United States Patent Application Publication US 2015/0232836 A1 - sequence listing, part 39

SEQ ID NO: 1530117 - DNA, 15 bp, Homo sapiens
gagaccctgagacac

SEQ ID NO: 1530118 - DNA, 15 bp, Homo sapiens
agaccctgagacact

SEQ ID NO: 1530119 - DNA, 15 bp, Homo sapiens
gaccctgagacactg

SEQ ID NO: 1530120 - DNA, 15 bp, Homo sapiens
accctgagacactgc

SEQ ID NO: 1530121 - DNA, 15 bp, Homo sapiens
ccctgagacactgcc

SEQ ID NO: 1530122 - DNA, 15 bp, Homo sapiens
cctgagacactgccc

SEQ ID NO: 1530123 - DNA, 15 bp, Homo sapiens
ctgagacactgcccc

SEQ ID NO: 1530124 - DNA, 15 bp, Homo sapiens
tgagacactgcccca

SEQ ID NO: 1530125 - DNA, 15 bp, Homo sapiens
gagacactgccccag

SEQ ID NO: 1530126 - DNA, 15 bp, Homo sapiens
agacactgccccagg

SEQ ID NO: 1530127 - DNA, 15 bp, Homo sapiens
gacactgccccagga

SEQ ID NO: 1530128 - DNA, 15 bp, Homo sapiens
acactgccccaggat

SEQ ID NO: 1530129 - DNA, 15 bp, Homo sapiens
cactgccccaggatc

SEQ ID NO: 1530130 - DNA, 15 bp, Homo sapiens
actgccccaggatct

SEQ ID NO: 1530131 - DNA, 15 bp, Homo sapiens
ctgccccaggatctg

SEQ ID NO: 1530132 - DNA, 15 bp, Homo sapiens
tgccccaggatctga

SEQ ID NO: 1530133 - DNA, 15 bp, Homo sapiens
gccccaggatctgaa

SEQ ID NO: 1530134 - DNA, 15 bp, Homo sapiens
ccccaggatctgaac

SEQ ID NO: 1530135 - DNA, 15 bp, Homo sapiens
cccaggatctgaaca

SEQ ID NO: 1530136 - DNA, 15 bp, Homo sapiens
ccaggatctgaacag

SEQ ID NO: 1530137 - DNA, 15 bp, Homo sapiens
caggatctgaacagg

SEQ ID NO: 1530138 - DNA, 15 bp, Homo sapiens
aggatctgaacaggt

SEQ ID NO: 1530139 - DNA, 15 bp, Homo sapiens
ggatctgaacaggtg

SEQ ID NO: 1530140 - DNA, 15 bp, Homo sapiens
gatctgaacaggtgg

SEQ ID NO: 1530141 - DNA, 15 bp, Homo sapiens
atctgaacaggtggc

SEQ ID NO: 1530142 - DNA, 15 bp, Homo sapiens
tctgaacaggtggca

SEQ ID NO: 1530143 - DNA, 15 bp, Homo sapiens
ctgaacaggtggcaa

SEQ ID NO: 1530144 - DNA, 15 bp, Homo sapiens
tgaacaggtggcaaa

SEQ ID NO: 1530145 - DNA, 15 bp, Homo sapiens
gaacaggtggcaaag

SEQ ID NO: 1530146 - DNA, 15 bp, Homo sapiens
aacaggtggcaaagg

SEQ ID NO: 1530147 - DNA, 15 bp, Homo sapiens
acaggtggcaaaggc

SEQ ID NO: 1530148 - DNA, 15 bp, Homo sapiens
caggtggcaaaggct

SEQ ID NO: 1530149 - DNA, 15 bp, Homo sapiens
aggtggcaaaggctt

SEQ ID NO: 1530150 - DNA, 15 bp, Homo sapiens
ggtggcaaaggctta

SEQ ID NO: 1530151 - DNA, 15 bp, Homo sapiens
gtggcaaaggcttaa

SEQ ID NO: 1530152 - DNA, 15 bp, Homo sapiens
tggcaaaggcttaac

SEQ ID NO: 1530153 - DNA, 15 bp, Homo sapiens
ggcaaaggcttaaca

SEQ ID NO: 1530154 - DNA, 15 bp, Homo sapiens
gcaaaggcttaacag

SEQ ID NO: 1530155 - DNA, 15 bp, Homo sapiens
caaaggcttaacagg

SEQ ID NO: 1530156 - DNA, 15 bp, Homo sapiens
aaaggcttaacaggc

SEQ ID NO: 1530157 - DNA, 15 bp, Homo sapiens
aaggcttaacaggct

SEQ ID NO: 1530158 - DNA, 15 bp, Homo sapiens
aggcttaacaggcta

SEQ ID NO: 1530159 - DNA, 15 bp, Homo sapiens
ggcttaacaggctag

SEQ ID NO: 1530160 - DNA, 15 bp, Homo sapiens
gcttaacaggctagc

SEQ ID NO: 1530161 - DNA, 15 bp, Homo sapiens
cttaacaggctagcg

SEQ ID NO: 1530162 - DNA, 15 bp, Homo sapiens
ttaacaggctagcgg

SEQ ID NO: 1530163 - DNA, 15 bp, Homo sapiens
taacaggctagcggt

SEQ ID NO: 1530164 - DNA, 15 bp, Homo sapiens
aacaggctagcggtc

SEQ ID NO: 1530165 - DNA, 15 bp, Homo sapiens
acaggctagcggtca

SEQ ID NO: 1530166 - DNA, 15 bp, Homo sapiens
caggctagcggtcac

SEQ ID NO: 1530167 - DNA, 15 bp, Homo sapiens
aggctagcggtcact

SEQ ID NO: 1530168 - DNA, 15 bp, Homo sapiens
ggctagcggtcactg

SEQ ID NO: 1530169 - DNA, 15 bp, Homo sapiens
gctagcggtcactgt

SEQ ID NO: 1530170 - DNA, 15 bp, Homo sapiens
ctagcggtcactgta

SEQ ID NO: 1530171 - DNA, 15 bp, Homo sapiens
tagcggtcactgtag

SEQ ID NO: 1530172 - DNA, 15 bp, Homo sapiens
agcggtcactgtagt

SEQ ID NO: 1530173 - DNA, 15 bp, Homo sapiens
gcggtcactgtagtg

SEQ ID NO: 1530174 - DNA, 15 bp, Homo sapiens
cggtcactgtagtga

SEQ ID NO: 1530175 - DNA, 15 bp, Homo sapiens
ggtcactgtagtgac

SEQ ID NO: 1530176 - DNA, 15 bp, Homo sapiens
gtcactgtagtgaca

SEQ ID NO: 1530177 - DNA, 15 bp, Homo sapiens
tcactgtagtgacaa

SEQ ID NO: 1530178 - DNA, 15 bp, Homo sapiens
cactgtagtgacaag

SEQ ID NO: 1530179 - DNA, 15 bp, Homo sapiens
actgtagtgacaagg

SEQ ID NO: 1530180 - DNA, 15 bp, Homo sapiens
ctgtagtgacaaggc

SEQ ID NO: 1530181 - DNA, 15 bp, Homo sapiens
tgtagtgacaaggcg

SEQ ID NO: 1530182 - DNA, 15 bp, Homo sapiens
gtagtgacaaggcga

SEQ ID NO: 1530183 - DNA, 15 bp, Homo sapiens
tagtgacaaggcgat

SEQ ID NO: 1530184 - DNA, 15 bp, Homo sapiens
agtgacaaggcgatt

SEQ ID NO: 1530185 - DNA, 15 bp, Homo sapiens
gtgacaaggcgattg

SEQ ID NO: 1530186 - DNA, 15 bp, Homo sapiens
tgacaaggcgattga

SEQ ID NO: 1530187 - DNA, 15 bp, Homo sapiens
gacaaggcgattgag

SEQ ID NO: 1530188 - DNA, 15 bp, Homo sapiens
acaaggcgattgagt

SEQ ID NO: 1530189 - DNA, 15 bp, Homo sapiens
caaggcgattgagtg

SEQ ID NO: 1530190 - DNA, 15 bp, Homo sapiens
aaggcgattgagtgg

SEQ ID NO: 1530191 - DNA, 15 bp, Homo sapiens
aggcgattgagtggt

SEQ ID NO: 1530192 - DNA, 15 bp, Homo sapiens
ggcgattgagtggtc

SEQ ID NO: 1530193 - DNA, 15 bp, Homo sapiens
gcgattgagtggtca

SEQ ID NO: 1530194 - DNA, 15 bp, Homo sapiens
cgattgagtggtcac

SEQ ID NO: 1530195 - DNA, 15 bp, Homo sapiens
gattgagtggtcacc

SEQ ID NO: 1530196 - DNA, 15 bp, Homo sapiens
attgagtggtcacca

SEQ ID NO: 1530197 - DNA, 15 bp, Homo sapiens
ttgagtggtcaccat

SEQ ID NO: 1530198 - DNA, 15 bp, Homo sapiens
tgagtggtcaccatg

SEQ ID NO: 1530199 - DNA, 15 bp, Homo sapiens
gagtggtcaccatgg

SEQ ID NO: 1530200 - DNA, 15 bp, Homo sapiens
agtggtcaccatggt

SEQ ID NO: 1530201 - DNA, 15 bp, Homo sapiens
gtggtcaccatggtg

SEQ ID NO: 1530202 - DNA, 15 bp, Homo sapiens
tggtcaccatggtga

SEQ ID NO: 1530203 - DNA, 15 bp, Homo sapiens
ggtcaccatggtgat

SEQ ID NO: 1530204 - DNA, 15 bp, Homo sapiens
gtcaccatggtgatg

SEQ ID NO: 1530205 - DNA, 15 bp, Homo sapiens
tcaccatggtgatgg

SEQ ID NO: 1530206 - DNA, 15 bp, Homo sapiens
caccatggtgatggg

SEQ ID NO: 1530207 - DNA, 15 bp, Homo sapiens
accatggtgatgggg

SEQ ID NO: 1530208 - DNA, 15 bp, Homo sapiens
catggtgatggggat

SEQ ID NO: 1530209 - DNA, 15 bp, Homo sapiens
atggtgatggggatg

SEQ ID NO: 1530210 - DNA, 15 bp, Homo sapiens
tggtgatggggatgg

SEQ ID NO: 1530211 - DNA, 15 bp, Homo sapiens
ggtgatggggatgga

SEQ ID NO: 1530212 - DNA, 15 bp, Homo sapiens
gtgatggggatggag

SEQ ID NO: 1530213 - DNA, 15 bp, Homo sapiens
tgatggggatggagg

SEQ ID NO: 1530214 - DNA, 15 bp, Homo sapiens
gatggggatggaggc

SEQ ID NO: 1530215 - DNA, 15 bp, Homo sapiens
atggggatggaggct

SEQ ID NO: 1530216 - DNA, 15 bp, Homo sapiens
tggggatggaggctc

SEQ ID NO: 1530217 - DNA, 15 bp, Homo sapiens
ggggatggaggctct

SEQ ID NO: 1530218 - DNA, 15 bp, Homo sapiens
gggatggaggctctt

SEQ ID NO: 1530219 - DNA, 15 bp, Homo sapiens
ggatggaggctcttt

SEQ ID NO: 1530220 - DNA, 15 bp, Homo sapiens
gatggaggctctttg

SEQ ID NO: 1530221 - DNA, 15 bp, Homo sapiens
atggaggctctttgc

SEQ ID NO: 1530222 - DNA, 15 bp, Homo sapiens
tggaggctctttgcc

SEQ ID NO: 1530223 - DNA, 15 bp, Homo sapiens
ggaggctctttgcca

SEQ ID NO: 1530224 - DNA, 15 bp, Homo sapiens
gaggctctttgccac

SEQ ID NO: 1530225 - DNA, 15 bp, Homo sapiens
aggctctttgccacc

SEQ ID NO: 1530226 - DNA, 15 bp, Homo sapiens
ggctctttgccacca

SEQ ID NO: 1530227 - DNA, 15 bp, Homo sapiens
gctctttgccaccag

SEQ ID NO: 1530228 - DNA, 15 bp, Homo sapiens
ctctttgccaccagt

SEQ ID NO: 1530229 - DNA, 15 bp, Homo sapiens
tctttgccaccagtc

SEQ ID NO: 1530230 - DNA, 15 bp, Homo sapiens
ctttgccaccagtcc

SEQ ID NO: 1530231 - DNA, 15 bp, Homo sapiens
tttgccaccagtccc

SEQ ID NO: 1530232 - DNA, 15 bp, Homo sapiens
ttgccaccagtccca

SEQ ID NO: 1530233 - DNA, 15 bp, Homo sapiens
tgccaccagtcccag

SEQ ID NO: 1530234 - DNA, 15 bp, Homo sapiens
gccaccagtcccagt

SEQ ID NO: 1530235 - DNA, 15 bp, Homo sapiens
ccaccagtcccagtt

SEQ ID NO: 1530236 - DNA, 15 bp, Homo sapiens
caccagtcccagttt

SEQ ID NO: 1530237 - DNA, 15 bp, Homo sapiens
accagtcccagtttt

SEQ ID NO: 1530238 - DNA, 15 bp, Homo sapiens
ccagtcccagtttta

SEQ ID NO: 1530239 - DNA, 15 bp, Homo sapiens
cagtcccagttttat

SEQ ID NO: 1530240 - DNA, 15 bp, Homo sapiens
agtcccagttttatg

SEQ ID NO: 1530241 - DNA, 15 bp, Homo sapiens
gtcccagttttatgc

SEQ ID NO: 1530242 - DNA, 15 bp, Homo sapiens
tcccagttttatgca

SEQ ID NO: 1530243 - DNA, 15 bp, Homo sapiens
cccagttttatgcat

SEQ ID NO: 1530244 - DNA, 15 bp, Homo sapiens
ccagttttatgcatg

SEQ ID NO: 1530245 - DNA, 15 bp, Homo sapiens
cagttttatgcatgg

SEQ ID NO: 1530246 - DNA, 15 bp, Homo sapiens
agttttatgcatggc

SEQ ID NO: 1530247 - DNA, 15 bp, Homo sapiens
gttttatgcatggca

SEQ ID NO: 1530248 - DNA, 15 bp, Homo sapiens
ttttatgcatggcag

SEQ ID NO: 1530249 - DNA, 15 bp, Homo sapiens
tttatgcatggcagc

SEQ ID NO: 1530250 - DNA, 15 bp, Homo sapiens
ttatgcatggcagct

SEQ ID NO: 1530251 - DNA, 15 bp, Homo sapiens
tatgcatggcagctc

SEQ ID NO: 1530252 - DNA, 15 bp, Homo sapiens
atgcatggcagctct

SEQ ID NO: 1530253 - DNA, 15 bp, Homo sapiens
tgcatggcagctcta

SEQ ID NO: 1530254 - DNA, 15 bp, Homo sapiens
gcatggcagctctaa

SEQ ID NO: 1530255 - DNA, 15 bp, Homo sapiens
catggcagctctaat

SEQ ID NO: 1530256 - DNA, 15 bp, Homo sapiens
atggcagctctaatg

SEQ ID NO: 1530257 - DNA, 15 bp, Homo sapiens
tggcagctctaatga

SEQ ID NO: 1530258 - DNA, 15 bp, Homo sapiens
ggcagctctaatgac

SEQ ID NO: 1530259 - DNA, 15 bp, Homo sapiens
gcagctctaatgaca

SEQ ID NO: 1530260 - DNA, 15 bp, Homo sapiens
cagctctaatgacag

SEQ ID NO: 1530261 - DNA, 15 bp, Homo sapiens
agctctaatgacagg

SEQ ID NO: 1530262 - DNA, 15 bp, Homo sapiens
gctctaatgacagga

SEQ ID NO: 1530263 - DNA, 15 bp, Homo sapiens
ctctaatgacaggat

SEQ ID NO: 1530264 - DNA, 15 bp, Homo sapiens
tctaatgacaggatg

SEQ ID NO: 1530265 - DNA, 15 bp, Homo sapiens
ctaatgacaggatgg

SEQ ID NO: 1530266 - DNA, 15 bp, Homo sapiens
taatgacaggatggt

SEQ ID NO: 1530267 - DNA, 15 bp, Homo sapiens
aatgacaggatggtc

SEQ ID NO: 1530268 - DNA, 15 bp, Homo sapiens
atgacaggatggtca

SEQ ID NO: 1530269 - DNA, 15 bp, Homo sapiens
tgacaggatggtcag

SEQ ID NO: 1530270 - DNA, 15 bp, Homo sapiens
gacaggatggtcagc

SEQ ID NO: 1530271 - DNA, 15 bp, Homo sapiens
acaggatggtcagcc

SEQ ID NO: 1530272 - DNA, 15 bp, Homo sapiens
caggatggtcagccc

SEQ ID NO: 1530273 - DNA, 15 bp, Homo sapiens
aggatggtcagccct

SEQ ID NO: 1530274 - DNA, 15 bp, Homo sapiens
ggatggtcagccctg

SEQ ID NO: 1530275 - DNA, 15 bp, Homo sapiens
gatggtcagccctgc

SEQ ID NO: 1530276 - DNA, 15 bp, Homo sapiens
atggtcagccctgct

SEQ ID NO: 1530277 - DNA, 15 bp, Homo sapiens
tggtcagccctgctg

SEQ ID NO: 1530278 - DNA, 15 bp, Homo sapiens
ggtcagccctgctga

SEQ ID NO: 1530279 - DNA, 15 bp, Homo sapiens
gtcagccctgctgag

SEQ ID NO: 1530280 - DNA, 15 bp, Homo sapiens
tcagccctgctgagg

SEQ ID NO: 1530281 - DNA, 15 bp, Homo sapiens
cagccctgctgaggc

SEQ ID NO: 1530282 - DNA, 15 bp, Homo sapiens
agccctgctgaggcc

SEQ ID NO: 1530283 - DNA, 15 bp, Homo sapiens
gccctgctgaggcca

SEQ ID NO: 1530284 - DNA, 15 bp, Homo sapiens
ccctgctgaggccac

SEQ ID NO: 1530285 - DNA, 15 bp, Homo sapiens
cctgctgaggccact

SEQ ID NO: 1530286 - DNA, 15 bp, Homo sapiens
ctgctgaggccactc

SEQ ID NO: 1530287 - DNA, 15 bp, Homo sapiens
tgctgaggccactcc

SEQ ID NO: 1530288 - DNA, 15 bp, Homo sapiens
gctgaggccactcct

SEQ ID NO: 1530289 - DNA, 15 bp, Homo sapiens
ctgaggccactcctg

SEQ ID NO: 1530290 - DNA, 15 bp, Homo sapiens
tgaggccactcctgg

SEQ ID NO: 1530291 - DNA, 15 bp, Homo sapiens
gaggccactcctggt

SEQ ID NO: 1530292 - DNA, 15 bp, Homo sapiens
aggccactcctggtc

SEQ ID NO: 1530293 - DNA, 15 bp, Homo sapiens
ggccactcctggtca

SEQ ID NO: 1530294 - DNA, 15 bp, Homo sapiens
gccactcctggtcac

SEQ ID NO: 1530295 - DNA, 15 bp, Homo sapiens
ccactcctggtcacc

SEQ ID NO: 1530296 - DNA, 15 bp, Homo sapiens
cactcctggtcacca

SEQ ID NO: 1530297 - DNA, 15 bp, Homo sapiens
actcctggtcaccat

SEQ ID NO: 1530298 - DNA, 15 bp, Homo sapiens
ctcctggtcaccatg

SEQ ID NO: 1530299 - DNA, 15 bp, Homo sapiens
tcctggtcaccatga

SEQ ID NO: 1530300 - DNA, 15 bp, Homo sapiens
cctggtcaccatgac

SEQ ID NO: 1530301 - DNA, 15 bp, Homo sapiens
ctggtcaccatgaca

SEQ ID NO: 1530302 - DNA, 15 bp, Homo sapiens
tggtcaccatgacaa

SEQ ID NO: 1530303 - DNA, 15 bp, Homo sapiens
ggtcaccatgacaac

SEQ ID NO: 1530304 - DNA, 15 bp, Homo sapiens
gtcaccatgacaacc

SEQ ID NO: 1530305 - DNA, 15 bp, Homo sapiens
tcaccatgacaacca

SEQ ID NO: 1530306 - DNA, 15 bp, Homo sapiens
caccatgacaaccac

SEQ ID NO: 1530307 - DNA, 15 bp, Homo sapiens
accatgacaaccaca

SEQ ID NO: 1530308 - DNA, 15 bp, Homo sapiens
ccatgacaaccacag

SEQ ID NO: 1530309 - DNA, 15 bp, Homo sapiens
catgacaaccacagg

SEQ ID NO: 1530310 - DNA, 15 bp, Homo sapiens
atgacaaccacaggc

SEQ ID NO: 1530311 - DNA, 15 bp, Homo sapiens
tgacaaccacaggcc

SEQ ID NO: 1530312 - DNA, 15 bp, Homo sapiens
gacaaccacaggccc

SEQ ID NO: 1530313 - DNA, 15 bp, Homo sapiens
acaaccacaggccct

SEQ ID NO: 1530314 - DNA, 15 bp, Homo sapiens
caaccacaggccctc

SEQ ID NO: 1530315 - DNA, 15 bp, Homo sapiens
aaccacaggccctct

SEQ ID NO: 1530316 - DNA, 15 bp, Homo sapiens
accacaggccctctc

SEQ ID NO: 1530317 - DNA, 15 bp, Homo sapiens
ccacaggccctctca

SEQ ID NO: 1530318 - DNA, 15 bp, Homo sapiens
cacaggccctctcag

SEQ ID NO: 1530319 - DNA, 15 bp, Homo sapiens
acaggccctctcagg

SEQ ID NO: 1530320 - DNA, 15 bp, Homo sapiens
caggccctctcagga

SEQ ID NO: 1530321 - DNA, 15 bp, Homo sapiens
aggccctctcaggag

SEQ ID NO: 1530322 - DNA, 15 bp, Homo sapiens
ggccctctcaggagc

SEQ ID NO: 1530323 - DNA, 15 bp, Homo sapiens
gccctctcaggagca

SEQ ID NO: 1530324 - DNA, 15 bp, Homo sapiens
ccctctcaggagcac

SEQ ID NO: 1530325 - DNA, 15 bp, Homo sapiens
cctctcaggagcaca

SEQ ID NO: 1530326 - DNA, 15 bp, Homo sapiens
ctctcaggagcacag

SEQ ID NO: 1530327 - DNA, 15 bp, Homo sapiens
tctcaggagcacagt

SEQ ID NO: 1530328 - DNA, 15 bp, Homo sapiens
ctcaggagcacagta

SEQ ID NO: 1530329 - DNA, 15 bp, Homo sapiens
tcaggagcacagtaa

SEQ ID NO: 1530330 - DNA, 15 bp, Homo sapiens
caggagcacagtaag

SEQ ID NO: 1530331 - DNA, 15 bp, Homo sapiens
aggagcacagtaagc

SEQ ID NO: 1530332 - DNA, 15 bp, Homo sapiens
ggagcacagtaagcc

SEQ ID NO: 1530333 - DNA, 15 bp, Homo sapiens
gagcacagtaagccc

SEQ ID NO: 1530334 - DNA, 15 bp, Homo sapiens
agcacagtaagccct

SEQ ID NO: 1530335 - DNA, 15 bp, Homo sapiens
gcacagtaagccctg

SEQ ID NO: 1530336 - DNA, 15 bp, Homo sapiens
cacagtaagccctgg

SEQ ID NO: 1530337 - DNA, 15 bp, Homo sapiens
acagtaagccctggc

SEQ ID NO: 1530338 - DNA, 15 bp, Homo sapiens
cagtaagccctggca

SEQ ID NO: 1530339 - DNA, 15 bp, Homo sapiens
agtaagccctggcag

SEQ ID NO: 1530340 - DNA, 15 bp, Homo sapiens
gtaagccctggcagg

SEQ ID NO: 1530341 - DNA, 15 bp, Homo sapiens
taagccctggcagga

SEQ ID NO: 1530342 - DNA, 15 bp, Homo sapiens
aagccctggcaggag

SEQ ID NO: 1530343 - DNA, 15 bp, Homo sapiens
agccctggcaggaga

SEQ ID NO: 1530344 - DNA, 15 bp, Homo sapiens
gccctggcaggagaa

SEQ ID NO: 1530345 - DNA, 15 bp, Homo sapiens
ccctggcaggagaat

SEQ ID NO: 1530346 - DNA, 15 bp, Homo sapiens
cctggcaggagaatc

SEQ ID NO: 1530347 - DNA, 15 bp, Homo sapiens
ctggcaggagaatcc

SEQ ID NO: 1530348 - DNA, 15 bp, Homo sapiens
tggcaggagaatccc

SEQ ID NO: 1530349 - DNA, 15 bp, Homo sapiens
ggcaggagaatcccc

SEQ ID NO: 1530350 - DNA, 15 bp, Homo sapiens
gcaggagaatccccc

SEQ ID NO: 1530351 - DNA, 15 bp, Homo sapiens
caggagaatccccca

SEQ ID NO: 1530352 - DNA, 15 bp, Homo sapiens
aggagaatcccccac

SEQ ID NO: 1530353 - DNA, 15 bp, Homo sapiens
ggagaatcccccact

SEQ ID NO: 1530354 - DNA, 15 bp, Homo sapiens
gagaatcccccactc

SEQ ID NO: 1530355 - DNA, 15 bp, Homo sapiens
agaatcccccactcc

SEQ ID NO: 1530356 - DNA, 15 bp, Homo sapiens
gaatcccccactcca

SEQ ID NO: 1530357 - DNA, 15 bp, Homo sapiens
aatcccccactccac

SEQ ID NO: 1530358 - DNA, 15 bp, Homo sapiens
atcccccactccaca

SEQ ID NO: 1530359 - DNA, 15 bp, Homo sapiens
tcccccactccacac

SEQ ID NO: 1530360 - DNA, 15 bp, Homo sapiens
cccccactccacacc

SEQ ID NO: 1530361 - DNA, 15 bp, Homo sapiens
ccccactccacacct

SEQ ID NO: 1530362 - DNA, 15 bp, Homo sapiens
cccactccacacctg

SEQ ID NO: 1530363 - DNA, 15 bp, Homo sapiens
ccactccacacctgg

SEQ ID NO: 1530364 - DNA, 15 bp, Homo sapiens
cactccacacctggc

SEQ ID NO: 1530365 - DNA, 15 bp, Homo sapiens
actccacacctggct

SEQ ID NO: 1530366 - DNA, 15 bp, Homo sapiens
ctccacacctggctg

SEQ ID NO: 1530367 - DNA, 15 bp, Homo sapiens
tccacacctggctgg

SEQ ID NO: 1530368 - DNA, 15 bp, Homo sapiens
ccacacctggctgga

SEQ ID NO: 1530369 - DNA, 15 bp, Homo sapiens
cacacctggctggag

SEQ ID NO: 1530370 - DNA, 15 bp, Homo sapiens
acacctggctggagc

SEQ ID NO: 1530371 - DNA, 15 bp, Homo sapiens
cacctggctggagca

SEQ ID NO: 1530372 - DNA, 15 bp, Homo sapiens
acctggctggagcag

SEQ ID NO: 1530373 - DNA, 15 bp, Homo sapiens
cctggctggagcagg

SEQ ID NO: 1530374 - DNA, 15 bp, Homo sapiens
ctggctggagcagga

SEQ ID NO: 1530375 - DNA, 15 bp, Homo sapiens
tggctggagcaggaa

SEQ ID NO: 1530376 - DNA, 15 bp, Homo sapiens
ggctggagcaggaaa

SEQ ID NO: 1530377 - DNA, 15 bp, Homo sapiens
gctggagcaggaaat

SEQ ID NO: 1530378 - DNA, 15 bp, Homo sapiens
ctggagcaggaaatg

SEQ ID NO: 1530379 - DNA, 15 bp, Homo sapiens
tggagcaggaaatgc

SEQ ID NO: 1530380 - DNA, 15 bp, Homo sapiens
ggagcaggaaatgcc

SEQ ID NO: 1530381 - DNA, 15 bp, Homo sapiens
gagcaggaaatgccg

SEQ ID NO: 1530382 - DNA, 15 bp, Homo sapiens
agcaggaaatgccga

SEQ ID NO: 1530383 - DNA, 15 bp, Homo sapiens
gcaggaaatgccgag

SEQ ID NO: 1530384 - DNA, 15 bp, Homo sapiens
caggaaatgccgagc

SEQ ID NO: 1530385 - DNA, 15 bp, Homo sapiens
aggaaatgccgagcg

SEQ ID NO: 1530386 - DNA, 15 bp, Homo sapiens
ggaaatgccgagcgg

SEQ ID NO: 1530387 - DNA, 15 bp, Homo sapiens
gaaatgccgagcggc

SEQ ID NO: 1530388 - DNA, 15 bp, Homo sapiens
aaatgccgagcggcg

SEQ ID NO: 1530389 - DNA, 15 bp, Homo sapiens
aatgccgagcggcgc

SEQ ID NO: 1530390 - DNA, 15 bp, Homo sapiens
atgccgagcggcgcc

SEQ ID NO: 1530391 - DNA, 15 bp, Homo sapiens
tgccgagcggcgcct

SEQ ID NO: 1530392 - DNA, 15 bp, Homo sapiens
gccgagcggcgcctg

SEQ ID NO: 1530393 - DNA, 15 bp, Homo sapiens
ccgagcggcgcctga

SEQ ID NO: 1530394 - DNA, 15 bp, Homo sapiens
cgagcggcgcctgag

SEQ ID NO: 1530395 - DNA, 15 bp, Homo sapiens
gagcggcgcctgagc

SEQ ID NO: 1530396 - DNA, 15 bp, Homo sapiens
agcggcgcctgagcc

SEQ ID NO: 1530397 - DNA, 15 bp, Homo sapiens
gcggcgcctgagccc

SEQ ID NO: 1530398 - DNA, 15 bp, Homo sapiens
cggcgcctgagcccc

SEQ ID NO: 1530399 - DNA, 15 bp, Homo sapiens
ggcgcctgagcccca

SEQ ID NO: 1530400 - DNA, 15 bp, Homo sapiens
gcgcctgagccccag

SEQ ID NO: 1530401 - DNA, 15 bp, Homo sapiens
cgcctgagccccagg

SEQ ID NO: 1530402 - DNA, 15 bp, Homo sapiens
gcctgagccccaggg

SEQ ID NO: 1530403 - DNA, 15 bp, Homo sapiens
cctgagccccaggga

SEQ ID NO: 1530404 - DNA, 15 bp, Homo sapiens
ctgagccccagggaa

SEQ ID NO: 1530405 - DNA, 15 bp, Homo sapiens
tgagccccagggaag

SEQ ID NO: 1530406 - DNA, 15 bp, Homo sapiens
gagccccagggaagc

SEQ ID NO: 1530407 - DNA, 15 bp, Homo sapiens
agccccagggaagca

SEQ ID NO: 1530408 - DNA, 15 bp, Homo sapiens
gccccagggaagcag

SEQ ID NO: 1530409 - DNA, 15 bp, Homo sapiens
ccccagggaagcagg

SEQ ID NO: 1530410 - DNA, 15 bp, Homo sapiens
cccagggaagcaggc

SEQ ID NO: 1530411 - DNA, 15 bp, Homo sapiens
ccagggaagcaggct

SEQ ID NO: 1530412 - DNA, 15 bp, Homo sapiens
cagggaagcaggcta

SEQ ID NO: 1530413 - DNA, 15 bp, Homo sapiens
agggaagcaggctag

SEQ ID NO: 1530414 - DNA, 15 bp, Homo sapiens
gggaagcaggctagg

SEQ ID NO: 1530415 - DNA, 15 bp, Homo sapiens
ggaagcaggctagga

SEQ ID NO: 1530416 - DNA, 15 bp, Homo sapiens
gaagcaggctaggat

SEQ ID NO: 1530417 - DNA, 15 bp, Homo sapiens
aagcaggctaggatg

SEQ ID NO: 1530418 - DNA, 15 bp, Homo sapiens
agcaggctaggatgt

SEQ ID NO: 1530419 - DNA, 15 bp, Homo sapiens
gcaggctaggatgtg

SEQ ID NO: 1530420 - DNA, 15 bp, Homo sapiens
caggctaggatgtga

SEQ ID NO: 1530421 - DNA, 15 bp, Homo sapiens
aggctaggatgtgag

SEQ ID NO: 1530422 - DNA, 15 bp, Homo sapiens
ggctaggatgtgaga

SEQ ID NO: 1530423 - DNA, 15 bp, Homo sapiens
gctaggatgtgagag

SEQ ID NO: 1530424 - DNA, 15 bp, Homo sapiens
ctaggatgtgagaga

SEQ ID NO: 1530425 - DNA, 15 bp, Homo sapiens
taggatgtgagagac

SEQ ID NO: 1530426 - DNA, 15 bp, Homo sapiens
aggatgtgagagaca

SEQ ID NO: 1530427 - DNA, 15 bp, Homo sapiens
ggatgtgagagacac

SEQ ID NO: 1530428 - DNA, 15 bp, Homo sapiens
gatgtgagagacaca

SEQ ID NO: 1530429 - DNA, 15 bp, Homo sapiens
atgtgagagacacag

SEQ ID NO: 1530430 - DNA, 15 bp, Homo sapiens
tgtgagagacacagt

SEQ ID NO: 1530431 - DNA, 15 bp, Homo sapiens
gtgagagacacagtc

SEQ ID NO: 1530432 - DNA, 15 bp, Homo sapiens
tgagagacacagtca

SEQ ID NO: 1530433 - DNA, 15 bp, Homo sapiens
gagagacacagtcac

SEQ ID NO: 1530434 - DNA, 15 bp, Homo sapiens
agagacacagtcacc

SEQ ID NO: 1530435 - DNA, 15 bp, Homo sapiens
gagacacagtcacct

SEQ ID NO: 1530436 - DNA, 15 bp, Homo sapiens
agacacagtcacctg

SEQ ID NO: 1530437 - DNA, 15 bp, Homo sapiens
gacacagtcacctgc

SEQ ID NO: 1530438 - DNA, 15 bp, Homo sapiens
acacagtcacctgca

SEQ ID NO: 1530439 - DNA, 15 bp, Homo sapiens
cacagtcacctgcag

SEQ ID NO: 1530440 - DNA, 15 bp, Homo sapiens
acagtcacctgcagc

SEQ ID NO: 1530441 - DNA, 15 bp, Homo sapiens
cagtcacctgcagcc

SEQ ID NO: 1530442 - DNA, 15 bp, Homo sapiens
agtcacctgcagcct

SEQ ID NO: 1530443 - DNA, 15 bp, Homo sapiens
gtcacctgcagccta

SEQ ID NO: 1530444 - DNA, 15 bp, Homo sapiens
tcacctgcagcctaa

SEQ ID NO: 1530445 - DNA, 15 bp, Homo sapiens
cacctgcagcctaat

SEQ ID NO: 1530446 - DNA, 15 bp, Homo sapiens
acctgcagcctaatt

SEQ ID NO: 1530447 - DNA, 15 bp, Homo sapiens
cctgcagcctaatta

SEQ ID NO: 1530448 - DNA, 15 bp, Homo sapiens
ctgcagcctaattac

SEQ ID NO: 1530449 - DNA, 15 bp, Homo sapiens
tgcagcctaattact

SEQ ID NO: 1530450 - DNA, 15 bp, Homo sapiens
gcagcctaattactc

SEQ ID NO: 1530451 - DNA, 15 bp, Homo sapiens
cagcctaattactca

SEQ ID NO: 1530452 - DNA, 15 bp, Homo sapiens
agcctaattactcaa

SEQ ID NO: 1530453 - DNA, 15 bp, Homo sapiens
gcctaattactcaaa

SEQ ID NO: 1530454 - DNA, 15 bp, Homo sapiens
cctaattactcaaaa

SEQ ID NO: 1530455 - DNA, 15 bp, Homo sapiens
ctaattactcaaaag

SEQ ID NO: 1530456 - DNA, 15 bp, Homo sapiens
taattactcaaaagc

SEQ ID NO: 1530457 - DNA, 15 bp, Homo sapiens
aattactcaaaagct

SEQ ID NO: 1530458 - DNA, 15 bp, Homo sapiens
attactcaaaagctg

SEQ ID NO: 1530459 - DNA, 15 bp, Homo sapiens
ttactcaaaagctgt

SEQ ID NO: 1530460 - DNA, 15 bp, Homo sapiens
tactcaaaagctgtc

SEQ ID NO: 1530461 - DNA, 15 bp, Homo sapiens
actcaaaagctgtcc

SEQ ID NO: 1530462 - DNA, 15 bp, Homo sapiens
ctcaaaagctgtccc

SEQ ID NO: 1530463 - DNA, 15 bp, Homo sapiens
tcaaaagctgtcccc

SEQ ID NO: 1530464 - DNA, 15 bp, Homo sapiens
caaaagctgtcccca

SEQ ID NO: 1530465 - DNA, 15 bp, Homo sapiens
aaaagctgtccccag

SEQ ID NO: 1530466 - DNA, 15 bp, Homo sapiens
aaagctgtccccagg

SEQ ID NO: 1530467 - DNA, 15 bp, Homo sapiens
aagctgtccccaggt

SEQ ID NO: 1530468 - DNA, 15 bp, Homo sapiens
agctgtccccaggtc

SEQ ID NO: 1530469 - DNA, 15 bp, Homo sapiens
gctgtccccaggtca

SEQ ID NO: 1530470 - DNA, 15 bp, Homo sapiens
ctgtccccaggtcac

SEQ ID NO: 1530471 - DNA, 15 bp, Homo sapiens
tgtccccaggtcaca

SEQ ID NO: 1530472 - DNA, 15 bp, Homo sapiens
gtccccaggtcacag

SEQ ID NO: 1530473 - DNA, 15 bp, Homo sapiens
tccccaggtcacaga

SEQ ID NO: 1530474 - DNA, 15 bp, Homo sapiens
ccccaggtcacagaa

SEQ ID NO: 1530475 - DNA, 15 bp, Homo sapiens
cccaggtcacagaag

SEQ ID NO: 1530476 - DNA, 15 bp, Homo sapiens
ccaggtcacagaagg

SEQ ID NO: 1530477 - DNA, 15 bp, Homo sapiens
caggtcacagaaggg

SEQ ID NO: 1530478 - DNA, 15 bp, Homo sapiens
aggtcacagaaggga

SEQ ID NO: 1530479 - DNA, 15 bp, Homo sapiens
ggtcacagaagggag

SEQ ID NO: 1530480 - DNA, 15 bp, Homo sapiens
gtcacagaagggaga

SEQ ID NO: 1530481 - DNA, 15 bp, Homo sapiens
tcacagaagggagag

SEQ ID NO: 1530482 - DNA, 15 bp, Homo sapiens
cacagaagggagagg

SEQ ID NO: 1530483 - DNA, 15 bp, Homo sapiens
acagaagggagagga

SEQ ID NO: 1530484 - DNA, 15 bp, Homo sapiens
cagaagggagaggac

SEQ ID NO: 1530485 - DNA, 15 bp, Homo sapiens
agaagggagaggaca

SEQ ID NO: 1530486 - DNA, 15 bp, Homo sapiens
gaagggagaggacat

SEQ ID NO: 1530487 - DNA, 15 bp, Homo sapiens
aagggagaggacatt

SEQ ID NO: 1530488 - DNA, 15 bp, Homo sapiens
agggagaggacattt

SEQ ID NO: 1530489 - DNA, 15 bp, Homo sapiens
gggagaggacatttc

SEQ ID NO: 1530490 - DNA, 15 bp, Homo sapiens
ggagaggacatttcc

SEQ ID NO: 1530491 - DNA, 15 bp, Homo sapiens
gagaggacatttccc

SEQ ID NO: 1530492 - DNA, 15 bp, Homo sapiens
agaggacatttccca

SEQ ID NO: 1530493 - DNA, 15 bp, Homo sapiens
gaggacatttcccac

SEQ ID NO: 1530494 - DNA, 15 bp, Homo sapiens
aggacatttcccact

SEQ ID NO: 1530495 - DNA, 15 bp, Homo sapiens
ggacatttcccactg

SEQ ID NO: 1530496 - DNA, 15 bp, Homo sapiens
gacatttcccactga

SEQ ID NO: 1530497 - DNA, 15 bp, Homo sapiens
acatttcccactgaa

SEQ ID NO: 1530498 - DNA, 15 bp, Homo sapiens
catttcccactgaat

SEQ ID NO: 1530499 - DNA, 15 bp, Homo sapiens
atttcccactgaatc

SEQ ID NO: 1530500 - DNA, 15 bp, Homo sapiens
tttcccactgaatct

SEQ ID NO: 1530501 - DNA, 15 bp, Homo sapiens
ttcccactgaatctg

SEQ ID NO: 1530502 - DNA, 15 bp, Homo sapiens
tcccactgaatctgt

SEQ ID NO: 1530503 - DNA, 15 bp, Homo sapiens
cccactgaatctgtc

SEQ ID NO: 1530504 - DNA, 15 bp, Homo sapiens
ccactgaatctgtct

SEQ ID NO: 1530505 - DNA, 15 bp, Homo sapiens
cactgaatctgtctg

SEQ ID NO: 1530506 - DNA, 15 bp, Homo sapiens
actgaatctgtctga

SEQ ID NO: 1530507 - DNA, 15 bp, Homo sapiens
ctgaatctgtctgaa

SEQ ID NO: 1530508 - DNA, 15 bp, Homo sapiens
tgaatctgtctgaag

SEQ ID NO: 1530509 - DNA, 15 bp, Homo sapiens
gaatctgtctgaagg

SEQ ID NO: 1530510 - DNA, 15 bp, Homo sapiens
aatctgtctgaagga

SEQ ID NO: 1530511 - DNA, 15 bp, Homo sapiens
atctgtctgaaggac

SEQ ID NO: 1530512 - DNA, 15 bp, Homo sapiens
tctgtctgaaggaca

SEQ ID NO: 1530513 - DNA, 15 bp, Homo sapiens
ctgtctgaaggacac

SEQ ID NO: 1530514 - DNA, 15 bp, Homo sapiens
tgtctgaaggacact

SEQ ID NO: 1530515 - DNA, 15 bp, Homo sapiens
gtctgaaggacacta

SEQ ID NO: 1530516 - DNA, 15 bp, Homo sapiens
tctgaaggacactaa

SEQ ID NO: 1530517 - DNA, 15 bp, Homo sapiens
ctgaaggacactaag

SEQ ID NO: 1530518 - DNA, 15 bp, Homo sapiens
tgaaggacactaagc

SEQ ID NO: 1530519 - DNA, 15 bp, Homo sapiens
gaaggacactaagcc

SEQ ID NO: 1530520 - DNA, 15 bp, Homo sapiens
aaggacactaagccc

SEQ ID NO: 1530521 - DNA, 15 bp, Homo sapiens
aggacactaagcccc

SEQ ID NO: 1530522 - DNA, 15 bp, Homo sapiens
ggacactaagcccca

SEQ ID NO: 1530523 - DNA, 15 bp, Homo sapiens
gacactaagccccac

SEQ ID NO: 1530524 - DNA, 15 bp, Homo sapiens
acactaagccccaca

SEQ ID NO: 1530525 - DNA, 15 bp, Homo sapiens
cactaagccccacag

SEQ ID NO: 1530526 - DNA, 15 bp, Homo sapiens
actaagccccacagc

SEQ ID NO: 1530527 - DNA, 15 bp, Homo sapiens
ctaagccccacagct

SEQ ID NO: 1530528 - DNA, 15 bp, Homo sapiens
taagccccacagctc

SEQ ID NO: 1530529 - DNA, 15 bp, Homo sapiens
aagccccacagctca

SEQ ID NO: 1530530 - DNA, 15 bp, Homo sapiens
agccccacagctcaa

SEQ ID NO: 1530531 - DNA, 15 bp, Homo sapiens
gccccacagctcaac

SEQ ID NO: 1530532 - DNA, 15 bp, Homo sapiens
ccccacagctcaaca

SEQ ID NO: 1530533 - DNA, 15 bp, Homo sapiens
cccacagctcaacac

SEQ ID NO: 1530534 - DNA, 15 bp, Homo sapiens
ccacagctcaacaca

SEQ ID NO: 1530535 - DNA, 15 bp, Homo sapiens
cacagctcaacacaa

SEQ ID NO: 1530536 - DNA, 15 bp, Homo sapiens
acagctcaacacaac

SEQ ID NO: 1530537 - DNA, 15 bp, Homo sapiens
cagctcaacacaacc

SEQ ID NO: 1530538 - DNA, 15 bp, Homo sapiens
agctcaacacaacca

SEQ ID NO: 1530539 - DNA, 15 bp, Homo sapiens
gctcaacacaaccag

SEQ ID NO: 1530540 - DNA, 15 bp, Homo sapiens
ctcaacacaaccagg

SEQ ID NO: 1530541 - DNA, 15 bp, Homo sapiens
tcaacacaaccagga

SEQ ID NO: 1530542 - DNA, 15 bp, Homo sapiens
caacacaaccaggag

SEQ ID NO: 1530543 - DNA, 15 bp, Homo sapiens
aacacaaccaggaga

SEQ ID NO: 1530544 - DNA, 15 bp, Homo sapiens
acacaaccaggagag

SEQ ID NO: 1530545 - DNA, 15 bp, Homo sapiens
cacaaccaggagaga

SEQ ID NO: 1530546 - DNA, 15 bp, Homo sapiens
acaaccaggagagaa

SEQ ID NO: 1530547 - DNA, 15 bp, Homo sapiens
caaccaggagagaaa

SEQ ID NO: 1530548 - DNA, 15 bp, Homo sapiens
aaccaggagagaaag

SEQ ID NO: 1530549 - DNA, 15 bp, Homo sapiens
accaggagagaaagc

SEQ ID NO: 1530550 - DNA, 15 bp, Homo sapiens
ccaggagagaaagcg

SEQ ID NO: 1530551 - DNA, 15 bp, Homo sapiens
caggagagaaagcgc

SEQ ID NO: 1530552 - DNA, 15 bp, Homo sapiens
aggagagaaagcgct

SEQ ID NO: 1530553 - DNA, 15 bp, Homo sapiens
ggagagaaagcgctg

SEQ ID NO: 1530554 - DNA, 15 bp, Homo sapiens
gagagaaagcgctga

SEQ ID NO: 1530555 - DNA, 15 bp, Homo sapiens
agagaaagcgctgag

SEQ ID NO: 1530556 - DNA, 15 bp, Homo sapiens
gagaaagcgctgagg

SEQ ID NO: 1530557 - DNA, 15 bp, Homo sapiens
agaaagcgctgagga

SEQ ID NO: 1530558 - DNA, 15 bp, Homo sapiens
gaaagcgctgaggac

SEQ ID NO: 1530559 - DNA, 15 bp, Homo sapiens
aaagcgctgaggacg

SEQ ID NO: 1530560 - DNA, 15 bp, Homo sapiens
aagcgctgaggacgc

SEQ ID NO: 1530561 - DNA, 15 bp, Homo sapiens
agcgctgaggacgcc

SEQ ID NO: 1530562 - DNA, 15 bp, Homo sapiens
gcgctgaggacgcca

SEQ ID NO: 1530563 - DNA, 15 bp, Homo sapiens
cgctgaggacgccac

SEQ ID NO: 1530564 - DNA, 15 bp, Homo sapiens
gctgaggacgccacc

SEQ ID NO: 1530565 - DNA, 15 bp, Homo sapiens
ctgaggacgccaccc

SEQ ID NO: 1530566 - DNA, 15 bp, Homo sapiens
tgaggacgccaccca

SEQ ID NO: 1530567 - DNA, 15 bp, Homo sapiens
gaggacgccacccaa

SEQ ID NO: 1530568 - DNA, 15 bp, Homo sapiens
aggacgccacccaag

SEQ ID NO: 1530569 - DNA, 15 bp, Homo sapiens
ggacgccacccaagc

SEQ ID NO: 1530570 - DNA, 15 bp, Homo sapiens
gacgccacccaagcg

SEQ ID NO: 1530571 - DNA, 15 bp, Homo sapiens
acgccacccaagcgc

SEQ ID NO: 1530572 - DNA, 15 bp, Homo sapiens
cgccacccaagcgcc

SEQ ID NO: 1530573 - DNA, 15 bp, Homo sapiens
gccacccaagcgccc

SEQ ID NO: 1530574 - DNA, 15 bp, Homo sapiens
ccacccaagcgccca

SEQ ID NO: 1530575 - DNA, 15 bp, Homo sapiens
cacccaagcgcccag

SEQ ID NO: 1530576 - DNA, 15 bp, Homo sapiens
acccaagcgcccagc

SEQ ID NO: 1530577 - DNA, 15 bp, Homo sapiens
cccaagcgcccagca

SEQ ID NO: 1530578 - DNA, 15 bp, Homo sapiens
ccaagcgcccagcaa

SEQ ID NO: 1530579 - DNA, 15 bp, Homo sapiens
caagcgcccagcaat

SEQ ID NO: 1530580 - DNA, 15 bp, Homo sapiens
aagcgcccagcaatg

SEQ ID NO: 1530581 - DNA, 15 bp, Homo sapiens
agcgcccagcaatgg

SEQ ID NO: 1530582 - DNA, 15 bp, Homo sapiens
gcgcccagcaatggc

SEQ ID NO: 1530583 - DNA, 15 bp, Homo sapiens
cgcccagcaatggcc

SEQ ID NO: 1530584 - DNA, 15 bp, Homo sapiens
gcccagcaatggccc

SEQ ID NO: 1530585 - DNA, 15 bp, Homo sapiens
cccagcaatggccct

SEQ ID NO: 1530586 - DNA, 15 bp, Homo sapiens
ccagcaatggccctg

SEQ ID NO: 1530587 - DNA, 15 bp, Homo sapiens
cagcaatggccctgc

SEQ ID NO: 1530588 - DNA, 15 bp, Homo sapiens
agcaatggccctgcc

SEQ ID NO: 1530589 - DNA, 15 bp, Homo sapiens
gcaatggccctgcct

SEQ ID NO: 1530590 - DNA, 15 bp, Homo sapiens
caatggccctgcctg

SEQ ID NO: 1530591 - DNA, 15 bp, Homo sapiens
aatggccctgcctgg

SEQ ID NO: 1530592 - DNA, 15 bp, Homo sapiens
atggccctgcctgga

SEQ ID NO: 1530593 - DNA, 15 bp, Homo sapiens
tggccctgcctggag

SEQ ID NO: 1530594 - DNA, 15 bp, Homo sapiens
ggccctgcctggaga

SEQ ID NO: 1530595 - DNA, 15 bp, Homo sapiens
gccctgcctggagaa

SEQ ID NO: 1530596 - DNA, 15 bp, Homo sapiens
ccctgcctggagaac

SEQ ID NO: 1530597 - DNA, 15 bp, Homo sapiens
cctgcctggagaaca

SEQ ID NO: 1530598 - DNA, 15 bp, Homo sapiens
ctgcctggagaacat

SEQ ID NO: 1530599 - DNA, 15 bp, Homo sapiens
tgcctggagaacatc

SEQ ID NO: 1530600 - DNA, 15 bp, Homo sapiens
gcctggagaacatcc

SEQ ID NO: 1530601 - DNA, 15 bp, Homo sapiens
cctggagaacatcca

SEQ ID NO: 1530602 - DNA, 15 bp, Homo sapiens
ctggagaacatccag

SEQ ID NO: 1530603 - DNA, 15 bp, Homo sapiens
tggagaacatccagg

SEQ ID NO: 1530604 - DNA, 15 bp, Homo sapiens
ggagaacatccaggc

SEQ ID NO: 1530605 - DNA, 15 bp, Homo sapiens
gagaacatccaggct

SEQ ID NO: 1530606 - DNA, 15 bp, Homo sapiens
agaacatccaggctc

SEQ ID NO: 1530607 - DNA, 15 bp, Homo sapiens
gaacatccaggctca

SEQ ID NO: 1530608 - DNA, 15 bp, Homo sapiens
aacatccaggctcag

SEQ ID NO: 1530609 - DNA, 15 bp, Homo sapiens
acatccaggctcagt

SEQ ID NO: 1530610 - DNA, 15 bp, Homo sapiens
catccaggctcagtg

SEQ ID NO: 1530611 - DNA, 15 bp, Homo sapiens
atccaggctcagtga

SEQ ID NO: 1530612 - DNA, 15 bp, Homo sapiens
tccaggctcagtgag

SEQ ID NO: 1530613 - DNA, 15 bp, Homo sapiens
ccaggctcagtgagg

SEQ ID NO: 1530614 - DNA, 15 bp, Homo sapiens
caggctcagtgagga

SEQ ID NO: 1530615 - DNA, 15 bp, Homo sapiens
aggctcagtgaggaa

SEQ ID NO: 1530616 - DNA, 15 bp, Homo sapiens
ggctcagtgaggaag

SEQ ID NO: 1530617 - DNA, 15 bp, Homo sapiens
gctcagtgaggaagg

SEQ ID NO: 1530618 - DNA, 15 bp, Homo sapiens
ctcagtgaggaaggg

SEQ ID NO: 1530619 - DNA, 15 bp, Homo sapiens
tcagtgaggaagggt

SEQ ID NO: 1530620 - DNA, 15 bp, Homo sapiens
cagtgaggaagggtc

SEQ ID NO: 1530621 - DNA, 15 bp, Homo sapiens
agtgaggaagggtcc

SEQ ID NO: 1530622 - DNA, 15 bp, Homo sapiens
gtgaggaagggtcca

SEQ ID NO: 1530623 - DNA, 15 bp, Homo sapiens
tgaggaagggtccag

SEQ ID NO: 1530624 - DNA, 15 bp, Homo sapiens
gaggaagggtccaga

SEQ ID NO: 1530625 - DNA, 15 bp, Homo sapiens
aggaagggtccagaa

SEQ ID NO: 1530626 - DNA, 15 bp, Homo sapiens
ggaagggtccagaag

SEQ ID NO: 1530627 - DNA, 15 bp, Homo sapiens
gaagggtccagaagg

SEQ ID NO: 1530628 - DNA, 15 bp, Homo sapiens
aagggtccagaaggg

SEQ ID NO: 1530629 - DNA, 15 bp, Homo sapiens
agggtccagaaggga

SEQ ID NO: 1530630 - DNA, 15 bp, Homo sapiens
gggtccagaagggaa

SEQ ID NO: 1530631 - DNA, 15 bp, Homo sapiens
ggtccagaagggaat

SEQ ID NO: 1530632 - DNA, 15 bp, Homo sapiens
gtccagaagggaatg

SEQ ID NO: 1530633 - DNA, 15 bp, Homo sapiens
tccagaagggaatgc

SEQ ID NO: 1530634 - DNA, 15 bp, Homo sapiens
ccagaagggaatgct

SEQ ID NO: 1530635 - DNA, 15 bp, Homo sapiens
cagaagggaatgctt

SEQ ID NO: 1530636 - DNA, 15 bp, Homo sapiens
agaagggaatgcttg

SEQ ID NO: 1530637 - DNA, 15 bp, Homo sapiens
gaagggaatgcttgc

SEQ ID NO: 1530638 - DNA, 15 bp, Homo sapiens
aagggaatgcttgcc

SEQ ID NO: 1530639 - DNA, 15 bp, Homo sapiens
agggaatgcttgccg

SEQ ID NO: 1530640 - DNA, 15 bp, Homo sapiens
gggaatgcttgccga

SEQ ID NO: 1530641 - DNA, 15 bp, Homo sapiens
ggaatgcttgccgac

SEQ ID NO: 1530642 - DNA, 15 bp, Homo sapiens
gaatgcttgccgact

SEQ ID NO: 1530643 - DNA, 15 bp, Homo sapiens
aatgcttgccgactc

SEQ ID NO: 1530644 - DNA, 15 bp, Homo sapiens
atgcttgccgactcg

SEQ ID NO: 1530645 - DNA, 15 bp, Homo sapiens
tgcttgccgactcgt

SEQ ID NO: 1530646 - DNA, 15 bp, Homo sapiens
gcttgccgactcgtt

SEQ ID NO: 1530647 - DNA, 15 bp, Homo sapiens
cttgccgactcgttg

SEQ ID NO: 1530648 - DNA, 15 bp, Homo sapiens
ttgccgactcgttgg

SEQ ID NO: 1530649 - DNA, 15 bp, Homo sapiens
tgccgactcgttgga

SEQ ID NO: 1530650 - DNA, 15 bp, Homo sapiens
gccgactcgttggag

SEQ ID NO: 1530651 - DNA, 15 bp, Homo sapiens
ccgactcgttggaga

SEQ ID NO: 1530652 - DNA, 15 bp, Homo sapiens
cgactcgttggagaa

SEQ ID NO: 1530653 - DNA, 15 bp, Homo sapiens
gactcgttggagaac

SEQ ID NO: 1530654 - DNA, 15 bp, Homo sapiens
actcgttggagaaca

SEQ ID NO: 1530655 - DNA, 15 bp, Homo sapiens
ctcgttggagaacaa

SEQ ID NO: 1530656 - DNA, 15 bp, Homo sapiens
tcgttggagaacaat

SEQ ID NO: 1530657 - DNA, 15 bp, Homo sapiens
cgttggagaacaatg

SEQ ID NO: 1530658 - DNA, 15 bp, Homo sapiens
gttggagaacaatga

SEQ ID NO: 1530659 - DNA, 15 bp, Homo sapiens
ttggagaacaatgaa

SEQ ID NO: 1530660 - DNA, 15 bp, Homo sapiens
tggagaacaatgaaa

SEQ ID NO: 1530661 - DNA, 15 bp, Homo sapiens
ggagaacaatgaaaa

SEQ ID NO: 1530662 - DNA, 15 bp, Homo sapiens
gagaacaatgaaaag

SEQ ID NO: 1530663 - DNA, 15 bp, Homo sapiens
agaacaatgaaaagg

SEQ ID NO: 1530664 - DNA, 15 bp, Homo sapiens
gaacaatgaaaagga

SEQ ID NO: 1530665 - DNA, 15 bp, Homo sapiens
aacaatgaaaaggag

SEQ ID NO: 1530666 - DNA, 15 bp, Homo sapiens
acaatgaaaaggagg

SEQ ID NO: 1530667 - DNA, 15 bp, Homo sapiens
caatgaaaaggagga

SEQ ID NO: 1530668 - DNA, 15 bp, Homo sapiens
aatgaaaaggaggaa

SEQ ID NO: 1530669 - DNA, 15 bp, Homo sapiens
atgaaaaggaggaaa

SEQ ID NO: 1530670 - DNA, 15 bp, Homo sapiens
tgaaaaggaggaaac

SEQ ID NO: 1530671 - DNA, 15 bp, Homo sapiens
gaaaaggaggaaact

SEQ ID NO: 1530672 - DNA, 15 bp, Homo sapiens
aaaaggaggaaactg

SEQ ID NO: 1530673 - DNA, 15 bp, Homo sapiens
aaaggaggaaactgt

SEQ ID NO: 1530674 - DNA, 15 bp, Homo sapiens
aaggaggaaactgtg

SEQ ID NO: 1530675 - DNA, 15 bp, Homo sapiens
aggaggaaactgtga

SEQ ID NO: 1530676 - DNA, 15 bp, Homo sapiens
ggaggaaactgtgac

SEQ ID NO: 1530677 - DNA, 15 bp, Homo sapiens
gaggaaactgtgact

SEQ ID NO: 1530678 - DNA, 15 bp, Homo sapiens
aggaaactgtgactg

SEQ ID NO: 1530679 - DNA, 15 bp, Homo sapiens
ggaaactgtgactga

SEQ ID NO: 1530680 - DNA, 15 bp, Homo sapiens
gaaactgtgactgaa

SEQ ID NO: 1530681 - DNA, 15 bp, Homo sapiens
aaactgtgactgaac

SEQ ID NO: 1530682 - DNA, 15 bp, Homo sapiens
aactgtgactgaacc

SEQ ID NO: 1530683 - DNA, 15 bp, Homo sapiens
actgtgactgaacct

SEQ ID NO: 1530684 - DNA, 15 bp, Homo sapiens
ctgtgactgaacctc

SEQ ID NO: 1530685 - DNA, 15 bp, Homo sapiens
tgtgactgaacctca

SEQ ID NO: 1530686 - DNA, 15 bp, Homo sapiens
gtgactgaacctcaa

SEQ ID NO: 1530687 - DNA, 15 bp, Homo sapiens
tgactgaacctcaaa

SEQ ID NO: 1530688 - DNA, 15 bp, Homo sapiens
gactgaacctcaaac

SEQ ID NO: 1530689 - DNA, 15 bp, Homo sapiens
actgaacctcaaacc

SEQ ID NO: 1530690 - DNA, 15 bp, Homo sapiens
ctgaacctcaaaccc

SEQ ID NO: 1530691 - DNA, 15 bp, Homo sapiens
tgaacctcaaacccc

SEQ ID NO: 1530692 - DNA, 15 bp, Homo sapiens
gaacctcaaacccca

SEQ ID NO: 1530693 - DNA, 15 bp, Homo sapiens
aacctcaaaccccaa

SEQ ID NO: 1530694 - DNA, 15 bp, Homo sapiens
acctcaaaccccaaa

SEQ ID NO: 1530695 - DNA, 15 bp, Homo sapiens
cctcaaaccccaaac

SEQ ID NO: 1530696 - DNA, 15 bp, Homo sapiens
ctcaaaccccaaacc

SEQ ID NO: 1530697 - DNA, 15 bp, Homo sapiens
tcaaaccccaaacca

SEQ ID NO: 1530698 - DNA, 15 bp, Homo sapiens
caaaccccaaaccag

SEQ ID NO: 1530699 - DNA, 15 bp, Homo sapiens
aaaccccaaaccagc

SEQ ID NO: 1530700 - DNA, 15 bp, Homo sapiens
aaccccaaaccagcc

SEQ ID NO: 1530701 - DNA, 15 bp, Homo sapiens
accccaaaccagccc

SEQ ID NO: 1530702 - DNA, 15 bp, Homo sapiens
ccccaaaccagcccg

SEQ ID NO: 1530703 - DNA, 15 bp, Homo sapiens
cccaaaccagcccga

SEQ ID NO: 1530704 - DNA, 15 bp, Homo sapiens
ccaaaccagcccgag

SEQ ID NO: 1530705 - DNA, 15 bp, Homo sapiens
caaaccagcccgagg

SEQ ID NO: 1530706 - DNA, 15 bp, Homo sapiens
aaaccagcccgagga

SEQ ID NO: 1530707 - DNA, 15 bp, Homo sapiens
aaccagcccgaggag

SEQ ID NO: 1530708 - DNA, 15 bp, Homo sapiens
accagcccgaggaga

SEQ ID NO: 1530709 - DNA, 15 bp, Homo sapiens
ccagcccgaggagaa

SEQ ID NO: 1530710 - DNA, 15 bp, Homo sapiens
cagcccgaggagaac

SEQ ID NO: 1530711 - DNA, 15 bp, Homo sapiens
agcccgaggagaacc

SEQ ID NO: 1530712 - DNA, 15 bp, Homo sapiens
gcccgaggagaacca

SEQ ID NO: 1530713 - DNA, 15 bp, Homo sapiens
cccgaggagaaccac

SEQ ID NO: 1530714 - DNA, 15 bp, Homo sapiens
ccgaggagaaccaca

SEQ ID NO: 1530715 - DNA, 15 bp, Homo sapiens
cgaggagaaccacat

SEQ ID NO: 1530716 - DNA, 15 bp, Homo sapiens
gaggagaaccacatt

SEQ ID NO: 1530717 - DNA, 15 bp, Homo sapiens
aggagaaccacattc

SEQ ID NO: 1530718 - DNA, 15 bp, Homo sapiens
ggagaaccacattct

SEQ ID NO: 1530719 - DNA, 15 bp, Homo sapiens
gagaaccacattctc

SEQ ID NO: 1530720 - DNA, 15 bp, Homo sapiens
agaaccacattctcc

SEQ ID NO: 1530721 - DNA, 15 bp, Homo sapiens
gaaccacattctccc

SEQ ID NO: 1530722 - DNA, 15 bp, Homo sapiens
aaccacattctccca

SEQ ID NO: 1530723 - DNA, 15 bp, Homo sapiens
accacattctcccag

SEQ ID NO: 1530724 - DNA, 15 bp, Homo sapiens
ccacattctcccagg

SEQ ID NO: 1530725 - DNA, 15 bp, Homo sapiens
cacattctcccaggg

SEQ ID NO: 1530726 - DNA, 15 bp, Homo sapiens
acattctcccaggga

SEQ ID NO: 1530727 - DNA, 15 bp, Homo sapiens
cattctcccagggac

SEQ ID NO: 1530728 - DNA, 15 bp, Homo sapiens
attctcccagggacc

SEQ ID NO: 1530729 - DNA, 15 bp, Homo sapiens
ttctcccagggaccc

SEQ ID NO: 1530730 - DNA, 15 bp, Homo sapiens
tctcccagggaccca

SEQ ID NO: 1530731 - DNA, 15 bp, Homo sapiens
ctcccagggacccag

SEQ ID NO: 1530732 - DNA, 15 bp, Homo sapiens
tcccagggacccagg

SEQ ID NO: 1530733 - DNA, 15 bp, Homo sapiens
cccagggacccaggg

SEQ ID NO: 1530734 - DNA, 15 bp, Homo sapiens
ccagggacccagggc

SEQ ID NO: 1530735 - DNA, 15 bp, Homo sapiens
cagggacccagggcg

SEQ ID NO: 1530736 - DNA, 15 bp, Homo sapiens
agggacccagggcgg

SEQ ID NO: 1530737 - DNA, 15 bp, Homo sapiens
gggacccagggcggg

SEQ ID NO: 1530738 - DNA, 15 bp, Homo sapiens
ggacccagggcgggc

SEQ ID NO: 1530739 - DNA, 15 bp, Homo sapiens
gacccagggcgggcc

SEQ ID NO: 1530740 - DNA, 15 bp, Homo sapiens
acccagggcgggccg

SEQ ID NO: 1530741 - DNA, 15 bp, Homo sapiens
cccagggcgggccgt

SEQ ID NO: 1530742 - DNA, 15 bp, Homo sapiens
ccagggcgggccgtg

SEQ ID NO: 1530743 - DNA, 15 bp, Homo sapiens
cagggcgggccgtga

SEQ ID NO: 1530744 - DNA, 15 bp, Homo sapiens
agggcgggccgtgac

SEQ ID NO: 1530745 - DNA, 15 bp, Homo sapiens
gggcgggccgtgacc

SEQ ID NO: 1530746 - DNA, 15 bp, Homo sapiens
ggcgggccgtgaccc

SEQ ID NO: 1530747 - DNA, 15 bp, Homo sapiens
gcgggccgtgacccc

SEQ ID NO: 1530748 - DNA, 15 bp, Homo sapiens
cgggccgtgacccct

SEQ ID NO: 1530749 - DNA, 15 bp, Homo sapiens
gggccgtgacccctg

SEQ ID NO: 1530750 - DNA, 15 bp, Homo sapiens
ggccgtgacccctgc

SEQ ID NO: 1530751 - DNA, 15 bp, Homo sapiens
gccgtgacccctgcg

SEQ ID NO: 1530752 - DNA, 15 bp, Homo sapiens
ccgtgacccctgcgg

SEQ ID NO: 1530753 - DNA, 15 bp, Homo sapiens
cgtgacccctgcggc

SEQ ID NO: 1530754 - DNA, 15 bp, Homo sapiens
gtgacccctgcggcg

SEQ ID NO: 1530755 - DNA, 15 bp, Homo sapiens
tgacccctgcggcgg

SEQ ID NO: 1530756 - DNA, 15 bp, Homo sapiens
gacccctgcggcgga

SEQ ID NO: 1530757 - DNA, 15 bp, Homo sapiens
acccctgcggcggag

SEQ ID NO: 1530758 - DNA, 15 bp, Homo sapiens
cccctgcggcggaga

SEQ ID NO: 1530759 - DNA, 15 bp, Homo sapiens
ccctgcggcggagaa

SEQ ID NO: 1530760 - DNA, 15 bp, Homo sapiens
cctgcggcggagaag

SEQ ID NO: 1530761 - DNA, 15 bp, Homo sapiens
ctgcggcggagaagc

SEQ ID NO: 1530762 - DNA, 15 bp, Homo sapiens
tgcggcggagaagcc

SEQ ID NO: 1530763 - DNA, 15 bp, Homo sapiens
gcggcggagaagcct

SEQ ID NO: 1530764 - DNA, 15 bp, Homo sapiens
cggcggagaagcctt

SEQ ID NO: 1530765 - DNA, 15 bp, Homo sapiens
ggcggagaagccttg

SEQ ID NO: 1530766 - DNA, 15 bp, Homo sapiens
gcggagaagccttgg

SEQ ID NO: 1530767 - DNA, 15 bp, Homo sapiens
cggagaagccttgga

SEQ ID NO: 1530768 - DNA, 15 bp, Homo sapiens
ggagaagccttggat

SEQ ID NO: 1530769 - DNA, 15 bp, Homo sapiens
gagaagccttggata

SEQ ID NO: 1530770 - DNA, 15 bp, Homo sapiens
agaagccttggatat

SEQ ID NO: 1530771 - DNA, 15 bp, Homo sapiens
gaagccttggatatt

SEQ ID NO: 1530772 - DNA, 15 bp, Homo sapiens
aagccttggatattt

SEQ ID NO: 1530773 - DNA, 15 bp, Homo sapiens
agccttggatatttc

SEQ ID NO: 1530774 - DNA, 15 bp, Homo sapiens
gccttggatatttcc

SEQ ID NO: 1530775 - DNA, 15 bp, Homo sapiens
ccttggatatttcca

SEQ ID NO: 1530776 - DNA, 15 bp, Homo sapiens
cttggatatttccac

SEQ ID NO: 1530777 - DNA, 15 bp, Homo sapiens
ttggatatttccact

SEQ ID NO: 1530778 - DNA, 15 bp, Homo sapiens
tggatatttccactt

SEQ ID NO: 1530779 - DNA, 15 bp, Homo sapiens
ggatatttccacttc

SEQ ID NO: 1530780 - DNA, 15 bp, Homo sapiens
gatatttccacttca

SEQ ID NO: 1530781 - DNA, 15 bp, Homo sapiens
atatttccacttcag

SEQ ID NO: 1530782 - DNA, 15 bp, Homo sapiens
tatttccacttcaga

SEQ ID NO: 1530783 - DNA, 15 bp, Homo sapiens
atttccacttcagaa

SEQ ID NO: 1530784 - DNA, 15 bp, Homo sapiens
tttccacttcagaag

SEQ ID NO: 1530785 - DNA, 15 bp, Homo sapiens
ttccacttcagaagc

SEQ ID NO: 1530786 - DNA, 15 bp, Homo sapiens
tccacttcagaagcc

SEQ ID NO: 1530787 - DNA, 15 bp, Homo sapiens
ccacttcagaagcct

SEQ ID NO: 1530788 - DNA, 15 bp, Homo sapiens
cacttcagaagccta

SEQ ID NO: 1530789 - DNA, 15 bp, Homo sapiens
acttcagaagcctac

SEQ ID NO: 1530790 - DNA, 15 bp, Homo sapiens
cttcagaagcctact

SEQ ID NO: 1530791 - DNA, 15 bp, Homo sapiens
ttcagaagcctactg

SEQ ID NO: 1530792 - DNA, 15 bp, Homo sapiens
tcagaagcctactgg

SEQ ID NO: 1530793 - DNA, 15 bp, Homo sapiens
cagaagcctactggg

SEQ ID NO: 1530794 - DNA, 15 bp, Homo sapiens
agaagcctactgggg

SEQ ID NO: 1530795 - DNA, 15 bp, Homo sapiens
gaagcctactgggga

SEQ ID NO: 1530796 - DNA, 15 bp, Homo sapiens
aagcctactggggaa

SEQ ID NO: 1530797 - DNA, 15 bp, Homo sapiens
agcctactggggaag

SEQ ID NO: 1530798 - DNA, 15 bp, Homo sapiens
gcctactggggaagg

SEQ ID NO: 1530799 - DNA, 15 bp, Homo sapiens
cctactggggaaggc

SEQ ID NO: 1530800 - DNA, 15 bp, Homo sapiens
ctactggggaaggct

SEQ ID NO: 1530801 - DNA, 15 bp, Homo sapiens
tactggggaaggctg

SEQ ID NO: 1530802 - DNA, 15 bp, Homo sapiens
actggggaaggctga

SEQ ID NO: 1530803 - DNA, 15 bp, Homo sapiens
ctggggaaggctgag

SEQ ID NO: 1530804 - DNA, 15 bp, Homo sapiens
tggggaaggctgagg

SEQ ID NO: 1530805 - DNA, 15 bp, Homo sapiens
ggggaaggctgaggg

SEQ ID NO: 1530806 - DNA, 15 bp, Homo sapiens
gggaaggctgagggg

SEQ ID NO: 1530807 - DNA, 15 bp, Homo sapiens
ggaaggctgaggggt

SEQ ID NO: 1530808 - DNA, 15 bp, Homo sapiens
gaaggctgaggggtc

SEQ ID NO: 1530809 - DNA, 15 bp, Homo sapiens
aaggctgaggggtcc

SEQ ID NO: 1530810 - DNA, 15 bp, Homo sapiens
aggctgaggggtccc

SEQ ID NO: 1530811 - DNA, 15 bp, Homo sapiens
ggctgaggggtccca

SEQ ID NO: 1530812 - DNA, 15 bp, Homo sapiens
gctgaggggtcccag

SEQ ID NO: 1530813 - DNA, 15 bp, Homo sapiens
ctgaggggtcccagc

SEQ ID NO: 1530814 - DNA, 15 bp, Homo sapiens
tgaggggtcccagct

SEQ ID NO: 1530815 - DNA, 15 bp, Homo sapiens
gaggggtcccagctc

SEQ ID NO: 1530816 - DNA, 15 bp, Homo sapiens
aggggtcccagctcc

SEQ ID NO: 1530817 - DNA, 15 bp, Homo sapiens
ggggtcccagctccc

SEQ ID NO: 1530818 - DNA, 15 bp, Homo sapiens
gggtcccagctcccc

SEQ ID NO: 1530819 - DNA, 15 bp, Homo sapiens
ggtcccagctcccca

SEQ ID NO: 1530820 - DNA, 15 bp, Homo sapiens
gtcccagctccccac

SEQ ID NO: 1530821 - DNA, 15 bp, Homo sapiens
tcccagctccccacg

SEQ ID NO: 1530822 - DNA, 15 bp, Homo sapiens
cccagctccccacgc

SEQ ID NO: 1530823 - DNA, 15 bp, Homo sapiens
ccagctccccacgct

SEQ ID NO: 1530824 - DNA, 15 bp, Homo sapiens
cagctccccacgctg

SEQ ID NO: 1530825 - DNA, 15 bp, Homo sapiens
agctccccacgctgg

SEQ ID NO: 1530826 - DNA, 15 bp, Homo sapiens
gctccccacgctggc

SEQ ID NO: 1530827 - DNA, 15 bp, Homo sapiens
ctccccacgctggct

SEQ ID NO: 1530828 - DNA, 15 bp, Homo sapiens
tccccacgctggctg

SEQ ID NO: 1530829 - DNA, 15 bp, Homo sapiens
ccccacgctggctgc

SEQ ID NO: 1530830 - DNA, 15 bp, Homo sapiens
cccacgctggctgct

SEQ ID NO: 1530831 - DNA, 15 bp, Homo sapiens
ccacgctggctgctg

SEQ ID NO: 1530832 - DNA, 15 bp, Homo sapiens
cacgctggctgctgt

SEQ ID NO: 1530833 - DNA, 15 bp, Homo sapiens
acgctggctgctgtg

SEQ ID NO: 1530834 - DNA, 15 bp, Homo sapiens
cgctggctgctgtgc

SEQ ID NO: 1530835 - DNA, 15 bp, Homo sapiens
gctggctgctgtgca

SEQ ID NO: 1530836 - DNA, 15 bp, Homo sapiens
ctggctgctgtgcag

SEQ ID NO: 1530837 - DNA, 15 bp, Homo sapiens
tggctgctgtgcaga

SEQ ID NO: 1530838 - DNA, 15 bp, Homo sapiens
ggctgctgtgcagat

SEQ ID NO: 1530839 - DNA, 15 bp, Homo sapiens
gctgctgtgcagatg

SEQ ID NO: 1530840 - DNA, 15 bp, Homo sapiens
ctgctgtgcagatgc

SEQ ID NO: 1530841 - DNA, 15 bp, Homo sapiens
tgctgtgcagatgct

SEQ ID NO: 1530842 - DNA, 15 bp, Homo sapiens
gctgtgcagatgctg

SEQ ID NO: 1530843 - DNA, 15 bp, Homo sapiens
ctgtgcagatgctgg

SEQ ID NO: 1530844 - DNA, 15 bp, Homo sapiens
tgtgcagatgctgga

SEQ ID NO: 1530845 - DNA, 15 bp, Homo sapiens
gtgcagatgctggac

SEQ ID NO: 1530846 - DNA, 15 bp, Homo sapiens
tgcagatgctggacg

SEQ ID NO: 1530847 - DNA, 15 bp, Homo sapiens
gcagatgctggacga

SEQ ID NO: 1530848 - DNA, 15 bp, Homo sapiens
cagatgctggacgac

SEQ ID NO: 1530849 - DNA, 15 bp, Homo sapiens
agatgctggacgaca

SEQ ID NO: 1530850 - DNA, 15 bp, Homo sapiens
gatgctggacgacag

SEQ ID NO: 1530851 - DNA, 15 bp, Homo sapiens
atgctggacgacaga

SEQ ID NO: 1530852 - DNA, 15 bp, Homo sapiens
tgctggacgacagag

SEQ ID NO: 1530853 - DNA, 15 bp, Homo sapiens
gctggacgacagagc

SEQ ID NO: 1530854 - DNA, 15 bp, Homo sapiens
ctggacgacagagcc

SEQ ID NO: 1530855 - DNA, 15 bp, Homo sapiens
tggacgacagagcca

SEQ ID NO: 1530856 - DNA, 15 bp, Homo sapiens
ggacgacagagccag

SEQ ID NO: 1530857 - DNA, 15 bp, Homo sapiens
gacgacagagccagg

SEQ ID NO: 1530858 - DNA, 15 bp, Homo sapiens
acgacagagccagga

SEQ ID NO: 1530859 - DNA, 15 bp, Homo sapiens
cgacagagccaggat

SEQ ID NO: 1530860 - DNA, 15 bp, Homo sapiens
gacagagccaggatg

SEQ ID NO: 1530861 - DNA, 15 bp, Homo sapiens
acagagccaggatgg

SEQ ID NO: 1530862 - DNA, 15 bp, Homo sapiens
cagagccaggatgga

SEQ ID NO: 1530863 - DNA, 15 bp, Homo sapiens
agagccaggatggag

SEQ ID NO: 1530864 - DNA, 15 bp, Homo sapiens
gagccaggatggagg

SEQ ID NO: 1530865 - DNA, 15 bp, Homo sapiens
agccaggatggaggc

SEQ ID NO: 1530866 - DNA, 15 bp, Homo sapiens
gccaggatggaggcc

SEQ ID NO: 1530867 - DNA, 15 bp, Homo sapiens
ccaggatggaggccg

SEQ ID NO: 1530868 - DNA, 15 bp, Homo sapiens
caggatggaggccgc

SEQ ID NO: 1530869 - DNA, 15 bp, Homo sapiens
aggatggaggccgcc

SEQ ID NO: 1530870 - DNA, 15 bp, Homo sapiens
ggatggaggccgcca

SEQ ID NO: 1530871 - DNA, 15 bp, Homo sapiens
gatggaggccgccaa

SEQ ID NO: 1530872 - DNA, 15 bp, Homo sapiens
atggaggccgccaag

SEQ ID NO: 1530873 - DNA, 15 bp, Homo sapiens
tggaggccgccaaga

SEQ ID NO: 1530874 - DNA, 15 bp, Homo sapiens
ggaggccgccaagaa

SEQ ID NO: 1530875 - DNA, 15 bp, Homo sapiens
gaggccgccaagaag

SEQ ID NO: 1530876 - DNA, 15 bp, Homo sapiens
aggccgccaagaagg

SEQ ID NO: 1530877 - DNA, 15 bp, Homo sapiens
ggccgccaagaagga

SEQ ID NO: 1530878 - DNA, 15 bp, Homo sapiens
gccgccaagaaggag

SEQ ID NO: 1530879 - DNA, 15 bp, Homo sapiens
ccgccaagaaggaga

SEQ ID NO: 1530880 - DNA, 15 bp, Homo sapiens
cgccaagaaggagaa

SEQ ID NO: 1530881 - DNA, 15 bp, Homo sapiens
gccaagaaggagaag

SEQ ID NO: 1530882 - DNA, 15 bp, Homo sapiens
ccaagaaggagaagg

SEQ ID NO: 1530883 - DNA, 15 bp, Homo sapiens
caagaaggagaaggt

SEQ ID NO: 1530884 - DNA, 15 bp, Homo sapiens
aagaaggagaaggta

SEQ ID NO: 1530885 - DNA, 15 bp, Homo sapiens
agaaggagaaggtat

SEQ ID NO: 1530886 - DNA, 15 bp, Homo sapiens
gaaggagaaggtatc

SEQ ID NO: 1530887 - DNA, 15 bp, Homo sapiens
aaggagaaggtatct

SEQ ID NO: 1530888 - DNA, 15 bp, Homo sapiens
aggagaaggtatctc

SEQ ID NO: 1530889 - DNA, 15 bp, Homo sapiens
ggagaaggtatctcg

SEQ ID NO: 1530890 - DNA, 15 bp, Homo sapiens
gagaaggtatctcgc

SEQ ID NO: 1530891 - DNA, 15 bp, Homo sapiens
agaaggtatctcgcc

SEQ ID NO: 1530892 - DNA, 15 bp, Homo sapiens
gaaggtatctcgccc

SEQ ID NO: 1530893 - DNA, 15 bp, Homo sapiens
aaggtatctcgccct

SEQ ID NO: 1530894 - DNA, 15 bp, Homo sapiens
aggtatctcgccctc

SEQ ID NO: 1530895 - DNA, 15 bp, Homo sapiens
ggtatctcgccctcc

SEQ ID NO: 1530896 - DNA, 15 bp, Homo sapiens
gtatctcgccctcca

SEQ ID NO: 1530897 - DNA, 15 bp, Homo sapiens
tatctcgccctccat

SEQ ID NO: 1530898 - DNA, 15 bp, Homo sapiens
atctcgccctccatt

SEQ ID NO: 1530899 - DNA, 15 bp, Homo sapiens
tctcgccctccattg

SEQ ID NO: 1530900 - DNA, 15 bp, Homo sapiens
ctcgccctccattgg

SEQ ID NO: 1530901 - DNA, 15 bp, Homo sapiens
tcgccctccattggg

SEQ ID NO: 1530902 - DNA, 15 bp, Homo sapiens
cgccctccattgggc

SEQ ID NO: 1530903 - DNA, 15 bp, Homo sapiens
gccctccattgggca

SEQ ID NO: 1530904 - DNA, 15 bp, Homo sapiens
ccctccattgggcat

SEQ ID NO: 1530905 - DNA, 15 bp, Homo sapiens
cctccattgggcatt

SEQ ID NO: 1530906 - DNA, 15 bp, Homo sapiens
ctccattgggcattc

SEQ ID NO: 1530907 - DNA, 15 bp, Homo sapiens
tccattgggcattct

SEQ ID NO: 1530908 - DNA, 15 bp, Homo sapiens
ccattgggcattctg

SEQ ID NO: 1530909 - DNA, 15 bp, Homo sapiens
cattgggcattctgg

SEQ ID NO: 1530910 - DNA, 15 bp, Homo sapiens
attgggcattctggg

SEQ ID NO: 1530911 - DNA, 15 bp, Homo sapiens
ttgggcattctggga

SEQ ID NO: 1530912 - DNA, 15 bp, Homo sapiens
tgggcattctgggag

SEQ ID NO: 1530913 - DNA, 15 bp, Homo sapiens
gggcattctgggagt

SEQ ID NO: 1530914 - DNA, 15 bp, Homo sapiens
ggcattctgggagtg

SEQ ID NO: 1530915 - DNA, 15 bp, Homo sapiens
gcattctgggagtgt

SEQ ID NO: 1530916 - DNA, 15 bp, Homo sapiens
cattctgggagtgtt

SEQ ID NO: 1530917 - DNA, 15 bp, Homo sapiens
attctgggagtgttt

SEQ ID NO: 1530918 - DNA, 15 bp, Homo sapiens
ttctgggagtgtttg

SEQ ID NO: 1530919 - DNA, 15 bp, Homo sapiens
tctgggagtgtttgc

SEQ ID NO: 1530920 - DNA, 15 bp, Homo sapiens
ctgggagtgtttgct

SEQ ID NO: 1530921 - DNA, 15 bp, Homo sapiens
tgggagtgtttgctt

SEQ ID NO: 1530922 - DNA, 15 bp, Homo sapiens
gggagtgtttgcttg

SEQ ID NO: 1530923 - DNA, 15 bp, Homo sapiens
ggagtgtttgcttgc

SEQ ID NO: 1530924 - DNA, 15 bp, Homo sapiens
gagtgtttgcttgcc

SEQ ID NO: 1530925 - DNA, 15 bp, Homo sapiens
agtgtttgcttgcct

SEQ ID NO: 1530926 - DNA, 15 bp, Homo sapiens
gtgtttgcttgcctg

SEQ ID NO: 1530927 - DNA, 15 bp, Homo sapiens
tgtttgcttgcctgt

SEQ ID NO: 1530928 - DNA, 15 bp, Homo sapiens
gtttgcttgcctgtc

SEQ ID NO: 1530929 - DNA, 15 bp, Homo sapiens
tttgcttgcctgtcc

SEQ ID NO: 1530930 - DNA, 15 bp, Homo sapiens
ttgcttgcctgtccc

SEQ ID NO: 1530931 - DNA, 15 bp, Homo sapiens
tgcttgcctgtcccc

SEQ ID NO: 1530932 - DNA, 15 bp, Homo sapiens
gcttgcctgtcccca

SEQ ID NO: 1530933 - DNA, 15 bp, Homo sapiens
cttgcctgtccccaa

SEQ ID NO: 1530934 - DNA, 15 bp, Homo sapiens
ttgcctgtccccaac

SEQ ID NO: 1530935 - DNA, 15 bp, Homo sapiens
tgcctgtccccaaca

SEQ ID NO: 1530936 - DNA, 15 bp, Homo sapiens
gcctgtccccaacat

SEQ ID NO: 1530937 - DNA, 15 bp, Homo sapiens
cctgtccccaacatt

SEQ ID NO: 1530938 - DNA, 15 bp, Homo sapiens
ctgtccccaacattc

SEQ ID NO: 1530939 - DNA, 15 bp, Homo sapiens
tgtccccaacattcc

SEQ ID NO: 1530940 - DNA, 15 bp, Homo sapiens
gtccccaacattcca

SEQ ID NO: 1530941 - DNA, 15 bp, Homo sapiens
tccccaacattccat

SEQ ID NO: 1530942 - DNA, 15 bp, Homo sapiens
ccccaacattccatg

SEQ ID NO: 1530943 - DNA, 15 bp, Homo sapiens
cccaacattccatgg

SEQ ID NO: 1530944 - DNA, 15 bp, Homo sapiens
ccaacattccatggt

SEQ ID NO: 1530945 - DNA, 15 bp, Homo sapiens
caacattccatggtt

SEQ ID NO: 1530946 - DNA, 15 bp, Homo sapiens
aacattccatggttt

SEQ ID NO: 1530947 - DNA, 15 bp, Homo sapiens
acattccatggtttg

SEQ ID NO: 1530948 - DNA, 15 bp, Homo sapiens
cattccatggtttgt

SEQ ID NO: 1530949 - DNA, 15 bp, Homo sapiens
attccatggtttgtt

SEQ ID NO: 1530950 - DNA, 15 bp, Homo sapiens
ttccatggtttgttt

SEQ ID NO: 1530951 - DNA, 15 bp, Homo sapiens
tccatggtttgtttg

SEQ ID NO: 1530952 - DNA, 15 bp, Homo sapiens
ccatggtttgtttga

SEQ ID NO: 1530953 - DNA, 15 bp, Homo sapiens
catggtttgtttgag

SEQ ID NO: 1530954 - DNA, 15 bp, Homo sapiens
atggtttgtttgagc

SEQ ID NO: 1530955 - DNA, 15 bp, Homo sapiens
tggtttgtttgagcc

SEQ ID NO: 1530956 - DNA, 15 bp, Homo sapiens
ggtttgtttgagcct

SEQ ID NO: 1530957 - DNA, 15 bp, Homo sapiens
gtttgtttgagcctc

SEQ ID NO: 1530958 - DNA, 15 bp, Homo sapiens
tttgtttgagcctca

SEQ ID NO: 1530959 - DNA, 15 bp, Homo sapiens
ttgtttgagcctcag

SEQ ID NO: 1530960 - DNA, 15 bp, Homo sapiens
tgtttgagcctcaga

SEQ ID NO: 1530961 - DNA, 15 bp, Homo sapiens
gtttgagcctcagaa

SEQ ID NO: 1530962 - DNA, 15 bp, Homo sapiens
tttgagcctcagaat

SEQ ID NO: 1530963 - DNA, 15 bp, Homo sapiens
ttgagcctcagaatc

SEQ ID NO: 1530964 - DNA, 15 bp, Homo sapiens
tgagcctcagaatct

SEQ ID NO: 1530965 - DNA, 15 bp, Homo sapiens
gagcctcagaatctg

SEQ ID NO: 1530966 - DNA, 15 bp, Homo sapiens
agcctcagaatctga

SEQ ID NO: 1530967 - DNA, 15 bp, Homo sapiens
gcctcagaatctgat

SEQ ID NO: 1530968 - DNA, 15 bp, Homo sapiens
cctcagaatctgatt

SEQ ID NO: 1530969 - DNA, 15 bp, Homo sapiens
ctcagaatctgattt

SEQ ID NO: 1530970 - DNA, 15 bp, Homo sapiens
tcagaatctgatttt

SEQ ID NO: 1530971 - DNA, 15 bp, Homo sapiens
cagaatctgatttta

SEQ ID NO: 1530972 - DNA, 15 bp, Homo sapiens
agaatctgattttat

SEQ ID NO: 1530973 - DNA, 15 bp, Homo sapiens
gaatctgattttatg

SEQ ID NO: 1530974 - DNA, 15 bp, Homo sapiens
aatctgattttatgc

SEQ ID NO: 1530975 - DNA, 15 bp, Homo sapiens
atctgattttatgca

SEQ ID NO: 1530976 - DNA, 15 bp, Homo sapiens
tctgattttatgcac

SEQ ID NO: 1530977 - DNA, 15 bp, Homo sapiens
ctgattttatgcaca

SEQ ID NO: 1530978 - DNA, 15 bp, Homo sapiens
tgattttatgcacag

SEQ ID NO: 1530979 - DNA, 15 bp, Homo sapiens
gattttatgcacagg

SEQ ID NO: 1530980 - DNA, 15 bp, Homo sapiens
attttatgcacaggc

SEQ ID NO: 1530981 - DNA, 15 bp, Homo sapiens
ttttatgcacaggct

SEQ ID NO: 1530982 - DNA, 15 bp, Homo sapiens
tttatgcacaggctc

SEQ ID NO: 1530983 - DNA, 15 bp, Homo sapiens
ttatgcacaggctct

SEQ ID NO: 1530984 - DNA, 15 bp, Homo sapiens
tatgcacaggctctt

SEQ ID NO: 1530985 - DNA, 15 bp, Homo sapiens
atgcacaggctcttt

SEQ ID NO: 1530986 - DNA, 15 bp, Homo sapiens
tgcacaggctctttg

SEQ ID NO: 1530987 - DNA, 15 bp, Homo sapiens
gcacaggctctttga

SEQ ID NO: 1530988 - DNA, 15 bp, Homo sapiens
cacaggctctttgag

SEQ ID NO: 1530989 - DNA, 15 bp, Homo sapiens
acaggctctttgaga

SEQ ID NO: 1530990 - DNA, 15 bp, Homo sapiens
caggctctttgagaa

SEQ ID NO: 1530991 - DNA, 15 bp, Homo sapiens
aggctctttgagaag

SEQ ID NO: 1530992 - DNA, 15 bp, Homo sapiens
ggctctttgagaagg

SEQ ID NO: 1530993 - DNA, 15 bp, Homo sapiens
gctctttgagaaggg

SEQ ID NO: 1530994 - DNA, 15 bp, Homo sapiens
ctctttgagaagggt

SEQ ID NO: 1530995 - DNA, 15 bp, Homo sapiens
tctttgagaagggtc

SEQ ID NO: 1530996 - DNA, 15 bp, Homo sapiens
ctttgagaagggtct

SEQ ID NO: 1530997 - DNA, 15 bp, Homo sapiens
tttgagaagggtctt

SEQ ID NO: 1530998 - DNA, 15 bp, Homo sapiens
ttgagaagggtcttg

SEQ ID NO: 1530999 - DNA, 15 bp, Homo sapiens
tgagaagggtcttgc

SEQ ID NO: 1531000 - DNA, 15 bp, Homo sapiens
gagaagggtcttgcc

SEQ ID NO: 1531001 - DNA, 15 bp, Homo sapiens
agaagggtcttgcca

SEQ ID NO: 1531002 - DNA, 15 bp, Homo sapiens
gaagggtcttgccag

SEQ ID NO: 1531003 - DNA, 15 bp, Homo sapiens
aagggtcttgccagg

SEQ ID NO: 1531004 - DNA, 15 bp, Homo sapiens
agggtcttgccaggg

SEQ ID NO: 1531005 - DNA, 15 bp, Homo sapiens
gggtcttgccagggg

SEQ ID NO: 1531006 - DNA, 15 bp, Homo sapiens
ggtcttgccaggggt

SEQ ID NO: 1531007 - DNA, 15 bp, Homo sapiens
gtcttgccaggggtg

SEQ ID NO: 1531008 - DNA, 15 bp, Homo sapiens
tcttgccaggggtgc

SEQ ID NO: 1531009 - DNA, 15 bp, Homo sapiens
cttgccaggggtgcc

SEQ ID NO: 1531010 - DNA, 15 bp, Homo sapiens
ttgccaggggtgcct

SEQ ID NO: 1531011 - DNA, 15 bp, Homo sapiens
tgccaggggtgcctt

SEQ ID NO: 1531012 - DNA, 15 bp, Homo sapiens
gccaggggtgccttc

SEQ ID NO: 1531013 - DNA, 15 bp, Homo sapiens
ccaggggtgccttct

SEQ ID NO: 1531014 - DNA, 15 bp, Homo sapiens
caggggtgccttctg

SEQ ID NO: 1531015 - DNA, 15 bp, Homo sapiens
aggggtgccttctgg

SEQ ID NO: 1531016 - DNA, 15 bp, Homo sapiens
ggggtgccttctggg

SEQ ID NO: 1531017 - DNA, 15 bp, Homo sapiens
gggtgccttctgggg

SEQ ID NO: 1531018 - DNA, 15 bp, Homo sapiens
ggtgccttctggggc

SEQ ID NO: 1531019 - DNA, 15 bp, Homo sapiens
gtgccttctggggca

SEQ ID NO: 1531020 - DNA, 15 bp, Homo sapiens
tgccttctggggcag

SEQ ID NO: 1531021 - DNA, 15 bp, Homo sapiens
gccttctggggcagg

SEQ ID NO: 1531022 - DNA, 15 bp, Homo sapiens
ccttctggggcagga

SEQ ID NO: 1531023 - DNA, 15 bp, Homo sapiens
cttctggggcaggaa

SEQ ID NO: 1531024 - DNA, 15 bp, Homo sapiens
ttctggggcaggaag

SEQ ID NO: 1531025 - DNA, 15 bp, Homo sapiens
tctggggcaggaagg

SEQ ID NO: 1531026 - DNA, 15 bp, Homo sapiens
ctggggcaggaaggc

SEQ ID NO: 1531027 - DNA, 15 bp, Homo sapiens
tggggcaggaaggcc

SEQ ID NO: 1531028 - DNA, 15 bp, Homo sapiens
ggggcaggaaggccc

SEQ ID NO: 1531029 - DNA, 15 bp, Homo sapiens
gggcaggaaggcccc

SEQ ID NO: 1531030 - DNA, 15 bp, Homo sapiens
ggcaggaaggcccct

SEQ ID NO: 1531031 - DNA, 15 bp, Homo sapiens
gcaggaaggccccta

SEQ ID NO: 1531032 - DNA, 15 bp, Homo sapiens
caggaaggcccctac

SEQ ID NO: 1531033 - DNA, 15 bp, Homo sapiens
aggaaggcccctact

SEQ ID NO: 1531034 - DNA, 15 bp, Homo sapiens
ggaaggcccctactg

SEQ ID NO: 1531035 - DNA, 15 bp, Homo sapiens
gaaggcccctactgc

SEQ ID NO: 1531036 - DNA, 15 bp, Homo sapiens
aaggcccctactgcc

SEQ ID NO: 1531037 - DNA, 15 bp, Homo sapiens
aggcccctactgcct

SEQ ID NO: 1531038 - DNA, 15 bp, Homo sapiens
ggcccctactgcctg

SEQ ID NO: 1531039 - DNA, 15 bp, Homo sapiens
gcccctactgcctgg

SEQ ID NO: 1531040 - DNA, 15 bp, Homo sapiens
ctgcctggcagaccc

SEQ ID NO: 1531041 - DNA, 15 bp, Homo sapiens
tgcctggcagaccca

SEQ ID NO: 1531042 - DNA, 15 bp, Homo sapiens
gcctggcagacccat

SEQ ID NO: 1531043 - DNA, 15 bp, Homo sapiens
cctggcagacccatc

SEQ ID NO: 1531044 - DNA, 15 bp, Homo sapiens
ctggcagacccatcc

SEQ ID NO: 1531045 - DNA, 15 bp, Homo sapiens
tggcagacccatcca

SEQ ID NO: 1531046 - DNA, 15 bp, Homo sapiens
ggcagacccatccag

SEQ ID NO: 1531047 - DNA, 15 bp, Homo sapiens
gcagacccatccagc

SEQ ID NO: 1531048 - DNA, 15 bp, Homo sapiens
cagacccatccagct

SEQ ID NO: 1531049 - DNA, 15 bp, Homo sapiens
agacccatccagctt

SEQ ID NO: 1531050 - DNA, 15 bp, Homo sapiens
gacccatccagcttt

SEQ ID NO: 1531051 - DNA, 15 bp, Homo sapiens
acccatccagctttg

SEQ ID NO: 1531052 - DNA, 15 bp, Homo sapiens
cccatccagctttgg

SEQ ID NO: 1531053 - DNA, 15 bp, Homo sapiens
ccatccagctttgga

SEQ ID NO: 1531054 - DNA, 15 bp, Homo sapiens
catccagctttggac

SEQ ID NO: 1531055 - DNA, 15 bp, Homo sapiens
atccagctttggact

SEQ ID NO: 1531056 - DNA, 15 bp, Homo sapiens
gctttggactctggt

SEQ ID NO: 1531057 - DNA, 15 bp, Homo sapiens
ctttggactctggtc

SEQ ID NO: 1531058 - DNA, 15 bp, Homo sapiens
tttggactctggtcc

SEQ ID NO: 1531059 - DNA, 15 bp, Homo sapiens
ttggactctggtcct

SEQ ID NO: 1531060 - DNA, 15 bp, Homo sapiens
tggactctggtcctg

SEQ ID NO: 1531061 - DNA, 15 bp, Homo sapiens
ggactctggtcctgc

SEQ ID NO: 1531062 - DNA, 15 bp, Homo sapiens
gactctggtcctgcg

SEQ ID NO: 1531063 - DNA, 15 bp, Homo sapiens
actctggtcctgcga

SEQ ID NO: 1531064 - DNA, 15 bp, Homo sapiens
ctctggtcctgcgac

SEQ ID NO: 1531065 - DNA, 15 bp, Homo sapiens
tctggtcctgcgacc

SEQ ID NO: 1531066 - DNA, 15 bp, Homo sapiens
ctggtcctgcgaccc

SEQ ID NO: 1531067 - DNA, 15 bp, Homo sapiens
tggtcctgcgacccg

SEQ ID NO: 1531068 - DNA, 15 bp, Homo sapiens
ggtcctgcgacccgg

SEQ ID NO: 1531069 - DNA, 15 bp, Homo sapiens
gtcctgcgacccgga

SEQ ID NO: 1531070 - DNA, 15 bp, Homo sapiens
tcctgcgacccggaa

SEQ ID NO: 1531071 - DNA, 15 bp, Homo sapiens
cctgcgacccggaag

SEQ ID NO: 1531072 - DNA, 15 bp, Homo sapiens
ctgcgacccggaagt

SEQ ID NO: 1531073 - DNA, 15 bp, Homo sapiens
tgcgacccggaagtc

SEQ ID NO: 1531074 - DNA, 15 bp, Homo sapiens
gcgacccggaagtca

SEQ ID NO: 1531075 - DNA, 15 bp, Homo sapiens
cgacccggaagtcag

SEQ ID NO: 1531076 - DNA, 15 bp, Homo sapiens
gacccggaagtcagg

SEQ ID NO: 1531077 - DNA, 15 bp, Homo sapiens
acccggaagtcaggc

SEQ ID NO: 1531078 - DNA, 15 bp, Homo sapiens
cccggaagtcaggct

SEQ ID NO: 1531079 - DNA, 15 bp, Homo sapiens
ccggaagtcaggctg

SEQ ID NO: 1531080 - DNA, 15 bp, Homo sapiens
cggaagtcaggctgc

SEQ ID NO: 1531081 - DNA, 15 bp, Homo sapiens
agtggcctccactgg

SEQ ID NO: 1531082 - DNA, 15 bp, Homo sapiens
gtggcctccactggg

SEQ ID NO: 1531083 - DNA, 15 bp, Homo sapiens
tggcctccactgggg

SEQ ID NO: 1531084 - DNA, 15 bp, Homo sapiens
ggcctccactgggga

SEQ ID NO: 1531085 - DNA, 15 bp, Homo sapiens
gcctccactggggag

SEQ ID NO: 1531086 - DNA, 15 bp, Homo sapiens
cctccactggggagg

SEQ ID NO: 1531087 - DNA, 15 bp, Homo sapiens
ctccactggggaggg

SEQ ID NO: 1531088 - DNA, 15 bp, Homo sapiens
tccactggggagggg

SEQ ID NO: 1531089 - DNA, 15 bp, Homo sapiens
ccactggggaggggc

SEQ ID NO: 1531090 - DNA, 15 bp, Homo sapiens
cactggggaggggct

SEQ ID NO: 1531091 - DNA, 15 bp, Homo sapiens
actggggaggggctc

SEQ ID NO: 1531092 - DNA, 15 bp, Homo sapiens
ctggggaggggctct

SEQ ID NO: 1531093 - DNA, 15 bp, Homo sapiens
tggggaggggctctg

SEQ ID NO: 1531094 - DNA, 15 bp, Homo sapiens
ggggaggggctctgg

SEQ ID NO: 1531095 - DNA, 15 bp, Homo sapiens
gggaggggctctgga

SEQ ID NO: 1531096 - DNA, 15 bp, Homo sapiens
ggaggggctctggag

SEQ ID NO: 1531097 - DNA, 15 bp, Homo sapiens
gaggggctctggaga

SEQ ID NO: 1531098 - DNA, 15 bp, Homo sapiens
aggggctctggagag

SEQ ID NO: 1531099 - DNA, 15 bp, Homo sapiens
ggggctctggagagt

SEQ ID NO: 1531100 - DNA, 15 bp, Homo sapiens
gggctctggagagtt

SEQ ID NO: 1531101 - DNA, 15 bp, Homo sapiens
ggctctggagagttt

SEQ ID NO: 1531102 - DNA, 15 bp, Homo sapiens
gctctggagagttta

SEQ ID NO: 1531103 - DNA, 15 bp, Homo sapiens
ctctggagagtttag

SEQ ID NO: 1531104 - DNA, 15 bp, Homo sapiens
tctggagagtttaga

SEQ ID NO: 1531105 - DNA, 15 bp, Homo sapiens
ctggagagtttagag

SEQ ID NO: 1531106 - DNA, 15 bp, Homo sapiens
tggagagtttagagc

SEQ ID NO: 1531107 - DNA, 15 bp, Homo sapiens
ggagagtttagagcc

SEQ ID NO: 1531108 - DNA, 15 bp, Homo sapiens
gagagtttagagccc

SEQ ID NO: 1531109 - DNA, 15 bp, Homo sapiens
agagtttagagccct

SEQ ID NO: 1531110 - DNA, 15 bp, Homo sapiens
gagtttagagcccta

SEQ ID NO: 1531111 - DNA, 15 bp, Homo sapiens
agtttagagccctag

SEQ ID NO: 1531112 - DNA, 15 bp, Homo sapiens
gtttagagccctaga

SEQ ID NO: 1531113 - DNA, 15 bp, Homo sapiens
tttagagccctagat

SEQ ID NO: 1531114 - DNA, 15 bp, Homo sapiens
ttagagccctagatg

SEQ ID NO: 1531115 - DNA, 15 bp, Homo sapiens
tagagccctagatgt

SEQ ID NO: 1531116 - DNA, 15 bp, Homo sapiens
agagccctagatgtg

SEQ ID NO: 1531117 - DNA, 15 bp, Homo sapiens
gagccctagatgtgg

SEQ ID NO: 1531118 - DNA, 15 bp, Homo sapiens
agccctagatgtggg

SEQ ID NO: 1531119 - DNA, 15 bp, Homo sapiens
gccctagatgtgggg

SEQ ID NO: 1531120 - DNA, 15 bp, Homo sapiens
ccctagatgtggggg

SEQ ID NO: 1531121 - DNA, 15 bp, Homo sapiens
cctagatgtgggggt

SEQ ID NO: 1531122 - DNA, 15 bp, Homo sapiens
ctagatgtgggggtt

SEQ ID NO: 1531123 - DNA, 15 bp, Homo sapiens
tagatgtgggggtta

SEQ ID NO: 1531124 - DNA, 15 bp, Homo sapiens
agatgtgggggttag

SEQ ID NO: 1531125 - DNA, 15 bp, Homo sapiens
gatgtgggggttagg

SEQ ID NO: 1531126 - DNA, 15 bp, Homo sapiens
atgtgggggttaggg

SEQ ID NO: 1531127 - DNA, 15 bp, Homo sapiens
tgtgggggttaggga

SEQ ID NO: 1531128 - DNA, 15 bp, Homo sapiens
gtgggggttagggac

SEQ ID NO: 1531129 - DNA, 15 bp, Homo sapiens
tgggggttagggaca

SEQ ID NO: 1531130 - DNA, 15 bp, Homo sapiens
gggggttagggacat

SEQ ID NO: 1531131 - DNA, 15 bp, Homo sapiens
ggggttagggacatg

SEQ ID NO: 1531132 - DNA, 15 bp, Homo sapiens
gggttagggacatga

SEQ ID NO: 1531133 - DNA, 15 bp, Homo sapiens
ggttagggacatgag

SEQ ID NO: 1531134 - DNA, 15 bp, Homo sapiens
gttagggacatgagg

SEQ ID NO: 1531135 - DNA, 15 bp, Homo sapiens
ttagggacatgaggt

SEQ ID NO: 1531136 - DNA, 15 bp, Homo sapiens
tagggacatgaggtc

SEQ ID NO: 1531137 - DNA, 15 bp, Homo sapiens
agggacatgaggtct

SEQ ID NO: 1531138 - DNA, 15 bp, Homo sapiens
gggacatgaggtctt

SEQ ID NO: 1531139 - DNA, 15 bp, Homo sapiens
ggacatgaggtcttg

SEQ ID NO: 1531140 - DNA, 15 bp, Homo sapiens
gacatgaggtcttgt

SEQ ID NO: 1531141 - DNA, 15 bp, Homo sapiens
acatgaggtcttgtg

SEQ ID NO: 1531142 - DNA, 15 bp, Homo sapiens
catgaggtcttgtgg

SEQ ID NO: 1531143 - DNA, 15 bp, Homo sapiens
atgaggtcttgtgga

SEQ ID NO: 1531144 - DNA, 15 bp, Homo sapiens
tgaggtcttgtggac

SEQ ID NO: 1531145 - DNA, 15 bp, Homo sapiens
gaggtcttgtggaca

SEQ ID NO: 1531146 - DNA, 15 bp, Homo sapiens
aggtcttgtggacaa

SEQ ID NO: 1531147 - DNA, 15 bp, Homo sapiens
ggtcttgtggacaaa

SEQ ID NO: 1531148 - DNA, 15 bp, Homo sapiens
gtcttgtggacaaag

SEQ ID NO: 1531149 - DNA, 15 bp, Homo sapiens
tcttgtggacaaagc

SEQ ID NO: 1531150 - DNA, 15 bp, Homo sapiens
cttgtggacaaagcc

SEQ ID NO: 1531151 - DNA, 15 bp, Homo sapiens
ttgtggacaaagccc

SEQ ID NO: 1531152 - DNA, 15 bp, Homo sapiens
tgtggacaaagccca

SEQ ID NO: 1531153 - DNA, 15 bp, Homo sapiens
gtggacaaagcccac

SEQ ID NO: 1531154 - DNA, 15 bp, Homo sapiens
tggacaaagcccact

SEQ ID NO: 1531155 - DNA, 15 bp, Homo sapiens
ggacaaagcccacta

SEQ ID NO: 1531156 - DNA, 15 bp, Homo sapiens
gacaaagcccactac

SEQ ID NO: 1531157 - DNA, 15 bp, Homo sapiens
acaaagcccactacc

SEQ ID NO: 1531158 - DNA, 15 bp, Homo sapiens
caaagcccactacct

SEQ ID NO: 1531159 - DNA, 15 bp, Homo sapiens
aaagcccactacctg

SEQ ID NO: 1531160 - DNA, 15 bp, Homo sapiens
aagcccactacctga

SEQ ID NO: 1531161 - DNA, 15 bp, Homo sapiens
agcccactacctgat

SEQ ID NO: 1531162 - DNA, 15 bp, Homo sapiens
gcccactacctgatt

SEQ ID NO: 1531163 - DNA, 15 bp, Homo sapiens
cccactacctgattt

SEQ ID NO: 1531164 - DNA, 15 bp, Homo sapiens
ccactacctgatttt

SEQ ID NO: 1531165 - DNA, 15 bp, Homo sapiens
cactacctgattttg

SEQ ID NO: 1531166 - DNA, 15 bp, Homo sapiens
actacctgattttga

SEQ ID NO: 1531167 - DNA, 15 bp, Homo sapiens
ctacctgattttgag

SEQ ID NO: 1531168 - DNA, 15 bp, Homo sapiens
tacctgattttgaga

SEQ ID NO: 1531169 - DNA, 15 bp, Homo sapiens
acctgattttgagac

SEQ ID NO: 1531170 - DNA, 15 bp, Homo sapiens
cctgattttgagaca

SEQ ID NO: 1531171 - DNA, 15 bp, Homo sapiens
ctgattttgagacaa

SEQ ID NO: 1531172 - DNA, 15 bp, Homo sapiens
tgattttgagacaac

SEQ ID NO: 1531173 - DNA, 15 bp, Homo sapiens
gattttgagacaaca

SEQ ID NO: 1531174 - DNA, 15 bp, Homo sapiens
attttgagacaacac

SEQ ID NO: 1531175 - DNA, 15 bp, Homo sapiens
ttttgagacaacact

SEQ ID NO: 1531176 - DNA, 15 bp, Homo sapiens
tttgagacaacactc

SEQ ID NO: 1531177 - DNA, 15 bp, Homo sapiens
ttgagacaacactca

SEQ ID NO: 1531178 - DNA, 15 bp, Homo sapiens
tgagacaacactcac

SEQ ID NO: 1531179 - DNA, 15 bp, Homo sapiens
gagacaacactcact

SEQ ID NO: 1531180 - DNA, 15 bp, Homo sapiens
agacaacactcacta

SEQ ID NO: 1531181 - DNA, 15 bp, Homo sapiens
gacaacactcactag

SEQ ID NO: 1531182 - DNA, 15 bp, Homo sapiens
acaacactcactaga

SEQ ID NO: 1531183 - DNA, 15 bp, Homo sapiens
caacactcactagac

SEQ ID NO: 1531184 - DNA, 15 bp, Homo sapiens
aacactcactagaca

SEQ ID NO: 1531185 - DNA, 15 bp, Homo sapiens
acactcactagacat

SEQ ID NO: 1531186 - DNA, 15 bp, Homo sapiens
cactcactagacatg

SEQ ID NO: 1531187 - DNA, 15 bp, Homo sapiens
actcactagacatgg

SEQ ID NO: 1531188 - DNA, 15 bp, Homo sapiens
ctcactagacatggt

SEQ ID NO: 1531189 - DNA, 15 bp, Homo sapiens
tcactagacatggtg

SEQ ID NO: 1531190 - DNA, 15 bp, Homo sapiens
cactagacatggtga

SEQ ID NO: 1531191 - DNA, 15 bp, Homo sapiens
actagacatggtgac

SEQ ID NO: 1531192 - DNA, 15 bp, Homo sapiens
ctagacatggtgaca

SEQ ID NO: 1531193 - DNA, 15 bp, Homo sapiens
tagacatggtgacaa

SEQ ID NO: 1531194 - DNA, 15 bp, Homo sapiens
agacatggtgacaag

SEQ ID NO: 1531195 - DNA, 15 bp, Homo sapiens
gacatggtgacaagt

SEQ ID NO: 1531196 - DNA, 15 bp, Homo sapiens
acatggtgacaagtc

SEQ ID NO: 1531197 - DNA, 15 bp, Homo sapiens
catggtgacaagtca

SEQ ID NO: 1531198 - DNA, 15 bp, Homo sapiens
atggtgacaagtcaa

SEQ ID NO: 1531199 - DNA, 15 bp, Homo sapiens
tggtgacaagtcaaa

SEQ ID NO: 1531200 - DNA, 15 bp, Homo sapiens
ggtgacaagtcaaag

SEQ ID NO: 1531201 - DNA, 15 bp, Homo sapiens
gtgacaagtcaaaga

SEQ ID NO: 1531202 - DNA, 15 bp, Homo sapiens
tgacaagtcaaagat

SEQ ID NO: 1531203 - DNA, 15 bp, Homo sapiens
gacaagtcaaagatg

SEQ ID NO: 1531204 - DNA, 15 bp, Homo sapiens
acaagtcaaagatgc

SEQ ID NO: 1531205 - DNA, 15 bp, Homo sapiens
caagtcaaagatgcc

SEQ ID NO: 1531206 - DNA, 15 bp, Homo sapiens
aagtcaaagatgcct

SEQ ID NO: 1531207 - DNA, 15 bp, Homo sapiens
agtcaaagatgcctt

SEQ ID NO: 1531208 - DNA, 15 bp, Homo sapiens
gtcaaagatgccttg

SEQ ID NO: 1531209 - DNA, 15 bp, Homo sapiens
tcaaagatgccttgc

SEQ ID NO: 1531210 - DNA, 15 bp, Homo sapiens
caaagatgccttgcc

SEQ ID NO: 1531211 - DNA, 15 bp, Homo sapiens
aaagatgccttgcct

SEQ ID NO: 1531212 - DNA, 15 bp, Homo sapiens
aagatgccttgcctc

SEQ ID NO: 1531213 - DNA, 15 bp, Homo sapiens
agatgccttgcctcc

SEQ ID NO: 1531214 - DNA, 15 bp, Homo sapiens
gatgccttgcctcct

SEQ ID NO: 1531215 - DNA, 15 bp, Homo sapiens
atgccttgcctccta

SEQ ID NO: 1531216 - DNA, 15 bp, Homo sapiens
tgccttgcctcctac

SEQ ID NO: 1531217 - DNA, 15 bp, Homo sapiens
gccttgcctcctacc

SEQ ID NO: 1531218 - DNA, 15 bp, Homo sapiens
ccttgcctcctacca

SEQ ID NO: 1531219 - DNA, 15 bp, Homo sapiens
cttgcctcctaccag

SEQ ID NO: 1531220 - DNA, 15 bp, Homo sapiens
ttgcctcctaccagg

SEQ ID NO: 1531221 - DNA, 15 bp, Homo sapiens
tgcctcctaccagga

SEQ ID NO: 1531222 - DNA, 15 bp, Homo sapiens
gcctcctaccaggaa

SEQ ID NO: 1531223 - DNA, 15 bp, Homo sapiens
cctcctaccaggaat

SEQ ID NO: 1531224 - DNA, 15 bp, Homo sapiens
ctcctaccaggaatc

SEQ ID NO: 1531225 - DNA, 15 bp, Homo sapiens
tcctaccaggaatca

SEQ ID NO: 1531226 - DNA, 15 bp, Homo sapiens
cctaccaggaatcac

SEQ ID NO: 1531227 - DNA, 15 bp, Homo sapiens
ctaccaggaatcact

SEQ ID NO: 1531228 - DNA, 15 bp, Homo sapiens
taccaggaatcactt

SEQ ID NO: 1531229 - DNA, 15 bp, Homo sapiens
accaggaatcacttc

SEQ ID NO: 1531230 - DNA, 15 bp, Homo sapiens
ccaggaatcacttcg

SEQ ID NO: 1531231 - DNA, 15 bp, Homo sapiens
caggaatcacttcgc

SEQ ID NO: 1531232 - DNA, 15 bp, Homo sapiens
aggaatcacttcgca

SEQ ID NO: 1531233 - DNA, 15 bp, Homo sapiens
ggaatcacttcgcag

SEQ ID NO: 1531234 - DNA, 15 bp, Homo sapiens
gaatcacttcgcagg

SEQ ID NO: 1531235 - DNA, 15 bp, Homo sapiens
aatcacttcgcaggg

SEQ ID NO: 1531236 - DNA, 15 bp, Homo sapiens
atcacttcgcaggga

SEQ ID NO: 1531237 - DNA, 15 bp, Homo sapiens
tcacttcgcagggag

SEQ ID NO: 1531238 - DNA, 15 bp, Homo sapiens
cacttcgcagggagc

SEQ ID NO: 1531239 - DNA, 15 bp, Homo sapiens
acttcgcagggagcc

SEQ ID NO: 1531240 - DNA, 15 bp, Homo sapiens
cttcgcagggagccc

SEQ ID NO: 1531241 - DNA, 15 bp, Homo sapiens
ttcgcagggagcccg

SEQ ID NO: 1531242 - DNA, 15 bp, Homo sapiens
tcgcagggagcccga

SEQ ID NO: 1531243 - DNA, 15 bp, Homo sapiens
cgcagggagcccgag

SEQ ID NO: 1531244 - DNA, 15 bp, Homo sapiens
gcagggagcccgagg

SEQ ID NO: 1531245 - DNA, 15 bp, Homo sapiens
cagggagcccgaggg

SEQ ID NO: 1531246 - DNA, 15 bp, Homo sapiens
agggagcccgagggc

SEQ ID NO: 1531247 - DNA, 15 bp, Homo sapiens
gggagcccgagggct

SEQ ID NO: 1531248 - DNA, 15 bp, Homo sapiens
ggagcccgagggctg

SEQ ID NO: 1531249 - DNA, 15 bp, Homo sapiens
gagcccgagggctgc

SEQ ID NO: 1531250 - DNA, 15 bp, Homo sapiens
agcccgagggctgct

SEQ ID NO: 1531251 - DNA, 15 bp, Homo sapiens
gcccgagggctgctg

SEQ ID NO: 1531252 - DNA, 15 bp, Homo sapiens
cccgagggctgctgt

SEQ ID NO: 1531253 - DNA, 15 bp, Homo sapiens
ccgagggctgctgtg

SEQ ID NO: 1531254 - DNA, 15 bp, Homo sapiens
cgagggctgctgtgg

SEQ ID NO: 1531255 - DNA, 15 bp, Homo sapiens
gagggctgctgtggc

SEQ ID NO: 1531256 - DNA, 15 bp, Homo sapiens
agggctgctgtggcc

SEQ ID NO: 1531257 - DNA, 15 bp, Homo sapiens
gggctgctgtggcct

SEQ ID NO: 1531258 - DNA, 15 bp, Homo sapiens
ggctgctgtggcctg

SEQ ID NO: 1531259 - DNA, 15 bp, Homo sapiens
gctgctgtggcctgc

SEQ ID NO: 1531260 - DNA, 15 bp, Homo sapiens
ctgctgtggcctgct

SEQ ID NO: 1531261 - DNA, 15 bp, Homo sapiens
tgctgtggcctgctg

SEQ ID NO: 1531262 - DNA, 15 bp, Homo sapiens
gctgtggcctgctga

SEQ ID NO: 1531263 - DNA, 15 bp, Homo sapiens
ctgtggcctgctgag

SEQ ID NO: 1531264 - DNA, 15 bp, Homo sapiens
tgtggcctgctgagg

SEQ ID NO: 1531265 - DNA, 15 bp, Homo sapiens
gtggcctgctgagga

SEQ ID NO: 1531266 - DNA, 15 bp, Homo sapiens
tggcctgctgaggag

SEQ ID NO: 1531267 - DNA, 15 bp, Homo sapiens
ggcctgctgaggagt

SEQ ID NO: 1531268 - DNA, 15 bp, Homo sapiens
gcctgctgaggagtg

SEQ ID NO: 1531269 - DNA, 15 bp, Homo sapiens
cctgctgaggagtgc

SEQ ID NO: 1531270 - DNA, 15 bp, Homo sapiens
ctgctgaggagtgca

SEQ ID NO: 1531271 - DNA, 15 bp, Homo sapiens
tgctgaggagtgcag

SEQ ID NO: 1531272 - DNA, 15 bp, Homo sapiens
gctgaggagtgcagg

SEQ ID NO: 1531273 - DNA, 15 bp, Homo sapiens
ctgaggagtgcaggg

SEQ ID NO: 1531274 - DNA, 15 bp, Homo sapiens
tgaggagtgcagggc

SEQ ID NO: 1531275 - DNA, 15 bp, Homo sapiens
gaggagtgcagggca

SEQ ID NO: 1531276 - DNA, 15 bp, Homo sapiens
aggagtgcagggcag

SEQ ID NO: 1531277 - DNA, 15 bp, Homo sapiens
ggagtgcagggcagt

SEQ ID NO: 1531278 - DNA, 15 bp, Homo sapiens
gagtgcagggcagtt

SEQ ID NO: 1531279 - DNA, 15 bp, Homo sapiens
agtgcagggcagtta

SEQ ID NO: 1531280 - DNA, 15 bp, Homo sapiens
gtgcagggcagttac

SEQ ID NO: 1531281 - DNA, 15 bp, Homo sapiens
tgcagggcagttact

SEQ ID NO: 1531282 - DNA, 15 bp, Homo sapiens
gcagggcagttactt

SEQ ID NO: 1531283 - DNA, 15 bp, Homo sapiens
cagggcagttacttt

SEQ ID NO: 1531284 - DNA, 15 bp, Homo sapiens
agggcagttactttt

SEQ ID NO: 1531285 - DNA, 15 bp, Homo sapiens
gggcagttacttttt

SEQ ID NO: 1531286 - DNA, 15 bp, Homo sapiens
ggcagttactttttc

SEQ ID NO: 1531287 - DNA, 15 bp, Homo sapiens
gcagttactttttcc

SEQ ID NO: 1531288 - DNA, 15 bp, Homo sapiens
cagttactttttcca

SEQ ID NO: 1531289 - DNA, 15 bp, Homo sapiens
agttactttttccaa

SEQ ID NO: 1531290 - DNA, 15 bp, Homo sapiens
gttactttttccaaa

SEQ ID NO: 1531291 - DNA, 15 bp, Homo sapiens
ttactttttccaaaa

SEQ ID NO: 1531292 - DNA, 15 bp, Homo sapiens
tactttttccaaaaa

SEQ ID NO: 1531293 - DNA, 15 bp, Homo sapiens
actttttccaaaaac

SEQ ID NO: 1531294 - DNA, 15 bp, Homo sapiens
ctttttccaaaaaca

SEQ ID NO: 1531295 - DNA, 15 bp, Homo sapiens
tttttccaaaaacaa

SEQ ID NO: 1531296 - DNA, 15 bp, Homo sapiens
ttttccaaaaacaaa

SEQ ID NO: 1531297 - DNA, 15 bp, Homo sapiens
tttccaaaaacaaag

SEQ ID NO: 1531298 - DNA, 15 bp, Homo sapiens
ttccaaaaacaaaga

SEQ ID NO: 1531299 - DNA, 15 bp, Homo sapiens
tccaaaaacaaagag

SEQ ID NO: 1531300 - DNA, 15 bp, Homo sapiens
ccaaaaacaaagaga

SEQ ID NO: 1531301 - DNA, 15 bp, Homo sapiens
caaaaacaaagagaa

SEQ ID NO: 1531302 - DNA, 15 bp, Homo sapiens
aaaaacaaagagaaa

SEQ ID NO: 1531303 - DNA, 15 bp, Homo sapiens
aaaacaaagagaaat

SEQ ID NO: 1531304 - DNA, 15 bp, Homo sapiens
aaacaaagagaaatc

SEQ ID NO: 1531305 - DNA, 15 bp, Homo sapiens
aacaaagagaaatcc

SEQ ID NO: 1531306 - DNA, 15 bp, Homo sapiens
acaaagagaaatcca

SEQ ID NO: 1531307 - DNA, 15 bp, Homo sapiens
caaagagaaatccag

SEQ ID NO: 1531308 - DNA, 15 bp, Homo sapiens
aaagagaaatccagg

SEQ ID NO: 1531309 - DNA, 15 bp, Homo sapiens
aagagaaatccaggc

SEQ ID NO: 1531310 - DNA, 15 bp, Homo sapiens
agagaaatccaggca

SEQ ID NO: 1531311 - DNA, 15 bp, Homo sapiens
gagaaatccaggcat

SEQ ID NO: 1531312 - DNA, 15 bp, Homo sapiens
agaaatccaggcatg

SEQ ID NO: 1531313 - DNA, 15 bp, Homo sapiens
gaaatccaggcatgc

SEQ ID NO: 1531314 - DNA, 15 bp, Homo sapiens
aaatccaggcatgct

SEQ ID NO: 1531315 - DNA, 15 bp, Homo sapiens
aatccaggcatgctc

SEQ ID NO: 1531316 - DNA, 15 bp, Homo sapiens
atccaggcatgctct

SEQ ID NO: 1531317 - DNA, 15 bp, Homo sapiens
tccaggcatgctctg

SEQ ID NO: 1531318 - DNA, 15 bp, Homo sapiens
ccaggcatgctctga

SEQ ID NO: 1531319 - DNA, 15 bp, Homo sapiens
caggcatgctctgag

SEQ ID NO: 1531320 - DNA, 15 bp, Homo sapiens
aggcatgctctgagc

SEQ ID NO: 1531321 - DNA, 15 bp, Homo sapiens
ggcatgctctgagcc

SEQ ID NO: 1531322 - DNA, 15 bp, Homo sapiens
gcatgctctgagcca

SEQ ID NO: 1531323 - DNA, 15 bp, Homo sapiens
catgctctgagccag

SEQ ID NO: 1531324 - DNA, 15 bp, Homo sapiens
atgctctgagccagc

SEQ ID NO: 1531325 - DNA, 15 bp, Homo sapiens
tgctctgagccagcc

SEQ ID NO: 1531326 - DNA, 15 bp, Homo sapiens
gctctgagccagccc

SEQ ID NO: 1531327 - DNA, 15 bp, Homo sapiens
ctctgagccagccct

SEQ ID NO: 1531328 - DNA, 15 bp, Homo sapiens
tctgagccagccctg

SEQ ID NO: 1531329 - DNA, 15 bp, Homo sapiens
ctgagccagccctga

SEQ ID NO: 1531330 - DNA, 15 bp, Homo sapiens
tgagccagccctgag

SEQ ID NO: 1531331 - DNA, 15 bp, Homo sapiens
gagccagccctgagc

SEQ ID NO: 1531332 - DNA, 15 bp, Homo sapiens
agccagccctgagcc

SEQ ID NO: 1531333 - DNA, 15 bp, Homo sapiens
gccagccctgagccc

SEQ ID NO: 1531334 - DNA, 15 bp, Homo sapiens
ccagccctgagccca

SEQ ID NO: 1531335 - DNA, 15 bp, Homo sapiens
cagccctgagcccag

SEQ ID NO: 1531336 - DNA, 15 bp, Homo sapiens
agccctgagcccagc

SEQ ID NO: 1531337 - DNA, 15 bp, Homo sapiens
gccctgagcccagca

SEQ ID NO: 1531338 - DNA, 15 bp, Homo sapiens
ccctgagcccagcag

SEQ ID NO: 1531339 - DNA, 15 bp, Homo sapiens
cctgagcccagcagt

SEQ ID NO: 1531340 - DNA, 15 bp, Homo sapiens
ctgagcccagcagtg

SEQ ID NO: 1531341 - DNA, 15 bp, Homo sapiens
tgagcccagcagtga

SEQ ID NO: 1531342 - DNA, 15 bp, Homo sapiens
gagcccagcagtgag

SEQ ID NO: 1531343 - DNA, 15 bp, Homo sapiens
agcccagcagtgagc

SEQ ID NO: 1531344 - DNA, 15 bp, Homo sapiens
gcccagcagtgagca

SEQ ID NO: 1531345 - DNA, 15 bp, Homo sapiens
cccagcagtgagcaa

SEQ ID NO: 1531346 - DNA, 15 bp, Homo sapiens
ccagcagtgagcaag

SEQ ID NO: 1531347 - DNA, 15 bp, Homo sapiens
cagcagtgagcaagg

SEQ ID NO: 1531348 - DNA, 15 bp, Homo sapiens
agcagtgagcaagga

SEQ ID NO: 1531349 - DNA, 15 bp, Homo sapiens
gcagtgagcaaggag

SEQ ID NO: 1531350 - DNA, 15 bp, Homo sapiens
cagtgagcaaggaga

SEQ ID NO: 1531351 - DNA, 15 bp, Homo sapiens
agtgagcaaggagag

SEQ ID NO: 1531352 - DNA, 15 bp, Homo sapiens
gtgagcaaggagaga

SEQ ID NO: 1531353 - DNA, 15 bp, Homo sapiens
tgagcaaggagagag

SEQ ID NO: 1531354 - DNA, 15 bp, Homo sapiens
gagcaaggagagagc

SEQ ID NO: 1531355 - DNA, 15 bp, Homo sapiens
agcaaggagagagct

SEQ ID NO: 1531356 - DNA, 15 bp, Homo sapiens
gcaaggagagagctg

SEQ ID NO: 1531357 - DNA, 15 bp, Homo sapiens
caaggagagagctgg

SEQ ID NO: 1531358 - DNA, 15 bp, Homo sapiens
aaggagagagctgga

SEQ ID NO: 1531359 - DNA, 15 bp, Homo sapiens
aggagagagctggag

SEQ ID NO: 1531360 - DNA, 15 bp, Homo sapiens
ggagagagctggaga

SEQ ID NO: 1531361 - DNA, 15 bp, Homo sapiens
gagagagctggagac

SEQ ID NO: 1531362 - DNA, 15 bp, Homo sapiens
agagagctggagaca

SEQ ID NO: 1531363 - DNA, 15 bp, Homo sapiens
gagagctggagacag

SEQ ID NO: 1531364 - DNA, 15 bp, Homo sapiens
agagctggagacagg

SEQ ID NO: 1531365 - DNA, 15 bp, Homo sapiens
gagctggagacaggg

SEQ ID NO: 1531366 - DNA, 15 bp, Homo sapiens
agctggagacagggg

SEQ ID NO: 1531367 - DNA, 15 bp, Homo sapiens
gctggagacagggga

SEQ ID NO: 1531368 - DNA, 15 bp, Homo sapiens
ctggagacaggggac

SEQ ID NO: 1531369 - DNA, 15 bp, Homo sapiens
tggagacaggggact

SEQ ID NO: 1531370 - DNA, 15 bp, Homo sapiens
ggagacaggggactt

SEQ ID NO: 1531371 - DNA, 15 bp, Homo sapiens
gagacaggggacttt

SEQ ID NO: 1531372 - DNA, 15 bp, Homo sapiens
agacaggggactttg

SEQ ID NO: 1531373 - DNA, 15 bp, Homo sapiens
gacaggggactttgc

SEQ ID NO: 1531374 - DNA, 15 bp, Homo sapiens
acaggggactttgct

SEQ ID NO: 1531375 - DNA, 15 bp, Homo sapiens
caggggactttgctg

SEQ ID NO: 1531376 - DNA, 15 bp, Homo sapiens
aggggactttgctgt

SEQ ID NO: 1531377 - DNA, 15 bp, Homo sapiens
ggggactttgctgtg

SEQ ID NO: 1531378 - DNA, 15 bp, Homo sapiens
gggactttgctgtga

SEQ ID NO: 1531379 - DNA, 15 bp, Homo sapiens
ggactttgctgtgaa

SEQ ID NO: 1531380 - DNA, 15 bp, Homo sapiens
gactttgctgtgaaa

SEQ ID NO: 1531381 - DNA, 15 bp, Homo sapiens
actttgctgtgaaac

SEQ ID NO: 1531382 - DNA, 15 bp, Homo sapiens
ctttgctgtgaaaca

SEQ ID NO: 1531383 - DNA, 15 bp, Homo sapiens
tttgctgtgaaacac

SEQ ID NO: 1531384 - DNA, 15 bp, Homo sapiens
ttgctgtgaaacact

SEQ ID NO: 1531385 - DNA, 15 bp, Homo sapiens
tgctgtgaaacactg

SEQ ID NO: 1531386 - DNA, 15 bp, Homo sapiens
gctgtgaaacactgg

SEQ ID NO: 1531387 - DNA, 15 bp, Homo sapiens
ctgtgaaacactggg

SEQ ID NO: 1531388 - DNA, 15 bp, Homo sapiens
tgtgaaacactgggg

SEQ ID NO: 1531389 - DNA, 15 bp, Homo sapiens
gtgaaacactggggg

SEQ ID NO: 1531390 - DNA, 15 bp, Homo sapiens
tgaaacactgggggg

SEQ ID NO: 1531391 - DNA, 15 bp, Homo sapiens
gaaacactgggggga

SEQ ID NO: 1531392 - DNA, 15 bp, Homo sapiens
aaacactggggggaa

SEQ ID NO: 1531393 - DNA, 15 bp, Homo sapiens
aacactggggggaat

SEQ ID NO: 1531394 - DNA, 15 bp, Homo sapiens
acactggggggaatg

SEQ ID NO: 1531395 - DNA, 15 bp, Homo sapiens
cactggggggaatgt

SEQ ID NO: 1531396 - DNA, 15 bp, Homo sapiens
actggggggaatgtg

SEQ ID NO: 1531397 - DNA, 15 bp, Homo sapiens
ctggggggaatgtgc

SEQ ID NO: 1531398 - DNA, 15 bp, Homo sapiens
tggggggaatgtgcc

SEQ ID NO: 1531399 - DNA, 15 bp, Homo sapiens
ggggggaatgtgcct

SEQ ID NO: 1531400 - DNA, 15 bp, Homo sapiens
gggggaatgtgcctg

SEQ ID NO: 1531401 - DNA, 15 bp, Homo sapiens
ggggaatgtgcctgc

SEQ ID NO: 1531402 - DNA, 15 bp, Homo sapiens
gggaatgtgcctgca

SEQ ID NO: 1531403 - DNA, 15 bp, Homo sapiens
ggaatgtgcctgcat

SEQ ID NO: 1531404 - DNA, 15 bp, Homo sapiens
gaatgtgcctgcatc

SEQ ID NO: 1531405 - DNA, 15 bp, Homo sapiens
aatgtgcctgcatca

SEQ ID NO: 1531406 - DNA, 15 bp, Homo sapiens
atgtgcctgcatcac

SEQ ID NO: 1531407 - DNA, 15 bp, Homo sapiens
tgtgcctgcatcacc

SEQ ID NO: 1531408 - DNA, 15 bp, Homo sapiens
gtgcctgcatcaccc

SEQ ID NO: 1531409 - DNA, 15 bp, Homo sapiens
tgcctgcatcacccc

SEQ ID NO: 1531410 - DNA, 15 bp, Homo sapiens
gcctgcatcacccca

SEQ ID NO: 1531411 - DNA, 15 bp, Homo sapiens
cctgcatcaccccag

SEQ ID NO: 1531412 - DNA, 15 bp, Homo sapiens
ctgcatcaccccagc

SEQ ID NO: 1531413 - DNA, 15 bp, Homo sapiens
tgcatcaccccagct

SEQ ID NO: 1531414 - DNA, 15 bp, Homo sapiens
gcatcaccccagctg

SEQ ID NO: 1531415 - DNA, 15 bp, Homo sapiens
catcaccccagctgg

SEQ ID NO: 1531416 - DNA, 15 bp, Homo sapiens
atcaccccagctggg

SEQ ID NO: 1531417 - DNA, 15 bp, Homo sapiens
tcaccccagctgggg

SEQ ID NO: 1531418 - DNA, 15 bp, Homo sapiens
caccccagctggggg

SEQ ID NO: 1531419 - DNA, 15 bp, Homo sapiens
accccagctgggggc

SEQ ID NO: 1531420 - DNA, 15 bp, Homo sapiens
ccccagctgggggcc

SEQ ID NO: 1531421 - DNA, 15 bp, Homo sapiens
cccagctgggggccc

SEQ ID NO: 1531422 - DNA, 15 bp, Homo sapiens
ccagctgggggccca

SEQ ID NO: 1531423 - DNA, 15 bp, Homo sapiens
cagctgggggcccag

SEQ ID NO: 1531424 - DNA, 15 bp, Homo sapiens
agctgggggcccagg

SEQ ID NO: 1531425 - DNA, 15 bp, Homo sapiens
gctgggggcccaggc

SEQ ID NO: 1531426 - DNA, 15 bp, Homo sapiens
ctgggggcccaggca

SEQ ID NO: 1531427 - DNA, 15 bp, Homo sapiens
tgggggcccaggcag

SEQ ID NO: 1531428 - DNA, 15 bp, Homo sapiens
gggggcccaggcaga

SEQ ID NO: 1531429 - DNA, 15 bp, Homo sapiens
ggggcccaggcagag

SEQ ID NO: 1531430 - DNA, 15 bp, Homo sapiens
gggcccaggcagagt

SEQ ID NO: 1531431 - DNA, 15 bp, Homo sapiens
ggcccaggcagagtg

SEQ ID NO: 1531432 - DNA, 15 bp, Homo sapiens
gcccaggcagagtgg

SEQ ID NO: 1531433 - DNA, 15 bp, Homo sapiens
cccaggcagagtggg

SEQ ID NO: 1531434 - DNA, 15 bp, Homo sapiens
ccaggcagagtgggg

SEQ ID NO: 1531435 - DNA, 15 bp, Homo sapiens
caggcagagtggggg

SEQ ID NO: 1531436 - DNA, 15 bp, Homo sapiens
aggcagagtggggga

SEQ ID NO: 1531437 - DNA, 15 bp, Homo sapiens
ggcagagtgggggag

SEQ ID NO: 1531438 - DNA, 15 bp, Homo sapiens
gcagagtgggggaga

SEQ ID NO: 1531439 - DNA, 15 bp, Homo sapiens
cagagtgggggagaa

SEQ ID NO: 1531440 - DNA, 15 bp, Homo sapiens
agagtgggggagaag

SEQ ID NO: 1531441 - DNA, 15 bp, Homo sapiens
gagtgggggagaagg

SEQ ID NO: 1531442 - DNA, 15 bp, Homo sapiens
agtgggggagaaggg

SEQ ID NO: 1531443 - DNA, 15 bp, Homo sapiens
gtgggggagaagggg

SEQ ID NO: 1531444 - DNA, 15 bp, Homo sapiens
tgggggagaaggggt

SEQ ID NO: 1531445 - DNA, 15 bp, Homo sapiens
gggggagaaggggta

SEQ ID NO: 1531446 - DNA, 15 bp, Homo sapiens
ggggagaaggggtaa

SEQ ID NO: 1531447 - DNA, 15 bp, Homo sapiens
gggagaaggggtaag

SEQ ID NO: 1531448 - DNA, 15 bp, Homo sapiens
ggagaaggggtaagt

SEQ ID NO: 1531449 - DNA, 15 bp, Homo sapiens
gagaaggggtaagtg

SEQ ID NO: 1531450 - DNA, 15 bp, Homo sapiens
agaaggggtaagtgg

SEQ ID NO: 1531451 - DNA, 15 bp, Homo sapiens
gaaggggtaagtggg

SEQ ID NO: 1531452 - DNA, 15 bp, Homo sapiens
aaggggtaagtgggc

SEQ ID NO: 1531453 - DNA, 15 bp, Homo sapiens
aggggtaagtgggca

SEQ ID NO: 1531454 - DNA, 15 bp, Homo sapiens
ggggtaagtgggcag

SEQ ID NO: 1531455 - DNA, 15 bp, Homo sapiens
gggtaagtgggcaga

SEQ ID NO: 1531456 - DNA, 15 bp, Homo sapiens
ggtaagtgggcagag

SEQ ID NO: 1531457 - DNA, 15 bp, Homo sapiens
gtaagtgggcagagc

SEQ ID NO: 1531458 - DNA, 15 bp, Homo sapiens
taagtgggcagagcc

SEQ ID NO: 1531459 - DNA, 15 bp, Homo sapiens
aagtgggcagagcca

SEQ ID NO: 1531460 - DNA, 15 bp, Homo sapiens
agtgggcagagccag

SEQ ID NO: 1531461 - DNA, 15 bp, Homo sapiens
gtgggcagagccagt

SEQ ID NO: 1531462 - DNA, 15 bp, Homo sapiens
tgggcagagccagtc

SEQ ID NO: 1531463 - DNA, 15 bp, Homo sapiens
gggcagagccagtca

SEQ ID NO: 1531464 - DNA, 15 bp, Homo sapiens
ggcagagccagtcac

SEQ ID NO: 1531465 - DNA, 15 bp, Homo sapiens
gcagagccagtcact

SEQ ID NO: 1531466 - DNA, 15 bp, Homo sapiens
cagagccagtcactt

SEQ ID NO: 1531467 - DNA, 15 bp, Homo sapiens
agagccagtcacttt

SEQ ID NO: 1531468 - DNA, 15 bp, Homo sapiens
gagccagtcactttg

SEQ ID NO: 1531469 - DNA, 15 bp, Homo sapiens
agccagtcactttgg

SEQ ID NO: 1531470 - DNA, 15 bp, Homo sapiens
gccagtcactttggg

SEQ ID NO: 1531471 - DNA, 15 bp, Homo sapiens
ccagtcactttgggc

SEQ ID NO: 1531472 - DNA, 15 bp, Homo sapiens
cagtcactttgggca

SEQ ID NO: 1531473 - DNA, 15 bp, Homo sapiens
agtcactttgggcat

SEQ ID NO: 1531474 - DNA, 15 bp, Homo sapiens
gtcactttgggcatg

SEQ ID NO: 1531475 - DNA, 15 bp, Homo sapiens
tcactttgggcatgc

SEQ ID NO: 1531476 - DNA, 15 bp, Homo sapiens
cactttgggcatgct

SEQ ID NO: 1531477 - DNA, 15 bp, Homo sapiens
actttgggcatgctt

SEQ ID NO: 1531478 - DNA, 15 bp, Homo sapiens
ctttgggcatgcttc

SEQ ID NO: 1531479 - DNA, 15 bp, Homo sapiens
tttgggcatgcttcc

SEQ ID NO: 1531480 - DNA, 15 bp, Homo sapiens
ttgggcatgcttccc

SEQ ID NO: 1531481 - DNA, 15 bp, Homo sapiens
tgggcatgcttccct

SEQ ID NO: 1531482 - DNA, 15 bp, Homo sapiens
gggcatgcttccctc

SEQ ID NO: 1531483 - DNA, 15 bp, Homo sapiens
ggcatgcttccctct

SEQ ID NO: 1531484 - DNA, 15 bp, Homo sapiens
gcatgcttccctctc

SEQ ID NO: 1531485 - DNA, 15 bp, Homo sapiens
catgcttccctctcg

SEQ ID NO: 1531486 - DNA, 15 bp, Homo sapiens
atgcttccctctcgc

SEQ ID NO: 1531487 - DNA, 15 bp, Homo sapiens
tgcttccctctcgcc

SEQ ID NO: 1531488 - DNA, 15 bp, Homo sapiens
gcttccctctcgcct

SEQ ID NO: 1531489 - DNA, 15 bp, Homo sapiens
cttccctctcgcctc

SEQ ID NO: 1531490 - DNA, 15 bp, Homo sapiens
ttccctctcgcctct

SEQ ID NO: 1531491 - DNA, 15 bp, Homo sapiens
tccctctcgcctctg

SEQ ID NO: 1531492 - DNA, 15 bp, Homo sapiens
ccctctcgcctctgt

SEQ ID NO: 1531493 - DNA, 15 bp, Homo sapiens
cctctcgcctctgtg

SEQ ID NO: 1531494 - DNA, 15 bp, Homo sapiens
ctctcgcctctgtgt

SEQ ID NO: 1531495 - DNA, 15 bp, Homo sapiens
tctcgcctctgtgtg

SEQ ID NO: 1531496 - DNA, 15 bp, Homo sapiens
ctcgcctctgtgtga

SEQ ID NO: 1531497 - DNA, 15 bp, Homo sapiens
tcgcctctgtgtgaa

SEQ ID NO: 1531498 - DNA, 15 bp, Homo sapiens
cgcctctgtgtgaaa

SEQ ID NO: 1531499 - DNA, 15 bp, Homo sapiens
gcctctgtgtgaaat

SEQ ID NO: 1531500 - DNA, 15 bp, Homo sapiens
cctctgtgtgaaatg

SEQ ID NO: 1531501 - DNA, 15 bp, Homo sapiens
ctctgtgtgaaatga

SEQ ID NO: 1531502 - DNA, 15 bp, Homo sapiens
tctgtgtgaaatgac

SEQ ID NO: 1531503 - DNA, 15 bp, Homo sapiens
ctgtgtgaaatgacc

SEQ ID NO: 1531504 - DNA, 15 bp, Homo sapiens
tgtgtgaaatgacca

SEQ ID NO: 1531505 - DNA, 15 bp, Homo sapiens
gtgtgaaatgaccag

SEQ ID NO: 1531506 - DNA, 15 bp, Homo sapiens
tgtgaaatgaccagg

SEQ ID NO: 1531507 - DNA, 15 bp, Homo sapiens
gtgaaatgaccaggt

SEQ ID NO: 1531508 - DNA, 15 bp, Homo sapiens
tgaaatgaccaggtc

SEQ ID NO: 1531509 - DNA, 15 bp, Homo sapiens
gaaatgaccaggtca

SEQ ID NO: 1531510 - DNA, 15 bp, Homo sapiens
aaatgaccaggtcag

SEQ ID NO: 1531511 - DNA, 15 bp, Homo sapiens
aatgaccaggtcagc

SEQ ID NO: 1531512 - DNA, 15 bp, Homo sapiens
atgaccaggtcagca

SEQ ID NO: 1531513 - DNA, 15 bp, Homo sapiens
tgaccaggtcagcat

SEQ ID NO: 1531514 - DNA, 15 bp, Homo sapiens
gaccaggtcagcata

SEQ ID NO: 1531515 - DNA, 15 bp, Homo sapiens
accaggtcagcataa

SEQ ID NO: 1531516 - DNA, 15 bp, Homo sapiens
ccaggtcagcataaa

SEQ ID NO: 1531517 - DNA, 15 bp, Homo sapiens
caggtcagcataaac

SEQ ID NO: 1531518 - DNA, 15 bp, Homo sapiens
aggtcagcataaacc

SEQ ID NO: 1531519 - DNA, 15 bp, Homo sapiens
ggtcagcataaaccc

SEQ ID NO: 1531520 - DNA, 15 bp, Homo sapiens
gtcagcataaacccc

SEQ ID NO: 1531521 - DNA, 15 bp, Homo sapiens
tcagcataaaccccg

SEQ ID NO: 1531522 - DNA, 15 bp, Homo sapiens
cagcataaaccccgg

SEQ ID NO: 1531523 - DNA, 15 bp, Homo sapiens
agcataaaccccggg

SEQ ID NO: 1531524 - DNA, 15 bp, Homo sapiens
gcataaaccccgggc

SEQ ID NO: 1531525 - DNA, 15 bp, Homo sapiens
cataaaccccgggct

SEQ ID NO: 1531526 - DNA, 15 bp, Homo sapiens
ataaaccccgggctg

SEQ ID NO: 1531527 - DNA, 15 bp, Homo sapiens
taaaccccgggctgg

SEQ ID NO: 1531528 - DNA, 15 bp, Homo sapiens
aaaccccgggctggc

SEQ ID NO: 1531529 - DNA, 15 bp, Homo sapiens
aaccccgggctggct

SEQ ID NO: 1531530 - DNA, 15 bp, Homo sapiens
accccgggctggctg

SEQ ID NO: 1531531 - DNA, 15 bp, Homo sapiens
ccccgggctggctgt

SEQ ID NO: 1531532 - DNA, 15 bp, Homo sapiens
cccgggctggctgtg

SEQ ID NO: 1531533 - DNA, 15 bp, Homo sapiens
ccgggctggctgtgc

SEQ ID NO: 1531534 - DNA, 15 bp, Homo sapiens
cgggctggctgtgct

SEQ ID NO: 1531535 - DNA, 15 bp, Homo sapiens
gggctggctgtgctt

SEQ ID NO: 1531536 - DNA, 15 bp, Homo sapiens
ggctggctgtgcttc

SEQ ID NO: 1531537 - DNA, 15 bp, Homo sapiens
gctggctgtgcttct

SEQ ID NO: 1531538 - DNA, 15 bp, Homo sapiens
ctggctgtgcttctg

SEQ ID NO: 1531539 - DNA, 15 bp, Homo sapiens
tggctgtgcttctgg

SEQ ID NO: 1531540 - DNA, 15 bp, Homo sapiens
ggctgtgcttctggc

SEQ ID NO: 1531541 - DNA, 15 bp, Homo sapiens
gctgtgcttctggca

SEQ ID NO: 1531542 - DNA, 15 bp, Homo sapiens
ctgtgcttctggcag

SEQ ID NO: 1531543 - DNA, 15 bp, Homo sapiens
tgtgcttctggcaga

SEQ ID NO: 1531544 - DNA, 15 bp, Homo sapiens
gtgcttctggcagag

SEQ ID NO: 1531545 - DNA, 15 bp, Homo sapiens
tgcttctggcagagc

SEQ ID NO: 1531546 - DNA, 15 bp, Homo sapiens
gcttctggcagagct

SEQ ID NO: 1531547 - DNA, 15 bp, Homo sapiens
cttctggcagagcta

SEQ ID NO: 1531548 - DNA, 15 bp, Homo sapiens
ttctggcagagctaa

SEQ ID NO: 1531549 - DNA, 15 bp, Homo sapiens
tctggcagagctaat

SEQ ID NO: 1531550 - DNA, 15 bp, Homo sapiens
ctggcagagctaatg

SEQ ID NO: 1531551 - DNA, 15 bp, Homo sapiens
tggcagagctaatga

SEQ ID NO: 1531552 - DNA, 15 bp, Homo sapiens
ggcagagctaatgat

SEQ ID NO: 1531553 - DNA, 15 bp, Homo sapiens
gcagagctaatgatg

SEQ ID NO: 1531554 - DNA, 15 bp, Homo sapiens
cagagctaatgatgt

SEQ ID NO: 1531555 - DNA, 15 bp, Homo sapiens
agagctaatgatgtt

SEQ ID NO: 1531556 - DNA, 15 bp, Homo sapiens
gagctaatgatgtta

SEQ ID NO: 1531557 - DNA, 15 bp, Homo sapiens
agctaatgatgttag

SEQ ID NO: 1531558 - DNA, 15 bp, Homo sapiens
gctaatgatgttagg

SEQ ID NO: 1531559 - DNA, 15 bp, Homo sapiens
ctaatgatgttagga

SEQ ID NO: 1531560 - DNA, 15 bp, Homo sapiens
taatgatgttaggag

SEQ ID NO: 1531561 - DNA, 15 bp, Homo sapiens
aatgatgttaggagg

SEQ ID NO: 1531562 - DNA, 15 bp, Homo sapiens
atgatgttaggagga

SEQ ID NO: 1531563 - DNA, 15 bp, Homo sapiens
tgatgttaggaggaa

SEQ ID NO: 1531564 - DNA, 15 bp, Homo sapiens
gatgttaggaggaaa

SEQ ID NO: 1531565 - DNA, 15 bp, Homo sapiens
atgttaggaggaaaa

SEQ ID NO: 1531566 - DNA, 15 bp, Homo sapiens
tgttaggaggaaaac

SEQ ID NO: 1531567 - DNA, 15 bp, Homo sapiens
gttaggaggaaaaca

SEQ ID NO: 1531568 - DNA, 15 bp, Homo sapiens
ttaggaggaaaacaa

SEQ ID NO: 1531569 - DNA, 15 bp, Homo sapiens
taggaggaaaacaac

SEQ ID NO: 1531570 - DNA, 15 bp, Homo sapiens
aggaggaaaacaacc

SEQ ID NO: 1531571 - DNA, 15 bp, Homo sapiens
ggaggaaaacaacca

SEQ ID NO: 1531572 - DNA, 15 bp, Homo sapiens
gaggaaaacaaccaa

SEQ ID NO: 1531573 - DNA, 15 bp, Homo sapiens
aggaaaacaaccaac

SEQ ID NO: 1531574 - DNA, 15 bp, Homo sapiens
ggaaaacaaccaacc

SEQ ID NO: 1531575 - DNA, 15 bp, Homo sapiens
gaaaacaaccaaccc

SEQ ID NO: 1531576 - DNA, 15 bp, Homo sapiens
aaaacaaccaaccca

SEQ ID NO: 1531577 - DNA, 15 bp, Homo sapiens
aaacaaccaacccaa

SEQ ID NO: 1531578 - DNA, 15 bp, Homo sapiens
aacaaccaacccaag

SEQ ID NO: 1531579 - DNA, 15 bp, Homo sapiens
acaaccaacccaagt

SEQ ID NO: 1531580 - DNA, 15 bp, Homo sapiens
caaccaacccaagtg

SEQ ID NO: 1531581 - DNA, 15 bp, Homo sapiens
aaccaacccaagtga

SEQ ID NO: 1531582 - DNA, 15 bp, Homo sapiens
accaacccaagtgag

SEQ ID NO: 1531583 - DNA, 15 bp, Homo sapiens
ccaacccaagtgaga

SEQ ID NO: 1531584 - DNA, 15 bp, Homo sapiens
caacccaagtgagag

SEQ ID NO: 1531585 - DNA, 15 bp, Homo sapiens
aacccaagtgagagg

SEQ ID NO: 1531586 - DNA, 15 bp, Homo sapiens
acccaagtgagaggg

SEQ ID NO: 1531587 - DNA, 15 bp, Homo sapiens
cccaagtgagagggt

SEQ ID NO: 1531588 - DNA, 15 bp, Homo sapiens
ccaagtgagagggtg

SEQ ID NO: 1531589 - DNA, 15 bp, Homo sapiens
caagtgagagggtgc

SEQ ID NO: 1531590 - DNA, 15 bp, Homo sapiens
aagtgagagggtgcg

SEQ ID NO: 1531591 - DNA, 15 bp, Homo sapiens
agtgagagggtgcgc

SEQ ID NO: 1531592 - DNA, 15 bp, Homo sapiens
gtgagagggtgcgca

SEQ ID NO: 1531593 - DNA, 15 bp, Homo sapiens
tgagagggtgcgcag

SEQ ID NO: 1531594 - DNA, 15 bp, Homo sapiens
gagagggtgcgcagc

SEQ ID NO: 1531595 - DNA, 15 bp, Homo sapiens
agagggtgcgcagcc

SEQ ID NO: 1531596 - DNA, 15 bp, Homo sapiens
gagggtgcgcagcca

SEQ ID NO: 1531597 - DNA, 15 bp, Homo sapiens
agggtgcgcagccag

SEQ ID NO: 1531598 - DNA, 15 bp, Homo sapiens
gggtgcgcagccaga

SEQ ID NO: 1531599 - DNA, 15 bp, Homo sapiens
ggtgcgcagccagac

SEQ ID NO: 1531600 - DNA, 15 bp, Homo sapiens
gtgcgcagccagaca

SEQ ID NO: 1531601 - DNA, 15 bp, Homo sapiens
tgcgcagccagacag

SEQ ID NO: 1531602 - DNA, 15 bp, Homo sapiens
cgcagccagacagct

SEQ ID NO: 1531603 - DNA, 15 bp, Homo sapiens
gcagccagacagctg

SEQ ID NO: 1531604 - DNA, 15 bp, Homo sapiens
cagccagacagctgg

SEQ ID NO: 1531605 - DNA, 15 bp, Homo sapiens
agccagacagctgga

SEQ ID NO: 1531606 - DNA, 15 bp, Homo sapiens
gccagacagctggac

SEQ ID NO: 1531607 - DNA, 15 bp, Homo sapiens
ccagacagctggacc

SEQ ID NO: 1531608 - DNA, 15 bp, Homo sapiens
cagacagctggaccg

SEQ ID NO: 1531609 - DNA, 15 bp, Homo sapiens
agacagctggaccgg

SEQ ID NO: 1531610 - DNA, 15 bp, Homo sapiens
gacagctggaccggc

SEQ ID NO: 1531611 - DNA, 15 bp, Homo sapiens
acagctggaccggcc

SEQ ID NO: 1531612 - DNA, 15 bp, Homo sapiens
cagctggaccggccg

SEQ ID NO: 1531613 - DNA, 15 bp, Homo sapiens
agctggaccggccga

SEQ ID NO: 1531614 - DNA, 15 bp, Homo sapiens
gctggaccggccgag

SEQ ID NO: 1531615 - DNA, 15 bp, Homo sapiens
ctggaccggccgagg

SEQ ID NO: 1531616 - DNA, 15 bp, Homo sapiens
tggaccggccgaggc

SEQ ID NO: 1531617 - DNA, 15 bp, Homo sapiens
ggaccggccgaggcc

SEQ ID NO: 1531618 - DNA, 15 bp, Homo sapiens
gaccggccgaggccc

SEQ ID NO: 1531619 - DNA, 15 bp, Homo sapiens
accggccgaggcccc

SEQ ID NO: 1531620 - DNA, 15 bp, Homo sapiens
ccggccgaggcccca

SEQ ID NO: 1531621 - DNA, 15 bp, Homo sapiens
cggccgaggccccaa

SEQ ID NO: 1531622 - DNA, 15 bp, Homo sapiens
ggccgaggccccaac

SEQ ID NO: 1531623 - DNA, 15 bp, Homo sapiens
gccgaggccccaacc

SEQ ID NO: 1531624 - DNA, 15 bp, Homo sapiens
ccgaggccccaacca

SEQ ID NO: 1531625 - DNA, 15 bp, Homo sapiens
cgaggccccaaccaa

SEQ ID NO: 1531626 - DNA, 15 bp, Homo sapiens
gaggccccaaccaag

SEQ ID NO: 1531627 - DNA, 15 bp, Homo sapiens
aggccccaaccaagt

SEQ ID NO: 1531628 - DNA, 15 bp, Homo sapiens
ggccccaaccaagtc

SEQ ID NO: 1531629 - DNA, 15 bp, Homo sapiens
gccccaaccaagtcc

SEQ ID NO: 1531630 - DNA, 15 bp, Homo sapiens
ccccaaccaagtccc

SEQ ID NO: 1531631 - DNA, 15 bp, Homo sapiens
cccaaccaagtccca

SEQ ID NO: 1531632 - DNA, 15 bp, Homo sapiens
ccaaccaagtcccag

SEQ ID NO: 1531633 - DNA, 15 bp, Homo sapiens
caaccaagtcccaga

SEQ ID NO: 1531634 - DNA, 15 bp, Homo sapiens
aaccaagtcccagat

SEQ ID NO: 1531635 - DNA, 15 bp, Homo sapiens
accaagtcccagatc

SEQ ID NO: 1531636 - DNA, 15 bp, Homo sapiens
ccaagtcccagatct

SEQ ID NO: 1531637 - DNA, 15 bp, Homo sapiens
caagtcccagatctg

SEQ ID NO: 1531638 - DNA, 15 bp, Homo sapiens
aagtcccagatctgc

SEQ ID NO: 1531639 - DNA, 15 bp, Homo sapiens
agtcccagatctgcc

SEQ ID NO: 1531640 - DNA, 15 bp, Homo sapiens
gtcccagatctgcct

SEQ ID NO: 1531641 - DNA, 15 bp, Homo sapiens
tcccagatctgcctg

SEQ ID NO: 1531642 - DNA, 15 bp, Homo sapiens
cccagatctgcctgt

SEQ ID NO: 1531643 - DNA, 15 bp, Homo sapiens
ccagatctgcctgtc

SEQ ID NO: 1531644 - DNA, 15 bp, Homo sapiens
cagatctgcctgtca

SEQ ID NO: 1531645 - DNA, 15 bp, Homo sapiens
agatctgcctgtcac

SEQ ID NO: 1531646 - DNA, 15 bp, Homo sapiens
gatctgcctgtcact

SEQ ID NO: 1531647 - DNA, 15 bp, Homo sapiens
atctgcctgtcactg

SEQ ID NO: 1531648 - DNA, 15 bp, Homo sapiens
tctgcctgtcactgg

SEQ ID NO: 1531649 - DNA, 15 bp, Homo sapiens
ctgcctgtcactggt

SEQ ID NO: 1531650 - DNA, 15 bp, Homo sapiens
tgcctgtcactggtg

SEQ ID NO: 1531651 - DNA, 15 bp, Homo sapiens
gcctgtcactggtgc

SEQ ID NO: 1531652 - DNA, 15 bp, Homo sapiens
cctgtcactggtgct

SEQ ID NO: 1531653 - DNA, 15 bp, Homo sapiens
ctgtcactggtgcta

SEQ ID NO: 1531654 - DNA, 15 bp, Homo sapiens
tgtcactggtgctat

SEQ ID NO: 1531655 - DNA, 15 bp, Homo sapiens
gtcactggtgctatg

SEQ ID NO: 1531656 - DNA, 15 bp, Homo sapiens
tcactggtgctatgg

SEQ ID NO: 1531657 - DNA, 15 bp, Homo sapiens
cactggtgctatggc

SEQ ID NO: 1531658 - DNA, 15 bp, Homo sapiens
actggtgctatggca

SEQ ID NO: 1531659 - DNA, 15 bp, Homo sapiens
ctggtgctatggcag

SEQ ID NO: 1531660 - DNA, 15 bp, Homo sapiens
tggtgctatggcagc

SEQ ID NO: 1531661 - DNA, 15 bp, Homo sapiens
ggtgctatggcagca

SEQ ID NO: 1531662 - DNA, 15 bp, Homo sapiens
gtgctatggcagcaa

SEQ ID NO: 1531663 - DNA, 15 bp, Homo sapiens
tgctatggcagcaat

SEQ ID NO: 1531664 - DNA, 15 bp, Homo sapiens
gctatggcagcaatt

SEQ ID NO: 1531665 - DNA, 15 bp, Homo sapiens
ctatggcagcaattt

SEQ ID NO: 1531666 - DNA, 15 bp, Homo sapiens
tatggcagcaatttg

SEQ ID NO: 1531667 - DNA, 15 bp, Homo sapiens
atggcagcaatttgg

SEQ ID NO: 1531668 - DNA, 15 bp, Homo sapiens
tggcagcaatttgga

SEQ ID NO: 1531669 - DNA, 15 bp, Homo sapiens
ggcagcaatttggat

SEQ ID NO: 1531670 - DNA, 15 bp, Homo sapiens
gcagcaatttggatg

SEQ ID NO: 1531671 - DNA, 15 bp, Homo sapiens
cagcaatttggatga

SEQ ID NO: 1531672 - DNA, 15 bp, Homo sapiens
agcaatttggatgag

SEQ ID NO: 1531673 - DNA, 15 bp, Homo sapiens
gcaatttggatgaga

SEQ ID NO: 1531674 - DNA, 15 bp, Homo sapiens
caatttggatgagaa

SEQ ID NO: 1531675 - DNA, 15 bp, Homo sapiens
aatttggatgagaaa

SEQ ID NO: 1531676 - DNA, 15 bp, Homo sapiens
atttggatgagaaat

SEQ ID NO: 1531677 - DNA, 15 bp, Homo sapiens
tttggatgagaaatc

SEQ ID NO: 1531678 - DNA, 15 bp, Homo sapiens
ttggatgagaaatcc

SEQ ID NO: 1531679 - DNA, 15 bp, Homo sapiens
tggatgagaaatcct

SEQ ID NO: 1531680 - DNA, 15 bp, Homo sapiens
ggatgagaaatcctg

SEQ ID NO: 1531681 - DNA, 15 bp, Homo sapiens
gatgagaaatcctgc

SEQ ID NO: 1531682 - DNA, 15 bp, Homo sapiens
atgagaaatcctgcc

SEQ ID NO: 1531683 - DNA, 15 bp, Homo sapiens
tgagaaatcctgccc

SEQ ID NO: 1531684 - DNA, 15 bp, Homo sapiens
gagaaatcctgccca

SEQ ID NO: 1531685 - DNA, 15 bp, Homo sapiens
agaaatcctgcccaa

SEQ ID NO: 1531686 - DNA, 15 bp, Homo sapiens
gaaatcctgcccaaa

SEQ ID NO: 1531687 - DNA, 15 bp, Homo sapiens
aaatcctgcccaaag

SEQ ID NO: 1531688 - DNA, 15 bp, Homo sapiens
aatcctgcccaaagg

SEQ ID NO: 1531689 - DNA, 15 bp, Homo sapiens
atcctgcccaaaggg

SEQ ID NO: 1531690 - DNA, 15 bp, Homo sapiens
tcctgcccaaagggc

SEQ ID NO: 1531691 - DNA, 15 bp, Homo sapiens
cctgcccaaagggcc

SEQ ID NO: 1531692 - DNA, 15 bp, Homo sapiens
ctgcccaaagggccc

SEQ ID NO: 1531693 - DNA, 15 bp, Homo sapiens
tgcccaaagggcccc

SEQ ID NO: 1531694 - DNA, 15 bp, Homo sapiens
gcccaaagggcccct

SEQ ID NO: 1531695 - DNA, 15 bp, Homo sapiens
cccaaagggcccctt

SEQ ID NO: 1531696 - DNA, 15 bp, Homo sapiens
ccaaagggccccttc

SEQ ID NO: 1531697 - DNA, 15 bp, Homo sapiens
caaagggccccttca

SEQ ID NO: 1531698 - DNA, 15 bp, Homo sapiens
aaagggccccttcag

SEQ ID NO: 1531699 - DNA, 15 bp, Homo sapiens
aagggccccttcagg

SEQ ID NO: 1531700 - DNA, 15 bp, Homo sapiens
agggccccttcaggc

SEQ ID NO: 1531701 - DNA, 15 bp, Homo sapiens
gggccccttcaggcc

SEQ ID NO: 1531702 - DNA, 15 bp, Homo sapiens
ggccccttcaggcca

SEQ ID NO: 1531703 - DNA, 15 bp, Homo sapiens
gccccttcaggccac

SEQ ID NO: 1531704 - DNA, 15 bp, Homo sapiens
ccccttcaggccacc

SEQ ID NO: 1531705 - DNA, 15 bp, Homo sapiens
cccttcaggccaccc

SEQ ID NO: 1531706 - DNA, 15 bp, Homo sapiens
ccttcaggccacccg

SEQ ID NO: 1531707 - DNA, 15 bp, Homo sapiens
cttcaggccacccgg

SEQ ID NO: 1531708 - DNA, 15 bp, Homo sapiens
ttcaggccacccggg

SEQ ID NO: 1531709 - DNA, 15 bp, Homo sapiens
tcaggccacccgggg

SEQ ID NO: 1531710 - DNA, 15 bp, Homo sapiens
caggccacccgggga

SEQ ID NO: 1531711 - DNA, 15 bp, Homo sapiens
aggccacccggggag

SEQ ID NO: 1531712 - DNA, 15 bp, Homo sapiens
ggccacccggggaga

SEQ ID NO: 1531713 - DNA, 15 bp, Homo sapiens
gccacccggggagaa

SEQ ID NO: 1531714 - DNA, 15 bp, Homo sapiens
ccacccggggagaag

SEQ ID NO: 1531715 - DNA, 15 bp, Homo sapiens
cacccggggagaagg

SEQ ID NO: 1531716 - DNA, 15 bp, Homo sapiens
acccggggagaagga

SEQ ID NO: 1531717 - DNA, 15 bp, Homo sapiens
cccggggagaaggaa

SEQ ID NO: 1531718 - DNA, 15 bp, Homo sapiens
ccggggagaaggaag

SEQ ID NO: 1531719 - DNA, 15 bp, Homo sapiens
cggggagaaggaagc

SEQ ID NO: 1531720 - DNA, 15 bp, Homo sapiens
ggggagaaggaagcg

SEQ ID NO: 1531721 - DNA, 15 bp, Homo sapiens
gggagaaggaagcgg

SEQ ID NO: 1531722 - DNA, 15 bp, Homo sapiens
ggagaaggaagcggc

SEQ ID NO: 1531723 - DNA, 15 bp, Homo sapiens
gagaaggaagcggct

SEQ ID NO: 1531724 - DNA, 15 bp, Homo sapiens
agaaggaagcggctg

SEQ ID NO: 1531725 - DNA, 15 bp, Homo sapiens
gaaggaagcggctgt

SEQ ID NO: 1531726 - DNA, 15 bp, Homo sapiens
aaggaagcggctgtc

SEQ ID NO: 1531727 - DNA, 15 bp, Homo sapiens
aggaagcggctgtct

SEQ ID NO: 1531728 - DNA, 15 bp, Homo sapiens
ggaagcggctgtctt

SEQ ID NO: 1531729 - DNA, 15 bp, Homo sapiens
gaagcggctgtcttt

SEQ ID NO: 1531730 - DNA, 15 bp, Homo sapiens
aagcggctgtctttg

SEQ ID NO: 1531731 - DNA, 15 bp, Homo sapiens
agcggctgtctttgg

SEQ ID NO: 1531732 - DNA, 15 bp, Homo sapiens
gcggctgtctttggc

SEQ ID NO: 1531733 - DNA, 15 bp, Homo sapiens
cggctgtctttggca

SEQ ID NO: 1531734 - DNA, 15 bp, Homo sapiens
ggctgtctttggcat

SEQ ID NO: 1531735 - DNA, 15 bp, Homo sapiens
gctgtctttggcatg

SEQ ID NO: 1531736 - DNA, 15 bp, Homo sapiens
ctgtctttggcatga

SEQ ID NO: 1531737 - DNA, 15 bp, Homo sapiens
tgtctttggcatgac

SEQ ID NO: 1531738 - DNA, 15 bp, Homo sapiens
gtctttggcatgacc

SEQ ID NO: 1531739 - DNA, 15 bp, Homo sapiens
tctttggcatgacca

SEQ ID NO: 1531740 - DNA, 15 bp, Homo sapiens
ctttggcatgaccag

SEQ ID NO: 1531741 - DNA, 15 bp, Homo sapiens
tttggcatgaccaga

SEQ ID NO: 1531742 - DNA, 15 bp, Homo sapiens
ttggcatgaccagaa

SEQ ID NO: 1531743 - DNA, 15 bp, Homo sapiens
tggcatgaccagaaa

SEQ ID NO: 1531744 - DNA, 15 bp, Homo sapiens
ggcatgaccagaaag

SEQ ID NO: 1531745 - DNA, 15 bp, Homo sapiens
gcatgaccagaaaga

SEQ ID NO: 1531746 - DNA, 15 bp, Homo sapiens
catgaccagaaagat

SEQ ID NO: 1531747 - DNA, 15 bp, Homo sapiens
atgaccagaaagatg

SEQ ID NO: 1531748 - DNA, 15 bp, Homo sapiens
tgaccagaaagatgg

SEQ ID NO: 1531749 - DNA, 15 bp, Homo sapiens
gaccagaaagatggc

SEQ ID NO: 1531750 - DNA, 15 bp, Homo sapiens
accagaaagatggct

SEQ ID NO: 1531751 - DNA, 15 bp, Homo sapiens
ccagaaagatggctc

SEQ ID NO: 1531752 - DNA, 15 bp, Homo sapiens
cagaaagatggctcg

SEQ ID NO: 1531753 - DNA, 15 bp, Homo sapiens
agaaagatggctcgg

SEQ ID NO: 1531754 - DNA, 15 bp, Homo sapiens
gaaagatggctcgga

SEQ ID NO: 1531755 - DNA, 15 bp, Homo sapiens
aaagatggctcggag

SEQ ID NO: 1531756 - DNA, 15 bp, Homo sapiens
aagatggctcggagc

SEQ ID NO: 1531757 - DNA, 15 bp, Homo sapiens
agatggctcggagct

SEQ ID NO: 1531758 - DNA, 15 bp, Homo sapiens
gatggctcggagcta

SEQ ID NO: 1531759 - DNA, 15 bp, Homo sapiens
atggctcggagctag

SEQ ID NO: 1531760 - DNA, 15 bp, Homo sapiens
tggctcggagctagg

SEQ ID NO: 1531761 - DNA, 15 bp, Homo sapiens
ggctcggagctaggg

SEQ ID NO: 1531762 - DNA, 15 bp, Homo sapiens
gctcggagctaggga

SEQ ID NO: 1531763 - DNA, 15 bp, Homo sapiens
ctcggagctagggag

SEQ ID NO: 1531764 - DNA, 15 bp, Homo sapiens
tcggagctagggaga

SEQ ID NO: 1531765 - DNA, 15 bp, Homo sapiens
cggagctagggagag

SEQ ID NO: 1531766 - DNA, 15 bp, Homo sapiens
ggagctagggagagg

SEQ ID NO: 1531767 - DNA, 15 bp, Homo sapiens
gagctagggagaggt

SEQ ID NO: 1531768 - DNA, 15 bp, Homo sapiens
agctagggagaggtg

SEQ ID NO: 1531769 - DNA, 15 bp, Homo sapiens
gctagggagaggtgg

SEQ ID NO: 1531770 - DNA, 15 bp, Homo sapiens
ctagggagaggtgga

SEQ ID NO: 1531771 - DNA, 15 bp, Homo sapiens
tagggagaggtggac

SEQ ID NO: 1531772 - DNA, 15 bp, Homo sapiens
agggagaggtggaca

SEQ ID NO: 1531773 - DNA, 15 bp, Homo sapiens
gggagaggtggacat

SEQ ID NO: 1531774 - DNA, 15 bp, Homo sapiens
ggagaggtggacatg

SEQ ID NO: 1531775 - DNA, 15 bp, Homo sapiens
gagaggtggacatgt

SEQ ID NO: 1531776 - DNA, 15 bp, Homo sapiens
agaggtggacatgtg

SEQ ID NO: 1531777 - DNA, 15 bp, Homo sapiens
gaggtggacatgtgg

SEQ ID NO: 1531778 - DNA, 15 bp, Homo sapiens
aggtggacatgtggg

SEQ ID NO: 1531779 - DNA, 15 bp, Homo sapiens
ggtggacatgtgggc

SEQ ID NO: 1531780 - DNA, 15 bp, Homo sapiens
gtggacatgtgggct

SEQ ID NO: 1531781 - DNA, 15 bp, Homo sapiens
tggacatgtgggctg

SEQ ID NO: 1531782 - DNA, 15 bp, Homo sapiens
ggacatgtgggctgt

SEQ ID NO: 1531783 - DNA, 15 bp, Homo sapiens
gacatgtgggctgtg

SEQ ID NO: 1531784 - DNA, 15 bp, Homo sapiens
acatgtgggctgtgg

SEQ ID NO: 1531785 - DNA, 15 bp, Homo sapiens
catgtgggctgtgga

SEQ ID NO: 1531786 - DNA, 15 bp, Homo sapiens
atgtgggctgtggag

SEQ ID NO: 1531787 - DNA, 15 bp, Homo sapiens
tgtgggctgtggaga

SEQ ID NO: 1531788 - DNA, 15 bp, Homo sapiens
gtgggctgtggagat

SEQ ID NO: 1531789 - DNA, 15 bp, Homo sapiens
tgggctgtggagatc

SEQ ID NO: 1531790 - DNA, 15 bp, Homo sapiens
gggctgtggagatct

SEQ ID NO: 1531791 - DNA, 15 bp, Homo sapiens
ggctgtggagatctg

SEQ ID NO: 1531792 - DNA, 15 bp, Homo sapiens
gctgtggagatctgg

SEQ ID NO: 1531793 - DNA, 15 bp, Homo sapiens
ctgtggagatctggc

SEQ ID NO: 1531794 - DNA, 15 bp, Homo sapiens
tgtggagatctggca

SEQ ID NO: 1531795 - DNA, 15 bp, Homo sapiens
gtggagatctggcac

SEQ ID NO: 1531796 - DNA, 15 bp, Homo sapiens
tggagatctggcact

SEQ ID NO: 1531797 - DNA, 15 bp, Homo sapiens
ggagatctggcactt

SEQ ID NO: 1531798 - DNA, 15 bp, Homo sapiens
gagatctggcacttt

SEQ ID NO: 1531799 - DNA, 15 bp, Homo sapiens
agatctggcactttc

SEQ ID NO: 1531800 - DNA, 15 bp, Homo sapiens
gatctggcactttcc

SEQ ID NO: 1531801 - DNA, 15 bp, Homo sapiens
atctggcactttccc

SEQ ID NO: 1531802 - DNA, 15 bp, Homo sapiens
tctggcactttcccc

SEQ ID NO: 1531803 - DNA, 15 bp, Homo sapiens
ctggcactttcccca

SEQ ID NO: 1531804 - DNA, 15 bp, Homo sapiens
tggcactttccccaa

SEQ ID NO: 1531805 - DNA, 15 bp, Homo sapiens
ggcactttccccaaa

SEQ ID NO: 1531806 - DNA, 15 bp, Homo sapiens
gcactttccccaaac

SEQ ID NO: 1531807 - DNA, 15 bp, Homo sapiens
ctttccccaaacaag

SEQ ID NO: 1531808 - DNA, 15 bp, Homo sapiens
tttccccaaacaagg

SEQ ID NO: 1531809 - DNA, 15 bp, Homo sapiens
ttccccaaacaagga

SEQ ID NO: 1531810 - DNA, 15 bp, Homo sapiens
tccccaaacaaggag

SEQ ID NO: 1531811 - DNA, 15 bp, Homo sapiens
ccccaaacaaggaga

SEQ ID NO: 1531812 - DNA, 15 bp, Homo sapiens
cccaaacaaggagag

SEQ ID NO: 1531813 - DNA, 15 bp, Homo sapiens
ccaaacaaggagaga

SEQ ID NO: 1531814 - DNA, 15 bp, Homo sapiens
caaacaaggagagaa

SEQ ID NO: 1531815 - DNA, 15 bp, Homo sapiens
aaacaaggagagaaa

SEQ ID NO: 1531816 - DNA, 15 bp, Homo sapiens
aacaaggagagaaag

SEQ ID NO: 1531817 - DNA, 15 bp, Homo sapiens
acaaggagagaaagc

SEQ ID NO: 1531818 - DNA, 15 bp, Homo sapiens
caaggagagaaagca

SEQ ID NO: 1531819 - DNA, 15 bp, Homo sapiens
aaggagagaaagcat

SEQ ID NO: 1531820 - DNA, 15 bp, Homo sapiens
aggagagaaagcata

SEQ ID NO: 1531821 - DNA, 15 bp, Homo sapiens
ggagagaaagcatag

SEQ ID NO: 1531822 - DNA, 15 bp, Homo sapiens
gagagaaagcatagt

SEQ ID NO: 1531823 - DNA, 15 bp, Homo sapiens
agagaaagcatagtg

SEQ ID NO: 1531824 - DNA, 15 bp, Homo sapiens
gagaaagcatagtgt

SEQ ID NO: 1531825 - DNA, 15 bp, Homo sapiens
agaaagcatagtgtg

SEQ ID NO: 1531826 - DNA, 15 bp, Homo sapiens
gaaagcatagtgtgc

SEQ ID NO: 1531827 - DNA, 15 bp, Homo sapiens
aaagcatagtgtgcc

SEQ ID NO: 1531828 - DNA, 15 bp, Homo sapiens
aagcatagtgtgcct

SEQ ID NO: 1531829 - DNA, 15 bp, Homo sapiens
agcatagtgtgccta

SEQ ID NO: 1531830 - DNA, 15 bp, Homo sapiens
gcatagtgtgcctat

SEQ ID NO: 1531831 - DNA, 15 bp, Homo sapiens
catagtgtgcctatg

SEQ ID NO: 1531832 - DNA, 15 bp, Homo sapiens
atagtgtgcctatgt

SEQ ID NO: 1531833 - DNA, 15 bp, Homo sapiens
tagtgtgcctatgtg

SEQ ID NO: 1531834 - DNA, 15 bp, Homo sapiens
agtgtgcctatgtgt

SEQ ID NO: 1531835 - DNA, 15 bp, Homo sapiens
gtgtgcctatgtgtg

SEQ ID NO: 1531836 - DNA, 15 bp, Homo sapiens
tgtgcctatgtgtga

SEQ ID NO: 1531837 - DNA, 15 bp, Homo sapiens
gtgcctatgtgtgaa

SEQ ID NO: 1531838 - DNA, 15 bp, Homo sapiens
tgcctatgtgtgaat

SEQ ID NO: 1531839 - DNA, 15 bp, Homo sapiens
gcctatgtgtgaatg

SEQ ID NO: 1531840 - DNA, 15 bp, Homo sapiens
cctatgtgtgaatgt

SEQ ID NO: 1531841 - DNA, 15 bp, Homo sapiens
ctatgtgtgaatgtg

SEQ ID NO: 1531842 - DNA, 15 bp, Homo sapiens
tatgtgtgaatgtgc

SEQ ID NO: 1531843 - DNA, 15 bp, Homo sapiens
atgtgtgaatgtgct

SEQ ID NO: 1531844 - DNA, 15 bp, Homo sapiens
tgtgtgaatgtgcta

SEQ ID NO: 1531845 - DNA, 15 bp, Homo sapiens
gtgtgaatgtgctat

SEQ ID NO: 1531846 - DNA, 15 bp, Homo sapiens
tgtgaatgtgctatg

SEQ ID NO: 1531847 - DNA, 15 bp, Homo sapiens
gtgaatgtgctatgt

SEQ ID NO: 1531848 - DNA, 15 bp, Homo sapiens
tgaatgtgctatgtg

SEQ ID NO: 1531849 - DNA, 15 bp, Homo sapiens
gaatgtgctatgtgt

SEQ ID NO: 1531850 - DNA, 15 bp, Homo sapiens
aatgtgctatgtgtg

SEQ ID NO: 1531851 - DNA, 15 bp, Homo sapiens
atgtgctatgtgtgc

SEQ ID NO: 1531852 - DNA, 15 bp, Homo sapiens
tgtgctatgtgtgca

SEQ ID NO: 1531853 - DNA, 15 bp, Homo sapiens
gtgctatgtgtgcat

SEQ ID NO: 1531854 - DNA, 15 bp, Homo sapiens
tgctatgtgtgcatg

SEQ ID NO: 1531855 - DNA, 15 bp, Homo sapiens
gctatgtgtgcatgt

SEQ ID NO: 1531856 - DNA, 15 bp, Homo sapiens
ctatgtgtgcatgtt

SEQ ID NO: 1531857 - DNA, 15 bp, Homo sapiens
tatgtgtgcatgttt

SEQ ID NO: 1531858 - DNA, 15 bp, Homo sapiens
atgtgtgcatgtttg

SEQ ID NO: 1531859 - DNA, 15 bp, Homo sapiens
tgtgtgcatgtttgt

SEQ ID NO: 1531860 - DNA, 15 bp, Homo sapiens
gtgtgcatgtttgtg

SEQ ID NO: 1531861 - DNA, 15 bp, Homo sapiens
tgtgcatgtttgtgc

SEQ ID NO: 1531862 - DNA, 15 bp, Homo sapiens
gtgcatgtttgtgcc

SEQ ID NO: 1531863 - DNA, 15 bp, Homo sapiens
tgcatgtttgtgcct

SEQ ID NO: 1531864 - DNA, 15 bp, Homo sapiens
gcatgtttgtgcctg

SEQ ID NO: 1531865 - DNA, 15 bp, Homo sapiens
catgtttgtgcctgt

SEQ ID NO: 1531866 - DNA, 15 bp, Homo sapiens
atgtttgtgcctgtg

SEQ ID NO: 1531867 - DNA, 15 bp, Homo sapiens
tgtttgtgcctgtgc

SEQ ID NO: 1531868 - DNA, 15 bp, Homo sapiens
gtttgtgcctgtgca

SEQ ID NO: 1531869 - DNA, 15 bp, Homo sapiens
tttgtgcctgtgcat

SEQ ID NO: 1531870 - DNA, 15 bp, Homo sapiens
ttgtgcctgtgcata

SEQ ID NO: 1531871 - DNA, 15 bp, Homo sapiens
tgtgcctgtgcatac

SEQ ID NO: 1531872 - DNA, 15 bp, Homo sapiens
gtgcctgtgcatacc

SEQ ID NO: 1531873 - DNA, 15 bp, Homo sapiens
tgcctgtgcatacct

SEQ ID NO: 1531874 - DNA, 15 bp, Homo sapiens
gcctgtgcatacctg

SEQ ID NO: 1531875 - DNA, 15 bp, Homo sapiens
cctgtgcatacctgc

SEQ ID NO: 1531876 - DNA, 15 bp, Homo sapiens
ctgtgcatacctgca

SEQ ID NO: 1531877 - DNA, 15 bp, Homo sapiens
tgtgcatacctgcat

SEQ ID NO: 1531878 - DNA, 15 bp, Homo sapiens
gtgcatacctgcatg

SEQ ID NO: 1531879 - DNA, 15 bp, Homo sapiens
tgcatacctgcatgt

SEQ ID NO: 1531880 - DNA, 15 bp, Homo sapiens
gcatacctgcatgtg

SEQ ID NO: 1531881 - DNA, 15 bp, Homo sapiens
catacctgcatgtgt

SEQ ID NO: 1531882 - DNA, 15 bp, Homo sapiens
atacctgcatgtgta

SEQ ID NO: 1531883 - DNA, 15 bp, Homo sapiens
tacctgcatgtgtac

SEQ ID NO: 1531884 - DNA, 15 bp, Homo sapiens
acctgcatgtgtaca

SEQ ID NO: 1531885 - DNA, 15 bp, Homo sapiens
cctgcatgtgtacat

SEQ ID NO: 1531886 - DNA, 15 bp, Homo sapiens
ctgcatgtgtacatg

SEQ ID NO: 1531887 - DNA, 15 bp, Homo sapiens
tgcatgtgtacatgc

SEQ ID NO: 1531888 - DNA, 15 bp, Homo sapiens
gcatgtgtacatgca

SEQ ID NO: 1531889 - DNA, 15 bp, Homo sapiens
catgtgtacatgcat

SEQ ID NO: 1531890 - DNA, 15 bp, Homo sapiens
atgtgtacatgcatg

SEQ ID NO: 1531891 - DNA, 15 bp, Homo sapiens
tgtgtacatgcatgt

SEQ ID NO: 1531892 - DNA, 15 bp, Homo sapiens
gtgtacatgcatgtg

SEQ ID NO: 1531893 - DNA, 15 bp, Homo sapiens
tgtacatgcatgtgc

SEQ ID NO: 1531894 - DNA, 15 bp, Homo sapiens
gtacatgcatgtgca

SEQ ID NO: 1531895 - DNA, 15 bp, Homo sapiens
tacatgcatgtgcac

SEQ ID NO: 1531896 - DNA, 15 bp, Homo sapiens
acatgcatgtgcaca

SEQ ID NO: 1531897 - DNA, 15 bp, Homo sapiens
catgcatgtgcacat

SEQ ID NO: 1531898 - DNA, 15 bp, Homo sapiens
atgcatgtgcacata

SEQ ID NO: 1531899 - DNA, 15 bp, Homo sapiens
tgcatgtgcacatat

SEQ ID NO: 1531900 - DNA, 15 bp, Homo sapiens
gcatgtgcacatatg

SEQ ID NO: 1531901 - DNA, 15 bp, Homo sapiens
catgtgcacatatgt

SEQ ID NO: 1531902 - DNA, 15 bp, Homo sapiens
atgtgcacatatgtg

SEQ ID NO: 1531903 - DNA, 15 bp, Homo sapiens
tgtgcacatatgtgt

SEQ ID NO: 1531904 - DNA, 15 bp, Homo sapiens
gtgcacatatgtgtg

SEQ ID NO: 1531905 - DNA, 15 bp, Homo sapiens
tgcacatatgtgtgc

SEQ ID NO: 1531906 - DNA, 15 bp, Homo sapiens
gcacatatgtgtgca

SEQ ID NO: 1531907 - DNA, 15 bp, Homo sapiens
cacatatgtgtgcac

SEQ ID NO: 1531908 - DNA, 15 bp, Homo sapiens
acatatgtgtgcaca

SEQ ID NO: 1531909 - DNA, 15 bp, Homo sapiens
catatgtgtgcacag

SEQ ID NO: 1531910 - DNA, 15 bp, Homo sapiens
atatgtgtgcacagg

SEQ ID NO: 1531911 - DNA, 15 bp, Homo sapiens
tatgtgtgcacaggg

SEQ ID NO: 1531912 - DNA, 15 bp, Homo sapiens
atgtgtgcacaggga

SEQ ID NO: 1531913 - DNA, 15 bp, Homo sapiens
tgtgtgcacagggaa

SEQ ID NO: 1531914 - DNA, 15 bp, Homo sapiens
gtgtgcacagggaat

SEQ ID NO: 1531915 - DNA, 15 bp, Homo sapiens
tgtgcacagggaatc

SEQ ID NO: 1531916 - DNA, 15 bp, Homo sapiens
gtgcacagggaatca

SEQ ID NO: 1531917 - DNA, 15 bp, Homo sapiens
tgcacagggaatcac

SEQ ID NO: 1531918 - DNA, 15 bp, Homo sapiens
gcacagggaatcact

SEQ ID NO: 1531919 - DNA, 15 bp, Homo sapiens
cacagggaatcactt

SEQ ID NO: 1531920 - DNA, 15 bp, Homo sapiens
acagggaatcacttt

SEQ ID NO: 1531921 - DNA, 15 bp, Homo sapiens
cagggaatcacttta

SEQ ID NO: 1531922 - DNA, 15 bp, Homo sapiens
agggaatcactttaa

SEQ ID NO: 1531923 - DNA, 15 bp, Homo sapiens
gggaatcactttaat

SEQ ID NO: 1531924 - DNA, 15 bp, Homo sapiens
ggaatcactttaata

SEQ ID NO: 1531925 - DNA, 15 bp, Homo sapiens
gaatcactttaataa

SEQ ID NO: 1531926 - DNA, 15 bp, Homo sapiens
aatcactttaataaa

SEQ ID NO: 1531927 - DNA, 15 bp, Homo sapiens
atcactttaataaag

SEQ ID NO: 1531928 - DNA, 15 bp, Homo sapiens
tcactttaataaagg

SEQ ID NO: 1531929 - DNA, 15 bp, Homo sapiens
cactttaataaaggc

SEQ ID NO: 1531930 - DNA, 15 bp, Homo sapiens
actttaataaaggcc

SEQ ID NO: 1531931 - DNA, 15 bp, Homo sapiens
ctttaataaaggcca

SEQ ID NO: 1531932 - DNA, 15 bp, Homo sapiens
tttaataaaggccac

SEQ ID NO: 1531933 - DNA, 15 bp, Homo sapiens
ttaataaaggccaca

SEQ ID NO: 1531934 - DNA, 15 bp, Homo sapiens
taataaaggccacag

SEQ ID NO: 1531935 - DNA, 15 bp, Homo sapiens
aataaaggccacagc

SEQ ID NO: 1531936 - DNA, 15 bp, Homo sapiens
ataaaggccacagca

SEQ ID NO: 1531937 - DNA, 15 bp, Homo sapiens
taaaggccacagcag

SEQ ID NO: 1531938 - DNA, 15 bp, Homo sapiens
aaaggccacagcaga

SEQ ID NO: 1531939 - DNA, 15 bp, Homo sapiens
aaggccacagcagag

SEQ ID NO: 1531940 - DNA, 15 bp, Homo sapiens
aggccacagcagagc

SEQ ID NO: 1531941 - DNA, 15 bp, Homo sapiens
ggccacagcagagct

SEQ ID NO: 1531942 - DNA, 15 bp, Homo sapiens
gccacagcagagctg

SEQ ID NO: 1531943 - DNA, 15 bp, Homo sapiens
ccacagcagagctgt

SEQ ID NO: 1531944 - DNA, 15 bp, Homo sapiens
cacagcagagctgtc

SEQ ID NO: 1531945 - DNA, 15 bp, Homo sapiens
acagcagagctgtcc

SEQ ID NO: 1531946 - DNA, 15 bp, Homo sapiens
cagcagagctgtccc

SEQ ID NO: 1531947 - DNA, 15 bp, Homo sapiens
agcagagctgtccct

SEQ ID NO: 1531948 - DNA, 15 bp, Homo sapiens
gcagagctgtccctg

SEQ ID NO: 1531949 - DNA, 15 bp, Homo sapiens
cagagctgtccctga

SEQ ID NO: 1531950 - DNA, 15 bp, Homo sapiens
agagctgtccctgag

SEQ ID NO: 1531951 - DNA, 15 bp, Homo sapiens
gagctgtccctgagc

SEQ ID NO: 1531952 - DNA, 15 bp, Homo sapiens
agctgtccctgagcc

SEQ ID NO: 1531953 - DNA, 15 bp, Homo sapiens
gctgtccctgagccc

SEQ ID NO: 1531954 - DNA, 15 bp, Homo sapiens
ctgtccctgagcccc

SEQ ID NO: 1531955 - DNA, 15 bp, Homo sapiens
tgtccctgagcccct

SEQ ID NO: 1531956 - DNA, 15 bp, Homo sapiens
gtccctgagcccctt

SEQ ID NO: 1531957 - DNA, 15 bp, Homo sapiens
tccctgagccccttg

SEQ ID NO: 1531958 - DNA, 15 bp, Homo sapiens
ccctgagccccttgc

SEQ ID NO: 1531959 - DNA, 15 bp, Homo sapiens
cctgagccccttgca

SEQ ID NO: 1531960 - DNA, 15 bp, Homo sapiens
ctgagccccttgcat

SEQ ID NO: 1531961 - DNA, 15 bp, Homo sapiens
tgagccccttgcatt

SEQ ID NO: 1531962 - DNA, 15 bp, Homo sapiens
gagccccttgcattc

SEQ ID NO: 1531963 - DNA, 15 bp, Homo sapiens
agccccttgcattca

SEQ ID NO: 1531964 - DNA, 15 bp, Homo sapiens
gccccttgcattcac

SEQ ID NO: 1531965 - DNA, 15 bp, Homo sapiens
ccccttgcattcaca

SEQ ID NO: 1531966 - DNA, 15 bp, Homo sapiens
cccttgcattcacag

SEQ ID NO: 1531967 - DNA, 15 bp, Homo sapiens
ccttgcattcacagt

SEQ ID NO: 1531968 - DNA, 15 bp, Homo sapiens
cttgcattcacagtg

SEQ ID NO: 1531969 - DNA, 15 bp, Homo sapiens
ttgcattcacagtgg

SEQ ID NO: 1531970 - DNA, 15 bp, Homo sapiens
tgcattcacagtggc

SEQ ID NO: 1531971 - DNA, 15 bp, Homo sapiens
gcattcacagtggca

SEQ ID NO: 1531972 - DNA, 15 bp, Homo sapiens
cattcacagtggcat

SEQ ID NO: 1531973 - DNA, 15 bp, Homo sapiens
attcacagtggcatg

SEQ ID NO: 1531974 - DNA, 15 bp, Homo sapiens
ttcacagtggcatgt

SEQ ID NO: 1531975 - DNA, 15 bp, Homo sapiens
tcacagtggcatgtg

SEQ ID NO: 1531976 - DNA, 15 bp, Homo sapiens
cacagtggcatgtga

SEQ ID NO: 1531977 - DNA, 15 bp, Homo sapiens
acagtggcatgtgag

SEQ ID NO: 1531978 - DNA, 15 bp, Homo sapiens
cagtggcatgtgagt

SEQ ID NO: 1531979 - DNA, 15 bp, Homo sapiens
agtggcatgtgagtg

SEQ ID NO: 1531980 - DNA, 15 bp, Homo sapiens
gtggcatgtgagtga

SEQ ID NO: 1531981 - DNA, 15 bp, Homo sapiens
tggcatgtgagtgaa

SEQ ID NO: 1531982 - DNA, 15 bp, Homo sapiens
ggcatgtgagtgaac

SEQ ID NO: 1531983 - DNA, 15 bp, Homo sapiens
gcatgtgagtgaacc

SEQ ID NO: 1531984 - DNA, 15 bp, Homo sapiens
catgtgagtgaacca

SEQ ID NO: 1531985 - DNA, 15 bp, Homo sapiens
atgtgagtgaaccac

SEQ ID NO: 1531986 - DNA, 15 bp, Homo sapiens
tgtgagtgaaccacc

SEQ ID NO: 1531987 - DNA, 15 bp, Homo sapiens
gtgagtgaaccacct

SEQ ID NO: 1531988 - DNA, 15 bp, Homo sapiens
tgagtgaaccacctt

SEQ ID NO: 1531989 - DNA, 15 bp, Homo sapiens
gagtgaaccaccttc

SEQ ID NO: 1531990 - DNA, 15 bp, Homo sapiens
agtgaaccaccttct

SEQ ID NO: 1531991 - DNA, 15 bp, Homo sapiens
gtgaaccaccttctt

SEQ ID NO: 1531992 - DNA, 15 bp, Homo sapiens
tgaaccaccttctta

SEQ ID NO: 1531993 - DNA, 15 bp, Homo sapiens
gaaccaccttcttag

SEQ ID NO: 1531994 - DNA, 15 bp, Homo sapiens
aaccaccttcttagg

SEQ ID NO: 1531995 - DNA, 15 bp, Homo sapiens
accaccttcttaggc

SEQ ID NO: 1531996 - DNA, 15 bp, Homo sapiens
ccaccttcttaggct

SEQ ID NO: 1531997 - DNA, 15 bp, Homo sapiens
caccttcttaggctg

SEQ ID NO: 1531998 - DNA, 15 bp, Homo sapiens
ttcttaggctgggca

SEQ ID NO: 1531999 - DNA, 15 bp, Homo sapiens
tcttaggctgggcat

SEQ ID NO: 1532000 - DNA, 15 bp, Homo sapiens
cttaggctgggcatc

SEQ ID NO: 1532001 - DNA, 15 bp, Homo sapiens
ttaggctgggcatcc

SEQ ID NO: 1532002 - DNA, 15 bp, Homo sapiens
taggctgggcatcca

SEQ ID NO: 1532003 - DNA, 15 bp, Homo sapiens
aggctgggcatccag

SEQ ID NO: 1532004 - DNA, 15 bp, Homo sapiens
ggctgggcatccagt

SEQ ID NO: 1532005 - DNA, 15 bp, Homo sapiens
gctgggcatccagtc

SEQ ID NO: 1532006 - DNA, 15 bp, Homo sapiens
ctgggcatccagtct

SEQ ID NO: 1532007 - DNA, 15 bp, Homo sapiens
tgggcatccagtctc

SEQ ID NO: 1532008 - DNA, 15 bp, Homo sapiens
gggcatccagtctca

SEQ ID NO: 1532009 - DNA, 15 bp, Homo sapiens
ggcatccagtctcag

SEQ ID NO: 1532010 - DNA, 15 bp, Homo sapiens
gcatccagtctcaga

SEQ ID NO: 1532011 - DNA, 15 bp, Homo sapiens
catccagtctcagac

SEQ ID NO: 1532012 - DNA, 15 bp, Homo sapiens
atccagtctcagact

SEQ ID NO: 1532013 - DNA, 15 bp, Homo sapiens
tccagtctcagactc

SEQ ID NO: 1532014 - DNA, 15 bp, Homo sapiens
ccagtctcagactct

SEQ ID NO: 1532015 - DNA, 15 bp, Homo sapiens
cagtctcagactctg

SEQ ID NO: 1532016 - DNA, 15 bp, Homo sapiens
agtctcagactctgg

SEQ ID NO: 1532017 - DNA, 15 bp, Homo sapiens
gtctcagactctggg

SEQ ID NO: 1532018 - DNA, 15 bp, Homo sapiens
tctcagactctgggg

SEQ ID NO: 1532019 - DNA, 15 bp, Homo sapiens
ctcagactctggggc

SEQ ID NO: 1532020 - DNA, 15 bp, Homo sapiens
tcagactctggggct

SEQ ID NO: 1532021 - DNA, 15 bp, Homo sapiens
cagactctggggctg

SEQ ID NO: 1532022 - DNA, 15 bp, Homo sapiens
agactctggggctgc

SEQ ID NO: 1532023 - DNA, 15 bp, Homo sapiens
gactctggggctgcc

SEQ ID NO: 1532024 - DNA, 15 bp, Homo sapiens
actctggggctgccc

SEQ ID NO: 1532025 - DNA, 15 bp, Homo sapiens
ctctggggctgccca

SEQ ID NO: 1532026 - DNA, 15 bp, Homo sapiens
tctggggctgcccat

SEQ ID NO: 1532027 - DNA, 15 bp, Homo sapiens
ctggggctgcccatg

SEQ ID NO: 1532028 - DNA, 15 bp, Homo sapiens
tggggctgcccatgc

SEQ ID NO: 1532029 - DNA, 15 bp, Homo sapiens
ggggctgcccatgcc

SEQ ID NO: 1532030 - DNA, 15 bp, Homo sapiens
gggctgcccatgccc

SEQ ID NO: 1532031 - DNA, 15 bp, Homo sapiens
ggctgcccatgcccc

SEQ ID NO: 1532032 - DNA, 15 bp, Homo sapiens
gctgcccatgcccca

SEQ ID NO: 1532033 - DNA, 15 bp, Homo sapiens
ctgcccatgccccat

SEQ ID NO: 1532034 - DNA, 15 bp, Homo sapiens
tgcccatgccccatc

SEQ ID NO: 1532035 - DNA, 15 bp, Homo sapiens
gcccatgccccatcc

SEQ ID NO: 1532036 - DNA, 15 bp, Homo sapiens
cccatgccccatcct

SEQ ID NO: 1532037 - DNA, 15 bp, Homo sapiens
ccatgccccatcctt

SEQ ID NO: 1532038 - DNA, 15 bp, Homo sapiens
catgccccatccttt

SEQ ID NO: 1532039 - DNA, 15 bp, Homo sapiens
atgccccatccttta

SEQ ID NO: 1532040 - DNA, 15 bp, Homo sapiens
tgccccatcctttat

SEQ ID NO: 1532041 - DNA, 15 bp, Homo sapiens
gccccatcctttatc

SEQ ID NO: 1532042 - DNA, 15 bp, Homo sapiens
ccccatcctttatct

SEQ ID NO: 1532043 - DNA, 15 bp, Homo sapiens
cccatcctttatctg

SEQ ID NO: 1532044 - DNA, 15 bp, Homo sapiens
ccatcctttatctgc

SEQ ID NO: 1532045 - DNA, 15 bp, Homo sapiens
catcctttatctgct

SEQ ID NO: 1532046 - DNA, 15 bp, Homo sapiens
atcctttatctgctc

SEQ ID NO: 1532047 - DNA, 15 bp, Homo sapiens
tcctttatctgctcc

SEQ ID NO: 1532048 - DNA, 15 bp, Homo sapiens
cctttatctgctcca

SEQ ID NO: 1532049 - DNA, 15 bp, Homo sapiens
ctttatctgctccac

SEQ ID NO: 1532050 - DNA, 15 bp, Homo sapiens
tttatctgctccacg

SEQ ID NO: 1532051 - DNA, 15 bp, Homo sapiens
ttatctgctccacgt

SEQ ID NO: 1532052 - DNA, 15 bp, Homo sapiens
tatctgctccacgtg

SEQ ID NO: 1532053 - DNA, 15 bp, Homo sapiens
atctgctccacgtgt

SEQ ID NO: 1532054 - DNA, 15 bp, Homo sapiens
tctgctccacgtgtg

SEQ ID NO: 1532055 - DNA, 15 bp, Homo sapiens
ctgctccacgtgtga

SEQ ID NO: 1532056 - DNA, 15 bp, Homo sapiens
tgctccacgtgtgag

SEQ ID NO: 1532057 - DNA, 15 bp, Homo sapiens
gctccacgtgtgagg

SEQ ID NO: 1532058 - DNA, 15 bp, Homo sapiens
ctccacgtgtgaggg

SEQ ID NO: 1532059 - DNA, 15 bp, Homo sapiens
tccacgtgtgagggg

SEQ ID NO: 1532060 - DNA, 15 bp, Homo sapiens
ccacgtgtgaggggt

SEQ ID NO: 1532061 - DNA, 15 bp, Homo sapiens
cacgtgtgaggggtt

SEQ ID NO: 1532062 - DNA, 15 bp, Homo sapiens
acgtgtgaggggttg

SEQ ID NO: 1532063 - DNA, 15 bp, Homo sapiens
cgtgtgaggggttgc

SEQ ID NO: 1532064 - DNA, 15 bp, Homo sapiens
gtgtgaggggttgct

SEQ ID NO: 1532065 - DNA, 15 bp, Homo sapiens
tgtgaggggttgctg

SEQ ID NO: 1532066 - DNA, 15 bp, Homo sapiens
gtgaggggttgctgg

SEQ ID NO: 1532067 - DNA, 15 bp, Homo sapiens
tgaggggttgctggt

SEQ ID NO: 1532068 - DNA, 15 bp, Homo sapiens
gaggggttgctggtc

SEQ ID NO: 1532069 - DNA, 15 bp, Homo sapiens
aggggttgctggtcc

SEQ ID NO: 1532070 - DNA, 15 bp, Homo sapiens
ggggttgctggtcct

SEQ ID NO: 1532071 - DNA, 15 bp, Homo sapiens
gggttgctggtcctg

SEQ ID NO: 1532072 - DNA, 15 bp, Homo sapiens
ggttgctggtcctga

SEQ ID NO: 1532073 - DNA, 15 bp, Homo sapiens
gttgctggtcctgac

SEQ ID NO: 1532074 - DNA, 15 bp, Homo sapiens
ttgctggtcctgacc

SEQ ID NO: 1532075 - DNA, 15 bp, Homo sapiens
tgctggtcctgacca

SEQ ID NO: 1532076 - DNA, 15 bp, Homo sapiens
gctggtcctgaccag

SEQ ID NO: 1532077 - DNA, 15 bp, Homo sapiens
ctggtcctgaccagg

SEQ ID NO: 1532078 - DNA, 15 bp, Homo sapiens
tggtcctgaccaggg

SEQ ID NO: 1532079 - DNA, 15 bp, Homo sapiens
ggtcctgaccagggc

SEQ ID NO: 1532080 - DNA, 15 bp, Homo sapiens
gtcctgaccagggcc

SEQ ID NO: 1532081 - DNA, 15 bp, Homo sapiens
tcctgaccagggcca

SEQ ID NO: 1532082 - DNA, 15 bp, Homo sapiens
cctgaccagggccag

SEQ ID NO: 1532083 - DNA, 15 bp, Homo sapiens
ctgaccagggccagc

SEQ ID NO: 1532084 - DNA, 15 bp, Homo sapiens
tgaccagggccagct

SEQ ID NO: 1532085 - DNA, 15 bp, Homo sapiens
gaccagggccagctg

SEQ ID NO: 1532086 - DNA, 15 bp, Homo sapiens
accagggccagctgt

SEQ ID NO: 1532087 - DNA, 15 bp, Homo sapiens
ccagggccagctgtg

SEQ ID NO: 1532088 - DNA, 15 bp, Homo sapiens
cagggccagctgtga

SEQ ID NO: 1532089 - DNA, 15 bp, Homo sapiens
agggccagctgtgaa

SEQ ID NO: 1532090 - DNA, 15 bp, Homo sapiens
gggccagctgtgaac

SEQ ID NO: 1532091 - DNA, 15 bp, Homo sapiens
ggccagctgtgaacc

SEQ ID NO: 1532092 - DNA, 15 bp, Homo sapiens
gccagctgtgaaccc

SEQ ID NO: 1532093 - DNA, 15 bp, Homo sapiens
ccagctgtgaacccc

SEQ ID NO: 1532094 - DNA, 15 bp, Homo sapiens
cagctgtgaacccca

SEQ ID NO: 1532095 - DNA, 15 bp, Homo sapiens
agctgtgaaccccag

SEQ ID NO: 1532096 - DNA, 15 bp, Homo sapiens
gctgtgaaccccaga

SEQ ID NO: 1532097 - DNA, 15 bp, Homo sapiens
ctgtgaaccccagaa

SEQ ID NO: 1532098 - DNA, 15 bp, Homo sapiens
tgtgaaccccagaat

SEQ ID NO: 1532099 - DNA, 15 bp, Homo sapiens
gtgaaccccagaatc

SEQ ID NO: 1532100 - DNA, 15 bp, Homo sapiens
tgaaccccagaatcc

SEQ ID NO: 1532101 - DNA, 15 bp, Homo sapiens
gaaccccagaatcct

SEQ ID NO: 1532102 - DNA, 15 bp, Homo sapiens
aaccccagaatcctg

SEQ ID NO: 1532103 - DNA, 15 bp, Homo sapiens
accccagaatcctgg

SEQ ID NO: 1532104 - DNA, 15 bp, Homo sapiens
ccccagaatcctggg

SEQ ID NO: 1532105 - DNA, 15 bp, Homo sapiens
cccagaatcctggga

SEQ ID NO: 1532106 - DNA, 15 bp, Homo sapiens
ccagaatcctgggaa

SEQ ID NO: 1532107 - DNA, 15 bp, Homo sapiens
cagaatcctgggaag

SEQ ID NO: 1532108 - DNA, 15 bp, Homo sapiens
agaatcctgggaagt

SEQ ID NO: 1532109 - DNA, 15 bp, Homo sapiens
gaatcctgggaagtc

SEQ ID NO: 1532110 - DNA, 15 bp, Homo sapiens
aatcctgggaagtca

SEQ ID NO: 1532111 - DNA, 15 bp, Homo sapiens
atcctgggaagtcac

SEQ ID NO: 1532112 - DNA, 15 bp, Homo sapiens
tcctgggaagtcact

SEQ ID NO: 1532113 - DNA, 15 bp, Homo sapiens
cctgggaagtcactg

SEQ ID NO: 1532114 - DNA, 15 bp, Homo sapiens
ctgggaagtcactga

SEQ ID NO: 1532115 - DNA, 15 bp, Homo sapiens
tgggaagtcactgac

SEQ ID NO: 1532116 - DNA, 15 bp, Homo sapiens
gggaagtcactgaca

SEQ ID NO: 1532117 - DNA, 15 bp, Homo sapiens
ggaagtcactgacat

SEQ ID NO: 1532118 - DNA, 15 bp, Homo sapiens
gaagtcactgacatt

SEQ ID NO: 1532119 - DNA, 15 bp, Homo sapiens
aagtcactgacattc

SEQ ID NO: 1532120 - DNA, 15 bp, Homo sapiens
agtcactgacattct

SEQ ID NO: 1532121 - DNA, 15 bp, Homo sapiens
gtcactgacattctt

SEQ ID NO: 1532122 - DNA, 15 bp, Homo sapiens
tcactgacattcttg

SEQ ID NO: 1532123 - DNA, 15 bp, Homo sapiens
cactgacattcttgt

SEQ ID NO: 1532124 - DNA, 15 bp, Homo sapiens
actgacattcttgtc

SEQ ID NO: 1532125 - DNA, 15 bp, Homo sapiens
ctgacattcttgtca

SEQ ID NO: 1532126 - DNA, 15 bp, Homo sapiens
tgacattcttgtcag

SEQ ID NO: 1532127 - DNA, 15 bp, Homo sapiens
gacattcttgtcagg

SEQ ID NO: 1532128 - DNA, 15 bp, Homo sapiens
acattcttgtcaggg

SEQ ID NO: 1532129 - DNA, 15 bp, Homo sapiens
cattcttgtcagggc

SEQ ID NO: 1532130 - DNA, 15 bp, Homo sapiens
attcttgtcagggcc

SEQ ID NO: 1532131 - DNA, 15 bp, Homo sapiens
ttcttgtcagggcca

SEQ ID NO: 1532132 - DNA, 15 bp, Homo sapiens
tcttgtcagggccaa

SEQ ID NO: 1532133 - DNA, 15 bp, Homo sapiens
cttgtcagggccaag

SEQ ID NO: 1532134 - DNA, 15 bp, Homo sapiens
ttgtcagggccaaga

SEQ ID NO: 1532135 - DNA, 15 bp, Homo sapiens
tgtcagggccaagag

SEQ ID NO: 1532136 - DNA, 15 bp, Homo sapiens
gtcagggccaagagt

SEQ ID NO: 1532137 - DNA, 15 bp, Homo sapiens
tcagggccaagagtg

SEQ ID NO: 1532138 - DNA, 15 bp, Homo sapiens
cagggccaagagtgg

SEQ ID NO: 1532139 - DNA, 15 bp, Homo sapiens
agggccaagagtgga

SEQ ID NO: 1532140 - DNA, 15 bp, Homo sapiens
gggccaagagtggag

SEQ ID NO: 1532141 - DNA, 15 bp, Homo sapiens
ggccaagagtggagc

SEQ ID NO: 1532142 - DNA, 15 bp, Homo sapiens
gccaagagtggagca

SEQ ID NO: 1532143 - DNA, 15 bp, Homo sapiens
ccaagagtggagcaa

SEQ ID NO: 1532144 - DNA, 15 bp, Homo sapiens
caagagtggagcaag

SEQ ID NO: 1532145 - DNA, 15 bp, Homo sapiens
aagagtggagcaagg

SEQ ID NO: 1532146 - DNA, 15 bp, Homo sapiens
agagtggagcaaggc

SEQ ID NO: 1532147 - DNA, 15 bp, Homo sapiens
gagtggagcaaggca

SEQ ID NO: 1532148 - DNA, 15 bp, Homo sapiens
agtggagcaaggcaa

SEQ ID NO: 1532149 - DNA, 15 bp, Homo sapiens
gtggagcaaggcaat

SEQ ID NO: 1532150 - DNA, 15 bp, Homo sapiens
tggagcaaggcaatg

SEQ ID NO: 1532151 - DNA, 15 bp, Homo sapiens
ggagcaaggcaatgc

SEQ ID NO: 1532152 - DNA, 15 bp, Homo sapiens
gagcaaggcaatgcc

SEQ ID NO: 1532153 - DNA, 15 bp, Homo sapiens
agcaaggcaatgcct

SEQ ID NO: 1532154 - DNA, 15 bp, Homo sapiens
gcaaggcaatgcctc

SEQ ID NO: 1532155 - DNA, 15 bp, Homo sapiens
caaggcaatgcctcg

SEQ ID NO: 1532156 - DNA, 15 bp, Homo sapiens
aaggcaatgcctcgg

SEQ ID NO: 1532157 - DNA, 15 bp, Homo sapiens
aggcaatgcctcggg

SEQ ID NO: 1532158 - DNA, 15 bp, Homo sapiens
ggcaatgcctcgggc

SEQ ID NO: 1532159 - DNA, 15 bp, Homo sapiens
gcaatgcctcgggca

SEQ ID NO: 1532160 - DNA, 15 bp, Homo sapiens
caatgcctcgggcac

SEQ ID NO: 1532161 - DNA, 15 bp, Homo sapiens
aatgcctcgggcaca

SEQ ID NO: 1532162 - DNA, 15 bp, Homo sapiens
atgcctcgggcacaa

SEQ ID NO: 1532163 - DNA, 15 bp, Homo sapiens
tgcctcgggcacaaa

SEQ ID NO: 1532164 - DNA, 15 bp, Homo sapiens
gcctcgggcacaaac

SEQ ID NO: 1532165 - DNA, 15 bp, Homo sapiens
cctcgggcacaaact

SEQ ID NO: 1532166 - DNA, 15 bp, Homo sapiens
ctcgggcacaaactt

SEQ ID NO: 1532167 - DNA, 15 bp, Homo sapiens
tcgggcacaaacttt

SEQ ID NO: 1532168 - DNA, 15 bp, Homo sapiens
cgggcacaaacttta

SEQ ID NO: 1532169 - DNA, 15 bp, Homo sapiens
gggcacaaactttaa

SEQ ID NO: 1532170 - DNA, 15 bp, Homo sapiens
ggcacaaactttaag

SEQ ID NO: 1532171 - DNA, 15 bp, Homo sapiens
gcacaaactttaagg

SEQ ID NO: 1532172 - DNA, 15 bp, Homo sapiens
cacaaactttaaggg

SEQ ID NO: 1532173 - DNA, 15 bp, Homo sapiens
acaaactttaagggg

SEQ ID NO: 1532174 - DNA, 15 bp, Homo sapiens
caaactttaaggggt

SEQ ID NO: 1532175 - DNA, 15 bp, Homo sapiens
aaactttaaggggtc

SEQ ID NO: 1532176 - DNA, 15 bp, Homo sapiens
aactttaaggggtca

SEQ ID NO: 1532177 - DNA, 15 bp, Homo sapiens
actttaaggggtcac

SEQ ID NO: 1532178 - DNA, 15 bp, Homo sapiens
ctttaaggggtcacc

SEQ ID NO: 1532179 - DNA, 15 bp, Homo sapiens
tttaaggggtcacca

SEQ ID NO: 1532180 - DNA, 15 bp, Homo sapiens
ttaaggggtcaccag

SEQ ID NO: 1532181 - DNA, 15 bp, Homo sapiens
taaggggtcaccaga

SEQ ID NO: 1532182 - DNA, 15 bp, Homo sapiens
aaggggtcaccagaa

SEQ ID NO: 1532183 - DNA, 15 bp, Homo sapiens
aggggtcaccagaaa

SEQ ID NO: 1532184 - DNA, 15 bp, Homo sapiens
ggggtcaccagaaac

SEQ ID NO: 1532185 - DNA, 15 bp, Homo sapiens
gggtcaccagaaaca

SEQ ID NO: 1532186 - DNA, 15 bp, Homo sapiens
ggtcaccagaaacat

SEQ ID NO: 1532187 - DNA, 15 bp, Homo sapiens
gtcaccagaaacatc

SEQ ID NO: 1532188 - DNA, 15 bp, Homo sapiens
tcaccagaaacatca

SEQ ID NO: 1532189 - DNA, 15 bp, Homo sapiens
caccagaaacatcaa

SEQ ID NO: 1532190 - DNA, 15 bp, Homo sapiens
accagaaacatcaat

SEQ ID NO: 1532191 - DNA, 15 bp, Homo sapiens
ccagaaacatcaatc

SEQ ID NO: 1532192 - DNA, 15 bp, Homo sapiens
cagaaacatcaatca

SEQ ID NO: 1532193 - DNA, 15 bp, Homo sapiens
agaaacatcaatcat

SEQ ID NO: 1532194 - DNA, 15 bp, Homo sapiens
gaaacatcaatcatc

SEQ ID NO: 1532195 - DNA, 15 bp, Homo sapiens
aaacatcaatcatca

SEQ ID NO: 1532196 - DNA, 15 bp, Homo sapiens
aacatcaatcatcaa

SEQ ID NO: 1532197 - DNA, 15 bp, Homo sapiens
acatcaatcatcaag

SEQ ID NO: 1532198 - DNA, 15 bp, Homo sapiens
catcaatcatcaaga

SEQ ID NO: 1532199 - DNA, 15 bp, Homo sapiens
atcaatcatcaagat

SEQ ID NO: 1532200 - DNA, 15 bp, Homo sapiens
tcaatcatcaagata

SEQ ID NO: 1532201 - DNA, 15 bp, Homo sapiens
caatcatcaagatat

SEQ ID NO: 1532202 - DNA, 15 bp, Homo sapiens
aatcatcaagatata

SEQ ID NO: 1532203 - DNA, 15 bp, Homo sapiens
atcatcaagatatat

SEQ ID NO: 1532204 - DNA, 15 bp, Homo sapiens
tcatcaagatatatg

SEQ ID NO: 1532205 - DNA, 15 bp, Homo sapiens
catcaagatatatgc

SEQ ID NO: 1532206 - DNA, 15 bp, Homo sapiens
atcaagatatatgct

SEQ ID NO: 1532207 - DNA, 15 bp, Homo sapiens
tcaagatatatgcta

SEQ ID NO: 1532208 - DNA, 15 bp, Homo sapiens
caagatatatgctat

SEQ ID NO: 1532209 - DNA, 15 bp, Homo sapiens
aagatatatgctatt

SEQ ID NO: 1532210 - DNA, 15 bp, Homo sapiens
agatatatgctattt

SEQ ID NO: 1532211 - DNA, 15 bp, Homo sapiens
gatatatgctatttt

SEQ ID NO: 1532212 - DNA, 15 bp, Homo sapiens
atatatgctatttta

SEQ ID NO: 1532213 - DNA, 15 bp, Homo sapiens
tatatgctattttaa

SEQ ID NO: 1532214 - DNA, 15 bp, Homo sapiens
atatgctattttaaa

SEQ ID NO: 1532215 - DNA, 15 bp, Homo sapiens
tatgctattttaaat

SEQ ID NO: 1532216 - DNA, 15 bp, Homo sapiens
atgctattttaaata

SEQ ID NO: 1532217 - DNA, 15 bp, Homo sapiens
tgctattttaaataa

SEQ ID NO: 1532218 - DNA, 15 bp, Homo sapiens
gctattttaaataat

SEQ ID NO: 1532219 - DNA, 15 bp, Homo sapiens
ctattttaaataatc

SEQ ID NO: 1532220 - DNA, 15 bp, Homo sapiens
tattttaaataatca

SEQ ID NO: 1532221 - DNA, 15 bp, Homo sapiens
attttaaataatcaa

SEQ ID NO: 1532222 - DNA, 15 bp, Homo sapiens
ttttaaataatcaaa

SEQ ID NO: 1532223 - DNA, 15 bp, Homo sapiens
tttaaataatcaaaa

SEQ ID NO: 1532224 - DNA, 15 bp, Homo sapiens
ttaaataatcaaaat

SEQ ID NO: 1532225 - DNA, 15 bp, Homo sapiens
taaataatcaaaatg

SEQ ID NO: 1532226 - DNA, 15 bp, Homo sapiens
aaataatcaaaatga

SEQ ID NO: 1532227 - DNA, 15 bp, Homo sapiens
aataatcaaaatgaa

SEQ ID NO: 1532228 - DNA, 15 bp, Homo sapiens
ataatcaaaatgaat

SEQ ID NO: 1532229 - DNA, 15 bp, Homo sapiens
taatcaaaatgaatg

SEQ ID NO: 1532230 - DNA, 15 bp, Homo sapiens
aatcaaaatgaatgc

SEQ ID NO: 1532231 - DNA, 15 bp, Homo sapiens
atcaaaatgaatgca

SEQ ID NO: 1532232 - DNA, 15 bp, Homo sapiens
tcaaaatgaatgcaa

SEQ ID NO: 1532233 - DNA, 15 bp, Homo sapiens
caaaatgaatgcaaa

SEQ ID NO: 1532234 - DNA, 15 bp, Homo sapiens
aaaatgaatgcaaaa

SEQ ID NO: 1532235 - DNA, 15 bp, Homo sapiens
aaatgaatgcaaaaa

SEQ ID NO: 1532236 - DNA, 15 bp, Homo sapiens
aatgaatgcaaaaaa

SEQ ID NO: 1532237 - DNA, 15 bp, Homo sapiens
atgaatgcaaaaaaa

SEQ ID NO: 1532238 - DNA, 15 bp, Homo sapiens
tgaatgcaaaaaaaa

SEQ ID NO: 1532239 - DNA, 15 bp, Homo sapiens
gaatgcaaaaaaaat

SEQ ID NO: 1532240 - DNA, 15 bp, Homo sapiens
aatgcaaaaaaaatt

SEQ ID NO: 1532241 - DNA, 15 bp, Homo sapiens
atgcaaaaaaaattt

SEQ ID NO: 1532242 - DNA, 15 bp, Homo sapiens
tgcaaaaaaaattta

SEQ ID NO: 1532243 - DNA, 15 bp, Homo sapiens
gcaaaaaaaatttat

SEQ ID NO: 1532244 - DNA, 15 bp, Homo sapiens
caaaaaaaatttatg

SEQ ID NO: 1532245 - DNA, 15 bp, Homo sapiens
aaaaaaaatttatga

SEQ ID NO: 1532246 - DNA, 15 bp, Homo sapiens
aaaaaaatttatgat

SEQ ID NO: 1532247 - DNA, 15 bp, Homo sapiens
aaaaaatttatgatg

SEQ ID NO: 1532248 - DNA, 15 bp, Homo sapiens
aaaaatttatgatgg

SEQ ID NO: 1532249 - DNA, 15 bp, Homo sapiens
aaaatttatgatgga

SEQ ID NO: 1532250 - DNA, 15 bp, Homo sapiens
aaatttatgatggac

SEQ ID NO: 1532251 - DNA, 15 bp, Homo sapiens
aatttatgatggaca

SEQ ID NO: 1532252 - DNA, 15 bp, Homo sapiens
atttatgatggacaa

SEQ ID NO: 1532253 - DNA, 15 bp, Homo sapiens
tttatgatggacaac

SEQ ID NO: 1532254 - DNA, 15 bp, Homo sapiens
ttatgatggacaaca

SEQ ID NO: 1532255 - DNA, 15 bp, Homo sapiens
tatgatggacaacat

SEQ ID NO: 1532256 - DNA, 15 bp, Homo sapiens
atgatggacaacata

SEQ ID NO: 1532257 - DNA, 15 bp, Homo sapiens
tgatggacaacatac

SEQ ID NO: 1532258 - DNA, 15 bp, Homo sapiens
gatggacaacatacc

SEQ ID NO: 1532259 - DNA, 15 bp, Homo sapiens
atggacaacatacca

SEQ ID NO: 1532260 - DNA, 15 bp, Homo sapiens
tggacaacataccaa

SEQ ID NO: 1532261 - DNA, 15 bp, Homo sapiens
ggacaacataccaaa

SEQ ID NO: 1532262 - DNA, 15 bp, Homo sapiens
gacaacataccaaat

SEQ ID NO: 1532263 - DNA, 15 bp, Homo sapiens
acaacataccaaatt

SEQ ID NO: 1532264 - DNA, 15 bp, Homo sapiens
caacataccaaattc

SEQ ID NO: 1532265 - DNA, 15 bp, Homo sapiens
aacataccaaattct

SEQ ID NO: 1532266 - DNA, 15 bp, Homo sapiens
acataccaaattcta

SEQ ID NO: 1532267 - DNA, 15 bp, Homo sapiens
cataccaaattctaa

SEQ ID NO: 1532268 - DNA, 15 bp, Homo sapiens
ataccaaattctaaa

SEQ ID NO: 1532269 - DNA, 15 bp, Homo sapiens
taccaaattctaaac

SEQ ID NO: 1532270 - DNA, 15 bp, Homo sapiens
accaaattctaaaca

SEQ ID NO: 1532271 - DNA, 15 bp, Homo sapiens
ccaaattctaaacaa

SEQ ID NO: 1532272 - DNA, 15 bp, Homo sapiens
caaattctaaacaaa

SEQ ID NO: 1532273 - DNA, 15 bp, Homo sapiens
aaattctaaacaaag

SEQ ID NO: 1532274 - DNA, 15 bp, Homo sapiens
aattctaaacaaagg

SEQ ID NO: 1532275 - DNA, 15 bp, Homo sapiens
attctaaacaaaggc

SEQ ID NO: 1532276 - DNA, 15 bp, Homo sapiens
ttctaaacaaaggca

SEQ ID NO: 1532277 - DNA, 15 bp, Homo sapiens
tctaaacaaaggcag

SEQ ID NO: 1532278 - DNA, 15 bp, Homo sapiens
ctaaacaaaggcagg

SEQ ID NO: 1532279 - DNA, 15 bp, Homo sapiens
taaacaaaggcagga

SEQ ID NO: 1532280 - DNA, 15 bp, Homo sapiens
aaacaaaggcaggat

SEQ ID NO: 1532281 - DNA, 15 bp, Homo sapiens
aacaaaggcaggatg

SEQ ID NO: 1532282 - DNA, 15 bp, Homo sapiens
acaaaggcaggatga

SEQ ID NO: 1532283 - DNA, 15 bp, Homo sapiens
caaaggcaggatgag

SEQ ID NO: 1532284 - DNA, 15 bp, Homo sapiens
aaaggcaggatgagt

SEQ ID NO: 1532285 - DNA, 15 bp, Homo sapiens
aaggcaggatgagta

SEQ ID NO: 1532286 - DNA, 15 bp, Homo sapiens
aggcaggatgagtat

SEQ ID NO: 1532287 - DNA, 15 bp, Homo sapiens
ggcaggatgagtatc

SEQ ID NO: 1532288 - DNA, 15 bp, Homo sapiens
gcaggatgagtatca

SEQ ID NO: 1532289 - DNA, 15 bp, Homo sapiens
caggatgagtatcac

SEQ ID NO: 1532290 - DNA, 15 bp, Homo sapiens
aggatgagtatcact

SEQ ID NO: 1532291 - DNA, 15 bp, Homo sapiens
ggatgagtatcactg

SEQ ID NO: 1532292 - DNA, 15 bp, Homo sapiens
gatgagtatcactgg

SEQ ID NO: 1532293 - DNA, 15 bp, Homo sapiens
atgagtatcactggc

SEQ ID NO: 1532294 - DNA, 15 bp, Homo sapiens
tgagtatcactggct

SEQ ID NO: 1532295 - DNA, 15 bp, Homo sapiens
gagtatcactggctt

SEQ ID NO: 1532296 - DNA, 15 bp, Homo sapiens
agtatcactggcttc

SEQ ID NO: 1532297 - DNA, 15 bp, Homo sapiens
gtatcactggcttct

SEQ ID NO: 1532298 - DNA, 15 bp, Homo sapiens
tatcactggcttctg

SEQ ID NO: 1532299 - DNA, 15 bp, Homo sapiens
atcactggcttctgc

SEQ ID NO: 1532300 - DNA, 15 bp, Homo sapiens
tcactggcttctgca

SEQ ID NO: 1532301 - DNA, 15 bp, Homo sapiens
cactggcttctgcac

SEQ ID NO: 1532302 - DNA, 15 bp, Homo sapiens
actggcttctgcact

SEQ ID NO: 1532303 - DNA, 15 bp, Homo sapiens
ctggcttctgcactt

SEQ ID NO: 1532304 - DNA, 15 bp, Homo sapiens
tggcttctgcacttt

SEQ ID NO: 1532305 - DNA, 15 bp, Homo sapiens
ggcttctgcactttt

SEQ ID NO: 1532306 - DNA, 15 bp, Homo sapiens
gcttctgcacttttc

SEQ ID NO: 1532307 - DNA, 15 bp, Homo sapiens
cttctgcacttttct

SEQ ID NO: 1532308 - DNA, 15 bp, Homo sapiens
ttctgcacttttctc

SEQ ID NO: 1532309 - DNA, 15 bp, Homo sapiens
tctgcacttttctcc

SEQ ID NO: 1532310 - DNA, 15 bp, Homo sapiens
ctgcacttttctcca

SEQ ID NO: 1532311 - DNA, 15 bp, Homo sapiens
tgcacttttctccac

SEQ ID NO: 1532312 - DNA, 15 bp, Homo sapiens
gcacttttctccacc

SEQ ID NO: 1532313 - DNA, 15 bp, Homo sapiens
cacttttctccaccc

SEQ ID NO: 1532314 - DNA, 15 bp, Homo sapiens
acttttctccaccca

SEQ ID NO: 1532315 - DNA, 15 bp, Homo sapiens
cttttctccacccag

SEQ ID NO: 1532316 - DNA, 15 bp, Homo sapiens
ttttctccacccagt

SEQ ID NO: 1532317 - DNA, 15 bp, Homo sapiens
tttctccacccagtc

SEQ ID NO: 1532318 - DNA, 15 bp, Homo sapiens
ttctccacccagtct

SEQ ID NO: 1532319 - DNA, 15 bp, Homo sapiens
tctccacccagtcta

SEQ ID NO: 1532320 - DNA, 15 bp, Homo sapiens
ctccacccagtctac

SEQ ID NO: 1532321 - DNA, 15 bp, Homo sapiens
tccacccagtctacc

SEQ ID NO: 1532322 - DNA, 15 bp, Homo sapiens
ccacccagtctaccc

SEQ ID NO: 1532323 - DNA, 15 bp, Homo sapiens
acccagtctacccct

SEQ ID NO: 1532324 - DNA, 15 bp, Homo sapiens
cccagtctacccctc

SEQ ID NO: 1532325 - DNA, 15 bp, Homo sapiens
ccagtctacccctct

SEQ ID NO: 1532326 - DNA, 15 bp, Homo sapiens
cagtctacccctctt

SEQ ID NO: 1532327 - DNA, 15 bp, Homo sapiens
agtctacccctcttc

SEQ ID NO: 1532328 - DNA, 15 bp, Homo sapiens
gtctacccctcttct

SEQ ID NO: 1532329 - DNA, 15 bp, Homo sapiens
tctacccctcttcta

SEQ ID NO: 1532330 - DNA, 15 bp, Homo sapiens
ctacccctcttctag

SEQ ID NO: 1532331 - DNA, 15 bp, Homo sapiens
tacccctcttctagt

SEQ ID NO: 1532332 - DNA, 15 bp, Homo sapiens
acccctcttctagtg

SEQ ID NO: 1532333 - DNA, 15 bp, Homo sapiens
cccctcttctagtgc

SEQ ID NO: 1532334 - DNA, 15 bp, Homo sapiens
ccctcttctagtgcc

SEQ ID NO: 1532335 - DNA, 15 bp, Homo sapiens
cctcttctagtgcct

SEQ ID NO: 1532336 - DNA, 15 bp, Homo sapiens
ctcttctagtgcctg

SEQ ID NO: 1532337 - DNA, 15 bp, Homo sapiens
tcttctagtgcctgg

SEQ ID NO: 1532338 - DNA, 15 bp, Homo sapiens
cttctagtgcctgga

SEQ ID NO: 1532339 - DNA, 15 bp, Homo sapiens
ttctagtgcctggat

SEQ ID NO: 1532340 - DNA, 15 bp, Homo sapiens
tctagtgcctggatc

SEQ ID NO: 1532341 - DNA, 15 bp, Homo sapiens
ctagtgcctggatcg

SEQ ID NO: 1532342 - DNA, 15 bp, Homo sapiens
tagtgcctggatcgc

SEQ ID NO: 1532343 - DNA, 15 bp, Homo sapiens
agtgcctggatcgca

SEQ ID NO: 1532344 - DNA, 15 bp, Homo sapiens
gtgcctggatcgcag

SEQ ID NO: 1532345 - DNA, 15 bp, Homo sapiens
tgcctggatcgcagg

SEQ ID NO: 1532346 - DNA, 15 bp, Homo sapiens
gcctggatcgcaggg

SEQ ID NO: 1532347 - DNA, 15 bp, Homo sapiens
cctggatcgcagggt

SEQ ID NO: 1532348 - DNA, 15 bp, Homo sapiens
ctggatcgcagggtg

SEQ ID NO: 1532349 - DNA, 15 bp, Homo sapiens
tggatcgcagggtgc

SEQ ID NO: 1532350 - DNA, 15 bp, Homo sapiens
ggatcgcagggtgcc

SEQ ID NO: 1532351 - DNA, 15 bp, Homo sapiens
gatcgcagggtgcca

SEQ ID NO: 1532352 - DNA, 15 bp, Homo sapiens
atcgcagggtgccaa

SEQ ID NO: 1532353 - DNA, 15 bp, Homo sapiens
tcgcagggtgccaag

SEQ ID NO: 1532354 - DNA, 15 bp, Homo sapiens
cgcagggtgccaagg

SEQ ID NO: 1532355 - DNA, 15 bp, Homo sapiens
gcagggtgccaaggc

SEQ ID NO: 1532356 - DNA, 15 bp, Homo sapiens
cagggtgccaaggcc

SEQ ID NO: 1532357 - DNA, 15 bp, Homo sapiens
agggtgccaaggcct

SEQ ID NO: 1532358 - DNA, 15 bp, Homo sapiens
gggtgccaaggcctg

SEQ ID NO: 1532359 - DNA, 15 bp, Homo sapiens
ggtgccaaggcctgg

SEQ ID NO: 1532360 - DNA, 15 bp, Homo sapiens
gtgccaaggcctgga

SEQ ID NO: 1532361 - DNA, 15 bp, Homo sapiens
tgccaaggcctggat

SEQ ID NO: 1532362 - DNA, 15 bp, Homo sapiens
gccaaggcctggatg

SEQ ID NO: 1532363 - DNA, 15 bp, Homo sapiens
ccaaggcctggatga

SEQ ID NO: 1532364 - DNA, 15 bp, Homo sapiens
caaggcctggatgag

SEQ ID NO: 1532365 - DNA, 15 bp, Homo sapiens
aaggcctggatgagg

SEQ ID NO: 1532366 - DNA, 15 bp, Homo sapiens
aggcctggatgaggg

SEQ ID NO: 1532367 - DNA, 15 bp, Homo sapiens
ggcctggatgaggga

SEQ ID NO: 1532368 - DNA, 15 bp, Homo sapiens
gcctggatgagggaa

SEQ ID NO: 1532369 - DNA, 15 bp, Homo sapiens
cctggatgagggaag

SEQ ID NO: 1532370 - DNA, 15 bp, Homo sapiens
ctggatgagggaagc

SEQ ID NO: 1532371 - DNA, 15 bp, Homo sapiens
tggatgagggaagcg

SEQ ID NO: 1532372 - DNA, 15 bp, Homo sapiens
ggatgagggaagcgt

SEQ ID NO: 1532373 - DNA, 15 bp, Homo sapiens
gatgagggaagcgtg

SEQ ID NO: 1532374 - DNA, 15 bp, Homo sapiens
atgagggaagcgtgg

SEQ ID NO: 1532375 - DNA, 15 bp, Homo sapiens
tgagggaagcgtgga

SEQ ID NO: 1532376 - DNA, 15 bp, Homo sapiens
gagggaagcgtggag

SEQ ID NO: 1532377 - DNA, 15 bp, Homo sapiens
agggaagcgtggagc

SEQ ID NO: 1532378 - DNA, 15 bp, Homo sapiens
gggaagcgtggagct

SEQ ID NO: 1532379 - DNA, 15 bp, Homo sapiens
ggaagcgtggagctg

SEQ ID NO: 1532380 - DNA, 15 bp, Homo sapiens
gaagcgtggagctgc

SEQ ID NO: 1532381 - DNA, 15 bp, Homo sapiens
aagcgtggagctgca

SEQ ID NO: 1532382 - DNA, 15 bp, Homo sapiens
agcgtggagctgcaa

SEQ ID NO: 1532383 - DNA, 15 bp, Homo sapiens
gcgtggagctgcaat

SEQ ID NO: 1532384 - DNA, 15 bp, Homo sapiens
cgtggagctgcaatg

SEQ ID NO: 1532385 - DNA, 15 bp, Homo sapiens
gtggagctgcaatgg

SEQ ID NO: 1532386 - DNA, 15 bp, Homo sapiens
tggagctgcaatggc

SEQ ID NO: 1532387 - DNA, 15 bp, Homo sapiens
ggagctgcaatggcc

SEQ ID NO: 1532388 - DNA, 15 bp, Homo sapiens
gagctgcaatggcca

SEQ ID NO: 1532389 - DNA, 15 bp, Homo sapiens
agctgcaatggccac

SEQ ID NO: 1532390 - DNA, 15 bp, Homo sapiens
gctgcaatggccact

SEQ ID NO: 1532391 - DNA, 15 bp, Homo sapiens
ctgcaatggccactc

SEQ ID NO: 1532392 - DNA, 15 bp, Homo sapiens
tgcaatggccactcc

SEQ ID NO: 1532393 - DNA, 15 bp, Homo sapiens
gcaatggccactcct

SEQ ID NO: 1532394 - DNA, 15 bp, Homo sapiens
caatggccactcctg

SEQ ID NO: 1532395 - DNA, 15 bp, Homo sapiens
aatggccactcctgt

SEQ ID NO: 1532396 - DNA, 15 bp, Homo sapiens
atggccactcctgtc

SEQ ID NO: 1532397 - DNA, 15 bp, Homo sapiens
tggccactcctgtct

SEQ ID NO: 1532398 - DNA, 15 bp, Homo sapiens
ggccactcctgtctg

SEQ ID NO: 1532399 - DNA, 15 bp, Homo sapiens
gccactcctgtctgc

SEQ ID NO: 1532400 - DNA, 15 bp, Homo sapiens
ccactcctgtctgcc

SEQ ID NO: 1532401 - DNA, 15 bp, Homo sapiens
cactcctgtctgcct

SEQ ID NO: 1532402 - DNA, 15 bp, Homo sapiens
actcctgtctgcctg

SEQ ID NO: 1532403 - DNA, 15 bp, Homo sapiens
ctcctgtctgcctgt

SEQ ID NO: 1532404 - DNA, 15 bp, Homo sapiens
tcctgtctgcctgtt

SEQ ID NO: 1532405 - DNA, 15 bp, Homo sapiens
cctgtctgcctgttc

SEQ ID NO: 1532406 - DNA, 15 bp, Homo sapiens
ctgtctgcctgttct

SEQ ID NO: 1532407 - DNA, 15 bp, Homo sapiens
tgtctgcctgttctg

SEQ ID NO: 1532408 - DNA, 15 bp, Homo sapiens
gtctgcctgttctgg

SEQ ID NO: 1532409 - DNA, 15 bp, Homo sapiens
tctgcctgttctggc

SEQ ID NO: 1532410 - DNA, 15 bp, Homo sapiens
ctgcctgttctggct

SEQ ID NO: 1532411 - DNA, 15 bp, Homo sapiens
tgcctgttctggctg

SEQ ID NO: 1532412 - DNA, 15 bp, Homo sapiens
gcctgttctggctgc

SEQ ID NO: 1532413 - DNA, 15 bp, Homo sapiens
cctgttctggctgca

SEQ ID NO: 1532414 - DNA, 15 bp, Homo sapiens
ctgttctggctgcac

SEQ ID NO: 1532415 - DNA, 15 bp, Homo sapiens
tgttctggctgcaca

SEQ ID NO: 1532416 - DNA, 15 bp, Homo sapiens
gttctggctgcacag

SEQ ID NO: 1532417 - DNA, 15 bp, Homo sapiens
ttctggctgcacaga

SEQ ID NO: 1532418 - DNA, 15 bp, Homo sapiens
tctggctgcacagag

SEQ ID NO: 1532419 - DNA, 15 bp, Homo sapiens
ctggctgcacagagg

SEQ ID NO: 1532420 - DNA, 15 bp, Homo sapiens
tggctgcacagagga

SEQ ID NO: 1532421 - DNA, 15 bp, Homo sapiens
ggctgcacagaggac

SEQ ID NO: 1532422 - DNA, 15 bp, Homo sapiens
gctgcacagaggact

SEQ ID NO: 1532423 - DNA, 15 bp, Homo sapiens
ctgcacagaggactc

SEQ ID NO: 1532424 - DNA, 15 bp, Homo sapiens
tgcacagaggactca

SEQ ID NO: 1532425 - DNA, 15 bp, Homo sapiens
gcacagaggactcag

SEQ ID NO: 1532426 - DNA, 15 bp, Homo sapiens
cacagaggactcagt

SEQ ID NO: 1532427 - DNA, 15 bp, Homo sapiens
acagaggactcagtc

SEQ ID NO: 1532428 - DNA, 15 bp, Homo sapiens
cagaggactcagtcc

SEQ ID NO: 1532429 - DNA, 15 bp, Homo sapiens
agaggactcagtcct

SEQ ID NO: 1532430 - DNA, 15 bp, Homo sapiens
gaggactcagtcctt

SEQ ID NO: 1532431 - DNA, 15 bp, Homo sapiens
aggactcagtccttg

SEQ ID NO: 1532432 - DNA, 15 bp, Homo sapiens
ggactcagtccttgt

SEQ ID NO: 1532433 - DNA, 15 bp, Homo sapiens
gactcagtccttgtc

SEQ ID NO: 1532434 - DNA, 15 bp, Homo sapiens
actcagtccttgtct

SEQ ID NO: 1532435 - DNA, 15 bp, Homo sapiens
ctcagtccttgtctt

SEQ ID NO: 1532436 - DNA, 15 bp, Homo sapiens
tcagtccttgtcttg

SEQ ID NO: 1532437 - DNA, 15 bp, Homo sapiens
cagtccttgtcttgg

SEQ ID NO: 1532438 - DNA, 15 bp, Homo sapiens
agtccttgtcttggg

SEQ ID NO: 1532439 - DNA, 15 bp, Homo sapiens
gtccttgtcttgggg

SEQ ID NO: 1532440 - DNA, 15 bp, Homo sapiens
tccttgtcttggggg

SEQ ID NO: 1532441 - DNA, 15 bp, Homo sapiens
ccttgtcttggggga

SEQ ID NO: 1532442 - DNA, 15 bp, Homo sapiens
cttgtcttgggggaa

SEQ ID NO: 1532443 - DNA, 15 bp, Homo sapiens
ttgtcttgggggaac

SEQ ID NO: 1532444 - DNA, 15 bp, Homo sapiens
tgtcttgggggaacc

SEQ ID NO: 1532445 - DNA, 15 bp, Homo sapiens
gtcttgggggaacct

SEQ ID NO: 1532446 - DNA, 15 bp, Homo sapiens
tcttgggggaaccta

SEQ ID NO: 1532447 - DNA, 15 bp, Homo sapiens
cttgggggaacctat

SEQ ID NO: 1532448 - DNA, 15 bp, Homo sapiens
ttgggggaacctatc

SEQ ID NO: 1532449 - DNA, 15 bp, Homo sapiens
tgggggaacctatct

SEQ ID NO: 1532450 - DNA, 15 bp, Homo sapiens
gggggaacctatctt

SEQ ID NO: 1532451 - DNA, 15 bp, Homo sapiens
ggggaacctatcttg

SEQ ID NO: 1532452 - DNA, 15 bp, Homo sapiens
gggaacctatcttgg

SEQ ID NO: 1532453 - DNA, 15 bp, Homo sapiens
ggaacctatcttggt

SEQ ID NO: 1532454 - DNA, 15 bp, Homo sapiens
gaacctatcttggtt

SEQ ID NO: 1532455 - DNA, 15 bp, Homo sapiens
aacctatcttggttt

SEQ ID NO: 1532456 - DNA, 15 bp, Homo sapiens
acctatcttggtttt

SEQ ID NO: 1532457 - DNA, 15 bp, Homo sapiens
cctatcttggtttta

SEQ ID NO: 1532458 - DNA, 15 bp, Homo sapiens
ctatcttggttttag

SEQ ID NO: 1532459 - DNA, 15 bp, Homo sapiens
tatcttggttttagg

SEQ ID NO: 1532460 - DNA, 15 bp, Homo sapiens
atcttggttttaggg

SEQ ID NO: 1532461 - DNA, 15 bp, Homo sapiens
tcttggttttagggt

SEQ ID NO: 1532462 - DNA, 15 bp, Homo sapiens
cttggttttagggtc

SEQ ID NO: 1532463 - DNA, 15 bp, Homo sapiens
ttggttttagggtca

SEQ ID NO: 1532464 - DNA, 15 bp, Homo sapiens
tggttttagggtcat

SEQ ID NO: 1532465 - DNA, 15 bp, Homo sapiens
ggttttagggtcatc

SEQ ID NO: 1532466 - DNA, 15 bp, Homo sapiens
gttttagggtcatcc

SEQ ID NO: 1532467 - DNA, 15 bp, Homo sapiens
ttttagggtcatcct

SEQ ID NO: 1532468 - DNA, 15 bp, Homo sapiens
tttagggtcatccta

SEQ ID NO: 1532469 - DNA, 15 bp, Homo sapiens
ttagggtcatcctaa

SEQ ID NO: 1532470 - DNA, 15 bp, Homo sapiens
tagggtcatcctaag

SEQ ID NO: 1532471 - DNA, 15 bp, Homo sapiens
agggtcatcctaagg

SEQ ID NO: 1532472 - DNA, 15 bp, Homo sapiens
gggtcatcctaagga

SEQ ID NO: 1532473 - DNA, 15 bp, Homo sapiens
ggtcatcctaaggat

SEQ ID NO: 1532474 - DNA, 15 bp, Homo sapiens
gtcatcctaaggatc

SEQ ID NO: 1532475 - DNA, 15 bp, Homo sapiens
tcatcctaaggatct

SEQ ID NO: 1532476 - DNA, 15 bp, Homo sapiens
catcctaaggatctg

SEQ ID NO: 1532477 - DNA, 15 bp, Homo sapiens
atcctaaggatctga

SEQ ID NO: 1532478 - DNA, 15 bp, Homo sapiens
tcctaaggatctgat

SEQ ID NO: 1532479 - DNA, 15 bp, Homo sapiens
cctaaggatctgatg

SEQ ID NO: 1532480 - DNA, 15 bp, Homo sapiens
ctaaggatctgatgt

SEQ ID NO: 1532481 - DNA, 15 bp, Homo sapiens
taaggatctgatgtt

SEQ ID NO: 1532482 - DNA, 15 bp, Homo sapiens
aaggatctgatgttt

SEQ ID NO: 1532483 - DNA, 15 bp, Homo sapiens
aggatctgatgtttt

SEQ ID NO: 1532484 - DNA, 15 bp, Homo sapiens
ggatctgatgttttc

SEQ ID NO: 1532485 - DNA, 15 bp, Homo sapiens
gatctgatgttttcc

SEQ ID NO: 1532486 - DNA, 15 bp, Homo sapiens
atctgatgttttcca

SEQ ID NO: 1532487 - DNA, 15 bp, Homo sapiens
tctgatgttttccaa

SEQ ID NO: 1532488 - DNA, 15 bp, Homo sapiens
ctgatgttttccaag

SEQ ID NO: 1532489 - DNA, 15 bp, Homo sapiens
tgatgttttccaagt

SEQ ID NO: 1532490 - DNA, 15 bp, Homo sapiens
gatgttttccaagtg

SEQ ID NO: 1532491 - DNA, 15 bp, Homo sapiens
atgttttccaagtga

SEQ ID NO: 1532492 - DNA, 15 bp, Homo sapiens
tgttttccaagtgag

SEQ ID NO: 1532493 - DNA, 15 bp, Homo sapiens
gttttccaagtgagc

SEQ ID NO: 1532494 - DNA, 15 bp, Homo sapiens
ttttccaagtgagct

SEQ ID NO: 1532495 - DNA, 15 bp, Homo sapiens
tttccaagtgagctg

SEQ ID NO: 1532496 - DNA, 15 bp, Homo sapiens
ttccaagtgagctgg

SEQ ID NO: 1532497 - DNA, 15 bp, Homo sapiens
tccaagtgagctggc

SEQ ID NO: 1532498 - DNA, 15 bp, Homo sapiens
ccaagtgagctggct

SEQ ID NO: 1532499 - DNA, 15 bp, Homo sapiens
caagtgagctggctg

SEQ ID NO: 1532500 - DNA, 15 bp, Homo sapiens
aagtgagctggctgt

SEQ ID NO: 1532501 - DNA, 15 bp, Homo sapiens
agtgagctggctgtc

SEQ ID NO: 1532502 - DNA, 15 bp, Homo sapiens
gtgagctggctgtcc

SEQ ID NO: 1532503 - DNA, 15 bp, Homo sapiens
tgagctggctgtcca

SEQ ID NO: 1532504 - DNA, 15 bp, Homo sapiens
gagctggctgtccag

SEQ ID NO: 1532505 - DNA, 15 bp, Homo sapiens
agctggctgtccagg

SEQ ID NO: 1532506 - DNA, 15 bp, Homo sapiens
gctggctgtccaggc

SEQ ID NO: 1532507 - DNA, 15 bp, Homo sapiens
ctggctgtccaggcc

SEQ ID NO: 1532508 - DNA, 15 bp, Homo sapiens
tggctgtccaggccc

SEQ ID NO: 1532509 - DNA, 15 bp, Homo sapiens
ggctgtccaggccca

SEQ ID NO: 1532510 - DNA, 15 bp, Homo sapiens
gctgtccaggcccac

SEQ ID NO: 1532511 - DNA, 15 bp, Homo sapiens
ctgtccaggcccacc

SEQ ID NO: 1532512 - DNA, 15 bp, Homo sapiens
tgtccaggcccaccc

SEQ ID NO: 1532513 - DNA, 15 bp, Homo sapiens
gtccaggcccaccca

SEQ ID NO: 1532514 - DNA, 15 bp, Homo sapiens
tccaggcccacccag

SEQ ID NO: 1532515 - DNA, 15 bp, Homo sapiens
ccaggcccacccagg

SEQ ID NO: 1532516 - DNA, 15 bp, Homo sapiens
caggcccacccaggt

SEQ ID NO: 1532517 - DNA, 15 bp, Homo sapiens
aggcccacccaggtt

SEQ ID NO: 1532518 - DNA, 15 bp, Homo sapiens
ggcccacccaggttc

SEQ ID NO: 1532519 - DNA, 15 bp, Homo sapiens
gcccacccaggttca

SEQ ID NO: 1532520 - DNA, 15 bp, Homo sapiens
cccacccaggttcag

SEQ ID NO: 1532521 - DNA, 15 bp, Homo sapiens
ccacccaggttcagt

SEQ ID NO: 1532522 - DNA, 15 bp, Homo sapiens
cacccaggttcagtc

SEQ ID NO: 1532523 - DNA, 15 bp, Homo sapiens
acccaggttcagtcc

SEQ ID NO: 1532524 - DNA, 15 bp, Homo sapiens
cccaggttcagtcca

SEQ ID NO: 1532525 - DNA, 15 bp, Homo sapiens
ccaggttcagtccag

SEQ ID NO: 1532526 - DNA, 15 bp, Homo sapiens
caggttcagtccagt

SEQ ID NO: 1532527 - DNA, 15 bp, Homo sapiens
aggttcagtccagtc

SEQ ID NO: 1532528 - DNA, 15 bp, Homo sapiens
ggttcagtccagtcc

SEQ ID NO: 1532529 - DNA, 15 bp, Homo sapiens
gttcagtccagtcct

SEQ ID NO: 1532530 - DNA, 15 bp, Homo sapiens
ttcagtccagtcctg

SEQ ID NO: 1532531 - DNA, 15 bp, Homo sapiens
tcagtccagtcctgt

SEQ ID NO: 1532532 - DNA, 15 bp, Homo sapiens
cagtccagtcctgtg

SEQ ID NO: 1532533 - DNA, 15 bp, Homo sapiens
agtccagtcctgtgt

SEQ ID NO: 1532534 - DNA, 15 bp, Homo sapiens
gtccagtcctgtgtc

SEQ ID NO: 1532535 - DNA, 15 bp, Homo sapiens
tccagtcctgtgtct

SEQ ID NO: 1532536 - DNA, 15 bp, Homo sapiens
ccagtcctgtgtctc

SEQ ID NO: 1532537 - DNA, 15 bp, Homo sapiens
cagtcctgtgtctct

SEQ ID NO: 1532538 - DNA, 15 bp, Homo sapiens
agtcctgtgtctctg

SEQ ID NO: 1532539 - DNA, 15 bp, Homo sapiens
gtcctgtgtctctgg

SEQ ID NO: 1532540 - DNA, 15 bp, Homo sapiens
tcctgtgtctctggg

SEQ ID NO: 1532541 - DNA, 15 bp, Homo sapiens
cctgtgtctctggga

SEQ ID NO: 1532542 - DNA, 15 bp, Homo sapiens
ctgtgtctctgggaa

SEQ ID NO: 1532543 - DNA, 15 bp, Homo sapiens
tgtgtctctgggaag

SEQ ID NO: 1532544 - DNA, 15 bp, Homo sapiens
gtgtctctgggaagt

SEQ ID NO: 1532545 - DNA, 15 bp, Homo sapiens
tgtctctgggaagtg

SEQ ID NO: 1532546 - DNA, 15 bp, Homo sapiens
gtctctgggaagtgc

SEQ ID NO: 1532547 - DNA, 15 bp, Homo sapiens
tctctgggaagtgct

SEQ ID NO: 1532548 - DNA, 15 bp, Homo sapiens
ctctgggaagtgctg

SEQ ID NO: 1532549 - DNA, 15 bp, Homo sapiens
tctgggaagtgctgc

SEQ ID NO: 1532550 - DNA, 15 bp, Homo sapiens
ctgggaagtgctgcc

SEQ ID NO: 1532551 - DNA, 15 bp, Homo sapiens
tgggaagtgctgccc

SEQ ID NO: 1532552 - DNA, 15 bp, Homo sapiens
gggaagtgctgcccc

SEQ ID NO: 1532553 - DNA, 15 bp, Homo sapiens
ggaagtgctgcccct

SEQ ID NO: 1532554 - DNA, 15 bp, Homo sapiens
gaagtgctgccccta

SEQ ID NO: 1532555 - DNA, 15 bp, Homo sapiens
aagtgctgcccctac

SEQ ID NO: 1532556 - DNA, 15 bp, Homo sapiens
agtgctgcccctacc

SEQ ID NO: 1532557 - DNA, 15 bp, Homo sapiens
gtgctgcccctaccc

SEQ ID NO: 1532558 - DNA, 15 bp, Homo sapiens
tgctgcccctacccc

SEQ ID NO: 1532559 - DNA, 15 bp, Homo sapiens
gctgcccctacccca

SEQ ID NO: 1532560 - DNA, 15 bp, Homo sapiens
ctgcccctaccccaa

SEQ ID NO: 1532561 - DNA, 15 bp, Homo sapiens
tgcccctaccccaag

SEQ ID NO: 1532562 - DNA, 15 bp, Homo sapiens
gcccctaccccaagc

SEQ ID NO: 1532563 - DNA, 15 bp, Homo sapiens
cccctaccccaagcc

SEQ ID NO: 1532564 - DNA, 15 bp, Homo sapiens
ccctaccccaagcca

SEQ ID NO: 1532565 - DNA, 15 bp, Homo sapiens
cctaccccaagccag

SEQ ID NO: 1532566 - DNA, 15 bp, Homo sapiens
ctaccccaagccagt

SEQ ID NO: 1532567 - DNA, 15 bp, Homo sapiens
taccccaagccagtg

SEQ ID NO: 1532568 - DNA, 15 bp, Homo sapiens
accccaagccagtgt

SEQ ID NO: 1532569 - DNA, 15 bp, Homo sapiens
ccccaagccagtgtt

SEQ ID NO: 1532570 - DNA, 15 bp, Homo sapiens
cccaagccagtgttt

SEQ ID NO: 1532571 - DNA, 15 bp, Homo sapiens
ccaagccagtgtttg

SEQ ID NO: 1532572 - DNA, 15 bp, Homo sapiens
caagccagtgtttga

SEQ ID NO: 1532573 - DNA, 15 bp, Homo sapiens
aagccagtgtttgac

SEQ ID NO: 1532574 - DNA, 15 bp, Homo sapiens
agccagtgtttgacc

SEQ ID NO: 1532575 - DNA, 15 bp, Homo sapiens
gccagtgtttgacct

SEQ ID NO: 1532576 - DNA, 15 bp, Homo sapiens
ccagtgtttgacctt

SEQ ID NO: 1532577 - DNA, 15 bp, Homo sapiens
cagtgtttgaccttg

SEQ ID NO: 1532578 - DNA, 15 bp, Homo sapiens
agtgtttgaccttgg

SEQ ID NO: 1532579 - DNA, 15 bp, Homo sapiens
gtgtttgaccttgga

SEQ ID NO: 1532580 - DNA, 15 bp, Homo sapiens
tgtttgaccttggag

SEQ ID NO: 1532581 - DNA, 15 bp, Homo sapiens
gtttgaccttggagc

SEQ ID NO: 1532582 - DNA, 15 bp, Homo sapiens
tttgaccttggagca

SEQ ID NO: 1532583 - DNA, 15 bp, Homo sapiens
ttgaccttggagcaa

SEQ ID NO: 1532584 - DNA, 15 bp, Homo sapiens
tgaccttggagcaat

SEQ ID NO: 1532585 - DNA, 15 bp, Homo sapiens
gaccttggagcaatg

SEQ ID NO: 1532586 - DNA, 15 bp, Homo sapiens
accttggagcaatga

SEQ ID NO: 1532587 - DNA, 15 bp, Homo sapiens
ccttggagcaatgag

SEQ ID NO: 1532588 - DNA, 15 bp, Homo sapiens
cttggagcaatgagc

SEQ ID NO: 1532589 - DNA, 15 bp, Homo sapiens
ttggagcaatgagca

SEQ ID NO: 1532590 - DNA, 15 bp, Homo sapiens
tggagcaatgagcaa

SEQ ID NO: 1532591 - DNA, 15 bp, Homo sapiens
ggagcaatgagcaat

SEQ ID NO: 1532592 - DNA, 15 bp, Homo sapiens
gagcaatgagcaatg

SEQ ID NO: 1532593 - DNA, 15 bp, Homo sapiens
agcaatgagcaatgc

SEQ ID NO: 1532594 - DNA, 15 bp, Homo sapiens
gcaatgagcaatgcc

SEQ ID NO: 1532595 - DNA, 15 bp, Homo sapiens
caatgagcaatgccc

SEQ ID NO: 1532596 - DNA, 15 bp, Homo sapiens
aatgagcaatgccct

SEQ ID NO: 1532597 - DNA, 15 bp, Homo sapiens
atgagcaatgccctc

SEQ ID NO: 1532598 - DNA, 15 bp, Homo sapiens
tgagcaatgccctcc

SEQ ID NO: 1532599 - DNA, 15 bp, Homo sapiens
gagcaatgccctcct

SEQ ID NO: 1532600 - DNA, 15 bp, Homo sapiens
agcaatgccctcctt

SEQ ID NO: 1532601 - DNA, 15 bp, Homo sapiens
gcaatgccctccttc

SEQ ID NO: 1532602 - DNA, 15 bp, Homo sapiens
caatgccctccttcc

SEQ ID NO: 1532603 - DNA, 15 bp, Homo sapiens
aatgccctccttcca

SEQ ID NO: 1532604 - DNA, 15 bp, Homo sapiens
atgccctccttccac

SEQ ID NO: 1532605 - DNA, 15 bp, Homo sapiens
tgccctccttccact

SEQ ID NO: 1532606 - DNA, 15 bp, Homo sapiens
gccctccttccactt

SEQ ID NO: 1532607 - DNA, 15 bp, Homo sapiens
ccctccttccacttt

SEQ ID NO: 1532608 - DNA, 15 bp, Homo sapiens
cctccttccactttc

SEQ ID NO: 1532609 - DNA, 15 bp, Homo sapiens
ctccttccactttca

SEQ ID NO: 1532610 - DNA, 15 bp, Homo sapiens
tccttccactttcaa

SEQ ID NO: 1532611 - DNA, 15 bp, Homo sapiens
ccttccactttcaaa

SEQ ID NO: 1532612 - DNA, 15 bp, Homo sapiens
cttccactttcaaag

SEQ ID NO: 1532613 - DNA, 15 bp, Homo sapiens
ttccactttcaaagt

SEQ ID NO: 1532614 - DNA, 15 bp, Homo sapiens
tccactttcaaagtt

SEQ ID NO: 1532615 - DNA, 15 bp, Homo sapiens
ccactttcaaagttg

SEQ ID NO: 1532616 - DNA, 15 bp, Homo sapiens
cactttcaaagttgt

SEQ ID NO: 1532617 - DNA, 15 bp, Homo sapiens
actttcaaagttgtc

SEQ ID NO: 1532618 - DNA, 15 bp, Homo sapiens
ctttcaaagttgtcc

SEQ ID NO: 1532619 - DNA, 15 bp, Homo sapiens
tttcaaagttgtccc

SEQ ID NO: 1532620 - DNA, 15 bp, Homo sapiens
ttcaaagttgtcccc

SEQ ID NO: 1532621 - DNA, 15 bp, Homo sapiens
tcaaagttgtcccca

SEQ ID NO: 1532622 - DNA, 15 bp, Homo sapiens
caaagttgtccccaa

SEQ ID NO: 1532623 - DNA, 15 bp, Homo sapiens
aaagttgtccccaag

SEQ ID NO: 1532624 - DNA, 15 bp, Homo sapiens
aagttgtccccaaga

SEQ ID NO: 1532625 - DNA, 15 bp, Homo sapiens
agttgtccccaagac

SEQ ID NO: 1532626 - DNA, 15 bp, Homo sapiens
gttgtccccaagacg

SEQ ID NO: 1532627 - DNA, 15 bp, Homo sapiens
ttgtccccaagacgt

SEQ ID NO: 1532628 - DNA, 15 bp, Homo sapiens
tgtccccaagacgtc

SEQ ID NO: 1532629 - DNA, 15 bp, Homo sapiens
gtccccaagacgtca

SEQ ID NO: 1532630 - DNA, 15 bp, Homo sapiens
tccccaagacgtcag

SEQ ID NO: 1532631 - DNA, 15 bp, Homo sapiens
ccccaagacgtcagc

SEQ ID NO: 1532632 - DNA, 15 bp, Homo sapiens
cccaagacgtcagct

SEQ ID NO: 1532633 - DNA, 15 bp, Homo sapiens
ccaagacgtcagctg

SEQ ID NO: 1532634 - DNA, 15 bp, Homo sapiens
caagacgtcagctgt

SEQ ID NO: 1532635 - DNA, 15 bp, Homo sapiens
aagacgtcagctgtg

SEQ ID NO: 1532636 - DNA, 15 bp, Homo sapiens
agacgtcagctgtgg

SEQ ID NO: 1532637 - DNA, 15 bp, Homo sapiens
gacgtcagctgtggt

SEQ ID NO: 1532638 - DNA, 15 bp, Homo sapiens
acgtcagctgtggtt

SEQ ID NO: 1532639 - DNA, 15 bp, Homo sapiens
cgtcagctgtggttg

SEQ ID NO: 1532640 - DNA, 15 bp, Homo sapiens
gtcagctgtggttgt

SEQ ID NO: 1532641 - DNA, 15 bp, Homo sapiens
tcagctgtggttgtc

SEQ ID NO: 1532642 - DNA, 15 bp, Homo sapiens
cagctgtggttgtct

SEQ ID NO: 1532643 - DNA, 15 bp, Homo sapiens
agctgtggttgtctc

SEQ ID NO: 1532644 - DNA, 15 bp, Homo sapiens
gctgtggttgtctct

SEQ ID NO: 1532645 - DNA, 15 bp, Homo sapiens
ctgtggttgtctctg

SEQ ID NO: 1532646 - DNA, 15 bp, Homo sapiens
tgtggttgtctctgt

SEQ ID NO: 1532647 - DNA, 15 bp, Homo sapiens
gtggttgtctctgtg

SEQ ID NO: 1532648 - DNA, 15 bp, Homo sapiens
tggttgtctctgtgc

SEQ ID NO: 1532649 - DNA, 15 bp, Homo sapiens
ggttgtctctgtgca

SEQ ID NO: 1532650 - DNA, 15 bp, Homo sapiens
gttgtctctgtgcag

SEQ ID NO: 1532651 - DNA, 15 bp, Homo sapiens
ttgtctctgtgcaga

SEQ ID NO: 1532652 - DNA, 15 bp, Homo sapiens
tgtctctgtgcagac

SEQ ID NO: 1532653 - DNA, 15 bp, Homo sapiens
gtctctgtgcagaca

SEQ ID NO: 1532654 - DNA, 15 bp, Homo sapiens
tctctgtgcagacac

SEQ ID NO: 1532655 - DNA, 15 bp, Homo sapiens
ctctgtgcagacacc

SEQ ID NO: 1532656 - DNA, 15 bp, Homo sapiens
tctgtgcagacaccg

SEQ ID NO: 1532657 - DNA, 15 bp, Homo sapiens
ctgtgcagacaccga

SEQ ID NO: 1532658 - DNA, 15 bp, Homo sapiens
tgtgcagacaccgag

SEQ ID NO: 1532659 - DNA, 15 bp, Homo sapiens
gtgcagacaccgagg

SEQ ID NO: 1532660 - DNA, 15 bp, Homo sapiens
tgcagacaccgagga

SEQ ID NO: 1532661 - DNA, 15 bp, Homo sapiens
gcagacaccgaggag

SEQ ID NO: 1532662 - DNA, 15 bp, Homo sapiens
cagacaccgaggagg

SEQ ID NO: 1532663 - DNA, 15 bp, Homo sapiens
agacaccgaggagga

SEQ ID NO: 1532664 - DNA, 15 bp, Homo sapiens
gacaccgaggaggaa

SEQ ID NO: 1532665 - DNA, 15 bp, Homo sapiens
acaccgaggaggaac

SEQ ID NO: 1532666 - DNA, 15 bp, Homo sapiens
caccgaggaggaact

SEQ ID NO: 1532667 - DNA, 15 bp, Homo sapiens
accgaggaggaactg

SEQ ID NO: 1532668 - DNA, 15 bp, Homo sapiens
ccgaggaggaactgt

SEQ ID NO: 1532669 - DNA, 15 bp, Homo sapiens
cgaggaggaactgtc

SEQ ID NO: 1532670 - DNA, 15 bp, Homo sapiens
gaggaggaactgtct

SEQ ID NO: 1532671 - DNA, 15 bp, Homo sapiens
aggaggaactgtctt

SEQ ID NO: 1532672 - DNA, 15 bp, Homo sapiens
ggaggaactgtcttc

SEQ ID NO: 1532673 - DNA, 15 bp, Homo sapiens
gaggaactgtcttct

SEQ ID NO: 1532674 - DNA, 15 bp, Homo sapiens
aggaactgtcttctt

SEQ ID NO: 1532675 - DNA, 15 bp, Homo sapiens
ggaactgtcttcttt

SEQ ID NO: 1532676 - DNA, 15 bp, Homo sapiens
gaactgtcttctttc

SEQ ID NO: 1532677 - DNA, 15 bp, Homo sapiens
aactgtcttctttct

SEQ ID NO: 1532678 - DNA, 15 bp, Homo sapiens
actgtcttctttctc

SEQ ID NO: 1532679 - DNA, 15 bp, Homo sapiens
ctgtcttctttctcc

SEQ ID NO: 1532680 - DNA, 15 bp, Homo sapiens
tgtcttctttctcct

SEQ ID NO: 1532681 - DNA, 15 bp, Homo sapiens
gtcttctttctcctt

SEQ ID NO: 1532682 - DNA, 15 bp, Homo sapiens
tcttctttctccttt

SEQ ID NO: 1532683 - DNA, 15 bp, Homo sapiens
cttctttctcctttt

SEQ ID NO: 1532684 - DNA, 15 bp, Homo sapiens
ttctttctccttttg

SEQ ID NO: 1532685 - DNA, 15 bp, Homo sapiens
tctttctccttttgg

SEQ ID NO: 1532686 - DNA, 15 bp, Homo sapiens
ctttctccttttggt

SEQ ID NO: 1532687 - DNA, 15 bp, Homo sapiens
tttctccttttggtt

SEQ ID NO: 1532688 - DNA, 15 bp, Homo sapiens
ttctccttttggttg

SEQ ID NO: 1532689 - DNA, 15 bp, Homo sapiens
tctccttttggttgc

SEQ ID NO: 1532690 - DNA, 15 bp, Homo sapiens
ctccttttggttgct

SEQ ID NO: 1532691 - DNA, 15 bp, Homo sapiens
tccttttggttgctt

SEQ ID NO: 1532692 - DNA, 15 bp, Homo sapiens
ccttttggttgcttt

SEQ ID NO: 1532693 - DNA, 15 bp, Homo sapiens
cttttggttgctttg

SEQ ID NO: 1532694 - DNA, 15 bp, Homo sapiens
ttttggttgctttgg

SEQ ID NO: 1532695 - DNA, 15 bp, Homo sapiens
tttggttgctttgga

SEQ ID NO: 1532696 - DNA, 15 bp, Homo sapiens
ttggttgctttggag

SEQ ID NO: 1532697 - DNA, 15 bp, Homo sapiens
tggttgctttggagg

SEQ ID NO: 1532698 - DNA, 15 bp, Homo sapiens
ggttgctttggagga

SEQ ID NO: 1532699 - DNA, 15 bp, Homo sapiens
gttgctttggaggaa

SEQ ID NO: 1532700 - DNA, 15 bp, Homo sapiens
ttgctttggaggaaa

SEQ ID NO: 1532701 - DNA, 15 bp, Homo sapiens
tgctttggaggaaag

SEQ ID NO: 1532702 - DNA, 15 bp, Homo sapiens
gctttggaggaaagt

SEQ ID NO: 1532703 - DNA, 15 bp, Homo sapiens
ctttggaggaaagta

SEQ ID NO: 1532704 - DNA, 15 bp, Homo sapiens
tttggaggaaagtaa

SEQ ID NO: 1532705 - DNA, 15 bp, Homo sapiens
ttggaggaaagtaaa

SEQ ID NO: 1532706 - DNA, 15 bp, Homo sapiens
tggaggaaagtaaag

SEQ ID NO: 1532707 - DNA, 15 bp, Homo sapiens
ggaggaaagtaaagt

SEQ ID NO: 1532708 - DNA, 15 bp, Homo sapiens
gaggaaagtaaagtg

SEQ ID NO: 1532709 - DNA, 15 bp, Homo sapiens
aggaaagtaaagtgt

SEQ ID NO: 1532710 - DNA, 15 bp, Homo sapiens
ggaaagtaaagtgtt

SEQ ID NO: 1532711 - DNA, 15 bp, Homo sapiens
gaaagtaaagtgttg

SEQ ID NO: 1532712 - DNA, 15 bp, Homo sapiens
aaagtaaagtgttgc

SEQ ID NO: 1532713 - DNA, 15 bp, Homo sapiens
aagtaaagtgttgct

SEQ ID NO: 1532714 - DNA, 15 bp, Homo sapiens
agtaaagtgttgctg

SEQ ID NO: 1532715 - DNA, 15 bp, Homo sapiens
gtaaagtgttgctgg

SEQ ID NO: 1532716 - DNA, 15 bp, Homo sapiens
taaagtgttgctggt

SEQ ID NO: 1532717 - DNA, 15 bp, Homo sapiens
aaagtgttgctggtt

SEQ ID NO: 1532718 - DNA, 15 bp, Homo sapiens
aagtgttgctggttt

SEQ ID NO: 1532719 - DNA, 15 bp, Homo sapiens
agtgttgctggtttc

SEQ ID NO: 1532720 - DNA, 15 bp, Homo sapiens
gtgttgctggtttcc

SEQ ID NO: 1532721 - DNA, 15 bp, Homo sapiens
tgttgctggtttccc

SEQ ID NO: 1532722 - DNA, 15 bp, Homo sapiens
gttgctggtttccct

SEQ ID NO: 1532723 - DNA, 15 bp, Homo sapiens
ttgctggtttccctc

SEQ ID NO: 1532724 - DNA, 15 bp, Homo sapiens
tgctggtttccctct

SEQ ID NO: 1532725 - DNA, 15 bp, Homo sapiens
gctggtttccctctt

SEQ ID NO: 1532726 - DNA, 15 bp, Homo sapiens
ctggtttccctcttt

SEQ ID NO: 1532727 - DNA, 15 bp, Homo sapiens
tggtttccctctttc

SEQ ID NO: 1532728 - DNA, 15 bp, Homo sapiens
ggtttccctctttct

SEQ ID NO: 1532729 - DNA, 15 bp, Homo sapiens
gtttccctctttcta

SEQ ID NO: 1532730 - DNA, 15 bp, Homo sapiens
tttccctctttctac

SEQ ID NO: 1532731 - DNA, 15 bp, Homo sapiens
ttccctctttctact

SEQ ID NO: 1532732 - DNA, 15 bp, Homo sapiens
tccctctttctactt

SEQ ID NO: 1532733 - DNA, 15 bp, Homo sapiens
ccctctttctacttc

SEQ ID NO: 1532734 - DNA, 15 bp, Homo sapiens
cctctttctacttct

SEQ ID NO: 1532735 - DNA, 15 bp, Homo sapiens
ctctttctacttctt

SEQ ID NO: 1532736 - DNA, 15 bp, Homo sapiens
tctttctacttcttt

SEQ ID NO: 1532737 - DNA, 15 bp, Homo sapiens
ctttctacttctttg

SEQ ID NO: 1532738 - DNA, 15 bp, Homo sapiens
tttctacttctttga

SEQ ID NO: 1532739 - DNA, 15 bp, Homo sapiens
ttctacttctttgat

SEQ ID NO: 1532740 - DNA, 15 bp, Homo sapiens
tctacttctttgatt

SEQ ID NO: 1532741 - DNA, 15 bp, Homo sapiens
gtgacttccctagag

SEQ ID NO: 1532742 - DNA, 15 bp, Homo sapiens
tgacttccctagagc

SEQ ID NO: 1532743 - DNA, 15 bp, Homo sapiens
gacttccctagagca

SEQ ID NO: 1532744 - DNA, 15 bp, Homo sapiens
acttccctagagcag

SEQ ID NO: 1532745 - DNA, 15 bp, Homo sapiens
cttccctagagcagg

SEQ ID NO: 1532746 - DNA, 15 bp, Homo sapiens
ttccctagagcagga

SEQ ID NO: 1532747 - DNA, 15 bp, Homo sapiens
tccctagagcaggag

SEQ ID NO: 1532748 - DNA, 15 bp, Homo sapiens
ccctagagcaggagc

SEQ ID NO: 1532749 - DNA, 15 bp, Homo sapiens
cctagagcaggagcc

SEQ ID NO: 1532750 - DNA, 15 bp, Homo sapiens
ctagagcaggagcca

SEQ ID NO: 1532751 - DNA, 15 bp, Homo sapiens
tagagcaggagccaa

SEQ ID NO: 1532752 - DNA, 15 bp, Homo sapiens
agagcaggagccaaa

SEQ ID NO: 1532753 - DNA, 15 bp, Homo sapiens
gagcaggagccaaac

SEQ ID NO: 1532754 - DNA, 15 bp, Homo sapiens
agcaggagccaaacc

SEQ ID NO: 1532755 - DNA, 15 bp, Homo sapiens
gcaggagccaaaccc

SEQ ID NO: 1532756 - DNA, 15 bp, Homo sapiens
caggagccaaaccct

SEQ ID NO: 1532757 - DNA, 15 bp, Homo sapiens
aggagccaaaccctt

SEQ ID NO: 1532758 - DNA, 15 bp, Homo sapiens
ggagccaaaccctta

SEQ ID NO: 1532759 - DNA, 15 bp, Homo sapiens
gagccaaacccttat

SEQ ID NO: 1532760 - DNA, 15 bp, Homo sapiens
agccaaacccttatc

SEQ ID NO: 1532761 - DNA, 15 bp, Homo sapiens
gccaaacccttatcc

SEQ ID NO: 1532762 - DNA, 15 bp, Homo sapiens
ccaaacccttatccc

SEQ ID NO: 1532763 - DNA, 15 bp, Homo sapiens
caaacccttatccct

SEQ ID NO: 1532764 - DNA, 15 bp, Homo sapiens
aaacccttatccctg

SEQ ID NO: 1532765 - DNA, 15 bp, Homo sapiens
aacccttatccctga

SEQ ID NO: 1532766 - DNA, 15 bp, Homo sapiens
acccttatccctgag

SEQ ID NO: 1532767 - DNA, 15 bp, Homo sapiens
cccttatccctgagg

SEQ ID NO: 1532768 - DNA, 15 bp, Homo sapiens
ccttatccctgaggc

SEQ ID NO: 1532769 - DNA, 15 bp, Homo sapiens
cttatccctgaggca

SEQ ID NO: 1532770 - DNA, 15 bp, Homo sapiens
ttatccctgaggcat

SEQ ID NO: 1532771 - DNA, 15 bp, Homo sapiens
tatccctgaggcatc

SEQ ID NO: 1532772 - DNA, 15 bp, Homo sapiens
atccctgaggcatct

SEQ ID NO: 1532773 - DNA, 15 bp, Homo sapiens
tccctgaggcatctg

SEQ ID NO: 1532774 - DNA, 15 bp, Homo sapiens
ccctgaggcatctga

SEQ ID NO: 1532775 - DNA, 15 bp, Homo sapiens
cctgaggcatctgaa

SEQ ID NO: 1532776 - DNA, 15 bp, Homo sapiens
ctgaggcatctgaat

SEQ ID NO: 1532777 - DNA, 15 bp, Homo sapiens
tgaggcatctgaatc

SEQ ID NO: 1532778 - DNA, 15 bp, Homo sapiens
gaggcatctgaatcc

SEQ ID NO: 1532779 - DNA, 15 bp, Homo sapiens
aggcatctgaatcct

SEQ ID NO: 1532780 - DNA, 15 bp, Homo sapiens
ggcatctgaatcctg

SEQ ID NO: 1532781 - DNA, 15 bp, Homo sapiens
gcatctgaatcctgg

SEQ ID NO: 1532782 - DNA, 15 bp, Homo sapiens
catctgaatcctgga

SEQ ID NO: 1532783 - DNA, 15 bp, Homo sapiens
atctgaatcctggat

SEQ ID NO: 1532784 - DNA, 15 bp, Homo sapiens
tctgaatcctggatt

SEQ ID NO: 1532785 - DNA, 15 bp, Homo sapiens
ctgaatcctggattc

SEQ ID NO: 1532786 - DNA, 15 bp, Homo sapiens
tgaatcctggattcc

SEQ ID NO: 1532787 - DNA, 15 bp, Homo sapiens
gaatcctggattcct

SEQ ID NO: 1532788 - DNA, 15 bp, Homo sapiens
aatcctggattcctt

SEQ ID NO: 1532789 - DNA, 15 bp, Homo sapiens
atcctggattccttt

SEQ ID NO: 1532790 - DNA, 15 bp, Homo sapiens
tcctggattccttta

SEQ ID NO: 1532791 - DNA, 15 bp, Homo sapiens
cctggattcctttat

SEQ ID NO: 1532792 - DNA, 15 bp, Homo sapiens
ctggattcctttatc

SEQ ID NO: 1532793 - DNA, 15 bp, Homo sapiens
tggattcctttatca

SEQ ID NO: 1532794 - DNA, 15 bp, Homo sapiens
ggattcctttatcag

SEQ ID NO: 1532795 - DNA, 15 bp, Homo sapiens
gattcctttatcagg

SEQ ID NO: 1532796 - DNA, 15 bp, Homo sapiens
attcctttatcaggc

SEQ ID NO: 1532797 - DNA, 15 bp, Homo sapiens
ttcctttatcaggct

SEQ ID NO: 1532798 - DNA, 15 bp, Homo sapiens
tcctttatcaggcta

SEQ ID NO: 1532799 - DNA, 15 bp, Homo sapiens
cctttatcaggctat

SEQ ID NO: 1532800 - DNA, 15 bp, Homo sapiens
ctttatcaggctatt

SEQ ID NO: 1532801 - DNA, 15 bp, Homo sapiens
tttatcaggctattg

SEQ ID NO: 1532802 - DNA, 15 bp, Homo sapiens
ttatcaggctattgt

SEQ ID NO: 1532803 - DNA, 15 bp, Homo sapiens
tatcaggctattgtt

SEQ ID NO: 1532804 - DNA, 15 bp, Homo sapiens
atcaggctattgttg

SEQ ID NO: 1532805 - DNA, 15 bp, Homo sapiens
tcaggctattgttgt

SEQ ID NO: 1532806 - DNA, 15 bp, Homo sapiens
caggctattgttgtt

SEQ ID NO: 1532807 - DNA, 15 bp, Homo sapiens
aggctattgttgttg

SEQ ID NO: 1532808 - DNA, 15 bp, Homo sapiens
ggctattgttgttgt

SEQ ID NO: 1532809 - DNA, 15 bp, Homo sapiens
gctattgttgttgta

SEQ ID NO: 1532810 - DNA, 15 bp, Homo sapiens
ctattgttgttgtaa

SEQ ID NO: 1532811 - DNA, 15 bp, Homo sapiens
tattgttgttgtaag

SEQ ID NO: 1532812 - DNA, 15 bp, Homo sapiens
attgttgttgtaagt

SEQ ID NO: 1532813 - DNA, 15 bp, Homo sapiens
ttgttgttgtaagtt

SEQ ID NO: 1532814 - DNA, 15 bp, Homo sapiens
tgttgttgtaagttg

SEQ ID NO: 1532815 - DNA, 15 bp, Homo sapiens
gttgttgtaagttgt

SEQ ID NO: 1532816 - DNA, 15 bp, Homo sapiens
ttgttgtaagttgtc

SEQ ID NO: 1532817 - DNA, 15 bp, Homo sapiens
tgttgtaagttgtcc

SEQ ID NO: 1532818 - DNA, 15 bp, Homo sapiens
gttgtaagttgtcca

SEQ ID NO: 1532819 - DNA, 15 bp, Homo sapiens
ttgtaagttgtccat

SEQ ID NO: 1532820 - DNA, 15 bp, Homo sapiens
tgtaagttgtccatt

SEQ ID NO: 1532821 - DNA, 15 bp, Homo sapiens
gtaagttgtccattc

SEQ ID NO: 1532822 - DNA, 15 bp, Homo sapiens
taagttgtccattcc

SEQ ID NO: 1532823 - DNA, 15 bp, Homo sapiens
aagttgtccattccc

SEQ ID NO: 1532824 - DNA, 15 bp, Homo sapiens
agttgtccattccca

SEQ ID NO: 1532825 - DNA, 15 bp, Homo sapiens
gttgtccattcccaa

SEQ ID NO: 1532826 - DNA, 15 bp, Homo sapiens
ttgtccattcccaat

SEQ ID NO: 1532827 - DNA, 15 bp, Homo sapiens
tgtccattcccaatt

SEQ ID NO: 1532828 - DNA, 15 bp, Homo sapiens
gtccattcccaatta

SEQ ID NO: 1532829 - DNA, 15 bp, Homo sapiens
tccattcccaattac

SEQ ID NO: 1532830 - DNA, 15 bp, Homo sapiens
ccattcccaattaca

SEQ ID NO: 1532831 - DNA, 15 bp, Homo sapiens
cattcccaattacaa

SEQ ID NO: 1532832 - DNA, 15 bp, Homo sapiens
attcccaattacaac

SEQ ID NO: 1532833 - DNA, 15 bp, Homo sapiens
ttcccaattacaact

SEQ ID NO: 1532834 - DNA, 15 bp, Homo sapiens
tcccaattacaactg

SEQ ID NO: 1532835 - DNA, 15 bp, Homo sapiens
cccaattacaactgg

SEQ ID NO: 1532836 - DNA, 15 bp, Homo sapiens
ccaattacaactgga

SEQ ID NO: 1532837 - DNA, 15 bp, Homo sapiens
caattacaactggac

SEQ ID NO: 1532838 - DNA, 15 bp, Homo sapiens
aattacaactggaca

SEQ ID NO: 1532839 - DNA, 15 bp, Homo sapiens
attacaactggacat

SEQ ID NO: 1532840 - DNA, 15 bp, Homo sapiens
ttacaactggacatg

SEQ ID NO: 1532841 - DNA, 15 bp, Homo sapiens
tacaactggacatga

SEQ ID NO: 1532842 - DNA, 15 bp, Homo sapiens
acaactggacatgag

SEQ ID NO: 1532843 - DNA, 15 bp, Homo sapiens
caactggacatgaga

SEQ ID NO: 1532844 - DNA, 15 bp, Homo sapiens
aactggacatgagac

SEQ ID NO: 1532845 - DNA, 15 bp, Homo sapiens
actggacatgagact

SEQ ID NO: 1532846 - DNA, 15 bp, Homo sapiens
ctggacatgagacta

SEQ ID NO: 1532847 - DNA, 15 bp, Homo sapiens
tggacatgagactac

SEQ ID NO: 1532848 - DNA, 15 bp, Homo sapiens
ggacatgagactacc

SEQ ID NO: 1532849 - DNA, 15 bp, Homo sapiens
gacatgagactacca

SEQ ID NO: 1532850 - DNA, 15 bp, Homo sapiens
acatgagactaccaa

SEQ ID NO: 1532851 - DNA, 15 bp, Homo sapiens
catgagactaccaag

SEQ ID NO: 1532852 - DNA, 15 bp, Homo sapiens
atgagactaccaaga

SEQ ID NO: 1532853 - DNA, 15 bp, Homo sapiens
tgagactaccaagaa

SEQ ID NO: 1532854 - DNA, 15 bp, Homo sapiens
gagactaccaagaaa

SEQ ID NO: 1532855 - DNA, 15 bp, Homo sapiens
agactaccaagaaac

SEQ ID NO: 1532856 - DNA, 15 bp, Homo sapiens
gactaccaagaaaca

SEQ ID NO: 1532857 - DNA, 15 bp, Homo sapiens
actaccaagaaacac

SEQ ID NO: 1532858 - DNA, 15 bp, Homo sapiens
ctaccaagaaacacc

SEQ ID NO: 1532859 - DNA, 15 bp, Homo sapiens
taccaagaaacaccc

SEQ ID NO: 1532860 - DNA, 15 bp, Homo sapiens
accaagaaacaccct

SEQ ID NO: 1532861 - DNA, 15 bp, Homo sapiens
ccaagaaacaccctg

SEQ ID NO: 1532862 - DNA, 15 bp, Homo sapiens
caagaaacaccctgg

SEQ ID NO: 1532863 - DNA, 15 bp, Homo sapiens
aagaaacaccctggc

SEQ ID NO: 1532864 - DNA, 15 bp, Homo sapiens
agaaacaccctggca

SEQ ID NO: 1532865 - DNA, 15 bp, Homo sapiens
gaaacaccctggcaa

SEQ ID NO: 1532866 - DNA, 15 bp, Homo sapiens
aaacaccctggcaaa

SEQ ID NO: 1532867 - DNA, 15 bp, Homo sapiens
aacaccctggcaaat

SEQ ID NO: 1532868 - DNA, 15 bp, Homo sapiens
acaccctggcaaatc

SEQ ID NO: 1532869 - DNA, 15 bp, Homo sapiens
caccctggcaaatca

SEQ ID NO: 1532870 - DNA, 15 bp, Homo sapiens
accctggcaaatcat

SEQ ID NO: 1532871 - DNA, 15 bp, Homo sapiens
ccctggcaaatcatc

SEQ ID NO: 1532872 - DNA, 15 bp, Homo sapiens
cctggcaaatcatct

SEQ ID NO: 1532873 - DNA, 15 bp, Homo sapiens
ctggcaaatcatctg

SEQ ID NO: 1532874 - DNA, 15 bp, Homo sapiens
tggcaaatcatctga

SEQ ID NO: 1532875 - DNA, 15 bp, Homo sapiens
ggcaaatcatctgag

SEQ ID NO: 1532876 - DNA, 15 bp, Homo sapiens
gcaaatcatctgagt

SEQ ID NO: 1532877 - DNA, 15 bp, Homo sapiens
caaatcatctgagtg

SEQ ID NO: 1532878 - DNA, 15 bp, Homo sapiens
aaatcatctgagtgc

SEQ ID NO: 1532879 - DNA, 15 bp, Homo sapiens
aatcatctgagtgca

SEQ ID NO: 1532880 - DNA, 15 bp, Homo sapiens
atcatctgagtgcaa

SEQ ID NO: 1532881 - DNA, 15 bp, Homo sapiens
tcatctgagtgcaag

SEQ ID NO: 1532882 - DNA, 15 bp, Homo sapiens
catctgagtgcaagc

SEQ ID NO: 1532883 - DNA, 15 bp, Homo sapiens
atctgagtgcaagcc

SEQ ID NO: 1532884 - DNA, 15 bp, Homo sapiens
tctgagtgcaagcca

SEQ ID NO: 1532885 - DNA, 15 bp, Homo sapiens
ctgagtgcaagccat

SEQ ID NO: 1532886 - DNA, 15 bp, Homo sapiens
tgagtgcaagccata

SEQ ID NO: 1532887 - DNA, 15 bp, Homo sapiens
gagtgcaagccatat

SEQ ID NO: 1532888 - DNA, 15 bp, Homo sapiens
agtgcaagccatatt

SEQ ID NO: 1532889 - DNA, 15 bp, Homo sapiens
gtgcaagccatattc

SEQ ID NO: 1532890 - DNA, 15 bp, Homo sapiens
tgcaagccatattct

SEQ ID NO: 1532891 - DNA, 15 bp, Homo sapiens
gcaagccatattctt

SEQ ID NO: 1532892 - DNA, 15 bp, Homo sapiens
caagccatattcttc

SEQ ID NO: 1532893 - DNA, 15 bp, Homo sapiens
aagccatattcttcc

SEQ ID NO: 1532894 - DNA, 15 bp, Homo sapiens
agccatattcttcct

SEQ ID NO: 1532895 - DNA, 15 bp, Homo sapiens
gccatattcttcctg

SEQ ID NO: 1532896 - DNA, 15 bp, Homo sapiens
ccatattcttcctgc

SEQ ID NO: 1532897 - DNA, 15 bp, Homo sapiens
catattcttcctgct

SEQ ID NO: 1532898 - DNA, 15 bp, Homo sapiens
atattcttcctgctc

SEQ ID NO: 1532899 - DNA, 15 bp, Homo sapiens
tattcttcctgctcc

SEQ ID NO: 1532900 - DNA, 15 bp, Homo sapiens
attcttcctgctcca

SEQ ID NO: 1532901 - DNA, 15 bp, Homo sapiens
ttcttcctgctccat

SEQ ID NO: 1532902 - DNA, 15 bp, Homo sapiens
tcttcctgctccatt

SEQ ID NO: 1532903 - DNA, 15 bp, Homo sapiens
cttcctgctccatta

SEQ ID NO: 1532904 - DNA, 15 bp, Homo sapiens
ttcctgctccattat

SEQ ID NO: 1532905 - DNA, 15 bp, Homo sapiens
tcctgctccattatg

SEQ ID NO: 1532906 - DNA, 15 bp, Homo sapiens
cctgctccattatgt

SEQ ID NO: 1532907 - DNA, 15 bp, Homo sapiens
ctgctccattatgta

SEQ ID NO: 1532908 - DNA, 15 bp, Homo sapiens
tgctccattatgtag

SEQ ID NO: 1532909 - DNA, 15 bp, Homo sapiens
gctccattatgtagc

SEQ ID NO: 1532910 - DNA, 15 bp, Homo sapiens
ctccattatgtagcg

SEQ ID NO: 1532911 - DNA, 15 bp, Homo sapiens
tccattatgtagcgg

SEQ ID NO: 1532912 - DNA, 15 bp, Homo sapiens
ccattatgtagcggt

SEQ ID NO: 1532913 - DNA, 15 bp, Homo sapiens
cattatgtagcggta

SEQ ID NO: 1532914 - DNA, 15 bp, Homo sapiens
attatgtagcggtag

SEQ ID NO: 1532915 - DNA, 15 bp, Homo sapiens
ttatgtagcggtagt

SEQ ID NO: 1532916 - DNA, 15 bp, Homo sapiens
tatgtagcggtagtc

SEQ ID NO: 1532917 - DNA, 15 bp, Homo sapiens
atgtagcggtagtcc

SEQ ID NO: 1532918 - DNA, 15 bp, Homo sapiens
tgtagcggtagtcct

SEQ ID NO: 1532919 - DNA, 15 bp, Homo sapiens
gtagcggtagtccta

SEQ ID NO: 1532920 - DNA, 15 bp, Homo sapiens
tagcggtagtcctac

SEQ ID NO: 1532921 - DNA, 15 bp, Homo sapiens
agcggtagtcctacc

SEQ ID NO: 1532922 - DNA, 15 bp, Homo sapiens
gcggtagtcctacct

SEQ ID NO: 1532923 - DNA, 15 bp, Homo sapiens
cggtagtcctacctc

SEQ ID NO: 1532924 - DNA, 15 bp, Homo sapiens
ggtagtcctacctcc

SEQ ID NO: 1532925 - DNA, 15 bp, Homo sapiens
gtagtcctacctcct

SEQ ID NO: 1532926 - DNA, 15 bp, Homo sapiens
tagtcctacctccta

SEQ ID NO: 1532927 - DNA, 15 bp, Homo sapiens
agtcctacctcctaa

SEQ ID NO: 1532928 - DNA, 15 bp, Homo sapiens
gtcctacctcctaat

SEQ ID NO: 1532929 - DNA, 15 bp, Homo sapiens
tcctacctcctaatg

SEQ ID NO: 1532930 - DNA, 15 bp, Homo sapiens
cctacctcctaatga

SEQ ID NO: 1532931 - DNA, 15 bp, Homo sapiens
ctacctcctaatgac

SEQ ID NO: 1532932 - DNA, 15 bp, Homo sapiens
tacctcctaatgaca

SEQ ID NO: 1532933 - DNA, 15 bp, Homo sapiens
acctcctaatgacaa

SEQ ID NO: 1532934 - DNA, 15 bp, Homo sapiens
cctcctaatgacaag

SEQ ID NO: 1532935 - DNA, 15 bp, Homo sapiens
ctcctaatgacaagg

SEQ ID NO: 1532936 - DNA, 15 bp, Homo sapiens
tcctaatgacaaggg

SEQ ID NO: 1532937 - DNA, 15 bp, Homo sapiens
cctaatgacaagggt

SEQ ID NO: 1532938 - DNA, 15 bp, Homo sapiens
ctaatgacaagggta

SEQ ID NO: 1532939 - DNA, 15 bp, Homo sapiens
taatgacaagggtaa

SEQ ID NO: 1532940 - DNA, 15 bp, Homo sapiens
aatgacaagggtaaa

SEQ ID NO: 1532941 - DNA, 15 bp, Homo sapiens
atgacaagggtaaat

SEQ ID NO: 1532942 - DNA, 15 bp, Homo sapiens
tgacaagggtaaatt

SEQ ID NO: 1532943 - DNA, 15 bp, Homo sapiens
gacaagggtaaattg

SEQ ID NO: 1532944 - DNA, 15 bp, Homo sapiens
acaagggtaaattgc

SEQ ID NO: 1532945 - DNA, 15 bp, Homo sapiens
caagggtaaattgcc

SEQ ID NO: 1532946 - DNA, 15 bp, Homo sapiens
aagggtaaattgcca

SEQ ID NO: 1532947 - DNA, 15 bp, Homo sapiens
agggtaaattgccac

SEQ ID NO: 1532948 - DNA, 15 bp, Homo sapiens
gggtaaattgccaca

SEQ ID NO: 1532949 - DNA, 15 bp, Homo sapiens
ggtaaattgccacat

SEQ ID NO: 1532950 - DNA, 15 bp, Homo sapiens
gtaaattgccacatt

SEQ ID NO: 1532951 - DNA, 15 bp, Homo sapiens
taaattgccacattt

SEQ ID NO: 1532952 - DNA, 15 bp, Homo sapiens
aaattgccacatttt

SEQ ID NO: 1532953 - DNA, 15 bp, Homo sapiens
aattgccacattttg

SEQ ID NO: 1532954 - DNA, 15 bp, Homo sapiens
attgccacattttgc

SEQ ID NO: 1532955 - DNA, 15 bp, Homo sapiens
ttgccacattttgct

SEQ ID NO: 1532956 - DNA, 15 bp, Homo sapiens
tgccacattttgctc

SEQ ID NO: 1532957 - DNA, 15 bp, Homo sapiens
gccacattttgctcc

SEQ ID NO: 1532958 - DNA, 15 bp, Homo sapiens
ccacattttgctcct

SEQ ID NO: 1532959 - DNA, 15 bp, Homo sapiens
cacattttgctcctt

SEQ ID NO: 1532960 - DNA, 15 bp, Homo sapiens
acattttgctccttg

SEQ ID NO: 1532961 - DNA, 15 bp, Homo sapiens
cattttgctccttgt

SEQ ID NO: 1532962 - DNA, 15 bp, Homo sapiens
attttgctccttgtg

SEQ ID NO: 1532963 - DNA, 15 bp, Homo sapiens
ttttgctccttgtgc

SEQ ID NO: 1532964 - DNA, 15 bp, Homo sapiens
tttgctccttgtgcc

SEQ ID NO: 1532965 - DNA, 15 bp, Homo sapiens
ttgctccttgtgcca

SEQ ID NO: 1532966 - DNA, 15 bp, Homo sapiens
tgctccttgtgccag

SEQ ID NO: 1532967 - DNA, 15 bp, Homo sapiens
gctccttgtgccagg

SEQ ID NO: 1532968 - DNA, 15 bp, Homo sapiens
ctccttgtgccagga

SEQ ID NO: 1532969 - DNA, 15 bp, Homo sapiens
tccttgtgccaggat

SEQ ID NO: 1532970 - DNA, 15 bp, Homo sapiens
ccttgtgccaggatg

SEQ ID NO: 1532971 - DNA, 15 bp, Homo sapiens
cttgtgccaggatgg

SEQ ID NO: 1532972 - DNA, 15 bp, Homo sapiens
ttgtgccaggatggt

SEQ ID NO: 1532973 - DNA, 15 bp, Homo sapiens
tgtgccaggatggta

SEQ ID NO: 1532974 - DNA, 15 bp, Homo sapiens
gtgccaggatggtaa

SEQ ID NO: 1532975 - DNA, 15 bp, Homo sapiens
tgccaggatggtaat

SEQ ID NO: 1532976 - DNA, 15 bp, Homo sapiens
gccaggatggtaata

SEQ ID NO: 1532977 - DNA, 15 bp, Homo sapiens
ccaggatggtaatac

SEQ ID NO: 1532978 - DNA, 15 bp, Homo sapiens
caggatggtaatacc

SEQ ID NO: 1532979 - DNA, 15 bp, Homo sapiens
aggatggtaatacct

SEQ ID NO: 1532980 - DNA, 15 bp, Homo sapiens
ggatggtaatacctt

SEQ ID NO: 1532981 - DNA, 15 bp, Homo sapiens
gatggtaataccttt

SEQ ID NO: 1532982 - DNA, 15 bp, Homo sapiens
atggtaatacctttc

SEQ ID NO: 1532983 - DNA, 15 bp, Homo sapiens
tggtaatacctttct

SEQ ID NO: 1532984 - DNA, 15 bp, Homo sapiens
ggtaatacctttctc

SEQ ID NO: 1532985 - DNA, 15 bp, Homo sapiens
gtaatacctttctct

SEQ ID NO: 1532986 - DNA, 15 bp, Homo sapiens
taatacctttctcta

SEQ ID NO: 1532987 - DNA, 15 bp, Homo sapiens
aatacctttctctac

SEQ ID NO: 1532988 - DNA, 15 bp, Homo sapiens
atacctttctctacc

SEQ ID NO: 1532989 - DNA, 15 bp, Homo sapiens
tacctttctctacct

SEQ ID NO: 1532990 - DNA, 15 bp, Homo sapiens
acctttctctacctg

SEQ ID NO: 1532991 - DNA, 15 bp, Homo sapiens
cctttctctacctgc

SEQ ID NO: 1532992 - DNA, 15 bp, Homo sapiens
ctttctctacctgct

SEQ ID NO: 1532993 - DNA, 15 bp, Homo sapiens
tttctctacctgctt

SEQ ID NO: 1532994 - DNA, 15 bp, Homo sapiens
ttctctacctgcttg

SEQ ID NO: 1532995 - DNA, 15 bp, Homo sapiens
tctctacctgcttgg

SEQ ID NO: 1532996 - DNA, 15 bp, Homo sapiens
ctctacctgcttggc

SEQ ID NO: 1532997 - DNA, 15 bp, Homo sapiens
tctacctgcttggct

SEQ ID NO: 1532998 - DNA, 15 bp, Homo sapiens
ctacctgcttggcta

SEQ ID NO: 1532999 - DNA, 15 bp, Homo sapiens
tacctgcttggctac

SEQ ID NO: 1533000 - DNA, 15 bp, Homo sapiens
acctgcttggctact

SEQ ID NO: 1533001 - DNA, 15 bp, Homo sapiens
cctgcttggctactg

SEQ ID NO: 1533002 - DNA, 15 bp, Homo sapiens
ctgcttggctactgg

SEQ ID NO: 1533003 - DNA, 15 bp, Homo sapiens
tgcttggctactggc

SEQ ID NO: 1533004 - DNA, 15 bp, Homo sapiens
gcttggctactggca

SEQ ID NO: 1533005 - DNA, 15 bp, Homo sapiens
cttggctactggcac

SEQ ID NO: 1533006 - DNA, 15 bp, Homo sapiens
ttggctactggcaca

SEQ ID NO: 1533007 - DNA, 15 bp, Homo sapiens
tggctactggcacaa

SEQ ID NO: 1533008 - DNA, 15 bp, Homo sapiens
ggctactggcacaag

SEQ ID NO: 1533009 - DNA, 15 bp, Homo sapiens
gctactggcacaagg

SEQ ID NO: 1533010 - DNA, 15 bp, Homo sapiens
ctactggcacaagga

SEQ ID NO: 1533011 - DNA, 15 bp, Homo sapiens
tactggcacaaggaa

SEQ ID NO: 1533012 - DNA, 15 bp, Homo sapiens
actggcacaaggaag

SEQ ID NO: 1533013 - DNA, 15 bp, Homo sapiens
ctggcacaaggaagc

SEQ ID NO: 1533014 - DNA, 15 bp, Homo sapiens
tggcacaaggaagca

SEQ ID NO: 1533015 - DNA, 15 bp, Homo sapiens
ggcacaaggaagcac

SEQ ID NO: 1533016 - DNA, 15 bp, Homo sapiens
gcacaaggaagcaca

SEQ ID NO: 1533017 - DNA, 15 bp, Homo sapiens
cacaaggaagcacag

SEQ ID NO: 1533018 - DNA, 15 bp, Homo sapiens
acaaggaagcacagc

SEQ ID NO: 1533019 - DNA, 15 bp, Homo sapiens
caaggaagcacagca

SEQ ID NO: 1533020 - DNA, 15 bp, Homo sapiens
aaggaagcacagcat

SEQ ID NO: 1533021 - DNA, 15 bp, Homo sapiens
aggaagcacagcatg

SEQ ID NO: 1533022 - DNA, 15 bp, Homo sapiens
ggaagcacagcatga

SEQ ID NO: 1533023 - DNA, 15 bp, Homo sapiens
gaagcacagcatgac

SEQ ID NO: 1533024 - DNA, 15 bp, Homo sapiens
aagcacagcatgacc

SEQ ID NO: 1533025 - DNA, 15 bp, Homo sapiens
agcacagcatgacca

SEQ ID NO: 1533026 - DNA, 15 bp, Homo sapiens
gcacagcatgaccag

SEQ ID NO: 1533027 - DNA, 15 bp, Homo sapiens
cacagcatgaccagg

SEQ ID NO: 1533028 - DNA, 15 bp, Homo sapiens
acagcatgaccagga

SEQ ID NO: 1533029 - DNA, 15 bp, Homo sapiens
cagcatgaccaggag

SEQ ID NO: 1533030 - DNA, 15 bp, Homo sapiens
agcatgaccaggagg

SEQ ID NO: 1533031 - DNA, 15 bp, Homo sapiens
gcatgaccaggaggc

SEQ ID NO: 1533032 - DNA, 15 bp, Homo sapiens
catgaccaggaggca

SEQ ID NO: 1533033 - DNA, 15 bp, Homo sapiens
atgaccaggaggcaa

SEQ ID NO: 1533034 - DNA, 15 bp, Homo sapiens
tgaccaggaggcaat

SEQ ID NO: 1533035 - DNA, 15 bp, Homo sapiens
gaccaggaggcaatt

SEQ ID NO: 1533036 - DNA, 15 bp, Homo sapiens
accaggaggcaattg

SEQ ID NO: 1533037 - DNA, 15 bp, Homo sapiens
ccaggaggcaattgt

SEQ ID NO: 1533038 - DNA, 15 bp, Homo sapiens
caggaggcaattgta

SEQ ID NO: 1533039 - DNA, 15 bp, Homo sapiens
aggaggcaattgtag

SEQ ID NO: 1533040 - DNA, 15 bp, Homo sapiens
ggaggcaattgtagc

SEQ ID NO: 1533041 - DNA, 15 bp, Homo sapiens
gaggcaattgtagct

SEQ ID NO: 1533042 - DNA, 15 bp, Homo sapiens
aggcaattgtagctg

SEQ ID NO: 1533043 - DNA, 15 bp, Homo sapiens
ggcaattgtagctgt

SEQ ID NO: 1533044 - DNA, 15 bp, Homo sapiens
gcaattgtagctgta

SEQ ID NO: 1533045 - DNA, 15 bp, Homo sapiens
caattgtagctgtac

SEQ ID NO: 1533046 - DNA, 15 bp, Homo sapiens
aattgtagctgtaca

SEQ ID NO: 1533047 - DNA, 15 bp, Homo sapiens
attgtagctgtacat

SEQ ID NO: 1533048 - DNA, 15 bp, Homo sapiens
ttgtagctgtacatt

SEQ ID NO: 1533049 - DNA, 15 bp, Homo sapiens
tgtagctgtacattt

SEQ ID NO: 1533050 - DNA, 15 bp, Homo sapiens
gtagctgtacattta

SEQ ID NO: 1533051 - DNA, 15 bp, Homo sapiens
tagctgtacatttag

SEQ ID NO: 1533052 - DNA, 15 bp, Homo sapiens
agctgtacatttagt

SEQ ID NO: 1533053 - DNA, 15 bp, Homo sapiens
gctgtacatttagtg

SEQ ID NO: 1533054 - DNA, 15 bp, Homo sapiens
ctgtacatttagtga

SEQ ID NO: 1533055 - DNA, 15 bp, Homo sapiens
tgtacatttagtgaa

SEQ ID NO: 1533056 - DNA, 15 bp, Homo sapiens
gtacatttagtgaat

SEQ ID NO: 1533057 - DNA, 15 bp, Homo sapiens
tacatttagtgaatg

SEQ ID NO: 1533058 - DNA, 15 bp, Homo sapiens
acatttagtgaatgt

SEQ ID NO: 1533059 - DNA, 15 bp, Homo sapiens
catttagtgaatgtg

SEQ ID NO: 1533060 - DNA, 15 bp, Homo sapiens
atttagtgaatgtgt

SEQ ID NO: 1533061 - DNA, 15 bp, Homo sapiens
tttagtgaatgtgtt

SEQ ID NO: 1533062 - DNA, 15 bp, Homo sapiens
ttagtgaatgtgtta

SEQ ID NO: 1533063 - DNA, 15 bp, Homo sapiens
tagtgaatgtgttaa

SEQ ID NO: 1533064 - DNA, 15 bp, Homo sapiens
agtgaatgtgttaat

SEQ ID NO: 1533065 - DNA, 15 bp, Homo sapiens
gtgaatgtgttaatg

SEQ ID NO: 1533066 - DNA, 15 bp, Homo sapiens
tgaatgtgttaatgt

SEQ ID NO: 1533067 - DNA, 15 bp, Homo sapiens
gaatgtgttaatgta

SEQ ID NO: 1533068 - DNA, 15 bp, Homo sapiens
aatgtgttaatgtat

SEQ ID NO: 1533069 - DNA, 15 bp, Homo sapiens
atgtgttaatgtatc

SEQ ID NO: 1533070 - DNA, 15 bp, Homo sapiens
tgtgttaatgtatca

SEQ ID NO: 1533071 - DNA, 15 bp, Homo sapiens
gtgttaatgtatcac

SEQ ID NO: 1533072 - DNA, 15 bp, Homo sapiens
tgttaatgtatcacc

SEQ ID NO: 1533073 - DNA, 15 bp, Homo sapiens
gttaatgtatcacct

SEQ ID NO: 1533074 - DNA, 15 bp, Homo sapiens
ttaatgtatcacctg

SEQ ID NO: 1533075 - DNA, 15 bp, Homo sapiens
taatgtatcacctgg

SEQ ID NO: 1533076 - DNA, 15 bp, Homo sapiens
aatgtatcacctggt

SEQ ID NO: 1533077 - DNA, 15 bp, Homo sapiens
atgtatcacctggtg

SEQ ID NO: 1533078 - DNA, 15 bp, Homo sapiens
tgtatcacctggtgg

SEQ ID NO: 1533079 - DNA, 15 bp, Homo sapiens
gtatcacctggtgga

SEQ ID NO: 1533080 - DNA, 15 bp, Homo sapiens
tatcacctggtggaa

SEQ ID NO: 1533081 - DNA, 15 bp, Homo sapiens
atcacctggtggaag

SEQ ID NO: 1533082 - DNA, 15 bp, Homo sapiens
tcacctggtggaagg

SEQ ID NO: 1533083 - DNA, 15 bp, Homo sapiens
cacctggtggaagga

SEQ ID NO: 1533084 - DNA, 15 bp, Homo sapiens
acctggtggaaggac

SEQ ID NO: 1533085 - DNA, 15 bp, Homo sapiens
cctggtggaaggacc

SEQ ID NO: 1533086 - DNA, 15 bp, Homo sapiens
ctggtggaaggaccc

SEQ ID NO: 1533087 - DNA, 15 bp, Homo sapiens
tggtggaaggacccc

SEQ ID NO: 1533088 - DNA, 15 bp, Homo sapiens
ggtggaaggaccccc

SEQ ID NO: 1533089 - DNA, 15 bp, Homo sapiens
gtggaaggaccccct

SEQ ID NO: 1533090 - DNA, 15 bp, Homo sapiens
tggaaggaccccctc

SEQ ID NO: 1533091 - DNA, 15 bp, Homo sapiens
ggaaggaccccctct

SEQ ID NO: 1533092 - DNA, 15 bp, Homo sapiens
gaaggaccccctctg

SEQ ID NO: 1533093 - DNA, 15 bp, Homo sapiens
aaggaccccctctga

SEQ ID NO: 1533094 - DNA, 15 bp, Homo sapiens
aggaccccctctgag

SEQ ID NO: 1533095 - DNA, 15 bp, Homo sapiens
ggaccccctctgaga

SEQ ID NO: 1533096 - DNA, 15 bp, Homo sapiens
gaccccctctgagaa

SEQ ID NO: 1533097 - DNA, 15 bp, Homo sapiens
accccctctgagaac

SEQ ID NO: 1533098 - DNA, 15 bp, Homo sapiens
ccccctctgagaacc

SEQ ID NO: 1533099 - DNA, 15 bp, Homo sapiens
cccctctgagaacca

SEQ ID NO: 1533100 - DNA, 15 bp, Homo sapiens
ccctctgagaaccag

SEQ ID NO: 1533101 - DNA, 15 bp, Homo sapiens
cctctgagaaccagg

SEQ ID NO: 1533102 - DNA, 15 bp, Homo sapiens
ctctgagaaccagga

SEQ ID NO: 1533103 - DNA, 15 bp, Homo sapiens
tctgagaaccaggac

SEQ ID NO: 1533104 - DNA, 15 bp, Homo sapiens
ctgagaaccaggact

SEQ ID NO: 1533105 - DNA, 15 bp, Homo sapiens
tgagaaccaggactt

SEQ ID NO: 1533106 - DNA, 15 bp, Homo sapiens
gagaaccaggacttc

SEQ ID NO: 1533107 - DNA, 15 bp, Homo sapiens
agaaccaggacttct

SEQ ID NO: 1533108 - DNA, 15 bp, Homo sapiens
gaaccaggacttcta

SEQ ID NO: 1533109 - DNA, 15 bp, Homo sapiens
aaccaggacttctag

SEQ ID NO: 1533110 - DNA, 15 bp, Homo sapiens
accaggacttctaga

SEQ ID NO: 1533111 - DNA, 15 bp, Homo sapiens
ccaggacttctagac

SEQ ID NO: 1533112 - DNA, 15 bp, Homo sapiens
caggacttctagacc

SEQ ID NO: 1533113 - DNA, 15 bp, Homo sapiens
aggacttctagaccc

SEQ ID NO: 1533114 - DNA, 15 bp, Homo sapiens
ggacttctagaccca

SEQ ID NO: 1533115 - DNA, 15 bp, Homo sapiens
gacttctagacccac

SEQ ID NO: 1533116 - DNA, 15 bp, Homo sapiens
acttctagacccaca

SEQ ID NO: 1533117 - DNA, 15 bp, Homo sapiens
cttctagacccacaa

SEQ ID NO: 1533118 - DNA, 15 bp, Homo sapiens
ttctagacccacaaa

SEQ ID NO: 1533119 - DNA, 15 bp, Homo sapiens
tctagacccacaaaa

SEQ ID NO: 1533120 - DNA, 15 bp, Homo sapiens
ctagacccacaaaac

SEQ ID NO: 1533121 - DNA, 15 bp, Homo sapiens
tagacccacaaaacc

SEQ ID NO: 1533122 - DNA, 15 bp, Homo sapiens
agacccacaaaacct

SEQ ID NO: 1533123 - DNA, 15 bp, Homo sapiens
gacccacaaaaccta

SEQ ID NO: 1533124 - DNA, 15 bp, Homo sapiens
acccacaaaacctaa

SEQ ID NO: 1533125 - DNA, 15 bp, Homo sapiens
cccacaaaacctaaa

SEQ ID NO: 1533126 - DNA, 15 bp, Homo sapiens
ccacaaaacctaaag

SEQ ID NO: 1533127 - DNA, 15 bp, Homo sapiens
cacaaaacctaaagt

SEQ ID NO: 1533128 - DNA, 15 bp, Homo sapiens
acaaaacctaaagtt

SEQ ID NO: 1533129 - DNA, 15 bp, Homo sapiens
caaaacctaaagttg

SEQ ID NO: 1533130 - DNA, 15 bp, Homo sapiens
aaaacctaaagttgt

SEQ ID NO: 1533131 - DNA, 15 bp, Homo sapiens
aaacctaaagttgtg

SEQ ID NO: 1533132 - DNA, 15 bp, Homo sapiens
aacctaaagttgtga

SEQ ID NO: 1533133 - DNA, 15 bp, Homo sapiens
acctaaagttgtgaa

SEQ ID NO: 1533134 - DNA, 15 bp, Homo sapiens
cctaaagttgtgaat

SEQ ID NO: 1533135 - DNA, 15 bp, Homo sapiens
ctaaagttgtgaatg

SEQ ID NO: 1533136 - DNA, 15 bp, Homo sapiens
taaagttgtgaatgg

SEQ ID NO: 1533137 - DNA, 15 bp, Homo sapiens
aaagttgtgaatggc

SEQ ID NO: 1533138 - DNA, 15 bp, Homo sapiens
aagttgtgaatggcg

SEQ ID NO: 1533139 - DNA, 15 bp, Homo sapiens
agttgtgaatggcgg

SEQ ID NO: 1533140 - DNA, 15 bp, Homo sapiens
gttgtgaatggcgga

SEQ ID NO: 1533141 - DNA, 15 bp, Homo sapiens
ttgtgaatggcggaa

SEQ ID NO: 1533142 - DNA, 15 bp, Homo sapiens
tgtgaatggcggaag

SEQ ID NO: 1533143 - DNA, 15 bp, Homo sapiens
gtgaatggcggaagc

SEQ ID NO: 1533144 - DNA, 15 bp, Homo sapiens
tgaatggcggaagca

SEQ ID NO: 1533145 - DNA, 15 bp, Homo sapiens
gaatggcggaagcac

SEQ ID NO: 1533146 - DNA, 15 bp, Homo sapiens
aatggcggaagcaca

SEQ ID NO: 1533147 - DNA, 15 bp, Homo sapiens
atggcggaagcacaa

SEQ ID NO: 1533148 - DNA, 15 bp, Homo sapiens
tggcggaagcacaaa

SEQ ID NO: 1533149 - DNA, 15 bp, Homo sapiens
ggcggaagcacaaat

SEQ ID NO: 1533150 - DNA, 15 bp, Homo sapiens
gcggaagcacaaatt

SEQ ID NO: 1533151 - DNA, 15 bp, Homo sapiens
cggaagcacaaattt

SEQ ID NO: 1533152 - DNA, 15 bp, Homo sapiens
ggaagcacaaatttc

SEQ ID NO: 1533153 - DNA, 15 bp, Homo sapiens
gaagcacaaatttcc

SEQ ID NO: 1533154 - DNA, 15 bp, Homo sapiens
aagcacaaatttccc

SEQ ID NO: 1533155 - DNA, 15 bp, Homo sapiens
agcacaaatttccca

SEQ ID NO: 1533156 - DNA, 15 bp, Homo sapiens
gcacaaatttcccaa

SEQ ID NO: 1533157 - DNA, 15 bp, Homo sapiens
cacaaatttcccaag

SEQ ID NO: 1533158 - DNA, 15 bp, Homo sapiens
acaaatttcccaagt

SEQ ID NO: 1533159 - DNA, 15 bp, Homo sapiens
caaatttcccaagtg

SEQ ID NO: 1533160 - DNA, 15 bp, Homo sapiens
aaatttcccaagtgg

SEQ ID NO: 1533161 - DNA, 15 bp, Homo sapiens
aatttcccaagtgga

SEQ ID NO: 1533162 - DNA, 15 bp, Homo sapiens
atttcccaagtggat

SEQ ID NO: 1533163 - DNA, 15 bp, Homo sapiens
tttcccaagtggatc

SEQ ID NO: 1533164 - DNA, 15 bp, Homo sapiens
ttcccaagtggatca

SEQ ID NO: 1533165 - DNA, 15 bp, Homo sapiens
tcccaagtggatcat

SEQ ID NO: 1533166 - DNA, 15 bp, Homo sapiens
cccaagtggatcatg

SEQ ID NO: 1533167 - DNA, 15 bp, Homo sapiens
ccaagtggatcatgg

SEQ ID NO: 1533168 - DNA, 15 bp, Homo sapiens
caagtggatcatgga

SEQ ID NO: 1533169 - DNA, 15 bp, Homo sapiens
aagtggatcatggag

SEQ ID NO: 1533170 - DNA, 15 bp, Homo sapiens
agtggatcatggaga

SEQ ID NO: 1533171 - DNA, 15 bp, Homo sapiens
gtggatcatggagag

SEQ ID NO: 1533172 - DNA, 15 bp, Homo sapiens
tggatcatggagagt

SEQ ID NO: 1533173 - DNA, 15 bp, Homo sapiens
ggatcatggagagtg

SEQ ID NO: 1533174 - DNA, 15 bp, Homo sapiens
gatcatggagagtga

SEQ ID NO: 1533175 - DNA, 15 bp, Homo sapiens
atcatggagagtgat

SEQ ID NO: 1533176 - DNA, 15 bp, Homo sapiens
tcatggagagtgatg

SEQ ID NO: 1533177 - DNA, 15 bp, Homo sapiens
catggagagtgatga

SEQ ID NO: 1533178 - DNA, 15 bp, Homo sapiens
atggagagtgatgaa

SEQ ID NO: 1533179 - DNA, 15 bp, Homo sapiens
tggagagtgatgaag

SEQ ID NO: 1533180 - DNA, 15 bp, Homo sapiens
ggagagtgatgaaga

SEQ ID NO: 1533181 - DNA, 15 bp, Homo sapiens
gagagtgatgaagag

SEQ ID NO: 1533182 - DNA, 15 bp, Homo sapiens
agagtgatgaagagt

SEQ ID NO: 1533183 - DNA, 15 bp, Homo sapiens
gagtgatgaagagtt

SEQ ID NO: 1533184 - DNA, 15 bp, Homo sapiens
agtgatgaagagttc

SEQ ID NO: 1533185 - DNA, 15 bp, Homo sapiens
gtgatgaagagttct

SEQ ID NO: 1533186 - DNA, 15 bp, Homo sapiens
tgatgaagagttctt

SEQ ID NO: 1533187 - DNA, 15 bp, Homo sapiens
gatgaagagttcttg

SEQ ID NO: 1533188 - DNA, 15 bp, Homo sapiens
atgaagagttcttgg

SEQ ID NO: 1533189 - DNA, 15 bp, Homo sapiens
tgaagagttcttggt

SEQ ID NO: 1533190 - DNA, 15 bp, Homo sapiens
gaagagttcttggtt

SEQ ID NO: 1533191 - DNA, 15 bp, Homo sapiens
aagagttcttggttc

SEQ ID NO: 1533192 - DNA, 15 bp, Homo sapiens
agagttcttggttcc

SEQ ID NO: 1533193 - DNA, 15 bp, Homo sapiens
gagttcttggttccc

SEQ ID NO: 1533194 - DNA, 15 bp, Homo sapiens
agttcttggttccca

SEQ ID NO: 1533195 - DNA, 15 bp, Homo sapiens
gttcttggttcccaa

SEQ ID NO: 1533196 - DNA, 15 bp, Homo sapiens
ttcttggttcccaaa

SEQ ID NO: 1533197 - DNA, 15 bp, Homo sapiens
tcttggttcccaaac

SEQ ID NO: 1533198 - DNA, 15 bp, Homo sapiens
cttggttcccaaacc

SEQ ID NO: 1533199 - DNA, 15 bp, Homo sapiens
ttggttcccaaaccc

SEQ ID NO: 1533200 - DNA, 15 bp, Homo sapiens
tggttcccaaaccca

SEQ ID NO: 1533201 - DNA, 15 bp, Homo sapiens
ggttcccaaacccac

SEQ ID NO: 1533202 - DNA, 15 bp, Homo sapiens
gttcccaaacccaca

SEQ ID NO: 1533203 - DNA, 15 bp, Homo sapiens
ttcccaaacccacat

SEQ ID NO: 1533204 - DNA, 15 bp, Homo sapiens
tcccaaacccacata

SEQ ID NO: 1533205 - DNA, 15 bp, Homo sapiens
cccaaacccacatat

SEQ ID NO: 1533206 - DNA, 15 bp, Homo sapiens
ccaaacccacatatt

SEQ ID NO: 1533207 - DNA, 15 bp, Homo sapiens
caaacccacatattt

SEQ ID NO: 1533208 - DNA, 15 bp, Homo sapiens
aaacccacatatttt

SEQ ID NO: 1533209 - DNA, 15 bp, Homo sapiens
aacccacatatttta

SEQ ID NO: 1533210 - DNA, 15 bp, Homo sapiens
acccacatattttac

SEQ ID NO: 1533211 - DNA, 15 bp, Homo sapiens
cccacatattttacc

SEQ ID NO: 1533212 - DNA, 15 bp, Homo sapiens
ccacatattttacct

SEQ ID NO: 1533213 - DNA, 15 bp, Homo sapiens
cacatattttacctt

SEQ ID NO: 1533214 - DNA, 15 bp, Homo sapiens
acatattttaccttt

SEQ ID NO: 1533215 - DNA, 15 bp, Homo sapiens
catattttacctttc

SEQ ID NO: 1533216 - DNA, 15 bp, Homo sapiens
atattttacctttca

SEQ ID NO: 1533217 - DNA, 15 bp, Homo sapiens
tattttacctttcag

SEQ ID NO: 1533218 - DNA, 15 bp, Homo sapiens
attttacctttcagg

SEQ ID NO: 1533219 - DNA, 15 bp, Homo sapiens
ttttacctttcagga

SEQ ID NO: 1533220 - DNA, 15 bp, Homo sapiens
tttacctttcaggaa

SEQ ID NO: 1533221 - DNA, 15 bp, Homo sapiens
ttacctttcaggaac

SEQ ID NO: 1533222 - DNA, 15 bp, Homo sapiens
tacctttcaggaaca

SEQ ID NO: 1533223 - DNA, 15 bp, Homo sapiens
acctttcaggaacat

SEQ ID NO: 1533224 - DNA, 15 bp, Homo sapiens
cctttcaggaacatg

SEQ ID NO: 1533225 - DNA, 15 bp, Homo sapiens
ctttcaggaacatgg

SEQ ID NO: 1533226 - DNA, 15 bp, Homo sapiens
tttcaggaacatggc

SEQ ID NO: 1533227 - DNA, 15 bp, Homo sapiens
ttcaggaacatggcc

SEQ ID NO: 1533228 - DNA, 15 bp, Homo sapiens
tcaggaacatggcct

SEQ ID NO: 1533229 - DNA, 15 bp, Homo sapiens
caggaacatggcctc

SEQ ID NO: 1533230 - DNA, 15 bp, Homo sapiens
aggaacatggcctca

SEQ ID NO: 1533231 - DNA, 15 bp, Homo sapiens
ggaacatggcctcat

SEQ ID NO: 1533232 - DNA, 15 bp, Homo sapiens
gaacatggcctcatc

SEQ ID NO: 1533233 - DNA, 15 bp, Homo sapiens
aacatggcctcatcc

SEQ ID NO: 1533234 - DNA, 15 bp, Homo sapiens
acatggcctcatccc

SEQ ID NO: 1533235 - DNA, 15 bp, Homo sapiens
catggcctcatccca

SEQ ID NO: 1533236 - DNA, 15 bp, Homo sapiens
atggcctcatcccat

SEQ ID NO: 1533237 - DNA, 15 bp, Homo sapiens
tggcctcatcccata

SEQ ID NO: 1533238 - DNA, 15 bp, Homo sapiens
ggcctcatcccatag

SEQ ID NO: 1533239 - DNA, 15 bp, Homo sapiens
gcctcatcccatagc

SEQ ID NO: 1533240 - DNA, 15 bp, Homo sapiens
cctcatcccatagcc

SEQ ID NO: 1533241 - DNA, 15 bp, Homo sapiens
ctcatcccatagcca

SEQ ID NO: 1533242 - DNA, 15 bp, Homo sapiens
tcatcccatagccat

SEQ ID NO: 1533243 - DNA, 15 bp, Homo sapiens
catcccatagccatt

SEQ ID NO: 1533244 - DNA, 15 bp, Homo sapiens
atcccatagccatta

SEQ ID NO: 1533245 - DNA, 15 bp, Homo sapiens
tcccatagccattag

SEQ ID NO: 1533246 - DNA, 15 bp, Homo sapiens
cccatagccattaga

SEQ ID NO: 1533247 - DNA, 15 bp, Homo sapiens
ccatagccattagag

SEQ ID NO: 1533248 - DNA, 15 bp, Homo sapiens
catagccattagagt

SEQ ID NO: 1533249 - DNA, 15 bp, Homo sapiens
atagccattagagtg

SEQ ID NO: 1533250 - DNA, 15 bp, Homo sapiens
tagccattagagtgc

SEQ ID NO: 1533251 - DNA, 15 bp, Homo sapiens
agccattagagtgca

SEQ ID NO: 1533252 - DNA, 15 bp, Homo sapiens
gccattagagtgcat

SEQ ID NO: 1533253 - DNA, 15 bp, Homo sapiens
ccattagagtgcata

SEQ ID NO: 1533254 - DNA, 15 bp, Homo sapiens
cattagagtgcatat

SEQ ID NO: 1533255 - DNA, 15 bp, Homo sapiens
attagagtgcatatt

SEQ ID NO: 1533256 - DNA, 15 bp, Homo sapiens
ttagagtgcatattg

SEQ ID NO: 1533257 - DNA, 15 bp, Homo sapiens
tagagtgcatattgc

SEQ ID NO: 1533258 - DNA, 15 bp, Homo sapiens
agagtgcatattgca

SEQ ID NO: 1533259 - DNA, 15 bp, Homo sapiens
gagtgcatattgcat

SEQ ID NO: 1533260 - DNA, 15 bp, Homo sapiens
agtgcatattgcatt

SEQ ID NO: 1533261 - DNA, 15 bp, Homo sapiens
gtgcatattgcattc

SEQ ID NO: 1533262 - DNA, 15 bp, Homo sapiens
tgcatattgcattct

SEQ ID NO: 1533263 - DNA, 15 bp, Homo sapiens
gcatattgcattctg

SEQ ID NO: 1533264 - DNA, 15 bp, Homo sapiens
catattgcattctgg

SEQ ID NO: 1533265 - DNA, 15 bp, Homo sapiens
atattgcattctgga

SEQ ID NO: 1533266 - DNA, 15 bp, Homo sapiens
tattgcattctggag

SEQ ID NO: 1533267 - DNA, 15 bp, Homo sapiens
attgcattctggagg

SEQ ID NO: 1533268 - DNA, 15 bp, Homo sapiens
ttgcattctggagga

SEQ ID NO: 1533269 - DNA, 15 bp, Homo sapiens
tgcattctggaggag

SEQ ID NO: 1533270 - DNA, 15 bp, Homo sapiens
gcattctggaggaga

SEQ ID NO: 1533271 - DNA, 15 bp, Homo sapiens
cattctggaggagac

SEQ ID NO: 1533272 - DNA, 15 bp, Homo sapiens
attctggaggagact

SEQ ID NO: 1533273 - DNA, 15 bp, Homo sapiens
ttctggaggagactg

SEQ ID NO: 1533274 - DNA, 15 bp, Homo sapiens
tctggaggagactgg

SEQ ID NO: 1533275 - DNA, 15 bp, Homo sapiens
ctggaggagactggg

SEQ ID NO: 1533276 - DNA, 15 bp, Homo sapiens
tggaggagactgggc

SEQ ID NO: 1533277 - DNA, 15 bp, Homo sapiens
ggaggagactgggcc

SEQ ID NO: 1533278 - DNA, 15 bp, Homo sapiens
gaggagactgggccc

SEQ ID NO: 1533279 - DNA, 15 bp, Homo sapiens
aggagactgggccct

SEQ ID NO: 1533280 - DNA, 15 bp, Homo sapiens
ggagactgggccctc

SEQ ID NO: 1533281 - DNA, 15 bp, Homo sapiens
gagactgggccctcc

SEQ ID NO: 1533282 - DNA, 15 bp, Homo sapiens
agactgggccctcct

SEQ ID NO: 1533283 - DNA, 15 bp, Homo sapiens
gactgggccctcctc

SEQ ID NO: 1533284 - DNA, 15 bp, Homo sapiens
actgggccctcctca

SEQ ID NO: 1533285 - DNA, 15 bp, Homo sapiens
ctgggccctcctcat

SEQ ID NO: 1533286 - DNA, 15 bp, Homo sapiens
tgggccctcctcatg

SEQ ID NO: 1533287 - DNA, 15 bp, Homo sapiens
gggccctcctcatgg

SEQ ID NO: 1533288 - DNA, 15 bp, Homo sapiens
ggccctcctcatggg

SEQ ID NO: 1533289 - DNA, 15 bp, Homo sapiens
gccctcctcatgggt

SEQ ID NO: 1533290 - DNA, 15 bp, Homo sapiens
ccctcctcatgggtg

SEQ ID NO: 1533291 - DNA, 15 bp, Homo sapiens
cctcctcatgggtgt

SEQ ID NO: 1533292 - DNA, 15 bp, Homo sapiens
ctcctcatgggtgtc

SEQ ID NO: 1533293 - DNA, 15 bp, Homo sapiens
tcctcatgggtgtca

SEQ ID NO: 1533294 - DNA, 15 bp, Homo sapiens
cctcatgggtgtcat

SEQ ID NO: 1533295 - DNA, 15 bp, Homo sapiens
ctcatgggtgtcatc

SEQ ID NO: 1533296 - DNA, 15 bp, Homo sapiens
tcatgggtgtcatct

SEQ ID NO: 1533297 - DNA, 15 bp, Homo sapiens
catgggtgtcatctt

SEQ ID NO: 1533298 - DNA, 15 bp, Homo sapiens
atgggtgtcatcttc

SEQ ID NO: 1533299 - DNA, 15 bp, Homo sapiens
tgggtgtcatcttca

SEQ ID NO: 1533300 - DNA, 15 bp, Homo sapiens
gggtgtcatcttcaa

SEQ ID NO: 1533301 - DNA, 15 bp, Homo sapiens
ggtgtcatcttcaag

SEQ ID NO: 1533302 - DNA, 15 bp, Homo sapiens
gtgtcatcttcaaga

SEQ ID NO: 1533303 - DNA, 15 bp, Homo sapiens
tgtcatcttcaagat

SEQ ID NO: 1533304 - DNA, 15 bp, Homo sapiens
gtcatcttcaagatg

SEQ ID NO: 1533305 - DNA, 15 bp, Homo sapiens
tcatcttcaagatga

SEQ ID NO: 1533306 - DNA, 15 bp, Homo sapiens
catcttcaagatgac

SEQ ID NO: 1533307 - DNA, 15 bp, Homo sapiens
atcttcaagatgaca

SEQ ID NO: 1533308 - DNA, 15 bp, Homo sapiens
tcttcaagatgacag

SEQ ID NO: 1533309 - DNA, 15 bp, Homo sapiens
cttcaagatgacagc

SEQ ID NO: 1533310 - DNA, 15 bp, Homo sapiens
ttcaagatgacagct

SEQ ID NO: 1533311 - DNA, 15 bp, Homo sapiens
tcaagatgacagctc

SEQ ID NO: 1533312 - DNA, 15 bp, Homo sapiens
caagatgacagctcc

SEQ ID NO: 1533313 - DNA, 15 bp, Homo sapiens
aagatgacagctcca

SEQ ID NO: 1533314 - DNA, 15 bp, Homo sapiens
agatgacagctccac

SEQ ID NO: 1533315 - DNA, 15 bp, Homo sapiens
gatgacagctccact

SEQ ID NO: 1533316 - DNA, 15 bp, Homo sapiens
atgacagctccactg

SEQ ID NO: 1533317 - DNA, 15 bp, Homo sapiens
tgacagctccactgt

SEQ ID NO: 1533318 - DNA, 15 bp, Homo sapiens
gacagctccactgtg

SEQ ID NO: 1533319 - DNA, 15 bp, Homo sapiens
acagctccactgtgc

SEQ ID NO: 1533320 - DNA, 15 bp, Homo sapiens
cagctccactgtgcc

SEQ ID NO: 1533321 - DNA, 15 bp, Homo sapiens
agctccactgtgcct

SEQ ID NO: 1533322 - DNA, 15 bp, Homo sapiens
gctccactgtgcctc

SEQ ID NO: 1533323 - DNA, 15 bp, Homo sapiens
ctccactgtgcctcc

SEQ ID NO: 1533324 - DNA, 15 bp, Homo sapiens
tccactgtgcctcca

SEQ ID NO: 1533325 - DNA, 15 bp, Homo sapiens
ccactgtgcctccaa

SEQ ID NO: 1533326 - DNA, 15 bp, Homo sapiens
cactgtgcctccaag

SEQ ID NO: 1533327 - DNA, 15 bp, Homo sapiens
actgtgcctccaaga

SEQ ID NO: 1533328 - DNA, 15 bp, Homo sapiens
ctgtgcctccaagag

SEQ ID NO: 1533329 - DNA, 15 bp, Homo sapiens
tgtgcctccaagagg

SEQ ID NO: 1533330 - DNA, 15 bp, Homo sapiens
gtgcctccaagagga

SEQ ID NO: 1533331 - DNA, 15 bp, Homo sapiens
tgcctccaagaggat

SEQ ID NO: 1533332 - DNA, 15 bp, Homo sapiens
gcctccaagaggatg

SEQ ID NO: 1533333 - DNA, 15 bp, Homo sapiens
cctccaagaggatgc

SEQ ID NO: 1533334 - DNA, 15 bp, Homo sapiens
ctccaagaggatgct

SEQ ID NO: 1533335 - DNA, 15 bp, Homo sapiens
tccaagaggatgctc

SEQ ID NO: 1533336 - DNA, 15 bp, Homo sapiens
ccaagaggatgctcc

SEQ ID NO: 1533337 - DNA, 15 bp, Homo sapiens
caagaggatgctcca

SEQ ID NO: 1533338 - DNA, 15 bp, Homo sapiens
aagaggatgctccac

SEQ ID NO: 1533339 - DNA, 15 bp, Homo sapiens
agaggatgctccacc

SEQ ID NO: 1533340 - DNA, 15 bp, Homo sapiens
gaggatgctccacca

SEQ ID NO: 1533341 - DNA, 15 bp, Homo sapiens
aggatgctccaccac

SEQ ID NO: 1533342 - DNA, 15 bp, Homo sapiens
ggatgctccaccacc

SEQ ID NO: 1533343 - DNA, 15 bp, Homo sapiens
gatgctccaccaccc

SEQ ID NO: 1533344 - DNA, 15 bp, Homo sapiens
atgctccaccaccct

SEQ ID NO: 1533345 - DNA, 15 bp, Homo sapiens
tgctccaccacccta

SEQ ID NO: 1533346 - DNA, 15 bp, Homo sapiens
gctccaccaccctat

SEQ ID NO: 1533347 - DNA, 15 bp, Homo sapiens
ctccaccaccctatc

SEQ ID NO: 1533348 - DNA, 15 bp, Homo sapiens
tccaccaccctatct

SEQ ID NO: 1533349 - DNA, 15 bp, Homo sapiens
ccaccaccctatctg

SEQ ID NO: 1533350 - DNA, 15 bp, Homo sapiens
caccaccctatctgt

SEQ ID NO: 1533351 - DNA, 15 bp, Homo sapiens
accaccctatctgtg

SEQ ID NO: 1533352 - DNA, 15 bp, Homo sapiens
ccaccctatctgtga

SEQ ID NO: 1533353 - DNA, 15 bp, Homo sapiens
caccctatctgtgat

SEQ ID NO: 1533354 - DNA, 15 bp, Homo sapiens
accctatctgtgatt

SEQ ID NO: 1533355 - DNA, 15 bp, Homo sapiens
ccctatctgtgattc

SEQ ID NO: 1533356 - DNA, 15 bp, Homo sapiens
cctatctgtgattcc

SEQ ID NO: 1533357 - DNA, 15 bp, Homo sapiens
ctatctgtgattcct

SEQ ID NO: 1533358 - DNA, 15 bp, Homo sapiens
tatctgtgattcctt

SEQ ID NO: 1533359 - DNA, 15 bp, Homo sapiens
atctgtgattccttg

SEQ ID NO: 1533360 - DNA, 15 bp, Homo sapiens
tctgtgattccttgg

SEQ ID NO: 1533361 - DNA, 15 bp, Homo sapiens
ctgtgattccttggt

SEQ ID NO: 1533362 - DNA, 15 bp, Homo sapiens
tgtgattccttggtt

SEQ ID NO: 1533363 - DNA, 15 bp, Homo sapiens
gtgattccttggtta

SEQ ID NO: 1533364 - DNA, 15 bp, Homo sapiens
tgattccttggttag

SEQ ID NO: 1533365 - DNA, 15 bp, Homo sapiens
gattccttggttagc

SEQ ID NO: 1533366 - DNA, 15 bp, Homo sapiens
attccttggttagca

SEQ ID NO: 1533367 - DNA, 15 bp, Homo sapiens
ttccttggttagcag

SEQ ID NO: 1533368 - DNA, 15 bp, Homo sapiens
tccttggttagcagg

SEQ ID NO: 1533369 - DNA, 15 bp, Homo sapiens
ccttggttagcagga

SEQ ID NO: 1533370 - DNA, 15 bp, Homo sapiens
cttggttagcaggac

SEQ ID NO: 1533371 - DNA, 15 bp, Homo sapiens
ttggttagcaggaca

SEQ ID NO: 1533372 - DNA, 15 bp, Homo sapiens
tggttagcaggacag

SEQ ID NO: 1533373 - DNA, 15 bp, Homo sapiens
ggttagcaggacagg

SEQ ID NO: 1533374 - DNA, 15 bp, Homo sapiens
gttagcaggacaggc

SEQ ID NO: 1533375 - DNA, 15 bp, Homo sapiens
ttagcaggacaggct

SEQ ID NO: 1533376 - DNA, 15 bp, Homo sapiens
tagcaggacaggctg

SEQ ID NO: 1533377 - DNA, 15 bp, Homo sapiens
agcaggacaggctgc

SEQ ID NO: 1533378 - DNA, 15 bp, Homo sapiens
gcaggacaggctgct

SEQ ID NO: 1533379 - DNA, 15 bp, Homo sapiens
caggacaggctgctg

SEQ ID NO: 1533380 - DNA, 15 bp, Homo sapiens
aggacaggctgctgc

SEQ ID NO: 1533381 - DNA, 15 bp, Homo sapiens
ggacaggctgctgca

SEQ ID NO: 1533382 - DNA, 15 bp, Homo sapiens
gacaggctgctgcac

SEQ ID NO: 1533383 - DNA, 15 bp, Homo sapiens
acaggctgctgcact

SEQ ID NO: 1533384 - DNA, 15 bp, Homo sapiens
caggctgctgcactg

SEQ ID NO: 1533385 - DNA, 15 bp, Homo sapiens
aggctgctgcactga

SEQ ID NO: 1533386 - DNA, 15 bp, Homo sapiens
ggctgctgcactgag

SEQ ID NO: 1533387 - DNA, 15 bp, Homo sapiens
gctgctgcactgagg

SEQ ID NO: 1533388 - DNA, 15 bp, Homo sapiens
ctgctgcactgaggg

SEQ ID NO: 1533389 - DNA, 15 bp, Homo sapiens
tgctgcactgagggt

SEQ ID NO: 1533390 - DNA, 15 bp, Homo sapiens
gctgcactgagggta

SEQ ID NO: 1533391 - DNA, 15 bp, Homo sapiens
ctgcactgagggtag

SEQ ID NO: 1533392 - DNA, 15 bp, Homo sapiens
tgcactgagggtagg

SEQ ID NO: 1533393 - DNA, 15 bp, Homo sapiens
gcactgagggtagga

SEQ ID NO: 1533394 - DNA, 15 bp, Homo sapiens
cactgagggtaggaa

SEQ ID NO: 1533395 - DNA, 15 bp, Homo sapiens
actgagggtaggaaa

SEQ ID NO: 1533396 - DNA, 15 bp, Homo sapiens
ctgagggtaggaaag

SEQ ID NO: 1533397 - DNA, 15 bp, Homo sapiens
tgagggtaggaaagg

SEQ ID NO: 1533398 - DNA, 15 bp, Homo sapiens
gagggtaggaaaggc

SEQ ID NO: 1533399 - DNA, 15 bp, Homo sapiens
agggtaggaaaggca

SEQ ID NO: 1533400 - DNA, 15 bp, Homo sapiens
ggtaggaaaggcaag

SEQ ID NO: 1533401 - DNA, 15 bp, Homo sapiens
gtaggaaaggcaagt

SEQ ID NO: 1533402 - DNA, 15 bp, Homo sapiens
taggaaaggcaagtc

SEQ ID NO: 1533403 - DNA, 15 bp, Homo sapiens
aggaaaggcaagtcc

SEQ ID NO: 1533404 - DNA, 15 bp, Homo sapiens
ggaaaggcaagtcca

SEQ ID NO: 1533405 - DNA, 15 bp, Homo sapiens
gaaaggcaagtccat

SEQ ID NO: 1533406 - DNA, 15 bp, Homo sapiens
aaaggcaagtccatt

SEQ ID NO: 1533407 - DNA, 15 bp, Homo sapiens
aaggcaagtccattg

SEQ ID NO: 1533408 - DNA, 15 bp, Homo sapiens
aggcaagtccattga

SEQ ID NO: 1533409 - DNA, 15 bp, Homo sapiens
ggcaagtccattgat

SEQ ID NO: 1533410 - DNA, 15 bp, Homo sapiens
gcaagtccattgatg

SEQ ID NO: 1533411 - DNA, 15 bp, Homo sapiens
caagtccattgatgg

SEQ ID NO: 1533412 - DNA, 15 bp, Homo sapiens
aagtccattgatggc

SEQ ID NO: 1533413 - DNA, 15 bp, Homo sapiens
agtccattgatggct

SEQ ID NO: 1533414 - DNA, 15 bp, Homo sapiens
gtccattgatggctg

SEQ ID NO: 1533415 - DNA, 15 bp, Homo sapiens
tccattgatggctgg

SEQ ID NO: 1533416 - DNA, 15 bp, Homo sapiens
ccattgatggctgga

SEQ ID NO: 1533417 - DNA, 15 bp, Homo sapiens
cattgatggctggaa

SEQ ID NO: 1533418 - DNA, 15 bp, Homo sapiens
attgatggctggaat

SEQ ID NO: 1533419 - DNA, 15 bp, Homo sapiens
ttgatggctggaata

SEQ ID NO: 1533420 - DNA, 15 bp, Homo sapiens
tgatggctggaatac

SEQ ID NO: 1533421 - DNA, 15 bp, Homo sapiens
gatggctggaataca

SEQ ID NO: 1533422 - DNA, 15 bp, Homo sapiens
atggctggaatacat

SEQ ID NO: 1533423 - DNA, 15 bp, Homo sapiens
tggctggaatacatg

SEQ ID NO: 1533424 - DNA, 15 bp, Homo sapiens
ggctggaatacatgt

SEQ ID NO: 1533425 - DNA, 15 bp, Homo sapiens
gctggaatacatgtc

SEQ ID NO: 1533426 - DNA, 15 bp, Homo sapiens
ctggaatacatgtca

SEQ ID NO: 1533427 - DNA, 15 bp, Homo sapiens
tggaatacatgtcaa

SEQ ID NO: 1533428 - DNA, 15 bp, Homo sapiens
ggaatacatgtcaat

SEQ ID NO: 1533429 - DNA, 15 bp, Homo sapiens
gaatacatgtcaatc

SEQ ID NO: 1533430 - DNA, 15 bp, Homo sapiens
aatacatgtcaatcc

SEQ ID NO: 1533431 - DNA, 15 bp, Homo sapiens
atacatgtcaatcca

SEQ ID NO: 1533432 - DNA, 15 bp, Homo sapiens
tacatgtcaatccaa

SEQ ID NO: 1533433 - DNA, 15 bp, Homo sapiens
acatgtcaatccaag

SEQ ID NO: 1533434 - DNA, 15 bp, Homo sapiens
catgtcaatccaagt

SEQ ID NO: 1533435 - DNA, 15 bp, Homo sapiens
atgtcaatccaagtc

SEQ ID NO: 1533436 - DNA, 15 bp, Homo sapiens
tgtcaatccaagtca

SEQ ID NO: 1533437 - DNA, 15 bp, Homo sapiens
gtcaatccaagtcaa

SEQ ID NO: 1533438 - DNA, 15 bp, Homo sapiens
tcaatccaagtcaag

SEQ ID NO: 1533439 - DNA, 15 bp, Homo sapiens
caatccaagtcaaga

SEQ ID NO: 1533440 - DNA, 15 bp, Homo sapiens
aatccaagtcaagag

SEQ ID NO: 1533441 - DNA, 15 bp, Homo sapiens
atccaagtcaagaga

SEQ ID NO: 1533442 - DNA, 15 bp, Homo sapiens
tccaagtcaagagaa

SEQ ID NO: 1533443 - DNA, 15 bp, Homo sapiens
ccaagtcaagagaaa

SEQ ID NO: 1533444 - DNA, 15 bp, Homo sapiens
caagtcaagagaaaa

SEQ ID NO: 1533445 - DNA, 15 bp, Homo sapiens
aagtcaagagaaaat

SEQ ID NO: 1533446 - DNA, 15 bp, Homo sapiens
agtcaagagaaaatg

SEQ ID NO: 1533447 - DNA, 15 bp, Homo sapiens
gtcaagagaaaatgc

SEQ ID NO: 1533448 - DNA, 15 bp, Homo sapiens
tcaagagaaaatgcc

SEQ ID NO: 1533449 - DNA, 15 bp, Homo sapiens
caagagaaaatgccg

SEQ ID NO: 1533450 - DNA, 15 bp, Homo sapiens
aagagaaaatgccgc

SEQ ID NO: 1533451 - DNA, 15 bp, Homo sapiens
agagaaaatgccgcc

SEQ ID NO: 1533452 - DNA, 15 bp, Homo sapiens
gagaaaatgccgccc

SEQ ID NO: 1533453 - DNA, 15 bp, Homo sapiens
agaaaatgccgccct

SEQ ID NO: 1533454 - DNA, 15 bp, Homo sapiens
gaaaatgccgccctt

SEQ ID NO: 1533455 - DNA, 15 bp, Homo sapiens
aaaatgccgcccttt

SEQ ID NO: 1533456 - DNA, 15 bp, Homo sapiens
aaatgccgccctttc

SEQ ID NO: 1533457 - DNA, 15 bp, Homo sapiens
aatgccgccctttcc

SEQ ID NO: 1533458 - DNA, 15 bp, Homo sapiens
atgccgccctttcca

SEQ ID NO: 1533459 - DNA, 15 bp, Homo sapiens
tgccgccctttccag

SEQ ID NO: 1533460 - DNA, 15 bp, Homo sapiens
gccgccctttccagg

SEQ ID NO: 1533461 - DNA, 15 bp, Homo sapiens
ccgccctttccaggt

SEQ ID NO: 1533462 - DNA, 15 bp, Homo sapiens
cgccctttccaggtt

SEQ ID NO: 1533463 - DNA, 15 bp, Homo sapiens
gccctttccaggttg

SEQ ID NO: 1533464 - DNA, 15 bp, Homo sapiens
ccctttccaggttgg

SEQ ID NO: 1533465 - DNA, 15 bp, Homo sapiens
cctttccaggttgga

SEQ ID NO: 1533466 - DNA, 15 bp, Homo sapiens
ctttccaggttggaa

SEQ ID NO: 1533467 - DNA, 15 bp, Homo sapiens
tttccaggttggaag

SEQ ID NO: 1533468 - DNA, 15 bp, Homo sapiens
ttccaggttggaagg

SEQ ID NO: 1533469 - DNA, 15 bp, Homo sapiens
tccaggttggaaggg

SEQ ID NO: 1533470 - DNA, 15 bp, Homo sapiens
ccaggttggaagggg

SEQ ID NO: 1533471 - DNA, 15 bp, Homo sapiens
caggttggaaggggc

SEQ ID NO: 1533472 - DNA, 15 bp, Homo sapiens
aggttggaaggggcc

SEQ ID NO: 1533473 - DNA, 15 bp, Homo sapiens
ggttggaaggggccc

SEQ ID NO: 1533474 - DNA, 15 bp, Homo sapiens
gttggaaggggcccg

SEQ ID NO: 1533475 - DNA, 15 bp, Homo sapiens
ttggaaggggcccga

SEQ ID NO: 1533476 - DNA, 15 bp, Homo sapiens
tggaaggggcccgat

SEQ ID NO: 1533477 - DNA, 15 bp, Homo sapiens
ggaaggggcccgatt

SEQ ID NO: 1533478 - DNA, 15 bp, Homo sapiens
gaaggggcccgattt

SEQ ID NO: 1533479 - DNA, 15 bp, Homo sapiens
aaggggcccgattta

SEQ ID NO: 1533480 - DNA, 15 bp, Homo sapiens
aggggcccgatttag

SEQ ID NO: 1533481 - DNA, 15 bp, Homo sapiens
ggggcccgatttagc

SEQ ID NO: 1533482 - DNA, 15 bp, Homo sapiens
gggcccgatttagcc

SEQ ID NO: 1533483 - DNA, 15 bp, Homo sapiens
ggcccgatttagcca

SEQ ID NO: 1533484 - DNA, 15 bp, Homo sapiens
gcccgatttagccaa

SEQ ID NO: 1533485 - DNA, 15 bp, Homo sapiens
cccgatttagccaac

SEQ ID NO: 1533486 - DNA, 15 bp, Homo sapiens
ccgatttagccaact

SEQ ID NO: 1533487 - DNA, 15 bp, Homo sapiens
cgatttagccaactt

SEQ ID NO: 1533488 - DNA, 15 bp, Homo sapiens
gatttagccaacttg

SEQ ID NO: 1533489 - DNA, 15 bp, Homo sapiens
atttagccaacttgt

SEQ ID NO: 1533490 - DNA, 15 bp, Homo sapiens
tttagccaacttgtc

SEQ ID NO: 1533491 - DNA, 15 bp, Homo sapiens
ttagccaacttgtca

SEQ ID NO: 1533492 - DNA, 15 bp, Homo sapiens
tagccaacttgtcac

SEQ ID NO: 1533493 - DNA, 15 bp, Homo sapiens
agccaacttgtcacc

SEQ ID NO: 1533494 - DNA, 15 bp, Homo sapiens
gccaacttgtcaccc

SEQ ID NO: 1533495 - DNA, 15 bp, Homo sapiens
ccaacttgtcaccca

SEQ ID NO: 1533496 - DNA, 15 bp, Homo sapiens
caacttgtcacccag

SEQ ID NO: 1533497 - DNA, 15 bp, Homo sapiens
aacttgtcacccagt

SEQ ID NO: 1533498 - DNA, 15 bp, Homo sapiens
acttgtcacccagta

SEQ ID NO: 1533499 - DNA, 15 bp, Homo sapiens
cttgtcacccagtag

SEQ ID NO: 1533500 - DNA, 15 bp, Homo sapiens
ttgtcacccagtagt

SEQ ID NO: 1533501 - DNA, 15 bp, Homo sapiens
tgtcacccagtagtg

SEQ ID NO: 1533502 - DNA, 15 bp, Homo sapiens
gtcacccagtagtgg

SEQ ID NO: 1533503 - DNA, 15 bp, Homo sapiens
tcacccagtagtggc

SEQ ID NO: 1533504 - DNA, 15 bp, Homo sapiens
cacccagtagtggct

SEQ ID NO: 1533505 - DNA, 15 bp, Homo sapiens
acccagtagtggctg

SEQ ID NO: 1533506 - DNA, 15 bp, Homo sapiens
cccagtagtggctgg

SEQ ID NO: 1533507 - DNA, 15 bp, Homo sapiens
ccagtagtggctggt

SEQ ID NO: 1533508 - DNA, 15 bp, Homo sapiens
cagtagtggctggtt

SEQ ID NO: 1533509 - DNA, 15 bp, Homo sapiens
agtagtggctggttg

SEQ ID NO: 1533510 - DNA, 15 bp, Homo sapiens
gtagtggctggttgg

SEQ ID NO: 1533511 - DNA, 15 bp, Homo sapiens
tagtggctggttggt

SEQ ID NO: 1533512 - DNA, 15 bp, Homo sapiens
agtggctggttggtc

SEQ ID NO: 1533513 - DNA, 15 bp, Homo sapiens
gtggctggttggtct

SEQ ID NO: 1533514 - DNA, 15 bp, Homo sapiens
tggctggttggtctc

SEQ ID NO: 1533515 - DNA, 15 bp, Homo sapiens
ggctggttggtctcc

SEQ ID NO: 1533516 - DNA, 15 bp, Homo sapiens
gctggttggtctcct

SEQ ID NO: 1533517 - DNA, 15 bp, Homo sapiens
ctggttggtctcctc

SEQ ID NO: 1533518 - DNA, 15 bp, Homo sapiens
tggttggtctcctcc

SEQ ID NO: 1533519 - DNA, 15 bp, Homo sapiens
ggttggtctcctcca

SEQ ID NO: 1533520 - DNA, 15 bp, Homo sapiens
gttggtctcctccag

SEQ ID NO: 1533521 - DNA, 15 bp, Homo sapiens
ttggtctcctccagg

SEQ ID NO: 1533522 - DNA, 15 bp, Homo sapiens
tggtctcctccagga

SEQ ID NO: 1533523 - DNA, 15 bp, Homo sapiens
ggtctcctccaggag

SEQ ID NO: 1533524 - DNA, 15 bp, Homo sapiens
gtctcctccaggagc

SEQ ID NO: 1533525 - DNA, 15 bp, Homo sapiens
tctcctccaggagca

SEQ ID NO: 1533526 - DNA, 15 bp, Homo sapiens
ctcctccaggagcag

SEQ ID NO: 1533527 - DNA, 15 bp, Homo sapiens
tcctccaggagcagt

SEQ ID NO: 1533528 - DNA, 15 bp, Homo sapiens
cctccaggagcagtg

SEQ ID NO: 1533529 - DNA, 15 bp, Homo sapiens
ctccaggagcagtgt

SEQ ID NO: 1533530 - DNA, 15 bp, Homo sapiens
tccaggagcagtgtt

SEQ ID NO: 1533531 - DNA, 15 bp, Homo sapiens
ccaggagcagtgtta

SEQ ID NO: 1533532 - DNA, 15 bp, Homo sapiens
caggagcagtgttat

SEQ ID NO: 1533533 - DNA, 15 bp, Homo sapiens
aggagcagtgttata

SEQ ID NO: 1533534 - DNA, 15 bp, Homo sapiens
ggagcagtgttatac

SEQ ID NO: 1533535 - DNA, 15 bp, Homo sapiens
gagcagtgttatacc

SEQ ID NO: 1533536 - DNA, 15 bp, Homo sapiens
agcagtgttatacca

SEQ ID NO: 1533537 - DNA, 15 bp, Homo sapiens
gcagtgttataccag

SEQ ID NO: 1533538 - DNA, 15 bp, Homo sapiens
cagtgttataccagg

SEQ ID NO: 1533539 - DNA, 15 bp, Homo sapiens
agtgttataccagga

SEQ ID NO: 1533540 - DNA, 15 bp, Homo sapiens
gtgttataccaggaa

SEQ ID NO: 1533541 - DNA, 15 bp, Homo sapiens
tgttataccaggaat

SEQ ID NO: 1533542 - DNA, 15 bp, Homo sapiens
gttataccaggaatt

SEQ ID NO: 1533543 - DNA, 15 bp, Homo sapiens
ttataccaggaattc

SEQ ID NO: 1533544 - DNA, 15 bp, Homo sapiens
tataccaggaattca

SEQ ID NO: 1533545 - DNA, 15 bp, Homo sapiens
ataccaggaattcag

SEQ ID NO: 1533546 - DNA, 15 bp, Homo sapiens
taccaggaattcagc

SEQ ID NO: 1533547 - DNA, 15 bp, Homo sapiens
accaggaattcagca

SEQ ID NO: 1533548 - DNA, 15 bp, Homo sapiens
ccaggaattcagcac

SEQ ID NO: 1533549 - DNA, 15 bp, Homo sapiens
caggaattcagcacc

SEQ ID NO: 1533550 - DNA, 15 bp, Homo sapiens
aggaattcagcacca

SEQ ID NO: 1533551 - DNA, 15 bp, Homo sapiens
ggaattcagcaccag

SEQ ID NO: 1533552 - DNA, 15 bp, Homo sapiens
gaattcagcaccagt

SEQ ID NO: 1533553 - DNA, 15 bp, Homo sapiens
aattcagcaccagtc

SEQ ID NO: 1533554 - DNA, 15 bp, Homo sapiens
attcagcaccagtcg

SEQ ID NO: 1533555 - DNA, 15 bp, Homo sapiens
ttcagcaccagtcgc

SEQ ID NO: 1533556 - DNA, 15 bp, Homo sapiens
tcagcaccagtcgct

SEQ ID NO: 1533557 - DNA, 15 bp, Homo sapiens
cagcaccagtcgcta

SEQ ID NO: 1533558 - DNA, 15 bp, Homo sapiens
agcaccagtcgctat

SEQ ID NO: 1533559 - DNA, 15 bp, Homo sapiens
gcaccagtcgctatt

SEQ ID NO: 1533560 - DNA, 15 bp, Homo sapiens
caccagtcgctattg

SEQ ID NO: 1533561 - DNA, 15 bp, Homo sapiens
accagtcgctattgc

SEQ ID NO: 1533562 - DNA, 15 bp, Homo sapiens
ccagtcgctattgct

SEQ ID NO: 1533563 - DNA, 15 bp, Homo sapiens
cagtcgctattgctg

SEQ ID NO: 1533564 - DNA, 15 bp, Homo sapiens
agtcgctattgctgg

SEQ ID NO: 1533565 - DNA, 15 bp, Homo sapiens
gtcgctattgctggc

SEQ ID NO: 1533566 - DNA, 15 bp, Homo sapiens
tcgctattgctggca

SEQ ID NO: 1533567 - DNA, 15 bp, Homo sapiens
cgctattgctggcag

SEQ ID NO: 1533568 - DNA, 15 bp, Homo sapiens
gctattgctggcagt

SEQ ID NO: 1533569 - DNA, 15 bp, Homo sapiens
ctattgctggcagtt

SEQ ID NO: 1533570 - DNA, 15 bp, Homo sapiens
tattgctggcagttc

SEQ ID NO: 1533571 - DNA, 15 bp, Homo sapiens
attgctggcagttct

SEQ ID NO: 1533572 - DNA, 15 bp, Homo sapiens
ttgctggcagttctt

SEQ ID NO: 1533573 - DNA, 15 bp, Homo sapiens
tgctggcagttctta

SEQ ID NO: 1533574 - DNA, 15 bp, Homo sapiens
gctggcagttcttac

SEQ ID NO: 1533575 - DNA, 15 bp, Homo sapiens
ctggcagttcttaca

SEQ ID NO: 1533576 - DNA, 15 bp, Homo sapiens
tggcagttcttacat

SEQ ID NO: 1533577 - DNA, 15 bp, Homo sapiens
ggcagttcttacatt

SEQ ID NO: 1533578 - DNA, 15 bp, Homo sapiens
gcagttcttacattc

SEQ ID NO: 1533579 - DNA, 15 bp, Homo sapiens
cagttcttacattca

SEQ ID NO: 1533580 - DNA, 15 bp, Homo sapiens
agttcttacattcaa

SEQ ID NO: 1533581 - DNA, 15 bp, Homo sapiens
gttcttacattcaac

SEQ ID NO: 1533582 - DNA, 15 bp, Homo sapiens
ttcttacattcaaca

SEQ ID NO: 1533583 - DNA, 15 bp, Homo sapiens
tcttacattcaacag

SEQ ID NO: 1533584 - DNA, 15 bp, Homo sapiens
cttacattcaacagc

SEQ ID NO: 1533585 - DNA, 15 bp, Homo sapiens
ttacattcaacagca

SEQ ID NO: 1533586 - DNA, 15 bp, Homo sapiens
tacattcaacagcag

SEQ ID NO: 1533587 - DNA, 15 bp, Homo sapiens
acattcaacagcagc

SEQ ID NO: 1533588 - DNA, 15 bp, Homo sapiens
cattcaacagcagca

SEQ ID NO: 1533589 - DNA, 15 bp, Homo sapiens
attcaacagcagcaa

SEQ ID NO: 1533590 - DNA, 15 bp, Homo sapiens
ttcaacagcagcaaa

SEQ ID NO: 1533591 - DNA, 15 bp, Homo sapiens
tcaacagcagcaaaa

SEQ ID NO: 1533592 - DNA, 15 bp, Homo sapiens
caacagcagcaaaac

SEQ ID NO: 1533593 - DNA, 15 bp, Homo sapiens
aacagcagcaaaact

SEQ ID NO: 1533594 - DNA, 15 bp, Homo sapiens
acagcagcaaaacta

SEQ ID NO: 1533595 - DNA, 15 bp, Homo sapiens
cagcagcaaaactag

SEQ ID NO: 1533596 - DNA, 15 bp, Homo sapiens
agcagcaaaactagg

SEQ ID NO: 1533597 - DNA, 15 bp, Homo sapiens
gcagcaaaactaggt

SEQ ID NO: 1533598 - DNA, 15 bp, Homo sapiens
cagcaaaactaggtc

SEQ ID NO: 1533599 - DNA, 15 bp, Homo sapiens
agcaaaactaggtca

SEQ ID NO: 1533600 - DNA, 15 bp, Homo sapiens
gcaaaactaggtcag

SEQ ID NO: 1533601 - DNA, 15 bp, Homo sapiens
caaaactaggtcagc

SEQ ID NO: 1533602 - DNA, 15 bp, Homo sapiens
aaaactaggtcagcc

SEQ ID NO: 1533603 - DNA, 15 bp, Homo sapiens
aaactaggtcagcct

SEQ ID NO: 1533604 - DNA, 15 bp, Homo sapiens
aactaggtcagcctt

SEQ ID NO: 1533605 - DNA, 15 bp, Homo sapiens
actaggtcagccttg

SEQ ID NO: 1533606 - DNA, 15 bp, Homo sapiens
ctaggtcagccttga

SEQ ID NO: 1533607 - DNA, 15 bp, Homo sapiens
taggtcagccttgat

SEQ ID NO: 1533608 - DNA, 15 bp, Homo sapiens
aggtcagccttgatg

SEQ ID NO: 1533609 - DNA, 15 bp, Homo sapiens
ggtcagccttgatga

SEQ ID NO: 1533610 - DNA, 15 bp, Homo sapiens
gtcagccttgatgag

SEQ ID NO: 1533611 - DNA, 15 bp, Homo sapiens
tcagccttgatgaga

SEQ ID NO: 1533612 - DNA, 15 bp, Homo sapiens
cagccttgatgagag

SEQ ID NO: 1533613 - DNA, 15 bp, Homo sapiens
agccttgatgagagg

SEQ ID NO: 1533614 - DNA, 15 bp, Homo sapiens
gccttgatgagaggg

SEQ ID NO: 1533615 - DNA, 15 bp, Homo sapiens
ccttgatgagaggga

SEQ ID NO: 1533616 - DNA, 15 bp, Homo sapiens
cttgatgagagggaa

SEQ ID NO: 1533617 - DNA, 15 bp, Homo sapiens
ttgatgagagggaat

SEQ ID NO: 1533618 - DNA, 15 bp, Homo sapiens
tgatgagagggaatg

SEQ ID NO: 1533619 - DNA, 15 bp, Homo sapiens
gatgagagggaatgt

SEQ ID NO: 1533620 - DNA, 15 bp, Homo sapiens
atgagagggaatgta

SEQ ID NO: 1533621 - DNA, 15 bp, Homo sapiens
tgagagggaatgtat

SEQ ID NO: 1533622 - DNA, 15 bp, Homo sapiens
gagagggaatgtatg

SEQ ID NO: 1533623 - DNA, 15 bp, Homo sapiens
agagggaatgtatgc

SEQ ID NO: 1533624 - DNA, 15 bp, Homo sapiens
gagggaatgtatgct

SEQ ID NO: 1533625 - DNA, 15 bp, Homo sapiens
agggaatgtatgctt

SEQ ID NO: 1533626 - DNA, 15 bp, Homo sapiens
gggaatgtatgcttc

SEQ ID NO: 1533627 - DNA, 15 bp, Homo sapiens
ggaatgtatgcttct

SEQ ID NO: 1533628 - DNA, 15 bp, Homo sapiens
gaatgtatgcttctg

SEQ ID NO: 1533629 - DNA, 15 bp, Homo sapiens
aatgtatgcttctgg

SEQ ID NO: 1533630 - DNA, 15 bp, Homo sapiens
atgtatgcttctggg

SEQ ID NO: 1533631 - DNA, 15 bp, Homo sapiens
tgtatgcttctgggc

SEQ ID NO: 1533632 - DNA, 15 bp, Homo sapiens
gtatgcttctgggca

SEQ ID NO: 1533633 - DNA, 15 bp, Homo sapiens
tatgcttctgggcac

SEQ ID NO: 1533634 - DNA, 15 bp, Homo sapiens
atgcttctgggcaca

SEQ ID NO: 1533635 - DNA, 15 bp, Homo sapiens
tgcttctgggcacag

SEQ ID NO: 1533636 - DNA, 15 bp, Homo sapiens
gcttctgggcacagg

SEQ ID NO: 1533637 - DNA, 15 bp, Homo sapiens
cttctgggcacaggc

SEQ ID NO: 1533638 - DNA, 15 bp, Homo sapiens
ttctgggcacaggca

SEQ ID NO: 1533639 - DNA, 15 bp, Homo sapiens
tctgggcacaggcat

SEQ ID NO: 1533640 - DNA, 15 bp, Homo sapiens
ctgggcacaggcatg

SEQ ID NO: 1533641 - DNA, 15 bp, Homo sapiens
tgggcacaggcatgg

SEQ ID NO: 1533642 - DNA, 15 bp, Homo sapiens
gggcacaggcatggc

SEQ ID NO: 1533643 - DNA, 15 bp, Homo sapiens
ggcacaggcatggct

SEQ ID NO: 1533644 - DNA, 15 bp, Homo sapiens
gcacaggcatggctt

SEQ ID NO: 1533645 - DNA, 15 bp, Homo sapiens
cacaggcatggcttc

SEQ ID NO: 1533646 - DNA, 15 bp, Homo sapiens
acaggcatggcttcc

SEQ ID NO: 1533647 - DNA, 15 bp, Homo sapiens
caggcatggcttcct

SEQ ID NO: 1533648 - DNA, 15 bp, Homo sapiens
aggcatggcttcctt

SEQ ID NO: 1533649 - DNA, 15 bp, Homo sapiens
ggcatggcttccttc

SEQ ID NO: 1533650 - DNA, 15 bp, Homo sapiens
gcatggcttccttct

SEQ ID NO: 1533651 - DNA, 15 bp, Homo sapiens
catggcttccttctc

SEQ ID NO: 1533652 - DNA, 15 bp, Homo sapiens
atggcttccttctct

SEQ ID NO: 1533653 - DNA, 15 bp, Homo sapiens
tggcttccttctctg

SEQ ID NO: 1533654 - DNA, 15 bp, Homo sapiens
ggcttccttctctga

SEQ ID NO: 1533655 - DNA, 15 bp, Homo sapiens
gcttccttctctgac

SEQ ID NO: 1533656 - DNA, 15 bp, Homo sapiens
cttccttctctgact

SEQ ID NO: 1533657 - DNA, 15 bp, Homo sapiens
ttccttctctgactc

SEQ ID NO: 1533658 - DNA, 15 bp, Homo sapiens
tccttctctgactcc

SEQ ID NO: 1533659 - DNA, 15 bp, Homo sapiens
ccttctctgactcca

SEQ ID NO: 1533660 - DNA, 15 bp, Homo sapiens
cttctctgactccat

SEQ ID NO: 1533661 - DNA, 15 bp, Homo sapiens
ttctctgactccatg

SEQ ID NO: 1533662 - DNA, 15 bp, Homo sapiens
tctctgactccatga

SEQ ID NO: 1533663 - DNA, 15 bp, Homo sapiens
ctctgactccatgac

SEQ ID NO: 1533664 - DNA, 15 bp, Homo sapiens
tctgactccatgact

SEQ ID NO: 1533665 - DNA, 15 bp, Homo sapiens
ctgactccatgacta

SEQ ID NO: 1533666 - DNA, 15 bp, Homo sapiens
tgactccatgactat

SEQ ID NO: 1533667 - DNA, 15 bp, Homo sapiens
gactccatgactatc

SEQ ID NO: 1533668 - DNA, 15 bp, Homo sapiens
actccatgactatct

SEQ ID NO: 1533669 - DNA, 15 bp, Homo sapiens
ctccatgactatcta

SEQ ID NO: 1533670 - DNA, 15 bp, Homo sapiens
tccatgactatctat

SEQ ID NO: 1533671 - DNA, 15 bp, Homo sapiens
ccatgactatctatt

SEQ ID NO: 1533672 - DNA, 15 bp, Homo sapiens
catgactatctattt

SEQ ID NO: 1533673 - DNA, 15 bp, Homo sapiens
atgactatctatttc

SEQ ID NO: 1533674 - DNA, 15 bp, Homo sapiens
tgactatctatttct

SEQ ID NO: 1533675 - DNA, 15 bp, Homo sapiens
gactatctatttctg

SEQ ID NO: 1533676 - DNA, 15 bp, Homo sapiens
actatctatttctga

SEQ ID NO: 1533677 - DNA, 15 bp, Homo sapiens
ctatctatttctgag

SEQ ID NO: 1533678 - DNA, 15 bp, Homo sapiens
tatctatttctgagt

SEQ ID NO: 1533679 - DNA, 15 bp, Homo sapiens
atctatttctgagtg

SEQ ID NO: 1533680 - DNA, 15 bp, Homo sapiens
tctatttctgagtgc

SEQ ID NO: 1533681 - DNA, 15 bp, Homo sapiens
ctatttctgagtgca

SEQ ID NO: 1533682 - DNA, 15 bp, Homo sapiens
tatttctgagtgcat

SEQ ID NO: 1533683 - DNA, 15 bp, Homo sapiens
atttctgagtgcatg

SEQ ID NO: 1533684 - DNA, 15 bp, Homo sapiens
tttctgagtgcatgg

SEQ ID NO: 1533685 - DNA, 15 bp, Homo sapiens
ttctgagtgcatggt

SEQ ID NO: 1533686 - DNA, 15 bp, Homo sapiens
tctgagtgcatggtg

SEQ ID NO: 1533687 - DNA, 15 bp, Homo sapiens
ctgagtgcatggtgg

SEQ ID NO: 1533688 - DNA, 15 bp, Homo sapiens
tgagtgcatggtggc

SEQ ID NO: 1533689 - DNA, 15 bp, Homo sapiens
gagtgcatggtggcc

SEQ ID NO: 1533690 - DNA, 15 bp, Homo sapiens
agtgcatggtggccg

SEQ ID NO: 1533691 - DNA, 15 bp, Homo sapiens
gtgcatggtggccga

SEQ ID NO: 1533692 - DNA, 15 bp, Homo sapiens
tgcatggtggccgac

SEQ ID NO: 1533693 - DNA, 15 bp, Homo sapiens
gcatggtggccgaca

SEQ ID NO: 1533694 - DNA, 15 bp, Homo sapiens
catggtggccgacat

SEQ ID NO: 1533695 - DNA, 15 bp, Homo sapiens
atggtggccgacatt

SEQ ID NO: 1533696 - DNA, 15 bp, Homo sapiens
tggtggccgacattc

SEQ ID NO: 1533697 - DNA, 15 bp, Homo sapiens
ggtggccgacattca

SEQ ID NO: 1533698 - DNA, 15 bp, Homo sapiens
gtggccgacattcag

SEQ ID NO: 1533699 - DNA, 15 bp, Homo sapiens
tggccgacattcagc

SEQ ID NO: 1533700 - DNA, 15 bp, Homo sapiens
ggccgacattcagct

SEQ ID NO: 1533701 - DNA, 15 bp, Homo sapiens
gccgacattcagctg

SEQ ID NO: 1533702 - DNA, 15 bp, Homo sapiens
ccgacattcagctgc

SEQ ID NO: 1533703 - DNA, 15 bp, Homo sapiens
cgacattcagctgcc

SEQ ID NO: 1533704 - DNA, 15 bp, Homo sapiens
gacattcagctgcct

SEQ ID NO: 1533705 - DNA, 15 bp, Homo sapiens
acattcagctgcctg

SEQ ID NO: 1533706 - DNA, 15 bp, Homo sapiens
cattcagctgcctgc

SEQ ID NO: 1533707 - DNA, 15 bp, Homo sapiens
attcagctgcctgcc

SEQ ID NO: 1533708 - DNA, 15 bp, Homo sapiens
ttcagctgcctgccc

SEQ ID NO: 1533709 - DNA, 15 bp, Homo sapiens
tcagctgcctgccca

SEQ ID NO: 1533710 - DNA, 15 bp, Homo sapiens
cagctgcctgcccat

SEQ ID NO: 1533711 - DNA, 15 bp, Homo sapiens
agctgcctgcccatc

SEQ ID NO: 1533712 - DNA, 15 bp, Homo sapiens
gctgcctgcccatcc

SEQ ID NO: 1533713 - DNA, 15 bp, Homo sapiens
ctgcctgcccatcct

SEQ ID NO: 1533714 - DNA, 15 bp, Homo sapiens
tgcctgcccatccta

SEQ ID NO: 1533715 - DNA, 15 bp, Homo sapiens
gcctgcccatcctat

SEQ ID NO: 1533716 - DNA, 15 bp, Homo sapiens
cctgcccatcctatc

SEQ ID NO: 1533717 - DNA, 15 bp, Homo sapiens
ctgcccatcctatcc

SEQ ID NO: 1533718 - DNA, 15 bp, Homo sapiens
tgcccatcctatcca

SEQ ID NO: 1533719 - DNA, 15 bp, Homo sapiens
gcccatcctatccac

SEQ ID NO: 1533720 - DNA, 15 bp, Homo sapiens
cccatcctatccact

SEQ ID NO: 1533721 - DNA, 15 bp, Homo sapiens
ccatcctatccactt

SEQ ID NO: 1533722 - DNA, 15 bp, Homo sapiens
catcctatccacttg

SEQ ID NO: 1533723 - DNA, 15 bp, Homo sapiens
atcctatccacttgg

SEQ ID NO: 1533724 - DNA, 15 bp, Homo sapiens
tcctatccacttggt

SEQ ID NO: 1533725 - DNA, 15 bp, Homo sapiens
cctatccacttggtt

SEQ ID NO: 1533726 - DNA, 15 bp, Homo sapiens
ctatccacttggtta

SEQ ID NO: 1533727 - DNA, 15 bp, Homo sapiens
tatccacttggttat

SEQ ID NO: 1533728 - DNA, 15 bp, Homo sapiens
atccacttggttatt

SEQ ID NO: 1533729 - DNA, 15 bp, Homo sapiens
tccacttggttatta

SEQ ID NO: 1533730 - DNA, 15 bp, Homo sapiens
ccacttggttattat

SEQ ID NO: 1533731 - DNA, 15 bp, Homo sapiens
cacttggttattatt

SEQ ID NO: 1533732 - DNA, 15 bp, Homo sapiens
acttggttattattg

SEQ ID NO: 1533733 - DNA, 15 bp, Homo sapiens
cttggttattattgc

SEQ ID NO: 1533734 - DNA, 15 bp, Homo sapiens
ttggttattattgcc

SEQ ID NO: 1533735 - DNA, 15 bp, Homo sapiens
tggttattattgcct

SEQ ID NO: 1533736 - DNA, 15 bp, Homo sapiens
ggttattattgcctc

SEQ ID NO: 1533737 - DNA, 15 bp, Homo sapiens
gttattattgcctct

SEQ ID NO: 1533738 - DNA, 15 bp, Homo sapiens
ttattattgcctctt

SEQ ID NO: 1533739 - DNA, 15 bp, Homo sapiens
tattattgcctcttc

SEQ ID NO: 1533740 - DNA, 15 bp, Homo sapiens
attattgcctcttcc

SEQ ID NO: 1533741 - DNA, 15 bp, Homo sapiens
ttattgcctcttcca

SEQ ID NO: 1533742 - DNA, 15 bp, Homo sapiens
tattgcctcttccac

SEQ ID NO: 1533743 - DNA, 15 bp, Homo sapiens
attgcctcttccaca

SEQ ID NO: 1533744 - DNA, 15 bp, Homo sapiens
ttgcctcttccacaa

SEQ ID NO: 1533745 - DNA, 15 bp, Homo sapiens
tgcctcttccacaag

SEQ ID NO: 1533746 - DNA, 15 bp, Homo sapiens
gcctcttccacaaga

SEQ ID NO: 1533747 - DNA, 15 bp, Homo sapiens
cctcttccacaagaa

SEQ ID NO: 1533748 - DNA, 15 bp, Homo sapiens
ctcttccacaagaag

SEQ ID NO: 1533749 - DNA, 15 bp, Homo sapiens
tcttccacaagaagt

SEQ ID NO: 1533750 - DNA, 15 bp, Homo sapiens
cttccacaagaagtg

SEQ ID NO: 1533751 - DNA, 15 bp, Homo sapiens
ttccacaagaagtgg

SEQ ID NO: 1533752 - DNA, 15 bp, Homo sapiens
tccacaagaagtggt

SEQ ID NO: 1533753 - DNA, 15 bp, Homo sapiens
ccacaagaagtggtt

SEQ ID NO: 1533754 - DNA, 15 bp, Homo sapiens
cacaagaagtggttt

SEQ ID NO: 1533755 - DNA, 15 bp, Homo sapiens
acaagaagtggtttc

SEQ ID NO: 1533756 - DNA, 15 bp, Homo sapiens
caagaagtggtttct

SEQ ID NO: 1533757 - DNA, 15 bp, Homo sapiens
aagaagtggtttctg

SEQ ID NO: 1533758 - DNA, 15 bp, Homo sapiens
agaagtggtttctgg

SEQ ID NO: 1533759 - DNA, 15 bp, Homo sapiens
gaagtggtttctggc

SEQ ID NO: 1533760 - DNA, 15 bp, Homo sapiens
aagtggtttctggct

SEQ ID NO: 1533761 - DNA, 15 bp, Homo sapiens
agtggtttctggctg

SEQ ID NO: 1533762 - DNA, 15 bp, Homo sapiens
gtggtttctggctgt

SEQ ID NO: 1533763 - DNA, 15 bp, Homo sapiens
tggtttctggctgtc

SEQ ID NO: 1533764 - DNA, 15 bp, Homo sapiens
ggtttctggctgtca

SEQ ID NO: 1533765 - DNA, 15 bp, Homo sapiens
gtttctggctgtcat

SEQ ID NO: 1533766 - DNA, 15 bp, Homo sapiens
tttctggctgtcatt

SEQ ID NO: 1533767 - DNA, 15 bp, Homo sapiens
ttctggctgtcatta

SEQ ID NO: 1533768 - DNA, 15 bp, Homo sapiens
tctggctgtcattaa

SEQ ID NO: 1533769 - DNA, 15 bp, Homo sapiens
ctggctgtcattaat

SEQ ID NO: 1533770 - DNA, 15 bp, Homo sapiens
tggctgtcattaatg

SEQ ID NO: 1533771 - DNA, 15 bp, Homo sapiens
ggctgtcattaatgt

SEQ ID NO: 1533772 - DNA, 15 bp, Homo sapiens
gctgtcattaatgtc

SEQ ID NO: 1533773 - DNA, 15 bp, Homo sapiens
ctgtcattaatgtct

SEQ ID NO: 1533774 - DNA, 15 bp, Homo sapiens
tgtcattaatgtctc

SEQ ID NO: 1533775 - DNA, 15 bp, Homo sapiens
gtcattaatgtctca

SEQ ID NO: 1533776 - DNA, 15 bp, Homo sapiens
tcattaatgtctcat

SEQ ID NO: 1533777 - DNA, 15 bp, Homo sapiens
cattaatgtctcata

SEQ ID NO: 1533778 - DNA, 15 bp, Homo sapiens
attaatgtctcatac

SEQ ID NO: 1533779 - DNA, 15 bp, Homo sapiens
ttaatgtctcatact

SEQ ID NO: 1533780 - DNA, 15 bp, Homo sapiens
taatgtctcatactt

SEQ ID NO: 1533781 - DNA, 15 bp, Homo sapiens
aatgtctcatacttt

SEQ ID NO: 1533782 - DNA, 15 bp, Homo sapiens
atgtctcatactttg

SEQ ID NO: 1533783 - DNA, 15 bp, Homo sapiens
tgtctcatactttgt

SEQ ID NO: 1533784 - DNA, 15 bp, Homo sapiens
gtctcatactttgtg

SEQ ID NO: 1533785 - DNA, 15 bp, Homo sapiens
tctcatactttgtgc

SEQ ID NO: 1533786 - DNA, 15 bp, Homo sapiens
ctcatactttgtgcc

SEQ ID NO: 1533787 - DNA, 15 bp, Homo sapiens
tcatactttgtgccc

SEQ ID NO: 1533788 - DNA, 15 bp, Homo sapiens
catactttgtgccca

SEQ ID NO: 1533789 - DNA, 15 bp, Homo sapiens
atactttgtgcccac

SEQ ID NO: 1533790 - DNA, 15 bp, Homo sapiens
tactttgtgcccact

SEQ ID NO: 1533791 - DNA, 15 bp, Homo sapiens
actttgtgcccactc

SEQ ID NO: 1533792 - DNA, 15 bp, Homo sapiens
ctttgtgcccactca

SEQ ID NO: 1533793 - DNA, 15 bp, Homo sapiens
tttgtgcccactcac

SEQ ID NO: 1533794 - DNA, 15 bp, Homo sapiens
ttgtgcccactcaca

SEQ ID NO: 1533795 - DNA, 15 bp, Homo sapiens
tgtgcccactcacac

SEQ ID NO: 1533796 - DNA, 15 bp, Homo sapiens
gtgcccactcacaca

SEQ ID NO: 1533797 - DNA, 15 bp, Homo sapiens
tgcccactcacacag

SEQ ID NO: 1533798 - DNA, 15 bp, Homo sapiens
gcccactcacacagg

SEQ ID NO: 1533799 - DNA, 15 bp, Homo sapiens
cccactcacacaggt

SEQ ID NO: 1533800 - DNA, 15 bp, Homo sapiens
ccactcacacaggtt

SEQ ID NO: 1533801 - DNA, 15 bp, Homo sapiens
cactcacacaggttt

SEQ ID NO: 1533802 - DNA, 15 bp, Homo sapiens
actcacacaggttta

SEQ ID NO: 1533803 - DNA, 15 bp, Homo sapiens
ctcacacaggtttag

SEQ ID NO: 1533804 - DNA, 15 bp, Homo sapiens
tcacacaggtttagc

SEQ ID NO: 1533805 - DNA, 15 bp, Homo sapiens
cacacaggtttagct

SEQ ID NO: 1533806 - DNA, 15 bp, Homo sapiens
acacaggtttagctc

SEQ ID NO: 1533807 - DNA, 15 bp, Homo sapiens
cacaggtttagctct

SEQ ID NO: 1533808 - DNA, 15 bp, Homo sapiens
acaggtttagctcta

SEQ ID NO: 1533809 - DNA, 15 bp, Homo sapiens
caggtttagctctac

SEQ ID NO: 1533810 - DNA, 15 bp, Homo sapiens
aggtttagctctaca

SEQ ID NO: 1533811 - DNA, 15 bp, Homo sapiens
ggtttagctctacaa

SEQ ID NO: 1533812 - DNA, 15 bp, Homo sapiens
gtttagctctacaac

SEQ ID NO: 1533813 - DNA, 15 bp, Homo sapiens
tttagctctacaact

SEQ ID NO: 1533814 - DNA, 15 bp, Homo sapiens
ttagctctacaactt

SEQ ID NO: 1533815 - DNA, 15 bp, Homo sapiens
tagctctacaacttt

SEQ ID NO: 1533816 - DNA, 15 bp, Homo sapiens
agctctacaactttt

SEQ ID NO: 1533817 - DNA, 15 bp, Homo sapiens
gctctacaacttttc

SEQ ID NO: 1533818 - DNA, 15 bp, Homo sapiens
ctctacaacttttcc

SEQ ID NO: 1533819 - DNA, 15 bp, Homo sapiens
tctacaacttttccc

SEQ ID NO: 1533820 - DNA, 15 bp, Homo sapiens
ctacaacttttcccc

SEQ ID NO: 1533821 - DNA, 15 bp, Homo sapiens
tacaacttttcccca

SEQ ID NO: 1533822 - DNA, 15 bp, Homo sapiens
acaacttttccccat

SEQ ID NO: 1533823 - DNA, 15 bp, Homo sapiens
caacttttccccatg

SEQ ID NO: 1533824 - DNA, 15 bp, Homo sapiens
aacttttccccatgc

SEQ ID NO: 1533825 - DNA, 15 bp, Homo sapiens
acttttccccatgcc

SEQ ID NO: 1533826 - DNA, 15 bp, Homo sapiens
cttttccccatgcca

SEQ ID NO: 1533827 - DNA, 15 bp, Homo sapiens
ttttccccatgccac

SEQ ID NO: 1533828 - DNA, 15 bp, Homo sapiens
tttccccatgccacc

SEQ ID NO: 1533829 - DNA, 15 bp, Homo sapiens
ttccccatgccacca

SEQ ID NO: 1533830 - DNA, 15 bp, Homo sapiens
tccccatgccaccac

SEQ ID NO: 1533831 - DNA, 15 bp, Homo sapiens
ccccatgccaccact

SEQ ID NO: 1533832 - DNA, 15 bp, Homo sapiens
cccatgccaccactt

SEQ ID NO: 1533833 - DNA, 15 bp, Homo sapiens
ccatgccaccacttt

SEQ ID NO: 1533834 - DNA, 15 bp, Homo sapiens
catgccaccactttt

SEQ ID NO: 1533835 - DNA, 15 bp, Homo sapiens
atgccaccacttttc

SEQ ID NO: 1533836 - DNA, 15 bp, Homo sapiens
tgccaccacttttcc

SEQ ID NO: 1533837 - DNA, 15 bp, Homo sapiens
gccaccacttttcca

SEQ ID NO: 1533838 - DNA, 15 bp, Homo sapiens
ccaccacttttccac

SEQ ID NO: 1533839 - DNA, 15 bp, Homo sapiens
caccacttttccaca

SEQ ID NO: 1533840 - DNA, 15 bp, Homo sapiens
accacttttccacaa

SEQ ID NO: 1533841 - DNA, 15 bp, Homo sapiens
ccacttttccacaat

SEQ ID NO: 1533842 - DNA, 15 bp, Homo sapiens
cacttttccacaatc

SEQ ID NO: 1533843 - DNA, 15 bp, Homo sapiens
acttttccacaatct

SEQ ID NO: 1533844 - DNA, 15 bp, Homo sapiens
cttttccacaatctt

SEQ ID NO: 1533845 - DNA, 15 bp, Homo sapiens
tttccacaatcttct

SEQ ID NO: 1533846 - DNA, 15 bp, Homo sapiens
ttccacaatcttcta

SEQ ID NO: 1533847 - DNA, 15 bp, Homo sapiens
tccacaatcttctaa

SEQ ID NO: 1533848 - DNA, 15 bp, Homo sapiens
ccacaatcttctaat

SEQ ID NO: 1533849 - DNA, 15 bp, Homo sapiens
cacaatcttctaatg

SEQ ID NO: 1533850 - DNA, 15 bp, Homo sapiens
acaatcttctaatgt

SEQ ID NO: 1533851 - DNA, 15 bp, Homo sapiens
caatcttctaatgtt

SEQ ID NO: 1533852 - DNA, 15 bp, Homo sapiens
aatcttctaatgttg

SEQ ID NO: 1533853 - DNA, 15 bp, Homo sapiens
atcttctaatgttgc

SEQ ID NO: 1533854 - DNA, 15 bp, Homo sapiens
tcttctaatgttgct

SEQ ID NO: 1533855 - DNA, 15 bp, Homo sapiens
cttctaatgttgctc

SEQ ID NO: 1533856 - DNA, 15 bp, Homo sapiens
ttctaatgttgctcc

SEQ ID NO: 1533857 - DNA, 15 bp, Homo sapiens
tctaatgttgctcct

SEQ ID NO: 1533858 - DNA, 15 bp, Homo sapiens
ctaatgttgctcctt

SEQ ID NO: 1533859 - DNA, 15 bp, Homo sapiens
taatgttgctccttc

SEQ ID NO: 1533860 - DNA, 15 bp, Homo sapiens
aatgttgctccttcc

SEQ ID NO: 1533861 - DNA, 15 bp, Homo sapiens
atgttgctccttcca

SEQ ID NO: 1533862 - DNA, 15 bp, Homo sapiens
tgttgctccttccaa

SEQ ID NO: 1533863 - DNA, 15 bp, Homo sapiens
gttgctccttccaag

SEQ ID NO: 1533864 - DNA, 15 bp, Homo sapiens
ttgctccttccaagc

SEQ ID NO: 1533865 - DNA, 15 bp, Homo sapiens
tgctccttccaagct

SEQ ID NO: 1533866 - DNA, 15 bp, Homo sapiens
gctccttccaagcta

SEQ ID NO: 1533867 - DNA, 15 bp, Homo sapiens
ctccttccaagctac

SEQ ID NO: 1533868 - DNA, 15 bp, Homo sapiens
tccttccaagctact

SEQ ID NO: 1533869 - DNA, 15 bp, Homo sapiens
ccttccaagctactg

SEQ ID NO: 1533870 - DNA, 15 bp, Homo sapiens
cttccaagctactga

SEQ ID NO: 1533871 - DNA, 15 bp, Homo sapiens
ttccaagctactgaa

SEQ ID NO: 1533872 - DNA, 15 bp, Homo sapiens
tccaagctactgaag

SEQ ID NO: 1533873 - DNA, 15 bp, Homo sapiens
ccaagctactgaaga

SEQ ID NO: 1533874 - DNA, 15 bp, Homo sapiens
caagctactgaagaa

SEQ ID NO: 1533875 - DNA, 15 bp, Homo sapiens
aagctactgaagaac

SEQ ID NO: 1533876 - DNA, 15 bp, Homo sapiens
agctactgaagaacg

SEQ ID NO: 1533877 - DNA, 15 bp, Homo sapiens
gctactgaagaacga

SEQ ID NO: 1533878 - DNA, 15 bp, Homo sapiens
ctactgaagaacgag

SEQ ID NO: 1533879 - DNA, 15 bp, Homo sapiens
tactgaagaacgagc

SEQ ID NO: 1533880 - DNA, 15 bp, Homo sapiens
actgaagaacgagct

SEQ ID NO: 1533881 - DNA, 15 bp, Homo sapiens
ctgaagaacgagcta

SEQ ID NO: 1533882 - DNA, 15 bp, Homo sapiens
tgaagaacgagctaa

SEQ ID NO: 1533883 - DNA, 15 bp, Homo sapiens
gaagaacgagctaag

SEQ ID NO: 1533884 - DNA, 15 bp, Homo sapiens
aagaacgagctaagc

SEQ ID NO: 1533885 - DNA, 15 bp, Homo sapiens
agaacgagctaagct

SEQ ID NO: 1533886 - DNA, 15 bp, Homo sapiens
gaacgagctaagcta

SEQ ID NO: 1533887 - DNA, 15 bp, Homo sapiens
aacgagctaagctat

SEQ ID NO: 1533888 - DNA, 15 bp, Homo sapiens
acgagctaagctatt

SEQ ID NO: 1533889 - DNA, 15 bp, Homo sapiens
cgagctaagctattc

SEQ ID NO: 1533890 - DNA, 15 bp, Homo sapiens
gagctaagctattca

SEQ ID NO: 1533891 - DNA, 15 bp, Homo sapiens
agctaagctattcac

SEQ ID NO: 1533892 - DNA, 15 bp, Homo sapiens
gctaagctattcacc

SEQ ID NO: 1533893 - DNA, 15 bp, Homo sapiens
ctaagctattcacca

SEQ ID NO: 1533894 - DNA, 15 bp, Homo sapiens
taagctattcaccaa

SEQ ID NO: 1533895 - DNA, 15 bp, Homo sapiens
aagctattcaccaat

SEQ ID NO: 1533896 - DNA, 15 bp, Homo sapiens
agctattcaccaatg

SEQ ID NO: 1533897 - DNA, 15 bp, Homo sapiens
gctattcaccaatgt

SEQ ID NO: 1533898 - DNA, 15 bp, Homo sapiens
ctattcaccaatgtc

SEQ ID NO: 1533899 - DNA, 15 bp, Homo sapiens
tattcaccaatgtcc

SEQ ID NO: 1533900 - DNA, 15 bp, Homo sapiens
attcaccaatgtcca

SEQ ID NO: 1533901 - DNA, 15 bp, Homo sapiens
ttcaccaatgtccat

SEQ ID NO: 1533902 - DNA, 15 bp, Homo sapiens
tcaccaatgtccatg

SEQ ID NO: 1533903 - DNA, 15 bp, Homo sapiens
caccaatgtccatga

SEQ ID NO: 1533904 - DNA, 15 bp, Homo sapiens
accaatgtccatgag

SEQ ID NO: 1533905 - DNA, 15 bp, Homo sapiens
ccaatgtccatgagt

SEQ ID NO: 1533906 - DNA, 15 bp, Homo sapiens
caatgtccatgagtc

SEQ ID NO: 1533907 - DNA, 15 bp, Homo sapiens
aatgtccatgagtct

SEQ ID NO: 1533908 - DNA, 15 bp, Homo sapiens
atgtccatgagtcta

SEQ ID NO: 1533909 - DNA, 15 bp, Homo sapiens
tgtccatgagtctat

SEQ ID NO: 1533910 - DNA, 15 bp, Homo sapiens
gtccatgagtctata

SEQ ID NO: 1533911 - DNA, 15 bp, Homo sapiens
tccatgagtctatat

SEQ ID NO: 1533912 - DNA, 15 bp, Homo sapiens
ccatgagtctatatt

SEQ ID NO: 1533913 - DNA, 15 bp, Homo sapiens
catgagtctatattt

SEQ ID NO: 1533914 - DNA, 15 bp, Homo sapiens
atgagtctatattta

SEQ ID NO: 1533915 - DNA, 15 bp, Homo sapiens
tgagtctatatttac

SEQ ID NO: 1533916 - DNA, 15 bp, Homo sapiens
gagtctatatttacc

SEQ ID NO: 1533917 - DNA, 15 bp, Homo sapiens
agtctatatttacct

SEQ ID NO: 1533918 - DNA, 15 bp, Homo sapiens
gtctatatttacctt

SEQ ID NO: 1533919 - DNA, 15 bp, Homo sapiens
tctatatttacctta

SEQ ID NO: 1533920 - DNA, 15 bp, Homo sapiens
ctatatttaccttag

SEQ ID NO: 1533921 - DNA, 15 bp, Homo sapiens
tatatttaccttagg

SEQ ID NO: 1533922 - DNA, 15 bp, Homo sapiens
atatttaccttaggc

SEQ ID NO: 1533923 - DNA, 15 bp, Homo sapiens
tatttaccttaggcc

SEQ ID NO: 1533924 - DNA, 15 bp, Homo sapiens
atttaccttaggcca

SEQ ID NO: 1533925 - DNA, 15 bp, Homo sapiens
tttaccttaggccac

SEQ ID NO: 1533926 - DNA, 15 bp, Homo sapiens
ttaccttaggccaca

SEQ ID NO: 1533927 - DNA, 15 bp, Homo sapiens
taccttaggccacat

SEQ ID NO: 1533928 - DNA, 15 bp, Homo sapiens
accttaggccacatc

SEQ ID NO: 1533929 - DNA, 15 bp, Homo sapiens
ccttaggccacatct

SEQ ID NO: 1533930 - DNA, 15 bp, Homo sapiens
cttaggccacatctc

SEQ ID NO: 1533931 - DNA, 15 bp, Homo sapiens
ttaggccacatctct

SEQ ID NO: 1533932 - DNA, 15 bp, Homo sapiens
taggccacatctctc

SEQ ID NO: 1533933 - DNA, 15 bp, Homo sapiens
aggccacatctctct

SEQ ID NO: 1533934 - DNA, 15 bp, Homo sapiens
ggccacatctctctc

SEQ ID NO: 1533935 - DNA, 15 bp, Homo sapiens
gccacatctctctcc

SEQ ID NO: 1533936 - DNA, 15 bp, Homo sapiens
ccacatctctctcca

SEQ ID NO: 1533937 - DNA, 15 bp, Homo sapiens
cacatctctctccac

SEQ ID NO: 1533938 - DNA, 15 bp, Homo sapiens
acatctctctccaca

SEQ ID NO: 1533939 - DNA, 15 bp, Homo sapiens
catctctctccacac

SEQ ID NO: 1533940 - DNA, 15 bp, Homo sapiens
atctctctccacaca

SEQ ID NO: 1533941 - DNA, 15 bp, Homo sapiens
tctctctccacacaa

SEQ ID NO: 1533942 - DNA, 15 bp, Homo sapiens
ctctctccacacaaa

SEQ ID NO: 1533943 - DNA, 15 bp, Homo sapiens
tctctccacacaaag

SEQ ID NO: 1533944 - DNA, 15 bp, Homo sapiens
ctctccacacaaagt

SEQ ID NO: 1533945 - DNA, 15 bp, Homo sapiens
tctccacacaaagtg

SEQ ID NO: 1533946 - DNA, 15 bp, Homo sapiens
ctccacacaaagtga

SEQ ID NO: 1533947 - DNA, 15 bp, Homo sapiens
tccacacaaagtgaa

SEQ ID NO: 1533948 - DNA, 15 bp, Homo sapiens
ccacacaaagtgaat

SEQ ID NO: 1533949 - DNA, 15 bp, Homo sapiens
cacacaaagtgaata

SEQ ID NO: 1533950 - DNA, 15 bp, Homo sapiens
acacaaagtgaataa

SEQ ID NO: 1533951 - DNA, 15 bp, Homo sapiens
cacaaagtgaataag

SEQ ID NO: 1533952 - DNA, 15 bp, Homo sapiens
acaaagtgaataagc

SEQ ID NO: 1533953 - DNA, 15 bp, Homo sapiens
caaagtgaataagca

SEQ ID NO: 1533954 - DNA, 15 bp, Homo sapiens
aaagtgaataagcag

SEQ ID NO: 1533955 - DNA, 15 bp, Homo sapiens
aagtgaataagcagg

SEQ ID NO: 1533956 - DNA, 15 bp, Homo sapiens
agtgaataagcaggt

SEQ ID NO: 1533957 - DNA, 15 bp, Homo sapiens
gtgaataagcaggtg

SEQ ID NO: 1533958 - DNA, 15 bp, Homo sapiens
tgaataagcaggtgc

SEQ ID NO: 1533959 - DNA, 15 bp, Homo sapiens
gaataagcaggtgca

SEQ ID NO: 1533960 - DNA, 15 bp, Homo sapiens
aataagcaggtgcac

SEQ ID NO: 1533961 - DNA, 15 bp, Homo sapiens
ataagcaggtgcacc

SEQ ID NO: 1533962 - DNA, 15 bp, Homo sapiens
taagcaggtgcaccc

SEQ ID NO: 1533963 - DNA, 15 bp, Homo sapiens
aagcaggtgcaccct

SEQ ID NO: 1533964 - DNA, 15 bp, Homo sapiens
agcaggtgcaccctc

SEQ ID NO: 1533965 - DNA, 15 bp, Homo sapiens
gcaggtgcaccctcc

SEQ ID NO: 1533966 - DNA, 15 bp, Homo sapiens
caggtgcaccctcca

SEQ ID NO: 1533967 - DNA, 15 bp, Homo sapiens
aggtgcaccctccaa

SEQ ID NO: 1533968 - DNA, 15 bp, Homo sapiens
ggtgcaccctccaaa

SEQ ID NO: 1533969 - DNA, 15 bp, Homo sapiens
gtgcaccctccaaaa

SEQ ID NO: 1533970 - DNA, 15 bp, Homo sapiens
tgcaccctccaaaac

SEQ ID NO: 1533971 - DNA, 15 bp, Homo sapiens
gcaccctccaaaact

SEQ ID NO: 1533972 - DNA, 15 bp, Homo sapiens
caccctccaaaactc

SEQ ID NO: 1533973 - DNA, 15 bp, Homo sapiens
accctccaaaactct

SEQ ID NO: 1533974 - DNA, 15 bp, Homo sapiens
ccctccaaaactcta

SEQ ID NO: 1533975 - DNA, 15 bp, Homo sapiens
cctccaaaactctac

SEQ ID NO: 1533976 - DNA, 15 bp, Homo sapiens
ctccaaaactctact

SEQ ID NO: 1533977 - DNA, 15 bp, Homo sapiens
tccaaaactctacta

SEQ ID NO: 1533978 - DNA, 15 bp, Homo sapiens
ccaaaactctactaa

SEQ ID NO: 1533979 - DNA, 15 bp, Homo sapiens
caaaactctactaag

SEQ ID NO: 1533980 - DNA, 15 bp, Homo sapiens
aaaactctactaaga

SEQ ID NO: 1533981 - DNA, 15 bp, Homo sapiens
aaactctactaagag

SEQ ID NO: 1533982 - DNA, 15 bp, Homo sapiens
aactctactaagagg

SEQ ID NO: 1533983 - DNA, 15 bp, Homo sapiens
actctactaagagga

SEQ ID NO: 1533984 - DNA, 15 bp, Homo sapiens
ctctactaagaggat

SEQ ID NO: 1533985 - DNA, 15 bp, Homo sapiens
tctactaagaggatt

SEQ ID NO: 1533986 - DNA, 15 bp, Homo sapiens
ctactaagaggattt

SEQ ID NO: 1533987 - DNA, 15 bp, Homo sapiens
tactaagaggatttc

SEQ ID NO: 1533988 - DNA, 15 bp, Homo sapiens
actaagaggatttct

SEQ ID NO: 1533989 - DNA, 15 bp, Homo sapiens
ctaagaggatttctt

SEQ ID NO: 1533990 - DNA, 15 bp, Homo sapiens
taagaggatttcttc

SEQ ID NO: 1533991 - DNA, 15 bp, Homo sapiens
aagaggatttcttct

SEQ ID NO: 1533992 - DNA, 15 bp, Homo sapiens
agaggatttcttctc

SEQ ID NO: 1533993 - DNA, 15 bp, Homo sapiens
gaggatttcttctcc

SEQ ID NO: 1533994 - DNA, 15 bp, Homo sapiens
aggatttcttctccc

SEQ ID NO: 1533995 - DNA, 15 bp, Homo sapiens
ggatttcttctcccc

SEQ ID NO: 1533996 - DNA, 15 bp, Homo sapiens
gatttcttctcccca

SEQ ID NO: 1533997 - DNA, 15 bp, Homo sapiens
atttcttctccccag

SEQ ID NO: 1533998 - DNA, 15 bp, Homo sapiens
tttcttctccccagt

SEQ ID NO: 1533999 - DNA, 15 bp, Homo sapiens
ttcttctccccagtg

SEQ ID NO: 1534000 - DNA, 15 bp, Homo sapiens
tcttctccccagtgt

SEQ ID NO: 1534001 - DNA, 15 bp, Homo sapiens
cttctccccagtgtc

SEQ ID NO: 1534002 - DNA, 15 bp, Homo sapiens
ttctccccagtgtct

SEQ ID NO: 1534003 - DNA, 15 bp, Homo sapiens
tctccccagtgtctt

SEQ ID NO: 1534004 - DNA, 15 bp, Homo sapiens
ctccccagtgtcttt

SEQ ID NO: 1534005 - DNA, 15 bp, Homo sapiens
tccccagtgtctttc

SEQ ID NO: 1534006 - DNA, 15 bp, Homo sapiens
ccccagtgtctttca

SEQ ID NO: 1534007 - DNA, 15 bp, Homo sapiens
cccagtgtctttcag

SEQ ID NO: 1534008 - DNA, 15 bp, Homo sapiens
ccagtgtctttcagg

SEQ ID NO: 1534009 - DNA, 15 bp, Homo sapiens
cagtgtctttcaggg

SEQ ID NO: 1534010 - DNA, 15 bp, Homo sapiens
agtgtctttcagggc

SEQ ID NO: 1534011 - DNA, 15 bp, Homo sapiens
gtgtctttcagggcc

SEQ ID NO: 1534012 - DNA, 15 bp, Homo sapiens
tgtctttcagggcca

SEQ ID NO: 1534013 - DNA, 15 bp, Homo sapiens
gtctttcagggccac

SEQ ID NO: 1534014 - DNA, 15 bp, Homo sapiens
tctttcagggccacc

SEQ ID NO: 1534015 - DNA, 15 bp, Homo sapiens
ctttcagggccacct

SEQ ID NO: 1534016 - DNA, 15 bp, Homo sapiens
tttcagggccacctt

SEQ ID NO: 1534017 - DNA, 15 bp, Homo sapiens
ttcagggccaccttg

SEQ ID NO: 1534018 - DNA, 15 bp, Homo sapiens
tcagggccaccttga

SEQ ID NO: 1534019 - DNA, 15 bp, Homo sapiens
cagggccaccttgag

SEQ ID NO: 1534020 - DNA, 15 bp, Homo sapiens
agggccaccttgagt

SEQ ID NO: 1534021 - DNA, 15 bp, Homo sapiens
gggccaccttgagtg

SEQ ID NO: 1534022 - DNA, 15 bp, Homo sapiens
ggccaccttgagtgg

SEQ ID NO: 1534023 - DNA, 15 bp, Homo sapiens
gccaccttgagtggg

SEQ ID NO: 1534024 - DNA, 15 bp, Homo sapiens
ccaccttgagtgggg

SEQ ID NO: 1534025 - DNA, 15 bp, Homo sapiens
caccttgagtggggc

SEQ ID NO: 1534026 - DNA, 15 bp, Homo sapiens
accttgagtggggct

SEQ ID NO: 1534027 - DNA, 15 bp, Homo sapiens
ccttgagtggggctg

SEQ ID NO: 1534028 - DNA, 15 bp, Homo sapiens
cttgagtggggctga

SEQ ID NO: 1534029 - DNA, 15 bp, Homo sapiens
ttgagtggggctgaa

SEQ ID NO: 1534030 - DNA, 15 bp, Homo sapiens
tgagtggggctgaag

SEQ ID NO: 1534031 - DNA, 15 bp, Homo sapiens
gagtggggctgaagt

SEQ ID NO: 1534032 - DNA, 15 bp, Homo sapiens
agtggggctgaagta

SEQ ID NO: 1534033 - DNA, 15 bp, Homo sapiens
gtggggctgaagtac

SEQ ID NO: 1534034 - DNA, 15 bp, Homo sapiens
tggggctgaagtaca

SEQ ID NO: 1534035 - DNA, 15 bp, Homo sapiens
ggggctgaagtacag

SEQ ID NO: 1534036 - DNA, 15 bp, Homo sapiens
gggctgaagtacagc

SEQ ID NO: 1534037 - DNA, 15 bp, Homo sapiens
ggctgaagtacagca

SEQ ID NO: 1534038 - DNA, 15 bp, Homo sapiens
gctgaagtacagcag

SEQ ID NO: 1534039 - DNA, 15 bp, Homo sapiens
ctgaagtacagcaga

SEQ ID NO: 1534040 - DNA, 15 bp, Homo sapiens
tgaagtacagcagaa

SEQ ID NO: 1534041 - DNA, 15 bp, Homo sapiens
gaagtacagcagaag

SEQ ID NO: 1534042 - DNA, 15 bp, Homo sapiens
aagtacagcagaagt

SEQ ID NO: 1534043 - DNA, 15 bp, Homo sapiens
agtacagcagaagtc

SEQ ID NO: 1534044 - DNA, 15 bp, Homo sapiens
gtacagcagaagtcc

SEQ ID NO: 1534045 - DNA, 15 bp, Homo sapiens
tacagcagaagtcca

SEQ ID NO: 1534046 - DNA, 15 bp, Homo sapiens
acagcagaagtccat

SEQ ID NO: 1534047 - DNA, 15 bp, Homo sapiens
cagcagaagtccatt

SEQ ID NO: 1534048 - DNA, 15 bp, Homo sapiens
agcagaagtccattt

SEQ ID NO: 1534049 - DNA, 15 bp, Homo sapiens
gcagaagtccatttc

SEQ ID NO: 1534050 - DNA, 15 bp, Homo sapiens
cagaagtccatttcc

SEQ ID NO: 1534051 - DNA, 15 bp, Homo sapiens
agaagtccatttcca

SEQ ID NO: 1534052 - DNA, 15 bp, Homo sapiens
gaagtccatttccag

SEQ ID NO: 1534053 - DNA, 15 bp, Homo sapiens
aagtccatttccagc

SEQ ID NO: 1534054 - DNA, 15 bp, Homo sapiens
agtccatttccagct

SEQ ID NO: 1534055 - DNA, 15 bp, Homo sapiens
gtccatttccagctt

SEQ ID NO: 1534056 - DNA, 15 bp, Homo sapiens
tccatttccagcttg

SEQ ID NO: 1534057 - DNA, 15 bp, Homo sapiens
ccatttccagcttgc

SEQ ID NO: 1534058 - DNA, 15 bp, Homo sapiens
catttccagcttgca

SEQ ID NO: 1534059 - DNA, 15 bp, Homo sapiens
atttccagcttgcat

SEQ ID NO: 1534060 - DNA, 15 bp, Homo sapiens
tttccagcttgcatc

SEQ ID NO: 1534061 - DNA, 15 bp, Homo sapiens
ttccagcttgcatca

SEQ ID NO: 1534062 - DNA, 15 bp, Homo sapiens
tccagcttgcatcaa

SEQ ID NO: 1534063 - DNA, 15 bp, Homo sapiens
ccagcttgcatcaac

SEQ ID NO: 1534064 - DNA, 15 bp, Homo sapiens
cagcttgcatcaaca

SEQ ID NO: 1534065 - DNA, 15 bp, Homo sapiens
agcttgcatcaacat

SEQ ID NO: 1534066 - DNA, 15 bp, Homo sapiens
gcttgcatcaacatt

SEQ ID NO: 1534067 - DNA, 15 bp, Homo sapiens
cttgcatcaacattc

SEQ ID NO: 1534068 - DNA, 15 bp, Homo sapiens
ttgcatcaacattcc

SEQ ID NO: 1534069 - DNA, 15 bp, Homo sapiens
tgcatcaacattcca

SEQ ID NO: 1534070 - DNA, 15 bp, Homo sapiens
gcatcaacattccaa

SEQ ID NO: 1534071 - DNA, 15 bp, Homo sapiens
catcaacattccaaa

SEQ ID NO: 1534072 - DNA, 15 bp, Homo sapiens
atcaacattccaaac

SEQ ID NO: 1534073 - DNA, 15 bp, Homo sapiens
tcaacattccaaact

SEQ ID NO: 1534074 - DNA, 15 bp, Homo sapiens
caacattccaaacta

SEQ ID NO: 1534075 - DNA, 15 bp, Homo sapiens
aacattccaaactaa

SEQ ID NO: 1534076 - DNA, 15 bp, Homo sapiens
acattccaaactaac

SEQ ID NO: 1534077 - DNA, 15 bp, Homo sapiens
cattccaaactaacc

SEQ ID NO: 1534078 - DNA, 15 bp, Homo sapiens
attccaaactaacct

SEQ ID NO: 1534079 - DNA, 15 bp, Homo sapiens
ttccaaactaaccta

SEQ ID NO: 1534080 - DNA, 15 bp, Homo sapiens
tccaaactaacctat

SEQ ID NO: 1534081 - DNA, 15 bp, Homo sapiens
ccaaactaacctatc

SEQ ID NO: 1534082 - DNA, 15 bp, Homo sapiens
caaactaacctatcc

SEQ ID NO: 1534083 - DNA, 15 bp, Homo sapiens
aaactaacctatcca

SEQ ID NO: 1534084 - DNA, 15 bp, Homo sapiens
aactaacctatccat

SEQ ID NO: 1534085 - DNA, 15 bp, Homo sapiens
actaacctatccatg

SEQ ID NO: 1534086 - DNA, 15 bp, Homo sapiens
ctaacctatccatga

SEQ ID NO: 1534087 - DNA, 15 bp, Homo sapiens
taacctatccatgat

SEQ ID NO: 1534088 - DNA, 15 bp, Homo sapiens
aacctatccatgatc

SEQ ID NO: 1534089 - DNA, 15 bp, Homo sapiens
acctatccatgatca

SEQ ID NO: 1534090 - DNA, 15 bp, Homo sapiens
cctatccatgatcaa

SEQ ID NO: 1534091 - DNA, 15 bp, Homo sapiens
ctatccatgatcaat

SEQ ID NO: 1534092 - DNA, 15 bp, Homo sapiens
tatccatgatcaatg

SEQ ID NO: 1534093 - DNA, 15 bp, Homo sapiens
atccatgatcaatgc

SEQ ID NO: 1534094 - DNA, 15 bp, Homo sapiens
tccatgatcaatgca

SEQ ID NO: 1534095 - DNA, 15 bp, Homo sapiens
ccatgatcaatgcat

SEQ ID NO: 1534096 - DNA, 15 bp, Homo sapiens
catgatcaatgcata

SEQ ID NO: 1534097 - DNA, 15 bp, Homo sapiens
atgatcaatgcatag

SEQ ID NO: 1534098 - DNA, 15 bp, Homo sapiens
tgatcaatgcataga

SEQ ID NO: 1534099 - DNA, 15 bp, Homo sapiens
gatcaatgcatagat

SEQ ID NO: 1534100 - DNA, 15 bp, Homo sapiens
atcaatgcatagatg

SEQ ID NO: 1534101 - DNA, 15 bp, Homo sapiens
tcaatgcatagatgg

SEQ ID NO: 1534102 - DNA, 15 bp, Homo sapiens
caatgcatagatggg

SEQ ID NO: 1534103 - DNA, 15 bp, Homo sapiens
aatgcatagatgggt

SEQ ID NO: 1534104 - DNA, 15 bp, Homo sapiens
atgcatagatgggtt

SEQ ID NO: 1534105 - DNA, 15 bp, Homo sapiens
tgcatagatgggttt

SEQ ID NO: 1534106 - DNA, 15 bp, Homo sapiens
gcatagatgggtttt

SEQ ID NO: 1534107 - DNA, 15 bp, Homo sapiens
catagatgggttttt

SEQ ID NO: 1534108 - DNA, 15 bp, Homo sapiens
atagatgggtttttc

SEQ ID NO: 1534109 - DNA, 15 bp, Homo sapiens
tagatgggtttttcc

SEQ ID NO: 1534110 - DNA, 15 bp, Homo sapiens
agatgggtttttccc

SEQ ID NO: 1534111 - DNA, 15 bp, Homo sapiens
gatgggtttttccct

SEQ ID NO: 1534112 - DNA, 15 bp, Homo sapiens
atgggtttttccctc

SEQ ID NO: 1534113 - DNA, 15 bp, Homo sapiens
tgggtttttccctcc

SEQ ID NO: 1534114 - DNA, 15 bp, Homo sapiens
gggtttttccctcct

SEQ ID NO: 1534115 - DNA, 15 bp, Homo sapiens
ggtttttccctcctc

SEQ ID NO: 1534116 - DNA, 15 bp, Homo sapiens
gtttttccctcctcc

SEQ ID NO: 1534117 - DNA, 15 bp, Homo sapiens
tttttccctcctcca

SEQ ID NO: 1534118 - DNA, 15 bp, Homo sapiens
ttttccctcctccag

SEQ ID NO: 1534119 - DNA, 15 bp, Homo sapiens
tttccctcctccagc

SEQ ID NO: 1534120 - DNA, 15 bp, Homo sapiens
ttccctcctccagca

SEQ ID NO: 1534121 - DNA, 15 bp, Homo sapiens
tccctcctccagcag

SEQ ID NO: 1534122 - DNA, 15 bp, Homo sapiens
ccctcctccagcagc

SEQ ID NO: 1534123 - DNA, 15 bp, Homo sapiens
cctcctccagcagct

SEQ ID NO: 1534124 - DNA, 15 bp, Homo sapiens
ctcctccagcagcta

SEQ ID NO: 1534125 - DNA, 15 bp, Homo sapiens
tcctccagcagctag

SEQ ID NO: 1534126 - DNA, 15 bp, Homo sapiens
cctccagcagctaga

SEQ ID NO: 1534127 - DNA, 15 bp, Homo sapiens
ctccagcagctagac

SEQ ID NO: 1534128 - DNA, 15 bp, Homo sapiens
tccagcagctagaca

SEQ ID NO: 1534129 - DNA, 15 bp, Homo sapiens
ccagcagctagacaa

SEQ ID NO: 1534130 - DNA, 15 bp, Homo sapiens
cagcagctagacaaa

SEQ ID NO: 1534131 - DNA, 15 bp, Homo sapiens
agcagctagacaaaa

SEQ ID NO: 1534132 - DNA, 15 bp, Homo sapiens
gcagctagacaaaag

SEQ ID NO: 1534133 - DNA, 15 bp, Homo sapiens
cagctagacaaaaga

SEQ ID NO: 1534134 - DNA, 15 bp, Homo sapiens
agctagacaaaagac

SEQ ID NO: 1534135 - DNA, 15 bp, Homo sapiens
gctagacaaaagaca

SEQ ID NO: 1534136 - DNA, 15 bp, Homo sapiens
ctagacaaaagacac

SEQ ID NO: 1534137 - DNA, 15 bp, Homo sapiens
tagacaaaagacacc

SEQ ID NO: 1534138 - DNA, 15 bp, Homo sapiens
agacaaaagacaccc

SEQ ID NO: 1534139 - DNA, 15 bp, Homo sapiens
gacaaaagacacccc

SEQ ID NO: 1534140 - DNA, 15 bp, Homo sapiens
acaaaagacaccccc

SEQ ID NO: 1534141 - DNA, 15 bp, Homo sapiens
caaaagacacccccc

SEQ ID NO: 1534142 - DNA, 15 bp, Homo sapiens
aaaagacacccccca

SEQ ID NO: 1534143 - DNA, 15 bp, Homo sapiens
aaagacaccccccac

SEQ ID NO: 1534144 - DNA, 15 bp, Homo sapiens
aagacaccccccacc

SEQ ID NO: 1534145 - DNA, 15 bp, Homo sapiens
agacaccccccacca

SEQ ID NO: 1534146 - DNA, 15 bp, Homo sapiens
gacaccccccaccag

SEQ ID NO: 1534147 - DNA, 15 bp, Homo sapiens
acaccccccaccagg

SEQ ID NO: 1534148 - DNA, 15 bp, Homo sapiens
caccccccaccagga

SEQ ID NO: 1534149 - DNA, 15 bp, Homo sapiens
accccccaccaggag

SEQ ID NO: 1534150 - DNA, 15 bp, Homo sapiens
ccccccaccaggagg

SEQ ID NO: 1534151 - DNA, 15 bp, Homo sapiens
cccccaccaggaggc

SEQ ID NO: 1534152 - DNA, 15 bp, Homo sapiens
ccccaccaggaggcc

SEQ ID NO: 1534153 - DNA, 15 bp, Homo sapiens
cccaccaggaggcca

SEQ ID NO: 1534154 - DNA, 15 bp, Homo sapiens
ccaccaggaggccat

SEQ ID NO: 1534155 - DNA, 15 bp, Homo sapiens
caccaggaggccata

SEQ ID NO: 1534156 - DNA, 15 bp, Homo sapiens
accaggaggccatat

SEQ ID NO: 1534157 - DNA, 15 bp, Homo sapiens
ccaggaggccatatt

SEQ ID NO: 1534158 - DNA, 15 bp, Homo sapiens
caggaggccatattt

SEQ ID NO: 1534159 - DNA, 15 bp, Homo sapiens
aggaggccatatttg

SEQ ID NO: 1534160 - DNA, 15 bp, Homo sapiens
ggaggccatatttgc

SEQ ID NO: 1534161 - DNA, 15 bp, Homo sapiens
gaggccatatttgca

SEQ ID NO: 1534162 - DNA, 15 bp, Homo sapiens
aggccatatttgcat

SEQ ID NO: 1534163 - DNA, 15 bp, Homo sapiens
ggccatatttgcatg

SEQ ID NO: 1534164 - DNA, 15 bp, Homo sapiens
gccatatttgcatgt

SEQ ID NO: 1534165 - DNA, 15 bp, Homo sapiens
ccatatttgcatgtg

SEQ ID NO: 1534166 - DNA, 15 bp, Homo sapiens
catatttgcatgtgg

SEQ ID NO: 1534167 - DNA, 15 bp, Homo sapiens
atatttgcatgtggg

SEQ ID NO: 1534168 - DNA, 15 bp, Homo sapiens
tatttgcatgtgggt

SEQ ID NO: 1534169 - DNA, 15 bp, Homo sapiens
atttgcatgtgggtg

SEQ ID NO: 1534170 - DNA, 15 bp, Homo sapiens
tttgcatgtgggtga

SEQ ID NO: 1534171 - DNA, 15 bp, Homo sapiens
ttgcatgtgggtgaa

SEQ ID NO: 1534172 - DNA, 15 bp, Homo sapiens
tgcatgtgggtgaaa

SEQ ID NO: 1534173 - DNA, 15 bp, Homo sapiens
gcatgtgggtgaaag

SEQ ID NO: 1534174 - DNA, 15 bp, Homo sapiens
catgtgggtgaaaga

SEQ ID NO: 1534175 - DNA, 15 bp, Homo sapiens
atgtgggtgaaagag

SEQ ID NO: 1534176 - DNA, 15 bp, Homo sapiens
tgtgggtgaaagaga

SEQ ID NO: 1534177 - DNA, 15 bp, Homo sapiens
gtgggtgaaagagag

SEQ ID NO: 1534178 - DNA, 15 bp, Homo sapiens
tgggtgaaagagagg

SEQ ID NO: 1534179 - DNA, 15 bp, Homo sapiens
gggtgaaagagaggc

SEQ ID NO: 1534180 - DNA, 15 bp, Homo sapiens
ggtgaaagagaggca

SEQ ID NO: 1534181 - DNA, 15 bp, Homo sapiens
gtgaaagagaggcac

SEQ ID NO: 1534182 - DNA, 15 bp, Homo sapiens
tgaaagagaggcaca

SEQ ID NO: 1534183 - DNA, 15 bp, Homo sapiens
gaaagagaggcacag

SEQ ID NO: 1534184 - DNA, 15 bp, Homo sapiens
aaagagaggcacagg

SEQ ID NO: 1534185 - DNA, 15 bp, Homo sapiens
aagagaggcacaggg

SEQ ID NO: 1534186 - DNA, 15 bp, Homo sapiens
agagaggcacagggg

SEQ ID NO: 1534187 - DNA, 15 bp, Homo sapiens
gagaggcacaggggc

SEQ ID NO: 1534188 - DNA, 15 bp, Homo sapiens
agaggcacaggggcc

SEQ ID NO: 1534189 - DNA, 15 bp, Homo sapiens
gaggcacaggggcca

SEQ ID NO: 1534190 - DNA, 15 bp, Homo sapiens
aggcacaggggccaa

SEQ ID NO: 1534191 - DNA, 15 bp, Homo sapiens
ggcacaggggccaat

SEQ ID NO: 1534192 - DNA, 15 bp, Homo sapiens
gcacaggggccaata

SEQ ID NO: 1534193 - DNA, 15 bp, Homo sapiens
cacaggggccaatat

SEQ ID NO: 1534194 - DNA, 15 bp, Homo sapiens
acaggggccaatatt

SEQ ID NO: 1534195 - DNA, 15 bp, Homo sapiens
caggggccaatattc

SEQ ID NO: 1534196 - DNA, 15 bp, Homo sapiens
aggggccaatattcg

SEQ ID NO: 1534197 - DNA, 15 bp, Homo sapiens
ggggccaatattcgt

SEQ ID NO: 1534198 - DNA, 15 bp, Homo sapiens
gggccaatattcgtg

SEQ ID NO: 1534199 - DNA, 15 bp, Homo sapiens
ggccaatattcgtgc

SEQ ID NO: 1534200 - DNA, 15 bp, Homo sapiens
gccaatattcgtgca

SEQ ID NO: 1534201 - DNA, 15 bp, Homo sapiens
ccaatattcgtgcaa

SEQ ID NO: 1534202 - DNA, 15 bp, Homo sapiens
caatattcgtgcaac

SEQ ID NO: 1534203 - DNA, 15 bp, Homo sapiens
aatattcgtgcaaca

SEQ ID NO: 1534204 - DNA, 15 bp, Homo sapiens
atattcgtgcaacag

SEQ ID NO: 1534205 - DNA, 15 bp, Homo sapiens
tattcgtgcaacagt

SEQ ID NO: 1534206 - DNA, 15 bp, Homo sapiens
attcgtgcaacagtg

SEQ ID NO: 1534207 - DNA, 15 bp, Homo sapiens
ttcgtgcaacagtgg

SEQ ID NO: 1534208 - DNA, 15 bp, Homo sapiens
tcgtgcaacagtggt

SEQ ID NO: 1534209 - DNA, 15 bp, Homo sapiens
cgtgcaacagtggta

SEQ ID NO: 1534210 - DNA, 15 bp, Homo sapiens
gtgcaacagtggtag

SEQ ID NO: 1534211 - DNA, 15 bp, Homo sapiens
tgcaacagtggtaga

SEQ ID NO: 1534212 - DNA, 15 bp, Homo sapiens
gcaacagtggtagat

SEQ ID NO: 1534213 - DNA, 15 bp, Homo sapiens
caacagtggtagatg

SEQ ID NO: 1534214 - DNA, 15 bp, Homo sapiens
aacagtggtagatgg

SEQ ID NO: 1534215 - DNA, 15 bp, Homo sapiens
acagtggtagatggc

SEQ ID NO: 1534216 - DNA, 15 bp, Homo sapiens
cagtggtagatggca

SEQ ID NO: 1534217 - DNA, 15 bp, Homo sapiens
agtggtagatggcag

SEQ ID NO: 1534218 - DNA, 15 bp, Homo sapiens
gtggtagatggcagg

SEQ ID NO: 1534219 - DNA, 15 bp, Homo sapiens
tggtagatggcaggt

SEQ ID NO: 1534220 - DNA, 15 bp, Homo sapiens
ggtagatggcaggtg

SEQ ID NO: 1534221 - DNA, 15 bp, Homo sapiens
gtagatggcaggtgg

SEQ ID NO: 1534222 - DNA, 15 bp, Homo sapiens
tagatggcaggtggg

SEQ ID NO: 1534223 - DNA, 15 bp, Homo sapiens
agatggcaggtgggt

SEQ ID NO: 1534224 - DNA, 15 bp, Homo sapiens
gatggcaggtgggtc

SEQ ID NO: 1534225 - DNA, 15 bp, Homo sapiens
atggcaggtgggtct

SEQ ID NO: 1534226 - DNA, 15 bp, Homo sapiens
tggcaggtgggtctg

SEQ ID NO: 1534227 - DNA, 15 bp, Homo sapiens
ggcaggtgggtctgg

SEQ ID NO: 1534228 - DNA, 15 bp, Homo sapiens
gcaggtgggtctggg

SEQ ID NO: 1534229 - DNA, 15 bp, Homo sapiens
caggtgggtctgggc

SEQ ID NO: 1534230 - DNA, 15 bp, Homo sapiens
aggtgggtctgggcc

SEQ ID NO: 1534231 - DNA, 15 bp, Homo sapiens
ggtgggtctgggcca

SEQ ID NO: 1534232 - DNA, 15 bp, Homo sapiens
gtgggtctgggccac

SEQ ID NO: 1534233 - DNA, 15 bp, Homo sapiens
tgggtctgggccacc

SEQ ID NO: 1534234 - DNA, 15 bp, Homo sapiens
gggtctgggccacct

SEQ ID NO: 1534235 - DNA, 15 bp, Homo sapiens
ggtctgggccacctg

SEQ ID NO: 1534236 - DNA, 15 bp, Homo sapiens
gtctgggccacctgt

SEQ ID NO: 1534237 - DNA, 15 bp, Homo sapiens
tctgggccacctgtc

SEQ ID NO: 1534238 - DNA, 15 bp, Homo sapiens
ctgggccacctgtcc

SEQ ID NO: 1534239 - DNA, 15 bp, Homo sapiens
tgggccacctgtccc

SEQ ID NO: 1534240 - DNA, 15 bp, Homo sapiens
gggccacctgtccct

SEQ ID NO: 1534241 - DNA, 15 bp, Homo sapiens
ggccacctgtccctg

SEQ ID NO: 1534242 - DNA, 15 bp, Homo sapiens
gccacctgtccctgc

SEQ ID NO: 1534243 - DNA, 15 bp, Homo sapiens
ccacctgtccctgca

SEQ ID NO: 1534244 - DNA, 15 bp, Homo sapiens
cacctgtccctgcag

SEQ ID NO: 1534245 - DNA, 15 bp, Homo sapiens
acctgtccctgcagc

SEQ ID NO: 1534246 - DNA, 15 bp, Homo sapiens
cctgtccctgcagct

SEQ ID NO: 1534247 - DNA, 15 bp, Homo sapiens
ctgtccctgcagctt

SEQ ID NO: 1534248 - DNA, 15 bp, Homo sapiens
tgtccctgcagctta

SEQ ID NO: 1534249 - DNA, 15 bp, Homo sapiens
gtccctgcagcttat

SEQ ID NO: 1534250 - DNA, 15 bp, Homo sapiens
tccctgcagcttatc

SEQ ID NO: 1534251 - DNA, 15 bp, Homo sapiens
ccctgcagcttatct

SEQ ID NO: 1534252 - DNA, 15 bp, Homo sapiens
cctgcagcttatctg

SEQ ID NO: 1534253 - DNA, 15 bp, Homo sapiens
ctgcagcttatctgt

SEQ ID NO: 1534254 - DNA, 15 bp, Homo sapiens
tgcagcttatctgtg

SEQ ID NO: 1534255 - DNA, 15 bp, Homo sapiens
gcagcttatctgtgc

SEQ ID NO: 1534256 - DNA, 15 bp, Homo sapiens
cagcttatctgtgcc

SEQ ID NO: 1534257 - DNA, 15 bp, Homo sapiens
agcttatctgtgcca

SEQ ID NO: 1534258 - DNA, 15 bp, Homo sapiens
gcttatctgtgccat

SEQ ID NO: 1534259 - DNA, 15 bp, Homo sapiens
cttatctgtgccatc

SEQ ID NO: 1534260 - DNA, 15 bp, Homo sapiens
ttatctgtgccatct

SEQ ID NO: 1534261 - DNA, 15 bp, Homo sapiens
tatctgtgccatctg

SEQ ID NO: 1534262 - DNA, 15 bp, Homo sapiens
atctgtgccatctgg

SEQ ID NO: 1534263 - DNA, 15 bp, Homo sapiens
tctgtgccatctgga

SEQ ID NO: 1534264 - DNA, 15 bp, Homo sapiens
ctgtgccatctggac

SEQ ID NO: 1534265 - DNA, 15 bp, Homo sapiens
tgtgccatctggacc

SEQ ID NO: 1534266 - DNA, 15 bp, Homo sapiens
gtgccatctggacct

SEQ ID NO: 1534267 - DNA, 15 bp, Homo sapiens
tgccatctggacctg

SEQ ID NO: 1534268 - DNA, 15 bp, Homo sapiens
gccatctggacctgc

SEQ ID NO: 1534269 - DNA, 15 bp, Homo sapiens
ccatctggacctgct

SEQ ID NO: 1534270 - DNA, 15 bp, Homo sapiens
catctggacctgctc

SEQ ID NO: 1534271 - DNA, 15 bp, Homo sapiens
atctggacctgctca

SEQ ID NO: 1534272 - DNA, 15 bp, Homo sapiens
tctggacctgctcaa

SEQ ID NO: 1534273 - DNA, 15 bp, Homo sapiens
ctggacctgctcaag

SEQ ID NO: 1534274 - DNA, 15 bp, Homo sapiens
tggacctgctcaagc

SEQ ID NO: 1534275 - DNA, 15 bp, Homo sapiens
ggacctgctcaagcc

SEQ ID NO: 1534276 - DNA, 15 bp, Homo sapiens
gacctgctcaagcct

SEQ ID NO: 1534277 - DNA, 15 bp, Homo sapiens
acctgctcaagcctg

SEQ ID NO: 1534278 - DNA, 15 bp, Homo sapiens
cctgctcaagcctga

SEQ ID NO: 1534279 - DNA, 15 bp, Homo sapiens
ctgctcaagcctgat

SEQ ID NO: 1534280 - DNA, 15 bp, Homo sapiens
tgctcaagcctgatt

SEQ ID NO: 1534281 - DNA, 15 bp, Homo sapiens
gctcaagcctgattc

SEQ ID NO: 1534282 - DNA, 15 bp, Homo sapiens
ctcaagcctgattcc

SEQ ID NO: 1534283 - DNA, 15 bp, Homo sapiens
tcaagcctgattcca

SEQ ID NO: 1534284 - DNA, 15 bp, Homo sapiens
caagcctgattccag

SEQ ID NO: 1534285 - DNA, 15 bp, Homo sapiens
aagcctgattccaga

SEQ ID NO: 1534286 - DNA, 15 bp, Homo sapiens
agcctgattccagat

SEQ ID NO: 1534287 - DNA, 15 bp, Homo sapiens
gcctgattccagata

SEQ ID NO: 1534288 - DNA, 15 bp, Homo sapiens
cctgattccagatat

SEQ ID NO: 1534289 - DNA, 15 bp, Homo sapiens
ctgattccagatata

SEQ ID NO: 1534290 - DNA, 15 bp, Homo sapiens
tgattccagatatac

SEQ ID NO: 1534291 - DNA, 15 bp, Homo sapiens
gattccagatatacc

SEQ ID NO: 1534292 - DNA, 15 bp, Homo sapiens
attccagatatacca

SEQ ID NO: 1534293 - DNA, 15 bp, Homo sapiens
ttccagatataccat

SEQ ID NO: 1534294 - DNA, 15 bp, Homo sapiens
tccagatataccatt

SEQ ID NO: 1534295 - DNA, 15 bp, Homo sapiens
ccagatataccattt

SEQ ID NO: 1534296 - DNA, 15 bp, Homo sapiens
cagatataccatttc

SEQ ID NO: 1534297 - DNA, 15 bp, Homo sapiens
agatataccatttcc

SEQ ID NO: 1534298 - DNA, 15 bp, Homo sapiens
gatataccatttcca

SEQ ID NO: 1534299 - DNA, 15 bp, Homo sapiens
atataccatttccat

SEQ ID NO: 1534300 - DNA, 15 bp, Homo sapiens
tataccatttccatc

SEQ ID NO: 1534301 - DNA, 15 bp, Homo sapiens
ataccatttccatct

SEQ ID NO: 1534302 - DNA, 15 bp, Homo sapiens
taccatttccatctt

SEQ ID NO: 1534303 - DNA, 15 bp, Homo sapiens
accatttccatctta

SEQ ID NO: 1534304 - DNA, 15 bp, Homo sapiens
ccatttccatcttat

SEQ ID NO: 1534305 - DNA, 15 bp, Homo sapiens
catttccatcttatg

SEQ ID NO: 1534306 - DNA, 15 bp, Homo sapiens
atttccatcttatga

SEQ ID NO: 1534307 - DNA, 15 bp, Homo sapiens
tttccatcttatgat

SEQ ID NO: 1534308 - DNA, 15 bp, Homo sapiens
ttccatcttatgatg

SEQ ID NO: 1534309 - DNA, 15 bp, Homo sapiens
tccatcttatgatgg

SEQ ID NO: 1534310 - DNA, 15 bp, Homo sapiens
ccatcttatgatgga

SEQ ID NO: 1534311 - DNA, 15 bp, Homo sapiens
catcttatgatggat

SEQ ID NO: 1534312 - DNA, 15 bp, Homo sapiens
atcttatgatggatg

SEQ ID NO: 1534313 - DNA, 15 bp, Homo sapiens
tcttatgatggatgg

SEQ ID NO: 1534314 - DNA, 15 bp, Homo sapiens
cttatgatggatggc

SEQ ID NO: 1534315 - DNA, 15 bp, Homo sapiens
ttatgatggatggct

SEQ ID NO: 1534316 - DNA, 15 bp, Homo sapiens
tatgatggatggctt

SEQ ID NO: 1534317 - DNA, 15 bp, Homo sapiens
atgatggatggctta

SEQ ID NO: 1534318 - DNA, 15 bp, Homo sapiens
tgatggatggcttat

SEQ ID NO: 1534319 - DNA, 15 bp, Homo sapiens
gatggatggcttatg

SEQ ID NO: 1534320 - DNA, 15 bp, Homo sapiens
atggatggcttatga

SEQ ID NO: 1534321 - DNA, 15 bp, Homo sapiens
tggatggcttatgac

SEQ ID NO: 1534322 - DNA, 15 bp, Homo sapiens
ggatggcttatgacc

SEQ ID NO: 1534323 - DNA, 15 bp, Homo sapiens
gatggcttatgacct

SEQ ID NO: 1534324 - DNA, 15 bp, Homo sapiens
atggcttatgaccta

SEQ ID NO: 1534325 - DNA, 15 bp, Homo sapiens
tggcttatgacctag

SEQ ID NO: 1534326 - DNA, 15 bp, Homo sapiens
ggcttatgacctagt

SEQ ID NO: 1534327 - DNA, 15 bp, Homo sapiens
gcttatgacctagtg

SEQ ID NO: 1534328 - DNA, 15 bp, Homo sapiens
cttatgacctagtgg

SEQ ID NO: 1534329 - DNA, 15 bp, Homo sapiens
ttatgacctagtggg

SEQ ID NO: 1534330 - DNA, 15 bp, Homo sapiens
tatgacctagtgggt

SEQ ID NO: 1534331 - DNA, 15 bp, Homo sapiens
atgacctagtgggtc

SEQ ID NO: 1534332 - DNA, 15 bp, Homo sapiens
tgacctagtgggtct

SEQ ID NO: 1534333 - DNA, 15 bp, Homo sapiens
gacctagtgggtctg

SEQ ID NO: 1534334 - DNA, 15 bp, Homo sapiens
acctagtgggtctga

SEQ ID NO: 1534335 - DNA, 15 bp, Homo sapiens
cctagtgggtctgac

SEQ ID NO: 1534336 - DNA, 15 bp, Homo sapiens
ctagtgggtctgaca

SEQ ID NO: 1534337 - DNA, 15 bp, Homo sapiens
tagtgggtctgacag

SEQ ID NO: 1534338 - DNA, 15 bp, Homo sapiens
agtgggtctgacagc

SEQ ID NO: 1534339 - DNA, 15 bp, Homo sapiens
gtgggtctgacagca

SEQ ID NO: 1534340 - DNA, 15 bp, Homo sapiens
tgggtctgacagcac

SEQ ID NO: 1534341 - DNA, 15 bp, Homo sapiens
gggtctgacagcacc

SEQ ID NO: 1534342 - DNA, 15 bp, Homo sapiens
ggtctgacagcacca

SEQ ID NO: 1534343 - DNA, 15 bp, Homo sapiens
gtctgacagcaccaa

SEQ ID NO: 1534344 - DNA, 15 bp, Homo sapiens
tctgacagcaccaaa

SEQ ID NO: 1534345 - DNA, 15 bp, Homo sapiens
ctgacagcaccaaac

SEQ ID NO: 1534346 - DNA, 15 bp, Homo sapiens
tgacagcaccaaact

SEQ ID NO: 1534347 - DNA, 15 bp, Homo sapiens
gacagcaccaaactc

SEQ ID NO: 1534348 - DNA, 15 bp, Homo sapiens
acagcaccaaactca

SEQ ID NO: 1534349 - DNA, 15 bp, Homo sapiens
cagcaccaaactcat

SEQ ID NO: 1534350 - DNA, 15 bp, Homo sapiens
agcaccaaactcata

SEQ ID NO: 1534351 - DNA, 15 bp, Homo sapiens
gcaccaaactcataa

SEQ ID NO: 1534352 - DNA, 15 bp, Homo sapiens
caccaaactcataat

SEQ ID NO: 1534353 - DNA, 15 bp, Homo sapiens
accaaactcataatg

SEQ ID NO: 1534354 - DNA, 15 bp, Homo sapiens
ccaaactcataatgg

SEQ ID NO: 1534355 - DNA, 15 bp, Homo sapiens
caaactcataatggg

SEQ ID NO: 1534356 - DNA, 15 bp, Homo sapiens
aaactcataatgggc

SEQ ID NO: 1534357 - DNA, 15 bp, Homo sapiens
aactcataatgggca

SEQ ID NO: 1534358 - DNA, 15 bp, Homo sapiens
actcataatgggcag

SEQ ID NO: 1534359 - DNA, 15 bp, Homo sapiens
ctcataatgggcagt

SEQ ID NO: 1534360 - DNA, 15 bp, Homo sapiens
tcataatgggcagtt

SEQ ID NO: 1534361 - DNA, 15 bp, Homo sapiens
cataatgggcagtta

SEQ ID NO: 1534362 - DNA, 15 bp, Homo sapiens
ataatgggcagttat

SEQ ID NO: 1534363 - DNA, 15 bp, Homo sapiens
taatgggcagttatg

SEQ ID NO: 1534364 - DNA, 15 bp, Homo sapiens
aatgggcagttatgg

SEQ ID NO: 1534365 - DNA, 15 bp, Homo sapiens
atgggcagttatggc

SEQ ID NO: 1534366 - DNA, 15 bp, Homo sapiens
tgggcagttatggcc

SEQ ID NO: 1534367 - DNA, 15 bp, Homo sapiens
gggcagttatggcca

SEQ ID NO: 1534368 - DNA, 15 bp, Homo sapiens
ggcagttatggccac

SEQ ID NO: 1534369 - DNA, 15 bp, Homo sapiens
gcagttatggccaca

SEQ ID NO: 1534370 - DNA, 15 bp, Homo sapiens
cagttatggccacat

SEQ ID NO: 1534371 - DNA, 15 bp, Homo sapiens
agttatggccacatg

SEQ ID NO: 1534372 - DNA, 15 bp, Homo sapiens
gttatggccacatgg

SEQ ID NO: 1534373 - DNA, 15 bp, Homo sapiens
ttatggccacatggt

SEQ ID NO: 1534374 - DNA, 15 bp, Homo sapiens
tatggccacatggtc

SEQ ID NO: 1534375 - DNA, 15 bp, Homo sapiens
atggccacatggtca

SEQ ID NO: 1534376 - DNA, 15 bp, Homo sapiens
tggccacatggtcac

SEQ ID NO: 1534377 - DNA, 15 bp, Homo sapiens
ggccacatggtcact

SEQ ID NO: 1534378 - DNA, 15 bp, Homo sapiens
gccacatggtcactt

SEQ ID NO: 1534379 - DNA, 15 bp, Homo sapiens
ccacatggtcactta

SEQ ID NO: 1534380 - DNA, 15 bp, Homo sapiens
cacatggtcacttaa

SEQ ID NO: 1534381 - DNA, 15 bp, Homo sapiens
acatggtcacttaat

SEQ ID NO: 1534382 - DNA, 15 bp, Homo sapiens
catggtcacttaatg

SEQ ID NO: 1534383 - DNA, 15 bp, Homo sapiens
atggtcacttaatgt

SEQ ID NO: 1534384 - DNA, 15 bp, Homo sapiens
tggtcacttaatgtc

SEQ ID NO: 1534385 - DNA, 15 bp, Homo sapiens
ggtcacttaatgtcc

SEQ ID NO: 1534386 - DNA, 15 bp, Homo sapiens
gtcacttaatgtcct

SEQ ID NO: 1534387 - DNA, 15 bp, Homo sapiens
tcacttaatgtccta

SEQ ID NO: 1534388 - DNA, 15 bp, Homo sapiens
cacttaatgtcctat

SEQ ID NO: 1534389 - DNA, 15 bp, Homo sapiens
acttaatgtcctatg

SEQ ID NO: 1534390 - DNA, 15 bp, Homo sapiens
cttaatgtcctatgg

SEQ ID NO: 1534391 - DNA, 15 bp, Homo sapiens
ttaatgtcctatggt

SEQ ID NO: 1534392 - DNA, 15 bp, Homo sapiens
taatgtcctatggtc

SEQ ID NO: 1534393 - DNA, 15 bp, Homo sapiens
aatgtcctatggtca

SEQ ID NO: 1534394 - DNA, 15 bp, Homo sapiens
atgtcctatggtcag

SEQ ID NO: 1534395 - DNA, 15 bp, Homo sapiens
tgtcctatggtcaga

SEQ ID NO: 1534396 - DNA, 15 bp, Homo sapiens
gtcctatggtcagac

SEQ ID NO: 1534397 - DNA, 15 bp, Homo sapiens
tcctatggtcagaca

SEQ ID NO: 1534398 - DNA, 15 bp, Homo sapiens
cctatggtcagacac

SEQ ID NO: 1534399 - DNA, 15 bp, Homo sapiens
ctatggtcagacact

SEQ ID NO: 1534400 - DNA, 15 bp, Homo sapiens
tatggtcagacactc

SEQ ID NO: 1534401 - DNA, 15 bp, Homo sapiens
atggtcagacactct

SEQ ID NO: 1534402 - DNA, 15 bp, Homo sapiens
tggtcagacactctg

SEQ ID NO: 1534403 - DNA, 15 bp, Homo sapiens
ggtcagacactctgc

SEQ ID NO: 1534404 - DNA, 15 bp, Homo sapiens
gtcagacactctgct

SEQ ID NO: 1534405 - DNA, 15 bp, Homo sapiens
tcagacactctgctg

SEQ ID NO: 1534406 - DNA, 15 bp, Homo sapiens
cagacactctgctga

SEQ ID NO: 1534407 - DNA, 15 bp, Homo sapiens
agacactctgctgag

SEQ ID NO: 1534408 - DNA, 15 bp, Homo sapiens
gacactctgctgagt

SEQ ID NO: 1534409 - DNA, 15 bp, Homo sapiens
acactctgctgagtg

SEQ ID NO: 1534410 - DNA, 15 bp, Homo sapiens
cactctgctgagtgg

SEQ ID NO: 1534411 - DNA, 15 bp, Homo sapiens
actctgctgagtggc

SEQ ID NO: 1534412 - DNA, 15 bp, Homo sapiens
ctctgctgagtggca

SEQ ID NO: 1534413 - DNA, 15 bp, Homo sapiens
tctgctgagtggcat

SEQ ID NO: 1534414 - DNA, 15 bp, Homo sapiens
ctgctgagtggcatg

SEQ ID NO: 1534415 - DNA, 15 bp, Homo sapiens
tgctgagtggcatgc

SEQ ID NO: 1534416 - DNA, 15 bp, Homo sapiens
gctgagtggcatgcc

SEQ ID NO: 1534417 - DNA, 15 bp, Homo sapiens
ctgagtggcatgcca

SEQ ID NO: 1534418 - DNA, 15 bp, Homo sapiens
tgagtggcatgccag

SEQ ID NO: 1534419 - DNA, 15 bp, Homo sapiens
gagtggcatgccagg

SEQ ID NO: 1534420 - DNA, 15 bp, Homo sapiens
agtggcatgccagga

SEQ ID NO: 1534421 - DNA, 15 bp, Homo sapiens
gtggcatgccaggaa

SEQ ID NO: 1534422 - DNA, 15 bp, Homo sapiens
tggcatgccaggaaa

SEQ ID NO: 1534423 - DNA, 15 bp, Homo sapiens
ggcatgccaggaaat

SEQ ID NO: 1534424 - DNA, 15 bp, Homo sapiens
gcatgccaggaaatg

SEQ ID NO: 1534425 - DNA, 15 bp, Homo sapiens
catgccaggaaatgc

SEQ ID NO: 1534426 - DNA, 15 bp, Homo sapiens
atgccaggaaatgct

SEQ ID NO: 1534427 - DNA, 15 bp, Homo sapiens
tgccaggaaatgctt

SEQ ID NO: 1534428 - DNA, 15 bp, Homo sapiens
gccaggaaatgcttt

SEQ ID NO: 1534429 - DNA, 15 bp, Homo sapiens
ccaggaaatgcttta

SEQ ID NO: 1534430 - DNA, 15 bp, Homo sapiens
caggaaatgctttac

SEQ ID NO: 1534431 - DNA, 15 bp, Homo sapiens
aggaaatgctttaca

SEQ ID NO: 1534432 - DNA, 15 bp, Homo sapiens
ggaaatgctttacaa

SEQ ID NO: 1534433 - DNA, 15 bp, Homo sapiens
gaaatgctttacaag

SEQ ID NO: 1534434 - DNA, 15 bp, Homo sapiens
aaatgctttacaagt

SEQ ID NO: 1534435 - DNA, 15 bp, Homo sapiens
aatgctttacaagtg

SEQ ID NO: 1534436 - DNA, 15 bp, Homo sapiens
atgctttacaagtgg

SEQ ID NO: 1534437 - DNA, 15 bp, Homo sapiens
tgctttacaagtggt

SEQ ID NO: 1534438 - DNA, 15 bp, Homo sapiens
gctttacaagtggtg

SEQ ID NO: 1534439 - DNA, 15 bp, Homo sapiens
ctttacaagtggtgt

SEQ ID NO: 1534440 - DNA, 15 bp, Homo sapiens
tttacaagtggtgtt

SEQ ID NO: 1534441 - DNA, 15 bp, Homo sapiens
ttacaagtggtgttt

SEQ ID NO: 1534442 - DNA, 15 bp, Homo sapiens
tacaagtggtgtttg

SEQ ID NO: 1534443 - DNA, 15 bp, Homo sapiens
acaagtggtgtttgg

SEQ ID NO: 1534444 - DNA, 15 bp, Homo sapiens
caagtggtgtttggt

SEQ ID NO: 1534445 - DNA, 15 bp, Homo sapiens
aagtggtgtttggtt

SEQ ID NO: 1534446 - DNA, 15 bp, Homo sapiens
agtggtgtttggttc

SEQ ID NO: 1534447 - DNA, 15 bp, Homo sapiens
gtggtgtttggttct

SEQ ID NO: 1534448 - DNA, 15 bp, Homo sapiens
tggtgtttggttctc

SEQ ID NO: 1534449 - DNA, 15 bp, Homo sapiens
ggtgtttggttctct

SEQ ID NO: 1534450 - DNA, 15 bp, Homo sapiens
gtgtttggttctctg

SEQ ID NO: 1534451 - DNA, 15 bp, Homo sapiens
tgtttggttctctgc

SEQ ID NO: 1534452 - DNA, 15 bp, Homo sapiens
gtttggttctctgct

SEQ ID NO: 1534453 - DNA, 15 bp, Homo sapiens
tttggttctctgctg

SEQ ID NO: 1534454 - DNA, 15 bp, Homo sapiens
ttggttctctgctgc

SEQ ID NO: 1534455 - DNA, 15 bp, Homo sapiens
tggttctctgctgca

SEQ ID NO: 1534456 - DNA, 15 bp, Homo sapiens
ggttctctgctgcag

SEQ ID NO: 1534457 - DNA, 15 bp, Homo sapiens
gttctctgctgcaga

SEQ ID NO: 1534458 - DNA, 15 bp, Homo sapiens
ttctctgctgcagat

SEQ ID NO: 1534459 - DNA, 15 bp, Homo sapiens
tctctgctgcagatg

SEQ ID NO: 1534460 - DNA, 15 bp, Homo sapiens
ctctgctgcagatgg

SEQ ID NO: 1534461 - DNA, 15 bp, Homo sapiens
tctgctgcagatggc

SEQ ID NO: 1534462 - DNA, 15 bp, Homo sapiens
ctgctgcagatggca

SEQ ID NO: 1534463 - DNA, 15 bp, Homo sapiens
tgctgcagatggcat

SEQ ID NO: 1534464 - DNA, 15 bp, Homo sapiens
gctgcagatggcatg

SEQ ID NO: 1534465 - DNA, 15 bp, Homo sapiens
ctgcagatggcatga

SEQ ID NO: 1534466 - DNA, 15 bp, Homo sapiens
tgcagatggcatgac

SEQ ID NO: 1534467 - DNA, 15 bp, Homo sapiens
gcagatggcatgacc

SEQ ID NO: 1534468 - DNA, 15 bp, Homo sapiens
cagatggcatgacct

SEQ ID NO: 1534469 - DNA, 15 bp, Homo sapiens
agatggcatgacctt

SEQ ID NO: 1534470 - DNA, 15 bp, Homo sapiens
gatggcatgaccttg

SEQ ID NO: 1534471 - DNA, 15 bp, Homo sapiens
atggcatgaccttgg

SEQ ID NO: 1534472 - DNA, 15 bp, Homo sapiens
tggcatgaccttggt

SEQ ID NO: 1534473 - DNA, 15 bp, Homo sapiens
ggcatgaccttggtc

SEQ ID NO: 1534474 - DNA, 15 bp, Homo sapiens
gcatgaccttggtcc

SEQ ID NO: 1534475 - DNA, 15 bp, Homo sapiens
catgaccttggtccg

SEQ ID NO: 1534476 - DNA, 15 bp, Homo sapiens
atgaccttggtccgg

SEQ ID NO: 1534477 - DNA, 15 bp, Homo sapiens
tgaccttggtccgga

SEQ ID NO: 1534478 - DNA, 15 bp, Homo sapiens
gaccttggtccggag

SEQ ID NO: 1534479 - DNA, 15 bp, Homo sapiens
accttggtccggagc

SEQ ID NO: 1534480 - DNA, 15 bp, Homo sapiens
ccttggtccggagcc

SEQ ID NO: 1534481 - DNA, 15 bp, Homo sapiens
cttggtccggagccc

SEQ ID NO: 1534482 - DNA, 15 bp, Homo sapiens
ttggtccggagccct

SEQ ID NO: 1534483 - DNA, 15 bp, Homo sapiens
tggtccggagcccta

SEQ ID NO: 1534484 - DNA, 15 bp, Homo sapiens
ggtccggagccctag

SEQ ID NO: 1534485 - DNA, 15 bp, Homo sapiens
gtccggagccctagg

SEQ ID NO: 1534486 - DNA, 15 bp, Homo sapiens
tccggagccctaggg

SEQ ID NO: 1534487 - DNA, 15 bp, Homo sapiens
ccggagccctagggg

SEQ ID NO: 1534488 - DNA, 15 bp, Homo sapiens
cggagccctaggggt

SEQ ID NO: 1534489 - DNA, 15 bp, Homo sapiens
ggagccctaggggtt

SEQ ID NO: 1534490 - DNA, 15 bp, Homo sapiens
gagccctaggggttt

SEQ ID NO: 1534491 - DNA, 15 bp, Homo sapiens
agccctaggggtttg

SEQ ID NO: 1534492 - DNA, 15 bp, Homo sapiens
gccctaggggtttgg

SEQ ID NO: 1534493 - DNA, 15 bp, Homo sapiens
ccctaggggtttgga

SEQ ID NO: 1534494 - DNA, 15 bp, Homo sapiens
cctaggggtttggac

SEQ ID NO: 1534495 - DNA, 15 bp, Homo sapiens
ctaggggtttggaca

SEQ ID NO: 1534496 - DNA, 15 bp, Homo sapiens
taggggtttggacag

SEQ ID NO: 1534497 - DNA, 15 bp, Homo sapiens
aggggtttggacagt

SEQ ID NO: 1534498 - DNA, 15 bp, Homo sapiens
ggggtttggacagtg

SEQ ID NO: 1534499 - DNA, 15 bp, Homo sapiens
gggtttggacagtga

SEQ ID NO: 1534500 - DNA, 15 bp, Homo sapiens
ggtttggacagtgac

SEQ ID NO: 1534501 - DNA, 15 bp, Homo sapiens
gtttggacagtgact

SEQ ID NO: 1534502 - DNA, 15 bp, Homo sapiens
tttggacagtgactc

SEQ ID NO: 1534503 - DNA, 15 bp, Homo sapiens
ttggacagtgactcc

SEQ ID NO: 1534504 - DNA, 15 bp, Homo sapiens
tggacagtgactcct

SEQ ID NO: 1534505 - DNA, 15 bp, Homo sapiens
ggacagtgactcctg

SEQ ID NO: 1534506 - DNA, 15 bp, Homo sapiens
gacagtgactcctgt

SEQ ID NO: 1534507 - DNA, 15 bp, Homo sapiens
acagtgactcctgtt

SEQ ID NO: 1534508 - DNA, 15 bp, Homo sapiens
cagtgactcctgttg

SEQ ID NO: 1534509 - DNA, 15 bp, Homo sapiens
agtgactcctgttgg

SEQ ID NO: 1534510 - DNA, 15 bp, Homo sapiens
gtgactcctgttggg

SEQ ID NO: 1534511 - DNA, 15 bp, Homo sapiens
tgactcctgttgggg

SEQ ID NO: 1534512 - DNA, 15 bp, Homo sapiens
gactcctgttggggc

SEQ ID NO: 1534513 - DNA, 15 bp, Homo sapiens
actcctgttggggcc

SEQ ID NO: 1534514 - DNA, 15 bp, Homo sapiens
ctcctgttggggcct

SEQ ID NO: 1534515 - DNA, 15 bp, Homo sapiens
tcctgttggggccta

SEQ ID NO: 1534516 - DNA, 15 bp, Homo sapiens
cctgttggggcctaa

SEQ ID NO: 1534517 - DNA, 15 bp, Homo sapiens
ctgttggggcctaat

SEQ ID NO: 1534518 - DNA, 15 bp, Homo sapiens
tgttggggcctaatc

SEQ ID NO: 1534519 - DNA, 15 bp, Homo sapiens
gttggggcctaatct

SEQ ID NO: 1534520 - DNA, 15 bp, Homo sapiens
ttggggcctaatctc

SEQ ID NO: 1534521 - DNA, 15 bp, Homo sapiens
tggggcctaatctca

SEQ ID NO: 1534522 - DNA, 15 bp, Homo sapiens
ggggcctaatctcac

SEQ ID NO: 1534523 - DNA, 15 bp, Homo sapiens
gggcctaatctcaca

SEQ ID NO: 1534524 - DNA, 15 bp, Homo sapiens
ggcctaatctcacat

SEQ ID NO: 1534525 - DNA, 15 bp, Homo sapiens
gcctaatctcacatt

SEQ ID NO: 1534526 - DNA, 15 bp, Homo sapiens
cctaatctcacattc

SEQ ID NO: 1534527 - DNA, 15 bp, Homo sapiens
ctaatctcacattcc

SEQ ID NO: 1534528 - DNA, 15 bp, Homo sapiens
taatctcacattcca

SEQ ID NO: 1534529 - DNA, 15 bp, Homo sapiens
aatctcacattccat

SEQ ID NO: 1534530 - DNA, 15 bp, Homo sapiens
atctcacattccatg

SEQ ID NO: 1534531 - DNA, 15 bp, Homo sapiens
tctcacattccatgc

SEQ ID NO: 1534532 - DNA, 15 bp, Homo sapiens
ctcacattccatgca

SEQ ID NO: 1534533 - DNA, 15 bp, Homo sapiens
tcacattccatgcag

SEQ ID NO: 1534534 - DNA, 15 bp, Homo sapiens
cacattccatgcaga

SEQ ID NO: 1534535 - DNA, 15 bp, Homo sapiens
acattccatgcagag

SEQ ID NO: 1534536 - DNA, 15 bp, Homo sapiens
cattccatgcagagt

SEQ ID NO: 1534537 - DNA, 15 bp, Homo sapiens
attccatgcagagta

SEQ ID NO: 1534538 - DNA, 15 bp, Homo sapiens
ttccatgcagagtat

SEQ ID NO: 1534539 - DNA, 15 bp, Homo sapiens
tccatgcagagtatc

SEQ ID NO: 1534540 - DNA, 15 bp, Homo sapiens
ccatgcagagtatca

SEQ ID NO: 1534541 - DNA, 15 bp, Homo sapiens
catgcagagtatcat

SEQ ID NO: 1534542 - DNA, 15 bp, Homo sapiens
atgcagagtatcatc

SEQ ID NO: 1534543 - DNA, 15 bp, Homo sapiens
tgcagagtatcatca

SEQ ID NO: 1534544 - DNA, 15 bp, Homo sapiens
gcagagtatcatcag

SEQ ID NO: 1534545 - DNA, 15 bp, Homo sapiens
cagagtatcatcaga

SEQ ID NO: 1534546 - DNA, 15 bp, Homo sapiens
agagtatcatcagat

SEQ ID NO: 1534547 - DNA, 15 bp, Homo sapiens
gagtatcatcagatt

SEQ ID NO: 1534548 - DNA, 15 bp, Homo sapiens
agtatcatcagattt

SEQ ID NO: 1534549 - DNA, 15 bp, Homo sapiens
gtatcatcagatttg

SEQ ID NO: 1534550 - DNA, 15 bp, Homo sapiens
tatcatcagatttgc

SEQ ID NO: 1534551 - DNA, 15 bp, Homo sapiens
atcatcagatttgcc

SEQ ID NO: 1534552 - DNA, 15 bp, Homo sapiens
tcatcagatttgcca

SEQ ID NO: 1534553 - DNA, 15 bp, Homo sapiens
catcagatttgccaa

SEQ ID NO: 1534554 - DNA, 15 bp, Homo sapiens
atcagatttgccaat

SEQ ID NO: 1534555 - DNA, 15 bp, Homo sapiens
tcagatttgccaatc

SEQ ID NO: 1534556 - DNA, 15 bp, Homo sapiens
cagatttgccaatca

SEQ ID NO: 1534557 - DNA, 15 bp, Homo sapiens
agatttgccaatcac

SEQ ID NO: 1534558 - DNA, 15 bp, Homo sapiens
gatttgccaatcaca

SEQ ID NO: 1534559 - DNA, 15 bp, Homo sapiens
atttgccaatcacat

SEQ ID NO: 1534560 - DNA, 15 bp, Homo sapiens
tttgccaatcacata

SEQ ID NO: 1534561 - DNA, 15 bp, Homo sapiens
ttgccaatcacatag

SEQ ID NO: 1534562 - DNA, 15 bp, Homo sapiens
tgccaatcacatagc

SEQ ID NO: 1534563 - DNA, 15 bp, Homo sapiens
gccaatcacatagcc

SEQ ID NO: 1534564 - DNA, 15 bp, Homo sapiens
ccaatcacatagcct

SEQ ID NO: 1534565 - DNA, 15 bp, Homo sapiens
caatcacatagccta

SEQ ID NO: 1534566 - DNA, 15 bp, Homo sapiens
aatcacatagcctaa

SEQ ID NO: 1534567 - DNA, 15 bp, Homo sapiens
atcacatagcctaag

SEQ ID NO: 1534568 - DNA, 15 bp, Homo sapiens
tcacatagcctaagg

SEQ ID NO: 1534569 - DNA, 15 bp, Homo sapiens
cacatagcctaaggg

SEQ ID NO: 1534570 - DNA, 15 bp, Homo sapiens
acatagcctaagggt

SEQ ID NO: 1534571 - DNA, 15 bp, Homo sapiens
catagcctaagggtc

SEQ ID NO: 1534572 - DNA, 15 bp, Homo sapiens
atagcctaagggtca

SEQ ID NO: 1534573 - DNA, 15 bp, Homo sapiens
tagcctaagggtcag

SEQ ID NO: 1534574 - DNA, 15 bp, Homo sapiens
agcctaagggtcagg

SEQ ID NO: 1534575 - DNA, 15 bp, Homo sapiens
gcctaagggtcagga

SEQ ID NO: 1534576 - DNA, 15 bp, Homo sapiens
cctaagggtcaggac

SEQ ID NO: 1534577 - DNA, 15 bp, Homo sapiens
ctaagggtcaggact

SEQ ID NO: 1534578 - DNA, 15 bp, Homo sapiens
taagggtcaggactg

SEQ ID NO: 1534579 - DNA, 15 bp, Homo sapiens
aagggtcaggactga

SEQ ID NO: 1534580 - DNA, 15 bp, Homo sapiens
agggtcaggactgat

SEQ ID NO: 1534581 - DNA, 15 bp, Homo sapiens
gggtcaggactgatc

SEQ ID NO: 1534582 - DNA, 15 bp, Homo sapiens
ggtcaggactgatcc

SEQ ID NO: 1534583 - DNA, 15 bp, Homo sapiens
gtcaggactgatcca

SEQ ID NO: 1534584 - DNA, 15 bp, Homo sapiens
tcaggactgatccaa

SEQ ID NO: 1534585 - DNA, 15 bp, Homo sapiens
caggactgatccaac

SEQ ID NO: 1534586 - DNA, 15 bp, Homo sapiens
aggactgatccaacc

SEQ ID NO: 1534587 - DNA, 15 bp, Homo sapiens
ggactgatccaacca

SEQ ID NO: 1534588 - DNA, 15 bp, Homo sapiens
gactgatccaaccag

SEQ ID NO: 1534589 - DNA, 15 bp, Homo sapiens
actgatccaaccagt

SEQ ID NO: 1534590 - DNA, 15 bp, Homo sapiens
ctgatccaaccagtt

SEQ ID NO: 1534591 - DNA, 15 bp, Homo sapiens
tgatccaaccagttt

SEQ ID NO: 1534592 - DNA, 15 bp, Homo sapiens
gatccaaccagtttt

SEQ ID NO: 1534593 - DNA, 15 bp, Homo sapiens
atccaaccagttttt

SEQ ID NO: 1534594 - DNA, 15 bp, Homo sapiens
tccaaccagtttttg

SEQ ID NO: 1534595 - DNA, 15 bp, Homo sapiens
ccaaccagtttttgc

SEQ ID NO: 1534596 - DNA, 15 bp, Homo sapiens
caaccagtttttgca

SEQ ID NO: 1534597 - DNA, 15 bp, Homo sapiens
aaccagtttttgcag

SEQ ID NO: 1534598 - DNA, 15 bp, Homo sapiens
accagtttttgcaga

SEQ ID NO: 1534599 - DNA, 15 bp, Homo sapiens
ccagtttttgcagag

SEQ ID NO: 1534600 - DNA, 15 bp, Homo sapiens
cagtttttgcagaga

SEQ ID NO: 1534601 - DNA, 15 bp, Homo sapiens
agtttttgcagagat

SEQ ID NO: 1534602 - DNA, 15 bp, Homo sapiens
gtttttgcagagatc

SEQ ID NO: 1534603 - DNA, 15 bp, Homo sapiens
tttttgcagagatca

SEQ ID NO: 1534604 - DNA, 15 bp, Homo sapiens
ttttgcagagatcaa

SEQ ID NO: 1534605 - DNA, 15 bp, Homo sapiens
tttgcagagatcaaa

SEQ ID NO: 1534606 - DNA, 15 bp, Homo sapiens
ttgcagagatcaaac

SEQ ID NO: 1534607 - DNA, 15 bp, Homo sapiens
tgcagagatcaaact

SEQ ID NO: 1534608 - DNA, 15 bp, Homo sapiens
gcagagatcaaactg

SEQ ID NO: 1534609 - DNA, 15 bp, Homo sapiens
cagagatcaaactgg

SEQ ID NO: 1534610 - DNA, 15 bp, Homo sapiens
agagatcaaactgga

SEQ ID NO: 1534611 - DNA, 15 bp, Homo sapiens
gagatcaaactggag

SEQ ID NO: 1534612 - DNA, 15 bp, Homo sapiens
agatcaaactggaga

SEQ ID NO: 1534613 - DNA, 15 bp, Homo sapiens
gatcaaactggagaa

SEQ ID NO: 1534614 - DNA, 15 bp, Homo sapiens
atcaaactggagaat

SEQ ID NO: 1534615 - DNA, 15 bp, Homo sapiens
tcaaactggagaatg

SEQ ID NO: 1534616 - DNA, 15 bp, Homo sapiens
caaactggagaatga

SEQ ID NO: 1534617 - DNA, 15 bp, Homo sapiens
aaactggagaatgaa

SEQ ID NO: 1534618 - DNA, 15 bp, Homo sapiens
aactggagaatgaaa

SEQ ID NO: 1534619 - DNA, 15 bp, Homo sapiens
actggagaatgaaag

SEQ ID NO: 1534620 - DNA, 15 bp, Homo sapiens
ctggagaatgaaagg

SEQ ID NO: 1534621 - DNA, 15 bp, Homo sapiens
tggagaatgaaaggt

SEQ ID NO: 1534622 - DNA, 15 bp, Homo sapiens
ggagaatgaaaggtt

SEQ ID NO: 1534623 - DNA, 15 bp, Homo sapiens
gagaatgaaaggttg

SEQ ID NO: 1534624 - DNA, 15 bp, Homo sapiens
agaatgaaaggttga

SEQ ID NO: 1534625 - DNA, 15 bp, Homo sapiens
gaatgaaaggttgat

SEQ ID NO: 1534626 - DNA, 15 bp, Homo sapiens
aatgaaaggttgata

SEQ ID NO: 1534627 - DNA, 15 bp, Homo sapiens
atgaaaggttgatat

SEQ ID NO: 1534628 - DNA, 15 bp, Homo sapiens
tgaaaggttgatatg

SEQ ID NO: 1534629 - DNA, 15 bp, Homo sapiens
gaaaggttgatatga

SEQ ID NO: 1534630 - DNA, 15 bp, Homo sapiens
aaaggttgatatgat

SEQ ID NO: 1534631 - DNA, 15 bp, Homo sapiens
aaggttgatatgatg

SEQ ID NO: 1534632 - DNA, 15 bp, Homo sapiens
aggttgatatgatgt

SEQ ID NO: 1534633 - DNA, 15 bp, Homo sapiens
ggttgatatgatgtg

SEQ ID NO: 1534634 - DNA, 15 bp, Homo sapiens
gttgatatgatgtga

SEQ ID NO: 1534635 - DNA, 15 bp, Homo sapiens
ttgatatgatgtgac

SEQ ID NO: 1534636 - DNA, 15 bp, Homo sapiens
tgatatgatgtgacc

SEQ ID NO: 1534637 - DNA, 15 bp, Homo sapiens
gatatgatgtgacca

SEQ ID NO: 1534638 - DNA, 15 bp, Homo sapiens
atatgatgtgaccat

SEQ ID NO: 1534639 - DNA, 15 bp, Homo sapiens
tatgatgtgaccatc

SEQ ID NO: 1534640 - DNA, 15 bp, Homo sapiens
atgatgtgaccatca

SEQ ID NO: 1534641 - DNA, 15 bp, Homo sapiens
tgatgtgaccatcat

SEQ ID NO: 1534642 - DNA, 15 bp, Homo sapiens
gatgtgaccatcata

SEQ ID NO: 1534643 - DNA, 15 bp, Homo sapiens
atgtgaccatcatat

SEQ ID NO: 1534644 - DNA, 15 bp, Homo sapiens
tgtgaccatcatatc

SEQ ID NO: 1534645 - DNA, 15 bp, Homo sapiens
gtgaccatcatatca

SEQ ID NO: 1534646 - DNA, 15 bp, Homo sapiens
tgaccatcatatcac

SEQ ID NO: 1534647 - DNA, 15 bp, Homo sapiens
gaccatcatatcacg

SEQ ID NO: 1534648 - DNA, 15 bp, Homo sapiens
accatcatatcacgt

SEQ ID NO: 1534649 - DNA, 15 bp, Homo sapiens
ccatcatatcacgtt

SEQ ID NO: 1534650 - DNA, 15 bp, Homo sapiens
catcatatcacgttt

SEQ ID NO: 1534651 - DNA, 15 bp, Homo sapiens
atcatatcacgtttt

SEQ ID NO: 1534652 - DNA, 15 bp, Homo sapiens
tcatatcacgttttt

SEQ ID NO: 1534653 - DNA, 15 bp, Homo sapiens
catatcacgtttttc

SEQ ID NO: 1534654 - DNA, 15 bp, Homo sapiens
atatcacgtttttct

SEQ ID NO: 1534655 - DNA, 15 bp, Homo sapiens
tatcacgtttttctc

SEQ ID NO: 1534656 - DNA, 15 bp, Homo sapiens
atcacgtttttctct

SEQ ID NO: 1534657 - DNA, 15 bp, Homo sapiens
tcacgtttttctctc

SEQ ID NO: 1534658 - DNA, 15 bp, Homo sapiens
cacgtttttctctct

SEQ ID NO: 1534659 - DNA, 15 bp, Homo sapiens
acgtttttctctctt

SEQ ID NO: 1534660 - DNA, 15 bp, Homo sapiens
cgtttttctctcttg

SEQ ID NO: 1534661 - DNA, 15 bp, Homo sapiens
gtttttctctcttga

SEQ ID NO: 1534662 - DNA, 15 bp, Homo sapiens
tttttctctcttgaa

SEQ ID NO: 1534663 - DNA, 15 bp, Homo sapiens
ttttctctcttgaaa

SEQ ID NO: 1534664 - DNA, 15 bp, Homo sapiens
tttctctcttgaaaa

SEQ ID NO: 1534665 - DNA, 15 bp, Homo sapiens
ttctctcttgaaaag

SEQ ID NO: 1534666 - DNA, 15 bp, Homo sapiens
tctctcttgaaaagt

SEQ ID NO: 1534667 - DNA, 15 bp, Homo sapiens
ctctcttgaaaagta

SEQ ID NO: 1534668 - DNA, 15 bp, Homo sapiens
tctcttgaaaagtat

SEQ ID NO: 1534669 - DNA, 15 bp, Homo sapiens
ctcttgaaaagtatg

SEQ ID NO: 1534670 - DNA, 15 bp, Homo sapiens
tcttgaaaagtatgc

SEQ ID NO: 1534671 - DNA, 15 bp, Homo sapiens
cttgaaaagtatgca

SEQ ID NO: 1534672 - DNA, 15 bp, Homo sapiens
ttgaaaagtatgcag

SEQ ID NO: 1534673 - DNA, 15 bp, Homo sapiens
tgaaaagtatgcaga

SEQ ID NO: 1534674 - DNA, 15 bp, Homo sapiens
gaaaagtatgcagat

SEQ ID NO: 1534675 - DNA, 15 bp, Homo sapiens
aaaagtatgcagatg

SEQ ID NO: 1534676 - DNA, 15 bp, Homo sapiens
aaagtatgcagatgt

SEQ ID NO: 1534677 - DNA, 15 bp, Homo sapiens
aagtatgcagatgtc

SEQ ID NO: 1534678 - DNA, 15 bp, Homo sapiens
agtatgcagatgtct

SEQ ID NO: 1534679 - DNA, 15 bp, Homo sapiens
gtatgcagatgtctg

SEQ ID NO: 1534680 - DNA, 15 bp, Homo sapiens
tatgcagatgtctga

SEQ ID NO: 1534681 - DNA, 15 bp, Homo sapiens
atgcagatgtctgaa

SEQ ID NO: 1534682 - DNA, 15 bp, Homo sapiens
tgcagatgtctgaaa

SEQ ID NO: 1534683 - DNA, 15 bp, Homo sapiens
gcagatgtctgaaag

SEQ ID NO: 1534684 - DNA, 15 bp, Homo sapiens
cagatgtctgaaaga

SEQ ID NO: 1534685 - DNA, 15 bp, Homo sapiens
agatgtctgaaagag

SEQ ID NO: 1534686 - DNA, 15 bp, Homo sapiens
gatgtctgaaagaga

SEQ ID NO: 1534687 - DNA, 15 bp, Homo sapiens
atgtctgaaagagac

SEQ ID NO: 1534688 - DNA, 15 bp, Homo sapiens
tgtctgaaagagaca

SEQ ID NO: 1534689 - DNA, 15 bp, Homo sapiens
gtctgaaagagacaa

SEQ ID NO: 1534690 - DNA, 15 bp, Homo sapiens
tctgaaagagacaag

SEQ ID NO: 1534691 - DNA, 15 bp, Homo sapiens
ctgaaagagacaagt

SEQ ID NO: 1534692 - DNA, 15 bp, Homo sapiens
tgaaagagacaagtg

SEQ ID NO: 1534693 - DNA, 15 bp, Homo sapiens
gaaagagacaagtgc

SEQ ID NO: 1534694 - DNA, 15 bp, Homo sapiens
aaagagacaagtgcc

SEQ ID NO: 1534695 - DNA, 15 bp, Homo sapiens
aagagacaagtgccc

SEQ ID NO: 1534696 - DNA, 15 bp, Homo sapiens
agagacaagtgcccc

SEQ ID NO: 1534697 - DNA, 15 bp, Homo sapiens
gagacaagtgcccca

SEQ ID NO: 1534698 - DNA, 15 bp, Homo sapiens
agacaagtgccccag

SEQ ID NO: 1534699 - DNA, 15 bp, Homo sapiens
gacaagtgccccagg

SEQ ID NO: 1534700 - DNA, 15 bp, Homo sapiens
acaagtgccccagga

SEQ ID NO: 1534701 - DNA, 15 bp, Homo sapiens
caagtgccccaggag

SEQ ID NO: 1534702 - DNA, 15 bp, Homo sapiens
aagtgccccaggaga

SEQ ID NO: 1534703 - DNA, 15 bp, Homo sapiens
agtgccccaggagaa

SEQ ID NO: 1534704 - DNA, 15 bp, Homo sapiens
gtgccccaggagaaa

SEQ ID NO: 1534705 - DNA, 15 bp, Homo sapiens
tgccccaggagaaaa

SEQ ID NO: 1534706 - DNA, 15 bp, Homo sapiens
gccccaggagaaaat

SEQ ID NO: 1534707 - DNA, 15 bp, Homo sapiens
ccccaggagaaaatg

SEQ ID NO: 1534708 - DNA, 15 bp, Homo sapiens
cccaggagaaaatgc

SEQ ID NO: 1534709 - DNA, 15 bp, Homo sapiens
ccaggagaaaatgca

SEQ ID NO: 1534710 - DNA, 15 bp, Homo sapiens
caggagaaaatgcat

SEQ ID NO: 1534711 - DNA, 15 bp, Homo sapiens
aggagaaaatgcatg

SEQ ID NO: 1534712 - DNA, 15 bp, Homo sapiens
ggagaaaatgcatgc

SEQ ID NO: 1534713 - DNA, 15 bp, Homo sapiens
gagaaaatgcatgcc

SEQ ID NO: 1534714 - DNA, 15 bp, Homo sapiens
agaaaatgcatgcct

SEQ ID NO: 1534715 - DNA, 15 bp, Homo sapiens
gaaaatgcatgcctt

SEQ ID NO: 1534716 - DNA, 15 bp, Homo sapiens
aaaatgcatgccttc

SEQ ID NO: 1534717 - DNA, 15 bp, Homo sapiens
aaatgcatgccttcc

SEQ ID NO: 1534718 - DNA, 15 bp, Homo sapiens
aatgcatgccttcct

SEQ ID NO: 1534719 - DNA, 15 bp, Homo sapiens
atgcatgccttcctc

SEQ ID NO: 1534720 - DNA, 15 bp, Homo sapiens
tgcatgccttcctca

SEQ ID NO: 1534721 - DNA, 15 bp, Homo sapiens
gcatgccttcctcag

SEQ ID NO: 1534722 - DNA, 15 bp, Homo sapiens
catgccttcctcagg

SEQ ID NO: 1534723 - DNA, 15 bp, Homo sapiens
atgccttcctcagga

SEQ ID NO: 1534724 - DNA, 15 bp, Homo sapiens
tgccttcctcaggat

SEQ ID NO: 1534725 - DNA, 15 bp, Homo sapiens
gccttcctcaggatc

SEQ ID NO: 1534726 - DNA, 15 bp, Homo sapiens
ccttcctcaggatcg

SEQ ID NO: 1534727 - DNA, 15 bp, Homo sapiens
cttcctcaggatcgg

SEQ ID NO: 1534728 - DNA, 15 bp, Homo sapiens
ttcctcaggatcggc

SEQ ID NO: 1534729 - DNA, 15 bp, Homo sapiens
tcctcaggatcggcc

SEQ ID NO: 1534730 - DNA, 15 bp, Homo sapiens
cctcaggatcggccc

SEQ ID NO: 1534731 - DNA, 15 bp, Homo sapiens
ctcaggatcggcccc

SEQ ID NO: 1534732 - DNA, 15 bp, Homo sapiens
tcaggatcggccccc

SEQ ID NO: 1534733 - DNA, 15 bp, Homo sapiens
caggatcggccccca

SEQ ID NO: 1534734 - DNA, 15 bp, Homo sapiens
aggatcggcccccac

SEQ ID NO: 1534735 - DNA, 15 bp, Homo sapiens
ggatcggcccccacc

SEQ ID NO: 1534736 - DNA, 15 bp, Homo sapiens
gatcggcccccacct

SEQ ID NO: 1534737 - DNA, 15 bp, Homo sapiens
atcggcccccacctc

SEQ ID NO: 1534738 - DNA, 15 bp, Homo sapiens
tcggcccccacctcc

SEQ ID NO: 1534739 - DNA, 15 bp, Homo sapiens
cggcccccacctccc

SEQ ID NO: 1534740 - DNA, 15 bp, Homo sapiens
ggcccccacctcccc

SEQ ID NO: 1534741 - DNA, 15 bp, Homo sapiens
gcccccacctcccct

SEQ ID NO: 1534742 - DNA, 15 bp, Homo sapiens
cccccacctcccctc

SEQ ID NO: 1534743 - DNA, 15 bp, Homo sapiens
ccccacctcccctcc

SEQ ID NO: 1534744 - DNA, 15 bp, Homo sapiens
cccacctcccctcct

SEQ ID NO: 1534745 - DNA, 15 bp, Homo sapiens
ccacctcccctcctg

SEQ ID NO: 1534746 - DNA, 15 bp, Homo sapiens
cacctcccctcctgg

SEQ ID NO: 1534747 - DNA, 15 bp, Homo sapiens
acctcccctcctggc

SEQ ID NO: 1534748 - DNA, 15 bp, Homo sapiens
cctcccctcctggcc

SEQ ID NO: 1534749 - DNA, 15 bp, Homo sapiens
ctcccctcctggcca

SEQ ID NO: 1534750 - DNA, 15 bp, Homo sapiens
tcccctcctggccac

SEQ ID NO: 1534751 - DNA, 15 bp, Homo sapiens
cccctcctggccaca

SEQ ID NO: 1534752 - DNA, 15 bp, Homo sapiens
ccctcctggccacaa

SEQ ID NO: 1534753 - DNA, 15 bp, Homo sapiens
cctcctggccacaag

SEQ ID NO: 1534754 - DNA, 15 bp, Homo sapiens
ctcctggccacaagg

SEQ ID NO: 1534755 - DNA, 15 bp, Homo sapiens
tcctggccacaagga

SEQ ID NO: 1534756 - DNA, 15 bp, Homo sapiens
cctggccacaaggag

SEQ ID NO: 1534757 - DNA, 15 bp, Homo sapiens
ctggccacaaggagg

SEQ ID NO: 1534758 - DNA, 15 bp, Homo sapiens
tggccacaaggaggg

SEQ ID NO: 1534759 - DNA, 15 bp, Homo sapiens
ggccacaaggagggt

SEQ ID NO: 1534760 - DNA, 15 bp, Homo sapiens
gccacaaggagggtc

SEQ ID NO: 1534761 - DNA, 15 bp, Homo sapiens
ccacaaggagggtca

SEQ ID NO: 1534762 - DNA, 15 bp, Homo sapiens
cacaaggagggtcaa

SEQ ID NO: 1534763 - DNA, 15 bp, Homo sapiens
acaaggagggtcaaa

SEQ ID NO: 1534764 - DNA, 15 bp, Homo sapiens
caaggagggtcaaat

SEQ ID NO: 1534765 - DNA, 15 bp, Homo sapiens
aaggagggtcaaatc

SEQ ID NO: 1534766 - DNA, 15 bp, Homo sapiens
aggagggtcaaatct

SEQ ID NO: 1534767 - DNA, 15 bp, Homo sapiens
ggagggtcaaatctc

SEQ ID NO: 1534768 - DNA, 15 bp, Homo sapiens
gagggtcaaatctca

SEQ ID NO: 1534769 - DNA, 15 bp, Homo sapiens
agggtcaaatctcag

SEQ ID NO: 1534770 - DNA, 15 bp, Homo sapiens
gggtcaaatctcagc

SEQ ID NO: 1534771 - DNA, 15 bp, Homo sapiens
ggtcaaatctcagca

SEQ ID NO: 1534772 - DNA, 15 bp, Homo sapiens
gtcaaatctcagcat

SEQ ID NO: 1534773 - DNA, 15 bp, Homo sapiens
tcaaatctcagcatg

SEQ ID NO: 1534774 - DNA, 15 bp, Homo sapiens
caaatctcagcatgg

SEQ ID NO: 1534775 - DNA, 15 bp, Homo sapiens
aaatctcagcatggc

SEQ ID NO: 1534776 - DNA, 15 bp, Homo sapiens
aatctcagcatggcc

SEQ ID NO: 1534777 - DNA, 15 bp, Homo sapiens
atctcagcatggccc

SEQ ID NO: 1534778 - DNA, 15 bp, Homo sapiens
tctcagcatggccca

SEQ ID NO: 1534779 - DNA, 15 bp, Homo sapiens
ctcagcatggcccaa

SEQ ID NO: 1534780 - DNA, 15 bp, Homo sapiens
tcagcatggcccaac

SEQ ID NO: 1534781 - DNA, 15 bp, Homo sapiens
cagcatggcccaact

SEQ ID NO: 1534782 - DNA, 15 bp, Homo sapiens
agcatggcccaactt

SEQ ID NO: 1534783 - DNA, 15 bp, Homo sapiens
gcatggcccaacttg

SEQ ID NO: 1534784 - DNA, 15 bp, Homo sapiens
catggcccaacttgg

SEQ ID NO: 1534785 - DNA, 15 bp, Homo sapiens
atggcccaacttgga

SEQ ID NO: 1534786 - DNA, 15 bp, Homo sapiens
tggcccaacttggac

SEQ ID NO: 1534787 - DNA, 15 bp, Homo sapiens
ggcccaacttggacc

SEQ ID NO: 1534788 - DNA, 15 bp, Homo sapiens
gcccaacttggacct

SEQ ID NO: 1534789 - DNA, 15 bp, Homo sapiens
cccaacttggacctg

SEQ ID NO: 1534790 - DNA, 15 bp, Homo sapiens
ccaacttggacctgt

SEQ ID NO: 1534791 - DNA, 15 bp, Homo sapiens
caacttggacctgtc

SEQ ID NO: 1534792 - DNA, 15 bp, Homo sapiens
aacttggacctgtca

SEQ ID NO: 1534793 - DNA, 15 bp, Homo sapiens
acttggacctgtcaa

SEQ ID NO: 1534794 - DNA, 15 bp, Homo sapiens
cttggacctgtcaag

SEQ ID NO: 1534795 - DNA, 15 bp, Homo sapiens
ttggacctgtcaagg

SEQ ID NO: 1534796 - DNA, 15 bp, Homo sapiens
tggacctgtcaagga

SEQ ID NO: 1534797 - DNA, 15 bp, Homo sapiens
ggacctgtcaaggaa

SEQ ID NO: 1534798 - DNA, 15 bp, Homo sapiens
gacctgtcaaggaag

SEQ ID NO: 1534799 - DNA, 15 bp, Homo sapiens
acctgtcaaggaaga

SEQ ID NO: 1534800 - DNA, 15 bp, Homo sapiens
cctgtcaaggaagaa

SEQ ID NO: 1534801 - DNA, 15 bp, Homo sapiens
ctgtcaaggaagaag

SEQ ID NO: 1534802 - DNA, 15 bp, Homo sapiens
tgtcaaggaagaaga

SEQ ID NO: 1534803 - DNA, 15 bp, Homo sapiens
gtcaaggaagaagaa

SEQ ID NO: 1534804 - DNA, 15 bp, Homo sapiens
tcaaggaagaagaaa

SEQ ID NO: 1534805 - DNA, 15 bp, Homo sapiens
caaggaagaagaaaa

SEQ ID NO: 1534806 - DNA, 15 bp, Homo sapiens
aaggaagaagaaaaa

SEQ ID NO: 1534807 - DNA, 15 bp, Homo sapiens
aggaagaagaaaaaa

SEQ ID NO: 1534808 - DNA, 15 bp, Homo sapiens
ggaagaagaaaaaaa

SEQ ID NO: 1534809 - DNA, 15 bp, Homo sapiens
gaagaagaaaaaaat

SEQ ID NO: 1534810 - DNA, 15 bp, Homo sapiens
aagaagaaaaaaatt

SEQ ID NO: 1534811 - DNA, 15 bp, Homo sapiens
agaagaaaaaaattg

SEQ ID NO: 1534812 - DNA, 15 bp, Homo sapiens
gaagaaaaaaattgt

SEQ ID NO: 1534813 - DNA, 15 bp, Homo sapiens
aagaaaaaaattgta

SEQ ID NO: 1534814 - DNA, 15 bp, Homo sapiens
agaaaaaaattgtat

SEQ ID NO: 1534815 - DNA, 15 bp, Homo sapiens
gaaaaaaattgtatg

SEQ ID NO: 1534816 - DNA, 15 bp, Homo sapiens
aaaaaaattgtatgc

SEQ ID NO: 1534817 - DNA, 15 bp, Homo sapiens
aaaaaattgtatgcc

SEQ ID NO: 1534818 - DNA, 15 bp, Homo sapiens
aaaaattgtatgcca

SEQ ID NO: 1534819 - DNA, 15 bp, Homo sapiens
aaaattgtatgccaa

SEQ ID NO: 1534820 - DNA, 15 bp, Homo sapiens
aaattgtatgccaaa

SEQ ID NO: 1534821 - DNA, 15 bp, Homo sapiens
aattgtatgccaaag

SEQ ID NO: 1534822 - DNA, 15 bp, Homo sapiens
attgtatgccaaagg

SEQ ID NO: 1534823 - DNA, 15 bp, Homo sapiens
ttgtatgccaaagga

SEQ ID NO: 1534824 - DNA, 15 bp, Homo sapiens
tgtatgccaaaggaa

SEQ ID NO: 1534825 - DNA, 15 bp, Homo sapiens
gtatgccaaaggaac

SEQ ID NO: 1534826 - DNA, 15 bp, Homo sapiens
tatgccaaaggaact

SEQ ID NO: 1534827 - DNA, 15 bp, Homo sapiens
atgccaaaggaactc

SEQ ID NO: 1534828 - DNA, 15 bp, Homo sapiens
tgccaaaggaactca

SEQ ID NO: 1534829 - DNA, 15 bp, Homo sapiens
gccaaaggaactcag

SEQ ID NO: 1534830 - DNA, 15 bp, Homo sapiens
ccaaaggaactcagt

SEQ ID NO: 1534831 - DNA, 15 bp, Homo sapiens
caaaggaactcagtc

SEQ ID NO: 1534832 - DNA, 15 bp, Homo sapiens
aaaggaactcagtct

SEQ ID NO: 1534833 - DNA, 15 bp, Homo sapiens
aaggaactcagtctt

SEQ ID NO: 1534834 - DNA, 15 bp, Homo sapiens
aggaactcagtcttt

SEQ ID NO: 1534835 - DNA, 15 bp, Homo sapiens
ggaactcagtctttg

SEQ ID NO: 1534836 - DNA, 15 bp, Homo sapiens
gaactcagtctttgg

SEQ ID NO: 1534837 - DNA, 15 bp, Homo sapiens
aactcagtctttggc

SEQ ID NO: 1534838 - DNA, 15 bp, Homo sapiens
actcagtctttggct

SEQ ID NO: 1534839 - DNA, 15 bp, Homo sapiens
ctcagtctttggcta

SEQ ID NO: 1534840 - DNA, 15 bp, Homo sapiens
tcagtctttggctaa

SEQ ID NO: 1534841 - DNA, 15 bp, Homo sapiens
cagtctttggctaac

SEQ ID NO: 1534842 - DNA, 15 bp, Homo sapiens
agtctttggctaaca

SEQ ID NO: 1534843 - DNA, 15 bp, Homo sapiens
gtctttggctaacaa

SEQ ID NO: 1534844 - DNA, 15 bp, Homo sapiens
tctttggctaacaag

SEQ ID NO: 1534845 - DNA, 15 bp, Homo sapiens
ctttggctaacaagt

SEQ ID NO: 1534846 - DNA, 15 bp, Homo sapiens
tttggctaacaagta

SEQ ID NO: 1534847 - DNA, 15 bp, Homo sapiens
ttggctaacaagtac

SEQ ID NO: 1534848 - DNA, 15 bp, Homo sapiens
tggctaacaagtact

SEQ ID NO: 1534849 - DNA, 15 bp, Homo sapiens
ggctaacaagtacta

SEQ ID NO: 1534850 - DNA, 15 bp, Homo sapiens
gctaacaagtactag

SEQ ID NO: 1534851 - DNA, 15 bp, Homo sapiens
ctaacaagtactaga

SEQ ID NO: 1534852 - DNA, 15 bp, Homo sapiens
taacaagtactagac

SEQ ID NO: 1534853 - DNA, 15 bp, Homo sapiens
aacaagtactagaca

SEQ ID NO: 1534854 - DNA, 15 bp, Homo sapiens
acaagtactagacat

SEQ ID NO: 1534855 - DNA, 15 bp, Homo sapiens
caagtactagacatc

SEQ ID NO: 1534856 - DNA, 15 bp, Homo sapiens
aagtactagacatcc

SEQ ID NO: 1534857 - DNA, 15 bp, Homo sapiens
agtactagacatcct

SEQ ID NO: 1534858 - DNA, 15 bp, Homo sapiens
gtactagacatcctt

SEQ ID NO: 1534859 - DNA, 15 bp, Homo sapiens
tactagacatccttt

SEQ ID NO: 1534860 - DNA, 15 bp, Homo sapiens
actagacatccttta

SEQ ID NO: 1534861 - DNA, 15 bp, Homo sapiens
ctagacatcctttaa

SEQ ID NO: 1534862 - DNA, 15 bp, Homo sapiens
tagacatcctttaag

SEQ ID NO: 1534863 - DNA, 15 bp, Homo sapiens
agacatcctttaagt

SEQ ID NO: 1534864 - DNA, 15 bp, Homo sapiens
gacatcctttaagtc

SEQ ID NO: 1534865 - DNA, 15 bp, Homo sapiens
acatcctttaagtct

SEQ ID NO: 1534866 - DNA, 15 bp, Homo sapiens
catcctttaagtctt

SEQ ID NO: 1534867 - DNA, 15 bp, Homo sapiens
atcctttaagtcttt

SEQ ID NO: 1534868 - DNA, 15 bp, Homo sapiens
tcctttaagtctttg

SEQ ID NO: 1534869 - DNA, 15 bp, Homo sapiens
cctttaagtctttga

SEQ ID NO: 1534870 - DNA, 15 bp, Homo sapiens
ctttaagtctttgag

SEQ ID NO: 1534871 - DNA, 15 bp, Homo sapiens
tttaagtctttgaga

SEQ ID NO: 1534872 - DNA, 15 bp, Homo sapiens
ttaagtctttgagaa

SEQ ID NO: 1534873 - DNA, 15 bp, Homo sapiens
taagtctttgagaat

SEQ ID NO: 1534874 - DNA, 15 bp, Homo sapiens
aagtctttgagaatg

SEQ ID NO: 1534875 - DNA, 15 bp, Homo sapiens
agtctttgagaatgg

SEQ ID NO: 1534876 - DNA, 15 bp, Homo sapiens
gtctttgagaatggt

SEQ ID NO: 1534877 - DNA, 15 bp, Homo sapiens
tctttgagaatggta

SEQ ID NO: 1534878 - DNA, 15 bp, Homo sapiens
ctttgagaatggtaa

SEQ ID NO: 1534879 - DNA, 15 bp, Homo sapiens
tttgagaatggtaat

SEQ ID NO: 1534880 - DNA, 15 bp, Homo sapiens
ttgagaatggtaata

SEQ ID NO: 1534881 - DNA, 15 bp, Homo sapiens
tgagaatggtaataa

SEQ ID NO: 1534882 - DNA, 15 bp, Homo sapiens
gagaatggtaataat

SEQ ID NO: 1534883 - DNA, 15 bp, Homo sapiens
agaatggtaataatt

SEQ ID NO: 1534884 - DNA, 15 bp, Homo sapiens
gaatggtaataattt

SEQ ID NO: 1534885 - DNA, 15 bp, Homo sapiens
aatggtaataatttc

SEQ ID NO: 1534886 - DNA, 15 bp, Homo sapiens
atggtaataatttct

SEQ ID NO: 1534887 - DNA, 15 bp, Homo sapiens
tggtaataatttctg

SEQ ID NO: 1534888 - DNA, 15 bp, Homo sapiens
ggtaataatttctgc

SEQ ID NO: 1534889 - DNA, 15 bp, Homo sapiens
gtaataatttctgcc

SEQ ID NO: 1534890 - DNA, 15 bp, Homo sapiens
taataatttctgcca

SEQ ID NO: 1534891 - DNA, 15 bp, Homo sapiens
aataatttctgccat

SEQ ID NO: 1534892 - DNA, 15 bp, Homo sapiens
ataatttctgccatc

SEQ ID NO: 1534893 - DNA, 15 bp, Homo sapiens
taatttctgccatcc

SEQ ID NO: 1534894 - DNA, 15 bp, Homo sapiens
aatttctgccatccc

SEQ ID NO: 1534895 - DNA, 15 bp, Homo sapiens
atttctgccatccct

SEQ ID NO: 1534896 - DNA, 15 bp, Homo sapiens
tttctgccatccctc

SEQ ID NO: 1534897 - DNA, 15 bp, Homo sapiens
ttctgccatccctcc

SEQ ID NO: 1534898 - DNA, 15 bp, Homo sapiens
tctgccatccctcca

SEQ ID NO: 1534899 - DNA, 15 bp, Homo sapiens
ctgccatccctccag

SEQ ID NO: 1534900 - DNA, 15 bp, Homo sapiens
tgccatccctccaga

SEQ ID NO: 1534901 - DNA, 15 bp, Homo sapiens
gccatccctccagat

SEQ ID NO: 1534902 - DNA, 15 bp, Homo sapiens
ccatccctccagatt

SEQ ID NO: 1534903 - DNA, 15 bp, Homo sapiens
catccctccagattt

SEQ ID NO: 1534904 - DNA, 15 bp, Homo sapiens
atccctccagatttg

SEQ ID NO: 1534905 - DNA, 15 bp, Homo sapiens
tccctccagatttgt

SEQ ID NO: 1534906 - DNA, 15 bp, Homo sapiens
ccctccagatttgtg

SEQ ID NO: 1534907 - DNA, 15 bp, Homo sapiens
cctccagatttgtgt

SEQ ID NO: 1534908 - DNA, 15 bp, Homo sapiens
ctccagatttgtgtt

SEQ ID NO: 1534909 - DNA, 15 bp, Homo sapiens
tccagatttgtgttt

SEQ ID NO: 1534910 - DNA, 15 bp, Homo sapiens
ccagatttgtgtttt

SEQ ID NO: 1534911 - DNA, 15 bp, Homo sapiens
cagatttgtgttttt

SEQ ID NO: 1534912 - DNA, 15 bp, Homo sapiens
agatttgtgtttttc

SEQ ID NO: 1534913 - DNA, 15 bp, Homo sapiens
gatttgtgtttttct

SEQ ID NO: 1534914 - DNA, 15 bp, Homo sapiens
atttgtgtttttctg

SEQ ID NO: 1534915 - DNA, 15 bp, Homo sapiens
tttgtgtttttctgt

SEQ ID NO: 1534916 - DNA, 15 bp, Homo sapiens
ttgtgtttttctgtt

SEQ ID NO: 1534917 - DNA, 15 bp, Homo sapiens
tgtgtttttctgttt

SEQ ID NO: 1534918 - DNA, 15 bp, Homo sapiens
gtgtttttctgtttt

SEQ ID NO: 1534919 - DNA, 15 bp, Homo sapiens
tgtttttctgttttg

SEQ ID NO: 1534920 - DNA, 15 bp, Homo sapiens
gtttttctgttttgg

SEQ ID NO: 1534921 - DNA, 15 bp, Homo sapiens
tttttctgttttggc

SEQ ID NO: 1534922 - DNA, 15 bp, Homo sapiens
ttttctgttttggct

SEQ ID NO: 1534923 - DNA, 15 bp, Homo sapiens
tttctgttttggctg

SEQ ID NO: 1534924 - DNA, 15 bp, Homo sapiens
ttctgttttggctgg

SEQ ID NO: 1534925 - DNA, 15 bp, Homo sapiens
tctgttttggctggg

SEQ ID NO: 1534926 - DNA, 15 bp, Homo sapiens
ctgttttggctgggt

SEQ ID NO: 1534927 - DNA, 15 bp, Homo sapiens
tgttttggctgggtg

SEQ ID NO: 1534928 - DNA, 15 bp, Homo sapiens
gttttggctgggtgg

SEQ ID NO: 1534929 - DNA, 15 bp, Homo sapiens
ttttggctgggtggg

SEQ ID NO: 1534930 - DNA, 15 bp, Homo sapiens
tttggctgggtggga

SEQ ID NO: 1534931 - DNA, 15 bp, Homo sapiens
ttggctgggtgggaa

SEQ ID NO: 1534932 - DNA, 15 bp, Homo sapiens
tggctgggtgggaat

SEQ ID NO: 1534933 - DNA, 15 bp, Homo sapiens
ggctgggtgggaatg

SEQ ID NO: 1534934 - DNA, 15 bp, Homo sapiens
gctgggtgggaatgc

SEQ ID NO: 1534935 - DNA, 15 bp, Homo sapiens
ctgggtgggaatgca

SEQ ID NO: 1534936 - DNA, 15 bp, Homo sapiens
tgggtgggaatgcag

SEQ ID NO: 1534937 - DNA, 15 bp, Homo sapiens
gggtgggaatgcagc

SEQ ID NO: 1534938 - DNA, 15 bp, Homo sapiens
ggtgggaatgcagca

SEQ ID NO: 1534939 - DNA, 15 bp, Homo sapiens
gtgggaatgcagcat

SEQ ID NO: 1534940 - DNA, 15 bp, Homo sapiens
tgggaatgcagcatt

SEQ ID NO: 1534941 - DNA, 15 bp, Homo sapiens
gggaatgcagcattt

SEQ ID NO: 1534942 - DNA, 15 bp, Homo sapiens
ggaatgcagcatttt

SEQ ID NO: 1534943 - DNA, 15 bp, Homo sapiens
gaatgcagcattttc

SEQ ID NO: 1534944 - DNA, 15 bp, Homo sapiens
aatgcagcattttca

SEQ ID NO: 1534945 - DNA, 15 bp, Homo sapiens
atgcagcattttcac

SEQ ID NO: 1534946 - DNA, 15 bp, Homo sapiens
tgcagcattttcact

SEQ ID NO: 1534947 - DNA, 15 bp, Homo sapiens
gcagcattttcactt

SEQ ID NO: 1534948 - DNA, 15 bp, Homo sapiens
cagcattttcacttt

SEQ ID NO: 1534949 - DNA, 15 bp, Homo sapiens
agcattttcactttg

SEQ ID NO: 1534950 - DNA, 15 bp, Homo sapiens
gcattttcactttgc

SEQ ID NO: 1534951 - DNA, 15 bp, Homo sapiens
cattttcactttgcc

SEQ ID NO: 1534952 - DNA, 15 bp, Homo sapiens
attttcactttgcct

SEQ ID NO: 1534953 - DNA, 15 bp, Homo sapiens
ttttcactttgcctt

SEQ ID NO: 1534954 - DNA, 15 bp, Homo sapiens
tttcactttgccttt

SEQ ID NO: 1534955 - DNA, 15 bp, Homo sapiens
ttcactttgcctttg

SEQ ID NO: 1534956 - DNA, 15 bp, Homo sapiens
tcactttgcctttgt

SEQ ID NO: 1534957 - DNA, 15 bp, Homo sapiens
cactttgcctttgtt

SEQ ID NO: 1534958 - DNA, 15 bp, Homo sapiens
actttgcctttgtta

SEQ ID NO: 1534959 - DNA, 15 bp, Homo sapiens
ctttgcctttgttat

SEQ ID NO: 1534960 - DNA, 15 bp, Homo sapiens
tttgcctttgttatt

SEQ ID NO: 1534961 - DNA, 15 bp, Homo sapiens
ttgcctttgttatta

SEQ ID NO: 1534962 - DNA, 15 bp, Homo sapiens
tgcctttgttattac

SEQ ID NO: 1534963 - DNA, 15 bp, Homo sapiens
gcctttgttattaca

SEQ ID NO: 1534964 - DNA, 15 bp, Homo sapiens
cctttgttattacaa

SEQ ID NO: 1534965 - DNA, 15 bp, Homo sapiens
ctttgttattacaaa

SEQ ID NO: 1534966 - DNA, 15 bp, Homo sapiens
tttgttattacaaat

SEQ ID NO: 1534967 - DNA, 15 bp, Homo sapiens
ttgttattacaaatg

SEQ ID NO: 1534968 - DNA, 15 bp, Homo sapiens
tgttattacaaatgt

SEQ ID NO: 1534969 - DNA, 15 bp, Homo sapiens
gttattacaaatgtt

SEQ ID NO: 1534970 - DNA, 15 bp, Homo sapiens
ttattacaaatgttg

SEQ ID NO: 1534971 - DNA, 15 bp, Homo sapiens
tattacaaatgttgc

SEQ ID NO: 1534972 - DNA, 15 bp, Homo sapiens
attacaaatgttgct

SEQ ID NO: 1534973 - DNA, 15 bp, Homo sapiens
ttacaaatgttgctt

SEQ ID NO: 1534974 - DNA, 15 bp, Homo sapiens
tacaaatgttgctta

SEQ ID NO: 1534975 - DNA, 15 bp, Homo sapiens
acaaatgttgcttat

SEQ ID NO: 1534976 - DNA, 15 bp, Homo sapiens
caaatgttgcttatt

SEQ ID NO: 1534977 - DNA, 15 bp, Homo sapiens
aaatgttgcttattc

SEQ ID NO: 1534978 - DNA, 15 bp, Homo sapiens
aatgttgcttattct

SEQ ID NO: 1534979 - DNA, 15 bp, Homo sapiens
atgttgcttattcta

SEQ ID NO: 1534980 - DNA, 15 bp, Homo sapiens
tgttgcttattctat

SEQ ID NO: 1534981 - DNA, 15 bp, Homo sapiens
gttgcttattctata

SEQ ID NO: 1534982 - DNA, 15 bp, Homo sapiens
ttgcttattctataa

SEQ ID NO: 1534983 - DNA, 15 bp, Homo sapiens
tgcttattctataaa

SEQ ID NO: 1534984 - DNA, 15 bp, Homo sapiens
gcttattctataaat

SEQ ID NO: 1534985 - DNA, 15 bp, Homo sapiens
cttattctataaatc

SEQ ID NO: 1534986 - DNA, 15 bp, Homo sapiens
ttattctataaatca

SEQ ID NO: 1534987 - DNA, 15 bp, Homo sapiens
tattctataaatcaa

SEQ ID NO: 1534988 - DNA, 15 bp, Homo sapiens
attctataaatcaag

SEQ ID NO: 1534989 - DNA, 15 bp, Homo sapiens
ttctataaatcaagg

SEQ ID NO: 1534990 - DNA, 15 bp, Homo sapiens
tctataaatcaagga

SEQ ID NO: 1534991 - DNA, 15 bp, Homo sapiens
ctataaatcaaggaa

SEQ ID NO: 1534992 - DNA, 15 bp, Homo sapiens
tataaatcaaggaac

SEQ ID NO: 1534993 - DNA, 15 bp, Homo sapiens
ataaatcaaggaacc

SEQ ID NO: 1534994 - DNA, 15 bp, Homo sapiens
taaatcaaggaacca

SEQ ID NO: 1534995 - DNA, 15 bp, Homo sapiens
aaatcaaggaaccat

SEQ ID NO: 1534996 - DNA, 15 bp, Homo sapiens
aatcaaggaaccatt

SEQ ID NO: 1534997 - DNA, 15 bp, Homo sapiens
atcaaggaaccattg

SEQ ID NO: 1534998 - DNA, 15 bp, Homo sapiens
tcaaggaaccattgt

SEQ ID NO: 1534999 - DNA, 15 bp, Homo sapiens
caaggaaccattgta

SEQ ID NO: 1535000 - DNA, 15 bp, Homo sapiens
aaggaaccattgtaa

SEQ ID NO: 1535001 - DNA, 15 bp, Homo sapiens
aggaaccattgtaag

SEQ ID NO: 1535002 - DNA, 15 bp, Homo sapiens
ggaaccattgtaagg

SEQ ID NO: 1535003 - DNA, 15 bp, Homo sapiens
gaaccattgtaaggg

SEQ ID NO: 1535004 - DNA, 15 bp, Homo sapiens
aaccattgtaagggc

SEQ ID NO: 1535005 - DNA, 15 bp, Homo sapiens
accattgtaagggct

SEQ ID NO: 1535006 - DNA, 15 bp, Homo sapiens
ccattgtaagggctc

SEQ ID NO: 1535007 - DNA, 15 bp, Homo sapiens
cattgtaagggctct

SEQ ID NO: 1535008 - DNA, 15 bp, Homo sapiens
attgtaagggctctt

SEQ ID NO: 1535009 - DNA, 15 bp, Homo sapiens
ttgtaagggctcttc

SEQ ID NO: 1535010 - DNA, 15 bp, Homo sapiens
tgtaagggctcttct

SEQ ID NO: 1535011 - DNA, 15 bp, Homo sapiens
gtaagggctcttctg

SEQ ID NO: 1535012 - DNA, 15 bp, Homo sapiens
taagggctcttctga

SEQ ID NO: 1535013 - DNA, 15 bp, Homo sapiens
aagggctcttctgat

SEQ ID NO: 1535014 - DNA, 15 bp, Homo sapiens
agggctcttctgatg

SEQ ID NO: 1535015 - DNA, 15 bp, Homo sapiens
gggctcttctgatgg

SEQ ID NO: 1535016 - DNA, 15 bp, Homo sapiens
ggctcttctgatggt

SEQ ID NO: 1535017 - DNA, 15 bp, Homo sapiens
gctcttctgatggtt

SEQ ID NO: 1535018 - DNA, 15 bp, Homo sapiens
ctcttctgatggtta

SEQ ID NO: 1535019 - DNA, 15 bp, Homo sapiens
tcttctgatggttaa

SEQ ID NO: 1535020 - DNA, 15 bp, Homo sapiens
cttctgatggttaag

SEQ ID NO: 1535021 - DNA, 15 bp, Homo sapiens
ttctgatggttaagt

SEQ ID NO: 1535022 - DNA, 15 bp, Homo sapiens
tctgatggttaagta

SEQ ID NO: 1535023 - DNA, 15 bp, Homo sapiens
ctgatggttaagtat

SEQ ID NO: 1535024 - DNA, 15 bp, Homo sapiens
tgatggttaagtata

SEQ ID NO: 1535025 - DNA, 15 bp, Homo sapiens
gatggttaagtatat

SEQ ID NO: 1535026 - DNA, 15 bp, Homo sapiens
atggttaagtatatc

SEQ ID NO: 1535027 - DNA, 15 bp, Homo sapiens
tggttaagtatatcc

SEQ ID NO: 1535028 - DNA, 15 bp, Homo sapiens
ggttaagtatatcca

SEQ ID NO: 1535029 - DNA, 15 bp, Homo sapiens
gttaagtatatccat

SEQ ID NO: 1535030 - DNA, 15 bp, Homo sapiens
ttaagtatatccatt

SEQ ID NO: 1535031 - DNA, 15 bp, Homo sapiens
taagtatatccattc

SEQ ID NO: 1535032 - DNA, 15 bp, Homo sapiens
aagtatatccattcc

SEQ ID NO: 1535033 - DNA, 15 bp, Homo sapiens
agtatatccattcca

SEQ ID NO: 1535034 - DNA, 15 bp, Homo sapiens
gtatatccattccaa

SEQ ID NO: 1535035 - DNA, 15 bp, Homo sapiens
tatatccattccaat

SEQ ID NO: 1535036 - DNA, 15 bp, Homo sapiens
atatccattccaatg

SEQ ID NO: 1535037 - DNA, 15 bp, Homo sapiens
tatccattccaatga

SEQ ID NO: 1535038 - DNA, 15 bp, Homo sapiens
atccattccaatgat

SEQ ID NO: 1535039 - DNA, 15 bp, Homo sapiens
tccattccaatgatt

SEQ ID NO: 1535040 - DNA, 15 bp, Homo sapiens
ccattccaatgattt

SEQ ID NO: 1535041 - DNA, 15 bp, Homo sapiens
cattccaatgattta

SEQ ID NO: 1535042 - DNA, 15 bp, Homo sapiens
attccaatgatttat

SEQ ID NO: 1535043 - DNA, 15 bp, Homo sapiens
ttccaatgatttatt

SEQ ID NO: 1535044 - DNA, 15 bp, Homo sapiens
tccaatgatttattc

SEQ ID NO: 1535045 - DNA, 15 bp, Homo sapiens
ccaatgatttattcg

SEQ ID NO: 1535046 - DNA, 15 bp, Homo sapiens
caatgatttattcgg

SEQ ID NO: 1535047 - DNA, 15 bp, Homo sapiens
aatgatttattcggg

SEQ ID NO: 1535048 - DNA, 15 bp, Homo sapiens
atgatttattcggga

SEQ ID NO: 1535049 - DNA, 15 bp, Homo sapiens
tgatttattcgggat

SEQ ID NO: 1535050 - DNA, 15 bp, Homo sapiens
gatttattcgggatc

SEQ ID NO: 1535051 - DNA, 15 bp, Homo sapiens
atttattcgggatcc

SEQ ID NO: 1535052 - DNA, 15 bp, Homo sapiens
tttattcgggatcca

SEQ ID NO: 1535053 - DNA, 15 bp, Homo sapiens
ttattcgggatccaa

SEQ ID NO: 1535054 - DNA, 15 bp, Homo sapiens
tattcgggatccaag

SEQ ID NO: 1535055 - DNA, 15 bp, Homo sapiens
attcgggatccaagg

SEQ ID NO: 1535056 - DNA, 15 bp, Homo sapiens
ttcgggatccaagga

SEQ ID NO: 1535057 - DNA, 15 bp, Homo sapiens
tcgggatccaaggaa

SEQ ID NO: 1535058 - DNA, 15 bp, Homo sapiens
cgggatccaaggaaa

SEQ ID NO: 1535059 - DNA, 15 bp, Homo sapiens
gggatccaaggaaat

SEQ ID NO: 1535060 - DNA, 15 bp, Homo sapiens
ggatccaaggaaatg

SEQ ID NO: 1535061 - DNA, 15 bp, Homo sapiens
gatccaaggaaatga

SEQ ID NO: 1535062 - DNA, 15 bp, Homo sapiens
atccaaggaaatgat

SEQ ID NO: 1535063 - DNA, 15 bp, Homo sapiens
tccaaggaaatgatt

SEQ ID NO: 1535064 - DNA, 15 bp, Homo sapiens
ccaaggaaatgattt

SEQ ID NO: 1535065 - DNA, 15 bp, Homo sapiens
caaggaaatgatttc

SEQ ID NO: 1535066 - DNA, 15 bp, Homo sapiens
aaggaaatgatttct

SEQ ID NO: 1535067 - DNA, 15 bp, Homo sapiens
aggaaatgatttctg

SEQ ID NO: 1535068 - DNA, 15 bp, Homo sapiens
ggaaatgatttctgg

SEQ ID NO: 1535069 - DNA, 15 bp, Homo sapiens
gaaatgatttctggg

SEQ ID NO: 1535070 - DNA, 15 bp, Homo sapiens
aaatgatttctgggt

SEQ ID NO: 1535071 - DNA, 15 bp, Homo sapiens
aatgatttctgggtg

SEQ ID NO: 1535072 - DNA, 15 bp, Homo sapiens
atgatttctgggtga

SEQ ID NO: 1535073 - DNA, 15 bp, Homo sapiens
tgatttctgggtgaa

SEQ ID NO: 1535074 - DNA, 15 bp, Homo sapiens
gatttctgggtgaat

SEQ ID NO: 1535075 - DNA, 15 bp, Homo sapiens
atttctgggtgaata

SEQ ID NO: 1535076 - DNA, 15 bp, Homo sapiens
tttctgggtgaatac

SEQ ID NO: 1535077 - DNA, 15 bp, Homo sapiens
ttctgggtgaataca

SEQ ID NO: 1535078 - DNA, 15 bp, Homo sapiens
tctgggtgaatacac

SEQ ID NO: 1535079 - DNA, 15 bp, Homo sapiens
ctgggtgaatacaca

SEQ ID NO: 1535080 - DNA, 15 bp, Homo sapiens
tgggtgaatacacag

SEQ ID NO: 1535081 - DNA, 15 bp, Homo sapiens
gggtgaatacacaga

SEQ ID NO: 1535082 - DNA, 15 bp, Homo sapiens
ggtgaatacacagaa

SEQ ID NO: 1535083 - DNA, 15 bp, Homo sapiens
gtgaatacacagaac

SEQ ID NO: 1535084 - DNA, 15 bp, Homo sapiens
tgaatacacagaact

SEQ ID NO: 1535085 - DNA, 15 bp, Homo sapiens
gaatacacagaacta

SEQ ID NO: 1535086 - DNA, 15 bp, Homo sapiens
aatacacagaactag

SEQ ID NO: 1535087 - DNA, 15 bp, Homo sapiens
atacacagaactagt

SEQ ID NO: 1535088 - DNA, 15 bp, Homo sapiens
tacacagaactagtg

SEQ ID NO: 1535089 - DNA, 15 bp, Homo sapiens
acacagaactagtgg

SEQ ID NO: 1535090 - DNA, 15 bp, Homo sapiens
cacagaactagtgga

SEQ ID NO: 1535091 - DNA, 15 bp, Homo sapiens
acagaactagtggat

SEQ ID NO: 1535092 - DNA, 15 bp, Homo sapiens
cagaactagtggatc

SEQ ID NO: 1535093 - DNA, 15 bp, Homo sapiens
agaactagtggatcc

SEQ ID NO: 1535094 - DNA, 15 bp, Homo sapiens
gaactagtggatcca

SEQ ID NO: 1535095 - DNA, 15 bp, Homo sapiens
aactagtggatccaa

SEQ ID NO: 1535096 - DNA, 15 bp, Homo sapiens
actagtggatccaat

SEQ ID NO: 1535097 - DNA, 15 bp, Homo sapiens
ctagtggatccaatt

SEQ ID NO: 1535098 - DNA, 15 bp, Homo sapiens
tagtggatccaattt

SEQ ID NO: 1535099 - DNA, 15 bp, Homo sapiens
agtggatccaatttg

SEQ ID NO: 1535100 - DNA, 15 bp, Homo sapiens
gtggatccaatttga

SEQ ID NO: 1535101 - DNA, 15 bp, Homo sapiens
tggatccaatttgag

SEQ ID NO: 1535102 - DNA, 15 bp, Homo sapiens
ggatccaatttgaga

SEQ ID NO: 1535103 - DNA, 15 bp, Homo sapiens
gatccaatttgagac

SEQ ID NO: 1535104 - DNA, 15 bp, Homo sapiens
atccaatttgagaca

SEQ ID NO: 1535105 - DNA, 15 bp, Homo sapiens
tccaatttgagacat

SEQ ID NO: 1535106 - DNA, 15 bp, Homo sapiens
ccaatttgagacata

SEQ ID NO: 1535107 - DNA, 15 bp, Homo sapiens
caatttgagacatac

SEQ ID NO: 1535108 - DNA, 15 bp, Homo sapiens
aatttgagacatacc

SEQ ID NO: 1535109 - DNA, 15 bp, Homo sapiens
atttgagacatacct

SEQ ID NO: 1535110 - DNA, 15 bp, Homo sapiens
tttgagacatacctg

SEQ ID NO: 1535111 - DNA, 15 bp, Homo sapiens
ttgagacatacctgg

SEQ ID NO: 1535112 - DNA, 15 bp, Homo sapiens
tgagacatacctggg

SEQ ID NO: 1535113 - DNA, 15 bp, Homo sapiens
gagacatacctgggc

SEQ ID NO: 1535114 - DNA, 15 bp, Homo sapiens
agacatacctgggcc

SEQ ID NO: 1535115 - DNA, 15 bp, Homo sapiens
gacatacctgggcca

SEQ ID NO: 1535116 - DNA, 15 bp, Homo sapiens
acatacctgggccag

SEQ ID NO: 1535117 - DNA, 15 bp, Homo sapiens
catacctgggccaga

SEQ ID NO: 1535118 - DNA, 15 bp, Homo sapiens
atacctgggccagaa

SEQ ID NO: 1535119 - DNA, 15 bp, Homo sapiens
tacctgggccagaac

SEQ ID NO: 1535120 - DNA, 15 bp, Homo sapiens
acctgggccagaact

SEQ ID NO: 1535121 - DNA, 15 bp, Homo sapiens
cctgggccagaacta

SEQ ID NO: 1535122 - DNA, 15 bp, Homo sapiens
ctgggccagaactat

SEQ ID NO: 1535123 - DNA, 15 bp, Homo sapiens
tgggccagaactata

SEQ ID NO: 1535124 - DNA, 15 bp, Homo sapiens
gggccagaactatat

SEQ ID NO: 1535125 - DNA, 15 bp, Homo sapiens
ggccagaactatatt

SEQ ID NO: 1535126 - DNA, 15 bp, Homo sapiens
gccagaactatattt

SEQ ID NO: 1535127 - DNA, 15 bp, Homo sapiens
ccagaactatatttg

SEQ ID NO: 1535128 - DNA, 15 bp, Homo sapiens
cagaactatatttgt

SEQ ID NO: 1535129 - DNA, 15 bp, Homo sapiens
agaactatatttgtc

SEQ ID NO: 1535130 - DNA, 15 bp, Homo sapiens
gaactatatttgtcg

SEQ ID NO: 1535131 - DNA, 15 bp, Homo sapiens
aactatatttgtcgt

SEQ ID NO: 1535132 - DNA, 15 bp, Homo sapiens
actatatttgtcgtc

SEQ ID NO: 1535133 - DNA, 15 bp, Homo sapiens
ctatatttgtcgtct

SEQ ID NO: 1535134 - DNA, 15 bp, Homo sapiens
tatatttgtcgtctt

SEQ ID NO: 1535135 - DNA, 15 bp, Homo sapiens
atatttgtcgtctta

SEQ ID NO: 1535136 - DNA, 15 bp, Homo sapiens
tatttgtcgtcttac

SEQ ID NO: 1535137 - DNA, 15 bp, Homo sapiens
atttgtcgtcttacc

SEQ ID NO: 1535138 - DNA, 15 bp, Homo sapiens
tttgtcgtcttaccc

SEQ ID NO: 1535139 - DNA, 15 bp, Homo sapiens
ttgtcgtcttacccc

SEQ ID NO: 1535140 - DNA, 15 bp, Homo sapiens
tgtcgtcttacccca

SEQ ID NO: 1535141 - DNA, 15 bp, Homo sapiens
gtcgtcttaccccaa

SEQ ID NO: 1535142 - DNA, 15 bp, Homo sapiens
tcgtcttaccccaat

SEQ ID NO: 1535143 - DNA, 15 bp, Homo sapiens
cgtcttaccccaata

SEQ ID NO: 1535144 - DNA, 15 bp, Homo sapiens
gtcttaccccaataa

SEQ ID NO: 1535145 - DNA, 15 bp, Homo sapiens
tcttaccccaataag

SEQ ID NO: 1535146 - DNA, 15 bp, Homo sapiens
cttaccccaataagc

SEQ ID NO: 1535147 - DNA, 15 bp, Homo sapiens
ttaccccaataagcc

SEQ ID NO: 1535148 - DNA, 15 bp, Homo sapiens
taccccaataagcct

SEQ ID NO: 1535149 - DNA, 15 bp, Homo sapiens
accccaataagcctg

SEQ ID NO: 1535150 - DNA, 15 bp, Homo sapiens
ccccaataagcctgc

SEQ ID NO: 1535151 - DNA, 15 bp, Homo sapiens
cccaataagcctgca

SEQ ID NO: 1535152 - DNA, 15 bp, Homo sapiens
ccaataagcctgcac

SEQ ID NO: 1535153 - DNA, 15 bp, Homo sapiens
caataagcctgcact

SEQ ID NO: 1535154 - DNA, 15 bp, Homo sapiens
aataagcctgcactc

SEQ ID NO: 1535155 - DNA, 15 bp, Homo sapiens
ataagcctgcactct

SEQ ID NO: 1535156 - DNA, 15 bp, Homo sapiens
taagcctgcactcta

SEQ ID NO: 1535157 - DNA, 15 bp, Homo sapiens
aagcctgcactctac

SEQ ID NO: 1535158 - DNA, 15 bp, Homo sapiens
agcctgcactctact

SEQ ID NO: 1535159 - DNA, 15 bp, Homo sapiens
gcctgcactctacta

SEQ ID NO: 1535160 - DNA, 15 bp, Homo sapiens
cctgcactctactag

SEQ ID NO: 1535161 - DNA, 15 bp, Homo sapiens
ctgcactctactagg

SEQ ID NO: 1535162 - DNA, 15 bp, Homo sapiens
tgcactctactagga

SEQ ID NO: 1535163 - DNA, 15 bp, Homo sapiens
gcactctactaggac

SEQ ID NO: 1535164 - DNA, 15 bp, Homo sapiens
cactctactaggaca

SEQ ID NO: 1535165 - DNA, 15 bp, Homo sapiens
actctactaggacag

SEQ ID NO: 1535166 - DNA, 15 bp, Homo sapiens
ctctactaggacagc

SEQ ID NO: 1535167 - DNA, 15 bp, Homo sapiens
tctactaggacagcc

SEQ ID NO: 1535168 - DNA, 15 bp, Homo sapiens
ctactaggacagcca

SEQ ID NO: 1535169 - DNA, 15 bp, Homo sapiens
tactaggacagccat

SEQ ID NO: 1535170 - DNA, 15 bp, Homo sapiens
actaggacagccatg

SEQ ID NO: 1535171 - DNA, 15 bp, Homo sapiens
ctaggacagccatga

SEQ ID NO: 1535172 - DNA, 15 bp, Homo sapiens
taggacagccatgac

SEQ ID NO: 1535173 - DNA, 15 bp, Homo sapiens
aggacagccatgaca

SEQ ID NO: 1535174 - DNA, 15 bp, Homo sapiens
ggacagccatgacag

SEQ ID NO: 1535175 - DNA, 15 bp, Homo sapiens
gacagccatgacagc

SEQ ID NO: 1535176 - DNA, 15 bp, Homo sapiens
acagccatgacagca

SEQ ID NO: 1535177 - DNA, 15 bp, Homo sapiens
cagccatgacagcac

SEQ ID NO: 1535178 - DNA, 15 bp, Homo sapiens
agccatgacagcact

SEQ ID NO: 1535179 - DNA, 15 bp, Homo sapiens
gccatgacagcactt

SEQ ID NO: 1535180 - DNA, 15 bp, Homo sapiens
ccatgacagcacttt

SEQ ID NO: 1535181 - DNA, 15 bp, Homo sapiens
catgacagcactttg

SEQ ID NO: 1535182 - DNA, 15 bp, Homo sapiens
atgacagcactttgg

SEQ ID NO: 1535183 - DNA, 15 bp, Homo sapiens
tgacagcactttggg

SEQ ID NO: 1535184 - DNA, 15 bp, Homo sapiens
gacagcactttggga

SEQ ID NO: 1535185 - DNA, 15 bp, Homo sapiens
acagcactttgggac

SEQ ID NO: 1535186 - DNA, 15 bp, Homo sapiens
cagcactttgggacc

SEQ ID NO: 1535187 - DNA, 15 bp, Homo sapiens
agcactttgggaccc

SEQ ID NO: 1535188 - DNA, 15 bp, Homo sapiens
gcactttgggaccct

SEQ ID NO: 1535189 - DNA, 15 bp, Homo sapiens
cactttgggacccta

SEQ ID NO: 1535190 - DNA, 15 bp, Homo sapiens
actttgggaccctag

SEQ ID NO: 1535191 - DNA, 15 bp, Homo sapiens
ctttgggaccctaga

SEQ ID NO: 1535192 - DNA, 15 bp, Homo sapiens
tttgggaccctagat

SEQ ID NO: 1535193 - DNA, 15 bp, Homo sapiens
ttgggaccctagata

SEQ ID NO: 1535194 - DNA, 15 bp, Homo sapiens
tgggaccctagatat

SEQ ID NO: 1535195 - DNA, 15 bp, Homo sapiens
gggaccctagatata

SEQ ID NO: 1535196 - DNA, 15 bp, Homo sapiens
ggaccctagatataa

SEQ ID NO: 1535197 - DNA, 15 bp, Homo sapiens
gaccctagatataag

SEQ ID NO: 1535198 - DNA, 15 bp, Homo sapiens
accctagatataagt

SEQ ID NO: 1535199 - DNA, 15 bp, Homo sapiens
ccctagatataagtg

SEQ ID NO: 1535200 - DNA, 15 bp, Homo sapiens
cctagatataagtgt

SEQ ID NO: 1535201 - DNA, 15 bp, Homo sapiens
ctagatataagtgtg

SEQ ID NO: 1535202 - DNA, 15 bp, Homo sapiens
tagatataagtgtga

SEQ ID NO: 1535203 - DNA, 15 bp, Homo sapiens
agatataagtgtgaa

SEQ ID NO: 1535204 - DNA, 15 bp, Homo sapiens
gatataagtgtgaat

SEQ ID NO: 1535205 - DNA, 15 bp, Homo sapiens
atataagtgtgaatt

SEQ ID NO: 1535206 - DNA, 15 bp, Homo sapiens
tataagtgtgaattg

SEQ ID NO: 1535207 - DNA, 15 bp, Homo sapiens
ataagtgtgaattgc

SEQ ID NO: 1535208 - DNA, 15 bp, Homo sapiens
taagtgtgaattgct

SEQ ID NO: 1535209 - DNA, 15 bp, Homo sapiens
aagtgtgaattgctg

SEQ ID NO: 1535210 - DNA, 15 bp, Homo sapiens
agtgtgaattgctgg

SEQ ID NO: 1535211 - DNA, 15 bp, Homo sapiens
gtgtgaattgctggc

SEQ ID NO: 1535212 - DNA, 15 bp, Homo sapiens
tgtgaattgctggct

SEQ ID NO: 1535213 - DNA, 15 bp, Homo sapiens
gtgaattgctggctg

SEQ ID NO: 1535214 - DNA, 15 bp, Homo sapiens
tgaattgctggctgg

SEQ ID NO: 1535215 - DNA, 15 bp, Homo sapiens
gaattgctggctggg

SEQ ID NO: 1535216 - DNA, 15 bp, Homo sapiens
aattgctggctgggc

SEQ ID NO: 1535217 - DNA, 15 bp, Homo sapiens
attgctggctgggca

SEQ ID NO: 1535218 - DNA, 15 bp, Homo sapiens
ttgctggctgggcat

SEQ ID NO: 1535219 - DNA, 15 bp, Homo sapiens
tgctggctgggcatg

SEQ ID NO: 1535220 - DNA, 15 bp, Homo sapiens
gctggctgggcatgg

SEQ ID NO: 1535221 - DNA, 15 bp, Homo sapiens
ctggctgggcatggt

SEQ ID NO: 1535222 - DNA, 15 bp, Homo sapiens
tggctgggcatggtg

SEQ ID NO: 1535223 - DNA, 15 bp, Homo sapiens
gaggtcaggagttga

SEQ ID NO: 1535224 - DNA, 15 bp, Homo sapiens
aggtcaggagttgaa

SEQ ID NO: 1535225 - DNA, 15 bp, Homo sapiens
ggtcaggagttgaag

SEQ ID NO: 1535226 - DNA, 15 bp, Homo sapiens
gtcaggagttgaaga

SEQ ID NO: 1535227 - DNA, 15 bp, Homo sapiens
tcaggagttgaagac

SEQ ID NO: 1535228 - DNA, 15 bp, Homo sapiens
caggagttgaagacc

SEQ ID NO: 1535229 - DNA, 15 bp, Homo sapiens
ggagttgaagaccag

SEQ ID NO: 1535230 - DNA, 15 bp, Homo sapiens
gagttgaagaccagc

SEQ ID NO: 1535231 - DNA, 15 bp, Homo sapiens
agttgaagaccagcc

SEQ ID NO: 1535232 - DNA, 15 bp, Homo sapiens
gttgaagaccagcct

SEQ ID NO: 1535233 - DNA, 15 bp, Homo sapiens
ttgaagaccagcctg

SEQ ID NO: 1535234 - DNA, 15 bp, Homo sapiens
tgaagaccagcctgg

SEQ ID NO: 1535235 - DNA, 15 bp, Homo sapiens
gaagaccagcctggc

SEQ ID NO: 1535236 - DNA, 15 bp, Homo sapiens
agcctggccaacacg

SEQ ID NO: 1535237 - DNA, 15 bp, Homo sapiens
gcctggccaacacgg

SEQ ID NO: 1535238 - DNA, 15 bp, Homo sapiens
ggcgtggtggtgggt

SEQ ID NO: 1535239 - DNA, 15 bp, Homo sapiens
gcgtggtggtgggtg

SEQ ID NO: 1535240 - DNA, 15 bp, Homo sapiens
cgtggtggtgggtgc

SEQ ID NO: 1535241 - DNA, 15 bp, Homo sapiens
gtggtggtgggtgcc

SEQ ID NO: 1535242 - DNA, 15 bp, Homo sapiens
tggtggtgggtgcct

SEQ ID NO: 1535243 - DNA, 15 bp, Homo sapiens
ggtggtgggtgcctg

SEQ ID NO: 1535244 - DNA, 15 bp, Homo sapiens
gtggtgggtgcctgt

SEQ ID NO: 1535245 - DNA, 15 bp, Homo sapiens
tggtgggtgcctgta

SEQ ID NO: 1535246 - DNA, 15 bp, Homo sapiens
ggtgggtgcctgtaa

SEQ ID NO: 1535247 - DNA, 15 bp, Homo sapiens
gtgggtgcctgtaat

SEQ ID NO: 1535248 - DNA, 15 bp, Homo sapiens
tgggtgcctgtaatc

SEQ ID NO: 1535249 - DNA, 15 bp, Homo sapiens
aggctgaggcaggga

SEQ ID NO: 1535250 - DNA, 15 bp, Homo sapiens
ggctgaggcagggag

SEQ ID NO: 1535251 - DNA, 15 bp, Homo sapiens
gctgaggcagggaga

SEQ ID NO: 1535252 - DNA, 15 bp, Homo sapiens
ctgaggcagggagaa

SEQ ID NO: 1535253 - DNA, 15 bp, Homo sapiens
tgaggcagggagaat

SEQ ID NO: 1535254 - DNA, 15 bp, Homo sapiens
gaggcagggagaatt

SEQ ID NO: 1535255 - DNA, 15 bp, Homo sapiens
aggcagggagaattg

SEQ ID NO: 1535256 - DNA, 15 bp, Homo sapiens
ggcagggagaattgc

SEQ ID NO: 1535257 - DNA, 15 bp, Homo sapiens
gcagggagaattgct

SEQ ID NO: 1535258 - DNA, 15 bp, Homo sapiens
cagggagaattgctt

SEQ ID NO: 1535259 - DNA, 15 bp, Homo sapiens
agggagaattgcttg

SEQ ID NO: 1535260 - DNA, 15 bp, Homo sapiens
gggagaattgcttga

SEQ ID NO: 1535261 - DNA, 15 bp, Homo sapiens
cagtgagccaaaatc

SEQ ID NO: 1535262 - DNA, 15 bp, Homo sapiens
agtgagccaaaatca

SEQ ID NO: 1535263 - DNA, 15 bp, Homo sapiens
gtgagccaaaatcac

SEQ ID NO: 1535264 - DNA, 15 bp, Homo sapiens
tgagccaaaatcaca

SEQ ID NO: 1535265 - DNA, 15 bp, Homo sapiens
gagccaaaatcacac

SEQ ID NO: 1535266 - DNA, 15 bp, Homo sapiens
agccaaaatcacacc

SEQ ID NO: 1535267 - DNA, 15 bp, Homo sapiens
gccaaaatcacacca

SEQ ID NO: 1535268 - DNA, 15 bp, Homo sapiens
ccaaaatcacaccac

SEQ ID NO: 1535269 - DNA, 15 bp, Homo sapiens
caaaatcacaccact

SEQ ID NO: 1535270 - DNA, 15 bp, Homo sapiens
aaaatcacaccactg

SEQ ID NO: 1535271 - DNA, 15 bp, Homo sapiens
aaatcacaccactgc

SEQ ID NO: 1535272 - DNA, 15 bp, Homo sapiens
aatcacaccactgca

SEQ ID NO: 1535273 - DNA, 15 bp, Homo sapiens
catctcaaaaaaaga

SEQ ID NO: 1535274 - DNA, 15 bp, Homo sapiens
atctcaaaaaaagaa

SEQ ID NO: 1535275 - DNA, 15 bp, Homo sapiens
tctcaaaaaaagaaa

SEQ ID NO: 1535276 - DNA, 15 bp, Homo sapiens
ctcaaaaaaagaaaa

SEQ ID NO: 1535277 - DNA, 15 bp, Homo sapiens
tcaaaaaaagaaaaa

SEQ ID NO: 1535278 - DNA, 15 bp, Homo sapiens
agaaaaaaaaaagtg

SEQ ID NO: 1535279 - DNA, 15 bp, Homo sapiens
aaaaaaaaagtgtga

SEQ ID NO: 1535280 - DNA, 15 bp, Homo sapiens
aaaaaaaagtgtgaa

SEQ ID NO: 1535281 - DNA, 15 bp, Homo sapiens
aaaaaaagtgtgaat

SEQ ID NO: 1535282 - DNA, 15 bp, Homo sapiens
aaaaaagtgtgaatt

SEQ ID NO: 1535283 - DNA, 15 bp, Homo sapiens
aaaaagtgtgaattg

SEQ ID NO: 1535284 - DNA, 15 bp, Homo sapiens
aaaagtgtgaattgc

SEQ ID NO: 1535285 - DNA, 15 bp, Homo sapiens
aaagtgtgaattgct

SEQ ID NO: 1535286 - DNA, 15 bp, Homo sapiens
aagtgtgaattgcta

SEQ ID NO: 1535287 - DNA, 15 bp, Homo sapiens
agtgtgaattgctat

SEQ ID NO: 1535288 - DNA, 15 bp, Homo sapiens
gtgtgaattgctatg

SEQ ID NO: 1535289 - DNA, 15 bp, Homo sapiens
tgtgaattgctatga

SEQ ID NO: 1535290 - DNA, 15 bp, Homo sapiens
gtgaattgctatgaa

SEQ ID NO: 1535291 - DNA, 15 bp, Homo sapiens
tgaattgctatgaaa

SEQ ID NO: 1535292 - DNA, 15 bp, Homo sapiens
gaattgctatgaaat

SEQ ID NO: 1535293 - DNA, 15 bp, Homo sapiens
aattgctatgaaatc

SEQ ID NO: 1535294 - DNA, 15 bp, Homo sapiens
attgctatgaaatca

SEQ ID NO: 1535295 - DNA, 15 bp, Homo sapiens
ttgctatgaaatcac

SEQ ID NO: 1535296 - DNA, 15 bp, Homo sapiens
tgctatgaaatcact

SEQ ID NO: 1535297 - DNA, 15 bp, Homo sapiens
gctatgaaatcacta

SEQ ID NO: 1535298 - DNA, 15 bp, Homo sapiens
ctatgaaatcactat

SEQ ID NO: 1535299 - DNA, 15 bp, Homo sapiens
tatgaaatcactatc

SEQ ID NO: 1535300 - DNA, 15 bp, Homo sapiens
atgaaatcactatca

SEQ ID NO: 1535301 - DNA, 15 bp, Homo sapiens
tgaaatcactatcaa

SEQ ID NO: 1535302 - DNA, 15 bp, Homo sapiens
gaaatcactatcaaa

SEQ ID NO: 1535303 - DNA, 15 bp, Homo sapiens
aaatcactatcaaaa

SEQ ID NO: 1535304 - DNA, 15 bp, Homo sapiens
aatcactatcaaaag

SEQ ID NO: 1535305 - DNA, 15 bp, Homo sapiens
atcactatcaaaaga

SEQ ID NO: 1535306 - DNA, 15 bp, Homo sapiens
tcactatcaaaagat

SEQ ID NO: 1535307 - DNA, 15 bp, Homo sapiens
cactatcaaaagatc

SEQ ID NO: 1535308 - DNA, 15 bp, Homo sapiens
actatcaaaagatct

SEQ ID NO: 1535309 - DNA, 15 bp, Homo sapiens
ctatcaaaagatctg

SEQ ID NO: 1535310 - DNA, 15 bp, Homo sapiens
tatcaaaagatctga

SEQ ID NO: 1535311 - DNA, 15 bp, Homo sapiens
atcaaaagatctgag

SEQ ID NO: 1535312 - DNA, 15 bp, Homo sapiens
tcaaaagatctgagt

SEQ ID NO: 1535313 - DNA, 15 bp, Homo sapiens
caaaagatctgagtg

SEQ ID NO: 1535314 - DNA, 15 bp, Homo sapiens
aaaagatctgagtgt

SEQ ID NO: 1535315 - DNA, 15 bp, Homo sapiens
aaagatctgagtgtt

SEQ ID NO: 1535316 - DNA, 15 bp, Homo sapiens
aagatctgagtgtta

SEQ ID NO: 1535317 - DNA, 15 bp, Homo sapiens
agatctgagtgttac

SEQ ID NO: 1535318 - DNA, 15 bp, Homo sapiens
gatctgagtgttacc

SEQ ID NO: 1535319 - DNA, 15 bp, Homo sapiens
atctgagtgttaccc

SEQ ID NO: 1535320 - DNA, 15 bp, Homo sapiens
tctgagtgttaccct

SEQ ID NO: 1535321 - DNA, 15 bp, Homo sapiens
ctgagtgttaccctt

SEQ ID NO: 1535322 - DNA, 15 bp, Homo sapiens
tgagtgttaccctta

SEQ ID NO: 1535323 - DNA, 15 bp, Homo sapiens
gagtgttacccttac

SEQ ID NO: 1535324 - DNA, 15 bp, Homo sapiens
agtgttacccttact

SEQ ID NO: 1535325 - DNA, 15 bp, Homo sapiens
gtgttacccttactc

SEQ ID NO: 1535326 - DNA, 15 bp, Homo sapiens
tgttacccttactca

SEQ ID NO: 1535327 - DNA, 15 bp, Homo sapiens
gttacccttactcag

SEQ ID NO: 1535328 - DNA, 15 bp, Homo sapiens
ttacccttactcagt

SEQ ID NO: 1535329 - DNA, 15 bp, Homo sapiens
tacccttactcagtg

SEQ ID NO: 1535330 - DNA, 15 bp, Homo sapiens
acccttactcagtgt

SEQ ID NO: 1535331 - DNA, 15 bp, Homo sapiens
cccttactcagtgtg

SEQ ID NO: 1535332 - DNA, 15 bp, Homo sapiens
ccttactcagtgtgg

SEQ ID NO: 1535333 - DNA, 15 bp, Homo sapiens
cttactcagtgtggt

SEQ ID NO: 1535334 - DNA, 15 bp, Homo sapiens
ttactcagtgtggtc

SEQ ID NO: 1535335 - DNA, 15 bp, Homo sapiens
tactcagtgtggtcg

SEQ ID NO: 1535336 - DNA, 15 bp, Homo sapiens
actcagtgtggtcga

SEQ ID NO: 1535337 - DNA, 15 bp, Homo sapiens
ctcagtgtggtcgaa

SEQ ID NO: 1535338 - DNA, 15 bp, Homo sapiens
tcagtgtggtcgaat

SEQ ID NO: 1535339 - DNA, 15 bp, Homo sapiens
cagtgtggtcgaata

SEQ ID NO: 1535340 - DNA, 15 bp, Homo sapiens
agtgtggtcgaatat

SEQ ID NO: 1535341 - DNA, 15 bp, Homo sapiens
gtgtggtcgaatata

SEQ ID NO: 1535342 - DNA, 15 bp, Homo sapiens
tgtggtcgaatataa

SEQ ID NO: 1535343 - DNA, 15 bp, Homo sapiens
gtggtcgaatataaa

SEQ ID NO: 1535344 - DNA, 15 bp, Homo sapiens
tggtcgaatataaat

SEQ ID NO: 1535345 - DNA, 15 bp, Homo sapiens
ggtcgaatataaata

SEQ ID NO: 1535346 - DNA, 15 bp, Homo sapiens
gtcgaatataaatag

SEQ ID NO: 1535347 - DNA, 15 bp, Homo sapiens
tcgaatataaatagc

SEQ ID NO: 1535348 - DNA, 15 bp, Homo sapiens
cgaatataaatagcc

SEQ ID NO: 1535349 - DNA, 15 bp, Homo sapiens
gaatataaatagcca

SEQ ID NO: 1535350 - DNA, 15 bp, Homo sapiens
aatataaatagccat

SEQ ID NO: 1535351 - DNA, 15 bp, Homo sapiens
atataaatagccata

SEQ ID NO: 1535352 - DNA, 15 bp, Homo sapiens
tataaatagccatag

SEQ ID NO: 1535353 - DNA, 15 bp, Homo sapiens
ataaatagccatagg

SEQ ID NO: 1535354 - DNA, 15 bp, Homo sapiens
taaatagccataggt

SEQ ID NO: 1535355 - DNA, 15 bp, Homo sapiens
aaatagccataggtt

SEQ ID NO: 1535356 - DNA, 15 bp, Homo sapiens
aatagccataggttc

SEQ ID NO: 1535357 - DNA, 15 bp, Homo sapiens
atagccataggttcc

SEQ ID NO: 1535358 - DNA, 15 bp, Homo sapiens
tagccataggttcct

SEQ ID NO: 1535359 - DNA, 15 bp, Homo sapiens
agccataggttcctg

SEQ ID NO: 1535360 - DNA, 15 bp, Homo sapiens
gccataggttcctgt

SEQ ID NO: 1535361 - DNA, 15 bp, Homo sapiens
ccataggttcctgtt

SEQ ID NO: 1535362 - DNA, 15 bp, Homo sapiens
cataggttcctgtta

SEQ ID NO: 1535363 - DNA, 15 bp, Homo sapiens
ataggttcctgttat

SEQ ID NO: 1535364 - DNA, 15 bp, Homo sapiens
taggttcctgttata

SEQ ID NO: 1535365 - DNA, 15 bp, Homo sapiens
aggttcctgttatac

SEQ ID NO: 1535366 - DNA, 15 bp, Homo sapiens
ggttcctgttataca

SEQ ID NO: 1535367 - DNA, 15 bp, Homo sapiens
gttcctgttatacac

SEQ ID NO: 1535368 - DNA, 15 bp, Homo sapiens
ttcctgttatacaca

SEQ ID NO: 1535369 - DNA, 15 bp, Homo sapiens
tcctgttatacacac

SEQ ID NO: 1535370 - DNA, 15 bp, Homo sapiens
cctgttatacacact

SEQ ID NO: 1535371 - DNA, 15 bp, Homo sapiens
ctgttatacacactt

SEQ ID NO: 1535372 - DNA, 15 bp, Homo sapiens
tgttatacacacttg

SEQ ID NO: 1535373 - DNA, 15 bp, Homo sapiens
gttatacacacttgc

SEQ ID NO: 1535374 - DNA, 15 bp, Homo sapiens
ttatacacacttgct

SEQ ID NO: 1535375 - DNA, 15 bp, Homo sapiens
tatacacacttgctg

SEQ ID NO: 1535376 - DNA, 15 bp, Homo sapiens
atacacacttgctgt

SEQ ID NO: 1535377 - DNA, 15 bp, Homo sapiens
tacacacttgctgtg

SEQ ID NO: 1535378 - DNA, 15 bp, Homo sapiens
acacacttgctgtgg

SEQ ID NO: 1535379 - DNA, 15 bp, Homo sapiens
cacacttgctgtggt

SEQ ID NO: 1535380 - DNA, 15 bp, Homo sapiens
acacttgctgtggtg

SEQ ID NO: 1535381 - DNA, 15 bp, Homo sapiens
cacttgctgtggtgc

SEQ ID NO: 1535382 - DNA, 15 bp, Homo sapiens
acttgctgtggtgct

SEQ ID NO: 1535383 - DNA, 15 bp, Homo sapiens
cttgctgtggtgcta

SEQ ID NO: 1535384 - DNA, 15 bp, Homo sapiens
ttgctgtggtgctac

SEQ ID NO: 1535385 - DNA, 15 bp, Homo sapiens
tgctgtggtgctaca

SEQ ID NO: 1535386 - DNA, 15 bp, Homo sapiens
gctgtggtgctacag

SEQ ID NO: 1535387 - DNA, 15 bp, Homo sapiens
ctgtggtgctacaga

SEQ ID NO: 1535388 - DNA, 15 bp, Homo sapiens
tgtggtgctacagag

SEQ ID NO: 1535389 - DNA, 15 bp, Homo sapiens
gtggtgctacagagt

SEQ ID NO: 1535390 - DNA, 15 bp, Homo sapiens
tggtgctacagagtc

SEQ ID NO: 1535391 - DNA, 15 bp, Homo sapiens
ggtgctacagagtct

SEQ ID NO: 1535392 - DNA, 15 bp, Homo sapiens
gtgctacagagtctt

SEQ ID NO: 1535393 - DNA, 15 bp, Homo sapiens
tgctacagagtcttt

SEQ ID NO: 1535394 - DNA, 15 bp, Homo sapiens
gctacagagtctttc

SEQ ID NO: 1535395 - DNA, 15 bp, Homo sapiens
ctacagagtctttcc

SEQ ID NO: 1535396 - DNA, 15 bp, Homo sapiens
tacagagtctttcct

SEQ ID NO: 1535397 - DNA, 15 bp, Homo sapiens
acagagtctttcctc

SEQ ID NO: 1535398 - DNA, 15 bp, Homo sapiens
cagagtctttcctca

SEQ ID NO: 1535399 - DNA, 15 bp, Homo sapiens
agagtctttcctcat

SEQ ID NO: 1535400 - DNA, 15 bp, Homo sapiens
gagtctttcctcatg

SEQ ID NO: 1535401 - DNA, 15 bp, Homo sapiens
agtctttcctcatgg

SEQ ID NO: 1535402 - DNA, 15 bp, Homo sapiens
gtctttcctcatggg

SEQ ID NO: 1535403 - DNA, 15 bp, Homo sapiens
tctttcctcatggga

SEQ ID NO: 1535404 - DNA, 15 bp, Homo sapiens
ctttcctcatgggaa

SEQ ID NO: 1535405 - DNA, 15 bp, Homo sapiens
tttcctcatgggaac

SEQ ID NO: 1535406 - DNA, 15 bp, Homo sapiens
ttcctcatgggaacc

SEQ ID NO: 1535407 - DNA, 15 bp, Homo sapiens
tcctcatgggaaccc

SEQ ID NO: 1535408 - DNA, 15 bp, Homo sapiens
cctcatgggaaccca

SEQ ID NO: 1535409 - DNA, 15 bp, Homo sapiens
ctcatgggaacccag

SEQ ID NO: 1535410 - DNA, 15 bp, Homo sapiens
tcatgggaacccagt

SEQ ID NO: 1535411 - DNA, 15 bp, Homo sapiens
catgggaacccagtc

SEQ ID NO: 1535412 - DNA, 15 bp, Homo sapiens
atgggaacccagtcc

SEQ ID NO: 1535413 - DNA, 15 bp, Homo sapiens
tgggaacccagtccc

SEQ ID NO: 1535414 - DNA, 15 bp, Homo sapiens
gggaacccagtccct

SEQ ID NO: 1535415 - DNA, 15 bp, Homo sapiens
ggaacccagtccctc

SEQ ID NO: 1535416 - DNA, 15 bp, Homo sapiens
gaacccagtccctct

SEQ ID NO: 1535417 - DNA, 15 bp, Homo sapiens
aacccagtccctctt

SEQ ID NO: 1535418 - DNA, 15 bp, Homo sapiens
acccagtccctcttt

SEQ ID NO: 1535419 - DNA, 15 bp, Homo sapiens
cccagtccctctttc

SEQ ID NO: 1535420 - DNA, 15 bp, Homo sapiens
ccagtccctctttca

SEQ ID NO: 1535421 - DNA, 15 bp, Homo sapiens
cagtccctctttcag

SEQ ID NO: 1535422 - DNA, 15 bp, Homo sapiens
agtccctctttcagt

SEQ ID NO: 1535423 - DNA, 15 bp, Homo sapiens
gtccctctttcagtc

SEQ ID NO: 1535424 - DNA, 15 bp, Homo sapiens
tccctctttcagtca

SEQ ID NO: 1535425 - DNA, 15 bp, Homo sapiens
ccctctttcagtcaa

SEQ ID NO: 1535426 - DNA, 15 bp, Homo sapiens
cctctttcagtcaat

SEQ ID NO: 1535427 - DNA, 15 bp, Homo sapiens
ctctttcagtcaatg

SEQ ID NO: 1535428 - DNA, 15 bp, Homo sapiens
tctttcagtcaatgg

SEQ ID NO: 1535429 - DNA, 15 bp, Homo sapiens
ctttcagtcaatggg

SEQ ID NO: 1535430 - DNA, 15 bp, Homo sapiens
tttcagtcaatgggt

SEQ ID NO: 1535431 - DNA, 15 bp, Homo sapiens
ttcagtcaatgggtt

SEQ ID NO: 1535432 - DNA, 15 bp, Homo sapiens
tcagtcaatgggttc

SEQ ID NO: 1535433 - DNA, 15 bp, Homo sapiens
cagtcaatgggttct

SEQ ID NO: 1535434 - DNA, 15 bp, Homo sapiens
agtcaatgggttctg

SEQ ID NO: 1535435 - DNA, 15 bp, Homo sapiens
gtcaatgggttctgg

SEQ ID NO: 1535436 - DNA, 15 bp, Homo sapiens
tcaatgggttctggt

SEQ ID NO: 1535437 - DNA, 15 bp, Homo sapiens
caatgggttctggtt

SEQ ID NO: 1535438 - DNA, 15 bp, Homo sapiens
aatgggttctggttc

SEQ ID NO: 1535439 - DNA, 15 bp, Homo sapiens
atgggttctggttcg

SEQ ID NO: 1535440 - DNA, 15 bp, Homo sapiens
tgggttctggttcga

SEQ ID NO: 1535441 - DNA, 15 bp, Homo sapiens
gggttctggttcgag

SEQ ID NO: 1535442 - DNA, 15 bp, Homo sapiens
ggttctggttcgaga

SEQ ID NO: 1535443 - DNA, 15 bp, Homo sapiens
gttctggttcgagaa

SEQ ID NO: 1535444 - DNA, 15 bp, Homo sapiens
ttctggttcgagaac

SEQ ID NO: 1535445 - DNA, 15 bp, Homo sapiens
tctggttcgagaact

SEQ ID NO: 1535446 - DNA, 15 bp, Homo sapiens
ctggttcgagaactg

SEQ ID NO: 1535447 - DNA, 15 bp, Homo sapiens
tggttcgagaactgg

SEQ ID NO: 1535448 - DNA, 15 bp, Homo sapiens
ggttcgagaactggc

SEQ ID NO: 1535449 - DNA, 15 bp, Homo sapiens
gttcgagaactggct

SEQ ID NO: 1535450 - DNA, 15 bp, Homo sapiens
ttcgagaactggctg

SEQ ID NO: 1535451 - DNA, 15 bp, Homo sapiens
tcgagaactggctga

SEQ ID NO: 1535452 - DNA, 15 bp, Homo sapiens
cgagaactggctgag

SEQ ID NO: 1535453 - DNA, 15 bp, Homo sapiens
gagaactggctgagg

SEQ ID NO: 1535454 - DNA, 15 bp, Homo sapiens
agaactggctgaggt

SEQ ID NO: 1535455 - DNA, 15 bp, Homo sapiens
gaactggctgaggtt

SEQ ID NO: 1535456 - DNA, 15 bp, Homo sapiens
aactggctgaggttt

SEQ ID NO: 1535457 - DNA, 15 bp, Homo sapiens
actggctgaggtttg

SEQ ID NO: 1535458 - DNA, 15 bp, Homo sapiens
ctggctgaggtttgg

SEQ ID NO: 1535459 - DNA, 15 bp, Homo sapiens
tggctgaggtttgga

SEQ ID NO: 1535460 - DNA, 15 bp, Homo sapiens
ggctgaggtttggaa

SEQ ID NO: 1535461 - DNA, 15 bp, Homo sapiens
gctgaggtttggaaa

SEQ ID NO: 1535462 - DNA, 15 bp, Homo sapiens
ctgaggtttggaaac

SEQ ID NO: 1535463 - DNA, 15 bp, Homo sapiens
tgaggtttggaaact

SEQ ID NO: 1535464 - DNA, 15 bp, Homo sapiens
gaggtttggaaactg

SEQ ID NO: 1535465 - DNA, 15 bp, Homo sapiens
aggtttggaaactgt

SEQ ID NO: 1535466 - DNA, 15 bp, Homo sapiens
ggtttggaaactgtg

SEQ ID NO: 1535467 - DNA, 15 bp, Homo sapiens
gtttggaaactgtgc

SEQ ID NO: 1535468 - DNA, 15 bp, Homo sapiens
tttggaaactgtgcc

SEQ ID NO: 1535469 - DNA, 15 bp, Homo sapiens
ttggaaactgtgcct

SEQ ID NO: 1535470 - DNA, 15 bp, Homo sapiens
tggaaactgtgcctt

SEQ ID NO: 1535471 - DNA, 15 bp, Homo sapiens
ggaaactgtgccttt

SEQ ID NO: 1535472 - DNA, 15 bp, Homo sapiens
gaaactgtgcctttc

SEQ ID NO: 1535473 - DNA, 15 bp, Homo sapiens
aaactgtgcctttcc

SEQ ID NO: 1535474 - DNA, 15 bp, Homo sapiens
aactgtgcctttcca

SEQ ID NO: 1535475 - DNA, 15 bp, Homo sapiens
actgtgcctttccat

SEQ ID NO: 1535476 - DNA, 15 bp, Homo sapiens
ctgtgcctttccatc

SEQ ID NO: 1535477 - DNA, 15 bp, Homo sapiens
tgtgcctttccatca

SEQ ID NO: 1535478 - DNA, 15 bp, Homo sapiens
gtgcctttccatcat

SEQ ID NO: 1535479 - DNA, 15 bp, Homo sapiens
tgcctttccatcata

SEQ ID NO: 1535480 - DNA, 15 bp, Homo sapiens
gcctttccatcataa

SEQ ID NO: 1535481 - DNA, 15 bp, Homo sapiens
cctttccatcataac

SEQ ID NO: 1535482 - DNA, 15 bp, Homo sapiens
ctttccatcataact

SEQ ID NO: 1535483 - DNA, 15 bp, Homo sapiens
tttccatcataactt

SEQ ID NO: 1535484 - DNA, 15 bp, Homo sapiens
ttccatcataacttt

SEQ ID NO: 1535485 - DNA, 15 bp, Homo sapiens
tccatcataactttc

SEQ ID NO: 1535486 - DNA, 15 bp, Homo sapiens
ccatcataactttcc

SEQ ID NO: 1535487 - DNA, 15 bp, Homo sapiens
catcataactttcca

SEQ ID NO: 1535488 - DNA, 15 bp, Homo sapiens
atcataactttccac

SEQ ID NO: 1535489 - DNA, 15 bp, Homo sapiens
tcataactttccact

SEQ ID NO: 1535490 - DNA, 15 bp, Homo sapiens
cataactttccactg

SEQ ID NO: 1535491 - DNA, 15 bp, Homo sapiens
ataactttccactgg

SEQ ID NO: 1535492 - DNA, 15 bp, Homo sapiens
taactttccactggg

SEQ ID NO: 1535493 - DNA, 15 bp, Homo sapiens
aactttccactgggg

SEQ ID NO: 1535494 - DNA, 15 bp, Homo sapiens
actttccactggggt

SEQ ID NO: 1535495 - DNA, 15 bp, Homo sapiens
ctttccactggggtg

SEQ ID NO: 1535496 - DNA, 15 bp, Homo sapiens
tttccactggggtga

SEQ ID NO: 1535497 - DNA, 15 bp, Homo sapiens
ttccactggggtgac

SEQ ID NO: 1535498 - DNA, 15 bp, Homo sapiens
tccactggggtgact

SEQ ID NO: 1535499 - DNA, 15 bp, Homo sapiens
ccactggggtgactg

SEQ ID NO: 1535500 - DNA, 15 bp, Homo sapiens
cactggggtgactga

SEQ ID NO: 1535501 - DNA, 15 bp, Homo sapiens
actggggtgactgac

SEQ ID NO: 1535502 - DNA, 15 bp, Homo sapiens
ctggggtgactgacc

SEQ ID NO: 1535503 - DNA, 15 bp, Homo sapiens
tggggtgactgacct

SEQ ID NO: 1535504 - DNA, 15 bp, Homo sapiens
ggggtgactgacctt

SEQ ID NO: 1535505 - DNA, 15 bp, Homo sapiens
gggtgactgaccttg

SEQ ID NO: 1535506 - DNA, 15 bp, Homo sapiens
ggtgactgaccttgg

SEQ ID NO: 1535507 - DNA, 15 bp, Homo sapiens
gtgactgaccttggc

SEQ ID NO: 1535508 - DNA, 15 bp, Homo sapiens
tgactgaccttggcc

SEQ ID NO: 1535509 - DNA, 15 bp, Homo sapiens
gactgaccttggcct

SEQ ID NO: 1535510 - DNA, 15 bp, Homo sapiens
actgaccttggcctt

SEQ ID NO: 1535511 - DNA, 15 bp, Homo sapiens
ctgaccttggccttc

SEQ ID NO: 1535512 - DNA, 15 bp, Homo sapiens
tgaccttggccttct

SEQ ID NO: 1535513 - DNA, 15 bp, Homo sapiens
gaccttggccttctg

SEQ ID NO: 1535514 - DNA, 15 bp, Homo sapiens
accttggccttctgt

SEQ ID NO: 1535515 - DNA, 15 bp, Homo sapiens
ccttggccttctgtt

SEQ ID NO: 1535516 - DNA, 15 bp, Homo sapiens
cttggccttctgttc

SEQ ID NO: 1535517 - DNA, 15 bp, Homo sapiens
ttggccttctgttca

SEQ ID NO: 1535518 - DNA, 15 bp, Homo sapiens
tggccttctgttcat

SEQ ID NO: 1535519 - DNA, 15 bp, Homo sapiens
ggccttctgttcatc

SEQ ID NO: 1535520 - DNA, 15 bp, Homo sapiens
gccttctgttcatcc

SEQ ID NO: 1535521 - DNA, 15 bp, Homo sapiens
ccttctgttcatcct

SEQ ID NO: 1535522 - DNA, 15 bp, Homo sapiens
cttctgttcatcctt

SEQ ID NO: 1535523 - DNA, 15 bp, Homo sapiens
ttctgttcatccttt

SEQ ID NO: 1535524 - DNA, 15 bp, Homo sapiens
tctgttcatcctttc

SEQ ID NO: 1535525 - DNA, 15 bp, Homo sapiens
ctgttcatcctttct

SEQ ID NO: 1535526 - DNA, 15 bp, Homo sapiens
tgttcatcctttcta

SEQ ID NO: 1535527 - DNA, 15 bp, Homo sapiens
gttcatcctttctag

SEQ ID NO: 1535528 - DNA, 15 bp, Homo sapiens
ttcatcctttctagc

SEQ ID NO: 1535529 - DNA, 15 bp, Homo sapiens
tcatcctttctagcc

SEQ ID NO: 1535530 - DNA, 15 bp, Homo sapiens
catcctttctagccc

SEQ ID NO: 1535531 - DNA, 15 bp, Homo sapiens
atcctttctagcccc

SEQ ID NO: 1535532 - DNA, 15 bp, Homo sapiens
tcctttctagcccct

SEQ ID NO: 1535533 - DNA, 15 bp, Homo sapiens
cctttctagccccta

SEQ ID NO: 1535534 - DNA, 15 bp, Homo sapiens
ctttctagcccctaa

SEQ ID NO: 1535535 - DNA, 15 bp, Homo sapiens
tttctagcccctaag

SEQ ID NO: 1535536 - DNA, 15 bp, Homo sapiens
ttctagcccctaaga

SEQ ID NO: 1535537 - DNA, 15 bp, Homo sapiens
tctagcccctaagaa

SEQ ID NO: 1535538 - DNA, 15 bp, Homo sapiens
ctagcccctaagaat

SEQ ID NO: 1535539 - DNA, 15 bp, Homo sapiens
tagcccctaagaatc

SEQ ID NO: 1535540 - DNA, 15 bp, Homo sapiens
agcccctaagaatcc

SEQ ID NO: 1535541 - DNA, 15 bp, Homo sapiens
gcccctaagaatcca

SEQ ID NO: 1535542 - DNA, 15 bp, Homo sapiens
cccctaagaatccaa

SEQ ID NO: 1535543 - DNA, 15 bp, Homo sapiens
ccctaagaatccaac

SEQ ID NO: 1535544 - DNA, 15 bp, Homo sapiens
cctaagaatccaaca

SEQ ID NO: 1535545 - DNA, 15 bp, Homo sapiens
ctaagaatccaacac

SEQ ID NO: 1535546 - DNA, 15 bp, Homo sapiens
taagaatccaacact

SEQ ID NO: 1535547 - DNA, 15 bp, Homo sapiens
aagaatccaacactc

SEQ ID NO: 1535548 - DNA, 15 bp, Homo sapiens
agaatccaacactct

SEQ ID NO: 1535549 - DNA, 15 bp, Homo sapiens
gaatccaacactcta

SEQ ID NO: 1535550 - DNA, 15 bp, Homo sapiens
aatccaacactctat

SEQ ID NO: 1535551 - DNA, 15 bp, Homo sapiens
atccaacactctatt

SEQ ID NO: 1535552 - DNA, 15 bp, Homo sapiens
tccaacactctatta

SEQ ID NO: 1535553 - DNA, 15 bp, Homo sapiens
ccaacactctattag

SEQ ID NO: 1535554 - DNA, 15 bp, Homo sapiens
caacactctattagc

SEQ ID NO: 1535555 - DNA, 15 bp, Homo sapiens
aacactctattagcc

SEQ ID NO: 1535556 - DNA, 15 bp, Homo sapiens
acactctattagcct

SEQ ID NO: 1535557 - DNA, 15 bp, Homo sapiens
cactctattagcctt

SEQ ID NO: 1535558 - DNA, 15 bp, Homo sapiens
actctattagccttc

SEQ ID NO: 1535559 - DNA, 15 bp, Homo sapiens
ctctattagccttct

SEQ ID NO: 1535560 - DNA, 15 bp, Homo sapiens
tctattagccttctc

SEQ ID NO: 1535561 - DNA, 15 bp, Homo sapiens
ctattagccttctcc

SEQ ID NO: 1535562 - DNA, 15 bp, Homo sapiens
tattagccttctcct

SEQ ID NO: 1535563 - DNA, 15 bp, Homo sapiens
attagccttctcctt

SEQ ID NO: 1535564 - DNA, 15 bp, Homo sapiens
ttagccttctcctta

SEQ ID NO: 1535565 - DNA, 15 bp, Homo sapiens
tagccttctccttag

SEQ ID NO: 1535566 - DNA, 15 bp, Homo sapiens
agccttctccttaga

SEQ ID NO: 1535567 - DNA, 15 bp, Homo sapiens
gccttctccttagac

SEQ ID NO: 1535568 - DNA, 15 bp, Homo sapiens
ccttctccttagacc

SEQ ID NO: 1535569 - DNA, 15 bp, Homo sapiens
cttctccttagaccc

SEQ ID NO: 1535570 - DNA, 15 bp, Homo sapiens
ttctccttagacccc

SEQ ID NO: 1535571 - DNA, 15 bp, Homo sapiens
tctccttagacccct

SEQ ID NO: 1535572 - DNA, 15 bp, Homo sapiens
ctccttagaccccta

SEQ ID NO: 1535573 - DNA, 15 bp, Homo sapiens
tccttagacccctat

SEQ ID NO: 1535574 - DNA, 15 bp, Homo sapiens
ccttagacccctata

SEQ ID NO: 1535575 - DNA, 15 bp, Homo sapiens
cttagacccctataa

SEQ ID NO: 1535576 - DNA, 15 bp, Homo sapiens
ttagacccctataag

SEQ ID NO: 1535577 - DNA, 15 bp, Homo sapiens
tagacccctataagc

SEQ ID NO: 1535578 - DNA, 15 bp, Homo sapiens
agacccctataagct

SEQ ID NO: 1535579 - DNA, 15 bp, Homo sapiens
gacccctataagcta

SEQ ID NO: 1535580 - DNA, 15 bp, Homo sapiens
acccctataagctaa

SEQ ID NO: 1535581 - DNA, 15 bp, Homo sapiens
cccctataagctaat

SEQ ID NO: 1535582 - DNA, 15 bp, Homo sapiens
ccctataagctaatc

SEQ ID NO: 1535583 - DNA, 15 bp, Homo sapiens
cctataagctaatcc

SEQ ID NO: 1535584 - DNA, 15 bp, Homo sapiens
ctataagctaatccc

SEQ ID NO: 1535585 - DNA, 15 bp, Homo sapiens
tataagctaatccct

SEQ ID NO: 1535586 - DNA, 15 bp, Homo sapiens
ataagctaatccctt

SEQ ID NO: 1535587 - DNA, 15 bp, Homo sapiens
taagctaatcccttc

SEQ ID NO: 1535588 - DNA, 15 bp, Homo sapiens
aagctaatcccttct

SEQ ID NO: 1535589 - DNA, 15 bp, Homo sapiens
agctaatcccttcta

SEQ ID NO: 1535590 - DNA, 15 bp, Homo sapiens
gctaatcccttctag

SEQ ID NO: 1535591 - DNA, 15 bp, Homo sapiens
ctaatcccttctagt

SEQ ID NO: 1535592 - DNA, 15 bp, Homo sapiens
taatcccttctagtt

SEQ ID NO: 1535593 - DNA, 15 bp, Homo sapiens
aatcccttctagttg

SEQ ID NO: 1535594 - DNA, 15 bp, Homo sapiens
atcccttctagttgt

SEQ ID NO: 1535595 - DNA, 15 bp, Homo sapiens
tcccttctagttgtt

SEQ ID NO: 1535596 - DNA, 15 bp, Homo sapiens
cccttctagttgtta

SEQ ID NO: 1535597 - DNA, 15 bp, Homo sapiens
ccttctagttgttag

SEQ ID NO: 1535598 - DNA, 15 bp, Homo sapiens
cttctagttgttagt

SEQ ID NO: 1535599 - DNA, 15 bp, Homo sapiens
ttctagttgttagtc

SEQ ID NO: 1535600 - DNA, 15 bp, Homo sapiens
tctagttgttagtct

SEQ ID NO: 1535601 - DNA, 15 bp, Homo sapiens
ctagttgttagtctg

SEQ ID NO: 1535602 - DNA, 15 bp, Homo sapiens
tagttgttagtctga

SEQ ID NO: 1535603 - DNA, 15 bp, Homo sapiens
agttgttagtctgac

SEQ ID NO: 1535604 - DNA, 15 bp, Homo sapiens
gttgttagtctgacc

SEQ ID NO: 1535605 - DNA, 15 bp, Homo sapiens
ttgttagtctgacct

SEQ ID NO: 1535606 - DNA, 15 bp, Homo sapiens
tgttagtctgacctt

SEQ ID NO: 1535607 - DNA, 15 bp, Homo sapiens
gttagtctgaccttg

SEQ ID NO: 1535608 - DNA, 15 bp, Homo sapiens
ttagtctgaccttgg

SEQ ID NO: 1535609 - DNA, 15 bp, Homo sapiens
tagtctgaccttggt

SEQ ID NO: 1535610 - DNA, 15 bp, Homo sapiens
agtctgaccttggtg

SEQ ID NO: 1535611 - DNA, 15 bp, Homo sapiens
gtctgaccttggtgc

SEQ ID NO: 1535612 - DNA, 15 bp, Homo sapiens
tctgaccttggtgcc

SEQ ID NO: 1535613 - DNA, 15 bp, Homo sapiens
ctgaccttggtgccc

SEQ ID NO: 1535614 - DNA, 15 bp, Homo sapiens
tgaccttggtgccca

SEQ ID NO: 1535615 - DNA, 15 bp, Homo sapiens
gaccttggtgcccaa

SEQ ID NO: 1535616 - DNA, 15 bp, Homo sapiens
accttggtgcccaat

SEQ ID NO: 1535617 - DNA, 15 bp, Homo sapiens
ccttggtgcccaata

SEQ ID NO: 1535618 - DNA, 15 bp, Homo sapiens
cttggtgcccaatat

SEQ ID NO: 1535619 - DNA, 15 bp, Homo sapiens
ttggtgcccaatatg

SEQ ID NO: 1535620 - DNA, 15 bp, Homo sapiens
tggtgcccaatatga

SEQ ID NO: 1535621 - DNA, 15 bp, Homo sapiens
ggtgcccaatatgat

SEQ ID NO: 1535622 - DNA, 15 bp, Homo sapiens
gtgcccaatatgata

SEQ ID NO: 1535623 - DNA, 15 bp, Homo sapiens
tgcccaatatgataa

SEQ ID NO: 1535624 - DNA, 15 bp, Homo sapiens
gcccaatatgataat

SEQ ID NO: 1535625 - DNA, 15 bp, Homo sapiens
cccaatatgataatt

SEQ ID NO: 1535626 - DNA, 15 bp, Homo sapiens
ccaatatgataatta

SEQ ID NO: 1535627 - DNA, 15 bp, Homo sapiens
caatatgataattat

SEQ ID NO: 1535628 - DNA, 15 bp, Homo sapiens
aatatgataattatt

SEQ ID NO: 1535629 - DNA, 15 bp, Homo sapiens
atatgataattattc

SEQ ID NO: 1535630 - DNA, 15 bp, Homo sapiens
tatgataattattcc

SEQ ID NO: 1535631 - DNA, 15 bp, Homo sapiens
atgataattattccc

SEQ ID NO: 1535632 - DNA, 15 bp, Homo sapiens
tgataattattccca

SEQ ID NO: 1535633 - DNA, 15 bp, Homo sapiens
gataattattcccac

SEQ ID NO: 1535634 - DNA, 15 bp, Homo sapiens
ataattattcccact

SEQ ID NO: 1535635 - DNA, 15 bp, Homo sapiens
taattattcccactt

SEQ ID NO: 1535636 - DNA, 15 bp, Homo sapiens
aattattcccacttt

SEQ ID NO: 1535637 - DNA, 15 bp, Homo sapiens
attattcccactttg

SEQ ID NO: 1535638 - DNA, 15 bp, Homo sapiens
ttattcccactttgc

SEQ ID NO: 1535639 - DNA, 15 bp, Homo sapiens
tattcccactttgct

SEQ ID NO: 1535640 - DNA, 15 bp, Homo sapiens
attcccactttgctt

SEQ ID NO: 1535641 - DNA, 15 bp, Homo sapiens
ttcccactttgcttc

SEQ ID NO: 1535642 - DNA, 15 bp, Homo sapiens
tcccactttgcttct

SEQ ID NO: 1535643 - DNA, 15 bp, Homo sapiens
cccactttgcttctg

SEQ ID NO: 1535644 - DNA, 15 bp, Homo sapiens
ccactttgcttctga

SEQ ID NO: 1535645 - DNA, 15 bp, Homo sapiens
cactttgcttctgat

SEQ ID NO: 1535646 - DNA, 15 bp, Homo sapiens
actttgcttctgata

SEQ ID NO: 1535647 - DNA, 15 bp, Homo sapiens
ctttgcttctgatat

SEQ ID NO: 1535648 - DNA, 15 bp, Homo sapiens
tttgcttctgatatg

SEQ ID NO: 1535649 - DNA, 15 bp, Homo sapiens
ttgcttctgatatgc

SEQ ID NO: 1535650 - DNA, 15 bp, Homo sapiens
tgcttctgatatgct

SEQ ID NO: 1535651 - DNA, 15 bp, Homo sapiens
gcttctgatatgctt

SEQ ID NO: 1535652 - DNA, 15 bp, Homo sapiens
cttctgatatgcttc

SEQ ID NO: 1535653 - DNA, 15 bp, Homo sapiens
ttctgatatgcttct

SEQ ID NO: 1535654 - DNA, 15 bp, Homo sapiens
tctgatatgcttcta

SEQ ID NO: 1535655 - DNA, 15 bp, Homo sapiens
ctgatatgcttctaa

SEQ ID NO: 1535656 - DNA, 15 bp, Homo sapiens
tgatatgcttctaag

SEQ ID NO: 1535657 - DNA, 15 bp, Homo sapiens
gatatgcttctaagt

SEQ ID NO: 1535658 - DNA, 15 bp, Homo sapiens
atatgcttctaagtg

SEQ ID NO: 1535659 - DNA, 15 bp, Homo sapiens
tatgcttctaagtgc

SEQ ID NO: 1535660 - DNA, 15 bp, Homo sapiens
atgcttctaagtgct

SEQ ID NO: 1535661 - DNA, 15 bp, Homo sapiens
tgcttctaagtgctg

SEQ ID NO: 1535662 - DNA, 15 bp, Homo sapiens
gcttctaagtgctgc

SEQ ID NO: 1535663 - DNA, 15 bp, Homo sapiens
cttctaagtgctgcc

SEQ ID NO: 1535664 - DNA, 15 bp, Homo sapiens
ttctaagtgctgccc

SEQ ID NO: 1535665 - DNA, 15 bp, Homo sapiens
tctaagtgctgcccc

SEQ ID NO: 1535666 - DNA, 15 bp, Homo sapiens
ctaagtgctgcccct

SEQ ID NO: 1535667 - DNA, 15 bp, Homo sapiens
taagtgctgcccctg

SEQ ID NO: 1535668 - DNA, 15 bp, Homo sapiens
aagtgctgcccctgg

SEQ ID NO: 1535669 - DNA, 15 bp, Homo sapiens
agtgctgcccctggt

SEQ ID NO: 1535670 - DNA, 15 bp, Homo sapiens
gtgctgcccctggtc

SEQ ID NO: 1535671 - DNA, 15 bp, Homo sapiens
tgctgcccctggtct

SEQ ID NO: 1535672 - DNA, 15 bp, Homo sapiens
gctgcccctggtctc

SEQ ID NO: 1535673 - DNA, 15 bp, Homo sapiens
ctgcccctggtctct

SEQ ID NO: 1535674 - DNA, 15 bp, Homo sapiens
tgcccctggtctctg

SEQ ID NO: 1535675 - DNA, 15 bp, Homo sapiens
gcccctggtctctgc

SEQ ID NO: 1535676 - DNA, 15 bp, Homo sapiens
cccctggtctctgcc

SEQ ID NO: 1535677 - DNA, 15 bp, Homo sapiens
ccctggtctctgccc

SEQ ID NO: 1535678 - DNA, 15 bp, Homo sapiens
cctggtctctgccct

SEQ ID NO: 1535679 - DNA, 15 bp, Homo sapiens
ctggtctctgccctt

SEQ ID NO: 1535680 - DNA, 15 bp, Homo sapiens
tggtctctgccctta

SEQ ID NO: 1535681 - DNA, 15 bp, Homo sapiens
ggtctctgcccttaa

SEQ ID NO: 1535682 - DNA, 15 bp, Homo sapiens
gtctctgcccttaag

SEQ ID NO: 1535683 - DNA, 15 bp, Homo sapiens
tctctgcccttaagt

SEQ ID NO: 1535684 - DNA, 15 bp, Homo sapiens
ctctgcccttaagtg

SEQ ID NO: 1535685 - DNA, 15 bp, Homo sapiens
tctgcccttaagtga

SEQ ID NO: 1535686 - DNA, 15 bp, Homo sapiens
ctgcccttaagtgat

SEQ ID NO: 1535687 - DNA, 15 bp, Homo sapiens
tgcccttaagtgatc

SEQ ID NO: 1535688 - DNA, 15 bp, Homo sapiens
gcccttaagtgatct

SEQ ID NO: 1535689 - DNA, 15 bp, Homo sapiens
cccttaagtgatcta

SEQ ID NO: 1535690 - DNA, 15 bp, Homo sapiens
ccttaagtgatctat

SEQ ID NO: 1535691 - DNA, 15 bp, Homo sapiens
cttaagtgatctatc

SEQ ID NO: 1535692 - DNA, 15 bp, Homo sapiens
ttaagtgatctatca

SEQ ID NO: 1535693 - DNA, 15 bp, Homo sapiens
taagtgatctatcat

SEQ ID NO: 1535694 - DNA, 15 bp, Homo sapiens
aagtgatctatcatc

SEQ ID NO: 1535695 - DNA, 15 bp, Homo sapiens
agtgatctatcatcc

SEQ ID NO: 1535696 - DNA, 15 bp, Homo sapiens
gtgatctatcatccc

SEQ ID NO: 1535697 - DNA, 15 bp, Homo sapiens
tgatctatcatcccc

SEQ ID NO: 1535698 - DNA, 15 bp, Homo sapiens
gatctatcatcccca

SEQ ID NO: 1535699 - DNA, 15 bp, Homo sapiens
atctatcatccccac

SEQ ID NO: 1535700 - DNA, 15 bp, Homo sapiens
tctatcatccccact

SEQ ID NO: 1535701 - DNA, 15 bp, Homo sapiens
ctatcatccccactg

SEQ ID NO: 1535702 - DNA, 15 bp, Homo sapiens
tatcatccccactgc

SEQ ID NO: 1535703 - DNA, 15 bp, Homo sapiens
atcatccccactgcc

SEQ ID NO: 1535704 - DNA, 15 bp, Homo sapiens
tcatccccactgcca

SEQ ID NO: 1535705 - DNA, 15 bp, Homo sapiens
catccccactgccat

SEQ ID NO: 1535706 - DNA, 15 bp, Homo sapiens
atccccactgccatt

SEQ ID NO: 1535707 - DNA, 15 bp, Homo sapiens
tccccactgccatta

SEQ ID NO: 1535708 - DNA, 15 bp, Homo sapiens
ccccactgccattag

SEQ ID NO: 1535709 - DNA, 15 bp, Homo sapiens
cccactgccattagg

SEQ ID NO: 1535710 - DNA, 15 bp, Homo sapiens
ccactgccattaggg

SEQ ID NO: 1535711 - DNA, 15 bp, Homo sapiens
cactgccattagggg

SEQ ID NO: 1535712 - DNA, 15 bp, Homo sapiens
actgccattaggggg

SEQ ID NO: 1535713 - DNA, 15 bp, Homo sapiens
ctgccattaggggga

SEQ ID NO: 1535714 - DNA, 15 bp, Homo sapiens
tgccattagggggag

SEQ ID NO: 1535715 - DNA, 15 bp, Homo sapiens
gccattagggggaga

SEQ ID NO: 1535716 - DNA, 15 bp, Homo sapiens
ccattagggggagaa

SEQ ID NO: 1535717 - DNA, 15 bp, Homo sapiens
cattagggggagaag

SEQ ID NO: 1535718 - DNA, 15 bp, Homo sapiens
attagggggagaagc

SEQ ID NO: 1535719 - DNA, 15 bp, Homo sapiens
ttagggggagaagct

SEQ ID NO: 1535720 - DNA, 15 bp, Homo sapiens
tagggggagaagctc

SEQ ID NO: 1535721 - DNA, 15 bp, Homo sapiens
agggggagaagctct

SEQ ID NO: 1535722 - DNA, 15 bp, Homo sapiens
gggggagaagctctg

SEQ ID NO: 1535723 - DNA, 15 bp, Homo sapiens
ggggagaagctctga

SEQ ID NO: 1535724 - DNA, 15 bp, Homo sapiens
gggagaagctctgaa

SEQ ID NO: 1535725 - DNA, 15 bp, Homo sapiens
ggagaagctctgaaa

SEQ ID NO: 1535726 - DNA, 15 bp, Homo sapiens
gagaagctctgaaaa

SEQ ID NO: 1535727 - DNA, 15 bp, Homo sapiens
agaagctctgaaaaa

SEQ ID NO: 1535728 - DNA, 15 bp, Homo sapiens
gaagctctgaaaaag

SEQ ID NO: 1535729 - DNA, 15 bp, Homo sapiens
aagctctgaaaaaga

SEQ ID NO: 1535730 - DNA, 15 bp, Homo sapiens
agctctgaaaaagag

SEQ ID NO: 1535731 - DNA, 15 bp, Homo sapiens
gctctgaaaaagagt

SEQ ID NO: 1535732 - DNA, 15 bp, Homo sapiens
ctctgaaaaagagtt

SEQ ID NO: 1535733 - DNA, 15 bp, Homo sapiens
tctgaaaaagagttg

SEQ ID NO: 1535734 - DNA, 15 bp, Homo sapiens
ctgaaaaagagttgt

SEQ ID NO: 1535735 - DNA, 15 bp, Homo sapiens
tgaaaaagagttgtc

SEQ ID NO: 1535736 - DNA, 15 bp, Homo sapiens
gaaaaagagttgtct

SEQ ID NO: 1535737 - DNA, 15 bp, Homo sapiens
aaaaagagttgtctc

SEQ ID NO: 1535738 - DNA, 15 bp, Homo sapiens
aaaagagttgtctcc

SEQ ID NO: 1535739 - DNA, 15 bp, Homo sapiens
aaagagttgtctccc

SEQ ID NO: 1535740 - DNA, 15 bp, Homo sapiens
aagagttgtctccca

SEQ ID NO: 1535741 - DNA, 15 bp, Homo sapiens
agagttgtctcccat

SEQ ID NO: 1535742 - DNA, 15 bp, Homo sapiens
gagttgtctcccatc

SEQ ID NO: 1535743 - DNA, 15 bp, Homo sapiens
agttgtctcccatca

SEQ ID NO: 1535744 - DNA, 15 bp, Homo sapiens
gttgtctcccatcaa

SEQ ID NO: 1535745 - DNA, 15 bp, Homo sapiens
ttgtctcccatcaac

SEQ ID NO: 1535746 - DNA, 15 bp, Homo sapiens
tgtctcccatcaact

SEQ ID NO: 1535747 - DNA, 15 bp, Homo sapiens
gtctcccatcaactc

SEQ ID NO: 1535748 - DNA, 15 bp, Homo sapiens
tctcccatcaactct

SEQ ID NO: 1535749 - DNA, 15 bp, Homo sapiens
ctcccatcaactctg

SEQ ID NO: 1535750 - DNA, 15 bp, Homo sapiens
tcccatcaactctgg

SEQ ID NO: 1535751 - DNA, 15 bp, Homo sapiens
cccatcaactctggt

SEQ ID NO: 1535752 - DNA, 15 bp, Homo sapiens
ccatcaactctggtc

SEQ ID NO: 1535753 - DNA, 15 bp, Homo sapiens
catcaactctggtct

SEQ ID NO: 1535754 - DNA, 15 bp, Homo sapiens
atcaactctggtcta

SEQ ID NO: 1535755 - DNA, 15 bp, Homo sapiens
tcaactctggtctac

SEQ ID NO: 1535756 - DNA, 15 bp, Homo sapiens
caactctggtctaca

SEQ ID NO: 1535757 - DNA, 15 bp, Homo sapiens
aactctggtctacaa

SEQ ID NO: 1535758 - DNA, 15 bp, Homo sapiens
actctggtctacaaa

SEQ ID NO: 1535759 - DNA, 15 bp, Homo sapiens
ctctggtctacaaag

SEQ ID NO: 1535760 - DNA, 15 bp, Homo sapiens
tctggtctacaaagg

SEQ ID NO: 1535761 - DNA, 15 bp, Homo sapiens
ctggtctacaaagga

SEQ ID NO: 1535762 - DNA, 15 bp, Homo sapiens
tggtctacaaaggac

SEQ ID NO: 1535763 - DNA, 15 bp, Homo sapiens
ggtctacaaaggaca

SEQ ID NO: 1535764 - DNA, 15 bp, Homo sapiens
gtctacaaaggacag

SEQ ID NO: 1535765 - DNA, 15 bp, Homo sapiens
tctacaaaggacagc

SEQ ID NO: 1535766 - DNA, 15 bp, Homo sapiens
ctacaaaggacagcc

SEQ ID NO: 1535767 - DNA, 15 bp, Homo sapiens
tacaaaggacagccc

SEQ ID NO: 1535768 - DNA, 15 bp, Homo sapiens
acaaaggacagccct

SEQ ID NO: 1535769 - DNA, 15 bp, Homo sapiens
caaaggacagcccta

SEQ ID NO: 1535770 - DNA, 15 bp, Homo sapiens
aaaggacagccctac

SEQ ID NO: 1535771 - DNA, 15 bp, Homo sapiens
aaggacagccctact

SEQ ID NO: 1535772 - DNA, 15 bp, Homo sapiens
aggacagccctactg

SEQ ID NO: 1535773 - DNA, 15 bp, Homo sapiens
ggacagccctactga

SEQ ID NO: 1535774 - DNA, 15 bp, Homo sapiens
gacagccctactgag

SEQ ID NO: 1535775 - DNA, 15 bp, Homo sapiens
acagccctactgagc

SEQ ID NO: 1535776 - DNA, 15 bp, Homo sapiens
cagccctactgagcc

SEQ ID NO: 1535777 - DNA, 15 bp, Homo sapiens
agccctactgagcct

SEQ ID NO: 1535778 - DNA, 15 bp, Homo sapiens
gccctactgagcctc

SEQ ID NO: 1535779 - DNA, 15 bp, Homo sapiens
ccctactgagcctca

SEQ ID NO: 1535780 - DNA, 15 bp, Homo sapiens
cctactgagcctcag

SEQ ID NO: 1535781 - DNA, 15 bp, Homo sapiens
ctactgagcctcagc

SEQ ID NO: 1535782 - DNA, 15 bp, Homo sapiens
tactgagcctcagcc

SEQ ID NO: 1535783 - DNA, 15 bp, Homo sapiens
actgagcctcagcca

SEQ ID NO: 1535784 - DNA, 15 bp, Homo sapiens
ctgagcctcagccat

SEQ ID NO: 1535785 - DNA, 15 bp, Homo sapiens
tgagcctcagccatg

SEQ ID NO: 1535786 - DNA, 15 bp, Homo sapiens
gagcctcagccatgt

SEQ ID NO: 1535787 - DNA, 15 bp, Homo sapiens
agcctcagccatgtg

SEQ ID NO: 1535788 - DNA, 15 bp, Homo sapiens
gcctcagccatgtgc

SEQ ID NO: 1535789 - DNA, 15 bp, Homo sapiens
cctcagccatgtgcc

SEQ ID NO: 1535790 - DNA, 15 bp, Homo sapiens
ctcagccatgtgccc

SEQ ID NO: 1535791 - DNA, 15 bp, Homo sapiens
tcagccatgtgcccg

SEQ ID NO: 1535792 - DNA, 15 bp, Homo sapiens
cagccatgtgcccga

SEQ ID NO: 1535793 - DNA, 15 bp, Homo sapiens
agccatgtgcccgac

SEQ ID NO: 1535794 - DNA, 15 bp, Homo sapiens
gccatgtgcccgaca

SEQ ID NO: 1535795 - DNA, 15 bp, Homo sapiens
ccatgtgcccgacac

SEQ ID NO: 1535796 - DNA, 15 bp, Homo sapiens
catgtgcccgacacc

SEQ ID NO: 1535797 - DNA, 15 bp, Homo sapiens
atgtgcccgacacca

SEQ ID NO: 1535798 - DNA, 15 bp, Homo sapiens
tgtgcccgacaccag

SEQ ID NO: 1535799 - DNA, 15 bp, Homo sapiens
gtgcccgacaccagc

SEQ ID NO: 1535800 - DNA, 15 bp, Homo sapiens
tgcccgacaccagca

SEQ ID NO: 1535801 - DNA, 15 bp, Homo sapiens
gcccgacaccagcag

SEQ ID NO: 1535802 - DNA, 15 bp, Homo sapiens
cccgacaccagcaga

SEQ ID NO: 1535803 - DNA, 15 bp, Homo sapiens
ccgacaccagcagat

SEQ ID NO: 1535804 - DNA, 15 bp, Homo sapiens
cgacaccagcagatt

SEQ ID NO: 1535805 - DNA, 15 bp, Homo sapiens
gacaccagcagattc

SEQ ID NO: 1535806 - DNA, 15 bp, Homo sapiens
acaccagcagattct

SEQ ID NO: 1535807 - DNA, 15 bp, Homo sapiens
caccagcagattctt

SEQ ID NO: 1535808 - DNA, 15 bp, Homo sapiens
accagcagattcttt

SEQ ID NO: 1535809 - DNA, 15 bp, Homo sapiens
ccagcagattcttta

SEQ ID NO: 1535810 - DNA, 15 bp, Homo sapiens
cagcagattctttac

SEQ ID NO: 1535811 - DNA, 15 bp, Homo sapiens
agcagattctttaca

SEQ ID NO: 1535812 - DNA, 15 bp, Homo sapiens
gcagattctttacag

SEQ ID NO: 1535813 - DNA, 15 bp, Homo sapiens
cagattctttacagc

SEQ ID NO: 1535814 - DNA, 15 bp, Homo sapiens
agattctttacagcc

SEQ ID NO: 1535815 - DNA, 15 bp, Homo sapiens
gattctttacagcct

SEQ ID NO: 1535816 - DNA, 15 bp, Homo sapiens
attctttacagcctg

SEQ ID NO: 1535817 - DNA, 15 bp, Homo sapiens
ttctttacagcctgg

SEQ ID NO: 1535818 - DNA, 15 bp, Homo sapiens
tctttacagcctggg

SEQ ID NO: 1535819 - DNA, 15 bp, Homo sapiens
ctttacagcctggga

SEQ ID NO: 1535820 - DNA, 15 bp, Homo sapiens
tttacagcctgggaa

SEQ ID NO: 1535821 - DNA, 15 bp, Homo sapiens
ttacagcctgggaag

SEQ ID NO: 1535822 - DNA, 15 bp, Homo sapiens
tacagcctgggaagc

SEQ ID NO: 1535823 - DNA, 15 bp, Homo sapiens
acagcctgggaagca

SEQ ID NO: 1535824 - DNA, 15 bp, Homo sapiens
cagcctgggaagcag

SEQ ID NO: 1535825 - DNA, 15 bp, Homo sapiens
agcctgggaagcaga

SEQ ID NO: 1535826 - DNA, 15 bp, Homo sapiens
gcctgggaagcagag

SEQ ID NO: 1535827 - DNA, 15 bp, Homo sapiens
cctgggaagcagagt

SEQ ID NO: 1535828 - DNA, 15 bp, Homo sapiens
ctgggaagcagagtg

SEQ ID NO: 1535829 - DNA, 15 bp, Homo sapiens
tgggaagcagagtgt

SEQ ID NO: 1535830 - DNA, 15 bp, Homo sapiens
gggaagcagagtgtc

SEQ ID NO: 1535831 - DNA, 15 bp, Homo sapiens
ggaagcagagtgtct

SEQ ID NO: 1535832 - DNA, 15 bp, Homo sapiens
gaagcagagtgtctt

SEQ ID NO: 1535833 - DNA, 15 bp, Homo sapiens
aagcagagtgtcttc

SEQ ID NO: 1535834 - DNA, 15 bp, Homo sapiens
agcagagtgtcttcc

SEQ ID NO: 1535835 - DNA, 15 bp, Homo sapiens
gcagagtgtcttccc

SEQ ID NO: 1535836 - DNA, 15 bp, Homo sapiens
cagagtgtcttccct

SEQ ID NO: 1535837 - DNA, 15 bp, Homo sapiens
agagtgtcttccctg

SEQ ID NO: 1535838 - DNA, 15 bp, Homo sapiens
gagtgtcttccctgc

SEQ ID NO: 1535839 - DNA, 15 bp, Homo sapiens
agtgtcttccctgcc

SEQ ID NO: 1535840 - DNA, 15 bp, Homo sapiens
gtgtcttccctgcct

SEQ ID NO: 1535841 - DNA, 15 bp, Homo sapiens
tgtcttccctgcctt

SEQ ID NO: 1535842 - DNA, 15 bp, Homo sapiens
gtcttccctgccttt

SEQ ID NO: 1535843 - DNA, 15 bp, Homo sapiens
tcttccctgcctttc

SEQ ID NO: 1535844 - DNA, 15 bp, Homo sapiens
cttccctgcctttcc

SEQ ID NO: 1535845 - DNA, 15 bp, Homo sapiens
ttccctgcctttcca

SEQ ID NO: 1535846 - DNA, 15 bp, Homo sapiens
tccctgcctttccag

SEQ ID NO: 1535847 - DNA, 15 bp, Homo sapiens
ccctgcctttccagg

SEQ ID NO: 1535848 - DNA, 15 bp, Homo sapiens
cctgcctttccaggg

SEQ ID NO: 1535849 - DNA, 15 bp, Homo sapiens
ctgcctttccaggga

SEQ ID NO: 1535850 - DNA, 15 bp, Homo sapiens
tgcctttccagggaa

SEQ ID NO: 1535851 - DNA, 15 bp, Homo sapiens
gcctttccagggaac

SEQ ID NO: 1535852 - DNA, 15 bp, Homo sapiens
cctttccagggaaca

SEQ ID NO: 1535853 - DNA, 15 bp, Homo sapiens
ctttccagggaacat

SEQ ID NO: 1535854 - DNA, 15 bp, Homo sapiens
tttccagggaacata

SEQ ID NO: 1535855 - DNA, 15 bp, Homo sapiens
ttccagggaacatag

SEQ ID NO: 1535856 - DNA, 15 bp, Homo sapiens
tccagggaacatagc

SEQ ID NO: 1535857 - DNA, 15 bp, Homo sapiens
ccagggaacatagcc

SEQ ID NO: 1535858 - DNA, 15 bp, Homo sapiens
cagggaacatagcca

SEQ ID NO: 1535859 - DNA, 15 bp, Homo sapiens
agggaacatagccag

SEQ ID NO: 1535860 - DNA, 15 bp, Homo sapiens
gggaacatagccagc

SEQ ID NO: 1535861 - DNA, 15 bp, Homo sapiens
ggaacatagccagct

SEQ ID NO: 1535862 - DNA, 15 bp, Homo sapiens
gaacatagccagctt

SEQ ID NO: 1535863 - DNA, 15 bp, Homo sapiens
aacatagccagctta

SEQ ID NO: 1535864 - DNA, 15 bp, Homo sapiens
acatagccagcttac

SEQ ID NO: 1535865 - DNA, 15 bp, Homo sapiens
catagccagcttaca

SEQ ID NO: 1535866 - DNA, 15 bp, Homo sapiens
atagccagcttacag

SEQ ID NO: 1535867 - DNA, 15 bp, Homo sapiens
tagccagcttacagg

SEQ ID NO: 1535868 - DNA, 15 bp, Homo sapiens
agccagcttacaggc

SEQ ID NO: 1535869 - DNA, 15 bp, Homo sapiens
gccagcttacaggct

SEQ ID NO: 1535870 - DNA, 15 bp, Homo sapiens
ccagcttacaggctt

SEQ ID NO: 1535871 - DNA, 15 bp, Homo sapiens
cagcttacaggcttt

SEQ ID NO: 1535872 - DNA, 15 bp, Homo sapiens
agcttacaggctttt

SEQ ID NO: 1535873 - DNA, 15 bp, Homo sapiens
gcttacaggcttttt

SEQ ID NO: 1535874 - DNA, 15 bp, Homo sapiens
cttacaggctttttg

SEQ ID NO: 1535875 - DNA, 15 bp, Homo sapiens
ttacaggctttttga

SEQ ID NO: 1535876 - DNA, 15 bp, Homo sapiens
tacaggctttttgat

SEQ ID NO: 1535877 - DNA, 15 bp, Homo sapiens
acaggctttttgatc

SEQ ID NO: 1535878 - DNA, 15 bp, Homo sapiens
caggctttttgatct

SEQ ID NO: 1535879 - DNA, 15 bp, Homo sapiens
aggctttttgatctt

SEQ ID NO: 1535880 - DNA, 15 bp, Homo sapiens
ggctttttgatctta

SEQ ID NO: 1535881 - DNA, 15 bp, Homo sapiens
gctttttgatcttat

SEQ ID NO: 1535882 - DNA, 15 bp, Homo sapiens
ctttttgatcttata

SEQ ID NO: 1535883 - DNA, 15 bp, Homo sapiens
tttttgatcttatag

SEQ ID NO: 1535884 - DNA, 15 bp, Homo sapiens
ttttgatcttataga

SEQ ID NO: 1535885 - DNA, 15 bp, Homo sapiens
tttgatcttatagag

SEQ ID NO: 1535886 - DNA, 15 bp, Homo sapiens
ttgatcttatagagt

SEQ ID NO: 1535887 - DNA, 15 bp, Homo sapiens
tgatcttatagagta

SEQ ID NO: 1535888 - DNA, 15 bp, Homo sapiens
gatcttatagagtag

SEQ ID NO: 1535889 - DNA, 15 bp, Homo sapiens
atcttatagagtagg

SEQ ID NO: 1535890 - DNA, 15 bp, Homo sapiens
tcttatagagtaggt

SEQ ID NO: 1535891 - DNA, 15 bp, Homo sapiens
cttatagagtaggtc

SEQ ID NO: 1535892 - DNA, 15 bp, Homo sapiens
ttatagagtaggtca

SEQ ID NO: 1535893 - DNA, 15 bp, Homo sapiens
tatagagtaggtcag

SEQ ID NO: 1535894 - DNA, 15 bp, Homo sapiens
atagagtaggtcagt

SEQ ID NO: 1535895 - DNA, 15 bp, Homo sapiens
tagagtaggtcagtt

SEQ ID NO: 1535896 - DNA, 15 bp, Homo sapiens
agagtaggtcagtta

SEQ ID NO: 1535897 - DNA, 15 bp, Homo sapiens
gagtaggtcagttat

SEQ ID NO: 1535898 - DNA, 15 bp, Homo sapiens
agtaggtcagttata

SEQ ID NO: 1535899 - DNA, 15 bp, Homo sapiens
gtaggtcagttatat

SEQ ID NO: 1535900 - DNA, 15 bp, Homo sapiens
taggtcagttatatt

SEQ ID NO: 1535901 - DNA, 15 bp, Homo sapiens
aggtcagttatattt

SEQ ID NO: 1535902 - DNA, 15 bp, Homo sapiens
ggtcagttatatttt

SEQ ID NO: 1535903 - DNA, 15 bp, Homo sapiens
gtcagttatattttg

SEQ ID NO: 1535904 - DNA, 15 bp, Homo sapiens
tcagttatattttgc

SEQ ID NO: 1535905 - DNA, 15 bp, Homo sapiens
cagttatattttgcc

SEQ ID NO: 1535906 - DNA, 15 bp, Homo sapiens
agttatattttgccc

SEQ ID NO: 1535907 - DNA, 15 bp, Homo sapiens
gttatattttgcccc

SEQ ID NO: 1535908 - DNA, 15 bp, Homo sapiens
ttatattttgcccca

SEQ ID NO: 1535909 - DNA, 15 bp, Homo sapiens
tatattttgccccat

SEQ ID NO: 1535910 - DNA, 15 bp, Homo sapiens
atattttgccccatt

SEQ ID NO: 1535911 - DNA, 15 bp, Homo sapiens
tattttgccccattt

SEQ ID NO: 1535912 - DNA, 15 bp, Homo sapiens
attttgccccatttc

SEQ ID NO: 1535913 - DNA, 15 bp, Homo sapiens
ttttgccccatttct

SEQ ID NO: 1535914 - DNA, 15 bp, Homo sapiens
tttgccccatttctt

SEQ ID NO: 1535915 - DNA, 15 bp, Homo sapiens
ttgccccatttcttt

SEQ ID NO: 1535916 - DNA, 15 bp, Homo sapiens
tgccccatttctttt

SEQ ID NO: 1535917 - DNA, 15 bp, Homo sapiens
gccccatttctttta

SEQ ID NO: 1535918 - DNA, 15 bp, Homo sapiens
ccccatttcttttat

SEQ ID NO: 1535919 - DNA, 15 bp, Homo sapiens
cccatttcttttatc

SEQ ID NO: 1535920 - DNA, 15 bp, Homo sapiens
ccatttcttttatcc

SEQ ID NO: 1535921 - DNA, 15 bp, Homo sapiens
catttcttttatcct

SEQ ID NO: 1535922 - DNA, 15 bp, Homo sapiens
atttcttttatcctt

SEQ ID NO: 1535923 - DNA, 15 bp, Homo sapiens
tttcttttatccttt

SEQ ID NO: 1535924 - DNA, 15 bp, Homo sapiens
ttcttttatcctttt

SEQ ID NO: 1535925 - DNA, 15 bp, Homo sapiens
tcttttatccttttg

SEQ ID NO: 1535926 - DNA, 15 bp, Homo sapiens
cttttatccttttga

SEQ ID NO: 1535927 - DNA, 15 bp, Homo sapiens
ttttatccttttgat

SEQ ID NO: 1535928 - DNA, 15 bp, Homo sapiens
tttatccttttgatc

SEQ ID NO: 1535929 - DNA, 15 bp, Homo sapiens
ttatccttttgatca

SEQ ID NO: 1535930 - DNA, 15 bp, Homo sapiens
tatccttttgatcac

SEQ ID NO: 1535931 - DNA, 15 bp, Homo sapiens
atccttttgatcact

SEQ ID NO: 1535932 - DNA, 15 bp, Homo sapiens
tccttttgatcactt

SEQ ID NO: 1535933 - DNA, 15 bp, Homo sapiens
ccttttgatcacttc

SEQ ID NO: 1535934 - DNA, 15 bp, Homo sapiens
cttttgatcacttcc

SEQ ID NO: 1535935 - DNA, 15 bp, Homo sapiens
ttttgatcacttcct

SEQ ID NO: 1535936 - DNA, 15 bp, Homo sapiens
tttgatcacttcctc

SEQ ID NO: 1535937 - DNA, 15 bp, Homo sapiens
ttgatcacttcctct

SEQ ID NO: 1535938 - DNA, 15 bp, Homo sapiens
tgatcacttcctctt

SEQ ID NO: 1535939 - DNA, 15 bp, Homo sapiens
gatcacttcctcttg

SEQ ID NO: 1535940 - DNA, 15 bp, Homo sapiens
atcacttcctcttgg

SEQ ID NO: 1535941 - DNA, 15 bp, Homo sapiens
tcacttcctcttggc

SEQ ID NO: 1535942 - DNA, 15 bp, Homo sapiens
cacttcctcttggcc

SEQ ID NO: 1535943 - DNA, 15 bp, Homo sapiens
acttcctcttggccc

SEQ ID NO: 1535944 - DNA, 15 bp, Homo sapiens
cttcctcttggccca

SEQ ID NO: 1535945 - DNA, 15 bp, Homo sapiens
ttcctcttggcccac

SEQ ID NO: 1535946 - DNA, 15 bp, Homo sapiens
tcctcttggcccacc

SEQ ID NO: 1535947 - DNA, 15 bp, Homo sapiens
cctcttggcccacca

SEQ ID NO: 1535948 - DNA, 15 bp, Homo sapiens
ctcttggcccaccat

SEQ ID NO: 1535949 - DNA, 15 bp, Homo sapiens
tcttggcccaccatg

SEQ ID NO: 1535950 - DNA, 15 bp, Homo sapiens
cttggcccaccatgt

SEQ ID NO: 1535951 - DNA, 15 bp, Homo sapiens
ttggcccaccatgta

SEQ ID NO: 1535952 - DNA, 15 bp, Homo sapiens
tggcccaccatgtaa

SEQ ID NO: 1535953 - DNA, 15 bp, Homo sapiens
ggcccaccatgtaaa

SEQ ID NO: 1535954 - DNA, 15 bp, Homo sapiens
gcccaccatgtaaac

SEQ ID NO: 1535955 - DNA, 15 bp, Homo sapiens
cccaccatgtaaact

SEQ ID NO: 1535956 - DNA, 15 bp, Homo sapiens
ccaccatgtaaactc

SEQ ID NO: 1535957 - DNA, 15 bp, Homo sapiens
caccatgtaaactca

SEQ ID NO: 1535958 - DNA, 15 bp, Homo sapiens
accatgtaaactcaa

SEQ ID NO: 1535959 - DNA, 15 bp, Homo sapiens
ccatgtaaactcaag

SEQ ID NO: 1535960 - DNA, 15 bp, Homo sapiens
catgtaaactcaagc

SEQ ID NO: 1535961 - DNA, 15 bp, Homo sapiens
atgtaaactcaagca

SEQ ID NO: 1535962 - DNA, 15 bp, Homo sapiens
tgtaaactcaagcat

SEQ ID NO: 1535963 - DNA, 15 bp, Homo sapiens
gtaaactcaagcatc

SEQ ID NO: 1535964 - DNA, 15 bp, Homo sapiens
taaactcaagcatcc

SEQ ID NO: 1535965 - DNA, 15 bp, Homo sapiens
aaactcaagcatccc

SEQ ID NO: 1535966 - DNA, 15 bp, Homo sapiens
aactcaagcatccct

SEQ ID NO: 1535967 - DNA, 15 bp, Homo sapiens
actcaagcatccctg

SEQ ID NO: 1535968 - DNA, 15 bp, Homo sapiens
ctcaagcatccctgc

SEQ ID NO: 1535969 - DNA, 15 bp, Homo sapiens
tcaagcatccctgct

SEQ ID NO: 1535970 - DNA, 15 bp, Homo sapiens
caagcatccctgctt

SEQ ID NO: 1535971 - DNA, 15 bp, Homo sapiens
aagcatccctgcttc

SEQ ID NO: 1535972 - DNA, 15 bp, Homo sapiens
agcatccctgcttca

SEQ ID NO: 1535973 - DNA, 15 bp, Homo sapiens
gcatccctgcttcat

SEQ ID NO: 1535974 - DNA, 15 bp, Homo sapiens
catccctgcttcatt

SEQ ID NO: 1535975 - DNA, 15 bp, Homo sapiens
atccctgcttcattt

SEQ ID NO: 1535976 - DNA, 15 bp, Homo sapiens
tccctgcttcattta

SEQ ID NO: 1535977 - DNA, 15 bp, Homo sapiens
ccctgcttcatttaa

SEQ ID NO: 1535978 - DNA, 15 bp, Homo sapiens
cctgcttcatttaat

SEQ ID NO: 1535979 - DNA, 15 bp, Homo sapiens
ctgcttcatttaatc

SEQ ID NO: 1535980 - DNA, 15 bp, Homo sapiens
tgcttcatttaatcg

SEQ ID NO: 1535981 - DNA, 15 bp, Homo sapiens
gcttcatttaatcga

SEQ ID NO: 1535982 - DNA, 15 bp, Homo sapiens
cttcatttaatcgag

SEQ ID NO: 1535983 - DNA, 15 bp, Homo sapiens
ttcatttaatcgagc

SEQ ID NO: 1535984 - DNA, 15 bp, Homo sapiens
tcatttaatcgagct

SEQ ID NO: 1535985 - DNA, 15 bp, Homo sapiens
catttaatcgagctg

SEQ ID NO: 1535986 - DNA, 15 bp, Homo sapiens
atttaatcgagctgt

SEQ ID NO: 1535987 - DNA, 15 bp, Homo sapiens
tttaatcgagctgtt

SEQ ID NO: 1535988 - DNA, 15 bp, Homo sapiens
ttaatcgagctgttg

SEQ ID NO: 1535989 - DNA, 15 bp, Homo sapiens
taatcgagctgttgc

SEQ ID NO: 1535990 - DNA, 15 bp, Homo sapiens
aatcgagctgttgct

SEQ ID NO: 1535991 - DNA, 15 bp, Homo sapiens
atcgagctgttgctt

SEQ ID NO: 1535992 - DNA, 15 bp, Homo sapiens
tcgagctgttgcttt

SEQ ID NO: 1535993 - DNA, 15 bp, Homo sapiens
cgagctgttgctttt

SEQ ID NO: 1535994 - DNA, 15 bp, Homo sapiens
gagctgttgcttttt

SEQ ID NO: 1535995 - DNA, 15 bp, Homo sapiens
agctgttgctttttc

SEQ ID NO: 1535996 - DNA, 15 bp, Homo sapiens
gctgttgctttttct

SEQ ID NO: 1535997 - DNA, 15 bp, Homo sapiens
ctgttgctttttcta

SEQ ID NO: 1535998 - DNA, 15 bp, Homo sapiens
tgttgctttttctaa

SEQ ID NO: 1535999 - DNA, 15 bp, Homo sapiens
gttgctttttctaag

SEQ ID NO: 1536000 - DNA, 15 bp, Homo sapiens
ttgctttttctaagc

SEQ ID NO: 1536001 - DNA, 15 bp, Homo sapiens
tgctttttctaagct

SEQ ID NO: 1536002 - DNA, 15 bp, Homo sapiens
gctttttctaagcta

SEQ ID NO: 1536003 - DNA, 15 bp, Homo sapiens
ctttttctaagctac

SEQ ID NO: 1536004 - DNA, 15 bp, Homo sapiens
tttttctaagctacc

SEQ ID NO: 1536005 - DNA, 15 bp, Homo sapiens
ttttctaagctacca

SEQ ID NO: 1536006 - DNA, 15 bp, Homo sapiens
tttctaagctaccaa

SEQ ID NO: 1536007 - DNA, 15 bp, Homo sapiens
ttctaagctaccaag

SEQ ID NO: 1536008 - DNA, 15 bp, Homo sapiens
tctaagctaccaaga

SEQ ID NO: 1536009 - DNA, 15 bp, Homo sapiens
ctaagctaccaagag

SEQ ID NO: 1536010 - DNA, 15 bp, Homo sapiens
taagctaccaagagc

SEQ ID NO: 1536011 - DNA, 15 bp, Homo sapiens
aagctaccaagagca

SEQ ID NO: 1536012 - DNA, 15 bp, Homo sapiens
agctaccaagagcaa

SEQ ID NO: 1536013 - DNA, 15 bp, Homo sapiens
gctaccaagagcaac

SEQ ID NO: 1536014 - DNA, 15 bp, Homo sapiens
ctaccaagagcaacc

SEQ ID NO: 1536015 - DNA, 15 bp, Homo sapiens
taccaagagcaaccc

SEQ ID NO: 1536016 - DNA, 15 bp, Homo sapiens
accaagagcaacccc

SEQ ID NO: 1536017 - DNA, 15 bp, Homo sapiens
ccaagagcaacccca

SEQ ID NO: 1536018 - DNA, 15 bp, Homo sapiens
caagagcaaccccag

SEQ ID NO: 1536019 - DNA, 15 bp, Homo sapiens
aagagcaaccccagc

SEQ ID NO: 1536020 - DNA, 15 bp, Homo sapiens
agagcaaccccagca

SEQ ID NO: 1536021 - DNA, 15 bp, Homo sapiens
gagcaaccccagcaa

SEQ ID NO: 1536022 - DNA, 15 bp, Homo sapiens
agcaaccccagcaat

SEQ ID NO: 1536023 - DNA, 15 bp, Homo sapiens
gcaaccccagcaata

SEQ ID NO: 1536024 - DNA, 15 bp, Homo sapiens
caaccccagcaatat

SEQ ID NO: 1536025 - DNA, 15 bp, Homo sapiens
aaccccagcaatata

SEQ ID NO: 1536026 - DNA, 15 bp, Homo sapiens
accccagcaatatat

SEQ ID NO: 1536027 - DNA, 15 bp, Homo sapiens
ccccagcaatatatc

SEQ ID NO: 1536028 - DNA, 15 bp, Homo sapiens
cccagcaatatatca

SEQ ID NO: 1536029 - DNA, 15 bp, Homo sapiens
ccagcaatatatcag

SEQ ID NO: 1536030 - DNA, 15 bp, Homo sapiens
cagcaatatatcaga

SEQ ID NO: 1536031 - DNA, 15 bp, Homo sapiens
agcaatatatcagag

SEQ ID NO: 1536032 - DNA, 15 bp, Homo sapiens
gcaatatatcagagc

SEQ ID NO: 1536033 - DNA, 15 bp, Homo sapiens
caatatatcagagcc

SEQ ID NO: 1536034 - DNA, 15 bp, Homo sapiens
aatatatcagagccc

SEQ ID NO: 1536035 - DNA, 15 bp, Homo sapiens
atatatcagagccct

SEQ ID NO: 1536036 - DNA, 15 bp, Homo sapiens
tatatcagagccctc

SEQ ID NO: 1536037 - DNA, 15 bp, Homo sapiens
atatcagagccctct

SEQ ID NO: 1536038 - DNA, 15 bp, Homo sapiens
tatcagagccctctc

SEQ ID NO: 1536039 - DNA, 15 bp, Homo sapiens
atcagagccctctct

SEQ ID NO: 1536040 - DNA, 15 bp, Homo sapiens
tcagagccctctctt

SEQ ID NO: 1536041 - DNA, 15 bp, Homo sapiens
cagagccctctcttg

SEQ ID NO: 1536042 - DNA, 15 bp, Homo sapiens
agagccctctcttgg

SEQ ID NO: 1536043 - DNA, 15 bp, Homo sapiens
gagccctctcttggg

SEQ ID NO: 1536044 - DNA, 15 bp, Homo sapiens
agccctctcttggga

SEQ ID NO: 1536045 - DNA, 15 bp, Homo sapiens
gccctctcttgggac

SEQ ID NO: 1536046 - DNA, 15 bp, Homo sapiens
ccctctcttgggacc

SEQ ID NO: 1536047 - DNA, 15 bp, Homo sapiens
cctctcttgggaccc

SEQ ID NO: 1536048 - DNA, 15 bp, Homo sapiens
ctctcttgggaccct

SEQ ID NO: 1536049 - DNA, 15 bp, Homo sapiens
tctcttgggaccctt

SEQ ID NO: 1536050 - DNA, 15 bp, Homo sapiens
ctcttgggacccttg

SEQ ID NO: 1536051 - DNA, 15 bp, Homo sapiens
tcttgggacccttgc

SEQ ID NO: 1536052 - DNA, 15 bp, Homo sapiens
cttgggacccttgct

SEQ ID NO: 1536053 - DNA, 15 bp, Homo sapiens
ttgggacccttgcta

SEQ ID NO: 1536054 - DNA, 15 bp, Homo sapiens
tgggacccttgctag

SEQ ID NO: 1536055 - DNA, 15 bp, Homo sapiens
gggacccttgctagg

SEQ ID NO: 1536056 - DNA, 15 bp, Homo sapiens
ggacccttgctaggg

SEQ ID NO: 1536057 - DNA, 15 bp, Homo sapiens
gacccttgctagggt

SEQ ID NO: 1536058 - DNA, 15 bp, Homo sapiens
acccttgctagggtg

SEQ ID NO: 1536059 - DNA, 15 bp, Homo sapiens
cccttgctagggtgt

SEQ ID NO: 1536060 - DNA, 15 bp, Homo sapiens
ccttgctagggtgtt

SEQ ID NO: 1536061 - DNA, 15 bp, Homo sapiens
cttgctagggtgtta

SEQ ID NO: 1536062 - DNA, 15 bp, Homo sapiens
ttgctagggtgttaa

SEQ ID NO: 1536063 - DNA, 15 bp, Homo sapiens
tgctagggtgttaaa

SEQ ID NO: 1536064 - DNA, 15 bp, Homo sapiens
gctagggtgttaaat

SEQ ID NO: 1536065 - DNA, 15 bp, Homo sapiens
ctagggtgttaaatc

SEQ ID NO: 1536066 - DNA, 15 bp, Homo sapiens
tagggtgttaaatcc

SEQ ID NO: 1536067 - DNA, 15 bp, Homo sapiens
agggtgttaaatcct

SEQ ID NO: 1536068 - DNA, 15 bp, Homo sapiens
gggtgttaaatcctg

SEQ ID NO: 1536069 - DNA, 15 bp, Homo sapiens
ggtgttaaatcctgc

SEQ ID NO: 1536070 - DNA, 15 bp, Homo sapiens
gtgttaaatcctgca

SEQ ID NO: 1536071 - DNA, 15 bp, Homo sapiens
tgttaaatcctgcat

SEQ ID NO: 1536072 - DNA, 15 bp, Homo sapiens
gttaaatcctgcatc

SEQ ID NO: 1536073 - DNA, 15 bp, Homo sapiens
ttaaatcctgcatca

SEQ ID NO: 1536074 - DNA, 15 bp, Homo sapiens
taaatcctgcatcat

SEQ ID NO: 1536075 - DNA, 15 bp, Homo sapiens
aaatcctgcatcata

SEQ ID NO: 1536076 - DNA, 15 bp, Homo sapiens
aatcctgcatcatag

SEQ ID NO: 1536077 - DNA, 15 bp, Homo sapiens
atcctgcatcatagg

SEQ ID NO: 1536078 - DNA, 15 bp, Homo sapiens
tcctgcatcatagga

SEQ ID NO: 1536079 - DNA, 15 bp, Homo sapiens
cctgcatcataggag

SEQ ID NO: 1536080 - DNA, 15 bp, Homo sapiens
ctgcatcataggaga

SEQ ID NO: 1536081 - DNA, 15 bp, Homo sapiens
tgcatcataggagaa

SEQ ID NO: 1536082 - DNA, 15 bp, Homo sapiens
gcatcataggagaat

SEQ ID NO: 1536083 - DNA, 15 bp, Homo sapiens
catcataggagaatg

SEQ ID NO: 1536084 - DNA, 15 bp, Homo sapiens
atcataggagaatgc

SEQ ID NO: 1536085 - DNA, 15 bp, Homo sapiens
tcataggagaatgcc

SEQ ID NO: 1536086 - DNA, 15 bp, Homo sapiens
cataggagaatgccc

SEQ ID NO: 1536087 - DNA, 15 bp, Homo sapiens
ataggagaatgcccc

SEQ ID NO: 1536088 - DNA, 15 bp, Homo sapiens
taggagaatgccccc

SEQ ID NO: 1536089 - DNA, 15 bp, Homo sapiens
aggagaatgccccca

SEQ ID NO: 1536090 - DNA, 15 bp, Homo sapiens
ggagaatgcccccac

SEQ ID NO: 1536091 - DNA, 15 bp, Homo sapiens
gagaatgcccccaca

SEQ ID NO: 1536092 - DNA, 15 bp, Homo sapiens
agaatgcccccacat

SEQ ID NO: 1536093 - DNA, 15 bp, Homo sapiens
gaatgcccccacatc

SEQ ID NO: 1536094 - DNA, 15 bp, Homo sapiens
aatgcccccacatca

SEQ ID NO: 1536095 - DNA, 15 bp, Homo sapiens
atgcccccacatcag

SEQ ID NO: 1536096 - DNA, 15 bp, Homo sapiens
tgcccccacatcagc

SEQ ID NO: 1536097 - DNA, 15 bp, Homo sapiens
gcccccacatcagca

SEQ ID NO: 1536098 - DNA, 15 bp, Homo sapiens
cccccacatcagcaa

SEQ ID NO: 1536099 - DNA, 15 bp, Homo sapiens
ccccacatcagcaaa

SEQ ID NO: 1536100 - DNA, 15 bp, Homo sapiens
cccacatcagcaaag

SEQ ID NO: 1536101 - DNA, 15 bp, Homo sapiens
ccacatcagcaaagt

SEQ ID NO: 1536102 - DNA, 15 bp, Homo sapiens
cacatcagcaaagtc

SEQ ID NO: 1536103 - DNA, 15 bp, Homo sapiens
acatcagcaaagtcc

SEQ ID NO: 1536104 - DNA, 15 bp, Homo sapiens
catcagcaaagtccc

SEQ ID NO: 1536105 - DNA, 15 bp, Homo sapiens
atcagcaaagtcccc

SEQ ID NO: 1536106 - DNA, 15 bp, Homo sapiens
tcagcaaagtcccct

SEQ ID NO: 1536107 - DNA, 15 bp, Homo sapiens
cagcaaagtcccctt

SEQ ID NO: 1536108 - DNA, 15 bp, Homo sapiens
agcaaagtcccctta

SEQ ID NO: 1536109 - DNA, 15 bp, Homo sapiens
gcaaagtccccttat

SEQ ID NO: 1536110 - DNA, 15 bp, Homo sapiens
caaagtccccttatc

SEQ ID NO: 1536111 - DNA, 15 bp, Homo sapiens
aaagtccccttatcc

SEQ ID NO: 1536112 - DNA, 15 bp, Homo sapiens
aagtccccttatcct

SEQ ID NO: 1536113 - DNA, 15 bp, Homo sapiens
agtccccttatcctc

SEQ ID NO: 1536114 - DNA, 15 bp, Homo sapiens
gtccccttatcctct

SEQ ID NO: 1536115 - DNA, 15 bp, Homo sapiens
tccccttatcctctt

SEQ ID NO: 1536116 - DNA, 15 bp, Homo sapiens
ccccttatcctcttg

SEQ ID NO: 1536117 - DNA, 15 bp, Homo sapiens
cccttatcctcttga

SEQ ID NO: 1536118 - DNA, 15 bp, Homo sapiens
ccttatcctcttgat

SEQ ID NO: 1536119 - DNA, 15 bp, Homo sapiens
cttatcctcttgata

SEQ ID NO: 1536120 - DNA, 15 bp, Homo sapiens
ttatcctcttgatat

SEQ ID NO: 1536121 - DNA, 15 bp, Homo sapiens
tatcctcttgatatc

SEQ ID NO: 1536122 - DNA, 15 bp, Homo sapiens
atcctcttgatatcc

SEQ ID NO: 1536123 - DNA, 15 bp, Homo sapiens
tcctcttgatatccc

SEQ ID NO: 1536124 - DNA, 15 bp, Homo sapiens
cctcttgatatccca

SEQ ID NO: 1536125 - DNA, 15 bp, Homo sapiens
ctcttgatatcccac

SEQ ID NO: 1536126 - DNA, 15 bp, Homo sapiens
tcttgatatcccacc

SEQ ID NO: 1536127 - DNA, 15 bp, Homo sapiens
cttgatatcccacct

SEQ ID NO: 1536128 - DNA, 15 bp, Homo sapiens
ttgatatcccacctg

SEQ ID NO: 1536129 - DNA, 15 bp, Homo sapiens
tgatatcccacctgc

SEQ ID NO: 1536130 - DNA, 15 bp, Homo sapiens
gatatcccacctgcc

SEQ ID NO: 1536131 - DNA, 15 bp, Homo sapiens
atatcccacctgccc

SEQ ID NO: 1536132 - DNA, 15 bp, Homo sapiens
tatcccacctgcccc

SEQ ID NO: 1536133 - DNA, 15 bp, Homo sapiens
atcccacctgcccca

SEQ ID NO: 1536134 - DNA, 15 bp, Homo sapiens
tcccacctgccccag

SEQ ID NO: 1536135 - DNA, 15 bp, Homo sapiens
cccacctgccccagt

SEQ ID NO: 1536136 - DNA, 15 bp, Homo sapiens
ccacctgccccagtc

SEQ ID NO: 1536137 - DNA, 15 bp, Homo sapiens
cacctgccccagtcc

SEQ ID NO: 1536138 - DNA, 15 bp, Homo sapiens
acctgccccagtcca

SEQ ID NO: 1536139 - DNA, 15 bp, Homo sapiens
cctgccccagtccag

SEQ ID NO: 1536140 - DNA, 15 bp, Homo sapiens
ctgccccagtccagc

SEQ ID NO: 1536141 - DNA, 15 bp, Homo sapiens
tgccccagtccagca

SEQ ID NO: 1536142 - DNA, 15 bp, Homo sapiens
gccccagtccagcac

SEQ ID NO: 1536143 - DNA, 15 bp, Homo sapiens
ccccagtccagcacc

SEQ ID NO: 1536144 - DNA, 15 bp, Homo sapiens
cccagtccagcacct

SEQ ID NO: 1536145 - DNA, 15 bp, Homo sapiens
ccagtccagcacctt

SEQ ID NO: 1536146 - DNA, 15 bp, Homo sapiens
cagtccagcaccttc

SEQ ID NO: 1536147 - DNA, 15 bp, Homo sapiens
agtccagcaccttca

SEQ ID NO: 1536148 - DNA, 15 bp, Homo sapiens
gtccagcaccttcag

SEQ ID NO: 1536149 - DNA, 15 bp, Homo sapiens
tccagcaccttcagg

SEQ ID NO: 1536150 - DNA, 15 bp, Homo sapiens
ccagcaccttcagga

SEQ ID NO: 1536151 - DNA, 15 bp, Homo sapiens
cagcaccttcaggat

SEQ ID NO: 1536152 - DNA, 15 bp, Homo sapiens
agcaccttcaggatc

SEQ ID NO: 1536153 - DNA, 15 bp, Homo sapiens
gcaccttcaggatct

SEQ ID NO: 1536154 - DNA, 15 bp, Homo sapiens
caccttcaggatctg

SEQ ID NO: 1536155 - DNA, 15 bp, Homo sapiens
accttcaggatctgg

SEQ ID NO: 1536156 - DNA, 15 bp, Homo sapiens
ccttcaggatctggt

SEQ ID NO: 1536157 - DNA, 15 bp, Homo sapiens
cttcaggatctggtc

SEQ ID NO: 1536158 - DNA, 15 bp, Homo sapiens
ttcaggatctggtct

SEQ ID NO: 1536159 - DNA, 15 bp, Homo sapiens
tcaggatctggtctc

SEQ ID NO: 1536160 - DNA, 15 bp, Homo sapiens
caggatctggtctca

SEQ ID NO: 1536161 - DNA, 15 bp, Homo sapiens
aggatctggtctcaa

SEQ ID NO: 1536162 - DNA, 15 bp, Homo sapiens
ggatctggtctcaat

SEQ ID NO: 1536163 - DNA, 15 bp, Homo sapiens
gatctggtctcaatc

SEQ ID NO: 1536164 - DNA, 15 bp, Homo sapiens
atctggtctcaatca

SEQ ID NO: 1536165 - DNA, 15 bp, Homo sapiens
tctggtctcaatcac

SEQ ID NO: 1536166 - DNA, 15 bp, Homo sapiens
ctggtctcaatcaca

SEQ ID NO: 1536167 - DNA, 15 bp, Homo sapiens
tggtctcaatcacag

SEQ ID NO: 1536168 - DNA, 15 bp, Homo sapiens
ggtctcaatcacagg

SEQ ID NO: 1536169 - DNA, 15 bp, Homo sapiens
gtctcaatcacagga

SEQ ID NO: 1536170 - DNA, 15 bp, Homo sapiens
tctcaatcacaggat

SEQ ID NO: 1536171 - DNA, 15 bp, Homo sapiens
ctcaatcacaggatc

SEQ ID NO: 1536172 - DNA, 15 bp, Homo sapiens
tcaatcacaggatcc

SEQ ID NO: 1536173 - DNA, 15 bp, Homo sapiens
caatcacaggatcca

SEQ ID NO: 1536174 - DNA, 15 bp, Homo sapiens
aatcacaggatccag

SEQ ID NO: 1536175 - DNA, 15 bp, Homo sapiens
atcacaggatccagc

SEQ ID NO: 1536176 - DNA, 15 bp, Homo sapiens
tcacaggatccagca

SEQ ID NO: 1536177 - DNA, 15 bp, Homo sapiens
cacaggatccagcac

SEQ ID NO: 1536178 - DNA, 15 bp, Homo sapiens
acaggatccagcacc

SEQ ID NO: 1536179 - DNA, 15 bp, Homo sapiens
caggatccagcacct

SEQ ID NO: 1536180 - DNA, 15 bp, Homo sapiens
aggatccagcacctt

SEQ ID NO: 1536181 - DNA, 15 bp, Homo sapiens
ggatccagcaccttt

SEQ ID NO: 1536182 - DNA, 15 bp, Homo sapiens
gatccagcacctttg

SEQ ID NO: 1536183 - DNA, 15 bp, Homo sapiens
atccagcacctttgg

SEQ ID NO: 1536184 - DNA, 15 bp, Homo sapiens
tccagcacctttggg

SEQ ID NO: 1536185 - DNA, 15 bp, Homo sapiens
ccagcacctttggga

SEQ ID NO: 1536186 - DNA, 15 bp, Homo sapiens
cagcacctttgggac

SEQ ID NO: 1536187 - DNA, 15 bp, Homo sapiens
agcacctttgggact

SEQ ID NO: 1536188 - DNA, 15 bp, Homo sapiens
gcacctttgggactg

SEQ ID NO: 1536189 - DNA, 15 bp, Homo sapiens
cacctttgggactgt

SEQ ID NO: 1536190 - DNA, 15 bp, Homo sapiens
acctttgggactgtt

SEQ ID NO: 1536191 - DNA, 15 bp, Homo sapiens
cctttgggactgttg

SEQ ID NO: 1536192 - DNA, 15 bp, Homo sapiens
ctttgggactgttgc

SEQ ID NO: 1536193 - DNA, 15 bp, Homo sapiens
tttgggactgttgca

SEQ ID NO: 1536194 - DNA, 15 bp, Homo sapiens
ttgggactgttgcaa

SEQ ID NO: 1536195 - DNA, 15 bp, Homo sapiens
tgggactgttgcaag

SEQ ID NO: 1536196 - DNA, 15 bp, Homo sapiens
gggactgttgcaagc

SEQ ID NO: 1536197 - DNA, 15 bp, Homo sapiens
ggactgttgcaagca

SEQ ID NO: 1536198 - DNA, 15 bp, Homo sapiens
gactgttgcaagcat

SEQ ID NO: 1536199 - DNA, 15 bp, Homo sapiens
actgttgcaagcata

SEQ ID NO: 1536200 - DNA, 15 bp, Homo sapiens
ctgttgcaagcataa

SEQ ID NO: 1536201 - DNA, 15 bp, Homo sapiens
tgttgcaagcataag

SEQ ID NO: 1536202 - DNA, 15 bp, Homo sapiens
gttgcaagcataaga

SEQ ID NO: 1536203 - DNA, 15 bp, Homo sapiens
ttgcaagcataagat

SEQ ID NO: 1536204 - DNA, 15 bp, Homo sapiens
tgcaagcataagatc

SEQ ID NO: 1536205 - DNA, 15 bp, Homo sapiens
gcaagcataagatcc

SEQ ID NO: 1536206 - DNA, 15 bp, Homo sapiens
caagcataagatcca

SEQ ID NO: 1536207 - DNA, 15 bp, Homo sapiens
aagcataagatccag

SEQ ID NO: 1536208 - DNA, 15 bp, Homo sapiens
agcataagatccagc

SEQ ID NO: 1536209 - DNA, 15 bp, Homo sapiens
gcataagatccagca

SEQ ID NO: 1536210 - DNA, 15 bp, Homo sapiens
cataagatccagcac

SEQ ID NO: 1536211 - DNA, 15 bp, Homo sapiens
ataagatccagcact

SEQ ID NO: 1536212 - DNA, 15 bp, Homo sapiens
taagatccagcactt

SEQ ID NO: 1536213 - DNA, 15 bp, Homo sapiens
aagatccagcacttt

SEQ ID NO: 1536214 - DNA, 15 bp, Homo sapiens
agatccagcactttt

SEQ ID NO: 1536215 - DNA, 15 bp, Homo sapiens
gatccagcacttttg

SEQ ID NO: 1536216 - DNA, 15 bp, Homo sapiens
atccagcacttttgg

SEQ ID NO: 1536217 - DNA, 15 bp, Homo sapiens
tccagcacttttggg

SEQ ID NO: 1536218 - DNA, 15 bp, Homo sapiens
ccagcacttttggga

SEQ ID NO: 1536219 - DNA, 15 bp, Homo sapiens
cagcacttttgggat

SEQ ID NO: 1536220 - DNA, 15 bp, Homo sapiens
agcacttttgggatc

SEQ ID NO: 1536221 - DNA, 15 bp, Homo sapiens
gcacttttgggatct

SEQ ID NO: 1536222 - DNA, 15 bp, Homo sapiens
cacttttgggatcta

SEQ ID NO: 1536223 - DNA, 15 bp, Homo sapiens
acttttgggatctag

SEQ ID NO: 1536224 - DNA, 15 bp, Homo sapiens
cttttgggatctagt

SEQ ID NO: 1536225 - DNA, 15 bp, Homo sapiens
ttttgggatctagtc

SEQ ID NO: 1536226 - DNA, 15 bp, Homo sapiens
tttgggatctagtct

SEQ ID NO: 1536227 - DNA, 15 bp, Homo sapiens
ttgggatctagtctc

SEQ ID NO: 1536228 - DNA, 15 bp, Homo sapiens
tgggatctagtctcc

SEQ ID NO: 1536229 - DNA, 15 bp, Homo sapiens
gggatctagtctccc

SEQ ID NO: 1536230 - DNA, 15 bp, Homo sapiens
ggatctagtctccca

SEQ ID NO: 1536231 - DNA, 15 bp, Homo sapiens
gatctagtctcccac

SEQ ID NO: 1536232 - DNA, 15 bp, Homo sapiens
atctagtctcccact

SEQ ID NO: 1536233 - DNA, 15 bp, Homo sapiens
tctagtctcccactt

SEQ ID NO: 1536234 - DNA, 15 bp, Homo sapiens
ctagtctcccacttc

SEQ ID NO: 1536235 - DNA, 15 bp, Homo sapiens
tagtctcccacttcc

SEQ ID NO: 1536236 - DNA, 15 bp, Homo sapiens
agtctcccacttcct

SEQ ID NO: 1536237 - DNA, 15 bp, Homo sapiens
gtctcccacttcctg

SEQ ID NO: 1536238 - DNA, 15 bp, Homo sapiens
tctcccacttcctgc

SEQ ID NO: 1536239 - DNA, 15 bp, Homo sapiens
ctcccacttcctgct

SEQ ID NO: 1536240 - DNA, 15 bp, Homo sapiens
tcccacttcctgcta

SEQ ID NO: 1536241 - DNA, 15 bp, Homo sapiens
cccacttcctgctag

SEQ ID NO: 1536242 - DNA, 15 bp, Homo sapiens
ccacttcctgctagt

SEQ ID NO: 1536243 - DNA, 15 bp, Homo sapiens
cacttcctgctagta

SEQ ID NO: 1536244 - DNA, 15 bp, Homo sapiens
acttcctgctagtac

SEQ ID NO: 1536245 - DNA, 15 bp, Homo sapiens
cttcctgctagtact

SEQ ID NO: 1536246 - DNA, 15 bp, Homo sapiens
ttcctgctagtactt

SEQ ID NO: 1536247 - DNA, 15 bp, Homo sapiens
tcctgctagtacttg

SEQ ID NO: 1536248 - DNA, 15 bp, Homo sapiens
cctgctagtacttgt

SEQ ID NO: 1536249 - DNA, 15 bp, Homo sapiens
ctgctagtacttgtt

SEQ ID NO: 1536250 - DNA, 15 bp, Homo sapiens
tgctagtacttgtta

SEQ ID NO: 1536251 - DNA, 15 bp, Homo sapiens
gctagtacttgttag

SEQ ID NO: 1536252 - DNA, 15 bp, Homo sapiens
ctagtacttgttagc

SEQ ID NO: 1536253 - DNA, 15 bp, Homo sapiens
tagtacttgttagcc

SEQ ID NO: 1536254 - DNA, 15 bp, Homo sapiens
agtacttgttagcca

SEQ ID NO: 1536255 - DNA, 15 bp, Homo sapiens
gtacttgttagccaa

SEQ ID NO: 1536256 - DNA, 15 bp, Homo sapiens
tacttgttagccaaa

SEQ ID NO: 1536257 - DNA, 15 bp, Homo sapiens
acttgttagccaaag

SEQ ID NO: 1536258 - DNA, 15 bp, Homo sapiens
cttgttagccaaaga

SEQ ID NO: 1536259 - DNA, 15 bp, Homo sapiens
ttgttagccaaagac

SEQ ID NO: 1536260 - DNA, 15 bp, Homo sapiens
tgttagccaaagact

SEQ ID NO: 1536261 - DNA, 15 bp, Homo sapiens
gttagccaaagactg

SEQ ID NO: 1536262 - DNA, 15 bp, Homo sapiens
ttagccaaagactga

SEQ ID NO: 1536263 - DNA, 15 bp, Homo sapiens
tagccaaagactgag

SEQ ID NO: 1536264 - DNA, 15 bp, Homo sapiens
agccaaagactgagt

SEQ ID NO: 1536265 - DNA, 15 bp, Homo sapiens
gccaaagactgagtt

SEQ ID NO: 1536266 - DNA, 15 bp, Homo sapiens
ccaaagactgagttc

SEQ ID NO: 1536267 - DNA, 15 bp, Homo sapiens
caaagactgagttcc

SEQ ID NO: 1536268 - DNA, 15 bp, Homo sapiens
aaagactgagttcct

SEQ ID NO: 1536269 - DNA, 15 bp, Homo sapiens
aagactgagttcctt

SEQ ID NO: 1536270 - DNA, 15 bp, Homo sapiens
agactgagttccttt

SEQ ID NO: 1536271 - DNA, 15 bp, Homo sapiens
gactgagttcctttg

SEQ ID NO: 1536272 - DNA, 15 bp, Homo sapiens
actgagttcctttgg

SEQ ID NO: 1536273 - DNA, 15 bp, Homo sapiens
ctgagttcctttggc

SEQ ID NO: 1536274 - DNA, 15 bp, Homo sapiens
tgagttcctttggca

SEQ ID NO: 1536275 - DNA, 15 bp, Homo sapiens
gagttcctttggcat

SEQ ID NO: 1536276 - DNA, 15 bp, Homo sapiens
agttcctttggcata

SEQ ID NO: 1536277 - DNA, 15 bp, Homo sapiens
gttcctttggcatac

SEQ ID NO: 1536278 - DNA, 15 bp, Homo sapiens
ttcctttggcataca

SEQ ID NO: 1536279 - DNA, 15 bp, Homo sapiens
tcctttggcatacaa

SEQ ID NO: 1536280 - DNA, 15 bp, Homo sapiens
cctttggcatacaat

SEQ ID NO: 1536281 - DNA, 15 bp, Homo sapiens
ctttggcatacaatt

SEQ ID NO: 1536282 - DNA, 15 bp, Homo sapiens
tttggcatacaattt

SEQ ID NO: 1536283 - DNA, 15 bp, Homo sapiens
ttggcatacaatttt

SEQ ID NO: 1536284 - DNA, 15 bp, Homo sapiens
tggcatacaattttt

SEQ ID NO: 1536285 - DNA, 15 bp, Homo sapiens
ggcatacaatttttt

SEQ ID NO: 1536286 - DNA, 15 bp, Homo sapiens
gcatacaattttttt

SEQ ID NO: 1536287 - DNA, 15 bp, Homo sapiens
catacaatttttttc

SEQ ID NO: 1536288 - DNA, 15 bp, Homo sapiens
atacaatttttttct

SEQ ID NO: 1536289 - DNA, 15 bp, Homo sapiens
tacaatttttttctt

SEQ ID NO: 1536290 - DNA, 15 bp, Homo sapiens
acaatttttttcttc

SEQ ID NO: 1536291 - DNA, 15 bp, Homo sapiens
tttttttcttcttcc

SEQ ID NO: 1536292 - DNA, 15 bp, Homo sapiens
ttttttcttcttcct

SEQ ID NO: 1536293 - DNA, 15 bp, Homo sapiens
ttttcttcttccttg

SEQ ID NO: 1536294 - DNA, 15 bp, Homo sapiens
tttcttcttccttga

SEQ ID NO: 1536295 - DNA, 15 bp, Homo sapiens
ttcttcttccttgac

SEQ ID NO: 1536296 - DNA, 15 bp, Homo sapiens
tcttcttccttgaca

SEQ ID NO: 1536297 - DNA, 15 bp, Homo sapiens
cttcttccttgacag

SEQ ID NO: 1536298 - DNA, 15 bp, Homo sapiens
ttcttccttgacagg

SEQ ID NO: 1536299 - DNA, 15 bp, Homo sapiens
tcttccttgacaggt

SEQ ID NO: 1536300 - DNA, 15 bp, Homo sapiens
cttccttgacaggtc

SEQ ID NO: 1536301 - DNA, 15 bp, Homo sapiens
ttccttgacaggtcc

SEQ ID NO: 1536302 - DNA, 15 bp, Homo sapiens
tccttgacaggtcca

SEQ ID NO: 1536303 - DNA, 15 bp, Homo sapiens
ccttgacaggtccaa

SEQ ID NO: 1536304 - DNA, 15 bp, Homo sapiens
cttgacaggtccaag

SEQ ID NO: 1536305 - DNA, 15 bp, Homo sapiens
ttgacaggtccaagt

SEQ ID NO: 1536306 - DNA, 15 bp, Homo sapiens
tgacaggtccaagtt

SEQ ID NO: 1536307 - DNA, 15 bp, Homo sapiens
gacaggtccaagttg

SEQ ID NO: 1536308 - DNA, 15 bp, Homo sapiens
acaggtccaagttgg

SEQ ID NO: 1536309 - DNA, 15 bp, Homo sapiens
caggtccaagttggg

SEQ ID NO: 1536310 - DNA, 15 bp, Homo sapiens
aggtccaagttgggc

SEQ ID NO: 1536311 - DNA, 15 bp, Homo sapiens
ggtccaagttgggcc

SEQ ID NO: 1536312 - DNA, 15 bp, Homo sapiens
gtccaagttgggcca

SEQ ID NO: 1536313 - DNA, 15 bp, Homo sapiens
tccaagttgggccat

SEQ ID NO: 1536314 - DNA, 15 bp, Homo sapiens
ccaagttgggccatg

SEQ ID NO: 1536315 - DNA, 15 bp, Homo sapiens
caagttgggccatgc

SEQ ID NO: 1536316 - DNA, 15 bp, Homo sapiens
aagttgggccatgct

SEQ ID NO: 1536317 - DNA, 15 bp, Homo sapiens
agttgggccatgctg

SEQ ID NO: 1536318 - DNA, 15 bp, Homo sapiens
gttgggccatgctga

SEQ ID NO: 1536319 - DNA, 15 bp, Homo sapiens
ttgggccatgctgag

SEQ ID NO: 1536320 - DNA, 15 bp, Homo sapiens
tgggccatgctgaga

SEQ ID NO: 1536321 - DNA, 15 bp, Homo sapiens
gggccatgctgagat

SEQ ID NO: 1536322 - DNA, 15 bp, Homo sapiens
ggccatgctgagatt

SEQ ID NO: 1536323 - DNA, 15 bp, Homo sapiens
gccatgctgagattt

SEQ ID NO: 1536324 - DNA, 15 bp, Homo sapiens
ccatgctgagatttg

SEQ ID NO: 1536325 - DNA, 15 bp, Homo sapiens
catgctgagatttga

SEQ ID NO: 1536326 - DNA, 15 bp, Homo sapiens
atgctgagatttgac

SEQ ID NO: 1536327 - DNA, 15 bp, Homo sapiens
tgctgagatttgacc

SEQ ID NO: 1536328 - DNA, 15 bp, Homo sapiens
gctgagatttgaccc

SEQ ID NO: 1536329 - DNA, 15 bp, Homo sapiens
ctgagatttgaccct

SEQ ID NO: 1536330 - DNA, 15 bp, Homo sapiens
tgagatttgaccctc

SEQ ID NO: 1536331 - DNA, 15 bp, Homo sapiens
gagatttgaccctcc

SEQ ID NO: 1536332 - DNA, 15 bp, Homo sapiens
agatttgaccctcct

SEQ ID NO: 1536333 - DNA, 15 bp, Homo sapiens
gatttgaccctcctt

SEQ ID NO: 1536334 - DNA, 15 bp, Homo sapiens
atttgaccctccttg

SEQ ID NO: 1536335 - DNA, 15 bp, Homo sapiens
tttgaccctccttgt

SEQ ID NO: 1536336 - DNA, 15 bp, Homo sapiens
ttgaccctccttgtg

SEQ ID NO: 1536337 - DNA, 15 bp, Homo sapiens
tgaccctccttgtgg

SEQ ID NO: 1536338 - DNA, 15 bp, Homo sapiens
gaccctccttgtggc

SEQ ID NO: 1536339 - DNA, 15 bp, Homo sapiens
accctccttgtggcc

SEQ ID NO: 1536340 - DNA, 15 bp, Homo sapiens
ccctccttgtggcca

SEQ ID NO: 1536341 - DNA, 15 bp, Homo sapiens
cctccttgtggccag

SEQ ID NO: 1536342 - DNA, 15 bp, Homo sapiens
ctccttgtggccagg

SEQ ID NO: 1536343 - DNA, 15 bp, Homo sapiens
tccttgtggccagga

SEQ ID NO: 1536344 - DNA, 15 bp, Homo sapiens
ccttgtggccaggag

SEQ ID NO: 1536345 - DNA, 15 bp, Homo sapiens
cttgtggccaggagg

SEQ ID NO: 1536346 - DNA, 15 bp, Homo sapiens
ttgtggccaggaggg

SEQ ID NO: 1536347 - DNA, 15 bp, Homo sapiens
tgtggccaggagggg

SEQ ID NO: 1536348 - DNA, 15 bp, Homo sapiens
gtggccaggagggga

SEQ ID NO: 1536349 - DNA, 15 bp, Homo sapiens
tggccaggaggggag

SEQ ID NO: 1536350 - DNA, 15 bp, Homo sapiens
ggccaggaggggagg

SEQ ID NO: 1536351 - DNA, 15 bp, Homo sapiens
gccaggaggggaggt

SEQ ID NO: 1536352 - DNA, 15 bp, Homo sapiens
ccaggaggggaggta

SEQ ID NO: 1536353 - DNA, 15 bp, Homo sapiens
caggaggggaggtag

SEQ ID NO: 1536354 - DNA, 15 bp, Homo sapiens
aggaggggaggtagg

SEQ ID NO: 1536355 - DNA, 15 bp, Homo sapiens
ggaggggaggtaggg

SEQ ID NO: 1536356 - DNA, 15 bp, Homo sapiens
gaggggaggtagggg

SEQ ID NO: 1536357 - DNA, 15 bp, Homo sapiens
aggggaggtaggggc

SEQ ID NO: 1536358 - DNA, 15 bp, Homo sapiens
ggggaggtaggggcc

SEQ ID NO: 1536359 - DNA, 15 bp, Homo sapiens
gggaggtaggggccg

SEQ ID NO: 1536360 - DNA, 15 bp, Homo sapiens
ggaggtaggggccga

SEQ ID NO: 1536361 - DNA, 15 bp, Homo sapiens
gaggtaggggccgat

SEQ ID NO: 1536362 - DNA, 15 bp, Homo sapiens
aggtaggggccgatc

SEQ ID NO: 1536363 - DNA, 15 bp, Homo sapiens
ggtaggggccgatcc

SEQ ID NO: 1536364 - DNA, 15 bp, Homo sapiens
gtaggggccgatcct

SEQ ID NO: 1536365 - DNA, 15 bp, Homo sapiens
taggggccgatcctg

SEQ ID NO: 1536366 - DNA, 15 bp, Homo sapiens
aggggccgatcctga

SEQ ID NO: 1536367 - DNA, 15 bp, Homo sapiens
ggggccgatcctgag

SEQ ID NO: 1536368 - DNA, 15 bp, Homo sapiens
gggccgatcctgagg

SEQ ID NO: 1536369 - DNA, 15 bp, Homo sapiens
ggccgatcctgagga

SEQ ID NO: 1536370 - DNA, 15 bp, Homo sapiens
gccgatcctgaggaa

SEQ ID NO: 1536371 - DNA, 15 bp, Homo sapiens
ccgatcctgaggaag

SEQ ID NO: 1536372 - DNA, 15 bp, Homo sapiens
cgatcctgaggaagg

SEQ ID NO: 1536373 - DNA, 15 bp, Homo sapiens
gatcctgaggaaggc

SEQ ID NO: 1536374 - DNA, 15 bp, Homo sapiens
atcctgaggaaggca

SEQ ID NO: 1536375 - DNA, 15 bp, Homo sapiens
tcctgaggaaggcac

SEQ ID NO: 1536376 - DNA, 15 bp, Homo sapiens
cctgaggaaggcact

SEQ ID NO: 1536377 - DNA, 15 bp, Homo sapiens
ctgaggaaggcactc

SEQ ID NO: 1536378 - DNA, 15 bp, Homo sapiens
tgaggaaggcactca

SEQ ID NO: 1536379 - DNA, 15 bp, Homo sapiens
gaggaaggcactcat

SEQ ID NO: 1536380 - DNA, 15 bp, Homo sapiens
aggaaggcactcatt

SEQ ID NO: 1536381 - DNA, 15 bp, Homo sapiens
ggaaggcactcattt

SEQ ID NO: 1536382 - DNA, 15 bp, Homo sapiens
gaaggcactcatttt

SEQ ID NO: 1536383 - DNA, 15 bp, Homo sapiens
aaggcactcattttc

SEQ ID NO: 1536384 - DNA, 15 bp, Homo sapiens
aggcactcattttct

SEQ ID NO: 1536385 - DNA, 15 bp, Homo sapiens
ggcactcattttctc

SEQ ID NO: 1536386 - DNA, 15 bp, Homo sapiens
gcactcattttctcc

SEQ ID NO: 1536387 - DNA, 15 bp, Homo sapiens
cactcattttctcct

SEQ ID NO: 1536388 - DNA, 15 bp, Homo sapiens
actcattttctcctg

SEQ ID NO: 1536389 - DNA, 15 bp, Homo sapiens
ctcattttctcctgg

SEQ ID NO: 1536390 - DNA, 15 bp, Homo sapiens
tcattttctcctggg

SEQ ID NO: 1536391 - DNA, 15 bp, Homo sapiens
cattttctcctgggg

SEQ ID NO: 1536392 - DNA, 15 bp, Homo sapiens
attttctcctggggc

SEQ ID NO: 1536393 - DNA, 15 bp, Homo sapiens
ttttctcctggggca

SEQ ID NO: 1536394 - DNA, 15 bp, Homo sapiens
tttctcctggggcac

SEQ ID NO: 1536395 - DNA, 15 bp, Homo sapiens
ttctcctggggcact

SEQ ID NO: 1536396 - DNA, 15 bp, Homo sapiens
tctcctggggcactt

SEQ ID NO: 1536397 - DNA, 15 bp, Homo sapiens
ctcctggggcacttg

SEQ ID NO: 1536398 - DNA, 15 bp, Homo sapiens
tcctggggcacttgt

SEQ ID NO: 1536399 - DNA, 15 bp, Homo sapiens
cctggggcacttgtc

SEQ ID NO: 1536400 - DNA, 15 bp, Homo sapiens
ctggggcacttgtct

SEQ ID NO: 1536401 - DNA, 15 bp, Homo sapiens
tggggcacttgtctc

SEQ ID NO: 1536402 - DNA, 15 bp, Homo sapiens
ggggcacttgtctct

SEQ ID NO: 1536403 - DNA, 15 bp, Homo sapiens
gggcacttgtctctt

SEQ ID NO: 1536404 - DNA, 15 bp, Homo sapiens
ggcacttgtctcttt

SEQ ID NO: 1536405 - DNA, 15 bp, Homo sapiens
gcacttgtctctttc

SEQ ID NO: 1536406 - DNA, 15 bp, Homo sapiens
cacttgtctctttca

SEQ ID NO: 1536407 - DNA, 15 bp, Homo sapiens
acttgtctctttcag

SEQ ID NO: 1536408 - DNA, 15 bp, Homo sapiens
cttgtctctttcaga

SEQ ID NO: 1536409 - DNA, 15 bp, Homo sapiens
ttgtctctttcagac

SEQ ID NO: 1536410 - DNA, 15 bp, Homo sapiens
tgtctctttcagaca

SEQ ID NO: 1536411 - DNA, 15 bp, Homo sapiens
gtctctttcagacat

SEQ ID NO: 1536412 - DNA, 15 bp, Homo sapiens
tctctttcagacatc

SEQ ID NO: 1536413 - DNA, 15 bp, Homo sapiens
ctctttcagacatct

SEQ ID NO: 1536414 - DNA, 15 bp, Homo sapiens
tctttcagacatctg

SEQ ID NO: 1536415 - DNA, 15 bp, Homo sapiens
ctttcagacatctgc

SEQ ID NO: 1536416 - DNA, 15 bp, Homo sapiens
tttcagacatctgca

SEQ ID NO: 1536417 - DNA, 15 bp, Homo sapiens
ttcagacatctgcat

SEQ ID NO: 1536418 - DNA, 15 bp, Homo sapiens
tcagacatctgcata

SEQ ID NO: 1536419 - DNA, 15 bp, Homo sapiens
cagacatctgcatac

SEQ ID NO: 1536420 - DNA, 15 bp, Homo sapiens
agacatctgcatact

SEQ ID NO: 1536421 - DNA, 15 bp, Homo sapiens
gacatctgcatactt

SEQ ID NO: 1536422 - DNA, 15 bp, Homo sapiens
acatctgcatacttt

SEQ ID NO: 1536423 - DNA, 15 bp, Homo sapiens
catctgcatactttt

SEQ ID NO: 1536424 - DNA, 15 bp, Homo sapiens
atctgcatacttttc

SEQ ID NO: 1536425 - DNA, 15 bp, Homo sapiens
tctgcatacttttca

SEQ ID NO: 1536426 - DNA, 15 bp, Homo sapiens
ctgcatacttttcaa

SEQ ID NO: 1536427 - DNA, 15 bp, Homo sapiens
tgcatacttttcaag

SEQ ID NO: 1536428 - DNA, 15 bp, Homo sapiens
gcatacttttcaaga

SEQ ID NO: 1536429 - DNA, 15 bp, Homo sapiens
catacttttcaagag

SEQ ID NO: 1536430 - DNA, 15 bp, Homo sapiens
atacttttcaagaga

SEQ ID NO: 1536431 - DNA, 15 bp, Homo sapiens
tacttttcaagagag

SEQ ID NO: 1536432 - DNA, 15 bp, Homo sapiens
acttttcaagagaga

SEQ ID NO: 1536433 - DNA, 15 bp, Homo sapiens
cttttcaagagagaa

SEQ ID NO: 1536434 - DNA, 15 bp, Homo sapiens
ttttcaagagagaaa

SEQ ID NO: 1536435 - DNA, 15 bp, Homo sapiens
tttcaagagagaaaa

SEQ ID NO: 1536436 - DNA, 15 bp, Homo sapiens
ttcaagagagaaaag

SEQ ID NO: 1536437 - DNA, 15 bp, Homo sapiens
tcaagagagaaaagg

SEQ ID NO: 1536438 - DNA, 15 bp, Homo sapiens
caagagagaaaaggc

SEQ ID NO: 1536439 - DNA, 15 bp, Homo sapiens
aagagagaaaaggcc

SEQ ID NO: 1536440 - DNA, 15 bp, Homo sapiens
agagagaaaaggcct

SEQ ID NO: 1536441 - DNA, 15 bp, Homo sapiens
gagagaaaaggcctc

SEQ ID NO: 1536442 - DNA, 15 bp, Homo sapiens
agagaaaaggcctcc

SEQ ID NO: 1536443 - DNA, 15 bp, Homo sapiens
gagaaaaggcctcct

SEQ ID NO: 1536444 - DNA, 15 bp, Homo sapiens
agaaaaggcctcctt

SEQ ID NO: 1536445 - DNA, 15 bp, Homo sapiens
gaaaaggcctccttc

SEQ ID NO: 1536446 - DNA, 15 bp, Homo sapiens
aaaaggcctccttct

SEQ ID NO: 1536447 - DNA, 15 bp, Homo sapiens
aaaggcctccttctc

SEQ ID NO: 1536448 - DNA, 15 bp, Homo sapiens
aaggcctccttctca

SEQ ID NO: 1536449 - DNA, 15 bp, Homo sapiens
aggcctccttctcac

SEQ ID NO: 1536450 - DNA, 15 bp, Homo sapiens
ggcctccttctcaca

SEQ ID NO: 1536451 - DNA, 15 bp, Homo sapiens
gcctccttctcacag

SEQ ID NO: 1536452 - DNA, 15 bp, Homo sapiens
cctccttctcacagc

SEQ ID NO: 1536453 - DNA, 15 bp, Homo sapiens
ctccttctcacagca

SEQ ID NO: 1536454 - DNA, 15 bp, Homo sapiens
tccttctcacagcaa

SEQ ID NO: 1536455 - DNA, 15 bp, Homo sapiens
ccttctcacagcaag

SEQ ID NO: 1536456 - DNA, 15 bp, Homo sapiens
cttctcacagcaaga

SEQ ID NO: 1536457 - DNA, 15 bp, Homo sapiens
ttctcacagcaagac

SEQ ID NO: 1536458 - DNA, 15 bp, Homo sapiens
tctcacagcaagact

SEQ ID NO: 1536459 - DNA, 15 bp, Homo sapiens
ctcacagcaagacta

SEQ ID NO: 1536460 - DNA, 15 bp, Homo sapiens
tcacagcaagactac

SEQ ID NO: 1536461 - DNA, 15 bp, Homo sapiens
cacagcaagactact

SEQ ID NO: 1536462 - DNA, 15 bp, Homo sapiens
acagcaagactactt

SEQ ID NO: 1536463 - DNA, 15 bp, Homo sapiens
cagcaagactacttc

SEQ ID NO: 1536464 - DNA, 15 bp, Homo sapiens
agcaagactacttct

SEQ ID NO: 1536465 - DNA, 15 bp, Homo sapiens
gcaagactacttctg

SEQ ID NO: 1536466 - DNA, 15 bp, Homo sapiens
caagactacttctgt

SEQ ID NO: 1536467 - DNA, 15 bp, Homo sapiens
aagactacttctgta

SEQ ID NO: 1536468 - DNA, 15 bp, Homo sapiens
agactacttctgtag

SEQ ID NO: 1536469 - DNA, 15 bp, Homo sapiens
gactacttctgtaga

SEQ ID NO: 1536470 - DNA, 15 bp, Homo sapiens
actacttctgtagat

SEQ ID NO: 1536471 - DNA, 15 bp, Homo sapiens
ctacttctgtagatg

SEQ ID NO: 1536472 - DNA, 15 bp, Homo sapiens
tacttctgtagatgc

SEQ ID NO: 1536473 - DNA, 15 bp, Homo sapiens
acttctgtagatgca

SEQ ID NO: 1536474 - DNA, 15 bp, Homo sapiens
cttctgtagatgcag

SEQ ID NO: 1536475 - DNA, 15 bp, Homo sapiens
ttctgtagatgcagg

SEQ ID NO: 1536476 - DNA, 15 bp, Homo sapiens
tctgtagatgcaggt

SEQ ID NO: 1536477 - DNA, 15 bp, Homo sapiens
ctgtagatgcaggtg

SEQ ID NO: 1536478 - DNA, 15 bp, Homo sapiens
tgtagatgcaggtgg

SEQ ID NO: 1536479 - DNA, 15 bp, Homo sapiens
gtagatgcaggtggc

SEQ ID NO: 1536480 - DNA, 15 bp, Homo sapiens
tagatgcaggtggct

SEQ ID NO: 1536481 - DNA, 15 bp, Homo sapiens
agatgcaggtggctc

SEQ ID NO: 1536482 - DNA, 15 bp, Homo sapiens
gatgcaggtggctcg

SEQ ID NO: 1536483 - DNA, 15 bp, Homo sapiens
atgcaggtggctcgt

SEQ ID NO: 1536484 - DNA, 15 bp, Homo sapiens
tgcaggtggctcgtg

SEQ ID NO: 1536485 - DNA, 15 bp, Homo sapiens
gcaggtggctcgtgg

SEQ ID NO: 1536486 - DNA, 15 bp, Homo sapiens
caggtggctcgtggg

SEQ ID NO: 1536487 - DNA, 15 bp, Homo sapiens
aggtggctcgtggga

SEQ ID NO: 1536488 - DNA, 15 bp, Homo sapiens
ggtggctcgtgggaa

SEQ ID NO: 1536489 - DNA, 15 bp, Homo sapiens
gtggctcgtgggaat

SEQ ID NO: 1536490 - DNA, 15 bp, Homo sapiens
tggctcgtgggaatc

SEQ ID NO: 1536491 - DNA, 15 bp, Homo sapiens
ggctcgtgggaatct

SEQ ID NO: 1536492 - DNA, 15 bp, Homo sapiens
gctcgtgggaatctg

SEQ ID NO: 1536493 - DNA, 15 bp, Homo sapiens
ctcgtgggaatctgg

SEQ ID NO: 1536494 - DNA, 15 bp, Homo sapiens
tcgtgggaatctggc

SEQ ID NO: 1536495 - DNA, 15 bp, Homo sapiens
cgtgggaatctggca

SEQ ID NO: 1536496 - DNA, 15 bp, Homo sapiens
gtgggaatctggcaa

SEQ ID NO: 1536497 - DNA, 15 bp, Homo sapiens
tgggaatctggcaat

SEQ ID NO: 1536498 - DNA, 15 bp, Homo sapiens
gggaatctggcaatt

SEQ ID NO: 1536499 - DNA, 15 bp, Homo sapiens
ggaatctggcaattc

SEQ ID NO: 1536500 - DNA, 15 bp, Homo sapiens
gaatctggcaattca

SEQ ID NO: 1536501 - DNA, 15 bp, Homo sapiens
aatctggcaattcaa

SEQ ID NO: 1536502 - DNA, 15 bp, Homo sapiens
atctggcaattcaaa

SEQ ID NO: 1536503 - DNA, 15 bp, Homo sapiens
tctggcaattcaaaa

SEQ ID NO: 1536504 - DNA, 15 bp, Homo sapiens
ctggcaattcaaaat

SEQ ID NO: 1536505 - DNA, 15 bp, Homo sapiens
tggcaattcaaaatt

SEQ ID NO: 1536506 - DNA, 15 bp, Homo sapiens
ggcaattcaaaattc

SEQ ID NO: 1536507 - DNA, 15 bp, Homo sapiens
gcaattcaaaattct

SEQ ID NO: 1536508 - DNA, 15 bp, Homo sapiens
caattcaaaattctc

SEQ ID NO: 1536509 - DNA, 15 bp, Homo sapiens
aattcaaaattctca

SEQ ID NO: 1536510 - DNA, 15 bp, Homo sapiens
attcaaaattctcaa

SEQ ID NO: 1536511 - DNA, 15 bp, Homo sapiens
ttcaaaattctcaag

SEQ ID NO: 1536512 - DNA, 15 bp, Homo sapiens
tcaaaattctcaagt

SEQ ID NO: 1536513 - DNA, 15 bp, Homo sapiens
caaaattctcaagtg

SEQ ID NO: 1536514 - DNA, 15 bp, Homo sapiens
aaaattctcaagtgt

SEQ ID NO: 1536515 - DNA, 15 bp, Homo sapiens
aaattctcaagtgta

SEQ ID NO: 1536516 - DNA, 15 bp, Homo sapiens
aattctcaagtgtac

SEQ ID NO: 1536517 - DNA, 15 bp, Homo sapiens
attctcaagtgtact

SEQ ID NO: 1536518 - DNA, 15 bp, Homo sapiens
ttctcaagtgtactc

SEQ ID NO: 1536519 - DNA, 15 bp, Homo sapiens
tctcaagtgtactca

SEQ ID NO: 1536520 - DNA, 15 bp, Homo sapiens
ctcaagtgtactcac

SEQ ID NO: 1536521 - DNA, 15 bp, Homo sapiens
tcaagtgtactcact

SEQ ID NO: 1536522 - DNA, 15 bp, Homo sapiens
caagtgtactcacta

SEQ ID NO: 1536523 - DNA, 15 bp, Homo sapiens
aagtgtactcactag

SEQ ID NO: 1536524 - DNA, 15 bp, Homo sapiens
agtgtactcactagc

SEQ ID NO: 1536525 - DNA, 15 bp, Homo sapiens
gtgtactcactagca

SEQ ID NO: 1536526 - DNA, 15 bp, Homo sapiens
tgtactcactagcac

SEQ ID NO: 1536527 - DNA, 15 bp, Homo sapiens
gtactcactagcaca

SEQ ID NO: 1536528 - DNA, 15 bp, Homo sapiens
tactcactagcacat

SEQ ID NO: 1536529 - DNA, 15 bp, Homo sapiens
actcactagcacatt

SEQ ID NO: 1536530 - DNA, 15 bp, Homo sapiens
ctcactagcacatta

SEQ ID NO: 1536531 - DNA, 15 bp, Homo sapiens
tcactagcacattag

SEQ ID NO: 1536532 - DNA, 15 bp, Homo sapiens
cactagcacattaga

SEQ ID NO: 1536533 - DNA, 15 bp, Homo sapiens
actagcacattagaa

SEQ ID NO: 1536534 - DNA, 15 bp, Homo sapiens
ctagcacattagaaa

SEQ ID NO: 1536535 - DNA, 15 bp, Homo sapiens
tagcacattagaaaa

SEQ ID NO: 1536536 - DNA, 15 bp, Homo sapiens
agcacattagaaaac

SEQ ID NO: 1536537 - DNA, 15 bp, Homo sapiens
gcacattagaaaacc

SEQ ID NO: 1536538 - DNA, 15 bp, Homo sapiens
cacattagaaaacca

SEQ ID NO: 1536539 - DNA, 15 bp, Homo sapiens
acattagaaaaccag

SEQ ID NO: 1536540 - DNA, 15 bp, Homo sapiens
cattagaaaaccagt

SEQ ID NO: 1536541 - DNA, 15 bp, Homo sapiens
attagaaaaccagta

SEQ ID NO: 1536542 - DNA, 15 bp, Homo sapiens
ttagaaaaccagtag

SEQ ID NO: 1536543 - DNA, 15 bp, Homo sapiens
tagaaaaccagtagt

SEQ ID NO: 1536544 - DNA, 15 bp, Homo sapiens
agaaaaccagtagta

SEQ ID NO: 1536545 - DNA, 15 bp, Homo sapiens
gaaaaccagtagtac

SEQ ID NO: 1536546 - DNA, 15 bp, Homo sapiens
aaaaccagtagtaca

SEQ ID NO: 1536547 - DNA, 15 bp, Homo sapiens
aaaccagtagtacac

SEQ ID NO: 1536548 - DNA, 15 bp, Homo sapiens
aaccagtagtacaca

SEQ ID NO: 1536549 - DNA, 15 bp, Homo sapiens
accagtagtacacat

SEQ ID NO: 1536550 - DNA, 15 bp, Homo sapiens
ccagtagtacacatc

SEQ ID NO: 1536551 - DNA, 15 bp, Homo sapiens
cagtagtacacatct

SEQ ID NO: 1536552 - DNA, 15 bp, Homo sapiens
agtagtacacatctc

SEQ ID NO: 1536553 - DNA, 15 bp, Homo sapiens
gtagtacacatctct

SEQ ID NO: 1536554 - DNA, 15 bp, Homo sapiens
tagtacacatctctt

SEQ ID NO: 1536555 - DNA, 15 bp, Homo sapiens
agtacacatctcttt

SEQ ID NO: 1536556 - DNA, 15 bp, Homo sapiens
gtacacatctctttc

SEQ ID NO: 1536557 - DNA, 15 bp, Homo sapiens
tacacatctctttcc

SEQ ID NO: 1536558 - DNA, 15 bp, Homo sapiens
acacatctctttcca

SEQ ID NO: 1536559 - DNA, 15 bp, Homo sapiens
cacatctctttccaa

SEQ ID NO: 1536560 - DNA, 15 bp, Homo sapiens
acatctctttccaaa

SEQ ID NO: 1536561 - DNA, 15 bp, Homo sapiens
catctctttccaaat

SEQ ID NO: 1536562 - DNA, 15 bp, Homo sapiens
atctctttccaaatc

SEQ ID NO: 1536563 - DNA, 15 bp, Homo sapiens
tctctttccaaatct

SEQ ID NO: 1536564 - DNA, 15 bp, Homo sapiens
ctctttccaaatctt

SEQ ID NO: 1536565 - DNA, 15 bp, Homo sapiens
tctttccaaatcttc

SEQ ID NO: 1536566 - DNA, 15 bp, Homo sapiens
ctttccaaatcttca

SEQ ID NO: 1536567 - DNA, 15 bp, Homo sapiens
tttccaaatcttcat

SEQ ID NO: 1536568 - DNA, 15 bp, Homo sapiens
ttccaaatcttcatt

SEQ ID NO: 1536569 - DNA, 15 bp, Homo sapiens
tccaaatcttcattc

SEQ ID NO: 1536570 - DNA, 15 bp, Homo sapiens
ccaaatcttcattca

SEQ ID NO: 1536571 - DNA, 15 bp, Homo sapiens
caaatcttcattcag

SEQ ID NO: 1536572 - DNA, 15 bp, Homo sapiens
aaatcttcattcagt

SEQ ID NO: 1536573 - DNA, 15 bp, Homo sapiens
aatcttcattcagtg

SEQ ID NO: 1536574 - DNA, 15 bp, Homo sapiens
atcttcattcagtga

SEQ ID NO: 1536575 - DNA, 15 bp, Homo sapiens
tcttcattcagtgac

SEQ ID NO: 1536576 - DNA, 15 bp, Homo sapiens
cttcattcagtgaca

SEQ ID NO: 1536577 - DNA, 15 bp, Homo sapiens
ttcattcagtgacac

SEQ ID NO: 1536578 - DNA, 15 bp, Homo sapiens
tcattcagtgacact

SEQ ID NO: 1536579 - DNA, 15 bp, Homo sapiens
cattcagtgacacta

SEQ ID NO: 1536580 - DNA, 15 bp, Homo sapiens
attcagtgacactat

SEQ ID NO: 1536581 - DNA, 15 bp, Homo sapiens
ttcagtgacactatg

SEQ ID NO: 1536582 - DNA, 15 bp, Homo sapiens
tcagtgacactatgt

SEQ ID NO: 1536583 - DNA, 15 bp, Homo sapiens
cagtgacactatgtc

SEQ ID NO: 1536584 - DNA, 15 bp, Homo sapiens
agtgacactatgtca

SEQ ID NO: 1536585 - DNA, 15 bp, Homo sapiens
gtgacactatgtcag

SEQ ID NO: 1536586 - DNA, 15 bp, Homo sapiens
tgacactatgtcagt

SEQ ID NO: 1536587 - DNA, 15 bp, Homo sapiens
gacactatgtcagta

SEQ ID NO: 1536588 - DNA, 15 bp, Homo sapiens
acactatgtcagtag

SEQ ID NO: 1536589 - DNA, 15 bp, Homo sapiens
cactatgtcagtagc

SEQ ID NO: 1536590 - DNA, 15 bp, Homo sapiens
actatgtcagtagct

SEQ ID NO: 1536591 - DNA, 15 bp, Homo sapiens
ctatgtcagtagctg

SEQ ID NO: 1536592 - DNA, 15 bp, Homo sapiens
tatgtcagtagctgg

SEQ ID NO: 1536593 - DNA, 15 bp, Homo sapiens
atgtcagtagctgga

SEQ ID NO: 1536594 - DNA, 15 bp, Homo sapiens
tgtcagtagctggaa

SEQ ID NO: 1536595 - DNA, 15 bp, Homo sapiens
gtcagtagctggaaa

SEQ ID NO: 1536596 - DNA, 15 bp, Homo sapiens
tcagtagctggaaat

SEQ ID NO: 1536597 - DNA, 15 bp, Homo sapiens
cagtagctggaaatg

SEQ ID NO: 1536598 - DNA, 15 bp, Homo sapiens
agtagctggaaatgg

SEQ ID NO: 1536599 - DNA, 15 bp, Homo sapiens
gtagctggaaatggg

SEQ ID NO: 1536600 - DNA, 15 bp, Homo sapiens
tagctggaaatgggc

SEQ ID NO: 1536601 - DNA, 15 bp, Homo sapiens
agctggaaatgggcc

SEQ ID NO: 1536602 - DNA, 15 bp, Homo sapiens
gctggaaatgggcca

SEQ ID NO: 1536603 - DNA, 15 bp, Homo sapiens
ctggaaatgggccat

SEQ ID NO: 1536604 - DNA, 15 bp, Homo sapiens
tggaaatgggccatg

SEQ ID NO: 1536605 - DNA, 15 bp, Homo sapiens
ggaaatgggccatgg

SEQ ID NO: 1536606 - DNA, 15 bp, Homo sapiens
gaaatgggccatggt

SEQ ID NO: 1536607 - DNA, 15 bp, Homo sapiens
aaatgggccatggtg

SEQ ID NO: 1536608 - DNA, 15 bp, Homo sapiens
aatgggccatggtgg

SEQ ID NO: 1536609 - DNA, 15 bp, Homo sapiens
atgggccatggtggg

SEQ ID NO: 1536610 - DNA, 15 bp, Homo sapiens
tgggccatggtgggt

SEQ ID NO: 1536611 - DNA, 15 bp, Homo sapiens
gggccatggtgggtg

SEQ ID NO: 1536612 - DNA, 15 bp, Homo sapiens
ggccatggtgggtgt

SEQ ID NO: 1536613 - DNA, 15 bp, Homo sapiens
gccatggtgggtgta

SEQ ID NO: 1536614 - DNA, 15 bp, Homo sapiens
ccatggtgggtgtat

SEQ ID NO: 1536615 - DNA, 15 bp, Homo sapiens
catggtgggtgtatt

SEQ ID NO: 1536616 - DNA, 15 bp, Homo sapiens
atggtgggtgtattt

SEQ ID NO: 1536617 - DNA, 15 bp, Homo sapiens
tggtgggtgtattta

SEQ ID NO: 1536618 - DNA, 15 bp, Homo sapiens
ggtgggtgtatttaa

SEQ ID NO: 1536619 - DNA, 15 bp, Homo sapiens
gtgggtgtatttaaa

SEQ ID NO: 1536620 - DNA, 15 bp, Homo sapiens
tgggtgtatttaaac

SEQ ID NO: 1536621 - DNA, 15 bp, Homo sapiens
gggtgtatttaaacc

SEQ ID NO: 1536622 - DNA, 15 bp, Homo sapiens
ggtgtatttaaacca

SEQ ID NO: 1536623 - DNA, 15 bp, Homo sapiens
gtgtatttaaaccat

SEQ ID NO: 1536624 - DNA, 15 bp, Homo sapiens
tgtatttaaaccatg

SEQ ID NO: 1536625 - DNA, 15 bp, Homo sapiens
gtatttaaaccatga

SEQ ID NO: 1536626 - DNA, 15 bp, Homo sapiens
tatttaaaccatgaa

SEQ ID NO: 1536627 - DNA, 15 bp, Homo sapiens
atttaaaccatgaaa

SEQ ID NO: 1536628 - DNA, 15 bp, Homo sapiens
tttaaaccatgaaaa

SEQ ID NO: 1536629 - DNA, 15 bp, Homo sapiens
ttaaaccatgaaaat

SEQ ID NO: 1536630 - DNA, 15 bp, Homo sapiens
taaaccatgaaaatc

SEQ ID NO: 1536631 - DNA, 15 bp, Homo sapiens
aaaccatgaaaatca

SEQ ID NO: 1536632 - DNA, 15 bp, Homo sapiens
aaccatgaaaatcag

SEQ ID NO: 1536633 - DNA, 15 bp, Homo sapiens
accatgaaaatcaga

SEQ ID NO: 1536634 - DNA, 15 bp, Homo sapiens
ccatgaaaatcagaa

SEQ ID NO: 1536635 - DNA, 15 bp, Homo sapiens
catgaaaatcagaaa

SEQ ID NO: 1536636 - DNA, 15 bp, Homo sapiens
atgaaaatcagaaaa

SEQ ID NO: 1536637 - DNA, 15 bp, Homo sapiens
tgaaaatcagaaaat

SEQ ID NO: 1536638 - DNA, 15 bp, Homo sapiens
gaaaatcagaaaatg

SEQ ID NO: 1536639 - DNA, 15 bp, Homo sapiens
aaaatcagaaaatgc

SEQ ID NO: 1536640 - DNA, 15 bp, Homo sapiens
aaatcagaaaatgct

SEQ ID NO: 1536641 - DNA, 15 bp, Homo sapiens
aatcagaaaatgcta

SEQ ID NO: 1536642 - DNA, 15 bp, Homo sapiens
atcagaaaatgctac

SEQ ID NO: 1536643 - DNA, 15 bp, Homo sapiens
tcagaaaatgctaca

SEQ ID NO: 1536644 - DNA, 15 bp, Homo sapiens
cagaaaatgctacaa

SEQ ID NO: 1536645 - DNA, 15 bp, Homo sapiens
agaaaatgctacaaa

SEQ ID NO: 1536646 - DNA, 15 bp, Homo sapiens
gaaaatgctacaaac

SEQ ID NO: 1536647 - DNA, 15 bp, Homo sapiens
aaaatgctacaaacc

SEQ ID NO: 1536648 - DNA, 15 bp, Homo sapiens
aaatgctacaaacca

SEQ ID NO: 1536649 - DNA, 15 bp, Homo sapiens
aatgctacaaaccag

SEQ ID NO: 1536650 - DNA, 15 bp, Homo sapiens
atgctacaaaccagg

SEQ ID NO: 1536651 - DNA, 15 bp, Homo sapiens
tgctacaaaccaggg

SEQ ID NO: 1536652 - DNA, 15 bp, Homo sapiens
gctacaaaccagggc

SEQ ID NO: 1536653 - DNA, 15 bp, Homo sapiens
ctacaaaccagggca

SEQ ID NO: 1536654 - DNA, 15 bp, Homo sapiens
tacaaaccagggcat

SEQ ID NO: 1536655 - DNA, 15 bp, Homo sapiens
acaaaccagggcatc

SEQ ID NO: 1536656 - DNA, 15 bp, Homo sapiens
caaaccagggcatcc

SEQ ID NO: 1536657 - DNA, 15 bp, Homo sapiens
aaaccagggcatccc

SEQ ID NO: 1536658 - DNA, 15 bp, Homo sapiens
aaccagggcatcccg

SEQ ID NO: 1536659 - DNA, 15 bp, Homo sapiens
accagggcatcccgc

SEQ ID NO: 1536660 - DNA, 15 bp, Homo sapiens
ccagggcatcccgca

SEQ ID NO: 1536661 - DNA, 15 bp, Homo sapiens
cagggcatcccgcat

SEQ ID NO: 1536662 - DNA, 15 bp, Homo sapiens
agggcatcccgcatc

SEQ ID NO: 1536663 - DNA, 15 bp, Homo sapiens
gggcatcccgcatct

SEQ ID NO: 1536664 - DNA, 15 bp, Homo sapiens
ggcatcccgcatctc

SEQ ID NO: 1536665 - DNA, 15 bp, Homo sapiens
gcatcccgcatctct

SEQ ID NO: 1536666 - DNA, 15 bp, Homo sapiens
catcccgcatctcta

SEQ ID NO: 1536667 - DNA, 15 bp, Homo sapiens
atcccgcatctctag

SEQ ID NO: 1536668 - DNA, 15 bp, Homo sapiens
tcccgcatctctaga

SEQ ID NO: 1536669 - DNA, 15 bp, Homo sapiens
cccgcatctctagac

SEQ ID NO: 1536670 - DNA, 15 bp, Homo sapiens
ccgcatctctagaca

SEQ ID NO: 1536671 - DNA, 15 bp, Homo sapiens
cgcatctctagacag

SEQ ID NO: 1536672 - DNA, 15 bp, Homo sapiens
gcatctctagacagc

SEQ ID NO: 1536673 - DNA, 15 bp, Homo sapiens
catctctagacagca

SEQ ID NO: 1536674 - DNA, 15 bp, Homo sapiens
atctctagacagcag

SEQ ID NO: 1536675 - DNA, 15 bp, Homo sapiens
tctctagacagcaga

SEQ ID NO: 1536676 - DNA, 15 bp, Homo sapiens
ctctagacagcagat

SEQ ID NO: 1536677 - DNA, 15 bp, Homo sapiens
tctagacagcagatt

SEQ ID NO: 1536678 - DNA, 15 bp, Homo sapiens
ctagacagcagattg

SEQ ID NO: 1536679 - DNA, 15 bp, Homo sapiens
tagacagcagattgt

SEQ ID NO: 1536680 - DNA, 15 bp, Homo sapiens
agacagcagattgtt

SEQ ID NO: 1536681 - DNA, 15 bp, Homo sapiens
gacagcagattgttg

SEQ ID NO: 1536682 - DNA, 15 bp, Homo sapiens
acagcagattgttgg

SEQ ID NO: 1536683 - DNA, 15 bp, Homo sapiens
cagcagattgttggc

SEQ ID NO: 1536684 - DNA, 15 bp, Homo sapiens
agcagattgttggcc

SEQ ID NO: 1536685 - DNA, 15 bp, Homo sapiens
gcagattgttggcca

SEQ ID NO: 1536686 - DNA, 15 bp, Homo sapiens
cagattgttggccat

SEQ ID NO: 1536687 - DNA, 15 bp, Homo sapiens
agattgttggccatt

SEQ ID NO: 1536688 - DNA, 15 bp, Homo sapiens
gattgttggccattt

SEQ ID NO: 1536689 - DNA, 15 bp, Homo sapiens
attgttggccatttc

SEQ ID NO: 1536690 - DNA, 15 bp, Homo sapiens
ttgttggccatttcc

SEQ ID NO: 1536691 - DNA, 15 bp, Homo sapiens
tgttggccatttccc

SEQ ID NO: 1536692 - DNA, 15 bp, Homo sapiens
gttggccatttccca

SEQ ID NO: 1536693 - DNA, 15 bp, Homo sapiens
ttggccatttcccag

SEQ ID NO: 1536694 - DNA, 15 bp, Homo sapiens
tggccatttcccagc

SEQ ID NO: 1536695 - DNA, 15 bp, Homo sapiens
ggccatttcccagca

SEQ ID NO: 1536696 - DNA, 15 bp, Homo sapiens
gccatttcccagcat

SEQ ID NO: 1536697 - DNA, 15 bp, Homo sapiens
ccatttcccagcata

SEQ ID NO: 1536698 - DNA, 15 bp, Homo sapiens
catttcccagcatac

SEQ ID NO: 1536699 - DNA, 15 bp, Homo sapiens
atttcccagcatacc

SEQ ID NO: 1536700 - DNA, 15 bp, Homo sapiens
tttcccagcatacca

SEQ ID NO: 1536701 - DNA, 15 bp, Homo sapiens
ttcccagcataccat

SEQ ID NO: 1536702 - DNA, 15 bp, Homo sapiens
tcccagcataccatt

SEQ ID NO: 1536703 - DNA, 15 bp, Homo sapiens
cccagcataccattg

SEQ ID NO: 1536704 - DNA, 15 bp, Homo sapiens
ccagcataccattgt

SEQ ID NO: 1536705 - DNA, 15 bp, Homo sapiens
cagcataccattgtg

SEQ ID NO: 1536706 - DNA, 15 bp, Homo sapiens
agcataccattgtgt

SEQ ID NO: 1536707 - DNA, 15 bp, Homo sapiens
gcataccattgtgta

SEQ ID NO: 1536708 - DNA, 15 bp, Homo sapiens
cataccattgtgtat

SEQ ID NO: 1536709 - DNA, 15 bp, Homo sapiens
ataccattgtgtata

SEQ ID NO: 1536710 - DNA, 15 bp, Homo sapiens
taccattgtgtatac

SEQ ID NO: 1536711 - DNA, 15 bp, Homo sapiens
accattgtgtatact

SEQ ID NO: 1536712 - DNA, 15 bp, Homo sapiens
ccattgtgtatactc

SEQ ID NO: 1536713 - DNA, 15 bp, Homo sapiens
cattgtgtatactcc

SEQ ID NO: 1536714 - DNA, 15 bp, Homo sapiens
attgtgtatactcct

SEQ ID NO: 1536715 - DNA, 15 bp, Homo sapiens
ttgtgtatactcctt

SEQ ID NO: 1536716 - DNA, 15 bp, Homo sapiens
tgtgtatactccttc

SEQ ID NO: 1536717 - DNA, 15 bp, Homo sapiens
gtgtatactccttcc

SEQ ID NO: 1536718 - DNA, 15 bp, Homo sapiens
tgtatactccttccc

SEQ ID NO: 1536719 - DNA, 15 bp, Homo sapiens
gtatactccttccca

SEQ ID NO: 1536720 - DNA, 15 bp, Homo sapiens
tatactccttcccat

SEQ ID NO: 1536721 - DNA, 15 bp, Homo sapiens
atactccttcccatc

SEQ ID NO: 1536722 - DNA, 15 bp, Homo sapiens
tactccttcccatca

SEQ ID NO: 1536723 - DNA, 15 bp, Homo sapiens
actccttcccatcag

SEQ ID NO: 1536724 - DNA, 15 bp, Homo sapiens
ctccttcccatcagg

SEQ ID NO: 1536725 - DNA, 15 bp, Homo sapiens
tccttcccatcaggg

SEQ ID NO: 1536726 - DNA, 15 bp, Homo sapiens
ccttcccatcagggc

SEQ ID NO: 1536727 - DNA, 15 bp, Homo sapiens
cttcccatcagggcc

SEQ ID NO: 1536728 - DNA, 15 bp, Homo sapiens
ttcccatcagggccg

SEQ ID NO: 1536729 - DNA, 15 bp, Homo sapiens
tcccatcagggccgt

SEQ ID NO: 1536730 - DNA, 15 bp, Homo sapiens
cccatcagggccgtg

SEQ ID NO: 1536731 - DNA, 15 bp, Homo sapiens
ccatcagggccgtgg

SEQ ID NO: 1536732 - DNA, 15 bp, Homo sapiens
catcagggccgtggc

SEQ ID NO: 1536733 - DNA, 15 bp, Homo sapiens
atcagggccgtggct

SEQ ID NO: 1536734 - DNA, 15 bp, Homo sapiens
tcagggccgtggctt

SEQ ID NO: 1536735 - DNA, 15 bp, Homo sapiens
cagggccgtggcttg

SEQ ID NO: 1536736 - DNA, 15 bp, Homo sapiens
agggccgtggcttgc

SEQ ID NO: 1536737 - DNA, 15 bp, Homo sapiens
gggccgtggcttgcc

SEQ ID NO: 1536738 - DNA, 15 bp, Homo sapiens
ggccgtggcttgcct

SEQ ID NO: 1536739 - DNA, 15 bp, Homo sapiens
gccgtggcttgcctt

SEQ ID NO: 1536740 - DNA, 15 bp, Homo sapiens
ccgtggcttgccttg

SEQ ID NO: 1536741 - DNA, 15 bp, Homo sapiens
cgtggcttgccttgg

SEQ ID NO: 1536742 - DNA, 15 bp, Homo sapiens
gtggcttgccttggt

SEQ ID NO: 1536743 - DNA, 15 bp, Homo sapiens
tggcttgccttggtg

SEQ ID NO: 1536744 - DNA, 15 bp, Homo sapiens
ggcttgccttggtgg

SEQ ID NO: 1536745 - DNA, 15 bp, Homo sapiens
gcttgccttggtgga

SEQ ID NO: 1536746 - DNA, 15 bp, Homo sapiens
cttgccttggtggag

SEQ ID NO: 1536747 - DNA, 15 bp, Homo sapiens
ttgccttggtggagg

SEQ ID NO: 1536748 - DNA, 15 bp, Homo sapiens
tgccttggtggagga

SEQ ID NO: 1536749 - DNA, 15 bp, Homo sapiens
gccttggtggaggac

SEQ ID NO: 1536750 - DNA, 15 bp, Homo sapiens
ccttggtggaggact

SEQ ID NO: 1536751 - DNA, 15 bp, Homo sapiens
cttggtggaggactc

SEQ ID NO: 1536752 - DNA, 15 bp, Homo sapiens
ttggtggaggactca

SEQ ID NO: 1536753 - DNA, 15 bp, Homo sapiens
tggtggaggactcag

SEQ ID NO: 1536754 - DNA, 15 bp, Homo sapiens
ggtggaggactcagc

SEQ ID NO: 1536755 - DNA, 15 bp, Homo sapiens
gtggaggactcagcc

SEQ ID NO: 1536756 - DNA, 15 bp, Homo sapiens
tggaggactcagccc

SEQ ID NO: 1536757 - DNA, 15 bp, Homo sapiens
ggaggactcagccct

SEQ ID NO: 1536758 - DNA, 15 bp, Homo sapiens
gaggactcagccctt

SEQ ID NO: 1536759 - DNA, 15 bp, Homo sapiens
aggactcagcccttg

SEQ ID NO: 1536760 - DNA, 15 bp, Homo sapiens
ggactcagcccttgc

SEQ ID NO: 1536761 - DNA, 15 bp, Homo sapiens
gactcagcccttgct

SEQ ID NO: 1536762 - DNA, 15 bp, Homo sapiens
actcagcccttgctg

SEQ ID NO: 1536763 - DNA, 15 bp, Homo sapiens
ctcagcccttgctga

SEQ ID NO: 1536764 - DNA, 15 bp, Homo sapiens
tcagcccttgctgaa

SEQ ID NO: 1536765 - DNA, 15 bp, Homo sapiens
cagcccttgctgaag

SEQ ID NO: 1536766 - DNA, 15 bp, Homo sapiens
agcccttgctgaagt

SEQ ID NO: 1536767 - DNA, 15 bp, Homo sapiens
gcccttgctgaagtt

SEQ ID NO: 1536768 - DNA, 15 bp, Homo sapiens
cccttgctgaagttc

SEQ ID NO: 1536769 - DNA, 15 bp, Homo sapiens
ccttgctgaagttct

SEQ ID NO: 1536770 - DNA, 15 bp, Homo sapiens
cttgctgaagttctg

SEQ ID NO: 1536771 - DNA, 15 bp, Homo sapiens
ttgctgaagttctgc

SEQ ID NO: 1536772 - DNA, 15 bp, Homo sapiens
tgctgaagttctgct

SEQ ID NO: 1536773 - DNA, 15 bp, Homo sapiens
gctgaagttctgcta

SEQ ID NO: 1536774 - DNA, 15 bp, Homo sapiens
ctgaagttctgctac

SEQ ID NO: 1536775 - DNA, 15 bp, Homo sapiens
tgaagttctgctact

SEQ ID NO: 1536776 - DNA, 15 bp, Homo sapiens
gaagttctgctactg

SEQ ID NO: 1536777 - DNA, 15 bp, Homo sapiens
aagttctgctactgc

SEQ ID NO: 1536778 - DNA, 15 bp, Homo sapiens
agttctgctactgct

SEQ ID NO: 1536779 - DNA, 15 bp, Homo sapiens
gttctgctactgctc

SEQ ID NO: 1536780 - DNA, 15 bp, Homo sapiens
ttctgctactgctct

SEQ ID NO: 1536781 - DNA, 15 bp, Homo sapiens
tctgctactgctctt

SEQ ID NO: 1536782 - DNA, 15 bp, Homo sapiens
ctgctactgctctta

SEQ ID NO: 1536783 - DNA, 15 bp, Homo sapiens
tgctactgctcttac

SEQ ID NO: 1536784 - DNA, 15 bp, Homo sapiens
gctactgctcttaca

SEQ ID NO: 1536785 - DNA, 15 bp, Homo sapiens
ctactgctcttacaa

SEQ ID NO: 1536786 - DNA, 15 bp, Homo sapiens
tactgctcttacaat

SEQ ID NO: 1536787 - DNA, 15 bp, Homo sapiens
actgctcttacaatt

SEQ ID NO: 1536788 - DNA, 15 bp, Homo sapiens
ctgctcttacaattg

SEQ ID NO: 1536789 - DNA, 15 bp, Homo sapiens
tgctcttacaattga

SEQ ID NO: 1536790 - DNA, 15 bp, Homo sapiens
gctcttacaattgag

SEQ ID NO: 1536791 - DNA, 15 bp, Homo sapiens
ctcttacaattgagt

SEQ ID NO: 1536792 - DNA, 15 bp, Homo sapiens
tcttacaattgagtc

SEQ ID NO: 1536793 - DNA, 15 bp, Homo sapiens
cttacaattgagtcc

SEQ ID NO: 1536794 - DNA, 15 bp, Homo sapiens
ttacaattgagtcct

SEQ ID NO: 1536795 - DNA, 15 bp, Homo sapiens
tacaattgagtccta

SEQ ID NO: 1536796 - DNA, 15 bp, Homo sapiens
acaattgagtcctat

SEQ ID NO: 1536797 - DNA, 15 bp, Homo sapiens
caattgagtcctatg

SEQ ID NO: 1536798 - DNA, 15 bp, Homo sapiens
aattgagtcctatgc

SEQ ID NO: 1536799 - DNA, 15 bp, Homo sapiens
attgagtcctatgcc

SEQ ID NO: 1536800 - DNA, 15 bp, Homo sapiens
ttgagtcctatgcct

SEQ ID NO: 1536801 - DNA, 15 bp, Homo sapiens
tgagtcctatgcctg

SEQ ID NO: 1536802 - DNA, 15 bp, Homo sapiens
gagtcctatgcctgg

SEQ ID NO: 1536803 - DNA, 15 bp, Homo sapiens
agtcctatgcctggt

SEQ ID NO: 1536804 - DNA, 15 bp, Homo sapiens
gtcctatgcctggtc

SEQ ID NO: 1536805 - DNA, 15 bp, Homo sapiens
tcctatgcctggtct

SEQ ID NO: 1536806 - DNA, 15 bp, Homo sapiens
cctatgcctggtctc

SEQ ID NO: 1536807 - DNA, 15 bp, Homo sapiens
ctatgcctggtctcc

SEQ ID NO: 1536808 - DNA, 15 bp, Homo sapiens
tatgcctggtctcca

SEQ ID NO: 1536809 - DNA, 15 bp, Homo sapiens
atgcctggtctccag

SEQ ID NO: 1536810 - DNA, 15 bp, Homo sapiens
tgcctggtctccagc

SEQ ID NO: 1536811 - DNA, 15 bp, Homo sapiens
gcctggtctccagct

SEQ ID NO: 1536812 - DNA, 15 bp, Homo sapiens
cctggtctccagctc

SEQ ID NO: 1536813 - DNA, 15 bp, Homo sapiens
ctggtctccagctct

SEQ ID NO: 1536814 - DNA, 15 bp, Homo sapiens
tggtctccagctctg

SEQ ID NO: 1536815 - DNA, 15 bp, Homo sapiens
ggtctccagctctgc

SEQ ID NO: 1536816 - DNA, 15 bp, Homo sapiens
gtctccagctctgcc

SEQ ID NO: 1536817 - DNA, 15 bp, Homo sapiens
tctccagctctgcct

SEQ ID NO: 1536818 - DNA, 15 bp, Homo sapiens
ctccagctctgcctg

SEQ ID NO: 1536819 - DNA, 15 bp, Homo sapiens
tccagctctgcctgc

SEQ ID NO: 1536820 - DNA, 15 bp, Homo sapiens
cagctctgcctgcct

SEQ ID NO: 1536821 - DNA, 15 bp, Homo sapiens
agctctgcctgcctc

SEQ ID NO: 1536822 - DNA, 15 bp, Homo sapiens
gctctgcctgcctca

SEQ ID NO: 1536823 - DNA, 15 bp, Homo sapiens
ctctgcctgcctcac

SEQ ID NO: 1536824 - DNA, 15 bp, Homo sapiens
tctgcctgcctcact

SEQ ID NO: 1536825 - DNA, 15 bp, Homo sapiens
ctgcctgcctcacta

SEQ ID NO: 1536826 - DNA, 15 bp, Homo sapiens
tgcctgcctcactac

SEQ ID NO: 1536827 - DNA, 15 bp, Homo sapiens
gcctgcctcactaca

SEQ ID NO: 1536828 - DNA, 15 bp, Homo sapiens
cctgcctcactacag

SEQ ID NO: 1536829 - DNA, 15 bp, Homo sapiens
ctgcctcactacagg

SEQ ID NO: 1536830 - DNA, 15 bp, Homo sapiens
tgcctcactacagga

SEQ ID NO: 1536831 - DNA, 15 bp, Homo sapiens
gcctcactacaggag

SEQ ID NO: 1536832 - DNA, 15 bp, Homo sapiens
cctcactacaggaga

SEQ ID NO: 1536833 - DNA, 15 bp, Homo sapiens
ctcactacaggagac

SEQ ID NO: 1536834 - DNA, 15 bp, Homo sapiens
tcactacaggagaca

SEQ ID NO: 1536835 - DNA, 15 bp, Homo sapiens
cactacaggagacaa

SEQ ID NO: 1536836 - DNA, 15 bp, Homo sapiens
actacaggagacaag

SEQ ID NO: 1536837 - DNA, 15 bp, Homo sapiens
ctacaggagacaagc

SEQ ID NO: 1536838 - DNA, 15 bp, Homo sapiens
tacaggagacaagca

SEQ ID NO: 1536839 - DNA, 15 bp, Homo sapiens
acaggagacaagcat

SEQ ID NO: 1536840 - DNA, 15 bp, Homo sapiens
caggagacaagcatc

SEQ ID NO: 1536841 - DNA, 15 bp, Homo sapiens
aggagacaagcatct

SEQ ID NO: 1536842 - DNA, 15 bp, Homo sapiens
ggagacaagcatctc

SEQ ID NO: 1536843 - DNA, 15 bp, Homo sapiens
gagacaagcatctct

SEQ ID NO: 1536844 - DNA, 15 bp, Homo sapiens
agacaagcatctctt

SEQ ID NO: 1536845 - DNA, 15 bp, Homo sapiens
gacaagcatctcttt

SEQ ID NO: 1536846 - DNA, 15 bp, Homo sapiens
acaagcatctctttg

SEQ ID NO: 1536847 - DNA, 15 bp, Homo sapiens
caagcatctctttga

SEQ ID NO: 1536848 - DNA, 15 bp, Homo sapiens
aagcatctctttgaa

SEQ ID NO: 1536849 - DNA, 15 bp, Homo sapiens
agcatctctttgaac

SEQ ID NO: 1536850 - DNA, 15 bp, Homo sapiens
gcatctctttgaaca

SEQ ID NO: 1536851 - DNA, 15 bp, Homo sapiens
catctctttgaacac

SEQ ID NO: 1536852 - DNA, 15 bp, Homo sapiens
atctctttgaacact

SEQ ID NO: 1536853 - DNA, 15 bp, Homo sapiens
tctctttgaacactg

SEQ ID NO: 1536854 - DNA, 15 bp, Homo sapiens
ctctttgaacactgc

SEQ ID NO: 1536855 - DNA, 15 bp, Homo sapiens
tctttgaacactgcc

SEQ ID NO: 1536856 - DNA, 15 bp, Homo sapiens
ctttgaacactgccg

SEQ ID NO: 1536857 - DNA, 15 bp, Homo sapiens
tttgaacactgccga

SEQ ID NO: 1536858 - DNA, 15 bp, Homo sapiens
ttgaacactgccgag

SEQ ID NO: 1536859 - DNA, 15 bp, Homo sapiens
tgaacactgccgaga

SEQ ID NO: 1536860 - DNA, 15 bp, Homo sapiens
gaacactgccgagaa

SEQ ID NO: 1536861 - DNA, 15 bp, Homo sapiens
aacactgccgagaag

SEQ ID NO: 1536862 - DNA, 15 bp, Homo sapiens
acactgccgagaaga

SEQ ID NO: 1536863 - DNA, 15 bp, Homo sapiens
cactgccgagaagac

SEQ ID NO: 1536864 - DNA, 15 bp, Homo sapiens
actgccgagaagacc

SEQ ID NO: 1536865 - DNA, 15 bp, Homo sapiens
ctgccgagaagaccc

SEQ ID NO: 1536866 - DNA, 15 bp, Homo sapiens
tgccgagaagaccct

SEQ ID NO: 1536867 - DNA, 15 bp, Homo sapiens
gccgagaagaccctc

SEQ ID NO: 1536868 - DNA, 15 bp, Homo sapiens
ccgagaagaccctct

SEQ ID NO: 1536869 - DNA, 15 bp, Homo sapiens
cgagaagaccctctg

SEQ ID NO: 1536870 - DNA, 15 bp, Homo sapiens
gagaagaccctctgg

SEQ ID NO: 1536871 - DNA, 15 bp, Homo sapiens
agaagaccctctggc

SEQ ID NO: 1536872 - DNA, 15 bp, Homo sapiens
gaagaccctctggct

SEQ ID NO: 1536873 - DNA, 15 bp, Homo sapiens
aagaccctctggctc

SEQ ID NO: 1536874 - DNA, 15 bp, Homo sapiens
agaccctctggctct

SEQ ID NO: 1536875 - DNA, 15 bp, Homo sapiens
gaccctctggctctc

SEQ ID NO: 1536876 - DNA, 15 bp, Homo sapiens
accctctggctctca

SEQ ID NO: 1536877 - DNA, 15 bp, Homo sapiens
ccctctggctctcag

SEQ ID NO: 1536878 - DNA, 15 bp, Homo sapiens
cctctggctctcagg

SEQ ID NO: 1536879 - DNA, 15 bp, Homo sapiens
ctctggctctcaggc

SEQ ID NO: 1536880 - DNA, 15 bp, Homo sapiens
tctggctctcaggct

SEQ ID NO: 1536881 - DNA, 15 bp, Homo sapiens
ctggctctcaggctt

SEQ ID NO: 1536882 - DNA, 15 bp, Homo sapiens
tggctctcaggcttg

SEQ ID NO: 1536883 - DNA, 15 bp, Homo sapiens
ggctctcaggcttgg

SEQ ID NO: 1536884 - DNA, 15 bp, Homo sapiens
gctctcaggcttggc

SEQ ID NO: 1536885 - DNA, 15 bp, Homo sapiens
ctctcaggcttggct

SEQ ID NO: 1536886 - DNA, 15 bp, Homo sapiens
tctcaggcttggctt

SEQ ID NO: 1536887 - DNA, 15 bp, Homo sapiens
ctcaggcttggcttt

SEQ ID NO: 1536888 - DNA, 15 bp, Homo sapiens
tcaggcttggcttta

SEQ ID NO: 1536889 - DNA, 15 bp, Homo sapiens
caggcttggctttaa

SEQ ID NO: 1536890 - DNA, 15 bp, Homo sapiens
aggcttggctttaaa

SEQ ID NO: 1536891 - DNA, 15 bp, Homo sapiens
ggcttggctttaaat

SEQ ID NO: 1536892 - DNA, 15 bp, Homo sapiens
gcttggctttaaatc

SEQ ID NO: 1536893 - DNA, 15 bp, Homo sapiens
cttggctttaaatcg

SEQ ID NO: 1536894 - DNA, 15 bp, Homo sapiens
ttggctttaaatcga

SEQ ID NO: 1536895 - DNA, 15 bp, Homo sapiens
tggctttaaatcgat

SEQ ID NO: 1536896 - DNA, 15 bp, Homo sapiens
ggctttaaatcgata

SEQ ID NO: 1536897 - DNA, 15 bp, Homo sapiens
gctttaaatcgatag

SEQ ID NO: 1536898 - DNA, 15 bp, Homo sapiens
ctttaaatcgataga

SEQ ID NO: 1536899 - DNA, 15 bp, Homo sapiens
tttaaatcgatagac

SEQ ID NO: 1536900 - DNA, 15 bp, Homo sapiens
ttaaatcgatagacc

SEQ ID NO: 1536901 - DNA, 15 bp, Homo sapiens
taaatcgatagacct

SEQ ID NO: 1536902 - DNA, 15 bp, Homo sapiens
aaatcgatagacctg

SEQ ID NO: 1536903 - DNA, 15 bp, Homo sapiens
aatcgatagacctga

SEQ ID NO: 1536904 - DNA, 15 bp, Homo sapiens
atcgatagacctgag

SEQ ID NO: 1536905 - DNA, 15 bp, Homo sapiens
tcgatagacctgagc

SEQ ID NO: 1536906 - DNA, 15 bp, Homo sapiens
cgatagacctgagcc

SEQ ID NO: 1536907 - DNA, 15 bp, Homo sapiens
gatagacctgagcct

SEQ ID NO: 1536908 - DNA, 15 bp, Homo sapiens
atagacctgagcctg

SEQ ID NO: 1536909 - DNA, 15 bp, Homo sapiens
tagacctgagcctgc

SEQ ID NO: 1536910 - DNA, 15 bp, Homo sapiens
agacctgagcctgcc

SEQ ID NO: 1536911 - DNA, 15 bp, Homo sapiens
gacctgagcctgcca

SEQ ID NO: 1536912 - DNA, 15 bp, Homo sapiens
acctgagcctgccat

SEQ ID NO: 1536913 - DNA, 15 bp, Homo sapiens
cctgagcctgccatt

SEQ ID NO: 1536914 - DNA, 15 bp, Homo sapiens
ctgagcctgccattt

SEQ ID NO: 1536915 - DNA, 15 bp, Homo sapiens
tgagcctgccatttt

SEQ ID NO: 1536916 - DNA, 15 bp, Homo sapiens
gagcctgccattttc

SEQ ID NO: 1536917 - DNA, 15 bp, Homo sapiens
agcctgccattttct

SEQ ID NO: 1536918 - DNA, 15 bp, Homo sapiens
gcctgccattttctc

SEQ ID NO: 1536919 - DNA, 15 bp, Homo sapiens
cctgccattttctct

SEQ ID NO: 1536920 - DNA, 15 bp, Homo sapiens
ctgccattttctctt

SEQ ID NO: 1536921 - DNA, 15 bp, Homo sapiens
tgccattttctcttt

SEQ ID NO: 1536922 - DNA, 15 bp, Homo sapiens
gccattttctctttt

SEQ ID NO: 1536923 - DNA, 15 bp, Homo sapiens
ccattttctcttttc

SEQ ID NO: 1536924 - DNA, 15 bp, Homo sapiens
cattttctcttttcc

SEQ ID NO: 1536925 - DNA, 15 bp, Homo sapiens
attttctcttttcca

SEQ ID NO: 1536926 - DNA, 15 bp, Homo sapiens
ttttctcttttccat

SEQ ID NO: 1536927 - DNA, 15 bp, Homo sapiens
tttctcttttccatg

SEQ ID NO: 1536928 - DNA, 15 bp, Homo sapiens
ttctcttttccatgc

SEQ ID NO: 1536929 - DNA, 15 bp, Homo sapiens
tctcttttccatgca

SEQ ID NO: 1536930 - DNA, 15 bp, Homo sapiens
ctcttttccatgcat

SEQ ID NO: 1536931 - DNA, 15 bp, Homo sapiens
tcttttccatgcatc

SEQ ID NO: 1536932 - DNA, 15 bp, Homo sapiens
cttttccatgcatca

SEQ ID NO: 1536933 - DNA, 15 bp, Homo sapiens
ttttccatgcatcac

SEQ ID NO: 1536934 - DNA, 15 bp, Homo sapiens
tttccatgcatcact

SEQ ID NO: 1536935 - DNA, 15 bp, Homo sapiens
ttccatgcatcactc

SEQ ID NO: 1536936 - DNA, 15 bp, Homo sapiens
tccatgcatcactcc

SEQ ID NO: 1536937 - DNA, 15 bp, Homo sapiens
ccatgcatcactcca

SEQ ID NO: 1536938 - DNA, 15 bp, Homo sapiens
catgcatcactccac

SEQ ID NO: 1536939 - DNA, 15 bp, Homo sapiens
atgcatcactccact

SEQ ID NO: 1536940 - DNA, 15 bp, Homo sapiens
tgcatcactccactg

SEQ ID NO: 1536941 - DNA, 15 bp, Homo sapiens
gcatcactccactga

SEQ ID NO: 1536942 - DNA, 15 bp, Homo sapiens
catcactccactgat

SEQ ID NO: 1536943 - DNA, 15 bp, Homo sapiens
atcactccactgatc

SEQ ID NO: 1536944 - DNA, 15 bp, Homo sapiens
tcactccactgatcc

SEQ ID NO: 1536945 - DNA, 15 bp, Homo sapiens
cactccactgatcca

SEQ ID NO: 1536946 - DNA, 15 bp, Homo sapiens
actccactgatccac

SEQ ID NO: 1536947 - DNA, 15 bp, Homo sapiens
ctccactgatccaca

SEQ ID NO: 1536948 - DNA, 15 bp, Homo sapiens
tccactgatccacag

SEQ ID NO: 1536949 - DNA, 15 bp, Homo sapiens
ccactgatccacagg

SEQ ID NO: 1536950 - DNA, 15 bp, Homo sapiens
cactgatccacaggt

SEQ ID NO: 1536951 - DNA, 15 bp, Homo sapiens
actgatccacaggtc

SEQ ID NO: 1536952 - DNA, 15 bp, Homo sapiens
ctgatccacaggtct

SEQ ID NO: 1536953 - DNA, 15 bp, Homo sapiens
tgatccacaggtctc

SEQ ID NO: 1536954 - DNA, 15 bp, Homo sapiens
gatccacaggtctca

SEQ ID NO: 1536955 - DNA, 15 bp, Homo sapiens
atccacaggtctcag

SEQ ID NO: 1536956 - DNA, 15 bp, Homo sapiens
tccacaggtctcagt

SEQ ID NO: 1536957 - DNA, 15 bp, Homo sapiens
ccacaggtctcagtg

SEQ ID NO: 1536958 - DNA, 15 bp, Homo sapiens
cacaggtctcagtgg

SEQ ID NO: 1536959 - DNA, 15 bp, Homo sapiens
acaggtctcagtggc

SEQ ID NO: 1536960 - DNA, 15 bp, Homo sapiens
caggtctcagtggca

SEQ ID NO: 1536961 - DNA, 15 bp, Homo sapiens
ggtctcagtggcata

SEQ ID NO: 1536962 - DNA, 15 bp, Homo sapiens
gtctcagtggcatag

SEQ ID NO: 1536963 - DNA, 15 bp, Homo sapiens
tctcagtggcatagt

SEQ ID NO: 1536964 - DNA, 15 bp, Homo sapiens
ctcagtggcatagtc

SEQ ID NO: 1536965 - DNA, 15 bp, Homo sapiens
tcagtggcatagtcc

SEQ ID NO: 1536966 - DNA, 15 bp, Homo sapiens
cagtggcatagtcct

SEQ ID NO: 1536967 - DNA, 15 bp, Homo sapiens
agtggcatagtcctt

SEQ ID NO: 1536968 - DNA, 15 bp, Homo sapiens
gtggcatagtccttc

SEQ ID NO: 1536969 - DNA, 15 bp, Homo sapiens
tggcatagtccttcg

SEQ ID NO: 1536970 - DNA, 15 bp, Homo sapiens
ggcatagtccttcgg

SEQ ID NO: 1536971 - DNA, 15 bp, Homo sapiens
gcatagtccttcggg

SEQ ID NO: 1536972 - DNA, 15 bp, Homo sapiens
catagtccttcgggt

SEQ ID NO: 1536973 - DNA, 15 bp, Homo sapiens
atagtccttcgggtt

SEQ ID NO: 1536974 - DNA, 15 bp, Homo sapiens
tagtccttcgggtta

SEQ ID NO: 1536975 - DNA, 15 bp, Homo sapiens
agtccttcgggttag

SEQ ID NO: 1536976 - DNA, 15 bp, Homo sapiens
gtccttcgggttagc

SEQ ID NO: 1536977 - DNA, 15 bp, Homo sapiens
tccttcgggttagca

SEQ ID NO: 1536978 - DNA, 15 bp, Homo sapiens
ccttcgggttagcat

SEQ ID NO: 1536979 - DNA, 15 bp, Homo sapiens
cttcgggttagcatc

SEQ ID NO: 1536980 - DNA, 15 bp, Homo sapiens
ttcgggttagcatct

SEQ ID NO: 1536981 - DNA, 15 bp, Homo sapiens
tcgggttagcatctc

SEQ ID NO: 1536982 - DNA, 15 bp, Homo sapiens
cgggttagcatctcc

SEQ ID NO: 1536983 - DNA, 15 bp, Homo sapiens
gggttagcatctccc

SEQ ID NO: 1536984 - DNA, 15 bp, Homo sapiens
ggttagcatctcccc

SEQ ID NO: 1536985 - DNA, 15 bp, Homo sapiens
gttagcatctccccc

SEQ ID NO: 1536986 - DNA, 15 bp, Homo sapiens
ttagcatctccccca

SEQ ID NO: 1536987 - DNA, 15 bp, Homo sapiens
tagcatctcccccac

SEQ ID NO: 1536988 - DNA, 15 bp, Homo sapiens
agcatctcccccaca

SEQ ID NO: 1536989 - DNA, 15 bp, Homo sapiens
catctcccccacacc

SEQ ID NO: 1536990 - DNA, 15 bp, Homo sapiens
atctcccccacaccc

SEQ ID NO: 1536991 - DNA, 15 bp, Homo sapiens
tctcccccacaccct

SEQ ID NO: 1536992 - DNA, 15 bp, Homo sapiens
ctcccccacaccctc

SEQ ID NO: 1536993 - DNA, 15 bp, Homo sapiens
tcccccacaccctcg

SEQ ID NO: 1536994 - DNA, 15 bp, Homo sapiens
cccccacaccctcgg

SEQ ID NO: 1536995 - DNA, 15 bp, Homo sapiens
ccccacaccctcggt

SEQ ID NO: 1536996 - DNA, 15 bp, Homo sapiens
cccacaccctcggtg

SEQ ID NO: 1536997 - DNA, 15 bp, Homo sapiens
ccacaccctcggtgc

SEQ ID NO: 1536998 - DNA, 15 bp, Homo sapiens
cacaccctcggtgcc

SEQ ID NO: 1536999 - DNA, 15 bp, Homo sapiens
acaccctcggtgcca

SEQ ID NO: 1537000 - DNA, 15 bp, Homo sapiens
caccctcggtgccag

SEQ ID NO: 1537001 - DNA, 15 bp, Homo sapiens
accctcggtgccaga

SEQ ID NO: 1537002 - DNA, 15 bp, Homo sapiens
ccctcggtgccagag

SEQ ID NO: 1537003 - DNA, 15 bp, Homo sapiens
cctcggtgccagaga

SEQ ID NO: 1537004 - DNA, 15 bp, Homo sapiens
ctcggtgccagagac

SEQ ID NO: 1537005 - DNA, 15 bp, Homo sapiens
tcggtgccagagaca

SEQ ID NO: 1537006 - DNA, 15 bp, Homo sapiens
cggtgccagagacac

SEQ ID NO: 1537007 - DNA, 15 bp, Homo sapiens
ggtgccagagacact

SEQ ID NO: 1537008 - DNA, 15 bp, Homo sapiens
gtgccagagacactg

SEQ ID NO: 1537009 - DNA, 15 bp, Homo sapiens
tgccagagacactga

SEQ ID NO: 1537010 - DNA, 15 bp, Homo sapiens
gccagagacactgag

SEQ ID NO: 1537011 - DNA, 15 bp, Homo sapiens
ccagagacactgagt

SEQ ID NO: 1537012 - DNA, 15 bp, Homo sapiens
cagagacactgagta

SEQ ID NO: 1537013 - DNA, 15 bp, Homo sapiens
agagacactgagtaa

SEQ ID NO: 1537014 - DNA, 15 bp, Homo sapiens
gagacactgagtaag

SEQ ID NO: 1537015 - DNA, 15 bp, Homo sapiens
agacactgagtaaga

SEQ ID NO: 1537016 - DNA, 15 bp, Homo sapiens
gacactgagtaagaa

SEQ ID NO: 1537017 - DNA, 15 bp, Homo sapiens
acactgagtaagaaa

SEQ ID NO: 1537018 - DNA, 15 bp, Homo sapiens
cactgagtaagaaag

SEQ ID NO: 1537019 - DNA, 15 bp, Homo sapiens
actgagtaagaaagt

SEQ ID NO: 1537020 - DNA, 15 bp, Homo sapiens
ctgagtaagaaagta

SEQ ID NO: 1537021 - DNA, 15 bp, Homo sapiens
tgagtaagaaagtac

SEQ ID NO: 1537022 - DNA, 15 bp, Homo sapiens
gagtaagaaagtacc

SEQ ID NO: 1537023 - DNA, 15 bp, Homo sapiens
agtaagaaagtacct

SEQ ID NO: 1537024 - DNA, 15 bp, Homo sapiens
gtaagaaagtacctc

SEQ ID NO: 1537025 - DNA, 15 bp, Homo sapiens
taagaaagtacctcc

SEQ ID NO: 1537026 - DNA, 15 bp, Homo sapiens
aagaaagtacctccc

SEQ ID NO: 1537027 - DNA, 15 bp, Homo sapiens
agaaagtacctccct

SEQ ID NO: 1537028 - DNA, 15 bp, Homo sapiens
gaaagtacctccctg

SEQ ID NO: 1537029 - DNA, 15 bp, Homo sapiens
aaagtacctccctgt

SEQ ID NO: 1537030 - DNA, 15 bp, Homo sapiens
aagtacctccctgtc

SEQ ID NO: 1537031 - DNA, 15 bp, Homo sapiens
agtacctccctgtct

SEQ ID NO: 1537032 - DNA, 15 bp, Homo sapiens
gtacctccctgtcta

SEQ ID NO: 1537033 - DNA, 15 bp, Homo sapiens
tacctccctgtctac

SEQ ID NO: 1537034 - DNA, 15 bp, Homo sapiens
acctccctgtctacc

SEQ ID NO: 1537035 - DNA, 15 bp, Homo sapiens
cctccctgtctaccc

SEQ ID NO: 1537036 - DNA, 15 bp, Homo sapiens
ctccctgtctacccc

SEQ ID NO: 1537037 - DNA, 15 bp, Homo sapiens
tccctgtctaccccc

SEQ ID NO: 1537038 - DNA, 15 bp, Homo sapiens
ccctgtctaccccca

SEQ ID NO: 1537039 - DNA, 15 bp, Homo sapiens
cctgtctacccccat

SEQ ID NO: 1537040 - DNA, 15 bp, Homo sapiens
ctgtctacccccatc

SEQ ID NO: 1537041 - DNA, 15 bp, Homo sapiens
tgtctacccccatcc

SEQ ID NO: 1537042 - DNA, 15 bp, Homo sapiens
gtctacccccatccc

SEQ ID NO: 1537043 - DNA, 15 bp, Homo sapiens
tctacccccatcccc

SEQ ID NO: 1537044 - DNA, 15 bp, Homo sapiens
ctacccccatccccg

SEQ ID NO: 1537045 - DNA, 15 bp, Homo sapiens
tacccccatccccgc

SEQ ID NO: 1537046 - DNA, 15 bp, Homo sapiens
acccccatccccgct

SEQ ID NO: 1537047 - DNA, 15 bp, Homo sapiens
cccccatccccgctc

SEQ ID NO: 1537048 - DNA, 15 bp, Homo sapiens
ccccatccccgctcc

SEQ ID NO: 1537049 - DNA, 15 bp, Homo sapiens
cccatccccgctccc

SEQ ID NO: 1537050 - DNA, 15 bp, Homo sapiens
ccatccccgctcccc

SEQ ID NO: 1537051 - DNA, 15 bp, Homo sapiens
catccccgctcccca

SEQ ID NO: 1537052 - DNA, 15 bp, Homo sapiens
atccccgctccccac

SEQ ID NO: 1537053 - DNA, 15 bp, Homo sapiens
tccccgctccccaca

SEQ ID NO: 1537054 - DNA, 15 bp, Homo sapiens
ccccgctccccacag

SEQ ID NO: 1537055 - DNA, 15 bp, Homo sapiens
cccgctccccacagg

SEQ ID NO: 1537056 - DNA, 15 bp, Homo sapiens
ccgctccccacaggc

SEQ ID NO: 1537057 - DNA, 15 bp, Homo sapiens
cgctccccacaggca

SEQ ID NO: 1537058 - DNA, 15 bp, Homo sapiens
gctccccacaggcag

SEQ ID NO: 1537059 - DNA, 15 bp, Homo sapiens
ctccccacaggcagg

SEQ ID NO: 1537060 - DNA, 15 bp, Homo sapiens
tccccacaggcaggg

SEQ ID NO: 1537061 - DNA, 15 bp, Homo sapiens
ccccacaggcagggc

SEQ ID NO: 1537062 - DNA, 15 bp, Homo sapiens
cccacaggcagggcc

SEQ ID NO: 1537063 - DNA, 15 bp, Homo sapiens
ccacaggcagggcct

SEQ ID NO: 1537064 - DNA, 15 bp, Homo sapiens
cacaggcagggcctt

SEQ ID NO: 1537065 - DNA, 15 bp, Homo sapiens
acaggcagggccttg

SEQ ID NO: 1537066 - DNA, 15 bp, Homo sapiens
caggcagggccttgg

SEQ ID NO: 1537067 - DNA, 15 bp, Homo sapiens
aggcagggccttggc

SEQ ID NO: 1537068 - DNA, 15 bp, Homo sapiens
ggcagggccttggcg

SEQ ID NO: 1537069 - DNA, 15 bp, Homo sapiens
gcagggccttggcga

SEQ ID NO: 1537070 - DNA, 15 bp, Homo sapiens
cagggccttggcgat

SEQ ID NO: 1537071 - DNA, 15 bp, Homo sapiens
agggccttggcgatc

SEQ ID NO: 1537072 - DNA, 15 bp, Homo sapiens
gggccttggcgatcc

SEQ ID NO: 1537073 - DNA, 15 bp, Homo sapiens
ggccttggcgatcca

SEQ ID NO: 1537074 - DNA, 15 bp, Homo sapiens
gccttggcgatccac

SEQ ID NO: 1537075 - DNA, 15 bp, Homo sapiens
ccttggcgatccact

SEQ ID NO: 1537076 - DNA, 15 bp, Homo sapiens
cttggcgatccactg

SEQ ID NO: 1537077 - DNA, 15 bp, Homo sapiens
ttggcgatccactgc

SEQ ID NO: 1537078 - DNA, 15 bp, Homo sapiens
tggcgatccactgct

SEQ ID NO: 1537079 - DNA, 15 bp, Homo sapiens
ggcgatccactgctg

SEQ ID NO: 1537080 - DNA, 15 bp, Homo sapiens
gcgatccactgctgc

SEQ ID NO: 1537081 - DNA, 15 bp, Homo sapiens
cgatccactgctgca

SEQ ID NO: 1537082 - DNA, 15 bp, Homo sapiens
gatccactgctgcaa

SEQ ID NO: 1537083 - DNA, 15 bp, Homo sapiens
atccactgctgcaat

SEQ ID NO: 1537084 - DNA, 15 bp, Homo sapiens
tccactgctgcaatg

SEQ ID NO: 1537085 - DNA, 15 bp, Homo sapiens
ccactgctgcaatgt

SEQ ID NO: 1537086 - DNA, 15 bp, Homo sapiens
cactgctgcaatgtg

SEQ ID NO: 1537087 - DNA, 15 bp, Homo sapiens
actgctgcaatgtgc

SEQ ID NO: 1537088 - DNA, 15 bp, Homo sapiens
ctgctgcaatgtgcc

SEQ ID NO: 1537089 - DNA, 15 bp, Homo sapiens
tgctgcaatgtgcca

SEQ ID NO: 1537090 - DNA, 15 bp, Homo sapiens
gctgcaatgtgccag

SEQ ID NO: 1537091 - DNA, 15 bp, Homo sapiens
ctgcaatgtgccaga

SEQ ID NO: 1537092 - DNA, 15 bp, Homo sapiens
tgcaatgtgccagag

SEQ ID NO: 1537093 - DNA, 15 bp, Homo sapiens
gcaatgtgccagaga

SEQ ID NO: 1537094 - DNA, 15 bp, Homo sapiens
caatgtgccagagac

SEQ ID NO: 1537095 - DNA, 15 bp, Homo sapiens
aatgtgccagagact

SEQ ID NO: 1537096 - DNA, 15 bp, Homo sapiens
atgtgccagagactg

SEQ ID NO: 1537097 - DNA, 15 bp, Homo sapiens
tgtgccagagactgt

SEQ ID NO: 1537098 - DNA, 15 bp, Homo sapiens
gtgccagagactgtc

SEQ ID NO: 1537099 - DNA, 15 bp, Homo sapiens
tgccagagactgtca

SEQ ID NO: 1537100 - DNA, 15 bp, Homo sapiens
gccagagactgtcag

SEQ ID NO: 1537101 - DNA, 15 bp, Homo sapiens
ccagagactgtcagt

SEQ ID NO: 1537102 - DNA, 15 bp, Homo sapiens
cagagactgtcagta

SEQ ID NO: 1537103 - DNA, 15 bp, Homo sapiens
agagactgtcagtac

SEQ ID NO: 1537104 - DNA, 15 bp, Homo sapiens
gagactgtcagtact

SEQ ID NO: 1537105 - DNA, 15 bp, Homo sapiens
agactgtcagtactc

SEQ ID NO: 1537106 - DNA, 15 bp, Homo sapiens
gactgtcagtactcc

SEQ ID NO: 1537107 - DNA, 15 bp, Homo sapiens
actgtcagtactcct

SEQ ID NO: 1537108 - DNA, 15 bp, Homo sapiens
ctgtcagtactccta

SEQ ID NO: 1537109 - DNA, 15 bp, Homo sapiens
tgtcagtactcctac

SEQ ID NO: 1537110 - DNA, 15 bp, Homo sapiens
gtcagtactcctacc

SEQ ID NO: 1537111 - DNA, 15 bp, Homo sapiens
tcagtactcctacca

SEQ ID NO: 1537112 - DNA, 15 bp, Homo sapiens
cagtactcctaccac

SEQ ID NO: 1537113 - DNA, 15 bp, Homo sapiens
agtactcctaccacc

SEQ ID NO: 1537114 - DNA, 15 bp, Homo sapiens
gtactcctaccacca

SEQ ID NO: 1537115 - DNA, 15 bp, Homo sapiens
tactcctaccaccag

SEQ ID NO: 1537116 - DNA, 15 bp, Homo sapiens
actcctaccaccagt

SEQ ID NO: 1537117 - DNA, 15 bp, Homo sapiens
ctcctaccaccagtg

SEQ ID NO: 1537118 - DNA, 15 bp, Homo sapiens
tcctaccaccagtga

SEQ ID NO: 1537119 - DNA, 15 bp, Homo sapiens
cctaccaccagtgag

SEQ ID NO: 1537120 - DNA, 15 bp, Homo sapiens
ctaccaccagtgagg

SEQ ID NO: 1537121 - DNA, 15 bp, Homo sapiens
taccaccagtgaggt

SEQ ID NO: 1537122 - DNA, 15 bp, Homo sapiens
accaccagtgaggtg

SEQ ID NO: 1537123 - DNA, 15 bp, Homo sapiens
ccaccagtgaggtgg

SEQ ID NO: 1537124 - DNA, 15 bp, Homo sapiens
caccagtgaggtggc

SEQ ID NO: 1537125 - DNA, 15 bp, Homo sapiens
accagtgaggtggca

SEQ ID NO: 1537126 - DNA, 15 bp, Homo sapiens
ccagtgaggtggcaa

SEQ ID NO: 1537127 - DNA, 15 bp, Homo sapiens
cagtgaggtggcaac

SEQ ID NO: 1537128 - DNA, 15 bp, Homo sapiens
agtgaggtggcaacc

SEQ ID NO: 1537129 - DNA, 15 bp, Homo sapiens
gtgaggtggcaacca

SEQ ID NO: 1537130 - DNA, 15 bp, Homo sapiens
tgaggtggcaaccag

SEQ ID NO: 1537131 - DNA, 15 bp, Homo sapiens
gaggtggcaaccagc

SEQ ID NO: 1537132 - DNA, 15 bp, Homo sapiens
aggtggcaaccagct

SEQ ID NO: 1537133 - DNA, 15 bp, Homo sapiens
ggtggcaaccagctg

SEQ ID NO: 1537134 - DNA, 15 bp, Homo sapiens
gtggcaaccagctgg

SEQ ID NO: 1537135 - DNA, 15 bp, Homo sapiens
tggcaaccagctggg

SEQ ID NO: 1537136 - DNA, 15 bp, Homo sapiens
ggcaaccagctggga

SEQ ID NO: 1537137 - DNA, 15 bp, Homo sapiens
gcaaccagctgggaa

SEQ ID NO: 1537138 - DNA, 15 bp, Homo sapiens
caaccagctgggaag

SEQ ID NO: 1537139 - DNA, 15 bp, Homo sapiens
aaccagctgggaagt

SEQ ID NO: 1537140 - DNA, 15 bp, Homo sapiens
accagctgggaagtg

SEQ ID NO: 1537141 - DNA, 15 bp, Homo sapiens
ccagctgggaagtga

SEQ ID NO: 1537142 - DNA, 15 bp, Homo sapiens
cagctgggaagtgat

SEQ ID NO: 1537143 - DNA, 15 bp, Homo sapiens
agctgggaagtgatc

SEQ ID NO: 1537144 - DNA, 15 bp, Homo sapiens
gctgggaagtgatcc

SEQ ID NO: 1537145 - DNA, 15 bp, Homo sapiens
ctgggaagtgatcca

SEQ ID NO: 1537146 - DNA, 15 bp, Homo sapiens
tgggaagtgatccaa

SEQ ID NO: 1537147 - DNA, 15 bp, Homo sapiens
gggaagtgatccaac

SEQ ID NO: 1537148 - DNA, 15 bp, Homo sapiens
ggaagtgatccaact

SEQ ID NO: 1537149 - DNA, 15 bp, Homo sapiens
gaagtgatccaactc

SEQ ID NO: 1537150 - DNA, 15 bp, Homo sapiens
aagtgatccaactcc

SEQ ID NO: 1537151 - DNA, 15 bp, Homo sapiens
agtgatccaactcca

SEQ ID NO: 1537152 - DNA, 15 bp, Homo sapiens
gtgatccaactccag

SEQ ID NO: 1537153 - DNA, 15 bp, Homo sapiens
tgatccaactccaga

SEQ ID NO: 1537154 - DNA, 15 bp, Homo sapiens
gatccaactccagag

SEQ ID NO: 1537155 - DNA, 15 bp, Homo sapiens
atccaactccagagt

SEQ ID NO: 1537156 - DNA, 15 bp, Homo sapiens
tccaactccagagtc

SEQ ID NO: 1537157 - DNA, 15 bp, Homo sapiens
ccaactccagagtcc

SEQ ID NO: 1537158 - DNA, 15 bp, Homo sapiens
caactccagagtccc

SEQ ID NO: 1537159 - DNA, 15 bp, Homo sapiens
aactccagagtcccg

SEQ ID NO: 1537160 - DNA, 15 bp, Homo sapiens
actccagagtcccgc

SEQ ID NO: 1537161 - DNA, 15 bp, Homo sapiens
ctccagagtcccgcc

SEQ ID NO: 1537162 - DNA, 15 bp, Homo sapiens
tccagagtcccgccc

SEQ ID NO: 1537163 - DNA, 15 bp, Homo sapiens
ccagagtcccgccct

SEQ ID NO: 1537164 - DNA, 15 bp, Homo sapiens
cagagtcccgccctc

SEQ ID NO: 1537165 - DNA, 15 bp, Homo sapiens
agagtcccgccctca

SEQ ID NO: 1537166 - DNA, 15 bp, Homo sapiens
gagtcccgccctcat

SEQ ID NO: 1537167 - DNA, 15 bp, Homo sapiens
agtcccgccctcata

SEQ ID NO: 1537168 - DNA, 15 bp, Homo sapiens
gtcccgccctcatag

SEQ ID NO: 1537169 - DNA, 15 bp, Homo sapiens
tcccgccctcatagg

SEQ ID NO: 1537170 - DNA, 15 bp, Homo sapiens
cccgccctcataggc

SEQ ID NO: 1537171 - DNA, 15 bp, Homo sapiens
ccgccctcataggct

SEQ ID NO: 1537172 - DNA, 15 bp, Homo sapiens
cgccctcataggctg

SEQ ID NO: 1537173 - DNA, 15 bp, Homo sapiens
gccctcataggctga

SEQ ID NO: 1537174 - DNA, 15 bp, Homo sapiens
ccctcataggctgat

SEQ ID NO: 1537175 - DNA, 15 bp, Homo sapiens
cctcataggctgatt

SEQ ID NO: 1537176 - DNA, 15 bp, Homo sapiens
ctcataggctgattt

SEQ ID NO: 1537177 - DNA, 15 bp, Homo sapiens
tcataggctgatttc

SEQ ID NO: 1537178 - DNA, 15 bp, Homo sapiens
cataggctgatttct

SEQ ID NO: 1537179 - DNA, 15 bp, Homo sapiens
ataggctgatttcta

SEQ ID NO: 1537180 - DNA, 15 bp, Homo sapiens
taggctgatttctag

SEQ ID NO: 1537181 - DNA, 15 bp, Homo sapiens
aggctgatttctagg

SEQ ID NO: 1537182 - DNA, 15 bp, Homo sapiens
ggctgatttctagga

SEQ ID NO: 1537183 - DNA, 15 bp, Homo sapiens
gctgatttctaggac

SEQ ID NO: 1537184 - DNA, 15 bp, Homo sapiens
ctgatttctaggacc

SEQ ID NO: 1537185 - DNA, 15 bp, Homo sapiens
tgatttctaggacca

SEQ ID NO: 1537186 - DNA, 15 bp, Homo sapiens
gatttctaggaccac

SEQ ID NO: 1537187 - DNA, 15 bp, Homo sapiens
atttctaggaccacc

SEQ ID NO: 1537188 - DNA, 15 bp, Homo sapiens
tttctaggaccaccc

SEQ ID NO: 1537189 - DNA, 15 bp, Homo sapiens
ttctaggaccacccc

SEQ ID NO: 1537190 - DNA, 15 bp, Homo sapiens
tctaggaccacccct

SEQ ID NO: 1537191 - DNA, 15 bp, Homo sapiens
ctaggaccacccctg

SEQ ID NO: 1537192 - DNA, 15 bp, Homo sapiens
taggaccacccctgg

SEQ ID NO: 1537193 - DNA, 15 bp, Homo sapiens
aggaccacccctggt

SEQ ID NO: 1537194 - DNA, 15 bp, Homo sapiens
ggaccacccctggta

SEQ ID NO: 1537195 - DNA, 15 bp, Homo sapiens
gaccacccctggtat

SEQ ID NO: 1537196 - DNA, 15 bp, Homo sapiens
accacccctggtata

SEQ ID NO: 1537197 - DNA, 15 bp, Homo sapiens
ccacccctggtatac

SEQ ID NO: 1537198 - DNA, 15 bp, Homo sapiens
cacccctggtatact

SEQ ID NO: 1537199 - DNA, 15 bp, Homo sapiens
acccctggtatactg

SEQ ID NO: 1537200 - DNA, 15 bp, Homo sapiens
cccctggtatactgt

SEQ ID NO: 1537201 - DNA, 15 bp, Homo sapiens
ccctggtatactgtg

SEQ ID NO: 1537202 - DNA, 15 bp, Homo sapiens
cctggtatactgtgt

SEQ ID NO: 1537203 - DNA, 15 bp, Homo sapiens
ctggtatactgtgtt

SEQ ID NO: 1537204 - DNA, 15 bp, Homo sapiens
tggtatactgtgtta

SEQ ID NO: 1537205 - DNA, 15 bp, Homo sapiens
ggtatactgtgttag

SEQ ID NO: 1537206 - DNA, 15 bp, Homo sapiens
gtatactgtgttagg

SEQ ID NO: 1537207 - DNA, 15 bp, Homo sapiens
tatactgtgttaggt

SEQ ID NO: 1537208 - DNA, 15 bp, Homo sapiens
atactgtgttaggtt

SEQ ID NO: 1537209 - DNA, 15 bp, Homo sapiens
tactgtgttaggttc

SEQ ID NO: 1537210 - DNA, 15 bp, Homo sapiens
actgtgttaggttct

SEQ ID NO: 1537211 - DNA, 15 bp, Homo sapiens
ctgtgttaggttctt

SEQ ID NO: 1537212 - DNA, 15 bp, Homo sapiens
tgtgttaggttcttg

SEQ ID NO: 1537213 - DNA, 15 bp, Homo sapiens
gtgttaggttcttga

SEQ ID NO: 1537214 - DNA, 15 bp, Homo sapiens
tgttaggttcttgaa

SEQ ID NO: 1537215 - DNA, 15 bp, Homo sapiens
gttaggttcttgaag

SEQ ID NO: 1537216 - DNA, 15 bp, Homo sapiens
ttaggttcttgaagc

SEQ ID NO: 1537217 - DNA, 15 bp, Homo sapiens
taggttcttgaagca

SEQ ID NO: 1537218 - DNA, 15 bp, Homo sapiens
aggttcttgaagcag

SEQ ID NO: 1537219 - DNA, 15 bp, Homo sapiens
ggttcttgaagcaga

SEQ ID NO: 1537220 - DNA, 15 bp, Homo sapiens
gttcttgaagcagag

SEQ ID NO: 1537221 - DNA, 15 bp, Homo sapiens
ttcttgaagcagagc

SEQ ID NO: 1537222 - DNA, 15 bp, Homo sapiens
tcttgaagcagagcc

SEQ ID NO: 1537223 - DNA, 15 bp, Homo sapiens
cttgaagcagagcct

SEQ ID NO: 1537224 - DNA, 15 bp, Homo sapiens
ttgaagcagagcctg

SEQ ID NO: 1537225 - DNA, 15 bp, Homo sapiens
tgaagcagagcctga

SEQ ID NO: 1537226 - DNA, 15 bp, Homo sapiens
gaagcagagcctgag

SEQ ID NO: 1537227 - DNA, 15 bp, Homo sapiens
aagcagagcctgaga

SEQ ID NO: 1537228 - DNA, 15 bp, Homo sapiens
agcagagcctgagat

SEQ ID NO: 1537229 - DNA, 15 bp, Homo sapiens
gcagagcctgagata

SEQ ID NO: 1537230 - DNA, 15 bp, Homo sapiens
cagagcctgagataa

SEQ ID NO: 1537231 - DNA, 15 bp, Homo sapiens
agagcctgagataag

SEQ ID NO: 1537232 - DNA, 15 bp, Homo sapiens
gagcctgagataagg

SEQ ID NO: 1537233 - DNA, 15 bp, Homo sapiens
agcctgagataagga

SEQ ID NO: 1537234 - DNA, 15 bp, Homo sapiens
gcctgagataaggat

SEQ ID NO: 1537235 - DNA, 15 bp, Homo sapiens
cctgagataaggatt

SEQ ID NO: 1537236 - DNA, 15 bp, Homo sapiens
ctgagataaggattc

SEQ ID NO: 1537237 - DNA, 15 bp, Homo sapiens
tgagataaggattct

SEQ ID NO: 1537238 - DNA, 15 bp, Homo sapiens
gagataaggattctg

SEQ ID NO: 1537239 - DNA, 15 bp, Homo sapiens
agataaggattctgg

SEQ ID NO: 1537240 - DNA, 15 bp, Homo sapiens
gataaggattctggc

SEQ ID NO: 1537241 - DNA, 15 bp, Homo sapiens
ataaggattctggca

SEQ ID NO: 1537242 - DNA, 15 bp, Homo sapiens
taaggattctggcac

SEQ ID NO: 1537243 - DNA, 15 bp, Homo sapiens
aaggattctggcacc

SEQ ID NO: 1537244 - DNA, 15 bp, Homo sapiens
aggattctggcacct

SEQ ID NO: 1537245 - DNA, 15 bp, Homo sapiens
ggattctggcacctg

SEQ ID NO: 1537246 - DNA, 15 bp, Homo sapiens
gattctggcacctgt

SEQ ID NO: 1537247 - DNA, 15 bp, Homo sapiens
attctggcacctgtg

SEQ ID NO: 1537248 - DNA, 15 bp, Homo sapiens
ttctggcacctgtga

SEQ ID NO: 1537249 - DNA, 15 bp, Homo sapiens
tctggcacctgtgat

SEQ ID NO: 1537250 - DNA, 15 bp, Homo sapiens
ctggcacctgtgatt

SEQ ID NO: 1537251 - DNA, 15 bp, Homo sapiens
tggcacctgtgattg

SEQ ID NO: 1537252 - DNA, 15 bp, Homo sapiens
ggcacctgtgattga

SEQ ID NO: 1537253 - DNA, 15 bp, Homo sapiens
gcacctgtgattgag

SEQ ID NO: 1537254 - DNA, 15 bp, Homo sapiens
cacctgtgattgagt

SEQ ID NO: 1537255 - DNA, 15 bp, Homo sapiens
acctgtgattgagtg

SEQ ID NO: 1537256 - DNA, 15 bp, Homo sapiens
cctgtgattgagtgg

SEQ ID NO: 1537257 - DNA, 15 bp, Homo sapiens
ctgtgattgagtggg

SEQ ID NO: 1537258 - DNA, 15 bp, Homo sapiens
tgtgattgagtggga

SEQ ID NO: 1537259 - DNA, 15 bp, Homo sapiens
gtgattgagtgggag

SEQ ID NO: 1537260 - DNA, 15 bp, Homo sapiens
tgattgagtgggagg

SEQ ID NO: 1537261 - DNA, 15 bp, Homo sapiens
gattgagtgggaggg

SEQ ID NO: 1537262 - DNA, 15 bp, Homo sapiens
attgagtgggagggt

SEQ ID NO: 1537263 - DNA, 15 bp, Homo sapiens
ttgagtgggagggtg

SEQ ID NO: 1537264 - DNA, 15 bp, Homo sapiens
tgagtgggagggtgc

SEQ ID NO: 1537265 - DNA, 15 bp, Homo sapiens
gagtgggagggtgct

SEQ ID NO: 1537266 - DNA, 15 bp, Homo sapiens
agtgggagggtgctc

SEQ ID NO: 1537267 - DNA, 15 bp, Homo sapiens
gtgggagggtgctct

SEQ ID NO: 1537268 - DNA, 15 bp, Homo sapiens
tgggagggtgctctc

SEQ ID NO: 1537269 - DNA, 15 bp, Homo sapiens
gggagggtgctctca

SEQ ID NO: 1537270 - DNA, 15 bp, Homo sapiens
ggagggtgctctcag

SEQ ID NO: 1537271 - DNA, 15 bp, Homo sapiens
gagggtgctctcagg

SEQ ID NO: 1537272 - DNA, 15 bp, Homo sapiens
agggtgctctcagga

SEQ ID NO: 1537273 - DNA, 15 bp, Homo sapiens
gggtgctctcaggat

SEQ ID NO: 1537274 - DNA, 15 bp, Homo sapiens
ggtgctctcaggatg

SEQ ID NO: 1537275 - DNA, 15 bp, Homo sapiens
gtgctctcaggatga

SEQ ID NO: 1537276 - DNA, 15 bp, Homo sapiens
tgctctcaggatgag

SEQ ID NO: 1537277 - DNA, 15 bp, Homo sapiens
gctctcaggatgaga

SEQ ID NO: 1537278 - DNA, 15 bp, Homo sapiens
ctctcaggatgagat

SEQ ID NO: 1537279 - DNA, 15 bp, Homo sapiens
tctcaggatgagatg

SEQ ID NO: 1537280 - DNA, 15 bp, Homo sapiens
ctcaggatgagatgg

SEQ ID NO: 1537281 - DNA, 15 bp, Homo sapiens
tcaggatgagatggg

SEQ ID NO: 1537282 - DNA, 15 bp, Homo sapiens
caggatgagatgggg

SEQ ID NO: 1537283 - DNA, 15 bp, Homo sapiens
aggatgagatggggt

SEQ ID NO: 1537284 - DNA, 15 bp, Homo sapiens
ggatgagatggggta

SEQ ID NO: 1537285 - DNA, 15 bp, Homo sapiens
gatgagatggggtag

SEQ ID NO: 1537286 - DNA, 15 bp, Homo sapiens
atgagatggggtaga

SEQ ID NO: 1537287 - DNA, 15 bp, Homo sapiens
tgagatggggtagaa

SEQ ID NO: 1537288 - DNA, 15 bp, Homo sapiens
gagatggggtagaaa

SEQ ID NO: 1537289 - DNA, 15 bp, Homo sapiens
agatggggtagaaat

SEQ ID NO: 1537290 - DNA, 15 bp, Homo sapiens
gatggggtagaaata

SEQ ID NO: 1537291 - DNA, 15 bp, Homo sapiens
atggggtagaaatag

SEQ ID NO: 1537292 - DNA, 15 bp, Homo sapiens
tggggtagaaatagg

SEQ ID NO: 1537293 - DNA, 15 bp, Homo sapiens
ggggtagaaataggc

SEQ ID NO: 1537294 - DNA, 15 bp, Homo sapiens
gggtagaaataggca

SEQ ID NO: 1537295 - DNA, 15 bp, Homo sapiens
ggtagaaataggcaa

SEQ ID NO: 1537296 - DNA, 15 bp, Homo sapiens
gtagaaataggcaaa

SEQ ID NO: 1537297 - DNA, 15 bp, Homo sapiens
tagaaataggcaaag

SEQ ID NO: 1537298 - DNA, 15 bp, Homo sapiens
agaaataggcaaagg

SEQ ID NO: 1537299 - DNA, 15 bp, Homo sapiens
gaaataggcaaaggt

SEQ ID NO: 1537300 - DNA, 15 bp, Homo sapiens
aaataggcaaaggta

SEQ ID NO: 1537301 - DNA, 15 bp, Homo sapiens
aataggcaaaggtac

SEQ ID NO: 1537302 - DNA, 15 bp, Homo sapiens
ataggcaaaggtaca

SEQ ID NO: 1537303 - DNA, 15 bp, Homo sapiens
taggcaaaggtacag

SEQ ID NO: 1537304 - DNA, 15 bp, Homo sapiens
aggcaaaggtacaga

SEQ ID NO: 1537305 - DNA, 15 bp, Homo sapiens
ggcaaaggtacagat

SEQ ID NO: 1537306 - DNA, 15 bp, Homo sapiens
gcaaaggtacagatt

SEQ ID NO: 1537307 - DNA, 15 bp, Homo sapiens
caaaggtacagattc

SEQ ID NO: 1537308 - DNA, 15 bp, Homo sapiens
aaaggtacagattca

SEQ ID NO: 1537309 - DNA, 15 bp, Homo sapiens
aaggtacagattcag

SEQ ID NO: 1537310 - DNA, 15 bp, Homo sapiens
aggtacagattcagc

SEQ ID NO: 1537311 - DNA, 15 bp, Homo sapiens
ggtacagattcagca

SEQ ID NO: 1537312 - DNA, 15 bp, Homo sapiens
gtacagattcagcag

SEQ ID NO: 1537313 - DNA, 15 bp, Homo sapiens
tacagattcagcagc

SEQ ID NO: 1537314 - DNA, 15 bp, Homo sapiens
acagattcagcagca

SEQ ID NO: 1537315 - DNA, 15 bp, Homo sapiens
cagattcagcagcag

SEQ ID NO: 1537316 - DNA, 15 bp, Homo sapiens
agattcagcagcagt

SEQ ID NO: 1537317 - DNA, 15 bp, Homo sapiens
gattcagcagcagtt

SEQ ID NO: 1537318 - DNA, 15 bp, Homo sapiens
attcagcagcagttg

SEQ ID NO: 1537319 - DNA, 15 bp, Homo sapiens
ttcagcagcagttga

SEQ ID NO: 1537320 - DNA, 15 bp, Homo sapiens
tcagcagcagttgag

SEQ ID NO: 1537321 - DNA, 15 bp, Homo sapiens
cagcagcagttgagc

SEQ ID NO: 1537322 - DNA, 15 bp, Homo sapiens
agcagcagttgagcc

SEQ ID NO: 1537323 - DNA, 15 bp, Homo sapiens
gcagcagttgagcct

SEQ ID NO: 1537324 - DNA, 15 bp, Homo sapiens
cagcagttgagcctc

SEQ ID NO: 1537325 - DNA, 15 bp, Homo sapiens
agcagttgagcctca

SEQ ID NO: 1537326 - DNA, 15 bp, Homo sapiens
gcagttgagcctcag

SEQ ID NO: 1537327 - DNA, 15 bp, Homo sapiens
cagttgagcctcagt

SEQ ID NO: 1537328 - DNA, 15 bp, Homo sapiens
agttgagcctcagtc

SEQ ID NO: 1537329 - DNA, 15 bp, Homo sapiens
gttgagcctcagtct

SEQ ID NO: 1537330 - DNA, 15 bp, Homo sapiens
ttgagcctcagtctg

SEQ ID NO: 1537331 - DNA, 15 bp, Homo sapiens
tgagcctcagtctga

SEQ ID NO: 1537332 - DNA, 15 bp, Homo sapiens
gagcctcagtctgac

SEQ ID NO: 1537333 - DNA, 15 bp, Homo sapiens
agcctcagtctgacc

SEQ ID NO: 1537334 - DNA, 15 bp, Homo sapiens
gcctcagtctgaccc

SEQ ID NO: 1537335 - DNA, 15 bp, Homo sapiens
cctcagtctgaccca

SEQ ID NO: 1537336 - DNA, 15 bp, Homo sapiens
ctcagtctgacccag

SEQ ID NO: 1537337 - DNA, 15 bp, Homo sapiens
tcagtctgacccagc

SEQ ID NO: 1537338 - DNA, 15 bp, Homo sapiens
cagtctgacccagca

SEQ ID NO: 1537339 - DNA, 15 bp, Homo sapiens
agtctgacccagcag

SEQ ID NO: 1537340 - DNA, 15 bp, Homo sapiens
gtctgacccagcagg

SEQ ID NO: 1537341 - DNA, 15 bp, Homo sapiens
tctgacccagcaggg

SEQ ID NO: 1537342 - DNA, 15 bp, Homo sapiens
ctgacccagcaggga

SEQ ID NO: 1537343 - DNA, 15 bp, Homo sapiens
tgacccagcagggag

SEQ ID NO: 1537344 - DNA, 15 bp, Homo sapiens
gacccagcagggagc

SEQ ID NO: 1537345 - DNA, 15 bp, Homo sapiens
acccagcagggagct

SEQ ID NO: 1537346 - DNA, 15 bp, Homo sapiens
cccagcagggagctc

SEQ ID NO: 1537347 - DNA, 15 bp, Homo sapiens
ccagcagggagctct

SEQ ID NO: 1537348 - DNA, 15 bp, Homo sapiens
cagcagggagctctc

SEQ ID NO: 1537349 - DNA, 15 bp, Homo sapiens
agcagggagctctca

SEQ ID NO: 1537350 - DNA, 15 bp, Homo sapiens
gcagggagctctcaa

SEQ ID NO: 1537351 - DNA, 15 bp, Homo sapiens
cagggagctctcaaa

SEQ ID NO: 1537352 - DNA, 15 bp, Homo sapiens
agggagctctcaaat

SEQ ID NO: 1537353 - DNA, 15 bp, Homo sapiens
gggagctctcaaatg

SEQ ID NO: 1537354 - DNA, 15 bp, Homo sapiens
ggagctctcaaatgt

SEQ ID NO: 1537355 - DNA, 15 bp, Homo sapiens
gagctctcaaatgtg

SEQ ID NO: 1537356 - DNA, 15 bp, Homo sapiens
agctctcaaatgtga

SEQ ID NO: 1537357 - DNA, 15 bp, Homo sapiens
gctctcaaatgtgaa

SEQ ID NO: 1537358 - DNA, 15 bp, Homo sapiens
ctctcaaatgtgaat

SEQ ID NO: 1537359 - DNA, 15 bp, Homo sapiens
tctcaaatgtgaatg

SEQ ID NO: 1537360 - DNA, 15 bp, Homo sapiens
ctcaaatgtgaatga

SEQ ID NO: 1537361 - DNA, 15 bp, Homo sapiens
tcaaatgtgaatgac

SEQ ID NO: 1537362 - DNA, 15 bp, Homo sapiens
caaatgtgaatgaca

SEQ ID NO: 1537363 - DNA, 15 bp, Homo sapiens
aaatgtgaatgacat

SEQ ID NO: 1537364 - DNA, 15 bp, Homo sapiens
aatgtgaatgacatc

SEQ ID NO: 1537365 - DNA, 15 bp, Homo sapiens
atgtgaatgacatca

SEQ ID NO: 1537366 - DNA, 15 bp, Homo sapiens
tgtgaatgacatcac

SEQ ID NO: 1537367 - DNA, 15 bp, Homo sapiens
gtgaatgacatcaca

SEQ ID NO: 1537368 - DNA, 15 bp, Homo sapiens
tgaatgacatcacag

SEQ ID NO: 1537369 - DNA, 15 bp, Homo sapiens
gaatgacatcacaga

SEQ ID NO: 1537370 - DNA, 15 bp, Homo sapiens
aatgacatcacagag

SEQ ID NO: 1537371 - DNA, 15 bp, Homo sapiens
atgacatcacagagt

SEQ ID NO: 1537372 - DNA, 15 bp, Homo sapiens
tgacatcacagagtt

SEQ ID NO: 1537373 - DNA, 15 bp, Homo sapiens
gacatcacagagttg

SEQ ID NO: 1537374 - DNA, 15 bp, Homo sapiens
acatcacagagttgt

SEQ ID NO: 1537375 - DNA, 15 bp, Homo sapiens
catcacagagttgtc

SEQ ID NO: 1537376 - DNA, 15 bp, Homo sapiens
atcacagagttgtcc

SEQ ID NO: 1537377 - DNA, 15 bp, Homo sapiens
tcacagagttgtccc

SEQ ID NO: 1537378 - DNA, 15 bp, Homo sapiens
cacagagttgtccct

SEQ ID NO: 1537379 - DNA, 15 bp, Homo sapiens
acagagttgtccctc

SEQ ID NO: 1537380 - DNA, 15 bp, Homo sapiens
cagagttgtccctct

SEQ ID NO: 1537381 - DNA, 15 bp, Homo sapiens
agagttgtccctctg

SEQ ID NO: 1537382 - DNA, 15 bp, Homo sapiens
gagttgtccctctga

SEQ ID NO: 1537383 - DNA, 15 bp, Homo sapiens
agttgtccctctgag

SEQ ID NO: 1537384 - DNA, 15 bp, Homo sapiens
gttgtccctctgagg

SEQ ID NO: 1537385 - DNA, 15 bp, Homo sapiens
ttgtccctctgaggc

SEQ ID NO: 1537386 - DNA, 15 bp, Homo sapiens
tgtccctctgaggca

SEQ ID NO: 1537387 - DNA, 15 bp, Homo sapiens
gtccctctgaggcag

SEQ ID NO: 1537388 - DNA, 15 bp, Homo sapiens
tccctctgaggcagg

SEQ ID NO: 1537389 - DNA, 15 bp, Homo sapiens
ccctctgaggcaggg

SEQ ID NO: 1537390 - DNA, 15 bp, Homo sapiens
cctctgaggcagggg

SEQ ID NO: 1537391 - DNA, 15 bp, Homo sapiens
ctctgaggcaggggc

SEQ ID NO: 1537392 - DNA, 15 bp, Homo sapiens
tctgaggcaggggcc

SEQ ID NO: 1537393 - DNA, 15 bp, Homo sapiens
ctgaggcaggggcca

SEQ ID NO: 1537394 - DNA, 15 bp, Homo sapiens
tgaggcaggggccag

SEQ ID NO: 1537395 - DNA, 15 bp, Homo sapiens
gaggcaggggccagc

SEQ ID NO: 1537396 - DNA, 15 bp, Homo sapiens
aggcaggggccagcc

SEQ ID NO: 1537397 - DNA, 15 bp, Homo sapiens
ggcaggggccagcct

SEQ ID NO: 1537398 - DNA, 15 bp, Homo sapiens
gcaggggccagcctt

SEQ ID NO: 1537399 - DNA, 15 bp, Homo sapiens
caggggccagccttt

SEQ ID NO: 1537400 - DNA, 15 bp, Homo sapiens
aggggccagcctttg

SEQ ID NO: 1537401 - DNA, 15 bp, Homo sapiens
ggggccagcctttgt

SEQ ID NO: 1537402 - DNA, 15 bp, Homo sapiens
gggccagcctttgtg

SEQ ID NO: 1537403 - DNA, 15 bp, Homo sapiens
ggccagcctttgtgc

SEQ ID NO: 1537404 - DNA, 15 bp, Homo sapiens
gccagcctttgtgct

SEQ ID NO: 1537405 - DNA, 15 bp, Homo sapiens
ccagcctttgtgctc

SEQ ID NO: 1537406 - DNA, 15 bp, Homo sapiens
cagcctttgtgctcc

SEQ ID NO: 1537407 - DNA, 15 bp, Homo sapiens
agcctttgtgctcct

SEQ ID NO: 1537408 - DNA, 15 bp, Homo sapiens
gcctttgtgctccta

SEQ ID NO: 1537409 - DNA, 15 bp, Homo sapiens
cctttgtgctcctac

SEQ ID NO: 1537410 - DNA, 15 bp, Homo sapiens
ctttgtgctcctaca

SEQ ID NO: 1537411 - DNA, 15 bp, Homo sapiens
tttgtgctcctacat

SEQ ID NO: 1537412 - DNA, 15 bp, Homo sapiens
ttgtgctcctacatg

SEQ ID NO: 1537413 - DNA, 15 bp, Homo sapiens
tgtgctcctacatga

SEQ ID NO: 1537414 - DNA, 15 bp, Homo sapiens
gtgctcctacatgag

SEQ ID NO: 1537415 - DNA, 15 bp, Homo sapiens
tgctcctacatgagt

SEQ ID NO: 1537416 - DNA, 15 bp, Homo sapiens
gctcctacatgagtc

SEQ ID NO: 1537417 - DNA, 15 bp, Homo sapiens
ctcctacatgagtca

SEQ ID NO: 1537418 - DNA, 15 bp, Homo sapiens
tcctacatgagtcag

SEQ ID NO: 1537419 - DNA, 15 bp, Homo sapiens
cctacatgagtcagt

SEQ ID NO: 1537420 - DNA, 15 bp, Homo sapiens
ctacatgagtcagtc

SEQ ID NO: 1537421 - DNA, 15 bp, Homo sapiens
tacatgagtcagtca

SEQ ID NO: 1537422 - DNA, 15 bp, Homo sapiens
acatgagtcagtcac

SEQ ID NO: 1537423 - DNA, 15 bp, Homo sapiens
catgagtcagtcact

SEQ ID NO: 1537424 - DNA, 15 bp, Homo sapiens
atgagtcagtcactg

SEQ ID NO: 1537425 - DNA, 15 bp, Homo sapiens
tgagtcagtcactgg

SEQ ID NO: 1537426 - DNA, 15 bp, Homo sapiens
gagtcagtcactggc

SEQ ID NO: 1537427 - DNA, 15 bp, Homo sapiens
agtcagtcactggct

SEQ ID NO: 1537428 - DNA, 15 bp, Homo sapiens
gtcagtcactggctg

SEQ ID NO: 1537429 - DNA, 15 bp, Homo sapiens
tcagtcactggctgg

SEQ ID NO: 1537430 - DNA, 15 bp, Homo sapiens
cagtcactggctgga

SEQ ID NO: 1537431 - DNA, 15 bp, Homo sapiens
agtcactggctggag

SEQ ID NO: 1537432 - DNA, 15 bp, Homo sapiens
gtcactggctggagg

SEQ ID NO: 1537433 - DNA, 15 bp, Homo sapiens
tcactggctggaggc

SEQ ID NO: 1537434 - DNA, 15 bp, Homo sapiens
cactggctggaggcc

SEQ ID NO: 1537435 - DNA, 15 bp, Homo sapiens
actggctggaggccc

SEQ ID NO: 1537436 - DNA, 15 bp, Homo sapiens
ctggctggaggcccc

SEQ ID NO: 1537437 - DNA, 15 bp, Homo sapiens
tggctggaggcccct

SEQ ID NO: 1537438 - DNA, 15 bp, Homo sapiens
ggctggaggcccctg

SEQ ID NO: 1537439 - DNA, 15 bp, Homo sapiens
gctggaggcccctgg

SEQ ID NO: 1537440 - DNA, 15 bp, Homo sapiens
ctggaggcccctggg

SEQ ID NO: 1537441 - DNA, 15 bp, Homo sapiens
tggaggcccctgggg

SEQ ID NO: 1537442 - DNA, 15 bp, Homo sapiens
ggaggcccctgggga

SEQ ID NO: 1537443 - DNA, 15 bp, Homo sapiens
gaggcccctggggaa

SEQ ID NO: 1537444 - DNA, 15 bp, Homo sapiens
aggcccctggggaaa

SEQ ID NO: 1537445 - DNA, 15 bp, Homo sapiens
ggcccctggggaaag

SEQ ID NO: 1537446 - DNA, 15 bp, Homo sapiens
gcccctggggaaagg

SEQ ID NO: 1537447 - DNA, 15 bp, Homo sapiens
cccctggggaaaggc

SEQ ID NO: 1537448 - DNA, 15 bp, Homo sapiens
ccctggggaaaggct

SEQ ID NO: 1537449 - DNA, 15 bp, Homo sapiens
cctggggaaaggcta

SEQ ID NO: 1537450 - DNA, 15 bp, Homo sapiens
ctggggaaaggctag

SEQ ID NO: 1537451 - DNA, 15 bp, Homo sapiens
tggggaaaggctagg

SEQ ID NO: 1537452 - DNA, 15 bp, Homo sapiens
ggggaaaggctaggg

SEQ ID NO: 1537453 - DNA, 15 bp, Homo sapiens
gggaaaggctagggc

SEQ ID NO: 1537454 - DNA, 15 bp, Homo sapiens
ggaaaggctagggct

SEQ ID NO: 1537455 - DNA, 15 bp, Homo sapiens
gaaaggctagggctg

SEQ ID NO: 1537456 - DNA, 15 bp, Homo sapiens
aaaggctagggctgc

SEQ ID NO: 1537457 - DNA, 15 bp, Homo sapiens
aaggctagggctgcc

SEQ ID NO: 1537458 - DNA, 15 bp, Homo sapiens
aggctagggctgcca

SEQ ID NO: 1537459 - DNA, 15 bp, Homo sapiens
ggctagggctgccag

SEQ ID NO: 1537460 - DNA, 15 bp, Homo sapiens
gctagggctgccagc

SEQ ID NO: 1537461 - DNA, 15 bp, Homo sapiens
ctagggctgccagct

SEQ ID NO: 1537462 - DNA, 15 bp, Homo sapiens
tagggctgccagctt

SEQ ID NO: 1537463 - DNA, 15 bp, Homo sapiens
agggctgccagcttt

SEQ ID NO: 1537464 - DNA, 15 bp, Homo sapiens
gggctgccagcttta

SEQ ID NO: 1537465 - DNA, 15 bp, Homo sapiens
ggctgccagctttag

SEQ ID NO: 1537466 - DNA, 15 bp, Homo sapiens
gctgccagctttagc

SEQ ID NO: 1537467 - DNA, 15 bp, Homo sapiens
ctgccagctttagca

SEQ ID NO: 1537468 - DNA, 15 bp, Homo sapiens
tgccagctttagcaa

SEQ ID NO: 1537469 - DNA, 15 bp, Homo sapiens
gccagctttagcaaa

SEQ ID NO: 1537470 - DNA, 15 bp, Homo sapiens
ccagctttagcaaat

SEQ ID NO: 1537471 - DNA, 15 bp, Homo sapiens
cagctttagcaaata

SEQ ID NO: 1537472 - DNA, 15 bp, Homo sapiens
agctttagcaaataa

SEQ ID NO: 1537473 - DNA, 15 bp, Homo sapiens
gctttagcaaataaa

SEQ ID NO: 1537474 - DNA, 15 bp, Homo sapiens
ctttagcaaataaaa

SEQ ID NO: 1537475 - DNA, 15 bp, Homo sapiens
tttagcaaataaaaa

SEQ ID NO: 1537476 - DNA, 15 bp, Homo sapiens
ttagcaaataaaaaa

SEQ ID NO: 1537477 - DNA, 15 bp, Homo sapiens
tagcaaataaaaaat

SEQ ID NO: 1537478 - DNA, 15 bp, Homo sapiens
agcaaataaaaaatt

SEQ ID NO: 1537479 - DNA, 15 bp, Homo sapiens
gcaaataaaaaatta

SEQ ID NO: 1537480 - DNA, 15 bp, Homo sapiens
caaataaaaaattag

SEQ ID NO: 1537481 - DNA, 15 bp, Homo sapiens
aaataaaaaattagg

SEQ ID NO: 1537482 - DNA, 15 bp, Homo sapiens
aataaaaaattaggg

SEQ ID NO: 1537483 - DNA, 15 bp, Homo sapiens
ataaaaaattagggc

SEQ ID NO: 1537484 - DNA, 15 bp, Homo sapiens
taaaaaattagggca

SEQ ID NO: 1537485 - DNA, 15 bp, Homo sapiens
aaaaaattagggcac

SEQ ID NO: 1537486 - DNA, 15 bp, Homo sapiens
aaaaattagggcact

SEQ ID NO: 1537487 - DNA, 15 bp, Homo sapiens
aaaattagggcactc

SEQ ID NO: 1537488 - DNA, 15 bp, Homo sapiens
aaattagggcactca

SEQ ID NO: 1537489 - DNA, 15 bp, Homo sapiens
aattagggcactcag

SEQ ID NO: 1537490 - DNA, 15 bp, Homo sapiens
attagggcactcagt

SEQ ID NO: 1537491 - DNA, 15 bp, Homo sapiens
ttagggcactcagtt

SEQ ID NO: 1537492 - DNA, 15 bp, Homo sapiens
tagggcactcagtta

SEQ ID NO: 1537493 - DNA, 15 bp, Homo sapiens
agggcactcagttaa

SEQ ID NO: 1537494 - DNA, 15 bp, Homo sapiens
gggcactcagttaaa

SEQ ID NO: 1537495 - DNA, 15 bp, Homo sapiens
ggcactcagttaaat

SEQ ID NO: 1537496 - DNA, 15 bp, Homo sapiens
gcactcagttaaatt

SEQ ID NO: 1537497 - DNA, 15 bp, Homo sapiens
cactcagttaaattg

SEQ ID NO: 1537498 - DNA, 15 bp, Homo sapiens
actcagttaaattga

SEQ ID NO: 1537499 - DNA, 15 bp, Homo sapiens
ctcagttaaattgaa

SEQ ID NO: 1537500 - DNA, 15 bp, Homo sapiens
tcagttaaattgaat

SEQ ID NO: 1537501 - DNA, 15 bp, Homo sapiens
cagttaaattgaatt

SEQ ID NO: 1537502 - DNA, 15 bp, Homo sapiens
agttaaattgaattt

SEQ ID NO: 1537503 - DNA, 15 bp, Homo sapiens
gttaaattgaatttc

SEQ ID NO: 1537504 - DNA, 15 bp, Homo sapiens
ttaaattgaatttca

SEQ ID NO: 1537505 - DNA, 15 bp, Homo sapiens
taaattgaatttcag

SEQ ID NO: 1537506 - DNA, 15 bp, Homo sapiens
aaattgaatttcaga

SEQ ID NO: 1537507 - DNA, 15 bp, Homo sapiens
aattgaatttcagat

SEQ ID NO: 1537508 - DNA, 15 bp, Homo sapiens
attgaatttcagata

SEQ ID NO: 1537509 - DNA, 15 bp, Homo sapiens
ttgaatttcagataa

SEQ ID NO: 1537510 - DNA, 15 bp, Homo sapiens
tgaatttcagataaa

SEQ ID NO: 1537511 - DNA, 15 bp, Homo sapiens
gaatttcagataaac

SEQ ID NO: 1537512 - DNA, 15 bp, Homo sapiens
aatttcagataaaca

SEQ ID NO: 1537513 - DNA, 15 bp, Homo sapiens
atttcagataaacaa

SEQ ID NO: 1537514 - DNA, 15 bp, Homo sapiens
tttcagataaacaac

SEQ ID NO: 1537515 - DNA, 15 bp, Homo sapiens
ttcagataaacaaca

SEQ ID NO: 1537516 - DNA, 15 bp, Homo sapiens
tcagataaacaacaa

SEQ ID NO: 1537517 - DNA, 15 bp, Homo sapiens
cagataaacaacaaa

SEQ ID NO: 1537518 - DNA, 15 bp, Homo sapiens
agataaacaacaaat

SEQ ID NO: 1537519 - DNA, 15 bp, Homo sapiens
gataaacaacaaatt

SEQ ID NO: 1537520 - DNA, 15 bp, Homo sapiens
ataaacaacaaatta

SEQ ID NO: 1537521 - DNA, 15 bp, Homo sapiens
taaacaacaaattat

SEQ ID NO: 1537522 - DNA, 15 bp, Homo sapiens
aaacaacaaattatt

SEQ ID NO: 1537523 - DNA, 15 bp, Homo sapiens
aacaacaaattattt

SEQ ID NO: 1537524 - DNA, 15 bp, Homo sapiens
acaacaaattatttt

SEQ ID NO: 1537525 - DNA, 15 bp, Homo sapiens
caacaaattattttt

SEQ ID NO: 1537526 - DNA, 15 bp, Homo sapiens
aacaaattatttttt

SEQ ID NO: 1537527 - DNA, 15 bp, Homo sapiens
acaaattatttttta

SEQ ID NO: 1537528 - DNA, 15 bp, Homo sapiens
caaattattttttag

SEQ ID NO: 1537529 - DNA, 15 bp, Homo sapiens
aaattattttttagt

SEQ ID NO: 1537530 - DNA, 15 bp, Homo sapiens
aattattttttagta

SEQ ID NO: 1537531 - DNA, 15 bp, Homo sapiens
attattttttagtat

SEQ ID NO: 1537532 - DNA, 15 bp, Homo sapiens
ttattttttagtata

SEQ ID NO: 1537533 - DNA, 15 bp, Homo sapiens
tattttttagtatat

SEQ ID NO: 1537534 - DNA, 15 bp, Homo sapiens
attttttagtatatg

SEQ ID NO: 1537535 - DNA, 15 bp, Homo sapiens
ttttttagtatatgt

SEQ ID NO: 1537536 - DNA, 15 bp, Homo sapiens
tttttagtatatgtc

SEQ ID NO: 1537537 - DNA, 15 bp, Homo sapiens
ttttagtatatgtcc

SEQ ID NO: 1537538 - DNA, 15 bp, Homo sapiens
tttagtatatgtccc

SEQ ID NO: 1537539 - DNA, 15 bp, Homo sapiens
ttagtatatgtccca

SEQ ID NO: 1537540 - DNA, 15 bp, Homo sapiens
tagtatatgtcccaa

SEQ ID NO: 1537541 - DNA, 15 bp, Homo sapiens
agtatatgtcccaaa

SEQ ID NO: 1537542 - DNA, 15 bp, Homo sapiens
gtatatgtcccaaat

SEQ ID NO: 1537543 - DNA, 15 bp, Homo sapiens
tatatgtcccaaatt

SEQ ID NO: 1537544 - DNA, 15 bp, Homo sapiens
atatgtcccaaattg

SEQ ID NO: 1537545 - DNA, 15 bp, Homo sapiens
tatgtcccaaattgt

SEQ ID NO: 1537546 - DNA, 15 bp, Homo sapiens
atgtcccaaattgtg

SEQ ID NO: 1537547 - DNA, 15 bp, Homo sapiens
tgtcccaaattgtgc

SEQ ID NO: 1537548 - DNA, 15 bp, Homo sapiens
gtcccaaattgtgca

SEQ ID NO: 1537549 - DNA, 15 bp, Homo sapiens
tcccaaattgtgcat

SEQ ID NO: 1537550 - DNA, 15 bp, Homo sapiens
cccaaattgtgcata

SEQ ID NO: 1537551 - DNA, 15 bp, Homo sapiens
ccaaattgtgcataa

SEQ ID NO: 1537552 - DNA, 15 bp, Homo sapiens
caaattgtgcataac

SEQ ID NO: 1537553 - DNA, 15 bp, Homo sapiens
aaattgtgcataaca

SEQ ID NO: 1537554 - DNA, 15 bp, Homo sapiens
aattgtgcataacat

SEQ ID NO: 1537555 - DNA, 15 bp, Homo sapiens
attgtgcataacata

SEQ ID NO: 1537556 - DNA, 15 bp, Homo sapiens
ttgtgcataacataa

SEQ ID NO: 1537557 - DNA, 15 bp, Homo sapiens
tgtgcataacataat

SEQ ID NO: 1537558 - DNA, 15 bp, Homo sapiens
gtgcataacataatg

SEQ ID NO: 1537559 - DNA, 15 bp, Homo sapiens
tgcataacataatgt

SEQ ID NO: 1537560 - DNA, 15 bp, Homo sapiens
gcataacataatgtg

SEQ ID NO: 1537561 - DNA, 15 bp, Homo sapiens
cataacataatgtgt

SEQ ID NO: 1537562 - DNA, 15 bp, Homo sapiens
ataacataatgtgtt

SEQ ID NO: 1537563 - DNA, 15 bp, Homo sapiens
taacataatgtgttt

SEQ ID NO: 1537564 - DNA, 15 bp, Homo sapiens
aacataatgtgtttt

SEQ ID NO: 1537565 - DNA, 15 bp, Homo sapiens
acataatgtgttttc

SEQ ID NO: 1537566 - DNA, 15 bp, Homo sapiens
cataatgtgttttct

SEQ ID NO: 1537567 - DNA, 15 bp, Homo sapiens
ataatgtgttttctc

SEQ ID NO: 1537568 - DNA, 15 bp, Homo sapiens
taatgtgttttctcc

SEQ ID NO: 1537569 - DNA, 15 bp, Homo sapiens
aatgtgttttctccg

SEQ ID NO: 1537570 - DNA, 15 bp, Homo sapiens
atgtgttttctccgc

SEQ ID NO: 1537571 - DNA, 15 bp, Homo sapiens
tgtgttttctccgcc

SEQ ID NO: 1537572 - DNA, 15 bp, Homo sapiens
gtgttttctccgcca

SEQ ID NO: 1537573 - DNA, 15 bp, Homo sapiens
tgttttctccgccag

SEQ ID NO: 1537574 - DNA, 15 bp, Homo sapiens
gttttctccgccagc

SEQ ID NO: 1537575 - DNA, 15 bp, Homo sapiens
ttttctccgccagcc

SEQ ID NO: 1537576 - DNA, 15 bp, Homo sapiens
tttctccgccagccc

SEQ ID NO: 1537577 - DNA, 15 bp, Homo sapiens
ttctccgccagccct

SEQ ID NO: 1537578 - DNA, 15 bp, Homo sapiens
tctccgccagccctg

SEQ ID NO: 1537579 - DNA, 15 bp, Homo sapiens
ctccgccagccctgg

SEQ ID NO: 1537580 - DNA, 15 bp, Homo sapiens
tccgccagccctggg

SEQ ID NO: 1537581 - DNA, 15 bp, Homo sapiens
ccgccagccctggga

SEQ ID NO: 1537582 - DNA, 15 bp, Homo sapiens
cgccagccctgggaa

SEQ ID NO: 1537583 - DNA, 15 bp, Homo sapiens
gccagccctgggaag

SEQ ID NO: 1537584 - DNA, 15 bp, Homo sapiens
ccagccctgggaagg

SEQ ID NO: 1537585 - DNA, 15 bp, Homo sapiens
cagccctgggaaggg

SEQ ID NO: 1537586 - DNA, 15 bp, Homo sapiens
agccctgggaagggc

SEQ ID NO: 1537587 - DNA, 15 bp, Homo sapiens
gccctgggaagggcg

SEQ ID NO: 1537588 - DNA, 15 bp, Homo sapiens
ccctgggaagggcgt

SEQ ID NO: 1537589 - DNA, 15 bp, Homo sapiens
cctgggaagggcgta

SEQ ID NO: 1537590 - DNA, 15 bp, Homo sapiens
ctgggaagggcgtaa

SEQ ID NO: 1537591 - DNA, 15 bp, Homo sapiens
tgggaagggcgtaac

SEQ ID NO: 1537592 - DNA, 15 bp, Homo sapiens
gggaagggcgtaact

SEQ ID NO: 1537593 - DNA, 15 bp, Homo sapiens
ggaagggcgtaactt

SEQ ID NO: 1537594 - DNA, 15 bp, Homo sapiens
gaagggcgtaacttc

SEQ ID NO: 1537595 - DNA, 15 bp, Homo sapiens
aagggcgtaacttcc

SEQ ID NO: 1537596 - DNA, 15 bp, Homo sapiens
agggcgtaacttccc

SEQ ID NO: 1537597 - DNA, 15 bp, Homo sapiens
gggcgtaacttccca

SEQ ID NO: 1537598 - DNA, 15 bp, Homo sapiens
ggcgtaacttcccag

SEQ ID NO: 1537599 - DNA, 15 bp, Homo sapiens
gcgtaacttcccagg

SEQ ID NO: 1537600 - DNA, 15 bp, Homo sapiens
cgtaacttcccaggt

SEQ ID NO: 1537601 - DNA, 15 bp, Homo sapiens
gtaacttcccaggta

SEQ ID NO: 1537602 - DNA, 15 bp, Homo sapiens
taacttcccaggtat

SEQ ID NO: 1537603 - DNA, 15 bp, Homo sapiens
aacttcccaggtatt

SEQ ID NO: 1537604 - DNA, 15 bp, Homo sapiens
acttcccaggtattt

SEQ ID NO: 1537605 - DNA, 15 bp, Homo sapiens
cttcccaggtatttc

SEQ ID NO: 1537606 - DNA, 15 bp, Homo sapiens
ttcccaggtatttct

SEQ ID NO: 1537607 - DNA, 15 bp, Homo sapiens
tcccaggtatttcta

SEQ ID NO: 1537608 - DNA, 15 bp, Homo sapiens
cccaggtatttctag

SEQ ID NO: 1537609 - DNA, 15 bp, Homo sapiens
ccaggtatttctagg

SEQ ID NO: 1537610 - DNA, 15 bp, Homo sapiens
caggtatttctaggt

SEQ ID NO: 1537611 - DNA, 15 bp, Homo sapiens
aggtatttctaggtg

SEQ ID NO: 1537612 - DNA, 15 bp, Homo sapiens
ggtatttctaggtga

SEQ ID NO: 1537613 - DNA, 15 bp, Homo sapiens
gtatttctaggtgaa

SEQ ID NO: 1537614 - DNA, 15 bp, Homo sapiens
tatttctaggtgaag

SEQ ID NO: 1537615 - DNA, 15 bp, Homo sapiens
atttctaggtgaagt

SEQ ID NO: 1537616 - DNA, 15 bp, Homo sapiens
tttctaggtgaagta

SEQ ID NO: 1537617 - DNA, 15 bp, Homo sapiens
ttctaggtgaagtaa

SEQ ID NO: 1537618 - DNA, 15 bp, Homo sapiens
tctaggtgaagtaac

SEQ ID NO: 1537619 - DNA, 15 bp, Homo sapiens
ctaggtgaagtaact

SEQ ID NO: 1537620 - DNA, 15 bp, Homo sapiens
taggtgaagtaactt

SEQ ID NO: 1537621 - DNA, 15 bp, Homo sapiens
aggtgaagtaacttt

SEQ ID NO: 1537622 - DNA, 15 bp, Homo sapiens
ggtgaagtaactttg

SEQ ID NO: 1537623 - DNA, 15 bp, Homo sapiens
gtgaagtaactttgt

SEQ ID NO: 1537624 - DNA, 15 bp, Homo sapiens
tgaagtaactttgta

SEQ ID NO: 1537625 - DNA, 15 bp, Homo sapiens
gaagtaactttgtag

SEQ ID NO: 1537626 - DNA, 15 bp, Homo sapiens
aagtaactttgtaga

SEQ ID NO: 1537627 - DNA, 15 bp, Homo sapiens
agtaactttgtagat

SEQ ID NO: 1537628 - DNA, 15 bp, Homo sapiens
gtaactttgtagatc

SEQ ID NO: 1537629 - DNA, 15 bp, Homo sapiens
taactttgtagatca

SEQ ID NO: 1537630 - DNA, 15 bp, Homo sapiens
aactttgtagatcag

SEQ ID NO: 1537631 - DNA, 15 bp, Homo sapiens
actttgtagatcagg

SEQ ID NO: 1537632 - DNA, 15 bp, Homo sapiens
ctttgtagatcagga

SEQ ID NO: 1537633 - DNA, 15 bp, Homo sapiens
tttgtagatcaggag

SEQ ID NO: 1537634 - DNA, 15 bp, Homo sapiens
ttgtagatcaggagt

SEQ ID NO: 1537635 - DNA, 15 bp, Homo sapiens
tgtagatcaggagta

SEQ ID NO: 1537636 - DNA, 15 bp, Homo sapiens
gtagatcaggagtaa

SEQ ID NO: 1537637 - DNA, 15 bp, Homo sapiens
tagatcaggagtaag

SEQ ID NO: 1537638 - DNA, 15 bp, Homo sapiens
agatcaggagtaagt

SEQ ID NO: 1537639 - DNA, 15 bp, Homo sapiens
gatcaggagtaagtc

SEQ ID NO: 1537640 - DNA, 15 bp, Homo sapiens
atcaggagtaagtcc

SEQ ID NO: 1537641 - DNA, 15 bp, Homo sapiens
tcaggagtaagtccc

SEQ ID NO: 1537642 - DNA, 15 bp, Homo sapiens
caggagtaagtccca

SEQ ID NO: 1537643 - DNA, 15 bp, Homo sapiens
aggagtaagtcccag

SEQ ID NO: 1537644 - DNA, 15 bp, Homo sapiens
ggagtaagtcccagg

SEQ ID NO: 1537645 - DNA, 15 bp, Homo sapiens
gagtaagtcccagga

SEQ ID NO: 1537646 - DNA, 15 bp, Homo sapiens
agtaagtcccaggaa

SEQ ID NO: 1537647 - DNA, 15 bp, Homo sapiens
gtaagtcccaggaaa

SEQ ID NO: 1537648 - DNA, 15 bp, Homo sapiens
taagtcccaggaaag

SEQ ID NO: 1537649 - DNA, 15 bp, Homo sapiens
aagtcccaggaaaga

SEQ ID NO: 1537650 - DNA, 15 bp, Homo sapiens
agtcccaggaaagaa

SEQ ID NO: 1537651 - DNA, 15 bp, Homo sapiens
gtcccaggaaagaag

SEQ ID NO: 1537652 - DNA, 15 bp, Homo sapiens
tcccaggaaagaagt

SEQ ID NO: 1537653 - DNA, 15 bp, Homo sapiens
cccaggaaagaagtc

SEQ ID NO: 1537654 - DNA, 15 bp, Homo sapiens
ccaggaaagaagtcc

SEQ ID NO: 1537655 - DNA, 15 bp, Homo sapiens
caggaaagaagtcca

SEQ ID NO: 1537656 - DNA, 15 bp, Homo sapiens
aggaaagaagtccag

SEQ ID NO: 1537657 - DNA, 15 bp, Homo sapiens
ggaaagaagtccagc

SEQ ID NO: 1537658 - DNA, 15 bp, Homo sapiens
gaaagaagtccagct

SEQ ID NO: 1537659 - DNA, 15 bp, Homo sapiens
aaagaagtccagctc

SEQ ID NO: 1537660 - DNA, 15 bp, Homo sapiens
aagaagtccagctct

SEQ ID NO: 1537661 - DNA, 15 bp, Homo sapiens
agaagtccagctctt

SEQ ID NO: 1537662 - DNA, 15 bp, Homo sapiens
gaagtccagctcttc

SEQ ID NO: 1537663 - DNA, 15 bp, Homo sapiens
aagtccagctcttct

SEQ ID NO: 1537664 - DNA, 15 bp, Homo sapiens
agtccagctcttctc

SEQ ID NO: 1537665 - DNA, 15 bp, Homo sapiens
gtccagctcttctct

SEQ ID NO: 1537666 - DNA, 15 bp, Homo sapiens
tccagctcttctctt

SEQ ID NO: 1537667 - DNA, 15 bp, Homo sapiens
ccagctcttctcttc

SEQ ID NO: 1537668 - DNA, 15 bp, Homo sapiens
cagctcttctcttca

SEQ ID NO: 1537669 - DNA, 15 bp, Homo sapiens
agctcttctcttcag

SEQ ID NO: 1537670 - DNA, 15 bp, Homo sapiens
gctcttctcttcagc

SEQ ID NO: 1537671 - DNA, 15 bp, Homo sapiens
ctcttctcttcagcc

SEQ ID NO: 1537672 - DNA, 15 bp, Homo sapiens
tcttctcttcagccc

SEQ ID NO: 1537673 - DNA, 15 bp, Homo sapiens
cttctcttcagccct

SEQ ID NO: 1537674 - DNA, 15 bp, Homo sapiens
ttctcttcagccctg

SEQ ID NO: 1537675 - DNA, 15 bp, Homo sapiens
tctcttcagccctgg

SEQ ID NO: 1537676 - DNA, 15 bp, Homo sapiens
ctcttcagccctggg

SEQ ID NO: 1537677 - DNA, 15 bp, Homo sapiens
tcttcagccctgggc

SEQ ID NO: 1537678 - DNA, 15 bp, Homo sapiens
cttcagccctgggca

SEQ ID NO: 1537679 - DNA, 15 bp, Homo sapiens
ttcagccctgggcag

SEQ ID NO: 1537680 - DNA, 15 bp, Homo sapiens
tcagccctgggcagc

SEQ ID NO: 1537681 - DNA, 15 bp, Homo sapiens
cagccctgggcagct

SEQ ID NO: 1537682 - DNA, 15 bp, Homo sapiens
agccctgggcagctg

SEQ ID NO: 1537683 - DNA, 15 bp, Homo sapiens
gccctgggcagctgg

SEQ ID NO: 1537684 - DNA, 15 bp, Homo sapiens
ccctgggcagctggg

SEQ ID NO: 1537685 - DNA, 15 bp, Homo sapiens
cctgggcagctgggg

SEQ ID NO: 1537686 - DNA, 15 bp, Homo sapiens
ctgggcagctggggg

SEQ ID NO: 1537687 - DNA, 15 bp, Homo sapiens
tgggcagctgggggt

SEQ ID NO: 1537688 - DNA, 15 bp, Homo sapiens
gggcagctgggggta

SEQ ID NO: 1537689 - DNA, 15 bp, Homo sapiens
ggcagctgggggtag

SEQ ID NO: 1537690 - DNA, 15 bp, Homo sapiens
gcagctgggggtagg

SEQ ID NO: 1537691 - DNA, 15 bp, Homo sapiens
cagctgggggtaggc

SEQ ID NO: 1537692 - DNA, 15 bp, Homo sapiens
agctgggggtaggca

SEQ ID NO: 1537693 - DNA, 15 bp, Homo sapiens
gctgggggtaggcac

SEQ ID NO: 1537694 - DNA, 15 bp, Homo sapiens
ctgggggtaggcaca

SEQ ID NO: 1537695 - DNA, 15 bp, Homo sapiens
tgggggtaggcacag

SEQ ID NO: 1537696 - DNA, 15 bp, Homo sapiens
gggggtaggcacagg

SEQ ID NO: 1537697 - DNA, 15 bp, Homo sapiens
ggggtaggcacaggg

SEQ ID NO: 1537698 - DNA, 15 bp, Homo sapiens
gggtaggcacagggg

SEQ ID NO: 1537699 - DNA, 15 bp, Homo sapiens
ggtaggcacaggggc

SEQ ID NO: 1537700 - DNA, 15 bp, Homo sapiens
gtaggcacaggggcc

SEQ ID NO: 1537701 - DNA, 15 bp, Homo sapiens
taggcacaggggccc

SEQ ID NO: 1537702 - DNA, 15 bp, Homo sapiens
aggcacaggggccca

SEQ ID NO: 1537703 - DNA, 15 bp, Homo sapiens
ggcacaggggcccag

SEQ ID NO: 1537704 - DNA, 15 bp, Homo sapiens
gcacaggggcccagc

SEQ ID NO: 1537705 - DNA, 15 bp, Homo sapiens
cacaggggcccagca

SEQ ID NO: 1537706 - DNA, 15 bp, Homo sapiens
acaggggcccagcag

SEQ ID NO: 1537707 - DNA, 15 bp, Homo sapiens
caggggcccagcagg

SEQ ID NO: 1537708 - DNA, 15 bp, Homo sapiens
aggggcccagcaggc

SEQ ID NO: 1537709 - DNA, 15 bp, Homo sapiens
ggggcccagcaggca

SEQ ID NO: 1537710 - DNA, 15 bp, Homo sapiens
gggcccagcaggcac

SEQ ID NO: 1537711 - DNA, 15 bp, Homo sapiens
ggcccagcaggcacc

SEQ ID NO: 1537712 - DNA, 15 bp, Homo sapiens
gcccagcaggcaccc

SEQ ID NO: 1537713 - DNA, 15 bp, Homo sapiens
cccagcaggcaccca

SEQ ID NO: 1537714 - DNA, 15 bp, Homo sapiens
ccagcaggcacccat

SEQ ID NO: 1537715 - DNA, 15 bp, Homo sapiens
cagcaggcacccata

SEQ ID NO: 1537716 - DNA, 15 bp, Homo sapiens
agcaggcacccatag

SEQ ID NO: 1537717 - DNA, 15 bp, Homo sapiens
gcaggcacccatagc

SEQ ID NO: 1537718 - DNA, 15 bp, Homo sapiens
caggcacccatagca

SEQ ID NO: 1537719 - DNA, 15 bp, Homo sapiens
aggcacccatagcat

SEQ ID NO: 1537720 - DNA, 15 bp, Homo sapiens
ggcacccatagcatc

SEQ ID NO: 1537721 - DNA, 15 bp, Homo sapiens
gcacccatagcatct

SEQ ID NO: 1537722 - DNA, 15 bp, Homo sapiens
cacccatagcatctc

SEQ ID NO: 1537723 - DNA, 15 bp, Homo sapiens
acccatagcatctcc

SEQ ID NO: 1537724 - DNA, 15 bp, Homo sapiens
cccatagcatctcct

SEQ ID NO: 1537725 - DNA, 15 bp, Homo sapiens
ccatagcatctccta

SEQ ID NO: 1537726 - DNA, 15 bp, Homo sapiens
catagcatctcctac

SEQ ID NO: 1537727 - DNA, 15 bp, Homo sapiens
atagcatctcctaca

SEQ ID NO: 1537728 - DNA, 15 bp, Homo sapiens
tagcatctcctacag

SEQ ID NO: 1537729 - DNA, 15 bp, Homo sapiens
agcatctcctacagc

SEQ ID NO: 1537730 - DNA, 15 bp, Homo sapiens
gcatctcctacagca

SEQ ID NO: 1537731 - DNA, 15 bp, Homo sapiens
catctcctacagcat

SEQ ID NO: 1537732 - DNA, 15 bp, Homo sapiens
atctcctacagcatc

SEQ ID NO: 1537733 - DNA, 15 bp, Homo sapiens
tctcctacagcatct

SEQ ID NO: 1537734 - DNA, 15 bp, Homo sapiens
ctcctacagcatctg

SEQ ID NO: 1537735 - DNA, 15 bp, Homo sapiens
tcctacagcatctga

SEQ ID NO: 1537736 - DNA, 15 bp, Homo sapiens
cctacagcatctgaa

SEQ ID NO: 1537737 - DNA, 15 bp, Homo sapiens
ctacagcatctgaaa

SEQ ID NO: 1537738 - DNA, 15 bp, Homo sapiens
tacagcatctgaaat

SEQ ID NO: 1537739 - DNA, 15 bp, Homo sapiens
acagcatctgaaatg

SEQ ID NO: 1537740 - DNA, 15 bp, Homo sapiens
cagcatctgaaatga

SEQ ID NO: 1537741 - DNA, 15 bp, Homo sapiens
agcatctgaaatgaa

SEQ ID NO: 1537742 - DNA, 15 bp, Homo sapiens
gcatctgaaatgaac

SEQ ID NO: 1537743 - DNA, 15 bp, Homo sapiens
catctgaaatgaaca

SEQ ID NO: 1537744 - DNA, 15 bp, Homo sapiens
atctgaaatgaacag

SEQ ID NO: 1537745 - DNA, 15 bp, Homo sapiens
tctgaaatgaacagg

SEQ ID NO: 1537746 - DNA, 15 bp, Homo sapiens
ctgaaatgaacaggg

SEQ ID NO: 1537747 - DNA, 15 bp, Homo sapiens
tgaaatgaacagggt

SEQ ID NO: 1537748 - DNA, 15 bp, Homo sapiens
gaaatgaacagggtc

SEQ ID NO: 1537749 - DNA, 15 bp, Homo sapiens
aaatgaacagggtca

SEQ ID NO: 1537750 - DNA, 15 bp, Homo sapiens
aatgaacagggtcat

SEQ ID NO: 1537751 - DNA, 15 bp, Homo sapiens
atgaacagggtcatc

SEQ ID NO: 1537752 - DNA, 15 bp, Homo sapiens
tgaacagggtcatca

SEQ ID NO: 1537753 - DNA, 15 bp, Homo sapiens
gaacagggtcatcac

SEQ ID NO: 1537754 - DNA, 15 bp, Homo sapiens
aacagggtcatcacg

SEQ ID NO: 1537755 - DNA, 15 bp, Homo sapiens
acagggtcatcacgt

SEQ ID NO: 1537756 - DNA, 15 bp, Homo sapiens
cagggtcatcacgta

SEQ ID NO: 1537757 - DNA, 15 bp, Homo sapiens
agggtcatcacgtac

SEQ ID NO: 1537758 - DNA, 15 bp, Homo sapiens
gggtcatcacgtact

SEQ ID NO: 1537759 - DNA, 15 bp, Homo sapiens
ggtcatcacgtacta

SEQ ID NO: 1537760 - DNA, 15 bp, Homo sapiens
gtcatcacgtactac

SEQ ID NO: 1537761 - DNA, 15 bp, Homo sapiens
tcatcacgtactaca

SEQ ID NO: 1537762 - DNA, 15 bp, Homo sapiens
catcacgtactacat

SEQ ID NO: 1537763 - DNA, 15 bp, Homo sapiens
atcacgtactacata

SEQ ID NO: 1537764 - DNA, 15 bp, Homo sapiens
tcacgtactacatac

SEQ ID NO: 1537765 - DNA, 15 bp, Homo sapiens
cacgtactacataca

SEQ ID NO: 1537766 - DNA, 15 bp, Homo sapiens
acgtactacatacaa

SEQ ID NO: 1537767 - DNA, 15 bp, Homo sapiens
cgtactacatacaaa

SEQ ID NO: 1537768 - DNA, 15 bp, Homo sapiens
gtactacatacaaat

SEQ ID NO: 1537769 - DNA, 15 bp, Homo sapiens
tactacatacaaatg

SEQ ID NO: 1537770 - DNA, 15 bp, Homo sapiens
actacatacaaatgt

SEQ ID NO: 1537771 - DNA, 15 bp, Homo sapiens
ctacatacaaatgta

SEQ ID NO: 1537772 - DNA, 15 bp, Homo sapiens
tacatacaaatgtac

SEQ ID NO: 1537773 - DNA, 15 bp, Homo sapiens
acatacaaatgtacc

SEQ ID NO: 1537774 - DNA, 15 bp, Homo sapiens
catacaaatgtaccc

SEQ ID NO: 1537775 - DNA, 15 bp, Homo sapiens
atacaaatgtaccca

SEQ ID NO: 1537776 - DNA, 15 bp, Homo sapiens
tacaaatgtacccac

SEQ ID NO: 1537777 - DNA, 15 bp, Homo sapiens
acaaatgtacccact

SEQ ID NO: 1537778 - DNA, 15 bp, Homo sapiens
caaatgtacccactg

SEQ ID NO: 1537779 - DNA, 15 bp, Homo sapiens
aaatgtacccactgc

SEQ ID NO: 1537780 - DNA, 15 bp, Homo sapiens
aatgtacccactgct

SEQ ID NO: 1537781 - DNA, 15 bp, Homo sapiens
atgtacccactgctg

SEQ ID NO: 1537782 - DNA, 15 bp, Homo sapiens
tgtacccactgctga

SEQ ID NO: 1537783 - DNA, 15 bp, Homo sapiens
gtacccactgctgag

SEQ ID NO: 1537784 - DNA, 15 bp, Homo sapiens
tacccactgctgagt

SEQ ID NO: 1537785 - DNA, 15 bp, Homo sapiens
acccactgctgagtt

SEQ ID NO: 1537786 - DNA, 15 bp, Homo sapiens
cccactgctgagttc

SEQ ID NO: 1537787 - DNA, 15 bp, Homo sapiens
ccactgctgagttct

SEQ ID NO: 1537788 - DNA, 15 bp, Homo sapiens
cactgctgagttctt

SEQ ID NO: 1537789 - DNA, 15 bp, Homo sapiens
actgctgagttcttc

SEQ ID NO: 1537790 - DNA, 15 bp, Homo sapiens
ctgctgagttcttca

SEQ ID NO: 1537791 - DNA, 15 bp, Homo sapiens
tgctgagttcttcag

SEQ ID NO: 1537792 - DNA, 15 bp, Homo sapiens
gctgagttcttcagg

SEQ ID NO: 1537793 - DNA, 15 bp, Homo sapiens
ctgagttcttcaggg

SEQ ID NO: 1537794 - DNA, 15 bp, Homo sapiens
tgagttcttcaggga

SEQ ID NO: 1537795 - DNA, 15 bp, Homo sapiens
gagttcttcagggat

SEQ ID NO: 1537796 - DNA, 15 bp, Homo sapiens
agttcttcagggatt

SEQ ID NO: 1537797 - DNA, 15 bp, Homo sapiens
gttcttcagggatta

SEQ ID NO: 1537798 - DNA, 15 bp, Homo sapiens
ttcttcagggattat

SEQ ID NO: 1537799 - DNA, 15 bp, Homo sapiens
tcttcagggattata

SEQ ID NO: 1537800 - DNA, 15 bp, Homo sapiens
cttcagggattatat

SEQ ID NO: 1537801 - DNA, 15 bp, Homo sapiens
ttcagggattatatc

SEQ ID NO: 1537802 - DNA, 15 bp, Homo sapiens
tcagggattatatca

SEQ ID NO: 1537803 - DNA, 15 bp, Homo sapiens
cagggattatatcat

SEQ ID NO: 1537804 - DNA, 15 bp, Homo sapiens
agggattatatcatt

SEQ ID NO: 1537805 - DNA, 15 bp, Homo sapiens
gggattatatcatta

SEQ ID NO: 1537806 - DNA, 15 bp, Homo sapiens
ggattatatcattag

SEQ ID NO: 1537807 - DNA, 15 bp, Homo sapiens
gattatatcattagg

SEQ ID NO: 1537808 - DNA, 15 bp, Homo sapiens
attatatcattaggt

SEQ ID NO: 1537809 - DNA, 15 bp, Homo sapiens
ttatatcattaggta

SEQ ID NO: 1537810 - DNA, 15 bp, Homo sapiens
tatatcattaggtac

SEQ ID NO: 1537811 - DNA, 15 bp, Homo sapiens
atatcattaggtact

SEQ ID NO: 1537812 - DNA, 15 bp, Homo sapiens
tatcattaggtactt

SEQ ID NO: 1537813 - DNA, 15 bp, Homo sapiens
atcattaggtacttg

SEQ ID NO: 1537814 - DNA, 15 bp, Homo sapiens
tcattaggtacttgg

SEQ ID NO: 1537815 - DNA, 15 bp, Homo sapiens
cattaggtacttggt

SEQ ID NO: 1537816 - DNA, 15 bp, Homo sapiens
attaggtacttggta

SEQ ID NO: 1537817 - DNA, 15 bp, Homo sapiens
ttaggtacttggtat

SEQ ID NO: 1537818 - DNA, 15 bp, Homo sapiens
taggtacttggtatt

SEQ ID NO: 1537819 - DNA, 15 bp, Homo sapiens
aggtacttggtattt

SEQ ID NO: 1537820 - DNA, 15 bp, Homo sapiens
ggtacttggtatttt

SEQ ID NO: 1537821 - DNA, 15 bp, Homo sapiens
gtacttggtatttta

SEQ ID NO: 1537822 - DNA, 15 bp, Homo sapiens
tacttggtattttaa

SEQ ID NO: 1537823 - DNA, 15 bp, Homo sapiens
acttggtattttaaa

SEQ ID NO: 1537824 - DNA, 15 bp, Homo sapiens
cttggtattttaaat

SEQ ID NO: 1537825 - DNA, 15 bp, Homo sapiens
ttggtattttaaata

SEQ ID NO: 1537826 - DNA, 15 bp, Homo sapiens
tggtattttaaatac

SEQ ID NO: 1537827 - DNA, 15 bp, Homo sapiens
ggtattttaaataca

SEQ ID NO: 1537828 - DNA, 15 bp, Homo sapiens
gtattttaaatacat

SEQ ID NO: 1537829 - DNA, 15 bp, Homo sapiens
tattttaaatacatt

SEQ ID NO: 1537830 - DNA, 15 bp, Homo sapiens
attttaaatacatta

SEQ ID NO: 1537831 - DNA, 15 bp, Homo sapiens
ttttaaatacattac

SEQ ID NO: 1537832 - DNA, 15 bp, Homo sapiens
tttaaatacattaca

SEQ ID NO: 1537833 - DNA, 15 bp, Homo sapiens
ttaaatacattacat

SEQ ID NO: 1537834 - DNA, 15 bp, Homo sapiens
taaatacattacatt

SEQ ID NO: 1537835 - DNA, 15 bp, Homo sapiens
aaatacattacatta

SEQ ID NO: 1537836 - DNA, 15 bp, Homo sapiens
aatacattacattat

SEQ ID NO: 1537837 - DNA, 15 bp, Homo sapiens
atacattacattatg

SEQ ID NO: 1537838 - DNA, 15 bp, Homo sapiens
tacattacattatgc

SEQ ID NO: 1537839 - DNA, 15 bp, Homo sapiens
acattacattatgca

SEQ ID NO: 1537840 - DNA, 15 bp, Homo sapiens
cattacattatgcag

SEQ ID NO: 1537841 - DNA, 15 bp, Homo sapiens
attacattatgcaga

SEQ ID NO: 1537842 - DNA, 15 bp, Homo sapiens
ttacattatgcagaa

SEQ ID NO: 1537843 - DNA, 15 bp, Homo sapiens
tacattatgcagaag

SEQ ID NO: 1537844 - DNA, 15 bp, Homo sapiens
acattatgcagaagt

SEQ ID NO: 1537845 - DNA, 15 bp, Homo sapiens
cattatgcagaagtc

SEQ ID NO: 1537846 - DNA, 15 bp, Homo sapiens
attatgcagaagtcc

SEQ ID NO: 1537847 - DNA, 15 bp, Homo sapiens
ttatgcagaagtcct

SEQ ID NO: 1537848 - DNA, 15 bp, Homo sapiens
tatgcagaagtcctt

SEQ ID NO: 1537849 - DNA, 15 bp, Homo sapiens
atgcagaagtccttt

SEQ ID NO: 1537850 - DNA, 15 bp, Homo sapiens
tgcagaagtcctttg

SEQ ID NO: 1537851 - DNA, 15 bp, Homo sapiens
gcagaagtcctttgt

SEQ ID NO: 1537852 - DNA, 15 bp, Homo sapiens
cagaagtcctttgtg

SEQ ID NO: 1537853 - DNA, 15 bp, Homo sapiens
agaagtcctttgtgg

SEQ ID NO: 1537854 - DNA, 15 bp, Homo sapiens
gaagtcctttgtgga

SEQ ID NO: 1537855 - DNA, 15 bp, Homo sapiens
aagtcctttgtggat

SEQ ID NO: 1537856 - DNA, 15 bp, Homo sapiens
agtcctttgtggatt

SEQ ID NO: 1537857 - DNA, 15 bp, Homo sapiens
gtcctttgtggattg

SEQ ID NO: 1537858 - DNA, 15 bp, Homo sapiens
tcctttgtggattgc

SEQ ID NO: 1537859 - DNA, 15 bp, Homo sapiens
cctttgtggattgct

SEQ ID NO: 1537860 - DNA, 15 bp, Homo sapiens
ctttgtggattgcta

SEQ ID NO: 1537861 - DNA, 15 bp, Homo sapiens
tttgtggattgctat

SEQ ID NO: 1537862 - DNA, 15 bp, Homo sapiens
ttgtggattgctata

SEQ ID NO: 1537863 - DNA, 15 bp, Homo sapiens
tgtggattgctatat

SEQ ID NO: 1537864 - DNA, 15 bp, Homo sapiens
gtggattgctatatt

SEQ ID NO: 1537865 - DNA, 15 bp, Homo sapiens
tggattgctatattt

SEQ ID NO: 1537866 - DNA, 15 bp, Homo sapiens
ggattgctatatttg

SEQ ID NO: 1537867 - DNA, 15 bp, Homo sapiens
gattgctatatttgg

SEQ ID NO: 1537868 - DNA, 15 bp, Homo sapiens
attgctatatttgga

SEQ ID NO: 1537869 - DNA, 15 bp, Homo sapiens
ttgctatatttggag

SEQ ID NO: 1537870 - DNA, 15 bp, Homo sapiens
tgctatatttggaga

SEQ ID NO: 1537871 - DNA, 15 bp, Homo sapiens
gctatatttggagag

SEQ ID NO: 1537872 - DNA, 15 bp, Homo sapiens
ctatatttggagagt

SEQ ID NO: 1537873 - DNA, 15 bp, Homo sapiens
tatatttggagagtt

SEQ ID NO: 1537874 - DNA, 15 bp, Homo sapiens
atatttggagagttt

SEQ ID NO: 1537875 - DNA, 15 bp, Homo sapiens
tatttggagagtttt

SEQ ID NO: 1537876 - DNA, 15 bp, Homo sapiens
atttggagagttttg

SEQ ID NO: 1537877 - DNA, 15 bp, Homo sapiens
tttggagagttttgt

SEQ ID NO: 1537878 - DNA, 15 bp, Homo sapiens
ttggagagttttgtg

SEQ ID NO: 1537879 - DNA, 15 bp, Homo sapiens
tggagagttttgtga

SEQ ID NO: 1537880 - DNA, 15 bp, Homo sapiens
ggagagttttgtgat

SEQ ID NO: 1537881 - DNA, 15 bp, Homo sapiens
gagagttttgtgata

SEQ ID NO: 1537882 - DNA, 15 bp, Homo sapiens
agagttttgtgatat

SEQ ID NO: 1537883 - DNA, 15 bp, Homo sapiens
gagttttgtgatatt

SEQ ID NO: 1537884 - DNA, 15 bp, Homo sapiens
agttttgtgatattg

SEQ ID NO: 1537885 - DNA, 15 bp, Homo sapiens
gttttgtgatattgg

SEQ ID NO: 1537886 - DNA, 15 bp, Homo sapiens
ttttgtgatattggg

SEQ ID NO: 1537887 - DNA, 15 bp, Homo sapiens
tttgtgatattgggg

SEQ ID NO: 1537888 - DNA, 15 bp, Homo sapiens
ttgtgatattggggg

SEQ ID NO: 1537889 - DNA, 15 bp, Homo sapiens
tgtgatattgggggg

SEQ ID NO: 1537890 - DNA, 15 bp, Homo sapiens
gtgatattgggggga

SEQ ID NO: 1537891 - DNA, 15 bp, Homo sapiens
tgatattggggggat

SEQ ID NO: 1537892 - DNA, 15 bp, Homo sapiens
gatattggggggatt

SEQ ID NO: 1537893 - DNA, 15 bp, Homo sapiens
atattggggggatta

SEQ ID NO: 1537894 - DNA, 15 bp, Homo sapiens
tattggggggattag

SEQ ID NO: 1537895 - DNA, 15 bp, Homo sapiens
attggggggattaga

SEQ ID NO: 1537896 - DNA, 15 bp, Homo sapiens
ttggggggattagat

SEQ ID NO: 1537897 - DNA, 15 bp, Homo sapiens
tggggggattagatg

SEQ ID NO: 1537898 - DNA, 15 bp, Homo sapiens
ggggggattagatgg

SEQ ID NO: 1537899 - DNA, 15 bp, Homo sapiens
gggggattagatgga

SEQ ID NO: 1537900 - DNA, 15 bp, Homo sapiens
ggggattagatggag

SEQ ID NO: 1537901 - DNA, 15 bp, Homo sapiens
gggattagatggagt

SEQ ID NO: 1537902 - DNA, 15 bp, Homo sapiens
ggattagatggagtt

SEQ ID NO: 1537903 - DNA, 15 bp, Homo sapiens
gattagatggagttt

SEQ ID NO: 1537904 - DNA, 15 bp, Homo sapiens
attagatggagtttt

SEQ ID NO: 1537905 - DNA, 15 bp, Homo sapiens
ttagatggagttttc

SEQ ID NO: 1537906 - DNA, 15 bp, Homo sapiens
tagatggagttttca

SEQ ID NO: 1537907 - DNA, 15 bp, Homo sapiens
agatggagttttcag

SEQ ID NO: 1537908 - DNA, 15 bp, Homo sapiens
gatggagttttcaga

SEQ ID NO: 1537909 - DNA, 15 bp, Homo sapiens
atggagttttcagat

SEQ ID NO: 1537910 - DNA, 15 bp, Homo sapiens
tggagttttcagatg

SEQ ID NO: 1537911 - DNA, 15 bp, Homo sapiens
ggagttttcagatgg

SEQ ID NO: 1537912 - DNA, 15 bp, Homo sapiens
gagttttcagatggg

SEQ ID NO: 1537913 - DNA, 15 bp, Homo sapiens
agttttcagatgggc

SEQ ID NO: 1537914 - DNA, 15 bp, Homo sapiens
gttttcagatgggca

SEQ ID NO: 1537915 - DNA, 15 bp, Homo sapiens
ttttcagatgggcat

SEQ ID NO: 1537916 - DNA, 15 bp, Homo sapiens
tttcagatgggcatc

SEQ ID NO: 1537917 - DNA, 15 bp, Homo sapiens
ttcagatgggcatca

SEQ ID NO: 1537918 - DNA, 15 bp, Homo sapiens
tcagatgggcatcat

SEQ ID NO: 1537919 - DNA, 15 bp, Homo sapiens
cagatgggcatcata

SEQ ID NO: 1537920 - DNA, 15 bp, Homo sapiens
agatgggcatcatac

SEQ ID NO: 1537921 - DNA, 15 bp, Homo sapiens
gatgggcatcatacg

SEQ ID NO: 1537922 - DNA, 15 bp, Homo sapiens
atgggcatcatacgg

SEQ ID NO: 1537923 - DNA, 15 bp, Homo sapiens
tgggcatcatacggt

SEQ ID NO: 1537924 - DNA, 15 bp, Homo sapiens
gggcatcatacggtt

SEQ ID NO: 1537925 - DNA, 15 bp, Homo sapiens
ggcatcatacggttt

SEQ ID NO: 1537926 - DNA, 15 bp, Homo sapiens
gcatcatacggtttt

SEQ ID NO: 1537927 - DNA, 15 bp, Homo sapiens
catcatacggttttt

SEQ ID NO: 1537928 - DNA, 15 bp, Homo sapiens
atcatacggtttttc

SEQ ID NO: 1537929 - DNA, 15 bp, Homo sapiens
tcatacggtttttca

SEQ ID NO: 1537930 - DNA, 15 bp, Homo sapiens
catacggtttttcat

SEQ ID NO: 1537931 - DNA, 15 bp, Homo sapiens
atacggtttttcatt

SEQ ID NO: 1537932 - DNA, 15 bp, Homo sapiens
tacggtttttcattt

SEQ ID NO: 1537933 - DNA, 15 bp, Homo sapiens
acggtttttcattta

SEQ ID NO: 1537934 - DNA, 15 bp, Homo sapiens
cggtttttcatttaa

SEQ ID NO: 1537935 - DNA, 15 bp, Homo sapiens
ggtttttcatttaaa

SEQ ID NO: 1537936 - DNA, 15 bp, Homo sapiens
gtttttcatttaaaa

SEQ ID NO: 1537937 - DNA, 15 bp, Homo sapiens
tttttcatttaaaac

SEQ ID NO: 1537938 - DNA, 15 bp, Homo sapiens
ttttcatttaaaacc

SEQ ID NO: 1537939 - DNA, 15 bp, Homo sapiens
tttcatttaaaaccc

SEQ ID NO: 1537940 - DNA, 15 bp, Homo sapiens
ttcatttaaaaccct

SEQ ID NO: 1537941 - DNA, 15 bp, Homo sapiens
tcatttaaaacccta

SEQ ID NO: 1537942 - DNA, 15 bp, Homo sapiens
catttaaaaccctag

SEQ ID NO: 1537943 - DNA, 15 bp, Homo sapiens
atttaaaaccctaga

SEQ ID NO: 1537944 - DNA, 15 bp, Homo sapiens
tttaaaaccctagag

SEQ ID NO: 1537945 - DNA, 15 bp, Homo sapiens
ttaaaaccctagagt

SEQ ID NO: 1537946 - DNA, 15 bp, Homo sapiens
taaaaccctagagta

SEQ ID NO: 1537947 - DNA, 15 bp, Homo sapiens
aaaaccctagagtat

SEQ ID NO: 1537948 - DNA, 15 bp, Homo sapiens
aaaccctagagtatt

SEQ ID NO: 1537949 - DNA, 15 bp, Homo sapiens
aaccctagagtattg

SEQ ID NO: 1537950 - DNA, 15 bp, Homo sapiens
accctagagtattgt

SEQ ID NO: 1537951 - DNA, 15 bp, Homo sapiens
ccctagagtattgta

SEQ ID NO: 1537952 - DNA, 15 bp, Homo sapiens
cctagagtattgtaa

SEQ ID NO: 1537953 - DNA, 15 bp, Homo sapiens
ctagagtattgtaat

SEQ ID NO: 1537954 - DNA, 15 bp, Homo sapiens
tagagtattgtaatc

SEQ ID NO: 1537955 - DNA, 15 bp, Homo sapiens
agagtattgtaatcc

SEQ ID NO: 1537956 - DNA, 15 bp, Homo sapiens
gagtattgtaatcct

SEQ ID NO: 1537957 - DNA, 15 bp, Homo sapiens
agtattgtaatccta

SEQ ID NO: 1537958 - DNA, 15 bp, Homo sapiens
gtattgtaatcctag

SEQ ID NO: 1537959 - DNA, 15 bp, Homo sapiens
tattgtaatcctagg

SEQ ID NO: 1537960 - DNA, 15 bp, Homo sapiens
attgtaatcctaggg

SEQ ID NO: 1537961 - DNA, 15 bp, Homo sapiens
ttgtaatcctaggga

SEQ ID NO: 1537962 - DNA, 15 bp, Homo sapiens
tgtaatcctagggag

SEQ ID NO: 1537963 - DNA, 15 bp, Homo sapiens
gtaatcctagggagt

SEQ ID NO: 1537964 - DNA, 15 bp, Homo sapiens
taatcctagggagtg

SEQ ID NO: 1537965 - DNA, 15 bp, Homo sapiens
aatcctagggagtga

SEQ ID NO: 1537966 - DNA, 15 bp, Homo sapiens
atcctagggagtgat

SEQ ID NO: 1537967 - DNA, 15 bp, Homo sapiens
tcctagggagtgatc

SEQ ID NO: 1537968 - DNA, 15 bp, Homo sapiens
cctagggagtgatcc

SEQ ID NO: 1537969 - DNA, 15 bp, Homo sapiens
ctagggagtgatcct

SEQ ID NO: 1537970 - DNA, 15 bp, Homo sapiens
tagggagtgatcctg

SEQ ID NO: 1537971 - DNA, 15 bp, Homo sapiens
agggagtgatcctgc

SEQ ID NO: 1537972 - DNA, 15 bp, Homo sapiens
gggagtgatcctgcg

SEQ ID NO: 1537973 - DNA, 15 bp, Homo sapiens
ggagtgatcctgcga

SEQ ID NO: 1537974 - DNA, 15 bp, Homo sapiens
gagtgatcctgcgat

SEQ ID NO: 1537975 - DNA, 15 bp, Homo sapiens
agtgatcctgcgatt

SEQ ID NO: 1537976 - DNA, 15 bp, Homo sapiens
gtgatcctgcgatta

SEQ ID NO: 1537977 - DNA, 15 bp, Homo sapiens
tgatcctgcgattag

SEQ ID NO: 1537978 - DNA, 15 bp, Homo sapiens
gatcctgcgattagt

SEQ ID NO: 1537979 - DNA, 15 bp, Homo sapiens
atcctgcgattagta

SEQ ID NO: 1537980 - DNA, 15 bp, Homo sapiens
tcctgcgattagtaa

SEQ ID NO: 1537981 - DNA, 15 bp, Homo sapiens
cctgcgattagtaaa

SEQ ID NO: 1537982 - DNA, 15 bp, Homo sapiens
ctgcgattagtaaat

SEQ ID NO: 1537983 - DNA, 15 bp, Homo sapiens
tgcgattagtaaatt

SEQ ID NO: 1537984 - DNA, 15 bp, Homo sapiens
gcgattagtaaatta

SEQ ID NO: 1537985 - DNA, 15 bp, Homo sapiens
cgattagtaaattag

SEQ ID NO: 1537986 - DNA, 15 bp, Homo sapiens
gattagtaaattagc

SEQ ID NO: 1537987 - DNA, 15 bp, Homo sapiens
attagtaaattagct

SEQ ID NO: 1537988 - DNA, 15 bp, Homo sapiens
ttagtaaattagctc

SEQ ID NO: 1537989 - DNA, 15 bp, Homo sapiens
tagtaaattagctct

SEQ ID NO: 1537990 - DNA, 15 bp, Homo sapiens
agtaaattagctctc

SEQ ID NO: 1537991 - DNA, 15 bp, Homo sapiens
gtaaattagctctcc

SEQ ID NO: 1537992 - DNA, 15 bp, Homo sapiens
taaattagctctcca

SEQ ID NO: 1537993 - DNA, 15 bp, Homo sapiens
aaattagctctccaa

SEQ ID NO: 1537994 - DNA, 15 bp, Homo sapiens
aattagctctccaat

SEQ ID NO: 1537995 - DNA, 15 bp, Homo sapiens
attagctctccaata

SEQ ID NO: 1537996 - DNA, 15 bp, Homo sapiens
ttagctctccaatag

SEQ ID NO: 1537997 - DNA, 15 bp, Homo sapiens
tagctctccaataga

SEQ ID NO: 1537998 - DNA, 15 bp, Homo sapiens
agctctccaatagat

SEQ ID NO: 1537999 - DNA, 15 bp, Homo sapiens
gctctccaatagatt

SEQ ID NO: 1538000 - DNA, 15 bp, Homo sapiens
ctctccaatagattt

SEQ ID NO: 1538001 - DNA, 15 bp, Homo sapiens
tctccaatagatttt

SEQ ID NO: 1538002 - DNA, 15 bp, Homo sapiens
ctccaatagattttc

SEQ ID NO: 1538003 - DNA, 15 bp, Homo sapiens
tccaatagattttca

SEQ ID NO: 1538004 - DNA, 15 bp, Homo sapiens
ccaatagattttcaa

SEQ ID NO: 1538005 - DNA, 15 bp, Homo sapiens
caatagattttcaat

SEQ ID NO: 1538006 - DNA, 15 bp, Homo sapiens
aatagattttcaatg

SEQ ID NO: 1538007 - DNA, 15 bp, Homo sapiens
atagattttcaatgt

SEQ ID NO: 1538008 - DNA, 15 bp, Homo sapiens
tagattttcaatgtg

SEQ ID NO: 1538009 - DNA, 15 bp, Homo sapiens
agattttcaatgtgg

SEQ ID NO: 1538010 - DNA, 15 bp, Homo sapiens
gattttcaatgtggt

SEQ ID NO: 1538011 - DNA, 15 bp, Homo sapiens
attttcaatgtggtt

SEQ ID NO: 1538012 - DNA, 15 bp, Homo sapiens
ttttcaatgtggttg

SEQ ID NO: 1538013 - DNA, 15 bp, Homo sapiens
tttcaatgtggttgc

SEQ ID NO: 1538014 - DNA, 15 bp, Homo sapiens
ttcaatgtggttgca

SEQ ID NO: 1538015 - DNA, 15 bp, Homo sapiens
tcaatgtggttgcaa

SEQ ID NO: 1538016 - DNA, 15 bp, Homo sapiens
caatgtggttgcaaa

SEQ ID NO: 1538017 - DNA, 15 bp, Homo sapiens
aatgtggttgcaaag

SEQ ID NO: 1538018 - DNA, 15 bp, Homo sapiens
atgtggttgcaaagg

SEQ ID NO: 1538019 - DNA, 15 bp, Homo sapiens
tgtggttgcaaagga

SEQ ID NO: 1538020 - DNA, 15 bp, Homo sapiens
gtggttgcaaaggac

SEQ ID NO: 1538021 - DNA, 15 bp, Homo sapiens
tggttgcaaaggaca

SEQ ID NO: 1538022 - DNA, 15 bp, Homo sapiens
ggttgcaaaggacat

SEQ ID NO: 1538023 - DNA, 15 bp, Homo sapiens
gttgcaaaggacatg

SEQ ID NO: 1538024 - DNA, 15 bp, Homo sapiens
ttgcaaaggacatgc

SEQ ID NO: 1538025 - DNA, 15 bp, Homo sapiens
tgcaaaggacatgca

SEQ ID NO: 1538026 - DNA, 15 bp, Homo sapiens
gcaaaggacatgcat

SEQ ID NO: 1538027 - DNA, 15 bp, Homo sapiens
caaaggacatgcatg

SEQ ID NO: 1538028 - DNA, 15 bp, Homo sapiens
aaaggacatgcatgt

SEQ ID NO: 1538029 - DNA, 15 bp, Homo sapiens
aaggacatgcatgtg

SEQ ID NO: 1538030 - DNA, 15 bp, Homo sapiens
aggacatgcatgtgg

SEQ ID NO: 1538031 - DNA, 15 bp, Homo sapiens
ggacatgcatgtggt

SEQ ID NO: 1538032 - DNA, 15 bp, Homo sapiens
gacatgcatgtggtt

SEQ ID NO: 1538033 - DNA, 15 bp, Homo sapiens
acatgcatgtggttc

SEQ ID NO: 1538034 - DNA, 15 bp, Homo sapiens
catgcatgtggttca

SEQ ID NO: 1538035 - DNA, 15 bp, Homo sapiens
atgcatgtggttcac

SEQ ID NO: 1538036 - DNA, 15 bp, Homo sapiens
tgcatgtggttcacc

SEQ ID NO: 1538037 - DNA, 15 bp, Homo sapiens
gcatgtggttcaccc

SEQ ID NO: 1538038 - DNA, 15 bp, Homo sapiens
catgtggttcaccct

SEQ ID NO: 1538039 - DNA, 15 bp, Homo sapiens
atgtggttcaccctc

SEQ ID NO: 1538040 - DNA, 15 bp, Homo sapiens
tgtggttcaccctcc

SEQ ID NO: 1538041 - DNA, 15 bp, Homo sapiens
gtggttcaccctccc

SEQ ID NO: 1538042 - DNA, 15 bp, Homo sapiens
tggttcaccctccca

SEQ ID NO: 1538043 - DNA, 15 bp, Homo sapiens
ggttcaccctcccag

SEQ ID NO: 1538044 - DNA, 15 bp, Homo sapiens
gttcaccctcccagg

SEQ ID NO: 1538045 - DNA, 15 bp, Homo sapiens
ttcaccctcccagga

SEQ ID NO: 1538046 - DNA, 15 bp, Homo sapiens
tcaccctcccaggaa

SEQ ID NO: 1538047 - DNA, 15 bp, Homo sapiens
caccctcccaggaaa

SEQ ID NO: 1538048 - DNA, 15 bp, Homo sapiens
accctcccaggaaat

SEQ ID NO: 1538049 - DNA, 15 bp, Homo sapiens
ccctcccaggaaatc

SEQ ID NO: 1538050 - DNA, 15 bp, Homo sapiens
cctcccaggaaatcc

SEQ ID NO: 1538051 - DNA, 15 bp, Homo sapiens
ctcccaggaaatcca

SEQ ID NO: 1538052 - DNA, 15 bp, Homo sapiens
tcccaggaaatccag

SEQ ID NO: 1538053 - DNA, 15 bp, Homo sapiens
cccaggaaatccaga

SEQ ID NO: 1538054 - DNA, 15 bp, Homo sapiens
ccaggaaatccagaa

SEQ ID NO: 1538055 - DNA, 15 bp, Homo sapiens
caggaaatccagaag

SEQ ID NO: 1538056 - DNA, 15 bp, Homo sapiens
aggaaatccagaagg

SEQ ID NO: 1538057 - DNA, 15 bp, Homo sapiens
ggaaatccagaaggg

SEQ ID NO: 1538058 - DNA, 15 bp, Homo sapiens
gaaatccagaagggc

SEQ ID NO: 1538059 - DNA, 15 bp, Homo sapiens
aaatccagaagggca

SEQ ID NO: 1538060 - DNA, 15 bp, Homo sapiens
aatccagaagggcag

SEQ ID NO: 1538061 - DNA, 15 bp, Homo sapiens
atccagaagggcagc

SEQ ID NO: 1538062 - DNA, 15 bp, Homo sapiens
tccagaagggcagca

SEQ ID NO: 1538063 - DNA, 15 bp, Homo sapiens
ccagaagggcagcat

SEQ ID NO: 1538064 - DNA, 15 bp, Homo sapiens
cagaagggcagcatt

SEQ ID NO: 1538065 - DNA, 15 bp, Homo sapiens
agaagggcagcattg

SEQ ID NO: 1538066 - DNA, 15 bp, Homo sapiens
gaagggcagcattgg

SEQ ID NO: 1538067 - DNA, 15 bp, Homo sapiens
aagggcagcattggc

SEQ ID NO: 1538068 - DNA, 15 bp, Homo sapiens
agggcagcattggcc

SEQ ID NO: 1538069 - DNA, 15 bp, Homo sapiens
gggcagcattggcct

SEQ ID NO: 1538070 - DNA, 15 bp, Homo sapiens
ggcagcattggcctg

SEQ ID NO: 1538071 - DNA, 15 bp, Homo sapiens
gcagcattggcctga

SEQ ID NO: 1538072 - DNA, 15 bp, Homo sapiens
cagcattggcctgag

SEQ ID NO: 1538073 - DNA, 15 bp, Homo sapiens
agcattggcctgagt

SEQ ID NO: 1538074 - DNA, 15 bp, Homo sapiens
gcattggcctgagtg

SEQ ID NO: 1538075 - DNA, 15 bp, Homo sapiens
cattggcctgagtgg

SEQ ID NO: 1538076 - DNA, 15 bp, Homo sapiens
attggcctgagtggc

SEQ ID NO: 1538077 - DNA, 15 bp, Homo sapiens
ttggcctgagtggcc

SEQ ID NO: 1538078 - DNA, 15 bp, Homo sapiens
tggcctgagtggcct

SEQ ID NO: 1538079 - DNA, 15 bp, Homo sapiens
ggcctgagtggcctg

SEQ ID NO: 1538080 - DNA, 15 bp, Homo sapiens
gcctgagtggcctga

SEQ ID NO: 1538081 - DNA, 15 bp, Homo sapiens
cctgagtggcctgag

SEQ ID NO: 1538082 - DNA, 15 bp, Homo sapiens
ctgagtggcctgagt

SEQ ID NO: 1538083 - DNA, 15 bp, Homo sapiens
tgagtggcctgagtt

SEQ ID NO: 1538084 - DNA, 15 bp, Homo sapiens
gagtggcctgagttt

SEQ ID NO: 1538085 - DNA, 15 bp, Homo sapiens
agtggcctgagtttg

SEQ ID NO: 1538086 - DNA, 15 bp, Homo sapiens
gtggcctgagtttgg

SEQ ID NO: 1538087 - DNA, 15 bp, Homo sapiens
tggcctgagtttggc

SEQ ID NO: 1538088 - DNA, 15 bp, Homo sapiens
ggcctgagtttggct

SEQ ID NO: 1538089 - DNA, 15 bp, Homo sapiens
gcctgagtttggctg

SEQ ID NO: 1538090 - DNA, 15 bp, Homo sapiens
cctgagtttggctgg

SEQ ID NO: 1538091 - DNA, 15 bp, Homo sapiens
ctgagtttggctggt

SEQ ID NO: 1538092 - DNA, 15 bp, Homo sapiens
tgagtttggctggtt

SEQ ID NO: 1538093 - DNA, 15 bp, Homo sapiens
gagtttggctggttg

SEQ ID NO: 1538094 - DNA, 15 bp, Homo sapiens
agtttggctggttgg

SEQ ID NO: 1538095 - DNA, 15 bp, Homo sapiens
gtttggctggttggg

SEQ ID NO: 1538096 - DNA, 15 bp, Homo sapiens
tttggctggttgggc

SEQ ID NO: 1538097 - DNA, 15 bp, Homo sapiens
ttggctggttgggct

SEQ ID NO: 1538098 - DNA, 15 bp, Homo sapiens
tggctggttgggctg

SEQ ID NO: 1538099 - DNA, 15 bp, Homo sapiens
ggctggttgggctgg

SEQ ID NO: 1538100 - DNA, 15 bp, Homo sapiens
gctggttgggctggt

SEQ ID NO: 1538101 - DNA, 15 bp, Homo sapiens
ctggttgggctggta

SEQ ID NO: 1538102 - DNA, 15 bp, Homo sapiens
tggttgggctggtaa

SEQ ID NO: 1538103 - DNA, 15 bp, Homo sapiens
ggttgggctggtaat

SEQ ID NO: 1538104 - DNA, 15 bp, Homo sapiens
gttgggctggtaatg

SEQ ID NO: 1538105 - DNA, 15 bp, Homo sapiens
ttgggctggtaatgc

SEQ ID NO: 1538106 - DNA, 15 bp, Homo sapiens
tgggctggtaatgct

SEQ ID NO: 1538107 - DNA, 15 bp, Homo sapiens
gggctggtaatgctg

SEQ ID NO: 1538108 - DNA, 15 bp, Homo sapiens
ggctggtaatgctgg

SEQ ID NO: 1538109 - DNA, 15 bp, Homo sapiens
gctggtaatgctgga

SEQ ID NO: 1538110 - DNA, 15 bp, Homo sapiens
ctggtaatgctggac

SEQ ID NO: 1538111 - DNA, 15 bp, Homo sapiens
tggtaatgctggaca

SEQ ID NO: 1538112 - DNA, 15 bp, Homo sapiens
ggtaatgctggacaa

SEQ ID NO: 1538113 - DNA, 15 bp, Homo sapiens
gtaatgctggacaaa

SEQ ID NO: 1538114 - DNA, 15 bp, Homo sapiens
taatgctggacaaag

SEQ ID NO: 1538115 - DNA, 15 bp, Homo sapiens
aatgctggacaaaga

SEQ ID NO: 1538116 - DNA, 15 bp, Homo sapiens
atgctggacaaagac

SEQ ID NO: 1538117 - DNA, 15 bp, Homo sapiens
tgctggacaaagaca

SEQ ID NO: 1538118 - DNA, 15 bp, Homo sapiens
gctggacaaagacaa

SEQ ID NO: 1538119 - DNA, 15 bp, Homo sapiens
ctggacaaagacaat

SEQ ID NO: 1538120 - DNA, 15 bp, Homo sapiens
tggacaaagacaatg

SEQ ID NO: 1538121 - DNA, 15 bp, Homo sapiens
ggacaaagacaatgg

SEQ ID NO: 1538122 - DNA, 15 bp, Homo sapiens
gacaaagacaatggg

SEQ ID NO: 1538123 - DNA, 15 bp, Homo sapiens
acaaagacaatgggt

SEQ ID NO: 1538124 - DNA, 15 bp, Homo sapiens
caaagacaatgggtg

SEQ ID NO: 1538125 - DNA, 15 bp, Homo sapiens
aaagacaatgggtgg

SEQ ID NO: 1538126 - DNA, 15 bp, Homo sapiens
aagacaatgggtgga

SEQ ID NO: 1538127 - DNA, 15 bp, Homo sapiens
agacaatgggtggaa

SEQ ID NO: 1538128 - DNA, 15 bp, Homo sapiens
gacaatgggtggaat

SEQ ID NO: 1538129 - DNA, 15 bp, Homo sapiens
acaatgggtggaatg

SEQ ID NO: 1538130 - DNA, 15 bp, Homo sapiens
caatgggtggaatgg

SEQ ID NO: 1538131 - DNA, 15 bp, Homo sapiens
aatgggtggaatggt

SEQ ID NO: 1538132 - DNA, 15 bp, Homo sapiens
atgggtggaatggtt

SEQ ID NO: 1538133 - DNA, 15 bp, Homo sapiens
tgggtggaatggttt

SEQ ID NO: 1538134 - DNA, 15 bp, Homo sapiens
gggtggaatggtttg

SEQ ID NO: 1538135 - DNA, 15 bp, Homo sapiens
ggtggaatggtttgc

SEQ ID NO: 1538136 - DNA, 15 bp, Homo sapiens
gtggaatggtttgct

SEQ ID NO: 1538137 - DNA, 15 bp, Homo sapiens
tggaatggtttgctt

SEQ ID NO: 1538138 - DNA, 15 bp, Homo sapiens
ggaatggtttgcttc

SEQ ID NO: 1538139 - DNA, 15 bp, Homo sapiens
gaatggtttgcttcc

SEQ ID NO: 1538140 - DNA, 15 bp, Homo sapiens
aatggtttgcttccc

SEQ ID NO: 1538141 - DNA, 15 bp, Homo sapiens
atggtttgcttccct

SEQ ID NO: 1538142 - DNA, 15 bp, Homo sapiens
tggtttgcttccctc

SEQ ID NO: 1538143 - DNA, 15 bp, Homo sapiens
ggtttgcttccctca

SEQ ID NO: 1538144 - DNA, 15 bp, Homo sapiens
gtttgcttccctcag

SEQ ID NO: 1538145 - DNA, 15 bp, Homo sapiens
tttgcttccctcagt

SEQ ID NO: 1538146 - DNA, 15 bp, Homo sapiens
ttgcttccctcagtc

SEQ ID NO: 1538147 - DNA, 15 bp, Homo sapiens
tgcttccctcagtcc

SEQ ID NO: 1538148 - DNA, 15 bp, Homo sapiens
gcttccctcagtcct

SEQ ID NO: 1538149 - DNA, 15 bp, Homo sapiens
cttccctcagtcctt

SEQ ID NO: 1538150 - DNA, 15 bp, Homo sapiens
ttccctcagtccttt

SEQ ID NO: 1538151 - DNA, 15 bp, Homo sapiens
tccctcagtcctttc

SEQ ID NO: 1538152 - DNA, 15 bp, Homo sapiens
ccctcagtcctttca

SEQ ID NO: 1538153 - DNA, 15 bp, Homo sapiens
cctcagtcctttcag

SEQ ID NO: 1538154 - DNA, 15 bp, Homo sapiens
ctcagtcctttcaga

SEQ ID NO: 1538155 - DNA, 15 bp, Homo sapiens
tcagtcctttcagac

SEQ ID NO: 1538156 - DNA, 15 bp, Homo sapiens
cagtcctttcagaca

SEQ ID NO: 1538157 - DNA, 15 bp, Homo sapiens
agtcctttcagacac

SEQ ID NO: 1538158 - DNA, 15 bp, Homo sapiens
gtcctttcagacaca

SEQ ID NO: 1538159 - DNA, 15 bp, Homo sapiens
tcctttcagacacag

SEQ ID NO: 1538160 - DNA, 15 bp, Homo sapiens
cctttcagacacagc

SEQ ID NO: 1538161 - DNA, 15 bp, Homo sapiens
ctttcagacacagcc

SEQ ID NO: 1538162 - DNA, 15 bp, Homo sapiens
tttcagacacagccc

SEQ ID NO: 1538163 - DNA, 15 bp, Homo sapiens
ttcagacacagccca

SEQ ID NO: 1538164 - DNA, 15 bp, Homo sapiens
tcagacacagcccag

SEQ ID NO: 1538165 - DNA, 15 bp, Homo sapiens
cagacacagcccagc

SEQ ID NO: 1538166 - DNA, 15 bp, Homo sapiens
agacacagcccagcc

SEQ ID NO: 1538167 - DNA, 15 bp, Homo sapiens
gacacagcccagccc

SEQ ID NO: 1538168 - DNA, 15 bp, Homo sapiens
acacagcccagccca

SEQ ID NO: 1538169 - DNA, 15 bp, Homo sapiens
cacagcccagcccac

SEQ ID NO: 1538170 - DNA, 15 bp, Homo sapiens
acagcccagcccacc

SEQ ID NO: 1538171 - DNA, 15 bp, Homo sapiens
cagcccagcccacca

SEQ ID NO: 1538172 - DNA, 15 bp, Homo sapiens
agcccagcccaccac

SEQ ID NO: 1538173 - DNA, 15 bp, Homo sapiens
gcccagcccaccacg

SEQ ID NO: 1538174 - DNA, 15 bp, Homo sapiens
cccagcccaccacgt

SEQ ID NO: 1538175 - DNA, 15 bp, Homo sapiens
ccagcccaccacgtc

SEQ ID NO: 1538176 - DNA, 15 bp, Homo sapiens
cagcccaccacgtca

SEQ ID NO: 1538177 - DNA, 15 bp, Homo sapiens
agcccaccacgtcaa

SEQ ID NO: 1538178 - DNA, 15 bp, Homo sapiens
gcccaccacgtcaag

SEQ ID NO: 1538179 - DNA, 15 bp, Homo sapiens
cccaccacgtcaagc

SEQ ID NO: 1538180 - DNA, 15 bp, Homo sapiens
ccaccacgtcaagcc

SEQ ID NO: 1538181 - DNA, 15 bp, Homo sapiens
caccacgtcaagcca

SEQ ID NO: 1538182 - DNA, 15 bp, Homo sapiens
accacgtcaagccag

SEQ ID NO: 1538183 - DNA, 15 bp, Homo sapiens
ccacgtcaagccagt

SEQ ID NO: 1538184 - DNA, 15 bp, Homo sapiens
cacgtcaagccagtg

SEQ ID NO: 1538185 - DNA, 15 bp, Homo sapiens
acgtcaagccagtgg

SEQ ID NO: 1538186 - DNA, 15 bp, Homo sapiens
cgtcaagccagtggg

SEQ ID NO: 1538187 - DNA, 15 bp, Homo sapiens
gtcaagccagtgggt

SEQ ID NO: 1538188 - DNA, 15 bp, Homo sapiens
tcaagccagtgggtg

SEQ ID NO: 1538189 - DNA, 15 bp, Homo sapiens
caagccagtgggtgc

SEQ ID NO: 1538190 - DNA, 15 bp, Homo sapiens
aagccagtgggtgca

SEQ ID NO: 1538191 - DNA, 15 bp, Homo sapiens
agccagtgggtgcat

SEQ ID NO: 1538192 - DNA, 15 bp, Homo sapiens
gccagtgggtgcatc

SEQ ID NO: 1538193 - DNA, 15 bp, Homo sapiens
ccagtgggtgcatct

SEQ ID NO: 1538194 - DNA, 15 bp, Homo sapiens
cagtgggtgcatctg

SEQ ID NO: 1538195 - DNA, 15 bp, Homo sapiens
agtgggtgcatctgc

SEQ ID NO: 1538196 - DNA, 15 bp, Homo sapiens
gtgggtgcatctgca

SEQ ID NO: 1538197 - DNA, 15 bp, Homo sapiens
tgggtgcatctgcaa

SEQ ID NO: 1538198 - DNA, 15 bp, Homo sapiens
gggtgcatctgcaac

SEQ ID NO: 1538199 - DNA, 15 bp, Homo sapiens
ggtgcatctgcaacc

SEQ ID NO: 1538200 - DNA, 15 bp, Homo sapiens
gtgcatctgcaacca

SEQ ID NO: 1538201 - DNA, 15 bp, Homo sapiens
tgcatctgcaaccaa

SEQ ID NO: 1538202 - DNA, 15 bp, Homo sapiens
gcatctgcaaccaat

SEQ ID NO: 1538203 - DNA, 15 bp, Homo sapiens
catctgcaaccaatc

SEQ ID NO: 1538204 - DNA, 15 bp, Homo sapiens
atctgcaaccaatcc

SEQ ID NO: 1538205 - DNA, 15 bp, Homo sapiens
tctgcaaccaatccc

SEQ ID NO: 1538206 - DNA, 15 bp, Homo sapiens
ctgcaaccaatcccc

SEQ ID NO: 1538207 - DNA, 15 bp, Homo sapiens
tgcaaccaatcccca

SEQ ID NO: 1538208 - DNA, 15 bp, Homo sapiens
gcaaccaatccccat

SEQ ID NO: 1538209 - DNA, 15 bp, Homo sapiens
caaccaatccccatg

SEQ ID NO: 1538210 - DNA, 15 bp, Homo sapiens
aaccaatccccatga

SEQ ID NO: 1538211 - DNA, 15 bp, Homo sapiens
accaatccccatgag

SEQ ID NO: 1538212 - DNA, 15 bp, Homo sapiens
ccaatccccatgaga

SEQ ID NO: 1538213 - DNA, 15 bp, Homo sapiens
caatccccatgagaa

SEQ ID NO: 1538214 - DNA, 15 bp, Homo sapiens
aatccccatgagaac

SEQ ID NO: 1538215 - DNA, 15 bp, Homo sapiens
atccccatgagaact

SEQ ID NO: 1538216 - DNA, 15 bp, Homo sapiens
tccccatgagaactg

SEQ ID NO: 1538217 - DNA, 15 bp, Homo sapiens
ccccatgagaactgc

SEQ ID NO: 1538218 - DNA, 15 bp, Homo sapiens
cccatgagaactgca

SEQ ID NO: 1538219 - DNA, 15 bp, Homo sapiens
ccatgagaactgcag

SEQ ID NO: 1538220 - DNA, 15 bp, Homo sapiens
catgagaactgcagc

SEQ ID NO: 1538221 - DNA, 15 bp, Homo sapiens
atgagaactgcagcc

SEQ ID NO: 1538222 - DNA, 15 bp, Homo sapiens
tgagaactgcagcct

SEQ ID NO: 1538223 - DNA, 15 bp, Homo sapiens
gagaactgcagcctc

SEQ ID NO: 1538224 - DNA, 15 bp, Homo sapiens
agaactgcagcctct

SEQ ID NO: 1538225 - DNA, 15 bp, Homo sapiens
gaactgcagcctctc

SEQ ID NO: 1538226 - DNA, 15 bp, Homo sapiens
aactgcagcctctca

SEQ ID NO: 1538227 - DNA, 15 bp, Homo sapiens
actgcagcctctcag

SEQ ID NO: 1538228 - DNA, 15 bp, Homo sapiens
ctgcagcctctcaga

SEQ ID NO: 1538229 - DNA, 15 bp, Homo sapiens
tgcagcctctcagag

SEQ ID NO: 1538230 - DNA, 15 bp, Homo sapiens
gcagcctctcagagg

SEQ ID NO: 1538231 - DNA, 15 bp, Homo sapiens
cagcctctcagaggt

SEQ ID NO: 1538232 - DNA, 15 bp, Homo sapiens
agcctctcagaggtg

SEQ ID NO: 1538233 - DNA, 15 bp, Homo sapiens
gcctctcagaggtgg

SEQ ID NO: 1538234 - DNA, 15 bp, Homo sapiens
cctctcagaggtggg

SEQ ID NO: 1538235 - DNA, 15 bp, Homo sapiens
ctctcagaggtgggc

SEQ ID NO: 1538236 - DNA, 15 bp, Homo sapiens
tctcagaggtgggca

SEQ ID NO: 1538237 - DNA, 15 bp, Homo sapiens
ctcagaggtgggcaa

SEQ ID NO: 1538238 - DNA, 15 bp, Homo sapiens
tcagaggtgggcaag

SEQ ID NO: 1538239 - DNA, 15 bp, Homo sapiens
cagaggtgggcaagt

SEQ ID NO: 1538240 - DNA, 15 bp, Homo sapiens
agaggtgggcaagtt

SEQ ID NO: 1538241 - DNA, 15 bp, Homo sapiens
gaggtgggcaagttg

SEQ ID NO: 1538242 - DNA, 15 bp, Homo sapiens
aggtgggcaagttgg

SEQ ID NO: 1538243 - DNA, 15 bp, Homo sapiens
ggtgggcaagttggc

SEQ ID NO: 1538244 - DNA, 15 bp, Homo sapiens
gtgggcaagttggcc

SEQ ID NO: 1538245 - DNA, 15 bp, Homo sapiens
tgggcaagttggccc

SEQ ID NO: 1538246 - DNA, 15 bp, Homo sapiens
gggcaagttggcccg

SEQ ID NO: 1538247 - DNA, 15 bp, Homo sapiens
ggcaagttggcccgg

SEQ ID NO: 1538248 - DNA, 15 bp, Homo sapiens
gcaagttggcccggg

SEQ ID NO: 1538249 - DNA, 15 bp, Homo sapiens
caagttggcccgggt

SEQ ID NO: 1538250 - DNA, 15 bp, Homo sapiens
aagttggcccgggtg

SEQ ID NO: 1538251 - DNA, 15 bp, Homo sapiens
agttggcccgggtgg

SEQ ID NO: 1538252 - DNA, 15 bp, Homo sapiens
gttggcccgggtggg

SEQ ID NO: 1538253 - DNA, 15 bp, Homo sapiens
ttggcccgggtgggt

SEQ ID NO: 1538254 - DNA, 15 bp, Homo sapiens
tggcccgggtgggtc

SEQ ID NO: 1538255 - DNA, 15 bp, Homo sapiens
ggcccgggtgggtca

SEQ ID NO: 1538256 - DNA, 15 bp, Homo sapiens
gcccgggtgggtcag

SEQ ID NO: 1538257 - DNA, 15 bp, Homo sapiens
cccgggtgggtcagg

SEQ ID NO: 1538258 - DNA, 15 bp, Homo sapiens
ccgggtgggtcagga

SEQ ID NO: 1538259 - DNA, 15 bp, Homo sapiens
cgggtgggtcaggag

SEQ ID NO: 1538260 - DNA, 15 bp, Homo sapiens
gggtgggtcaggagg

SEQ ID NO: 1538261 - DNA, 15 bp, Homo sapiens
ggtgggtcaggagga

SEQ ID NO: 1538262 - DNA, 15 bp, Homo sapiens
gtgggtcaggaggat

SEQ ID NO: 1538263 - DNA, 15 bp, Homo sapiens
tgggtcaggaggatc

SEQ ID NO: 1538264 - DNA, 15 bp, Homo sapiens
gggtcaggaggatca

SEQ ID NO: 1538265 - DNA, 15 bp, Homo sapiens
ggtcaggaggatcag

SEQ ID NO: 1538266 - DNA, 15 bp, Homo sapiens
gtcaggaggatcaga

SEQ ID NO: 1538267 - DNA, 15 bp, Homo sapiens
tcaggaggatcagat

SEQ ID NO: 1538268 - DNA, 15 bp, Homo sapiens
caggaggatcagatg

SEQ ID NO: 1538269 - DNA, 15 bp, Homo sapiens
aggaggatcagatgt

SEQ ID NO: 1538270 - DNA, 15 bp, Homo sapiens
ggaggatcagatgtt

SEQ ID NO: 1538271 - DNA, 15 bp, Homo sapiens
gaggatcagatgttg

SEQ ID NO: 1538272 - DNA, 15 bp, Homo sapiens
aggatcagatgttga

SEQ ID NO: 1538273 - DNA, 15 bp, Homo sapiens
ggatcagatgttgag

SEQ ID NO: 1538274 - DNA, 15 bp, Homo sapiens
gatcagatgttgagg

SEQ ID NO: 1538275 - DNA, 15 bp, Homo sapiens
atcagatgttgagga

SEQ ID NO: 1538276 - DNA, 15 bp, Homo sapiens
tcagatgttgaggaa

SEQ ID NO: 1538277 - DNA, 15 bp, Homo sapiens
cagatgttgaggaaa

SEQ ID NO: 1538278 - DNA, 15 bp, Homo sapiens
agatgttgaggaaat

SEQ ID NO: 1538279 - DNA, 15 bp, Homo sapiens
gatgttgaggaaatc

SEQ ID NO: 1538280 - DNA, 15 bp, Homo sapiens
atgttgaggaaatct

SEQ ID NO: 1538281 - DNA, 15 bp, Homo sapiens
tgttgaggaaatctt

SEQ ID NO: 1538282 - DNA, 15 bp, Homo sapiens
gttgaggaaatcttt

SEQ ID NO: 1538283 - DNA, 15 bp, Homo sapiens
ttgaggaaatctttg

SEQ ID NO: 1538284 - DNA, 15 bp, Homo sapiens
tgaggaaatctttgg

SEQ ID NO: 1538285 - DNA, 15 bp, Homo sapiens
gaggaaatctttgga

SEQ ID NO: 1538286 - DNA, 15 bp, Homo sapiens
aggaaatctttggat

SEQ ID NO: 1538287 - DNA, 15 bp, Homo sapiens
ggaaatctttggatt

SEQ ID NO: 1538288 - DNA, 15 bp, Homo sapiens
gaaatctttggattg

SEQ ID NO: 1538289 - DNA, 15 bp, Homo sapiens
aaatctttggattgg

SEQ ID NO: 1538290 - DNA, 15 bp, Homo sapiens
aatctttggattgga

SEQ ID NO: 1538291 - DNA, 15 bp, Homo sapiens
atctttggattggag

SEQ ID NO: 1538292 - DNA, 15 bp, Homo sapiens
tctttggattggagg

SEQ ID NO: 1538293 - DNA, 15 bp, Homo sapiens
ctttggattggaggc

SEQ ID NO: 1538294 - DNA, 15 bp, Homo sapiens
tttggattggaggca

SEQ ID NO: 1538295 - DNA, 15 bp, Homo sapiens
ttggattggaggcag

SEQ ID NO: 1538296 - DNA, 15 bp, Homo sapiens
tggattggaggcagg

SEQ ID NO: 1538297 - DNA, 15 bp, Homo sapiens
ggattggaggcaggc

SEQ ID NO: 1538298 - DNA, 15 bp, Homo sapiens
gattggaggcaggca

SEQ ID NO: 1538299 - DNA, 15 bp, Homo sapiens
attggaggcaggcag

SEQ ID NO: 1538300 - DNA, 15 bp, Homo sapiens
ttggaggcaggcaga

SEQ ID NO: 1538301 - DNA, 15 bp, Homo sapiens
tggaggcaggcagag

SEQ ID NO: 1538302 - DNA, 15 bp, Homo sapiens
ggaggcaggcagagc

SEQ ID NO: 1538303 - DNA, 15 bp, Homo sapiens
gaggcaggcagagca

SEQ ID NO: 1538304 - DNA, 15 bp, Homo sapiens
aggcaggcagagcag

SEQ ID NO: 1538305 - DNA, 15 bp, Homo sapiens
ggcaggcagagcagg

SEQ ID NO: 1538306 - DNA, 15 bp, Homo sapiens
gcaggcagagcaggg

SEQ ID NO: 1538307 - DNA, 15 bp, Homo sapiens
caggcagagcaggga

SEQ ID NO: 1538308 - DNA, 15 bp, Homo sapiens
aggcagagcagggaa

SEQ ID NO: 1538309 - DNA, 15 bp, Homo sapiens
ggcagagcagggaag

SEQ ID NO: 1538310 - DNA, 15 bp, Homo sapiens
gcagagcagggaagc

SEQ ID NO: 1538311 - DNA, 15 bp, Homo sapiens
cagagcagggaagca

SEQ ID NO: 1538312 - DNA, 15 bp, Homo sapiens
agagcagggaagcat

SEQ ID NO: 1538313 - DNA, 15 bp, Homo sapiens
gagcagggaagcatc

SEQ ID NO: 1538314 - DNA, 15 bp, Homo sapiens
agcagggaagcatcg

SEQ ID NO: 1538315 - DNA, 15 bp, Homo sapiens
gcagggaagcatcgg

SEQ ID NO: 1538316 - DNA, 15 bp, Homo sapiens
cagggaagcatcggg

SEQ ID NO: 1538317 - DNA, 15 bp, Homo sapiens
agggaagcatcgggt

SEQ ID NO: 1538318 - DNA, 15 bp, Homo sapiens
gggaagcatcgggtg

SEQ ID NO: 1538319 - DNA, 15 bp, Homo sapiens
ggaagcatcgggtga

SEQ ID NO: 1538320 - DNA, 15 bp, Homo sapiens
gaagcatcgggtgat

SEQ ID NO: 1538321 - DNA, 15 bp, Homo sapiens
aagcatcgggtgatt

SEQ ID NO: 1538322 - DNA, 15 bp, Homo sapiens
agcatcgggtgattc

SEQ ID NO: 1538323 - DNA, 15 bp, Homo sapiens
gcatcgggtgattct

SEQ ID NO: 1538324 - DNA, 15 bp, Homo sapiens
catcgggtgattcta

SEQ ID NO: 1538325 - DNA, 15 bp, Homo sapiens
atcgggtgattctat

SEQ ID NO: 1538326 - DNA, 15 bp, Homo sapiens
tcgggtgattctatg

SEQ ID NO: 1538327 - DNA, 15 bp, Homo sapiens
cgggtgattctatga

SEQ ID NO: 1538328 - DNA, 15 bp, Homo sapiens
gggtgattctatgac

SEQ ID NO: 1538329 - DNA, 15 bp, Homo sapiens
ggtgattctatgaca

SEQ ID NO: 1538330 - DNA, 15 bp, Homo sapiens
gtgattctatgacag

SEQ ID NO: 1538331 - DNA, 15 bp, Homo sapiens
tgattctatgacaga

SEQ ID NO: 1538332 - DNA, 15 bp, Homo sapiens
gattctatgacagac

SEQ ID NO: 1538333 - DNA, 15 bp, Homo sapiens
attctatgacagacc

SEQ ID NO: 1538334 - DNA, 15 bp, Homo sapiens
ttctatgacagaccc

SEQ ID NO: 1538335 - DNA, 15 bp, Homo sapiens
tctatgacagaccca

SEQ ID NO: 1538336 - DNA, 15 bp, Homo sapiens
ctatgacagacccag

SEQ ID NO: 1538337 - DNA, 15 bp, Homo sapiens
tatgacagacccagg

SEQ ID NO: 1538338 - DNA, 15 bp, Homo sapiens
atgacagacccaggg

SEQ ID NO: 1538339 - DNA, 15 bp, Homo sapiens
tgacagacccagggc

SEQ ID NO: 1538340 - DNA, 15 bp, Homo sapiens
gacagacccagggct

SEQ ID NO: 1538341 - DNA, 15 bp, Homo sapiens
acagacccagggctc

SEQ ID NO: 1538342 - DNA, 15 bp, Homo sapiens
cagacccagggctcc

SEQ ID NO: 1538343 - DNA, 15 bp, Homo sapiens
gacccagggctccaa

SEQ ID NO: 1538344 - DNA, 15 bp, Homo sapiens
acccagggctccaag

SEQ ID NO: 1538345 - DNA, 15 bp, Homo sapiens
cccagggctccaagc

SEQ ID NO: 1538346 - DNA, 15 bp, Homo sapiens
ccagggctccaagct

SEQ ID NO: 1538347 - DNA, 15 bp, Homo sapiens
cagggctccaagctg

SEQ ID NO: 1538348 - DNA, 15 bp, Homo sapiens
agggctccaagctgc

SEQ ID NO: 1538349 - DNA, 15 bp, Homo sapiens
gggctccaagctgca

SEQ ID NO: 1538350 - DNA, 15 bp, Homo sapiens
ggctccaagctgcag

SEQ ID NO: 1538351 - DNA, 15 bp, Homo sapiens
gctccaagctgcagt

SEQ ID NO: 1538352 - DNA, 15 bp, Homo sapiens
ctccaagctgcagtt

SEQ ID NO: 1538353 - DNA, 15 bp, Homo sapiens
tccaagctgcagttc

SEQ ID NO: 1538354 - DNA, 15 bp, Homo sapiens
ccaagctgcagttca

SEQ ID NO: 1538355 - DNA, 15 bp, Homo sapiens
caagctgcagttcag

SEQ ID NO: 1538356 - DNA, 15 bp, Homo sapiens
aagctgcagttcagg

SEQ ID NO: 1538357 - DNA, 15 bp, Homo sapiens
agctgcagttcagga

SEQ ID NO: 1538358 - DNA, 15 bp, Homo sapiens
gctgcagttcaggag

SEQ ID NO: 1538359 - DNA, 15 bp, Homo sapiens
ctgcagttcaggagg

SEQ ID NO: 1538360 - DNA, 15 bp, Homo sapiens
tgcagttcaggaggg

SEQ ID NO: 1538361 - DNA, 15 bp, Homo sapiens
gcagttcaggagggg

SEQ ID NO: 1538362 - DNA, 15 bp, Homo sapiens
cagttcaggaggggc

SEQ ID NO: 1538363 - DNA, 15 bp, Homo sapiens
agttcaggaggggca

SEQ ID NO: 1538364 - DNA, 15 bp, Homo sapiens
gttcaggaggggcac

SEQ ID NO: 1538365 - DNA, 15 bp, Homo sapiens
ttcaggaggggcact

SEQ ID NO: 1538366 - DNA, 15 bp, Homo sapiens
tcaggaggggcactg

SEQ ID NO: 1538367 - DNA, 15 bp, Homo sapiens
caggaggggcactgg

SEQ ID NO: 1538368 - DNA, 15 bp, Homo sapiens
aggaggggcactggc

SEQ ID NO: 1538369 - DNA, 15 bp, Homo sapiens
ggaggggcactggca

SEQ ID NO: 1538370 - DNA, 15 bp, Homo sapiens
gaggggcactggcac

SEQ ID NO: 1538371 - DNA, 15 bp, Homo sapiens
aggggcactggcacg

SEQ ID NO: 1538372 - DNA, 15 bp, Homo sapiens
ggggcactggcacgg

SEQ ID NO: 1538373 - DNA, 15 bp, Homo sapiens
gggcactggcacggc

SEQ ID NO: 1538374 - DNA, 15 bp, Homo sapiens
ggcactggcacggcc

SEQ ID NO: 1538375 - DNA, 15 bp, Homo sapiens
gcactggcacggcct

SEQ ID NO: 1538376 - DNA, 15 bp, Homo sapiens
cactggcacggcctc

SEQ ID NO: 1538377 - DNA, 15 bp, Homo sapiens
actggcacggcctct

SEQ ID NO: 1538378 - DNA, 15 bp, Homo sapiens
ctggcacggcctctg

SEQ ID NO: 1538379 - DNA, 15 bp, Homo sapiens
tggcacggcctctgc

SEQ ID NO: 1538380 - DNA, 15 bp, Homo sapiens
ggcacggcctctgct

SEQ ID NO: 1538381 - DNA, 15 bp, Homo sapiens
gcacggcctctgctc

SEQ ID NO: 1538382 - DNA, 15 bp, Homo sapiens
cacggcctctgctca

SEQ ID NO: 1538383 - DNA, 15 bp, Homo sapiens
acggcctctgctcaa

SEQ ID NO: 1538384 - DNA, 15 bp, Homo sapiens
cggcctctgctcaac

SEQ ID NO: 1538385 - DNA, 15 bp, Homo sapiens
ggcctctgctcaact

SEQ ID NO: 1538386 - DNA, 15 bp, Homo sapiens
gcctctgctcaactc

SEQ ID NO: 1538387 - DNA, 15 bp, Homo sapiens
cctctgctcaactcc

SEQ ID NO: 1538388 - DNA, 15 bp, Homo sapiens
ctctgctcaactccc

SEQ ID NO: 1538389 - DNA, 15 bp, Homo sapiens
tctgctcaactcccc

SEQ ID NO: 1538390 - DNA, 15 bp, Homo sapiens
ctgctcaactccccc

SEQ ID NO: 1538391 - DNA, 15 bp, Homo sapiens
tgctcaactccccct

SEQ ID NO: 1538392 - DNA, 15 bp, Homo sapiens
gctcaactccccctt

SEQ ID NO: 1538393 - DNA, 15 bp, Homo sapiens
ctcaactcccccttg

SEQ ID NO: 1538394 - DNA, 15 bp, Homo sapiens
tcaactcccccttga

SEQ ID NO: 1538395 - DNA, 15 bp, Homo sapiens
caactcccccttgag

SEQ ID NO: 1538396 - DNA, 15 bp, Homo sapiens
aactcccccttgagt

SEQ ID NO: 1538397 - DNA, 15 bp, Homo sapiens
actcccccttgagtg

SEQ ID NO: 1538398 - DNA, 15 bp, Homo sapiens
ctcccccttgagtga

SEQ ID NO: 1538399 - DNA, 15 bp, Homo sapiens
tcccccttgagtgac

SEQ ID NO: 1538400 - DNA, 15 bp, Homo sapiens
cccccttgagtgaca

SEQ ID NO: 1538401 - DNA, 15 bp, Homo sapiens
ccccttgagtgacat

SEQ ID NO: 1538402 - DNA, 15 bp, Homo sapiens
cccttgagtgacatc

SEQ ID NO: 1538403 - DNA, 15 bp, Homo sapiens
ccttgagtgacatca

SEQ ID NO: 1538404 - DNA, 15 bp, Homo sapiens
cttgagtgacatcag

SEQ ID NO: 1538405 - DNA, 15 bp, Homo sapiens
ttgagtgacatcagg

SEQ ID NO: 1538406 - DNA, 15 bp, Homo sapiens
tgagtgacatcaggt

SEQ ID NO: 1538407 - DNA, 15 bp, Homo sapiens
gagtgacatcaggtg

SEQ ID NO: 1538408 - DNA, 15 bp, Homo sapiens
agtgacatcaggtga

SEQ ID NO: 1538409 - DNA, 15 bp, Homo sapiens
gtgacatcaggtgaa

SEQ ID NO: 1538410 - DNA, 15 bp, Homo sapiens
tgacatcaggtgaag

SEQ ID NO: 1538411 - DNA, 15 bp, Homo sapiens
gacatcaggtgaagt

SEQ ID NO: 1538412 - DNA, 15 bp, Homo sapiens
acatcaggtgaagtg

SEQ ID NO: 1538413 - DNA, 15 bp, Homo sapiens
catcaggtgaagtgc

SEQ ID NO: 1538414 - DNA, 15 bp, Homo sapiens
atcaggtgaagtgcc

SEQ ID NO: 1538415 - DNA, 15 bp, Homo sapiens
tcaggtgaagtgccg

SEQ ID NO: 1538416 - DNA, 15 bp, Homo sapiens
caggtgaagtgccga

SEQ ID NO: 1538417 - DNA, 15 bp, Homo sapiens
aggtgaagtgccgac

SEQ ID NO: 1538418 - DNA, 15 bp, Homo sapiens
ggtgaagtgccgaca

SEQ ID NO: 1538419 - DNA, 15 bp, Homo sapiens
gtgaagtgccgacaa

SEQ ID NO: 1538420 - DNA, 15 bp, Homo sapiens
tgaagtgccgacaac

SEQ ID NO: 1538421 - DNA, 15 bp, Homo sapiens
gaagtgccgacaaca

SEQ ID NO: 1538422 - DNA, 15 bp, Homo sapiens
aagtgccgacaacac

SEQ ID NO: 1538423 - DNA, 15 bp, Homo sapiens
agtgccgacaacaca

SEQ ID NO: 1538424 - DNA, 15 bp, Homo sapiens
gtgccgacaacacag

SEQ ID NO: 1538425 - DNA, 15 bp, Homo sapiens
tgccgacaacacaga

SEQ ID NO: 1538426 - DNA, 15 bp, Homo sapiens
gccgacaacacagaa

SEQ ID NO: 1538427 - DNA, 15 bp, Homo sapiens
ccgacaacacagaag

SEQ ID NO: 1538428 - DNA, 15 bp, Homo sapiens
cgacaacacagaagg

SEQ ID NO: 1538429 - DNA, 15 bp, Homo sapiens
gacaacacagaaggc

SEQ ID NO: 1538430 - DNA, 15 bp, Homo sapiens
acaacacagaaggca

SEQ ID NO: 1538431 - DNA, 15 bp, Homo sapiens
caacacagaaggcag

SEQ ID NO: 1538432 - DNA, 15 bp, Homo sapiens
aacacagaaggcagc

SEQ ID NO: 1538433 - DNA, 15 bp, Homo sapiens
acacagaaggcagca

SEQ ID NO: 1538434 - DNA, 15 bp, Homo sapiens
cacagaaggcagcaa

SEQ ID NO: 1538435 - DNA, 15 bp, Homo sapiens
acagaaggcagcaaa

SEQ ID NO: 1538436 - DNA, 15 bp, Homo sapiens
cagaaggcagcaaat

SEQ ID NO: 1538437 - DNA, 15 bp, Homo sapiens
agaaggcagcaaatg

SEQ ID NO: 1538438 - DNA, 15 bp, Homo sapiens
gaaggcagcaaatgc

SEQ ID NO: 1538439 - DNA, 15 bp, Homo sapiens
aaggcagcaaatgct

SEQ ID NO: 1538440 - DNA, 15 bp, Homo sapiens
aggcagcaaatgctg

SEQ ID NO: 1538441 - DNA, 15 bp, Homo sapiens
ggcagcaaatgctgc

SEQ ID NO: 1538442 - DNA, 15 bp, Homo sapiens
gcagcaaatgctgcc

SEQ ID NO: 1538443 - DNA, 15 bp, Homo sapiens
cagcaaatgctgcca

SEQ ID NO: 1538444 - DNA, 15 bp, Homo sapiens
agcaaatgctgccag

SEQ ID NO: 1538445 - DNA, 15 bp, Homo sapiens
gcaaatgctgccagt

SEQ ID NO: 1538446 - DNA, 15 bp, Homo sapiens
caaatgctgccagtc

SEQ ID NO: 1538447 - DNA, 15 bp, Homo sapiens
aaatgctgccagtca

SEQ ID NO: 1538448 - DNA, 15 bp, Homo sapiens
aatgctgccagtcag

SEQ ID NO: 1538449 - DNA, 15 bp, Homo sapiens
atgctgccagtcagg

SEQ ID NO: 1538450 - DNA, 15 bp, Homo sapiens
tgctgccagtcaggt

SEQ ID NO: 1538451 - DNA, 15 bp, Homo sapiens
gctgccagtcaggtc

SEQ ID NO: 1538452 - DNA, 15 bp, Homo sapiens
ctgccagtcaggtct

SEQ ID NO: 1538453 - DNA, 15 bp, Homo sapiens
tgccagtcaggtctg

SEQ ID NO: 1538454 - DNA, 15 bp, Homo sapiens
gccagtcaggtctgc

SEQ ID NO: 1538455 - DNA, 15 bp, Homo sapiens
ccagtcaggtctgct

SEQ ID NO: 1538456 - DNA, 15 bp, Homo sapiens
cagtcaggtctgctt

SEQ ID NO: 1538457 - DNA, 15 bp, Homo sapiens
agtcaggtctgcttc

SEQ ID NO: 1538458 - DNA, 15 bp, Homo sapiens
gtcaggtctgcttcc

SEQ ID NO: 1538459 - DNA, 15 bp, Homo sapiens
tcaggtctgcttccc

SEQ ID NO: 1538460 - DNA, 15 bp, Homo sapiens
caggtctgcttccca

SEQ ID NO: 1538461 - DNA, 15 bp, Homo sapiens
aggtctgcttcccag

SEQ ID NO: 1538462 - DNA, 15 bp, Homo sapiens
ggtctgcttcccagg

SEQ ID NO: 1538463 - DNA, 15 bp, Homo sapiens
gtctgcttcccagga

SEQ ID NO: 1538464 - DNA, 15 bp, Homo sapiens
tctgcttcccaggac

SEQ ID NO: 1538465 - DNA, 15 bp, Homo sapiens
ctgcttcccaggaca

SEQ ID NO: 1538466 - DNA, 15 bp, Homo sapiens
tgcttcccaggacag

SEQ ID NO: 1538467 - DNA, 15 bp, Homo sapiens
gcttcccaggacagc

SEQ ID NO: 1538468 - DNA, 15 bp, Homo sapiens
cttcccaggacagcc

SEQ ID NO: 1538469 - DNA, 15 bp, Homo sapiens
ttcccaggacagcca

SEQ ID NO: 1538470 - DNA, 15 bp, Homo sapiens
tcccaggacagccag

SEQ ID NO: 1538471 - DNA, 15 bp, Homo sapiens
cccaggacagccagt

SEQ ID NO: 1538472 - DNA, 15 bp, Homo sapiens
ccaggacagccagtt

SEQ ID NO: 1538473 - DNA, 15 bp, Homo sapiens
caggacagccagttg

SEQ ID NO: 1538474 - DNA, 15 bp, Homo sapiens
aggacagccagttgc

SEQ ID NO: 1538475 - DNA, 15 bp, Homo sapiens
ggacagccagttgct

SEQ ID NO: 1538476 - DNA, 15 bp, Homo sapiens
gacagccagttgcta

SEQ ID NO: 1538477 - DNA, 15 bp, Homo sapiens
acagccagttgctaa

SEQ ID NO: 1538478 - DNA, 15 bp, Homo sapiens
cagccagttgctaac

SEQ ID NO: 1538479 - DNA, 15 bp, Homo sapiens
agccagttgctaacc

SEQ ID NO: 1538480 - DNA, 15 bp, Homo sapiens
gccagttgctaaccc

SEQ ID NO: 1538481 - DNA, 15 bp, Homo sapiens
ccagttgctaaccct

SEQ ID NO: 1538482 - DNA, 15 bp, Homo sapiens
cagttgctaaccctt

SEQ ID NO: 1538483 - DNA, 15 bp, Homo sapiens
agttgctaacccttc

SEQ ID NO: 1538484 - DNA, 15 bp, Homo sapiens
gttgctaacccttct

SEQ ID NO: 1538485 - DNA, 15 bp, Homo sapiens
ttgctaacccttctc

SEQ ID NO: 1538486 - DNA, 15 bp, Homo sapiens
tgctaacccttctcc

SEQ ID NO: 1538487 - DNA, 15 bp, Homo sapiens
gctaacccttctcca

SEQ ID NO: 1538488 - DNA, 15 bp, Homo sapiens
ctaacccttctccag

SEQ ID NO: 1538489 - DNA, 15 bp, Homo sapiens
taacccttctccagc

SEQ ID NO: 1538490 - DNA, 15 bp, Homo sapiens
aacccttctccagca

SEQ ID NO: 1538491 - DNA, 15 bp, Homo sapiens
acccttctccagcac

SEQ ID NO: 1538492 - DNA, 15 bp, Homo sapiens
cccttctccagcaca

SEQ ID NO: 1538493 - DNA, 15 bp, Homo sapiens
ccttctccagcacag

SEQ ID NO: 1538494 - DNA, 15 bp, Homo sapiens
cttctccagcacagc

SEQ ID NO: 1538495 - DNA, 15 bp, Homo sapiens
ttctccagcacagca

SEQ ID NO: 1538496 - DNA, 15 bp, Homo sapiens
tctccagcacagcac

SEQ ID NO: 1538497 - DNA, 15 bp, Homo sapiens
ctccagcacagcact

SEQ ID NO: 1538498 - DNA, 15 bp, Homo sapiens
tccagcacagcactg

SEQ ID NO: 1538499 - DNA, 15 bp, Homo sapiens
ccagcacagcactgg

SEQ ID NO: 1538500 - DNA, 15 bp, Homo sapiens
cagcacagcactgga

SEQ ID NO: 1538501 - DNA, 15 bp, Homo sapiens
agcacagcactggat

SEQ ID NO: 1538502 - DNA, 15 bp, Homo sapiens
gcacagcactggatt

SEQ ID NO: 1538503 - DNA, 15 bp, Homo sapiens
cacagcactggattt

SEQ ID NO: 1538504 - DNA, 15 bp, Homo sapiens
acagcactggatttt

SEQ ID NO: 1538505 - DNA, 15 bp, Homo sapiens
cagcactggattttg

SEQ ID NO: 1538506 - DNA, 15 bp, Homo sapiens
agcactggattttgg

SEQ ID NO: 1538507 - DNA, 15 bp, Homo sapiens
gcactggattttggt

SEQ ID NO: 1538508 - DNA, 15 bp, Homo sapiens
cactggattttggtc

SEQ ID NO: 1538509 - DNA, 15 bp, Homo sapiens
actggattttggtca

SEQ ID NO: 1538510 - DNA, 15 bp, Homo sapiens
ctggattttggtcac

SEQ ID NO: 1538511 - DNA, 15 bp, Homo sapiens
tggattttggtcacc

SEQ ID NO: 1538512 - DNA, 15 bp, Homo sapiens
ggattttggtcacct

SEQ ID NO: 1538513 - DNA, 15 bp, Homo sapiens
gattttggtcacctg

SEQ ID NO: 1538514 - DNA, 15 bp, Homo sapiens
attttggtcacctgg

SEQ ID NO: 1538515 - DNA, 15 bp, Homo sapiens
ttttggtcacctggc

SEQ ID NO: 1538516 - DNA, 15 bp, Homo sapiens
tttggtcacctggct

SEQ ID NO: 1538517 - DNA, 15 bp, Homo sapiens
ttggtcacctggctg

SEQ ID NO: 1538518 - DNA, 15 bp, Homo sapiens
tggtcacctggctgg

SEQ ID NO: 1538519 - DNA, 15 bp, Homo sapiens
ggtcacctggctggg

SEQ ID NO: 1538520 - DNA, 15 bp, Homo sapiens
gtcacctggctggga

SEQ ID NO: 1538521 - DNA, 15 bp, Homo sapiens
tcacctggctgggag

SEQ ID NO: 1538522 - DNA, 15 bp, Homo sapiens
cacctggctgggagc

SEQ ID NO: 1538523 - DNA, 15 bp, Homo sapiens
acctggctgggagct

SEQ ID NO: 1538524 - DNA, 15 bp, Homo sapiens
cctggctgggagctc

SEQ ID NO: 1538525 - DNA, 15 bp, Homo sapiens
ctggctgggagctcc

SEQ ID NO: 1538526 - DNA, 15 bp, Homo sapiens
tggctgggagctcca

SEQ ID NO: 1538527 - DNA, 15 bp, Homo sapiens
ggctgggagctccac

SEQ ID NO: 1538528 - DNA, 15 bp, Homo sapiens
gctgggagctccacc

SEQ ID NO: 1538529 - DNA, 15 bp, Homo sapiens
ctgggagctccacct

SEQ ID NO: 1538530 - DNA, 15 bp, Homo sapiens
tgggagctccacctc

SEQ ID NO: 1538531 - DNA, 15 bp, Homo sapiens
gggagctccacctcc

SEQ ID NO: 1538532 - DNA, 15 bp, Homo sapiens
ggagctccacctccc

SEQ ID NO: 1538533 - DNA, 15 bp, Homo sapiens
gagctccacctcccc

SEQ ID NO: 1538534 - DNA, 15 bp, Homo sapiens
agctccacctcccca

SEQ ID NO: 1538535 - DNA, 15 bp, Homo sapiens
gctccacctccccag

SEQ ID NO: 1538536 - DNA, 15 bp, Homo sapiens
ctccacctccccagc

SEQ ID NO: 1538537 - DNA, 15 bp, Homo sapiens
tccacctccccagct

SEQ ID NO: 1538538 - DNA, 15 bp, Homo sapiens
ccacctccccagctg

SEQ ID NO: 1538539 - DNA, 15 bp, Homo sapiens
cacctccccagctgc

SEQ ID NO: 1538540 - DNA, 15 bp, Homo sapiens
acctccccagctgct

SEQ ID NO: 1538541 - DNA, 15 bp, Homo sapiens
cctccccagctgctg

SEQ ID NO: 1538542 - DNA, 15 bp, Homo sapiens
ctccccagctgctgc

SEQ ID NO: 1538543 - DNA, 15 bp, Homo sapiens
tccccagctgctgcc

SEQ ID NO: 1538544 - DNA, 15 bp, Homo sapiens
ccccagctgctgcct

SEQ ID NO: 1538545 - DNA, 15 bp, Homo sapiens
cccagctgctgcctc

SEQ ID NO: 1538546 - DNA, 15 bp, Homo sapiens
ccagctgctgcctca

SEQ ID NO: 1538547 - DNA, 15 bp, Homo sapiens
cagctgctgcctcac

SEQ ID NO: 1538548 - DNA, 15 bp, Homo sapiens
agctgctgcctcacc

SEQ ID NO: 1538549 - DNA, 15 bp, Homo sapiens
gctgctgcctcacct

SEQ ID NO: 1538550 - DNA, 15 bp, Homo sapiens
ctgctgcctcacctg

SEQ ID NO: 1538551 - DNA, 15 bp, Homo sapiens
tgctgcctcacctgc

SEQ ID NO: 1538552 - DNA, 15 bp, Homo sapiens
gctgcctcacctgct

SEQ ID NO: 1538553 - DNA, 15 bp, Homo sapiens
ctgcctcacctgctt

SEQ ID NO: 1538554 - DNA, 15 bp, Homo sapiens
tgcctcacctgcttt

SEQ ID NO: 1538555 - DNA, 15 bp, Homo sapiens
gcctcacctgctttt

SEQ ID NO: 1538556 - DNA, 15 bp, Homo sapiens
cctcacctgcttttc

SEQ ID NO: 1538557 - DNA, 15 bp, Homo sapiens
ctcacctgcttttcc

SEQ ID NO: 1538558 - DNA, 15 bp, Homo sapiens
tcacctgcttttcca

SEQ ID NO: 1538559 - DNA, 15 bp, Homo sapiens
cacctgcttttccaa

SEQ ID NO: 1538560 - DNA, 15 bp, Homo sapiens
acctgcttttccaaa

SEQ ID NO: 1538561 - DNA, 15 bp, Homo sapiens
cctgcttttccaaac

SEQ ID NO: 1538562 - DNA, 15 bp, Homo sapiens
ctgcttttccaaacc

SEQ ID NO: 1538563 - DNA, 15 bp, Homo sapiens
tgcttttccaaaccc

SEQ ID NO: 1538564 - DNA, 15 bp, Homo sapiens
gcttttccaaacccc

SEQ ID NO: 1538565 - DNA, 15 bp, Homo sapiens
cttttccaaacccca

SEQ ID NO: 1538566 - DNA, 15 bp, Homo sapiens
ttttccaaaccccac

SEQ ID NO: 1538567 - DNA, 15 bp, Homo sapiens
tttccaaaccccacc

SEQ ID NO: 1538568 - DNA, 15 bp, Homo sapiens
ttccaaaccccaccc

SEQ ID NO: 1538569 - DNA, 15 bp, Homo sapiens
tccaaaccccaccct

SEQ ID NO: 1538570 - DNA, 15 bp, Homo sapiens
ccaaaccccaccctg

SEQ ID NO: 1538571 - DNA, 15 bp, Homo sapiens
caaaccccaccctgt

SEQ ID NO: 1538572 - DNA, 15 bp, Homo sapiens
aaaccccaccctgta

SEQ ID NO: 1538573 - DNA, 15 bp, Homo sapiens
aaccccaccctgtaa

SEQ ID NO: 1538574 - DNA, 15 bp, Homo sapiens
accccaccctgtaaa

SEQ ID NO: 1538575 - DNA, 15 bp, Homo sapiens
ccccaccctgtaaac

SEQ ID NO: 1538576 - DNA, 15 bp, Homo sapiens
cccaccctgtaaacg

SEQ ID NO: 1538577 - DNA, 15 bp, Homo sapiens
ccaccctgtaaacgg

SEQ ID NO: 1538578 - DNA, 15 bp, Homo sapiens
caccctgtaaacggt

SEQ ID NO: 1538579 - DNA, 15 bp, Homo sapiens
accctgtaaacggta

SEQ ID NO: 1538580 - DNA, 15 bp, Homo sapiens
ccctgtaaacggtaa

SEQ ID NO: 1538581 - DNA, 15 bp, Homo sapiens
cctgtaaacggtaac

SEQ ID NO: 1538582 - DNA, 15 bp, Homo sapiens
ctgtaaacggtaact

SEQ ID NO: 1538583 - DNA, 15 bp, Homo sapiens
tgtaaacggtaacta

SEQ ID NO: 1538584 - DNA, 15 bp, Homo sapiens
gtaaacggtaactac

SEQ ID NO: 1538585 - DNA, 15 bp, Homo sapiens
taaacggtaactaca

SEQ ID NO: 1538586 - DNA, 15 bp, Homo sapiens
aaacggtaactacat

SEQ ID NO: 1538587 - DNA, 15 bp, Homo sapiens
aacggtaactacatt

SEQ ID NO: 1538588 - DNA, 15 bp, Homo sapiens
acggtaactacattt

SEQ ID NO: 1538589 - DNA, 15 bp, Homo sapiens
cggtaactacatttt

SEQ ID NO: 1538590 - DNA, 15 bp, Homo sapiens
ggtaactacattttg

SEQ ID NO: 1538591 - DNA, 15 bp, Homo sapiens
gtaactacattttgt

SEQ ID NO: 1538592 - DNA, 15 bp, Homo sapiens
taactacattttgtg

SEQ ID NO: 1538593 - DNA, 15 bp, Homo sapiens
aactacattttgtgc

SEQ ID NO: 1538594 - DNA, 15 bp, Homo sapiens
actacattttgtgcc

SEQ ID NO: 1538595 - DNA, 15 bp, Homo sapiens
ctacattttgtgccc

SEQ ID NO: 1538596 - DNA, 15 bp, Homo sapiens
tacattttgtgccca

SEQ ID NO: 1538597 - DNA, 15 bp, Homo sapiens
acattttgtgcccac

SEQ ID NO: 1538598 - DNA, 15 bp, Homo sapiens
cattttgtgcccact

SEQ ID NO: 1538599 - DNA, 15 bp, Homo sapiens
attttgtgcccacta

SEQ ID NO: 1538600 - DNA, 15 bp, Homo sapiens
ttttgtgcccactac

SEQ ID NO: 1538601 - DNA, 15 bp, Homo sapiens
tttgtgcccactacg

SEQ ID NO: 1538602 - DNA, 15 bp, Homo sapiens
ttgtgcccactacgc

SEQ ID NO: 1538603 - DNA, 15 bp, Homo sapiens
tgtgcccactacgcc

SEQ ID NO: 1538604 - DNA, 15 bp, Homo sapiens
gtgcccactacgcct

SEQ ID NO: 1538605 - DNA, 15 bp, Homo sapiens
tgcccactacgcctc

SEQ ID NO: 1538606 - DNA, 15 bp, Homo sapiens
gcccactacgcctcg

SEQ ID NO: 1538607 - DNA, 15 bp, Homo sapiens
cccactacgcctcgt

SEQ ID NO: 1538608 - DNA, 15 bp, Homo sapiens
ccactacgcctcgtt

SEQ ID NO: 1538609 - DNA, 15 bp, Homo sapiens
cactacgcctcgttt

SEQ ID NO: 1538610 - DNA, 15 bp, Homo sapiens
actacgcctcgtttc

SEQ ID NO: 1538611 - DNA, 15 bp, Homo sapiens
ctacgcctcgtttcc

SEQ ID NO: 1538612 - DNA, 15 bp, Homo sapiens
tacgcctcgtttcca

SEQ ID NO: 1538613 - DNA, 15 bp, Homo sapiens
acgcctcgtttccat

SEQ ID NO: 1538614 - DNA, 15 bp, Homo sapiens
cgcctcgtttccatc

SEQ ID NO: 1538615 - DNA, 15 bp, Homo sapiens
gcctcgtttccatct

SEQ ID NO: 1538616 - DNA, 15 bp, Homo sapiens
cctcgtttccatctc

SEQ ID NO: 1538617 - DNA, 15 bp, Homo sapiens
ctcgtttccatctct

SEQ ID NO: 1538618 - DNA, 15 bp, Homo sapiens
tcgtttccatctctt

SEQ ID NO: 1538619 - DNA, 15 bp, Homo sapiens
cgtttccatctcttt

SEQ ID NO: 1538620 - DNA, 15 bp, Homo sapiens
gtttccatctctttg

SEQ ID NO: 1538621 - DNA, 15 bp, Homo sapiens
tttccatctctttgg

SEQ ID NO: 1538622 - DNA, 15 bp, Homo sapiens
ttccatctctttgga

SEQ ID NO: 1538623 - DNA, 15 bp, Homo sapiens
tccatctctttggag

SEQ ID NO: 1538624 - DNA, 15 bp, Homo sapiens
ccatctctttggagc

SEQ ID NO: 1538625 - DNA, 15 bp, Homo sapiens
catctctttggagca

SEQ ID NO: 1538626 - DNA, 15 bp, Homo sapiens
atctctttggagcac

SEQ ID NO: 1538627 - DNA, 15 bp, Homo sapiens
tctctttggagcacc

SEQ ID NO: 1538628 - DNA, 15 bp, Homo sapiens
ctctttggagcacct

SEQ ID NO: 1538629 - DNA, 15 bp, Homo sapiens
tctttggagcacctc

SEQ ID NO: 1538630 - DNA, 15 bp, Homo sapiens
ctttggagcacctct

SEQ ID NO: 1538631 - DNA, 15 bp, Homo sapiens
tttggagcacctctc

SEQ ID NO: 1538632 - DNA, 15 bp, Homo sapiens
ttggagcacctctca

SEQ ID NO: 1538633 - DNA, 15 bp, Homo sapiens
tggagcacctctcac

SEQ ID NO: 1538634 - DNA, 15 bp, Homo sapiens
ggagcacctctcacg

SEQ ID NO: 1538635 - DNA, 15 bp, Homo sapiens
gagcacctctcacgt

SEQ ID NO: 1538636 - DNA, 15 bp, Homo sapiens
agcacctctcacgtg

SEQ ID NO: 1538637 - DNA, 15 bp, Homo sapiens
gcacctctcacgtgg

SEQ ID NO: 1538638 - DNA, 15 bp, Homo sapiens
cacctctcacgtgga

SEQ ID NO: 1538639 - DNA, 15 bp, Homo sapiens
acctctcacgtggag

SEQ ID NO: 1538640 - DNA, 15 bp, Homo sapiens
cctctcacgtggagc

SEQ ID NO: 1538641 - DNA, 15 bp, Homo sapiens
ctctcacgtggagct

SEQ ID NO: 1538642 - DNA, 15 bp, Homo sapiens
tctcacgtggagctg

SEQ ID NO: 1538643 - DNA, 15 bp, Homo sapiens
ctcacgtggagctga

SEQ ID NO: 1538644 - DNA, 15 bp, Homo sapiens
tcacgtggagctgaa

SEQ ID NO: 1538645 - DNA, 15 bp, Homo sapiens
cacgtggagctgaac

SEQ ID NO: 1538646 - DNA, 15 bp, Homo sapiens
acgtggagctgaaca

SEQ ID NO: 1538647 - DNA, 15 bp, Homo sapiens
cgtggagctgaacag

SEQ ID NO: 1538648 - DNA, 15 bp, Homo sapiens
gtggagctgaacaga

SEQ ID NO: 1538649 - DNA, 15 bp, Homo sapiens
tggagctgaacagaa

SEQ ID NO: 1538650 - DNA, 15 bp, Homo sapiens
ggagctgaacagaac

SEQ ID NO: 1538651 - DNA, 15 bp, Homo sapiens
gagctgaacagaacg

SEQ ID NO: 1538652 - DNA, 15 bp, Homo sapiens
agctgaacagaacga

SEQ ID NO: 1538653 - DNA, 15 bp, Homo sapiens
gctgaacagaacgac

SEQ ID NO: 1538654 - DNA, 15 bp, Homo sapiens
ctgaacagaacgacc

SEQ ID NO: 1538655 - DNA, 15 bp, Homo sapiens
tgaacagaacgacct

SEQ ID NO: 1538656 - DNA, 15 bp, Homo sapiens
gaacagaacgacctg

SEQ ID NO: 1538657 - DNA, 15 bp, Homo sapiens
aacagaacgacctgt

SEQ ID NO: 1538658 - DNA, 15 bp, Homo sapiens
acagaacgacctgtt

SEQ ID NO: 1538659 - DNA, 15 bp, Homo sapiens
cagaacgacctgtta

SEQ ID NO: 1538660 - DNA, 15 bp, Homo sapiens
agaacgacctgttaa

SEQ ID NO: 1538661 - DNA, 15 bp, Homo sapiens
gaacgacctgttaag

SEQ ID NO: 1538662 - DNA, 15 bp, Homo sapiens
aacgacctgttaagc

SEQ ID NO: 1538663 - DNA, 15 bp, Homo sapiens
acgacctgttaagcc

SEQ ID NO: 1538664 - DNA, 15 bp, Homo sapiens
cgacctgttaagccc

SEQ ID NO: 1538665 - DNA, 15 bp, Homo sapiens
gacctgttaagccca

SEQ ID NO: 1538666 - DNA, 15 bp, Homo sapiens
acctgttaagcccac

SEQ ID NO: 1538667 - DNA, 15 bp, Homo sapiens
cctgttaagcccacc

SEQ ID NO: 1538668 - DNA, 15 bp, Homo sapiens
ctgttaagcccaccg

SEQ ID NO: 1538669 - DNA, 15 bp, Homo sapiens
tgttaagcccaccgt

SEQ ID NO: 1538670 - DNA, 15 bp, Homo sapiens
gttaagcccaccgtg

SEQ ID NO: 1538671 - DNA, 15 bp, Homo sapiens
ttaagcccaccgtgt

SEQ ID NO: 1538672 - DNA, 15 bp, Homo sapiens
taagcccaccgtgtc

SEQ ID NO: 1538673 - DNA, 15 bp, Homo sapiens
aagcccaccgtgtct

SEQ ID NO: 1538674 - DNA, 15 bp, Homo sapiens
agcccaccgtgtctg

SEQ ID NO: 1538675 - DNA, 15 bp, Homo sapiens
gcccaccgtgtctgt

SEQ ID NO: 1538676 - DNA, 15 bp, Homo sapiens
cccaccgtgtctgtt

SEQ ID NO: 1538677 - DNA, 15 bp, Homo sapiens
ccaccgtgtctgtta

SEQ ID NO: 1538678 - DNA, 15 bp, Homo sapiens
caccgtgtctgttag

SEQ ID NO: 1538679 - DNA, 15 bp, Homo sapiens
accgtgtctgttagg

SEQ ID NO: 1538680 - DNA, 15 bp, Homo sapiens
ccgtgtctgttaggg

SEQ ID NO: 1538681 - DNA, 15 bp, Homo sapiens
cgtgtctgttagggt

SEQ ID NO: 1538682 - DNA, 15 bp, Homo sapiens
gtgtctgttagggtt

SEQ ID NO: 1538683 - DNA, 15 bp, Homo sapiens
tgtctgttagggttg

SEQ ID NO: 1538684 - DNA, 15 bp, Homo sapiens
gtctgttagggttgt

SEQ ID NO: 1538685 - DNA, 15 bp, Homo sapiens
tctgttagggttgtc

SEQ ID NO: 1538686 - DNA, 15 bp, Homo sapiens
ctgttagggttgtct

SEQ ID NO: 1538687 - DNA, 15 bp, Homo sapiens
tgttagggttgtcta

SEQ ID NO: 1538688 - DNA, 15 bp, Homo sapiens
gttagggttgtctag

SEQ ID NO: 1538689 - DNA, 15 bp, Homo sapiens
ttagggttgtctagg

SEQ ID NO: 1538690 - DNA, 15 bp, Homo sapiens
tagggttgtctaggc

SEQ ID NO: 1538691 - DNA, 15 bp, Homo sapiens
agggttgtctaggct

SEQ ID NO: 1538692 - DNA, 15 bp, Homo sapiens
gggttgtctaggctg

SEQ ID NO: 1538693 - DNA, 15 bp, Homo sapiens
ggttgtctaggctgt

SEQ ID NO: 1538694 - DNA, 15 bp, Homo sapiens
gttgtctaggctgta

SEQ ID NO: 1538695 - DNA, 15 bp, Homo sapiens
ttgtctaggctgtat

SEQ ID NO: 1538696 - DNA, 15 bp, Homo sapiens
tgtctaggctgtatc

SEQ ID NO: 1538697 - DNA, 15 bp, Homo sapiens
gtctaggctgtatca

SEQ ID NO: 1538698 - DNA, 15 bp, Homo sapiens
tctaggctgtatcag

SEQ ID NO: 1538699 - DNA, 15 bp, Homo sapiens
ctaggctgtatcaga

SEQ ID NO: 1538700 - DNA, 15 bp, Homo sapiens
taggctgtatcagat

SEQ ID NO: 1538701 - DNA, 15 bp, Homo sapiens
aggctgtatcagata

SEQ ID NO: 1538702 - DNA, 15 bp, Homo sapiens
ggctgtatcagatac

SEQ ID NO: 1538703 - DNA, 15 bp, Homo sapiens
gctgtatcagatacc

SEQ ID NO: 1538704 - DNA, 15 bp, Homo sapiens
ctgtatcagataccc

SEQ ID NO: 1538705 - DNA, 15 bp, Homo sapiens
tgtatcagataccca

SEQ ID NO: 1538706 - DNA, 15 bp, Homo sapiens
gtatcagatacccaa

SEQ ID NO: 1538707 - DNA, 15 bp, Homo sapiens
tatcagatacccaac

SEQ ID NO: 1538708 - DNA, 15 bp, Homo sapiens
atcagatacccaact

SEQ ID NO: 1538709 - DNA, 15 bp, Homo sapiens
tcagatacccaacta

SEQ ID NO: 1538710 - DNA, 15 bp, Homo sapiens
cagatacccaactaa

SEQ ID NO: 1538711 - DNA, 15 bp, Homo sapiens
agatacccaactaaa

SEQ ID NO: 1538712 - DNA, 15 bp, Homo sapiens
gatacccaactaaaa

SEQ ID NO: 1538713 - DNA, 15 bp, Homo sapiens
atacccaactaaaac

SEQ ID NO: 1538714 - DNA, 15 bp, Homo sapiens
tacccaactaaaact

SEQ ID NO: 1538715 - DNA, 15 bp, Homo sapiens
acccaactaaaactg

SEQ ID NO: 1538716 - DNA, 15 bp, Homo sapiens
cccaactaaaactgg

SEQ ID NO: 1538717 - DNA, 15 bp, Homo sapiens
ccaactaaaactgga

SEQ ID NO: 1538718 - DNA, 15 bp, Homo sapiens
caactaaaactggat

SEQ ID NO: 1538719 - DNA, 15 bp, Homo sapiens
aactaaaactggatt

SEQ ID NO: 1538720 - DNA, 15 bp, Homo sapiens
actaaaactggattc

SEQ ID NO: 1538721 - DNA, 15 bp, Homo sapiens
ctaaaactggattca

SEQ ID NO: 1538722 - DNA, 15 bp, Homo sapiens
taaaactggattcac

SEQ ID NO: 1538723 - DNA, 15 bp, Homo sapiens
aaaactggattcacc

SEQ ID NO: 1538724 - DNA, 15 bp, Homo sapiens
aaactggattcacca

SEQ ID NO: 1538725 - DNA, 15 bp, Homo sapiens
aactggattcaccaa

SEQ ID NO: 1538726 - DNA, 15 bp, Homo sapiens
actggattcaccaac

SEQ ID NO: 1538727 - DNA, 15 bp, Homo sapiens
ctggattcaccaaca

SEQ ID NO: 1538728 - DNA, 15 bp, Homo sapiens
tggattcaccaacag

SEQ ID NO: 1538729 - DNA, 15 bp, Homo sapiens
ggattcaccaacagg

SEQ ID NO: 1538730 - DNA, 15 bp, Homo sapiens
gattcaccaacaggt

SEQ ID NO: 1538731 - DNA, 15 bp, Homo sapiens
attcaccaacaggta

SEQ ID NO: 1538732 - DNA, 15 bp, Homo sapiens
ttcaccaacaggtat

SEQ ID NO: 1538733 - DNA, 15 bp, Homo sapiens
tcaccaacaggtatt

SEQ ID NO: 1538734 - DNA, 15 bp, Homo sapiens
caccaacaggtattg

SEQ ID NO: 1538735 - DNA, 15 bp, Homo sapiens
accaacaggtattgt

SEQ ID NO: 1538736 - DNA, 15 bp, Homo sapiens
ccaacaggtattgtc

SEQ ID NO: 1538737 - DNA, 15 bp, Homo sapiens
caacaggtattgtca

SEQ ID NO: 1538738 - DNA, 15 bp, Homo sapiens
aacaggtattgtcaa

SEQ ID NO: 1538739 - DNA, 15 bp, Homo sapiens
acaggtattgtcaaa

SEQ ID NO: 1538740 - DNA, 15 bp, Homo sapiens
caggtattgtcaaag

SEQ ID NO: 1538741 - DNA, 15 bp, Homo sapiens
aggtattgtcaaagc

SEQ ID NO: 1538742 - DNA, 15 bp, Homo sapiens
ggtattgtcaaagca

SEQ ID NO: 1538743 - DNA, 15 bp, Homo sapiens
gtattgtcaaagcac

SEQ ID NO: 1538744 - DNA, 15 bp, Homo sapiens
tattgtcaaagcaca

SEQ ID NO: 1538745 - DNA, 15 bp, Homo sapiens
attgtcaaagcacat

SEQ ID NO: 1538746 - DNA, 15 bp, Homo sapiens
ttgtcaaagcacata

SEQ ID NO: 1538747 - DNA, 15 bp, Homo sapiens
tgtcaaagcacataa

SEQ ID NO: 1538748 - DNA, 15 bp, Homo sapiens
gtcaaagcacataag

SEQ ID NO: 1538749 - DNA, 15 bp, Homo sapiens
tcaaagcacataaga

SEQ ID NO: 1538750 - DNA, 15 bp, Homo sapiens
caaagcacataagaa

SEQ ID NO: 1538751 - DNA, 15 bp, Homo sapiens
aaagcacataagaaa

SEQ ID NO: 1538752 - DNA, 15 bp, Homo sapiens
aagcacataagaaag

SEQ ID NO: 1538753 - DNA, 15 bp, Homo sapiens
agcacataagaaaga

SEQ ID NO: 1538754 - DNA, 15 bp, Homo sapiens
gcacataagaaagag

SEQ ID NO: 1538755 - DNA, 15 bp, Homo sapiens
cacataagaaagagt

SEQ ID NO: 1538756 - DNA, 15 bp, Homo sapiens
acataagaaagagtc

SEQ ID NO: 1538757 - DNA, 15 bp, Homo sapiens
cataagaaagagtcc

SEQ ID NO: 1538758 - DNA, 15 bp, Homo sapiens
ataagaaagagtcca

SEQ ID NO: 1538759 - DNA, 15 bp, Homo sapiens
taagaaagagtccag

SEQ ID NO: 1538760 - DNA, 15 bp, Homo sapiens
aagaaagagtccaga

SEQ ID NO: 1538761 - DNA, 15 bp, Homo sapiens
agaaagagtccagag

SEQ ID NO: 1538762 - DNA, 15 bp, Homo sapiens
gaaagagtccagagg

SEQ ID NO: 1538763 - DNA, 15 bp, Homo sapiens
aaagagtccagaggc

SEQ ID NO: 1538764 - DNA, 15 bp, Homo sapiens
aagagtccagaggca

SEQ ID NO: 1538765 - DNA, 15 bp, Homo sapiens
agagtccagaggcag

SEQ ID NO: 1538766 - DNA, 15 bp, Homo sapiens
gagtccagaggcagg

SEQ ID NO: 1538767 - DNA, 15 bp, Homo sapiens
agtccagaggcaggc

SEQ ID NO: 1538768 - DNA, 15 bp, Homo sapiens
gtccagaggcaggca

SEQ ID NO: 1538769 - DNA, 15 bp, Homo sapiens
tccagaggcaggcag

SEQ ID NO: 1538770 - DNA, 15 bp, Homo sapiens
ccagaggcaggcagc

SEQ ID NO: 1538771 - DNA, 15 bp, Homo sapiens
cagaggcaggcagct

SEQ ID NO: 1538772 - DNA, 15 bp, Homo sapiens
agaggcaggcagctc

SEQ ID NO: 1538773 - DNA, 15 bp, Homo sapiens
gaggcaggcagctct

SEQ ID NO: 1538774 - DNA, 15 bp, Homo sapiens
aggcaggcagctctc

SEQ ID NO: 1538775 - DNA, 15 bp, Homo sapiens
ggcaggcagctctca

SEQ ID NO: 1538776 - DNA, 15 bp, Homo sapiens
gcaggcagctctcag

SEQ ID NO: 1538777 - DNA, 15 bp, Homo sapiens
caggcagctctcagc

SEQ ID NO: 1538778 - DNA, 15 bp, Homo sapiens
aggcagctctcagcc

SEQ ID NO: 1538779 - DNA, 15 bp, Homo sapiens
ggcagctctcagcct

SEQ ID NO: 1538780 - DNA, 15 bp, Homo sapiens
gcagctctcagcctg

SEQ ID NO: 1538781 - DNA, 15 bp, Homo sapiens
cagctctcagcctgg

SEQ ID NO: 1538782 - DNA, 15 bp, Homo sapiens
agctctcagcctggt

SEQ ID NO: 1538783 - DNA, 15 bp, Homo sapiens
gctctcagcctggtg

SEQ ID NO: 1538784 - DNA, 15 bp, Homo sapiens
ctctcagcctggtgt

SEQ ID NO: 1538785 - DNA, 15 bp, Homo sapiens
ctcagcctggtgtca

SEQ ID NO: 1538786 - DNA, 15 bp, Homo sapiens
tcagcctggtgtcag

SEQ ID NO: 1538787 - DNA, 15 bp, Homo sapiens
cagcctggtgtcagg

SEQ ID NO: 1538788 - DNA, 15 bp, Homo sapiens
agcctggtgtcaggc

SEQ ID NO: 1538789 - DNA, 15 bp, Homo sapiens
gcctggtgtcaggct

SEQ ID NO: 1538790 - DNA, 15 bp, Homo sapiens
cctggtgtcaggctc

SEQ ID NO: 1538791 - DNA, 15 bp, Homo sapiens
ctggtgtcaggctct

SEQ ID NO: 1538792 - DNA, 15 bp, Homo sapiens
tggtgtcaggctctg

SEQ ID NO: 1538793 - DNA, 15 bp, Homo sapiens
ggtgtcaggctctgg

SEQ ID NO: 1538794 - DNA, 15 bp, Homo sapiens
gtgtcaggctctggg

SEQ ID NO: 1538795 - DNA, 15 bp, Homo sapiens
tgtcaggctctgggt

SEQ ID NO: 1538796 - DNA, 15 bp, Homo sapiens
gtcaggctctgggtc

SEQ ID NO: 1538797 - DNA, 15 bp, Homo sapiens
tcaggctctgggtca

SEQ ID NO: 1538798 - DNA, 15 bp, Homo sapiens
caggctctgggtcag

SEQ ID NO: 1538799 - DNA, 15 bp, Homo sapiens
aggctctgggtcagc

SEQ ID NO: 1538800 - DNA, 15 bp, Homo sapiens
ggctctgggtcagct

SEQ ID NO: 1538801 - DNA, 15 bp, Homo sapiens
gctctgggtcagctt

SEQ ID NO: 1538802 - DNA, 15 bp, Homo sapiens
ctctgggtcagcttt

SEQ ID NO: 1538803 - DNA, 15 bp, Homo sapiens
tctgggtcagctttc

SEQ ID NO: 1538804 - DNA, 15 bp, Homo sapiens
ctgggtcagctttcc

SEQ ID NO: 1538805 - DNA, 15 bp, Homo sapiens
tgggtcagctttcca

SEQ ID NO: 1538806 - DNA, 15 bp, Homo sapiens
gggtcagctttccag

SEQ ID NO: 1538807 - DNA, 15 bp, Homo sapiens
ggtcagctttccaga

SEQ ID NO: 1538808 - DNA, 15 bp, Homo sapiens
gtcagctttccagat

SEQ ID NO: 1538809 - DNA, 15 bp, Homo sapiens
tcagctttccagatt

SEQ ID NO: 1538810 - DNA, 15 bp, Homo sapiens
cagctttccagattc

SEQ ID NO: 1538811 - DNA, 15 bp, Homo sapiens
agctttccagattct

SEQ ID NO: 1538812 - DNA, 15 bp, Homo sapiens
gctttccagattctc

SEQ ID NO: 1538813 - DNA, 15 bp, Homo sapiens
ctttccagattctct

SEQ ID NO: 1538814 - DNA, 15 bp, Homo sapiens
tttccagattctctt

SEQ ID NO: 1538815 - DNA, 15 bp, Homo sapiens
ttccagattctctta

SEQ ID NO: 1538816 - DNA, 15 bp, Homo sapiens
tccagattctcttaa

SEQ ID NO: 1538817 - DNA, 15 bp, Homo sapiens
ccagattctcttaac

SEQ ID NO: 1538818 - DNA, 15 bp, Homo sapiens
cagattctcttaacc

SEQ ID NO: 1538819 - DNA, 15 bp, Homo sapiens
agattctcttaacct

SEQ ID NO: 1538820 - DNA, 15 bp, Homo sapiens
gattctcttaacctt

SEQ ID NO: 1538821 - DNA, 15 bp, Homo sapiens
attctcttaaccttc

SEQ ID NO: 1538822 - DNA, 15 bp, Homo sapiens
ttctcttaaccttcc

SEQ ID NO: 1538823 - DNA, 15 bp, Homo sapiens
tctcttaaccttccc

SEQ ID NO: 1538824 - DNA, 15 bp, Homo sapiens
ctcttaaccttcccc

SEQ ID NO: 1538825 - DNA, 15 bp, Homo sapiens
tcttaaccttcccca

SEQ ID NO: 1538826 - DNA, 15 bp, Homo sapiens
cttaaccttccccac

SEQ ID NO: 1538827 - DNA, 15 bp, Homo sapiens
ttaaccttccccaca

SEQ ID NO: 1538828 - DNA, 15 bp, Homo sapiens
taaccttccccacat

SEQ ID NO: 1538829 - DNA, 15 bp, Homo sapiens
aaccttccccacatc

SEQ ID NO: 1538830 - DNA, 15 bp, Homo sapiens
accttccccacatct

SEQ ID NO: 1538831 - DNA, 15 bp, Homo sapiens
ccttccccacatctg

SEQ ID NO: 1538832 - DNA, 15 bp, Homo sapiens
cttccccacatctgc

SEQ ID NO: 1538833 - DNA, 15 bp, Homo sapiens
ttccccacatctgcc

SEQ ID NO: 1538834 - DNA, 15 bp, Homo sapiens
tccccacatctgcca

SEQ ID NO: 1538835 - DNA, 15 bp, Homo sapiens
ccccacatctgccag

SEQ ID NO: 1538836 - DNA, 15 bp, Homo sapiens
cccacatctgccaga

SEQ ID NO: 1538837 - DNA, 15 bp, Homo sapiens
ccacatctgccagat

SEQ ID NO: 1538838 - DNA, 15 bp, Homo sapiens
cacatctgccagatg

SEQ ID NO: 1538839 - DNA, 15 bp, Homo sapiens
acatctgccagatgc

SEQ ID NO: 1538840 - DNA, 15 bp, Homo sapiens
catctgccagatgcc

SEQ ID NO: 1538841 - DNA, 15 bp, Homo sapiens
atctgccagatgccg

SEQ ID NO: 1538842 - DNA, 15 bp, Homo sapiens
tctgccagatgccgc

SEQ ID NO: 1538843 - DNA, 15 bp, Homo sapiens
ctgccagatgccgcc

SEQ ID NO: 1538844 - DNA, 15 bp, Homo sapiens
tgccagatgccgcca

SEQ ID NO: 1538845 - DNA, 15 bp, Homo sapiens
gccagatgccgccac

SEQ ID NO: 1538846 - DNA, 15 bp, Homo sapiens
ccagatgccgccaca

SEQ ID NO: 1538847 - DNA, 15 bp, Homo sapiens
cagatgccgccacag

SEQ ID NO: 1538848 - DNA, 15 bp, Homo sapiens
agatgccgccacagg

SEQ ID NO: 1538849 - DNA, 15 bp, Homo sapiens
gatgccgccacaggc

SEQ ID NO: 1538850 - DNA, 15 bp, Homo sapiens
atgccgccacaggca

SEQ ID NO: 1538851 - DNA, 15 bp, Homo sapiens
tgccgccacaggcac

SEQ ID NO: 1538852 - DNA, 15 bp, Homo sapiens
gccgccacaggcaca

SEQ ID NO: 1538853 - DNA, 15 bp, Homo sapiens
ccgccacaggcacag

SEQ ID NO: 1538854 - DNA, 15 bp, Homo sapiens
cgccacaggcacagg

SEQ ID NO: 1538855 - DNA, 15 bp, Homo sapiens
gccacaggcacagga

SEQ ID NO: 1538856 - DNA, 15 bp, Homo sapiens
ccacaggcacaggag

SEQ ID NO: 1538857 - DNA, 15 bp, Homo sapiens
cacaggcacaggagg

SEQ ID NO: 1538858 - DNA, 15 bp, Homo sapiens
acaggcacaggaggt

SEQ ID NO: 1538859 - DNA, 15 bp, Homo sapiens
caggcacaggaggta

SEQ ID NO: 1538860 - DNA, 15 bp, Homo sapiens
aggcacaggaggtac

SEQ ID NO: 1538861 - DNA, 15 bp, Homo sapiens
ggcacaggaggtaca

SEQ ID NO: 1538862 - DNA, 15 bp, Homo sapiens
gcacaggaggtacaa

SEQ ID NO: 1538863 - DNA, 15 bp, Homo sapiens
cacaggaggtacaaa

SEQ ID NO: 1538864 - DNA, 15 bp, Homo sapiens
acaggaggtacaaac

SEQ ID NO: 1538865 - DNA, 15 bp, Homo sapiens
caggaggtacaaaca

SEQ ID NO: 1538866 - DNA, 15 bp, Homo sapiens
aggaggtacaaacaa

SEQ ID NO: 1538867 - DNA, 15 bp, Homo sapiens
ggaggtacaaacaaa

SEQ ID NO: 1538868 - DNA, 15 bp, Homo sapiens
gaggtacaaacaaac

SEQ ID NO: 1538869 - DNA, 15 bp, Homo sapiens
aggtacaaacaaacc

SEQ ID NO: 1538870 - DNA, 15 bp, Homo sapiens
ggtacaaacaaaccc

SEQ ID NO: 1538871 - DNA, 15 bp, Homo sapiens
gtacaaacaaaccca

SEQ ID NO: 1538872 - DNA, 15 bp, Homo sapiens
tacaaacaaacccaa

SEQ ID NO: 1538873 - DNA, 15 bp, Homo sapiens
acaaacaaacccaaa

SEQ ID NO: 1538874 - DNA, 15 bp, Homo sapiens
caaacaaacccaaaa

SEQ ID NO: 1538875 - DNA, 15 bp, Homo sapiens
aaacaaacccaaaaa

SEQ ID NO: 1538876 - DNA, 15 bp, Homo sapiens
aacaaacccaaaaat

SEQ ID NO: 1538877 - DNA, 15 bp, Homo sapiens
acaaacccaaaaatg

SEQ ID NO: 1538878 - DNA, 15 bp, Homo sapiens
caaacccaaaaatgt

SEQ ID NO: 1538879 - DNA, 15 bp, Homo sapiens
aaacccaaaaatgtt

SEQ ID NO: 1538880 - DNA, 15 bp, Homo sapiens
aacccaaaaatgttc

SEQ ID NO: 1538881 - DNA, 15 bp, Homo sapiens
acccaaaaatgttct

SEQ ID NO: 1538882 - DNA, 15 bp, Homo sapiens
cccaaaaatgttctg

SEQ ID NO: 1538883 - DNA, 15 bp, Homo sapiens
ccaaaaatgttctgg

SEQ ID NO: 1538884 - DNA, 15 bp, Homo sapiens
caaaaatgttctgga

SEQ ID NO: 1538885 - DNA, 15 bp, Homo sapiens
aaaaatgttctggaa

SEQ ID NO: 1538886 - DNA, 15 bp, Homo sapiens
aaaatgttctggaaa

SEQ ID NO: 1538887 - DNA, 15 bp, Homo sapiens
aaatgttctggaaac

SEQ ID NO: 1538888 - DNA, 15 bp, Homo sapiens
aatgttctggaaaca

SEQ ID NO: 1538889 - DNA, 15 bp, Homo sapiens
atgttctggaaacaa

SEQ ID NO: 1538890 - DNA, 15 bp, Homo sapiens
tgttctggaaacaag

SEQ ID NO: 1538891 - DNA, 15 bp, Homo sapiens
gttctggaaacaaga

SEQ ID NO: 1538892 - DNA, 15 bp, Homo sapiens
ttctggaaacaagaa

SEQ ID NO: 1538893 - DNA, 15 bp, Homo sapiens
tctggaaacaagaag

SEQ ID NO: 1538894 - DNA, 15 bp, Homo sapiens
ctggaaacaagaagg

SEQ ID NO: 1538895 - DNA, 15 bp, Homo sapiens
tggaaacaagaaggg

SEQ ID NO: 1538896 - DNA, 15 bp, Homo sapiens
ggaaacaagaaggga

SEQ ID NO: 1538897 - DNA, 15 bp, Homo sapiens
gaaacaagaagggaa

SEQ ID NO: 1538898 - DNA, 15 bp, Homo sapiens
aaacaagaagggaag

SEQ ID NO: 1538899 - DNA, 15 bp, Homo sapiens
aacaagaagggaagg

SEQ ID NO: 1538900 - DNA, 15 bp, Homo sapiens
acaagaagggaaggg

SEQ ID NO: 1538901 - DNA, 15 bp, Homo sapiens
caagaagggaagggg

SEQ ID NO: 1538902 - DNA, 15 bp, Homo sapiens
aagaagggaagggga

SEQ ID NO: 1538903 - DNA, 15 bp, Homo sapiens
agaagggaaggggat

SEQ ID NO: 1538904 - DNA, 15 bp, Homo sapiens
gaagggaaggggatc

SEQ ID NO: 1538905 - DNA, 15 bp, Homo sapiens
aagggaaggggatcc

SEQ ID NO: 1538906 - DNA, 15 bp, Homo sapiens
agggaaggggatccc

SEQ ID NO: 1538907 - DNA, 15 bp, Homo sapiens
gggaaggggatcccc

SEQ ID NO: 1538908 - DNA, 15 bp, Homo sapiens
ggaaggggatcccca

SEQ ID NO: 1538909 - DNA, 15 bp, Homo sapiens
gaaggggatccccac

SEQ ID NO: 1538910 - DNA, 15 bp, Homo sapiens
aaggggatccccacc

SEQ ID NO: 1538911 - DNA, 15 bp, Homo sapiens
aggggatccccacca

SEQ ID NO: 1538912 - DNA, 15 bp, Homo sapiens
ggggatccccaccat

SEQ ID NO: 1538913 - DNA, 15 bp, Homo sapiens
gggatccccaccata

SEQ ID NO: 1538914 - DNA, 15 bp, Homo sapiens
ggatccccaccatat

SEQ ID NO: 1538915 - DNA, 15 bp, Homo sapiens
gatccccaccatatc

SEQ ID NO: 1538916 - DNA, 15 bp, Homo sapiens
atccccaccatatct

SEQ ID NO: 1538917 - DNA, 15 bp, Homo sapiens
tccccaccatatctc

SEQ ID NO: 1538918 - DNA, 15 bp, Homo sapiens
ccccaccatatctcc

SEQ ID NO: 1538919 - DNA, 15 bp, Homo sapiens
cccaccatatctccc

SEQ ID NO: 1538920 - DNA, 15 bp, Homo sapiens
ccaccatatctcccc

SEQ ID NO: 1538921 - DNA, 15 bp, Homo sapiens
caccatatctcccca

SEQ ID NO: 1538922 - DNA, 15 bp, Homo sapiens
accatatctccccag

SEQ ID NO: 1538923 - DNA, 15 bp, Homo sapiens
ccatatctccccaga

SEQ ID NO: 1538924 - DNA, 15 bp, Homo sapiens
catatctccccagag

SEQ ID NO: 1538925 - DNA, 15 bp, Homo sapiens
atatctccccagagg

SEQ ID NO: 1538926 - DNA, 15 bp, Homo sapiens
tatctccccagaggc

SEQ ID NO: 1538927 - DNA, 15 bp, Homo sapiens
atctccccagaggcc

SEQ ID NO: 1538928 - DNA, 15 bp, Homo sapiens
tctccccagaggcct

SEQ ID NO: 1538929 - DNA, 15 bp, Homo sapiens
ctccccagaggcctt

SEQ ID NO: 1538930 - DNA, 15 bp, Homo sapiens
tccccagaggccttc

SEQ ID NO: 1538931 - DNA, 15 bp, Homo sapiens
ccccagaggccttcc

SEQ ID NO: 1538932 - DNA, 15 bp, Homo sapiens
cccagaggccttcct

SEQ ID NO: 1538933 - DNA, 15 bp, Homo sapiens
ccagaggccttcctt

SEQ ID NO: 1538934 - DNA, 15 bp, Homo sapiens
cagaggccttccttc

SEQ ID NO: 1538935 - DNA, 15 bp, Homo sapiens
agaggccttccttct

SEQ ID NO: 1538936 - DNA, 15 bp, Homo sapiens
gaggccttccttctc

SEQ ID NO: 1538937 - DNA, 15 bp, Homo sapiens
aggccttccttctca

SEQ ID NO: 1538938 - DNA, 15 bp, Homo sapiens
ggccttccttctcac

SEQ ID NO: 1538939 - DNA, 15 bp, Homo sapiens
gccttccttctcaca

SEQ ID NO: 1538940 - DNA, 15 bp, Homo sapiens
ccttccttctcacat

SEQ ID NO: 1538941 - DNA, 15 bp, Homo sapiens
cttccttctcacatc

SEQ ID NO: 1538942 - DNA, 15 bp, Homo sapiens
ttccttctcacatct

SEQ ID NO: 1538943 - DNA, 15 bp, Homo sapiens
tccttctcacatctc

SEQ ID NO: 1538944 - DNA, 15 bp, Homo sapiens
ccttctcacatctca

SEQ ID NO: 1538945 - DNA, 15 bp, Homo sapiens
cttctcacatctcac

SEQ ID NO: 1538946 - DNA, 15 bp, Homo sapiens
ttctcacatctcact

SEQ ID NO: 1538947 - DNA, 15 bp, Homo sapiens
tctcacatctcactg

SEQ ID NO: 1538948 - DNA, 15 bp, Homo sapiens
ctcacatctcactgt

SEQ ID NO: 1538949 - DNA, 15 bp, Homo sapiens
tcacatctcactgta

SEQ ID NO: 1538950 - DNA, 15 bp, Homo sapiens
cacatctcactgtac

SEQ ID NO: 1538951 - DNA, 15 bp, Homo sapiens
acatctcactgtact

SEQ ID NO: 1538952 - DNA, 15 bp, Homo sapiens
catctcactgtactg

SEQ ID NO: 1538953 - DNA, 15 bp, Homo sapiens
atctcactgtactga

SEQ ID NO: 1538954 - DNA, 15 bp, Homo sapiens
tctcactgtactgaa

SEQ ID NO: 1538955 - DNA, 15 bp, Homo sapiens
ctcactgtactgaag

SEQ ID NO: 1538956 - DNA, 15 bp, Homo sapiens
tcactgtactgaagc

SEQ ID NO: 1538957 - DNA, 15 bp, Homo sapiens
cactgtactgaagcc

SEQ ID NO: 1538958 - DNA, 15 bp, Homo sapiens
actgtactgaagcca

SEQ ID NO: 1538959 - DNA, 15 bp, Homo sapiens
ctgtactgaagccag

SEQ ID NO: 1538960 - DNA, 15 bp, Homo sapiens
tgtactgaagccagc

SEQ ID NO: 1538961 - DNA, 15 bp, Homo sapiens
gtactgaagccagct

SEQ ID NO: 1538962 - DNA, 15 bp, Homo sapiens
tactgaagccagctc

SEQ ID NO: 1538963 - DNA, 15 bp, Homo sapiens
actgaagccagctct

SEQ ID NO: 1538964 - DNA, 15 bp, Homo sapiens
ctgaagccagctcta

SEQ ID NO: 1538965 - DNA, 15 bp, Homo sapiens
tgaagccagctctag

SEQ ID NO: 1538966 - DNA, 15 bp, Homo sapiens
gaagccagctctagc

SEQ ID NO: 1538967 - DNA, 15 bp, Homo sapiens
aagccagctctagca

SEQ ID NO: 1538968 - DNA, 15 bp, Homo sapiens
agccagctctagcag

SEQ ID NO: 1538969 - DNA, 15 bp, Homo sapiens
gccagctctagcaga

SEQ ID NO: 1538970 - DNA, 15 bp, Homo sapiens
ccagctctagcagaa

SEQ ID NO: 1538971 - DNA, 15 bp, Homo sapiens
cagctctagcagaag

SEQ ID NO: 1538972 - DNA, 15 bp, Homo sapiens
agctctagcagaaga

SEQ ID NO: 1538973 - DNA, 15 bp, Homo sapiens
gctctagcagaagac

SEQ ID NO: 1538974 - DNA, 15 bp, Homo sapiens
ctctagcagaagaca

SEQ ID NO: 1538975 - DNA, 15 bp, Homo sapiens
tctagcagaagacag

SEQ ID NO: 1538976 - DNA, 15 bp, Homo sapiens
ctagcagaagacagc

SEQ ID NO: 1538977 - DNA, 15 bp, Homo sapiens
tagcagaagacagca

SEQ ID NO: 1538978 - DNA, 15 bp, Homo sapiens
agcagaagacagcag

SEQ ID NO: 1538979 - DNA, 15 bp, Homo sapiens
gcagaagacagcagg

SEQ ID NO: 1538980 - DNA, 15 bp, Homo sapiens
cagaagacagcaggg

SEQ ID NO: 1538981 - DNA, 15 bp, Homo sapiens
agaagacagcagggt

SEQ ID NO: 1538982 - DNA, 15 bp, Homo sapiens
gaagacagcagggtg

SEQ ID NO: 1538983 - DNA, 15 bp, Homo sapiens
aagacagcagggtga

SEQ ID NO: 1538984 - DNA, 15 bp, Homo sapiens
agacagcagggtgaa

SEQ ID NO: 1538985 - DNA, 15 bp, Homo sapiens
gacagcagggtgaat

SEQ ID NO: 1538986 - DNA, 15 bp, Homo sapiens
acagcagggtgaatt

SEQ ID NO: 1538987 - DNA, 15 bp, Homo sapiens
cagcagggtgaattt

SEQ ID NO: 1538988 - DNA, 15 bp, Homo sapiens
agcagggtgaatttg

SEQ ID NO: 1538989 - DNA, 15 bp, Homo sapiens
gcagggtgaatttgt

SEQ ID NO: 1538990 - DNA, 15 bp, Homo sapiens
cagggtgaatttgtc

SEQ ID NO: 1538991 - DNA, 15 bp, Homo sapiens
agggtgaatttgtcc

SEQ ID NO: 1538992 - DNA, 15 bp, Homo sapiens
gggtgaatttgtcca

SEQ ID NO: 1538993 - DNA, 15 bp, Homo sapiens
ggtgaatttgtccag

SEQ ID NO: 1538994 - DNA, 15 bp, Homo sapiens
gtgaatttgtccagg

SEQ ID NO: 1538995 - DNA, 15 bp, Homo sapiens
tgaatttgtccaggg

SEQ ID NO: 1538996 - DNA, 15 bp, Homo sapiens
gaatttgtccagggt

SEQ ID NO: 1538997 - DNA, 15 bp, Homo sapiens
aatttgtccagggta

SEQ ID NO: 1538998 - DNA, 15 bp, Homo sapiens
atttgtccagggtat

SEQ ID NO: 1538999 - DNA, 15 bp, Homo sapiens
tttgtccagggtatt

SEQ ID NO: 1539000 - DNA, 15 bp, Homo sapiens
ttgtccagggtattc

SEQ ID NO: 1539001 - DNA, 15 bp, Homo sapiens
tgtccagggtattca

SEQ ID NO: 1539002 - DNA, 15 bp, Homo sapiens
gtccagggtattcag

SEQ ID NO: 1539003 - DNA, 15 bp, Homo sapiens
tccagggtattcagc

SEQ ID NO: 1539004 - DNA, 15 bp, Homo sapiens
ccagggtattcagcc

SEQ ID NO: 1539005 - DNA, 15 bp, Homo sapiens
cagggtattcagccc

SEQ ID NO: 1539006 - DNA, 15 bp, Homo sapiens
agggtattcagcccc

SEQ ID NO: 1539007 - DNA, 15 bp, Homo sapiens
gggtattcagccccc

SEQ ID NO: 1539008 - DNA, 15 bp, Homo sapiens
ggtattcagccccca

SEQ ID NO: 1539009 - DNA, 15 bp, Homo sapiens
gtattcagcccccag

SEQ ID NO: 1539010 - DNA, 15 bp, Homo sapiens
tattcagcccccagt

SEQ ID NO: 1539011 - DNA, 15 bp, Homo sapiens
attcagcccccagtg

SEQ ID NO: 1539012 - DNA, 15 bp, Homo sapiens
ttcagcccccagtgc

SEQ ID NO: 1539013 - DNA, 15 bp, Homo sapiens
tcagcccccagtgct

SEQ ID NO: 1539014 - DNA, 15 bp, Homo sapiens
cagcccccagtgctg

SEQ ID NO: 1539015 - DNA, 15 bp, Homo sapiens
agcccccagtgctgg

SEQ ID NO: 1539016 - DNA, 15 bp, Homo sapiens
gcccccagtgctggg

SEQ ID NO: 1539017 - DNA, 15 bp, Homo sapiens
cccccagtgctgggt

SEQ ID NO: 1539018 - DNA, 15 bp, Homo sapiens
ccccagtgctgggtc

SEQ ID NO: 1539019 - DNA, 15 bp, Homo sapiens
cccagtgctgggtcc

SEQ ID NO: 1539020 - DNA, 15 bp, Homo sapiens
ccagtgctgggtcca

SEQ ID NO: 1539021 - DNA, 15 bp, Homo sapiens
cagtgctgggtccat

SEQ ID NO: 1539022 - DNA, 15 bp, Homo sapiens
agtgctgggtccatt

SEQ ID NO: 1539023 - DNA, 15 bp, Homo sapiens
gtgctgggtccatta

SEQ ID NO: 1539024 - DNA, 15 bp, Homo sapiens
tgctgggtccattac

SEQ ID NO: 1539025 - DNA, 15 bp, Homo sapiens
gctgggtccattact

SEQ ID NO: 1539026 - DNA, 15 bp, Homo sapiens
ctgggtccattacta

SEQ ID NO: 1539027 - DNA, 15 bp, Homo sapiens
tgggtccattactac

SEQ ID NO: 1539028 - DNA, 15 bp, Homo sapiens
gggtccattactact

SEQ ID NO: 1539029 - DNA, 15 bp, Homo sapiens
ggtccattactactt

SEQ ID NO: 1539030 - DNA, 15 bp, Homo sapiens
gtccattactacttg

SEQ ID NO: 1539031 - DNA, 15 bp, Homo sapiens
tccattactacttga

SEQ ID NO: 1539032 - DNA, 15 bp, Homo sapiens
ccattactacttgac

SEQ ID NO: 1539033 - DNA, 15 bp, Homo sapiens
cattactacttgacc

SEQ ID NO: 1539034 - DNA, 15 bp, Homo sapiens
attactacttgaccc

SEQ ID NO: 1539035 - DNA, 15 bp, Homo sapiens
ttactacttgacccc

SEQ ID NO: 1539036 - DNA, 15 bp, Homo sapiens
tactacttgacccct

SEQ ID NO: 1539037 - DNA, 15 bp, Homo sapiens
actacttgacccctg

SEQ ID NO: 1539038 - DNA, 15 bp, Homo sapiens
ctacttgacccctga

SEQ ID NO: 1539039 - DNA, 15 bp, Homo sapiens
tacttgacccctgaa

SEQ ID NO: 1539040 - DNA, 15 bp, Homo sapiens
acttgacccctgaat

SEQ ID NO: 1539041 - DNA, 15 bp, Homo sapiens
cttgacccctgaata

SEQ ID NO: 1539042 - DNA, 15 bp, Homo sapiens
ttgacccctgaataa

SEQ ID NO: 1539043 - DNA, 15 bp, Homo sapiens
tgacccctgaataaa

SEQ ID NO: 1539044 - DNA, 15 bp, Homo sapiens
gacccctgaataaaa

SEQ ID NO: 1539045 - DNA, 15 bp, Homo sapiens
acccctgaataaaac

SEQ ID NO: 1539046 - DNA, 15 bp, Homo sapiens
cccctgaataaaaca

SEQ ID NO: 1539047 - DNA, 15 bp, Homo sapiens
ccctgaataaaacag

SEQ ID NO: 1539048 - DNA, 15 bp, Homo sapiens
cctgaataaaacaga

SEQ ID NO: 1539049 - DNA, 15 bp, Homo sapiens
ctgaataaaacagag

SEQ ID NO: 1539050 - DNA, 15 bp, Homo sapiens
tgaataaaacagagg

SEQ ID NO: 1539051 - DNA, 15 bp, Homo sapiens
gaataaaacagaggt

SEQ ID NO: 1539052 - DNA, 15 bp, Homo sapiens
aataaaacagaggtt

SEQ ID NO: 1539053 - DNA, 15 bp, Homo sapiens
ataaaacagaggttc

SEQ ID NO: 1539054 - DNA, 15 bp, Homo sapiens
taaaacagaggttcc

SEQ ID NO: 1539055 - DNA, 15 bp, Homo sapiens
aaaacagaggttcca

SEQ ID NO: 1539056 - DNA, 15 bp, Homo sapiens
aaacagaggttccat

SEQ ID NO: 1539057 - DNA, 15 bp, Homo sapiens
aacagaggttccatg

SEQ ID NO: 1539058 - DNA, 15 bp, Homo sapiens
acagaggttccatga

SEQ ID NO: 1539059 - DNA, 15 bp, Homo sapiens
cagaggttccatgag

SEQ ID NO: 1539060 - DNA, 15 bp, Homo sapiens
agaggttccatgagc

SEQ ID NO: 1539061 - DNA, 15 bp, Homo sapiens
gaggttccatgagca

SEQ ID NO: 1539062 - DNA, 15 bp, Homo sapiens
aggttccatgagcaa

SEQ ID NO: 1539063 - DNA, 15 bp, Homo sapiens
ggttccatgagcaag

SEQ ID NO: 1539064 - DNA, 15 bp, Homo sapiens
gttccatgagcaaga

SEQ ID NO: 1539065 - DNA, 15 bp, Homo sapiens
ttccatgagcaagaa

SEQ ID NO: 1539066 - DNA, 15 bp, Homo sapiens
tccatgagcaagaag

SEQ ID NO: 1539067 - DNA, 15 bp, Homo sapiens
ccatgagcaagaagg

SEQ ID NO: 1539068 - DNA, 15 bp, Homo sapiens
catgagcaagaagga

SEQ ID NO: 1539069 - DNA, 15 bp, Homo sapiens
atgagcaagaaggaa

SEQ ID NO: 1539070 - DNA, 15 bp, Homo sapiens
tgagcaagaaggaag

SEQ ID NO: 1539071 - DNA, 15 bp, Homo sapiens
gagcaagaaggaagg

SEQ ID NO: 1539072 - DNA, 15 bp, Homo sapiens
agcaagaaggaaggg

SEQ ID NO: 1539073 - DNA, 15 bp, Homo sapiens
gcaagaaggaagggg

SEQ ID NO: 1539074 - DNA, 15 bp, Homo sapiens
caagaaggaagggga

SEQ ID NO: 1539075 - DNA, 15 bp, Homo sapiens
aagaaggaaggggaa

SEQ ID NO: 1539076 - DNA, 15 bp, Homo sapiens
agaaggaaggggaac

SEQ ID NO: 1539077 - DNA, 15 bp, Homo sapiens
gaaggaaggggaact

SEQ ID NO: 1539078 - DNA, 15 bp, Homo sapiens
aaggaaggggaactg

SEQ ID NO: 1539079 - DNA, 15 bp, Homo sapiens
aggaaggggaactgg

SEQ ID NO: 1539080 - DNA, 15 bp, Homo sapiens
ggaaggggaactgga

SEQ ID NO: 1539081 - DNA, 15 bp, Homo sapiens
gaaggggaactggat

SEQ ID NO: 1539082 - DNA, 15 bp, Homo sapiens
aaggggaactggatg

SEQ ID NO: 1539083 - DNA, 15 bp, Homo sapiens
aggggaactggatgt

SEQ ID NO: 1539084 - DNA, 15 bp, Homo sapiens
ggggaactggatgtt

SEQ ID NO: 1539085 - DNA, 15 bp, Homo sapiens
gggaactggatgtta

SEQ ID NO: 1539086 - DNA, 15 bp, Homo sapiens
ggaactggatgttag

SEQ ID NO: 1539087 - DNA, 15 bp, Homo sapiens
gaactggatgttaga

SEQ ID NO: 1539088 - DNA, 15 bp, Homo sapiens
aactggatgttagag

SEQ ID NO: 1539089 - DNA, 15 bp, Homo sapiens
actggatgttagagg

SEQ ID NO: 1539090 - DNA, 15 bp, Homo sapiens
ctggatgttagaggg

SEQ ID NO: 1539091 - DNA, 15 bp, Homo sapiens
tggatgttagagggc

SEQ ID NO: 1539092 - DNA, 15 bp, Homo sapiens
ggatgttagagggca

SEQ ID NO: 1539093 - DNA, 15 bp, Homo sapiens
gatgttagagggcaa

SEQ ID NO: 1539094 - DNA, 15 bp, Homo sapiens
atgttagagggcaag

SEQ ID NO: 1539095 - DNA, 15 bp, Homo sapiens
tgttagagggcaaga

SEQ ID NO: 1539096 - DNA, 15 bp, Homo sapiens
gttagagggcaagaa

SEQ ID NO: 1539097 - DNA, 15 bp, Homo sapiens
ttagagggcaagaat

SEQ ID NO: 1539098 - DNA, 15 bp, Homo sapiens
tagagggcaagaatg

SEQ ID NO: 1539099 - DNA, 15 bp, Homo sapiens
agagggcaagaatgt

SEQ ID NO: 1539100 - DNA, 15 bp, Homo sapiens
gagggcaagaatgta

SEQ ID NO: 1539101 - DNA, 15 bp, Homo sapiens
agggcaagaatgtat

SEQ ID NO: 1539102 - DNA, 15 bp, Homo sapiens
gggcaagaatgtatc

SEQ ID NO: 1539103 - DNA, 15 bp, Homo sapiens
ggcaagaatgtatcc

SEQ ID NO: 1539104 - DNA, 15 bp, Homo sapiens
gcaagaatgtatcca

SEQ ID NO: 1539105 - DNA, 15 bp, Homo sapiens
caagaatgtatccat

SEQ ID NO: 1539106 - DNA, 15 bp, Homo sapiens
aagaatgtatccatc

SEQ ID NO: 1539107 - DNA, 15 bp, Homo sapiens
agaatgtatccatcc

SEQ ID NO: 1539108 - DNA, 15 bp, Homo sapiens
gaatgtatccatccc

SEQ ID NO: 1539109 - DNA, 15 bp, Homo sapiens
aatgtatccatccca

SEQ ID NO: 1539110 - DNA, 15 bp, Homo sapiens
atgtatccatcccac

SEQ ID NO: 1539111 - DNA, 15 bp, Homo sapiens
tgtatccatcccacc

SEQ ID NO: 1539112 - DNA, 15 bp, Homo sapiens
gtatccatcccaccc

SEQ ID NO: 1539113 - DNA, 15 bp, Homo sapiens
tatccatcccacccc

SEQ ID NO: 1539114 - DNA, 15 bp, Homo sapiens
atccatcccacccct

SEQ ID NO: 1539115 - DNA, 15 bp, Homo sapiens
tccatcccaccccta

SEQ ID NO: 1539116 - DNA, 15 bp, Homo sapiens
ccatcccacccctag

SEQ ID NO: 1539117 - DNA, 15 bp, Homo sapiens
catcccacccctagg

SEQ ID NO: 1539118 - DNA, 15 bp, Homo sapiens
atcccacccctagga

SEQ ID NO: 1539119 - DNA, 15 bp, Homo sapiens
tcccacccctaggag

SEQ ID NO: 1539120 - DNA, 15 bp, Homo sapiens
cccacccctaggagc

SEQ ID NO: 1539121 - DNA, 15 bp, Homo sapiens
ccacccctaggagca

SEQ ID NO: 1539122 - DNA, 15 bp, Homo sapiens
cacccctaggagcac

SEQ ID NO: 1539123 - DNA, 15 bp, Homo sapiens
acccctaggagcacg

SEQ ID NO: 1539124 - DNA, 15 bp, Homo sapiens
cccctaggagcacgc

SEQ ID NO: 1539125 - DNA, 15 bp, Homo sapiens
ccctaggagcacgca

SEQ ID NO: 1539126 - DNA, 15 bp, Homo sapiens
cctaggagcacgcat

SEQ ID NO: 1539127 - DNA, 15 bp, Homo sapiens
ctaggagcacgcatg

SEQ ID NO: 1539128 - DNA, 15 bp, Homo sapiens
taggagcacgcatgg

SEQ ID NO: 1539129 - DNA, 15 bp, Homo sapiens
aggagcacgcatgga

SEQ ID NO: 1539130 - DNA, 15 bp, Homo sapiens
ggagcacgcatggac

SEQ ID NO: 1539131 - DNA, 15 bp, Homo sapiens
gagcacgcatggaca

SEQ ID NO: 1539132 - DNA, 15 bp, Homo sapiens
agcacgcatggacaa

SEQ ID NO: 1539133 - DNA, 15 bp, Homo sapiens
gcacgcatggacaac

SEQ ID NO: 1539134 - DNA, 15 bp, Homo sapiens
cacgcatggacaact

SEQ ID NO: 1539135 - DNA, 15 bp, Homo sapiens
acgcatggacaactg

SEQ ID NO: 1539136 - DNA, 15 bp, Homo sapiens
cgcatggacaactgc

SEQ ID NO: 1539137 - DNA, 15 bp, Homo sapiens
gcatggacaactgcc

SEQ ID NO: 1539138 - DNA, 15 bp, Homo sapiens
catggacaactgccc

SEQ ID NO: 1539139 - DNA, 15 bp, Homo sapiens
atggacaactgcccc

SEQ ID NO: 1539140 - DNA, 15 bp, Homo sapiens
tggacaactgcccca

SEQ ID NO: 1539141 - DNA, 15 bp, Homo sapiens
ggacaactgccccat

SEQ ID NO: 1539142 - DNA, 15 bp, Homo sapiens
gacaactgccccatt

SEQ ID NO: 1539143 - DNA, 15 bp, Homo sapiens
acaactgccccattt

SEQ ID NO: 1539144 - DNA, 15 bp, Homo sapiens
caactgccccatttt

SEQ ID NO: 1539145 - DNA, 15 bp, Homo sapiens
aactgccccattttt

SEQ ID NO: 1539146 - DNA, 15 bp, Homo sapiens
actgccccatttttg

SEQ ID NO: 1539147 - DNA, 15 bp, Homo sapiens
ctgccccatttttgc

SEQ ID NO: 1539148 - DNA, 15 bp, Homo sapiens
tgccccatttttgct

SEQ ID NO: 1539149 - DNA, 15 bp, Homo sapiens
gccccatttttgctc

SEQ ID NO: 1539150 - DNA, 15 bp, Homo sapiens
ccccatttttgctcc

SEQ ID NO: 1539151 - DNA, 15 bp, Homo sapiens
cccatttttgctcct

SEQ ID NO: 1539152 - DNA, 15 bp, Homo sapiens
ccatttttgctccta

SEQ ID NO: 1539153 - DNA, 15 bp, Homo sapiens
catttttgctcctat

SEQ ID NO: 1539154 - DNA, 15 bp, Homo sapiens
atttttgctcctatt

SEQ ID NO: 1539155 - DNA, 15 bp, Homo sapiens
tttttgctcctattg

SEQ ID NO: 1539156 - DNA, 15 bp, Homo sapiens
ttttgctcctattgc

SEQ ID NO: 1539157 - DNA, 15 bp, Homo sapiens
tttgctcctattgca

SEQ ID NO: 1539158 - DNA, 15 bp, Homo sapiens
ttgctcctattgcag

SEQ ID NO: 1539159 - DNA, 15 bp, Homo sapiens
tgctcctattgcagc

SEQ ID NO: 1539160 - DNA, 15 bp, Homo sapiens
gctcctattgcagcc

SEQ ID NO: 1539161 - DNA, 15 bp, Homo sapiens
ctcctattgcagccc

SEQ ID NO: 1539162 - DNA, 15 bp, Homo sapiens
tcctattgcagccca

SEQ ID NO: 1539163 - DNA, 15 bp, Homo sapiens
cctattgcagcccag

SEQ ID NO: 1539164 - DNA, 15 bp, Homo sapiens
ctattgcagcccagg

SEQ ID NO: 1539165 - DNA, 15 bp, Homo sapiens
tattgcagcccaggg

SEQ ID NO: 1539166 - DNA, 15 bp, Homo sapiens
attgcagcccagggg

SEQ ID NO: 1539167 - DNA, 15 bp, Homo sapiens
ttgcagcccaggggc

SEQ ID NO: 1539168 - DNA, 15 bp, Homo sapiens
tgcagcccaggggct

SEQ ID NO: 1539169 - DNA, 15 bp, Homo sapiens
gcagcccaggggcta

SEQ ID NO: 1539170 - DNA, 15 bp, Homo sapiens
cagcccaggggctag

SEQ ID NO: 1539171 - DNA, 15 bp, Homo sapiens
agcccaggggctagc

SEQ ID NO: 1539172 - DNA, 15 bp, Homo sapiens
gcccaggggctagcc

SEQ ID NO: 1539173 - DNA, 15 bp, Homo sapiens
cccaggggctagccc

SEQ ID NO: 1539174 - DNA, 15 bp, Homo sapiens
ccaggggctagccca

SEQ ID NO: 1539175 - DNA, 15 bp, Homo sapiens
caggggctagcccag

SEQ ID NO: 1539176 - DNA, 15 bp, Homo sapiens
aggggctagcccaga

SEQ ID NO: 1539177 - DNA, 15 bp, Homo sapiens
ggggctagcccagag

SEQ ID NO: 1539178 - DNA, 15 bp, Homo sapiens
gggctagcccagaga

SEQ ID NO: 1539179 - DNA, 15 bp, Homo sapiens
ggctagcccagagac

SEQ ID NO: 1539180 - DNA, 15 bp, Homo sapiens
gctagcccagagacc

SEQ ID NO: 1539181 - DNA, 15 bp, Homo sapiens
ctagcccagagacct

SEQ ID NO: 1539182 - DNA, 15 bp, Homo sapiens
tagcccagagacctt

SEQ ID NO: 1539183 - DNA, 15 bp, Homo sapiens
agcccagagaccttg

SEQ ID NO: 1539184 - DNA, 15 bp, Homo sapiens
gcccagagaccttgc

SEQ ID NO: 1539185 - DNA, 15 bp, Homo sapiens
cccagagaccttgcc

SEQ ID NO: 1539186 - DNA, 15 bp, Homo sapiens
ccagagaccttgcca

SEQ ID NO: 1539187 - DNA, 15 bp, Homo sapiens
cagagaccttgccag

SEQ ID NO: 1539188 - DNA, 15 bp, Homo sapiens
agagaccttgccagt

SEQ ID NO: 1539189 - DNA, 15 bp, Homo sapiens
gagaccttgccagtg

SEQ ID NO: 1539190 - DNA, 15 bp, Homo sapiens
agaccttgccagtgc

SEQ ID NO: 1539191 - DNA, 15 bp, Homo sapiens
gaccttgccagtgct

SEQ ID NO: 1539192 - DNA, 15 bp, Homo sapiens
accttgccagtgctg

SEQ ID NO: 1539193 - DNA, 15 bp, Homo sapiens
ccttgccagtgctga

SEQ ID NO: 1539194 - DNA, 15 bp, Homo sapiens
cttgccagtgctgag

SEQ ID NO: 1539195 - DNA, 15 bp, Homo sapiens
ttgccagtgctgagt

SEQ ID NO: 1539196 - DNA, 15 bp, Homo sapiens
tgccagtgctgagtc

SEQ ID NO: 1539197 - DNA, 15 bp, Homo sapiens
gccagtgctgagtca

SEQ ID NO: 1539198 - DNA, 15 bp, Homo sapiens
ccagtgctgagtcac

SEQ ID NO: 1539199 - DNA, 15 bp, Homo sapiens
cagtgctgagtcaca

SEQ ID NO: 1539200 - DNA, 15 bp, Homo sapiens
agtgctgagtcacaa

SEQ ID NO: 1539201 - DNA, 15 bp, Homo sapiens
gtgctgagtcacaag

SEQ ID NO: 1539202 - DNA, 15 bp, Homo sapiens
tgctgagtcacaaga

SEQ ID NO: 1539203 - DNA, 15 bp, Homo sapiens
gctgagtcacaagat

SEQ ID NO: 1539204 - DNA, 15 bp, Homo sapiens
ctgagtcacaagatg

SEQ ID NO: 1539205 - DNA, 15 bp, Homo sapiens
tgagtcacaagatgc

SEQ ID NO: 1539206 - DNA, 15 bp, Homo sapiens
gagtcacaagatgct

SEQ ID NO: 1539207 - DNA, 15 bp, Homo sapiens
agtcacaagatgctg

SEQ ID NO: 1539208 - DNA, 15 bp, Homo sapiens
gtcacaagatgctgg

SEQ ID NO: 1539209 - DNA, 15 bp, Homo sapiens
tcacaagatgctggg

SEQ ID NO: 1539210 - DNA, 15 bp, Homo sapiens
cacaagatgctggga

SEQ ID NO: 1539211 - DNA, 15 bp, Homo sapiens
acaagatgctgggaa

SEQ ID NO: 1539212 - DNA, 15 bp, Homo sapiens
caagatgctgggaaa

SEQ ID NO: 1539213 - DNA, 15 bp, Homo sapiens
aagatgctgggaaag

SEQ ID NO: 1539214 - DNA, 15 bp, Homo sapiens
agatgctgggaaagt

SEQ ID NO: 1539215 - DNA, 15 bp, Homo sapiens
gatgctgggaaagtg

SEQ ID NO: 1539216 - DNA, 15 bp, Homo sapiens
atgctgggaaagtga

SEQ ID NO: 1539217 - DNA, 15 bp, Homo sapiens
tgctgggaaagtgag

SEQ ID NO: 1539218 - DNA, 15 bp, Homo sapiens
gctgggaaagtgaga

SEQ ID NO: 1539219 - DNA, 15 bp, Homo sapiens
ctgggaaagtgagac

SEQ ID NO: 1539220 - DNA, 15 bp, Homo sapiens
tgggaaagtgagacc

SEQ ID NO: 1539221 - DNA, 15 bp, Homo sapiens
gggaaagtgagacca

SEQ ID NO: 1539222 - DNA, 15 bp, Homo sapiens
ggaaagtgagaccag

SEQ ID NO: 1539223 - DNA, 15 bp, Homo sapiens
gaaagtgagaccaga

SEQ ID NO: 1539224 - DNA, 15 bp, Homo sapiens
aaagtgagaccagag

SEQ ID NO: 1539225 - DNA, 15 bp, Homo sapiens
aagtgagaccagagc

SEQ ID NO: 1539226 - DNA, 15 bp, Homo sapiens
agtgagaccagagcc

SEQ ID NO: 1539227 - DNA, 15 bp, Homo sapiens
gtgagaccagagcct

SEQ ID NO: 1539228 - DNA, 15 bp, Homo sapiens
tgagaccagagcctg

SEQ ID NO: 1539229 - DNA, 15 bp, Homo sapiens
gagaccagagcctgg

SEQ ID NO: 1539230 - DNA, 15 bp, Homo sapiens
agaccagagcctggt

SEQ ID NO: 1539231 - DNA, 15 bp, Homo sapiens
gaccagagcctggtc

SEQ ID NO: 1539232 - DNA, 15 bp, Homo sapiens
accagagcctggtct

SEQ ID NO: 1539233 - DNA, 15 bp, Homo sapiens
ccagagcctggtctt

SEQ ID NO: 1539234 - DNA, 15 bp, Homo sapiens
cagagcctggtcttg

SEQ ID NO: 1539235 - DNA, 15 bp, Homo sapiens
agagcctggtcttgg

SEQ ID NO: 1539236 - DNA, 15 bp, Homo sapiens
gagcctggtcttggg

SEQ ID NO: 1539237 - DNA, 15 bp, Homo sapiens
agcctggtcttgggg

SEQ ID NO: 1539238 - DNA, 15 bp, Homo sapiens
gcctggtcttgggga

SEQ ID NO: 1539239 - DNA, 15 bp, Homo sapiens
cctggtcttggggaa

SEQ ID NO: 1539240 - DNA, 15 bp, Homo sapiens
ctggtcttggggaac

SEQ ID NO: 1539241 - DNA, 15 bp, Homo sapiens
tggtcttggggaaca

SEQ ID NO: 1539242 - DNA, 15 bp, Homo sapiens
ggtcttggggaacag

SEQ ID NO: 1539243 - DNA, 15 bp, Homo sapiens
gtcttggggaacagc

SEQ ID NO: 1539244 - DNA, 15 bp, Homo sapiens
tcttggggaacagct

SEQ ID NO: 1539245 - DNA, 15 bp, Homo sapiens
cttggggaacagctc

SEQ ID NO: 1539246 - DNA, 15 bp, Homo sapiens
ttggggaacagctca

SEQ ID NO: 1539247 - DNA, 15 bp, Homo sapiens
tggggaacagctcaa

SEQ ID NO: 1539248 - DNA, 15 bp, Homo sapiens
ggggaacagctcaag

SEQ ID NO: 1539249 - DNA, 15 bp, Homo sapiens
gggaacagctcaagg

SEQ ID NO: 1539250 - DNA, 15 bp, Homo sapiens
ggaacagctcaaggc

SEQ ID NO: 1539251 - DNA, 15 bp, Homo sapiens
gaacagctcaaggcc

SEQ ID NO: 1539252 - DNA, 15 bp, Homo sapiens
aacagctcaaggccg

SEQ ID NO: 1539253 - DNA, 15 bp, Homo sapiens
acagctcaaggccgc

SEQ ID NO: 1539254 - DNA, 15 bp, Homo sapiens
cagctcaaggccgca

SEQ ID NO: 1539255 - DNA, 15 bp, Homo sapiens
agctcaaggccgcat

SEQ ID NO: 1539256 - DNA, 15 bp, Homo sapiens
gctcaaggccgcatt

SEQ ID NO: 1539257 - DNA, 15 bp, Homo sapiens
ctcaaggccgcattg

SEQ ID NO: 1539258 - DNA, 15 bp, Homo sapiens
tcaaggccgcattgg

SEQ ID NO: 1539259 - DNA, 15 bp, Homo sapiens
caaggccgcattggt

SEQ ID NO: 1539260 - DNA, 15 bp, Homo sapiens
aaggccgcattggtc

SEQ ID NO: 1539261 - DNA, 15 bp, Homo sapiens
aggccgcattggtct

SEQ ID NO: 1539262 - DNA, 15 bp, Homo sapiens
ggccgcattggtctg

SEQ ID NO: 1539263 - DNA, 15 bp, Homo sapiens
gccgcattggtctgc

SEQ ID NO: 1539264 - DNA, 15 bp, Homo sapiens
ccgcattggtctgca

SEQ ID NO: 1539265 - DNA, 15 bp, Homo sapiens
cgcattggtctgcag

SEQ ID NO: 1539266 - DNA, 15 bp, Homo sapiens
gcattggtctgcagg

SEQ ID NO: 1539267 - DNA, 15 bp, Homo sapiens
cattggtctgcaggt

SEQ ID NO: 1539268 - DNA, 15 bp, Homo sapiens
attggtctgcaggtc

SEQ ID NO: 1539269 - DNA, 15 bp, Homo sapiens
ttggtctgcaggtca

SEQ ID NO: 1539270 - DNA, 15 bp, Homo sapiens
tggtctgcaggtcat

SEQ ID NO: 1539271 - DNA, 15 bp, Homo sapiens
ggtctgcaggtcata

SEQ ID NO: 1539272 - DNA, 15 bp, Homo sapiens
gtctgcaggtcatag

SEQ ID NO: 1539273 - DNA, 15 bp, Homo sapiens
tctgcaggtcataga

SEQ ID NO: 1539274 - DNA, 15 bp, Homo sapiens
ctgcaggtcatagag

SEQ ID NO: 1539275 - DNA, 15 bp, Homo sapiens
tgcaggtcatagagc

SEQ ID NO: 1539276 - DNA, 15 bp, Homo sapiens
gcaggtcatagagca

SEQ ID NO: 1539277 - DNA, 15 bp, Homo sapiens
caggtcatagagcag

SEQ ID NO: 1539278 - DNA, 15 bp, Homo sapiens
aggtcatagagcagc

SEQ ID NO: 1539279 - DNA, 15 bp, Homo sapiens
ggtcatagagcagct

SEQ ID NO: 1539280 - DNA, 15 bp, Homo sapiens
gtcatagagcagctg

SEQ ID NO: 1539281 - DNA, 15 bp, Homo sapiens
tcatagagcagctgc

SEQ ID NO: 1539282 - DNA, 15 bp, Homo sapiens
catagagcagctgct

SEQ ID NO: 1539283 - DNA, 15 bp, Homo sapiens
atagagcagctgctg

SEQ ID NO: 1539284 - DNA, 15 bp, Homo sapiens
tagagcagctgctga

SEQ ID NO: 1539285 - DNA, 15 bp, Homo sapiens
agagcagctgctgag

SEQ ID NO: 1539286 - DNA, 15 bp, Homo sapiens
gagcagctgctgagc

SEQ ID NO: 1539287 - DNA, 15 bp, Homo sapiens
agcagctgctgagca

SEQ ID NO: 1539288 - DNA, 15 bp, Homo sapiens
gcagctgctgagcag

SEQ ID NO: 1539289 - DNA, 15 bp, Homo sapiens
cagctgctgagcagt

SEQ ID NO: 1539290 - DNA, 15 bp, Homo sapiens
agctgctgagcagtg

SEQ ID NO: 1539291 - DNA, 15 bp, Homo sapiens
gctgctgagcagtga

SEQ ID NO: 1539292 - DNA, 15 bp, Homo sapiens
ctgctgagcagtgag

SEQ ID NO: 1539293 - DNA, 15 bp, Homo sapiens
tgctgagcagtgaga

SEQ ID NO: 1539294 - DNA, 15 bp, Homo sapiens
gctgagcagtgagag

SEQ ID NO: 1539295 - DNA, 15 bp, Homo sapiens
ctgagcagtgagagc

SEQ ID NO: 1539296 - DNA, 15 bp, Homo sapiens
tgagcagtgagagcc

SEQ ID NO: 1539297 - DNA, 15 bp, Homo sapiens
gagcagtgagagccc

SEQ ID NO: 1539298 - DNA, 15 bp, Homo sapiens
agcagtgagagccca

SEQ ID NO: 1539299 - DNA, 15 bp, Homo sapiens
gcagtgagagcccac

SEQ ID NO: 1539300 - DNA, 15 bp, Homo sapiens
cagtgagagcccacg

SEQ ID NO: 1539301 - DNA, 15 bp, Homo sapiens
agtgagagcccacga

SEQ ID NO: 1539302 - DNA, 15 bp, Homo sapiens
gtgagagcccacgat

SEQ ID NO: 1539303 - DNA, 15 bp, Homo sapiens
tgagagcccacgatg

SEQ ID NO: 1539304 - DNA, 15 bp, Homo sapiens
gagagcccacgatgg

SEQ ID NO: 1539305 - DNA, 15 bp, Homo sapiens
agagcccacgatggg

SEQ ID NO: 1539306 - DNA, 15 bp, Homo sapiens
gagcccacgatgggc

SEQ ID NO: 1539307 - DNA, 15 bp, Homo sapiens
agcccacgatgggcc

SEQ ID NO: 1539308 - DNA, 15 bp, Homo sapiens
gcccacgatgggcca

SEQ ID NO: 1539309 - DNA, 15 bp, Homo sapiens
cccacgatgggccag

SEQ ID NO: 1539310 - DNA, 15 bp, Homo sapiens
ccacgatgggccagg

SEQ ID NO: 1539311 - DNA, 15 bp, Homo sapiens
cacgatgggccaggc

SEQ ID NO: 1539312 - DNA, 15 bp, Homo sapiens
acgatgggccaggcc

SEQ ID NO: 1539313 - DNA, 15 bp, Homo sapiens
cgatgggccaggccc

SEQ ID NO: 1539314 - DNA, 15 bp, Homo sapiens
gatgggccaggccct

SEQ ID NO: 1539315 - DNA, 15 bp, Homo sapiens
atgggccaggccctg

SEQ ID NO: 1539316 - DNA, 15 bp, Homo sapiens
tgggccaggccctgg

SEQ ID NO: 1539317 - DNA, 15 bp, Homo sapiens
gggccaggccctggg

SEQ ID NO: 1539318 - DNA, 15 bp, Homo sapiens
ggccaggccctgggt

SEQ ID NO: 1539319 - DNA, 15 bp, Homo sapiens
gccaggccctgggtc

SEQ ID NO: 1539320 - DNA, 15 bp, Homo sapiens
ccaggccctgggtct

SEQ ID NO: 1539321 - DNA, 15 bp, Homo sapiens
caggccctgggtctt

SEQ ID NO: 1539322 - DNA, 15 bp, Homo sapiens
aggccctgggtcttg

SEQ ID NO: 1539323 - DNA, 15 bp, Homo sapiens
ggccctgggtcttgg

SEQ ID NO: 1539324 - DNA, 15 bp, Homo sapiens
gccctgggtcttgga

SEQ ID NO: 1539325 - DNA, 15 bp, Homo sapiens
ccctgggtcttggag

SEQ ID NO: 1539326 - DNA, 15 bp, Homo sapiens
cctgggtcttggaga

SEQ ID NO: 1539327 - DNA, 15 bp, Homo sapiens
ctgggtcttggagac

SEQ ID NO: 1539328 - DNA, 15 bp, Homo sapiens
tgggtcttggagacc

SEQ ID NO: 1539329 - DNA, 15 bp, Homo sapiens
gggtcttggagacct

SEQ ID NO: 1539330 - DNA, 15 bp, Homo sapiens
ggtcttggagacctg

SEQ ID NO: 1539331 - DNA, 15 bp, Homo sapiens
gtcttggagacctga

SEQ ID NO: 1539332 - DNA, 15 bp, Homo sapiens
tcttggagacctgaa

SEQ ID NO: 1539333 - DNA, 15 bp, Homo sapiens
cttggagacctgaat

SEQ ID NO: 1539334 - DNA, 15 bp, Homo sapiens
ttggagacctgaatg

SEQ ID NO: 1539335 - DNA, 15 bp, Homo sapiens
tggagacctgaatga

SEQ ID NO: 1539336 - DNA, 15 bp, Homo sapiens
ggagacctgaatgag

SEQ ID NO: 1539337 - DNA, 15 bp, Homo sapiens
gagacctgaatgaga

SEQ ID NO: 1539338 - DNA, 15 bp, Homo sapiens
agacctgaatgagat

SEQ ID NO: 1539339 - DNA, 15 bp, Homo sapiens
gacctgaatgagata

SEQ ID NO: 1539340 - DNA, 15 bp, Homo sapiens
acctgaatgagatag

SEQ ID NO: 1539341 - DNA, 15 bp, Homo sapiens
cctgaatgagataga

SEQ ID NO: 1539342 - DNA, 15 bp, Homo sapiens
ctgaatgagatagac

SEQ ID NO: 1539343 - DNA, 15 bp, Homo sapiens
tgaatgagatagact

SEQ ID NO: 1539344 - DNA, 15 bp, Homo sapiens
gaatgagatagactg

SEQ ID NO: 1539345 - DNA, 15 bp, Homo sapiens
aatgagatagactgg

SEQ ID NO: 1539346 - DNA, 15 bp, Homo sapiens
atgagatagactggg

SEQ ID NO: 1539347 - DNA, 15 bp, Homo sapiens
tgagatagactgggt

SEQ ID NO: 1539348 - DNA, 15 bp, Homo sapiens
gagatagactgggtt

SEQ ID NO: 1539349 - DNA, 15 bp, Homo sapiens
agatagactgggttc

SEQ ID NO: 1539350 - DNA, 15 bp, Homo sapiens
gatagactgggttcc

SEQ ID NO: 1539351 - DNA, 15 bp, Homo sapiens
atagactgggttcct

SEQ ID NO: 1539352 - DNA, 15 bp, Homo sapiens
tagactgggttcctg

SEQ ID NO: 1539353 - DNA, 15 bp, Homo sapiens
agactgggttcctgt

SEQ ID NO: 1539354 - DNA, 15 bp, Homo sapiens
gactgggttcctgtt

SEQ ID NO: 1539355 - DNA, 15 bp, Homo sapiens
actgggttcctgttc

SEQ ID NO: 1539356 - DNA, 15 bp, Homo sapiens
ctgggttcctgttct

SEQ ID NO: 1539357 - DNA, 15 bp, Homo sapiens
tgggttcctgttctc

SEQ ID NO: 1539358 - DNA, 15 bp, Homo sapiens
gggttcctgttctcc

SEQ ID NO: 1539359 - DNA, 15 bp, Homo sapiens
ggttcctgttctcct

SEQ ID NO: 1539360 - DNA, 15 bp, Homo sapiens
gttcctgttctcctg

SEQ ID NO: 1539361 - DNA, 15 bp, Homo sapiens
ttcctgttctcctgg

SEQ ID NO: 1539362 - DNA, 15 bp, Homo sapiens
tcctgttctcctggg

SEQ ID NO: 1539363 - DNA, 15 bp, Homo sapiens
cctgttctcctgggc

SEQ ID NO: 1539364 - DNA, 15 bp, Homo sapiens
ctgttctcctgggca

SEQ ID NO: 1539365 - DNA, 15 bp, Homo sapiens
tgttctcctgggcat

SEQ ID NO: 1539366 - DNA, 15 bp, Homo sapiens
gttctcctgggcatt

SEQ ID NO: 1539367 - DNA, 15 bp, Homo sapiens
ttctcctgggcattg

SEQ ID NO: 1539368 - DNA, 15 bp, Homo sapiens
tctcctgggcattgc

SEQ ID NO: 1539369 - DNA, 15 bp, Homo sapiens
ctcctgggcattgcc

SEQ ID NO: 1539370 - DNA, 15 bp, Homo sapiens
tcctgggcattgcct

SEQ ID NO: 1539371 - DNA, 15 bp, Homo sapiens
cctgggcattgcctc

SEQ ID NO: 1539372 - DNA, 15 bp, Homo sapiens
ctgggcattgcctct

SEQ ID NO: 1539373 - DNA, 15 bp, Homo sapiens
tgggcattgcctctt

SEQ ID NO: 1539374 - DNA, 15 bp, Homo sapiens
gggcattgcctctta

SEQ ID NO: 1539375 - DNA, 15 bp, Homo sapiens
ggcattgcctcttag

SEQ ID NO: 1539376 - DNA, 15 bp, Homo sapiens
gcattgcctcttaga

SEQ ID NO: 1539377 - DNA, 15 bp, Homo sapiens
cattgcctcttagag

SEQ ID NO: 1539378 - DNA, 15 bp, Homo sapiens
attgcctcttagagg

SEQ ID NO: 1539379 - DNA, 15 bp, Homo sapiens
ttgcctcttagaggg

SEQ ID NO: 1539380 - DNA, 15 bp, Homo sapiens
tgcctcttagagggc

SEQ ID NO: 1539381 - DNA, 15 bp, Homo sapiens
gcctcttagagggca

SEQ ID NO: 1539382 - DNA, 15 bp, Homo sapiens
cctcttagagggcaa

SEQ ID NO: 1539383 - DNA, 15 bp, Homo sapiens
ctcttagagggcaaa

SEQ ID NO: 1539384 - DNA, 15 bp, Homo sapiens
tcttagagggcaaag

SEQ ID NO: 1539385 - DNA, 15 bp, Homo sapiens
cttagagggcaaaga

SEQ ID NO: 1539386 - DNA, 15 bp, Homo sapiens
ttagagggcaaagac

SEQ ID NO: 1539387 - DNA, 15 bp, Homo sapiens
tagagggcaaagaca

SEQ ID NO: 1539388 - DNA, 15 bp, Homo sapiens
agagggcaaagacaa

SEQ ID NO: 1539389 - DNA, 15 bp, Homo sapiens
gagggcaaagacaat

SEQ ID NO: 1539390 - DNA, 15 bp, Homo sapiens
agggcaaagacaatt

SEQ ID NO: 1539391 - DNA, 15 bp, Homo sapiens
gggcaaagacaatta

SEQ ID NO: 1539392 - DNA, 15 bp, Homo sapiens
ggcaaagacaattaa

SEQ ID NO: 1539393 - DNA, 15 bp, Homo sapiens
gcaaagacaattaac

SEQ ID NO: 1539394 - DNA, 15 bp, Homo sapiens
caaagacaattaaca

SEQ ID NO: 1539395 - DNA, 15 bp, Homo sapiens
aaagacaattaacaa

SEQ ID NO: 1539396 - DNA, 15 bp, Homo sapiens
aagacaattaacaat

SEQ ID NO: 1539397 - DNA, 15 bp, Homo sapiens
agacaattaacaata

SEQ ID NO: 1539398 - DNA, 15 bp, Homo sapiens
gacaattaacaataa

SEQ ID NO: 1539399 - DNA, 15 bp, Homo sapiens
acaattaacaataaa

SEQ ID NO: 1539400 - DNA, 15 bp, Homo sapiens
caattaacaataaac

SEQ ID NO: 1539401 - DNA, 15 bp, Homo sapiens
aattaacaataaaca

SEQ ID NO: 1539402 - DNA, 15 bp, Homo sapiens
attaacaataaacaa

SEQ ID NO: 1539403 - DNA, 15 bp, Homo sapiens
ttaacaataaacaaa

SEQ ID NO: 1539404 - DNA, 15 bp, Homo sapiens
taacaataaacaaat

SEQ ID NO: 1539405 - DNA, 15 bp, Homo sapiens
aacaataaacaaata

SEQ ID NO: 1539406 - DNA, 15 bp, Homo sapiens
acaataaacaaatag

SEQ ID NO: 1539407 - DNA, 15 bp, Homo sapiens
caataaacaaataga

SEQ ID NO: 1539408 - DNA, 15 bp, Homo sapiens
aataaacaaatagaa

SEQ ID NO: 1539409 - DNA, 15 bp, Homo sapiens
ataaacaaatagaac

SEQ ID NO: 1539410 - DNA, 15 bp, Homo sapiens
taaacaaatagaaca

SEQ ID NO: 1539411 - DNA, 15 bp, Homo sapiens
aaacaaatagaacat

SEQ ID NO: 1539412 - DNA, 15 bp, Homo sapiens
aacaaatagaacatg

SEQ ID NO: 1539413 - DNA, 15 bp, Homo sapiens
acaaatagaacatga

SEQ ID NO: 1539414 - DNA, 15 bp, Homo sapiens
caaatagaacatgaa

SEQ ID NO: 1539415 - DNA, 15 bp, Homo sapiens
aaatagaacatgaag

SEQ ID NO: 1539416 - DNA, 15 bp, Homo sapiens
aatagaacatgaagt

SEQ ID NO: 1539417 - DNA, 15 bp, Homo sapiens
atagaacatgaagtg

SEQ ID NO: 1539418 - DNA, 15 bp, Homo sapiens
tagaacatgaagtgt

SEQ ID NO: 1539419 - DNA, 15 bp, Homo sapiens
agaacatgaagtgtt

SEQ ID NO: 1539420 - DNA, 15 bp, Homo sapiens
gaacatgaagtgttt

SEQ ID NO: 1539421 - DNA, 15 bp, Homo sapiens
aacatgaagtgtttt

SEQ ID NO: 1539422 - DNA, 15 bp, Homo sapiens
acatgaagtgttttc

SEQ ID NO: 1539423 - DNA, 15 bp, Homo sapiens
catgaagtgttttcc

SEQ ID NO: 1539424 - DNA, 15 bp, Homo sapiens
atgaagtgttttccg

SEQ ID NO: 1539425 - DNA, 15 bp, Homo sapiens
tgaagtgttttccga

SEQ ID NO: 1539426 - DNA, 15 bp, Homo sapiens
gaagtgttttccgat

SEQ ID NO: 1539427 - DNA, 15 bp, Homo sapiens
aagtgttttccgata

SEQ ID NO: 1539428 - DNA, 15 bp, Homo sapiens
agtgttttccgatag

SEQ ID NO: 1539429 - DNA, 15 bp, Homo sapiens
gtgttttccgatagt

SEQ ID NO: 1539430 - DNA, 15 bp, Homo sapiens
tgttttccgatagtg

SEQ ID NO: 1539431 - DNA, 15 bp, Homo sapiens
gttttccgatagtga

SEQ ID NO: 1539432 - DNA, 15 bp, Homo sapiens
ttttccgatagtgac

SEQ ID NO: 1539433 - DNA, 15 bp, Homo sapiens
tttccgatagtgact

SEQ ID NO: 1539434 - DNA, 15 bp, Homo sapiens
ttccgatagtgactg

SEQ ID NO: 1539435 - DNA, 15 bp, Homo sapiens
tccgatagtgactga

SEQ ID NO: 1539436 - DNA, 15 bp, Homo sapiens
ccgatagtgactgat

SEQ ID NO: 1539437 - DNA, 15 bp, Homo sapiens
cgatagtgactgata

SEQ ID NO: 1539438 - DNA, 15 bp, Homo sapiens
gatagtgactgatat

SEQ ID NO: 1539439 - DNA, 15 bp, Homo sapiens
atagtgactgatata

SEQ ID NO: 1539440 - DNA, 15 bp, Homo sapiens
tagtgactgatatac

SEQ ID NO: 1539441 - DNA, 15 bp, Homo sapiens
agtgactgatatact

SEQ ID NO: 1539442 - DNA, 15 bp, Homo sapiens
gtgactgatatactt

SEQ ID NO: 1539443 - DNA, 15 bp, Homo sapiens
tgactgatatacttt

SEQ ID NO: 1539444 - DNA, 15 bp, Homo sapiens
gactgatatactttg

SEQ ID NO: 1539445 - DNA, 15 bp, Homo sapiens
actgatatactttgg

SEQ ID NO: 1539446 - DNA, 15 bp, Homo sapiens
ctgatatactttgga

SEQ ID NO: 1539447 - DNA, 15 bp, Homo sapiens
tgatatactttggat

SEQ ID NO: 1539448 - DNA, 15 bp, Homo sapiens
gatatactttggata

SEQ ID NO: 1539449 - DNA, 15 bp, Homo sapiens
atatactttggatat

SEQ ID NO: 1539450 - DNA, 15 bp, Homo sapiens
tatactttggatatt

SEQ ID NO: 1539451 - DNA, 15 bp, Homo sapiens
atactttggatattt

SEQ ID NO: 1539452 - DNA, 15 bp, Homo sapiens
tactttggatatttg

SEQ ID NO: 1539453 - DNA, 15 bp, Homo sapiens
actttggatatttgt

SEQ ID NO: 1539454 - DNA, 15 bp, Homo sapiens
ctttggatatttgtc

SEQ ID NO: 1539455 - DNA, 15 bp, Homo sapiens
tttggatatttgtcc

SEQ ID NO: 1539456 - DNA, 15 bp, Homo sapiens
ttggatatttgtcct

SEQ ID NO: 1539457 - DNA, 15 bp, Homo sapiens
tggatatttgtcctc

SEQ ID NO: 1539458 - DNA, 15 bp, Homo sapiens
ggatatttgtcctct

SEQ ID NO: 1539459 - DNA, 15 bp, Homo sapiens
gatatttgtcctctc

SEQ ID NO: 1539460 - DNA, 15 bp, Homo sapiens
atatttgtcctctcc

SEQ ID NO: 1539461 - DNA, 15 bp, Homo sapiens
tatttgtcctctcca

SEQ ID NO: 1539462 - DNA, 15 bp, Homo sapiens
atttgtcctctccaa

SEQ ID NO: 1539463 - DNA, 15 bp, Homo sapiens
tttgtcctctccaaa

SEQ ID NO: 1539464 - DNA, 15 bp, Homo sapiens
ttgtcctctccaaat

SEQ ID NO: 1539465 - DNA, 15 bp, Homo sapiens
tgtcctctccaaatc

SEQ ID NO: 1539466 - DNA, 15 bp, Homo sapiens
gtcctctccaaatct

SEQ ID NO: 1539467 - DNA, 15 bp, Homo sapiens
tcctctccaaatctc

SEQ ID NO: 1539468 - DNA, 15 bp, Homo sapiens
cctctccaaatctca

SEQ ID NO: 1539469 - DNA, 15 bp, Homo sapiens
ctctccaaatctcat

SEQ ID NO: 1539470 - DNA, 15 bp, Homo sapiens
tctccaaatctcatg

SEQ ID NO: 1539471 - DNA, 15 bp, Homo sapiens
ctccaaatctcatgt

SEQ ID NO: 1539472 - DNA, 15 bp, Homo sapiens
tccaaatctcatgtt

SEQ ID NO: 1539473 - DNA, 15 bp, Homo sapiens
aatctcatgttgaaa

SEQ ID NO: 1539474 - DNA, 15 bp, Homo sapiens
atctcatgttgaaat

SEQ ID NO: 1539475 - DNA, 15 bp, Homo sapiens
tctcatgttgaaatg

SEQ ID NO: 1539476 - DNA, 15 bp, Homo sapiens
ctcatgttgaaatgt

SEQ ID NO: 1539477 - DNA, 15 bp, Homo sapiens
tcatgttgaaatgta

SEQ ID NO: 1539478 - DNA, 15 bp, Homo sapiens
catgttgaaatgtaa

SEQ ID NO: 1539479 - DNA, 15 bp, Homo sapiens
atgttgaaatgtaat

SEQ ID NO: 1539480 - DNA, 15 bp, Homo sapiens
tgttgaaatgtaatt

SEQ ID NO: 1539481 - DNA, 15 bp, Homo sapiens
gttgaaatgtaattc

SEQ ID NO: 1539482 - DNA, 15 bp, Homo sapiens
ttgaaatgtaattcc

SEQ ID NO: 1539483 - DNA, 15 bp, Homo sapiens
tgaaatgtaattcct

SEQ ID NO: 1539484 - DNA, 15 bp, Homo sapiens
gaaatgtaattcctt

SEQ ID NO: 1539485 - DNA, 15 bp, Homo sapiens
aaatgtaattcctta

SEQ ID NO: 1539486 - DNA, 15 bp, Homo sapiens
aatgtaattccttat

SEQ ID NO: 1539487 - DNA, 15 bp, Homo sapiens
atgtaattccttatg

SEQ ID NO: 1539488 - DNA, 15 bp, Homo sapiens
tgtaattccttatgt

SEQ ID NO: 1539489 - DNA, 15 bp, Homo sapiens
gtaattccttatgtt

SEQ ID NO: 1539490 - DNA, 15 bp, Homo sapiens
taattccttatgttg

SEQ ID NO: 1539491 - DNA, 15 bp, Homo sapiens
aattccttatgttgg

SEQ ID NO: 1539492 - DNA, 15 bp, Homo sapiens
attccttatgttgga

SEQ ID NO: 1539493 - DNA, 15 bp, Homo sapiens
ttccttatgttggag

SEQ ID NO: 1539494 - DNA, 15 bp, Homo sapiens
tccttatgttggagg

SEQ ID NO: 1539495 - DNA, 15 bp, Homo sapiens
ccttatgttggaggt

SEQ ID NO: 1539496 - DNA, 15 bp, Homo sapiens
cttatgttggaggtg

SEQ ID NO: 1539497 - DNA, 15 bp, Homo sapiens
ttatgttggaggtgg

SEQ ID NO: 1539498 - DNA, 15 bp, Homo sapiens
tatgttggaggtggg

SEQ ID NO: 1539499 - DNA, 15 bp, Homo sapiens
atgttggaggtgggg

SEQ ID NO: 1539500 - DNA, 15 bp, Homo sapiens
tgttggaggtggggc

SEQ ID NO: 1539501 - DNA, 15 bp, Homo sapiens
gttggaggtggggcc

SEQ ID NO: 1539502 - DNA, 15 bp, Homo sapiens
ttggaggtggggcct

SEQ ID NO: 1539503 - DNA, 15 bp, Homo sapiens
aggtggggcctggaa

SEQ ID NO: 1539504 - DNA, 15 bp, Homo sapiens
ggtggggcctggaag

SEQ ID NO: 1539505 - DNA, 15 bp, Homo sapiens
gtggggcctggaagg

SEQ ID NO: 1539506 - DNA, 15 bp, Homo sapiens
tggggcctggaagga

SEQ ID NO: 1539507 - DNA, 15 bp, Homo sapiens
ggggcctggaaggag

SEQ ID NO: 1539508 - DNA, 15 bp, Homo sapiens
gggcctggaaggagg

SEQ ID NO: 1539509 - DNA, 15 bp, Homo sapiens
ggcctggaaggaggt

SEQ ID NO: 1539510 - DNA, 15 bp, Homo sapiens
gcctggaaggaggtg

SEQ ID NO: 1539511 - DNA, 15 bp, Homo sapiens
cctggaaggaggtgt

SEQ ID NO: 1539512 - DNA, 15 bp, Homo sapiens
ctggaaggaggtgtc

SEQ ID NO: 1539513 - DNA, 15 bp, Homo sapiens
tggaaggaggtgtct

SEQ ID NO: 1539514 - DNA, 15 bp, Homo sapiens
ggaaggaggtgtctg

SEQ ID NO: 1539515 - DNA, 15 bp, Homo sapiens
gaaggaggtgtctgg

SEQ ID NO: 1539516 - DNA, 15 bp, Homo sapiens
aaggaggtgtctggg

SEQ ID NO: 1539517 - DNA, 15 bp, Homo sapiens
aggaggtgtctgggt

SEQ ID NO: 1539518 - DNA, 15 bp, Homo sapiens
ggaggtgtctgggtc

SEQ ID NO: 1539519 - DNA, 15 bp, Homo sapiens
gaggtgtctgggtca

SEQ ID NO: 1539520 - DNA, 15 bp, Homo sapiens
aggtgtctgggtcat

SEQ ID NO: 1539521 - DNA, 15 bp, Homo sapiens
ggtgtctgggtcatg

SEQ ID NO: 1539522 - DNA, 15 bp, Homo sapiens
gtgtctgggtcatgg

SEQ ID NO: 1539523 - DNA, 15 bp, Homo sapiens
tgtctgggtcatggg

SEQ ID NO: 1539524 - DNA, 15 bp, Homo sapiens
gtctgggtcatgggg

SEQ ID NO: 1539525 - DNA, 15 bp, Homo sapiens
tctgggtcatggggg

SEQ ID NO: 1539526 - DNA, 15 bp, Homo sapiens
ctgggtcatgggggc

SEQ ID NO: 1539527 - DNA, 15 bp, Homo sapiens
tgggtcatgggggca

SEQ ID NO: 1539528 - DNA, 15 bp, Homo sapiens
gggtcatgggggcag

SEQ ID NO: 1539529 - DNA, 15 bp, Homo sapiens
ggtcatgggggcaga

SEQ ID NO: 1539530 - DNA, 15 bp, Homo sapiens
gtcatgggggcagat

SEQ ID NO: 1539531 - DNA, 15 bp, Homo sapiens
tcatgggggcagatc

SEQ ID NO: 1539532 - DNA, 15 bp, Homo sapiens
catgggggcagatcc

SEQ ID NO: 1539533 - DNA, 15 bp, Homo sapiens
atgggggcagatccc

SEQ ID NO: 1539534 - DNA, 15 bp, Homo sapiens
tgggggcagatccct

SEQ ID NO: 1539535 - DNA, 15 bp, Homo sapiens
gggggcagatccctc

SEQ ID NO: 1539536 - DNA, 15 bp, Homo sapiens
ggggcagatccctca

SEQ ID NO: 1539537 - DNA, 15 bp, Homo sapiens
gggcagatccctcat

SEQ ID NO: 1539538 - DNA, 15 bp, Homo sapiens
ggcagatccctcatg

SEQ ID NO: 1539539 - DNA, 15 bp, Homo sapiens
gcagatccctcatga

SEQ ID NO: 1539540 - DNA, 15 bp, Homo sapiens
cagatccctcatgaa

SEQ ID NO: 1539541 - DNA, 15 bp, Homo sapiens
agatccctcatgaat

SEQ ID NO: 1539542 - DNA, 15 bp, Homo sapiens
gatccctcatgaatg

SEQ ID NO: 1539543 - DNA, 15 bp, Homo sapiens
atccctcatgaatgg

SEQ ID NO: 1539544 - DNA, 15 bp, Homo sapiens
tccctcatgaatggt

SEQ ID NO: 1539545 - DNA, 15 bp, Homo sapiens
ccctcatgaatggtt

SEQ ID NO: 1539546 - DNA, 15 bp, Homo sapiens
cctcatgaatggttt

SEQ ID NO: 1539547 - DNA, 15 bp, Homo sapiens
tcatgaatggtttag

SEQ ID NO: 1539548 - DNA, 15 bp, Homo sapiens
catgaatggtttagt

SEQ ID NO: 1539549 - DNA, 15 bp, Homo sapiens
atgaatggtttagtg

SEQ ID NO: 1539550 - DNA, 15 bp, Homo sapiens
tgaatggtttagtgc

SEQ ID NO: 1539551 - DNA, 15 bp, Homo sapiens
gaatggtttagtgcc

SEQ ID NO: 1539552 - DNA, 15 bp, Homo sapiens
aatggtttagtgcca

SEQ ID NO: 1539553 - DNA, 15 bp, Homo sapiens
atggtttagtgccat

SEQ ID NO: 1539554 - DNA, 15 bp, Homo sapiens
tggtttagtgccatc

SEQ ID NO: 1539555 - DNA, 15 bp, Homo sapiens
ggtttagtgccatcc

SEQ ID NO: 1539556 - DNA, 15 bp, Homo sapiens
gtttagtgccatccc

SEQ ID NO: 1539557 - DNA, 15 bp, Homo sapiens
tttagtgccatcccc

SEQ ID NO: 1539558 - DNA, 15 bp, Homo sapiens
ttagtgccatcccct

SEQ ID NO: 1539559 - DNA, 15 bp, Homo sapiens
tagtgccatcccctt

SEQ ID NO: 1539560 - DNA, 15 bp, Homo sapiens
agtgccatccccttg

SEQ ID NO: 1539561 - DNA, 15 bp, Homo sapiens
gtgccatccccttgg

SEQ ID NO: 1539562 - DNA, 15 bp, Homo sapiens
tgccatccccttggt

SEQ ID NO: 1539563 - DNA, 15 bp, Homo sapiens
gccatccccttggtg

SEQ ID NO: 1539564 - DNA, 15 bp, Homo sapiens
ccatccccttggtga

SEQ ID NO: 1539565 - DNA, 15 bp, Homo sapiens
catccccttggtgat

SEQ ID NO: 1539566 - DNA, 15 bp, Homo sapiens
atccccttggtgatg

SEQ ID NO: 1539567 - DNA, 15 bp, Homo sapiens
tccccttggtgatga

SEQ ID NO: 1539568 - DNA, 15 bp, Homo sapiens
ccccttggtgatgag

SEQ ID NO: 1539569 - DNA, 15 bp, Homo sapiens
cccttggtgatgagt

SEQ ID NO: 1539570 - DNA, 15 bp, Homo sapiens
ccttggtgatgagtg

SEQ ID NO: 1539571 - DNA, 15 bp, Homo sapiens
cttggtgatgagtga

SEQ ID NO: 1539572 - DNA, 15 bp, Homo sapiens
ttggtgatgagtgag

SEQ ID NO: 1539573 - DNA, 15 bp, Homo sapiens
tggtgatgagtgagt

SEQ ID NO: 1539574 - DNA, 15 bp, Homo sapiens
ggtgatgagtgagtt

SEQ ID NO: 1539575 - DNA, 15 bp, Homo sapiens
gtgatgagtgagttc

SEQ ID NO: 1539576 - DNA, 15 bp, Homo sapiens
tgatgagtgagttca

SEQ ID NO: 1539577 - DNA, 15 bp, Homo sapiens
gatgagtgagttcac

SEQ ID NO: 1539578 - DNA, 15 bp, Homo sapiens
atgagtgagttcacg

SEQ ID NO: 1539579 - DNA, 15 bp, Homo sapiens
tgagtgagttcacgt

SEQ ID NO: 1539580 - DNA, 15 bp, Homo sapiens
gagtgagttcacgtg

SEQ ID NO: 1539581 - DNA, 15 bp, Homo sapiens
agtgagttcacgtga

SEQ ID NO: 1539582 - DNA, 15 bp, Homo sapiens
gtgagttcacgtgag

SEQ ID NO: 1539583 - DNA, 15 bp, Homo sapiens
tgagttcacgtgaga

SEQ ID NO: 1539584 - DNA, 15 bp, Homo sapiens
gagttcacgtgagag

SEQ ID NO: 1539585 - DNA, 15 bp, Homo sapiens
agttcacgtgagagc

SEQ ID NO: 1539586 - DNA, 15 bp, Homo sapiens
gttcacgtgagagct

SEQ ID NO: 1539587 - DNA, 15 bp, Homo sapiens
ttcacgtgagagctg

SEQ ID NO: 1539588 - DNA, 15 bp, Homo sapiens
tcacgtgagagctgg

SEQ ID NO: 1539589 - DNA, 15 bp, Homo sapiens
cacgtgagagctggt

SEQ ID NO: 1539590 - DNA, 15 bp, Homo sapiens
acgtgagagctggtt

SEQ ID NO: 1539591 - DNA, 15 bp, Homo sapiens
cgtgagagctggttg

SEQ ID NO: 1539592 - DNA, 15 bp, Homo sapiens
gtgagagctggttgt

SEQ ID NO: 1539593 - DNA, 15 bp, Homo sapiens
tgagagctggttgtt

SEQ ID NO: 1539594 - DNA, 15 bp, Homo sapiens
gagagctggttgttt

SEQ ID NO: 1539595 - DNA, 15 bp, Homo sapiens
agagctggttgtttg

SEQ ID NO: 1539596 - DNA, 15 bp, Homo sapiens
gagctggttgtttga

SEQ ID NO: 1539597 - DNA, 15 bp, Homo sapiens
agctggttgtttgaa

SEQ ID NO: 1539598 - DNA, 15 bp, Homo sapiens
gctggttgtttgaaa

SEQ ID NO: 1539599 - DNA, 15 bp, Homo sapiens
ctggttgtttgaaag

SEQ ID NO: 1539600 - DNA, 15 bp, Homo sapiens
tggttgtttgaaaga

SEQ ID NO: 1539601 - DNA, 15 bp, Homo sapiens
ggttgtttgaaagag

SEQ ID NO: 1539602 - DNA, 15 bp, Homo sapiens
gttgtttgaaagagc

SEQ ID NO: 1539603 - DNA, 15 bp, Homo sapiens
ttgtttgaaagagcc

SEQ ID NO: 1539604 - DNA, 15 bp, Homo sapiens
tgtttgaaagagcct

SEQ ID NO: 1539605 - DNA, 15 bp, Homo sapiens
gtttgaaagagcctg

SEQ ID NO: 1539606 - DNA, 15 bp, Homo sapiens
tttgaaagagcctgg

SEQ ID NO: 1539607 - DNA, 15 bp, Homo sapiens
ttgaaagagcctggc

SEQ ID NO: 1539608 - DNA, 15 bp, Homo sapiens
tgaaagagcctggcc

SEQ ID NO: 1539609 - DNA, 15 bp, Homo sapiens
gaaagagcctggccc

SEQ ID NO: 1539610 - DNA, 15 bp, Homo sapiens
aaagagcctggcccc

SEQ ID NO: 1539611 - DNA, 15 bp, Homo sapiens
aagagcctggccccc

SEQ ID NO: 1539612 - DNA, 15 bp, Homo sapiens
agagcctggccccct

SEQ ID NO: 1539613 - DNA, 15 bp, Homo sapiens
gagcctggccccctc

SEQ ID NO: 1539614 - DNA, 15 bp, Homo sapiens
agcctggccccctct

SEQ ID NO: 1539615 - DNA, 15 bp, Homo sapiens
gcctggccccctctc

SEQ ID NO: 1539616 - DNA, 15 bp, Homo sapiens
cctggccccctctca

SEQ ID NO: 1539617 - DNA, 15 bp, Homo sapiens
ctggccccctctcat

SEQ ID NO: 1539618 - DNA, 15 bp, Homo sapiens
tggccccctctcatt

SEQ ID NO: 1539619 - DNA, 15 bp, Homo sapiens
ggccccctctcattc

SEQ ID NO: 1539620 - DNA, 15 bp, Homo sapiens
gccccctctcattct

SEQ ID NO: 1539621 - DNA, 15 bp, Homo sapiens
ccccctctcattctc

SEQ ID NO: 1539622 - DNA, 15 bp, Homo sapiens
cccctctcattctcc

SEQ ID NO: 1539623 - DNA, 15 bp, Homo sapiens
ccctctcattctcct

SEQ ID NO: 1539624 - DNA, 15 bp, Homo sapiens
cctctcattctcctg

SEQ ID NO: 1539625 - DNA, 15 bp, Homo sapiens
ctctcattctcctgc

SEQ ID NO: 1539626 - DNA, 15 bp, Homo sapiens
tctcattctcctgct

SEQ ID NO: 1539627 - DNA, 15 bp, Homo sapiens
ctcattctcctgctc

SEQ ID NO: 1539628 - DNA, 15 bp, Homo sapiens
tcattctcctgctcc

SEQ ID NO: 1539629 - DNA, 15 bp, Homo sapiens
cattctcctgctccc

SEQ ID NO: 1539630 - DNA, 15 bp, Homo sapiens
attctcctgctccca

SEQ ID NO: 1539631 - DNA, 15 bp, Homo sapiens
ttctcctgctcccac

SEQ ID NO: 1539632 - DNA, 15 bp, Homo sapiens
tctcctgctcccact

SEQ ID NO: 1539633 - DNA, 15 bp, Homo sapiens
ctcctgctcccactc

SEQ ID NO: 1539634 - DNA, 15 bp, Homo sapiens
tcctgctcccactct

SEQ ID NO: 1539635 - DNA, 15 bp, Homo sapiens
cctgctcccactctt

SEQ ID NO: 1539636 - DNA, 15 bp, Homo sapiens
ctgctcccactcttg

SEQ ID NO: 1539637 - DNA, 15 bp, Homo sapiens
tgctcccactcttgc

SEQ ID NO: 1539638 - DNA, 15 bp, Homo sapiens
gctcccactcttgca

SEQ ID NO: 1539639 - DNA, 15 bp, Homo sapiens
ctcccactcttgcat

SEQ ID NO: 1539640 - DNA, 15 bp, Homo sapiens
tcccactcttgcatg

SEQ ID NO: 1539641 - DNA, 15 bp, Homo sapiens
cccactcttgcatga

SEQ ID NO: 1539642 - DNA, 15 bp, Homo sapiens
ccactcttgcatgag

SEQ ID NO: 1539643 - DNA, 15 bp, Homo sapiens
cactcttgcatgaga

SEQ ID NO: 1539644 - DNA, 15 bp, Homo sapiens
actcttgcatgagac

SEQ ID NO: 1539645 - DNA, 15 bp, Homo sapiens
ctcttgcatgagaca

SEQ ID NO: 1539646 - DNA, 15 bp, Homo sapiens
tcttgcatgagacac

SEQ ID NO: 1539647 - DNA, 15 bp, Homo sapiens
cttgcatgagacacc

SEQ ID NO: 1539648 - DNA, 15 bp, Homo sapiens
ttgcatgagacacct

SEQ ID NO: 1539649 - DNA, 15 bp, Homo sapiens
tgcatgagacacctg

SEQ ID NO: 1539650 - DNA, 15 bp, Homo sapiens
gcatgagacacctgc

SEQ ID NO: 1539651 - DNA, 15 bp, Homo sapiens
catgagacacctgct

SEQ ID NO: 1539652 - DNA, 15 bp, Homo sapiens
atgagacacctgctc

SEQ ID NO: 1539653 - DNA, 15 bp, Homo sapiens
tgagacacctgctcc

SEQ ID NO: 1539654 - DNA, 15 bp, Homo sapiens
gagacacctgctccc

SEQ ID NO: 1539655 - DNA, 15 bp, Homo sapiens
agacacctgctcccc

SEQ ID NO: 1539656 - DNA, 15 bp, Homo sapiens
gacacctgctccccc

SEQ ID NO: 1539657 - DNA, 15 bp, Homo sapiens
acacctgctccccct

SEQ ID NO: 1539658 - DNA, 15 bp, Homo sapiens
cacctgctccccctt

SEQ ID NO: 1539659 - DNA, 15 bp, Homo sapiens
acctgctcccccttc

SEQ ID NO: 1539660 - DNA, 15 bp, Homo sapiens
cctgctcccccttct

SEQ ID NO: 1539661 - DNA, 15 bp, Homo sapiens
ctgctcccccttctc

SEQ ID NO: 1539662 - DNA, 15 bp, Homo sapiens
tgctcccccttctcc

SEQ ID NO: 1539663 - DNA, 15 bp, Homo sapiens
gctcccccttctcct

SEQ ID NO: 1539664 - DNA, 15 bp, Homo sapiens
ctcccccttctcctt

SEQ ID NO: 1539665 - DNA, 15 bp, Homo sapiens
tcccccttctccttc

SEQ ID NO: 1539666 - DNA, 15 bp, Homo sapiens
cccccttctccttct

SEQ ID NO: 1539667 - DNA, 15 bp, Homo sapiens
ccccttctccttctg

SEQ ID NO: 1539668 - DNA, 15 bp, Homo sapiens
cccttctccttctgc

SEQ ID NO: 1539669 - DNA, 15 bp, Homo sapiens
ccttctccttctgcc

SEQ ID NO: 1539670 - DNA, 15 bp, Homo sapiens
cttctccttctgcca

SEQ ID NO: 1539671 - DNA, 15 bp, Homo sapiens
ttctccttctgccat

SEQ ID NO: 1539672 - DNA, 15 bp, Homo sapiens
tctccttctgccatg

SEQ ID NO: 1539673 - DNA, 15 bp, Homo sapiens
ctccttctgccatga

SEQ ID NO: 1539674 - DNA, 15 bp, Homo sapiens
tccttctgccatgat

SEQ ID NO: 1539675 - DNA, 15 bp, Homo sapiens
ccttctgccatgatt

SEQ ID NO: 1539676 - DNA, 15 bp, Homo sapiens
cttctgccatgattt

SEQ ID NO: 1539677 - DNA, 15 bp, Homo sapiens
ttctgccatgatttt

SEQ ID NO: 1539678 - DNA, 15 bp, Homo sapiens
tctgccatgatttta

SEQ ID NO: 1539679 - DNA, 15 bp, Homo sapiens
ctgccatgattttaa

SEQ ID NO: 1539680 - DNA, 15 bp, Homo sapiens
tgccatgattttaag

SEQ ID NO: 1539681 - DNA, 15 bp, Homo sapiens
gccatgattttaaga

SEQ ID NO: 1539682 - DNA, 15 bp, Homo sapiens
ccatgattttaagat

SEQ ID NO: 1539683 - DNA, 15 bp, Homo sapiens
catgattttaagatt

SEQ ID NO: 1539684 - DNA, 15 bp, Homo sapiens
atgattttaagattc

SEQ ID NO: 1539685 - DNA, 15 bp, Homo sapiens
tgattttaagattcc

SEQ ID NO: 1539686 - DNA, 15 bp, Homo sapiens
gattttaagattcca

SEQ ID NO: 1539687 - DNA, 15 bp, Homo sapiens
attttaagattccag

SEQ ID NO: 1539688 - DNA, 15 bp, Homo sapiens
ttttaagattccagg

SEQ ID NO: 1539689 - DNA, 15 bp, Homo sapiens
tttaagattccaggg

SEQ ID NO: 1539690 - DNA, 15 bp, Homo sapiens
ttaagattccaggga

SEQ ID NO: 1539691 - DNA, 15 bp, Homo sapiens
taagattccagggac

SEQ ID NO: 1539692 - DNA, 15 bp, Homo sapiens
aagattccagggact

SEQ ID NO: 1539693 - DNA, 15 bp, Homo sapiens
agattccagggactt

SEQ ID NO: 1539694 - DNA, 15 bp, Homo sapiens
gattccagggacttc

SEQ ID NO: 1539695 - DNA, 15 bp, Homo sapiens
attccagggacttca

SEQ ID NO: 1539696 - DNA, 15 bp, Homo sapiens
ttccagggacttcac

SEQ ID NO: 1539697 - DNA, 15 bp, Homo sapiens
tccagggacttcaca

SEQ ID NO: 1539698 - DNA, 15 bp, Homo sapiens
ccagggacttcacaa

SEQ ID NO: 1539699 - DNA, 15 bp, Homo sapiens
cagggacttcacaag

SEQ ID NO: 1539700 - DNA, 15 bp, Homo sapiens
agggacttcacaaga

SEQ ID NO: 1539701 - DNA, 15 bp, Homo sapiens
gggacttcacaagaa

SEQ ID NO: 1539702 - DNA, 15 bp, Homo sapiens
ggacttcacaagaag

SEQ ID NO: 1539703 - DNA, 15 bp, Homo sapiens
gacttcacaagaagc

SEQ ID NO: 1539704 - DNA, 15 bp, Homo sapiens
acttcacaagaagca

SEQ ID NO: 1539705 - DNA, 15 bp, Homo sapiens
cttcacaagaagcaa

SEQ ID NO: 1539706 - DNA, 15 bp, Homo sapiens
ttcacaagaagcaaa

SEQ ID NO: 1539707 - DNA, 15 bp, Homo sapiens
tcacaagaagcaaat

SEQ ID NO: 1539708 - DNA, 15 bp, Homo sapiens
cacaagaagcaaatg

SEQ ID NO: 1539709 - DNA, 15 bp, Homo sapiens
acaagaagcaaatgc

SEQ ID NO: 1539710 - DNA, 15 bp, Homo sapiens
gaggcaaacactggg

SEQ ID NO: 1539711 - DNA, 15 bp, Homo sapiens
aggcaaacactgggg

SEQ ID NO: 1539712 - DNA, 15 bp, Homo sapiens
ggcaaacactggggc

SEQ ID NO: 1539713 - DNA, 15 bp, Homo sapiens
gcaaacactggggca

SEQ ID NO: 1539714 - DNA, 15 bp, Homo sapiens
caaacactggggcaa

SEQ ID NO: 1539715 - DNA, 15 bp, Homo sapiens
aaacactggggcaaa

SEQ ID NO: 1539716 - DNA, 15 bp, Homo sapiens
aacactggggcaaaa

SEQ ID NO: 1539717 - DNA, 15 bp, Homo sapiens
acactggggcaaaac

SEQ ID NO: 1539718 - DNA, 15 bp, Homo sapiens
cactggggcaaaact

SEQ ID NO: 1539719 - DNA, 15 bp, Homo sapiens
actggggcaaaactg

SEQ ID NO: 1539720 - DNA, 15 bp, Homo sapiens
ctggggcaaaactga

SEQ ID NO: 1539721 - DNA, 15 bp, Homo sapiens
tggggcaaaactgac

SEQ ID NO: 1539722 - DNA, 15 bp, Homo sapiens
ggggcaaaactgacc

SEQ ID NO: 1539723 - DNA, 15 bp, Homo sapiens
gggcaaaactgacct

SEQ ID NO: 1539724 - DNA, 15 bp, Homo sapiens
ggcaaaactgacctc

SEQ ID NO: 1539725 - DNA, 15 bp, Homo sapiens
gcaaaactgacctct

SEQ ID NO: 1539726 - DNA, 15 bp, Homo sapiens
caaaactgacctctg

SEQ ID NO: 1539727 - DNA, 15 bp, Homo sapiens
aaaactgacctctgt

SEQ ID NO: 1539728 - DNA, 15 bp, Homo sapiens
aaactgacctctgtg

SEQ ID NO: 1539729 - DNA, 15 bp, Homo sapiens
aactgacctctgtgg

SEQ ID NO: 1539730 - DNA, 15 bp, Homo sapiens
actgacctctgtgga

SEQ ID NO: 1539731 - DNA, 15 bp, Homo sapiens
ctgacctctgtggat

SEQ ID NO: 1539732 - DNA, 15 bp, Homo sapiens
tgacctctgtggata

SEQ ID NO: 1539733 - DNA, 15 bp, Homo sapiens
gacctctgtggatac

SEQ ID NO: 1539734 - DNA, 15 bp, Homo sapiens
acctctgtggatacc

SEQ ID NO: 1539735 - DNA, 15 bp, Homo sapiens
cctctgtggatacca

SEQ ID NO: 1539736 - DNA, 15 bp, Homo sapiens
ctctgtggataccac

SEQ ID NO: 1539737 - DNA, 15 bp, Homo sapiens
tctgtggataccact

SEQ ID NO: 1539738 - DNA, 15 bp, Homo sapiens
ctgtggataccactg

SEQ ID NO: 1539739 - DNA, 15 bp, Homo sapiens
tgtggataccactgt

SEQ ID NO: 1539740 - DNA, 15 bp, Homo sapiens
gtggataccactgtg

SEQ ID NO: 1539741 - DNA, 15 bp, Homo sapiens
tggataccactgtgt

SEQ ID NO: 1539742 - DNA, 15 bp, Homo sapiens
ggataccactgtgtc

SEQ ID NO: 1539743 - DNA, 15 bp, Homo sapiens
gataccactgtgtcc

SEQ ID NO: 1539744 - DNA, 15 bp, Homo sapiens
ataccactgtgtcca

SEQ ID NO: 1539745 - DNA, 15 bp, Homo sapiens
taccactgtgtccac

SEQ ID NO: 1539746 - DNA, 15 bp, Homo sapiens
accactgtgtccacc

SEQ ID NO: 1539747 - DNA, 15 bp, Homo sapiens
ccactgtgtccacct

SEQ ID NO: 1539748 - DNA, 15 bp, Homo sapiens
cactgtgtccacctc

SEQ ID NO: 1539749 - DNA, 15 bp, Homo sapiens
actgtgtccacctcc

SEQ ID NO: 1539750 - DNA, 15 bp, Homo sapiens
ctgtgtccacctcca

SEQ ID NO: 1539751 - DNA, 15 bp, Homo sapiens
tgtgtccacctccac

SEQ ID NO: 1539752 - DNA, 15 bp, Homo sapiens
gtgtccacctccacc

SEQ ID NO: 1539753 - DNA, 15 bp, Homo sapiens
tgtccacctccacca

SEQ ID NO: 1539754 - DNA, 15 bp, Homo sapiens
gtccacctccaccag

SEQ ID NO: 1539755 - DNA, 15 bp, Homo sapiens
tccacctccaccagc

SEQ ID NO: 1539756 - DNA, 15 bp, Homo sapiens
ccacctccaccagct

SEQ ID NO: 1539757 - DNA, 15 bp, Homo sapiens
cacctccaccagctt

SEQ ID NO: 1539758 - DNA, 15 bp, Homo sapiens
acctccaccagcttc

SEQ ID NO: 1539759 - DNA, 15 bp, Homo sapiens
cctccaccagcttca

SEQ ID NO: 1539760 - DNA, 15 bp, Homo sapiens
ctccaccagcttcag

SEQ ID NO: 1539761 - DNA, 15 bp, Homo sapiens
tccaccagcttcagc

SEQ ID NO: 1539762 - DNA, 15 bp, Homo sapiens
ccaccagcttcagct

SEQ ID NO: 1539763 - DNA, 15 bp, Homo sapiens
caccagcttcagctg

SEQ ID NO: 1539764 - DNA, 15 bp, Homo sapiens
accagcttcagctga

SEQ ID NO: 1539765 - DNA, 15 bp, Homo sapiens
ccagcttcagctgaa

SEQ ID NO: 1539766 - DNA, 15 bp, Homo sapiens
cagcttcagctgaag

SEQ ID NO: 1539767 - DNA, 15 bp, Homo sapiens
agcttcagctgaagc

SEQ ID NO: 1539768 - DNA, 15 bp, Homo sapiens
gcttcagctgaagcc

SEQ ID NO: 1539769 - DNA, 15 bp, Homo sapiens
cttcagctgaagcct

SEQ ID NO: 1539770 - DNA, 15 bp, Homo sapiens
ttcagctgaagcctc

SEQ ID NO: 1539771 - DNA, 15 bp, Homo sapiens
tcagctgaagcctct

SEQ ID NO: 1539772 - DNA, 15 bp, Homo sapiens
cagctgaagcctctg

SEQ ID NO: 1539773 - DNA, 15 bp, Homo sapiens
agctgaagcctctga

SEQ ID NO: 1539774 - DNA, 15 bp, Homo sapiens
gctgaagcctctgaa

SEQ ID NO: 1539775 - DNA, 15 bp, Homo sapiens
ctgaagcctctgaac

SEQ ID NO: 1539776 - DNA, 15 bp, Homo sapiens
tgaagcctctgaaca

SEQ ID NO: 1539777 - DNA, 15 bp, Homo sapiens
gaagcctctgaacat

SEQ ID NO: 1539778 - DNA, 15 bp, Homo sapiens
aagcctctgaacatc

SEQ ID NO: 1539779 - DNA, 15 bp, Homo sapiens
agcctctgaacatct

SEQ ID NO: 1539780 - DNA, 15 bp, Homo sapiens
gcctctgaacatctc

SEQ ID NO: 1539781 - DNA, 15 bp, Homo sapiens
cctctgaacatctcc

SEQ ID NO: 1539782 - DNA, 15 bp, Homo sapiens
ctctgaacatctcca

SEQ ID NO: 1539783 - DNA, 15 bp, Homo sapiens
tctgaacatctccag

SEQ ID NO: 1539784 - DNA, 15 bp, Homo sapiens
ctgaacatctccagc

SEQ ID NO: 1539785 - DNA, 15 bp, Homo sapiens
tgaacatctccagca

SEQ ID NO: 1539786 - DNA, 15 bp, Homo sapiens
gaacatctccagcat

SEQ ID NO: 1539787 - DNA, 15 bp, Homo sapiens
aacatctccagcatg

SEQ ID NO: 1539788 - DNA, 15 bp, Homo sapiens
acatctccagcatgg

SEQ ID NO: 1539789 - DNA, 15 bp, Homo sapiens
catctccagcatgga

SEQ ID NO: 1539790 - DNA, 15 bp, Homo sapiens
atctccagcatggaa

SEQ ID NO: 1539791 - DNA, 15 bp, Homo sapiens
tctccagcatggaag

SEQ ID NO: 1539792 - DNA, 15 bp, Homo sapiens
ctccagcatggaaga

SEQ ID NO: 1539793 - DNA, 15 bp, Homo sapiens
tccagcatggaagaa

SEQ ID NO: 1539794 - DNA, 15 bp, Homo sapiens
ccagcatggaagaag

SEQ ID NO: 1539795 - DNA, 15 bp, Homo sapiens
cagcatggaagaagc

SEQ ID NO: 1539796 - DNA, 15 bp, Homo sapiens
agcatggaagaagcc

SEQ ID NO: 1539797 - DNA, 15 bp, Homo sapiens
gcatggaagaagccc

SEQ ID NO: 1539798 - DNA, 15 bp, Homo sapiens
catggaagaagcccc

SEQ ID NO: 1539799 - DNA, 15 bp, Homo sapiens
atggaagaagcccca

SEQ ID NO: 1539800 - DNA, 15 bp, Homo sapiens
tggaagaagccccaa

SEQ ID NO: 1539801 - DNA, 15 bp, Homo sapiens
ggaagaagccccaaa

SEQ ID NO: 1539802 - DNA, 15 bp, Homo sapiens
gaagaagccccaaag

SEQ ID NO: 1539803 - DNA, 15 bp, Homo sapiens
aagaagccccaaagg

SEQ ID NO: 1539804 - DNA, 15 bp, Homo sapiens
agaagccccaaagga

SEQ ID NO: 1539805 - DNA, 15 bp, Homo sapiens
gaagccccaaaggat

SEQ ID NO: 1539806 - DNA, 15 bp, Homo sapiens
aagccccaaaggata

SEQ ID NO: 1539807 - DNA, 15 bp, Homo sapiens
agccccaaaggatat

SEQ ID NO: 1539808 - DNA, 15 bp, Homo sapiens
gccccaaaggatatt

SEQ ID NO: 1539809 - DNA, 15 bp, Homo sapiens
ccccaaaggatattt

SEQ ID NO: 1539810 - DNA, 15 bp, Homo sapiens
cccaaaggatatttc

SEQ ID NO: 1539811 - DNA, 15 bp, Homo sapiens
ccaaaggatatttcc

SEQ ID NO: 1539812 - DNA, 15 bp, Homo sapiens
caaaggatatttcct

SEQ ID NO: 1539813 - DNA, 15 bp, Homo sapiens
aaaggatatttcctg

SEQ ID NO: 1539814 - DNA, 15 bp, Homo sapiens
aaggatatttcctgt

SEQ ID NO: 1539815 - DNA, 15 bp, Homo sapiens
aggatatttcctgtc

SEQ ID NO: 1539816 - DNA, 15 bp, Homo sapiens
ggatatttcctgtcc

SEQ ID NO: 1539817 - DNA, 15 bp, Homo sapiens
gatatttcctgtccc

SEQ ID NO: 1539818 - DNA, 15 bp, Homo sapiens
atatttcctgtcccc

SEQ ID NO: 1539819 - DNA, 15 bp, Homo sapiens
tatttcctgtccccc

SEQ ID NO: 1539820 - DNA, 15 bp, Homo sapiens
atttcctgtccccca

SEQ ID NO: 1539821 - DNA, 15 bp, Homo sapiens
tttcctgtcccccag

SEQ ID NO: 1539822 - DNA, 15 bp, Homo sapiens
ttcctgtcccccagc

SEQ ID NO: 1539823 - DNA, 15 bp, Homo sapiens
tcctgtcccccagca

SEQ ID NO: 1539824 - DNA, 15 bp, Homo sapiens
cctgtcccccagcat

SEQ ID NO: 1539825 - DNA, 15 bp, Homo sapiens
ctgtcccccagcata

SEQ ID NO: 1539826 - DNA, 15 bp, Homo sapiens
tgtcccccagcatat

SEQ ID NO: 1539827 - DNA, 15 bp, Homo sapiens
gtcccccagcatatg

SEQ ID NO: 1539828 - DNA, 15 bp, Homo sapiens
tcccccagcatatgc

SEQ ID NO: 1539829 - DNA, 15 bp, Homo sapiens
cccccagcatatgct

SEQ ID NO: 1539830 - DNA, 15 bp, Homo sapiens
ccccagcatatgctt

SEQ ID NO: 1539831 - DNA, 15 bp, Homo sapiens
cccagcatatgcttg

SEQ ID NO: 1539832 - DNA, 15 bp, Homo sapiens
ccagcatatgcttga

SEQ ID NO: 1539833 - DNA, 15 bp, Homo sapiens
cagcatatgcttgac

SEQ ID NO: 1539834 - DNA, 15 bp, Homo sapiens
agcatatgcttgacc

SEQ ID NO: 1539835 - DNA, 15 bp, Homo sapiens
gcatatgcttgaccc

SEQ ID NO: 1539836 - DNA, 15 bp, Homo sapiens
catatgcttgaccct

SEQ ID NO: 1539837 - DNA, 15 bp, Homo sapiens
atatgcttgaccctg

SEQ ID NO: 1539838 - DNA, 15 bp, Homo sapiens
tatgcttgaccctga

SEQ ID NO: 1539839 - DNA, 15 bp, Homo sapiens
atgcttgaccctgaa

SEQ ID NO: 1539840 - DNA, 15 bp, Homo sapiens
tgcttgaccctgaag

SEQ ID NO: 1539841 - DNA, 15 bp, Homo sapiens
gcttgaccctgaagc

SEQ ID NO: 1539842 - DNA, 15 bp, Homo sapiens
cttgaccctgaagcc

SEQ ID NO: 1539843 - DNA, 15 bp, Homo sapiens
ttgaccctgaagccc

SEQ ID NO: 1539844 - DNA, 15 bp, Homo sapiens
tgaccctgaagccct

SEQ ID NO: 1539845 - DNA, 15 bp, Homo sapiens
gaccctgaagccctc

SEQ ID NO: 1539846 - DNA, 15 bp, Homo sapiens
accctgaagccctcc

SEQ ID NO: 1539847 - DNA, 15 bp, Homo sapiens
ccctgaagccctccc

SEQ ID NO: 1539848 - DNA, 15 bp, Homo sapiens
cctgaagccctcccc

SEQ ID NO: 1539849 - DNA, 15 bp, Homo sapiens
ctgaagccctcccca

SEQ ID NO: 1539850 - DNA, 15 bp, Homo sapiens
tgaagccctccccat

SEQ ID NO: 1539851 - DNA, 15 bp, Homo sapiens
gaagccctccccatc

SEQ ID NO: 1539852 - DNA, 15 bp, Homo sapiens
aagccctccccatct

SEQ ID NO: 1539853 - DNA, 15 bp, Homo sapiens
agccctccccatcta

SEQ ID NO: 1539854 - DNA, 15 bp, Homo sapiens
gccctccccatctag

SEQ ID NO: 1539855 - DNA, 15 bp, Homo sapiens
ccctccccatctagt

SEQ ID NO: 1539856 - DNA, 15 bp, Homo sapiens
cctccccatctagtc

SEQ ID NO: 1539857 - DNA, 15 bp, Homo sapiens
ctccccatctagtca

SEQ ID NO: 1539858 - DNA, 15 bp, Homo sapiens
tccccatctagtcaa

SEQ ID NO: 1539859 - DNA, 15 bp, Homo sapiens
ccccatctagtcaag

SEQ ID NO: 1539860 - DNA, 15 bp, Homo sapiens
cccatctagtcaaga

SEQ ID NO: 1539861 - DNA, 15 bp, Homo sapiens
ccatctagtcaagaa

SEQ ID NO: 1539862 - DNA, 15 bp, Homo sapiens
catctagtcaagaag

SEQ ID NO: 1539863 - DNA, 15 bp, Homo sapiens
atctagtcaagaaga

SEQ ID NO: 1539864 - DNA, 15 bp, Homo sapiens
tctagtcaagaagac

SEQ ID NO: 1539865 - DNA, 15 bp, Homo sapiens
ctagtcaagaagacc

SEQ ID NO: 1539866 - DNA, 15 bp, Homo sapiens
tagtcaagaagacca

SEQ ID NO: 1539867 - DNA, 15 bp, Homo sapiens
agtcaagaagaccaa

SEQ ID NO: 1539868 - DNA, 15 bp, Homo sapiens
gtcaagaagaccaaa

SEQ ID NO: 1539869 - DNA, 15 bp, Homo sapiens
tcaagaagaccaaac

SEQ ID NO: 1539870 - DNA, 15 bp, Homo sapiens
caagaagaccaaact

SEQ ID NO: 1539871 - DNA, 15 bp, Homo sapiens
aagaagaccaaactg

SEQ ID NO: 1539872 - DNA, 15 bp, Homo sapiens
agaagaccaaactgt

SEQ ID NO: 1539873 - DNA, 15 bp, Homo sapiens
gaagaccaaactgtt

SEQ ID NO: 1539874 - DNA, 15 bp, Homo sapiens
aagaccaaactgtta

SEQ ID NO: 1539875 - DNA, 15 bp, Homo sapiens
agaccaaactgttaa

SEQ ID NO: 1539876 - DNA, 15 bp, Homo sapiens
gaccaaactgttaac

SEQ ID NO: 1539877 - DNA, 15 bp, Homo sapiens
accaaactgttaaca

SEQ ID NO: 1539878 - DNA, 15 bp, Homo sapiens
ccaaactgttaacaa

SEQ ID NO: 1539879 - DNA, 15 bp, Homo sapiens
caaactgttaacaat

SEQ ID NO: 1539880 - DNA, 15 bp, Homo sapiens
aaactgttaacaatc

SEQ ID NO: 1539881 - DNA, 15 bp, Homo sapiens
aactgttaacaatcc

SEQ ID NO: 1539882 - DNA, 15 bp, Homo sapiens
actgttaacaatcct

SEQ ID NO: 1539883 - DNA, 15 bp, Homo sapiens
ctgttaacaatcctg

SEQ ID NO: 1539884 - DNA, 15 bp, Homo sapiens
tgttaacaatcctgg

SEQ ID NO: 1539885 - DNA, 15 bp, Homo sapiens
gttaacaatcctgga

SEQ ID NO: 1539886 - DNA, 15 bp, Homo sapiens
ttaacaatcctggag

SEQ ID NO: 1539887 - DNA, 15 bp, Homo sapiens
taacaatcctggagt

SEQ ID NO: 1539888 - DNA, 15 bp, Homo sapiens
aacaatcctggagtc

SEQ ID NO: 1539889 - DNA, 15 bp, Homo sapiens
acaatcctggagtca

SEQ ID NO: 1539890 - DNA, 15 bp, Homo sapiens
caatcctggagtcag

SEQ ID NO: 1539891 - DNA, 15 bp, Homo sapiens
aatcctggagtcaga

SEQ ID NO: 1539892 - DNA, 15 bp, Homo sapiens
atcctggagtcagag

SEQ ID NO: 1539893 - DNA, 15 bp, Homo sapiens
tcctggagtcagagt

SEQ ID NO: 1539894 - DNA, 15 bp, Homo sapiens
cctggagtcagagtg

SEQ ID NO: 1539895 - DNA, 15 bp, Homo sapiens
ctggagtcagagtga

SEQ ID NO: 1539896 - DNA, 15 bp, Homo sapiens
tggagtcagagtgac

SEQ ID NO: 1539897 - DNA, 15 bp, Homo sapiens
ggagtcagagtgacc

SEQ ID NO: 1539898 - DNA, 15 bp, Homo sapiens
gagtcagagtgaccc

SEQ ID NO: 1539899 - DNA, 15 bp, Homo sapiens
agtcagagtgaccca

SEQ ID NO: 1539900 - DNA, 15 bp, Homo sapiens
gtcagagtgacccat

SEQ ID NO: 1539901 - DNA, 15 bp, Homo sapiens
tcagagtgacccatg

SEQ ID NO: 1539902 - DNA, 15 bp, Homo sapiens
cagagtgacccatgg

SEQ ID NO: 1539903 - DNA, 15 bp, Homo sapiens
agagtgacccatggg

SEQ ID NO: 1539904 - DNA, 15 bp, Homo sapiens
gagtgacccatgggt

SEQ ID NO: 1539905 - DNA, 15 bp, Homo sapiens
agtgacccatgggtg

SEQ ID NO: 1539906 - DNA, 15 bp, Homo sapiens
gtgacccatgggtga

SEQ ID NO: 1539907 - DNA, 15 bp, Homo sapiens
tgacccatgggtgaa

SEQ ID NO: 1539908 - DNA, 15 bp, Homo sapiens
gacccatgggtgaat

SEQ ID NO: 1539909 - DNA, 15 bp, Homo sapiens
acccatgggtgaatc

SEQ ID NO: 1539910 - DNA, 15 bp, Homo sapiens
cccatgggtgaatct

SEQ ID NO: 1539911 - DNA, 15 bp, Homo sapiens
ccatgggtgaatctt

SEQ ID NO: 1539912 - DNA, 15 bp, Homo sapiens
catgggtgaatctta

SEQ ID NO: 1539913 - DNA, 15 bp, Homo sapiens
atgggtgaatcttag

SEQ ID NO: 1539914 - DNA, 15 bp, Homo sapiens
tgggtgaatcttagc

SEQ ID NO: 1539915 - DNA, 15 bp, Homo sapiens
gggtgaatcttagcc

SEQ ID NO: 1539916 - DNA, 15 bp, Homo sapiens
ggtgaatcttagcca

SEQ ID NO: 1539917 - DNA, 15 bp, Homo sapiens
gtgaatcttagccaa

SEQ ID NO: 1539918 - DNA, 15 bp, Homo sapiens
tgaatcttagccaag

SEQ ID NO: 1539919 - DNA, 15 bp, Homo sapiens
gaatcttagccaagt

SEQ ID NO: 1539920 - DNA, 15 bp, Homo sapiens
aatcttagccaagtc

SEQ ID NO: 1539921 - DNA, 15 bp, Homo sapiens
atcttagccaagtca

SEQ ID NO: 1539922 - DNA, 15 bp, Homo sapiens
tcttagccaagtcac

SEQ ID NO: 1539923 - DNA, 15 bp, Homo sapiens
cttagccaagtcact

SEQ ID NO: 1539924 - DNA, 15 bp, Homo sapiens
ttagccaagtcactc

SEQ ID NO: 1539925 - DNA, 15 bp, Homo sapiens
tagccaagtcactca

SEQ ID NO: 1539926 - DNA, 15 bp, Homo sapiens
agccaagtcactcat

SEQ ID NO: 1539927 - DNA, 15 bp, Homo sapiens
gccaagtcactcata

SEQ ID NO: 1539928 - DNA, 15 bp, Homo sapiens
ccaagtcactcatag

SEQ ID NO: 1539929 - DNA, 15 bp, Homo sapiens
caagtcactcatagc

SEQ ID NO: 1539930 - DNA, 15 bp, Homo sapiens
aagtcactcatagct

SEQ ID NO: 1539931 - DNA, 15 bp, Homo sapiens
agtcactcatagctg

SEQ ID NO: 1539932 - DNA, 15 bp, Homo sapiens
gtcactcatagctgt

SEQ ID NO: 1539933 - DNA, 15 bp, Homo sapiens
tcactcatagctgtt

SEQ ID NO: 1539934 - DNA, 15 bp, Homo sapiens
cactcatagctgttg

SEQ ID NO: 1539935 - DNA, 15 bp, Homo sapiens
actcatagctgttgc

SEQ ID NO: 1539936 - DNA, 15 bp, Homo sapiens
ctcatagctgttgca

SEQ ID NO: 1539937 - DNA, 15 bp, Homo sapiens
tcatagctgttgcat

SEQ ID NO: 1539938 - DNA, 15 bp, Homo sapiens
catagctgttgcatc

SEQ ID NO: 1539939 - DNA, 15 bp, Homo sapiens
atagctgttgcatcc

SEQ ID NO: 1539940 - DNA, 15 bp, Homo sapiens
tagctgttgcatcct

SEQ ID NO: 1539941 - DNA, 15 bp, Homo sapiens
agctgttgcatccta

SEQ ID NO: 1539942 - DNA, 15 bp, Homo sapiens
gctgttgcatcctag

SEQ ID NO: 1539943 - DNA, 15 bp, Homo sapiens
ctgttgcatcctagt

SEQ ID NO: 1539944 - DNA, 15 bp, Homo sapiens
tgttgcatcctagta

SEQ ID NO: 1539945 - DNA, 15 bp, Homo sapiens
gttgcatcctagtaa

SEQ ID NO: 1539946 - DNA, 15 bp, Homo sapiens
ttgcatcctagtaaa

SEQ ID NO: 1539947 - DNA, 15 bp, Homo sapiens
tgcatcctagtaaat

SEQ ID NO: 1539948 - DNA, 15 bp, Homo sapiens
gcatcctagtaaatc

SEQ ID NO: 1539949 - DNA, 15 bp, Homo sapiens
catcctagtaaatcc

SEQ ID NO: 1539950 - DNA, 15 bp, Homo sapiens
atcctagtaaatccc

SEQ ID NO: 1539951 - DNA, 15 bp, Homo sapiens
tcctagtaaatccct

SEQ ID NO: 1539952 - DNA, 15 bp, Homo sapiens
cctagtaaatccctt

SEQ ID NO: 1539953 - DNA, 15 bp, Homo sapiens
ctagtaaatccctta

SEQ ID NO: 1539954 - DNA, 15 bp, Homo sapiens
tagtaaatcccttaa

SEQ ID NO: 1539955 - DNA, 15 bp, Homo sapiens
agtaaatcccttaac

SEQ ID NO: 1539956 - DNA, 15 bp, Homo sapiens
gtaaatcccttaact

SEQ ID NO: 1539957 - DNA, 15 bp, Homo sapiens
taaatcccttaactc

SEQ ID NO: 1539958 - DNA, 15 bp, Homo sapiens
aaatcccttaactcc

SEQ ID NO: 1539959 - DNA, 15 bp, Homo sapiens
aatcccttaactccc

SEQ ID NO: 1539960 - DNA, 15 bp, Homo sapiens
atcccttaactccca

SEQ ID NO: 1539961 - DNA, 15 bp, Homo sapiens
tcccttaactcccat

SEQ ID NO: 1539962 - DNA, 15 bp, Homo sapiens
cccttaactcccata

SEQ ID NO: 1539963 - DNA, 15 bp, Homo sapiens
ccttaactcccatag

SEQ ID NO: 1539964 - DNA, 15 bp, Homo sapiens
cttaactcccatagg

SEQ ID NO: 1539965 - DNA, 15 bp, Homo sapiens
ttaactcccataggc

SEQ ID NO: 1539966 - DNA, 15 bp, Homo sapiens
taactcccataggct

SEQ ID NO: 1539967 - DNA, 15 bp, Homo sapiens
aactcccataggctt

SEQ ID NO: 1539968 - DNA, 15 bp, Homo sapiens
actcccataggcttc

SEQ ID NO: 1539969 - DNA, 15 bp, Homo sapiens
ctcccataggcttca

SEQ ID NO: 1539970 - DNA, 15 bp, Homo sapiens
tcccataggcttcag

SEQ ID NO: 1539971 - DNA, 15 bp, Homo sapiens
cccataggcttcagt

SEQ ID NO: 1539972 - DNA, 15 bp, Homo sapiens
ccataggcttcagtt

SEQ ID NO: 1539973 - DNA, 15 bp, Homo sapiens
cataggcttcagttt

SEQ ID NO: 1539974 - DNA, 15 bp, Homo sapiens
ataggcttcagtttc

SEQ ID NO: 1539975 - DNA, 15 bp, Homo sapiens
taggcttcagtttcc

SEQ ID NO: 1539976 - DNA, 15 bp, Homo sapiens
aggcttcagtttccc

SEQ ID NO: 1539977 - DNA, 15 bp, Homo sapiens
ggcttcagtttccct

SEQ ID NO: 1539978 - DNA, 15 bp, Homo sapiens
gcttcagtttccctg

SEQ ID NO: 1539979 - DNA, 15 bp, Homo sapiens
cttcagtttccctgc

SEQ ID NO: 1539980 - DNA, 15 bp, Homo sapiens
ttcagtttccctgca

SEQ ID NO: 1539981 - DNA, 15 bp, Homo sapiens
tcagtttccctgcat

SEQ ID NO: 1539982 - DNA, 15 bp, Homo sapiens
cagtttccctgcata

SEQ ID NO: 1539983 - DNA, 15 bp, Homo sapiens
agtttccctgcatat

SEQ ID NO: 1539984 - DNA, 15 bp, Homo sapiens
gtttccctgcatata

SEQ ID NO: 1539985 - DNA, 15 bp, Homo sapiens
tttccctgcatataa

SEQ ID NO: 1539986 - DNA, 15 bp, Homo sapiens
ttccctgcatataaa

SEQ ID NO: 1539987 - DNA, 15 bp, Homo sapiens
tccctgcatataaaa

SEQ ID NO: 1539988 - DNA, 15 bp, Homo sapiens
ccctgcatataaaat

SEQ ID NO: 1539989 - DNA, 15 bp, Homo sapiens
cctgcatataaaatg

SEQ ID NO: 1539990 - DNA, 15 bp, Homo sapiens
ctgcatataaaatga

SEQ ID NO: 1539991 - DNA, 15 bp, Homo sapiens
tgcatataaaatgac

SEQ ID NO: 1539992 - DNA, 15 bp, Homo sapiens
gcatataaaatgaca

SEQ ID NO: 1539993 - DNA, 15 bp, Homo sapiens
catataaaatgacag

SEQ ID NO: 1539994 - DNA, 15 bp, Homo sapiens
atataaaatgacagc

SEQ ID NO: 1539995 - DNA, 15 bp, Homo sapiens
tataaaatgacagcc

SEQ ID NO: 1539996 - DNA, 15 bp, Homo sapiens
ataaaatgacagcct

SEQ ID NO: 1539997 - DNA, 15 bp, Homo sapiens
taaaatgacagcctt

SEQ ID NO: 1539998 - DNA, 15 bp, Homo sapiens
aaaatgacagccttc

SEQ ID NO: 1539999 - DNA, 15 bp, Homo sapiens
aaatgacagccttca

SEQ ID NO: 1540000 - DNA, 15 bp, Homo sapiens
aatgacagccttcag

SEQ ID NO: 1540001 - DNA, 15 bp, Homo sapiens
atgacagccttcagc

SEQ ID NO: 1540002 - DNA, 15 bp, Homo sapiens
tgacagccttcagct

SEQ ID NO: 1540003 - DNA, 15 bp, Homo sapiens
gacagccttcagctc

SEQ ID NO: 1540004 - DNA, 15 bp, Homo sapiens
acagccttcagctca

SEQ ID NO: 1540005 - DNA, 15 bp, Homo sapiens
cagccttcagctcat

SEQ ID NO: 1540006 - DNA, 15 bp, Homo sapiens
agccttcagctcatc

SEQ ID NO: 1540007 - DNA, 15 bp, Homo sapiens
gccttcagctcatcg

SEQ ID NO: 1540008 - DNA, 15 bp, Homo sapiens
ccttcagctcatcgg

SEQ ID NO: 1540009 - DNA, 15 bp, Homo sapiens
cttcagctcatcggc

SEQ ID NO: 1540010 - DNA, 15 bp, Homo sapiens
ttcagctcatcggcc

SEQ ID NO: 1540011 - DNA, 15 bp, Homo sapiens
tcagctcatcggcca

SEQ ID NO: 1540012 - DNA, 15 bp, Homo sapiens
cagctcatcggccag

SEQ ID NO: 1540013 - DNA, 15 bp, Homo sapiens
agctcatcggccagt

SEQ ID NO: 1540014 - DNA, 15 bp, Homo sapiens
gctcatcggccagtt

SEQ ID NO: 1540015 - DNA, 15 bp, Homo sapiens
ctcatcggccagttt

SEQ ID NO: 1540016 - DNA, 15 bp, Homo sapiens
tcatcggccagtttc

SEQ ID NO: 1540017 - DNA, 15 bp, Homo sapiens
catcggccagtttca

SEQ ID NO: 1540018 - DNA, 15 bp, Homo sapiens
atcggccagtttcaa

SEQ ID NO: 1540019 - DNA, 15 bp, Homo sapiens
tcggccagtttcaat

SEQ ID NO: 1540020 - DNA, 15 bp, Homo sapiens
cggccagtttcaatc

SEQ ID NO: 1540021 - DNA, 15 bp, Homo sapiens
ggccagtttcaatcc

SEQ ID NO: 1540022 - DNA, 15 bp, Homo sapiens
gccagtttcaatcca

SEQ ID NO: 1540023 - DNA, 15 bp, Homo sapiens
ccagtttcaatccat

SEQ ID NO: 1540024 - DNA, 15 bp, Homo sapiens
cagtttcaatccatc

SEQ ID NO: 1540025 - DNA, 15 bp, Homo sapiens
agtttcaatccatct

SEQ ID NO: 1540026 - DNA, 15 bp, Homo sapiens
gtttcaatccatcta

SEQ ID NO: 1540027 - DNA, 15 bp, Homo sapiens
tttcaatccatctaa

SEQ ID NO: 1540028 - DNA, 15 bp, Homo sapiens
ttcaatccatctaaa

SEQ ID NO: 1540029 - DNA, 15 bp, Homo sapiens
tcaatccatctaaag

SEQ ID NO: 1540030 - DNA, 15 bp, Homo sapiens
caatccatctaaagg

SEQ ID NO: 1540031 - DNA, 15 bp, Homo sapiens
aatccatctaaaggg

SEQ ID NO: 1540032 - DNA, 15 bp, Homo sapiens
atccatctaaagggt

SEQ ID NO: 1540033 - DNA, 15 bp, Homo sapiens
tccatctaaagggtc

SEQ ID NO: 1540034 - DNA, 15 bp, Homo sapiens
ccatctaaagggtct

SEQ ID NO: 1540035 - DNA, 15 bp, Homo sapiens
catctaaagggtcta

SEQ ID NO: 1540036 - DNA, 15 bp, Homo sapiens
atctaaagggtctag

SEQ ID NO: 1540037 - DNA, 15 bp, Homo sapiens
tctaaagggtctagc

SEQ ID NO: 1540038 - DNA, 15 bp, Homo sapiens
ctaaagggtctagca

SEQ ID NO: 1540039 - DNA, 15 bp, Homo sapiens
taaagggtctagcac

SEQ ID NO: 1540040 - DNA, 15 bp, Homo sapiens
aaagggtctagcaca

SEQ ID NO: 1540041 - DNA, 15 bp, Homo sapiens
aagggtctagcacat

SEQ ID NO: 1540042 - DNA, 15 bp, Homo sapiens
agggtctagcacatc

SEQ ID NO: 1540043 - DNA, 15 bp, Homo sapiens
gggtctagcacatcc

SEQ ID NO: 1540044 - DNA, 15 bp, Homo sapiens
ggtctagcacatccc

SEQ ID NO: 1540045 - DNA, 15 bp, Homo sapiens
gtctagcacatcccc

SEQ ID NO: 1540046 - DNA, 15 bp, Homo sapiens
tctagcacatcccct

SEQ ID NO: 1540047 - DNA, 15 bp, Homo sapiens
ctagcacatcccctg

SEQ ID NO: 1540048 - DNA, 15 bp, Homo sapiens
tagcacatcccctgg

SEQ ID NO: 1540049 - DNA, 15 bp, Homo sapiens
agcacatcccctggc

SEQ ID NO: 1540050 - DNA, 15 bp, Homo sapiens
gcacatcccctggca

SEQ ID NO: 1540051 - DNA, 15 bp, Homo sapiens
cacatcccctggcat

SEQ ID NO: 1540052 - DNA, 15 bp, Homo sapiens
acatcccctggcatg

SEQ ID NO: 1540053 - DNA, 15 bp, Homo sapiens
catcccctggcatgt

SEQ ID NO: 1540054 - DNA, 15 bp, Homo sapiens
atcccctggcatgtg

SEQ ID NO: 1540055 - DNA, 15 bp, Homo sapiens
tcccctggcatgtgg

SEQ ID NO: 1540056 - DNA, 15 bp, Homo sapiens
cccctggcatgtgga

SEQ ID NO: 1540057 - DNA, 15 bp, Homo sapiens
ccctggcatgtggaa

SEQ ID NO: 1540058 - DNA, 15 bp, Homo sapiens
cctggcatgtggaag

SEQ ID NO: 1540059 - DNA, 15 bp, Homo sapiens
ctggcatgtggaagc

SEQ ID NO: 1540060 - DNA, 15 bp, Homo sapiens
tggcatgtggaagcc

SEQ ID NO: 1540061 - DNA, 15 bp, Homo sapiens
ggcatgtggaagcca

SEQ ID NO: 1540062 - DNA, 15 bp, Homo sapiens
gcatgtggaagccac

SEQ ID NO: 1540063 - DNA, 15 bp, Homo sapiens
catgtggaagccaca

SEQ ID NO: 1540064 - DNA, 15 bp, Homo sapiens
atgtggaagccacag

SEQ ID NO: 1540065 - DNA, 15 bp, Homo sapiens
tgtggaagccacagg

SEQ ID NO: 1540066 - DNA, 15 bp, Homo sapiens
gtggaagccacaggg

SEQ ID NO: 1540067 - DNA, 15 bp, Homo sapiens
tggaagccacagggc

SEQ ID NO: 1540068 - DNA, 15 bp, Homo sapiens
ggaagccacagggca

SEQ ID NO: 1540069 - DNA, 15 bp, Homo sapiens
gaagccacagggcac

SEQ ID NO: 1540070 - DNA, 15 bp, Homo sapiens
aagccacagggcaca

SEQ ID NO: 1540071 - DNA, 15 bp, Homo sapiens
agccacagggcacac

SEQ ID NO: 1540072 - DNA, 15 bp, Homo sapiens
gccacagggcacaca

SEQ ID NO: 1540073 - DNA, 15 bp, Homo sapiens
ccacagggcacacac

SEQ ID NO: 1540074 - DNA, 15 bp, Homo sapiens
acagggcacacacta

SEQ ID NO: 1540075 - DNA, 15 bp, Homo sapiens
cagggcacacactag

SEQ ID NO: 1540076 - DNA, 15 bp, Homo sapiens
agggcacacactagt

SEQ ID NO: 1540077 - DNA, 15 bp, Homo sapiens
gggcacacactagtt

SEQ ID NO: 1540078 - DNA, 15 bp, Homo sapiens
ggcacacactagttg

SEQ ID NO: 1540079 - DNA, 15 bp, Homo sapiens
gcacacactagttgt

SEQ ID NO: 1540080 - DNA, 15 bp, Homo sapiens
cacacactagttgtg

SEQ ID NO: 1540081 - DNA, 15 bp, Homo sapiens
acacactagttgtgg

SEQ ID NO: 1540082 - DNA, 15 bp, Homo sapiens
cacactagttgtggt

SEQ ID NO: 1540083 - DNA, 15 bp, Homo sapiens
acactagttgtggtc

SEQ ID NO: 1540084 - DNA, 15 bp, Homo sapiens
cactagttgtggtca

SEQ ID NO: 1540085 - DNA, 15 bp, Homo sapiens
actagttgtggtcat

SEQ ID NO: 1540086 - DNA, 15 bp, Homo sapiens
ctagttgtggtcatt

SEQ ID NO: 1540087 - DNA, 15 bp, Homo sapiens
tagttgtggtcattt

SEQ ID NO: 1540088 - DNA, 15 bp, Homo sapiens
agttgtggtcatttg

SEQ ID NO: 1540089 - DNA, 15 bp, Homo sapiens
gttgtggtcatttga

SEQ ID NO: 1540090 - DNA, 15 bp, Homo sapiens
ttgtggtcatttgat

SEQ ID NO: 1540091 - DNA, 15 bp, Homo sapiens
tgtggtcatttgatc

SEQ ID NO: 1540092 - DNA, 15 bp, Homo sapiens
gtggtcatttgatcc

SEQ ID NO: 1540093 - DNA, 15 bp, Homo sapiens
tggtcatttgatcct

SEQ ID NO: 1540094 - DNA, 15 bp, Homo sapiens
ggtcatttgatcctg

SEQ ID NO: 1540095 - DNA, 15 bp, Homo sapiens
gtcatttgatcctgg

SEQ ID NO: 1540096 - DNA, 15 bp, Homo sapiens
tcatttgatcctggc

SEQ ID NO: 1540097 - DNA, 15 bp, Homo sapiens
catttgatcctggca

SEQ ID NO: 1540098 - DNA, 15 bp, Homo sapiens
atttgatcctggcat

SEQ ID NO: 1540099 - DNA, 15 bp, Homo sapiens
tttgatcctggcatg

SEQ ID NO: 1540100 - DNA, 15 bp, Homo sapiens
ttgatcctggcatgc

SEQ ID NO: 1540101 - DNA, 15 bp, Homo sapiens
tgatcctggcatgct

SEQ ID NO: 1540102 - DNA, 15 bp, Homo sapiens
gatcctggcatgctc

SEQ ID NO: 1540103 - DNA, 15 bp, Homo sapiens
atcctggcatgctct

SEQ ID NO: 1540104 - DNA, 15 bp, Homo sapiens
tcctggcatgctctg

SEQ ID NO: 1540105 - DNA, 15 bp, Homo sapiens
cctggcatgctctgc

SEQ ID NO: 1540106 - DNA, 15 bp, Homo sapiens
ctggcatgctctgct

SEQ ID NO: 1540107 - DNA, 15 bp, Homo sapiens
tggcatgctctgctg

SEQ ID NO: 1540108 - DNA, 15 bp, Homo sapiens
ggcatgctctgctgt

SEQ ID NO: 1540109 - DNA, 15 bp, Homo sapiens
gcatgctctgctgtc

SEQ ID NO: 1540110 - DNA, 15 bp, Homo sapiens
catgctctgctgtct

SEQ ID NO: 1540111 - DNA, 15 bp, Homo sapiens
atgctctgctgtctc

SEQ ID NO: 1540112 - DNA, 15 bp, Homo sapiens
tgctctgctgtctct

SEQ ID NO: 1540113 - DNA, 15 bp, Homo sapiens
gctctgctgtctctc

SEQ ID NO: 1540114 - DNA, 15 bp, Homo sapiens
ctctgctgtctctcg

SEQ ID NO: 1540115 - DNA, 15 bp, Homo sapiens
tctgctgtctctcgg

SEQ ID NO: 1540116 - DNA, 15 bp, Homo sapiens
ctgctgtctctcggc

SEQ ID NO: 1540117 - DNA, 15 bp, Homo sapiens
tgctgtctctcggct

SEQ ID NO: 1540118 - DNA, 15 bp, Homo sapiens
gctgtctctcggctc

SEQ ID NO: 1540119 - DNA, 15 bp, Homo sapiens
ctgtctctcggctct

SEQ ID NO: 1540120 - DNA, 15 bp, Homo sapiens
tgtctctcggctctc

SEQ ID NO: 1540121 - DNA, 15 bp, Homo sapiens
gtctctcggctctcc

SEQ ID NO: 1540122 - DNA, 15 bp, Homo sapiens
tctctcggctctccc

SEQ ID NO: 1540123 - DNA, 15 bp, Homo sapiens
ctctcggctctcccc

SEQ ID NO: 1540124 - DNA, 15 bp, Homo sapiens
tctcggctctcccct

SEQ ID NO: 1540125 - DNA, 15 bp, Homo sapiens
ctcggctctcccctt

SEQ ID NO: 1540126 - DNA, 15 bp, Homo sapiens
tcggctctccccttg

SEQ ID NO: 1540127 - DNA, 15 bp, Homo sapiens
cggctctccccttgc

SEQ ID NO: 1540128 - DNA, 15 bp, Homo sapiens
ggctctccccttgcc

SEQ ID NO: 1540129 - DNA, 15 bp, Homo sapiens
gctctccccttgcct

SEQ ID NO: 1540130 - DNA, 15 bp, Homo sapiens
ctctccccttgcctc

SEQ ID NO: 1540131 - DNA, 15 bp, Homo sapiens
tctccccttgcctct

SEQ ID NO: 1540132 - DNA, 15 bp, Homo sapiens
ctccccttgcctctt

SEQ ID NO: 1540133 - DNA, 15 bp, Homo sapiens
tccccttgcctcttt

SEQ ID NO: 1540134 - DNA, 15 bp, Homo sapiens
ccccttgcctctttc

SEQ ID NO: 1540135 - DNA, 15 bp, Homo sapiens
cccttgcctctttcc

SEQ ID NO: 1540136 - DNA, 15 bp, Homo sapiens
ccttgcctctttccc

SEQ ID NO: 1540137 - DNA, 15 bp, Homo sapiens
cttgcctctttccct

SEQ ID NO: 1540138 - DNA, 15 bp, Homo sapiens
ttgcctctttccctg

SEQ ID NO: 1540139 - DNA, 15 bp, Homo sapiens
tgcctctttccctga

SEQ ID NO: 1540140 - DNA, 15 bp, Homo sapiens
gcctctttccctgat

SEQ ID NO: 1540141 - DNA, 15 bp, Homo sapiens
cctctttccctgatg

SEQ ID NO: 1540142 - DNA, 15 bp, Homo sapiens
ctctttccctgatgt

SEQ ID NO: 1540143 - DNA, 15 bp, Homo sapiens
tctttccctgatgtc

SEQ ID NO: 1540144 - DNA, 15 bp, Homo sapiens
ctttccctgatgtcc

SEQ ID NO: 1540145 - DNA, 15 bp, Homo sapiens
tttccctgatgtcct

SEQ ID NO: 1540146 - DNA, 15 bp, Homo sapiens
ttccctgatgtcctg

SEQ ID NO: 1540147 - DNA, 15 bp, Homo sapiens
tccctgatgtcctgg

SEQ ID NO: 1540148 - DNA, 15 bp, Homo sapiens
ccctgatgtcctggc

SEQ ID NO: 1540149 - DNA, 15 bp, Homo sapiens
cctgatgtcctggcc

SEQ ID NO: 1540150 - DNA, 15 bp, Homo sapiens
ctgatgtcctggcca

SEQ ID NO: 1540151 - DNA, 15 bp, Homo sapiens
tgatgtcctggccat

SEQ ID NO: 1540152 - DNA, 15 bp, Homo sapiens
gatgtcctggccatc

SEQ ID NO: 1540153 - DNA, 15 bp, Homo sapiens
atgtcctggccatca

SEQ ID NO: 1540154 - DNA, 15 bp, Homo sapiens
tgtcctggccatcag

SEQ ID NO: 1540155 - DNA, 15 bp, Homo sapiens
gtcctggccatcagc

SEQ ID NO: 1540156 - DNA, 15 bp, Homo sapiens
tcctggccatcagcc

SEQ ID NO: 1540157 - DNA, 15 bp, Homo sapiens
ctggccatcagccac

SEQ ID NO: 1540158 - DNA, 15 bp, Homo sapiens
tggccatcagccact

SEQ ID NO: 1540159 - DNA, 15 bp, Homo sapiens
ggccatcagccactg

SEQ ID NO: 1540160 - DNA, 15 bp, Homo sapiens
gccatcagccactgc

SEQ ID NO: 1540161 - DNA, 15 bp, Homo sapiens
ccatcagccactgcc

SEQ ID NO: 1540162 - DNA, 15 bp, Homo sapiens
catcagccactgcct

SEQ ID NO: 1540163 - DNA, 15 bp, Homo sapiens
atcagccactgccta

SEQ ID NO: 1540164 - DNA, 15 bp, Homo sapiens
tcagccactgcctaa

SEQ ID NO: 1540165 - DNA, 15 bp, Homo sapiens
cagccactgcctaac

SEQ ID NO: 1540166 - DNA, 15 bp, Homo sapiens
agccactgcctaaca

SEQ ID NO: 1540167 - DNA, 15 bp, Homo sapiens
gccactgcctaacac

SEQ ID NO: 1540168 - DNA, 15 bp, Homo sapiens
ccactgcctaacacc

SEQ ID NO: 1540169 - DNA, 15 bp, Homo sapiens
cactgcctaacaccc

SEQ ID NO: 1540170 - DNA, 15 bp, Homo sapiens
actgcctaacaccct

SEQ ID NO: 1540171 - DNA, 15 bp, Homo sapiens
ctgcctaacaccctc

SEQ ID NO: 1540172 - DNA, 15 bp, Homo sapiens
tgcctaacaccctcc

SEQ ID NO: 1540173 - DNA, 15 bp, Homo sapiens
gcctaacaccctccc

SEQ ID NO: 1540174 - DNA, 15 bp, Homo sapiens
cctaacaccctccca

SEQ ID NO: 1540175 - DNA, 15 bp, Homo sapiens
ctaacaccctcccac

SEQ ID NO: 1540176 - DNA, 15 bp, Homo sapiens
taacaccctcccact

SEQ ID NO: 1540177 - DNA, 15 bp, Homo sapiens
aacaccctcccactc

SEQ ID NO: 1540178 - DNA, 15 bp, Homo sapiens
acaccctcccactca

SEQ ID NO: 1540179 - DNA, 15 bp, Homo sapiens
caccctcccactcac

SEQ ID NO: 1540180 - DNA, 15 bp, Homo sapiens
accctcccactcacc

SEQ ID NO: 1540181 - DNA, 15 bp, Homo sapiens
ccctcccactcacca

SEQ ID NO: 1540182 - DNA, 15 bp, Homo sapiens
cctcccactcaccag

SEQ ID NO: 1540183 - DNA, 15 bp, Homo sapiens
ctcccactcaccagg

SEQ ID NO: 1540184 - DNA, 15 bp, Homo sapiens
tcccactcaccaggc

SEQ ID NO: 1540185 - DNA, 15 bp, Homo sapiens
cccactcaccaggcc

SEQ ID NO: 1540186 - DNA, 15 bp, Homo sapiens
ccactcaccaggccc

SEQ ID NO: 1540187 - DNA, 15 bp, Homo sapiens
cactcaccaggccct

SEQ ID NO: 1540188 - DNA, 15 bp, Homo sapiens
actcaccaggccctt

SEQ ID NO: 1540189 - DNA, 15 bp, Homo sapiens
ctcaccaggccctta

SEQ ID NO: 1540190 - DNA, 15 bp, Homo sapiens
tcaccaggcccttag

SEQ ID NO: 1540191 - DNA, 15 bp, Homo sapiens
caccaggcccttagc

SEQ ID NO: 1540192 - DNA, 15 bp, Homo sapiens
accaggcccttagcc

SEQ ID NO: 1540193 - DNA, 15 bp, Homo sapiens
ccaggcccttagcct

SEQ ID NO: 1540194 - DNA, 15 bp, Homo sapiens
caggcccttagcctg

SEQ ID NO: 1540195 - DNA, 15 bp, Homo sapiens
aggcccttagcctgc

SEQ ID NO: 1540196 - DNA, 15 bp, Homo sapiens
ggcccttagcctgcc

SEQ ID NO: 1540197 - DNA, 15 bp, Homo sapiens
gcccttagcctgccc

SEQ ID NO: 1540198 - DNA, 15 bp, Homo sapiens
cccttagcctgcccc

SEQ ID NO: 1540199 - DNA, 15 bp, Homo sapiens
ccttagcctgcccct

SEQ ID NO: 1540200 - DNA, 15 bp, Homo sapiens
cttagcctgcccctt

SEQ ID NO: 1540201 - DNA, 15 bp, Homo sapiens
ttagcctgcccctta

SEQ ID NO: 1540202 - DNA, 15 bp, Homo sapiens
tagcctgccccttag

SEQ ID NO: 1540203 - DNA, 15 bp, Homo sapiens
agcctgccccttagc

SEQ ID NO: 1540204 - DNA, 15 bp, Homo sapiens
gcctgccccttagca

SEQ ID NO: 1540205 - DNA, 15 bp, Homo sapiens
cctgccccttagcac

SEQ ID NO: 1540206 - DNA, 15 bp, Homo sapiens
ctgccccttagcaca

SEQ ID NO: 1540207 - DNA, 15 bp, Homo sapiens
tgccccttagcacaa

SEQ ID NO: 1540208 - DNA, 15 bp, Homo sapiens
gccccttagcacaag

SEQ ID NO: 1540209 - DNA, 15 bp, Homo sapiens
ccccttagcacaaga

SEQ ID NO: 1540210 - DNA, 15 bp, Homo sapiens
cccttagcacaagag

SEQ ID NO: 1540211 - DNA, 15 bp, Homo sapiens
ccttagcacaagagc

SEQ ID NO: 1540212 - DNA, 15 bp, Homo sapiens
cttagcacaagagca

SEQ ID NO: 1540213 - DNA, 15 bp, Homo sapiens
ttagcacaagagcac

SEQ ID NO: 1540214 - DNA, 15 bp, Homo sapiens
tagcacaagagcaca

SEQ ID NO: 1540215 - DNA, 15 bp, Homo sapiens
agcacaagagcacag

SEQ ID NO: 1540216 - DNA, 15 bp, Homo sapiens
gcacaagagcacagc

SEQ ID NO: 1540217 - DNA, 15 bp, Homo sapiens
cacaagagcacagcc

SEQ ID NO: 1540218 - DNA, 15 bp, Homo sapiens
acaagagcacagccg

SEQ ID NO: 1540219 - DNA, 15 bp, Homo sapiens
caagagcacagccgg

SEQ ID NO: 1540220 - DNA, 15 bp, Homo sapiens
aagagcacagccggt

SEQ ID NO: 1540221 - DNA, 15 bp, Homo sapiens
agagcacagccggtc

SEQ ID NO: 1540222 - DNA, 15 bp, Homo sapiens
gagcacagccggtct

SEQ ID NO: 1540223 - DNA, 15 bp, Homo sapiens
agcacagccggtctc

SEQ ID NO: 1540224 - DNA, 15 bp, Homo sapiens
gcacagccggtctca

SEQ ID NO: 1540225 - DNA, 15 bp, Homo sapiens
cacagccggtctcaa

SEQ ID NO: 1540226 - DNA, 15 bp, Homo sapiens
acagccggtctcaag

SEQ ID NO: 1540227 - DNA, 15 bp, Homo sapiens
cagccggtctcaagt

SEQ ID NO: 1540228 - DNA, 15 bp, Homo sapiens
agccggtctcaagtc

SEQ ID NO: 1540229 - DNA, 15 bp, Homo sapiens
gccggtctcaagtct

SEQ ID NO: 1540230 - DNA, 15 bp, Homo sapiens
ccggtctcaagtcta

SEQ ID NO: 1540231 - DNA, 15 bp, Homo sapiens
cggtctcaagtctac

SEQ ID NO: 1540232 - DNA, 15 bp, Homo sapiens
ggtctcaagtctacc

SEQ ID NO: 1540233 - DNA, 15 bp, Homo sapiens
gtctcaagtctaccc

SEQ ID NO: 1540234 - DNA, 15 bp, Homo sapiens
tctcaagtctaccct

SEQ ID NO: 1540235 - DNA, 15 bp, Homo sapiens
ctcaagtctaccctg

SEQ ID NO: 1540236 - DNA, 15 bp, Homo sapiens
tcaagtctaccctgc

SEQ ID NO: 1540237 - DNA, 15 bp, Homo sapiens
caagtctaccctgct

SEQ ID NO: 1540238 - DNA, 15 bp, Homo sapiens
aagtctaccctgctg

SEQ ID NO: 1540239 - DNA, 15 bp, Homo sapiens
agtctaccctgctgt

SEQ ID NO: 1540240 - DNA, 15 bp, Homo sapiens
gtctaccctgctgta

SEQ ID NO: 1540241 - DNA, 15 bp, Homo sapiens
tctaccctgctgtaa

SEQ ID NO: 1540242 - DNA, 15 bp, Homo sapiens
ctaccctgctgtaag

SEQ ID NO: 1540243 - DNA, 15 bp, Homo sapiens
taccctgctgtaagc

SEQ ID NO: 1540244 - DNA, 15 bp, Homo sapiens
accctgctgtaagca

SEQ ID NO: 1540245 - DNA, 15 bp, Homo sapiens
ccctgctgtaagcaa

SEQ ID NO: 1540246 - DNA, 15 bp, Homo sapiens
cctgctgtaagcaaa

SEQ ID NO: 1540247 - DNA, 15 bp, Homo sapiens
ctgctgtaagcaaac

SEQ ID NO: 1540248 - DNA, 15 bp, Homo sapiens
tgctgtaagcaaaca

SEQ ID NO: 1540249 - DNA, 15 bp, Homo sapiens
gctgtaagcaaacac

SEQ ID NO: 1540250 - DNA, 15 bp, Homo sapiens
ctgtaagcaaacact

SEQ ID NO: 1540251 - DNA, 15 bp, Homo sapiens
tgtaagcaaacactt

SEQ ID NO: 1540252 - DNA, 15 bp, Homo sapiens
gtaagcaaacacttg

SEQ ID NO: 1540253 - DNA, 15 bp, Homo sapiens
taagcaaacacttgc

SEQ ID NO: 1540254 - DNA, 15 bp, Homo sapiens
aagcaaacacttgca

SEQ ID NO: 1540255 - DNA, 15 bp, Homo sapiens
agcaaacacttgcaa

SEQ ID NO: 1540256 - DNA, 15 bp, Homo sapiens
gcaaacacttgcaac

SEQ ID NO: 1540257 - DNA, 15 bp, Homo sapiens
caaacacttgcaaca

SEQ ID NO: 1540258 - DNA, 15 bp, Homo sapiens
aaacacttgcaacat

SEQ ID NO: 1540259 - DNA, 15 bp, Homo sapiens
aacacttgcaacatc

SEQ ID NO: 1540260 - DNA, 15 bp, Homo sapiens
acacttgcaacatca

SEQ ID NO: 1540261 - DNA, 15 bp, Homo sapiens
cacttgcaacatcat

SEQ ID NO: 1540262 - DNA, 15 bp, Homo sapiens
acttgcaacatcatg

SEQ ID NO: 1540263 - DNA, 15 bp, Homo sapiens
cttgcaacatcatgc

SEQ ID NO: 1540264 - DNA, 15 bp, Homo sapiens
ttgcaacatcatgct

SEQ ID NO: 1540265 - DNA, 15 bp, Homo sapiens
tgcaacatcatgctg

SEQ ID NO: 1540266 - DNA, 15 bp, Homo sapiens
gcaacatcatgctga

SEQ ID NO: 1540267 - DNA, 15 bp, Homo sapiens
caacatcatgctgac

SEQ ID NO: 1540268 - DNA, 15 bp, Homo sapiens
aacatcatgctgacc

SEQ ID NO: 1540269 - DNA, 15 bp, Homo sapiens
acatcatgctgacct

SEQ ID NO: 1540270 - DNA, 15 bp, Homo sapiens
catcatgctgacctc

SEQ ID NO: 1540271 - DNA, 15 bp, Homo sapiens
atcatgctgacctcc

SEQ ID NO: 1540272 - DNA, 15 bp, Homo sapiens
tcatgctgacctcca

SEQ ID NO: 1540273 - DNA, 15 bp, Homo sapiens
catgctgacctccag

SEQ ID NO: 1540274 - DNA, 15 bp, Homo sapiens
atgctgacctccagg

SEQ ID NO: 1540275 - DNA, 15 bp, Homo sapiens
tgctgacctccaggc

SEQ ID NO: 1540276 - DNA, 15 bp, Homo sapiens
gctgacctccaggcc

SEQ ID NO: 1540277 - DNA, 15 bp, Homo sapiens
ctgacctccaggccc

SEQ ID NO: 1540278 - DNA, 15 bp, Homo sapiens
tgacctccaggccct

SEQ ID NO: 1540279 - DNA, 15 bp, Homo sapiens
gacctccaggccctg

SEQ ID NO: 1540280 - DNA, 15 bp, Homo sapiens
acctccaggccctgt

SEQ ID NO: 1540281 - DNA, 15 bp, Homo sapiens
cctccaggccctgtt

SEQ ID NO: 1540282 - DNA, 15 bp, Homo sapiens
ctccaggccctgttg

SEQ ID NO: 1540283 - DNA, 15 bp, Homo sapiens
tccaggccctgttgc

SEQ ID NO: 1540284 - DNA, 15 bp, Homo sapiens
ccaggccctgttgca

SEQ ID NO: 1540285 - DNA, 15 bp, Homo sapiens
caggccctgttgcat

SEQ ID NO: 1540286 - DNA, 15 bp, Homo sapiens
aggccctgttgcatc

SEQ ID NO: 1540287 - DNA, 15 bp, Homo sapiens
ggccctgttgcatca

SEQ ID NO: 1540288 - DNA, 15 bp, Homo sapiens
gccctgttgcatcag

SEQ ID NO: 1540289 - DNA, 15 bp, Homo sapiens
ccctgttgcatcagc

SEQ ID NO: 1540290 - DNA, 15 bp, Homo sapiens
cctgttgcatcagcg

SEQ ID NO: 1540291 - DNA, 15 bp, Homo sapiens
ctgttgcatcagcgt

SEQ ID NO: 1540292 - DNA, 15 bp, Homo sapiens
tgttgcatcagcgtg

SEQ ID NO: 1540293 - DNA, 15 bp, Homo sapiens
gttgcatcagcgtgc

SEQ ID NO: 1540294 - DNA, 15 bp, Homo sapiens
ttgcatcagcgtgcc

SEQ ID NO: 1540295 - DNA, 15 bp, Homo sapiens
tgcatcagcgtgccc

SEQ ID NO: 1540296 - DNA, 15 bp, Homo sapiens
gcatcagcgtgccca

SEQ ID NO: 1540297 - DNA, 15 bp, Homo sapiens
catcagcgtgcccac

SEQ ID NO: 1540298 - DNA, 15 bp, Homo sapiens
atcagcgtgcccaca

SEQ ID NO: 1540299 - DNA, 15 bp, Homo sapiens
tcagcgtgcccacac

SEQ ID NO: 1540300 - DNA, 15 bp, Homo sapiens
cagcgtgcccacact

SEQ ID NO: 1540301 - DNA, 15 bp, Homo sapiens
agcgtgcccacactt

SEQ ID NO: 1540302 - DNA, 15 bp, Homo sapiens
gcgtgcccacacttg

SEQ ID NO: 1540303 - DNA, 15 bp, Homo sapiens
cgtgcccacacttgg

SEQ ID NO: 1540304 - DNA, 15 bp, Homo sapiens
gtgcccacacttggt

SEQ ID NO: 1540305 - DNA, 15 bp, Homo sapiens
tgcccacacttggtg

SEQ ID NO: 1540306 - DNA, 15 bp, Homo sapiens
gcccacacttggtgc

SEQ ID NO: 1540307 - DNA, 15 bp, Homo sapiens
cccacacttggtgcc

SEQ ID NO: 1540308 - DNA, 15 bp, Homo sapiens
ccacacttggtgccc

SEQ ID NO: 1540309 - DNA, 15 bp, Homo sapiens
cacacttggtgccca

SEQ ID NO: 1540310 - DNA, 15 bp, Homo sapiens
acacttggtgcccag

SEQ ID NO: 1540311 - DNA, 15 bp, Homo sapiens
cacttggtgcccagc

SEQ ID NO: 1540312 - DNA, 15 bp, Homo sapiens
acttggtgcccagct

SEQ ID NO: 1540313 - DNA, 15 bp, Homo sapiens
cttggtgcccagctg

SEQ ID NO: 1540314 - DNA, 15 bp, Homo sapiens
ttggtgcccagctgg

SEQ ID NO: 1540315 - DNA, 15 bp, Homo sapiens
tggtgcccagctggt

SEQ ID NO: 1540316 - DNA, 15 bp, Homo sapiens
ggtgcccagctggta

SEQ ID NO: 1540317 - DNA, 15 bp, Homo sapiens
gtgcccagctggtac

SEQ ID NO: 1540318 - DNA, 15 bp, Homo sapiens
tgcccagctggtact

SEQ ID NO: 1540319 - DNA, 15 bp, Homo sapiens
gcccagctggtactg

SEQ ID NO: 1540320 - DNA, 15 bp, Homo sapiens
cccagctggtactga

SEQ ID NO: 1540321 - DNA, 15 bp, Homo sapiens
ccagctggtactgag

SEQ ID NO: 1540322 - DNA, 15 bp, Homo sapiens
cagctggtactgagg

SEQ ID NO: 1540323 - DNA, 15 bp, Homo sapiens
agctggtactgaggg

SEQ ID NO: 1540324 - DNA, 15 bp, Homo sapiens
gctggtactgagggt

SEQ ID NO: 1540325 - DNA, 15 bp, Homo sapiens
ctggtactgagggta

SEQ ID NO: 1540326 - DNA, 15 bp, Homo sapiens
tggtactgagggtat

SEQ ID NO: 1540327 - DNA, 15 bp, Homo sapiens
ggtactgagggtatc

SEQ ID NO: 1540328 - DNA, 15 bp, Homo sapiens
gtactgagggtatca

SEQ ID NO: 1540329 - DNA, 15 bp, Homo sapiens
tactgagggtatcag

SEQ ID NO: 1540330 - DNA, 15 bp, Homo sapiens
actgagggtatcagg

SEQ ID NO: 1540331 - DNA, 15 bp, Homo sapiens
ctgagggtatcaggg

SEQ ID NO: 1540332 - DNA, 15 bp, Homo sapiens
tgagggtatcaggga

SEQ ID NO: 1540333 - DNA, 15 bp, Homo sapiens
gagggtatcagggaa

SEQ ID NO: 1540334 - DNA, 15 bp, Homo sapiens
agggtatcagggaac

SEQ ID NO: 1540335 - DNA, 15 bp, Homo sapiens
gggtatcagggaaca

SEQ ID NO: 1540336 - DNA, 15 bp, Homo sapiens
ggtatcagggaacag

SEQ ID NO: 1540337 - DNA, 15 bp, Homo sapiens
gtatcagggaacagg

SEQ ID NO: 1540338 - DNA, 15 bp, Homo sapiens
tatcagggaacaggc

SEQ ID NO: 1540339 - DNA, 15 bp, Homo sapiens
atcagggaacaggcc

SEQ ID NO: 1540340 - DNA, 15 bp, Homo sapiens
tcagggaacaggcca

SEQ ID NO: 1540341 - DNA, 15 bp, Homo sapiens
cagggaacaggccag

SEQ ID NO: 1540342 - DNA, 15 bp, Homo sapiens
agggaacaggccagt

SEQ ID NO: 1540343 - DNA, 15 bp, Homo sapiens
gggaacaggccagtg

SEQ ID NO: 1540344 - DNA, 15 bp, Homo sapiens
ggaacaggccagtgg

SEQ ID NO: 1540345 - DNA, 15 bp, Homo sapiens
gaacaggccagtggt

SEQ ID NO: 1540346 - DNA, 15 bp, Homo sapiens
aacaggccagtggtg

SEQ ID NO: 1540347 - DNA, 15 bp, Homo sapiens
acaggccagtggtgg

SEQ ID NO: 1540348 - DNA, 15 bp, Homo sapiens
caggccagtggtgga

SEQ ID NO: 1540349 - DNA, 15 bp, Homo sapiens
aggccagtggtggaa

SEQ ID NO: 1540350 - DNA, 15 bp, Homo sapiens
ggccagtggtggaag

SEQ ID NO: 1540351 - DNA, 15 bp, Homo sapiens
gccagtggtggaagg

SEQ ID NO: 1540352 - DNA, 15 bp, Homo sapiens
ccagtggtggaaggg

SEQ ID NO: 1540353 - DNA, 15 bp, Homo sapiens
cagtggtggaagggc

SEQ ID NO: 1540354 - DNA, 15 bp, Homo sapiens
agtggtggaagggcg

SEQ ID NO: 1540355 - DNA, 15 bp, Homo sapiens
gtggtggaagggcgg

SEQ ID NO: 1540356 - DNA, 15 bp, Homo sapiens
tggtggaagggcgga

SEQ ID NO: 1540357 - DNA, 15 bp, Homo sapiens
ggtggaagggcggac

SEQ ID NO: 1540358 - DNA, 15 bp, Homo sapiens
gtggaagggcggaca

SEQ ID NO: 1540359 - DNA, 15 bp, Homo sapiens
tggaagggcggacac

SEQ ID NO: 1540360 - DNA, 15 bp, Homo sapiens
ggaagggcggacact

SEQ ID NO: 1540361 - DNA, 15 bp, Homo sapiens
gaagggcggacactt

SEQ ID NO: 1540362 - DNA, 15 bp, Homo sapiens
aagggcggacacttt

SEQ ID NO: 1540363 - DNA, 15 bp, Homo sapiens
agggcggacactttg

SEQ ID NO: 1540364 - DNA, 15 bp, Homo sapiens
gggcggacactttgg

SEQ ID NO: 1540365 - DNA, 15 bp, Homo sapiens
ggcggacactttggg

SEQ ID NO: 1540366 - DNA, 15 bp, Homo sapiens
gcggacactttgggt

SEQ ID NO: 1540367 - DNA, 15 bp, Homo sapiens
cggacactttgggtt

SEQ ID NO: 1540368 - DNA, 15 bp, Homo sapiens
ggacactttgggttc

SEQ ID NO: 1540369 - DNA, 15 bp, Homo sapiens
gacactttgggttcc

SEQ ID NO: 1540370 - DNA, 15 bp, Homo sapiens
acactttgggttccc

SEQ ID NO: 1540371 - DNA, 15 bp, Homo sapiens
cactttgggttccct

SEQ ID NO: 1540372 - DNA, 15 bp, Homo sapiens
actttgggttccctg

SEQ ID NO: 1540373 - DNA, 15 bp, Homo sapiens
ctttgggttccctgg

SEQ ID NO: 1540374 - DNA, 15 bp, Homo sapiens
tttgggttccctggt

SEQ ID NO: 1540375 - DNA, 15 bp, Homo sapiens
ttgggttccctggtt

SEQ ID NO: 1540376 - DNA, 15 bp, Homo sapiens
tgggttccctggttt

SEQ ID NO: 1540377 - DNA, 15 bp, Homo sapiens
gggttccctggtttc

SEQ ID NO: 1540378 - DNA, 15 bp, Homo sapiens
ggttccctggtttcc

SEQ ID NO: 1540379 - DNA, 15 bp, Homo sapiens
gttccctggtttcct

SEQ ID NO: 1540380 - DNA, 15 bp, Homo sapiens
ttccctggtttcctg

SEQ ID NO: 1540381 - DNA, 15 bp, Homo sapiens
tccctggtttcctgg

SEQ ID NO: 1540382 - DNA, 15 bp, Homo sapiens
ccctggtttcctggc

SEQ ID NO: 1540383 - DNA, 15 bp, Homo sapiens
cctggtttcctggct

SEQ ID NO: 1540384 - DNA, 15 bp, Homo sapiens
ctggtttcctggctc

SEQ ID NO: 1540385 - DNA, 15 bp, Homo sapiens
tggtttcctggctcc

SEQ ID NO: 1540386 - DNA, 15 bp, Homo sapiens
ggtttcctggctccc

SEQ ID NO: 1540387 - DNA, 15 bp, Homo sapiens
gtttcctggctccca

SEQ ID NO: 1540388 - DNA, 15 bp, Homo sapiens
tttcctggctcccaa

SEQ ID NO: 1540389 - DNA, 15 bp, Homo sapiens
ttcctggctcccaat

SEQ ID NO: 1540390 - DNA, 15 bp, Homo sapiens
tcctggctcccaata

SEQ ID NO: 1540391 - DNA, 15 bp, Homo sapiens
cctggctcccaatat

SEQ ID NO: 1540392 - DNA, 15 bp, Homo sapiens
ctggctcccaatatc

SEQ ID NO: 1540393 - DNA, 15 bp, Homo sapiens
tggctcccaatatct

SEQ ID NO: 1540394 - DNA, 15 bp, Homo sapiens
ggctcccaatatctt

SEQ ID NO: 1540395 - DNA, 15 bp, Homo sapiens
gctcccaatatcttt

SEQ ID NO: 1540396 - DNA, 15 bp, Homo sapiens
ctcccaatatctttc

SEQ ID NO: 1540397 - DNA, 15 bp, Homo sapiens
tcccaatatctttcc

SEQ ID NO: 1540398 - DNA, 15 bp, Homo sapiens
cccaatatctttccc

SEQ ID NO: 1540399 - DNA, 15 bp, Homo sapiens
ccaatatctttccca

SEQ ID NO: 1540400 - DNA, 15 bp, Homo sapiens
caatatctttcccaa

SEQ ID NO: 1540401 - DNA, 15 bp, Homo sapiens
aatatctttcccaat

SEQ ID NO: 1540402 - DNA, 15 bp, Homo sapiens
atatctttcccaatg

SEQ ID NO: 1540403 - DNA, 15 bp, Homo sapiens
tatctttcccaatgg

SEQ ID NO: 1540404 - DNA, 15 bp, Homo sapiens
atctttcccaatggc

SEQ ID NO: 1540405 - DNA, 15 bp, Homo sapiens
tctttcccaatggca

SEQ ID NO: 1540406 - DNA, 15 bp, Homo sapiens
ctttcccaatggcat

SEQ ID NO: 1540407 - DNA, 15 bp, Homo sapiens
tttcccaatggcata

SEQ ID NO: 1540408 - DNA, 15 bp, Homo sapiens
ttcccaatggcatat

SEQ ID NO: 1540409 - DNA, 15 bp, Homo sapiens
tcccaatggcatatg

SEQ ID NO: 1540410 - DNA, 15 bp, Homo sapiens
cccaatggcatatgg

SEQ ID NO: 1540411 - DNA, 15 bp, Homo sapiens
ccaatggcatatggg

SEQ ID NO: 1540412 - DNA, 15 bp, Homo sapiens
caatggcatatgggg

SEQ ID NO: 1540413 - DNA, 15 bp, Homo sapiens
aatggcatatggggt

SEQ ID NO: 1540414 - DNA, 15 bp, Homo sapiens
atggcatatggggtc

SEQ ID NO: 1540415 - DNA, 15 bp, Homo sapiens
tggcatatggggtct

SEQ ID NO: 1540416 - DNA, 15 bp, Homo sapiens
ggcatatggggtcta

SEQ ID NO: 1540417 - DNA, 15 bp, Homo sapiens
gcatatggggtctag

SEQ ID NO: 1540418 - DNA, 15 bp, Homo sapiens
catatggggtctagc

SEQ ID NO: 1540419 - DNA, 15 bp, Homo sapiens
atatggggtctagca

SEQ ID NO: 1540420 - DNA, 15 bp, Homo sapiens
tatggggtctagcag

SEQ ID NO: 1540421 - DNA, 15 bp, Homo sapiens
atggggtctagcagc

SEQ ID NO: 1540422 - DNA, 15 bp, Homo sapiens
tggggtctagcagct

SEQ ID NO: 1540423 - DNA, 15 bp, Homo sapiens
ggggtctagcagctt

SEQ ID NO: 1540424 - DNA, 15 bp, Homo sapiens
gggtctagcagcttg

SEQ ID NO: 1540425 - DNA, 15 bp, Homo sapiens
ggtctagcagcttgg

SEQ ID NO: 1540426 - DNA, 15 bp, Homo sapiens
gtctagcagcttggc

SEQ ID NO: 1540427 - DNA, 15 bp, Homo sapiens
tctagcagcttggct

SEQ ID NO: 1540428 - DNA, 15 bp, Homo sapiens
ctagcagcttggctc

SEQ ID NO: 1540429 - DNA, 15 bp, Homo sapiens
tagcagcttggctca

SEQ ID NO: 1540430 - DNA, 15 bp, Homo sapiens
agcagcttggctcat

SEQ ID NO: 1540431 - DNA, 15 bp, Homo sapiens
gcagcttggctcatt

SEQ ID NO: 1540432 - DNA, 15 bp, Homo sapiens
cagcttggctcattt

SEQ ID NO: 1540433 - DNA, 15 bp, Homo sapiens
agcttggctcattta

SEQ ID NO: 1540434 - DNA, 15 bp, Homo sapiens
gcttggctcatttaa

SEQ ID NO: 1540435 - DNA, 15 bp, Homo sapiens
cttggctcatttaac

SEQ ID NO: 1540436 - DNA, 15 bp, Homo sapiens
ttggctcatttaact

SEQ ID NO: 1540437 - DNA, 15 bp, Homo sapiens
tggctcatttaactg

SEQ ID NO: 1540438 - DNA, 15 bp, Homo sapiens
ggctcatttaactgt

SEQ ID NO: 1540439 - DNA, 15 bp, Homo sapiens
gctcatttaactgtg

SEQ ID NO: 1540440 - DNA, 15 bp, Homo sapiens
ctcatttaactgtga

SEQ ID NO: 1540441 - DNA, 15 bp, Homo sapiens
tcatttaactgtgaa

SEQ ID NO: 1540442 - DNA, 15 bp, Homo sapiens
catttaactgtgaac

SEQ ID NO: 1540443 - DNA, 15 bp, Homo sapiens
atttaactgtgaacc

SEQ ID NO: 1540444 - DNA, 15 bp, Homo sapiens
tttaactgtgaacct

SEQ ID NO: 1540445 - DNA, 15 bp, Homo sapiens
ttaactgtgaacctc

SEQ ID NO: 1540446 - DNA, 15 bp, Homo sapiens
taactgtgaacctct

SEQ ID NO: 1540447 - DNA, 15 bp, Homo sapiens
aactgtgaacctcta

SEQ ID NO: 1540448 - DNA, 15 bp, Homo sapiens
actgtgaacctctac

SEQ ID NO: 1540449 - DNA, 15 bp, Homo sapiens
ctgtgaacctctacc

SEQ ID NO: 1540450 - DNA, 15 bp, Homo sapiens
tgtgaacctctaccc

SEQ ID NO: 1540451 - DNA, 15 bp, Homo sapiens
gtgaacctctaccct

SEQ ID NO: 1540452 - DNA, 15 bp, Homo sapiens
tgaacctctaccctt

SEQ ID NO: 1540453 - DNA, 15 bp, Homo sapiens
gaacctctacccttt

SEQ ID NO: 1540454 - DNA, 15 bp, Homo sapiens
aacctctacccttta

SEQ ID NO: 1540455 - DNA, 15 bp, Homo sapiens
acctctaccctttag

SEQ ID NO: 1540456 - DNA, 15 bp, Homo sapiens
cctctaccctttaga

SEQ ID NO: 1540457 - DNA, 15 bp, Homo sapiens
ctctaccctttagaa

SEQ ID NO: 1540458 - DNA, 15 bp, Homo sapiens
tctaccctttagaat

SEQ ID NO: 1540459 - DNA, 15 bp, Homo sapiens
ctaccctttagaatc

SEQ ID NO: 1540460 - DNA, 15 bp, Homo sapiens
taccctttagaatct

SEQ ID NO: 1540461 - DNA, 15 bp, Homo sapiens
accctttagaatctg

SEQ ID NO: 1540462 - DNA, 15 bp, Homo sapiens
ccctttagaatctgg

SEQ ID NO: 1540463 - DNA, 15 bp, Homo sapiens
cctttagaatctggg

SEQ ID NO: 1540464 - DNA, 15 bp, Homo sapiens
ctttagaatctgggc

SEQ ID NO: 1540465 - DNA, 15 bp, Homo sapiens
tttagaatctgggcc

SEQ ID NO: 1540466 - DNA, 15 bp, Homo sapiens
ttagaatctgggcct

SEQ ID NO: 1540467 - DNA, 15 bp, Homo sapiens
tagaatctgggcctc

SEQ ID NO: 1540468 - DNA, 15 bp, Homo sapiens
agaatctgggcctcc

SEQ ID NO: 1540469 - DNA, 15 bp, Homo sapiens
gaatctgggcctcca

SEQ ID NO: 1540470 - DNA, 15 bp, Homo sapiens
aatctgggcctccag

SEQ ID NO: 1540471 - DNA, 15 bp, Homo sapiens
atctgggcctccagg

SEQ ID NO: 1540472 - DNA, 15 bp, Homo sapiens
tctgggcctccaggc

SEQ ID NO: 1540473 - DNA, 15 bp, Homo sapiens
ctgggcctccaggct

SEQ ID NO: 1540474 - DNA, 15 bp, Homo sapiens
tgggcctccaggctt

SEQ ID NO: 1540475 - DNA, 15 bp, Homo sapiens
gggcctccaggcttg

SEQ ID NO: 1540476 - DNA, 15 bp, Homo sapiens
ggcctccaggcttgc

SEQ ID NO: 1540477 - DNA, 15 bp, Homo sapiens
gcctccaggcttgct

SEQ ID NO: 1540478 - DNA, 15 bp, Homo sapiens
cctccaggcttgctt

SEQ ID NO: 1540479 - DNA, 15 bp, Homo sapiens
ctccaggcttgcttc

SEQ ID NO: 1540480 - DNA, 15 bp, Homo sapiens
tccaggcttgcttct

SEQ ID NO: 1540481 - DNA, 15 bp, Homo sapiens
ccaggcttgcttctg

SEQ ID NO: 1540482 - DNA, 15 bp, Homo sapiens
caggcttgcttctgt

SEQ ID NO: 1540483 - DNA, 15 bp, Homo sapiens
aggcttgcttctgtg

SEQ ID NO: 1540484 - DNA, 15 bp, Homo sapiens
ggcttgcttctgtgc

SEQ ID NO: 1540485 - DNA, 15 bp, Homo sapiens
gcttgcttctgtgca

SEQ ID NO: 1540486 - DNA, 15 bp, Homo sapiens
cttgcttctgtgcaa

SEQ ID NO: 1540487 - DNA, 15 bp, Homo sapiens
ttgcttctgtgcaaa

SEQ ID NO: 1540488 - DNA, 15 bp, Homo sapiens
tgcttctgtgcaaaa

SEQ ID NO: 1540489 - DNA, 15 bp, Homo sapiens
gcttctgtgcaaaat

SEQ ID NO: 1540490 - DNA, 15 bp, Homo sapiens
cttctgtgcaaaatg

SEQ ID NO: 1540491 - DNA, 15 bp, Homo sapiens
ttctgtgcaaaatgg

SEQ ID NO: 1540492 - DNA, 15 bp, Homo sapiens
tctgtgcaaaatggc

SEQ ID NO: 1540493 - DNA, 15 bp, Homo sapiens
ctgtgcaaaatggca

SEQ ID NO: 1540494 - DNA, 15 bp, Homo sapiens
tgtgcaaaatggcag

SEQ ID NO: 1540495 - DNA, 15 bp, Homo sapiens
gtgcaaaatggcaga

SEQ ID NO: 1540496 - DNA, 15 bp, Homo sapiens
tgcaaaatggcagat

SEQ ID NO: 1540497 - DNA, 15 bp, Homo sapiens
gcaaaatggcagata

SEQ ID NO: 1540498 - DNA, 15 bp, Homo sapiens
caaaatggcagataa

SEQ ID NO: 1540499 - DNA, 15 bp, Homo sapiens
aaaatggcagataag

SEQ ID NO: 1540500 - DNA, 15 bp, Homo sapiens
aaatggcagataagg

SEQ ID NO: 1540501 - DNA, 15 bp, Homo sapiens
aatggcagataaggc

SEQ ID NO: 1540502 - DNA, 15 bp, Homo sapiens
atggcagataaggct

SEQ ID NO: 1540503 - DNA, 15 bp, Homo sapiens
tggcagataaggctc

SEQ ID NO: 1540504 - DNA, 15 bp, Homo sapiens
ggcagataaggctca

SEQ ID NO: 1540505 - DNA, 15 bp, Homo sapiens
gcagataaggctcaa

SEQ ID NO: 1540506 - DNA, 15 bp, Homo sapiens
cagataaggctcaac

SEQ ID NO: 1540507 - DNA, 15 bp, Homo sapiens
agataaggctcaacc

SEQ ID NO: 1540508 - DNA, 15 bp, Homo sapiens
gataaggctcaacct

SEQ ID NO: 1540509 - DNA, 15 bp, Homo sapiens
ataaggctcaacctt

SEQ ID NO: 1540510 - DNA, 15 bp, Homo sapiens
taaggctcaaccttt

SEQ ID NO: 1540511 - DNA, 15 bp, Homo sapiens
aaggctcaacctttc

SEQ ID NO: 1540512 - DNA, 15 bp, Homo sapiens
aggctcaacctttct

SEQ ID NO: 1540513 - DNA, 15 bp, Homo sapiens
ggctcaacctttctt

SEQ ID NO: 1540514 - DNA, 15 bp, Homo sapiens
gctcaacctttcttt

SEQ ID NO: 1540515 - DNA, 15 bp, Homo sapiens
ctcaacctttctttt

SEQ ID NO: 1540516 - DNA, 15 bp, Homo sapiens
tcaacctttcttttt

SEQ ID NO: 1540517 - DNA, 15 bp, Homo sapiens
caacctttctttttt

SEQ ID NO: 1540518 - DNA, 15 bp, Homo sapiens
aacctttcttttttt

SEQ ID NO: 1540519 - DNA, 15 bp, Homo sapiens
acctttcttttttta

SEQ ID NO: 1540520 - DNA, 15 bp, Homo sapiens
cctttctttttttaa

SEQ ID NO: 1540521 - DNA, 15 bp, Homo sapiens
ctttctttttttaac

SEQ ID NO: 1540522 - DNA, 15 bp, Homo sapiens
ttctttttttaactt

SEQ ID NO: 1540523 - DNA, 15 bp, Homo sapiens
tctttttttaacttc

SEQ ID NO: 1540524 - DNA, 15 bp, Homo sapiens
ctttttttaacttca

SEQ ID NO: 1540525 - DNA, 15 bp, Homo sapiens
tttttttaacttcat

SEQ ID NO: 1540526 - DNA, 15 bp, Homo sapiens
ttttttaacttcatt

SEQ ID NO: 1540527 - DNA, 15 bp, Homo sapiens
tttttaacttcattg

SEQ ID NO: 1540528 - DNA, 15 bp, Homo sapiens
ttttaacttcattgt

SEQ ID NO: 1540529 - DNA, 15 bp, Homo sapiens
tttaacttcattgtt

SEQ ID NO: 1540530 - DNA, 15 bp, Homo sapiens
ttaacttcattgtta

SEQ ID NO: 1540531 - DNA, 15 bp, Homo sapiens
taacttcattgttaa

SEQ ID NO: 1540532 - DNA, 15 bp, Homo sapiens
aacttcattgttaaa

SEQ ID NO: 1540533 - DNA, 15 bp, Homo sapiens
acttcattgttaaat

SEQ ID NO: 1540534 - DNA, 15 bp, Homo sapiens
cttcattgttaaata

SEQ ID NO: 1540535 - DNA, 15 bp, Homo sapiens
ttcattgttaaatat

SEQ ID NO: 1540536 - DNA, 15 bp, Homo sapiens
tcattgttaaatatt

SEQ ID NO: 1540537 - DNA, 15 bp, Homo sapiens
cattgttaaatatta

SEQ ID NO: 1540538 - DNA, 15 bp, Homo sapiens
attgttaaatattac

SEQ ID NO: 1540539 - DNA, 15 bp, Homo sapiens
ttgttaaatattact

SEQ ID NO: 1540540 - DNA, 15 bp, Homo sapiens
tgttaaatattactc

SEQ ID NO: 1540541 - DNA, 15 bp, Homo sapiens
gttaaatattactcc

SEQ ID NO: 1540542 - DNA, 15 bp, Homo sapiens
ttaaatattactcca

SEQ ID NO: 1540543 - DNA, 15 bp, Homo sapiens
taaatattactccat

SEQ ID NO: 1540544 - DNA, 15 bp, Homo sapiens
aaatattactccatt

SEQ ID NO: 1540545 - DNA, 15 bp, Homo sapiens
aatattactccatta

SEQ ID NO: 1540546 - DNA, 15 bp, Homo sapiens
atattactccattaa

SEQ ID NO: 1540547 - DNA, 15 bp, Homo sapiens
tattactccattaat

SEQ ID NO: 1540548 - DNA, 15 bp, Homo sapiens
attactccattaata

SEQ ID NO: 1540549 - DNA, 15 bp, Homo sapiens
ttactccattaatac

SEQ ID NO: 1540550 - DNA, 15 bp, Homo sapiens
tactccattaatacc

SEQ ID NO: 1540551 - DNA, 15 bp, Homo sapiens
actccattaataccc

SEQ ID NO: 1540552 - DNA, 15 bp, Homo sapiens
ctccattaataccca

SEQ ID NO: 1540553 - DNA, 15 bp, Homo sapiens
tccattaatacccat

SEQ ID NO: 1540554 - DNA, 15 bp, Homo sapiens
ccattaatacccatt

SEQ ID NO: 1540555 - DNA, 15 bp, Homo sapiens
cattaatacccattt

SEQ ID NO: 1540556 - DNA, 15 bp, Homo sapiens
attaatacccattta

SEQ ID NO: 1540557 - DNA, 15 bp, Homo sapiens
ttaatacccatttac

SEQ ID NO: 1540558 - DNA, 15 bp, Homo sapiens
taatacccatttact

SEQ ID NO: 1540559 - DNA, 15 bp, Homo sapiens
aatacccatttactg

SEQ ID NO: 1540560 - DNA, 15 bp, Homo sapiens
atacccatttactgc

SEQ ID NO: 1540561 - DNA, 15 bp, Homo sapiens
tacccatttactgca

SEQ ID NO: 1540562 - DNA, 15 bp, Homo sapiens
acccatttactgcag

SEQ ID NO: 1540563 - DNA, 15 bp, Homo sapiens
cccatttactgcaga

SEQ ID NO: 1540564 - DNA, 15 bp, Homo sapiens
ccatttactgcagaa

SEQ ID NO: 1540565 - DNA, 15 bp, Homo sapiens
catttactgcagaaa

SEQ ID NO: 1540566 - DNA, 15 bp, Homo sapiens
atttactgcagaaaa

SEQ ID NO: 1540567 - DNA, 15 bp, Homo sapiens
tttactgcagaaaag

SEQ ID NO: 1540568 - DNA, 15 bp, Homo sapiens
ttactgcagaaaagg

SEQ ID NO: 1540569 - DNA, 15 bp, Homo sapiens
tactgcagaaaaggt

SEQ ID NO: 1540570 - DNA, 15 bp, Homo sapiens
actgcagaaaaggta

SEQ ID NO: 1540571 - DNA, 15 bp, Homo sapiens
ctgcagaaaaggtag

SEQ ID NO: 1540572 - DNA, 15 bp, Homo sapiens
tgcagaaaaggtagg

SEQ ID NO: 1540573 - DNA, 15 bp, Homo sapiens
gcagaaaaggtagga

SEQ ID NO: 1540574 - DNA, 15 bp, Homo sapiens
cagaaaaggtaggaa

SEQ ID NO: 1540575 - DNA, 15 bp, Homo sapiens
agaaaaggtaggaaa

SEQ ID NO: 1540576 - DNA, 15 bp, Homo sapiens
gaaaaggtaggaaat

SEQ ID NO: 1540577 - DNA, 15 bp, Homo sapiens
aaaaggtaggaaata

SEQ ID NO: 1540578 - DNA, 15 bp, Homo sapiens
aaaggtaggaaatac

SEQ ID NO: 1540579 - DNA, 15 bp, Homo sapiens
aaggtaggaaataca

SEQ ID NO: 1540580 - DNA, 15 bp, Homo sapiens
aggtaggaaatacag

SEQ ID NO: 1540581 - DNA, 15 bp, Homo sapiens
ggtaggaaatacaga

SEQ ID NO: 1540582 - DNA, 15 bp, Homo sapiens
gtaggaaatacagat

SEQ ID NO: 1540583 - DNA, 15 bp, Homo sapiens
taggaaatacagata

SEQ ID NO: 1540584 - DNA, 15 bp, Homo sapiens
aggaaatacagataa

SEQ ID NO: 1540585 - DNA, 15 bp, Homo sapiens
ggaaatacagataag

SEQ ID NO: 1540586 - DNA, 15 bp, Homo sapiens
gaaatacagataagc

SEQ ID NO: 1540587 - DNA, 15 bp, Homo sapiens
aaatacagataagca

SEQ ID NO: 1540588 - DNA, 15 bp, Homo sapiens
aatacagataagcaa

SEQ ID NO: 1540589 - DNA, 15 bp, Homo sapiens
atacagataagcaaa

SEQ ID NO: 1540590 - DNA, 15 bp, Homo sapiens
tacagataagcaaaa

SEQ ID NO: 1540591 - DNA, 15 bp, Homo sapiens
acagataagcaaaaa

SEQ ID NO: 1540592 - DNA, 15 bp, Homo sapiens
cagataagcaaaaag

SEQ ID NO: 1540593 - DNA, 15 bp, Homo sapiens
agataagcaaaaagg

SEQ ID NO: 1540594 - DNA, 15 bp, Homo sapiens
gataagcaaaaagga

SEQ ID NO: 1540595 - DNA, 15 bp, Homo sapiens
ataagcaaaaaggaa

SEQ ID NO: 1540596 - DNA, 15 bp, Homo sapiens
taagcaaaaaggaaa

SEQ ID NO: 1540597 - DNA, 15 bp, Homo sapiens
aagcaaaaaggaaaa

SEQ ID NO: 1540598 - DNA, 15 bp, Homo sapiens
agcaaaaaggaaaat

SEQ ID NO: 1540599 - DNA, 15 bp, Homo sapiens
gcaaaaaggaaaata

SEQ ID NO: 1540600 - DNA, 15 bp, Homo sapiens
caaaaaggaaaataa

SEQ ID NO: 1540601 - DNA, 15 bp, Homo sapiens
aaaaaggaaaataaa

SEQ ID NO: 1540602 - DNA, 15 bp, Homo sapiens
aaaaggaaaataaat

SEQ ID NO: 1540603 - DNA, 15 bp, Homo sapiens
aaaggaaaataaatt

SEQ ID NO: 1540604 - DNA, 15 bp, Homo sapiens
aaggaaaataaatta

SEQ ID NO: 1540605 - DNA, 15 bp, Homo sapiens
aggaaaataaattaa

SEQ ID NO: 1540606 - DNA, 15 bp, Homo sapiens
ggaaaataaattaaa

SEQ ID NO: 1540607 - DNA, 15 bp, Homo sapiens
gaaaataaattaaaa

SEQ ID NO: 1540608 - DNA, 15 bp, Homo sapiens
aaaataaattaaaat

SEQ ID NO: 1540609 - DNA, 15 bp, Homo sapiens
aaataaattaaaatc

SEQ ID NO: 1540610 - DNA, 15 bp, Homo sapiens
aataaattaaaatcc

SEQ ID NO: 1540611 - DNA, 15 bp, Homo sapiens
ataaattaaaatcct

SEQ ID NO: 1540612 - DNA, 15 bp, Homo sapiens
taaattaaaatcctc

SEQ ID NO: 1540613 - DNA, 15 bp, Homo sapiens
aaattaaaatcctca

SEQ ID NO: 1540614 - DNA, 15 bp, Homo sapiens
aattaaaatcctcat

SEQ ID NO: 1540615 - DNA, 15 bp, Homo sapiens
attaaaatcctcata

SEQ ID NO: 1540616 - DNA, 15 bp, Homo sapiens
ttaaaatcctcatac

SEQ ID NO: 1540617 - DNA, 15 bp, Homo sapiens
taaaatcctcatacc

SEQ ID NO: 1540618 - DNA, 15 bp, Homo sapiens
aaaatcctcatacca

SEQ ID NO: 1540619 - DNA, 15 bp, Homo sapiens
aaatcctcataccac

SEQ ID NO: 1540620 - DNA, 15 bp, Homo sapiens
aatcctcataccacc

SEQ ID NO: 1540621 - DNA, 15 bp, Homo sapiens
atcctcataccacca

SEQ ID NO: 1540622 - DNA, 15 bp, Homo sapiens
tcctcataccaccat

SEQ ID NO: 1540623 - DNA, 15 bp, Homo sapiens
cctcataccaccatc

SEQ ID NO: 1540624 - DNA, 15 bp, Homo sapiens
ctcataccaccatca

SEQ ID NO: 1540625 - DNA, 15 bp, Homo sapiens
tcataccaccatcat

SEQ ID NO: 1540626 - DNA, 15 bp, Homo sapiens
cataccaccatcatc

SEQ ID NO: 1540627 - DNA, 15 bp, Homo sapiens
ataccaccatcatca

SEQ ID NO: 1540628 - DNA, 15 bp, Homo sapiens
taccaccatcatcaa

SEQ ID NO: 1540629 - DNA, 15 bp, Homo sapiens
accaccatcatcaag

SEQ ID NO: 1540630 - DNA, 15 bp, Homo sapiens
ccaccatcatcaaga

SEQ ID NO: 1540631 - DNA, 15 bp, Homo sapiens
caccatcatcaagat

SEQ ID NO: 1540632 - DNA, 15 bp, Homo sapiens
accatcatcaagata

SEQ ID NO: 1540633 - DNA, 15 bp, Homo sapiens
ccatcatcaagataa

SEQ ID NO: 1540634 - DNA, 15 bp, Homo sapiens
catcatcaagataat

SEQ ID NO: 1540635 - DNA, 15 bp, Homo sapiens
atcatcaagataatt

SEQ ID NO: 1540636 - DNA, 15 bp, Homo sapiens
tcatcaagataatta

SEQ ID NO: 1540637 - DNA, 15 bp, Homo sapiens
catcaagataattac

SEQ ID NO: 1540638 - DNA, 15 bp, Homo sapiens
atcaagataattact

SEQ ID NO: 1540639 - DNA, 15 bp, Homo sapiens
tcaagataattactg

SEQ ID NO: 1540640 - DNA, 15 bp, Homo sapiens
caagataattactgt

SEQ ID NO: 1540641 - DNA, 15 bp, Homo sapiens
aagataattactgtc

SEQ ID NO: 1540642 - DNA, 15 bp, Homo sapiens
agataattactgtca

SEQ ID NO: 1540643 - DNA, 15 bp, Homo sapiens
gataattactgtcac

SEQ ID NO: 1540644 - DNA, 15 bp, Homo sapiens
ataattactgtcacc

SEQ ID NO: 1540645 - DNA, 15 bp, Homo sapiens
taattactgtcacca

SEQ ID NO: 1540646 - DNA, 15 bp, Homo sapiens
aattactgtcaccat

SEQ ID NO: 1540647 - DNA, 15 bp, Homo sapiens
attactgtcaccatt

SEQ ID NO: 1540648 - DNA, 15 bp, Homo sapiens
ttactgtcaccattt

SEQ ID NO: 1540649 - DNA, 15 bp, Homo sapiens
tactgtcaccatttt

SEQ ID NO: 1540650 - DNA, 15 bp, Homo sapiens
actgtcaccattttg

SEQ ID NO: 1540651 - DNA, 15 bp, Homo sapiens
ctgtcaccattttgg

SEQ ID NO: 1540652 - DNA, 15 bp, Homo sapiens
tgtcaccattttggt

SEQ ID NO: 1540653 - DNA, 15 bp, Homo sapiens
gtcaccattttggta

SEQ ID NO: 1540654 - DNA, 15 bp, Homo sapiens
tcaccattttggtat

SEQ ID NO: 1540655 - DNA, 15 bp, Homo sapiens
caccattttggtata

SEQ ID NO: 1540656 - DNA, 15 bp, Homo sapiens
accattttggtatat

SEQ ID NO: 1540657 - DNA, 15 bp, Homo sapiens
ccattttggtatatt

SEQ ID NO: 1540658 - DNA, 15 bp, Homo sapiens
cattttggtatattt

SEQ ID NO: 1540659 - DNA, 15 bp, Homo sapiens
attttggtatatttc

SEQ ID NO: 1540660 - DNA, 15 bp, Homo sapiens
ttttggtatatttcc

SEQ ID NO: 1540661 - DNA, 15 bp, Homo sapiens
tttggtatatttcct

SEQ ID NO: 1540662 - DNA, 15 bp, Homo sapiens
ttggtatatttcctc

SEQ ID NO: 1540663 - DNA, 15 bp, Homo sapiens
tggtatatttcctcc

SEQ ID NO: 1540664 - DNA, 15 bp, Homo sapiens
ggtatatttcctccc

SEQ ID NO: 1540665 - DNA, 15 bp, Homo sapiens
gtatatttcctccca

SEQ ID NO: 1540666 - DNA, 15 bp, Homo sapiens
tatatttcctcccaa

SEQ ID NO: 1540667 - DNA, 15 bp, Homo sapiens
atatttcctcccaat

SEQ ID NO: 1540668 - DNA, 15 bp, Homo sapiens
tatttcctcccaata

SEQ ID NO: 1540669 - DNA, 15 bp, Homo sapiens
atttcctcccaatac

SEQ ID NO: 1540670 - DNA, 15 bp, Homo sapiens
tttcctcccaataca

SEQ ID NO: 1540671 - DNA, 15 bp, Homo sapiens
ttcctcccaatacat

SEQ ID NO: 1540672 - DNA, 15 bp, Homo sapiens
tcctcccaatacata

SEQ ID NO: 1540673 - DNA, 15 bp, Homo sapiens
cctcccaatacatat

SEQ ID NO: 1540674 - DNA, 15 bp, Homo sapiens
ctcccaatacatata

SEQ ID NO: 1540675 - DNA, 15 bp, Homo sapiens
tcccaatacatatat

SEQ ID NO: 1540676 - DNA, 15 bp, Homo sapiens
cccaatacatatatt

SEQ ID NO: 1540677 - DNA, 15 bp, Homo sapiens
ccaatacatatatta

SEQ ID NO: 1540678 - DNA, 15 bp, Homo sapiens
caatacatatattat

SEQ ID NO: 1540679 - DNA, 15 bp, Homo sapiens
aatacatatattatc

SEQ ID NO: 1540680 - DNA, 15 bp, Homo sapiens
atacatatattatct

SEQ ID NO: 1540681 - DNA, 15 bp, Homo sapiens
tacatatattatcta

SEQ ID NO: 1540682 - DNA, 15 bp, Homo sapiens
catatattatctata

SEQ ID NO: 1540683 - DNA, 15 bp, Homo sapiens
atatattatctatat

SEQ ID NO: 1540684 - DNA, 15 bp, Homo sapiens
tatattatctatatc

SEQ ID NO: 1540685 - DNA, 15 bp, Homo sapiens
atattatctatatcg

SEQ ID NO: 1540686 - DNA, 15 bp, Homo sapiens
tattatctatatcgt

SEQ ID NO: 1540687 - DNA, 15 bp, Homo sapiens
attatctatatcgta

SEQ ID NO: 1540688 - DNA, 15 bp, Homo sapiens
ttatctatatcgtat

SEQ ID NO: 1540689 - DNA, 15 bp, Homo sapiens
tatctatatcgtata

SEQ ID NO: 1540690 - DNA, 15 bp, Homo sapiens
atctatatcgtatat

SEQ ID NO: 1540691 - DNA, 15 bp, Homo sapiens
tctatatcgtatata

SEQ ID NO: 1540692 - DNA, 15 bp, Homo sapiens
ctatatcgtatatac

SEQ ID NO: 1540693 - DNA, 15 bp, Homo sapiens
tatatcgtatatacg

SEQ ID NO: 1540694 - DNA, 15 bp, Homo sapiens
atatcgtatatacga

SEQ ID NO: 1540695 - DNA, 15 bp, Homo sapiens
tatcgtatatacgac

SEQ ID NO: 1540696 - DNA, 15 bp, Homo sapiens
atcgtatatacgaca

SEQ ID NO: 1540697 - DNA, 15 bp, Homo sapiens
tcgtatatacgacaa

SEQ ID NO: 1540698 - DNA, 15 bp, Homo sapiens
cgtatatacgacaaa

SEQ ID NO: 1540699 - DNA, 15 bp, Homo sapiens
gtatatacgacaaaa

SEQ ID NO: 1540700 - DNA, 15 bp, Homo sapiens
tatatacgacaaaaa

SEQ ID NO: 1540701 - DNA, 15 bp, Homo sapiens
atatacgacaaaaat

SEQ ID NO: 1540702 - DNA, 15 bp, Homo sapiens
tatacgacaaaaatg

SEQ ID NO: 1540703 - DNA, 15 bp, Homo sapiens
atacgacaaaaatgg

SEQ ID NO: 1540704 - DNA, 15 bp, Homo sapiens
tacgacaaaaatgga

SEQ ID NO: 1540705 - DNA, 15 bp, Homo sapiens
acgacaaaaatggat

SEQ ID NO: 1540706 - DNA, 15 bp, Homo sapiens
cgacaaaaatggatc

SEQ ID NO: 1540707 - DNA, 15 bp, Homo sapiens
gacaaaaatggatca

SEQ ID NO: 1540708 - DNA, 15 bp, Homo sapiens
acaaaaatggatcat

SEQ ID NO: 1540709 - DNA, 15 bp, Homo sapiens
caaaaatggatcata

SEQ ID NO: 1540710 - DNA, 15 bp, Homo sapiens
aaaaatggatcatac

SEQ ID NO: 1540711 - DNA, 15 bp, Homo sapiens
aaaatggatcatact

SEQ ID NO: 1540712 - DNA, 15 bp, Homo sapiens
aaatggatcatacta

SEQ ID NO: 1540713 - DNA, 15 bp, Homo sapiens
aatggatcatactat

SEQ ID NO: 1540714 - DNA, 15 bp, Homo sapiens
atggatcatactatg

SEQ ID NO: 1540715 - DNA, 15 bp, Homo sapiens
tggatcatactatgt

SEQ ID NO: 1540716 - DNA, 15 bp, Homo sapiens
ggatcatactatgtt

SEQ ID NO: 1540717 - DNA, 15 bp, Homo sapiens
gatcatactatgttt

SEQ ID NO: 1540718 - DNA, 15 bp, Homo sapiens
atcatactatgtttc

SEQ ID NO: 1540719 - DNA, 15 bp, Homo sapiens
tcatactatgtttcc

SEQ ID NO: 1540720 - DNA, 15 bp, Homo sapiens
catactatgtttcct

SEQ ID NO: 1540721 - DNA, 15 bp, Homo sapiens
atactatgtttcctg

SEQ ID NO: 1540722 - DNA, 15 bp, Homo sapiens
tactatgtttcctgt

SEQ ID NO: 1540723 - DNA, 15 bp, Homo sapiens
actatgtttcctgtt

SEQ ID NO: 1540724 - DNA, 15 bp, Homo sapiens
ctatgtttcctgttc

SEQ ID NO: 1540725 - DNA, 15 bp, Homo sapiens
tatgtttcctgttct

SEQ ID NO: 1540726 - DNA, 15 bp, Homo sapiens
atgtttcctgttctt

SEQ ID NO: 1540727 - DNA, 15 bp, Homo sapiens
tgtttcctgttcttc

SEQ ID NO: 1540728 - DNA, 15 bp, Homo sapiens
gtttcctgttcttcc

SEQ ID NO: 1540729 - DNA, 15 bp, Homo sapiens
tttcctgttcttccc

SEQ ID NO: 1540730 - DNA, 15 bp, Homo sapiens
ttcctgttcttcccc

SEQ ID NO: 1540731 - DNA, 15 bp, Homo sapiens
tcctgttcttcccct

SEQ ID NO: 1540732 - DNA, 15 bp, Homo sapiens
cctgttcttcccctg

SEQ ID NO: 1540733 - DNA, 15 bp, Homo sapiens
ctgttcttcccctgt

SEQ ID NO: 1540734 - DNA, 15 bp, Homo sapiens
tgttcttcccctgtg

SEQ ID NO: 1540735 - DNA, 15 bp, Homo sapiens
gttcttcccctgtgt

SEQ ID NO: 1540736 - DNA, 15 bp, Homo sapiens
ttcttcccctgtgtt

SEQ ID NO: 1540737 - DNA, 15 bp, Homo sapiens
tcttcccctgtgtta

SEQ ID NO: 1540738 - DNA, 15 bp, Homo sapiens
cttcccctgtgttag

SEQ ID NO: 1540739 - DNA, 15 bp, Homo sapiens
ttcccctgtgttagt

SEQ ID NO: 1540740 - DNA, 15 bp, Homo sapiens
tcccctgtgttagtc

SEQ ID NO: 1540741 - DNA, 15 bp, Homo sapiens
cccctgtgttagtca

SEQ ID NO: 1540742 - DNA, 15 bp, Homo sapiens
ccctgtgttagtcat

SEQ ID NO: 1540743 - DNA, 15 bp, Homo sapiens
cctgtgttagtcatc

SEQ ID NO: 1540744 - DNA, 15 bp, Homo sapiens
ctgtgttagtcatct

SEQ ID NO: 1540745 - DNA, 15 bp, Homo sapiens
tgtgttagtcatcta

SEQ ID NO: 1540746 - DNA, 15 bp, Homo sapiens
gtgttagtcatctat

SEQ ID NO: 1540747 - DNA, 15 bp, Homo sapiens
tgttagtcatctatt

SEQ ID NO: 1540748 - DNA, 15 bp, Homo sapiens
gttagtcatctattg

SEQ ID NO: 1540749 - DNA, 15 bp, Homo sapiens
ttagtcatctattgc

SEQ ID NO: 1540750 - DNA, 15 bp, Homo sapiens
tagtcatctattgct

SEQ ID NO: 1540751 - DNA, 15 bp, Homo sapiens
agtcatctattgctg

SEQ ID NO: 1540752 - DNA, 15 bp, Homo sapiens
gtcatctattgctgt

SEQ ID NO: 1540753 - DNA, 15 bp, Homo sapiens
tcatctattgctgta

SEQ ID NO: 1540754 - DNA, 15 bp, Homo sapiens
catctattgctgtat

SEQ ID NO: 1540755 - DNA, 15 bp, Homo sapiens
atctattgctgtata

SEQ ID NO: 1540756 - DNA, 15 bp, Homo sapiens
tctattgctgtataa

SEQ ID NO: 1540757 - DNA, 15 bp, Homo sapiens
ctattgctgtataac

SEQ ID NO: 1540758 - DNA, 15 bp, Homo sapiens
tattgctgtataaca

SEQ ID NO: 1540759 - DNA, 15 bp, Homo sapiens
attgctgtataacaa

SEQ ID NO: 1540760 - DNA, 15 bp, Homo sapiens
ttgctgtataacaaa

SEQ ID NO: 1540761 - DNA, 15 bp, Homo sapiens
tgctgtataacaaac

SEQ ID NO: 1540762 - DNA, 15 bp, Homo sapiens
gctgtataacaaact

SEQ ID NO: 1540763 - DNA, 15 bp, Homo sapiens
ctgtataacaaactg

SEQ ID NO: 1540764 - DNA, 15 bp, Homo sapiens
tgtataacaaactgc

SEQ ID NO: 1540765 - DNA, 15 bp, Homo sapiens
gtataacaaactgcc

SEQ ID NO: 1540766 - DNA, 15 bp, Homo sapiens
tataacaaactgcct

SEQ ID NO: 1540767 - DNA, 15 bp, Homo sapiens
ataacaaactgcctc

SEQ ID NO: 1540768 - DNA, 15 bp, Homo sapiens
taacaaactgcctca

SEQ ID NO: 1540769 - DNA, 15 bp, Homo sapiens
aacaaactgcctcaa

SEQ ID NO: 1540770 - DNA, 15 bp, Homo sapiens
acaaactgcctcaaa

SEQ ID NO: 1540771 - DNA, 15 bp, Homo sapiens
caaactgcctcaaaa

SEQ ID NO: 1540772 - DNA, 15 bp, Homo sapiens
aaactgcctcaaaac

SEQ ID NO: 1540773 - DNA, 15 bp, Homo sapiens
aactgcctcaaaact

SEQ ID NO: 1540774 - DNA, 15 bp, Homo sapiens
actgcctcaaaactt

SEQ ID NO: 1540775 - DNA, 15 bp, Homo sapiens
ctgcctcaaaactta

SEQ ID NO: 1540776 - DNA, 15 bp, Homo sapiens
tgcctcaaaacttag

SEQ ID NO: 1540777 - DNA, 15 bp, Homo sapiens
gcctcaaaacttagt

SEQ ID NO: 1540778 - DNA, 15 bp, Homo sapiens
cctcaaaacttagtg

SEQ ID NO: 1540779 - DNA, 15 bp, Homo sapiens
ctcaaaacttagtgg

SEQ ID NO: 1540780 - DNA, 15 bp, Homo sapiens
tcaaaacttagtggc

SEQ ID NO: 1540781 - DNA, 15 bp, Homo sapiens
caaaacttagtggct

SEQ ID NO: 1540782 - DNA, 15 bp, Homo sapiens
aaaacttagtggctt

SEQ ID NO: 1540783 - DNA, 15 bp, Homo sapiens
aaacttagtggcttc

SEQ ID NO: 1540784 - DNA, 15 bp, Homo sapiens
aacttagtggcttca

SEQ ID NO: 1540785 - DNA, 15 bp, Homo sapiens
acttagtggcttcac

SEQ ID NO: 1540786 - DNA, 15 bp, Homo sapiens
cttagtggcttcacc

SEQ ID NO: 1540787 - DNA, 15 bp, Homo sapiens
ttagtggcttcacct

SEQ ID NO: 1540788 - DNA, 15 bp, Homo sapiens
tagtggcttcacctt

SEQ ID NO: 1540789 - DNA, 15 bp, Homo sapiens
agtggcttcaccttt

SEQ ID NO: 1540790 - DNA, 15 bp, Homo sapiens
gtggcttcacctttc

SEQ ID NO: 1540791 - DNA, 15 bp, Homo sapiens
tggcttcacctttcc

SEQ ID NO: 1540792 - DNA, 15 bp, Homo sapiens
ggcttcacctttccg

SEQ ID NO: 1540793 - DNA, 15 bp, Homo sapiens
gcttcacctttccgt

SEQ ID NO: 1540794 - DNA, 15 bp, Homo sapiens
cttcacctttccgtg

SEQ ID NO: 1540795 - DNA, 15 bp, Homo sapiens
ttcacctttccgtgt

SEQ ID NO: 1540796 - DNA, 15 bp, Homo sapiens
tcacctttccgtgta

SEQ ID NO: 1540797 - DNA, 15 bp, Homo sapiens
cacctttccgtgtat

SEQ ID NO: 1540798 - DNA, 15 bp, Homo sapiens
acctttccgtgtatt

SEQ ID NO: 1540799 - DNA, 15 bp, Homo sapiens
cctttccgtgtatta

SEQ ID NO: 1540800 - DNA, 15 bp, Homo sapiens
ctttccgtgtattat

SEQ ID NO: 1540801 - DNA, 15 bp, Homo sapiens
tttccgtgtattatg

SEQ ID NO: 1540802 - DNA, 15 bp, Homo sapiens
ttccgtgtattatga

SEQ ID NO: 1540803 - DNA, 15 bp, Homo sapiens
tccgtgtattatgat

SEQ ID NO: 1540804 - DNA, 15 bp, Homo sapiens
ccgtgtattatgatg

SEQ ID NO: 1540805 - DNA, 15 bp, Homo sapiens
cgtgtattatgatga

SEQ ID NO: 1540806 - DNA, 15 bp, Homo sapiens
gtgtattatgatgac

SEQ ID NO: 1540807 - DNA, 15 bp, Homo sapiens
tgtattatgatgaca

SEQ ID NO: 1540808 - DNA, 15 bp, Homo sapiens
gtattatgatgacaa

SEQ ID NO: 1540809 - DNA, 15 bp, Homo sapiens
tattatgatgacaag

SEQ ID NO: 1540810 - DNA, 15 bp, Homo sapiens
attatgatgacaaga

SEQ ID NO: 1540811 - DNA, 15 bp, Homo sapiens
ttatgatgacaagaa

SEQ ID NO: 1540812 - DNA, 15 bp, Homo sapiens
tatgatgacaagaat

SEQ ID NO: 1540813 - DNA, 15 bp, Homo sapiens
atgatgacaagaatg

SEQ ID NO: 1540814 - DNA, 15 bp, Homo sapiens
tgatgacaagaatgt

SEQ ID NO: 1540815 - DNA, 15 bp, Homo sapiens
gatgacaagaatgtg

SEQ ID NO: 1540816 - DNA, 15 bp, Homo sapiens
atgacaagaatgtgg

SEQ ID NO: 1540817 - DNA, 15 bp, Homo sapiens
tgacaagaatgtggt

SEQ ID NO: 1540818 - DNA, 15 bp, Homo sapiens
gacaagaatgtggta

SEQ ID NO: 1540819 - DNA, 15 bp, Homo sapiens
acaagaatgtggtat

SEQ ID NO: 1540820 - DNA, 15 bp, Homo sapiens
caagaatgtggtatg

SEQ ID NO: 1540821 - DNA, 15 bp, Homo sapiens
aagaatgtggtatga

SEQ ID NO: 1540822 - DNA, 15 bp, Homo sapiens
agaatgtggtatgac

SEQ ID NO: 1540823 - DNA, 15 bp, Homo sapiens
gaatgtggtatgaca

SEQ ID NO: 1540824 - DNA, 15 bp, Homo sapiens
aatgtggtatgacac

SEQ ID NO: 1540825 - DNA, 15 bp, Homo sapiens
atgtggtatgacact

SEQ ID NO: 1540826 - DNA, 15 bp, Homo sapiens
tgtggtatgacactg

SEQ ID NO: 1540827 - DNA, 15 bp, Homo sapiens
gtggtatgacactgt

SEQ ID NO: 1540828 - DNA, 15 bp, Homo sapiens
tggtatgacactgtc

SEQ ID NO: 1540829 - DNA, 15 bp, Homo sapiens
ggtatgacactgtct

SEQ ID NO: 1540830 - DNA, 15 bp, Homo sapiens
gtatgacactgtctt

SEQ ID NO: 1540831 - DNA, 15 bp, Homo sapiens
tatgacactgtctta

SEQ ID NO: 1540832 - DNA, 15 bp, Homo sapiens
atgacactgtcttat

SEQ ID NO: 1540833 - DNA, 15 bp, Homo sapiens
tgacactgtcttata

SEQ ID NO: 1540834 - DNA, 15 bp, Homo sapiens
gacactgtcttatat

SEQ ID NO: 1540835 - DNA, 15 bp, Homo sapiens
acactgtcttatatc

SEQ ID NO: 1540836 - DNA, 15 bp, Homo sapiens
cactgtcttatatct

SEQ ID NO: 1540837 - DNA, 15 bp, Homo sapiens
actgtcttatatctg

SEQ ID NO: 1540838 - DNA, 15 bp, Homo sapiens
ctgtcttatatctgg

SEQ ID NO: 1540839 - DNA, 15 bp, Homo sapiens
tgtcttatatctgga

SEQ ID NO: 1540840 - DNA, 15 bp, Homo sapiens
gtcttatatctggat

SEQ ID NO: 1540841 - DNA, 15 bp, Homo sapiens
tcttatatctggatc

SEQ ID NO: 1540842 - DNA, 15 bp, Homo sapiens
cttatatctggatca

SEQ ID NO: 1540843 - DNA, 15 bp, Homo sapiens
ttatatctggatcat

SEQ ID NO: 1540844 - DNA, 15 bp, Homo sapiens
tatatctggatcata

SEQ ID NO: 1540845 - DNA, 15 bp, Homo sapiens
atatctggatcatat

SEQ ID NO: 1540846 - DNA, 15 bp, Homo sapiens
tatctggatcatatg

SEQ ID NO: 1540847 - DNA, 15 bp, Homo sapiens
atctggatcatatgc

SEQ ID NO: 1540848 - DNA, 15 bp, Homo sapiens
tctggatcatatgct

SEQ ID NO: 1540849 - DNA, 15 bp, Homo sapiens
ctggatcatatgcta

SEQ ID NO: 1540850 - DNA, 15 bp, Homo sapiens
tggatcatatgctaa

SEQ ID NO: 1540851 - DNA, 15 bp, Homo sapiens
ggatcatatgctaaa

SEQ ID NO: 1540852 - DNA, 15 bp, Homo sapiens
gatcatatgctaaaa

SEQ ID NO: 1540853 - DNA, 15 bp, Homo sapiens
atcatatgctaaaag

SEQ ID NO: 1540854 - DNA, 15 bp, Homo sapiens
tcatatgctaaaaga

SEQ ID NO: 1540855 - DNA, 15 bp, Homo sapiens
catatgctaaaagat

SEQ ID NO: 1540856 - DNA, 15 bp, Homo sapiens
atatgctaaaagata

SEQ ID NO: 1540857 - DNA, 15 bp, Homo sapiens
tatgctaaaagatag

SEQ ID NO: 1540858 - DNA, 15 bp, Homo sapiens
atgctaaaagataga

SEQ ID NO: 1540859 - DNA, 15 bp, Homo sapiens
tgctaaaagatagaa

SEQ ID NO: 1540860 - DNA, 15 bp, Homo sapiens
gctaaaagatagaaa

SEQ ID NO: 1540861 - DNA, 15 bp, Homo sapiens
ctaaaagatagaaaa

SEQ ID NO: 1540862 - DNA, 15 bp, Homo sapiens
taaaagatagaaaat

SEQ ID NO: 1540863 - DNA, 15 bp, Homo sapiens
aaaagatagaaaatg

SEQ ID NO: 1540864 - DNA, 15 bp, Homo sapiens
aaagatagaaaatgg

SEQ ID NO: 1540865 - DNA, 15 bp, Homo sapiens
aagatagaaaatggt

SEQ ID NO: 1540866 - DNA, 15 bp, Homo sapiens
agatagaaaatggtt

SEQ ID NO: 1540867 - DNA, 15 bp, Homo sapiens
gatagaaaatggttt

SEQ ID NO: 1540868 - DNA, 15 bp, Homo sapiens
atagaaaatggtttc

SEQ ID NO: 1540869 - DNA, 15 bp, Homo sapiens
tagaaaatggtttct

SEQ ID NO: 1540870 - DNA, 15 bp, Homo sapiens
agaaaatggtttcta

SEQ ID NO: 1540871 - DNA, 15 bp, Homo sapiens
gaaaatggtttctaa

SEQ ID NO: 1540872 - DNA, 15 bp, Homo sapiens
aaaatggtttctaaa

SEQ ID NO: 1540873 - DNA, 15 bp, Homo sapiens
aaatggtttctaaac

SEQ ID NO: 1540874 - DNA, 15 bp, Homo sapiens
aatggtttctaaact

SEQ ID NO: 1540875 - DNA, 15 bp, Homo sapiens
atggtttctaaactt

SEQ ID NO: 1540876 - DNA, 15 bp, Homo sapiens
tggtttctaaactta

SEQ ID NO: 1540877 - DNA, 15 bp, Homo sapiens
ggtttctaaacttat

SEQ ID NO: 1540878 - DNA, 15 bp, Homo sapiens
gtttctaaacttatt

SEQ ID NO: 1540879 - DNA, 15 bp, Homo sapiens
tttctaaacttattt

SEQ ID NO: 1540880 - DNA, 15 bp, Homo sapiens
ttctaaacttatttg

SEQ ID NO: 1540881 - DNA, 15 bp, Homo sapiens
tctaaacttatttgt

SEQ ID NO: 1540882 - DNA, 15 bp, Homo sapiens
ctaaacttatttgtt

SEQ ID NO: 1540883 - DNA, 15 bp, Homo sapiens
taaacttatttgttc

SEQ ID NO: 1540884 - DNA, 15 bp, Homo sapiens
aaacttatttgttct

SEQ ID NO: 1540885 - DNA, 15 bp, Homo sapiens
aacttatttgttctg

SEQ ID NO: 1540886 - DNA, 15 bp, Homo sapiens
acttatttgttctgt

SEQ ID NO: 1540887 - DNA, 15 bp, Homo sapiens
cttatttgttctgta

SEQ ID NO: 1540888 - DNA, 15 bp, Homo sapiens
ttatttgttctgtaa

SEQ ID NO: 1540889 - DNA, 15 bp, Homo sapiens
tatttgttctgtaat

SEQ ID NO: 1540890 - DNA, 15 bp, Homo sapiens
atttgttctgtaata

SEQ ID NO: 1540891 - DNA, 15 bp, Homo sapiens
tttgttctgtaataa

SEQ ID NO: 1540892 - DNA, 15 bp, Homo sapiens
ttgttctgtaataac

SEQ ID NO: 1540893 - DNA, 15 bp, Homo sapiens
tgttctgtaataaca

SEQ ID NO: 1540894 - DNA, 15 bp, Homo sapiens
gttctgtaataacaa

SEQ ID NO: 1540895 - DNA, 15 bp, Homo sapiens
ttctgtaataacaaa

SEQ ID NO: 1540896 - DNA, 15 bp, Homo sapiens
tctgtaataacaaaa

SEQ ID NO: 1540897 - DNA, 15 bp, Homo sapiens
ctgtaataacaaaat

SEQ ID NO: 1540898 - DNA, 15 bp, Homo sapiens
tgtaataacaaaatt

SEQ ID NO: 1540899 - DNA, 15 bp, Homo sapiens
gtaataacaaaattt

SEQ ID NO: 1540900 - DNA, 15 bp, Homo sapiens
taataacaaaatttt

SEQ ID NO: 1540901 - DNA, 15 bp, Homo sapiens
aataacaaaatttta

SEQ ID NO: 1540902 - DNA, 15 bp, Homo sapiens
ataacaaaattttat

SEQ ID NO: 1540903 - DNA, 15 bp, Homo sapiens
taacaaaattttatt

SEQ ID NO: 1540904 - DNA, 15 bp, Homo sapiens
aacaaaattttattt

SEQ ID NO: 1540905 - DNA, 15 bp, Homo sapiens
acaaaattttatttc

SEQ ID NO: 1540906 - DNA, 15 bp, Homo sapiens
caaaattttatttca

SEQ ID NO: 1540907 - DNA, 15 bp, Homo sapiens
aaaattttatttcat

SEQ ID NO: 1540908 - DNA, 15 bp, Homo sapiens
aaattttatttcata

SEQ ID NO: 1540909 - DNA, 15 bp, Homo sapiens
aattttatttcataa

SEQ ID NO: 1540910 - DNA, 15 bp, Homo sapiens
attttatttcataaa

SEQ ID NO: 1540911 - DNA, 15 bp, Homo sapiens
ttttatttcataaag

SEQ ID NO: 1540912 - DNA, 15 bp, Homo sapiens
tttatttcataaagt

SEQ ID NO: 1540913 - DNA, 15 bp, Homo sapiens
ttatttcataaagtg

SEQ ID NO: 1540914 - DNA, 15 bp, Homo sapiens
tatttcataaagtgt

SEQ ID NO: 1540915 - DNA, 15 bp, Homo sapiens
atttcataaagtgtt

SEQ ID NO: 1540916 - DNA, 15 bp, Homo sapiens
tttcataaagtgttt

SEQ ID NO: 1540917 - DNA, 15 bp, Homo sapiens
ttcataaagtgtttt

SEQ ID NO: 1540918 - DNA, 15 bp, Homo sapiens
tcataaagtgttttt

SEQ ID NO: 1540919 - DNA, 15 bp, Homo sapiens
cataaagtgttttta

SEQ ID NO: 1540920 - DNA, 15 bp, Homo sapiens
ataaagtgtttttaa

SEQ ID NO: 1540921 - DNA, 15 bp, Homo sapiens
taaagtgtttttaaa

SEQ ID NO: 1540922 - DNA, 15 bp, Homo sapiens
aaagtgtttttaaaa

SEQ ID NO: 1540923 - DNA, 15 bp, Homo sapiens
aagtgtttttaaaaa

SEQ ID NO: 1540924 - DNA, 15 bp, Homo sapiens
agtgtttttaaaaaa

SEQ ID NO: 1540925 - DNA, 15 bp, Homo sapiens
agactctcctctgaa

SEQ ID NO: 1540926 - DNA, 15 bp, Homo sapiens
gactctcctctgaac

SEQ ID NO: 1540927 - DNA, 15 bp, Homo sapiens
actctcctctgaact

SEQ ID NO: 1540928 - DNA, 15 bp, Homo sapiens
ctctcctctgaactc

SEQ ID NO: 1540929 - DNA, 15 bp, Homo sapiens
tctcctctgaactcg

SEQ ID NO: 1540930 - DNA, 15 bp, Homo sapiens
ctcctctgaactcgg

SEQ ID NO: 1540931 - DNA, 15 bp, Homo sapiens
tcctctgaactcggg

SEQ ID NO: 1540932 - DNA, 15 bp, Homo sapiens
cctctgaactcgggc

SEQ ID NO: 1540933 - DNA, 15 bp, Homo sapiens
ctctgaactcgggcc

SEQ ID NO: 1540934 - DNA, 15 bp, Homo sapiens
tctgaactcgggcct

SEQ ID NO: 1540935 - DNA, 15 bp, Homo sapiens
ctgaactcgggcctc

SEQ ID NO: 1540936 - DNA, 15 bp, Homo sapiens
tgaactcgggcctca

SEQ ID NO: 1540937 - DNA, 15 bp, Homo sapiens
gaactcgggcctcac

SEQ ID NO: 1540938 - DNA, 15 bp, Homo sapiens
aactcgggcctcaca

SEQ ID NO: 1540939 - DNA, 15 bp, Homo sapiens
actcgggcctcacat

SEQ ID NO: 1540940 - DNA, 15 bp, Homo sapiens
ctcgggcctcacatg

SEQ ID NO: 1540941 - DNA, 15 bp, Homo sapiens
tcgggcctcacatgg

SEQ ID NO: 1540942 - DNA, 15 bp, Homo sapiens
cgggcctcacatggc

SEQ ID NO: 1540943 - DNA, 15 bp, Homo sapiens
gggcctcacatggcc

SEQ ID NO: 1540944 - DNA, 15 bp, Homo sapiens
ggcctcacatggcca

SEQ ID NO: 1540945 - DNA, 15 bp, Homo sapiens
gcctcacatggccaa

SEQ ID NO: 1540946 - DNA, 15 bp, Homo sapiens
cctcacatggccaac

SEQ ID NO: 1540947 - DNA, 15 bp, Homo sapiens
ctcacatggccaact

SEQ ID NO: 1540948 - DNA, 15 bp, Homo sapiens
tcacatggccaactg

SEQ ID NO: 1540949 - DNA, 15 bp, Homo sapiens
cacatggccaactgc

SEQ ID NO: 1540950 - DNA, 15 bp, Homo sapiens
acatggccaactgct

SEQ ID NO: 1540951 - DNA, 15 bp, Homo sapiens
catggccaactgcta

SEQ ID NO: 1540952 - DNA, 15 bp, Homo sapiens
atggccaactgctac

SEQ ID NO: 1540953 - DNA, 15 bp, Homo sapiens
tggccaactgctact

SEQ ID NO: 1540954 - DNA, 15 bp, Homo sapiens
ggccaactgctactt

SEQ ID NO: 1540955 - DNA, 15 bp, Homo sapiens
gccaactgctacttg

SEQ ID NO: 1540956 - DNA, 15 bp, Homo sapiens
ccaactgctacttgg

SEQ ID NO: 1540957 - DNA, 15 bp, Homo sapiens
caactgctacttgga

SEQ ID NO: 1540958 - DNA, 15 bp, Homo sapiens
aactgctacttggaa

SEQ ID NO: 1540959 - DNA, 15 bp, Homo sapiens
actgctacttggaac

SEQ ID NO: 1540960 - DNA, 15 bp, Homo sapiens
ctgctacttggaaca

SEQ ID NO: 1540961 - DNA, 15 bp, Homo sapiens
tgctacttggaacaa

SEQ ID NO: 1540962 - DNA, 15 bp, Homo sapiens
gctacttggaacaaa

SEQ ID NO: 1540963 - DNA, 15 bp, Homo sapiens
ctacttggaacaaat

SEQ ID NO: 1540964 - DNA, 15 bp, Homo sapiens
tacttggaacaaatc

SEQ ID NO: 1540965 - DNA, 15 bp, Homo sapiens
acttggaacaaatcg

SEQ ID NO: 1540966 - DNA, 15 bp, Homo sapiens
cttggaacaaatcgc

SEQ ID NO: 1540967 - DNA, 15 bp, Homo sapiens
ttggaacaaatcgcc

SEQ ID NO: 1540968 - DNA, 15 bp, Homo sapiens
tggaacaaatcgccc

SEQ ID NO: 1540969 - DNA, 15 bp, Homo sapiens
ggaacaaatcgcccc

SEQ ID NO: 1540970 - DNA, 15 bp, Homo sapiens
gaacaaatcgcccct

SEQ ID NO: 1540971 - DNA, 15 bp, Homo sapiens
aacaaatcgcccctt

SEQ ID NO: 1540972 - DNA, 15 bp, Homo sapiens
acaaatcgccccttg

SEQ ID NO: 1540973 - DNA, 15 bp, Homo sapiens
caaatcgccccttgg

SEQ ID NO: 1540974 - DNA, 15 bp, Homo sapiens
aaatcgccccttggc

SEQ ID NO: 1540975 - DNA, 15 bp, Homo sapiens
aatcgccccttggct

SEQ ID NO: 1540976 - DNA, 15 bp, Homo sapiens
atcgccccttggctg

SEQ ID NO: 1540977 - DNA, 15 bp, Homo sapiens
tcgccccttggctgg

SEQ ID NO: 1540978 - DNA, 15 bp, Homo sapiens
cgccccttggctggc

SEQ ID NO: 1540979 - DNA, 15 bp, Homo sapiens
gccccttggctggca

SEQ ID NO: 1540980 - DNA, 15 bp, Homo sapiens
ccccttggctggcag

SEQ ID NO: 1540981 - DNA, 15 bp, Homo sapiens
cccttggctggcaga

SEQ ID NO: 1540982 - DNA, 15 bp, Homo sapiens
ccttggctggcagat

SEQ ID NO: 1540983 - DNA, 15 bp, Homo sapiens
cttggctggcagatg

SEQ ID NO: 1540984 - DNA, 15 bp, Homo sapiens
ttggctggcagatgt

SEQ ID NO: 1540985 - DNA, 15 bp, Homo sapiens
tggctggcagatgtg

SEQ ID NO: 1540986 - DNA, 15 bp, Homo sapiens
ggctggcagatgtgt

SEQ ID NO: 1540987 - DNA, 15 bp, Homo sapiens
gctggcagatgtgtt

SEQ ID NO: 1540988 - DNA, 15 bp, Homo sapiens
ctggcagatgtgtta

SEQ ID NO: 1540989 - DNA, 15 bp, Homo sapiens
tggcagatgtgttaa

SEQ ID NO: 1540990 - DNA, 15 bp, Homo sapiens
ggcagatgtgttaac

SEQ ID NO: 1540991 - DNA, 15 bp, Homo sapiens
gcagatgtgttaaca

SEQ ID NO: 1540992 - DNA, 15 bp, Homo sapiens
cagatgtgttaacat

SEQ ID NO: 1540993 - DNA, 15 bp, Homo sapiens
agatgtgttaacatg

SEQ ID NO: 1540994 - DNA, 15 bp, Homo sapiens
gatgtgttaacatgc

SEQ ID NO: 1540995 - DNA, 15 bp, Homo sapiens
atgtgttaacatgcc

SEQ ID NO: 1540996 - DNA, 15 bp, Homo sapiens
tgtgttaacatgccc

SEQ ID NO: 1540997 - DNA, 15 bp, Homo sapiens
gtgttaacatgccca

SEQ ID NO: 1540998 - DNA, 15 bp, Homo sapiens
tgttaacatgcccag

SEQ ID NO: 1540999 - DNA, 15 bp, Homo sapiens
gttaacatgcccaga

SEQ ID NO: 1541000 - DNA, 15 bp, Homo sapiens
ttaacatgcccagac

SEQ ID NO: 1541001 - DNA, 15 bp, Homo sapiens
taacatgcccagacc

SEQ ID NO: 1541002 - DNA, 15 bp, Homo sapiens
aacatgcccagacca

SEQ ID NO: 1541003 - DNA, 15 bp, Homo sapiens
acatgcccagaccaa

SEQ ID NO: 1541004 - DNA, 15 bp, Homo sapiens
catgcccagaccaag

SEQ ID NO: 1541005 - DNA, 15 bp, Homo sapiens
atgcccagaccaaga

SEQ ID NO: 1541006 - DNA, 15 bp, Homo sapiens
tgcccagaccaagat

SEQ ID NO: 1541007 - DNA, 15 bp, Homo sapiens
gcccagaccaagatc

SEQ ID NO: 1541008 - DNA, 15 bp, Homo sapiens
cccagaccaagatcc

SEQ ID NO: 1541009 - DNA, 15 bp, Homo sapiens
ccagaccaagatccc

SEQ ID NO: 1541010 - DNA, 15 bp, Homo sapiens
cagaccaagatccca

SEQ ID NO: 1541011 - DNA, 15 bp, Homo sapiens
agaccaagatcccaa

SEQ ID NO: 1541012 - DNA, 15 bp, Homo sapiens
gaccaagatcccaac

SEQ ID NO: 1541013 - DNA, 15 bp, Homo sapiens
accaagatcccaact

SEQ ID NO: 1541014 - DNA, 15 bp, Homo sapiens
ccaagatcccaactc

SEQ ID NO: 1541015 - DNA, 15 bp, Homo sapiens
caagatcccaactcc

SEQ ID NO: 1541016 - DNA, 15 bp, Homo sapiens
aagatcccaactccc

SEQ ID NO: 1541017 - DNA, 15 bp, Homo sapiens
agatcccaactccca

SEQ ID NO: 1541018 - DNA, 15 bp, Homo sapiens
gatcccaactcccac

SEQ ID NO: 1541019 - DNA, 15 bp, Homo sapiens
atcccaactcccaca

SEQ ID NO: 1541020 - DNA, 15 bp, Homo sapiens
tcccaactcccacaa

SEQ ID NO: 1541021 - DNA, 15 bp, Homo sapiens
cccaactcccacaac

SEQ ID NO: 1541022 - DNA, 15 bp, Homo sapiens
ccaactcccacaacc

SEQ ID NO: 1541023 - DNA, 15 bp, Homo sapiens
caactcccacaaccc

SEQ ID NO: 1541024 - DNA, 15 bp, Homo sapiens
aactcccacaaccca

SEQ ID NO: 1541025 - DNA, 15 bp, Homo sapiens
actcccacaacccaa

SEQ ID NO: 1541026 - DNA, 15 bp, Homo sapiens
ctcccacaacccaac

SEQ ID NO: 1541027 - DNA, 15 bp, Homo sapiens
tcccacaacccaact

SEQ ID NO: 1541028 - DNA, 15 bp, Homo sapiens
cccacaacccaactc

SEQ ID NO: 1541029 - DNA, 15 bp, Homo sapiens
ccacaacccaactcc

SEQ ID NO: 1541030 - DNA, 15 bp, Homo sapiens
cacaacccaactccc

SEQ ID NO: 1541031 - DNA, 15 bp, Homo sapiens
acaacccaactccca

SEQ ID NO: 1541032 - DNA, 15 bp, Homo sapiens
caacccaactcccag

SEQ ID NO: 1541033 - DNA, 15 bp, Homo sapiens
aacccaactcccagg

SEQ ID NO: 1541034 - DNA, 15 bp, Homo sapiens
acccaactcccaggt

SEQ ID NO: 1541035 - DNA, 15 bp, Homo sapiens
cccaactcccaggtc

SEQ ID NO: 1541036 - DNA, 15 bp, Homo sapiens
ccaactcccaggtca

SEQ ID NO: 1541037 - DNA, 15 bp, Homo sapiens
caactcccaggtcag

SEQ ID NO: 1541038 - DNA, 15 bp, Homo sapiens
aactcccaggtcaga

SEQ ID NO: 1541039 - DNA, 15 bp, Homo sapiens
actcccaggtcagat

SEQ ID NO: 1541040 - DNA, 15 bp, Homo sapiens
ctcccaggtcagatg

SEQ ID NO: 1541041 - DNA, 15 bp, Homo sapiens
tcccaggtcagatgg

SEQ ID NO: 1541042 - DNA, 15 bp, Homo sapiens
cccaggtcagatgga

SEQ ID NO: 1541043 - DNA, 15 bp, Homo sapiens
ccaggtcagatggaa

SEQ ID NO: 1541044 - DNA, 15 bp, Homo sapiens
caggtcagatggaac

SEQ ID NO: 1541045 - DNA, 15 bp, Homo sapiens
aggtcagatggaacc

SEQ ID NO: 1541046 - DNA, 15 bp, Homo sapiens
ggtcagatggaacct

SEQ ID NO: 1541047 - DNA, 15 bp, Homo sapiens
gtcagatggaacctc

SEQ ID NO: 1541048 - DNA, 15 bp, Homo sapiens
tcagatggaacctct

SEQ ID NO: 1541049 - DNA, 15 bp, Homo sapiens
cagatggaacctctt

SEQ ID NO: 1541050 - DNA, 15 bp, Homo sapiens
agatggaacctcttc

SEQ ID NO: 1541051 - DNA, 15 bp, Homo sapiens
gatggaacctcttct

SEQ ID NO: 1541052 - DNA, 15 bp, Homo sapiens
atggaacctcttctt

SEQ ID NO: 1541053 - DNA, 15 bp, Homo sapiens
tggaacctcttcttc

SEQ ID NO: 1541054 - DNA, 15 bp, Homo sapiens
ggaacctcttcttcc

SEQ ID NO: 1541055 - DNA, 15 bp, Homo sapiens
gaacctcttcttccc

SEQ ID NO: 1541056 - DNA, 15 bp, Homo sapiens
aacctcttcttccca

SEQ ID NO: 1541057 - DNA, 15 bp, Homo sapiens
acctcttcttcccag

SEQ ID NO: 1541058 - DNA, 15 bp, Homo sapiens
cctcttcttcccagg

SEQ ID NO: 1541059 - DNA, 15 bp, Homo sapiens
ctcttcttcccaggc

SEQ ID NO: 1541060 - DNA, 15 bp, Homo sapiens
tcttcttcccaggcc

SEQ ID NO: 1541061 - DNA, 15 bp, Homo sapiens
cttcttcccaggccc

SEQ ID NO: 1541062 - DNA, 15 bp, Homo sapiens
ttcttcccaggccct

SEQ ID NO: 1541063 - DNA, 15 bp, Homo sapiens
tcttcccaggccctt

SEQ ID NO: 1541064 - DNA, 15 bp, Homo sapiens
cttcccaggcccttc

SEQ ID NO: 1541065 - DNA, 15 bp, Homo sapiens
ttcccaggcccttct

SEQ ID NO: 1541066 - DNA, 15 bp, Homo sapiens
tcccaggcccttctg

SEQ ID NO: 1541067 - DNA, 15 bp, Homo sapiens
cccaggcccttctgt

SEQ ID NO: 1541068 - DNA, 15 bp, Homo sapiens
ccaggcccttctgtt

SEQ ID NO: 1541069 - DNA, 15 bp, Homo sapiens
caggcccttctgttc

SEQ ID NO: 1541070 - DNA, 15 bp, Homo sapiens
aggcccttctgttcc

SEQ ID NO: 1541071 - DNA, 15 bp, Homo sapiens
ggcccttctgttcct

SEQ ID NO: 1541072 - DNA, 15 bp, Homo sapiens
gcccttctgttcctc

SEQ ID NO: 1541073 - DNA, 15 bp, Homo sapiens
cccttctgttcctct

SEQ ID NO: 1541074 - DNA, 15 bp, Homo sapiens
ccttctgttcctctc

SEQ ID NO: 1541075 - DNA, 15 bp, Homo sapiens
cttctgttcctctcc

SEQ ID NO: 1541076 - DNA, 15 bp, Homo sapiens
ttctgttcctctcct

SEQ ID NO: 1541077 - DNA, 15 bp, Homo sapiens
tctgttcctctcctc

SEQ ID NO: 1541078 - DNA, 15 bp, Homo sapiens
ctgttcctctcctca

SEQ ID NO: 1541079 - DNA, 15 bp, Homo sapiens
tgttcctctcctcag

SEQ ID NO: 1541080 - DNA, 15 bp, Homo sapiens
gttcctctcctcagc

SEQ ID NO: 1541081 - DNA, 15 bp, Homo sapiens
ttcctctcctcagcc

SEQ ID NO: 1541082 - DNA, 15 bp, Homo sapiens
tcctctcctcagccc

SEQ ID NO: 1541083 - DNA, 15 bp, Homo sapiens
cctctcctcagcccc

SEQ ID NO: 1541084 - DNA, 15 bp, Homo sapiens
ctctcctcagcccct

SEQ ID NO: 1541085 - DNA, 15 bp, Homo sapiens
tctcctcagcccctc

SEQ ID NO: 1541086 - DNA, 15 bp, Homo sapiens
ctcctcagcccctcc

SEQ ID NO: 1541087 - DNA, 15 bp, Homo sapiens
tcctcagcccctccc

SEQ ID NO: 1541088 - DNA, 15 bp, Homo sapiens
cctcagcccctccca

SEQ ID NO: 1541089 - DNA, 15 bp, Homo sapiens
ctcagcccctcccac

SEQ ID NO: 1541090 - DNA, 15 bp, Homo sapiens
tcagcccctcccacc

SEQ ID NO: 1541091 - DNA, 15 bp, Homo sapiens
cagcccctcccacct

SEQ ID NO: 1541092 - DNA, 15 bp, Homo sapiens
agcccctcccacctc

SEQ ID NO: 1541093 - DNA, 15 bp, Homo sapiens
gcccctcccacctcc

SEQ ID NO: 1541094 - DNA, 15 bp, Homo sapiens
cccctcccacctccc

SEQ ID NO: 1541095 - DNA, 15 bp, Homo sapiens
ccctcccacctccct

SEQ ID NO: 1541096 - DNA, 15 bp, Homo sapiens
cctcccacctccctt

SEQ ID NO: 1541097 - DNA, 15 bp, Homo sapiens
ctcccacctcccttc

SEQ ID NO: 1541098 - DNA, 15 bp, Homo sapiens
tcccacctcccttca

SEQ ID NO: 1541099 - DNA, 15 bp, Homo sapiens
cccacctcccttcag

SEQ ID NO: 1541100 - DNA, 15 bp, Homo sapiens
ccacctcccttcaga

SEQ ID NO: 1541101 - DNA, 15 bp, Homo sapiens
cacctcccttcagaa

SEQ ID NO: 1541102 - DNA, 15 bp, Homo sapiens
acctcccttcagaat

SEQ ID NO: 1541103 - DNA, 15 bp, Homo sapiens
cctcccttcagaata

SEQ ID NO: 1541104 - DNA, 15 bp, Homo sapiens
ctcccttcagaataa

SEQ ID NO: 1541105 - DNA, 15 bp, Homo sapiens
tcccttcagaataag

SEQ ID NO: 1541106 - DNA, 15 bp, Homo sapiens
cccttcagaataagt

SEQ ID NO: 1541107 - DNA, 15 bp, Homo sapiens
ccttcagaataagtc

SEQ ID NO: 1541108 - DNA, 15 bp, Homo sapiens
cttcagaataagtct

SEQ ID NO: 1541109 - DNA, 15 bp, Homo sapiens
ttcagaataagtcta

SEQ ID NO: 1541110 - DNA, 15 bp, Homo sapiens
tcagaataagtctag

SEQ ID NO: 1541111 - DNA, 15 bp, Homo sapiens
cagaataagtctaga

SEQ ID NO: 1541112 - DNA, 15 bp, Homo sapiens
agaataagtctagac

SEQ ID NO: 1541113 - DNA, 15 bp, Homo sapiens
gaataagtctagact

SEQ ID NO: 1541114 - DNA, 15 bp, Homo sapiens
aataagtctagactc

SEQ ID NO: 1541115 - DNA, 15 bp, Homo sapiens
ataagtctagactct

SEQ ID NO: 1541116 - DNA, 15 bp, Homo sapiens
taagtctagactctt

SEQ ID NO: 1541117 - DNA, 15 bp, Homo sapiens
aagtctagactctta

SEQ ID NO: 1541118 - DNA, 15 bp, Homo sapiens
agtctagactcttat

SEQ ID NO: 1541119 - DNA, 15 bp, Homo sapiens
gtctagactcttatc

SEQ ID NO: 1541120 - DNA, 15 bp, Homo sapiens
tctagactcttatcg

SEQ ID NO: 1541121 - DNA, 15 bp, Homo sapiens
ctagactcttatcgc

SEQ ID NO: 1541122 - DNA, 15 bp, Homo sapiens
tagactcttatcgct

SEQ ID NO: 1541123 - DNA, 15 bp, Homo sapiens
agactcttatcgctt

SEQ ID NO: 1541124 - DNA, 15 bp, Homo sapiens
gactcttatcgcttt

SEQ ID NO: 1541125 - DNA, 15 bp, Homo sapiens
actcttatcgctttc

SEQ ID NO: 1541126 - DNA, 15 bp, Homo sapiens
ctcttatcgctttca

SEQ ID NO: 1541127 - DNA, 15 bp, Homo sapiens
tcttatcgctttcac

SEQ ID NO: 1541128 - DNA, 15 bp, Homo sapiens
cttatcgctttcacc

SEQ ID NO: 1541129 - DNA, 15 bp, Homo sapiens
ttatcgctttcacca

SEQ ID NO: 1541130 - DNA, 15 bp, Homo sapiens
tatcgctttcaccaa

SEQ ID NO: 1541131 - DNA, 15 bp, Homo sapiens
atcgctttcaccaag

SEQ ID NO: 1541132 - DNA, 15 bp, Homo sapiens
tcgctttcaccaagc

SEQ ID NO: 1541133 - DNA, 15 bp, Homo sapiens
cgctttcaccaagcc

SEQ ID NO: 1541134 - DNA, 15 bp, Homo sapiens
gctttcaccaagcct

SEQ ID NO: 1541135 - DNA, 15 bp, Homo sapiens
ctttcaccaagcctg

SEQ ID NO: 1541136 - DNA, 15 bp, Homo sapiens
tttcaccaagcctgc

SEQ ID NO: 1541137 - DNA, 15 bp, Homo sapiens
ttcaccaagcctgcg

SEQ ID NO: 1541138 - DNA, 15 bp, Homo sapiens
tcaccaagcctgcgc

SEQ ID NO: 1541139 - DNA, 15 bp, Homo sapiens
caccaagcctgcgcc

SEQ ID NO: 1541140 - DNA, 15 bp, Homo sapiens
accaagcctgcgccc

SEQ ID NO: 1541141 - DNA, 15 bp, Homo sapiens
ccaagcctgcgccca

SEQ ID NO: 1541142 - DNA, 15 bp, Homo sapiens
caagcctgcgcccag

SEQ ID NO: 1541143 - DNA, 15 bp, Homo sapiens
aagcctgcgcccagc

SEQ ID NO: 1541144 - DNA, 15 bp, Homo sapiens
agcctgcgcccagca

SEQ ID NO: 1541145 - DNA, 15 bp, Homo sapiens
gcctgcgcccagcat

SEQ ID NO: 1541146 - DNA, 15 bp, Homo sapiens
cctgcgcccagcatc

SEQ ID NO: 1541147 - DNA, 15 bp, Homo sapiens
ctgcgcccagcatcc

SEQ ID NO: 1541148 - DNA, 15 bp, Homo sapiens
tgcgcccagcatccc

SEQ ID NO: 1541149 - DNA, 15 bp, Homo sapiens
gcgcccagcatccct

SEQ ID NO: 1541150 - DNA, 15 bp, Homo sapiens
cgcccagcatccctg

SEQ ID NO: 1541151 - DNA, 15 bp, Homo sapiens
gcccagcatccctgc

SEQ ID NO: 1541152 - DNA, 15 bp, Homo sapiens
cccagcatccctgca

SEQ ID NO: 1541153 - DNA, 15 bp, Homo sapiens
ccagcatccctgcac

SEQ ID NO: 1541154 - DNA, 15 bp, Homo sapiens
cagcatccctgcaca

SEQ ID NO: 1541155 - DNA, 15 bp, Homo sapiens
agcatccctgcacag

SEQ ID NO: 1541156 - DNA, 15 bp, Homo sapiens
gcatccctgcacagg

SEQ ID NO: 1541157 - DNA, 15 bp, Homo sapiens
catccctgcacaggg

SEQ ID NO: 1541158 - DNA, 15 bp, Homo sapiens
atccctgcacaggga

SEQ ID NO: 1541159 - DNA, 15 bp, Homo sapiens
tccctgcacagggat

SEQ ID NO: 1541160 - DNA, 15 bp, Homo sapiens
ccctgcacagggatt

SEQ ID NO: 1541161 - DNA, 15 bp, Homo sapiens
cctgcacagggattg

SEQ ID NO: 1541162 - DNA, 15 bp, Homo sapiens
ctgcacagggattgt

SEQ ID NO: 1541163 - DNA, 15 bp, Homo sapiens
tgcacagggattgtt

SEQ ID NO: 1541164 - DNA, 15 bp, Homo sapiens
gcacagggattgtta

SEQ ID NO: 1541165 - DNA, 15 bp, Homo sapiens
cacagggattgttag

SEQ ID NO: 1541166 - DNA, 15 bp, Homo sapiens
acagggattgttagg

SEQ ID NO: 1541167 - DNA, 15 bp, Homo sapiens
cagggattgttagga

SEQ ID NO: 1541168 - DNA, 15 bp, Homo sapiens
agggattgttaggac

SEQ ID NO: 1541169 - DNA, 15 bp, Homo sapiens
gggattgttaggaca

SEQ ID NO: 1541170 - DNA, 15 bp, Homo sapiens
ggattgttaggacag

SEQ ID NO: 1541171 - DNA, 15 bp, Homo sapiens
gattgttaggacagc

SEQ ID NO: 1541172 - DNA, 15 bp, Homo sapiens
attgttaggacagcc

SEQ ID NO: 1541173 - DNA, 15 bp, Homo sapiens
ttgttaggacagcct

SEQ ID NO: 1541174 - DNA, 15 bp, Homo sapiens
tgttaggacagcctg

SEQ ID NO: 1541175 - DNA, 15 bp, Homo sapiens
gttaggacagcctga

SEQ ID NO: 1541176 - DNA, 15 bp, Homo sapiens
ttaggacagcctgac

SEQ ID NO: 1541177 - DNA, 15 bp, Homo sapiens
taggacagcctgacg

SEQ ID NO: 1541178 - DNA, 15 bp, Homo sapiens
aggacagcctgacgc

SEQ ID NO: 1541179 - DNA, 15 bp, Homo sapiens
ggacagcctgacgcc

SEQ ID NO: 1541180 - DNA, 15 bp, Homo sapiens
gacagcctgacgccc

SEQ ID NO: 1541181 - DNA, 15 bp, Homo sapiens
acagcctgacgccct

SEQ ID NO: 1541182 - DNA, 15 bp, Homo sapiens
cagcctgacgccctg

SEQ ID NO: 1541183 - DNA, 15 bp, Homo sapiens
agcctgacgccctgc

SEQ ID NO: 1541184 - DNA, 15 bp, Homo sapiens
gcctgacgccctgct

SEQ ID NO: 1541185 - DNA, 15 bp, Homo sapiens
cctgacgccctgctt

SEQ ID NO: 1541186 - DNA, 15 bp, Homo sapiens
ctgacgccctgcttc

SEQ ID NO: 1541187 - DNA, 15 bp, Homo sapiens
tgacgccctgcttcc

SEQ ID NO: 1541188 - DNA, 15 bp, Homo sapiens
gacgccctgcttcca

SEQ ID NO: 1541189 - DNA, 15 bp, Homo sapiens
acgccctgcttccac

SEQ ID NO: 1541190 - DNA, 15 bp, Homo sapiens
cgccctgcttccacc

SEQ ID NO: 1541191 - DNA, 15 bp, Homo sapiens
gccctgcttccaccc

SEQ ID NO: 1541192 - DNA, 15 bp, Homo sapiens
ccctgcttccaccct

SEQ ID NO: 1541193 - DNA, 15 bp, Homo sapiens
cctgcttccaccctg

SEQ ID NO: 1541194 - DNA, 15 bp, Homo sapiens
ctgcttccaccctgc

SEQ ID NO: 1541195 - DNA, 15 bp, Homo sapiens
tgcttccaccctgcc

SEQ ID NO: 1541196 - DNA, 15 bp, Homo sapiens
gcttccaccctgccc

SEQ ID NO: 1541197 - DNA, 15 bp, Homo sapiens
cttccaccctgcccc

SEQ ID NO: 1541198 - DNA, 15 bp, Homo sapiens
ttccaccctgcccca

SEQ ID NO: 1541199 - DNA, 15 bp, Homo sapiens
tccaccctgccccaa

SEQ ID NO: 1541200 - DNA, 15 bp, Homo sapiens
ccaccctgccccaag

SEQ ID NO: 1541201 - DNA, 15 bp, Homo sapiens
caccctgccccaaga

SEQ ID NO: 1541202 - DNA, 15 bp, Homo sapiens
accctgccccaagat

SEQ ID NO: 1541203 - DNA, 15 bp, Homo sapiens
ccctgccccaagatg

SEQ ID NO: 1541204 - DNA, 15 bp, Homo sapiens
cctgccccaagatgc

SEQ ID NO: 1541205 - DNA, 15 bp, Homo sapiens
ctgccccaagatgcc

SEQ ID NO: 1541206 - DNA, 15 bp, Homo sapiens
tgccccaagatgccc

SEQ ID NO: 1541207 - DNA, 15 bp, Homo sapiens
gccccaagatgcccc

SEQ ID NO: 1541208 - DNA, 15 bp, Homo sapiens
ccccaagatgcccct

SEQ ID NO: 1541209 - DNA, 15 bp, Homo sapiens
cccaagatgcccctg

SEQ ID NO: 1541210 - DNA, 15 bp, Homo sapiens
ccaagatgcccctgc

SEQ ID NO: 1541211 - DNA, 15 bp, Homo sapiens
caagatgcccctgct

SEQ ID NO: 1541212 - DNA, 15 bp, Homo sapiens
aagatgcccctgctc

SEQ ID NO: 1541213 - DNA, 15 bp, Homo sapiens
agatgcccctgctct

SEQ ID NO: 1541214 - DNA, 15 bp, Homo sapiens
gatgcccctgctctg

SEQ ID NO: 1541215 - DNA, 15 bp, Homo sapiens
atgcccctgctctgc

SEQ ID NO: 1541216 - DNA, 15 bp, Homo sapiens
tgcccctgctctgca

SEQ ID NO: 1541217 - DNA, 15 bp, Homo sapiens
gcccctgctctgcag

SEQ ID NO: 1541218 - DNA, 15 bp, Homo sapiens
cccctgctctgcagc

SEQ ID NO: 1541219 - DNA, 15 bp, Homo sapiens
ccctgctctgcagcc

SEQ ID NO: 1541220 - DNA, 15 bp, Homo sapiens
cctgctctgcagccc

SEQ ID NO: 1541221 - DNA, 15 bp, Homo sapiens
ctgctctgcagcccg

SEQ ID NO: 1541222 - DNA, 15 bp, Homo sapiens
tgctctgcagcccgg

SEQ ID NO: 1541223 - DNA, 15 bp, Homo sapiens
gctctgcagcccggc

SEQ ID NO: 1541224 - DNA, 15 bp, Homo sapiens
ctctgcagcccggcg

SEQ ID NO: 1541225 - DNA, 15 bp, Homo sapiens
tctgcagcccggcgc

SEQ ID NO: 1541226 - DNA, 15 bp, Homo sapiens
ctgcagcccggcgcc

SEQ ID NO: 1541227 - DNA, 15 bp, Homo sapiens
tgcagcccggcgcct

SEQ ID NO: 1541228 - DNA, 15 bp, Homo sapiens
gcagcccggcgcctc

SEQ ID NO: 1541229 - DNA, 15 bp, Homo sapiens
cagcccggcgcctcc

SEQ ID NO: 1541230 - DNA, 15 bp, Homo sapiens
agcccggcgcctcca

SEQ ID NO: 1541231 - DNA, 15 bp, Homo sapiens
gcccggcgcctccag

SEQ ID NO: 1541232 - DNA, 15 bp, Homo sapiens
cccggcgcctccagg

SEQ ID NO: 1541233 - DNA, 15 bp, Homo sapiens
ccggcgcctccaggc

SEQ ID NO: 1541234 - DNA, 15 bp, Homo sapiens
cggcgcctccaggct

SEQ ID NO: 1541235 - DNA, 15 bp, Homo sapiens
ggcgcctccaggctt

SEQ ID NO: 1541236 - DNA, 15 bp, Homo sapiens
gcgcctccaggcttc

SEQ ID NO: 1541237 - DNA, 15 bp, Homo sapiens
cgcctccaggcttct

SEQ ID NO: 1541238 - DNA, 15 bp, Homo sapiens
gcctccaggcttctc

SEQ ID NO: 1541239 - DNA, 15 bp, Homo sapiens
cctccaggcttctca

SEQ ID NO: 1541240 - DNA, 15 bp, Homo sapiens
ctccaggcttctcac

SEQ ID NO: 1541241 - DNA, 15 bp, Homo sapiens
tccaggcttctcacc

SEQ ID NO: 1541242 - DNA, 15 bp, Homo sapiens
ccaggcttctcacct

SEQ ID NO: 1541243 - DNA, 15 bp, Homo sapiens
caggcttctcacctc

SEQ ID NO: 1541244 - DNA, 15 bp, Homo sapiens
aggcttctcacctcc

SEQ ID NO: 1541245 - DNA, 15 bp, Homo sapiens
ggcttctcacctcct

SEQ ID NO: 1541246 - DNA, 15 bp, Homo sapiens
gcttctcacctcctg

SEQ ID NO: 1541247 - DNA, 15 bp, Homo sapiens
cttctcacctcctgc

SEQ ID NO: 1541248 - DNA, 15 bp, Homo sapiens
ttctcacctcctgct

SEQ ID NO: 1541249 - DNA, 15 bp, Homo sapiens
tctcacctcctgctg

SEQ ID NO: 1541250 - DNA, 15 bp, Homo sapiens
ctcacctcctgctgc

SEQ ID NO: 1541251 - DNA, 15 bp, Homo sapiens
tcacctcctgctgct

SEQ ID NO: 1541252 - DNA, 15 bp, Homo sapiens
cacctcctgctgctc

SEQ ID NO: 1541253 - DNA, 15 bp, Homo sapiens
acctcctgctgctca

SEQ ID NO: 1541254 - DNA, 15 bp, Homo sapiens
cctcctgctgctcac

SEQ ID NO: 1541255 - DNA, 15 bp, Homo sapiens
ctcctgctgctcaca

SEQ ID NO: 1541256 - DNA, 15 bp, Homo sapiens
tcctgctgctcacag

SEQ ID NO: 1541257 - DNA, 15 bp, Homo sapiens
cctgctgctcacagc

SEQ ID NO: 1541258 - DNA, 15 bp, Homo sapiens
ctgctgctcacagct

SEQ ID NO: 1541259 - DNA, 15 bp, Homo sapiens
tgctgctcacagctc

SEQ ID NO: 1541260 - DNA, 15 bp, Homo sapiens
gctgctcacagctca

SEQ ID NO: 1541261 - DNA, 15 bp, Homo sapiens
ctgctcacagctcag

SEQ ID NO: 1541262 - DNA, 15 bp, Homo sapiens
tgctcacagctcagc

SEQ ID NO: 1541263 - DNA, 15 bp, Homo sapiens
gctcacagctcagcc

SEQ ID NO: 1541264 - DNA, 15 bp, Homo sapiens
ctcacagctcagcct

SEQ ID NO: 1541265 - DNA, 15 bp, Homo sapiens
tcacagctcagcctc

SEQ ID NO: 1541266 - DNA, 15 bp, Homo sapiens
cacagctcagcctca

SEQ ID NO: 1541267 - DNA, 15 bp, Homo sapiens
acagctcagcctcac

SEQ ID NO: 1541268 - DNA, 15 bp, Homo sapiens
cagctcagcctcact

SEQ ID NO: 1541269 - DNA, 15 bp, Homo sapiens
agctcagcctcactc

SEQ ID NO: 1541270 - DNA, 15 bp, Homo sapiens
gctcagcctcactcc

SEQ ID NO: 1541271 - DNA, 15 bp, Homo sapiens
ctcagcctcactccc

SEQ ID NO: 1541272 - DNA, 15 bp, Homo sapiens
tcagcctcactccct

SEQ ID NO: 1541273 - DNA, 15 bp, Homo sapiens
cagcctcactccctc

SEQ ID NO: 1541274 - DNA, 15 bp, Homo sapiens
agcctcactccctcc

SEQ ID NO: 1541275 - DNA, 15 bp, Homo sapiens
gcctcactccctccc

SEQ ID NO: 1541276 - DNA, 15 bp, Homo sapiens
cctcactccctccct

SEQ ID NO: 1541277 - DNA, 15 bp, Homo sapiens
ctcactccctccctc

SEQ ID NO: 1541278 - DNA, 15 bp, Homo sapiens
tcactccctccctcc

SEQ ID NO: 1541279 - DNA, 15 bp, Homo sapiens
cactccctccctccc

SEQ ID NO: 1541280 - DNA, 15 bp, Homo sapiens
actccctccctcccc

SEQ ID NO: 1541281 - DNA, 15 bp, Homo sapiens
ctccctccctccccg

SEQ ID NO: 1541282 - DNA, 15 bp, Homo sapiens
tccctccctccccgc

SEQ ID NO: 1541283 - DNA, 15 bp, Homo sapiens
ccctccctccccgcc

SEQ ID NO: 1541284 - DNA, 15 bp, Homo sapiens
cctccctccccgcct

SEQ ID NO: 1541285 - DNA, 15 bp, Homo sapiens
ctccctccccgcctc

SEQ ID NO: 1541286 - DNA, 15 bp, Homo sapiens
tccctccccgcctct

SEQ ID NO: 1541287 - DNA, 15 bp, Homo sapiens
ccctccccgcctctg

SEQ ID NO: 1541288 - DNA, 15 bp, Homo sapiens
cctccccgcctctgc

SEQ ID NO: 1541289 - DNA, 15 bp, Homo sapiens
ctccccgcctctgct

SEQ ID NO: 1541290 - DNA, 15 bp, Homo sapiens
tccccgcctctgctc

SEQ ID NO: 1541291 - DNA, 15 bp, Homo sapiens
ccccgcctctgctcc

SEQ ID NO: 1541292 - DNA, 15 bp, Homo sapiens
cccgcctctgctcca

SEQ ID NO: 1541293 - DNA, 15 bp, Homo sapiens
ccgcctctgctccag

SEQ ID NO: 1541294 - DNA, 15 bp, Homo sapiens
cgcctctgctccagc

SEQ ID NO: 1541295 - DNA, 15 bp, Homo sapiens
gcctctgctccagcc

SEQ ID NO: 1541296 - DNA, 15 bp, Homo sapiens
cctctgctccagcct

SEQ ID NO: 1541297 - DNA, 15 bp, Homo sapiens
ctctgctccagcctc

SEQ ID NO: 1541298 - DNA, 15 bp, Homo sapiens
tctgctccagcctca

SEQ ID NO: 1541299 - DNA, 15 bp, Homo sapiens
ctgctccagcctcag

SEQ ID NO: 1541300 - DNA, 15 bp, Homo sapiens
tgctccagcctcagt

SEQ ID NO: 1541301 - DNA, 15 bp, Homo sapiens
gctccagcctcagtg

SEQ ID NO: 1541302 - DNA, 15 bp, Homo sapiens
ctccagcctcagtgc

SEQ ID NO: 1541303 - DNA, 15 bp, Homo sapiens
tccagcctcagtgca

SEQ ID NO: 1541304 - DNA, 15 bp, Homo sapiens
ccagcctcagtgcag

SEQ ID NO: 1541305 - DNA, 15 bp, Homo sapiens
cagcctcagtgcagg

SEQ ID NO: 1541306 - DNA, 15 bp, Homo sapiens
agcctcagtgcaggt

SEQ ID NO: 1541307 - DNA, 15 bp, Homo sapiens
gcctcagtgcaggtc

SEQ ID NO: 1541308 - DNA, 15 bp, Homo sapiens
cctcagtgcaggtcc

SEQ ID NO: 1541309 - DNA, 15 bp, Homo sapiens
ctcagtgcaggtccc

SEQ ID NO: 1541310 - DNA, 15 bp, Homo sapiens
tcagtgcaggtcccc

SEQ ID NO: 1541311 - DNA, 15 bp, Homo sapiens
cagtgcaggtcccct

SEQ ID NO: 1541312 - DNA, 15 bp, Homo sapiens
agtgcaggtcccctg

SEQ ID NO: 1541313 - DNA, 15 bp, Homo sapiens
gtgcaggtcccctgc

SEQ ID NO: 1541314 - DNA, 15 bp, Homo sapiens
tgcaggtcccctgct

SEQ ID NO: 1541315 - DNA, 15 bp, Homo sapiens
gcaggtcccctgctc

SEQ ID NO: 1541316 - DNA, 15 bp, Homo sapiens
caggtcccctgctcc

SEQ ID NO: 1541317 - DNA, 15 bp, Homo sapiens
aggtcccctgctccc

SEQ ID NO: 1541318 - DNA, 15 bp, Homo sapiens
ggtcccctgctccca

SEQ ID NO: 1541319 - DNA, 15 bp, Homo sapiens
gtcccctgctcccat

SEQ ID NO: 1541320 - DNA, 15 bp, Homo sapiens
tcccctgctcccatc

SEQ ID NO: 1541321 - DNA, 15 bp, Homo sapiens
cccctgctcccatct

SEQ ID NO: 1541322 - DNA, 15 bp, Homo sapiens
ccctgctcccatctt

SEQ ID NO: 1541323 - DNA, 15 bp, Homo sapiens
cctgctcccatcttc

SEQ ID NO: 1541324 - DNA, 15 bp, Homo sapiens
ctgctcccatcttct

SEQ ID NO: 1541325 - DNA, 15 bp, Homo sapiens
tgctcccatcttctg

SEQ ID NO: 1541326 - DNA, 15 bp, Homo sapiens
gctcccatcttctgg

SEQ ID NO: 1541327 - DNA, 15 bp, Homo sapiens
ctcccatcttctggc

SEQ ID NO: 1541328 - DNA, 15 bp, Homo sapiens
tcccatcttctggca

SEQ ID NO: 1541329 - DNA, 15 bp, Homo sapiens
cccatcttctggcag

SEQ ID NO: 1541330 - DNA, 15 bp, Homo sapiens
ccatcttctggcagc

SEQ ID NO: 1541331 - DNA, 15 bp, Homo sapiens
catcttctggcagca

SEQ ID NO: 1541332 - DNA, 15 bp, Homo sapiens
atcttctggcagcag

SEQ ID NO: 1541333 - DNA, 15 bp, Homo sapiens
tcttctggcagcagc

SEQ ID NO: 1541334 - DNA, 15 bp, Homo sapiens
cttctggcagcagct

SEQ ID NO: 1541335 - DNA, 15 bp, Homo sapiens
ttctggcagcagctg

SEQ ID NO: 1541336 - DNA, 15 bp, Homo sapiens
tctggcagcagctgc

SEQ ID NO: 1541337 - DNA, 15 bp, Homo sapiens
ctggcagcagctgcc

SEQ ID NO: 1541338 - DNA, 15 bp, Homo sapiens
tggcagcagctgccc

SEQ ID NO: 1541339 - DNA, 15 bp, Homo sapiens
ggcagcagctgcccg

SEQ ID NO: 1541340 - DNA, 15 bp, Homo sapiens
gcagcagctgcccga

SEQ ID NO: 1541341 - DNA, 15 bp, Homo sapiens
cagcagctgcccgac

SEQ ID NO: 1541342 - DNA, 15 bp, Homo sapiens
agcagctgcccgacc

SEQ ID NO: 1541343 - DNA, 15 bp, Homo sapiens
gcagctgcccgacct

SEQ ID NO: 1541344 - DNA, 15 bp, Homo sapiens
cagctgcccgacctg

SEQ ID NO: 1541345 - DNA, 15 bp, Homo sapiens
agctgcccgacctgg

SEQ ID NO: 1541346 - DNA, 15 bp, Homo sapiens
gctgcccgacctggt

SEQ ID NO: 1541347 - DNA, 15 bp, Homo sapiens
ctgcccgacctggtc

SEQ ID NO: 1541348 - DNA, 15 bp, Homo sapiens
tgcccgacctggtcc

SEQ ID NO: 1541349 - DNA, 15 bp, Homo sapiens
gcccgacctggtccc

SEQ ID NO: 1541350 - DNA, 15 bp, Homo sapiens
cccgacctggtccct

SEQ ID NO: 1541351 - DNA, 15 bp, Homo sapiens
ccgacctggtccctc

SEQ ID NO: 1541352 - DNA, 15 bp, Homo sapiens
cgacctggtccctct

SEQ ID NO: 1541353 - DNA, 15 bp, Homo sapiens
gacctggtccctctt

SEQ ID NO: 1541354 - DNA, 15 bp, Homo sapiens
acctggtccctcttc

SEQ ID NO: 1541355 - DNA, 15 bp, Homo sapiens
cctggtccctcttca

SEQ ID NO: 1541356 - DNA, 15 bp, Homo sapiens
ctggtccctcttcat

SEQ ID NO: 1541357 - DNA, 15 bp, Homo sapiens
tggtccctcttcatc

SEQ ID NO: 1541358 - DNA, 15 bp, Homo sapiens
ggtccctcttcatct

SEQ ID NO: 1541359 - DNA, 15 bp, Homo sapiens
gtccctcttcatctg

SEQ ID NO: 1541360 - DNA, 15 bp, Homo sapiens
tccctcttcatctgt

SEQ ID NO: 1541361 - DNA, 15 bp, Homo sapiens
ccctcttcatctgtc

SEQ ID NO: 1541362 - DNA, 15 bp, Homo sapiens
cctcttcatctgtcc

SEQ ID NO: 1541363 - DNA, 15 bp, Homo sapiens
ctcttcatctgtccc

SEQ ID NO: 1541364 - DNA, 15 bp, Homo sapiens
tcttcatctgtcccc

SEQ ID NO: 1541365 - DNA, 15 bp, Homo sapiens
cttcatctgtcccca

SEQ ID NO: 1541366 - DNA, 15 bp, Homo sapiens
ttcatctgtccccat

SEQ ID NO: 1541367 - DNA, 15 bp, Homo sapiens
tcatctgtccccatt

SEQ ID NO: 1541368 - DNA, 15 bp, Homo sapiens
catctgtccccattc

SEQ ID NO: 1541369 - DNA, 15 bp, Homo sapiens
atctgtccccattcc

SEQ ID NO: 1541370 - DNA, 15 bp, Homo sapiens
tctgtccccattcct

SEQ ID NO: 1541371 - DNA, 15 bp, Homo sapiens
ctgtccccattcctt

SEQ ID NO: 1541372 - DNA, 15 bp, Homo sapiens
tgtccccattccttc

SEQ ID NO: 1541373 - DNA, 15 bp, Homo sapiens
gtccccattccttca

SEQ ID NO: 1541374 - DNA, 15 bp, Homo sapiens
tccccattccttcac

SEQ ID NO: 1541375 - DNA, 15 bp, Homo sapiens
ccccattccttcacc

SEQ ID NO: 1541376 - DNA, 15 bp, Homo sapiens
cccattccttcaccc

SEQ ID NO: 1541377 - DNA, 15 bp, Homo sapiens
ccattccttcacccc

SEQ ID NO: 1541378 - DNA, 15 bp, Homo sapiens
cattccttcaccccc

SEQ ID NO: 1541379 - DNA, 15 bp, Homo sapiens
attccttcacccccc

SEQ ID NO: 1541380 - DNA, 15 bp, Homo sapiens
ttccttcacccccca

SEQ ID NO: 1541381 - DNA, 15 bp, Homo sapiens
tccttcaccccccag

SEQ ID NO: 1541382 - DNA, 15 bp, Homo sapiens
ccttcaccccccagc

SEQ ID NO: 1541383 - DNA, 15 bp, Homo sapiens
cttcaccccccagcc

SEQ ID NO: 1541384 - DNA, 15 bp, Homo sapiens
ttcaccccccagcct

SEQ ID NO: 1541385 - DNA, 15 bp, Homo sapiens
tcaccccccagcctg

SEQ ID NO: 1541386 - DNA, 15 bp, Homo sapiens
caccccccagcctgt

SEQ ID NO: 1541387 - DNA, 15 bp, Homo sapiens
accccccagcctgtc

SEQ ID NO: 1541388 - DNA, 15 bp, Homo sapiens
ccccccagcctgtcc

SEQ ID NO: 1541389 - DNA, 15 bp, Homo sapiens
cccccagcctgtccc

SEQ ID NO: 1541390 - DNA, 15 bp, Homo sapiens
ccccagcctgtcccc

SEQ ID NO: 1541391 - DNA, 15 bp, Homo sapiens
cccagcctgtcccca

SEQ ID NO: 1541392 - DNA, 15 bp, Homo sapiens
ccagcctgtccccaa

SEQ ID NO: 1541393 - DNA, 15 bp, Homo sapiens
cagcctgtccccaac

SEQ ID NO: 1541394 - DNA, 15 bp, Homo sapiens
agcctgtccccaact

SEQ ID NO: 1541395 - DNA, 15 bp, Homo sapiens
gcctgtccccaactt

SEQ ID NO: 1541396 - DNA, 15 bp, Homo sapiens
cctgtccccaacttg

SEQ ID NO: 1541397 - DNA, 15 bp, Homo sapiens
ctgtccccaacttga

SEQ ID NO: 1541398 - DNA, 15 bp, Homo sapiens
tgtccccaacttgac

SEQ ID NO: 1541399 - DNA, 15 bp, Homo sapiens
gtccccaacttgact

SEQ ID NO: 1541400 - DNA, 15 bp, Homo sapiens
tccccaacttgactg

SEQ ID NO: 1541401 - DNA, 15 bp, Homo sapiens
ccccaacttgactga

SEQ ID NO: 1541402 - DNA, 15 bp, Homo sapiens
cccaacttgactgag

SEQ ID NO: 1541403 - DNA, 15 bp, Homo sapiens
ccaacttgactgagg

SEQ ID NO: 1541404 - DNA, 15 bp, Homo sapiens
caacttgactgaggt

SEQ ID NO: 1541405 - DNA, 15 bp, Homo sapiens
aacttgactgaggtt

SEQ ID NO: 1541406 - DNA, 15 bp, Homo sapiens
acttgactgaggttc

SEQ ID NO: 1541407 - DNA, 15 bp, Homo sapiens
cttgactgaggttct

SEQ ID NO: 1541408 - DNA, 15 bp, Homo sapiens
ttgactgaggttctt

SEQ ID NO: 1541409 - DNA, 15 bp, Homo sapiens
tgactgaggttcttt

SEQ ID NO: 1541410 - DNA, 15 bp, Homo sapiens
gactgaggttctttc

SEQ ID NO: 1541411 - DNA, 15 bp, Homo sapiens
actgaggttctttcc

SEQ ID NO: 1541412 - DNA, 15 bp, Homo sapiens
ctgaggttctttcct

SEQ ID NO: 1541413 - DNA, 15 bp, Homo sapiens
tgaggttctttcctg

SEQ ID NO: 1541414 - DNA, 15 bp, Homo sapiens
gaggttctttcctgc

SEQ ID NO: 1541415 - DNA, 15 bp, Homo sapiens
aggttctttcctgca

SEQ ID NO: 1541416 - DNA, 15 bp, Homo sapiens
ggttctttcctgcag

SEQ ID NO: 1541417 - DNA, 15 bp, Homo sapiens
gttctttcctgcaga

SEQ ID NO: 1541418 - DNA, 15 bp, Homo sapiens
ttctttcctgcagat

SEQ ID NO: 1541419 - DNA, 15 bp, Homo sapiens
tctttcctgcagatc

SEQ ID NO: 1541420 - DNA, 15 bp, Homo sapiens
ctttcctgcagatcc

SEQ ID NO: 1541421 - DNA, 15 bp, Homo sapiens
tttcctgcagatccc

SEQ ID NO: 1541422 - DNA, 15 bp, Homo sapiens
ttcctgcagatcccc

SEQ ID NO: 1541423 - DNA, 15 bp, Homo sapiens
tcctgcagatccccg

SEQ ID NO: 1541424 - DNA, 15 bp, Homo sapiens
cctgcagatccccgc

SEQ ID NO: 1541425 - DNA, 15 bp, Homo sapiens
ctgcagatccccgcc

SEQ ID NO: 1541426 - DNA, 15 bp, Homo sapiens
tgcagatccccgccc

SEQ ID NO: 1541427 - DNA, 15 bp, Homo sapiens
gcagatccccgccct

SEQ ID NO: 1541428 - DNA, 15 bp, Homo sapiens
cagatccccgccctt

SEQ ID NO: 1541429 - DNA, 15 bp, Homo sapiens
agatccccgcccttg

SEQ ID NO: 1541430 - DNA, 15 bp, Homo sapiens
gatccccgcccttga

SEQ ID NO: 1541431 - DNA, 15 bp, Homo sapiens
atccccgcccttgag

SEQ ID NO: 1541432 - DNA, 15 bp, Homo sapiens
tccccgcccttgaga

SEQ ID NO: 1541433 - DNA, 15 bp, Homo sapiens
ccccgcccttgagag

SEQ ID NO: 1541434 - DNA, 15 bp, Homo sapiens
cccgcccttgagagg

SEQ ID NO: 1541435 - DNA, 15 bp, Homo sapiens
ccgcccttgagaggg

SEQ ID NO: 1541436 - DNA, 15 bp, Homo sapiens
cgcccttgagagggg

SEQ ID NO: 1541437 - DNA, 15 bp, Homo sapiens
gcccttgagaggggt

SEQ ID NO: 1541438 - DNA, 15 bp, Homo sapiens
cccttgagaggggtt

SEQ ID NO: 1541439 - DNA, 15 bp, Homo sapiens
ccttgagaggggttg

SEQ ID NO: 1541440 - DNA, 15 bp, Homo sapiens
cttgagaggggttgg

SEQ ID NO: 1541441 - DNA, 15 bp, Homo sapiens
ttgagaggggttggt

SEQ ID NO: 1541442 - DNA, 15 bp, Homo sapiens
tgagaggggttggtc

SEQ ID NO: 1541443 - DNA, 15 bp, Homo sapiens
gagaggggttggtcc

SEQ ID NO: 1541444 - DNA, 15 bp, Homo sapiens
agaggggttggtccc

SEQ ID NO: 1541445 - DNA, 15 bp, Homo sapiens
gaggggttggtccca

SEQ ID NO: 1541446 - DNA, 15 bp, Homo sapiens
aggggttggtcccac

SEQ ID NO: 1541447 - DNA, 15 bp, Homo sapiens
ggggttggtcccact

SEQ ID NO: 1541448 - DNA, 15 bp, Homo sapiens
gggttggtcccactg

SEQ ID NO: 1541449 - DNA, 15 bp, Homo sapiens
ggttggtcccactgt

SEQ ID NO: 1541450 - DNA, 15 bp, Homo sapiens
gttggtcccactgtc

SEQ ID NO: 1541451 - DNA, 15 bp, Homo sapiens
ttggtcccactgtca

SEQ ID NO: 1541452 - DNA, 15 bp, Homo sapiens
tggtcccactgtcaa

SEQ ID NO: 1541453 - DNA, 15 bp, Homo sapiens
ggtcccactgtcaac

SEQ ID NO: 1541454 - DNA, 15 bp, Homo sapiens
gtcccactgtcaact

SEQ ID NO: 1541455 - DNA, 15 bp, Homo sapiens
tcccactgtcaactc

SEQ ID NO: 1541456 - DNA, 15 bp, Homo sapiens
cccactgtcaactct

SEQ ID NO: 1541457 - DNA, 15 bp, Homo sapiens
ccactgtcaactctg

SEQ ID NO: 1541458 - DNA, 15 bp, Homo sapiens
cactgtcaactctgc

SEQ ID NO: 1541459 - DNA, 15 bp, Homo sapiens
actgtcaactctgct

SEQ ID NO: 1541460 - DNA, 15 bp, Homo sapiens
ctgtcaactctgctt

SEQ ID NO: 1541461 - DNA, 15 bp, Homo sapiens
tgtcaactctgcttc

SEQ ID NO: 1541462 - DNA, 15 bp, Homo sapiens
gtcaactctgcttct

SEQ ID NO: 1541463 - DNA, 15 bp, Homo sapiens
tcaactctgcttctg

SEQ ID NO: 1541464 - DNA, 15 bp, Homo sapiens
caactctgcttctgt

SEQ ID NO: 1541465 - DNA, 15 bp, Homo sapiens
aactctgcttctgtg

SEQ ID NO: 1541466 - DNA, 15 bp, Homo sapiens
actctgcttctgtgc

SEQ ID NO: 1541467 - DNA, 15 bp, Homo sapiens
ctctgcttctgtgcc

SEQ ID NO: 1541468 - DNA, 15 bp, Homo sapiens
tctgcttctgtgccc

SEQ ID NO: 1541469 - DNA, 15 bp, Homo sapiens
ctgcttctgtgccct

SEQ ID NO: 1541470 - DNA, 15 bp, Homo sapiens
tgcttctgtgccctg

SEQ ID NO: 1541471 - DNA, 15 bp, Homo sapiens
gcttctgtgccctgt

SEQ ID NO: 1541472 - DNA, 15 bp, Homo sapiens
cttctgtgccctgtg

SEQ ID NO: 1541473 - DNA, 15 bp, Homo sapiens
ttctgtgccctgtgc

SEQ ID NO: 1541474 - DNA, 15 bp, Homo sapiens
tctgtgccctgtgcc

SEQ ID NO: 1541475 - DNA, 15 bp, Homo sapiens
ctgtgccctgtgccg

SEQ ID NO: 1541476 - DNA, 15 bp, Homo sapiens
tgtgccctgtgccgc

SEQ ID NO: 1541477 - DNA, 15 bp, Homo sapiens
gtgccctgtgccgca

SEQ ID NO: 1541478 - DNA, 15 bp, Homo sapiens
tgccctgtgccgcac

SEQ ID NO: 1541479 - DNA, 15 bp, Homo sapiens
gccctgtgccgcacc

SEQ ID NO: 1541480 - DNA, 15 bp, Homo sapiens
ccctgtgccgcacct

SEQ ID NO: 1541481 - DNA, 15 bp, Homo sapiens
cctgtgccgcacctg

SEQ ID NO: 1541482 - DNA, 15 bp, Homo sapiens
ctgtgccgcacctgg

SEQ ID NO: 1541483 - DNA, 15 bp, Homo sapiens
tgtgccgcacctggc

SEQ ID NO: 1541484 - DNA, 15 bp, Homo sapiens
gtgccgcacctggca

SEQ ID NO: 1541485 - DNA, 15 bp, Homo sapiens
tgccgcacctggcat

SEQ ID NO: 1541486 - DNA, 15 bp, Homo sapiens
gccgcacctggcatt

SEQ ID NO: 1541487 - DNA, 15 bp, Homo sapiens
ccgcacctggcattc

SEQ ID NO: 1541488 - DNA, 15 bp, Homo sapiens
cgcacctggcattca

SEQ ID NO: 1541489 - DNA, 15 bp, Homo sapiens
gcacctggcattcag

SEQ ID NO: 1541490 - DNA, 15 bp, Homo sapiens
cacctggcattcagt

SEQ ID NO: 1541491 - DNA, 15 bp, Homo sapiens
acctggcattcagtg

SEQ ID NO: 1541492 - DNA, 15 bp, Homo sapiens
cctggcattcagtga

SEQ ID NO: 1541493 - DNA, 15 bp, Homo sapiens
ctggcattcagtgag

SEQ ID NO: 1541494 - DNA, 15 bp, Homo sapiens
tggcattcagtgagc

SEQ ID NO: 1541495 - DNA, 15 bp, Homo sapiens
ggcattcagtgagca

SEQ ID NO: 1541496 - DNA, 15 bp, Homo sapiens
gcattcagtgagcat

SEQ ID NO: 1541497 - DNA, 15 bp, Homo sapiens
cattcagtgagcatc

SEQ ID NO: 1541498 - DNA, 15 bp, Homo sapiens
attcagtgagcatct

SEQ ID NO: 1541499 - DNA, 15 bp, Homo sapiens
ttcagtgagcatctg

SEQ ID NO: 1541500 - DNA, 15 bp, Homo sapiens
tcagtgagcatctgc

SEQ ID NO: 1541501 - DNA, 15 bp, Homo sapiens
cagtgagcatctgct

SEQ ID NO: 1541502 - DNA, 15 bp, Homo sapiens
agtgagcatctgctg

SEQ ID NO: 1541503 - DNA, 15 bp, Homo sapiens
gtgagcatctgctga

SEQ ID NO: 1541504 - DNA, 15 bp, Homo sapiens
tgagcatctgctgaa

SEQ ID NO: 1541505 - DNA, 15 bp, Homo sapiens
gagcatctgctgaag

SEQ ID NO: 1541506 - DNA, 15 bp, Homo sapiens
agcatctgctgaaga

SEQ ID NO: 1541507 - DNA, 15 bp, Homo sapiens
gcatctgctgaagag

SEQ ID NO: 1541508 - DNA, 15 bp, Homo sapiens
catctgctgaagaga

SEQ ID NO: 1541509 - DNA, 15 bp, Homo sapiens
atctgctgaagagat

SEQ ID NO: 1541510 - DNA, 15 bp, Homo sapiens
tctgctgaagagatg

SEQ ID NO: 1541511 - DNA, 15 bp, Homo sapiens
ctgctgaagagatga

SEQ ID NO: 1541512 - DNA, 15 bp, Homo sapiens
tgctgaagagatgag

SEQ ID NO: 1541513 - DNA, 15 bp, Homo sapiens
gctgaagagatgagg

SEQ ID NO: 1541514 - DNA, 15 bp, Homo sapiens
ctgaagagatgaggg

SEQ ID NO: 1541515 - DNA, 15 bp, Homo sapiens
tgaagagatgagggt

SEQ ID NO: 1541516 - DNA, 15 bp, Homo sapiens
gaagagatgagggtc

SEQ ID NO: 1541517 - DNA, 15 bp, Homo sapiens
aagagatgagggtca

SEQ ID NO: 1541518 - DNA, 15 bp, Homo sapiens
agagatgagggtcag

SEQ ID NO: 1541519 - DNA, 15 bp, Homo sapiens
gagatgagggtcaga

SEQ ID NO: 1541520 - DNA, 15 bp, Homo sapiens
agatgagggtcagat

SEQ ID NO: 1541521 - DNA, 15 bp, Homo sapiens
gatgagggtcagatg

SEQ ID NO: 1541522 - DNA, 15 bp, Homo sapiens
atgagggtcagatgc

SEQ ID NO: 1541523 - DNA, 15 bp, Homo sapiens
tgagggtcagatgcc

SEQ ID NO: 1541524 - DNA, 15 bp, Homo sapiens
gagggtcagatgccc

SEQ ID NO: 1541525 - DNA, 15 bp, Homo sapiens
agggtcagatgccct

SEQ ID NO: 1541526 - DNA, 15 bp, Homo sapiens
gggtcagatgccctg

SEQ ID NO: 1541527 - DNA, 15 bp, Homo sapiens
ggtcagatgccctgc

SEQ ID NO: 1541528 - DNA, 15 bp, Homo sapiens
gtcagatgccctgca

SEQ ID NO: 1541529 - DNA, 15 bp, Homo sapiens
tcagatgccctgcag

SEQ ID NO: 1541530 - DNA, 15 bp, Homo sapiens
cagatgccctgcagg

SEQ ID NO: 1541531 - DNA, 15 bp, Homo sapiens
agatgccctgcaggg

SEQ ID NO: 1541532 - DNA, 15 bp, Homo sapiens
gatgccctgcaggga

SEQ ID NO: 1541533 - DNA, 15 bp, Homo sapiens
atgccctgcagggag

SEQ ID NO: 1541534 - DNA, 15 bp, Homo sapiens
tgccctgcagggagt

SEQ ID NO: 1541535 - DNA, 15 bp, Homo sapiens
gccctgcagggagtg

SEQ ID NO: 1541536 - DNA, 15 bp, Homo sapiens
ccctgcagggagtgt

SEQ ID NO: 1541537 - DNA, 15 bp, Homo sapiens
cctgcagggagtgtg

SEQ ID NO: 1541538 - DNA, 15 bp, Homo sapiens
ctgcagggagtgtgg

SEQ ID NO: 1541539 - DNA, 15 bp, Homo sapiens
tgcagggagtgtggg

SEQ ID NO: 1541540 - DNA, 15 bp, Homo sapiens
gcagggagtgtgggg

SEQ ID NO: 1541541 - DNA, 15 bp, Homo sapiens
cagggagtgtggggg

SEQ ID NO: 1541542 - DNA, 15 bp, Homo sapiens
agggagtgtgggggc

SEQ ID NO: 1541543 - DNA, 15 bp, Homo sapiens
gggagtgtgggggcg

SEQ ID NO: 1541544 - DNA, 15 bp, Homo sapiens
ggagtgtgggggcgt

SEQ ID NO: 1541545 - DNA, 15 bp, Homo sapiens
gagtgtgggggcgtc

SEQ ID NO: 1541546 - DNA, 15 bp, Homo sapiens
agtgtgggggcgtcc

SEQ ID NO: 1541547 - DNA, 15 bp, Homo sapiens
gtgtgggggcgtcct

SEQ ID NO: 1541548 - DNA, 15 bp, Homo sapiens
tgtgggggcgtcctc

SEQ ID NO: 1541549 - DNA, 15 bp, Homo sapiens
gtgggggcgtcctca

SEQ ID NO: 1541550 - DNA, 15 bp, Homo sapiens
tgggggcgtcctcag

SEQ ID NO: 1541551 - DNA, 15 bp, Homo sapiens
gggggcgtcctcagg

SEQ ID NO: 1541552 - DNA, 15 bp, Homo sapiens
ggggcgtcctcaggc

SEQ ID NO: 1541553 - DNA, 15 bp, Homo sapiens
gggcgtcctcaggca

SEQ ID NO: 1541554 - DNA, 15 bp, Homo sapiens
ggcgtcctcaggcaa

SEQ ID NO: 1541555 - DNA, 15 bp, Homo sapiens
gcgtcctcaggcaag

SEQ ID NO: 1541556 - DNA, 15 bp, Homo sapiens
cgtcctcaggcaaga

SEQ ID NO: 1541557 - DNA, 15 bp, Homo sapiens
gtcctcaggcaagaa

SEQ ID NO: 1541558 - DNA, 15 bp, Homo sapiens
tcctcaggcaagaaa

SEQ ID NO: 1541559 - DNA, 15 bp, Homo sapiens
cctcaggcaagaaaa

SEQ ID NO: 1541560 - DNA, 15 bp, Homo sapiens
ctcaggcaagaaaag

SEQ ID NO: 1541561 - DNA, 15 bp, Homo sapiens
tcaggcaagaaaagt

SEQ ID NO: 1541562 - DNA, 15 bp, Homo sapiens
caggcaagaaaagtt

SEQ ID NO: 1541563 - DNA, 15 bp, Homo sapiens
aggcaagaaaagttg

SEQ ID NO: 1541564 - DNA, 15 bp, Homo sapiens
ggcaagaaaagttgt

SEQ ID NO: 1541565 - DNA, 15 bp, Homo sapiens
gcaagaaaagttgta

SEQ ID NO: 1541566 - DNA, 15 bp, Homo sapiens
caagaaaagttgtac

SEQ ID NO: 1541567 - DNA, 15 bp, Homo sapiens
aagaaaagttgtacg

SEQ ID NO: 1541568 - DNA, 15 bp, Homo sapiens
agaaaagttgtacgt

SEQ ID NO: 1541569 - DNA, 15 bp, Homo sapiens
gaaaagttgtacgtt

SEQ ID NO: 1541570 - DNA, 15 bp, Homo sapiens
aaaagttgtacgttt

SEQ ID NO: 1541571 - DNA, 15 bp, Homo sapiens
aaagttgtacgtttg

SEQ ID NO: 1541572 - DNA, 15 bp, Homo sapiens
aagttgtacgtttgg

SEQ ID NO: 1541573 - DNA, 15 bp, Homo sapiens
agttgtacgtttggc

SEQ ID NO: 1541574 - DNA, 15 bp, Homo sapiens
gttgtacgtttggct

SEQ ID NO: 1541575 - DNA, 15 bp, Homo sapiens
ttgtacgtttggctg

SEQ ID NO: 1541576 - DNA, 15 bp, Homo sapiens
tgtacgtttggctgt

SEQ ID NO: 1541577 - DNA, 15 bp, Homo sapiens
gtacgtttggctgtg

SEQ ID NO: 1541578 - DNA, 15 bp, Homo sapiens
tacgtttggctgtgg

SEQ ID NO: 1541579 - DNA, 15 bp, Homo sapiens
acgtttggctgtggg

SEQ ID NO: 1541580 - DNA, 15 bp, Homo sapiens
cgtttggctgtgggc

SEQ ID NO: 1541581 - DNA, 15 bp, Homo sapiens
gtttggctgtgggcc

SEQ ID NO: 1541582 - DNA, 15 bp, Homo sapiens
tttggctgtgggccc

SEQ ID NO: 1541583 - DNA, 15 bp, Homo sapiens
ttggctgtgggccct

SEQ ID NO: 1541584 - DNA, 15 bp, Homo sapiens
tggctgtgggccctg

SEQ ID NO: 1541585 - DNA, 15 bp, Homo sapiens
ggctgtgggccctga

SEQ ID NO: 1541586 - DNA, 15 bp, Homo sapiens
gctgtgggccctgat

SEQ ID NO: 1541587 - DNA, 15 bp, Homo sapiens
ctgtgggccctgatt

SEQ ID NO: 1541588 - DNA, 15 bp, Homo sapiens
tgtgggccctgatta

SEQ ID NO: 1541589 - DNA, 15 bp, Homo sapiens
gtgggccctgattat

SEQ ID NO: 1541590 - DNA, 15 bp, Homo sapiens
tgggccctgattatg

SEQ ID NO: 1541591 - DNA, 15 bp, Homo sapiens
gggccctgattatgt

SEQ ID NO: 1541592 - DNA, 15 bp, Homo sapiens
ggccctgattatgtg

SEQ ID NO: 1541593 - DNA, 15 bp, Homo sapiens
gccctgattatgtgt

SEQ ID NO: 1541594 - DNA, 15 bp, Homo sapiens
ccctgattatgtgtc

SEQ ID NO: 1541595 - DNA, 15 bp, Homo sapiens
cctgattatgtgtcc

SEQ ID NO: 1541596 - DNA, 15 bp, Homo sapiens
ctgattatgtgtcct

SEQ ID NO: 1541597 - DNA, 15 bp, Homo sapiens
tgattatgtgtcctg

SEQ ID NO: 1541598 - DNA, 15 bp, Homo sapiens
gattatgtgtcctgt

SEQ ID NO: 1541599 - DNA, 15 bp, Homo sapiens
attatgtgtcctgtg

SEQ ID NO: 1541600 - DNA, 15 bp, Homo sapiens
ttatgtgtcctgtga

SEQ ID NO: 1541601 - DNA, 15 bp, Homo sapiens
tatgtgtcctgtgac

SEQ ID NO: 1541602 - DNA, 15 bp, Homo sapiens
atgtgtcctgtgacc

SEQ ID NO: 1541603 - DNA, 15 bp, Homo sapiens
tgtgtcctgtgacct

SEQ ID NO: 1541604 - DNA, 15 bp, Homo sapiens
gtgtcctgtgacctc

SEQ ID NO: 1541605 - DNA, 15 bp, Homo sapiens
tgtcctgtgacctct

SEQ ID NO: 1541606 - DNA, 15 bp, Homo sapiens
gtcctgtgacctctt

SEQ ID NO: 1541607 - DNA, 15 bp, Homo sapiens
tcctgtgacctcttg

SEQ ID NO: 1541608 - DNA, 15 bp, Homo sapiens
cctgtgacctcttgg

SEQ ID NO: 1541609 - DNA, 15 bp, Homo sapiens
ctgtgacctcttggg

SEQ ID NO: 1541610 - DNA, 15 bp, Homo sapiens
tgtgacctcttgggt

SEQ ID NO: 1541611 - DNA, 15 bp, Homo sapiens
gtgacctcttgggtg

SEQ ID NO: 1541612 - DNA, 15 bp, Homo sapiens
tgacctcttgggtga

SEQ ID NO: 1541613 - DNA, 15 bp, Homo sapiens
gacctcttgggtgag

SEQ ID NO: 1541614 - DNA, 15 bp, Homo sapiens
acctcttgggtgagg

SEQ ID NO: 1541615 - DNA, 15 bp, Homo sapiens
cctcttgggtgaggt

SEQ ID NO: 1541616 - DNA, 15 bp, Homo sapiens
ctcttgggtgaggtc

SEQ ID NO: 1541617 - DNA, 15 bp, Homo sapiens
tcttgggtgaggtca

SEQ ID NO: 1541618 - DNA, 15 bp, Homo sapiens
cttgggtgaggtcag

SEQ ID NO: 1541619 - DNA, 15 bp, Homo sapiens
ttgggtgaggtcagc

SEQ ID NO: 1541620 - DNA, 15 bp, Homo sapiens
tgggtgaggtcagca

SEQ ID NO: 1541621 - DNA, 15 bp, Homo sapiens
gggtgaggtcagcaa

SEQ ID NO: 1541622 - DNA, 15 bp, Homo sapiens
ggtgaggtcagcaag

SEQ ID NO: 1541623 - DNA, 15 bp, Homo sapiens
gtgaggtcagcaaga

SEQ ID NO: 1541624 - DNA, 15 bp, Homo sapiens
tgaggtcagcaagag

SEQ ID NO: 1541625 - DNA, 15 bp, Homo sapiens
gaggtcagcaagaga

SEQ ID NO: 1541626 - DNA, 15 bp, Homo sapiens
aggtcagcaagagaa

SEQ ID NO: 1541627 - DNA, 15 bp, Homo sapiens
ggtcagcaagagaaa

SEQ ID NO: 1541628 - DNA, 15 bp, Homo sapiens
gtcagcaagagaaac

SEQ ID NO: 1541629 - DNA, 15 bp, Homo sapiens
tcagcaagagaaacc

SEQ ID NO: 1541630 - DNA, 15 bp, Homo sapiens
cagcaagagaaacct

SEQ ID NO: 1541631 - DNA, 15 bp, Homo sapiens
agcaagagaaacctc

SEQ ID NO: 1541632 - DNA, 15 bp, Homo sapiens
gcaagagaaacctct

SEQ ID NO: 1541633 - DNA, 15 bp, Homo sapiens
caagagaaacctctg

SEQ ID NO: 1541634 - DNA, 15 bp, Homo sapiens
aagagaaacctctgc

SEQ ID NO: 1541635 - DNA, 15 bp, Homo sapiens
agagaaacctctgca

SEQ ID NO: 1541636 - DNA, 15 bp, Homo sapiens
gagaaacctctgcaa

SEQ ID NO: 1541637 - DNA, 15 bp, Homo sapiens
agaaacctctgcaag

SEQ ID NO: 1541638 - DNA, 15 bp, Homo sapiens
gaaacctctgcaagc

SEQ ID NO: 1541639 - DNA, 15 bp, Homo sapiens
aaacctctgcaagct

SEQ ID NO: 1541640 - DNA, 15 bp, Homo sapiens
aacctctgcaagctg

SEQ ID NO: 1541641 - DNA, 15 bp, Homo sapiens
acctctgcaagctgg

SEQ ID NO: 1541642 - DNA, 15 bp, Homo sapiens
cctctgcaagctggc

SEQ ID NO: 1541643 - DNA, 15 bp, Homo sapiens
ctctgcaagctggct

SEQ ID NO: 1541644 - DNA, 15 bp, Homo sapiens
tctgcaagctggctg

SEQ ID NO: 1541645 - DNA, 15 bp, Homo sapiens
ctgcaagctggctgg

SEQ ID NO: 1541646 - DNA, 15 bp, Homo sapiens
tgcaagctggctggg

SEQ ID NO: 1541647 - DNA, 15 bp, Homo sapiens
gcaagctggctgggg

SEQ ID NO: 1541648 - DNA, 15 bp, Homo sapiens
caagctggctggggc

SEQ ID NO: 1541649 - DNA, 15 bp, Homo sapiens
aagctggctggggct

SEQ ID NO: 1541650 - DNA, 15 bp, Homo sapiens
agctggctggggctg

SEQ ID NO: 1541651 - DNA, 15 bp, Homo sapiens
gctggctggggctgc

SEQ ID NO: 1541652 - DNA, 15 bp, Homo sapiens
ctggctggggctgcc

SEQ ID NO: 1541653 - DNA, 15 bp, Homo sapiens
tggctggggctgcct

SEQ ID NO: 1541654 - DNA, 15 bp, Homo sapiens
ggctggggctgcctc

SEQ ID NO: 1541655 - DNA, 15 bp, Homo sapiens
gctggggctgcctcc

SEQ ID NO: 1541656 - DNA, 15 bp, Homo sapiens
ctggggctgcctccc

SEQ ID NO: 1541657 - DNA, 15 bp, Homo sapiens
tggggctgcctccca

SEQ ID NO: 1541658 - DNA, 15 bp, Homo sapiens
ggggctgcctcccag

SEQ ID NO: 1541659 - DNA, 15 bp, Homo sapiens
gggctgcctcccaga

SEQ ID NO: 1541660 - DNA, 15 bp, Homo sapiens
ggctgcctcccagag

SEQ ID NO: 1541661 - DNA, 15 bp, Homo sapiens
gctgcctcccagagg

SEQ ID NO: 1541662 - DNA, 15 bp, Homo sapiens
ctgcctcccagaggc

SEQ ID NO: 1541663 - DNA, 15 bp, Homo sapiens
tgcctcccagaggct

SEQ ID NO: 1541664 - DNA, 15 bp, Homo sapiens
gcctcccagaggctg

SEQ ID NO: 1541665 - DNA, 15 bp, Homo sapiens
cctcccagaggctgc

SEQ ID NO: 1541666 - DNA, 15 bp, Homo sapiens
ctcccagaggctgcc

SEQ ID NO: 1541667 - DNA, 15 bp, Homo sapiens
tcccagaggctgcca

SEQ ID NO: 1541668 - DNA, 15 bp, Homo sapiens
cccagaggctgccag

SEQ ID NO: 1541669 - DNA, 15 bp, Homo sapiens
ccagaggctgccagg

SEQ ID NO: 1541670 - DNA, 15 bp, Homo sapiens
cagaggctgccaggg

SEQ ID NO: 1541671 - DNA, 15 bp, Homo sapiens
agaggctgccagggg

SEQ ID NO: 1541672 - DNA, 15 bp, Homo sapiens
gaggctgccaggggg

SEQ ID NO: 1541673 - DNA, 15 bp, Homo sapiens
aggctgccaggggga

SEQ ID NO: 1541674 - DNA, 15 bp, Homo sapiens
ggctgccagggggag

SEQ ID NO: 1541675 - DNA, 15 bp, Homo sapiens
gctgccagggggagg

SEQ ID NO: 1541676 - DNA, 15 bp, Homo sapiens
ctgccagggggaggg

SEQ ID NO: 1541677 - DNA, 15 bp, Homo sapiens
tgccagggggaggga

SEQ ID NO: 1541678 - DNA, 15 bp, Homo sapiens
gccagggggagggac

SEQ ID NO: 1541679 - DNA, 15 bp, Homo sapiens
ccagggggagggaca

SEQ ID NO: 1541680 - DNA, 15 bp, Homo sapiens
cagggggagggacag

SEQ ID NO: 1541681 - DNA, 15 bp, Homo sapiens
agggggagggacagg

SEQ ID NO: 1541682 - DNA, 15 bp, Homo sapiens
gggggagggacaggc

SEQ ID NO: 1541683 - DNA, 15 bp, Homo sapiens
ggggagggacaggct

SEQ ID NO: 1541684 - DNA, 15 bp, Homo sapiens
gggagggacaggctc

SEQ ID NO: 1541685 - DNA, 15 bp, Homo sapiens
ggagggacaggctct

SEQ ID NO: 1541686 - DNA, 15 bp, Homo sapiens
gagggacaggctctg

SEQ ID NO: 1541687 - DNA, 15 bp, Homo sapiens
agggacaggctctgt

SEQ ID NO: 1541688 - DNA, 15 bp, Homo sapiens
gggacaggctctgtc

SEQ ID NO: 1541689 - DNA, 15 bp, Homo sapiens
ggacaggctctgtct

SEQ ID NO: 1541690 - DNA, 15 bp, Homo sapiens
gacaggctctgtctg

SEQ ID NO: 1541691 - DNA, 15 bp, Homo sapiens
acaggctctgtctgt

SEQ ID NO: 1541692 - DNA, 15 bp, Homo sapiens
caggctctgtctgtg

SEQ ID NO: 1541693 - DNA, 15 bp, Homo sapiens
aggctctgtctgtgc

SEQ ID NO: 1541694 - DNA, 15 bp, Homo sapiens
ggctctgtctgtgct

SEQ ID NO: 1541695 - DNA, 15 bp, Homo sapiens
gctctgtctgtgctc

SEQ ID NO: 1541696 - DNA, 15 bp, Homo sapiens
ctctgtctgtgctct

SEQ ID NO: 1541697 - DNA, 15 bp, Homo sapiens
tctgtctgtgctctt

SEQ ID NO: 1541698 - DNA, 15 bp, Homo sapiens
ctgtctgtgctcttc

SEQ ID NO: 1541699 - DNA, 15 bp, Homo sapiens
tgtctgtgctcttct

SEQ ID NO: 1541700 - DNA, 15 bp, Homo sapiens
gtctgtgctcttctt

SEQ ID NO: 1541701 - DNA, 15 bp, Homo sapiens
tctgtgctcttcttc

SEQ ID NO: 1541702 - DNA, 15 bp, Homo sapiens
ctgtgctcttcttcc

SEQ ID NO: 1541703 - DNA, 15 bp, Homo sapiens
tgtgctcttcttccg

SEQ ID NO: 1541704 - DNA, 15 bp, Homo sapiens
gtgctcttcttccga

SEQ ID NO: 1541705 - DNA, 15 bp, Homo sapiens
tgctcttcttccgag

SEQ ID NO: 1541706 - DNA, 15 bp, Homo sapiens
gctcttcttccgagg

SEQ ID NO: 1541707 - DNA, 15 bp, Homo sapiens
ctcttcttccgaggc

SEQ ID NO: 1541708 - DNA, 15 bp, Homo sapiens
tcttcttccgaggct

SEQ ID NO: 1541709 - DNA, 15 bp, Homo sapiens
cttcttccgaggcta

SEQ ID NO: 1541710 - DNA, 15 bp, Homo sapiens
ttcttccgaggctac

SEQ ID NO: 1541711 - DNA, 15 bp, Homo sapiens
tcttccgaggctaca

SEQ ID NO: 1541712 - DNA, 15 bp, Homo sapiens
cttccgaggctacac

SEQ ID NO: 1541713 - DNA, 15 bp, Homo sapiens
ttccgaggctacacc

SEQ ID NO: 1541714 - DNA, 15 bp, Homo sapiens
tccgaggctacacct

SEQ ID NO: 1541715 - DNA, 15 bp, Homo sapiens
ccgaggctacacctg

SEQ ID NO: 1541716 - DNA, 15 bp, Homo sapiens
cgaggctacacctgg

SEQ ID NO: 1541717 - DNA, 15 bp, Homo sapiens
gaggctacacctggg

SEQ ID NO: 1541718 - DNA, 15 bp, Homo sapiens
aggctacacctgggg

SEQ ID NO: 1541719 - DNA, 15 bp, Homo sapiens
ggctacacctggggc

SEQ ID NO: 1541720 - DNA, 15 bp, Homo sapiens
gctacacctggggcg

SEQ ID NO: 1541721 - DNA, 15 bp, Homo sapiens
ctacacctggggcgc

SEQ ID NO: 1541722 - DNA, 15 bp, Homo sapiens
tacacctggggcgcc

SEQ ID NO: 1541723 - DNA, 15 bp, Homo sapiens
acacctggggcgcca

SEQ ID NO: 1541724 - DNA, 15 bp, Homo sapiens
cacctggggcgccag

SEQ ID NO: 1541725 - DNA, 15 bp, Homo sapiens
acctggggcgccagg

SEQ ID NO: 1541726 - DNA, 15 bp, Homo sapiens
cctggggcgccaggc

SEQ ID NO: 1541727 - DNA, 15 bp, Homo sapiens
ctggggcgccaggct

SEQ ID NO: 1541728 - DNA, 15 bp, Homo sapiens
tggggcgccaggctc

SEQ ID NO: 1541729 - DNA, 15 bp, Homo sapiens
ggggcgccaggctct

SEQ ID NO: 1541730 - DNA, 15 bp, Homo sapiens
gggcgccaggctctc

SEQ ID NO: 1541731 - DNA, 15 bp, Homo sapiens
ggcgccaggctctca

SEQ ID NO: 1541732 - DNA, 15 bp, Homo sapiens
gcgccaggctctcag

SEQ ID NO: 1541733 - DNA, 15 bp, Homo sapiens
cgccaggctctcagg

SEQ ID NO: 1541734 - DNA, 15 bp, Homo sapiens
gccaggctctcaggg

SEQ ID NO: 1541735 - DNA, 15 bp, Homo sapiens
ccaggctctcagggc

SEQ ID NO: 1541736 - DNA, 15 bp, Homo sapiens
caggctctcagggct

SEQ ID NO: 1541737 - DNA, 15 bp, Homo sapiens
aggctctcagggctc

SEQ ID NO: 1541738 - DNA, 15 bp, Homo sapiens
ggctctcagggctcc

SEQ ID NO: 1541739 - DNA, 15 bp, Homo sapiens
gctctcagggctccc

SEQ ID NO: 1541740 - DNA, 15 bp, Homo sapiens
ctctcagggctcccc

SEQ ID NO: 1541741 - DNA, 15 bp, Homo sapiens
tctcagggctcccca

SEQ ID NO: 1541742 - DNA, 15 bp, Homo sapiens
ctcagggctccccag

SEQ ID NO: 1541743 - DNA, 15 bp, Homo sapiens
tcagggctccccagg

SEQ ID NO: 1541744 - DNA, 15 bp, Homo sapiens
cagggctccccaggt

SEQ ID NO: 1541745 - DNA, 15 bp, Homo sapiens
agggctccccaggta

SEQ ID NO: 1541746 - DNA, 15 bp, Homo sapiens
gggctccccaggtac

SEQ ID NO: 1541747 - DNA, 15 bp, Homo sapiens
ggctccccaggtacc

SEQ ID NO: 1541748 - DNA, 15 bp, Homo sapiens
gctccccaggtacca

SEQ ID NO: 1541749 - DNA, 15 bp, Homo sapiens
ctccccaggtaccac

SEQ ID NO: 1541750 - DNA, 15 bp, Homo sapiens
tccccaggtaccacc

SEQ ID NO: 1541751 - DNA, 15 bp, Homo sapiens
ccccaggtaccacca

SEQ ID NO: 1541752 - DNA, 15 bp, Homo sapiens
cccaggtaccaccac

SEQ ID NO: 1541753 - DNA, 15 bp, Homo sapiens
ccaggtaccaccaca

SEQ ID NO: 1541754 - DNA, 15 bp, Homo sapiens
caggtaccaccacat

SEQ ID NO: 1541755 - DNA, 15 bp, Homo sapiens
aggtaccaccacatt

SEQ ID NO: 1541756 - DNA, 15 bp, Homo sapiens
ggtaccaccacattt

SEQ ID NO: 1541757 - DNA, 15 bp, Homo sapiens
gtaccaccacatttc

SEQ ID NO: 1541758 - DNA, 15 bp, Homo sapiens
taccaccacatttcc

SEQ ID NO: 1541759 - DNA, 15 bp, Homo sapiens
accaccacatttcct

SEQ ID NO: 1541760 - DNA, 15 bp, Homo sapiens
ccaccacatttccta

SEQ ID NO: 1541761 - DNA, 15 bp, Homo sapiens
caccacatttcctac

SEQ ID NO: 1541762 - DNA, 15 bp, Homo sapiens
accacatttcctaca

SEQ ID NO: 1541763 - DNA, 15 bp, Homo sapiens
ccacatttcctacac

SEQ ID NO: 1541764 - DNA, 15 bp, Homo sapiens
cacatttcctacact

SEQ ID NO: 1541765 - DNA, 15 bp, Homo sapiens
acatttcctacactg

SEQ ID NO: 1541766 - DNA, 15 bp, Homo sapiens
catttcctacactgc

SEQ ID NO: 1541767 - DNA, 15 bp, Homo sapiens
atttcctacactgct

SEQ ID NO: 1541768 - DNA, 15 bp, Homo sapiens
tttcctacactgctt

SEQ ID NO: 1541769 - DNA, 15 bp, Homo sapiens
ttcctacactgcttg

SEQ ID NO: 1541770 - DNA, 15 bp, Homo sapiens
tcctacactgcttgg

SEQ ID NO: 1541771 - DNA, 15 bp, Homo sapiens
cctacactgcttggg

SEQ ID NO: 1541772 - DNA, 15 bp, Homo sapiens
ctacactgcttggga

SEQ ID NO: 1541773 - DNA, 15 bp, Homo sapiens
tacactgcttgggaa

SEQ ID NO: 1541774 - DNA, 15 bp, Homo sapiens
acactgcttgggaaa

SEQ ID NO: 1541775 - DNA, 15 bp, Homo sapiens
cactgcttgggaaag

SEQ ID NO: 1541776 - DNA, 15 bp, Homo sapiens
actgcttgggaaagc

SEQ ID NO: 1541777 - DNA, 15 bp, Homo sapiens
ctgcttgggaaagcc

SEQ ID NO: 1541778 - DNA, 15 bp, Homo sapiens
tgcttgggaaagccc

SEQ ID NO: 1541779 - DNA, 15 bp, Homo sapiens
gcttgggaaagccct

SEQ ID NO: 1541780 - DNA, 15 bp, Homo sapiens
cttgggaaagccctg

SEQ ID NO: 1541781 - DNA, 15 bp, Homo sapiens
ttgggaaagccctgt

SEQ ID NO: 1541782 - DNA, 15 bp, Homo sapiens
tgggaaagccctgta

SEQ ID NO: 1541783 - DNA, 15 bp, Homo sapiens
gggaaagccctgtaa

SEQ ID NO: 1541784 - DNA, 15 bp, Homo sapiens
ggaaagccctgtaag

SEQ ID NO: 1541785 - DNA, 15 bp, Homo sapiens
gaaagccctgtaagt

SEQ ID NO: 1541786 - DNA, 15 bp, Homo sapiens
aaagccctgtaagtt

SEQ ID NO: 1541787 - DNA, 15 bp, Homo sapiens
aagccctgtaagttt

SEQ ID NO: 1541788 - DNA, 15 bp, Homo sapiens
agccctgtaagtttg

SEQ ID NO: 1541789 - DNA, 15 bp, Homo sapiens
gccctgtaagtttgc

SEQ ID NO: 1541790 - DNA, 15 bp, Homo sapiens
ccctgtaagtttgca

SEQ ID NO: 1541791 - DNA, 15 bp, Homo sapiens
cctgtaagtttgcac

SEQ ID NO: 1541792 - DNA, 15 bp, Homo sapiens
ctgtaagtttgcaca

SEQ ID NO: 1541793 - DNA, 15 bp, Homo sapiens
tgtaagtttgcacag

SEQ ID NO: 1541794 - DNA, 15 bp, Homo sapiens
gtaagtttgcacaga

SEQ ID NO: 1541795 - DNA, 15 bp, Homo sapiens
taagtttgcacagac

SEQ ID NO: 1541796 - DNA, 15 bp, Homo sapiens
aagtttgcacagaca

SEQ ID NO: 1541797 - DNA, 15 bp, Homo sapiens
agtttgcacagacac

SEQ ID NO: 1541798 - DNA, 15 bp, Homo sapiens
gtttgcacagacacc

SEQ ID NO: 1541799 - DNA, 15 bp, Homo sapiens
tttgcacagacaccc

SEQ ID NO: 1541800 - DNA, 15 bp, Homo sapiens
ttgcacagacaccca

SEQ ID NO: 1541801 - DNA, 15 bp, Homo sapiens
tgcacagacacccag

SEQ ID NO: 1541802 - DNA, 15 bp, Homo sapiens
gcacagacacccagc

SEQ ID NO: 1541803 - DNA, 15 bp, Homo sapiens
cacagacacccagca

SEQ ID NO: 1541804 - DNA, 15 bp, Homo sapiens
acagacacccagcat

SEQ ID NO: 1541805 - DNA, 15 bp, Homo sapiens
cagacacccagcatg

SEQ ID NO: 1541806 - DNA, 15 bp, Homo sapiens
agacacccagcatga

SEQ ID NO: 1541807 - DNA, 15 bp, Homo sapiens
gacacccagcatgag

SEQ ID NO: 1541808 - DNA, 15 bp, Homo sapiens
acacccagcatgagg

SEQ ID NO: 1541809 - DNA, 15 bp, Homo sapiens
cacccagcatgaggc

SEQ ID NO: 1541810 - DNA, 15 bp, Homo sapiens
acccagcatgaggct

SEQ ID NO: 1541811 - DNA, 15 bp, Homo sapiens
cccagcatgaggctc

SEQ ID NO: 1541812 - DNA, 15 bp, Homo sapiens
ccagcatgaggctcg

SEQ ID NO: 1541813 - DNA, 15 bp, Homo sapiens
cagcatgaggctcgc

SEQ ID NO: 1541814 - DNA, 15 bp, Homo sapiens
agcatgaggctcgcc

SEQ ID NO: 1541815 - DNA, 15 bp, Homo sapiens
gcatgaggctcgcca

SEQ ID NO: 1541816 - DNA, 15 bp, Homo sapiens
catgaggctcgccag

SEQ ID NO: 1541817 - DNA, 15 bp, Homo sapiens
atgaggctcgccaga

SEQ ID NO: 1541818 - DNA, 15 bp, Homo sapiens
tgaggctcgccagag

SEQ ID NO: 1541819 - DNA, 15 bp, Homo sapiens
gaggctcgccagaga

SEQ ID NO: 1541820 - DNA, 15 bp, Homo sapiens
aggctcgccagagag

SEQ ID NO: 1541821 - DNA, 15 bp, Homo sapiens
ggctcgccagagaga

SEQ ID NO: 1541822 - DNA, 15 bp, Homo sapiens
gctcgccagagagat

SEQ ID NO: 1541823 - DNA, 15 bp, Homo sapiens
ctcgccagagagata

SEQ ID NO: 1541824 - DNA, 15 bp, Homo sapiens
tcgccagagagatac

SEQ ID NO: 1541825 - DNA, 15 bp, Homo sapiens
cgccagagagatact

SEQ ID NO: 1541826 - DNA, 15 bp, Homo sapiens
gccagagagatactt

SEQ ID NO: 1541827 - DNA, 15 bp, Homo sapiens
ccagagagatacttg

SEQ ID NO: 1541828 - DNA, 15 bp, Homo sapiens
cagagagatacttgt

SEQ ID NO: 1541829 - DNA, 15 bp, Homo sapiens
agagagatacttgta

SEQ ID NO: 1541830 - DNA, 15 bp, Homo sapiens
gagagatacttgtag

SEQ ID NO: 1541831 - DNA, 15 bp, Homo sapiens
agagatacttgtagc

SEQ ID NO: 1541832 - DNA, 15 bp, Homo sapiens
gagatacttgtagct

SEQ ID NO: 1541833 - DNA, 15 bp, Homo sapiens
agatacttgtagctg

SEQ ID NO: 1541834 - DNA, 15 bp, Homo sapiens
gatacttgtagctgg

SEQ ID NO: 1541835 - DNA, 15 bp, Homo sapiens
atacttgtagctggg

SEQ ID NO: 1541836 - DNA, 15 bp, Homo sapiens
tacttgtagctgggg

SEQ ID NO: 1541837 - DNA, 15 bp, Homo sapiens
acttgtagctggggt

SEQ ID NO: 1541838 - DNA, 15 bp, Homo sapiens
cttgtagctggggtc

SEQ ID NO: 1541839 - DNA, 15 bp, Homo sapiens
ttgtagctggggtct

SEQ ID NO: 1541840 - DNA, 15 bp, Homo sapiens
tgtagctggggtctg

SEQ ID NO: 1541841 - DNA, 15 bp, Homo sapiens
gtagctggggtctgg

SEQ ID NO: 1541842 - DNA, 15 bp, Homo sapiens
tagctggggtctggg

SEQ ID NO: 1541843 - DNA, 15 bp, Homo sapiens
agctggggtctgggc

SEQ ID NO: 1541844 - DNA, 15 bp, Homo sapiens
gctggggtctgggca

SEQ ID NO: 1541845 - DNA, 15 bp, Homo sapiens
ctggggtctgggcac

SEQ ID NO: 1541846 - DNA, 15 bp, Homo sapiens
tggggtctgggcacc

SEQ ID NO: 1541847 - DNA, 15 bp, Homo sapiens
ggggtctgggcacca

SEQ ID NO: 1541848 - DNA, 15 bp, Homo sapiens
gggtctgggcaccag

SEQ ID NO: 1541849 - DNA, 15 bp, Homo sapiens
ggtctgggcaccagg

SEQ ID NO: 1541850 - DNA, 15 bp, Homo sapiens
gtctgggcaccagga

SEQ ID NO: 1541851 - DNA, 15 bp, Homo sapiens
tctgggcaccaggaa

SEQ ID NO: 1541852 - DNA, 15 bp, Homo sapiens
ctgggcaccaggaac

SEQ ID NO: 1541853 - DNA, 15 bp, Homo sapiens
tgggcaccaggaaca

SEQ ID NO: 1541854 - DNA, 15 bp, Homo sapiens
gggcaccaggaacag

SEQ ID NO: 1541855 - DNA, 15 bp, Homo sapiens
ggcaccaggaacagc

SEQ ID NO: 1541856 - DNA, 15 bp, Homo sapiens
gcaccaggaacagct

SEQ ID NO: 1541857 - DNA, 15 bp, Homo sapiens
caccaggaacagctt

SEQ ID NO: 1541858 - DNA, 15 bp, Homo sapiens
accaggaacagcttg

SEQ ID NO: 1541859 - DNA, 15 bp, Homo sapiens
ccaggaacagcttgg

SEQ ID NO: 1541860 - DNA, 15 bp, Homo sapiens
caggaacagcttggt

SEQ ID NO: 1541861 - DNA, 15 bp, Homo sapiens
aggaacagcttggtg

SEQ ID NO: 1541862 - DNA, 15 bp, Homo sapiens
ggaacagcttggtgc

SEQ ID NO: 1541863 - DNA, 15 bp, Homo sapiens
gaacagcttggtgct

SEQ ID NO: 1541864 - DNA, 15 bp, Homo sapiens
aacagcttggtgctg

SEQ ID NO: 1541865 - DNA, 15 bp, Homo sapiens
acagcttggtgctgg

SEQ ID NO: 1541866 - DNA, 15 bp, Homo sapiens
cagcttggtgctggg

SEQ ID NO: 1541867 - DNA, 15 bp, Homo sapiens
agcttggtgctgggc

SEQ ID NO: 1541868 - DNA, 15 bp, Homo sapiens
gcttggtgctgggcc

SEQ ID NO: 1541869 - DNA, 15 bp, Homo sapiens
cttggtgctgggcct

SEQ ID NO: 1541870 - DNA, 15 bp, Homo sapiens
ttggtgctgggcctg

SEQ ID NO: 1541871 - DNA, 15 bp, Homo sapiens
tggtgctgggcctga

SEQ ID NO: 1541872 - DNA, 15 bp, Homo sapiens
ggtgctgggcctgaa

SEQ ID NO: 1541873 - DNA, 15 bp, Homo sapiens
gtgctgggcctgaag

SEQ ID NO: 1541874 - DNA, 15 bp, Homo sapiens
tgctgggcctgaagt

SEQ ID NO: 1541875 - DNA, 15 bp, Homo sapiens
gctgggcctgaagtc

SEQ ID NO: 1541876 - DNA, 15 bp, Homo sapiens
ctgggcctgaagtcg

SEQ ID NO: 1541877 - DNA, 15 bp, Homo sapiens
tgggcctgaagtcgg

SEQ ID NO: 1541878 - DNA, 15 bp, Homo sapiens
gggcctgaagtcggg

SEQ ID NO: 1541879 - DNA, 15 bp, Homo sapiens
ggcctgaagtcgggc

SEQ ID NO: 1541880 - DNA, 15 bp, Homo sapiens
gcctgaagtcgggca

SEQ ID NO: 1541881 - DNA, 15 bp, Homo sapiens
cctgaagtcgggcag

SEQ ID NO: 1541882 - DNA, 15 bp, Homo sapiens
ctgaagtcgggcagg

SEQ ID NO: 1541883 - DNA, 15 bp, Homo sapiens
tgaagtcgggcagga

SEQ ID NO: 1541884 - DNA, 15 bp, Homo sapiens
gaagtcgggcaggat

SEQ ID NO: 1541885 - DNA, 15 bp, Homo sapiens
aagtcgggcaggatg

SEQ ID NO: 1541886 - DNA, 15 bp, Homo sapiens
agtcgggcaggatgc

SEQ ID NO: 1541887 - DNA, 15 bp, Homo sapiens
gtcgggcaggatgca

SEQ ID NO: 1541888 - DNA, 15 bp, Homo sapiens
tcgggcaggatgcag

SEQ ID NO: 1541889 - DNA, 15 bp, Homo sapiens
cgggcaggatgcagc

SEQ ID NO: 1541890 - DNA, 15 bp, Homo sapiens
gggcaggatgcagcc

SEQ ID NO: 1541891 - DNA, 15 bp, Homo sapiens
ggcaggatgcagcct

SEQ ID NO: 1541892 - DNA, 15 bp, Homo sapiens
gcaggatgcagcctg

SEQ ID NO: 1541893 - DNA, 15 bp, Homo sapiens
caggatgcagcctgg

SEQ ID NO: 1541894 - DNA, 15 bp, Homo sapiens
aggatgcagcctggc

SEQ ID NO: 1541895 - DNA, 15 bp, Homo sapiens
ggatgcagcctggcc

SEQ ID NO: 1541896 - DNA, 15 bp, Homo sapiens
gatgcagcctggcca

SEQ ID NO: 1541897 - DNA, 15 bp, Homo sapiens
atgcagcctggccag

SEQ ID NO: 1541898 - DNA, 15 bp, Homo sapiens
tgcagcctggccagg

SEQ ID NO: 1541899 - DNA, 15 bp, Homo sapiens
gcagcctggccaggt

SEQ ID NO: 1541900 - DNA, 15 bp, Homo sapiens
cagcctggccaggtg

SEQ ID NO: 1541901 - DNA, 15 bp, Homo sapiens
agcctggccaggtga

SEQ ID NO: 1541902 - DNA, 15 bp, Homo sapiens
gcctggccaggtgag

SEQ ID NO: 1541903 - DNA, 15 bp, Homo sapiens
cctggccaggtgaga

SEQ ID NO: 1541904 - DNA, 15 bp, Homo sapiens
ctggccaggtgagag

SEQ ID NO: 1541905 - DNA, 15 bp, Homo sapiens
tggccaggtgagagg

SEQ ID NO: 1541906 - DNA, 15 bp, Homo sapiens
ggccaggtgagagga

SEQ ID NO: 1541907 - DNA, 15 bp, Homo sapiens
gccaggtgagaggaa

SEQ ID NO: 1541908 - DNA, 15 bp, Homo sapiens
ccaggtgagaggaaa

SEQ ID NO: 1541909 - DNA, 15 bp, Homo sapiens
caggtgagaggaaag

SEQ ID NO: 1541910 - DNA, 15 bp, Homo sapiens
aggtgagaggaaagc

SEQ ID NO: 1541911 - DNA, 15 bp, Homo sapiens
ggtgagaggaaagct

SEQ ID NO: 1541912 - DNA, 15 bp, Homo sapiens
gtgagaggaaagctt

SEQ ID NO: 1541913 - DNA, 15 bp, Homo sapiens
tgagaggaaagcttg

SEQ ID NO: 1541914 - DNA, 15 bp, Homo sapiens
gagaggaaagcttgg

SEQ ID NO: 1541915 - DNA, 15 bp, Homo sapiens
agaggaaagcttgga

SEQ ID NO: 1541916 - DNA, 15 bp, Homo sapiens
gaggaaagcttggag

SEQ ID NO: 1541917 - DNA, 15 bp, Homo sapiens
ggaaagcttggagcc

SEQ ID NO: 1541918 - DNA, 15 bp, Homo sapiens
gaaagcttggagcca

SEQ ID NO: 1541919 - DNA, 15 bp, Homo sapiens
aaagcttggagccag

SEQ ID NO: 1541920 - DNA, 15 bp, Homo sapiens
aagcttggagccagt

SEQ ID NO: 1541921 - DNA, 15 bp, Homo sapiens
agcttggagccagtg

SEQ ID NO: 1541922 - DNA, 15 bp, Homo sapiens
gcttggagccagtgc

SEQ ID NO: 1541923 - DNA, 15 bp, Homo sapiens
cttggagccagtgcc

SEQ ID NO: 1541924 - DNA, 15 bp, Homo sapiens
ttggagccagtgcct

SEQ ID NO: 1541925 - DNA, 15 bp, Homo sapiens
tggagccagtgcctg

SEQ ID NO: 1541926 - DNA, 15 bp, Homo sapiens
ggagccagtgcctgg

SEQ ID NO: 1541927 - DNA, 15 bp, Homo sapiens
gagccagtgcctggg

SEQ ID NO: 1541928 - DNA, 15 bp, Homo sapiens
agccagtgcctgggt

SEQ ID NO: 1541929 - DNA, 15 bp, Homo sapiens
gccagtgcctgggtt

SEQ ID NO: 1541930 - DNA, 15 bp, Homo sapiens
ccagtgcctgggttc

SEQ ID NO: 1541931 - DNA, 15 bp, Homo sapiens
cagtgcctgggttca

SEQ ID NO: 1541932 - DNA, 15 bp, Homo sapiens
agtgcctgggttcaa

SEQ ID NO: 1541933 - DNA, 15 bp, Homo sapiens
gtgcctgggttcaaa

SEQ ID NO: 1541934 - DNA, 15 bp, Homo sapiens
tgcctgggttcaaac

SEQ ID NO: 1541935 - DNA, 15 bp, Homo sapiens
gcctgggttcaaact

SEQ ID NO: 1541936 - DNA, 15 bp, Homo sapiens
cctgggttcaaactc

SEQ ID NO: 1541937 - DNA, 15 bp, Homo sapiens
ctgggttcaaactcc

SEQ ID NO: 1541938 - DNA, 15 bp, Homo sapiens
tgggttcaaactcct

SEQ ID NO: 1541939 - DNA, 15 bp, Homo sapiens
gggttcaaactcctc

SEQ ID NO: 1541940 - DNA, 15 bp, Homo sapiens
ggttcaaactcctct

SEQ ID NO: 1541941 - DNA, 15 bp, Homo sapiens
gttcaaactcctctg

SEQ ID NO: 1541942 - DNA, 15 bp, Homo sapiens
ttcaaactcctctgt

SEQ ID NO: 1541943 - DNA, 15 bp, Homo sapiens
tcaaactcctctgtg

SEQ ID NO: 1541944 - DNA, 15 bp, Homo sapiens
caaactcctctgtgg

SEQ ID NO: 1541945 - DNA, 15 bp, Homo sapiens
aaactcctctgtggc

SEQ ID NO: 1541946 - DNA, 15 bp, Homo sapiens
aactcctctgtggcc

SEQ ID NO: 1541947 - DNA, 15 bp, Homo sapiens
actcctctgtggcct

SEQ ID NO: 1541948 - DNA, 15 bp, Homo sapiens
ctcctctgtggccta

SEQ ID NO: 1541949 - DNA, 15 bp, Homo sapiens
tcctctgtggcctat

SEQ ID NO: 1541950 - DNA, 15 bp, Homo sapiens
cctctgtggcctatg

SEQ ID NO: 1541951 - DNA, 15 bp, Homo sapiens
ctctgtggcctatgg

SEQ ID NO: 1541952 - DNA, 15 bp, Homo sapiens
tctgtggcctatggt

SEQ ID NO: 1541953 - DNA, 15 bp, Homo sapiens
ctgtggcctatggtt

SEQ ID NO: 1541954 - DNA, 15 bp, Homo sapiens
tgtggcctatggttc

SEQ ID NO: 1541955 - DNA, 15 bp, Homo sapiens
gtggcctatggttct

SEQ ID NO: 1541956 - DNA, 15 bp, Homo sapiens
tggcctatggttctg

SEQ ID NO: 1541957 - DNA, 15 bp, Homo sapiens
ggcctatggttctgt

SEQ ID NO: 1541958 - DNA, 15 bp, Homo sapiens
gcctatggttctgtg

SEQ ID NO: 1541959 - DNA, 15 bp, Homo sapiens
cctatggttctgtgg

SEQ ID NO: 1541960 - DNA, 15 bp, Homo sapiens
ctatggttctgtggg

SEQ ID NO: 1541961 - DNA, 15 bp, Homo sapiens
tatggttctgtgggc

SEQ ID NO: 1541962 - DNA, 15 bp, Homo sapiens
atggttctgtgggct

SEQ ID NO: 1541963 - DNA, 15 bp, Homo sapiens
tggttctgtgggctt

SEQ ID NO: 1541964 - DNA, 15 bp, Homo sapiens
ggttctgtgggcttg

SEQ ID NO: 1541965 - DNA, 15 bp, Homo sapiens
gttctgtgggcttgg

SEQ ID NO: 1541966 - DNA, 15 bp, Homo sapiens
ttctgtgggcttggg

SEQ ID NO: 1541967 - DNA, 15 bp, Homo sapiens
tctgtgggcttgggg

SEQ ID NO: 1541968 - DNA, 15 bp, Homo sapiens
ctgtgggcttgggga

SEQ ID NO: 1541969 - DNA, 15 bp, Homo sapiens
tgtgggcttggggaa

SEQ ID NO: 1541970 - DNA, 15 bp, Homo sapiens
gtgggcttggggaag

SEQ ID NO: 1541971 - DNA, 15 bp, Homo sapiens
tgggcttggggaagg

SEQ ID NO: 1541972 - DNA, 15 bp, Homo sapiens
gggcttggggaaggg

SEQ ID NO: 1541973 - DNA, 15 bp, Homo sapiens
ggcttggggaagggt

SEQ ID NO: 1541974 - DNA, 15 bp, Homo sapiens
gcttggggaagggtt

SEQ ID NO: 1541975 - DNA, 15 bp, Homo sapiens
cttggggaagggttt

SEQ ID NO: 1541976 - DNA, 15 bp, Homo sapiens
ttggggaagggtttg

SEQ ID NO: 1541977 - DNA, 15 bp, Homo sapiens
tggggaagggtttgt

SEQ ID NO: 1541978 - DNA, 15 bp, Homo sapiens
ggggaagggtttgta

SEQ ID NO: 1541979 - DNA, 15 bp, Homo sapiens
gggaagggtttgtac

SEQ ID NO: 1541980 - DNA, 15 bp, Homo sapiens
ggaagggtttgtacc

SEQ ID NO: 1541981 - DNA, 15 bp, Homo sapiens
gaagggtttgtacct

SEQ ID NO: 1541982 - DNA, 15 bp, Homo sapiens
aagggtttgtacctc

SEQ ID NO: 1541983 - DNA, 15 bp, Homo sapiens
agggtttgtacctct

SEQ ID NO: 1541984 - DNA, 15 bp, Homo sapiens
gggtttgtacctctg

SEQ ID NO: 1541985 - DNA, 15 bp, Homo sapiens
ggtttgtacctctgt

SEQ ID NO: 1541986 - DNA, 15 bp, Homo sapiens
gtttgtacctctgtg

SEQ ID NO: 1541987 - DNA, 15 bp, Homo sapiens
tttgtacctctgtgt

SEQ ID NO: 1541988 - DNA, 15 bp, Homo sapiens
ttgtacctctgtgtc

SEQ ID NO: 1541989 - DNA, 15 bp, Homo sapiens
tgtacctctgtgtcc

SEQ ID NO: 1541990 - DNA, 15 bp, Homo sapiens
gtacctctgtgtcca

SEQ ID NO: 1541991 - DNA, 15 bp, Homo sapiens
tacctctgtgtccag

SEQ ID NO: 1541992 - DNA, 15 bp, Homo sapiens
acctctgtgtccagt

SEQ ID NO: 1541993 - DNA, 15 bp, Homo sapiens
cctctgtgtccagtt

SEQ ID NO: 1541994 - DNA, 15 bp, Homo sapiens
ctctgtgtccagttt

SEQ ID NO: 1541995 - DNA, 15 bp, Homo sapiens
tctgtgtccagtttc

SEQ ID NO: 1541996 - DNA, 15 bp, Homo sapiens
ctgtgtccagtttcc

SEQ ID NO: 1541997 - DNA, 15 bp, Homo sapiens
tgtgtccagtttcct

SEQ ID NO: 1541998 - DNA, 15 bp, Homo sapiens
gtgtccagtttcctc

SEQ ID NO: 1541999 - DNA, 15 bp, Homo sapiens
tgtccagtttcctca

SEQ ID NO: 1542000 - DNA, 15 bp, Homo sapiens
gtccagtttcctcac

SEQ ID NO: 1542001 - DNA, 15 bp, Homo sapiens
tccagtttcctcact

SEQ ID NO: 1542002 - DNA, 15 bp, Homo sapiens
ccagtttcctcactt

SEQ ID NO: 1542003 - DNA, 15 bp, Homo sapiens
cagtttcctcactta

SEQ ID NO: 1542004 - DNA, 15 bp, Homo sapiens
agtttcctcacttat

SEQ ID NO: 1542005 - DNA, 15 bp, Homo sapiens
gtttcctcacttata

SEQ ID NO: 1542006 - DNA, 15 bp, Homo sapiens
tttcctcacttataa

SEQ ID NO: 1542007 - DNA, 15 bp, Homo sapiens
ttcctcacttataaa

SEQ ID NO: 1542008 - DNA, 15 bp, Homo sapiens
tcctcacttataaaa

SEQ ID NO: 1542009 - DNA, 15 bp, Homo sapiens
cctcacttataaaaa

SEQ ID NO: 1542010 - DNA, 15 bp, Homo sapiens
ctcacttataaaaaa

SEQ ID NO: 1542011 - DNA, 15 bp, Homo sapiens
tcacttataaaaaaa

SEQ ID NO: 1542012 - DNA, 15 bp, Homo sapiens
cacttataaaaaaag

SEQ ID NO: 1542013 - DNA, 15 bp, Homo sapiens
acttataaaaaaagg

SEQ ID NO: 1542014 - DNA, 15 bp, Homo sapiens
cttataaaaaaagga

SEQ ID NO: 1542015 - DNA, 15 bp, Homo sapiens
ttataaaaaaaggag

SEQ ID NO: 1542016 - DNA, 15 bp, Homo sapiens
tataaaaaaaggaga

SEQ ID NO: 1542017 - DNA, 15 bp, Homo sapiens
ataaaaaaaggagat

SEQ ID NO: 1542018 - DNA, 15 bp, Homo sapiens
taaaaaaaggagata

SEQ ID NO: 1542019 - DNA, 15 bp, Homo sapiens
aaaaaaaggagataa

SEQ ID NO: 1542020 - DNA, 15 bp, Homo sapiens
aaaaaaggagataat

SEQ ID NO: 1542021 - DNA, 15 bp, Homo sapiens
aaaaaggagataata

SEQ ID NO: 1542022 - DNA, 15 bp, Homo sapiens
aaaaggagataataa

SEQ ID NO: 1542023 - DNA, 15 bp, Homo sapiens
aaaggagataataaa

SEQ ID NO: 1542024 - DNA, 15 bp, Homo sapiens
aaggagataataaaa

SEQ ID NO: 1542025 - DNA, 15 bp, Homo sapiens
aggagataataaaag

SEQ ID NO: 1542026 - DNA, 15 bp, Homo sapiens
ggagataataaaagt

SEQ ID NO: 1542027 - DNA, 15 bp, Homo sapiens
gagataataaaagta

SEQ ID NO: 1542028 - DNA, 15 bp, Homo sapiens
agataataaaagtac

SEQ ID NO: 1542029 - DNA, 15 bp, Homo sapiens
gataataaaagtacc

SEQ ID NO: 1542030 - DNA, 15 bp, Homo sapiens
ataataaaagtaccc

SEQ ID NO: 1542031 - DNA, 15 bp, Homo sapiens
taataaaagtaccca

SEQ ID NO: 1542032 - DNA, 15 bp, Homo sapiens
aataaaagtacccat

SEQ ID NO: 1542033 - DNA, 15 bp, Homo sapiens
ataaaagtacccatg

SEQ ID NO: 1542034 - DNA, 15 bp, Homo sapiens
taaaagtacccatgt

SEQ ID NO: 1542035 - DNA, 15 bp, Homo sapiens
aaaagtacccatgtc

SEQ ID NO: 1542036 - DNA, 15 bp, Homo sapiens
aaagtacccatgtcc

SEQ ID NO: 1542037 - DNA, 15 bp, Homo sapiens
aagtacccatgtccc

SEQ ID NO: 1542038 - DNA, 15 bp, Homo sapiens
agtacccatgtccca

SEQ ID NO: 1542039 - DNA, 15 bp, Homo sapiens
gtacccatgtcccag

SEQ ID NO: 1542040 - DNA, 15 bp, Homo sapiens
tacccatgtcccagg

SEQ ID NO: 1542041 - DNA, 15 bp, Homo sapiens
acccatgtcccaggg

SEQ ID NO: 1542042 - DNA, 15 bp, Homo sapiens
cccatgtcccagggt

SEQ ID NO: 1542043 - DNA, 15 bp, Homo sapiens
ccatgtcccagggtg

SEQ ID NO: 1542044 - DNA, 15 bp, Homo sapiens
catgtcccagggtgg

SEQ ID NO: 1542045 - DNA, 15 bp, Homo sapiens
atgtcccagggtggc

SEQ ID NO: 1542046 - DNA, 15 bp, Homo sapiens
tgtcccagggtggct

SEQ ID NO: 1542047 - DNA, 15 bp, Homo sapiens
gtcccagggtggctg

SEQ ID NO: 1542048 - DNA, 15 bp, Homo sapiens
tcccagggtggctgt

SEQ ID NO: 1542049 - DNA, 15 bp, Homo sapiens
cccagggtggctgta

SEQ ID NO: 1542050 - DNA, 15 bp, Homo sapiens
ccagggtggctgtag

SEQ ID NO: 1542051 - DNA, 15 bp, Homo sapiens
cagggtggctgtagc

SEQ ID NO: 1542052 - DNA, 15 bp, Homo sapiens
agggtggctgtagca

SEQ ID NO: 1542053 - DNA, 15 bp, Homo sapiens
gggtggctgtagcaa

SEQ ID NO: 1542054 - DNA, 15 bp, Homo sapiens
ggtggctgtagcaat

SEQ ID NO: 1542055 - DNA, 15 bp, Homo sapiens
gtggctgtagcaata

SEQ ID NO: 1542056 - DNA, 15 bp, Homo sapiens
tggctgtagcaataa

SEQ ID NO: 1542057 - DNA, 15 bp, Homo sapiens
ggctgtagcaataat

SEQ ID NO: 1542058 - DNA, 15 bp, Homo sapiens
gctgtagcaataata

SEQ ID NO: 1542059 - DNA, 15 bp, Homo sapiens
ctgtagcaataatag

SEQ ID NO: 1542060 - DNA, 15 bp, Homo sapiens
tgtagcaataatagg

SEQ ID NO: 1542061 - DNA, 15 bp, Homo sapiens
gtagcaataataggg

SEQ ID NO: 1542062 - DNA, 15 bp, Homo sapiens
tagcaataataggga

SEQ ID NO: 1542063 - DNA, 15 bp, Homo sapiens
agcaataatagggag

SEQ ID NO: 1542064 - DNA, 15 bp, Homo sapiens
gcaataatagggagg

SEQ ID NO: 1542065 - DNA, 15 bp, Homo sapiens
caataatagggaggg

SEQ ID NO: 1542066 - DNA, 15 bp, Homo sapiens
aataatagggagggg

SEQ ID NO: 1542067 - DNA, 15 bp, Homo sapiens
ataatagggaggggt

SEQ ID NO: 1542068 - DNA, 15 bp, Homo sapiens
taatagggaggggtg

SEQ ID NO: 1542069 - DNA, 15 bp, Homo sapiens
aatagggaggggtgc

SEQ ID NO: 1542070 - DNA, 15 bp, Homo sapiens
atagggaggggtgcc

SEQ ID NO: 1542071 - DNA, 15 bp, Homo sapiens
tagggaggggtgccc

SEQ ID NO: 1542072 - DNA, 15 bp, Homo sapiens
agggaggggtgccca

SEQ ID NO: 1542073 - DNA, 15 bp, Homo sapiens
gggaggggtgcccag

SEQ ID NO: 1542074 - DNA, 15 bp, Homo sapiens
ggaggggtgcccaga

SEQ ID NO: 1542075 - DNA, 15 bp, Homo sapiens
gaggggtgcccagag

SEQ ID NO: 1542076 - DNA, 15 bp, Homo sapiens
aggggtgcccagagc

SEQ ID NO: 1542077 - DNA, 15 bp, Homo sapiens
ggggtgcccagagca

SEQ ID NO: 1542078 - DNA, 15 bp, Homo sapiens
gggtgcccagagcag

SEQ ID NO: 1542079 - DNA, 15 bp, Homo sapiens
ggtgcccagagcagg

SEQ ID NO: 1542080 - DNA, 15 bp, Homo sapiens
gtgcccagagcaggt

SEQ ID NO: 1542081 - DNA, 15 bp, Homo sapiens
tgcccagagcaggtc

SEQ ID NO: 1542082 - DNA, 15 bp, Homo sapiens
gcccagagcaggtct

SEQ ID NO: 1542083 - DNA, 15 bp, Homo sapiens
cccagagcaggtctg

SEQ ID NO: 1542084 - DNA, 15 bp, Homo sapiens
ccagagcaggtctgg

SEQ ID NO: 1542085 - DNA, 15 bp, Homo sapiens
cagagcaggtctggc

SEQ ID NO: 1542086 - DNA, 15 bp, Homo sapiens
agagcaggtctggca

SEQ ID NO: 1542087 - DNA, 15 bp, Homo sapiens
gagcaggtctggcac

SEQ ID NO: 1542088 - DNA, 15 bp, Homo sapiens
agcaggtctggcaca

SEQ ID NO: 1542089 - DNA, 15 bp, Homo sapiens
gcaggtctggcacac

SEQ ID NO: 1542090 - DNA, 15 bp, Homo sapiens
caggtctggcacaca

SEQ ID NO: 1542091 - DNA, 15 bp, Homo sapiens
aggtctggcacacag

SEQ ID NO: 1542092 - DNA, 15 bp, Homo sapiens
ggtctggcacacagg

SEQ ID NO: 1542093 - DNA, 15 bp, Homo sapiens
gtctggcacacagga

SEQ ID NO: 1542094 - DNA, 15 bp, Homo sapiens
tctggcacacaggaa

SEQ ID NO: 1542095 - DNA, 15 bp, Homo sapiens
ctggcacacaggaag

SEQ ID NO: 1542096 - DNA, 15 bp, Homo sapiens
tggcacacaggaagt

SEQ ID NO: 1542097 - DNA, 15 bp, Homo sapiens
ggcacacaggaagtg

SEQ ID NO: 1542098 - DNA, 15 bp, Homo sapiens
gcacacaggaagtgt

SEQ ID NO: 1542099 - DNA, 15 bp, Homo sapiens
cacacaggaagtgtg

SEQ ID NO: 1542100 - DNA, 15 bp, Homo sapiens
acacaggaagtgtgc

SEQ ID NO: 1542101 - DNA, 15 bp, Homo sapiens
cacaggaagtgtgca

SEQ ID NO: 1542102 - DNA, 15 bp, Homo sapiens
acaggaagtgtgcat

SEQ ID NO: 1542103 - DNA, 15 bp, Homo sapiens
caggaagtgtgcatc

SEQ ID NO: 1542104 - DNA, 15 bp, Homo sapiens
aggaagtgtgcatca

SEQ ID NO: 1542105 - DNA, 15 bp, Homo sapiens
ggaagtgtgcatcag

SEQ ID NO: 1542106 - DNA, 15 bp, Homo sapiens
gaagtgtgcatcagc

SEQ ID NO: 1542107 - DNA, 15 bp, Homo sapiens
aagtgtgcatcagcc

SEQ ID NO: 1542108 - DNA, 15 bp, Homo sapiens
agtgtgcatcagcct

SEQ ID NO: 1542109 - DNA, 15 bp, Homo sapiens
gtgtgcatcagcctc

SEQ ID NO: 1542110 - DNA, 15 bp, Homo sapiens
tgtgcatcagcctca

SEQ ID NO: 1542111 - DNA, 15 bp, Homo sapiens
gtgcatcagcctcag

SEQ ID NO: 1542112 - DNA, 15 bp, Homo sapiens
tgcatcagcctcagt

SEQ ID NO: 1542113 - DNA, 15 bp, Homo sapiens
gcatcagcctcagtc

SEQ ID NO: 1542114 - DNA, 15 bp, Homo sapiens
catcagcctcagtcc

SEQ ID NO: 1542115 - DNA, 15 bp, Homo sapiens
atcagcctcagtccc

SEQ ID NO: 1542116 - DNA, 15 bp, Homo sapiens
tcagcctcagtccct

SEQ ID NO: 1542117 - DNA, 15 bp, Homo sapiens
cagcctcagtccctg

SEQ ID NO: 1542118 - DNA, 15 bp, Homo sapiens
agcctcagtccctgc

SEQ ID NO: 1542119 - DNA, 15 bp, Homo sapiens
gcctcagtccctgcc

SEQ ID NO: 1542120 - DNA, 15 bp, Homo sapiens
cctcagtccctgcca

SEQ ID NO: 1542121 - DNA, 15 bp, Homo sapiens
ctcagtccctgccat

SEQ ID NO: 1542122 - DNA, 15 bp, Homo sapiens
tcagtccctgccatt

SEQ ID NO: 1542123 - DNA, 15 bp, Homo sapiens
cagtccctgccattg

SEQ ID NO: 1542124 - DNA, 15 bp, Homo sapiens
agtccctgccattgg

SEQ ID NO: 1542125 - DNA, 15 bp, Homo sapiens
gtccctgccattggg

SEQ ID NO: 1542126 - DNA, 15 bp, Homo sapiens
tccctgccattgggc

SEQ ID NO: 1542127 - DNA, 15 bp, Homo sapiens
ccctgccattgggct

SEQ ID NO: 1542128 - DNA, 15 bp, Homo sapiens
cctgccattgggctt

SEQ ID NO: 1542129 - DNA, 15 bp, Homo sapiens
ctgccattgggcttg

SEQ ID NO: 1542130 - DNA, 15 bp, Homo sapiens
tgccattgggcttgt

SEQ ID NO: 1542131 - DNA, 15 bp, Homo sapiens
gccattgggcttgtc

SEQ ID NO: 1542132 - DNA, 15 bp, Homo sapiens
ccattgggcttgtcc

SEQ ID NO: 1542133 - DNA, 15 bp, Homo sapiens
cattgggcttgtcct

SEQ ID NO: 1542134 - DNA, 15 bp, Homo sapiens
attgggcttgtcctg

SEQ ID NO: 1542135 - DNA, 15 bp, Homo sapiens
ttgggcttgtcctgg

SEQ ID NO: 1542136 - DNA, 15 bp, Homo sapiens
tgggcttgtcctggg

SEQ ID NO: 1542137 - DNA, 15 bp, Homo sapiens
gggcttgtcctggga

SEQ ID NO: 1542138 - DNA, 15 bp, Homo sapiens
ggcttgtcctgggag

SEQ ID NO: 1542139 - DNA, 15 bp, Homo sapiens
gcttgtcctgggagt

SEQ ID NO: 1542140 - DNA, 15 bp, Homo sapiens
cttgtcctgggagtc

SEQ ID NO: 1542141 - DNA, 15 bp, Homo sapiens
ttgtcctgggagtct

SEQ ID NO: 1542142 - DNA, 15 bp, Homo sapiens
tgtcctgggagtctg

SEQ ID NO: 1542143 - DNA, 15 bp, Homo sapiens
gtcctgggagtctgt

SEQ ID NO: 1542144 - DNA, 15 bp, Homo sapiens
tcctgggagtctgtg

SEQ ID NO: 1542145 - DNA, 15 bp, Homo sapiens
cctgggagtctgtga

SEQ ID NO: 1542146 - DNA, 15 bp, Homo sapiens
ctgggagtctgtgaa

SEQ ID NO: 1542147 - DNA, 15 bp, Homo sapiens
tgggagtctgtgaag

SEQ ID NO: 1542148 - DNA, 15 bp, Homo sapiens
gggagtctgtgaagc

SEQ ID NO: 1542149 - DNA, 15 bp, Homo sapiens
ggagtctgtgaagcc

SEQ ID NO: 1542150 - DNA, 15 bp, Homo sapiens
gagtctgtgaagcca

SEQ ID NO: 1542151 - DNA, 15 bp, Homo sapiens
agtctgtgaagccaa

SEQ ID NO: 1542152 - DNA, 15 bp, Homo sapiens
gtctgtgaagccaac

SEQ ID NO: 1542153 - DNA, 15 bp, Homo sapiens
tctgtgaagccaacc

SEQ ID NO: 1542154 - DNA, 15 bp, Homo sapiens
ctgtgaagccaacct

SEQ ID NO: 1542155 - DNA, 15 bp, Homo sapiens
tgtgaagccaacctc

SEQ ID NO: 1542156 - DNA, 15 bp, Homo sapiens
gtgaagccaacctct

SEQ ID NO: 1542157 - DNA, 15 bp, Homo sapiens
tgaagccaacctctg

SEQ ID NO: 1542158 - DNA, 15 bp, Homo sapiens
gaagccaacctctgc

SEQ ID NO: 1542159 - DNA, 15 bp, Homo sapiens
aagccaacctctgct

SEQ ID NO: 1542160 - DNA, 15 bp, Homo sapiens
agccaacctctgctc

SEQ ID NO: 1542161 - DNA, 15 bp, Homo sapiens
gccaacctctgctcc

SEQ ID NO: 1542162 - DNA, 15 bp, Homo sapiens
ccaacctctgctcca

SEQ ID NO: 1542163 - DNA, 15 bp, Homo sapiens
caacctctgctccac

SEQ ID NO: 1542164 - DNA, 15 bp, Homo sapiens
aacctctgctccaca

SEQ ID NO: 1542165 - DNA, 15 bp, Homo sapiens
acctctgctccacaa

SEQ ID NO: 1542166 - DNA, 15 bp, Homo sapiens
cctctgctccacaat

SEQ ID NO: 1542167 - DNA, 15 bp, Homo sapiens
ctctgctccacaatg

SEQ ID NO: 1542168 - DNA, 15 bp, Homo sapiens
tctgctccacaatgt

SEQ ID NO: 1542169 - DNA, 15 bp, Homo sapiens
ctgctccacaatgtg

SEQ ID NO: 1542170 - DNA, 15 bp, Homo sapiens
tgctccacaatgtga

SEQ ID NO: 1542171 - DNA, 15 bp, Homo sapiens
gctccacaatgtgac

SEQ ID NO: 1542172 - DNA, 15 bp, Homo sapiens
ctccacaatgtgacc

SEQ ID NO: 1542173 - DNA, 15 bp, Homo sapiens
tccacaatgtgaccc

SEQ ID NO: 1542174 - DNA, 15 bp, Homo sapiens
ccacaatgtgacccc

SEQ ID NO: 1542175 - DNA, 15 bp, Homo sapiens
cacaatgtgaccccc

SEQ ID NO: 1542176 - DNA, 15 bp, Homo sapiens
acaatgtgaccccca

SEQ ID NO: 1542177 - DNA, 15 bp, Homo sapiens
caatgtgacccccag

SEQ ID NO: 1542178 - DNA, 15 bp, Homo sapiens
aatgtgacccccagg

SEQ ID NO: 1542179 - DNA, 15 bp, Homo sapiens
atgtgacccccaggc

SEQ ID NO: 1542180 - DNA, 15 bp, Homo sapiens
tgtgacccccaggct

SEQ ID NO: 1542181 - DNA, 15 bp, Homo sapiens
gtgacccccaggctt

SEQ ID NO: 1542182 - DNA, 15 bp, Homo sapiens
tgacccccaggcttg

SEQ ID NO: 1542183 - DNA, 15 bp, Homo sapiens
gacccccaggcttgt

SEQ ID NO: 1542184 - DNA, 15 bp, Homo sapiens
acccccaggcttgtg

SEQ ID NO: 1542185 - DNA, 15 bp, Homo sapiens
cccccaggcttgtga

SEQ ID NO: 1542186 - DNA, 15 bp, Homo sapiens
ccccaggcttgtgag

SEQ ID NO: 1542187 - DNA, 15 bp, Homo sapiens
cccaggcttgtgaga

SEQ ID NO: 1542188 - DNA, 15 bp, Homo sapiens
ccaggcttgtgagac

SEQ ID NO: 1542189 - DNA, 15 bp, Homo sapiens
caggcttgtgagacc

SEQ ID NO: 1542190 - DNA, 15 bp, Homo sapiens
aggcttgtgagacca

SEQ ID NO: 1542191 - DNA, 15 bp, Homo sapiens
ggcttgtgagaccaa

SEQ ID NO: 1542192 - DNA, 15 bp, Homo sapiens
gcttgtgagaccaag

SEQ ID NO: 1542193 - DNA, 15 bp, Homo sapiens
cttgtgagaccaagc

SEQ ID NO: 1542194 - DNA, 15 bp, Homo sapiens
ttgtgagaccaagct

SEQ ID NO: 1542195 - DNA, 15 bp, Homo sapiens
tgtgagaccaagctg

SEQ ID NO: 1542196 - DNA, 15 bp, Homo sapiens
gtgagaccaagctgg

SEQ ID NO: 1542197 - DNA, 15 bp, Homo sapiens
tgagaccaagctggg

SEQ ID NO: 1542198 - DNA, 15 bp, Homo sapiens
gagaccaagctgggt

SEQ ID NO: 1542199 - DNA, 15 bp, Homo sapiens
agaccaagctgggtc

SEQ ID NO: 1542200 - DNA, 15 bp, Homo sapiens
gaccaagctgggtca

SEQ ID NO: 1542201 - DNA, 15 bp, Homo sapiens
accaagctgggtcag

SEQ ID NO: 1542202 - DNA, 15 bp, Homo sapiens
ccaagctgggtcaga

SEQ ID NO: 1542203 - DNA, 15 bp, Homo sapiens
caagctgggtcagag

SEQ ID NO: 1542204 - DNA, 15 bp, Homo sapiens
aagctgggtcagagc

SEQ ID NO: 1542205 - DNA, 15 bp, Homo sapiens
agctgggtcagagct

SEQ ID NO: 1542206 - DNA, 15 bp, Homo sapiens
gctgggtcagagctt

SEQ ID NO: 1542207 - DNA, 15 bp, Homo sapiens
ctgggtcagagcttc

SEQ ID NO: 1542208 - DNA, 15 bp, Homo sapiens
tgggtcagagcttcc

SEQ ID NO: 1542209 - DNA, 15 bp, Homo sapiens
gggtcagagcttcct

SEQ ID NO: 1542210 - DNA, 15 bp, Homo sapiens
ggtcagagcttcctc

SEQ ID NO: 1542211 - DNA, 15 bp, Homo sapiens
gtcagagcttcctcc

SEQ ID NO: 1542212 - DNA, 15 bp, Homo sapiens
tcagagcttcctcct

SEQ ID NO: 1542213 - DNA, 15 bp, Homo sapiens
cagagcttcctcctc

SEQ ID NO: 1542214 - DNA, 15 bp, Homo sapiens
agagcttcctcctct

SEQ ID NO: 1542215 - DNA, 15 bp, Homo sapiens
gagcttcctcctctg

SEQ ID NO: 1542216 - DNA, 15 bp, Homo sapiens
agcttcctcctctgg

SEQ ID NO: 1542217 - DNA, 15 bp, Homo sapiens
gcttcctcctctggg

SEQ ID NO: 1542218 - DNA, 15 bp, Homo sapiens
cttcctcctctgggg

SEQ ID NO: 1542219 - DNA, 15 bp, Homo sapiens
ttcctcctctggggt

SEQ ID NO: 1542220 - DNA, 15 bp, Homo sapiens
tcctcctctggggtt

SEQ ID NO: 1542221 - DNA, 15 bp, Homo sapiens
cctcctctggggttg

SEQ ID NO: 1542222 - DNA, 15 bp, Homo sapiens
ctcctctggggttgc

SEQ ID NO: 1542223 - DNA, 15 bp, Homo sapiens
tcctctggggttgca

SEQ ID NO: 1542224 - DNA, 15 bp, Homo sapiens
cctctggggttgcac

SEQ ID NO: 1542225 - DNA, 15 bp, Homo sapiens
ctctggggttgcacc

SEQ ID NO: 1542226 - DNA, 15 bp, Homo sapiens
tctggggttgcacca

SEQ ID NO: 1542227 - DNA, 15 bp, Homo sapiens
ctggggttgcaccag

SEQ ID NO: 1542228 - DNA, 15 bp, Homo sapiens
tggggttgcaccagg

SEQ ID NO: 1542229 - DNA, 15 bp, Homo sapiens
ggggttgcaccagga

SEQ ID NO: 1542230 - DNA, 15 bp, Homo sapiens
gggttgcaccaggag

SEQ ID NO: 1542231 - DNA, 15 bp, Homo sapiens
ggttgcaccaggagg

SEQ ID NO: 1542232 - DNA, 15 bp, Homo sapiens
gttgcaccaggaggg

SEQ ID NO: 1542233 - DNA, 15 bp, Homo sapiens
ttgcaccaggagggg

SEQ ID NO: 1542234 - DNA, 15 bp, Homo sapiens
tgcaccaggagggga

SEQ ID NO: 1542235 - DNA, 15 bp, Homo sapiens
gcaccaggaggggaa

SEQ ID NO: 1542236 - DNA, 15 bp, Homo sapiens
caccaggaggggaac

SEQ ID NO: 1542237 - DNA, 15 bp, Homo sapiens
accaggaggggaact

SEQ ID NO: 1542238 - DNA, 15 bp, Homo sapiens
ccaggaggggaactt

SEQ ID NO: 1542239 - DNA, 15 bp, Homo sapiens
caggaggggaacttc

SEQ ID NO: 1542240 - DNA, 15 bp, Homo sapiens
aggaggggaacttct

SEQ ID NO: 1542241 - DNA, 15 bp, Homo sapiens
ggaggggaacttctg

SEQ ID NO: 1542242 - DNA, 15 bp, Homo sapiens
gaggggaacttctgc

SEQ ID NO: 1542243 - DNA, 15 bp, Homo sapiens
aggggaacttctgca

SEQ ID NO: 1542244 - DNA, 15 bp, Homo sapiens
ggggaacttctgcag

SEQ ID NO: 1542245 - DNA, 15 bp, Homo sapiens
gggaacttctgcagg

SEQ ID NO: 1542246 - DNA, 15 bp, Homo sapiens
ggaacttctgcaggc

SEQ ID NO: 1542247 - DNA, 15 bp, Homo sapiens
gaacttctgcaggcc

SEQ ID NO: 1542248 - DNA, 15 bp, Homo sapiens
aacttctgcaggccc

SEQ ID NO: 1542249 - DNA, 15 bp, Homo sapiens
acttctgcaggccca

SEQ ID NO: 1542250 - DNA, 15 bp, Homo sapiens
cttctgcaggcccag

SEQ ID NO: 1542251 - DNA, 15 bp, Homo sapiens
ttctgcaggcccaga

SEQ ID NO: 1542252 - DNA, 15 bp, Homo sapiens
tctgcaggcccagat

SEQ ID NO: 1542253 - DNA, 15 bp, Homo sapiens
ctgcaggcccagatg

SEQ ID NO: 1542254 - DNA, 15 bp, Homo sapiens
tgcaggcccagatgc

SEQ ID NO: 1542255 - DNA, 15 bp, Homo sapiens
gcaggcccagatgca

SEQ ID NO: 1542256 - DNA, 15 bp, Homo sapiens
caggcccagatgcac

SEQ ID NO: 1542257 - DNA, 15 bp, Homo sapiens
aggcccagatgcacc

SEQ ID NO: 1542258 - DNA, 15 bp, Homo sapiens
ggcccagatgcaccc

SEQ ID NO: 1542259 - DNA, 15 bp, Homo sapiens
gcccagatgcaccct

SEQ ID NO: 1542260 - DNA, 15 bp, Homo sapiens
cccagatgcaccctg

SEQ ID NO: 1542261 - DNA, 15 bp, Homo sapiens
ccagatgcaccctga

SEQ ID NO: 1542262 - DNA, 15 bp, Homo sapiens
cagatgcaccctgag

SEQ ID NO: 1542263 - DNA, 15 bp, Homo sapiens
agatgcaccctgagg

SEQ ID NO: 1542264 - DNA, 15 bp, Homo sapiens
gatgcaccctgagga

SEQ ID NO: 1542265 - DNA, 15 bp, Homo sapiens
atgcaccctgaggaa

SEQ ID NO: 1542266 - DNA, 15 bp, Homo sapiens
tgcaccctgaggaaa

SEQ ID NO: 1542267 - DNA, 15 bp, Homo sapiens
gcaccctgaggaaag

SEQ ID NO: 1542268 - DNA, 15 bp, Homo sapiens
caccctgaggaaagg

SEQ ID NO: 1542269 - DNA, 15 bp, Homo sapiens
accctgaggaaaggg

SEQ ID NO: 1542270 - DNA, 15 bp, Homo sapiens
ccctgaggaaagggc

SEQ ID NO: 1542271 - DNA, 15 bp, Homo sapiens
cctgaggaaagggct

SEQ ID NO: 1542272 - DNA, 15 bp, Homo sapiens
ctgaggaaagggctt

SEQ ID NO: 1542273 - DNA, 15 bp, Homo sapiens
tgaggaaagggcttg

SEQ ID NO: 1542274 - DNA, 15 bp, Homo sapiens
gaggaaagggcttgt

SEQ ID NO: 1542275 - DNA, 15 bp, Homo sapiens
aggaaagggcttgtt

SEQ ID NO: 1542276 - DNA, 15 bp, Homo sapiens
ggaaagggcttgttc

SEQ ID NO: 1542277 - DNA, 15 bp, Homo sapiens
gaaagggcttgttcc

SEQ ID NO: 1542278 - DNA, 15 bp, Homo sapiens
aaagggcttgttccc

SEQ ID NO: 1542279 - DNA, 15 bp, Homo sapiens
aagggcttgttccca

SEQ ID NO: 1542280 - DNA, 15 bp, Homo sapiens
agggcttgttcccac

SEQ ID NO: 1542281 - DNA, 15 bp, Homo sapiens
gggcttgttcccacc

SEQ ID NO: 1542282 - DNA, 15 bp, Homo sapiens
ggcttgttcccacca

SEQ ID NO: 1542283 - DNA, 15 bp, Homo sapiens
gcttgttcccaccaa

SEQ ID NO: 1542284 - DNA, 15 bp, Homo sapiens
cttgttcccaccaag

SEQ ID NO: 1542285 - DNA, 15 bp, Homo sapiens
ttgttcccaccaaga

SEQ ID NO: 1542286 - DNA, 15 bp, Homo sapiens
tgttcccaccaagaa

SEQ ID NO: 1542287 - DNA, 15 bp, Homo sapiens
gttcccaccaagaac

SEQ ID NO: 1542288 - DNA, 15 bp, Homo sapiens
ttcccaccaagaaca

SEQ ID NO: 1542289 - DNA, 15 bp, Homo sapiens
tcccaccaagaacaa

SEQ ID NO: 1542290 - DNA, 15 bp, Homo sapiens
cccaccaagaacaag

SEQ ID NO: 1542291 - DNA, 15 bp, Homo sapiens
ccaccaagaacaagg

SEQ ID NO: 1542292 - DNA, 15 bp, Homo sapiens
caccaagaacaaggc

SEQ ID NO: 1542293 - DNA, 15 bp, Homo sapiens
accaagaacaaggct

SEQ ID NO: 1542294 - DNA, 15 bp, Homo sapiens
ccaagaacaaggctc

SEQ ID NO: 1542295 - DNA, 15 bp, Homo sapiens
caagaacaaggctca

SEQ ID NO: 1542296 - DNA, 15 bp, Homo sapiens
aagaacaaggctcac

SEQ ID NO: 1542297 - DNA, 15 bp, Homo sapiens
agaacaaggctcacc

SEQ ID NO: 1542298 - DNA, 15 bp, Homo sapiens
gaacaaggctcacct

SEQ ID NO: 1542299 - DNA, 15 bp, Homo sapiens
aacaaggctcacctt

SEQ ID NO: 1542300 - DNA, 15 bp, Homo sapiens
acaaggctcaccttt

SEQ ID NO: 1542301 - DNA, 15 bp, Homo sapiens
caaggctcacctttg

SEQ ID NO: 1542302 - DNA, 15 bp, Homo sapiens
aaggctcacctttgg

SEQ ID NO: 1542303 - DNA, 15 bp, Homo sapiens
aggctcacctttgga

SEQ ID NO: 1542304 - DNA, 15 bp, Homo sapiens
ggctcacctttggag

SEQ ID NO: 1542305 - DNA, 15 bp, Homo sapiens
gctcacctttggagg

SEQ ID NO: 1542306 - DNA, 15 bp, Homo sapiens
ctcacctttggagga

SEQ ID NO: 1542307 - DNA, 15 bp, Homo sapiens
tcacctttggaggat

SEQ ID NO: 1542308 - DNA, 15 bp, Homo sapiens
cacctttggaggatg

SEQ ID NO: 1542309 - DNA, 15 bp, Homo sapiens
acctttggaggatgc

SEQ ID NO: 1542310 - DNA, 15 bp, Homo sapiens
cctttggaggatgct

SEQ ID NO: 1542311 - DNA, 15 bp, Homo sapiens
ctttggaggatgctc

SEQ ID NO: 1542312 - DNA, 15 bp, Homo sapiens
tttggaggatgctcc

SEQ ID NO: 1542313 - DNA, 15 bp, Homo sapiens
ttggaggatgctccc

SEQ ID NO: 1542314 - DNA, 15 bp, Homo sapiens
tggaggatgctcccc

SEQ ID NO: 1542315 - DNA, 15 bp, Homo sapiens
ggaggatgctcccca

SEQ ID NO: 1542316 - DNA, 15 bp, Homo sapiens
gaggatgctccccac

SEQ ID NO: 1542317 - DNA, 15 bp, Homo sapiens
aggatgctccccaca

SEQ ID NO: 1542318 - DNA, 15 bp, Homo sapiens
ggatgctccccacat

SEQ ID NO: 1542319 - DNA, 15 bp, Homo sapiens
gatgctccccacatg

SEQ ID NO: 1542320 - DNA, 15 bp, Homo sapiens
atgctccccacatga

SEQ ID NO: 1542321 - DNA, 15 bp, Homo sapiens
tgctccccacatgag

SEQ ID NO: 1542322 - DNA, 15 bp, Homo sapiens
gctccccacatgaga

SEQ ID NO: 1542323 - DNA, 15 bp, Homo sapiens
ctccccacatgagag

SEQ ID NO: 1542324 - DNA, 15 bp, Homo sapiens
tccccacatgagagg

SEQ ID NO: 1542325 - DNA, 15 bp, Homo sapiens
ccccacatgagaggt

SEQ ID NO: 1542326 - DNA, 15 bp, Homo sapiens
cccacatgagaggtg

SEQ ID NO: 1542327 - DNA, 15 bp, Homo sapiens
ccacatgagaggtga

SEQ ID NO: 1542328 - DNA, 15 bp, Homo sapiens
cacatgagaggtgaa

SEQ ID NO: 1542329 - DNA, 15 bp, Homo sapiens
acatgagaggtgaac

SEQ ID NO: 1542330 - DNA, 15 bp, Homo sapiens
catgagaggtgaacc

SEQ ID NO: 1542331 - DNA, 15 bp, Homo sapiens
atgagaggtgaaccc

SEQ ID NO: 1542332 - DNA, 15 bp, Homo sapiens
tgagaggtgaacccc

SEQ ID NO: 1542333 - DNA, 15 bp, Homo sapiens
gagaggtgaaccccc

SEQ ID NO: 1542334 - DNA, 15 bp, Homo sapiens
agaggtgaaccccca

SEQ ID NO: 1542335 - DNA, 15 bp, Homo sapiens
gaggtgaacccccag

SEQ ID NO: 1542336 - DNA, 15 bp, Homo sapiens
aggtgaacccccagg

SEQ ID NO: 1542337 - DNA, 15 bp, Homo sapiens
ggtgaacccccaggt

SEQ ID NO: 1542338 - DNA, 15 bp, Homo sapiens
gtgaacccccaggtc

SEQ ID NO: 1542339 - DNA, 15 bp, Homo sapiens
tgaacccccaggtct

SEQ ID NO: 1542340 - DNA, 15 bp, Homo sapiens
gaacccccaggtcta

SEQ ID NO: 1542341 - DNA, 15 bp, Homo sapiens
aacccccaggtctac

SEQ ID NO: 1542342 - DNA, 15 bp, Homo sapiens
acccccaggtctact

SEQ ID NO: 1542343 - DNA, 15 bp, Homo sapiens
cccccaggtctactg

SEQ ID NO: 1542344 - DNA, 15 bp, Homo sapiens
ccccaggtctactgg

SEQ ID NO: 1542345 - DNA, 15 bp, Homo sapiens
cccaggtctactggt

SEQ ID NO: 1542346 - DNA, 15 bp, Homo sapiens
ccaggtctactggtg

SEQ ID NO: 1542347 - DNA, 15 bp, Homo sapiens
caggtctactggtga

SEQ ID NO: 1542348 - DNA, 15 bp, Homo sapiens
aggtctactggtgac

SEQ ID NO: 1542349 - DNA, 15 bp, Homo sapiens
ggtctactggtgact

SEQ ID NO: 1542350 - DNA, 15 bp, Homo sapiens
gtctactggtgactg

SEQ ID NO: 1542351 - DNA, 15 bp, Homo sapiens
tctactggtgactgc

SEQ ID NO: 1542352 - DNA, 15 bp, Homo sapiens
ctactggtgactgca

SEQ ID NO: 1542353 - DNA, 15 bp, Homo sapiens
tactggtgactgcag

SEQ ID NO: 1542354 - DNA, 15 bp, Homo sapiens
actggtgactgcagc

SEQ ID NO: 1542355 - DNA, 15 bp, Homo sapiens
ctggtgactgcagcc

SEQ ID NO: 1542356 - DNA, 15 bp, Homo sapiens
tggtgactgcagcct

SEQ ID NO: 1542357 - DNA, 15 bp, Homo sapiens
ggtgactgcagcctc

SEQ ID NO: 1542358 - DNA, 15 bp, Homo sapiens
gtgactgcagcctcg

SEQ ID NO: 1542359 - DNA, 15 bp, Homo sapiens
tgactgcagcctcgg

SEQ ID NO: 1542360 - DNA, 15 bp, Homo sapiens
gactgcagcctcgga

SEQ ID NO: 1542361 - DNA, 15 bp, Homo sapiens
actgcagcctcggaa

SEQ ID NO: 1542362 - DNA, 15 bp, Homo sapiens
ctgcagcctcggaag

SEQ ID NO: 1542363 - DNA, 15 bp, Homo sapiens
tgcagcctcggaagc

SEQ ID NO: 1542364 - DNA, 15 bp, Homo sapiens
gcagcctcggaagct

SEQ ID NO: 1542365 - DNA, 15 bp, Homo sapiens
cagcctcggaagctg

SEQ ID NO: 1542366 - DNA, 15 bp, Homo sapiens
agcctcggaagctga

SEQ ID NO: 1542367 - DNA, 15 bp, Homo sapiens
gcctcggaagctgac

SEQ ID NO: 1542368 - DNA, 15 bp, Homo sapiens
cctcggaagctgaca

SEQ ID NO: 1542369 - DNA, 15 bp, Homo sapiens
ctcggaagctgacag

SEQ ID NO: 1542370 - DNA, 15 bp, Homo sapiens
tcggaagctgacagc

SEQ ID NO: 1542371 - DNA, 15 bp, Homo sapiens
cggaagctgacagca

SEQ ID NO: 1542372 - DNA, 15 bp, Homo sapiens
ggaagctgacagcat

SEQ ID NO: 1542373 - DNA, 15 bp, Homo sapiens
gaagctgacagcatc

SEQ ID NO: 1542374 - DNA, 15 bp, Homo sapiens
aagctgacagcatct

SEQ ID NO: 1542375 - DNA, 15 bp, Homo sapiens
agctgacagcatcta

SEQ ID NO: 1542376 - DNA, 15 bp, Homo sapiens
gctgacagcatctat

SEQ ID NO: 1542377 - DNA, 15 bp, Homo sapiens
ctgacagcatctatc

SEQ ID NO: 1542378 - DNA, 15 bp, Homo sapiens
tgacagcatctatcc

SEQ ID NO: 1542379 - DNA, 15 bp, Homo sapiens
gacagcatctatcct

SEQ ID NO: 1542380 - DNA, 15 bp, Homo sapiens
acagcatctatcctc

SEQ ID NO: 1542381 - DNA, 15 bp, Homo sapiens
cagcatctatcctcc

SEQ ID NO: 1542382 - DNA, 15 bp, Homo sapiens
agcatctatcctcca

SEQ ID NO: 1542383 - DNA, 15 bp, Homo sapiens
gcatctatcctccaa

SEQ ID NO: 1542384 - DNA, 15 bp, Homo sapiens
catctatcctccaac

SEQ ID NO: 1542385 - DNA, 15 bp, Homo sapiens
atctatcctccaacc

SEQ ID NO: 1542386 - DNA, 15 bp, Homo sapiens
tctatcctccaaccc

SEQ ID NO: 1542387 - DNA, 15 bp, Homo sapiens
ctatcctccaaccca

SEQ ID NO: 1542388 - DNA, 15 bp, Homo sapiens
tatcctccaacccat

SEQ ID NO: 1542389 - DNA, 15 bp, Homo sapiens
atcctccaacccatg

SEQ ID NO: 1542390 - DNA, 15 bp, Homo sapiens
tcctccaacccatgc

SEQ ID NO: 1542391 - DNA, 15 bp, Homo sapiens
cctccaacccatgcc

SEQ ID NO: 1542392 - DNA, 15 bp, Homo sapiens
ctccaacccatgccc

SEQ ID NO: 1542393 - DNA, 15 bp, Homo sapiens
tccaacccatgccca

SEQ ID NO: 1542394 - DNA, 15 bp, Homo sapiens
ccaacccatgcccac

SEQ ID NO: 1542395 - DNA, 15 bp, Homo sapiens
caacccatgcccact

SEQ ID NO: 1542396 - DNA, 15 bp, Homo sapiens
aacccatgcccactg

SEQ ID NO: 1542397 - DNA, 15 bp, Homo sapiens
acccatgcccactgg

SEQ ID NO: 1542398 - DNA, 15 bp, Homo sapiens
cccatgcccactggg

SEQ ID NO: 1542399 - DNA, 15 bp, Homo sapiens
ccatgcccactggga

SEQ ID NO: 1542400 - DNA, 15 bp, Homo sapiens
catgcccactgggaa

SEQ ID NO: 1542401 - DNA, 15 bp, Homo sapiens
atgcccactgggaag

SEQ ID NO: 1542402 - DNA, 15 bp, Homo sapiens
tgcccactgggaagt

SEQ ID NO: 1542403 - DNA, 15 bp, Homo sapiens
gcccactgggaagtg

SEQ ID NO: 1542404 - DNA, 15 bp, Homo sapiens
cccactgggaagtgt

SEQ ID NO: 1542405 - DNA, 15 bp, Homo sapiens
ccactgggaagtgtg

SEQ ID NO: 1542406 - DNA, 15 bp, Homo sapiens
cactgggaagtgtgt

SEQ ID NO: 1542407 - DNA, 15 bp, Homo sapiens
actgggaagtgtgtg

SEQ ID NO: 1542408 - DNA, 15 bp, Homo sapiens
ctgggaagtgtgtga

SEQ ID NO: 1542409 - DNA, 15 bp, Homo sapiens
tgggaagtgtgtgag

SEQ ID NO: 1542410 - DNA, 15 bp, Homo sapiens
gggaagtgtgtgagg

SEQ ID NO: 1542411 - DNA, 15 bp, Homo sapiens
ggaagtgtgtgaggg

SEQ ID NO: 1542412 - DNA, 15 bp, Homo sapiens
gaagtgtgtgagggg

SEQ ID NO: 1542413 - DNA, 15 bp, Homo sapiens
aagtgtgtgaggggt

SEQ ID NO: 1542414 - DNA, 15 bp, Homo sapiens
agtgtgtgaggggtc

SEQ ID NO: 1542415 - DNA, 15 bp, Homo sapiens
gtgtgtgaggggtcc

SEQ ID NO: 1542416 - DNA, 15 bp, Homo sapiens
tgtgtgaggggtcct

SEQ ID NO: 1542417 - DNA, 15 bp, Homo sapiens
gtgtgaggggtcctc

SEQ ID NO: 1542418 - DNA, 15 bp, Homo sapiens
tgtgaggggtcctca

SEQ ID NO: 1542419 - DNA, 15 bp, Homo sapiens
gtgaggggtcctcat

SEQ ID NO: 1542420 - DNA, 15 bp, Homo sapiens
tgaggggtcctcata

SEQ ID NO: 1542421 - DNA, 15 bp, Homo sapiens
gaggggtcctcatag

SEQ ID NO: 1542422 - DNA, 15 bp, Homo sapiens
aggggtcctcatagg

SEQ ID NO: 1542423 - DNA, 15 bp, Homo sapiens
ggggtcctcataggc

SEQ ID NO: 1542424 - DNA, 15 bp, Homo sapiens
gggtcctcataggcc

SEQ ID NO: 1542425 - DNA, 15 bp, Homo sapiens
ggtcctcataggccc

SEQ ID NO: 1542426 - DNA, 15 bp, Homo sapiens
gtcctcataggccct

SEQ ID NO: 1542427 - DNA, 15 bp, Homo sapiens
tcctcataggccctg

SEQ ID NO: 1542428 - DNA, 15 bp, Homo sapiens
cctcataggccctgc

SEQ ID NO: 1542429 - DNA, 15 bp, Homo sapiens
ctcataggccctgcg

SEQ ID NO: 1542430 - DNA, 15 bp, Homo sapiens
tcataggccctgcgg

SEQ ID NO: 1542431 - DNA, 15 bp, Homo sapiens
cataggccctgcggt

SEQ ID NO: 1542432 - DNA, 15 bp, Homo sapiens
ataggccctgcggtg

SEQ ID NO: 1542433 - DNA, 15 bp, Homo sapiens
taggccctgcggtgt

SEQ ID NO: 1542434 - DNA, 15 bp, Homo sapiens
aggccctgcggtgtg

SEQ ID NO: 1542435 - DNA, 15 bp, Homo sapiens
ggccctgcggtgtgg

SEQ ID NO: 1542436 - DNA, 15 bp, Homo sapiens
gccctgcggtgtgga

SEQ ID NO: 1542437 - DNA, 15 bp, Homo sapiens
ccctgcggtgtggac

SEQ ID NO: 1542438 - DNA, 15 bp, Homo sapiens
cctgcggtgtggaca

SEQ ID NO: 1542439 - DNA, 15 bp, Homo sapiens
ctgcggtgtggacaa

SEQ ID NO: 1542440 - DNA, 15 bp, Homo sapiens
tgcggtgtggacaat

SEQ ID NO: 1542441 - DNA, 15 bp, Homo sapiens
gcggtgtggacaatg

SEQ ID NO: 1542442 - DNA, 15 bp, Homo sapiens
cggtgtggacaatgc

SEQ ID NO: 1542443 - DNA, 15 bp, Homo sapiens
ggtgtggacaatgca

SEQ ID NO: 1542444 - DNA, 15 bp, Homo sapiens
gtgtggacaatgcag

SEQ ID NO: 1542445 - DNA, 15 bp, Homo sapiens
tgtggacaatgcaga

SEQ ID NO: 1542446 - DNA, 15 bp, Homo sapiens
gtggacaatgcagag

SEQ ID NO: 1542447 - DNA, 15 bp, Homo sapiens
tggacaatgcagaga

SEQ ID NO: 1542448 - DNA, 15 bp, Homo sapiens
ggacaatgcagagac

SEQ ID NO: 1542449 - DNA, 15 bp, Homo sapiens
gacaatgcagagacc

SEQ ID NO: 1542450 - DNA, 15 bp, Homo sapiens
acaatgcagagaccc

SEQ ID NO: 1542451 - DNA, 15 bp, Homo sapiens
caatgcagagaccct

SEQ ID NO: 1542452 - DNA, 15 bp, Homo sapiens
aatgcagagaccctg

SEQ ID NO: 1542453 - DNA, 15 bp, Homo sapiens
atgcagagaccctgt

SEQ ID NO: 1542454 - DNA, 15 bp, Homo sapiens
tgcagagaccctgta

SEQ ID NO: 1542455 - DNA, 15 bp, Homo sapiens
gcagagaccctgtag

SEQ ID NO: 1542456 - DNA, 15 bp, Homo sapiens
cagagaccctgtagc

SEQ ID NO: 1542457 - DNA, 15 bp, Homo sapiens
agagaccctgtagca

SEQ ID NO: 1542458 - DNA, 15 bp, Homo sapiens
gagaccctgtagcat

SEQ ID NO: 1542459 - DNA, 15 bp, Homo sapiens
agaccctgtagcatc

SEQ ID NO: 1542460 - DNA, 15 bp, Homo sapiens
gaccctgtagcatct

SEQ ID NO: 1542461 - DNA, 15 bp, Homo sapiens
accctgtagcatctg

SEQ ID NO: 1542462 - DNA, 15 bp, Homo sapiens
ccctgtagcatctgg

SEQ ID NO: 1542463 - DNA, 15 bp, Homo sapiens
cctgtagcatctggc

SEQ ID NO: 1542464 - DNA, 15 bp, Homo sapiens
ctgtagcatctggct

SEQ ID NO: 1542465 - DNA, 15 bp, Homo sapiens
tgtagcatctggcta

SEQ ID NO: 1542466 - DNA, 15 bp, Homo sapiens
gtagcatctggctag

SEQ ID NO: 1542467 - DNA, 15 bp, Homo sapiens
tagcatctggctagg

SEQ ID NO: 1542468 - DNA, 15 bp, Homo sapiens
agcatctggctaggg

SEQ ID NO: 1542469 - DNA, 15 bp, Homo sapiens
gcatctggctagggc

SEQ ID NO: 1542470 - DNA, 15 bp, Homo sapiens
catctggctagggcg

SEQ ID NO: 1542471 - DNA, 15 bp, Homo sapiens
atctggctagggcgg

SEQ ID NO: 1542472 - DNA, 15 bp, Homo sapiens
tctggctagggcggg

SEQ ID NO: 1542473 - DNA, 15 bp, Homo sapiens
ctggctagggcgggg

SEQ ID NO: 1542474 - DNA, 15 bp, Homo sapiens
tggctagggcggggc

SEQ ID NO: 1542475 - DNA, 15 bp, Homo sapiens
ggctagggcggggcc

SEQ ID NO: 1542476 - DNA, 15 bp, Homo sapiens
gctagggcggggccc

SEQ ID NO: 1542477 - DNA, 15 bp, Homo sapiens
ctagggcggggccca

SEQ ID NO: 1542478 - DNA, 15 bp, Homo sapiens
tagggcggggcccag

SEQ ID NO: 1542479 - DNA, 15 bp, Homo sapiens
agggcggggcccaga

SEQ ID NO: 1542480 - DNA, 15 bp, Homo sapiens
gggcggggcccagat

SEQ ID NO: 1542481 - DNA, 15 bp, Homo sapiens
ggcggggcccagata

SEQ ID NO: 1542482 - DNA, 15 bp, Homo sapiens
gcggggcccagataa

SEQ ID NO: 1542483 - DNA, 15 bp, Homo sapiens
cggggcccagataag

SEQ ID NO: 1542484 - DNA, 15 bp, Homo sapiens
ggggcccagataaga

SEQ ID NO: 1542485 - DNA, 15 bp, Homo sapiens
gggcccagataagag

SEQ ID NO: 1542486 - DNA, 15 bp, Homo sapiens
ggcccagataagagc

SEQ ID NO: 1542487 - DNA, 15 bp, Homo sapiens
gcccagataagagcc

SEQ ID NO: 1542488 - DNA, 15 bp, Homo sapiens
cccagataagagccc

SEQ ID NO: 1542489 - DNA, 15 bp, Homo sapiens
ccagataagagccct

SEQ ID NO: 1542490 - DNA, 15 bp, Homo sapiens
cagataagagccctg

SEQ ID NO: 1542491 - DNA, 15 bp, Homo sapiens
agataagagccctgt

SEQ ID NO: 1542492 - DNA, 15 bp, Homo sapiens
gataagagccctgtg

SEQ ID NO: 1542493 - DNA, 15 bp, Homo sapiens
ataagagccctgtgc

SEQ ID NO: 1542494 - DNA, 15 bp, Homo sapiens
taagagccctgtgcc

SEQ ID NO: 1542495 - DNA, 15 bp, Homo sapiens
aagagccctgtgcca

SEQ ID NO: 1542496 - DNA, 15 bp, Homo sapiens
agagccctgtgccag

SEQ ID NO: 1542497 - DNA, 15 bp, Homo sapiens
gagccctgtgccagg

SEQ ID NO: 1542498 - DNA, 15 bp, Homo sapiens
agccctgtgccagga

SEQ ID NO: 1542499 - DNA, 15 bp, Homo sapiens
gccctgtgccaggag

SEQ ID NO: 1542500 - DNA, 15 bp, Homo sapiens
ccctgtgccaggaga

SEQ ID NO: 1542501 - DNA, 15 bp, Homo sapiens
cctgtgccaggagag

SEQ ID NO: 1542502 - DNA, 15 bp, Homo sapiens
ctgtgccaggagagc

SEQ ID NO: 1542503 - DNA, 15 bp, Homo sapiens
tgtgccaggagagcc

SEQ ID NO: 1542504 - DNA, 15 bp, Homo sapiens
gtgccaggagagcct

SEQ ID NO: 1542505 - DNA, 15 bp, Homo sapiens
tgccaggagagcctg

SEQ ID NO: 1542506 - DNA, 15 bp, Homo sapiens
gccaggagagcctgg

SEQ ID NO: 1542507 - DNA, 15 bp, Homo sapiens
ccaggagagcctggc

SEQ ID NO: 1542508 - DNA, 15 bp, Homo sapiens
caggagagcctggcc

SEQ ID NO: 1542509 - DNA, 15 bp, Homo sapiens
aggagagcctggccg

SEQ ID NO: 1542510 - DNA, 15 bp, Homo sapiens
ggagagcctggccgg

SEQ ID NO: 1542511 - DNA, 15 bp, Homo sapiens
gagagcctggccggt

SEQ ID NO: 1542512 - DNA, 15 bp, Homo sapiens
agagcctggccggtt

SEQ ID NO: 1542513 - DNA, 15 bp, Homo sapiens
gagcctggccggttc

SEQ ID NO: 1542514 - DNA, 15 bp, Homo sapiens
agcctggccggttct

SEQ ID NO: 1542515 - DNA, 15 bp, Homo sapiens
gcctggccggttctg

SEQ ID NO: 1542516 - DNA, 15 bp, Homo sapiens
cctggccggttctgc

SEQ ID NO: 1542517 - DNA, 15 bp, Homo sapiens
ctggccggttctgcc

SEQ ID NO: 1542518 - DNA, 15 bp, Homo sapiens
tggccggttctgcca

SEQ ID NO: 1542519 - DNA, 15 bp, Homo sapiens
ggccggttctgccac

SEQ ID NO: 1542520 - DNA, 15 bp, Homo sapiens
gccggttctgccact

SEQ ID NO: 1542521 - DNA, 15 bp, Homo sapiens
ccggttctgccactg

SEQ ID NO: 1542522 - DNA, 15 bp, Homo sapiens
cggttctgccactgt

SEQ ID NO: 1542523 - DNA, 15 bp, Homo sapiens
ggttctgccactgtg

SEQ ID NO: 1542524 - DNA, 15 bp, Homo sapiens
gttctgccactgtgg

SEQ ID NO: 1542525 - DNA, 15 bp, Homo sapiens
ttctgccactgtggg

SEQ ID NO: 1542526 - DNA, 15 bp, Homo sapiens
tctgccactgtgggg

SEQ ID NO: 1542527 - DNA, 15 bp, Homo sapiens
ctgccactgtgggga

SEQ ID NO: 1542528 - DNA, 15 bp, Homo sapiens
tgccactgtggggag

SEQ ID NO: 1542529 - DNA, 15 bp, Homo sapiens
gccactgtggggaga

SEQ ID NO: 1542530 - DNA, 15 bp, Homo sapiens
ccactgtggggagac

SEQ ID NO: 1542531 - DNA, 15 bp, Homo sapiens
cactgtggggagaca

SEQ ID NO: 1542532 - DNA, 15 bp, Homo sapiens
actgtggggagacag

SEQ ID NO: 1542533 - DNA, 15 bp, Homo sapiens
ctgtggggagacagg

SEQ ID NO: 1542534 - DNA, 15 bp, Homo sapiens
tgtggggagacaggc

SEQ ID NO: 1542535 - DNA, 15 bp, Homo sapiens
gtggggagacaggct

SEQ ID NO: 1542536 - DNA, 15 bp, Homo sapiens
tggggagacaggctc

SEQ ID NO: 1542537 - DNA, 15 bp, Homo sapiens
ggggagacaggctcc

SEQ ID NO: 1542538 - DNA, 15 bp, Homo sapiens
gggagacaggctccc

SEQ ID NO: 1542539 - DNA, 15 bp, Homo sapiens
ggagacaggctcccc

SEQ ID NO: 1542540 - DNA, 15 bp, Homo sapiens
gagacaggctccccc

SEQ ID NO: 1542541 - DNA, 15 bp, Homo sapiens
agacaggctccccca

SEQ ID NO: 1542542 - DNA, 15 bp, Homo sapiens
gacaggctcccccac

SEQ ID NO: 1542543 - DNA, 15 bp, Homo sapiens
acaggctcccccacc

SEQ ID NO: 1542544 - DNA, 15 bp, Homo sapiens
caggctcccccaccc

SEQ ID NO: 1542545 - DNA, 15 bp, Homo sapiens
aggctcccccacccc

SEQ ID NO: 1542546 - DNA, 15 bp, Homo sapiens
ggctcccccacccca

SEQ ID NO: 1542547 - DNA, 15 bp, Homo sapiens
gctcccccaccccat

SEQ ID NO: 1542548 - DNA, 15 bp, Homo sapiens
ctcccccaccccatg

SEQ ID NO: 1542549 - DNA, 15 bp, Homo sapiens
tcccccaccccatgt

SEQ ID NO: 1542550 - DNA, 15 bp, Homo sapiens
cccccaccccatgtc

SEQ ID NO: 1542551 - DNA, 15 bp, Homo sapiens
ccccaccccatgtcc

SEQ ID NO: 1542552 - DNA, 15 bp, Homo sapiens
cccaccccatgtccc

SEQ ID NO: 1542553 - DNA, 15 bp, Homo sapiens
ccaccccatgtcccc

SEQ ID NO: 1542554 - DNA, 15 bp, Homo sapiens
caccccatgtcccct

SEQ ID NO: 1542555 - DNA, 15 bp, Homo sapiens
accccatgtcccctg

SEQ ID NO: 1542556 - DNA, 15 bp, Homo sapiens
ccccatgtcccctgc

SEQ ID NO: 1542557 - DNA, 15 bp, Homo sapiens
cccatgtcccctgct

SEQ ID NO: 1542558 - DNA, 15 bp, Homo sapiens
ccatgtcccctgctt

SEQ ID NO: 1542559 - DNA, 15 bp, Homo sapiens
catgtcccctgcttc

SEQ ID NO: 1542560 - DNA, 15 bp, Homo sapiens
atgtcccctgcttcc

SEQ ID NO: 1542561 - DNA, 15 bp, Homo sapiens
tgtcccctgcttccc

SEQ ID NO: 1542562 - DNA, 15 bp, Homo sapiens
gtcccctgcttccct

SEQ ID NO: 1542563 - DNA, 15 bp, Homo sapiens
tcccctgcttccctg

SEQ ID NO: 1542564 - DNA, 15 bp, Homo sapiens
cccctgcttccctgc

SEQ ID NO: 1542565 - DNA, 15 bp, Homo sapiens
ccctgcttccctgca

SEQ ID NO: 1542566 - DNA, 15 bp, Homo sapiens
cctgcttccctgcag

SEQ ID NO: 1542567 - DNA, 15 bp, Homo sapiens
ctgcttccctgcagc

SEQ ID NO: 1542568 - DNA, 15 bp, Homo sapiens
tgcttccctgcagcc

SEQ ID NO: 1542569 - DNA, 15 bp, Homo sapiens
gcttccctgcagccc

SEQ ID NO: 1542570 - DNA, 15 bp, Homo sapiens
cttccctgcagccca

SEQ ID NO: 1542571 - DNA, 15 bp, Homo sapiens
ttccctgcagcccac

SEQ ID NO: 1542572 - DNA, 15 bp, Homo sapiens
tccctgcagcccaca

SEQ ID NO: 1542573 - DNA, 15 bp, Homo sapiens
ccctgcagcccacag

SEQ ID NO: 1542574 - DNA, 15 bp, Homo sapiens
cctgcagcccacaga

SEQ ID NO: 1542575 - DNA, 15 bp, Homo sapiens
ctgcagcccacagag

SEQ ID NO: 1542576 - DNA, 15 bp, Homo sapiens
tgcagcccacagaga

SEQ ID NO: 1542577 - DNA, 15 bp, Homo sapiens
gcagcccacagagaa

SEQ ID NO: 1542578 - DNA, 15 bp, Homo sapiens
cagcccacagagaat

SEQ ID NO: 1542579 - DNA, 15 bp, Homo sapiens
agcccacagagaata

SEQ ID NO: 1542580 - DNA, 15 bp, Homo sapiens
gcccacagagaatac

SEQ ID NO: 1542581 - DNA, 15 bp, Homo sapiens
cccacagagaataca

SEQ ID NO: 1542582 - DNA, 15 bp, Homo sapiens
ccacagagaatacag

SEQ ID NO: 1542583 - DNA, 15 bp, Homo sapiens
cacagagaatacaga

SEQ ID NO: 1542584 - DNA, 15 bp, Homo sapiens
acagagaatacagac

SEQ ID NO: 1542585 - DNA, 15 bp, Homo sapiens
cagagaatacagacc

SEQ ID NO: 1542586 - DNA, 15 bp, Homo sapiens
agagaatacagacct

SEQ ID NO: 1542587 - DNA, 15 bp, Homo sapiens
gagaatacagaccta

SEQ ID NO: 1542588 - DNA, 15 bp, Homo sapiens
agaatacagacctac

SEQ ID NO: 1542589 - DNA, 15 bp, Homo sapiens
gaatacagacctact

SEQ ID NO: 1542590 - DNA, 15 bp, Homo sapiens
aatacagacctactt

SEQ ID NO: 1542591 - DNA, 15 bp, Homo sapiens
atacagacctacttt

SEQ ID NO: 1542592 - DNA, 15 bp, Homo sapiens
tacagacctactttt

SEQ ID NO: 1542593 - DNA, 15 bp, Homo sapiens
acagacctactttta

SEQ ID NO: 1542594 - DNA, 15 bp, Homo sapiens
cagacctacttttac

SEQ ID NO: 1542595 - DNA, 15 bp, Homo sapiens
agacctacttttaca

SEQ ID NO: 1542596 - DNA, 15 bp, Homo sapiens
gacctacttttacag

SEQ ID NO: 1542597 - DNA, 15 bp, Homo sapiens
acctacttttacaga

SEQ ID NO: 1542598 - DNA, 15 bp, Homo sapiens
cctacttttacagaa

SEQ ID NO: 1542599 - DNA, 15 bp, Homo sapiens
ctacttttacagaaa

SEQ ID NO: 1542600 - DNA, 15 bp, Homo sapiens
tacttttacagaaat

SEQ ID NO: 1542601 - DNA, 15 bp, Homo sapiens
acttttacagaaatc

SEQ ID NO: 1542602 - DNA, 15 bp, Homo sapiens
cttttacagaaatcc

SEQ ID NO: 1542603 - DNA, 15 bp, Homo sapiens
ttttacagaaatcca

SEQ ID NO: 1542604 - DNA, 15 bp, Homo sapiens
tttacagaaatccag

SEQ ID NO: 1542605 - DNA, 15 bp, Homo sapiens
ttacagaaatccaga

SEQ ID NO: 1542606 - DNA, 15 bp, Homo sapiens
tacagaaatccagat

SEQ ID NO: 1542607 - DNA, 15 bp, Homo sapiens
acagaaatccagatt

SEQ ID NO: 1542608 - DNA, 15 bp, Homo sapiens
cagaaatccagattt

SEQ ID NO: 1542609 - DNA, 15 bp, Homo sapiens
agaaatccagatttt

SEQ ID NO: 1542610 - DNA, 15 bp, Homo sapiens
gaaatccagattttt

SEQ ID NO: 1542611 - DNA, 15 bp, Homo sapiens
aaatccagatttttg

SEQ ID NO: 1542612 - DNA, 15 bp, Homo sapiens
aatccagatttttgt

SEQ ID NO: 1542613 - DNA, 15 bp, Homo sapiens
atccagatttttgtg

SEQ ID NO: 1542614 - DNA, 15 bp, Homo sapiens
tccagatttttgtgt

SEQ ID NO: 1542615 - DNA, 15 bp, Homo sapiens
ccagatttttgtgta

SEQ ID NO: 1542616 - DNA, 15 bp, Homo sapiens
cagatttttgtgtaa

SEQ ID NO: 1542617 - DNA, 15 bp, Homo sapiens
agatttttgtgtaaa

SEQ ID NO: 1542618 - DNA, 15 bp, Homo sapiens
gatttttgtgtaaaa

SEQ ID NO: 1542619 - DNA, 15 bp, Homo sapiens
atttttgtgtaaaag

SEQ ID NO: 1542620 - DNA, 15 bp, Homo sapiens
tttttgtgtaaaagt

SEQ ID NO: 1542621 - DNA, 15 bp, Homo sapiens
ttttgtgtaaaagtg

SEQ ID NO: 1542622 - DNA, 15 bp, Homo sapiens
tttgtgtaaaagtgt

SEQ ID NO: 1542623 - DNA, 15 bp, Homo sapiens
ttgtgtaaaagtgtc

SEQ ID NO: 1542624 - DNA, 15 bp, Homo sapiens
tgtgtaaaagtgtct

SEQ ID NO: 1542625 - DNA, 15 bp, Homo sapiens
gtgtaaaagtgtctc

SEQ ID NO: 1542626 - DNA, 15 bp, Homo sapiens
tgtaaaagtgtctct

SEQ ID NO: 1542627 - DNA, 15 bp, Homo sapiens
gtaaaagtgtctcta

SEQ ID NO: 1542628 - DNA, 15 bp, Homo sapiens
taaaagtgtctctat

SEQ ID NO: 1542629 - DNA, 15 bp, Homo sapiens
aaaagtgtctctatt

SEQ ID NO: 1542630 - DNA, 15 bp, Homo sapiens
aaagtgtctctattt

SEQ ID NO: 1542631 - DNA, 15 bp, Homo sapiens
aagtgtctctatttt

SEQ ID NO: 1542632 - DNA, 15 bp, Homo sapiens
agtgtctctatttta

SEQ ID NO: 1542633 - DNA, 15 bp, Homo sapiens
gtgtctctattttaa

SEQ ID NO: 1542634 - DNA, 15 bp, Homo sapiens
tgtctctattttaag

SEQ ID NO: 1542635 - DNA, 15 bp, Homo sapiens
gtctctattttaagt

SEQ ID NO: 1542636 - DNA, 15 bp, Homo sapiens
tctctattttaagta

SEQ ID NO: 1542637 - DNA, 15 bp, Homo sapiens
ctctattttaagtag

SEQ ID NO: 1542638 - DNA, 15 bp, Homo sapiens
tctattttaagtaga

SEQ ID NO: 1542639 - DNA, 15 bp, Homo sapiens
ctattttaagtagat

SEQ ID NO: 1542640 - DNA, 15 bp, Homo sapiens
tattttaagtagatt

SEQ ID NO: 1542641 - DNA, 15 bp, Homo sapiens
attttaagtagattt

SEQ ID NO: 1542642 - DNA, 15 bp, Homo sapiens
ttttaagtagatttt

SEQ ID NO: 1542643 - DNA, 15 bp, Homo sapiens
tttaagtagatttta

SEQ ID NO: 1542644 - DNA, 15 bp, Homo sapiens
ttaagtagattttaa

SEQ ID NO: 1542645 - DNA, 15 bp, Homo sapiens
taagtagattttaag

SEQ ID NO: 1542646 - DNA, 15 bp, Homo sapiens
aagtagattttaagt

SEQ ID NO: 1542647 - DNA, 15 bp, Homo sapiens
agtagattttaagtg

SEQ ID NO: 1542648 - DNA, 15 bp, Homo sapiens
gtagattttaagtgg

SEQ ID NO: 1542649 - DNA, 15 bp, Homo sapiens
tagattttaagtggt

SEQ ID NO: 1542650 - DNA, 15 bp, Homo sapiens
agattttaagtggtg

SEQ ID NO: 1542651 - DNA, 15 bp, Homo sapiens
gattttaagtggtgg

SEQ ID NO: 1542652 - DNA, 15 bp, Homo sapiens
attttaagtggtggc

SEQ ID NO: 1542653 - DNA, 15 bp, Homo sapiens
ttttaagtggtggca

SEQ ID NO: 1542654 - DNA, 15 bp, Homo sapiens
tttaagtggtggcag

SEQ ID NO: 1542655 - DNA, 15 bp, Homo sapiens
ttaagtggtggcagc

SEQ ID NO: 1542656 - DNA, 15 bp, Homo sapiens
taagtggtggcagca

SEQ ID NO: 1542657 - DNA, 15 bp, Homo sapiens
aagtggtggcagcaa

SEQ ID NO: 1542658 - DNA, 15 bp, Homo sapiens
agtggtggcagcaaa

SEQ ID NO: 1542659 - DNA, 15 bp, Homo sapiens
gtggtggcagcaaat

SEQ ID NO: 1542660 - DNA, 15 bp, Homo sapiens
tggtggcagcaaatt

SEQ ID NO: 1542661 - DNA, 15 bp, Homo sapiens
ggtggcagcaaattt

SEQ ID NO: 1542662 - DNA, 15 bp, Homo sapiens
gtggcagcaaattta

SEQ ID NO: 1542663 - DNA, 15 bp, Homo sapiens
tggcagcaaatttaa

SEQ ID NO: 1542664 - DNA, 15 bp, Homo sapiens
ggcagcaaatttaag

SEQ ID NO: 1542665 - DNA, 15 bp, Homo sapiens
gcagcaaatttaagc

SEQ ID NO: 1542666 - DNA, 15 bp, Homo sapiens
cagcaaatttaagct

SEQ ID NO: 1542667 - DNA, 15 bp, Homo sapiens
agcaaatttaagctt

SEQ ID NO: 1542668 - DNA, 15 bp, Homo sapiens
gcaaatttaagcttt

SEQ ID NO: 1542669 - DNA, 15 bp, Homo sapiens
caaatttaagctttt

SEQ ID NO: 1542670 - DNA, 15 bp, Homo sapiens
aaatttaagcttttg

SEQ ID NO: 1542671 - DNA, 15 bp, Homo sapiens
aatttaagcttttga

SEQ ID NO: 1542672 - DNA, 15 bp, Homo sapiens
atttaagcttttgag

SEQ ID NO: 1542673 - DNA, 15 bp, Homo sapiens
tttaagcttttgaga

SEQ ID NO: 1542674 - DNA, 15 bp, Homo sapiens
ttaagcttttgagaa

SEQ ID NO: 1542675 - DNA, 15 bp, Homo sapiens
taagcttttgagaat

SEQ ID NO: 1542676 - DNA, 15 bp, Homo sapiens
aagcttttgagaata

SEQ ID NO: 1542677 - DNA, 15 bp, Homo sapiens
agcttttgagaatat

SEQ ID NO: 1542678 - DNA, 15 bp, Homo sapiens
gcttttgagaatatt

SEQ ID NO: 1542679 - DNA, 15 bp, Homo sapiens
cttttgagaatatta

SEQ ID NO: 1542680 - DNA, 15 bp, Homo sapiens
ttttgagaatattat

SEQ ID NO: 1542681 - DNA, 15 bp, Homo sapiens
tttgagaatattata

SEQ ID NO: 1542682 - DNA, 15 bp, Homo sapiens
ttgagaatattatac

SEQ ID NO: 1542683 - DNA, 15 bp, Homo sapiens
tgagaatattataca

SEQ ID NO: 1542684 - DNA, 15 bp, Homo sapiens
gagaatattatacag

SEQ ID NO: 1542685 - DNA, 15 bp, Homo sapiens
agaatattatacaga

SEQ ID NO: 1542686 - DNA, 15 bp, Homo sapiens
gaatattatacagaa

SEQ ID NO: 1542687 - DNA, 15 bp, Homo sapiens
aatattatacagaac

SEQ ID NO: 1542688 - DNA, 15 bp, Homo sapiens
atattatacagaaca

SEQ ID NO: 1542689 - DNA, 15 bp, Homo sapiens
tattatacagaacaa

SEQ ID NO: 1542690 - DNA, 15 bp, Homo sapiens
attatacagaacaaa

SEQ ID NO: 1542691 - DNA, 15 bp, Homo sapiens
ttatacagaacaaat

SEQ ID NO: 1542692 - DNA, 15 bp, Homo sapiens
tatacagaacaaatc

SEQ ID NO: 1542693 - DNA, 15 bp, Homo sapiens
atacagaacaaatca

SEQ ID NO: 1542694 - DNA, 15 bp, Homo sapiens
tacagaacaaatcag

SEQ ID NO: 1542695 - DNA, 15 bp, Homo sapiens
acagaacaaatcaga

SEQ ID NO: 1542696 - DNA, 15 bp, Homo sapiens
cagaacaaatcagat

SEQ ID NO: 1542697 - DNA, 15 bp, Homo sapiens
agaacaaatcagatt

SEQ ID NO: 1542698 - DNA, 15 bp, Homo sapiens
gaacaaatcagattc

SEQ ID NO: 1542699 - DNA, 15 bp, Homo sapiens
aacaaatcagattca

SEQ ID NO: 1542700 - DNA, 15 bp, Homo sapiens
acaaatcagattcac

SEQ ID NO: 1542701 - DNA, 15 bp, Homo sapiens
caaatcagattcaca

SEQ ID NO: 1542702 - DNA, 15 bp, Homo sapiens
aaatcagattcacag

SEQ ID NO: 1542703 - DNA, 15 bp, Homo sapiens
aatcagattcacagg

SEQ ID NO: 1542704 - DNA, 15 bp, Homo sapiens
atcagattcacaggc

SEQ ID NO: 1542705 - DNA, 15 bp, Homo sapiens
tcagattcacaggcc

SEQ ID NO: 1542706 - DNA, 15 bp, Homo sapiens
cagattcacaggcca

SEQ ID NO: 1542707 - DNA, 15 bp, Homo sapiens
agattcacaggccag

SEQ ID NO: 1542708 - DNA, 15 bp, Homo sapiens
gattcacaggccaga

SEQ ID NO: 1542709 - DNA, 15 bp, Homo sapiens
attcacaggccagat

SEQ ID NO: 1542710 - DNA, 15 bp, Homo sapiens
ttcacaggccagatg

SEQ ID NO: 1542711 - DNA, 15 bp, Homo sapiens
tcacaggccagatgc

SEQ ID NO: 1542712 - DNA, 15 bp, Homo sapiens
cacaggccagatgca

SEQ ID NO: 1542713 - DNA, 15 bp, Homo sapiens
acaggccagatgcaa

SEQ ID NO: 1542714 - DNA, 15 bp, Homo sapiens
caggccagatgcaac

SEQ ID NO: 1542715 - DNA, 15 bp, Homo sapiens
aggccagatgcaact

SEQ ID NO: 1542716 - DNA, 15 bp, Homo sapiens
ggccagatgcaactt

SEQ ID NO: 1542717 - DNA, 15 bp, Homo sapiens
gccagatgcaacttt

SEQ ID NO: 1542718 - DNA, 15 bp, Homo sapiens
ccagatgcaacttta

SEQ ID NO: 1542719 - DNA, 15 bp, Homo sapiens
cagatgcaactttat

SEQ ID NO: 1542720 - DNA, 15 bp, Homo sapiens
agatgcaactttatt

SEQ ID NO: 1542721 - DNA, 15 bp, Homo sapiens
gatgcaactttattt

SEQ ID NO: 1542722 - DNA, 15 bp, Homo sapiens
atgcaactttattta

SEQ ID NO: 1542723 - DNA, 15 bp, Homo sapiens
tgcaactttatttac

SEQ ID NO: 1542724 - DNA, 15 bp, Homo sapiens
gcaactttatttaca

SEQ ID NO: 1542725 - DNA, 15 bp, Homo sapiens
caactttatttacag

SEQ ID NO: 1542726 - DNA, 15 bp, Homo sapiens
aactttatttacaga

SEQ ID NO: 1542727 - DNA, 15 bp, Homo sapiens
actttatttacagaa

SEQ ID NO: 1542728 - DNA, 15 bp, Homo sapiens
ctttatttacagaaa

SEQ ID NO: 1542729 - DNA, 15 bp, Homo sapiens
tttatttacagaaat

SEQ ID NO: 1542730 - DNA, 15 bp, Homo sapiens
ttatttacagaaatg

SEQ ID NO: 1542731 - DNA, 15 bp, Homo sapiens
tatttacagaaatgg

SEQ ID NO: 1542732 - DNA, 15 bp, Homo sapiens
atttacagaaatggg

SEQ ID NO: 1542733 - DNA, 15 bp, Homo sapiens
tttacagaaatggga

SEQ ID NO: 1542734 - DNA, 15 bp, Homo sapiens
ttacagaaatgggat

SEQ ID NO: 1542735 - DNA, 15 bp, Homo sapiens
tacagaaatgggatc

SEQ ID NO: 1542736 - DNA, 15 bp, Homo sapiens
acagaaatgggatca

SEQ ID NO: 1542737 - DNA, 15 bp, Homo sapiens
cagaaatgggatcag

SEQ ID NO: 1542738 - DNA, 15 bp, Homo sapiens
agaaatgggatcagg

SEQ ID NO: 1542739 - DNA, 15 bp, Homo sapiens
gaaatgggatcaggt

SEQ ID NO: 1542740 - DNA, 15 bp, Homo sapiens
aaatgggatcaggtc

SEQ ID NO: 1542741 - DNA, 15 bp, Homo sapiens
aatgggatcaggtcc

SEQ ID NO: 1542742 - DNA, 15 bp, Homo sapiens
atgggatcaggtcct

SEQ ID NO: 1542743 - DNA, 15 bp, Homo sapiens
tgggatcaggtccta

SEQ ID NO: 1542744 - DNA, 15 bp, Homo sapiens
gggatcaggtcctac

SEQ ID NO: 1542745 - DNA, 15 bp, Homo sapiens
ggatcaggtcctacc

SEQ ID NO: 1542746 - DNA, 15 bp, Homo sapiens
gatcaggtcctacct

SEQ ID NO: 1542747 - DNA, 15 bp, Homo sapiens
atcaggtcctacctc

SEQ ID NO: 1542748 - DNA, 15 bp, Homo sapiens
tcaggtcctacctca

SEQ ID NO: 1542749 - DNA, 15 bp, Homo sapiens
caggtcctacctcag

SEQ ID NO: 1542750 - DNA, 15 bp, Homo sapiens
aggtcctacctcagg

SEQ ID NO: 1542751 - DNA, 15 bp, Homo sapiens
ggtcctacctcaggt

SEQ ID NO: 1542752 - DNA, 15 bp, Homo sapiens
gtcctacctcaggtc

SEQ ID NO: 1542753 - DNA, 15 bp, Homo sapiens
tcctacctcaggtcc

SEQ ID NO: 1542754 - DNA, 15 bp, Homo sapiens
cctacctcaggtccc

SEQ ID NO: 1542755 - DNA, 15 bp, Homo sapiens
ctacctcaggtccca

SEQ ID NO: 1542756 - DNA, 15 bp, Homo sapiens
tacctcaggtcccat

SEQ ID NO: 1542757 - DNA, 15 bp, Homo sapiens
acctcaggtcccatc

SEQ ID NO: 1542758 - DNA, 15 bp, Homo sapiens
cctcaggtcccatct

SEQ ID NO: 1542759 - DNA, 15 bp, Homo sapiens
ctcaggtcccatctc

SEQ ID NO: 1542760 - DNA, 15 bp, Homo sapiens
tcaggtcccatctca

SEQ ID NO: 1542761 - DNA, 15 bp, Homo sapiens
caggtcccatctcac

SEQ ID NO: 1542762 - DNA, 15 bp, Homo sapiens
aggtcccatctcacg

SEQ ID NO: 1542763 - DNA, 15 bp, Homo sapiens
ggtcccatctcacgt

SEQ ID NO: 1542764 - DNA, 15 bp, Homo sapiens
gtcccatctcacgtt

SEQ ID NO: 1542765 - DNA, 15 bp, Homo sapiens
tcccatctcacgttt

SEQ ID NO: 1542766 - DNA, 15 bp, Homo sapiens
cccatctcacgtttt

SEQ ID NO: 1542767 - DNA, 15 bp, Homo sapiens
ccatctcacgttttc

SEQ ID NO: 1542768 - DNA, 15 bp, Homo sapiens
catctcacgttttca

SEQ ID NO: 1542769 - DNA, 15 bp, Homo sapiens
atctcacgttttcac

SEQ ID NO: 1542770 - DNA, 15 bp, Homo sapiens
tctcacgttttcact

SEQ ID NO: 1542771 - DNA, 15 bp, Homo sapiens
ctcacgttttcactt

SEQ ID NO: 1542772 - DNA, 15 bp, Homo sapiens
tcacgttttcactta

SEQ ID NO: 1542773 - DNA, 15 bp, Homo sapiens
cacgttttcacttat

SEQ ID NO: 1542774 - DNA, 15 bp, Homo sapiens
acgttttcacttatg

SEQ ID NO: 1542775 - DNA, 15 bp, Homo sapiens
cgttttcacttatgc

SEQ ID NO: 1542776 - DNA, 15 bp, Homo sapiens
gttttcacttatgcc

SEQ ID NO: 1542777 - DNA, 15 bp, Homo sapiens
ttttcacttatgcct

SEQ ID NO: 1542778 - DNA, 15 bp, Homo sapiens
tttcacttatgccta

SEQ ID NO: 1542779 - DNA, 15 bp, Homo sapiens
ttcacttatgcctat

SEQ ID NO: 1542780 - DNA, 15 bp, Homo sapiens
tcacttatgcctata

SEQ ID NO: 1542781 - DNA, 15 bp, Homo sapiens
cacttatgcctatac

SEQ ID NO: 1542782 - DNA, 15 bp, Homo sapiens
acttatgcctatacg

SEQ ID NO: 1542783 - DNA, 15 bp, Homo sapiens
cttatgcctatacgt

SEQ ID NO: 1542784 - DNA, 15 bp, Homo sapiens
ttatgcctatacgtc

SEQ ID NO: 1542785 - DNA, 15 bp, Homo sapiens
tatgcctatacgtct

SEQ ID NO: 1542786 - DNA, 15 bp, Homo sapiens
atgcctatacgtctc

SEQ ID NO: 1542787 - DNA, 15 bp, Homo sapiens
tgcctatacgtctcc

SEQ ID NO: 1542788 - DNA, 15 bp, Homo sapiens
gcctatacgtctcct

SEQ ID NO: 1542789 - DNA, 15 bp, Homo sapiens
cctatacgtctcctt

SEQ ID NO: 1542790 - DNA, 15 bp, Homo sapiens
ctatacgtctccttc

SEQ ID NO: 1542791 - DNA, 15 bp, Homo sapiens
tatacgtctccttca

SEQ ID NO: 1542792 - DNA, 15 bp, Homo sapiens
atacgtctccttcac

SEQ ID NO: 1542793 - DNA, 15 bp, Homo sapiens
tacgtctccttcacg

SEQ ID NO: 1542794 - DNA, 15 bp, Homo sapiens
acgtctccttcacgg

SEQ ID NO: 1542795 - DNA, 15 bp, Homo sapiens
cgtctccttcacggg

SEQ ID NO: 1542796 - DNA, 15 bp, Homo sapiens
gtctccttcacggga

SEQ ID NO: 1542797 - DNA, 15 bp, Homo sapiens
tctccttcacgggaa

SEQ ID NO: 1542798 - DNA, 15 bp, Homo sapiens
ctccttcacgggaaa

SEQ ID NO: 1542799 - DNA, 15 bp, Homo sapiens
tccttcacgggaaag

SEQ ID NO: 1542800 - DNA, 15 bp, Homo sapiens
ccttcacgggaaagg

SEQ ID NO: 1542801 - DNA, 15 bp, Homo sapiens
cttcacgggaaaggc

SEQ ID NO: 1542802 - DNA, 15 bp, Homo sapiens
ttcacgggaaaggcc

SEQ ID NO: 1542803 - DNA, 15 bp, Homo sapiens
tcacgggaaaggcca

SEQ ID NO: 1542804 - DNA, 15 bp, Homo sapiens
cacgggaaaggccac

SEQ ID NO: 1542805 - DNA, 15 bp, Homo sapiens
acgggaaaggccaca

SEQ ID NO: 1542806 - DNA, 15 bp, Homo sapiens
cgggaaaggccacaa

SEQ ID NO: 1542807 - DNA, 15 bp, Homo sapiens
aaaggccacaagagg

SEQ ID NO: 1542808 - DNA, 15 bp, Homo sapiens
aaggccacaagaggc

SEQ ID NO: 1542809 - DNA, 15 bp, Homo sapiens
aggccacaagaggcc

SEQ ID NO: 1542810 - DNA, 15 bp, Homo sapiens
ggccacaagaggccc

SEQ ID NO: 1542811 - DNA, 15 bp, Homo sapiens
gccacaagaggccct

SEQ ID NO: 1542812 - DNA, 15 bp, Homo sapiens
ccacaagaggccctg

SEQ ID NO: 1542813 - DNA, 15 bp, Homo sapiens
cacaagaggccctgc

SEQ ID NO: 1542814 - DNA, 15 bp, Homo sapiens
acaagaggccctgcg

SEQ ID NO: 1542815 - DNA, 15 bp, Homo sapiens
caagaggccctgcgg

SEQ ID NO: 1542816 - DNA, 15 bp, Homo sapiens
aagaggccctgcggt

SEQ ID NO: 1542817 - DNA, 15 bp, Homo sapiens
agaggccctgcggta

SEQ ID NO: 1542818 - DNA, 15 bp, Homo sapiens
gaggccctgcggtaa

SEQ ID NO: 1542819 - DNA, 15 bp, Homo sapiens
aggccctgcggtaag

SEQ ID NO: 1542820 - DNA, 15 bp, Homo sapiens
ggccctgcggtaagt

SEQ ID NO: 1542821 - DNA, 15 bp, Homo sapiens
gccctgcggtaagtg

SEQ ID NO: 1542822 - DNA, 15 bp, Homo sapiens
ccctgcggtaagtgt

SEQ ID NO: 1542823 - DNA, 15 bp, Homo sapiens
cctgcggtaagtgtc

SEQ ID NO: 1542824 - DNA, 15 bp, Homo sapiens
ctgcggtaagtgtcc

SEQ ID NO: 1542825 - DNA, 15 bp, Homo sapiens
tgcggtaagtgtccc

SEQ ID NO: 1542826 - DNA, 15 bp, Homo sapiens
gcggtaagtgtcccg

SEQ ID NO: 1542827 - DNA, 15 bp, Homo sapiens
cggtaagtgtcccgg

SEQ ID NO: 1542828 - DNA, 15 bp, Homo sapiens
ggtaagtgtcccggt

SEQ ID NO: 1542829 - DNA, 15 bp, Homo sapiens
gtaagtgtcccggtg

SEQ ID NO: 1542830 - DNA, 15 bp, Homo sapiens
taagtgtcccggtgt

SEQ ID NO: 1542831 - DNA, 15 bp, Homo sapiens
aagtgtcccggtgtt

SEQ ID NO: 1542832 - DNA, 15 bp, Homo sapiens
agtgtcccggtgttg

SEQ ID NO: 1542833 - DNA, 15 bp, Homo sapiens
gtgtcccggtgttga

SEQ ID NO: 1542834 - DNA, 15 bp, Homo sapiens
tgtcccggtgttgat

SEQ ID NO: 1542835 - DNA, 15 bp, Homo sapiens
gtcccggtgttgatt

SEQ ID NO: 1542836 - DNA, 15 bp, Homo sapiens
tcccggtgttgattt

SEQ ID NO: 1542837 - DNA, 15 bp, Homo sapiens
cccggtgttgattta

SEQ ID NO: 1542838 - DNA, 15 bp, Homo sapiens
ccggtgttgatttaa

SEQ ID NO: 1542839 - DNA, 15 bp, Homo sapiens
cggtgttgatttaaa

SEQ ID NO: 1542840 - DNA, 15 bp, Homo sapiens
ggtgttgatttaaag

SEQ ID NO: 1542841 - DNA, 15 bp, Homo sapiens
gtgttgatttaaagt

SEQ ID NO: 1542842 - DNA, 15 bp, Homo sapiens
tgttgatttaaagtc

SEQ ID NO: 1542843 - DNA, 15 bp, Homo sapiens
gttgatttaaagtcc

SEQ ID NO: 1542844 - DNA, 15 bp, Homo sapiens
ttgatttaaagtccc

SEQ ID NO: 1542845 - DNA, 15 bp, Homo sapiens
tgatttaaagtcccc

SEQ ID NO: 1542846 - DNA, 15 bp, Homo sapiens
gatttaaagtcccca

SEQ ID NO: 1542847 - DNA, 15 bp, Homo sapiens
atttaaagtccccaa

SEQ ID NO: 1542848 - DNA, 15 bp, Homo sapiens
tttaaagtccccaac

SEQ ID NO: 1542849 - DNA, 15 bp, Homo sapiens
ttaaagtccccaaca

SEQ ID NO: 1542850 - DNA, 15 bp, Homo sapiens
taaagtccccaacag

SEQ ID NO: 1542851 - DNA, 15 bp, Homo sapiens
aaagtccccaacagt

SEQ ID NO: 1542852 - DNA, 15 bp, Homo sapiens
aagtccccaacagtg

SEQ ID NO: 1542853 - DNA, 15 bp, Homo sapiens
agtccccaacagtga

SEQ ID NO: 1542854 - DNA, 15 bp, Homo sapiens
gtccccaacagtgaa

SEQ ID NO: 1542855 - DNA, 15 bp, Homo sapiens
tccccaacagtgaat

SEQ ID NO: 1542856 - DNA, 15 bp, Homo sapiens
ccccaacagtgaata

SEQ ID NO: 1542857 - DNA, 15 bp, Homo sapiens
cccaacagtgaatat

SEQ ID NO: 1542858 - DNA, 15 bp, Homo sapiens
ccaacagtgaatatg

SEQ ID NO: 1542859 - DNA, 15 bp, Homo sapiens
caacagtgaatatga

SEQ ID NO: 1542860 - DNA, 15 bp, Homo sapiens
aacagtgaatatgag

SEQ ID NO: 1542861 - DNA, 15 bp, Homo sapiens
acagtgaatatgagg

SEQ ID NO: 1542862 - DNA, 15 bp, Homo sapiens
cagtgaatatgaggg

SEQ ID NO: 1542863 - DNA, 15 bp, Homo sapiens
agtgaatatgagggt

SEQ ID NO: 1542864 - DNA, 15 bp, Homo sapiens
gtgaatatgagggtc

SEQ ID NO: 1542865 - DNA, 15 bp, Homo sapiens
tgaatatgagggtcc

SEQ ID NO: 1542866 - DNA, 15 bp, Homo sapiens
gaatatgagggtcct

SEQ ID NO: 1542867 - DNA, 15 bp, Homo sapiens
aatatgagggtcctc

SEQ ID NO: 1542868 - DNA, 15 bp, Homo sapiens
atatgagggtcctca

SEQ ID NO: 1542869 - DNA, 15 bp, Homo sapiens
tatgagggtcctcac

SEQ ID NO: 1542870 - DNA, 15 bp, Homo sapiens
atgagggtcctcact

SEQ ID NO: 1542871 - DNA, 15 bp, Homo sapiens
tgagggtcctcactg

SEQ ID NO: 1542872 - DNA, 15 bp, Homo sapiens
gagggtcctcactgt

SEQ ID NO: 1542873 - DNA, 15 bp, Homo sapiens
agggtcctcactgtt

SEQ ID NO: 1542874 - DNA, 15 bp, Homo sapiens
gggtcctcactgttg

SEQ ID NO: 1542875 - DNA, 15 bp, Homo sapiens
ggtcctcactgttgc

SEQ ID NO: 1542876 - DNA, 15 bp, Homo sapiens
gtcctcactgttgca

SEQ ID NO: 1542877 - DNA, 15 bp, Homo sapiens
tcctcactgttgcag

SEQ ID NO: 1542878 - DNA, 15 bp, Homo sapiens
cctcactgttgcagc

SEQ ID NO: 1542879 - DNA, 15 bp, Homo sapiens
ctcactgttgcagca

SEQ ID NO: 1542880 - DNA, 15 bp, Homo sapiens
tcactgttgcagcaa

SEQ ID NO: 1542881 - DNA, 15 bp, Homo sapiens
cactgttgcagcaag

SEQ ID NO: 1542882 - DNA, 15 bp, Homo sapiens
actgttgcagcaaga

SEQ ID NO: 1542883 - DNA, 15 bp, Homo sapiens
ctgttgcagcaagag

SEQ ID NO: 1542884 - DNA, 15 bp, Homo sapiens
tgttgcagcaagagg

SEQ ID NO: 1542885 - DNA, 15 bp, Homo sapiens
gttgcagcaagagga

SEQ ID NO: 1542886 - DNA, 15 bp, Homo sapiens
ttgcagcaagaggat

SEQ ID NO: 1542887 - DNA, 15 bp, Homo sapiens
tgcagcaagaggata

SEQ ID NO: 1542888 - DNA, 15 bp, Homo sapiens
gcagcaagaggatac

SEQ ID NO: 1542889 - DNA, 15 bp, Homo sapiens
cagcaagaggatacc

SEQ ID NO: 1542890 - DNA, 15 bp, Homo sapiens
agcaagaggataccc

SEQ ID NO: 1542891 - DNA, 15 bp, Homo sapiens
gcaagaggatacccc

SEQ ID NO: 1542892 - DNA, 15 bp, Homo sapiens
caagaggataccccc

SEQ ID NO: 1542893 - DNA, 15 bp, Homo sapiens
aagaggatacccccc

SEQ ID NO: 1542894 - DNA, 15 bp, Homo sapiens
agaggatacccccct

SEQ ID NO: 1542895 - DNA, 15 bp, Homo sapiens
gaggatacccccctg

SEQ ID NO: 1542896 - DNA, 15 bp, Homo sapiens
aggatacccccctgt

SEQ ID NO: 1542897 - DNA, 15 bp, Homo sapiens
ggatacccccctgtg

SEQ ID NO: 1542898 - DNA, 15 bp, Homo sapiens
gatacccccctgtgt

SEQ ID NO: 1542899 - DNA, 15 bp, Homo sapiens
atacccccctgtgta

SEQ ID NO: 1542900 - DNA, 15 bp, Homo sapiens
tacccccctgtgtat

SEQ ID NO: 1542901 - DNA, 15 bp, Homo sapiens
acccccctgtgtatc

SEQ ID NO: 1542902 - DNA, 15 bp, Homo sapiens
cccccctgtgtatct

SEQ ID NO: 1542903 - DNA, 15 bp, Homo sapiens
ccccctgtgtatctt

SEQ ID NO: 1542904 - DNA, 15 bp, Homo sapiens
cccctgtgtatcttg

SEQ ID NO: 1542905 - DNA, 15 bp, Homo sapiens
ccctgtgtatcttgg

SEQ ID NO: 1542906 - DNA, 15 bp, Homo sapiens
cctgtgtatcttgga

SEQ ID NO: 1542907 - DNA, 15 bp, Homo sapiens
ctgtgtatcttggaa

SEQ ID NO: 1542908 - DNA, 15 bp, Homo sapiens
tgtgtatcttggaaa

SEQ ID NO: 1542909 - DNA, 15 bp, Homo sapiens
gtgtatcttggaaat

SEQ ID NO: 1542910 - DNA, 15 bp, Homo sapiens
tgtatcttggaaatg

SEQ ID NO: 1542911 - DNA, 15 bp, Homo sapiens
gtatcttggaaatgc

SEQ ID NO: 1542912 - DNA, 15 bp, Homo sapiens
tatcttggaaatgcc

SEQ ID NO: 1542913 - DNA, 15 bp, Homo sapiens
atcttggaaatgcct

SEQ ID NO: 1542914 - DNA, 15 bp, Homo sapiens
tcttggaaatgcctg

SEQ ID NO: 1542915 - DNA, 15 bp, Homo sapiens
cttggaaatgcctgc

SEQ ID NO: 1542916 - DNA, 15 bp, Homo sapiens
ttggaaatgcctgca

SEQ ID NO: 1542917 - DNA, 15 bp, Homo sapiens
tggaaatgcctgcag

SEQ ID NO: 1542918 - DNA, 15 bp, Homo sapiens
ggaaatgcctgcagc

SEQ ID NO: 1542919 - DNA, 15 bp, Homo sapiens
gaaatgcctgcagcc

SEQ ID NO: 1542920 - DNA, 15 bp, Homo sapiens
aaatgcctgcagccc

SEQ ID NO: 1542921 - DNA, 15 bp, Homo sapiens
aatgcctgcagccct

SEQ ID NO: 1542922 - DNA, 15 bp, Homo sapiens
atgcctgcagccctc

SEQ ID NO: 1542923 - DNA, 15 bp, Homo sapiens
tgcctgcagccctct

SEQ ID NO: 1542924 - DNA, 15 bp, Homo sapiens
gcctgcagccctctt

SEQ ID NO: 1542925 - DNA, 15 bp, Homo sapiens
cctgcagccctcttg

SEQ ID NO: 1542926 - DNA, 15 bp, Homo sapiens
ctgcagccctcttgc

SEQ ID NO: 1542927 - DNA, 15 bp, Homo sapiens
tgcagccctcttgct

SEQ ID NO: 1542928 - DNA, 15 bp, Homo sapiens
gcagccctcttgctg

SEQ ID NO: 1542929 - DNA, 15 bp, Homo sapiens
cagccctcttgctgc

SEQ ID NO: 1542930 - DNA, 15 bp, Homo sapiens
agccctcttgctgca

SEQ ID NO: 1542931 - DNA, 15 bp, Homo sapiens
gccctcttgctgcag

SEQ ID NO: 1542932 - DNA, 15 bp, Homo sapiens
ccctcttgctgcaga

SEQ ID NO: 1542933 - DNA, 15 bp, Homo sapiens
cctcttgctgcagaa

SEQ ID NO: 1542934 - DNA, 15 bp, Homo sapiens
ctcttgctgcagaac

SEQ ID NO: 1542935 - DNA, 15 bp, Homo sapiens
tcttgctgcagaaca

SEQ ID NO: 1542936 - DNA, 15 bp, Homo sapiens
cttgctgcagaacag

SEQ ID NO: 1542937 - DNA, 15 bp, Homo sapiens
ttgctgcagaacaga

SEQ ID NO: 1542938 - DNA, 15 bp, Homo sapiens
tgctgcagaacagat

SEQ ID NO: 1542939 - DNA, 15 bp, Homo sapiens
gctgcagaacagatt

SEQ ID NO: 1542940 - DNA, 15 bp, Homo sapiens
ctgcagaacagattc

SEQ ID NO: 1542941 - DNA, 15 bp, Homo sapiens
tgcagaacagattct

SEQ ID NO: 1542942 - DNA, 15 bp, Homo sapiens
gcagaacagattctt

SEQ ID NO: 1542943 - DNA, 15 bp, Homo sapiens
cagaacagattctta

SEQ ID NO: 1542944 - DNA, 15 bp, Homo sapiens
agaacagattcttag

SEQ ID NO: 1542945 - DNA, 15 bp, Homo sapiens
gaacagattcttagg

SEQ ID NO: 1542946 - DNA, 15 bp, Homo sapiens
aacagattcttagga

SEQ ID NO: 1542947 - DNA, 15 bp, Homo sapiens
acagattcttaggag

SEQ ID NO: 1542948 - DNA, 15 bp, Homo sapiens
cagattcttaggaga

SEQ ID NO: 1542949 - DNA, 15 bp, Homo sapiens
agattcttaggagag

SEQ ID NO: 1542950 - DNA, 15 bp, Homo sapiens
gattcttaggagaga

SEQ ID NO: 1542951 - DNA, 15 bp, Homo sapiens
attcttaggagagaa

SEQ ID NO: 1542952 - DNA, 15 bp, Homo sapiens
ttcttaggagagaaa

SEQ ID NO: 1542953 - DNA, 15 bp, Homo sapiens
tcttaggagagaaac

SEQ ID NO: 1542954 - DNA, 15 bp, Homo sapiens
cttaggagagaaact

SEQ ID NO: 1542955 - DNA, 15 bp, Homo sapiens
ttaggagagaaactg

SEQ ID NO: 1542956 - DNA, 15 bp, Homo sapiens
taggagagaaactgt

SEQ ID NO: 1542957 - DNA, 15 bp, Homo sapiens
aggagagaaactgtc

SEQ ID NO: 1542958 - DNA, 15 bp, Homo sapiens
ggagagaaactgtca

SEQ ID NO: 1542959 - DNA, 15 bp, Homo sapiens
gagagaaactgtcag

SEQ ID NO: 1542960 - DNA, 15 bp, Homo sapiens
agagaaactgtcaga

SEQ ID NO: 1542961 - DNA, 15 bp, Homo sapiens
gagaaactgtcagat

SEQ ID NO: 1542962 - DNA, 15 bp, Homo sapiens
agaaactgtcagatc

SEQ ID NO: 1542963 - DNA, 15 bp, Homo sapiens
gaaactgtcagatca

SEQ ID NO: 1542964 - DNA, 15 bp, Homo sapiens
aaactgtcagatcaa

SEQ ID NO: 1542965 - DNA, 15 bp, Homo sapiens
aactgtcagatcaaa

SEQ ID NO: 1542966 - DNA, 15 bp, Homo sapiens
actgtcagatcaaag

SEQ ID NO: 1542967 - DNA, 15 bp, Homo sapiens
ctgtcagatcaaagt

SEQ ID NO: 1542968 - DNA, 15 bp, Homo sapiens
tgtcagatcaaagtt

SEQ ID NO: 1542969 - DNA, 15 bp, Homo sapiens
gtcagatcaaagtta

SEQ ID NO: 1542970 - DNA, 15 bp, Homo sapiens
tcagatcaaagttaa

SEQ ID NO: 1542971 - DNA, 15 bp, Homo sapiens
cagatcaaagttaaa

SEQ ID NO: 1542972 - DNA, 15 bp, Homo sapiens
agatcaaagttaaac

SEQ ID NO: 1542973 - DNA, 15 bp, Homo sapiens
gatcaaagttaaact

SEQ ID NO: 1542974 - DNA, 15 bp, Homo sapiens
atcaaagttaaactt

SEQ ID NO: 1542975 - DNA, 15 bp, Homo sapiens
tcaaagttaaactta

SEQ ID NO: 1542976 - DNA, 15 bp, Homo sapiens
caaagttaaacttag

SEQ ID NO: 1542977 - DNA, 15 bp, Homo sapiens
aaagttaaacttaga

SEQ ID NO: 1542978 - DNA, 15 bp, Homo sapiens
aagttaaacttagag

SEQ ID NO: 1542979 - DNA, 15 bp, Homo sapiens
agttaaacttagaga

SEQ ID NO: 1542980 - DNA, 15 bp, Homo sapiens
gttaaacttagagaa

SEQ ID NO: 1542981 - DNA, 15 bp, Homo sapiens
ttaaacttagagaaa

SEQ ID NO: 1542982 - DNA, 15 bp, Homo sapiens
taaacttagagaaac

SEQ ID NO: 1542983 - DNA, 15 bp, Homo sapiens
aaacttagagaaact

SEQ ID NO: 1542984 - DNA, 15 bp, Homo sapiens
aacttagagaaactc

SEQ ID NO: 1542985 - DNA, 15 bp, Homo sapiens
acttagagaaactcc

SEQ ID NO: 1542986 - DNA, 15 bp, Homo sapiens
cttagagaaactcca

SEQ ID NO: 1542987 - DNA, 15 bp, Homo sapiens
ttagagaaactccaa

SEQ ID NO: 1542988 - DNA, 15 bp, Homo sapiens
tagagaaactccaaa

SEQ ID NO: 1542989 - DNA, 15 bp, Homo sapiens
agagaaactccaaat

SEQ ID NO: 1542990 - DNA, 15 bp, Homo sapiens
gagaaactccaaatt

SEQ ID NO: 1542991 - DNA, 15 bp, Homo sapiens
agaaactccaaattg

SEQ ID NO: 1542992 - DNA, 15 bp, Homo sapiens
gaaactccaaattgc

SEQ ID NO: 1542993 - DNA, 15 bp, Homo sapiens
aaactccaaattgcc

SEQ ID NO: 1542994 - DNA, 15 bp, Homo sapiens
aactccaaattgccc

SEQ ID NO: 1542995 - DNA, 15 bp, Homo sapiens
actccaaattgccct

SEQ ID NO: 1542996 - DNA, 15 bp, Homo sapiens
ctccaaattgccctc

SEQ ID NO: 1542997 - DNA, 15 bp, Homo sapiens
tccaaattgccctct

SEQ ID NO: 1542998 - DNA, 15 bp, Homo sapiens
ccaaattgccctctg

SEQ ID NO: 1542999 - DNA, 15 bp, Homo sapiens
caaattgccctctga

SEQ ID NO: 1543000 - DNA, 15 bp, Homo sapiens
aaattgccctctgaa

SEQ ID NO: 1543001 - DNA, 15 bp, Homo sapiens
aattgccctctgaac

SEQ ID NO: 1543002 - DNA, 15 bp, Homo sapiens
attgccctctgaaca

SEQ ID NO: 1543003 - DNA, 15 bp, Homo sapiens
ttgccctctgaacag

SEQ ID NO: 1543004 - DNA, 15 bp, Homo sapiens
tgccctctgaacaga

SEQ ID NO: 1543005 - DNA, 15 bp, Homo sapiens
gccctctgaacagac

SEQ ID NO: 1543006 - DNA, 15 bp, Homo sapiens
ccctctgaacagacg

SEQ ID NO: 1543007 - DNA, 15 bp, Homo sapiens
cctctgaacagacgg

SEQ ID NO: 1543008 - DNA, 15 bp, Homo sapiens
ctctgaacagacggt

SEQ ID NO: 1543009 - DNA, 15 bp, Homo sapiens
tctgaacagacggta

SEQ ID NO: 1543010 - DNA, 15 bp, Homo sapiens
ctgaacagacggtat

SEQ ID NO: 1543011 - DNA, 15 bp, Homo sapiens
tgaacagacggtatc

SEQ ID NO: 1543012 - DNA, 15 bp, Homo sapiens
gaacagacggtatca

SEQ ID NO: 1543013 - DNA, 15 bp, Homo sapiens
aacagacggtatcag

SEQ ID NO: 1543014 - DNA, 15 bp, Homo sapiens
acagacggtatcagt

SEQ ID NO: 1543015 - DNA, 15 bp, Homo sapiens
cagacggtatcagtt

SEQ ID NO: 1543016 - DNA, 15 bp, Homo sapiens
agacggtatcagttt

SEQ ID NO: 1543017 - DNA, 15 bp, Homo sapiens
gacggtatcagtttg

SEQ ID NO: 1543018 - DNA, 15 bp, Homo sapiens
acggtatcagtttga

SEQ ID NO: 1543019 - DNA, 15 bp, Homo sapiens
cggtatcagtttgac

SEQ ID NO: 1543020 - DNA, 15 bp, Homo sapiens
ggtatcagtttgaca

SEQ ID NO: 1543021 - DNA, 15 bp, Homo sapiens
gtatcagtttgacat

SEQ ID NO: 1543022 - DNA, 15 bp, Homo sapiens
tatcagtttgacatc

SEQ ID NO: 1543023 - DNA, 15 bp, Homo sapiens
atcagtttgacatca

SEQ ID NO: 1543024 - DNA, 15 bp, Homo sapiens
tcagtttgacatcat

SEQ ID NO: 1543025 - DNA, 15 bp, Homo sapiens
cagtttgacatcatc

SEQ ID NO: 1543026 - DNA, 15 bp, Homo sapiens
agtttgacatcatcc

SEQ ID NO: 1543027 - DNA, 15 bp, Homo sapiens
gtttgacatcatcca

SEQ ID NO: 1543028 - DNA, 15 bp, Homo sapiens
tttgacatcatccaa

SEQ ID NO: 1543029 - DNA, 15 bp, Homo sapiens
ttgacatcatccaat

SEQ ID NO: 1543030 - DNA, 15 bp, Homo sapiens
tgacatcatccaata

SEQ ID NO: 1543031 - DNA, 15 bp, Homo sapiens
gacatcatccaatac

SEQ ID NO: 1543032 - DNA, 15 bp, Homo sapiens
acatcatccaatacc

SEQ ID NO: 1543033 - DNA, 15 bp, Homo sapiens
catcatccaataccg

SEQ ID NO: 1543034 - DNA, 15 bp, Homo sapiens
atcatccaataccgg

SEQ ID NO: 1543035 - DNA, 15 bp, Homo sapiens
tcatccaataccggg

SEQ ID NO: 1543036 - DNA, 15 bp, Homo sapiens
catccaataccggga

SEQ ID NO: 1543037 - DNA, 15 bp, Homo sapiens
atccaataccgggat

SEQ ID NO: 1543038 - DNA, 15 bp, Homo sapiens
tccaataccgggatt

SEQ ID NO: 1543039 - DNA, 15 bp, Homo sapiens
ccaataccgggattc

SEQ ID NO: 1543040 - DNA, 15 bp, Homo sapiens
caataccgggattcc

SEQ ID NO: 1543041 - DNA, 15 bp, Homo sapiens
aataccgggattcct

SEQ ID NO: 1543042 - DNA, 15 bp, Homo sapiens
ataccgggattcctc

SEQ ID NO: 1543043 - DNA, 15 bp, Homo sapiens
taccgggattcctcg

SEQ ID NO: 1543044 - DNA, 15 bp, Homo sapiens
accgggattcctcgg

SEQ ID NO: 1543045 - DNA, 15 bp, Homo sapiens
ccgggattcctcggg

SEQ ID NO: 1543046 - DNA, 15 bp, Homo sapiens
cgggattcctcgggg

SEQ ID NO: 1543047 - DNA, 15 bp, Homo sapiens
gggattcctcgggga

SEQ ID NO: 1543048 - DNA, 15 bp, Homo sapiens
ggattcctcggggag

SEQ ID NO: 1543049 - DNA, 15 bp, Homo sapiens
gattcctcggggaga

SEQ ID NO: 1543050 - DNA, 15 bp, Homo sapiens
attcctcggggagaa

SEQ ID NO: 1543051 - DNA, 15 bp, Homo sapiens
ttcctcggggagaac

SEQ ID NO: 1543052 - DNA, 15 bp, Homo sapiens
tcctcggggagaact

SEQ ID NO: 1543053 - DNA, 15 bp, Homo sapiens
cctcggggagaactt

SEQ ID NO: 1543054 - DNA, 15 bp, Homo sapiens
ctcggggagaacttt

SEQ ID NO: 1543055 - DNA, 15 bp, Homo sapiens
tcggggagaactttc

SEQ ID NO: 1543056 - DNA, 15 bp, Homo sapiens
cggggagaactttct

SEQ ID NO: 1543057 - DNA, 15 bp, Homo sapiens
ggggagaactttctg

SEQ ID NO: 1543058 - DNA, 15 bp, Homo sapiens
gggagaactttctgg

SEQ ID NO: 1543059 - DNA, 15 bp, Homo sapiens
ggagaactttctggc

SEQ ID NO: 1543060 - DNA, 15 bp, Homo sapiens
gagaactttctggcc

SEQ ID NO: 1543061 - DNA, 15 bp, Homo sapiens
agaactttctggcct

SEQ ID NO: 1543062 - DNA, 15 bp, Homo sapiens
gaactttctggccta

SEQ ID NO: 1543063 - DNA, 15 bp, Homo sapiens
aactttctggcctag

SEQ ID NO: 1543064 - DNA, 15 bp, Homo sapiens
actttctggcctaga

SEQ ID NO: 1543065 - DNA, 15 bp, Homo sapiens
ctttctggcctagaa

SEQ ID NO: 1543066 - DNA, 15 bp, Homo sapiens
tttctggcctagaag

SEQ ID NO: 1543067 - DNA, 15 bp, Homo sapiens
ttctggcctagaagg

SEQ ID NO: 1543068 - DNA, 15 bp, Homo sapiens
tctggcctagaaggc

SEQ ID NO: 1543069 - DNA, 15 bp, Homo sapiens
ctggcctagaaggca

SEQ ID NO: 1543070 - DNA, 15 bp, Homo sapiens
tggcctagaaggcag

SEQ ID NO: 1543071 - DNA, 15 bp, Homo sapiens
ggcctagaaggcagt

SEQ ID NO: 1543072 - DNA, 15 bp, Homo sapiens
gcctagaaggcagta

SEQ ID NO: 1543073 - DNA, 15 bp, Homo sapiens
cctagaaggcagtag

SEQ ID NO: 1543074 - DNA, 15 bp, Homo sapiens
ctagaaggcagtaga

SEQ ID NO: 1543075 - DNA, 15 bp, Homo sapiens
tagaaggcagtagag

SEQ ID NO: 1543076 - DNA, 15 bp, Homo sapiens
agaaggcagtagagc

SEQ ID NO: 1543077 - DNA, 15 bp, Homo sapiens
gaaggcagtagagcc

SEQ ID NO: 1543078 - DNA, 15 bp, Homo sapiens
aaggcagtagagcca

SEQ ID NO: 1543079 - DNA, 15 bp, Homo sapiens
aggcagtagagccag

SEQ ID NO: 1543080 - DNA, 15 bp, Homo sapiens
ggcagtagagccagg

SEQ ID NO: 1543081 - DNA, 15 bp, Homo sapiens
gcagtagagccagga

SEQ ID NO: 1543082 - DNA, 15 bp, Homo sapiens
cagtagagccaggac

SEQ ID NO: 1543083 - DNA, 15 bp, Homo sapiens
agtagagccaggact

SEQ ID NO: 1543084 - DNA, 15 bp, Homo sapiens
gtagagccaggactt

SEQ ID NO: 1543085 - DNA, 15 bp, Homo sapiens
tagagccaggacttc

SEQ ID NO: 1543086 - DNA, 15 bp, Homo sapiens
agagccaggacttca

SEQ ID NO: 1543087 - DNA, 15 bp, Homo sapiens
gagccaggacttcac

SEQ ID NO: 1543088 - DNA, 15 bp, Homo sapiens
agccaggacttcacc

SEQ ID NO: 1543089 - DNA, 15 bp, Homo sapiens
gccaggacttcaccc

SEQ ID NO: 1543090 - DNA, 15 bp, Homo sapiens
ccaggacttcaccca

SEQ ID NO: 1543091 - DNA, 15 bp, Homo sapiens
caggacttcacccag

SEQ ID NO: 1543092 - DNA, 15 bp, Homo sapiens
aggacttcacccagt

SEQ ID NO: 1543093 - DNA, 15 bp, Homo sapiens
ggacttcacccagtc

SEQ ID NO: 1543094 - DNA, 15 bp, Homo sapiens
gacttcacccagtca

SEQ ID NO: 1543095 - DNA, 15 bp, Homo sapiens
acttcacccagtcag

SEQ ID NO: 1543096 - DNA, 15 bp, Homo sapiens
cttcacccagtcagt

SEQ ID NO: 1543097 - DNA, 15 bp, Homo sapiens
ttcacccagtcagtg

SEQ ID NO: 1543098 - DNA, 15 bp, Homo sapiens
tcacccagtcagtgg

SEQ ID NO: 1543099 - DNA, 15 bp, Homo sapiens
cacccagtcagtggc

SEQ ID NO: 1543100 - DNA, 15 bp, Homo sapiens
acccagtcagtggca

SEQ ID NO: 1543101 - DNA, 15 bp, Homo sapiens
cccagtcagtggcag

SEQ ID NO: 1543102 - DNA, 15 bp, Homo sapiens
ccagtcagtggcagg

SEQ ID NO: 1543103 - DNA, 15 bp, Homo sapiens
cagtcagtggcaggg

SEQ ID NO: 1543104 - DNA, 15 bp, Homo sapiens
agtcagtggcagggc

SEQ ID NO: 1543105 - DNA, 15 bp, Homo sapiens
gtcagtggcagggcc

SEQ ID NO: 1543106 - DNA, 15 bp, Homo sapiens
tcagtggcagggcca

SEQ ID NO: 1543107 - DNA, 15 bp, Homo sapiens
cagtggcagggccac

SEQ ID NO: 1543108 - DNA, 15 bp, Homo sapiens
agtggcagggccaca

SEQ ID NO: 1543109 - DNA, 15 bp, Homo sapiens
gtggcagggccacac

SEQ ID NO: 1543110 - DNA, 15 bp, Homo sapiens
tggcagggccacacg

SEQ ID NO: 1543111 - DNA, 15 bp, Homo sapiens
ggcagggccacacgt

SEQ ID NO: 1543112 - DNA, 15 bp, Homo sapiens
gcagggccacacgtg

SEQ ID NO: 1543113 - DNA, 15 bp, Homo sapiens
cagggccacacgtgg

SEQ ID NO: 1543114 - DNA, 15 bp, Homo sapiens
agggccacacgtggg

SEQ ID NO: 1543115 - DNA, 15 bp, Homo sapiens
gggccacacgtgggc

SEQ ID NO: 1543116 - DNA, 15 bp, Homo sapiens
ggccacacgtgggcc

SEQ ID NO: 1543117 - DNA, 15 bp, Homo sapiens
gccacacgtgggcct

SEQ ID NO: 1543118 - DNA, 15 bp, Homo sapiens
ccacacgtgggcctt

SEQ ID NO: 1543119 - DNA, 15 bp, Homo sapiens
cacacgtgggccttg

SEQ ID NO: 1543120 - DNA, 15 bp, Homo sapiens
acacgtgggccttga

SEQ ID NO: 1543121 - DNA, 15 bp, Homo sapiens
cacgtgggccttgat

SEQ ID NO: 1543122 - DNA, 15 bp, Homo sapiens
acgtgggccttgata

SEQ ID NO: 1543123 - DNA, 15 bp, Homo sapiens
cgtgggccttgatac

SEQ ID NO: 1543124 - DNA, 15 bp, Homo sapiens
gtgggccttgataca

SEQ ID NO: 1543125 - DNA, 15 bp, Homo sapiens
tgggccttgatacag

SEQ ID NO: 1543126 - DNA, 15 bp, Homo sapiens
gggccttgatacaga

SEQ ID NO: 1543127 - DNA, 15 bp, Homo sapiens
ggccttgatacagag

SEQ ID NO: 1543128 - DNA, 15 bp, Homo sapiens
gccttgatacagagg

SEQ ID NO: 1543129 - DNA, 15 bp, Homo sapiens
ccttgatacagaggg

SEQ ID NO: 1543130 - DNA, 15 bp, Homo sapiens
cttgatacagagggg

SEQ ID NO: 1543131 - DNA, 15 bp, Homo sapiens
ttgatacagaggggg

SEQ ID NO: 1543132 - DNA, 15 bp, Homo sapiens
tgatacagaggggga

SEQ ID NO: 1543133 - DNA, 15 bp, Homo sapiens
gatacagagggggaa

SEQ ID NO: 1543134 - DNA, 15 bp, Homo sapiens
atacagagggggaag

SEQ ID NO: 1543135 - DNA, 15 bp, Homo sapiens
tacagagggggaaga

SEQ ID NO: 1543136 - DNA, 15 bp, Homo sapiens
acagagggggaagac

SEQ ID NO: 1543137 - DNA, 15 bp, Homo sapiens
cagagggggaagact

SEQ ID NO: 1543138 - DNA, 15 bp, Homo sapiens
agagggggaagactt

SEQ ID NO: 1543139 - DNA, 15 bp, Homo sapiens
gagggggaagacttg

SEQ ID NO: 1543140 - DNA, 15 bp, Homo sapiens
agggggaagacttga

SEQ ID NO: 1543141 - DNA, 15 bp, Homo sapiens
gggggaagacttgag

SEQ ID NO: 1543142 - DNA, 15 bp, Homo sapiens
ggggaagacttgagc

SEQ ID NO: 1543143 - DNA, 15 bp, Homo sapiens
gggaagacttgagcc

SEQ ID NO: 1543144 - DNA, 15 bp, Homo sapiens
ggaagacttgagcct

SEQ ID NO: 1543145 - DNA, 15 bp, Homo sapiens
gaagacttgagcctc

SEQ ID NO: 1543146 - DNA, 15 bp, Homo sapiens
aagacttgagcctcc

SEQ ID NO: 1543147 - DNA, 15 bp, Homo sapiens
agacttgagcctcct

SEQ ID NO: 1543148 - DNA, 15 bp, Homo sapiens
gacttgagcctcctc

SEQ ID NO: 1543149 - DNA, 15 bp, Homo sapiens
acttgagcctcctcg

SEQ ID NO: 1543150 - DNA, 15 bp, Homo sapiens
cttgagcctcctcga

SEQ ID NO: 1543151 - DNA, 15 bp, Homo sapiens
ttgagcctcctcgac

SEQ ID NO: 1543152 - DNA, 15 bp, Homo sapiens
tgagcctcctcgaca

SEQ ID NO: 1543153 - DNA, 15 bp, Homo sapiens
gagcctcctcgacac

SEQ ID NO: 1543154 - DNA, 15 bp, Homo sapiens
agcctcctcgacacc

SEQ ID NO: 1543155 - DNA, 15 bp, Homo sapiens
gcctcctcgacaccc

SEQ ID NO: 1543156 - DNA, 15 bp, Homo sapiens
cctcctcgacaccct

SEQ ID NO: 1543157 - DNA, 15 bp, Homo sapiens
ctcctcgacacccta

SEQ ID NO: 1543158 - DNA, 15 bp, Homo sapiens
tcctcgacaccctac

SEQ ID NO: 1543159 - DNA, 15 bp, Homo sapiens
cctcgacaccctaca

SEQ ID NO: 1543160 - DNA, 15 bp, Homo sapiens
ctcgacaccctacag

SEQ ID NO: 1543161 - DNA, 15 bp, Homo sapiens
tcgacaccctacagg

SEQ ID NO: 1543162 - DNA, 15 bp, Homo sapiens
cgacaccctacaggg

SEQ ID NO: 1543163 - DNA, 15 bp, Homo sapiens
gacaccctacagggc

SEQ ID NO: 1543164 - DNA, 15 bp, Homo sapiens
acaccctacagggcc

SEQ ID NO: 1543165 - DNA, 15 bp, Homo sapiens
caccctacagggccc

SEQ ID NO: 1543166 - DNA, 15 bp, Homo sapiens
accctacagggccca

SEQ ID NO: 1543167 - DNA, 15 bp, Homo sapiens
ccctacagggcccag

SEQ ID NO: 1543168 - DNA, 15 bp, Homo sapiens
cctacagggcccagc

SEQ ID NO: 1543169 - DNA, 15 bp, Homo sapiens
ctacagggcccagcc

SEQ ID NO: 1543170 - DNA, 15 bp, Homo sapiens
tacagggcccagcct

SEQ ID NO: 1543171 - DNA, 15 bp, Homo sapiens
acagggcccagcctc

SEQ ID NO: 1543172 - DNA, 15 bp, Homo sapiens
cagggcccagcctcc

SEQ ID NO: 1543173 - DNA, 15 bp, Homo sapiens
agggcccagcctccc

SEQ ID NO: 1543174 - DNA, 15 bp, Homo sapiens
gggcccagcctccca

SEQ ID NO: 1543175 - DNA, 15 bp, Homo sapiens
ggcccagcctcccaa

SEQ ID NO: 1543176 - DNA, 15 bp, Homo sapiens
gcccagcctcccaac

SEQ ID NO: 1543177 - DNA, 15 bp, Homo sapiens
cccagcctcccaaca

SEQ ID NO: 1543178 - DNA, 15 bp, Homo sapiens
ccagcctcccaacat

SEQ ID NO: 1543179 - DNA, 15 bp, Homo sapiens
cagcctcccaacatg

SEQ ID NO: 1543180 - DNA, 15 bp, Homo sapiens
agcctcccaacatgt

SEQ ID NO: 1543181 - DNA, 15 bp, Homo sapiens
gcctcccaacatgtg

SEQ ID NO: 1543182 - DNA, 15 bp, Homo sapiens
cctcccaacatgtga

SEQ ID NO: 1543183 - DNA, 15 bp, Homo sapiens
ctcccaacatgtgat

SEQ ID NO: 1543184 - DNA, 15 bp, Homo sapiens
tcccaacatgtgata

SEQ ID NO: 1543185 - DNA, 15 bp, Homo sapiens
cccaacatgtgataa

SEQ ID NO: 1543186 - DNA, 15 bp, Homo sapiens
ccaacatgtgataag

SEQ ID NO: 1543187 - DNA, 15 bp, Homo sapiens
caacatgtgataaga

SEQ ID NO: 1543188 - DNA, 15 bp, Homo sapiens
aacatgtgataagag

SEQ ID NO: 1543189 - DNA, 15 bp, Homo sapiens
acatgtgataagaga

SEQ ID NO: 1543190 - DNA, 15 bp, Homo sapiens
catgtgataagagaa

SEQ ID NO: 1543191 - DNA, 15 bp, Homo sapiens
atgtgataagagaaa

SEQ ID NO: 1543192 - DNA, 15 bp, Homo sapiens
tgtgataagagaaac

SEQ ID NO: 1543193 - DNA, 15 bp, Homo sapiens
gtgataagagaaaca

SEQ ID NO: 1543194 - DNA, 15 bp, Homo sapiens
tgataagagaaacaa

SEQ ID NO: 1543195 - DNA, 15 bp, Homo sapiens
gataagagaaacaac

SEQ ID NO: 1543196 - DNA, 15 bp, Homo sapiens
ataagagaaacaaca

SEQ ID NO: 1543197 - DNA, 15 bp, Homo sapiens
taagagaaacaacag

SEQ ID NO: 1543198 - DNA, 15 bp, Homo sapiens
aagagaaacaacagc

SEQ ID NO: 1543199 - DNA, 15 bp, Homo sapiens
agagaaacaacagcc

SEQ ID NO: 1543200 - DNA, 15 bp, Homo sapiens
gagaaacaacagcca

SEQ ID NO: 1543201 - DNA, 15 bp, Homo sapiens
agaaacaacagccaa

SEQ ID NO: 1543202 - DNA, 15 bp, Homo sapiens
gaaacaacagccaac

SEQ ID NO: 1543203 - DNA, 15 bp, Homo sapiens
aaacaacagccaact

SEQ ID NO: 1543204 - DNA, 15 bp, Homo sapiens
aacaacagccaactt

SEQ ID NO: 1543205 - DNA, 15 bp, Homo sapiens
acaacagccaacttg

SEQ ID NO: 1543206 - DNA, 15 bp, Homo sapiens
caacagccaacttgt

SEQ ID NO: 1543207 - DNA, 15 bp, Homo sapiens
aacagccaacttgta

SEQ ID NO: 1543208 - DNA, 15 bp, Homo sapiens
acagccaacttgtac

SEQ ID NO: 1543209 - DNA, 15 bp, Homo sapiens
cagccaacttgtacc

SEQ ID NO: 1543210 - DNA, 15 bp, Homo sapiens
agccaacttgtacct

SEQ ID NO: 1543211 - DNA, 15 bp, Homo sapiens
gccaacttgtaccta

SEQ ID NO: 1543212 - DNA, 15 bp, Homo sapiens
ccaacttgtacctag

SEQ ID NO: 1543213 - DNA, 15 bp, Homo sapiens
caacttgtacctagc

SEQ ID NO: 1543214 - DNA, 15 bp, Homo sapiens
aacttgtacctagct

SEQ ID NO: 1543215 - DNA, 15 bp, Homo sapiens
acttgtacctagctc

SEQ ID NO: 1543216 - DNA, 15 bp, Homo sapiens
cttgtacctagctct

SEQ ID NO: 1543217 - DNA, 15 bp, Homo sapiens
ttgtacctagctctc

SEQ ID NO: 1543218 - DNA, 15 bp, Homo sapiens
tgtacctagctctcc

SEQ ID NO: 1543219 - DNA, 15 bp, Homo sapiens
gtacctagctctcct

SEQ ID NO: 1543220 - DNA, 15 bp, Homo sapiens
tacctagctctcctt

SEQ ID NO: 1543221 - DNA, 15 bp, Homo sapiens
acctagctctcctta

SEQ ID NO: 1543222 - DNA, 15 bp, Homo sapiens
cctagctctccttat

SEQ ID NO: 1543223 - DNA, 15 bp, Homo sapiens
ctagctctccttatt

SEQ ID NO: 1543224 - DNA, 15 bp, Homo sapiens
tagctctccttattc

SEQ ID NO: 1543225 - DNA, 15 bp, Homo sapiens
agctctccttattct

SEQ ID NO: 1543226 - DNA, 15 bp, Homo sapiens
gctctccttattctc

SEQ ID NO: 1543227 - DNA, 15 bp, Homo sapiens
ctctccttattctcc

SEQ ID NO: 1543228 - DNA, 15 bp, Homo sapiens
tctccttattctcca

SEQ ID NO: 1543229 - DNA, 15 bp, Homo sapiens
ctccttattctccaa

SEQ ID NO: 1543230 - DNA, 15 bp, Homo sapiens
tccttattctccaag

SEQ ID NO: 1543231 - DNA, 15 bp, Homo sapiens
ccttattctccaagg

SEQ ID NO: 1543232 - DNA, 15 bp, Homo sapiens
cttattctccaaggg

SEQ ID NO: 1543233 - DNA, 15 bp, Homo sapiens
ttattctccaagggc

SEQ ID NO: 1543234 - DNA, 15 bp, Homo sapiens
tattctccaagggct

SEQ ID NO: 1543235 - DNA, 15 bp, Homo sapiens
attctccaagggctg

SEQ ID NO: 1543236 - DNA, 15 bp, Homo sapiens
ttctccaagggctgg

SEQ ID NO: 1543237 - DNA, 15 bp, Homo sapiens
tctccaagggctggg

SEQ ID NO: 1543238 - DNA, 15 bp, Homo sapiens
ctccaagggctgggc

SEQ ID NO: 1543239 - DNA, 15 bp, Homo sapiens
tccaagggctgggcc

SEQ ID NO: 1543240 - DNA, 15 bp, Homo sapiens
ccaagggctgggcca

SEQ ID NO: 1543241 - DNA, 15 bp, Homo sapiens
caagggctgggccag

SEQ ID NO: 1543242 - DNA, 15 bp, Homo sapiens
aagggctgggccagt

SEQ ID NO: 1543243 - DNA, 15 bp, Homo sapiens
agggctgggccagtt

SEQ ID NO: 1543244 - DNA, 15 bp, Homo sapiens
gggctgggccagttc

SEQ ID NO: 1543245 - DNA, 15 bp, Homo sapiens
ggctgggccagttct

SEQ ID NO: 1543246 - DNA, 15 bp, Homo sapiens
gctgggccagttctc

SEQ ID NO: 1543247 - DNA, 15 bp, Homo sapiens
ctgggccagttctcc

SEQ ID NO: 1543248 - DNA, 15 bp, Homo sapiens
tgggccagttctccc

SEQ ID NO: 1543249 - DNA, 15 bp, Homo sapiens
gggccagttctcccc

SEQ ID NO: 1543250 - DNA, 15 bp, Homo sapiens
ggccagttctcccca

SEQ ID NO: 1543251 - DNA, 15 bp, Homo sapiens
gccagttctccccac

SEQ ID NO: 1543252 - DNA, 15 bp, Homo sapiens
ccagttctccccaca

SEQ ID NO: 1543253 - DNA, 15 bp, Homo sapiens
cagttctccccacag

SEQ ID NO: 1543254 - DNA, 15 bp, Homo sapiens
agttctccccacagc

SEQ ID NO: 1543255 - DNA, 15 bp, Homo sapiens
gttctccccacagcc

SEQ ID NO: 1543256 - DNA, 15 bp, Homo sapiens
ttctccccacagccc

SEQ ID NO: 1543257 - DNA, 15 bp, Homo sapiens
tctccccacagccct

SEQ ID NO: 1543258 - DNA, 15 bp, Homo sapiens
ctccccacagccctg

SEQ ID NO: 1543259 - DNA, 15 bp, Homo sapiens
tccccacagccctgc

SEQ ID NO: 1543260 - DNA, 15 bp, Homo sapiens
ccccacagccctgca

SEQ ID NO: 1543261 - DNA, 15 bp, Homo sapiens
cccacagccctgcaa

SEQ ID NO: 1543262 - DNA, 15 bp, Homo sapiens
ccacagccctgcaag

SEQ ID NO: 1543263 - DNA, 15 bp, Homo sapiens
cacagccctgcaagg

SEQ ID NO: 1543264 - DNA, 15 bp, Homo sapiens
acagccctgcaaggg

SEQ ID NO: 1543265 - DNA, 15 bp, Homo sapiens
cagccctgcaaggga

SEQ ID NO: 1543266 - DNA, 15 bp, Homo sapiens
agccctgcaagggag

SEQ ID NO: 1543267 - DNA, 15 bp, Homo sapiens
gccctgcaagggagg

SEQ ID NO: 1543268 - DNA, 15 bp, Homo sapiens
ccctgcaagggagga

SEQ ID NO: 1543269 - DNA, 15 bp, Homo sapiens
cctgcaagggaggat

SEQ ID NO: 1543270 - DNA, 15 bp, Homo sapiens
ctgcaagggaggatc

SEQ ID NO: 1543271 - DNA, 15 bp, Homo sapiens
tgcaagggaggatca

SEQ ID NO: 1543272 - DNA, 15 bp, Homo sapiens
gcaagggaggatcac

SEQ ID NO: 1543273 - DNA, 15 bp, Homo sapiens
caagggaggatcact

SEQ ID NO: 1543274 - DNA, 15 bp, Homo sapiens
aagggaggatcactc

SEQ ID NO: 1543275 - DNA, 15 bp, Homo sapiens
agggaggatcactca

SEQ ID NO: 1543276 - DNA, 15 bp, Homo sapiens
gggaggatcactcaa

SEQ ID NO: 1543277 - DNA, 15 bp, Homo sapiens
ggaggatcactcaag

SEQ ID NO: 1543278 - DNA, 15 bp, Homo sapiens
gaggatcactcaagg

SEQ ID NO: 1543279 - DNA, 15 bp, Homo sapiens
aggatcactcaaggg

SEQ ID NO: 1543280 - DNA, 15 bp, Homo sapiens
ggatcactcaagggc

SEQ ID NO: 1543281 - DNA, 15 bp, Homo sapiens
gatcactcaagggcc

SEQ ID NO: 1543282 - DNA, 15 bp, Homo sapiens
atcactcaagggccc

SEQ ID NO: 1543283 - DNA, 15 bp, Homo sapiens
tcactcaagggcccc

SEQ ID NO: 1543284 - DNA, 15 bp, Homo sapiens
cactcaagggcccca

SEQ ID NO: 1543285 - DNA, 15 bp, Homo sapiens
actcaagggccccaa

SEQ ID NO: 1543286 - DNA, 15 bp, Homo sapiens
ctcaagggccccaac

SEQ ID NO: 1543287 - DNA, 15 bp, Homo sapiens
tcaagggccccaact

SEQ ID NO: 1543288 - DNA, 15 bp, Homo sapiens
caagggccccaactg

SEQ ID NO: 1543289 - DNA, 15 bp, Homo sapiens
aagggccccaactgt

SEQ ID NO: 1543290 - DNA, 15 bp, Homo sapiens
agggccccaactgtc

SEQ ID NO: 1543291 - DNA, 15 bp, Homo sapiens
gggccccaactgtct

SEQ ID NO: 1543292 - DNA, 15 bp, Homo sapiens
ggccccaactgtctg

SEQ ID NO: 1543293 - DNA, 15 bp, Homo sapiens
gccccaactgtctga

SEQ ID NO: 1543294 - DNA, 15 bp, Homo sapiens
ccccaactgtctgac

SEQ ID NO: 1543295 - DNA, 15 bp, Homo sapiens
cccaactgtctgaca

SEQ ID NO: 1543296 - DNA, 15 bp, Homo sapiens
ccaactgtctgacaa

SEQ ID NO: 1543297 - DNA, 15 bp, Homo sapiens
caactgtctgacaat

SEQ ID NO: 1543298 - DNA, 15 bp, Homo sapiens
aactgtctgacaata

SEQ ID NO: 1543299 - DNA, 15 bp, Homo sapiens
actgtctgacaatac

SEQ ID NO: 1543300 - DNA, 15 bp, Homo sapiens
ctgtctgacaataca

SEQ ID NO: 1543301 - DNA, 15 bp, Homo sapiens
tgtctgacaatacag

SEQ ID NO: 1543302 - DNA, 15 bp, Homo sapiens
gtctgacaatacagc

SEQ ID NO: 1543303 - DNA, 15 bp, Homo sapiens
tctgacaatacagcc

SEQ ID NO: 1543304 - DNA, 15 bp, Homo sapiens
ctgacaatacagcca

SEQ ID NO: 1543305 - DNA, 15 bp, Homo sapiens
tgacaatacagccac

SEQ ID NO: 1543306 - DNA, 15 bp, Homo sapiens
gacaatacagccaca

SEQ ID NO: 1543307 - DNA, 15 bp, Homo sapiens
acaatacagccacac

SEQ ID NO: 1543308 - DNA, 15 bp, Homo sapiens
caatacagccacact

SEQ ID NO: 1543309 - DNA, 15 bp, Homo sapiens
aatacagccacactc

SEQ ID NO: 1543310 - DNA, 15 bp, Homo sapiens
atacagccacactct

SEQ ID NO: 1543311 - DNA, 15 bp, Homo sapiens
tacagccacactctg

SEQ ID NO: 1543312 - DNA, 15 bp, Homo sapiens
acagccacactctga

SEQ ID NO: 1543313 - DNA, 15 bp, Homo sapiens
cagccacactctgat

SEQ ID NO: 1543314 - DNA, 15 bp, Homo sapiens
agccacactctgatc

SEQ ID NO: 1543315 - DNA, 15 bp, Homo sapiens
gccacactctgatca

SEQ ID NO: 1543316 - DNA, 15 bp, Homo sapiens
ccacactctgatcag

SEQ ID NO: 1543317 - DNA, 15 bp, Homo sapiens
cacactctgatcagc

SEQ ID NO: 1543318 - DNA, 15 bp, Homo sapiens
acactctgatcagcc

SEQ ID NO: 1543319 - DNA, 15 bp, Homo sapiens
cactctgatcagcca

SEQ ID NO: 1543320 - DNA, 15 bp, Homo sapiens
actctgatcagccac

SEQ ID NO: 1543321 - DNA, 15 bp, Homo sapiens
ctctgatcagccacc

SEQ ID NO: 1543322 - DNA, 15 bp, Homo sapiens
tctgatcagccacct

SEQ ID NO: 1543323 - DNA, 15 bp, Homo sapiens
ctgatcagccacctg

SEQ ID NO: 1543324 - DNA, 15 bp, Homo sapiens
tgatcagccacctgg

SEQ ID NO: 1543325 - DNA, 15 bp, Homo sapiens
gatcagccacctggg

SEQ ID NO: 1543326 - DNA, 15 bp, Homo sapiens
atcagccacctgggc

SEQ ID NO: 1543327 - DNA, 15 bp, Homo sapiens
tcagccacctgggca

SEQ ID NO: 1543328 - DNA, 15 bp, Homo sapiens
cagccacctgggcat

SEQ ID NO: 1543329 - DNA, 15 bp, Homo sapiens
agccacctgggcata

SEQ ID NO: 1543330 - DNA, 15 bp, Homo sapiens
gccacctgggcatag

SEQ ID NO: 1543331 - DNA, 15 bp, Homo sapiens
ccacctgggcatagg

SEQ ID NO: 1543332 - DNA, 15 bp, Homo sapiens
cacctgggcataggc

SEQ ID NO: 1543333 - DNA, 15 bp, Homo sapiens
acctgggcataggct

SEQ ID NO: 1543334 - DNA, 15 bp, Homo sapiens
cctgggcataggctc

SEQ ID NO: 1543335 - DNA, 15 bp, Homo sapiens
ctgggcataggctcc

SEQ ID NO: 1543336 - DNA, 15 bp, Homo sapiens
tgggcataggctcca

SEQ ID NO: 1543337 - DNA, 15 bp, Homo sapiens
gggcataggctccat

SEQ ID NO: 1543338 - DNA, 15 bp, Homo sapiens
ggcataggctccatg

SEQ ID NO: 1543339 - DNA, 15 bp, Homo sapiens
gcataggctccatgc

SEQ ID NO: 1543340 - DNA, 15 bp, Homo sapiens
cataggctccatgcc

SEQ ID NO: 1543341 - DNA, 15 bp, Homo sapiens
ataggctccatgcca

SEQ ID NO: 1543342 - DNA, 15 bp, Homo sapiens
taggctccatgccat

SEQ ID NO: 1543343 - DNA, 15 bp, Homo sapiens
aggctccatgccatt

SEQ ID NO: 1543344 - DNA, 15 bp, Homo sapiens
ggctccatgccattg

SEQ ID NO: 1543345 - DNA, 15 bp, Homo sapiens
gctccatgccattgt

SEQ ID NO: 1543346 - DNA, 15 bp, Homo sapiens
ctccatgccattgtc

SEQ ID NO: 1543347 - DNA, 15 bp, Homo sapiens
tccatgccattgtcc

SEQ ID NO: 1543348 - DNA, 15 bp, Homo sapiens
ccatgccattgtcct

SEQ ID NO: 1543349 - DNA, 15 bp, Homo sapiens
catgccattgtcctc

SEQ ID NO: 1543350 - DNA, 15 bp, Homo sapiens
atgccattgtcctcc

SEQ ID NO: 1543351 - DNA, 15 bp, Homo sapiens
tgccattgtcctccg

SEQ ID NO: 1543352 - DNA, 15 bp, Homo sapiens
gccattgtcctccgc

SEQ ID NO: 1543353 - DNA, 15 bp, Homo sapiens
ccattgtcctccgcc

SEQ ID NO: 1543354 - DNA, 15 bp, Homo sapiens
cattgtcctccgcca

SEQ ID NO: 1543355 - DNA, 15 bp, Homo sapiens
attgtcctccgccaa

SEQ ID NO: 1543356 - DNA, 15 bp, Homo sapiens
ttgtcctccgccaag

SEQ ID NO: 1543357 - DNA, 15 bp, Homo sapiens
tgtcctccgccaaga

SEQ ID NO: 1543358 - DNA, 15 bp, Homo sapiens
gtcctccgccaagac

SEQ ID NO: 1543359 - DNA, 15 bp, Homo sapiens
tcctccgccaagacc

SEQ ID NO: 1543360 - DNA, 15 bp, Homo sapiens
cctccgccaagacct

SEQ ID NO: 1543361 - DNA, 15 bp, Homo sapiens
ctccgccaagacctc

SEQ ID NO: 1543362 - DNA, 15 bp, Homo sapiens
tccgccaagacctca

SEQ ID NO: 1543363 - DNA, 15 bp, Homo sapiens
ccgccaagacctcag

SEQ ID NO: 1543364 - DNA, 15 bp, Homo sapiens
cgccaagacctcaga

SEQ ID NO: 1543365 - DNA, 15 bp, Homo sapiens
gccaagacctcagac

SEQ ID NO: 1543366 - DNA, 15 bp, Homo sapiens
ccaagacctcagact

SEQ ID NO: 1543367 - DNA, 15 bp, Homo sapiens
caagacctcagactg

SEQ ID NO: 1543368 - DNA, 15 bp, Homo sapiens
aagacctcagactga

SEQ ID NO: 1543369 - DNA, 15 bp, Homo sapiens
agacctcagactgaa

SEQ ID NO: 1543370 - DNA, 15 bp, Homo sapiens
gacctcagactgaaa

SEQ ID NO: 1543371 - DNA, 15 bp, Homo sapiens
acctcagactgaaat

SEQ ID NO: 1543372 - DNA, 15 bp, Homo sapiens
cctcagactgaaatg

SEQ ID NO: 1543373 - DNA, 15 bp, Homo sapiens
ctcagactgaaatgt

SEQ ID NO: 1543374 - DNA, 15 bp, Homo sapiens
tcagactgaaatgtt

SEQ ID NO: 1543375 - DNA, 15 bp, Homo sapiens
cagactgaaatgttg

SEQ ID NO: 1543376 - DNA, 15 bp, Homo sapiens
agactgaaatgttgg

SEQ ID NO: 1543377 - DNA, 15 bp, Homo sapiens
gactgaaatgttggc

SEQ ID NO: 1543378 - DNA, 15 bp, Homo sapiens
actgaaatgttggct

SEQ ID NO: 1543379 - DNA, 15 bp, Homo sapiens
ctgaaatgttggctc

SEQ ID NO: 1543380 - DNA, 15 bp, Homo sapiens
tgaaatgttggctcc

SEQ ID NO: 1543381 - DNA, 15 bp, Homo sapiens
gaaatgttggctcct

SEQ ID NO: 1543382 - DNA, 15 bp, Homo sapiens
aaatgttggctcctc

SEQ ID NO: 1543383 - DNA, 15 bp, Homo sapiens
aatgttggctcctcc

SEQ ID NO: 1543384 - DNA, 15 bp, Homo sapiens
atgttggctcctccc

SEQ ID NO: 1543385 - DNA, 15 bp, Homo sapiens
tgttggctcctccca

SEQ ID NO: 1543386 - DNA, 15 bp, Homo sapiens
gttggctcctcccat

SEQ ID NO: 1543387 - DNA, 15 bp, Homo sapiens
ttggctcctcccatg

SEQ ID NO: 1543388 - DNA, 15 bp, Homo sapiens
tggctcctcccatga

SEQ ID NO: 1543389 - DNA, 15 bp, Homo sapiens
ggctcctcccatgaa

SEQ ID NO: 1543390 - DNA, 15 bp, Homo sapiens
gctcctcccatgaag

SEQ ID NO: 1543391 - DNA, 15 bp, Homo sapiens
ctcctcccatgaaga

SEQ ID NO: 1543392 - DNA, 15 bp, Homo sapiens
tcctcccatgaagaa

SEQ ID NO: 1543393 - DNA, 15 bp, Homo sapiens
cctcccatgaagaac

SEQ ID NO: 1543394 - DNA, 15 bp, Homo sapiens
ctcccatgaagaacc

SEQ ID NO: 1543395 - DNA, 15 bp, Homo sapiens
tcccatgaagaacct

SEQ ID NO: 1543396 - DNA, 15 bp, Homo sapiens
cccatgaagaacctg

SEQ ID NO: 1543397 - DNA, 15 bp, Homo sapiens
ccatgaagaacctgg

SEQ ID NO: 1543398 - DNA, 15 bp, Homo sapiens
catgaagaacctggg

SEQ ID NO: 1543399 - DNA, 15 bp, Homo sapiens
atgaagaacctgggg

SEQ ID NO: 1543400 - DNA, 15 bp, Homo sapiens
tgaagaacctggggc

SEQ ID NO: 1543401 - DNA, 15 bp, Homo sapiens
gaagaacctggggcc

SEQ ID NO: 1543402 - DNA, 15 bp, Homo sapiens
aagaacctggggcca

SEQ ID NO: 1543403 - DNA, 15 bp, Homo sapiens
agaacctggggccaa

SEQ ID NO: 1543404 - DNA, 15 bp, Homo sapiens
gaacctggggccaaa

SEQ ID NO: 1543405 - DNA, 15 bp, Homo sapiens
aacctggggccaaag

SEQ ID NO: 1543406 - DNA, 15 bp, Homo sapiens
acctggggccaaagg

SEQ ID NO: 1543407 - DNA, 15 bp, Homo sapiens
cctggggccaaagga

SEQ ID NO: 1543408 - DNA, 15 bp, Homo sapiens
ctggggccaaaggac

SEQ ID NO: 1543409 - DNA, 15 bp, Homo sapiens
tggggccaaaggacc

SEQ ID NO: 1543410 - DNA, 15 bp, Homo sapiens
ggggccaaaggacca

SEQ ID NO: 1543411 - DNA, 15 bp, Homo sapiens
gggccaaaggaccag

SEQ ID NO: 1543412 - DNA, 15 bp, Homo sapiens
ggccaaaggaccaga

SEQ ID NO: 1543413 - DNA, 15 bp, Homo sapiens
gccaaaggaccagag

SEQ ID NO: 1543414 - DNA, 15 bp, Homo sapiens
ccaaaggaccagagt

SEQ ID NO: 1543415 - DNA, 15 bp, Homo sapiens
caaaggaccagagtc

SEQ ID NO: 1543416 - DNA, 15 bp, Homo sapiens
aaaggaccagagtcc

SEQ ID NO: 1543417 - DNA, 15 bp, Homo sapiens
aaggaccagagtcca

SEQ ID NO: 1543418 - DNA, 15 bp, Homo sapiens
aggaccagagtccag

SEQ ID NO: 1543419 - DNA, 15 bp, Homo sapiens
ggaccagagtccagg

SEQ ID NO: 1543420 - DNA, 15 bp, Homo sapiens
gaccagagtccaggt

SEQ ID NO: 1543421 - DNA, 15 bp, Homo sapiens
accagagtccaggtc

SEQ ID NO: 1543422 - DNA, 15 bp, Homo sapiens
ccagagtccaggtcc

SEQ ID NO: 1543423 - DNA, 15 bp, Homo sapiens
cagagtccaggtccg

SEQ ID NO: 1543424 - DNA, 15 bp, Homo sapiens
agagtccaggtccgt

SEQ ID NO: 1543425 - DNA, 15 bp, Homo sapiens
gagtccaggtccgtg

SEQ ID NO: 1543426 - DNA, 15 bp, Homo sapiens
agtccaggtccgtgg

SEQ ID NO: 1543427 - DNA, 15 bp, Homo sapiens
gtccaggtccgtggc

SEQ ID NO: 1543428 - DNA, 15 bp, Homo sapiens
tccaggtccgtggct

SEQ ID NO: 1543429 - DNA, 15 bp, Homo sapiens
ccaggtccgtggctg

SEQ ID NO: 1543430 - DNA, 15 bp, Homo sapiens
caggtccgtggctgc

SEQ ID NO: 1543431 - DNA, 15 bp, Homo sapiens
aggtccgtggctgcc

SEQ ID NO: 1543432 - DNA, 15 bp, Homo sapiens
ggtccgtggctgcca

SEQ ID NO: 1543433 - DNA, 15 bp, Homo sapiens
gtccgtggctgccag

SEQ ID NO: 1543434 - DNA, 15 bp, Homo sapiens
tccgtggctgccagg

SEQ ID NO: 1543435 - DNA, 15 bp, Homo sapiens
ccgtggctgccagga

SEQ ID NO: 1543436 - DNA, 15 bp, Homo sapiens
cgtggctgccaggat

SEQ ID NO: 1543437 - DNA, 15 bp, Homo sapiens
gtggctgccaggatg

SEQ ID NO: 1543438 - DNA, 15 bp, Homo sapiens
tggctgccaggatgg

SEQ ID NO: 1543439 - DNA, 15 bp, Homo sapiens
ggctgccaggatggg

SEQ ID NO: 1543440 - DNA, 15 bp, Homo sapiens
gctgccaggatgggc

SEQ ID NO: 1543441 - DNA, 15 bp, Homo sapiens
ctgccaggatgggcc

SEQ ID NO: 1543442 - DNA, 15 bp, Homo sapiens
tgccaggatgggcca

SEQ ID NO: 1543443 - DNA, 15 bp, Homo sapiens
gccaggatgggccac

SEQ ID NO: 1543444 - DNA, 15 bp, Homo sapiens
ccaggatgggccact

SEQ ID NO: 1543445 - DNA, 15 bp, Homo sapiens
caggatgggccactt

SEQ ID NO: 1543446 - DNA, 15 bp, Homo sapiens
aggatgggccacttg

SEQ ID NO: 1543447 - DNA, 15 bp, Homo sapiens
ggatgggccacttgg

SEQ ID NO: 1543448 - DNA, 15 bp, Homo sapiens
gatgggccacttgga

SEQ ID NO: 1543449 - DNA, 15 bp, Homo sapiens
atgggccacttggag

SEQ ID NO: 1543450 - DNA, 15 bp, Homo sapiens
tgggccacttggaga

SEQ ID NO: 1543451 - DNA, 15 bp, Homo sapiens
gggccacttggagag

SEQ ID NO: 1543452 - DNA, 15 bp, Homo sapiens
ggccacttggagaga

SEQ ID NO: 1543453 - DNA, 15 bp, Homo sapiens
gccacttggagagag

SEQ ID NO: 1543454 - DNA, 15 bp, Homo sapiens
ccacttggagagagg

SEQ ID NO: 1543455 - DNA, 15 bp, Homo sapiens
cacttggagagaggc

SEQ ID NO: 1543456 - DNA, 15 bp, Homo sapiens
acttggagagaggca

SEQ ID NO: 1543457 - DNA, 15 bp, Homo sapiens
cttggagagaggcac

SEQ ID NO: 1543458 - DNA, 15 bp, Homo sapiens
ttggagagaggcaca

SEQ ID NO: 1543459 - DNA, 15 bp, Homo sapiens
ggagagaggcacaag

SEQ ID NO: 1543460 - DNA, 15 bp, Homo sapiens
gagagaggcacaagg

SEQ ID NO: 1543461 - DNA, 15 bp, Homo sapiens
agagaggcacaaggg

SEQ ID NO: 1543462 - DNA, 15 bp, Homo sapiens
gagaggcacaagggt

SEQ ID NO: 1543463 - DNA, 15 bp, Homo sapiens
agaggcacaagggtg

SEQ ID NO: 1543464 - DNA, 15 bp, Homo sapiens
gaggcacaagggtgg

SEQ ID NO: 1543465 - DNA, 15 bp, Homo sapiens
aggcacaagggtggt

SEQ ID NO: 1543466 - DNA, 15 bp, Homo sapiens
ggcacaagggtggtg

SEQ ID NO: 1543467 - DNA, 15 bp, Homo sapiens
gcacaagggtggtgc

SEQ ID NO: 1543468 - DNA, 15 bp, Homo sapiens
cacaagggtggtgcc

SEQ ID NO: 1543469 - DNA, 15 bp, Homo sapiens
acaagggtggtgcca

SEQ ID NO: 1543470 - DNA, 15 bp, Homo sapiens
caagggtggtgccag

SEQ ID NO: 1543471 - DNA, 15 bp, Homo sapiens
aagggtggtgccagg

SEQ ID NO: 1543472 - DNA, 15 bp, Homo sapiens
agggtggtgccaggc

SEQ ID NO: 1543473 - DNA, 15 bp, Homo sapiens
gggtggtgccaggca

SEQ ID NO: 1543474 - DNA, 15 bp, Homo sapiens
ggtggtgccaggcag

SEQ ID NO: 1543475 - DNA, 15 bp, Homo sapiens
gtggtgccaggcagg

SEQ ID NO: 1543476 - DNA, 15 bp, Homo sapiens
tggtgccaggcaggt

SEQ ID NO: 1543477 - DNA, 15 bp, Homo sapiens
ggtgccaggcaggtg

SEQ ID NO: 1543478 - DNA, 15 bp, Homo sapiens
gtgccaggcaggtgt

SEQ ID NO: 1543479 - DNA, 15 bp, Homo sapiens
tgccaggcaggtgtg

SEQ ID NO: 1543480 - DNA, 15 bp, Homo sapiens
gccaggcaggtgtga

SEQ ID NO: 1543481 - DNA, 15 bp, Homo sapiens
ccaggcaggtgtgag

SEQ ID NO: 1543482 - DNA, 15 bp, Homo sapiens
caggcaggtgtgagg

SEQ ID NO: 1543483 - DNA, 15 bp, Homo sapiens
aggcaggtgtgaggg

SEQ ID NO: 1543484 - DNA, 15 bp, Homo sapiens
ggcaggtgtgagggc

SEQ ID NO: 1543485 - DNA, 15 bp, Homo sapiens
gcaggtgtgagggct

SEQ ID NO: 1543486 - DNA, 15 bp, Homo sapiens
caggtgtgagggctg

SEQ ID NO: 1543487 - DNA, 15 bp, Homo sapiens
aggtgtgagggctgg

SEQ ID NO: 1543488 - DNA, 15 bp, Homo sapiens
ggtgtgagggctgga

SEQ ID NO: 1543489 - DNA, 15 bp, Homo sapiens
gtgtgagggctggac

SEQ ID NO: 1543490 - DNA, 15 bp, Homo sapiens
tgtgagggctggacc

SEQ ID NO: 1543491 - DNA, 15 bp, Homo sapiens
gtgagggctggacct

SEQ ID NO: 1543492 - DNA, 15 bp, Homo sapiens
tgagggctggacctt

SEQ ID NO: 1543493 - DNA, 15 bp, Homo sapiens
gagggctggaccttt

SEQ ID NO: 1543494 - DNA, 15 bp, Homo sapiens
agggctggacctttg

SEQ ID NO: 1543495 - DNA, 15 bp, Homo sapiens
gggctggacctttgc

SEQ ID NO: 1543496 - DNA, 15 bp, Homo sapiens
ggctggacctttgca

SEQ ID NO: 1543497 - DNA, 15 bp, Homo sapiens
gctggacctttgcaa

SEQ ID NO: 1543498 - DNA, 15 bp, Homo sapiens
ctggacctttgcaag

SEQ ID NO: 1543499 - DNA, 15 bp, Homo sapiens
tggacctttgcaaga

SEQ ID NO: 1543500 - DNA, 15 bp, Homo sapiens
ggacctttgcaagag

SEQ ID NO: 1543501 - DNA, 15 bp, Homo sapiens
gacctttgcaagagc

SEQ ID NO: 1543502 - DNA, 15 bp, Homo sapiens
acctttgcaagagca

SEQ ID NO: 1543503 - DNA, 15 bp, Homo sapiens
cctttgcaagagcag

SEQ ID NO: 1543504 - DNA, 15 bp, Homo sapiens
ctttgcaagagcagc

SEQ ID NO: 1543505 - DNA, 15 bp, Homo sapiens
tttgcaagagcagca

SEQ ID NO: 1543506 - DNA, 15 bp, Homo sapiens
ttgcaagagcagcat

SEQ ID NO: 1543507 - DNA, 15 bp, Homo sapiens
tgcaagagcagcatc

SEQ ID NO: 1543508 - DNA, 15 bp, Homo sapiens
gcaagagcagcatca

SEQ ID NO: 1543509 - DNA, 15 bp, Homo sapiens
caagagcagcatcac

SEQ ID NO: 1543510 - DNA, 15 bp, Homo sapiens
aagagcagcatcact

SEQ ID NO: 1543511 - DNA, 15 bp, Homo sapiens
agagcagcatcactt

SEQ ID NO: 1543512 - DNA, 15 bp, Homo sapiens
gagcagcatcacttt

SEQ ID NO: 1543513 - DNA, 15 bp, Homo sapiens
agcagcatcactttt

SEQ ID NO: 1543514 - DNA, 15 bp, Homo sapiens
gcagcatcacttttg

SEQ ID NO: 1543515 - DNA, 15 bp, Homo sapiens
cagcatcacttttgt

SEQ ID NO: 1543516 - DNA, 15 bp, Homo sapiens
agcatcacttttgtt

SEQ ID NO: 1543517 - DNA, 15 bp, Homo sapiens
gcatcacttttgttg

SEQ ID NO: 1543518 - DNA, 15 bp, Homo sapiens
catcacttttgttga

SEQ ID NO: 1543519 - DNA, 15 bp, Homo sapiens
tcacttttgttgaga

SEQ ID NO: 1543520 - DNA, 15 bp, Homo sapiens
cacttttgttgagag

SEQ ID NO: 1543521 - DNA, 15 bp, Homo sapiens
acttttgttgagagc

SEQ ID NO: 1543522 - DNA, 15 bp, Homo sapiens
cttttgttgagagcc

SEQ ID NO: 1543523 - DNA, 15 bp, Homo sapiens
ttttgttgagagccc

SEQ ID NO: 1543524 - DNA, 15 bp, Homo sapiens
tttgttgagagccca

SEQ ID NO: 1543525 - DNA, 15 bp, Homo sapiens
ttgttgagagcccac

SEQ ID NO: 1543526 - DNA, 15 bp, Homo sapiens
tgttgagagcccaca

SEQ ID NO: 1543527 - DNA, 15 bp, Homo sapiens
gttgagagcccacag

SEQ ID NO: 1543528 - DNA, 15 bp, Homo sapiens
ttgagagcccacagg

SEQ ID NO: 1543529 - DNA, 15 bp, Homo sapiens
tgagagcccacaggt

SEQ ID NO: 1543530 - DNA, 15 bp, Homo sapiens
gagagcccacaggta

SEQ ID NO: 1543531 - DNA, 15 bp, Homo sapiens
agagcccacaggtat

SEQ ID NO: 1543532 - DNA, 15 bp, Homo sapiens
gagcccacaggtatc

SEQ ID NO: 1543533 - DNA, 15 bp, Homo sapiens
agcccacaggtatct

SEQ ID NO: 1543534 - DNA, 15 bp, Homo sapiens
gcccacaggtatctt

SEQ ID NO: 1543535 - DNA, 15 bp, Homo sapiens
cccacaggtatctta

SEQ ID NO: 1543536 - DNA, 15 bp, Homo sapiens
ccacaggtatcttat

SEQ ID NO: 1543537 - DNA, 15 bp, Homo sapiens
cacaggtatcttata

SEQ ID NO: 1543538 - DNA, 15 bp, Homo sapiens
acaggtatcttataa

SEQ ID NO: 1543539 - DNA, 15 bp, Homo sapiens
caggtatcttataat

SEQ ID NO: 1543540 - DNA, 15 bp, Homo sapiens
aggtatcttataatt

SEQ ID NO: 1543541 - DNA, 15 bp, Homo sapiens
ggtatcttataattg

SEQ ID NO: 1543542 - DNA, 15 bp, Homo sapiens
gtatcttataattgg

SEQ ID NO: 1543543 - DNA, 15 bp, Homo sapiens
tatcttataattggg

SEQ ID NO: 1543544 - DNA, 15 bp, Homo sapiens
atcttataattgggt

SEQ ID NO: 1543545 - DNA, 15 bp, Homo sapiens
tcttataattgggtc

SEQ ID NO: 1543546 - DNA, 15 bp, Homo sapiens
cttataattgggtcc

SEQ ID NO: 1543547 - DNA, 15 bp, Homo sapiens
ttataattgggtcct

SEQ ID NO: 1543548 - DNA, 15 bp, Homo sapiens
tataattgggtccta

SEQ ID NO: 1543549 - DNA, 15 bp, Homo sapiens
ataattgggtcctag

SEQ ID NO: 1543550 - DNA, 15 bp, Homo sapiens
taattgggtcctagg

SEQ ID NO: 1543551 - DNA, 15 bp, Homo sapiens
aattgggtcctagga

SEQ ID NO: 1543552 - DNA, 15 bp, Homo sapiens
attgggtcctaggac

SEQ ID NO: 1543553 - DNA, 15 bp, Homo sapiens
ttgggtcctaggact

SEQ ID NO: 1543554 - DNA, 15 bp, Homo sapiens
tgggtcctaggactt

SEQ ID NO: 1543555 - DNA, 15 bp, Homo sapiens
gggtcctaggacttc

SEQ ID NO: 1543556 - DNA, 15 bp, Homo sapiens
ggtcctaggacttcc

SEQ ID NO: 1543557 - DNA, 15 bp, Homo sapiens
gtcctaggacttcct

SEQ ID NO: 1543558 - DNA, 15 bp, Homo sapiens
tcctaggacttcctg

SEQ ID NO: 1543559 - DNA, 15 bp, Homo sapiens
cctaggacttcctgc

SEQ ID NO: 1543560 - DNA, 15 bp, Homo sapiens
ctaggacttcctgcc

SEQ ID NO: 1543561 - DNA, 15 bp, Homo sapiens
taggacttcctgcca

SEQ ID NO: 1543562 - DNA, 15 bp, Homo sapiens
aggacttcctgccag

SEQ ID NO: 1543563 - DNA, 15 bp, Homo sapiens
ggacttcctgccagt

SEQ ID NO: 1543564 - DNA, 15 bp, Homo sapiens
gacttcctgccagta

SEQ ID NO: 1543565 - DNA, 15 bp, Homo sapiens
acttcctgccagtag

SEQ ID NO: 1543566 - DNA, 15 bp, Homo sapiens
cttcctgccagtagc

SEQ ID NO: 1543567 - DNA, 15 bp, Homo sapiens
ttcctgccagtagcc

SEQ ID NO: 1543568 - DNA, 15 bp, Homo sapiens
tcctgccagtagcca

SEQ ID NO: 1543569 - DNA, 15 bp, Homo sapiens
cctgccagtagccat

SEQ ID NO: 1543570 - DNA, 15 bp, Homo sapiens
ctgccagtagccatt

SEQ ID NO: 1543571 - DNA, 15 bp, Homo sapiens
tgccagtagccattg

SEQ ID NO: 1543572 - DNA, 15 bp, Homo sapiens
gccagtagccattgt

SEQ ID NO: 1543573 - DNA, 15 bp, Homo sapiens
ccagtagccattgtg

SEQ ID NO: 1543574 - DNA, 15 bp, Homo sapiens
cagtagccattgtgt

SEQ ID NO: 1543575 - DNA, 15 bp, Homo sapiens
agtagccattgtgtg

SEQ ID NO: 1543576 - DNA, 15 bp, Homo sapiens
gtagccattgtgtgc

SEQ ID NO: 1543577 - DNA, 15 bp, Homo sapiens
tagccattgtgtgca

SEQ ID NO: 1543578 - DNA, 15 bp, Homo sapiens
agccattgtgtgcat

SEQ ID NO: 1543579 - DNA, 15 bp, Homo sapiens
gccattgtgtgcatg

SEQ ID NO: 1543580 - DNA, 15 bp, Homo sapiens
ccattgtgtgcatgg

SEQ ID NO: 1543581 - DNA, 15 bp, Homo sapiens
cattgtgtgcatgga

SEQ ID NO: 1543582 - DNA, 15 bp, Homo sapiens
attgtgtgcatggat

SEQ ID NO: 1543583 - DNA, 15 bp, Homo sapiens
ttgtgtgcatggatt

SEQ ID NO: 1543584 - DNA, 15 bp, Homo sapiens
tgtgtgcatggattt

SEQ ID NO: 1543585 - DNA, 15 bp, Homo sapiens
gtgtgcatggatttg

SEQ ID NO: 1543586 - DNA, 15 bp, Homo sapiens
tgtgcatggatttgg

SEQ ID NO: 1543587 - DNA, 15 bp, Homo sapiens
gtgcatggatttggg

SEQ ID NO: 1543588 - DNA, 15 bp, Homo sapiens
tgcatggatttgggt

SEQ ID NO: 1543589 - DNA, 15 bp, Homo sapiens
gcatggatttgggtg

SEQ ID NO: 1543590 - DNA, 15 bp, Homo sapiens
catggatttgggtgc

SEQ ID NO: 1543591 - DNA, 15 bp, Homo sapiens
atggatttgggtgct

SEQ ID NO: 1543592 - DNA, 15 bp, Homo sapiens
tggatttgggtgctg

SEQ ID NO: 1543593 - DNA, 15 bp, Homo sapiens
ggatttgggtgctgg

SEQ ID NO: 1543594 - DNA, 15 bp, Homo sapiens
gatttgggtgctggc

SEQ ID NO: 1543595 - DNA, 15 bp, Homo sapiens
atttgggtgctggcc

SEQ ID NO: 1543596 - DNA, 15 bp, Homo sapiens
tttgggtgctggcct

SEQ ID NO: 1543597 - DNA, 15 bp, Homo sapiens
ttgggtgctggcctc

SEQ ID NO: 1543598 - DNA, 15 bp, Homo sapiens
tgggtgctggcctca

SEQ ID NO: 1543599 - DNA, 15 bp, Homo sapiens
gggtgctggcctcac

SEQ ID NO: 1543600 - DNA, 15 bp, Homo sapiens
ggtgctggcctcacc

SEQ ID NO: 1543601 - DNA, 15 bp, Homo sapiens
gtgctggcctcacca

SEQ ID NO: 1543602 - DNA, 15 bp, Homo sapiens
tgctggcctcaccat

SEQ ID NO: 1543603 - DNA, 15 bp, Homo sapiens
gctggcctcaccatg

SEQ ID NO: 1543604 - DNA, 15 bp, Homo sapiens
ctggcctcaccatgg

SEQ ID NO: 1543605 - DNA, 15 bp, Homo sapiens
tggcctcaccatggt

SEQ ID NO: 1543606 - DNA, 15 bp, Homo sapiens
ggcctcaccatggtg

SEQ ID NO: 1543607 - DNA, 15 bp, Homo sapiens
gcctcaccatggtgt

SEQ ID NO: 1543608 - DNA, 15 bp, Homo sapiens
cctcaccatggtgtg

SEQ ID NO: 1543609 - DNA, 15 bp, Homo sapiens
ctcaccatggtgtgc

SEQ ID NO: 1543610 - DNA, 15 bp, Homo sapiens
tcaccatggtgtgct

SEQ ID NO: 1543611 - DNA, 15 bp, Homo sapiens
caccatggtgtgctg

SEQ ID NO: 1543612 - DNA, 15 bp, Homo sapiens
accatggtgtgctgg

SEQ ID NO: 1543613 - DNA, 15 bp, Homo sapiens
ccatggtgtgctggc

SEQ ID NO: 1543614 - DNA, 15 bp, Homo sapiens
catggtgtgctggct

SEQ ID NO: 1543615 - DNA, 15 bp, Homo sapiens
atggtgtgctggctg

SEQ ID NO: 1543616 - DNA, 15 bp, Homo sapiens
tggtgtgctggctgc

SEQ ID NO: 1543617 - DNA, 15 bp, Homo sapiens
ggtgtgctggctgcc

SEQ ID NO: 1543618 - DNA, 15 bp, Homo sapiens
gtgtgctggctgccc

SEQ ID NO: 1543619 - DNA, 15 bp, Homo sapiens
tgtgctggctgccca

SEQ ID NO: 1543620 - DNA, 15 bp, Homo sapiens
gtgctggctgcccat

SEQ ID NO: 1543621 - DNA, 15 bp, Homo sapiens
tgctggctgcccatg

SEQ ID NO: 1543622 - DNA, 15 bp, Homo sapiens
gctggctgcccatgc

SEQ ID NO: 1543623 - DNA, 15 bp, Homo sapiens
ctggctgcccatgcc

SEQ ID NO: 1543624 - DNA, 15 bp, Homo sapiens
tggctgcccatgcct

SEQ ID NO: 1543625 - DNA, 15 bp, Homo sapiens
ggctgcccatgcctg

SEQ ID NO: 1543626 - DNA, 15 bp, Homo sapiens
gctgcccatgcctgc

SEQ ID NO: 1543627 - DNA, 15 bp, Homo sapiens
ctgcccatgcctgca

SEQ ID NO: 1543628 - DNA, 15 bp, Homo sapiens
tgcccatgcctgcaa

SEQ ID NO: 1543629 - DNA, 15 bp, Homo sapiens
gcccatgcctgcaat

SEQ ID NO: 1543630 - DNA, 15 bp, Homo sapiens
cccatgcctgcaata

SEQ ID NO: 1543631 - DNA, 15 bp, Homo sapiens
ccatgcctgcaataa

SEQ ID NO: 1543632 - DNA, 15 bp, Homo sapiens
catgcctgcaataat

SEQ ID NO: 1543633 - DNA, 15 bp, Homo sapiens
atgcctgcaataatg

SEQ ID NO: 1543634 - DNA, 15 bp, Homo sapiens
tgcctgcaataatga

SEQ ID NO: 1543635 - DNA, 15 bp, Homo sapiens
gcctgcaataatgac

SEQ ID NO: 1543636 - DNA, 15 bp, Homo sapiens
cctgcaataatgact

SEQ ID NO: 1543637 - DNA, 15 bp, Homo sapiens
ctgcaataatgactt

SEQ ID NO: 1543638 - DNA, 15 bp, Homo sapiens
tgcaataatgacttc

SEQ ID NO: 1543639 - DNA, 15 bp, Homo sapiens
gcaataatgacttct

SEQ ID NO: 1543640 - DNA, 15 bp, Homo sapiens
caataatgacttctg

SEQ ID NO: 1543641 - DNA, 15 bp, Homo sapiens
aataatgacttctgt

SEQ ID NO: 1543642 - DNA, 15 bp, Homo sapiens
ataatgacttctgta

SEQ ID NO: 1543643 - DNA, 15 bp, Homo sapiens
taatgacttctgtaa

SEQ ID NO: 1543644 - DNA, 15 bp, Homo sapiens
aatgacttctgtaag

SEQ ID NO: 1543645 - DNA, 15 bp, Homo sapiens
atgacttctgtaagc

SEQ ID NO: 1543646 - DNA, 15 bp, Homo sapiens
tgacttctgtaagcc

SEQ ID NO: 1543647 - DNA, 15 bp, Homo sapiens
gacttctgtaagcct

SEQ ID NO: 1543648 - DNA, 15 bp, Homo sapiens
acttctgtaagcctt

SEQ ID NO: 1543649 - DNA, 15 bp, Homo sapiens
cttctgtaagccttt

SEQ ID NO: 1543650 - DNA, 15 bp, Homo sapiens
ttctgtaagcctttc

SEQ ID NO: 1543651 - DNA, 15 bp, Homo sapiens
tctgtaagcctttct

SEQ ID NO: 1543652 - DNA, 15 bp, Homo sapiens
ctgtaagcctttctt

SEQ ID NO: 1543653 - DNA, 15 bp, Homo sapiens
tgtaagcctttcttc

SEQ ID NO: 1543654 - DNA, 15 bp, Homo sapiens
gtaagcctttcttca

SEQ ID NO: 1543655 - DNA, 15 bp, Homo sapiens
taagcctttcttcat

SEQ ID NO: 1543656 - DNA, 15 bp, Homo sapiens
aagcctttcttcatc

SEQ ID NO: 1543657 - DNA, 15 bp, Homo sapiens
agcctttcttcatct

SEQ ID NO: 1543658 - DNA, 15 bp, Homo sapiens
gcctttcttcatctg

SEQ ID NO: 1543659 - DNA, 15 bp, Homo sapiens
cctttcttcatctgc

SEQ ID NO: 1543660 - DNA, 15 bp, Homo sapiens
ctttcttcatctgca

SEQ ID NO: 1543661 - DNA, 15 bp, Homo sapiens
tttcttcatctgcaa

SEQ ID NO: 1543662 - DNA, 15 bp, Homo sapiens
ttcttcatctgcaag

SEQ ID NO: 1543663 - DNA, 15 bp, Homo sapiens
tcttcatctgcaaga

SEQ ID NO: 1543664 - DNA, 15 bp, Homo sapiens
cttcatctgcaagat

SEQ ID NO: 1543665 - DNA, 15 bp, Homo sapiens
ttcatctgcaagatg

SEQ ID NO: 1543666 - DNA, 15 bp, Homo sapiens
tcatctgcaagatgg

SEQ ID NO: 1543667 - DNA, 15 bp, Homo sapiens
catctgcaagatggg

SEQ ID NO: 1543668 - DNA, 15 bp, Homo sapiens
atctgcaagatgggt

SEQ ID NO: 1543669 - DNA, 15 bp, Homo sapiens
tctgcaagatgggtg

SEQ ID NO: 1543670 - DNA, 15 bp, Homo sapiens
ctgcaagatgggtgc

SEQ ID NO: 1543671 - DNA, 15 bp, Homo sapiens
tgcaagatgggtgct

SEQ ID NO: 1543672 - DNA, 15 bp, Homo sapiens
gcaagatgggtgctg

SEQ ID NO: 1543673 - DNA, 15 bp, Homo sapiens
caagatgggtgctgc

SEQ ID NO: 1543674 - DNA, 15 bp, Homo sapiens
aagatgggtgctgct

SEQ ID NO: 1543675 - DNA, 15 bp, Homo sapiens
agatgggtgctgctg

SEQ ID NO: 1543676 - DNA, 15 bp, Homo sapiens
gatgggtgctgctgg

SEQ ID NO: 1543677 - DNA, 15 bp, Homo sapiens
atgggtgctgctggc

SEQ ID NO: 1543678 - DNA, 15 bp, Homo sapiens
tgggtgctgctggca

SEQ ID NO: 1543679 - DNA, 15 bp, Homo sapiens
gggtgctgctggcac

SEQ ID NO: 1543680 - DNA, 15 bp, Homo sapiens
ggtgctgctggcacc

SEQ ID NO: 1543681 - DNA, 15 bp, Homo sapiens
gtgctgctggcacct

SEQ ID NO: 1543682 - DNA, 15 bp, Homo sapiens
tgctgctggcacctc

SEQ ID NO: 1543683 - DNA, 15 bp, Homo sapiens
gctgctggcacctcc

SEQ ID NO: 1543684 - DNA, 15 bp, Homo sapiens
ctgctggcacctcct

SEQ ID NO: 1543685 - DNA, 15 bp, Homo sapiens
tgctggcacctcctc

SEQ ID NO: 1543686 - DNA, 15 bp, Homo sapiens
gctggcacctcctcc

SEQ ID NO: 1543687 - DNA, 15 bp, Homo sapiens
ctggcacctcctccc

SEQ ID NO: 1543688 - DNA, 15 bp, Homo sapiens
tggcacctcctcccc

SEQ ID NO: 1543689 - DNA, 15 bp, Homo sapiens
ggcacctcctccccg

SEQ ID NO: 1543690 - DNA, 15 bp, Homo sapiens
gcacctcctccccgg

SEQ ID NO: 1543691 - DNA, 15 bp, Homo sapiens
cacctcctccccggt

SEQ ID NO: 1543692 - DNA, 15 bp, Homo sapiens
acctcctccccggtg

SEQ ID NO: 1543693 - DNA, 15 bp, Homo sapiens
cctcctccccggtgc

SEQ ID NO: 1543694 - DNA, 15 bp, Homo sapiens
ctcctccccggtgct

SEQ ID NO: 1543695 - DNA, 15 bp, Homo sapiens
tcctccccggtgctg

SEQ ID NO: 1543696 - DNA, 15 bp, Homo sapiens
cctccccggtgctgt

SEQ ID NO: 1543697 - DNA, 15 bp, Homo sapiens
ctccccggtgctgtg

SEQ ID NO: 1543698 - DNA, 15 bp, Homo sapiens
tccccggtgctgtgg

SEQ ID NO: 1543699 - DNA, 15 bp, Homo sapiens
ccccggtgctgtggt

SEQ ID NO: 1543700 - DNA, 15 bp, Homo sapiens
cccggtgctgtggtg

SEQ ID NO: 1543701 - DNA, 15 bp, Homo sapiens
ccggtgctgtggtga

SEQ ID NO: 1543702 - DNA, 15 bp, Homo sapiens
cggtgctgtggtgac

SEQ ID NO: 1543703 - DNA, 15 bp, Homo sapiens
ggtgctgtggtgaca

SEQ ID NO: 1543704 - DNA, 15 bp, Homo sapiens
gtgctgtggtgacag

SEQ ID NO: 1543705 - DNA, 15 bp, Homo sapiens
tgctgtggtgacagg

SEQ ID NO: 1543706 - DNA, 15 bp, Homo sapiens
gctgtggtgacaggg

SEQ ID NO: 1543707 - DNA, 15 bp, Homo sapiens
ctgtggtgacagggc

SEQ ID NO: 1543708 - DNA, 15 bp, Homo sapiens
tgtggtgacagggca

SEQ ID NO: 1543709 - DNA, 15 bp, Homo sapiens
gtggtgacagggcat

SEQ ID NO: 1543710 - DNA, 15 bp, Homo sapiens
tggtgacagggcata

SEQ ID NO: 1543711 - DNA, 15 bp, Homo sapiens
ggtgacagggcatag

SEQ ID NO: 1543712 - DNA, 15 bp, Homo sapiens
gtgacagggcatagt

SEQ ID NO: 1543713 - DNA, 15 bp, Homo sapiens
tgacagggcatagtg

SEQ ID NO: 1543714 - DNA, 15 bp, Homo sapiens
gacagggcatagtgt

SEQ ID NO: 1543715 - DNA, 15 bp, Homo sapiens
acagggcatagtgtg

SEQ ID NO: 1543716 - DNA, 15 bp, Homo sapiens
cagggcatagtgtgt

SEQ ID NO: 1543717 - DNA, 15 bp, Homo sapiens
agggcatagtgtgtg

SEQ ID NO: 1543718 - DNA, 15 bp, Homo sapiens
gggcatagtgtgtga

SEQ ID NO: 1543719 - DNA, 15 bp, Homo sapiens
ggcatagtgtgtgag

SEQ ID NO: 1543720 - DNA, 15 bp, Homo sapiens
gcatagtgtgtgagg

SEQ ID NO: 1543721 - DNA, 15 bp, Homo sapiens
catagtgtgtgaggc

SEQ ID NO: 1543722 - DNA, 15 bp, Homo sapiens
atagtgtgtgaggct

SEQ ID NO: 1543723 - DNA, 15 bp, Homo sapiens
tagtgtgtgaggctg

SEQ ID NO: 1543724 - DNA, 15 bp, Homo sapiens
agtgtgtgaggctgc

SEQ ID NO: 1543725 - DNA, 15 bp, Homo sapiens
gtgtgtgaggctgct

SEQ ID NO: 1543726 - DNA, 15 bp, Homo sapiens
tgtgtgaggctgcta

SEQ ID NO: 1543727 - DNA, 15 bp, Homo sapiens
gtgtgaggctgctat

SEQ ID NO: 1543728 - DNA, 15 bp, Homo sapiens
tgtgaggctgctatg

SEQ ID NO: 1543729 - DNA, 15 bp, Homo sapiens
gtgaggctgctatgt

SEQ ID NO: 1543730 - DNA, 15 bp, Homo sapiens
tgaggctgctatgtg

SEQ ID NO: 1543731 - DNA, 15 bp, Homo sapiens
gaggctgctatgtga

SEQ ID NO: 1543732 - DNA, 15 bp, Homo sapiens
aggctgctatgtgaa

SEQ ID NO: 1543733 - DNA, 15 bp, Homo sapiens
ggctgctatgtgaag

SEQ ID NO: 1543734 - DNA, 15 bp, Homo sapiens
gctgctatgtgaagc

SEQ ID NO: 1543735 - DNA, 15 bp, Homo sapiens
ctgctatgtgaagca

SEQ ID NO: 1543736 - DNA, 15 bp, Homo sapiens
tgctatgtgaagcac

SEQ ID NO: 1543737 - DNA, 15 bp, Homo sapiens
gctatgtgaagcacc

SEQ ID NO: 1543738 - DNA, 15 bp, Homo sapiens
ctatgtgaagcacct

SEQ ID NO: 1543739 - DNA, 15 bp, Homo sapiens
tatgtgaagcaccta

SEQ ID NO: 1543740 - DNA, 15 bp, Homo sapiens
atgtgaagcacctaa

SEQ ID NO: 1543741 - DNA, 15 bp, Homo sapiens
tgtgaagcacctaat

SEQ ID NO: 1543742 - DNA, 15 bp, Homo sapiens
gtgaagcacctaatg

SEQ ID NO: 1543743 - DNA, 15 bp, Homo sapiens
tgaagcacctaatgc

SEQ ID NO: 1543744 - DNA, 15 bp, Homo sapiens
gaagcacctaatgca

SEQ ID NO: 1543745 - DNA, 15 bp, Homo sapiens
aagcacctaatgcag

SEQ ID NO: 1543746 - DNA, 15 bp, Homo sapiens
agcacctaatgcagg

SEQ ID NO: 1543747 - DNA, 15 bp, Homo sapiens
gcacctaatgcaggg

SEQ ID NO: 1543748 - DNA, 15 bp, Homo sapiens
cacctaatgcagggc

SEQ ID NO: 1543749 - DNA, 15 bp, Homo sapiens
acctaatgcagggcc

SEQ ID NO: 1543750 - DNA, 15 bp, Homo sapiens
cctaatgcagggcct

SEQ ID NO: 1543751 - DNA, 15 bp, Homo sapiens
ctaatgcagggcctg

SEQ ID NO: 1543752 - DNA, 15 bp, Homo sapiens
taatgcagggcctgg

SEQ ID NO: 1543753 - DNA, 15 bp, Homo sapiens
aatgcagggcctggc

SEQ ID NO: 1543754 - DNA, 15 bp, Homo sapiens
atgcagggcctggca

SEQ ID NO: 1543755 - DNA, 15 bp, Homo sapiens
tgcagggcctggcat

SEQ ID NO: 1543756 - DNA, 15 bp, Homo sapiens
gcagggcctggcata

SEQ ID NO: 1543757 - DNA, 15 bp, Homo sapiens
cagggcctggcatat

SEQ ID NO: 1543758 - DNA, 15 bp, Homo sapiens
agggcctggcatatg

SEQ ID NO: 1543759 - DNA, 15 bp, Homo sapiens
gggcctggcatatgg

SEQ ID NO: 1543760 - DNA, 15 bp, Homo sapiens
ggcctggcatatgga

SEQ ID NO: 1543761 - DNA, 15 bp, Homo sapiens
gcctggcatatggag

SEQ ID NO: 1543762 - DNA, 15 bp, Homo sapiens
cctggcatatggagg

SEQ ID NO: 1543763 - DNA, 15 bp, Homo sapiens
ctggcatatggagga

SEQ ID NO: 1543764 - DNA, 15 bp, Homo sapiens
tggcatatggaggaa

SEQ ID NO: 1543765 - DNA, 15 bp, Homo sapiens
ggcatatggaggaat

SEQ ID NO: 1543766 - DNA, 15 bp, Homo sapiens
gcatatggaggaatt

SEQ ID NO: 1543767 - DNA, 15 bp, Homo sapiens
catatggaggaattc

SEQ ID NO: 1543768 - DNA, 15 bp, Homo sapiens
atatggaggaattca

SEQ ID NO: 1543769 - DNA, 15 bp, Homo sapiens
tatggaggaattcag

SEQ ID NO: 1543770 - DNA, 15 bp, Homo sapiens
atggaggaattcagc

SEQ ID NO: 1543771 - DNA, 15 bp, Homo sapiens
tggaggaattcagca

SEQ ID NO: 1543772 - DNA, 15 bp, Homo sapiens
ggaggaattcagcaa

SEQ ID NO: 1543773 - DNA, 15 bp, Homo sapiens
gaggaattcagcaaa

SEQ ID NO: 1543774 - DNA, 15 bp, Homo sapiens
aggaattcagcaaat

SEQ ID NO: 1543775 - DNA, 15 bp, Homo sapiens
ggaattcagcaaatg

SEQ ID NO: 1543776 - DNA, 15 bp, Homo sapiens
gaattcagcaaatga

SEQ ID NO: 1543777 - DNA, 15 bp, Homo sapiens
aattcagcaaatgac

SEQ ID NO: 1543778 - DNA, 15 bp, Homo sapiens
attcagcaaatgaca

SEQ ID NO: 1543779 - DNA, 15 bp, Homo sapiens
ttcagcaaatgacag

SEQ ID NO: 1543780 - DNA, 15 bp, Homo sapiens
tcagcaaatgacaga

SEQ ID NO: 1543781 - DNA, 15 bp, Homo sapiens
cagcaaatgacagat

SEQ ID NO: 1543782 - DNA, 15 bp, Homo sapiens
agcaaatgacagatg

SEQ ID NO: 1543783 - DNA, 15 bp, Homo sapiens
gcaaatgacagatgc

SEQ ID NO: 1543784 - DNA, 15 bp, Homo sapiens
caaatgacagatgcc

SEQ ID NO: 1543785 - DNA, 15 bp, Homo sapiens
aaatgacagatgcct

SEQ ID NO: 1543786 - DNA, 15 bp, Homo sapiens
aatgacagatgcctt

SEQ ID NO: 1543787 - DNA, 15 bp, Homo sapiens
atgacagatgccttc

SEQ ID NO: 1543788 - DNA, 15 bp, Homo sapiens
tgacagatgccttca

SEQ ID NO: 1543789 - DNA, 15 bp, Homo sapiens
gacagatgccttcac

SEQ ID NO: 1543790 - DNA, 15 bp, Homo sapiens
acagatgccttcaca

SEQ ID NO: 1543791 - DNA, 15 bp, Homo sapiens
cagatgccttcacag

SEQ ID NO: 1543792 - DNA, 15 bp, Homo sapiens
agatgccttcacagt

SEQ ID NO: 1543793 - DNA, 15 bp, Homo sapiens
gatgccttcacagtt

SEQ ID NO: 1543794 - DNA, 15 bp, Homo sapiens
atgccttcacagtta

SEQ ID NO: 1543795 - DNA, 15 bp, Homo sapiens
tgccttcacagttag

SEQ ID NO: 1543796 - DNA, 15 bp, Homo sapiens
gccttcacagttagt

SEQ ID NO: 1543797 - DNA, 15 bp, Homo sapiens
ccttcacagttagtt

SEQ ID NO: 1543798 - DNA, 15 bp, Homo sapiens
cttcacagttagttc

SEQ ID NO: 1543799 - DNA, 15 bp, Homo sapiens
ttcacagttagttcc

SEQ ID NO: 1543800 - DNA, 15 bp, Homo sapiens
tcacagttagttcct

SEQ ID NO: 1543801 - DNA, 15 bp, Homo sapiens
cacagttagttcctg

SEQ ID NO: 1543802 - DNA, 15 bp, Homo sapiens
acagttagttcctgg

SEQ ID NO: 1543803 - DNA, 15 bp, Homo sapiens
cagttagttcctggc

SEQ ID NO: 1543804 - DNA, 15 bp, Homo sapiens
agttagttcctggca

SEQ ID NO: 1543805 - DNA, 15 bp, Homo sapiens
gttagttcctggcat

SEQ ID NO: 1543806 - DNA, 15 bp, Homo sapiens
ttagttcctggcatc

SEQ ID NO: 1543807 - DNA, 15 bp, Homo sapiens
tagttcctggcatcc

SEQ ID NO: 1543808 - DNA, 15 bp, Homo sapiens
agttcctggcatcct

SEQ ID NO: 1543809 - DNA, 15 bp, Homo sapiens
gttcctggcatcctc

SEQ ID NO: 1543810 - DNA, 15 bp, Homo sapiens
ttcctggcatcctct

SEQ ID NO: 1543811 - DNA, 15 bp, Homo sapiens
tcctggcatcctcta

SEQ ID NO: 1543812 - DNA, 15 bp, Homo sapiens
cctggcatcctctac

SEQ ID NO: 1543813 - DNA, 15 bp, Homo sapiens
ctggcatcctctaca

SEQ ID NO: 1543814 - DNA, 15 bp, Homo sapiens
tggcatcctctacat

SEQ ID NO: 1543815 - DNA, 15 bp, Homo sapiens
ggcatcctctacatt

SEQ ID NO: 1543816 - DNA, 15 bp, Homo sapiens
gcatcctctacattg

SEQ ID NO: 1543817 - DNA, 15 bp, Homo sapiens
catcctctacattgg

SEQ ID NO: 1543818 - DNA, 15 bp, Homo sapiens
atcctctacattggt

SEQ ID NO: 1543819 - DNA, 15 bp, Homo sapiens
tcctctacattggtg

SEQ ID NO: 1543820 - DNA, 15 bp, Homo sapiens
cctctacattggtgg

SEQ ID NO: 1543821 - DNA, 15 bp, Homo sapiens
ctctacattggtggg

SEQ ID NO: 1543822 - DNA, 15 bp, Homo sapiens
tctacattggtgggt

SEQ ID NO: 1543823 - DNA, 15 bp, Homo sapiens
ctacattggtgggtg

SEQ ID NO: 1543824 - DNA, 15 bp, Homo sapiens
tacattggtgggtgt

SEQ ID NO: 1543825 - DNA, 15 bp, Homo sapiens
acattggtgggtgta

SEQ ID NO: 1543826 - DNA, 15 bp, Homo sapiens
cattggtgggtgtag

SEQ ID NO: 1543827 - DNA, 15 bp, Homo sapiens
attggtgggtgtagg

SEQ ID NO: 1543828 - DNA, 15 bp, Homo sapiens
ttggtgggtgtagga

SEQ ID NO: 1543829 - DNA, 15 bp, Homo sapiens
tggtgggtgtaggaa

SEQ ID NO: 1543830 - DNA, 15 bp, Homo sapiens
ggtgggtgtaggaaa

SEQ ID NO: 1543831 - DNA, 15 bp, Homo sapiens
gtgggtgtaggaaag

SEQ ID NO: 1543832 - DNA, 15 bp, Homo sapiens
tgggtgtaggaaaga

SEQ ID NO: 1543833 - DNA, 15 bp, Homo sapiens
gggtgtaggaaagaa

SEQ ID NO: 1543834 - DNA, 15 bp, Homo sapiens
ggtgtaggaaagaaa

SEQ ID NO: 1543835 - DNA, 15 bp, Homo sapiens
gtgtaggaaagaaag

SEQ ID NO: 1543836 - DNA, 15 bp, Homo sapiens
tgtaggaaagaaaga

SEQ ID NO: 1543837 - DNA, 15 bp, Homo sapiens
gtaggaaagaaagac

SEQ ID NO: 1543838 - DNA, 15 bp, Homo sapiens
taggaaagaaagaca

SEQ ID NO: 1543839 - DNA, 15 bp, Homo sapiens
aggaaagaaagacag

SEQ ID NO: 1543840 - DNA, 15 bp, Homo sapiens
ggaaagaaagacaga

SEQ ID NO: 1543841 - DNA, 15 bp, Homo sapiens
gaaagaaagacagag

SEQ ID NO: 1543842 - DNA, 15 bp, Homo sapiens
aaagaaagacagagg

SEQ ID NO: 1543843 - DNA, 15 bp, Homo sapiens
aagaaagacagagga

SEQ ID NO: 1543844 - DNA, 15 bp, Homo sapiens
agaaagacagaggag

SEQ ID NO: 1543845 - DNA, 15 bp, Homo sapiens
gaaagacagaggagg

SEQ ID NO: 1543846 - DNA, 15 bp, Homo sapiens
aaagacagaggaggc

SEQ ID NO: 1543847 - DNA, 15 bp, Homo sapiens
aagacagaggaggca

SEQ ID NO: 1543848 - DNA, 15 bp, Homo sapiens
agacagaggaggcaa

SEQ ID NO: 1543849 - DNA, 15 bp, Homo sapiens
gacagaggaggcaaa

SEQ ID NO: 1543850 - DNA, 15 bp, Homo sapiens
acagaggaggcaaaa

SEQ ID NO: 1543851 - DNA, 15 bp, Homo sapiens
cagaggaggcaaaag

SEQ ID NO: 1543852 - DNA, 15 bp, Homo sapiens
agaggaggcaaaagt

SEQ ID NO: 1543853 - DNA, 15 bp, Homo sapiens
gaggaggcaaaagtt

SEQ ID NO: 1543854 - DNA, 15 bp, Homo sapiens
aggaggcaaaagttg

SEQ ID NO: 1543855 - DNA, 15 bp, Homo sapiens
ggaggcaaaagttgt

SEQ ID NO: 1543856 - DNA, 15 bp, Homo sapiens
gaggcaaaagttgta

SEQ ID NO: 1543857 - DNA, 15 bp, Homo sapiens
aggcaaaagttgtag

SEQ ID NO: 1543858 - DNA, 15 bp, Homo sapiens
ggcaaaagttgtagc

SEQ ID NO: 1543859 - DNA, 15 bp, Homo sapiens
gcaaaagttgtagct

SEQ ID NO: 1543860 - DNA, 15 bp, Homo sapiens
caaaagttgtagctg

SEQ ID NO: 1543861 - DNA, 15 bp, Homo sapiens
aaaagttgtagctgt

SEQ ID NO: 1543862 - DNA, 15 bp, Homo sapiens
aaagttgtagctgtg

SEQ ID NO: 1543863 - DNA, 15 bp, Homo sapiens
aagttgtagctgtgg

SEQ ID NO: 1543864 - DNA, 15 bp, Homo sapiens
agttgtagctgtggg

SEQ ID NO: 1543865 - DNA, 15 bp, Homo sapiens
gttgtagctgtgggg

SEQ ID NO: 1543866 - DNA, 15 bp, Homo sapiens
ttgtagctgtggggc

SEQ ID NO: 1543867 - DNA, 15 bp, Homo sapiens
tgtagctgtggggca

SEQ ID NO: 1543868 - DNA, 15 bp, Homo sapiens
gtagctgtggggcat

SEQ ID NO: 1543869 - DNA, 15 bp, Homo sapiens
tagctgtggggcatt

SEQ ID NO: 1543870 - DNA, 15 bp, Homo sapiens
agctgtggggcattg

SEQ ID NO: 1543871 - DNA, 15 bp, Homo sapiens
gctgtggggcattga

SEQ ID NO: 1543872 - DNA, 15 bp, Homo sapiens
ctgtggggcattgag

SEQ ID NO: 1543873 - DNA, 15 bp, Homo sapiens
tgtggggcattgagg

SEQ ID NO: 1543874 - DNA, 15 bp, Homo sapiens
gtggggcattgagga

SEQ ID NO: 1543875 - DNA, 15 bp, Homo sapiens
tggggcattgaggac

SEQ ID NO: 1543876 - DNA, 15 bp, Homo sapiens
ggggcattgaggaca

SEQ ID NO: 1543877 - DNA, 15 bp, Homo sapiens
gggcattgaggacag

SEQ ID NO: 1543878 - DNA, 15 bp, Homo sapiens
ggcattgaggacagc

SEQ ID NO: 1543879 - DNA, 15 bp, Homo sapiens
gcattgaggacagcc

SEQ ID NO: 1543880 - DNA, 15 bp, Homo sapiens
cattgaggacagcct

SEQ ID NO: 1543881 - DNA, 15 bp, Homo sapiens
attgaggacagcctg

SEQ ID NO: 1543882 - DNA, 15 bp, Homo sapiens
ttgaggacagcctgg

SEQ ID NO: 1543883 - DNA, 15 bp, Homo sapiens
tgaggacagcctgga

SEQ ID NO: 1543884 - DNA, 15 bp, Homo sapiens
gaggacagcctggat

SEQ ID NO: 1543885 - DNA, 15 bp, Homo sapiens
aggacagcctggatt

SEQ ID NO: 1543886 - DNA, 15 bp, Homo sapiens
ggacagcctggattg

SEQ ID NO: 1543887 - DNA, 15 bp, Homo sapiens
gacagcctggattgt

SEQ ID NO: 1543888 - DNA, 15 bp, Homo sapiens
acagcctggattgtt

SEQ ID NO: 1543889 - DNA, 15 bp, Homo sapiens
cagcctggattgttc

SEQ ID NO: 1543890 - DNA, 15 bp, Homo sapiens
agcctggattgttcc

SEQ ID NO: 1543891 - DNA, 15 bp, Homo sapiens
gcctggattgttcca

SEQ ID NO: 1543892 - DNA, 15 bp, Homo sapiens
cctggattgttccac

SEQ ID NO: 1543893 - DNA, 15 bp, Homo sapiens
ctggattgttccaca

SEQ ID NO: 1543894 - DNA, 15 bp, Homo sapiens
tggattgttccacag

SEQ ID NO: 1543895 - DNA, 15 bp, Homo sapiens
ggattgttccacaga

SEQ ID NO: 1543896 - DNA, 15 bp, Homo sapiens
gattgttccacagag

SEQ ID NO: 1543897 - DNA, 15 bp, Homo sapiens
attgttccacagagc

SEQ ID NO: 1543898 - DNA, 15 bp, Homo sapiens
ttgttccacagagcc

SEQ ID NO: 1543899 - DNA, 15 bp, Homo sapiens
tgttccacagagccc

SEQ ID NO: 1543900 - DNA, 15 bp, Homo sapiens
gttccacagagccct

SEQ ID NO: 1543901 - DNA, 15 bp, Homo sapiens
ttccacagagccctg

SEQ ID NO: 1543902 - DNA, 15 bp, Homo sapiens
tccacagagccctga

SEQ ID NO: 1543903 - DNA, 15 bp, Homo sapiens
ccacagagccctgag

SEQ ID NO: 1543904 - DNA, 15 bp, Homo sapiens
cacagagccctgagg

SEQ ID NO: 1543905 - DNA, 15 bp, Homo sapiens
acagagccctgagga

SEQ ID NO: 1543906 - DNA, 15 bp, Homo sapiens
cagagccctgaggac

SEQ ID NO: 1543907 - DNA, 15 bp, Homo sapiens
agagccctgaggaca

SEQ ID NO: 1543908 - DNA, 15 bp, Homo sapiens
gagccctgaggacat

SEQ ID NO: 1543909 - DNA, 15 bp, Homo sapiens
agccctgaggacatc

SEQ ID NO: 1543910 - DNA, 15 bp, Homo sapiens
gccctgaggacatct

SEQ ID NO: 1543911 - DNA, 15 bp, Homo sapiens
ccctgaggacatctc

SEQ ID NO: 1543912 - DNA, 15 bp, Homo sapiens
cctgaggacatctcc

SEQ ID NO: 1543913 - DNA, 15 bp, Homo sapiens
ctgaggacatctcca

SEQ ID NO: 1543914 - DNA, 15 bp, Homo sapiens
tgaggacatctccag

SEQ ID NO: 1543915 - DNA, 15 bp, Homo sapiens
gaggacatctccagg

SEQ ID NO: 1543916 - DNA, 15 bp, Homo sapiens
aggacatctccaggg

SEQ ID NO: 1543917 - DNA, 15 bp, Homo sapiens
ggacatctccagggg

SEQ ID NO: 1543918 - DNA, 15 bp, Homo sapiens
gacatctccaggggt

SEQ ID NO: 1543919 - DNA, 15 bp, Homo sapiens
acatctccaggggtg

SEQ ID NO: 1543920 - DNA, 15 bp, Homo sapiens
catctccaggggtgt

SEQ ID NO: 1543921 - DNA, 15 bp, Homo sapiens
atctccaggggtgtg

SEQ ID NO: 1543922 - DNA, 15 bp, Homo sapiens
tctccaggggtgtgc

SEQ ID NO: 1543923 - DNA, 15 bp, Homo sapiens
ctccaggggtgtgct

SEQ ID NO: 1543924 - DNA, 15 bp, Homo sapiens
tccaggggtgtgctc

SEQ ID NO: 1543925 - DNA, 15 bp, Homo sapiens
ccaggggtgtgctct

SEQ ID NO: 1543926 - DNA, 15 bp, Homo sapiens
caggggtgtgctctg

SEQ ID NO: 1543927 - DNA, 15 bp, Homo sapiens
aggggtgtgctctgc

SEQ ID NO: 1543928 - DNA, 15 bp, Homo sapiens
ggggtgtgctctgca

SEQ ID NO: 1543929 - DNA, 15 bp, Homo sapiens
gggtgtgctctgcag

SEQ ID NO: 1543930 - DNA, 15 bp, Homo sapiens
ggtgtgctctgcagg

SEQ ID NO: 1543931 - DNA, 15 bp, Homo sapiens
gtgtgctctgcaggg

SEQ ID NO: 1543932 - DNA, 15 bp, Homo sapiens
tgtgctctgcagggg

SEQ ID NO: 1543933 - DNA, 15 bp, Homo sapiens
gtgctctgcaggggc

SEQ ID NO: 1543934 - DNA, 15 bp, Homo sapiens
tgctctgcaggggca

SEQ ID NO: 1543935 - DNA, 15 bp, Homo sapiens
gctctgcaggggcag

SEQ ID NO: 1543936 - DNA, 15 bp, Homo sapiens
ctctgcaggggcagc

SEQ ID NO: 1543937 - DNA, 15 bp, Homo sapiens
tctgcaggggcagct

SEQ ID NO: 1543938 - DNA, 15 bp, Homo sapiens
ctgcaggggcagctg

SEQ ID NO: 1543939 - DNA, 15 bp, Homo sapiens
tgcaggggcagctgg

SEQ ID NO: 1543940 - DNA, 15 bp, Homo sapiens
gcaggggcagctgga

SEQ ID NO: 1543941 - DNA, 15 bp, Homo sapiens
caggggcagctggat

SEQ ID NO: 1543942 - DNA, 15 bp, Homo sapiens
aggggcagctggatt

SEQ ID NO: 1543943 - DNA, 15 bp, Homo sapiens
ggggcagctggattg

SEQ ID NO: 1543944 - DNA, 15 bp, Homo sapiens
gggcagctggattgg

SEQ ID NO: 1543945 - DNA, 15 bp, Homo sapiens
ggcagctggattgga

SEQ ID NO: 1543946 - DNA, 15 bp, Homo sapiens
gcagctggattggag

SEQ ID NO: 1543947 - DNA, 15 bp, Homo sapiens
cagctggattggagg

SEQ ID NO: 1543948 - DNA, 15 bp, Homo sapiens
agctggattggaggg

SEQ ID NO: 1543949 - DNA, 15 bp, Homo sapiens
gctggattggagggt

SEQ ID NO: 1543950 - DNA, 15 bp, Homo sapiens
ctggattggagggtt

SEQ ID NO: 1543951 - DNA, 15 bp, Homo sapiens
tggattggagggtta

SEQ ID NO: 1543952 - DNA, 15 bp, Homo sapiens
ggattggagggttag

SEQ ID NO: 1543953 - DNA, 15 bp, Homo sapiens
gattggagggttagg

SEQ ID NO: 1543954 - DNA, 15 bp, Homo sapiens
attggagggttaggg

SEQ ID NO: 1543955 - DNA, 15 bp, Homo sapiens
ttggagggttagggg

SEQ ID NO: 1543956 - DNA, 15 bp, Homo sapiens
tggagggttaggggt

SEQ ID NO: 1543957 - DNA, 15 bp, Homo sapiens
ggagggttaggggtc

SEQ ID NO: 1543958 - DNA, 15 bp, Homo sapiens
gagggttaggggtcg

SEQ ID NO: 1543959 - DNA, 15 bp, Homo sapiens
agggttaggggtcgg

SEQ ID NO: 1543960 - DNA, 15 bp, Homo sapiens
gggttaggggtcggg

SEQ ID NO: 1543961 - DNA, 15 bp, Homo sapiens
ggttaggggtcgggg

SEQ ID NO: 1543962 - DNA, 15 bp, Homo sapiens
gttaggggtcgggga

SEQ ID NO: 1543963 - DNA, 15 bp, Homo sapiens
ttaggggtcggggag

SEQ ID NO: 1543964 - DNA, 15 bp, Homo sapiens
taggggtcggggagg

SEQ ID NO: 1543965 - DNA, 15 bp, Homo sapiens
aggggtcggggaggg

SEQ ID NO: 1543966 - DNA, 15 bp, Homo sapiens
ggggtcggggagggc

SEQ ID NO: 1543967 - DNA, 15 bp, Homo sapiens
gggtcggggagggcg

SEQ ID NO: 1543968 - DNA, 15 bp, Homo sapiens
ggtcggggagggcgt

SEQ ID NO: 1543969 - DNA, 15 bp, Homo sapiens
gtcggggagggcgtg

SEQ ID NO: 1543970 - DNA, 15 bp, Homo sapiens
tcggggagggcgtgc

SEQ ID NO: 1543971 - DNA, 15 bp, Homo sapiens
cggggagggcgtgca

SEQ ID NO: 1543972 - DNA, 15 bp, Homo sapiens
ggggagggcgtgcac

SEQ ID NO: 1543973 - DNA, 15 bp, Homo sapiens
gggagggcgtgcact

SEQ ID NO: 1543974 - DNA, 15 bp, Homo sapiens
ggagggcgtgcactc

SEQ ID NO: 1543975 - DNA, 15 bp, Homo sapiens
gagggcgtgcactcc

SEQ ID NO: 1543976 - DNA, 15 bp, Homo sapiens
agggcgtgcactccc

SEQ ID NO: 1543977 - DNA, 15 bp, Homo sapiens
gggcgtgcactccca

SEQ ID NO: 1543978 - DNA, 15 bp, Homo sapiens
ggcgtgcactcccac

SEQ ID NO: 1543979 - DNA, 15 bp, Homo sapiens
gcgtgcactcccacc

SEQ ID NO: 1543980 - DNA, 15 bp, Homo sapiens
cgtgcactcccaccc

SEQ ID NO: 1543981 - DNA, 15 bp, Homo sapiens
gtgcactcccaccca

SEQ ID NO: 1543982 - DNA, 15 bp, Homo sapiens
tgcactcccacccat

SEQ ID NO: 1543983 - DNA, 15 bp, Homo sapiens
gcactcccacccatg

SEQ ID NO: 1543984 - DNA, 15 bp, Homo sapiens
cactcccacccatgc

SEQ ID NO: 1543985 - DNA, 15 bp, Homo sapiens
actcccacccatgct

SEQ ID NO: 1543986 - DNA, 15 bp, Homo sapiens
ctcccacccatgctc

SEQ ID NO: 1543987 - DNA, 15 bp, Homo sapiens
tcccacccatgctca

SEQ ID NO: 1543988 - DNA, 15 bp, Homo sapiens
cccacccatgctcac

SEQ ID NO: 1543989 - DNA, 15 bp, Homo sapiens
ccacccatgctcaca

SEQ ID NO: 1543990 - DNA, 15 bp, Homo sapiens
cacccatgctcacag

SEQ ID NO: 1543991 - DNA, 15 bp, Homo sapiens
acccatgctcacagc

SEQ ID NO: 1543992 - DNA, 15 bp, Homo sapiens
cccatgctcacagcc

SEQ ID NO: 1543993 - DNA, 15 bp, Homo sapiens
ccatgctcacagcct

SEQ ID NO: 1543994 - DNA, 15 bp, Homo sapiens
catgctcacagcctc

SEQ ID NO: 1543995 - DNA, 15 bp, Homo sapiens
atgctcacagcctcg

SEQ ID NO: 1543996 - DNA, 15 bp, Homo sapiens
tgctcacagcctcgg

SEQ ID NO: 1543997 - DNA, 15 bp, Homo sapiens
gctcacagcctcgga

SEQ ID NO: 1543998 - DNA, 15 bp, Homo sapiens
ctcacagcctcggaa

SEQ ID NO: 1543999 - DNA, 15 bp, Homo sapiens
tcacagcctcggaac

SEQ ID NO: 1544000 - DNA, 15 bp, Homo sapiens
cacagcctcggaaca

SEQ ID NO: 1544001 - DNA, 15 bp, Homo sapiens
acagcctcggaacag

SEQ ID NO: 1544002 - DNA, 15 bp, Homo sapiens
cagcctcggaacagt

SEQ ID NO: 1544003 - DNA, 15 bp, Homo sapiens
agcctcggaacagtg

SEQ ID NO: 1544004 - DNA, 15 bp, Homo sapiens
gcctcggaacagtgc

SEQ ID NO: 1544005 - DNA, 15 bp, Homo sapiens
cctcggaacagtgcc

SEQ ID NO: 1544006 - DNA, 15 bp, Homo sapiens
ctcggaacagtgcct

SEQ ID NO: 1544007 - DNA, 15 bp, Homo sapiens
tcggaacagtgcctg

SEQ ID NO: 1544008 - DNA, 15 bp, Homo sapiens
cggaacagtgcctgc

SEQ ID NO: 1544009 - DNA, 15 bp, Homo sapiens
ggaacagtgcctgct

SEQ ID NO: 1544010 - DNA, 15 bp, Homo sapiens
gaacagtgcctgctc

SEQ ID NO: 1544011 - DNA, 15 bp, Homo sapiens
aacagtgcctgctca

SEQ ID NO: 1544012 - DNA, 15 bp, Homo sapiens
acagtgcctgctcag

SEQ ID NO: 1544013 - DNA, 15 bp, Homo sapiens
cagtgcctgctcagc

SEQ ID NO: 1544014 - DNA, 15 bp, Homo sapiens
agtgcctgctcagcc

SEQ ID NO: 1544015 - DNA, 15 bp, Homo sapiens
gtgcctgctcagcca

SEQ ID NO: 1544016 - DNA, 15 bp, Homo sapiens
tgcctgctcagccaa

SEQ ID NO: 1544017 - DNA, 15 bp, Homo sapiens
gcctgctcagccaac

SEQ ID NO: 1544018 - DNA, 15 bp, Homo sapiens
cctgctcagccaaca

SEQ ID NO: 1544019 - DNA, 15 bp, Homo sapiens
ctgctcagccaacat

SEQ ID NO: 1544020 - DNA, 15 bp, Homo sapiens
tgctcagccaacatg

SEQ ID NO: 1544021 - DNA, 15 bp, Homo sapiens
gctcagccaacatgg

SEQ ID NO: 1544022 - DNA, 15 bp, Homo sapiens
ctcagccaacatggg

SEQ ID NO: 1544023 - DNA, 15 bp, Homo sapiens
tcagccaacatgggt

SEQ ID NO: 1544024 - DNA, 15 bp, Homo sapiens
cagccaacatgggtg

SEQ ID NO: 1544025 - DNA, 15 bp, Homo sapiens
agccaacatgggtgt

SEQ ID NO: 1544026 - DNA, 15 bp, Homo sapiens
gccaacatgggtgtt

SEQ ID NO: 1544027 - DNA, 15 bp, Homo sapiens
ccaacatgggtgttt

SEQ ID NO: 1544028 - DNA, 15 bp, Homo sapiens
caacatgggtgtttg

SEQ ID NO: 1544029 - DNA, 15 bp, Homo sapiens
aacatgggtgtttga

SEQ ID NO: 1544030 - DNA, 15 bp, Homo sapiens
acatgggtgtttgat

SEQ ID NO: 1544031 - DNA, 15 bp, Homo sapiens
catgggtgtttgatt

SEQ ID NO: 1544032 - DNA, 15 bp, Homo sapiens
atgggtgtttgattc

SEQ ID NO: 1544033 - DNA, 15 bp, Homo sapiens
tgggtgtttgattct

SEQ ID NO: 1544034 - DNA, 15 bp, Homo sapiens
gggtgtttgattctg

SEQ ID NO: 1544035 - DNA, 15 bp, Homo sapiens
ggtgtttgattctgt

SEQ ID NO: 1544036 - DNA, 15 bp, Homo sapiens
gtgtttgattctgtg

SEQ ID NO: 1544037 - DNA, 15 bp, Homo sapiens
tgtttgattctgtgt

SEQ ID NO: 1544038 - DNA, 15 bp, Homo sapiens
gtttgattctgtgtc

SEQ ID NO: 1544039 - DNA, 15 bp, Homo sapiens
tttgattctgtgtct

SEQ ID NO: 1544040 - DNA, 15 bp, Homo sapiens
ttgattctgtgtctt

SEQ ID NO: 1544041 - DNA, 15 bp, Homo sapiens
tgattctgtgtcttt

SEQ ID NO: 1544042 - DNA, 15 bp, Homo sapiens
gattctgtgtctttt

SEQ ID NO: 1544043 - DNA, 15 bp, Homo sapiens
attctgtgtcttttg

SEQ ID NO: 1544044 - DNA, 15 bp, Homo sapiens
ttctgtgtcttttgt

SEQ ID NO: 1544045 - DNA, 15 bp, Homo sapiens
tctgtgtcttttgtc

SEQ ID NO: 1544046 - DNA, 15 bp, Homo sapiens
ctgtgtcttttgtca

SEQ ID NO: 1544047 - DNA, 15 bp, Homo sapiens
tgtgtcttttgtcac

SEQ ID NO: 1544048 - DNA, 15 bp, Homo sapiens
gtgtcttttgtcaca

SEQ ID NO: 1544049 - DNA, 15 bp, Homo sapiens
tgtcttttgtcacag

SEQ ID NO: 1544050 - DNA, 15 bp, Homo sapiens
gtcttttgtcacaga

SEQ ID NO: 1544051 - DNA, 15 bp, Homo sapiens
cttttgtcacagact

SEQ ID NO: 1544052 - DNA, 15 bp, Homo sapiens
ttttgtcacagactt

SEQ ID NO: 1544053 - DNA, 15 bp, Homo sapiens
tttgtcacagacttt

SEQ ID NO: 1544054 - DNA, 15 bp, Homo sapiens
ttgtcacagacttta

SEQ ID NO: 1544055 - DNA, 15 bp, Homo sapiens
tgtcacagactttat

SEQ ID NO: 1544056 - DNA, 15 bp, Homo sapiens
gtcacagactttatc

SEQ ID NO: 1544057 - DNA, 15 bp, Homo sapiens
tcacagactttatca

SEQ ID NO: 1544058 - DNA, 15 bp, Homo sapiens
cacagactttatcag

SEQ ID NO: 1544059 - DNA, 15 bp, Homo sapiens
acagactttatcagc

SEQ ID NO: 1544060 - DNA, 15 bp, Homo sapiens
cagactttatcagcc

SEQ ID NO: 1544061 - DNA, 15 bp, Homo sapiens
agactttatcagccc

SEQ ID NO: 1544062 - DNA, 15 bp, Homo sapiens
gactttatcagcccc

SEQ ID NO: 1544063 - DNA, 15 bp, Homo sapiens
actttatcagcccca

SEQ ID NO: 1544064 - DNA, 15 bp, Homo sapiens
ctttatcagccccat

SEQ ID NO: 1544065 - DNA, 15 bp, Homo sapiens
tttatcagccccatc

SEQ ID NO: 1544066 - DNA, 15 bp, Homo sapiens
ttatcagccccatcc

SEQ ID NO: 1544067 - DNA, 15 bp, Homo sapiens
tatcagccccatccc

SEQ ID NO: 1544068 - DNA, 15 bp, Homo sapiens
atcagccccatccct

SEQ ID NO: 1544069 - DNA, 15 bp, Homo sapiens
tcagccccatccctt

SEQ ID NO: 1544070 - DNA, 15 bp, Homo sapiens
cagccccatcccttt

SEQ ID NO: 1544071 - DNA, 15 bp, Homo sapiens
agccccatccctttc

SEQ ID NO: 1544072 - DNA, 15 bp, Homo sapiens
gccccatccctttct

SEQ ID NO: 1544073 - DNA, 15 bp, Homo sapiens
ccccatccctttctg

SEQ ID NO: 1544074 - DNA, 15 bp, Homo sapiens
cccatccctttctga

SEQ ID NO: 1544075 - DNA, 15 bp, Homo sapiens
ccatccctttctgac

SEQ ID NO: 1544076 - DNA, 15 bp, Homo sapiens
catccctttctgacc

SEQ ID NO: 1544077 - DNA, 15 bp, Homo sapiens
atccctttctgacct

SEQ ID NO: 1544078 - DNA, 15 bp, Homo sapiens
tccctttctgacctt

SEQ ID NO: 1544079 - DNA, 15 bp, Homo sapiens
ccctttctgaccttg

SEQ ID NO: 1544080 - DNA, 15 bp, Homo sapiens
cctttctgaccttgc

SEQ ID NO: 1544081 - DNA, 15 bp, Homo sapiens
ctttctgaccttgcc

SEQ ID NO: 1544082 - DNA, 15 bp, Homo sapiens
tttctgaccttgcct

SEQ ID NO: 1544083 - DNA, 15 bp, Homo sapiens
ttctgaccttgcctc

SEQ ID NO: 1544084 - DNA, 15 bp, Homo sapiens
tctgaccttgcctca

SEQ ID NO: 1544085 - DNA, 15 bp, Homo sapiens
ctgaccttgcctcag

SEQ ID NO: 1544086 - DNA, 15 bp, Homo sapiens
tgaccttgcctcagt

SEQ ID NO: 1544087 - DNA, 15 bp, Homo sapiens
gaccttgcctcagtt

SEQ ID NO: 1544088 - DNA, 15 bp, Homo sapiens
accttgcctcagttt

SEQ ID NO: 1544089 - DNA, 15 bp, Homo sapiens
ccttgcctcagttta

SEQ ID NO: 1544090 - DNA, 15 bp, Homo sapiens
cttgcctcagtttaa

SEQ ID NO: 1544091 - DNA, 15 bp, Homo sapiens
ttgcctcagtttaaa

SEQ ID NO: 1544092 - DNA, 15 bp, Homo sapiens
tgcctcagtttaaat

SEQ ID NO: 1544093 - DNA, 15 bp, Homo sapiens
gcctcagtttaaatt

SEQ ID NO: 1544094 - DNA, 15 bp, Homo sapiens
cctcagtttaaattt

SEQ ID NO: 1544095 - DNA, 15 bp, Homo sapiens
ctcagtttaaatttt

SEQ ID NO: 1544096 - DNA, 15 bp, Homo sapiens
tcagtttaaatttta

SEQ ID NO: 1544097 - DNA, 15 bp, Homo sapiens
cagtttaaattttac

SEQ ID NO: 1544098 - DNA, 15 bp, Homo sapiens
agtttaaattttaca

SEQ ID NO: 1544099 - DNA, 15 bp, Homo sapiens
gtttaaattttacat

SEQ ID NO: 1544100 - DNA, 15 bp, Homo sapiens
tttaaattttacatg

SEQ ID NO: 1544101 - DNA, 15 bp, Homo sapiens
ttaaattttacatgt

SEQ ID NO: 1544102 - DNA, 15 bp, Homo sapiens
taaattttacatgtg

SEQ ID NO: 1544103 - DNA, 15 bp, Homo sapiens
aaattttacatgtgg

SEQ ID NO: 1544104 - DNA, 15 bp, Homo sapiens
aattttacatgtggg

SEQ ID NO: 1544105 - DNA, 15 bp, Homo sapiens
attttacatgtgggg

SEQ ID NO: 1544106 - DNA, 15 bp, Homo sapiens
ttttacatgtggggc

SEQ ID NO: 1544107 - DNA, 15 bp, Homo sapiens
tttacatgtggggcc

SEQ ID NO: 1544108 - DNA, 15 bp, Homo sapiens
ttacatgtggggcct

SEQ ID NO: 1544109 - DNA, 15 bp, Homo sapiens
tacatgtggggcctc

SEQ ID NO: 1544110 - DNA, 15 bp, Homo sapiens
acatgtggggcctca

SEQ ID NO: 1544111 - DNA, 15 bp, Homo sapiens
catgtggggcctcat

SEQ ID NO: 1544112 - DNA, 15 bp, Homo sapiens
atgtggggcctcatt

SEQ ID NO: 1544113 - DNA, 15 bp, Homo sapiens
tgtggggcctcatta

SEQ ID NO: 1544114 - DNA, 15 bp, Homo sapiens
gtggggcctcattaa

SEQ ID NO: 1544115 - DNA, 15 bp, Homo sapiens
tggggcctcattaag

SEQ ID NO: 1544116 - DNA, 15 bp, Homo sapiens
ggggcctcattaaga

SEQ ID NO: 1544117 - DNA, 15 bp, Homo sapiens
gggcctcattaagag

SEQ ID NO: 1544118 - DNA, 15 bp, Homo sapiens
ggcctcattaagaga

SEQ ID NO: 1544119 - DNA, 15 bp, Homo sapiens
gcctcattaagagac

SEQ ID NO: 1544120 - DNA, 15 bp, Homo sapiens
cctcattaagagaca

SEQ ID NO: 1544121 - DNA, 15 bp, Homo sapiens
ctcattaagagacat

SEQ ID NO: 1544122 - DNA, 15 bp, Homo sapiens
tcattaagagacatg

SEQ ID NO: 1544123 - DNA, 15 bp, Homo sapiens
cattaagagacatgg

SEQ ID NO: 1544124 - DNA, 15 bp, Homo sapiens
attaagagacatggt

SEQ ID NO: 1544125 - DNA, 15 bp, Homo sapiens
ttaagagacatggtt

SEQ ID NO: 1544126 - DNA, 15 bp, Homo sapiens
taagagacatggttc

SEQ ID NO: 1544127 - DNA, 15 bp, Homo sapiens
aagagacatggttct

SEQ ID NO: 1544128 - DNA, 15 bp, Homo sapiens
agagacatggttctt

SEQ ID NO: 1544129 - DNA, 15 bp, Homo sapiens
gagacatggttctta

SEQ ID NO: 1544130 - DNA, 15 bp, Homo sapiens
agacatggttcttaa

SEQ ID NO: 1544131 - DNA, 15 bp, Homo sapiens
gacatggttcttaac

SEQ ID NO: 1544132 - DNA, 15 bp, Homo sapiens
acatggttcttaact

SEQ ID NO: 1544133 - DNA, 15 bp, Homo sapiens
catggttcttaacta

SEQ ID NO: 1544134 - DNA, 15 bp, Homo sapiens
atggttcttaactaa

SEQ ID NO: 1544135 - DNA, 15 bp, Homo sapiens
tggttcttaactaaa

SEQ ID NO: 1544136 - DNA, 15 bp, Homo sapiens
ggttcttaactaaag

SEQ ID NO: 1544137 - DNA, 15 bp, Homo sapiens
gttcttaactaaaga

SEQ ID NO: 1544138 - DNA, 15 bp, Homo sapiens
ttcttaactaaagat

SEQ ID NO: 1544139 - DNA, 15 bp, Homo sapiens
tcttaactaaagatc

SEQ ID NO: 1544140 - DNA, 15 bp, Homo sapiens
cttaactaaagatct

SEQ ID NO: 1544141 - DNA, 15 bp, Homo sapiens
ttaactaaagatctg

SEQ ID NO: 1544142 - DNA, 15 bp, Homo sapiens
taactaaagatctgt

SEQ ID NO: 1544143 - DNA, 15 bp, Homo sapiens
aactaaagatctgta

SEQ ID NO: 1544144 - DNA, 15 bp, Homo sapiens
actaaagatctgtat

SEQ ID NO: 1544145 - DNA, 15 bp, Homo sapiens
ctaaagatctgtatc

SEQ ID NO: 1544146 - DNA, 15 bp, Homo sapiens
taaagatctgtatcc

SEQ ID NO: 1544147 - DNA, 15 bp, Homo sapiens
aaagatctgtatcca

SEQ ID NO: 1544148 - DNA, 15 bp, Homo sapiens
aagatctgtatccat

SEQ ID NO: 1544149 - DNA, 15 bp, Homo sapiens
agatctgtatccatt

SEQ ID NO: 1544150 - DNA, 15 bp, Homo sapiens
gatctgtatccatta

SEQ ID NO: 1544151 - DNA, 15 bp, Homo sapiens
atctgtatccattag

SEQ ID NO: 1544152 - DNA, 15 bp, Homo sapiens
tctgtatccattagg

SEQ ID NO: 1544153 - DNA, 15 bp, Homo sapiens
ctgtatccattagga

SEQ ID NO: 1544154 - DNA, 15 bp, Homo sapiens
tgtatccattaggaa

SEQ ID NO: 1544155 - DNA, 15 bp, Homo sapiens
gtatccattaggaat

SEQ ID NO: 1544156 - DNA, 15 bp, Homo sapiens
tatccattaggaatg

SEQ ID NO: 1544157 - DNA, 15 bp, Homo sapiens
atccattaggaatgc

SEQ ID NO: 1544158 - DNA, 15 bp, Homo sapiens
tccattaggaatgct

SEQ ID NO: 1544159 - DNA, 15 bp, Homo sapiens
ccattaggaatgctt

SEQ ID NO: 1544160 - DNA, 15 bp, Homo sapiens
cattaggaatgcttt

SEQ ID NO: 1544161 - DNA, 15 bp, Homo sapiens
attaggaatgctttg

SEQ ID NO: 1544162 - DNA, 15 bp, Homo sapiens
ttaggaatgctttgg

SEQ ID NO: 1544163 - DNA, 15 bp, Homo sapiens
taggaatgctttggg

SEQ ID NO: 1544164 - DNA, 15 bp, Homo sapiens
aggaatgctttgggc

SEQ ID NO: 1544165 - DNA, 15 bp, Homo sapiens
ggaatgctttgggct

SEQ ID NO: 1544166 - DNA, 15 bp, Homo sapiens
gaatgctttgggctg

SEQ ID NO: 1544167 - DNA, 15 bp, Homo sapiens
aatgctttgggctgc

SEQ ID NO: 1544168 - DNA, 15 bp, Homo sapiens
atgctttgggctgca

SEQ ID NO: 1544169 - DNA, 15 bp, Homo sapiens
tgctttgggctgcag

SEQ ID NO: 1544170 - DNA, 15 bp, Homo sapiens
gctttgggctgcagg

SEQ ID NO: 1544171 - DNA, 15 bp, Homo sapiens
ctttgggctgcagga

SEQ ID NO: 1544172 - DNA, 15 bp, Homo sapiens
tttgggctgcaggaa

SEQ ID NO: 1544173 - DNA, 15 bp, Homo sapiens
ttgggctgcaggaag

SEQ ID NO: 1544174 - DNA, 15 bp, Homo sapiens
tgggctgcaggaaga

SEQ ID NO: 1544175 - DNA, 15 bp, Homo sapiens
gggctgcaggaagac

SEQ ID NO: 1544176 - DNA, 15 bp, Homo sapiens
ggctgcaggaagaca

SEQ ID NO: 1544177 - DNA, 15 bp, Homo sapiens
gctgcaggaagacaa

SEQ ID NO: 1544178 - DNA, 15 bp, Homo sapiens
ctgcaggaagacaaa

SEQ ID NO: 1544179 - DNA, 15 bp, Homo sapiens
tgcaggaagacaaac

SEQ ID NO: 1544180 - DNA, 15 bp, Homo sapiens
gcaggaagacaaaca

SEQ ID NO: 1544181 - DNA, 15 bp, Homo sapiens
caggaagacaaacac

SEQ ID NO: 1544182 - DNA, 15 bp, Homo sapiens
aggaagacaaacacc

SEQ ID NO: 1544183 - DNA, 15 bp, Homo sapiens
ggaagacaaacacct

SEQ ID NO: 1544184 - DNA, 15 bp, Homo sapiens
gaagacaaacacctg

SEQ ID NO: 1544185 - DNA, 15 bp, Homo sapiens
aagacaaacacctga

SEQ ID NO: 1544186 - DNA, 15 bp, Homo sapiens
agacaaacacctgac

SEQ ID NO: 1544187 - DNA, 15 bp, Homo sapiens
gacaaacacctgact

SEQ ID NO: 1544188 - DNA, 15 bp, Homo sapiens
acaaacacctgactc

SEQ ID NO: 1544189 - DNA, 15 bp, Homo sapiens
caaacacctgactca

SEQ ID NO: 1544190 - DNA, 15 bp, Homo sapiens
aaacacctgactcac

SEQ ID NO: 1544191 - DNA, 15 bp, Homo sapiens
aacacctgactcact

SEQ ID NO: 1544192 - DNA, 15 bp, Homo sapiens
acacctgactcactg

SEQ ID NO: 1544193 - DNA, 15 bp, Homo sapiens
cacctgactcactgt

SEQ ID NO: 1544194 - DNA, 15 bp, Homo sapiens
acctgactcactgtg

SEQ ID NO: 1544195 - DNA, 15 bp, Homo sapiens
cctgactcactgtgg

SEQ ID NO: 1544196 - DNA, 15 bp, Homo sapiens
ctgactcactgtggc

SEQ ID NO: 1544197 - DNA, 15 bp, Homo sapiens
tgactcactgtggca

SEQ ID NO: 1544198 - DNA, 15 bp, Homo sapiens
gactcactgtggcat

SEQ ID NO: 1544199 - DNA, 15 bp, Homo sapiens
actcactgtggcata

SEQ ID NO: 1544200 - DNA, 15 bp, Homo sapiens
ctcactgtggcataa

SEQ ID NO: 1544201 - DNA, 15 bp, Homo sapiens
tcactgtggcataag

SEQ ID NO: 1544202 - DNA, 15 bp, Homo sapiens
cactgtggcataagt

SEQ ID NO: 1544203 - DNA, 15 bp, Homo sapiens
actgtggcataagtg

SEQ ID NO: 1544204 - DNA, 15 bp, Homo sapiens
ctgtggcataagtgg

SEQ ID NO: 1544205 - DNA, 15 bp, Homo sapiens
tgtggcataagtggt

SEQ ID NO: 1544206 - DNA, 15 bp, Homo sapiens
gtggcataagtggtt

SEQ ID NO: 1544207 - DNA, 15 bp, Homo sapiens
tggcataagtggttt

SEQ ID NO: 1544208 - DNA, 15 bp, Homo sapiens
ggcataagtggtttg

SEQ ID NO: 1544209 - DNA, 15 bp, Homo sapiens
gcataagtggtttgc

SEQ ID NO: 1544210 - DNA, 15 bp, Homo sapiens
cataagtggtttgcg

SEQ ID NO: 1544211 - DNA, 15 bp, Homo sapiens
ataagtggtttgcgt

SEQ ID NO: 1544212 - DNA, 15 bp, Homo sapiens
taagtggtttgcgtc

SEQ ID NO: 1544213 - DNA, 15 bp, Homo sapiens
aagtggtttgcgtct

SEQ ID NO: 1544214 - DNA, 15 bp, Homo sapiens
agtggtttgcgtctg

SEQ ID NO: 1544215 - DNA, 15 bp, Homo sapiens
gtggtttgcgtctgc

SEQ ID NO: 1544216 - DNA, 15 bp, Homo sapiens
tggtttgcgtctgct

SEQ ID NO: 1544217 - DNA, 15 bp, Homo sapiens
ggtttgcgtctgctc

SEQ ID NO: 1544218 - DNA, 15 bp, Homo sapiens
gtttgcgtctgctcc

SEQ ID NO: 1544219 - DNA, 15 bp, Homo sapiens
tttgcgtctgctccc

SEQ ID NO: 1544220 - DNA, 15 bp, Homo sapiens
ttgcgtctgctccca

SEQ ID NO: 1544221 - DNA, 15 bp, Homo sapiens
tgcgtctgctcccat

SEQ ID NO: 1544222 - DNA, 15 bp, Homo sapiens
gcgtctgctcccata

SEQ ID NO: 1544223 - DNA, 15 bp, Homo sapiens
cgtctgctcccataa

SEQ ID NO: 1544224 - DNA, 15 bp, Homo sapiens
gtctgctcccataag

SEQ ID NO: 1544225 - DNA, 15 bp, Homo sapiens
tctgctcccataagc

SEQ ID NO: 1544226 - DNA, 15 bp, Homo sapiens
ctgctcccataagct

SEQ ID NO: 1544227 - DNA, 15 bp, Homo sapiens
tgctcccataagctg

SEQ ID NO: 1544228 - DNA, 15 bp, Homo sapiens
gctcccataagctgc

SEQ ID NO: 1544229 - DNA, 15 bp, Homo sapiens
ctcccataagctgca

SEQ ID NO: 1544230 - DNA, 15 bp, Homo sapiens
tcccataagctgcac

SEQ ID NO: 1544231 - DNA, 15 bp, Homo sapiens
cccataagctgcacg

SEQ ID NO: 1544232 - DNA, 15 bp, Homo sapiens
ccataagctgcacgt

SEQ ID NO: 1544233 - DNA, 15 bp, Homo sapiens
cataagctgcacgtg

SEQ ID NO: 1544234 - DNA, 15 bp, Homo sapiens
ataagctgcacgtgg

SEQ ID NO: 1544235 - DNA, 15 bp, Homo sapiens
taagctgcacgtgga

SEQ ID NO: 1544236 - DNA, 15 bp, Homo sapiens
aagctgcacgtggag

SEQ ID NO: 1544237 - DNA, 15 bp, Homo sapiens
agctgcacgtggagg

SEQ ID NO: 1544238 - DNA, 15 bp, Homo sapiens
gctgcacgtggaggg

SEQ ID NO: 1544239 - DNA, 15 bp, Homo sapiens
ctgcacgtggagggt

SEQ ID NO: 1544240 - DNA, 15 bp, Homo sapiens
tgcacgtggagggtg

SEQ ID NO: 1544241 - DNA, 15 bp, Homo sapiens
gcacgtggagggtgg

SEQ ID NO: 1544242 - DNA, 15 bp, Homo sapiens
cacgtggagggtgga

SEQ ID NO: 1544243 - DNA, 15 bp, Homo sapiens
acgtggagggtggat

SEQ ID NO: 1544244 - DNA, 15 bp, Homo sapiens
cgtggagggtggatc

SEQ ID NO: 1544245 - DNA, 15 bp, Homo sapiens
gtggagggtggatct

SEQ ID NO: 1544246 - DNA, 15 bp, Homo sapiens
tggagggtggatctg

SEQ ID NO: 1544247 - DNA, 15 bp, Homo sapiens
ggagggtggatctgg

SEQ ID NO: 1544248 - DNA, 15 bp, Homo sapiens
gagggtggatctggc

SEQ ID NO: 1544249 - DNA, 15 bp, Homo sapiens
agggtggatctggca

SEQ ID NO: 1544250 - DNA, 15 bp, Homo sapiens
gggtggatctggcat

SEQ ID NO: 1544251 - DNA, 15 bp, Homo sapiens
ggtggatctggcatt

SEQ ID NO: 1544252 - DNA, 15 bp, Homo sapiens
gtggatctggcatta

SEQ ID NO: 1544253 - DNA, 15 bp, Homo sapiens
tggatctggcattac

SEQ ID NO: 1544254 - DNA, 15 bp, Homo sapiens
ggatctggcattact

SEQ ID NO: 1544255 - DNA, 15 bp, Homo sapiens
gatctggcattactc

SEQ ID NO: 1544256 - DNA, 15 bp, Homo sapiens
atctggcattactct

SEQ ID NO: 1544257 - DNA, 15 bp, Homo sapiens
tctggcattactctc

SEQ ID NO: 1544258 - DNA, 15 bp, Homo sapiens
ctggcattactctct

SEQ ID NO: 1544259 - DNA, 15 bp, Homo sapiens
tggcattactctctc

SEQ ID NO: 1544260 - DNA, 15 bp, Homo sapiens
ggcattactctctct

SEQ ID NO: 1544261 - DNA, 15 bp, Homo sapiens
gcattactctctctt

SEQ ID NO: 1544262 - DNA, 15 bp, Homo sapiens
cattactctctcttc

SEQ ID NO: 1544263 - DNA, 15 bp, Homo sapiens
attactctctcttcc

SEQ ID NO: 1544264 - DNA, 15 bp, Homo sapiens
ttactctctcttccc

SEQ ID NO: 1544265 - DNA, 15 bp, Homo sapiens
tactctctcttccct

SEQ ID NO: 1544266 - DNA, 15 bp, Homo sapiens
actctctcttcccta

SEQ ID NO: 1544267 - DNA, 15 bp, Homo sapiens
ctctctcttccctac

SEQ ID NO: 1544268 - DNA, 15 bp, Homo sapiens
tctctcttccctaca

SEQ ID NO: 1544269 - DNA, 15 bp, Homo sapiens
ctctcttccctacat

SEQ ID NO: 1544270 - DNA, 15 bp, Homo sapiens
tctcttccctacatt

SEQ ID NO: 1544271 - DNA, 15 bp, Homo sapiens
ctcttccctacattt

SEQ ID NO: 1544272 - DNA, 15 bp, Homo sapiens
tcttccctacatttg

SEQ ID NO: 1544273 - DNA, 15 bp, Homo sapiens
cttccctacatttgc

SEQ ID NO: 1544274 - DNA, 15 bp, Homo sapiens
ttccctacatttgca

SEQ ID NO: 1544275 - DNA, 15 bp, Homo sapiens
tccctacatttgcag

SEQ ID NO: 1544276 - DNA, 15 bp, Homo sapiens
ccctacatttgcagt

SEQ ID NO: 1544277 - DNA, 15 bp, Homo sapiens
cctacatttgcagta

SEQ ID NO: 1544278 - DNA, 15 bp, Homo sapiens
ctacatttgcagtat

SEQ ID NO: 1544279 - DNA, 15 bp, Homo sapiens
tacatttgcagtatg

SEQ ID NO: 1544280 - DNA, 15 bp, Homo sapiens
acatttgcagtatgc

SEQ ID NO: 1544281 - DNA, 15 bp, Homo sapiens
catttgcagtatgct

SEQ ID NO: 1544282 - DNA, 15 bp, Homo sapiens
atttgcagtatgcta

SEQ ID NO: 1544283 - DNA, 15 bp, Homo sapiens
tttgcagtatgctaa

SEQ ID NO: 1544284 - DNA, 15 bp, Homo sapiens
ttgcagtatgctaac

SEQ ID NO: 1544285 - DNA, 15 bp, Homo sapiens
tgcagtatgctaaca

SEQ ID NO: 1544286 - DNA, 15 bp, Homo sapiens
gcagtatgctaacag

SEQ ID NO: 1544287 - DNA, 15 bp, Homo sapiens
cagtatgctaacagc

SEQ ID NO: 1544288 - DNA, 15 bp, Homo sapiens
agtatgctaacagct

SEQ ID NO: 1544289 - DNA, 15 bp, Homo sapiens
gtatgctaacagctt

SEQ ID NO: 1544290 - DNA, 15 bp, Homo sapiens
tatgctaacagcttt

SEQ ID NO: 1544291 - DNA, 15 bp, Homo sapiens
atgctaacagcttta

SEQ ID NO: 1544292 - DNA, 15 bp, Homo sapiens
tgctaacagctttaa

SEQ ID NO: 1544293 - DNA, 15 bp, Homo sapiens
gctaacagctttaac

SEQ ID NO: 1544294 - DNA, 15 bp, Homo sapiens
ctaacagctttaacc

SEQ ID NO: 1544295 - DNA, 15 bp, Homo sapiens
taacagctttaacct

SEQ ID NO: 1544296 - DNA, 15 bp, Homo sapiens
aacagctttaacctc

SEQ ID NO: 1544297 - DNA, 15 bp, Homo sapiens
acagctttaacctcc

SEQ ID NO: 1544298 - DNA, 15 bp, Homo sapiens
cagctttaacctcca

SEQ ID NO: 1544299 - DNA, 15 bp, Homo sapiens
agctttaacctccag

SEQ ID NO: 1544300 - DNA, 15 bp, Homo sapiens
gctttaacctccagc

SEQ ID NO: 1544301 - DNA, 15 bp, Homo sapiens
ctttaacctccagcc

SEQ ID NO: 1544302 - DNA, 15 bp, Homo sapiens
tttaacctccagcct

SEQ ID NO: 1544303 - DNA, 15 bp, Homo sapiens
ttaacctccagcctt

SEQ ID NO: 1544304 - DNA, 15 bp, Homo sapiens
taacctccagccttg

SEQ ID NO: 1544305 - DNA, 15 bp, Homo sapiens
aacctccagccttgt

SEQ ID NO: 1544306 - DNA, 15 bp, Homo sapiens
acctccagccttgtt

SEQ ID NO: 1544307 - DNA, 15 bp, Homo sapiens
cctccagccttgttt

SEQ ID NO: 1544308 - DNA, 15 bp, Homo sapiens
ctccagccttgtttc

SEQ ID NO: 1544309 - DNA, 15 bp, Homo sapiens
tccagccttgtttct

SEQ ID NO: 1544310 - DNA, 15 bp, Homo sapiens
ccagccttgtttctt

SEQ ID NO: 1544311 - DNA, 15 bp, Homo sapiens
cagccttgtttcttc

SEQ ID NO: 1544312 - DNA, 15 bp, Homo sapiens
agccttgtttcttca

SEQ ID NO: 1544313 - DNA, 15 bp, Homo sapiens
gccttgtttcttcat

SEQ ID NO: 1544314 - DNA, 15 bp, Homo sapiens
ccttgtttcttcatg

SEQ ID NO: 1544315 - DNA, 15 bp, Homo sapiens
cttgtttcttcatgg

SEQ ID NO: 1544316 - DNA, 15 bp, Homo sapiens
ttgtttcttcatggt

SEQ ID NO: 1544317 - DNA, 15 bp, Homo sapiens
tgtttcttcatggtt

SEQ ID NO: 1544318 - DNA, 15 bp, Homo sapiens
gtttcttcatggttg

SEQ ID NO: 1544319 - DNA, 15 bp, Homo sapiens
tttcttcatggttgc

SEQ ID NO: 1544320 - DNA, 15 bp, Homo sapiens
ttcttcatggttgca

SEQ ID NO: 1544321 - DNA, 15 bp, Homo sapiens
tcttcatggttgcag

SEQ ID NO: 1544322 - DNA, 15 bp, Homo sapiens
cttcatggttgcagg

SEQ ID NO: 1544323 - DNA, 15 bp, Homo sapiens
ttcatggttgcaggg

SEQ ID NO: 1544324 - DNA, 15 bp, Homo sapiens
tcatggttgcagggt

SEQ ID NO: 1544325 - DNA, 15 bp, Homo sapiens
catggttgcagggtg

SEQ ID NO: 1544326 - DNA, 15 bp, Homo sapiens
atggttgcagggtgg

SEQ ID NO: 1544327 - DNA, 15 bp, Homo sapiens
tggttgcagggtggc

SEQ ID NO: 1544328 - DNA, 15 bp, Homo sapiens
ggttgcagggtggct

SEQ ID NO: 1544329 - DNA, 15 bp, Homo sapiens
gttgcagggtggcta

SEQ ID NO: 1544330 - DNA, 15 bp, Homo sapiens
ttgcagggtggctat

SEQ ID NO: 1544331 - DNA, 15 bp, Homo sapiens
tgcagggtggctatc

SEQ ID NO: 1544332 - DNA, 15 bp, Homo sapiens
gcagggtggctatca

SEQ ID NO: 1544333 - DNA, 15 bp, Homo sapiens
cagggtggctatcac

SEQ ID NO: 1544334 - DNA, 15 bp, Homo sapiens
agggtggctatcaca

SEQ ID NO: 1544335 - DNA, 15 bp, Homo sapiens
gggtggctatcacag

SEQ ID NO: 1544336 - DNA, 15 bp, Homo sapiens
ggtggctatcacagc

SEQ ID NO: 1544337 - DNA, 15 bp, Homo sapiens
gtggctatcacagcg

SEQ ID NO: 1544338 - DNA, 15 bp, Homo sapiens
tggctatcacagcgc

SEQ ID NO: 1544339 - DNA, 15 bp, Homo sapiens
ggctatcacagcgct

SEQ ID NO: 1544340 - DNA, 15 bp, Homo sapiens
gctatcacagcgctg

SEQ ID NO: 1544341 - DNA, 15 bp, Homo sapiens
ctatcacagcgctgg

SEQ ID NO: 1544342 - DNA, 15 bp, Homo sapiens
tatcacagcgctggc

SEQ ID NO: 1544343 - DNA, 15 bp, Homo sapiens
atcacagcgctggcc

SEQ ID NO: 1544344 - DNA, 15 bp, Homo sapiens
tcacagcgctggcca

SEQ ID NO: 1544345 - DNA, 15 bp, Homo sapiens
cacagcgctggccat

SEQ ID NO: 1544346 - DNA, 15 bp, Homo sapiens
acagcgctggccatc

SEQ ID NO: 1544347 - DNA, 15 bp, Homo sapiens
cagcgctggccatca

SEQ ID NO: 1544348 - DNA, 15 bp, Homo sapiens
agcgctggccatcac

SEQ ID NO: 1544349 - DNA, 15 bp, Homo sapiens
gcgctggccatcaca

SEQ ID NO: 1544350 - DNA, 15 bp, Homo sapiens
cgctggccatcacat

SEQ ID NO: 1544351 - DNA, 15 bp, Homo sapiens
gctggccatcacatc

SEQ ID NO: 1544352 - DNA, 15 bp, Homo sapiens
ctggccatcacatcc

SEQ ID NO: 1544353 - DNA, 15 bp, Homo sapiens
tggccatcacatcct

SEQ ID NO: 1544354 - DNA, 15 bp, Homo sapiens
ggccatcacatcctt

SEQ ID NO: 1544355 - DNA, 15 bp, Homo sapiens
gccatcacatcctta

SEQ ID NO: 1544356 - DNA, 15 bp, Homo sapiens
ccatcacatccttac

SEQ ID NO: 1544357 - DNA, 15 bp, Homo sapiens
catcacatccttaca

SEQ ID NO: 1544358 - DNA, 15 bp, Homo sapiens
atcacatccttacac

SEQ ID NO: 1544359 - DNA, 15 bp, Homo sapiens
tcacatccttacaca

SEQ ID NO: 1544360 - DNA, 15 bp, Homo sapiens
cacatccttacacag

SEQ ID NO: 1544361 - DNA, 15 bp, Homo sapiens
acatccttacacagc

SEQ ID NO: 1544362 - DNA, 15 bp, Homo sapiens
catccttacacagct

SEQ ID NO: 1544363 - DNA, 15 bp, Homo sapiens
atccttacacagctg

SEQ ID NO: 1544364 - DNA, 15 bp, Homo sapiens
tccttacacagctgt

SEQ ID NO: 1544365 - DNA, 15 bp, Homo sapiens
ccttacacagctgtg

SEQ ID NO: 1544366 - DNA, 15 bp, Homo sapiens
cttacacagctgtgt

SEQ ID NO: 1544367 - DNA, 15 bp, Homo sapiens
ttacacagctgtgtt

SEQ ID NO: 1544368 - DNA, 15 bp, Homo sapiens
tacacagctgtgttt

SEQ ID NO: 1544369 - DNA, 15 bp, Homo sapiens
acacagctgtgttta

SEQ ID NO: 1544370 - DNA, 15 bp, Homo sapiens
cacagctgtgtttac

SEQ ID NO: 1544371 - DNA, 15 bp, Homo sapiens
acagctgtgtttaca

SEQ ID NO: 1544372 - DNA, 15 bp, Homo sapiens
cagctgtgtttacaa

SEQ ID NO: 1544373 - DNA, 15 bp, Homo sapiens
agctgtgtttacaaa

SEQ ID NO: 1544374 - DNA, 15 bp, Homo sapiens
gctgtgtttacaaat

SEQ ID NO: 1544375 - DNA, 15 bp, Homo sapiens
ctgtgtttacaaatt

SEQ ID NO: 1544376 - DNA, 15 bp, Homo sapiens
tgtgtttacaaattt

SEQ ID NO: 1544377 - DNA, 15 bp, Homo sapiens
gtgtttacaaattta

SEQ ID NO: 1544378 - DNA, 15 bp, Homo sapiens
tgtttacaaatttag

SEQ ID NO: 1544379 - DNA, 15 bp, Homo sapiens
gtttacaaatttagg

SEQ ID NO: 1544380 - DNA, 15 bp, Homo sapiens
tttacaaatttaggg

SEQ ID NO: 1544381 - DNA, 15 bp, Homo sapiens
ttacaaatttagggg

SEQ ID NO: 1544382 - DNA, 15 bp, Homo sapiens
tacaaatttaggggg

SEQ ID NO: 1544383 - DNA, 15 bp, Homo sapiens
acaaatttaggggga

SEQ ID NO: 1544384 - DNA, 15 bp, Homo sapiens
caaatttagggggac

SEQ ID NO: 1544385 - DNA, 15 bp, Homo sapiens
aaatttagggggaca

SEQ ID NO: 1544386 - DNA, 15 bp, Homo sapiens
aatttagggggacat

SEQ ID NO: 1544387 - DNA, 15 bp, Homo sapiens
atttagggggacatt

SEQ ID NO: 1544388 - DNA, 15 bp, Homo sapiens
tttagggggacattg

SEQ ID NO: 1544389 - DNA, 15 bp, Homo sapiens
ttagggggacattga

SEQ ID NO: 1544390 - DNA, 15 bp, Homo sapiens
tagggggacattgaa

SEQ ID NO: 1544391 - DNA, 15 bp, Homo sapiens
agggggacattgaag

SEQ ID NO: 1544392 - DNA, 15 bp, Homo sapiens
gggggacattgaagc

SEQ ID NO: 1544393 - DNA, 15 bp, Homo sapiens
ggggacattgaagct

SEQ ID NO: 1544394 - DNA, 15 bp, Homo sapiens
gggacattgaagctc

SEQ ID NO: 1544395 - DNA, 15 bp, Homo sapiens
ggacattgaagctcc

SEQ ID NO: 1544396 - DNA, 15 bp, Homo sapiens
gacattgaagctcct

SEQ ID NO: 1544397 - DNA, 15 bp, Homo sapiens
acattgaagctcctc

SEQ ID NO: 1544398 - DNA, 15 bp, Homo sapiens
cattgaagctcctcc

SEQ ID NO: 1544399 - DNA, 15 bp, Homo sapiens
attgaagctcctccc

SEQ ID NO: 1544400 - DNA, 15 bp, Homo sapiens
ttgaagctcctcccc

SEQ ID NO: 1544401 - DNA, 15 bp, Homo sapiens
tgaagctcctcccct

SEQ ID NO: 1544402 - DNA, 15 bp, Homo sapiens
gaagctcctcccctg

SEQ ID NO: 1544403 - DNA, 15 bp, Homo sapiens
aagctcctcccctgc

SEQ ID NO: 1544404 - DNA, 15 bp, Homo sapiens
agctcctcccctgct

SEQ ID NO: 1544405 - DNA, 15 bp, Homo sapiens
gctcctcccctgcta

SEQ ID NO: 1544406 - DNA, 15 bp, Homo sapiens
ctcctcccctgctaa

SEQ ID NO: 1544407 - DNA, 15 bp, Homo sapiens
tcctcccctgctaaa

SEQ ID NO: 1544408 - DNA, 15 bp, Homo sapiens
cctcccctgctaaaa

SEQ ID NO: 1544409 - DNA, 15 bp, Homo sapiens
ctcccctgctaaaat

SEQ ID NO: 1544410 - DNA, 15 bp, Homo sapiens
tcccctgctaaaatc

SEQ ID NO: 1544411 - DNA, 15 bp, Homo sapiens
cccctgctaaaatca

SEQ ID NO: 1544412 - DNA, 15 bp, Homo sapiens
ccctgctaaaatcag

SEQ ID NO: 1544413 - DNA, 15 bp, Homo sapiens
ctgctaaaatcaggc

SEQ ID NO: 1544414 - DNA, 15 bp, Homo sapiens
tgctaaaatcaggct

SEQ ID NO: 1544415 - DNA, 15 bp, Homo sapiens
gctaaaatcaggctt

SEQ ID NO: 1544416 - DNA, 15 bp, Homo sapiens
ctaaaatcaggcttc

SEQ ID NO: 1544417 - DNA, 15 bp, Homo sapiens
taaaatcaggcttcc

SEQ ID NO: 1544418 - DNA, 15 bp, Homo sapiens
aaaatcaggcttccc

SEQ ID NO: 1544419 - DNA, 15 bp, Homo sapiens
aaatcaggcttccct

SEQ ID NO: 1544420 - DNA, 15 bp, Homo sapiens
aatcaggcttccctt

SEQ ID NO: 1544421 - DNA, 15 bp, Homo sapiens
atcaggcttcccttc

SEQ ID NO: 1544422 - DNA, 15 bp, Homo sapiens
tcaggcttcccttca

SEQ ID NO: 1544423 - DNA, 15 bp, Homo sapiens
caggcttcccttcac

SEQ ID NO: 1544424 - DNA, 15 bp, Homo sapiens
aggcttcccttcacc

SEQ ID NO: 1544425 - DNA, 15 bp, Homo sapiens
ggcttcccttcacct

SEQ ID NO: 1544426 - DNA, 15 bp, Homo sapiens
gcttcccttcacctg

SEQ ID NO: 1544427 - DNA, 15 bp, Homo sapiens
cttcccttcacctgt

SEQ ID NO: 1544428 - DNA, 15 bp, Homo sapiens
ttcccttcacctgtc

SEQ ID NO: 1544429 - DNA, 15 bp, Homo sapiens
tcccttcacctgtca

SEQ ID NO: 1544430 - DNA, 15 bp, Homo sapiens
cccttcacctgtcat

SEQ ID NO: 1544431 - DNA, 15 bp, Homo sapiens
ccttcacctgtcatt

SEQ ID NO: 1544432 - DNA, 15 bp, Homo sapiens
cttcacctgtcattg

SEQ ID NO: 1544433 - DNA, 15 bp, Homo sapiens
ttcacctgtcattgg

SEQ ID NO: 1544434 - DNA, 15 bp, Homo sapiens
tcacctgtcattggc

SEQ ID NO: 1544435 - DNA, 15 bp, Homo sapiens
cacctgtcattggcc

SEQ ID NO: 1544436 - DNA, 15 bp, Homo sapiens
acctgtcattggcca

SEQ ID NO: 1544437 - DNA, 15 bp, Homo sapiens
cctgtcattggccag

SEQ ID NO: 1544438 - DNA, 15 bp, Homo sapiens
ctgtcattggccaga

SEQ ID NO: 1544439 - DNA, 15 bp, Homo sapiens
tgtcattggccagaa

SEQ ID NO: 1544440 - DNA, 15 bp, Homo sapiens
gtcattggccagaac

SEQ ID NO: 1544441 - DNA, 15 bp, Homo sapiens
tcattggccagaact

SEQ ID NO: 1544442 - DNA, 15 bp, Homo sapiens
cattggccagaactg

SEQ ID NO: 1544443 - DNA, 15 bp, Homo sapiens
attggccagaactgg

SEQ ID NO: 1544444 - DNA, 15 bp, Homo sapiens
ttggccagaactggg

SEQ ID NO: 1544445 - DNA, 15 bp, Homo sapiens
tggccagaactgggt

SEQ ID NO: 1544446 - DNA, 15 bp, Homo sapiens
ggccagaactgggtg

SEQ ID NO: 1544447 - DNA, 15 bp, Homo sapiens
gccagaactgggtga

SEQ ID NO: 1544448 - DNA, 15 bp, Homo sapiens
ccagaactgggtgaa

SEQ ID NO: 1544449 - DNA, 15 bp, Homo sapiens
cagaactgggtgaaa

SEQ ID NO: 1544450 - DNA, 15 bp, Homo sapiens
agaactgggtgaaat

SEQ ID NO: 1544451 - DNA, 15 bp, Homo sapiens
gaactgggtgaaatg

SEQ ID NO: 1544452 - DNA, 15 bp, Homo sapiens
aactgggtgaaatgc

SEQ ID NO: 1544453 - DNA, 15 bp, Homo sapiens
actgggtgaaatgcc

SEQ ID NO: 1544454 - DNA, 15 bp, Homo sapiens
ctgggtgaaatgccc

SEQ ID NO: 1544455 - DNA, 15 bp, Homo sapiens
tgggtgaaatgccca

SEQ ID NO: 1544456 - DNA, 15 bp, Homo sapiens
gggtgaaatgcccaa

SEQ ID NO: 1544457 - DNA, 15 bp, Homo sapiens
ggtgaaatgcccaac

SEQ ID NO: 1544458 - DNA, 15 bp, Homo sapiens
gtgaaatgcccaact

SEQ ID NO: 1544459 - DNA, 15 bp, Homo sapiens
tgaaatgcccaactc

SEQ ID NO: 1544460 - DNA, 15 bp, Homo sapiens
gaaatgcccaactct

SEQ ID NO: 1544461 - DNA, 15 bp, Homo sapiens
aaatgcccaactcta

SEQ ID NO: 1544462 - DNA, 15 bp, Homo sapiens
aatgcccaactctag

SEQ ID NO: 1544463 - DNA, 15 bp, Homo sapiens
atgcccaactctaga

SEQ ID NO: 1544464 - DNA, 15 bp, Homo sapiens
tgcccaactctagac

SEQ ID NO: 1544465 - DNA, 15 bp, Homo sapiens
gcccaactctagacc

SEQ ID NO: 1544466 - DNA, 15 bp, Homo sapiens
cccaactctagaccg

SEQ ID NO: 1544467 - DNA, 15 bp, Homo sapiens
ccaactctagaccga

SEQ ID NO: 1544468 - DNA, 15 bp, Homo sapiens
caactctagaccgat

SEQ ID NO: 1544469 - DNA, 15 bp, Homo sapiens
aactctagaccgatc

SEQ ID NO: 1544470 - DNA, 15 bp, Homo sapiens
actctagaccgatca

SEQ ID NO: 1544471 - DNA, 15 bp, Homo sapiens
ctctagaccgatcat

SEQ ID NO: 1544472 - DNA, 15 bp, Homo sapiens
tctagaccgatcatc

SEQ ID NO: 1544473 - DNA, 15 bp, Homo sapiens
ctagaccgatcatca

SEQ ID NO: 1544474 - DNA, 15 bp, Homo sapiens
tagaccgatcatcag

SEQ ID NO: 1544475 - DNA, 15 bp, Homo sapiens
agaccgatcatcagt

SEQ ID NO: 1544476 - DNA, 15 bp, Homo sapiens
gaccgatcatcagta

SEQ ID NO: 1544477 - DNA, 15 bp, Homo sapiens
accgatcatcagtaa

SEQ ID NO: 1544478 - DNA, 15 bp, Homo sapiens
ccgatcatcagtaag

SEQ ID NO: 1544479 - DNA, 15 bp, Homo sapiens
cgatcatcagtaaga

SEQ ID NO: 1544480 - DNA, 15 bp, Homo sapiens
gatcatcagtaagag

SEQ ID NO: 1544481 - DNA, 15 bp, Homo sapiens
atcatcagtaagagg

SEQ ID NO: 1544482 - DNA, 15 bp, Homo sapiens
tcatcagtaagagga

SEQ ID NO: 1544483 - DNA, 15 bp, Homo sapiens
catcagtaagaggag

SEQ ID NO: 1544484 - DNA, 15 bp, Homo sapiens
atcagtaagaggagt

SEQ ID NO: 1544485 - DNA, 15 bp, Homo sapiens
tcagtaagaggagta

SEQ ID NO: 1544486 - DNA, 15 bp, Homo sapiens
cagtaagaggagtat

SEQ ID NO: 1544487 - DNA, 15 bp, Homo sapiens
agtaagaggagtata

SEQ ID NO: 1544488 - DNA, 15 bp, Homo sapiens
gtaagaggagtatag

SEQ ID NO: 1544489 - DNA, 15 bp, Homo sapiens
taagaggagtataga

SEQ ID NO: 1544490 - DNA, 15 bp, Homo sapiens
aagaggagtatagaa

SEQ ID NO: 1544491 - DNA, 15 bp, Homo sapiens
agaggagtatagaat

SEQ ID NO: 1544492 - DNA, 15 bp, Homo sapiens
gaggagtatagaatt

SEQ ID NO: 1544493 - DNA, 15 bp, Homo sapiens
aggagtatagaattg

SEQ ID NO: 1544494 - DNA, 15 bp, Homo sapiens
ggagtatagaattgc

SEQ ID NO: 1544495 - DNA, 15 bp, Homo sapiens
gagtatagaattgct

SEQ ID NO: 1544496 - DNA, 15 bp, Homo sapiens
agtatagaattgctg

SEQ ID NO: 1544497 - DNA, 15 bp, Homo sapiens
gtatagaattgctgt

SEQ ID NO: 1544498 - DNA, 15 bp, Homo sapiens
tatagaattgctgtg

SEQ ID NO: 1544499 - DNA, 15 bp, Homo sapiens
atagaattgctgtgc

SEQ ID NO: 1544500 - DNA, 15 bp, Homo sapiens
tagaattgctgtgcc

SEQ ID NO: 1544501 - DNA, 15 bp, Homo sapiens
agaattgctgtgccc

SEQ ID NO: 1544502 - DNA, 15 bp, Homo sapiens
gaattgctgtgccca

SEQ ID NO: 1544503 - DNA, 15 bp, Homo sapiens
aattgctgtgcccac

SEQ ID NO: 1544504 - DNA, 15 bp, Homo sapiens
attgctgtgcccacc

SEQ ID NO: 1544505 - DNA, 15 bp, Homo sapiens
ttgctgtgcccacct

SEQ ID NO: 1544506 - DNA, 15 bp, Homo sapiens
tgctgtgcccacctt

SEQ ID NO: 1544507 - DNA, 15 bp, Homo sapiens
gctgtgcccacctta

SEQ ID NO: 1544508 - DNA, 15 bp, Homo sapiens
ctgtgcccaccttag

SEQ ID NO: 1544509 - DNA, 15 bp, Homo sapiens
tgtgcccaccttaga

SEQ ID NO: 1544510 - DNA, 15 bp, Homo sapiens
gtgcccaccttagat

SEQ ID NO: 1544511 - DNA, 15 bp, Homo sapiens
tgcccaccttagatt

SEQ ID NO: 1544512 - DNA, 15 bp, Homo sapiens
gcccaccttagatta

SEQ ID NO: 1544513 - DNA, 15 bp, Homo sapiens
cccaccttagattaa

SEQ ID NO: 1544514 - DNA, 15 bp, Homo sapiens
ccaccttagattaat

SEQ ID NO: 1544515 - DNA, 15 bp, Homo sapiens
caccttagattaatc

SEQ ID NO: 1544516 - DNA, 15 bp, Homo sapiens
accttagattaatca

SEQ ID NO: 1544517 - DNA, 15 bp, Homo sapiens
ccttagattaatcat

SEQ ID NO: 1544518 - DNA, 15 bp, Homo sapiens
cttagattaatcatg

SEQ ID NO: 1544519 - DNA, 15 bp, Homo sapiens
ttagattaatcatgg

SEQ ID NO: 1544520 - DNA, 15 bp, Homo sapiens
tagattaatcatggc

SEQ ID NO: 1544521 - DNA, 15 bp, Homo sapiens
agattaatcatggcg

SEQ ID NO: 1544522 - DNA, 15 bp, Homo sapiens
gattaatcatggcgc

SEQ ID NO: 1544523 - DNA, 15 bp, Homo sapiens
attaatcatggcgca

SEQ ID NO: 1544524 - DNA, 15 bp, Homo sapiens
ttaatcatggcgcaa

SEQ ID NO: 1544525 - DNA, 15 bp, Homo sapiens
taatcatggcgcaat

SEQ ID NO: 1544526 - DNA, 15 bp, Homo sapiens
aatcatggcgcaatg

SEQ ID NO: 1544527 - DNA, 15 bp, Homo sapiens
atcatggcgcaatgt

SEQ ID NO: 1544528 - DNA, 15 bp, Homo sapiens
tcatggcgcaatgtg

SEQ ID NO: 1544529 - DNA, 15 bp, Homo sapiens
catggcgcaatgtgc

SEQ ID NO: 1544530 - DNA, 15 bp, Homo sapiens
atggcgcaatgtgct

SEQ ID NO: 1544531 - DNA, 15 bp, Homo sapiens
tggcgcaatgtgctc

SEQ ID NO: 1544532 - DNA, 15 bp, Homo sapiens
ggcgcaatgtgctcc

SEQ ID NO: 1544533 - DNA, 15 bp, Homo sapiens
gcgcaatgtgctccc

SEQ ID NO: 1544534 - DNA, 15 bp, Homo sapiens
cgcaatgtgctcccc

SEQ ID NO: 1544535 - DNA, 15 bp, Homo sapiens
gcaatgtgctcccca

SEQ ID NO: 1544536 - DNA, 15 bp, Homo sapiens
caatgtgctccccat

SEQ ID NO: 1544537 - DNA, 15 bp, Homo sapiens
aatgtgctccccata

SEQ ID NO: 1544538 - DNA, 15 bp, Homo sapiens
atgtgctccccatac

SEQ ID NO: 1544539 - DNA, 15 bp, Homo sapiens
tgtgctccccatacc

SEQ ID NO: 1544540 - DNA, 15 bp, Homo sapiens
gtgctccccatacca

SEQ ID NO: 1544541 - DNA, 15 bp, Homo sapiens
tgctccccataccaa

SEQ ID NO: 1544542 - DNA, 15 bp, Homo sapiens
gctccccataccaac

SEQ ID NO: 1544543 - DNA, 15 bp, Homo sapiens
ctccccataccaaca

SEQ ID NO: 1544544 - DNA, 15 bp, Homo sapiens
tccccataccaacaa

SEQ ID NO: 1544545 - DNA, 15 bp, Homo sapiens
ccccataccaacaaa

SEQ ID NO: 1544546 - DNA, 15 bp, Homo sapiens
cccataccaacaaaa

SEQ ID NO: 1544547 - DNA, 15 bp, Homo sapiens
ccataccaacaaaat

SEQ ID NO: 1544548 - DNA, 15 bp, Homo sapiens
cataccaacaaaatc

SEQ ID NO: 1544549 - DNA, 15 bp, Homo sapiens
ataccaacaaaatct

SEQ ID NO: 1544550 - DNA, 15 bp, Homo sapiens
taccaacaaaatctg

SEQ ID NO: 1544551 - DNA, 15 bp, Homo sapiens
accaacaaaatctga

SEQ ID NO: 1544552 - DNA, 15 bp, Homo sapiens
ccaacaaaatctgag

SEQ ID NO: 1544553 - DNA, 15 bp, Homo sapiens
caacaaaatctgagt

SEQ ID NO: 1544554 - DNA, 15 bp, Homo sapiens
aacaaaatctgagtt

SEQ ID NO: 1544555 - DNA, 15 bp, Homo sapiens
acaaaatctgagttc

SEQ ID NO: 1544556 - DNA, 15 bp, Homo sapiens
caaaatctgagttct

SEQ ID NO: 1544557 - DNA, 15 bp, Homo sapiens
aaaatctgagttcta

SEQ ID NO: 1544558 - DNA, 15 bp, Homo sapiens
aaatctgagttctag

SEQ ID NO: 1544559 - DNA, 15 bp, Homo sapiens
aatctgagttctaga

SEQ ID NO: 1544560 - DNA, 15 bp, Homo sapiens
atctgagttctagaa

SEQ ID NO: 1544561 - DNA, 15 bp, Homo sapiens
tctgagttctagaaa

SEQ ID NO: 1544562 - DNA, 15 bp, Homo sapiens
ctgagttctagaaac

SEQ ID NO: 1544563 - DNA, 15 bp, Homo sapiens
tgagttctagaaact

SEQ ID NO: 1544564 - DNA, 15 bp, Homo sapiens
gagttctagaaactg

SEQ ID NO: 1544565 - DNA, 15 bp, Homo sapiens
agttctagaaactga

SEQ ID NO: 1544566 - DNA, 15 bp, Homo sapiens
gttctagaaactgag

SEQ ID NO: 1544567 - DNA, 15 bp, Homo sapiens
ttctagaaactgagg

SEQ ID NO: 1544568 - DNA, 15 bp, Homo sapiens
tctagaaactgagga

SEQ ID NO: 1544569 - DNA, 15 bp, Homo sapiens
ctagaaactgaggaa

SEQ ID NO: 1544570 - DNA, 15 bp, Homo sapiens
tagaaactgaggaag

SEQ ID NO: 1544571 - DNA, 15 bp, Homo sapiens
agaaactgaggaaga

SEQ ID NO: 1544572 - DNA, 15 bp, Homo sapiens
gaaactgaggaagaa

SEQ ID NO: 1544573 - DNA, 15 bp, Homo sapiens
aaactgaggaagaag

SEQ ID NO: 1544574 - DNA, 15 bp, Homo sapiens
aactgaggaagaaga

SEQ ID NO: 1544575 - DNA, 15 bp, Homo sapiens
actgaggaagaagag

SEQ ID NO: 1544576 - DNA, 15 bp, Homo sapiens
ctgaggaagaagagg

SEQ ID NO: 1544577 - DNA, 15 bp, Homo sapiens
tgaggaagaagagga

SEQ ID NO: 1544578 - DNA, 15 bp, Homo sapiens
gaggaagaagaggaa

SEQ ID NO: 1544579 - DNA, 15 bp, Homo sapiens
aggaagaagaggaaa

SEQ ID NO: 1544580 - DNA, 15 bp, Homo sapiens
ggaagaagaggaaaa

SEQ ID NO: 1544581 - DNA, 15 bp, Homo sapiens
gaagaagaggaaaat

SEQ ID NO: 1544582 - DNA, 15 bp, Homo sapiens
aagaagaggaaaatg

SEQ ID NO: 1544583 - DNA, 15 bp, Homo sapiens
agaagaggaaaatgg

SEQ ID NO: 1544584 - DNA, 15 bp, Homo sapiens
gaagaggaaaatggc

SEQ ID NO: 1544585 - DNA, 15 bp, Homo sapiens
aagaggaaaatggcc

SEQ ID NO: 1544586 - DNA, 15 bp, Homo sapiens
agaggaaaatggccg

SEQ ID NO: 1544587 - DNA, 15 bp, Homo sapiens
gaggaaaatggccgt

SEQ ID NO: 1544588 - DNA, 15 bp, Homo sapiens
aggaaaatggccgtc

SEQ ID NO: 1544589 - DNA, 15 bp, Homo sapiens
ggaaaatggccgtct

SEQ ID NO: 1544590 - DNA, 15 bp, Homo sapiens
gaaaatggccgtctt

SEQ ID NO: 1544591 - DNA, 15 bp, Homo sapiens
aaaatggccgtcttg

SEQ ID NO: 1544592 - DNA, 15 bp, Homo sapiens
aaatggccgtcttgc

SEQ ID NO: 1544593 - DNA, 15 bp, Homo sapiens
aatggccgtcttgcc

SEQ ID NO: 1544594 - DNA, 15 bp, Homo sapiens
atggccgtcttgcct

SEQ ID NO: 1544595 - DNA, 15 bp, Homo sapiens
tggccgtcttgcctc

SEQ ID NO: 1544596 - DNA, 15 bp, Homo sapiens
ggccgtcttgcctcc

SEQ ID NO: 1544597 - DNA, 15 bp, Homo sapiens
gccgtcttgcctcct

SEQ ID NO: 1544598 - DNA, 15 bp, Homo sapiens
ccgtcttgcctcctg

SEQ ID NO: 1544599 - DNA, 15 bp, Homo sapiens
cgtcttgcctcctgg

SEQ ID NO: 1544600 - DNA, 15 bp, Homo sapiens
gtcttgcctcctggc

SEQ ID NO: 1544601 - DNA, 15 bp, Homo sapiens
tcttgcctcctggct

SEQ ID NO: 1544602 - DNA, 15 bp, Homo sapiens
cttgcctcctggctg

SEQ ID NO: 1544603 - DNA, 15 bp, Homo sapiens
ttgcctcctggctgg

SEQ ID NO: 1544604 - DNA, 15 bp, Homo sapiens
tgcctcctggctggg

SEQ ID NO: 1544605 - DNA, 15 bp, Homo sapiens
gcctcctggctggga

SEQ ID NO: 1544606 - DNA, 15 bp, Homo sapiens
cctcctggctgggat

SEQ ID NO: 1544607 - DNA, 15 bp, Homo sapiens
ctcctggctgggatt

SEQ ID NO: 1544608 - DNA, 15 bp, Homo sapiens
tcctggctgggattc

SEQ ID NO: 1544609 - DNA, 15 bp, Homo sapiens
cctggctgggattca

SEQ ID NO: 1544610 - DNA, 15 bp, Homo sapiens
ctggctgggattcag

SEQ ID NO: 1544611 - DNA, 15 bp, Homo sapiens
tggctgggattcaga

SEQ ID NO: 1544612 - DNA, 15 bp, Homo sapiens
ggctgggattcagag

SEQ ID NO: 1544613 - DNA, 15 bp, Homo sapiens
gctgggattcagagc

SEQ ID NO: 1544614 - DNA, 15 bp, Homo sapiens
ctgggattcagagca

SEQ ID NO: 1544615 - DNA, 15 bp, Homo sapiens
tgggattcagagcat

SEQ ID NO: 1544616 - DNA, 15 bp, Homo sapiens
gggattcagagcatc

SEQ ID NO: 1544617 - DNA, 15 bp, Homo sapiens
ggattcagagcatct

SEQ ID NO: 1544618 - DNA, 15 bp, Homo sapiens
gattcagagcatctc

SEQ ID NO: 1544619 - DNA, 15 bp, Homo sapiens
attcagagcatctcc

SEQ ID NO: 1544620 - DNA, 15 bp, Homo sapiens
ttcagagcatctcca

SEQ ID NO: 1544621 - DNA, 15 bp, Homo sapiens
tcagagcatctccaa

SEQ ID NO: 1544622 - DNA, 15 bp, Homo sapiens
cagagcatctccaac

SEQ ID NO: 1544623 - DNA, 15 bp, Homo sapiens
agagcatctccaacc

SEQ ID NO: 1544624 - DNA, 15 bp, Homo sapiens
gagcatctccaaccc

SEQ ID NO: 1544625 - DNA, 15 bp, Homo sapiens
agcatctccaaccct

SEQ ID NO: 1544626 - DNA, 15 bp, Homo sapiens
gcatctccaaccctc

SEQ ID NO: 1544627 - DNA, 15 bp, Homo sapiens
catctccaaccctct

SEQ ID NO: 1544628 - DNA, 15 bp, Homo sapiens
atctccaaccctctg

SEQ ID NO: 1544629 - DNA, 15 bp, Homo sapiens
tctccaaccctctga

SEQ ID NO: 1544630 - DNA, 15 bp, Homo sapiens
ctccaaccctctgag

SEQ ID NO: 1544631 - DNA, 15 bp, Homo sapiens
tccaaccctctgagc

SEQ ID NO: 1544632 - DNA, 15 bp, Homo sapiens
ccaaccctctgagct

SEQ ID NO: 1544633 - DNA, 15 bp, Homo sapiens
caaccctctgagctt

SEQ ID NO: 1544634 - DNA, 15 bp, Homo sapiens
aaccctctgagctta

SEQ ID NO: 1544635 - DNA, 15 bp, Homo sapiens
accctctgagcttat

SEQ ID NO: 1544636 - DNA, 15 bp, Homo sapiens
ccctctgagcttatg

SEQ ID NO: 1544637 - DNA, 15 bp, Homo sapiens
cctctgagcttatgt

SEQ ID NO: 1544638 - DNA, 15 bp, Homo sapiens
ctctgagcttatgtg

SEQ ID NO: 1544639 - DNA, 15 bp, Homo sapiens
tctgagcttatgtgt

SEQ ID NO: 1544640 - DNA, 15 bp, Homo sapiens
ctgagcttatgtgta

SEQ ID NO: 1544641 - DNA, 15 bp, Homo sapiens
tgagcttatgtgtaa

SEQ ID NO: 1544642 - DNA, 15 bp, Homo sapiens
gagcttatgtgtaag

SEQ ID NO: 1544643 - DNA, 15 bp, Homo sapiens
agcttatgtgtaaga

SEQ ID NO: 1544644 - DNA, 15 bp, Homo sapiens
gcttatgtgtaagac

SEQ ID NO: 1544645 - DNA, 15 bp, Homo sapiens
cttatgtgtaagact

SEQ ID NO: 1544646 - DNA, 15 bp, Homo sapiens
ttatgtgtaagactg

SEQ ID NO: 1544647 - DNA, 15 bp, Homo sapiens
tatgtgtaagactgt

SEQ ID NO: 1544648 - DNA, 15 bp, Homo sapiens
atgtgtaagactgtg

SEQ ID NO: 1544649 - DNA, 15 bp, Homo sapiens
tgtgtaagactgtgg

SEQ ID NO: 1544650 - DNA, 15 bp, Homo sapiens
gtgtaagactgtggg

SEQ ID NO: 1544651 - DNA, 15 bp, Homo sapiens
tgtaagactgtgggc

SEQ ID NO: 1544652 - DNA, 15 bp, Homo sapiens
gtaagactgtgggca

SEQ ID NO: 1544653 - DNA, 15 bp, Homo sapiens
taagactgtgggcaa

SEQ ID NO: 1544654 - DNA, 15 bp, Homo sapiens
aagactgtgggcaaa

SEQ ID NO: 1544655 - DNA, 15 bp, Homo sapiens
agactgtgggcaaaa

SEQ ID NO: 1544656 - DNA, 15 bp, Homo sapiens
gactgtgggcaaaag

SEQ ID NO: 1544657 - DNA, 15 bp, Homo sapiens
actgtgggcaaaagt

SEQ ID NO: 1544658 - DNA, 15 bp, Homo sapiens
ctgtgggcaaaagtg

SEQ ID NO: 1544659 - DNA, 15 bp, Homo sapiens
tgtgggcaaaagtgt

SEQ ID NO: 1544660 - DNA, 15 bp, Homo sapiens
gtgggcaaaagtgtg

SEQ ID NO: 1544661 - DNA, 15 bp, Homo sapiens
tgggcaaaagtgtgt

SEQ ID NO: 1544662 - DNA, 15 bp, Homo sapiens
gggcaaaagtgtgtg

SEQ ID NO: 1544663 - DNA, 15 bp, Homo sapiens
ggcaaaagtgtgtga

SEQ ID NO: 1544664 - DNA, 15 bp, Homo sapiens
gcaaaagtgtgtgag

SEQ ID NO: 1544665 - DNA, 15 bp, Homo sapiens
caaaagtgtgtgagt

SEQ ID NO: 1544666 - DNA, 15 bp, Homo sapiens
aaaagtgtgtgagtt

SEQ ID NO: 1544667 - DNA, 15 bp, Homo sapiens
aaagtgtgtgagttt

SEQ ID NO: 1544668 - DNA, 15 bp, Homo sapiens
aagtgtgtgagtttt

SEQ ID NO: 1544669 - DNA, 15 bp, Homo sapiens
agtgtgtgagttttt

SEQ ID NO: 1544670 - DNA, 15 bp, Homo sapiens
gtgtgtgagtttttg

SEQ ID NO: 1544671 - DNA, 15 bp, Homo sapiens
tgtgtgagtttttgt

SEQ ID NO: 1544672 - DNA, 15 bp, Homo sapiens
gtgtgagtttttgtg

SEQ ID NO: 1544673 - DNA, 15 bp, Homo sapiens
tgtgagtttttgtgg

SEQ ID NO: 1544674 - DNA, 15 bp, Homo sapiens
gtgagtttttgtgga

SEQ ID NO: 1544675 - DNA, 15 bp, Homo sapiens
tgagtttttgtggaa

SEQ ID NO: 1544676 - DNA, 15 bp, Homo sapiens
gagtttttgtggaat

SEQ ID NO: 1544677 - DNA, 15 bp, Homo sapiens
agtttttgtggaatg

SEQ ID NO: 1544678 - DNA, 15 bp, Homo sapiens
gtttttgtggaatgg

SEQ ID NO: 1544679 - DNA, 15 bp, Homo sapiens
tttttgtggaatgga

SEQ ID NO: 1544680 - DNA, 15 bp, Homo sapiens
ttttgtggaatggat

SEQ ID NO: 1544681 - DNA, 15 bp, Homo sapiens
tttgtggaatggatc

SEQ ID NO: 1544682 - DNA, 15 bp, Homo sapiens
ttgtggaatggatcc

SEQ ID NO: 1544683 - DNA, 15 bp, Homo sapiens
tgtggaatggatcca

SEQ ID NO: 1544684 - DNA, 15 bp, Homo sapiens
gtggaatggatccac

SEQ ID NO: 1544685 - DNA, 15 bp, Homo sapiens
tggaatggatccacg

SEQ ID NO: 1544686 - DNA, 15 bp, Homo sapiens
ggaatggatccacgg

SEQ ID NO: 1544687 - DNA, 15 bp, Homo sapiens
gaatggatccacggc

SEQ ID NO: 1544688 - DNA, 15 bp, Homo sapiens
aatggatccacggct

SEQ ID NO: 1544689 - DNA, 15 bp, Homo sapiens
atggatccacggctt

SEQ ID NO: 1544690 - DNA, 15 bp, Homo sapiens
tggatccacggcttt

SEQ ID NO: 1544691 - DNA, 15 bp, Homo sapiens
ggatccacggctttt

SEQ ID NO: 1544692 - DNA, 15 bp, Homo sapiens
gatccacggctttta

SEQ ID NO: 1544693 - DNA, 15 bp, Homo sapiens
atccacggcttttat

SEQ ID NO: 1544694 - DNA, 15 bp, Homo sapiens
tccacggcttttatc

SEQ ID NO: 1544695 - DNA, 15 bp, Homo sapiens
ccacggcttttatca

SEQ ID NO: 1544696 - DNA, 15 bp, Homo sapiens
cacggcttttatcag

SEQ ID NO: 1544697 - DNA, 15 bp, Homo sapiens
acggcttttatcaga

SEQ ID NO: 1544698 - DNA, 15 bp, Homo sapiens
cggcttttatcagag

SEQ ID NO: 1544699 - DNA, 15 bp, Homo sapiens
ggcttttatcagagc

SEQ ID NO: 1544700 - DNA, 15 bp, Homo sapiens
gcttttatcagagca

SEQ ID NO: 1544701 - DNA, 15 bp, Homo sapiens
cttttatcagagcat

SEQ ID NO: 1544702 - DNA, 15 bp, Homo sapiens
ttttatcagagcatc

SEQ ID NO: 1544703 - DNA, 15 bp, Homo sapiens
tttatcagagcatct

SEQ ID NO: 1544704 - DNA, 15 bp, Homo sapiens
ttatcagagcatctt

SEQ ID NO: 1544705 - DNA, 15 bp, Homo sapiens
tatcagagcatcttt

SEQ ID NO: 1544706 - DNA, 15 bp, Homo sapiens
atcagagcatctttc

SEQ ID NO: 1544707 - DNA, 15 bp, Homo sapiens
tcagagcatctttcc

SEQ ID NO: 1544708 - DNA, 15 bp, Homo sapiens
cagagcatctttcct

SEQ ID NO: 1544709 - DNA, 15 bp, Homo sapiens
agagcatctttcctt

SEQ ID NO: 1544710 - DNA, 15 bp, Homo sapiens
gagcatctttccttt

SEQ ID NO: 1544711 - DNA, 15 bp, Homo sapiens
agcatctttcctttt

SEQ ID NO: 1544712 - DNA, 15 bp, Homo sapiens
gcatctttccttttt

SEQ ID NO: 1544713 - DNA, 15 bp, Homo sapiens
catctttcctttttc

SEQ ID NO: 1544714 - DNA, 15 bp, Homo sapiens
atctttcctttttct

SEQ ID NO: 1544715 - DNA, 15 bp, Homo sapiens
tctttcctttttctt

SEQ ID NO: 1544716 - DNA, 15 bp, Homo sapiens
ctttcctttttcttt

SEQ ID NO: 1544717 - DNA, 15 bp, Homo sapiens
tcctttttctttttg

SEQ ID NO: 1544718 - DNA, 15 bp, Homo sapiens
cctttttctttttga

SEQ ID NO: 1544719 - DNA, 15 bp, Homo sapiens
ctttttctttttgat

SEQ ID NO: 1544720 - DNA, 15 bp, Homo sapiens
tttttctttttgatt

SEQ ID NO: 1544721 - DNA, 15 bp, Homo sapiens
tatgttagcagccac

SEQ ID NO: 1544722 - DNA, 15 bp, Homo sapiens
atgttagcagccacg

SEQ ID NO: 1544723 - DNA, 15 bp, Homo sapiens
tgttagcagccacga

SEQ ID NO: 1544724 - DNA, 15 bp, Homo sapiens
gttagcagccacgag

SEQ ID NO: 1544725 - DNA, 15 bp, Homo sapiens
ttagcagccacgagg

SEQ ID NO: 1544726 - DNA, 15 bp, Homo sapiens
tagcagccacgaggc

SEQ ID NO: 1544727 - DNA, 15 bp, Homo sapiens
agcagccacgaggcc

SEQ ID NO: 1544728 - DNA, 15 bp, Homo sapiens
gcagccacgaggcct

SEQ ID NO: 1544729 - DNA, 15 bp, Homo sapiens
cagccacgaggccta

SEQ ID NO: 1544730 - DNA, 15 bp, Homo sapiens
agccacgaggcctat

SEQ ID NO: 1544731 - DNA, 15 bp, Homo sapiens
gccacgaggcctatc

SEQ ID NO: 1544732 - DNA, 15 bp, Homo sapiens
ccacgaggcctatct

SEQ ID NO: 1544733 - DNA, 15 bp, Homo sapiens
cacgaggcctatctc

SEQ ID NO: 1544734 - DNA, 15 bp, Homo sapiens
acgaggcctatctct

SEQ ID NO: 1544735 - DNA, 15 bp, Homo sapiens
cgaggcctatctctc

SEQ ID NO: 1544736 - DNA, 15 bp, Homo sapiens
gaggcctatctctcc

SEQ ID NO: 1544737 - DNA, 15 bp, Homo sapiens
aggcctatctctccc

SEQ ID NO: 1544738 - DNA, 15 bp, Homo sapiens
ggcctatctctcccc

SEQ ID NO: 1544739 - DNA, 15 bp, Homo sapiens
gcctatctctcccca

SEQ ID NO: 1544740 - DNA, 15 bp, Homo sapiens
cctatctctccccac

SEQ ID NO: 1544741 - DNA, 15 bp, Homo sapiens
ctatctctccccaca

SEQ ID NO: 1544742 - DNA, 15 bp, Homo sapiens
tatctctccccacag

SEQ ID NO: 1544743 - DNA, 15 bp, Homo sapiens
atctctccccacagg

SEQ ID NO: 1544744 - DNA, 15 bp, Homo sapiens
tctctccccacaggg

SEQ ID NO: 1544745 - DNA, 15 bp, Homo sapiens
ctctccccacagggc

SEQ ID NO: 1544746 - DNA, 15 bp, Homo sapiens
tctccccacagggca

SEQ ID NO: 1544747 - DNA, 15 bp, Homo sapiens
ctccccacagggcat

SEQ ID NO: 1544748 - DNA, 15 bp, Homo sapiens
tccccacagggcatc

SEQ ID NO: 1544749 - DNA, 15 bp, Homo sapiens
ccccacagggcatcc

SEQ ID NO: 1544750 - DNA, 15 bp, Homo sapiens
cccacagggcatcct

SEQ ID NO: 1544751 - DNA, 15 bp, Homo sapiens
ccacagggcatcctt

SEQ ID NO: 1544752 - DNA, 15 bp, Homo sapiens
cacagggcatccttc

SEQ ID NO: 1544753 - DNA, 15 bp, Homo sapiens
acagggcatccttct

SEQ ID NO: 1544754 - DNA, 15 bp, Homo sapiens
cagggcatccttctc

SEQ ID NO: 1544755 - DNA, 15 bp, Homo sapiens
agggcatccttctca

SEQ ID NO: 1544756 - DNA, 15 bp, Homo sapiens
gggcatccttctcaa

SEQ ID NO: 1544757 - DNA, 15 bp, Homo sapiens
ggcatccttctcaac

SEQ ID NO: 1544758 - DNA, 15 bp, Homo sapiens
gcatccttctcaact

SEQ ID NO: 1544759 - DNA, 15 bp, Homo sapiens
catccttctcaactg

SEQ ID NO: 1544760 - DNA, 15 bp, Homo sapiens
atccttctcaactgg

SEQ ID NO: 1544761 - DNA, 15 bp, Homo sapiens
tccttctcaactgga

SEQ ID NO: 1544762 - DNA, 15 bp, Homo sapiens
ccttctcaactggac

SEQ ID NO: 1544763 - DNA, 15 bp, Homo sapiens
cttctcaactggacc

SEQ ID NO: 1544764 - DNA, 15 bp, Homo sapiens
ttctcaactggacca

SEQ ID NO: 1544765 - DNA, 15 bp, Homo sapiens
tctcaactggaccaa

SEQ ID NO: 1544766 - DNA, 15 bp, Homo sapiens
ctcaactggaccaag

SEQ ID NO: 1544767 - DNA, 15 bp, Homo sapiens
tcaactggaccaagg

SEQ ID NO: 1544768 - DNA, 15 bp, Homo sapiens
caactggaccaaggg

SEQ ID NO: 1544769 - DNA, 15 bp, Homo sapiens
aactggaccaagggc

SEQ ID NO: 1544770 - DNA, 15 bp, Homo sapiens
actggaccaagggct

SEQ ID NO: 1544771 - DNA, 15 bp, Homo sapiens
ctggaccaagggctt

SEQ ID NO: 1544772 - DNA, 15 bp, Homo sapiens
tggaccaagggcttc

SEQ ID NO: 1544773 - DNA, 15 bp, Homo sapiens
ggaccaagggcttca

SEQ ID NO: 1544774 - DNA, 15 bp, Homo sapiens
gaccaagggcttcaa

SEQ ID NO: 1544775 - DNA, 15 bp, Homo sapiens
accaagggcttcaag

SEQ ID NO: 1544776 - DNA, 15 bp, Homo sapiens
ccaagggcttcaagg

SEQ ID NO: 1544777 - DNA, 15 bp, Homo sapiens
caagggcttcaaggc

SEQ ID NO: 1544778 - DNA, 15 bp, Homo sapiens
aagggcttcaaggcc

SEQ ID NO: 1544779 - DNA, 15 bp, Homo sapiens
agggcttcaaggcct

SEQ ID NO: 1544780 - DNA, 15 bp, Homo sapiens
gggcttcaaggcctc

SEQ ID NO: 1544781 - DNA, 15 bp, Homo sapiens
ggcttcaaggcctca

SEQ ID NO: 1544782 - DNA, 15 bp, Homo sapiens
gcttcaaggcctcag

SEQ ID NO: 1544783 - DNA, 15 bp, Homo sapiens
cttcaaggcctcagg

SEQ ID NO: 1544784 - DNA, 15 bp, Homo sapiens
ttcaaggcctcagga

SEQ ID NO: 1544785 - DNA, 15 bp, Homo sapiens
tcaaggcctcaggag

SEQ ID NO: 1544786 - DNA, 15 bp, Homo sapiens
caaggcctcaggagc

SEQ ID NO: 1544787 - DNA, 15 bp, Homo sapiens
aaggcctcaggagca

SEQ ID NO: 1544788 - DNA, 15 bp, Homo sapiens
aggcctcaggagcag

SEQ ID NO: 1544789 - DNA, 15 bp, Homo sapiens
ggcctcaggagcaga

SEQ ID NO: 1544790 - DNA, 15 bp, Homo sapiens
gcctcaggagcagaa

SEQ ID NO: 1544791 - DNA, 15 bp, Homo sapiens
cctcaggagcagaag

SEQ ID NO: 1544792 - DNA, 15 bp, Homo sapiens
ctcaggagcagaagg

SEQ ID NO: 1544793 - DNA, 15 bp, Homo sapiens
tcaggagcagaaggg

SEQ ID NO: 1544794 - DNA, 15 bp, Homo sapiens
caggagcagaaggga

SEQ ID NO: 1544795 - DNA, 15 bp, Homo sapiens
aggagcagaagggaa

SEQ ID NO: 1544796 - DNA, 15 bp, Homo sapiens
ggagcagaagggaac

SEQ ID NO: 1544797 - DNA, 15 bp, Homo sapiens
gagcagaagggaaca

SEQ ID NO: 1544798 - DNA, 15 bp, Homo sapiens
agcagaagggaacaa

SEQ ID NO: 1544799 - DNA, 15 bp, Homo sapiens
gcagaagggaacaat

SEQ ID NO: 1544800 - DNA, 15 bp, Homo sapiens
cagaagggaacaatg

SEQ ID NO: 1544801 - DNA, 15 bp, Homo sapiens
agaagggaacaatgt

SEQ ID NO: 1544802 - DNA, 15 bp, Homo sapiens
gaagggaacaatgtc

SEQ ID NO: 1544803 - DNA, 15 bp, Homo sapiens
aagggaacaatgtcg

SEQ ID NO: 1544804 - DNA, 15 bp, Homo sapiens
agggaacaatgtcgt

SEQ ID NO: 1544805 - DNA, 15 bp, Homo sapiens
gggaacaatgtcgtg

SEQ ID NO: 1544806 - DNA, 15 bp, Homo sapiens
ggaacaatgtcgtgg

SEQ ID NO: 1544807 - DNA, 15 bp, Homo sapiens
gaacaatgtcgtggg

SEQ ID NO: 1544808 - DNA, 15 bp, Homo sapiens
aacaatgtcgtgggg

SEQ ID NO: 1544809 - DNA, 15 bp, Homo sapiens
acaatgtcgtggggc

SEQ ID NO: 1544810 - DNA, 15 bp, Homo sapiens
caatgtcgtggggct

SEQ ID NO: 1544811 - DNA, 15 bp, Homo sapiens
aatgtcgtggggctt

SEQ ID NO: 1544812 - DNA, 15 bp, Homo sapiens
atgtcgtggggcttc

SEQ ID NO: 1544813 - DNA, 15 bp, Homo sapiens
tgtcgtggggcttct

SEQ ID NO: 1544814 - DNA, 15 bp, Homo sapiens
gtcgtggggcttctg

SEQ ID NO: 1544815 - DNA, 15 bp, Homo sapiens
tcgtggggcttctgc

SEQ ID NO: 1544816 - DNA, 15 bp, Homo sapiens
cgtggggcttctgcg

SEQ ID NO: 1544817 - DNA, 15 bp, Homo sapiens
gtggggcttctgcga

SEQ ID NO: 1544818 - DNA, 15 bp, Homo sapiens
tggggcttctgcgag

SEQ ID NO: 1544819 - DNA, 15 bp, Homo sapiens
ggggcttctgcgaga

SEQ ID NO: 1544820 - DNA, 15 bp, Homo sapiens
gggcttctgcgagac

SEQ ID NO: 1544821 - DNA, 15 bp, Homo sapiens
ggcttctgcgagacg

SEQ ID NO: 1544822 - DNA, 15 bp, Homo sapiens
gcttctgcgagacgc

SEQ ID NO: 1544823 - DNA, 15 bp, Homo sapiens
cttctgcgagacgct

SEQ ID NO: 1544824 - DNA, 15 bp, Homo sapiens
ttctgcgagacgcta

SEQ ID NO: 1544825 - DNA, 15 bp, Homo sapiens
tctgcgagacgctat

SEQ ID NO: 1544826 - DNA, 15 bp, Homo sapiens
ctgcgagacgctatc

SEQ ID NO: 1544827 - DNA, 15 bp, Homo sapiens
tgcgagacgctatca

SEQ ID NO: 1544828 - DNA, 15 bp, Homo sapiens
gcgagacgctatcaa

SEQ ID NO: 1544829 - DNA, 15 bp, Homo sapiens
cgagacgctatcaaa

SEQ ID NO: 1544830 - DNA, 15 bp, Homo sapiens
gagacgctatcaaac

SEQ ID NO: 1544831 - DNA, 15 bp, Homo sapiens
agacgctatcaaacg

SEQ ID NO: 1544832 - DNA, 15 bp, Homo sapiens
gacgctatcaaacgg

SEQ ID NO: 1544833 - DNA, 15 bp, Homo sapiens
acgctatcaaacgga

SEQ ID NO: 1544834 - DNA, 15 bp, Homo sapiens
cgctatcaaacggag

SEQ ID NO: 1544835 - DNA, 15 bp, Homo sapiens
gctatcaaacggaga

SEQ ID NO: 1544836 - DNA, 15 bp, Homo sapiens
ctatcaaacggagag

SEQ ID NO: 1544837 - DNA, 15 bp, Homo sapiens
tatcaaacggagagg

SEQ ID NO: 1544838 - DNA, 15 bp, Homo sapiens
atcaaacggagaggg

SEQ ID NO: 1544839 - DNA, 15 bp, Homo sapiens
tcaaacggagagggg

SEQ ID NO: 1544840 - DNA, 15 bp, Homo sapiens
caaacggagaggggt

SEQ ID NO: 1544841 - DNA, 15 bp, Homo sapiens
aaacggagaggggtg

SEQ ID NO: 1544842 - DNA, 15 bp, Homo sapiens
aacggagaggggtga

SEQ ID NO: 1544843 - DNA, 15 bp, Homo sapiens
acggagaggggtgag

SEQ ID NO: 1544844 - DNA, 15 bp, Homo sapiens
cggagaggggtgagg

SEQ ID NO: 1544845 - DNA, 15 bp, Homo sapiens
ggagaggggtgaggg

SEQ ID NO: 1544846 - DNA, 15 bp, Homo sapiens
gagaggggtgagggg

SEQ ID NO: 1544847 - DNA, 15 bp, Homo sapiens
agaggggtgaggggg

SEQ ID NO: 1544848 - DNA, 15 bp, Homo sapiens
gaggggtgagggggc

SEQ ID NO: 1544849 - DNA, 15 bp, Homo sapiens
aggggtgagggggca

SEQ ID NO: 1544850 - DNA, 15 bp, Homo sapiens
ggggtgagggggcac

SEQ ID NO: 1544851 - DNA, 15 bp, Homo sapiens
gggtgagggggcacc

SEQ ID NO: 1544852 - DNA, 15 bp, Homo sapiens
ggtgagggggcacct

SEQ ID NO: 1544853 - DNA, 15 bp, Homo sapiens
gtgagggggcacctg

SEQ ID NO: 1544854 - DNA, 15 bp, Homo sapiens
tgagggggcacctgt

SEQ ID NO: 1544855 - DNA, 15 bp, Homo sapiens
gagggggcacctgta

SEQ ID NO: 1544856 - DNA, 15 bp, Homo sapiens
agggggcacctgtac

SEQ ID NO: 1544857 - DNA, 15 bp, Homo sapiens
gggggcacctgtacc

SEQ ID NO: 1544858 - DNA, 15 bp, Homo sapiens
ggggcacctgtacct

SEQ ID NO: 1544859 - DNA, 15 bp, Homo sapiens
gggcacctgtacctg

SEQ ID NO: 1544860 - DNA, 15 bp, Homo sapiens
ggcacctgtacctgc

SEQ ID NO: 1544861 - DNA, 15 bp, Homo sapiens
gcacctgtacctgcc

SEQ ID NO: 1544862 - DNA, 15 bp, Homo sapiens
cacctgtacctgccg

SEQ ID NO: 1544863 - DNA, 15 bp, Homo sapiens
acctgtacctgccgg

SEQ ID NO: 1544864 - DNA, 15 bp, Homo sapiens
cctgtacctgccggg

SEQ ID NO: 1544865 - DNA, 15 bp, Homo sapiens
ctgtacctgccgggg

SEQ ID NO: 1544866 - DNA, 15 bp, Homo sapiens
tgtacctgccggggg

SEQ ID NO: 1544867 - DNA, 15 bp, Homo sapiens
gtacctgccgggggg

SEQ ID NO: 1544868 - DNA, 15 bp, Homo sapiens
tacctgccggggggg

SEQ ID NO: 1544869 - DNA, 15 bp, Homo sapiens
acctgccgggggggc

SEQ ID NO: 1544870 - DNA, 15 bp, Homo sapiens
cctgccgggggggct

SEQ ID NO: 1544871 - DNA, 15 bp, Homo sapiens
ctgccgggggggctg

SEQ ID NO: 1544872 - DNA, 15 bp, Homo sapiens
tgccgggggggctgc

SEQ ID NO: 1544873 - DNA, 15 bp, Homo sapiens
gccgggggggctgcc

SEQ ID NO: 1544874 - DNA, 15 bp, Homo sapiens
ccgggggggctgccc

SEQ ID NO: 1544875 - DNA, 15 bp, Homo sapiens
cgggggggctgccct

SEQ ID NO: 1544876 - DNA, 15 bp, Homo sapiens
gggggggctgccctg

SEQ ID NO: 1544877 - DNA, 15 bp, Homo sapiens
ggggggctgccctgg

SEQ ID NO: 1544878 - DNA, 15 bp, Homo sapiens
gggggctgccctggg

SEQ ID NO: 1544879 - DNA, 15 bp, Homo sapiens
ggggctgccctgggc

SEQ ID NO: 1544880 - DNA, 15 bp, Homo sapiens
gggctgccctgggcc

SEQ ID NO: 1544881 - DNA, 15 bp, Homo sapiens
ggctgccctgggcca

SEQ ID NO: 1544882 - DNA, 15 bp, Homo sapiens
gctgccctgggccac

SEQ ID NO: 1544883 - DNA, 15 bp, Homo sapiens
ctgccctgggccacc

SEQ ID NO: 1544884 - DNA, 15 bp, Homo sapiens
tgccctgggccaccc

SEQ ID NO: 1544885 - DNA, 15 bp, Homo sapiens
gccctgggccaccca

SEQ ID NO: 1544886 - DNA, 15 bp, Homo sapiens
ccctgggccacccac

SEQ ID NO: 1544887 - DNA, 15 bp, Homo sapiens
cctgggccacccacc

SEQ ID NO: 1544888 - DNA, 15 bp, Homo sapiens
ctgggccacccaccc

SEQ ID NO: 1544889 - DNA, 15 bp, Homo sapiens
tgggccacccacccc

SEQ ID NO: 1544890 - DNA, 15 bp, Homo sapiens
gggccacccacccca

SEQ ID NO: 1544891 - DNA, 15 bp, Homo sapiens
ggccacccaccccag

SEQ ID NO: 1544892 - DNA, 15 bp, Homo sapiens
gccacccaccccagc

SEQ ID NO: 1544893 - DNA, 15 bp, Homo sapiens
ccacccaccccagca

SEQ ID NO: 1544894 - DNA, 15 bp, Homo sapiens
cacccaccccagcac

SEQ ID NO: 1544895 - DNA, 15 bp, Homo sapiens
acccaccccagcact

SEQ ID NO: 1544896 - DNA, 15 bp, Homo sapiens
cccaccccagcactg

SEQ ID NO: 1544897 - DNA, 15 bp, Homo sapiens
ccaccccagcactgc

SEQ ID NO: 1544898 - DNA, 15 bp, Homo sapiens
caccccagcactgcc

SEQ ID NO: 1544899 - DNA, 15 bp, Homo sapiens
accccagcactgcct

SEQ ID NO: 1544900 - DNA, 15 bp, Homo sapiens
ccccagcactgcctg

SEQ ID NO: 1544901 - DNA, 15 bp, Homo sapiens
cccagcactgcctgc

SEQ ID NO: 1544902 - DNA, 15 bp, Homo sapiens
ccagcactgcctgcc

SEQ ID NO: 1544903 - DNA, 15 bp, Homo sapiens
cagcactgcctgcct

SEQ ID NO: 1544904 - DNA, 15 bp, Homo sapiens
agcactgcctgcctt

SEQ ID NO: 1544905 - DNA, 15 bp, Homo sapiens
gcactgcctgccttt

SEQ ID NO: 1544906 - DNA, 15 bp, Homo sapiens
cactgcctgcctttc

SEQ ID NO: 1544907 - DNA, 15 bp, Homo sapiens
actgcctgcctttct

SEQ ID NO: 1544908 - DNA, 15 bp, Homo sapiens
ctgcctgcctttctc

SEQ ID NO: 1544909 - DNA, 15 bp, Homo sapiens
tgcctgcctttctcc

SEQ ID NO: 1544910 - DNA, 15 bp, Homo sapiens
gcctgcctttctcct

SEQ ID NO: 1544911 - DNA, 15 bp, Homo sapiens
cctgcctttctcctt

SEQ ID NO: 1544912 - DNA, 15 bp, Homo sapiens
ctgcctttctccttg

SEQ ID NO: 1544913 - DNA, 15 bp, Homo sapiens
tgcctttctccttgg

SEQ ID NO: 1544914 - DNA, 15 bp, Homo sapiens
gcctttctccttggc

SEQ ID NO: 1544915 - DNA, 15 bp, Homo sapiens
cctttctccttggct

SEQ ID NO: 1544916 - DNA, 15 bp, Homo sapiens
ctttctccttggctt

SEQ ID NO: 1544917 - DNA, 15 bp, Homo sapiens
tttctccttggcttc

SEQ ID NO: 1544918 - DNA, 15 bp, Homo sapiens
ttctccttggcttcc

SEQ ID NO: 1544919 - DNA, 15 bp, Homo sapiens
tctccttggcttcca

SEQ ID NO: 1544920 - DNA, 15 bp, Homo sapiens
ctccttggcttccag

SEQ ID NO: 1544921 - DNA, 15 bp, Homo sapiens
tccttggcttccagc

SEQ ID NO: 1544922 - DNA, 15 bp, Homo sapiens
ccttggcttccagca

SEQ ID NO: 1544923 - DNA, 15 bp, Homo sapiens
cttggcttccagcac

SEQ ID NO: 1544924 - DNA, 15 bp, Homo sapiens
ttggcttccagcact

SEQ ID NO: 1544925 - DNA, 15 bp, Homo sapiens
tggcttccagcactg

SEQ ID NO: 1544926 - DNA, 15 bp, Homo sapiens
ggcttccagcactgc

SEQ ID NO: 1544927 - DNA, 15 bp, Homo sapiens
gcttccagcactgca

SEQ ID NO: 1544928 - DNA, 15 bp, Homo sapiens
cttccagcactgcag

SEQ ID NO: 1544929 - DNA, 15 bp, Homo sapiens
ttccagcactgcagc

SEQ ID NO: 1544930 - DNA, 15 bp, Homo sapiens
tccagcactgcagct

SEQ ID NO: 1544931 - DNA, 15 bp, Homo sapiens
ccagcactgcagctt

SEQ ID NO: 1544932 - DNA, 15 bp, Homo sapiens
cagcactgcagcttc

SEQ ID NO: 1544933 - DNA, 15 bp, Homo sapiens
agcactgcagcttct

SEQ ID NO: 1544934 - DNA, 15 bp, Homo sapiens
gcactgcagcttctg

SEQ ID NO: 1544935 - DNA, 15 bp, Homo sapiens
cactgcagcttctgt

SEQ ID NO: 1544936 - DNA, 15 bp, Homo sapiens
actgcagcttctgtg

SEQ ID NO: 1544937 - DNA, 15 bp, Homo sapiens
ctgcagcttctgtgc

SEQ ID NO: 1544938 - DNA, 15 bp, Homo sapiens
tgcagcttctgtgct

SEQ ID NO: 1544939 - DNA, 15 bp, Homo sapiens
gcagcttctgtgctt

SEQ ID NO: 1544940 - DNA, 15 bp, Homo sapiens
cagcttctgtgcttc

SEQ ID NO: 1544941 - DNA, 15 bp, Homo sapiens
agcttctgtgcttct

SEQ ID NO: 1544942 - DNA, 15 bp, Homo sapiens
gcttctgtgcttctt

SEQ ID NO: 1544943 - DNA, 15 bp, Homo sapiens
cttctgtgcttcttg

SEQ ID NO: 1544944 - DNA, 15 bp, Homo sapiens
ttctgtgcttcttgg

SEQ ID NO: 1544945 - DNA, 15 bp, Homo sapiens
tctgtgcttcttggc

SEQ ID NO: 1544946 - DNA, 15 bp, Homo sapiens
ctgtgcttcttggca

SEQ ID NO: 1544947 - DNA, 15 bp, Homo sapiens
tgtgcttcttggcag

SEQ ID NO: 1544948 - DNA, 15 bp, Homo sapiens
gtgcttcttggcagg

SEQ ID NO: 1544949 - DNA, 15 bp, Homo sapiens
tgcttcttggcagga

SEQ ID NO: 1544950 - DNA, 15 bp, Homo sapiens
gcttcttggcaggac

SEQ ID NO: 1544951 - DNA, 15 bp, Homo sapiens
cttcttggcaggact

SEQ ID NO: 1544952 - DNA, 15 bp, Homo sapiens
ttcttggcaggactt

SEQ ID NO: 1544953 - DNA, 15 bp, Homo sapiens
tcttggcaggacttt

SEQ ID NO: 1544954 - DNA, 15 bp, Homo sapiens
cttggcaggactttg

SEQ ID NO: 1544955 - DNA, 15 bp, Homo sapiens
ttggcaggactttga

SEQ ID NO: 1544956 - DNA, 15 bp, Homo sapiens
tggcaggactttgaa

SEQ ID NO: 1544957 - DNA, 15 bp, Homo sapiens
ggcaggactttgaaa

SEQ ID NO: 1544958 - DNA, 15 bp, Homo sapiens
gcaggactttgaaat

SEQ ID NO: 1544959 - DNA, 15 bp, Homo sapiens
caggactttgaaatg

SEQ ID NO: 1544960 - DNA, 15 bp, Homo sapiens
aggactttgaaatgg

SEQ ID NO: 1544961 - DNA, 15 bp, Homo sapiens
ggactttgaaatgga

SEQ ID NO: 1544962 - DNA, 15 bp, Homo sapiens
gactttgaaatggat

SEQ ID NO: 1544963 - DNA, 15 bp, Homo sapiens
actttgaaatggatg

SEQ ID NO: 1544964 - DNA, 15 bp, Homo sapiens
ctttgaaatggatgt

SEQ ID NO: 1544965 - DNA, 15 bp, Homo sapiens
tttgaaatggatgtg

SEQ ID NO: 1544966 - DNA, 15 bp, Homo sapiens
ttgaaatggatgtgg

SEQ ID NO: 1544967 - DNA, 15 bp, Homo sapiens
tgaaatggatgtggt

SEQ ID NO: 1544968 - DNA, 15 bp, Homo sapiens
gaaatggatgtggtg

SEQ ID NO: 1544969 - DNA, 15 bp, Homo sapiens
aaatggatgtggtgg

SEQ ID NO: 1544970 - DNA, 15 bp, Homo sapiens
aatggatgtggtggc

SEQ ID NO: 1544971 - DNA, 15 bp, Homo sapiens
atggatgtggtggca

SEQ ID NO: 1544972 - DNA, 15 bp, Homo sapiens
tggatgtggtggcaa

SEQ ID NO: 1544973 - DNA, 15 bp, Homo sapiens
ggatgtggtggcaat

SEQ ID NO: 1544974 - DNA, 15 bp, Homo sapiens
gatgtggtggcaatg

SEQ ID NO: 1544975 - DNA, 15 bp, Homo sapiens
atgtggtggcaatgg

SEQ ID NO: 1544976 - DNA, 15 bp, Homo sapiens
tgtggtggcaatggt

SEQ ID NO: 1544977 - DNA, 15 bp, Homo sapiens
gtggtggcaatggtg

SEQ ID NO: 1544978 - DNA, 15 bp, Homo sapiens
tggtggcaatggtga

SEQ ID NO: 1544979 - DNA, 15 bp, Homo sapiens
ggtggcaatggtgaa

SEQ ID NO: 1544980 - DNA, 15 bp, Homo sapiens
gtggcaatggtgaat

SEQ ID NO: 1544981 - DNA, 15 bp, Homo sapiens
tggcaatggtgaatg

SEQ ID NO: 1544982 - DNA, 15 bp, Homo sapiens
ggcaatggtgaatga

SEQ ID NO: 1544983 - DNA, 15 bp, Homo sapiens
gcaatggtgaatgac

SEQ ID NO: 1544984 - DNA, 15 bp, Homo sapiens
caatggtgaatgaca

SEQ ID NO: 1544985 - DNA, 15 bp, Homo sapiens
aatggtgaatgacac

SEQ ID NO: 1544986 - DNA, 15 bp, Homo sapiens
atggtgaatgacacg

SEQ ID NO: 1544987 - DNA, 15 bp, Homo sapiens
tggtgaatgacacgg

SEQ ID NO: 1544988 - DNA, 15 bp, Homo sapiens
ggtgaatgacacggt

SEQ ID NO: 1544989 - DNA, 15 bp, Homo sapiens
gtgaatgacacggtg

SEQ ID NO: 1544990 - DNA, 15 bp, Homo sapiens
tgaatgacacggtgg

SEQ ID NO: 1544991 - DNA, 15 bp, Homo sapiens
gaatgacacggtggc

SEQ ID NO: 1544992 - DNA, 15 bp, Homo sapiens
aatgacacggtggcc

SEQ ID NO: 1544993 - DNA, 15 bp, Homo sapiens
atgacacggtggcca

SEQ ID NO: 1544994 - DNA, 15 bp, Homo sapiens
tgacacggtggccac

SEQ ID NO: 1544995 - DNA, 15 bp, Homo sapiens
gacacggtggccacg

SEQ ID NO: 1544996 - DNA, 15 bp, Homo sapiens
acacggtggccacga

SEQ ID NO: 1544997 - DNA, 15 bp, Homo sapiens
cacggtggccacgat

SEQ ID NO: 1544998 - DNA, 15 bp, Homo sapiens
acggtggccacgatg

SEQ ID NO: 1544999 - DNA, 15 bp, Homo sapiens
cggtggccacgatga

SEQ ID NO: 1545000 - DNA, 15 bp, Homo sapiens
ggtggccacgatgat

SEQ ID NO: 1545001 - DNA, 15 bp, Homo sapiens
gtggccacgatgatc

SEQ ID NO: 1545002 - DNA, 15 bp, Homo sapiens
tggccacgatgatct

SEQ ID NO: 1545003 - DNA, 15 bp, Homo sapiens
ggccacgatgatctc

SEQ ID NO: 1545004 - DNA, 15 bp, Homo sapiens
gccacgatgatctcc

SEQ ID NO: 1545005 - DNA, 15 bp, Homo sapiens
ccacgatgatctcct

SEQ ID NO: 1545006 - DNA, 15 bp, Homo sapiens
cacgatgatctcctg

SEQ ID NO: 1545007 - DNA, 15 bp, Homo sapiens
acgatgatctcctgc

SEQ ID NO: 1545008 - DNA, 15 bp, Homo sapiens
cgatgatctcctgct

SEQ ID NO: 1545009 - DNA, 15 bp, Homo sapiens
gatgatctcctgcta

SEQ ID NO: 1545010 - DNA, 15 bp, Homo sapiens
atgatctcctgctac

SEQ ID NO: 1545011 - DNA, 15 bp, Homo sapiens
tgatctcctgctact

SEQ ID NO: 1545012 - DNA, 15 bp, Homo sapiens
gatctcctgctacta

SEQ ID NO: 1545013 - DNA, 15 bp, Homo sapiens
atctcctgctactac

SEQ ID NO: 1545014 - DNA, 15 bp, Homo sapiens
tctcctgctactacg

SEQ ID NO: 1545015 - DNA, 15 bp, Homo sapiens
ctcctgctactacga

SEQ ID NO: 1545016 - DNA, 15 bp, Homo sapiens
tcctgctactacgaa

SEQ ID NO: 1545017 - DNA, 15 bp, Homo sapiens
cctgctactacgaag

SEQ ID NO: 1545018 - DNA, 15 bp, Homo sapiens
ctgctactacgaaga

SEQ ID NO: 1545019 - DNA, 15 bp, Homo sapiens
tgctactacgaagac

SEQ ID NO: 1545020 - DNA, 15 bp, Homo sapiens
gctactacgaagacc

SEQ ID NO: 1545021 - DNA, 15 bp, Homo sapiens
ctactacgaagacca

SEQ ID NO: 1545022 - DNA, 15 bp, Homo sapiens
tactacgaagaccat

SEQ ID NO: 1545023 - DNA, 15 bp, Homo sapiens
actacgaagaccatc

SEQ ID NO: 1545024 - DNA, 15 bp, Homo sapiens
ctacgaagaccatca

SEQ ID NO: 1545025 - DNA, 15 bp, Homo sapiens
tacgaagaccatcag

SEQ ID NO: 1545026 - DNA, 15 bp, Homo sapiens
acgaagaccatcagt

SEQ ID NO: 1545027 - DNA, 15 bp, Homo sapiens
cgaagaccatcagtg

SEQ ID NO: 1545028 - DNA, 15 bp, Homo sapiens
gaagaccatcagtgc

SEQ ID NO: 1545029 - DNA, 15 bp, Homo sapiens
aagaccatcagtgcg

SEQ ID NO: 1545030 - DNA, 15 bp, Homo sapiens
agaccatcagtgcga

SEQ ID NO: 1545031 - DNA, 15 bp, Homo sapiens
gaccatcagtgcgag

SEQ ID NO: 1545032 - DNA, 15 bp, Homo sapiens
accatcagtgcgagg

SEQ ID NO: 1545033 - DNA, 15 bp, Homo sapiens
ccatcagtgcgaggt

SEQ ID NO: 1545034 - DNA, 15 bp, Homo sapiens
catcagtgcgaggtc

SEQ ID NO: 1545035 - DNA, 15 bp, Homo sapiens
atcagtgcgaggtcg

SEQ ID NO: 1545036 - DNA, 15 bp, Homo sapiens
tcagtgcgaggtcgg

SEQ ID NO: 1545037 - DNA, 15 bp, Homo sapiens
cagtgcgaggtcggc

SEQ ID NO: 1545038 - DNA, 15 bp, Homo sapiens
agtgcgaggtcggca

SEQ ID NO: 1545039 - DNA, 15 bp, Homo sapiens
gtgcgaggtcggcat

SEQ ID NO: 1545040 - DNA, 15 bp, Homo sapiens
tgcgaggtcggcatg

SEQ ID NO: 1545041 - DNA, 15 bp, Homo sapiens
gcgaggtcggcatga

SEQ ID NO: 1545042 - DNA, 15 bp, Homo sapiens
cgaggtcggcatgat

SEQ ID NO: 1545043 - DNA, 15 bp, Homo sapiens
gaggtcggcatgatc

SEQ ID NO: 1545044 - DNA, 15 bp, Homo sapiens
aggtcggcatgatcg

SEQ ID NO: 1545045 - DNA, 15 bp, Homo sapiens
ggtcggcatgatcgt

SEQ ID NO: 1545046 - DNA, 15 bp, Homo sapiens
gtcggcatgatcgtg

SEQ ID NO: 1545047 - DNA, 15 bp, Homo sapiens
tcggcatgatcgtgg

SEQ ID NO: 1545048 - DNA, 15 bp, Homo sapiens
cggcatgatcgtggg

SEQ ID NO: 1545049 - DNA, 15 bp, Homo sapiens
ggcatgatcgtgggt

SEQ ID NO: 1545050 - DNA, 15 bp, Homo sapiens
gcatgatcgtgggta

SEQ ID NO: 1545051 - DNA, 15 bp, Homo sapiens
catgatcgtgggtaa

SEQ ID NO: 1545052 - DNA, 15 bp, Homo sapiens
atgatcgtgggtaag

SEQ ID NO: 1545053 - DNA, 15 bp, Homo sapiens
tgatcgtgggtaagg

SEQ ID NO: 1545054 - DNA, 15 bp, Homo sapiens
gatcgtgggtaaggg

SEQ ID NO: 1545055 - DNA, 15 bp, Homo sapiens
atcgtgggtaagggc

SEQ ID NO: 1545056 - DNA, 15 bp, Homo sapiens
tcgtgggtaagggct

SEQ ID NO: 1545057 - DNA, 15 bp, Homo sapiens
cgtgggtaagggctc

SEQ ID NO: 1545058 - DNA, 15 bp, Homo sapiens
gtgggtaagggctcc

SEQ ID NO: 1545059 - DNA, 15 bp, Homo sapiens
tgggtaagggctcct

SEQ ID NO: 1545060 - DNA, 15 bp, Homo sapiens
gggtaagggctcctt

SEQ ID NO: 1545061 - DNA, 15 bp, Homo sapiens
ggtaagggctccttg

SEQ ID NO: 1545062 - DNA, 15 bp, Homo sapiens
gtaagggctccttgc

SEQ ID NO: 1545063 - DNA, 15 bp, Homo sapiens
taagggctccttgca

SEQ ID NO: 1545064 - DNA, 15 bp, Homo sapiens
aagggctccttgcac

SEQ ID NO: 1545065 - DNA, 15 bp, Homo sapiens
agggctccttgcacc

SEQ ID NO: 1545066 - DNA, 15 bp, Homo sapiens
gggctccttgcaccc

SEQ ID NO: 1545067 - DNA, 15 bp, Homo sapiens
ggctccttgcacccc

SEQ ID NO: 1545068 - DNA, 15 bp, Homo sapiens
gctccttgcacccct

SEQ ID NO: 1545069 - DNA, 15 bp, Homo sapiens
ctccttgcacccctg

SEQ ID NO: 1545070 - DNA, 15 bp, Homo sapiens
tccttgcacccctgc

SEQ ID NO: 1545071 - DNA, 15 bp, Homo sapiens
ccttgcacccctgcc

SEQ ID NO: 1545072 - DNA, 15 bp, Homo sapiens
cttgcacccctgccc

SEQ ID NO: 1545073 - DNA, 15 bp, Homo sapiens
ttgcacccctgcccc

SEQ ID NO: 1545074 - DNA, 15 bp, Homo sapiens
tgcacccctgcccct

SEQ ID NO: 1545075 - DNA, 15 bp, Homo sapiens
gcacccctgcccctt

SEQ ID NO: 1545076 - DNA, 15 bp, Homo sapiens
cacccctgccccttc

SEQ ID NO: 1545077 - DNA, 15 bp, Homo sapiens
acccctgccccttcc

SEQ ID NO: 1545078 - DNA, 15 bp, Homo sapiens
cccctgccccttcca

SEQ ID NO: 1545079 - DNA, 15 bp, Homo sapiens
ccctgccccttccag

SEQ ID NO: 1545080 - DNA, 15 bp, Homo sapiens
cctgccccttccaga

SEQ ID NO: 1545081 - DNA, 15 bp, Homo sapiens
ctgccccttccagac

SEQ ID NO: 1545082 - DNA, 15 bp, Homo sapiens
tgccccttccagact

SEQ ID NO: 1545083 - DNA, 15 bp, Homo sapiens
gccccttccagactg

SEQ ID NO: 1545084 - DNA, 15 bp, Homo sapiens
ccccttccagactgc

SEQ ID NO: 1545085 - DNA, 15 bp, Homo sapiens
cccttccagactgct

SEQ ID NO: 1545086 - DNA, 15 bp, Homo sapiens
ccttccagactgctg

SEQ ID NO: 1545087 - DNA, 15 bp, Homo sapiens
cttccagactgctga

SEQ ID NO: 1545088 - DNA, 15 bp, Homo sapiens
ttccagactgctgag

SEQ ID NO: 1545089 - DNA, 15 bp, Homo sapiens
tccagactgctgagg

SEQ ID NO: 1545090 - DNA, 15 bp, Homo sapiens
ccagactgctgaggc

SEQ ID NO: 1545091 - DNA, 15 bp, Homo sapiens
cagactgctgaggct

SEQ ID NO: 1545092 - DNA, 15 bp, Homo sapiens
agactgctgaggctc

SEQ ID NO: 1545093 - DNA, 15 bp, Homo sapiens
gactgctgaggctcc

SEQ ID NO: 1545094 - DNA, 15 bp, Homo sapiens
actgctgaggctccc

SEQ ID NO: 1545095 - DNA, 15 bp, Homo sapiens
ctgctgaggctccct

SEQ ID NO: 1545096 - DNA, 15 bp, Homo sapiens
tgctgaggctccctg

SEQ ID NO: 1545097 - DNA, 15 bp, Homo sapiens
gctgaggctccctgt

SEQ ID NO: 1545098 - DNA, 15 bp, Homo sapiens
ctgaggctccctgtg

SEQ ID NO: 1545099 - DNA, 15 bp, Homo sapiens
tgaggctccctgtgt

SEQ ID NO: 1545100 - DNA, 15 bp, Homo sapiens
gaggctccctgtgta

SEQ ID NO: 1545101 - DNA, 15 bp, Homo sapiens
aggctccctgtgtac

SEQ ID NO: 1545102 - DNA, 15 bp, Homo sapiens
ggctccctgtgtaca

SEQ ID NO: 1545103 - DNA, 15 bp, Homo sapiens
gctccctgtgtacaa

SEQ ID NO: 1545104 - DNA, 15 bp, Homo sapiens
ctccctgtgtacaac

SEQ ID NO: 1545105 - DNA, 15 bp, Homo sapiens
tccctgtgtacaaca

SEQ ID NO: 1545106 - DNA, 15 bp, Homo sapiens
ccctgtgtacaacag

SEQ ID NO: 1545107 - DNA, 15 bp, Homo sapiens
cctgtgtacaacagg

SEQ ID NO: 1545108 - DNA, 15 bp, Homo sapiens
ctgtgtacaacaggc

SEQ ID NO: 1545109 - DNA, 15 bp, Homo sapiens
tgtgtacaacaggct

SEQ ID NO: 1545110 - DNA, 15 bp, Homo sapiens
gtgtacaacaggctt

SEQ ID NO: 1545111 - DNA, 15 bp, Homo sapiens
tgtacaacaggcttc

SEQ ID NO: 1545112 - DNA, 15 bp, Homo sapiens
gtacaacaggcttca

SEQ ID NO: 1545113 - DNA, 15 bp, Homo sapiens
tacaacaggcttcaa

SEQ ID NO: 1545114 - DNA, 15 bp, Homo sapiens
acaacaggcttcaag

SEQ ID NO: 1545115 - DNA, 15 bp, Homo sapiens
caacaggcttcaagg

SEQ ID NO: 1545116 - DNA, 15 bp, Homo sapiens
aacaggcttcaaggg

SEQ ID NO: 1545117 - DNA, 15 bp, Homo sapiens
acaggcttcaagggc

SEQ ID NO: 1545118 - DNA, 15 bp, Homo sapiens
caggcttcaagggcc

SEQ ID NO: 1545119 - DNA, 15 bp, Homo sapiens
aggcttcaagggccc

SEQ ID NO: 1545120 - DNA, 15 bp, Homo sapiens
ggcttcaagggccct

SEQ ID NO: 1545121 - DNA, 15 bp, Homo sapiens
gcttcaagggccctg

SEQ ID NO: 1545122 - DNA, 15 bp, Homo sapiens
cttcaagggccctgt

SEQ ID NO: 1545123 - DNA, 15 bp, Homo sapiens
ttcaagggccctgtg

SEQ ID NO: 1545124 - DNA, 15 bp, Homo sapiens
tcaagggccctgtgg

SEQ ID NO: 1545125 - DNA, 15 bp, Homo sapiens
caagggccctgtggg

SEQ ID NO: 1545126 - DNA, 15 bp, Homo sapiens
aagggccctgtgggg

SEQ ID NO: 1545127 - DNA, 15 bp, Homo sapiens
agggccctgtggggt

SEQ ID NO: 1545128 - DNA, 15 bp, Homo sapiens
gggccctgtggggtg

SEQ ID NO: 1545129 - DNA, 15 bp, Homo sapiens
ggccctgtggggtga

SEQ ID NO: 1545130 - DNA, 15 bp, Homo sapiens
gccctgtggggtgag

SEQ ID NO: 1545131 - DNA, 15 bp, Homo sapiens
ccctgtggggtgagg

SEQ ID NO: 1545132 - DNA, 15 bp, Homo sapiens
cctgtggggtgagga

SEQ ID NO: 1545133 - DNA, 15 bp, Homo sapiens
ctgtggggtgaggac

SEQ ID NO: 1545134 - DNA, 15 bp, Homo sapiens
tgtggggtgaggacc

SEQ ID NO: 1545135 - DNA, 15 bp, Homo sapiens
gtggggtgaggacca

SEQ ID NO: 1545136 - DNA, 15 bp, Homo sapiens
tggggtgaggaccaa

SEQ ID NO: 1545137 - DNA, 15 bp, Homo sapiens
ggggtgaggaccaaa

SEQ ID NO: 1545138 - DNA, 15 bp, Homo sapiens
gggtgaggaccaaac

SEQ ID NO: 1545139 - DNA, 15 bp, Homo sapiens
ggtgaggaccaaact

SEQ ID NO: 1545140 - DNA, 15 bp, Homo sapiens
gtgaggaccaaacta

SEQ ID NO: 1545141 - DNA, 15 bp, Homo sapiens
tgaggaccaaactac

SEQ ID NO: 1545142 - DNA, 15 bp, Homo sapiens
gaggaccaaactact

SEQ ID NO: 1545143 - DNA, 15 bp, Homo sapiens
aggaccaaactactt

SEQ ID NO: 1545144 - DNA, 15 bp, Homo sapiens
ggaccaaactactta

SEQ ID NO: 1545145 - DNA, 15 bp, Homo sapiens
gaccaaactacttaa

SEQ ID NO: 1545146 - DNA, 15 bp, Homo sapiens
accaaactacttaac

SEQ ID NO: 1545147 - DNA, 15 bp, Homo sapiens
ccaaactacttaaca

SEQ ID NO: 1545148 - DNA, 15 bp, Homo sapiens
caaactacttaacaa

SEQ ID NO: 1545149 - DNA, 15 bp, Homo sapiens
aaactacttaacaac

SEQ ID NO: 1545150 - DNA, 15 bp, Homo sapiens
aactacttaacaacc

SEQ ID NO: 1545151 - DNA, 15 bp, Homo sapiens
actacttaacaaccg

SEQ ID NO: 1545152 - DNA, 15 bp, Homo sapiens
ctacttaacaaccgg

SEQ ID NO: 1545153 - DNA, 15 bp, Homo sapiens
tacttaacaaccggt

SEQ ID NO: 1545154 - DNA, 15 bp, Homo sapiens
acttaacaaccggtg

SEQ ID NO: 1545155 - DNA, 15 bp, Homo sapiens
cttaacaaccggtga

SEQ ID NO: 1545156 - DNA, 15 bp, Homo sapiens
ttaacaaccggtgat

SEQ ID NO: 1545157 - DNA, 15 bp, Homo sapiens
taacaaccggtgatg

SEQ ID NO: 1545158 - DNA, 15 bp, Homo sapiens
aacaaccggtgatgt

SEQ ID NO: 1545159 - DNA, 15 bp, Homo sapiens
acaaccggtgatgtc

SEQ ID NO: 1545160 - DNA, 15 bp, Homo sapiens
caaccggtgatgtca

SEQ ID NO: 1545161 - DNA, 15 bp, Homo sapiens
aaccggtgatgtcag

SEQ ID NO: 1545162 - DNA, 15 bp, Homo sapiens
accggtgatgtcaga

SEQ ID NO: 1545163 - DNA, 15 bp, Homo sapiens
ccggtgatgtcagag

SEQ ID NO: 1545164 - DNA, 15 bp, Homo sapiens
cggtgatgtcagagc

SEQ ID NO: 1545165 - DNA, 15 bp, Homo sapiens
ggtgatgtcagagca

SEQ ID NO: 1545166 - DNA, 15 bp, Homo sapiens
gtgatgtcagagcag

SEQ ID NO: 1545167 - DNA, 15 bp, Homo sapiens
tgatgtcagagcaga

SEQ ID NO: 1545168 - DNA, 15 bp, Homo sapiens
gatgtcagagcagag

SEQ ID NO: 1545169 - DNA, 15 bp, Homo sapiens
atgtcagagcagagc

SEQ ID NO: 1545170 - DNA, 15 bp, Homo sapiens
tgtcagagcagagcc

SEQ ID NO: 1545171 - DNA, 15 bp, Homo sapiens
gtcagagcagagcct

SEQ ID NO: 1545172 - DNA, 15 bp, Homo sapiens
tcagagcagagcctg

SEQ ID NO: 1545173 - DNA, 15 bp, Homo sapiens
cagagcagagcctgg

SEQ ID NO: 1545174 - DNA, 15 bp, Homo sapiens
agagcagagcctggt

SEQ ID NO: 1545175 - DNA, 15 bp, Homo sapiens
agcagagcctggtgc

SEQ ID NO: 1545176 - DNA, 15 bp, Homo sapiens
gcagagcctggtgct

SEQ ID NO: 1545177 - DNA, 15 bp, Homo sapiens
cagagcctggtgcta

SEQ ID NO: 1545178 - DNA, 15 bp, Homo sapiens
agagcctggtgctac

SEQ ID NO: 1545179 - DNA, 15 bp, Homo sapiens
gagcctggtgctaca

SEQ ID NO: 1545180 - DNA, 15 bp, Homo sapiens
agcctggtgctacag

SEQ ID NO: 1545181 - DNA, 15 bp, Homo sapiens
gcctggtgctacagc

SEQ ID NO: 1545182 - DNA, 15 bp, Homo sapiens
cctggtgctacagcc

SEQ ID NO: 1545183 - DNA, 15 bp, Homo sapiens
ctggtgctacagcct

SEQ ID NO: 1545184 - DNA, 15 bp, Homo sapiens
tggtgctacagcctg

SEQ ID NO: 1545185 - DNA, 15 bp, Homo sapiens
ggtgctacagcctgg

SEQ ID NO: 1545186 - DNA, 15 bp, Homo sapiens
gtgctacagcctggg

SEQ ID NO: 1545187 - DNA, 15 bp, Homo sapiens
tgctacagcctgggt

SEQ ID NO: 1545188 - DNA, 15 bp, Homo sapiens
gctacagcctgggtg

SEQ ID NO: 1545189 - DNA, 15 bp, Homo sapiens
ctacagcctgggtgg

SEQ ID NO: 1545190 - DNA, 15 bp, Homo sapiens
tacagcctgggtggt

SEQ ID NO: 1545191 - DNA, 15 bp, Homo sapiens
acagcctgggtggtc

SEQ ID NO: 1545192 - DNA, 15 bp, Homo sapiens
cagcctgggtggtct

SEQ ID NO: 1545193 - DNA, 15 bp, Homo sapiens
agcctgggtggtctt

SEQ ID NO: 1545194 - DNA, 15 bp, Homo sapiens
gcctgggtggtcttg

SEQ ID NO: 1545195 - DNA, 15 bp, Homo sapiens
cctgggtggtcttgg

SEQ ID NO: 1545196 - DNA, 15 bp, Homo sapiens
ctgggtggtcttggg

SEQ ID NO: 1545197 - DNA, 15 bp, Homo sapiens
tgggtggtcttgggg

SEQ ID NO: 1545198 - DNA, 15 bp, Homo sapiens
gggtggtcttggggt

SEQ ID NO: 1545199 - DNA, 15 bp, Homo sapiens
ggtggtcttggggta

SEQ ID NO: 1545200 - DNA, 15 bp, Homo sapiens
gtggtcttggggtat

SEQ ID NO: 1545201 - DNA, 15 bp, Homo sapiens
tggtcttggggtatc

SEQ ID NO: 1545202 - DNA, 15 bp, Homo sapiens
ggtcttggggtatca

SEQ ID NO: 1545203 - DNA, 15 bp, Homo sapiens
gtcttggggtatcaa

SEQ ID NO: 1545204 - DNA, 15 bp, Homo sapiens
tcttggggtatcaag

SEQ ID NO: 1545205 - DNA, 15 bp, Homo sapiens
cttggggtatcaaga

SEQ ID NO: 1545206 - DNA, 15 bp, Homo sapiens
ttggggtatcaagat

SEQ ID NO: 1545207 - DNA, 15 bp, Homo sapiens
tggggtatcaagatg

SEQ ID NO: 1545208 - DNA, 15 bp, Homo sapiens
ggggtatcaagatgg

SEQ ID NO: 1545209 - DNA, 15 bp, Homo sapiens
gggtatcaagatgga

SEQ ID NO: 1545210 - DNA, 15 bp, Homo sapiens
ggtatcaagatggaa

SEQ ID NO: 1545211 - DNA, 15 bp, Homo sapiens
gtatcaagatggaag

SEQ ID NO: 1545212 - DNA, 15 bp, Homo sapiens
tatcaagatggaagc

SEQ ID NO: 1545213 - DNA, 15 bp, Homo sapiens
atcaagatggaagca

SEQ ID NO: 1545214 - DNA, 15 bp, Homo sapiens
tcaagatggaagcac

SEQ ID NO: 1545215 - DNA, 15 bp, Homo sapiens
caagatggaagcacc

SEQ ID NO: 1545216 - DNA, 15 bp, Homo sapiens
aagatggaagcaccg

SEQ ID NO: 1545217 - DNA, 15 bp, Homo sapiens
agatggaagcaccgt

SEQ ID NO: 1545218 - DNA, 15 bp, Homo sapiens
gatggaagcaccgtg

SEQ ID NO: 1545219 - DNA, 15 bp, Homo sapiens
atggaagcaccgtgt

SEQ ID NO: 1545220 - DNA, 15 bp, Homo sapiens
tggaagcaccgtgta

SEQ ID NO: 1545221 - DNA, 15 bp, Homo sapiens
ggaagcaccgtgtac

SEQ ID NO: 1545222 - DNA, 15 bp, Homo sapiens
gaagcaccgtgtaca

SEQ ID NO: 1545223 - DNA, 15 bp, Homo sapiens
aagcaccgtgtacag

SEQ ID NO: 1545224 - DNA, 15 bp, Homo sapiens
agcaccgtgtacagt

SEQ ID NO: 1545225 - DNA, 15 bp, Homo sapiens
gcaccgtgtacagta

SEQ ID NO: 1545226 - DNA, 15 bp, Homo sapiens
caccgtgtacagtag

SEQ ID NO: 1545227 - DNA, 15 bp, Homo sapiens
accgtgtacagtagg

SEQ ID NO: 1545228 - DNA, 15 bp, Homo sapiens
ccgtgtacagtagga

SEQ ID NO: 1545229 - DNA, 15 bp, Homo sapiens
cgtgtacagtaggaa

SEQ ID NO: 1545230 - DNA, 15 bp, Homo sapiens
gtgtacagtaggaag

SEQ ID NO: 1545231 - DNA, 15 bp, Homo sapiens
tgtacagtaggaagc

SEQ ID NO: 1545232 - DNA, 15 bp, Homo sapiens
gtacagtaggaagca

SEQ ID NO: 1545233 - DNA, 15 bp, Homo sapiens
tacagtaggaagcat

SEQ ID NO: 1545234 - DNA, 15 bp, Homo sapiens
acagtaggaagcatt

SEQ ID NO: 1545235 - DNA, 15 bp, Homo sapiens
cagtaggaagcattt

SEQ ID NO: 1545236 - DNA, 15 bp, Homo sapiens
agtaggaagcatttc

SEQ ID NO: 1545237 - DNA, 15 bp, Homo sapiens
gtaggaagcatttca

SEQ ID NO: 1545238 - DNA, 15 bp, Homo sapiens
taggaagcatttcaa

SEQ ID NO: 1545239 - DNA, 15 bp, Homo sapiens
aggaagcatttcaac

SEQ ID NO: 1545240 - DNA, 15 bp, Homo sapiens
ggaagcatttcaacg

SEQ ID NO: 1545241 - DNA, 15 bp, Homo sapiens
gaagcatttcaacgc

SEQ ID NO: 1545242 - DNA, 15 bp, Homo sapiens
aagcatttcaacgcc

SEQ ID NO: 1545243 - DNA, 15 bp, Homo sapiens
agcatttcaacgcca

SEQ ID NO: 1545244 - DNA, 15 bp, Homo sapiens
gcatttcaacgccat

SEQ ID NO: 1545245 - DNA, 15 bp, Homo sapiens
catttcaacgccatg

SEQ ID NO: 1545246 - DNA, 15 bp, Homo sapiens
atttcaacgccatga

SEQ ID NO: 1545247 - DNA, 15 bp, Homo sapiens
tttcaacgccatgat

SEQ ID NO: 1545248 - DNA, 15 bp, Homo sapiens
ttcaacgccatgatg

SEQ ID NO: 1545249 - DNA, 15 bp, Homo sapiens
tcaacgccatgatgc

SEQ ID NO: 1545250 - DNA, 15 bp, Homo sapiens
caacgccatgatgcc

SEQ ID NO: 1545251 - DNA, 15 bp, Homo sapiens
aacgccatgatgcca

SEQ ID NO: 1545252 - DNA, 15 bp, Homo sapiens
acgccatgatgccac

SEQ ID NO: 1545253 - DNA, 15 bp, Homo sapiens
cgccatgatgccaca

SEQ ID NO: 1545254 - DNA, 15 bp, Homo sapiens
gccatgatgccacat

SEQ ID NO: 1545255 - DNA, 15 bp, Homo sapiens
ccatgatgccacatt

SEQ ID NO: 1545256 - DNA, 15 bp, Homo sapiens
catgatgccacattc

SEQ ID NO: 1545257 - DNA, 15 bp, Homo sapiens
atgatgccacattcc

SEQ ID NO: 1545258 - DNA, 15 bp, Homo sapiens
tgatgccacattcct

SEQ ID NO: 1545259 - DNA, 15 bp, Homo sapiens
gatgccacattcctg

SEQ ID NO: 1545260 - DNA, 15 bp, Homo sapiens
atgccacattcctgc

SEQ ID NO: 1545261 - DNA, 15 bp, Homo sapiens
tgccacattcctgca

SEQ ID NO: 1545262 - DNA, 15 bp, Homo sapiens
gccacattcctgcat

SEQ ID NO: 1545263 - DNA, 15 bp, Homo sapiens
ccacattcctgcatc

SEQ ID NO: 1545264 - DNA, 15 bp, Homo sapiens
cacattcctgcatca

SEQ ID NO: 1545265 - DNA, 15 bp, Homo sapiens
acattcctgcatcag

SEQ ID NO: 1545266 - DNA, 15 bp, Homo sapiens
cattcctgcatcaga

SEQ ID NO: 1545267 - DNA, 15 bp, Homo sapiens
attcctgcatcagat

SEQ ID NO: 1545268 - DNA, 15 bp, Homo sapiens
ttcctgcatcagatg

SEQ ID NO: 1545269 - DNA, 15 bp, Homo sapiens
tcctgcatcagatgg

SEQ ID NO: 1545270 - DNA, 15 bp, Homo sapiens
cctgcatcagatggt

SEQ ID NO: 1545271 - DNA, 15 bp, Homo sapiens
ctgcatcagatggta

SEQ ID NO: 1545272 - DNA, 15 bp, Homo sapiens
tgcatcagatggtat

SEQ ID NO: 1545273 - DNA, 15 bp, Homo sapiens
gcatcagatggtatg

SEQ ID NO: 1545274 - DNA, 15 bp, Homo sapiens
catcagatggtatgc

SEQ ID NO: 1545275 - DNA, 15 bp, Homo sapiens
atcagatggtatgcc

SEQ ID NO: 1545276 - DNA, 15 bp, Homo sapiens
tcagatggtatgcca

SEQ ID NO: 1545277 - DNA, 15 bp, Homo sapiens
cagatggtatgccag

SEQ ID NO: 1545278 - DNA, 15 bp, Homo sapiens
agatggtatgccagc

SEQ ID NO: 1545279 - DNA, 15 bp, Homo sapiens
gatggtatgccagct

SEQ ID NO: 1545280 - DNA, 15 bp, Homo sapiens
atggtatgccagctg

SEQ ID NO: 1545281 - DNA, 15 bp, Homo sapiens
tggtatgccagctgc

SEQ ID NO: 1545282 - DNA, 15 bp, Homo sapiens
ggtatgccagctgca

SEQ ID NO: 1545283 - DNA, 15 bp, Homo sapiens
gtatgccagctgcat

SEQ ID NO: 1545284 - DNA, 15 bp, Homo sapiens
tatgccagctgcata

SEQ ID NO: 1545285 - DNA, 15 bp, Homo sapiens
atgccagctgcatat

SEQ ID NO: 1545286 - DNA, 15 bp, Homo sapiens
tgccagctgcatatc

SEQ ID NO: 1545287 - DNA, 15 bp, Homo sapiens
gccagctgcatatcc

SEQ ID NO: 1545288 - DNA, 15 bp, Homo sapiens
ccagctgcatatcca

SEQ ID NO: 1545289 - DNA, 15 bp, Homo sapiens
cagctgcatatccac

SEQ ID NO: 1545290 - DNA, 15 bp, Homo sapiens
agctgcatatccacc

SEQ ID NO: 1545291 - DNA, 15 bp, Homo sapiens
gctgcatatccacct

SEQ ID NO: 1545292 - DNA, 15 bp, Homo sapiens
ctgcatatccacctc

SEQ ID NO: 1545293 - DNA, 15 bp, Homo sapiens
tgcatatccacctca

SEQ ID NO: 1545294 - DNA, 15 bp, Homo sapiens
gcatatccacctcac

SEQ ID NO: 1545295 - DNA, 15 bp, Homo sapiens
catatccacctcacc

SEQ ID NO: 1545296 - DNA, 15 bp, Homo sapiens
atatccacctcaccc

SEQ ID NO: 1545297 - DNA, 15 bp, Homo sapiens
tatccacctcaccca

SEQ ID NO: 1545298 - DNA, 15 bp, Homo sapiens
atccacctcacccat

SEQ ID NO: 1545299 - DNA, 15 bp, Homo sapiens
tccacctcacccatc

SEQ ID NO: 1545300 - DNA, 15 bp, Homo sapiens
ccacctcacccatca

SEQ ID NO: 1545301 - DNA, 15 bp, Homo sapiens
cacctcacccatcag

SEQ ID NO: 1545302 - DNA, 15 bp, Homo sapiens
acctcacccatcagg

SEQ ID NO: 1545303 - DNA, 15 bp, Homo sapiens
cctcacccatcagga

SEQ ID NO: 1545304 - DNA, 15 bp, Homo sapiens
ctcacccatcaggat

SEQ ID NO: 1545305 - DNA, 15 bp, Homo sapiens
tcacccatcaggatt

SEQ ID NO: 1545306 - DNA, 15 bp, Homo sapiens
cacccatcaggatta

SEQ ID NO: 1545307 - DNA, 15 bp, Homo sapiens
acccatcaggattat

SEQ ID NO: 1545308 - DNA, 15 bp, Homo sapiens
cccatcaggattata

SEQ ID NO: 1545309 - DNA, 15 bp, Homo sapiens
ccatcaggattataa

SEQ ID NO: 1545310 - DNA, 15 bp, Homo sapiens
catcaggattataat

SEQ ID NO: 1545311 - DNA, 15 bp, Homo sapiens
atcaggattataatt

SEQ ID NO: 1545312 - DNA, 15 bp, Homo sapiens
tcaggattataatta

SEQ ID NO: 1545313 - DNA, 15 bp, Homo sapiens
caggattataattaa

SEQ ID NO: 1545314 - DNA, 15 bp, Homo sapiens
aggattataattaaa

SEQ ID NO: 1545315 - DNA, 15 bp, Homo sapiens
ggattataattaaaa

SEQ ID NO: 1545316 - DNA, 15 bp, Homo sapiens
gattataattaaaac

SEQ ID NO: 1545317 - DNA, 15 bp, Homo sapiens
attataattaaaaca

SEQ ID NO: 1545318 - DNA, 15 bp, Homo sapiens
ttataattaaaacac

SEQ ID NO: 1545319 - DNA, 15 bp, Homo sapiens
tataattaaaacact

SEQ ID NO: 1545320 - DNA, 15 bp, Homo sapiens
ataattaaaacactt

SEQ ID NO: 1545321 - DNA, 15 bp, Homo sapiens
taattaaaacactta

SEQ ID NO: 1545322 - DNA, 15 bp, Homo sapiens
aattaaaacacttat

SEQ ID NO: 1545323 - DNA, 15 bp, Homo sapiens
attaaaacacttatc

SEQ ID NO: 1545324 - DNA, 15 bp, Homo sapiens
ttaaaacacttatct

SEQ ID NO: 1545325 - DNA, 15 bp, Homo sapiens
taaaacacttatctg

SEQ ID NO: 1545326 - DNA, 15 bp, Homo sapiens
aaaacacttatctgg

SEQ ID NO: 1545327 - DNA, 15 bp, Homo sapiens
aaacacttatctggt

SEQ ID NO: 1545328 - DNA, 15 bp, Homo sapiens
aacacttatctggta

SEQ ID NO: 1545329 - DNA, 15 bp, Homo sapiens
acacttatctggtaa

SEQ ID NO: 1545330 - DNA, 15 bp, Homo sapiens
cacttatctggtaaa

SEQ ID NO: 1545331 - DNA, 15 bp, Homo sapiens
acttatctggtaaat

SEQ ID NO: 1545332 - DNA, 15 bp, Homo sapiens
cttatctggtaaatt

SEQ ID NO: 1545333 - DNA, 15 bp, Homo sapiens
ttatctggtaaattg

SEQ ID NO: 1545334 - DNA, 15 bp, Homo sapiens
tatctggtaaattga

SEQ ID NO: 1545335 - DNA, 15 bp, Homo sapiens
atctggtaaattgac

SEQ ID NO: 1545336 - DNA, 15 bp, Homo sapiens
tctggtaaattgacc

SEQ ID NO: 1545337 - DNA, 15 bp, Homo sapiens
ctggtaaattgacca

SEQ ID NO: 1545338 - DNA, 15 bp, Homo sapiens
tggtaaattgaccaa

SEQ ID NO: 1545339 - DNA, 15 bp, Homo sapiens
ggtaaattgaccaac

SEQ ID NO: 1545340 - DNA, 15 bp, Homo sapiens
gtaaattgaccaact

SEQ ID NO: 1545341 - DNA, 15 bp, Homo sapiens
taaattgaccaactg

SEQ ID NO: 1545342 - DNA, 15 bp, Homo sapiens
aaattgaccaactgg

SEQ ID NO: 1545343 - DNA, 15 bp, Homo sapiens
aattgaccaactgga

SEQ ID NO: 1545344 - DNA, 15 bp, Homo sapiens
attgaccaactggac

SEQ ID NO: 1545345 - DNA, 15 bp, Homo sapiens
ttgaccaactggaca

SEQ ID NO: 1545346 - DNA, 15 bp, Homo sapiens
tgaccaactggacag

SEQ ID NO: 1545347 - DNA, 15 bp, Homo sapiens
gaccaactggacaga

SEQ ID NO: 1545348 - DNA, 15 bp, Homo sapiens
accaactggacagat

SEQ ID NO: 1545349 - DNA, 15 bp, Homo sapiens
ccaactggacagatt

SEQ ID NO: 1545350 - DNA, 15 bp, Homo sapiens
caactggacagattg

SEQ ID NO: 1545351 - DNA, 15 bp, Homo sapiens
aactggacagattgg

SEQ ID NO: 1545352 - DNA, 15 bp, Homo sapiens
actggacagattggt

SEQ ID NO: 1545353 - DNA, 15 bp, Homo sapiens
ctggacagattggtc

SEQ ID NO: 1545354 - DNA, 15 bp, Homo sapiens
tggacagattggtcc

SEQ ID NO: 1545355 - DNA, 15 bp, Homo sapiens
ggacagattggtcca

SEQ ID NO: 1545356 - DNA, 15 bp, Homo sapiens
gacagattggtccaa

SEQ ID NO: 1545357 - DNA, 15 bp, Homo sapiens
acagattggtccaag

SEQ ID NO: 1545358 - DNA, 15 bp, Homo sapiens
cagattggtccaagt

SEQ ID NO: 1545359 - DNA, 15 bp, Homo sapiens
agattggtccaagtg

SEQ ID NO: 1545360 - DNA, 15 bp, Homo sapiens
gattggtccaagtgg

SEQ ID NO: 1545361 - DNA, 15 bp, Homo sapiens
attggtccaagtgga

SEQ ID NO: 1545362 - DNA, 15 bp, Homo sapiens
ttggtccaagtggaa

SEQ ID NO: 1545363 - DNA, 15 bp, Homo sapiens
tggtccaagtggaag

SEQ ID NO: 1545364 - DNA, 15 bp, Homo sapiens
ggtccaagtggaaga

SEQ ID NO: 1545365 - DNA, 15 bp, Homo sapiens
gtccaagtggaagag

SEQ ID NO: 1545366 - DNA, 15 bp, Homo sapiens
tccaagtggaagagg

SEQ ID NO: 1545367 - DNA, 15 bp, Homo sapiens
ccaagtggaagagga

SEQ ID NO: 1545368 - DNA, 15 bp, Homo sapiens
caagtggaagaggat

SEQ ID NO: 1545369 - DNA, 15 bp, Homo sapiens
aagtggaagaggata

SEQ ID NO: 1545370 - DNA, 15 bp, Homo sapiens
agtggaagaggataa

SEQ ID NO: 1545371 - DNA, 15 bp, Homo sapiens
gtggaagaggataag

SEQ ID NO: 1545372 - DNA, 15 bp, Homo sapiens
tggaagaggataagc

SEQ ID NO: 1545373 - DNA, 15 bp, Homo sapiens
ggaagaggataagca

SEQ ID NO: 1545374 - DNA, 15 bp, Homo sapiens
gaagaggataagcaa

SEQ ID NO: 1545375 - DNA, 15 bp, Homo sapiens
aagaggataagcaaa

SEQ ID NO: 1545376 - DNA, 15 bp, Homo sapiens
agaggataagcaaaa

SEQ ID NO: 1545377 - DNA, 15 bp, Homo sapiens
gaggataagcaaaag

SEQ ID NO: 1545378 - DNA, 15 bp, Homo sapiens
aggataagcaaaagt

SEQ ID NO: 1545379 - DNA, 15 bp, Homo sapiens
ggataagcaaaagtg

SEQ ID NO: 1545380 - DNA, 15 bp, Homo sapiens
gataagcaaaagtgg

SEQ ID NO: 1545381 - DNA, 15 bp, Homo sapiens
ataagcaaaagtggt

SEQ ID NO: 1545382 - DNA, 15 bp, Homo sapiens
taagcaaaagtggta

SEQ ID NO: 1545383 - DNA, 15 bp, Homo sapiens
aagcaaaagtggtac

SEQ ID NO: 1545384 - DNA, 15 bp, Homo sapiens
agcaaaagtggtacc

SEQ ID NO: 1545385 - DNA, 15 bp, Homo sapiens
gcaaaagtggtacca

SEQ ID NO: 1545386 - DNA, 15 bp, Homo sapiens
caaaagtggtaccat

SEQ ID NO: 1545387 - DNA, 15 bp, Homo sapiens
aaaagtggtaccatc

SEQ ID NO: 1545388 - DNA, 15 bp, Homo sapiens
aaagtggtaccatct

SEQ ID NO: 1545389 - DNA, 15 bp, Homo sapiens
aagtggtaccatctc

SEQ ID NO: 1545390 - DNA, 15 bp, Homo sapiens
agtggtaccatctcc

SEQ ID NO: 1545391 - DNA, 15 bp, Homo sapiens
gtggtaccatctcca

SEQ ID NO: 1545392 - DNA, 15 bp, Homo sapiens
tggtaccatctccac

SEQ ID NO: 1545393 - DNA, 15 bp, Homo sapiens
ggtaccatctccacc

SEQ ID NO: 1545394 - DNA, 15 bp, Homo sapiens
gtaccatctccaccc

SEQ ID NO: 1545395 - DNA, 15 bp, Homo sapiens
taccatctccacccg

SEQ ID NO: 1545396 - DNA, 15 bp, Homo sapiens
accatctccacccga

SEQ ID NO: 1545397 - DNA, 15 bp, Homo sapiens
ccatctccacccgaa

SEQ ID NO: 1545398 - DNA, 15 bp, Homo sapiens
catctccacccgaat

SEQ ID NO: 1545399 - DNA, 15 bp, Homo sapiens
atctccacccgaatg

SEQ ID NO: 1545400 - DNA, 15 bp, Homo sapiens
tctccacccgaatgg

SEQ ID NO: 1545401 - DNA, 15 bp, Homo sapiens
ctccacccgaatggt

SEQ ID NO: 1545402 - DNA, 15 bp, Homo sapiens
tccacccgaatggtc

SEQ ID NO: 1545403 - DNA, 15 bp, Homo sapiens
ccacccgaatggtct

SEQ ID NO: 1545404 - DNA, 15 bp, Homo sapiens
cacccgaatggtctt

SEQ ID NO: 1545405 - DNA, 15 bp, Homo sapiens
acccgaatggtcttt

SEQ ID NO: 1545406 - DNA, 15 bp, Homo sapiens
cccgaatggtctttc

SEQ ID NO: 1545407 - DNA, 15 bp, Homo sapiens
ccgaatggtctttcc

SEQ ID NO: 1545408 - DNA, 15 bp, Homo sapiens
cgaatggtctttcca

SEQ ID NO: 1545409 - DNA, 15 bp, Homo sapiens
gaatggtctttccac

SEQ ID NO: 1545410 - DNA, 15 bp, Homo sapiens
aatggtctttccacg

SEQ ID NO: 1545411 - DNA, 15 bp, Homo sapiens
atggtctttccacgg

SEQ ID NO: 1545412 - DNA, 15 bp, Homo sapiens
tggtctttccacggg

SEQ ID NO: 1545413 - DNA, 15 bp, Homo sapiens
ggtctttccacgggc

SEQ ID NO: 1545414 - DNA, 15 bp, Homo sapiens
gtctttccacgggcc

SEQ ID NO: 1545415 - DNA, 15 bp, Homo sapiens
tctttccacgggcct

SEQ ID NO: 1545416 - DNA, 15 bp, Homo sapiens
ctttccacgggcctg

SEQ ID NO: 1545417 - DNA, 15 bp, Homo sapiens
tttccacgggcctgc

SEQ ID NO: 1545418 - DNA, 15 bp, Homo sapiens
ttccacgggcctgcc

SEQ ID NO: 1545419 - DNA, 15 bp, Homo sapiens
tccacgggcctgccc

SEQ ID NO: 1545420 - DNA, 15 bp, Homo sapiens
ccacgggcctgcccc

SEQ ID NO: 1545421 - DNA, 15 bp, Homo sapiens
cacgggcctgcccct

SEQ ID NO: 1545422 - DNA, 15 bp, Homo sapiens
acgggcctgcccctg

SEQ ID NO: 1545423 - DNA, 15 bp, Homo sapiens
cgggcctgcccctgc

SEQ ID NO: 1545424 - DNA, 15 bp, Homo sapiens
gggcctgcccctgcc

SEQ ID NO: 1545425 - DNA, 15 bp, Homo sapiens
ggcctgcccctgccc

SEQ ID NO: 1545426 - DNA, 15 bp, Homo sapiens
gcctgcccctgcccc

SEQ ID NO: 1545427 - DNA, 15 bp, Homo sapiens
cctgcccctgcccct

SEQ ID NO: 1545428 - DNA, 15 bp, Homo sapiens
ctgcccctgcccctg

SEQ ID NO: 1545429 - DNA, 15 bp, Homo sapiens
tgcccctgcccctgc

SEQ ID NO: 1545430 - DNA, 15 bp, Homo sapiens
gcccctgcccctgcc

SEQ ID NO: 1545431 - DNA, 15 bp, Homo sapiens
cccctgcccctgccc

SEQ ID NO: 1545432 - DNA, 15 bp, Homo sapiens
ccctgcccctgcccc

SEQ ID NO: 1545433 - DNA, 15 bp, Homo sapiens
cctgcccctgccccc

SEQ ID NO: 1545434 - DNA, 15 bp, Homo sapiens
ctgcccctgccccca

SEQ ID NO: 1545435 - DNA, 15 bp, Homo sapiens
tgcccctgcccccac

SEQ ID NO: 1545436 - DNA, 15 bp, Homo sapiens
gcccctgcccccacc

SEQ ID NO: 1545437 - DNA, 15 bp, Homo sapiens
cccctgcccccaccc

SEQ ID NO: 1545438 - DNA, 15 bp, Homo sapiens
ccctgcccccaccca

SEQ ID NO: 1545439 - DNA, 15 bp, Homo sapiens
cctgcccccacccaa

SEQ ID NO: 1545440 - DNA, 15 bp, Homo sapiens
ctgcccccacccaaa

SEQ ID NO: 1545441 - DNA, 15 bp, Homo sapiens
tgcccccacccaaag

SEQ ID NO: 1545442 - DNA, 15 bp, Homo sapiens
gcccccacccaaagt

SEQ ID NO: 1545443 - DNA, 15 bp, Homo sapiens
cccccacccaaagtg

SEQ ID NO: 1545444 - DNA, 15 bp, Homo sapiens
ccccacccaaagtga

SEQ ID NO: 1545445 - DNA, 15 bp, Homo sapiens
cccacccaaagtgaa

SEQ ID NO: 1545446 - DNA, 15 bp, Homo sapiens
ccacccaaagtgaag

SEQ ID NO: 1545447 - DNA, 15 bp, Homo sapiens
cacccaaagtgaagg

SEQ ID NO: 1545448 - DNA, 15 bp, Homo sapiens
acccaaagtgaaggc

SEQ ID NO: 1545449 - DNA, 15 bp, Homo sapiens
cccaaagtgaaggca

SEQ ID NO: 1545450 - DNA, 15 bp, Homo sapiens
ccaaagtgaaggcag

SEQ ID NO: 1545451 - DNA, 15 bp, Homo sapiens
caaagtgaaggcagg

SEQ ID NO: 1545452 - DNA, 15 bp, Homo sapiens
aaagtgaaggcaggt

SEQ ID NO: 1545453 - DNA, 15 bp, Homo sapiens
aagtgaaggcaggta

SEQ ID NO: 1545454 - DNA, 15 bp, Homo sapiens
agtgaaggcaggtac

SEQ ID NO: 1545455 - DNA, 15 bp, Homo sapiens
gtgaaggcaggtacc

SEQ ID NO: 1545456 - DNA, 15 bp, Homo sapiens
tgaaggcaggtacca

SEQ ID NO: 1545457 - DNA, 15 bp, Homo sapiens
gaaggcaggtaccag

SEQ ID NO: 1545458 - DNA, 15 bp, Homo sapiens
aaggcaggtaccagg

SEQ ID NO: 1545459 - DNA, 15 bp, Homo sapiens
aggcaggtaccagga

SEQ ID NO: 1545460 - DNA, 15 bp, Homo sapiens
ggcaggtaccaggaa

SEQ ID NO: 1545461 - DNA, 15 bp, Homo sapiens
gcaggtaccaggaaa

SEQ ID NO: 1545462 - DNA, 15 bp, Homo sapiens
caggtaccaggaaag

SEQ ID NO: 1545463 - DNA, 15 bp, Homo sapiens
aggtaccaggaaagg

SEQ ID NO: 1545464 - DNA, 15 bp, Homo sapiens
ggtaccaggaaaggg

SEQ ID NO: 1545465 - DNA, 15 bp, Homo sapiens
gtaccaggaaaggga

SEQ ID NO: 1545466 - DNA, 15 bp, Homo sapiens
taccaggaaagggag

SEQ ID NO: 1545467 - DNA, 15 bp, Homo sapiens
accaggaaagggagc

SEQ ID NO: 1545468 - DNA, 15 bp, Homo sapiens
ccaggaaagggagca

SEQ ID NO: 1545469 - DNA, 15 bp, Homo sapiens
caggaaagggagcag

SEQ ID NO: 1545470 - DNA, 15 bp, Homo sapiens
aggaaagggagcagc

SEQ ID NO: 1545471 - DNA, 15 bp, Homo sapiens
ggaaagggagcagca

SEQ ID NO: 1545472 - DNA, 15 bp, Homo sapiens
gaaagggagcagcag

SEQ ID NO: 1545473 - DNA, 15 bp, Homo sapiens
aaagggagcagcagt

SEQ ID NO: 1545474 - DNA, 15 bp, Homo sapiens
aagggagcagcagtc

SEQ ID NO: 1545475 - DNA, 15 bp, Homo sapiens
agggagcagcagtcc

SEQ ID NO: 1545476 - DNA, 15 bp, Homo sapiens
gggagcagcagtccg

SEQ ID NO: 1545477 - DNA, 15 bp, Homo sapiens
ggagcagcagtccgc

SEQ ID NO: 1545478 - DNA, 15 bp, Homo sapiens
gagcagcagtccgcc

SEQ ID NO: 1545479 - DNA, 15 bp, Homo sapiens
agcagcagtccgccc

SEQ ID NO: 1545480 - DNA, 15 bp, Homo sapiens
gcagcagtccgcccc

SEQ ID NO: 1545481 - DNA, 15 bp, Homo sapiens
cagcagtccgcccct

SEQ ID NO: 1545482 - DNA, 15 bp, Homo sapiens
agcagtccgcccctc

SEQ ID NO: 1545483 - DNA, 15 bp, Homo sapiens
gcagtccgcccctcc

SEQ ID NO: 1545484 - DNA, 15 bp, Homo sapiens
cagtccgcccctccc

SEQ ID NO: 1545485 - DNA, 15 bp, Homo sapiens
agtccgcccctccca

SEQ ID NO: 1545486 - DNA, 15 bp, Homo sapiens
gtccgcccctcccag

SEQ ID NO: 1545487 - DNA, 15 bp, Homo sapiens
tccgcccctcccagc

SEQ ID NO: 1545488 - DNA, 15 bp, Homo sapiens
ccgcccctcccagca

SEQ ID NO: 1545489 - DNA, 15 bp, Homo sapiens
cgcccctcccagcag

SEQ ID NO: 1545490 - DNA, 15 bp, Homo sapiens
gcccctcccagcaga

SEQ ID NO: 1545491 - DNA, 15 bp, Homo sapiens
cccctcccagcagag

SEQ ID NO: 1545492 - DNA, 15 bp, Homo sapiens
ccctcccagcagagg

SEQ ID NO: 1545493 - DNA, 15 bp, Homo sapiens
cctcccagcagaggg

SEQ ID NO: 1545494 - DNA, 15 bp, Homo sapiens
ctcccagcagagggg

SEQ ID NO: 1545495 - DNA, 15 bp, Homo sapiens
tcccagcagaggggt

SEQ ID NO: 1545496 - DNA, 15 bp, Homo sapiens
cccagcagaggggtc

SEQ ID NO: 1545497 - DNA, 15 bp, Homo sapiens
ccagcagaggggtct

SEQ ID NO: 1545498 - DNA, 15 bp, Homo sapiens
cagcagaggggtctt

SEQ ID NO: 1545499 - DNA, 15 bp, Homo sapiens
agcagaggggtcttc

SEQ ID NO: 1545500 - DNA, 15 bp, Homo sapiens
gcagaggggtcttcc

SEQ ID NO: 1545501 - DNA, 15 bp, Homo sapiens
cagaggggtcttcca

SEQ ID NO: 1545502 - DNA, 15 bp, Homo sapiens
agaggggtcttccac

SEQ ID NO: 1545503 - DNA, 15 bp, Homo sapiens
gaggggtcttccaca

SEQ ID NO: 1545504 - DNA, 15 bp, Homo sapiens
aggggtcttccacac

SEQ ID NO: 1545505 - DNA, 15 bp, Homo sapiens
ggggtcttccacacc

SEQ ID NO: 1545506 - DNA, 15 bp, Homo sapiens
gggtcttccacacca

SEQ ID NO: 1545507 - DNA, 15 bp, Homo sapiens
ggtcttccacaccaa

SEQ ID NO: 1545508 - DNA, 15 bp, Homo sapiens
gtcttccacaccaac

SEQ ID NO: 1545509 - DNA, 15 bp, Homo sapiens
tcttccacaccaact

SEQ ID NO: 1545510 - DNA, 15 bp, Homo sapiens
cttccacaccaactc

SEQ ID NO: 1545511 - DNA, 15 bp, Homo sapiens
ttccacaccaactcg

SEQ ID NO: 1545512 - DNA, 15 bp, Homo sapiens
tccacaccaactcgg

SEQ ID NO: 1545513 - DNA, 15 bp, Homo sapiens
ccacaccaactcgga

SEQ ID NO: 1545514 - DNA, 15 bp, Homo sapiens
cacaccaactcggac

SEQ ID NO: 1545515 - DNA, 15 bp, Homo sapiens
acaccaactcggacc

SEQ ID NO: 1545516 - DNA, 15 bp, Homo sapiens
caccaactcggacct

SEQ ID NO: 1545517 - DNA, 15 bp, Homo sapiens
accaactcggacctt

SEQ ID NO: 1545518 - DNA, 15 bp, Homo sapiens
ccaactcggaccttt

SEQ ID NO: 1545519 - DNA, 15 bp, Homo sapiens
caactcggacctttc

SEQ ID NO: 1545520 - DNA, 15 bp, Homo sapiens
aactcggacctttct

SEQ ID NO: 1545521 - DNA, 15 bp, Homo sapiens
actcggacctttctc

SEQ ID NO: 1545522 - DNA, 15 bp, Homo sapiens
ctcggacctttctca

SEQ ID NO: 1545523 - DNA, 15 bp, Homo sapiens
tcggacctttctcag

SEQ ID NO: 1545524 - DNA, 15 bp, Homo sapiens
cggacctttctcaga

SEQ ID NO: 1545525 - DNA, 15 bp, Homo sapiens
ggacctttctcagaa

SEQ ID NO: 1545526 - DNA, 15 bp, Homo sapiens
gacctttctcagaag

SEQ ID NO: 1545527 - DNA, 15 bp, Homo sapiens
acctttctcagaagt

SEQ ID NO: 1545528 - DNA, 15 bp, Homo sapiens
cctttctcagaagtt

SEQ ID NO: 1545529 - DNA, 15 bp, Homo sapiens
ctttctcagaagttc

SEQ ID NO: 1545530 - DNA, 15 bp, Homo sapiens
tttctcagaagttcc

SEQ ID NO: 1545531 - DNA, 15 bp, Homo sapiens
ttctcagaagttccg

SEQ ID NO: 1545532 - DNA, 15 bp, Homo sapiens
tctcagaagttccgg

SEQ ID NO: 1545533 - DNA, 15 bp, Homo sapiens
ctcagaagttccgga

SEQ ID NO: 1545534 - DNA, 15 bp, Homo sapiens
tcagaagttccggag

SEQ ID NO: 1545535 - DNA, 15 bp, Homo sapiens
cagaagttccggagg

SEQ ID NO: 1545536 - DNA, 15 bp, Homo sapiens
agaagttccggaggt

SEQ ID NO: 1545537 - DNA, 15 bp, Homo sapiens
gaagttccggaggtc

SEQ ID NO: 1545538 - DNA, 15 bp, Homo sapiens
aagttccggaggtca

SEQ ID NO: 1545539 - DNA, 15 bp, Homo sapiens
agttccggaggtcat

SEQ ID NO: 1545540 - DNA, 15 bp, Homo sapiens
gttccggaggtcatt

SEQ ID NO: 1545541 - DNA, 15 bp, Homo sapiens
ttccggaggtcatta

SEQ ID NO: 1545542 - DNA, 15 bp, Homo sapiens
tccggaggtcattat

SEQ ID NO: 1545543 - DNA, 15 bp, Homo sapiens
ccggaggtcattata

SEQ ID NO: 1545544 - DNA, 15 bp, Homo sapiens
cggaggtcattataa

SEQ ID NO: 1545545 - DNA, 15 bp, Homo sapiens
ggaggtcattataac

SEQ ID NO: 1545546 - DNA, 15 bp, Homo sapiens
gaggtcattataacc

SEQ ID NO: 1545547 - DNA, 15 bp, Homo sapiens
aggtcattataacca

SEQ ID NO: 1545548 - DNA, 15 bp, Homo sapiens
ggtcattataaccag

SEQ ID NO: 1545549 - DNA, 15 bp, Homo sapiens
gtcattataaccagc

SEQ ID NO: 1545550 - DNA, 15 bp, Homo sapiens
tcattataaccagcc

SEQ ID NO: 1545551 - DNA, 15 bp, Homo sapiens
cattataaccagcct

SEQ ID NO: 1545552 - DNA, 15 bp, Homo sapiens
attataaccagcctt

SEQ ID NO: 1545553 - DNA, 15 bp, Homo sapiens
ttataaccagccttc

SEQ ID NO: 1545554 - DNA, 15 bp, Homo sapiens
tataaccagccttca

SEQ ID NO: 1545555 - DNA, 15 bp, Homo sapiens
ataaccagccttcac

SEQ ID NO: 1545556 - DNA, 15 bp, Homo sapiens
taaccagccttcact

SEQ ID NO: 1545557 - DNA, 15 bp, Homo sapiens
aaccagccttcactg

SEQ ID NO: 1545558 - DNA, 15 bp, Homo sapiens
aagttttaaacatgg

SEQ ID NO: 1545559 - DNA, 15 bp, Homo sapiens
agttttaaacatggc

SEQ ID NO: 1545560 - DNA, 15 bp, Homo sapiens
gttttaaacatggcc

SEQ ID NO: 1545561 - DNA, 15 bp, Homo sapiens
ttttaaacatggcct

SEQ ID NO: 1545562 - DNA, 15 bp, Homo sapiens
tttaaacatggcctg

SEQ ID NO: 1545563 - DNA, 15 bp, Homo sapiens
ttaaacatggcctgt

SEQ ID NO: 1545564 - DNA, 15 bp, Homo sapiens
taaacatggcctgtc

SEQ ID NO: 1545565 - DNA, 15 bp, Homo sapiens
aaacatggcctgtcc

SEQ ID NO: 1545566 - DNA, 15 bp, Homo sapiens
aacatggcctgtcca

SEQ ID NO: 1545567 - DNA, 15 bp, Homo sapiens
acatggcctgtccac

SEQ ID NO: 1545568 - DNA, 15 bp, Homo sapiens
catggcctgtccact

SEQ ID NO: 1545569 - DNA, 15 bp, Homo sapiens
atggcctgtccactg

SEQ ID NO: 1545570 - DNA, 15 bp, Homo sapiens
tggcctgtccactgt

SEQ ID NO: 1545571 - DNA, 15 bp, Homo sapiens
ggcctgtccactgtt

SEQ ID NO: 1545572 - DNA, 15 bp, Homo sapiens
gcctgtccactgttc

SEQ ID NO: 1545573 - DNA, 15 bp, Homo sapiens
cctgtccactgttct

SEQ ID NO: 1545574 - DNA, 15 bp, Homo sapiens
ctgtccactgttctt

SEQ ID NO: 1545575 - DNA, 15 bp, Homo sapiens
tgtccactgttcttt

SEQ ID NO: 1545576 - DNA, 15 bp, Homo sapiens
gtccactgttctttg

SEQ ID NO: 1545577 - DNA, 15 bp, Homo sapiens
tccactgttctttga

SEQ ID NO: 1545578 - DNA, 15 bp, Homo sapiens
cactgttctttgact

SEQ ID NO: 1545579 - DNA, 15 bp, Homo sapiens
actgttctttgactt

SEQ ID NO: 1545580 - DNA, 15 bp, Homo sapiens
ctgttctttgacttc

SEQ ID NO: 1545581 - DNA, 15 bp, Homo sapiens
tgttctttgacttct

SEQ ID NO: 1545582 - DNA, 15 bp, Homo sapiens
gttctttgacttctg

SEQ ID NO: 1545583 - DNA, 15 bp, Homo sapiens
ttctttgacttctgt

SEQ ID NO: 1545584 - DNA, 15 bp, Homo sapiens
tctttgacttctgtg

SEQ ID NO: 1545585 - DNA, 15 bp, Homo sapiens
ctttgacttctgtgc

SEQ ID NO: 1545586 - DNA, 15 bp, Homo sapiens
tttgacttctgtgca

SEQ ID NO: 1545587 - DNA, 15 bp, Homo sapiens
ttgacttctgtgcat

SEQ ID NO: 1545588 - DNA, 15 bp, Homo sapiens
tgacttctgtgcatt

SEQ ID NO: 1545589 - DNA, 15 bp, Homo sapiens
gacttctgtgcatta

SEQ ID NO: 1545590 - DNA, 15 bp, Homo sapiens
acttctgtgcattag

SEQ ID NO: 1545591 - DNA, 15 bp, Homo sapiens
cttctgtgcattagg

SEQ ID NO: 1545592 - DNA, 15 bp, Homo sapiens
ttctgtgcattagga

SEQ ID NO: 1545593 - DNA, 15 bp, Homo sapiens
tctgtgcattaggac

SEQ ID NO: 1545594 - DNA, 15 bp, Homo sapiens
ctgtgcattaggact

SEQ ID NO: 1545595 - DNA, 15 bp, Homo sapiens
tgtgcattaggactg

SEQ ID NO: 1545596 - DNA, 15 bp, Homo sapiens
gtgcattaggactgt

SEQ ID NO: 1545597 - DNA, 15 bp, Homo sapiens
tgcattaggactgtg

SEQ ID NO: 1545598 - DNA, 15 bp, Homo sapiens
gcattaggactgtgg

SEQ ID NO: 1545599 - DNA, 15 bp, Homo sapiens
cattaggactgtggg

SEQ ID NO: 1545600 - DNA, 15 bp, Homo sapiens
attaggactgtgggg

SEQ ID NO: 1545601 - DNA, 15 bp, Homo sapiens
ttaggactgtgggga

SEQ ID NO: 1545602 - DNA, 15 bp, Homo sapiens
taggactgtggggac

SEQ ID NO: 1545603 - DNA, 15 bp, Homo sapiens
aggactgtggggaca

SEQ ID NO: 1545604 - DNA, 15 bp, Homo sapiens
ggactgtggggacaa

SEQ ID NO: 1545605 - DNA, 15 bp, Homo sapiens
gactgtggggacaat

SEQ ID NO: 1545606 - DNA, 15 bp, Homo sapiens
actgtggggacaatc

SEQ ID NO: 1545607 - DNA, 15 bp, Homo sapiens
ctgtggggacaatct

SEQ ID NO: 1545608 - DNA, 15 bp, Homo sapiens
tgtggggacaatcta

SEQ ID NO: 1545609 - DNA, 15 bp, Homo sapiens
gtggggacaatctat

SEQ ID NO: 1545610 - DNA, 15 bp, Homo sapiens
tggggacaatctata

SEQ ID NO: 1545611 - DNA, 15 bp, Homo sapiens
ggggacaatctataa

SEQ ID NO: 1545612 - DNA, 15 bp, Homo sapiens
gggacaatctataaa

SEQ ID NO: 1545613 - DNA, 15 bp, Homo sapiens
ggacaatctataaag

SEQ ID NO: 1545614 - DNA, 15 bp, Homo sapiens
gacaatctataaaga

SEQ ID NO: 1545615 - DNA, 15 bp, Homo sapiens
acaatctataaagag

SEQ ID NO: 1545616 - DNA, 15 bp, Homo sapiens
caatctataaagagt

SEQ ID NO: 1545617 - DNA, 15 bp, Homo sapiens
aatctataaagagtc

SEQ ID NO: 1545618 - DNA, 15 bp, Homo sapiens
atctataaagagtct

SEQ ID NO: 1545619 - DNA, 15 bp, Homo sapiens
tctataaagagtctg

SEQ ID NO: 1545620 - DNA, 15 bp, Homo sapiens
ctataaagagtctgc

SEQ ID NO: 1545621 - DNA, 15 bp, Homo sapiens
tataaagagtctgcg

SEQ ID NO: 1545622 - DNA, 15 bp, Homo sapiens
ataaagagtctgcgt

SEQ ID NO: 1545623 - DNA, 15 bp, Homo sapiens
taaagagtctgcgtc

SEQ ID NO: 1545624 - DNA, 15 bp, Homo sapiens
aaagagtctgcgtca

SEQ ID NO: 1545625 - DNA, 15 bp, Homo sapiens
aagagtctgcgtcac

SEQ ID NO: 1545626 - DNA, 15 bp, Homo sapiens
agagtctgcgtcaca

SEQ ID NO: 1545627 - DNA, 15 bp, Homo sapiens
gagtctgcgtcacat

SEQ ID NO: 1545628 - DNA, 15 bp, Homo sapiens
agtctgcgtcacatg

SEQ ID NO: 1545629 - DNA, 15 bp, Homo sapiens
gtctgcgtcacatgc

SEQ ID NO: 1545630 - DNA, 15 bp, Homo sapiens
tctgcgtcacatgca

SEQ ID NO: 1545631 - DNA, 15 bp, Homo sapiens
ctgcgtcacatgcat

SEQ ID NO: 1545632 - DNA, 15 bp, Homo sapiens
tgcgtcacatgcatg

SEQ ID NO: 1545633 - DNA, 15 bp, Homo sapiens
gcgtcacatgcatga

SEQ ID NO: 1545634 - DNA, 15 bp, Homo sapiens
cgtcacatgcatgaa

SEQ ID NO: 1545635 - DNA, 15 bp, Homo sapiens
gtcacatgcatgaag

SEQ ID NO: 1545636 - DNA, 15 bp, Homo sapiens
tcacatgcatgaaga

SEQ ID NO: 1545637 - DNA, 15 bp, Homo sapiens
cacatgcatgaagac

SEQ ID NO: 1545638 - DNA, 15 bp, Homo sapiens
acatgcatgaagaca

SEQ ID NO: 1545639 - DNA, 15 bp, Homo sapiens
catgcatgaagacac

SEQ ID NO: 1545640 - DNA, 15 bp, Homo sapiens
atgcatgaagacact

SEQ ID NO: 1545641 - DNA, 15 bp, Homo sapiens
tgcatgaagacactt

SEQ ID NO: 1545642 - DNA, 15 bp, Homo sapiens
gcatgaagacacttc

SEQ ID NO: 1545643 - DNA, 15 bp, Homo sapiens
catgaagacacttca

SEQ ID NO: 1545644 - DNA, 15 bp, Homo sapiens
atgaagacacttcag

SEQ ID NO: 1545645 - DNA, 15 bp, Homo sapiens
tgaagacacttcagt

SEQ ID NO: 1545646 - DNA, 15 bp, Homo sapiens
gaagacacttcagta

SEQ ID NO: 1545647 - DNA, 15 bp, Homo sapiens
aagacacttcagtat

SEQ ID NO: 1545648 - DNA, 15 bp, Homo sapiens
agacacttcagtatc

SEQ ID NO: 1545649 - DNA, 15 bp, Homo sapiens
gacacttcagtatct

SEQ ID NO: 1545650 - DNA, 15 bp, Homo sapiens
acacttcagtatctc

SEQ ID NO: 1545651 - DNA, 15 bp, Homo sapiens
cacttcagtatctcg

SEQ ID NO: 1545652 - DNA, 15 bp, Homo sapiens
acttcagtatctcgg

SEQ ID NO: 1545653 - DNA, 15 bp, Homo sapiens
cttcagtatctcggc

SEQ ID NO: 1545654 - DNA, 15 bp, Homo sapiens
ttcagtatctcggca

SEQ ID NO: 1545655 - DNA, 15 bp, Homo sapiens
tcagtatctcggcaa

SEQ ID NO: 1545656 - DNA, 15 bp, Homo sapiens
cagtatctcggcaat

SEQ ID NO: 1545657 - DNA, 15 bp, Homo sapiens
agtatctcggcaatg

SEQ ID NO: 1545658 - DNA, 15 bp, Homo sapiens
gtatctcggcaatgc

SEQ ID NO: 1545659 - DNA, 15 bp, Homo sapiens
tatctcggcaatgcc

SEQ ID NO: 1545660 - DNA, 15 bp, Homo sapiens
atctcggcaatgccc

SEQ ID NO: 1545661 - DNA, 15 bp, Homo sapiens
tctcggcaatgccct

SEQ ID NO: 1545662 - DNA, 15 bp, Homo sapiens
ctcggcaatgccctc

SEQ ID NO: 1545663 - DNA, 15 bp, Homo sapiens
tcggcaatgccctcc

SEQ ID NO: 1545664 - DNA, 15 bp, Homo sapiens
cggcaatgccctcca

SEQ ID NO: 1545665 - DNA, 15 bp, Homo sapiens
ggcaatgccctccag

SEQ ID NO: 1545666 - DNA, 15 bp, Homo sapiens
gcaatgccctccaga

SEQ ID NO: 1545667 - DNA, 15 bp, Homo sapiens
caatgccctccagac

SEQ ID NO: 1545668 - DNA, 15 bp, Homo sapiens
aatgccctccagaca

SEQ ID NO: 1545669 - DNA, 15 bp, Homo sapiens
atgccctccagacag

SEQ ID NO: 1545670 - DNA, 15 bp, Homo sapiens
tgccctccagacagc

SEQ ID NO: 1545671 - DNA, 15 bp, Homo sapiens
gccctccagacagct

SEQ ID NO: 1545672 - DNA, 15 bp, Homo sapiens
ccctccagacagctc

SEQ ID NO: 1545673 - DNA, 15 bp, Homo sapiens
cctccagacagctcc

SEQ ID NO: 1545674 - DNA, 15 bp, Homo sapiens
ctccagacagctcct

SEQ ID NO: 1545675 - DNA, 15 bp, Homo sapiens
tccagacagctcctc

SEQ ID NO: 1545676 - DNA, 15 bp, Homo sapiens
ccagacagctcctcc

SEQ ID NO: 1545677 - DNA, 15 bp, Homo sapiens
cagacagctcctcca

SEQ ID NO: 1545678 - DNA, 15 bp, Homo sapiens
agacagctcctccag

SEQ ID NO: 1545679 - DNA, 15 bp, Homo sapiens
gacagctcctccagc

SEQ ID NO: 1545680 - DNA, 15 bp, Homo sapiens
acagctcctccagcc

SEQ ID NO: 1545681 - DNA, 15 bp, Homo sapiens
cagctcctccagcca

SEQ ID NO: 1545682 - DNA, 15 bp, Homo sapiens
agctcctccagccat

SEQ ID NO: 1545683 - DNA, 15 bp, Homo sapiens
gctcctccagccatc

SEQ ID NO: 1545684 - DNA, 15 bp, Homo sapiens
ctcctccagccatct

SEQ ID NO: 1545685 - DNA, 15 bp, Homo sapiens
tcctccagccatctg

SEQ ID NO: 1545686 - DNA, 15 bp, Homo sapiens
cctccagccatctgt

SEQ ID NO: 1545687 - DNA, 15 bp, Homo sapiens
ctccagccatctgtg

SEQ ID NO: 1545688 - DNA, 15 bp, Homo sapiens
tccagccatctgtgc

SEQ ID NO: 1545689 - DNA, 15 bp, Homo sapiens
ccagccatctgtgcc

SEQ ID NO: 1545690 - DNA, 15 bp, Homo sapiens
cagccatctgtgcca

SEQ ID NO: 1545691 - DNA, 15 bp, Homo sapiens
agccatctgtgccaa

SEQ ID NO: 1545692 - DNA, 15 bp, Homo sapiens
gccatctgtgccaag

SEQ ID NO: 1545693 - DNA, 15 bp, Homo sapiens
ccatctgtgccaagg

SEQ ID NO: 1545694 - DNA, 15 bp, Homo sapiens
catctgtgccaaggg

SEQ ID NO: 1545695 - DNA, 15 bp, Homo sapiens
atctgtgccaagggg

SEQ ID NO: 1545696 - DNA, 15 bp, Homo sapiens
tctgtgccaagggga

SEQ ID NO: 1545697 - DNA, 15 bp, Homo sapiens
ctgtgccaaggggag

SEQ ID NO: 1545698 - DNA, 15 bp, Homo sapiens
tgtgccaaggggagt

SEQ ID NO: 1545699 - DNA, 15 bp, Homo sapiens
gtgccaaggggagtg

SEQ ID NO: 1545700 - DNA, 15 bp, Homo sapiens
tgccaaggggagtgt

SEQ ID NO: 1545701 - DNA, 15 bp, Homo sapiens
gccaaggggagtgtg

SEQ ID NO: 1545702 - DNA, 15 bp, Homo sapiens
ccaaggggagtgtga

SEQ ID NO: 1545703 - DNA, 15 bp, Homo sapiens
caaggggagtgtgag

SEQ ID NO: 1545704 - DNA, 15 bp, Homo sapiens
aaggggagtgtgagg

SEQ ID NO: 1545705 - DNA, 15 bp, Homo sapiens
aggggagtgtgagga

SEQ ID NO: 1545706 - DNA, 15 bp, Homo sapiens
ggggagtgtgaggag

SEQ ID NO: 1545707 - DNA, 15 bp, Homo sapiens
gggagtgtgaggagt

SEQ ID NO: 1545708 - DNA, 15 bp, Homo sapiens
ggagtgtgaggagtg

SEQ ID NO: 1545709 - DNA, 15 bp, Homo sapiens
gagtgtgaggagtga

SEQ ID NO: 1545710 - DNA, 15 bp, Homo sapiens
agtgtgaggagtgac

SEQ ID NO: 1545711 - DNA, 15 bp, Homo sapiens
gtgtgaggagtgaca

SEQ ID NO: 1545712 - DNA, 15 bp, Homo sapiens
tgtgaggagtgacag

SEQ ID NO: 1545713 - DNA, 15 bp, Homo sapiens
gtgaggagtgacaga

SEQ ID NO: 1545714 - DNA, 15 bp, Homo sapiens
tgaggagtgacagac

SEQ ID NO: 1545715 - DNA, 15 bp, Homo sapiens
gaggagtgacagacc

SEQ ID NO: 1545716 - DNA, 15 bp, Homo sapiens
aggagtgacagacca

SEQ ID NO: 1545717 - DNA, 15 bp, Homo sapiens
ggagtgacagaccag

SEQ ID NO: 1545718 - DNA, 15 bp, Homo sapiens
gagtgacagaccagg

SEQ ID NO: 1545719 - DNA, 15 bp, Homo sapiens
agtgacagaccaggc

SEQ ID NO: 1545720 - DNA, 15 bp, Homo sapiens
gtgacagaccaggct

SEQ ID NO: 1545721 - DNA, 15 bp, Homo sapiens
tgacagaccaggctg

SEQ ID NO: 1545722 - DNA, 15 bp, Homo sapiens
gacagaccaggctgt

SEQ ID NO: 1545723 - DNA, 15 bp, Homo sapiens
acagaccaggctgta

SEQ ID NO: 1545724 - DNA, 15 bp, Homo sapiens
cagaccaggctgtag

SEQ ID NO: 1545725 - DNA, 15 bp, Homo sapiens
agaccaggctgtagg

SEQ ID NO: 1545726 - DNA, 15 bp, Homo sapiens
gaccaggctgtagga

SEQ ID NO: 1545727 - DNA, 15 bp, Homo sapiens
accaggctgtaggaa

SEQ ID NO: 1545728 - DNA, 15 bp, Homo sapiens
ccaggctgtaggaac

SEQ ID NO: 1545729 - DNA, 15 bp, Homo sapiens
caggctgtaggaaca

SEQ ID NO: 1545730 - DNA, 15 bp, Homo sapiens
aggctgtaggaacag

SEQ ID NO: 1545731 - DNA, 15 bp, Homo sapiens
ggctgtaggaacagg

SEQ ID NO: 1545732 - DNA, 15 bp, Homo sapiens
gctgtaggaacagga

SEQ ID NO: 1545733 - DNA, 15 bp, Homo sapiens
ctgtaggaacaggaa

SEQ ID NO: 1545734 - DNA, 15 bp, Homo sapiens
tgtaggaacaggaat

SEQ ID NO: 1545735 - DNA, 15 bp, Homo sapiens
gtaggaacaggaatg

SEQ ID NO: 1545736 - DNA, 15 bp, Homo sapiens
taggaacaggaatgg

SEQ ID NO: 1545737 - DNA, 15 bp, Homo sapiens
aggaacaggaatggg

SEQ ID NO: 1545738 - DNA, 15 bp, Homo sapiens
ggaacaggaatgggg

SEQ ID NO: 1545739 - DNA, 15 bp, Homo sapiens
gaacaggaatggggt

SEQ ID NO: 1545740 - DNA, 15 bp, Homo sapiens
aacaggaatggggtg

SEQ ID NO: 1545741 - DNA, 15 bp, Homo sapiens
acaggaatggggtgt

SEQ ID NO: 1545742 - DNA, 15 bp, Homo sapiens
caggaatggggtgtc

SEQ ID NO: 1545743 - DNA, 15 bp, Homo sapiens
aggaatggggtgtca

SEQ ID NO: 1545744 - DNA, 15 bp, Homo sapiens
ggaatggggtgtcat

SEQ ID NO: 1545745 - DNA, 15 bp, Homo sapiens
gaatggggtgtcatg

SEQ ID NO: 1545746 - DNA, 15 bp, Homo sapiens
aatggggtgtcatgg

SEQ ID NO: 1545747 - DNA, 15 bp, Homo sapiens
atggggtgtcatggg

SEQ ID NO: 1545748 - DNA, 15 bp, Homo sapiens
tggggtgtcatgggg

SEQ ID NO: 1545749 - DNA, 15 bp, Homo sapiens
ggggtgtcatggggg

SEQ ID NO: 1545750 - DNA, 15 bp, Homo sapiens
gggtgtcatggggga

SEQ ID NO: 1545751 - DNA, 15 bp, Homo sapiens
ggtgtcatgggggat

SEQ ID NO: 1545752 - DNA, 15 bp, Homo sapiens
gtgtcatgggggatg

SEQ ID NO: 1545753 - DNA, 15 bp, Homo sapiens
tgtcatgggggatgg

SEQ ID NO: 1545754 - DNA, 15 bp, Homo sapiens
gtcatgggggatggc

SEQ ID NO: 1545755 - DNA, 15 bp, Homo sapiens
tcatgggggatggca

SEQ ID NO: 1545756 - DNA, 15 bp, Homo sapiens
catgggggatggcag

SEQ ID NO: 1545757 - DNA, 15 bp, Homo sapiens
atgggggatggcaga

SEQ ID NO: 1545758 - DNA, 15 bp, Homo sapiens
tgggggatggcagag

SEQ ID NO: 1545759 - DNA, 15 bp, Homo sapiens
gggggatggcagagc

SEQ ID NO: 1545760 - DNA, 15 bp, Homo sapiens
ggggatggcagagca

SEQ ID NO: 1545761 - DNA, 15 bp, Homo sapiens
gggatggcagagcag

SEQ ID NO: 1545762 - DNA, 15 bp, Homo sapiens
ggatggcagagcagt

SEQ ID NO: 1545763 - DNA, 15 bp, Homo sapiens
gatggcagagcagtg

SEQ ID NO: 1545764 - DNA, 15 bp, Homo sapiens
atggcagagcagtgg

SEQ ID NO: 1545765 - DNA, 15 bp, Homo sapiens
tggcagagcagtgga

SEQ ID NO: 1545766 - DNA, 15 bp, Homo sapiens
ggcagagcagtggac

SEQ ID NO: 1545767 - DNA, 15 bp, Homo sapiens
gcagagcagtggaca

SEQ ID NO: 1545768 - DNA, 15 bp, Homo sapiens
cagagcagtggacag

SEQ ID NO: 1545769 - DNA, 15 bp, Homo sapiens
agagcagtggacagt

SEQ ID NO: 1545770 - DNA, 15 bp, Homo sapiens
gagcagtggacagta

SEQ ID NO: 1545771 - DNA, 15 bp, Homo sapiens
agcagtggacagtac

SEQ ID NO: 1545772 - DNA, 15 bp, Homo sapiens
gcagtggacagtaca

SEQ ID NO: 1545773 - DNA, 15 bp, Homo sapiens
cagtggacagtacac

SEQ ID NO: 1545774 - DNA, 15 bp, Homo sapiens
agtggacagtacact

SEQ ID NO: 1545775 - DNA, 15 bp, Homo sapiens
gtggacagtacactg

SEQ ID NO: 1545776 - DNA, 15 bp, Homo sapiens
tggacagtacactgc

SEQ ID NO: 1545777 - DNA, 15 bp, Homo sapiens
ggacagtacactgcc

SEQ ID NO: 1545778 - DNA, 15 bp, Homo sapiens
gacagtacactgcct

SEQ ID NO: 1545779 - DNA, 15 bp, Homo sapiens
acagtacactgcctg

SEQ ID NO: 1545780 - DNA, 15 bp, Homo sapiens
cagtacactgcctgg

SEQ ID NO: 1545781 - DNA, 15 bp, Homo sapiens
agtacactgcctggc

SEQ ID NO: 1545782 - DNA, 15 bp, Homo sapiens
gtacactgcctggcc

SEQ ID NO: 1545783 - DNA, 15 bp, Homo sapiens
tacactgcctggccc

SEQ ID NO: 1545784 - DNA, 15 bp, Homo sapiens
acactgcctggcccg

SEQ ID NO: 1545785 - DNA, 15 bp, Homo sapiens
cactgcctggcccgg

SEQ ID NO: 1545786 - DNA, 15 bp, Homo sapiens
actgcctggcccggg

SEQ ID NO: 1545787 - DNA, 15 bp, Homo sapiens
ctgcctggcccgggc

SEQ ID NO: 1545788 - DNA, 15 bp, Homo sapiens
tgcctggcccgggcc

SEQ ID NO: 1545789 - DNA, 15 bp, Homo sapiens
gcctggcccgggccc

SEQ ID NO: 1545790 - DNA, 15 bp, Homo sapiens
cctggcccgggcccc

SEQ ID NO: 1545791 - DNA, 15 bp, Homo sapiens
ctggcccgggcccct

SEQ ID NO: 1545792 - DNA, 15 bp, Homo sapiens
tggcccgggcccctg

SEQ ID NO: 1545793 - DNA, 15 bp, Homo sapiens
ggcccgggcccctgc

SEQ ID NO: 1545794 - DNA, 15 bp, Homo sapiens
gcccgggcccctgct

SEQ ID NO: 1545795 - DNA, 15 bp, Homo sapiens
cccgggcccctgctt

SEQ ID NO: 1545796 - DNA, 15 bp, Homo sapiens
ccgggcccctgcttg

SEQ ID NO: 1545797 - DNA, 15 bp, Homo sapiens
cgggcccctgcttgc

SEQ ID NO: 1545798 - DNA, 15 bp, Homo sapiens
gggcccctgcttgcc

SEQ ID NO: 1545799 - DNA, 15 bp, Homo sapiens
ggcccctgcttgcct

SEQ ID NO: 1545800 - DNA, 15 bp, Homo sapiens
gcccctgcttgcctg

SEQ ID NO: 1545801 - DNA, 15 bp, Homo sapiens
cccctgcttgcctgc

SEQ ID NO: 1545802 - DNA, 15 bp, Homo sapiens
ccctgcttgcctgcc

SEQ ID NO: 1545803 - DNA, 15 bp, Homo sapiens
cctgcttgcctgccc

SEQ ID NO: 1545804 - DNA, 15 bp, Homo sapiens
ctgcttgcctgccca

SEQ ID NO: 1545805 - DNA, 15 bp, Homo sapiens
tgcttgcctgcccat

SEQ ID NO: 1545806 - DNA, 15 bp, Homo sapiens
gcttgcctgcccatg

SEQ ID NO: 1545807 - DNA, 15 bp, Homo sapiens
cttgcctgcccatgg

SEQ ID NO: 1545808 - DNA, 15 bp, Homo sapiens
ttgcctgcccatgga

SEQ ID NO: 1545809 - DNA, 15 bp, Homo sapiens
tgcctgcccatggaa

SEQ ID NO: 1545810 - DNA, 15 bp, Homo sapiens
gcctgcccatggaat

SEQ ID NO: 1545811 - DNA, 15 bp, Homo sapiens
cctgcccatggaatg

SEQ ID NO: 1545812 - DNA, 15 bp, Homo sapiens
ctgcccatggaatgt

SEQ ID NO: 1545813 - DNA, 15 bp, Homo sapiens
tgcccatggaatgtg

SEQ ID NO: 1545814 - DNA, 15 bp, Homo sapiens
gcccatggaatgtgt

SEQ ID NO: 1545815 - DNA, 15 bp, Homo sapiens
cccatggaatgtgtg

SEQ ID NO: 1545816 - DNA, 15 bp, Homo sapiens
ccatggaatgtgtgc

SEQ ID NO: 1545817 - DNA, 15 bp, Homo sapiens
catggaatgtgtgca

SEQ ID NO: 1545818 - DNA, 15 bp, Homo sapiens
atggaatgtgtgcag

SEQ ID NO: 1545819 - DNA, 15 bp, Homo sapiens
tggaatgtgtgcaga

SEQ ID NO: 1545820 - DNA, 15 bp, Homo sapiens
ggaatgtgtgcagag

SEQ ID NO: 1545821 - DNA, 15 bp, Homo sapiens
gaatgtgtgcagagg

SEQ ID NO: 1545822 - DNA, 15 bp, Homo sapiens
aatgtgtgcagaggg

SEQ ID NO: 1545823 - DNA, 15 bp, Homo sapiens
atgtgtgcagaggga

SEQ ID NO: 1545824 - DNA, 15 bp, Homo sapiens
tgtgtgcagagggag

SEQ ID NO: 1545825 - DNA, 15 bp, Homo sapiens
gtgtgcagagggagt

SEQ ID NO: 1545826 - DNA, 15 bp, Homo sapiens
tgtgcagagggagtg

SEQ ID NO: 1545827 - DNA, 15 bp, Homo sapiens
gtgcagagggagtgc

SEQ ID NO: 1545828 - DNA, 15 bp, Homo sapiens
tgcagagggagtgcc

SEQ ID NO: 1545829 - DNA, 15 bp, Homo sapiens
gcagagggagtgcca

SEQ ID NO: 1545830 - DNA, 15 bp, Homo sapiens
cagagggagtgccag

SEQ ID NO: 1545831 - DNA, 15 bp, Homo sapiens
agagggagtgccagg

SEQ ID NO: 1545832 - DNA, 15 bp, Homo sapiens
gagggagtgccaggc

SEQ ID NO: 1545833 - DNA, 15 bp, Homo sapiens
agggagtgccaggcc

SEQ ID NO: 1545834 - DNA, 15 bp, Homo sapiens
gggagtgccaggcca

SEQ ID NO: 1545835 - DNA, 15 bp, Homo sapiens
ggagtgccaggccag

SEQ ID NO: 1545836 - DNA, 15 bp, Homo sapiens
gagtgccaggccagg

SEQ ID NO: 1545837 - DNA, 15 bp, Homo sapiens
agtgccaggccaggt

SEQ ID NO: 1545838 - DNA, 15 bp, Homo sapiens
gtgccaggccaggtg

SEQ ID NO: 1545839 - DNA, 15 bp, Homo sapiens
tgccaggccaggtgc

SEQ ID NO: 1545840 - DNA, 15 bp, Homo sapiens
gccaggccaggtgct

SEQ ID NO: 1545841 - DNA, 15 bp, Homo sapiens
ccaggccaggtgctg

SEQ ID NO: 1545842 - DNA, 15 bp, Homo sapiens
caggccaggtgctgc

SEQ ID NO: 1545843 - DNA, 15 bp, Homo sapiens
aggccaggtgctgct

SEQ ID NO: 1545844 - DNA, 15 bp, Homo sapiens
ggccaggtgctgctc

SEQ ID NO: 1545845 - DNA, 15 bp, Homo sapiens
gccaggtgctgctct

SEQ ID NO: 1545846 - DNA, 15 bp, Homo sapiens
ccaggtgctgctctg

SEQ ID NO: 1545847 - DNA, 15 bp, Homo sapiens
caggtgctgctctgg

SEQ ID NO: 1545848 - DNA, 15 bp, Homo sapiens
aggtgctgctctgga

SEQ ID NO: 1545849 - DNA, 15 bp, Homo sapiens
ggtgctgctctggag

SEQ ID NO: 1545850 - DNA, 15 bp, Homo sapiens
gtgctgctctggaga

SEQ ID NO: 1545851 - DNA, 15 bp, Homo sapiens
tgctgctctggagaa

SEQ ID NO: 1545852 - DNA, 15 bp, Homo sapiens
gctgctctggagaag

SEQ ID NO: 1545853 - DNA, 15 bp, Homo sapiens
ctgctctggagaagt

SEQ ID NO: 1545854 - DNA, 15 bp, Homo sapiens
tgctctggagaagtg

SEQ ID NO: 1545855 - DNA, 15 bp, Homo sapiens
gctctggagaagtgg

SEQ ID NO: 1545856 - DNA, 15 bp, Homo sapiens
ctctggagaagtggg

SEQ ID NO: 1545857 - DNA, 15 bp, Homo sapiens
tctggagaagtgggg

SEQ ID NO: 1545858 - DNA, 15 bp, Homo sapiens
ctggagaagtggggg

SEQ ID NO: 1545859 - DNA, 15 bp, Homo sapiens
tggagaagtggggga

SEQ ID NO: 1545860 - DNA, 15 bp, Homo sapiens
ggagaagtgggggaa

SEQ ID NO: 1545861 - DNA, 15 bp, Homo sapiens
gagaagtgggggaat

SEQ ID NO: 1545862 - DNA, 15 bp, Homo sapiens
agaagtgggggaatg

SEQ ID NO: 1545863 - DNA, 15 bp, Homo sapiens
gaagtgggggaatga

SEQ ID NO: 1545864 - DNA, 15 bp, Homo sapiens
aagtgggggaatgag

SEQ ID NO: 1545865 - DNA, 15 bp, Homo sapiens
agtgggggaatgagg

SEQ ID NO: 1545866 - DNA, 15 bp, Homo sapiens
gtgggggaatgaggc

SEQ ID NO: 1545867 - DNA, 15 bp, Homo sapiens
tgggggaatgaggct

SEQ ID NO: 1545868 - DNA, 15 bp, Homo sapiens
gggggaatgaggctg

SEQ ID NO: 1545869 - DNA, 15 bp, Homo sapiens
ggggaatgaggctgg

SEQ ID NO: 1545870 - DNA, 15 bp, Homo sapiens
gggaatgaggctggt

SEQ ID NO: 1545871 - DNA, 15 bp, Homo sapiens
ggaatgaggctggtc

SEQ ID NO: 1545872 - DNA, 15 bp, Homo sapiens
gaatgaggctggtcc

SEQ ID NO: 1545873 - DNA, 15 bp, Homo sapiens
aatgaggctggtcct

SEQ ID NO: 1545874 - DNA, 15 bp, Homo sapiens
atgaggctggtcctg

SEQ ID NO: 1545875 - DNA, 15 bp, Homo sapiens
tgaggctggtcctgc

SEQ ID NO: 1545876 - DNA, 15 bp, Homo sapiens
gaggctggtcctgct

SEQ ID NO: 1545877 - DNA, 15 bp, Homo sapiens
aggctggtcctgctg

SEQ ID NO: 1545878 - DNA, 15 bp, Homo sapiens
ggctggtcctgctgc

SEQ ID NO: 1545879 - DNA, 15 bp, Homo sapiens
gctggtcctgctgca

SEQ ID NO: 1545880 - DNA, 15 bp, Homo sapiens
ctggtcctgctgcag

SEQ ID NO: 1545881 - DNA, 15 bp, Homo sapiens
tggtcctgctgcagg

SEQ ID NO: 1545882 - DNA, 15 bp, Homo sapiens
ggtcctgctgcaggt

SEQ ID NO: 1545883 - DNA, 15 bp, Homo sapiens
gtcctgctgcaggtc

SEQ ID NO: 1545884 - DNA, 15 bp, Homo sapiens
tcctgctgcaggtca

SEQ ID NO: 1545885 - DNA, 15 bp, Homo sapiens
cctgctgcaggtcag

SEQ ID NO: 1545886 - DNA, 15 bp, Homo sapiens
ctgctgcaggtcagt

SEQ ID NO: 1545887 - DNA, 15 bp, Homo sapiens
tgctgcaggtcagtc

SEQ ID NO: 1545888 - DNA, 15 bp, Homo sapiens
gctgcaggtcagtct

SEQ ID NO: 1545889 - DNA, 15 bp, Homo sapiens
ctgcaggtcagtctc

SEQ ID NO: 1545890 - DNA, 15 bp, Homo sapiens
tgcaggtcagtctca

SEQ ID NO: 1545891 - DNA, 15 bp, Homo sapiens
gcaggtcagtctcag

SEQ ID NO: 1545892 - DNA, 15 bp, Homo sapiens
caggtcagtctcagc

SEQ ID NO: 1545893 - DNA, 15 bp, Homo sapiens
aggtcagtctcagca

SEQ ID NO: 1545894 - DNA, 15 bp, Homo sapiens
ggtcagtctcagcac

SEQ ID NO: 1545895 - DNA, 15 bp, Homo sapiens
gtcagtctcagcacc

SEQ ID NO: 1545896 - DNA, 15 bp, Homo sapiens
tcagtctcagcaccg

SEQ ID NO: 1545897 - DNA, 15 bp, Homo sapiens
cagtctcagcaccgt

SEQ ID NO: 1545898 - DNA, 15 bp, Homo sapiens
agtctcagcaccgtc

SEQ ID NO: 1545899 - DNA, 15 bp, Homo sapiens
gtctcagcaccgtcc

SEQ ID NO: 1545900 - DNA, 15 bp, Homo sapiens
tctcagcaccgtcct

SEQ ID NO: 1545901 - DNA, 15 bp, Homo sapiens
ctcagcaccgtcctg

SEQ ID NO: 1545902 - DNA, 15 bp, Homo sapiens
tcagcaccgtcctgt

SEQ ID NO: 1545903 - DNA, 15 bp, Homo sapiens
cagcaccgtcctgtc

SEQ ID NO: 1545904 - DNA, 15 bp, Homo sapiens
agcaccgtcctgtcc

SEQ ID NO: 1545905 - DNA, 15 bp, Homo sapiens
gcaccgtcctgtcca

SEQ ID NO: 1545906 - DNA, 15 bp, Homo sapiens
caccgtcctgtccag

SEQ ID NO: 1545907 - DNA, 15 bp, Homo sapiens
accgtcctgtccagt

SEQ ID NO: 1545908 - DNA, 15 bp, Homo sapiens
ccgtcctgtccagtc

SEQ ID NO: 1545909 - DNA, 15 bp, Homo sapiens
cgtcctgtccagtca

SEQ ID NO: 1545910 - DNA, 15 bp, Homo sapiens
gtcctgtccagtcag

SEQ ID NO: 1545911 - DNA, 15 bp, Homo sapiens
tcctgtccagtcaga

SEQ ID NO: 1545912 - DNA, 15 bp, Homo sapiens
cctgtccagtcagag

SEQ ID NO: 1545913 - DNA, 15 bp, Homo sapiens
ctgtccagtcagagt

SEQ ID NO: 1545914 - DNA, 15 bp, Homo sapiens
tgtccagtcagagtc

SEQ ID NO: 1545915 - DNA, 15 bp, Homo sapiens
gtccagtcagagtca

SEQ ID NO: 1545916 - DNA, 15 bp, Homo sapiens
tccagtcagagtcac

SEQ ID NO: 1545917 - DNA, 15 bp, Homo sapiens
ccagtcagagtcact

SEQ ID NO: 1545918 - DNA, 15 bp, Homo sapiens
cagtcagagtcactt

SEQ ID NO: 1545919 - DNA, 15 bp, Homo sapiens
agtcagagtcactta

SEQ ID NO: 1545920 - DNA, 15 bp, Homo sapiens
gtcagagtcacttag

SEQ ID NO: 1545921 - DNA, 15 bp, Homo sapiens
tcagagtcacttagg

SEQ ID NO: 1545922 - DNA, 15 bp, Homo sapiens
cagagtcacttaggt

SEQ ID NO: 1545923 - DNA, 15 bp, Homo sapiens
agagtcacttaggtt

SEQ ID NO: 1545924 - DNA, 15 bp, Homo sapiens
gagtcacttaggttt

SEQ ID NO: 1545925 - DNA, 15 bp, Homo sapiens
agtcacttaggtttg

SEQ ID NO: 1545926 - DNA, 15 bp, Homo sapiens
gtcacttaggtttgc

SEQ ID NO: 1545927 - DNA, 15 bp, Homo sapiens
tcacttaggtttgcc

SEQ ID NO: 1545928 - DNA, 15 bp, Homo sapiens
cacttaggtttgcca

SEQ ID NO: 1545929 - DNA, 15 bp, Homo sapiens
acttaggtttgccag

SEQ ID NO: 1545930 - DNA, 15 bp, Homo sapiens
cttaggtttgccagt

SEQ ID NO: 1545931 - DNA, 15 bp, Homo sapiens
ttaggtttgccagtg

SEQ ID NO: 1545932 - DNA, 15 bp, Homo sapiens
taggtttgccagtga

SEQ ID NO: 1545933 - DNA, 15 bp, Homo sapiens
aggtttgccagtgag

SEQ ID NO: 1545934 - DNA, 15 bp, Homo sapiens
ggtttgccagtgagt

SEQ ID NO: 1545935 - DNA, 15 bp, Homo sapiens
gtttgccagtgagta

SEQ ID NO: 1545936 - DNA, 15 bp, Homo sapiens
tttgccagtgagtag

SEQ ID NO: 1545937 - DNA, 15 bp, Homo sapiens
ttgccagtgagtagg

SEQ ID NO: 1545938 - DNA, 15 bp, Homo sapiens
tgccagtgagtaggg

SEQ ID NO: 1545939 - DNA, 15 bp, Homo sapiens
gccagtgagtagggg

SEQ ID NO: 1545940 - DNA, 15 bp, Homo sapiens
ccagtgagtaggggc

SEQ ID NO: 1545941 - DNA, 15 bp, Homo sapiens
cagtgagtaggggcc

SEQ ID NO: 1545942 - DNA, 15 bp, Homo sapiens
agtgagtaggggccc

SEQ ID NO: 1545943 - DNA, 15 bp, Homo sapiens
gtgagtaggggccca

SEQ ID NO: 1545944 - DNA, 15 bp, Homo sapiens
tgagtaggggcccag

SEQ ID NO: 1545945 - DNA, 15 bp, Homo sapiens
gagtaggggcccaga

SEQ ID NO: 1545946 - DNA, 15 bp, Homo sapiens
agtaggggcccagat

SEQ ID NO: 1545947 - DNA, 15 bp, Homo sapiens
gtaggggcccagata

SEQ ID NO: 1545948 - DNA, 15 bp, Homo sapiens
taggggcccagatac

SEQ ID NO: 1545949 - DNA, 15 bp, Homo sapiens
aggggcccagataca

SEQ ID NO: 1545950 - DNA, 15 bp, Homo sapiens
ggggcccagatacat

SEQ ID NO: 1545951 - DNA, 15 bp, Homo sapiens
gggcccagatacatg

SEQ ID NO: 1545952 - DNA, 15 bp, Homo sapiens
ggcccagatacatgt

SEQ ID NO: 1545953 - DNA, 15 bp, Homo sapiens
gcccagatacatgtt

SEQ ID NO: 1545954 - DNA, 15 bp, Homo sapiens
cccagatacatgttg

SEQ ID NO: 1545955 - DNA, 15 bp, Homo sapiens
ccagatacatgttgg

SEQ ID NO: 1545956 - DNA, 15 bp, Homo sapiens
cagatacatgttgga

SEQ ID NO: 1545957 - DNA, 15 bp, Homo sapiens
agatacatgttggat

SEQ ID NO: 1545958 - DNA, 15 bp, Homo sapiens
gatacatgttggatt

SEQ ID NO: 1545959 - DNA, 15 bp, Homo sapiens
atacatgttggattt

SEQ ID NO: 1545960 - DNA, 15 bp, Homo sapiens
tacatgttggatttc

SEQ ID NO: 1545961 - DNA, 15 bp, Homo sapiens
acatgttggatttct

SEQ ID NO: 1545962 - DNA, 15 bp, Homo sapiens
catgttggatttcta

SEQ ID NO: 1545963 - DNA, 15 bp, Homo sapiens
atgttggatttctaa

SEQ ID NO: 1545964 - DNA, 15 bp, Homo sapiens
tgttggatttctaag

SEQ ID NO: 1545965 - DNA, 15 bp, Homo sapiens
gttggatttctaagg

SEQ ID NO: 1545966 - DNA, 15 bp, Homo sapiens
ttggatttctaaggt

SEQ ID NO: 1545967 - DNA, 15 bp, Homo sapiens
tggatttctaaggtc

SEQ ID NO: 1545968 - DNA, 15 bp, Homo sapiens
ggatttctaaggtcc

SEQ ID NO: 1545969 - DNA, 15 bp, Homo sapiens
gatttctaaggtccc

SEQ ID NO: 1545970 - DNA, 15 bp, Homo sapiens
atttctaaggtccct

SEQ ID NO: 1545971 - DNA, 15 bp, Homo sapiens
tttctaaggtccctc

SEQ ID NO: 1545972 - DNA, 15 bp, Homo sapiens
ttctaaggtccctcc

SEQ ID NO: 1545973 - DNA, 15 bp, Homo sapiens
tctaaggtccctcca

SEQ ID NO: 1545974 - DNA, 15 bp, Homo sapiens
ctaaggtccctccag

SEQ ID NO: 1545975 - DNA, 15 bp, Homo sapiens
taaggtccctccaga

SEQ ID NO: 1545976 - DNA, 15 bp, Homo sapiens
aaggtccctccagat

SEQ ID NO: 1545977 - DNA, 15 bp, Homo sapiens
aggtccctccagatg

SEQ ID NO: 1545978 - DNA, 15 bp, Homo sapiens
ggtccctccagatgc

SEQ ID NO: 1545979 - DNA, 15 bp, Homo sapiens
gtccctccagatgct

SEQ ID NO: 1545980 - DNA, 15 bp, Homo sapiens
tccctccagatgctc

SEQ ID NO: 1545981 - DNA, 15 bp, Homo sapiens
ccctccagatgctcc

SEQ ID NO: 1545982 - DNA, 15 bp, Homo sapiens
cctccagatgctcct

SEQ ID NO: 1545983 - DNA, 15 bp, Homo sapiens
ctccagatgctcctg

SEQ ID NO: 1545984 - DNA, 15 bp, Homo sapiens
tccagatgctcctgt

SEQ ID NO: 1545985 - DNA, 15 bp, Homo sapiens
ccagatgctcctgtc

SEQ ID NO: 1545986 - DNA, 15 bp, Homo sapiens
cagatgctcctgtca

SEQ ID NO: 1545987 - DNA, 15 bp, Homo sapiens
agatgctcctgtcag

SEQ ID NO: 1545988 - DNA, 15 bp, Homo sapiens
gatgctcctgtcagt

SEQ ID NO: 1545989 - DNA, 15 bp, Homo sapiens
atgctcctgtcagtg

SEQ ID NO: 1545990 - DNA, 15 bp, Homo sapiens
tgctcctgtcagtgg

SEQ ID NO: 1545991 - DNA, 15 bp, Homo sapiens
gctcctgtcagtgga

SEQ ID NO: 1545992 - DNA, 15 bp, Homo sapiens
ctcctgtcagtggaa

SEQ ID NO: 1545993 - DNA, 15 bp, Homo sapiens
tcctgtcagtggaac

SEQ ID NO: 1545994 - DNA, 15 bp, Homo sapiens
cctgtcagtggaacg

SEQ ID NO: 1545995 - DNA, 15 bp, Homo sapiens
ctgtcagtggaacgc

SEQ ID NO: 1545996 - DNA, 15 bp, Homo sapiens
tgtcagtggaacgcc

SEQ ID NO: 1545997 - DNA, 15 bp, Homo sapiens
gtcagtggaacgcct

SEQ ID NO: 1545998 - DNA, 15 bp, Homo sapiens
tcagtggaacgccta

SEQ ID NO: 1545999 - DNA, 15 bp, Homo sapiens
cagtggaacgcctat

SEQ ID NO: 1546000 - DNA, 15 bp, Homo sapiens
agtggaacgcctatt

SEQ ID NO: 1546001 - DNA, 15 bp, Homo sapiens
gtggaacgcctattt

SEQ ID NO: 1546002 - DNA, 15 bp, Homo sapiens
tggaacgcctattta

SEQ ID NO: 1546003 - DNA, 15 bp, Homo sapiens
ggaacgcctatttag

SEQ ID NO: 1546004 - DNA, 15 bp, Homo sapiens
gaacgcctatttaga

SEQ ID NO: 1546005 - DNA, 15 bp, Homo sapiens
aacgcctatttagag

SEQ ID NO: 1546006 - DNA, 15 bp, Homo sapiens
acgcctatttagagt

SEQ ID NO: 1546007 - DNA, 15 bp, Homo sapiens
cgcctatttagagtt

SEQ ID NO: 1546008 - DNA, 15 bp, Homo sapiens
gcctatttagagtta

SEQ ID NO: 1546009 - DNA, 15 bp, Homo sapiens
cctatttagagttag

SEQ ID NO: 1546010 - DNA, 15 bp, Homo sapiens
ctatttagagttagc

SEQ ID NO: 1546011 - DNA, 15 bp, Homo sapiens
tatttagagttagcc

SEQ ID NO: 1546012 - DNA, 15 bp, Homo sapiens
atttagagttagcca

SEQ ID NO: 1546013 - DNA, 15 bp, Homo sapiens
tttagagttagccaa

SEQ ID NO: 1546014 - DNA, 15 bp, Homo sapiens
ttagagttagccaag

SEQ ID NO: 1546015 - DNA, 15 bp, Homo sapiens
tagagttagccaagc

SEQ ID NO: 1546016 - DNA, 15 bp, Homo sapiens
agagttagccaagcg

SEQ ID NO: 1546017 - DNA, 15 bp, Homo sapiens
gagttagccaagcgt

SEQ ID NO: 1546018 - DNA, 15 bp, Homo sapiens
agttagccaagcgta

SEQ ID NO: 1546019 - DNA, 15 bp, Homo sapiens
gttagccaagcgtag

SEQ ID NO: 1546020 - DNA, 15 bp, Homo sapiens
ttagccaagcgtagg

SEQ ID NO: 1546021 - DNA, 15 bp, Homo sapiens
tagccaagcgtaggc

SEQ ID NO: 1546022 - DNA, 15 bp, Homo sapiens
agccaagcgtaggca

SEQ ID NO: 1546023 - DNA, 15 bp, Homo sapiens
gccaagcgtaggcat

SEQ ID NO: 1546024 - DNA, 15 bp, Homo sapiens
ccaagcgtaggcata

SEQ ID NO: 1546025 - DNA, 15 bp, Homo sapiens
caagcgtaggcataa

SEQ ID NO: 1546026 - DNA, 15 bp, Homo sapiens
aagcgtaggcataat

SEQ ID NO: 1546027 - DNA, 15 bp, Homo sapiens
agcgtaggcataatg

SEQ ID NO: 1546028 - DNA, 15 bp, Homo sapiens
gcgtaggcataatgc

SEQ ID NO: 1546029 - DNA, 15 bp, Homo sapiens
cgtaggcataatgcc

SEQ ID NO: 1546030 - DNA, 15 bp, Homo sapiens
gtaggcataatgcca

SEQ ID NO: 1546031 - DNA, 15 bp, Homo sapiens
taggcataatgccat

SEQ ID NO: 1546032 - DNA, 15 bp, Homo sapiens
aggcataatgccatc

SEQ ID NO: 1546033 - DNA, 15 bp, Homo sapiens
ggcataatgccatct

SEQ ID NO: 1546034 - DNA, 15 bp, Homo sapiens
gcataatgccatctt

SEQ ID NO: 1546035 - DNA, 15 bp, Homo sapiens
cataatgccatcttt

SEQ ID NO: 1546036 - DNA, 15 bp, Homo sapiens
ataatgccatctttc

SEQ ID NO: 1546037 - DNA, 15 bp, Homo sapiens
taatgccatctttct

SEQ ID NO: 1546038 - DNA, 15 bp, Homo sapiens
aatgccatctttctg

SEQ ID NO: 1546039 - DNA, 15 bp, Homo sapiens
atgccatctttctgc

SEQ ID NO: 1546040 - DNA, 15 bp, Homo sapiens
tgccatctttctgca

SEQ ID NO: 1546041 - DNA, 15 bp, Homo sapiens
gccatctttctgcag

SEQ ID NO: 1546042 - DNA, 15 bp, Homo sapiens
ccatctttctgcagc

SEQ ID NO: 1546043 - DNA, 15 bp, Homo sapiens
catctttctgcagca

SEQ ID NO: 1546044 - DNA, 15 bp, Homo sapiens
atctttctgcagcat

SEQ ID NO: 1546045 - DNA, 15 bp, Homo sapiens
tctttctgcagcata

SEQ ID NO: 1546046 - DNA, 15 bp, Homo sapiens
ctttctgcagcataa

SEQ ID NO: 1546047 - DNA, 15 bp, Homo sapiens
tttctgcagcataaa

SEQ ID NO: 1546048 - DNA, 15 bp, Homo sapiens
ttctgcagcataaaa

SEQ ID NO: 1546049 - DNA, 15 bp, Homo sapiens
tctgcagcataaaat

SEQ ID NO: 1546050 - DNA, 15 bp, Homo sapiens
ctgcagcataaaata

SEQ ID NO: 1546051 - DNA, 15 bp, Homo sapiens
tgcagcataaaatac

SEQ ID NO: 1546052 - DNA, 15 bp, Homo sapiens
gcagcataaaataca

SEQ ID NO: 1546053 - DNA, 15 bp, Homo sapiens
cagcataaaatacag

SEQ ID NO: 1546054 - DNA, 15 bp, Homo sapiens
agcataaaatacagt

SEQ ID NO: 1546055 - DNA, 15 bp, Homo sapiens
gcataaaatacagtg

SEQ ID NO: 1546056 - DNA, 15 bp, Homo sapiens
cataaaatacagtga

SEQ ID NO: 1546057 - DNA, 15 bp, Homo sapiens
ataaaatacagtgac

SEQ ID NO: 1546058 - DNA, 15 bp, Homo sapiens
taaaatacagtgaca

SEQ ID NO: 1546059 - DNA, 15 bp, Homo sapiens
aaaatacagtgacat

SEQ ID NO: 1546060 - DNA, 15 bp, Homo sapiens
aaatacagtgacata

SEQ ID NO: 1546061 - DNA, 15 bp, Homo sapiens
aatacagtgacatag

SEQ ID NO: 1546062 - DNA, 15 bp, Homo sapiens
atacagtgacataga

SEQ ID NO: 1546063 - DNA, 15 bp, Homo sapiens
tacagtgacatagaa

SEQ ID NO: 1546064 - DNA, 15 bp, Homo sapiens
acagtgacatagaaa

SEQ ID NO: 1546065 - DNA, 15 bp, Homo sapiens
cagtgacatagaaac

SEQ ID NO: 1546066 - DNA, 15 bp, Homo sapiens
agtgacatagaaaca

SEQ ID NO: 1546067 - DNA, 15 bp, Homo sapiens
gtgacatagaaacat

SEQ ID NO: 1546068 - DNA, 15 bp, Homo sapiens
tgacatagaaacata

SEQ ID NO: 1546069 - DNA, 15 bp, Homo sapiens
gacatagaaacatat

SEQ ID NO: 1546070 - DNA, 15 bp, Homo sapiens
acatagaaacatatt

SEQ ID NO: 1546071 - DNA, 15 bp, Homo sapiens
catagaaacatattt

SEQ ID NO: 1546072 - DNA, 15 bp, Homo sapiens
atagaaacatatttg

SEQ ID NO: 1546073 - DNA, 15 bp, Homo sapiens
tagaaacatatttgt

SEQ ID NO: 1546074 - DNA, 15 bp, Homo sapiens
agaaacatatttgtg

SEQ ID NO: 1546075 - DNA, 15 bp, Homo sapiens
gaaacatatttgtgt

SEQ ID NO: 1546076 - DNA, 15 bp, Homo sapiens
aaacatatttgtgtg

SEQ ID NO: 1546077 - DNA, 15 bp, Homo sapiens
aacatatttgtgtga

SEQ ID NO: 1546078 - DNA, 15 bp, Homo sapiens
acatatttgtgtgat

SEQ ID NO: 1546079 - DNA, 15 bp, Homo sapiens
catatttgtgtgatt

SEQ ID NO: 1546080 - DNA, 15 bp, Homo sapiens
atatttgtgtgattt

SEQ ID NO: 1546081 - DNA, 15 bp, Homo sapiens
tatttgtgtgatttt

SEQ ID NO: 1546082 - DNA, 15 bp, Homo sapiens
atttgtgtgattttc

SEQ ID NO: 1546083 - DNA, 15 bp, Homo sapiens
tttgtgtgattttca

SEQ ID NO: 1546084 - DNA, 15 bp, Homo sapiens
ttgtgtgattttcat

SEQ ID NO: 1546085 - DNA, 15 bp, Homo sapiens
tgtgtgattttcatg

SEQ ID NO: 1546086 - DNA, 15 bp, Homo sapiens
gtgtgattttcatgc

SEQ ID NO: 1546087 - DNA, 15 bp, Homo sapiens
tgtgattttcatgca

SEQ ID NO: 1546088 - DNA, 15 bp, Homo sapiens
gtgattttcatgcat

SEQ ID NO: 1546089 - DNA, 15 bp, Homo sapiens
tgattttcatgcatt

SEQ ID NO: 1546090 - DNA, 15 bp, Homo sapiens
gattttcatgcattc

SEQ ID NO: 1546091 - DNA, 15 bp, Homo sapiens
attttcatgcattcc

SEQ ID NO: 1546092 - DNA, 15 bp, Homo sapiens
ttttcatgcattcct

SEQ ID NO: 1546093 - DNA, 15 bp, Homo sapiens
tttcatgcattcctt

SEQ ID NO: 1546094 - DNA, 15 bp, Homo sapiens
ttcatgcattccttt

SEQ ID NO: 1546095 - DNA, 15 bp, Homo sapiens
tcatgcattcctttt

SEQ ID NO: 1546096 - DNA, 15 bp, Homo sapiens
catgcattccttttt

SEQ ID NO: 1546097 - DNA, 15 bp, Homo sapiens
atgcattcctttttt

SEQ ID NO: 1546098 - DNA, 15 bp, Homo sapiens
tgcattccttttttg

SEQ ID NO: 1546099 - DNA, 15 bp, Homo sapiens
gcattccttttttga

SEQ ID NO: 1546100 - DNA, 15 bp, Homo sapiens
cattccttttttgat

SEQ ID NO: 1546101 - DNA, 15 bp, Homo sapiens
attccttttttgatg

SEQ ID NO: 1546102 - DNA, 15 bp, Homo sapiens
ttccttttttgatga

SEQ ID NO: 1546103 - DNA, 15 bp, Homo sapiens
tccttttttgatgag

SEQ ID NO: 1546104 - DNA, 15 bp, Homo sapiens
ccttttttgatgaga

SEQ ID NO: 1546105 - DNA, 15 bp, Homo sapiens
cttttttgatgagag

SEQ ID NO: 1546106 - DNA, 15 bp, Homo sapiens
ttttttgatgagaga

SEQ ID NO: 1546107 - DNA, 15 bp, Homo sapiens
tttttgatgagagat

SEQ ID NO: 1546108 - DNA, 15 bp, Homo sapiens
ttttgatgagagata

SEQ ID NO: 1546109 - DNA, 15 bp, Homo sapiens
tttgatgagagatat

SEQ ID NO: 1546110 - DNA, 15 bp, Homo sapiens
ttgatgagagatatt

SEQ ID NO: 1546111 - DNA, 15 bp, Homo sapiens
tgatgagagatatta

SEQ ID NO: 1546112 - DNA, 15 bp, Homo sapiens
gatgagagatattac

SEQ ID NO: 1546113 - DNA, 15 bp, Homo sapiens
atgagagatattacc

SEQ ID NO: 1546114 - DNA, 15 bp, Homo sapiens
tgagagatattaccc

SEQ ID NO: 1546115 - DNA, 15 bp, Homo sapiens
gagagatattaccca

SEQ ID NO: 1546116 - DNA, 15 bp, Homo sapiens
agagatattacccag

SEQ ID NO: 1546117 - DNA, 15 bp, Homo sapiens
gagatattacccagc

SEQ ID NO: 1546118 - DNA, 15 bp, Homo sapiens
agatattacccagct

SEQ ID NO: 1546119 - DNA, 15 bp, Homo sapiens
gatattacccagcta

SEQ ID NO: 1546120 - DNA, 15 bp, Homo sapiens
atattacccagctaa

SEQ ID NO: 1546121 - DNA, 15 bp, Homo sapiens
tattacccagctaat

SEQ ID NO: 1546122 - DNA, 15 bp, Homo sapiens
attacccagctaatt

SEQ ID NO: 1546123 - DNA, 15 bp, Homo sapiens
ttacccagctaatta

SEQ ID NO: 1546124 - DNA, 15 bp, Homo sapiens
tacccagctaattag

SEQ ID NO: 1546125 - DNA, 15 bp, Homo sapiens
acccagctaattagg

SEQ ID NO: 1546126 - DNA, 15 bp, Homo sapiens
cccagctaattagga

SEQ ID NO: 1546127 - DNA, 15 bp, Homo sapiens
ccagctaattaggaa

SEQ ID NO: 1546128 - DNA, 15 bp, Homo sapiens
cagctaattaggaac

SEQ ID NO: 1546129 - DNA, 15 bp, Homo sapiens
agctaattaggaaca

SEQ ID NO: 1546130 - DNA, 15 bp, Homo sapiens
gctaattaggaacaa

SEQ ID NO: 1546131 - DNA, 15 bp, Homo sapiens
ctaattaggaacaac

SEQ ID NO: 1546132 - DNA, 15 bp, Homo sapiens
taattaggaacaact

SEQ ID NO: 1546133 - DNA, 15 bp, Homo sapiens
aattaggaacaactg

SEQ ID NO: 1546134 - DNA, 15 bp, Homo sapiens
attaggaacaactgt

SEQ ID NO: 1546135 - DNA, 15 bp, Homo sapiens
ttaggaacaactgtt

SEQ ID NO: 1546136 - DNA, 15 bp, Homo sapiens
taggaacaactgttt

SEQ ID NO: 1546137 - DNA, 15 bp, Homo sapiens
aggaacaactgtttt

SEQ ID NO: 1546138 - DNA, 15 bp, Homo sapiens
ggaacaactgttttg

SEQ ID NO: 1546139 - DNA, 15 bp, Homo sapiens
gaacaactgttttgt

SEQ ID NO: 1546140 - DNA, 15 bp, Homo sapiens
aacaactgttttgtt

SEQ ID NO: 1546141 - DNA, 15 bp, Homo sapiens
acaactgttttgttt

SEQ ID NO: 1546142 - DNA, 15 bp, Homo sapiens
caactgttttgtttc

SEQ ID NO: 1546143 - DNA, 15 bp, Homo sapiens
aactgttttgtttcc

SEQ ID NO: 1546144 - DNA, 15 bp, Homo sapiens
actgttttgtttcct

SEQ ID NO: 1546145 - DNA, 15 bp, Homo sapiens
ctgttttgtttcctt

SEQ ID NO: 1546146 - DNA, 15 bp, Homo sapiens
tgttttgtttccttc

SEQ ID NO: 1546147 - DNA, 15 bp, Homo sapiens
gttttgtttccttca

SEQ ID NO: 1546148 - DNA, 15 bp, Homo sapiens
ttttgtttccttcag

SEQ ID NO: 1546149 - DNA, 15 bp, Homo sapiens
tttgtttccttcaga

SEQ ID NO: 1546150 - DNA, 15 bp, Homo sapiens
ttgtttccttcagat

SEQ ID NO: 1546151 - DNA, 15 bp, Homo sapiens
tgtttccttcagatc

SEQ ID NO: 1546152 - DNA, 15 bp, Homo sapiens
gtttccttcagatca

SEQ ID NO: 1546153 - DNA, 15 bp, Homo sapiens
tttccttcagatcat

SEQ ID NO: 1546154 - DNA, 15 bp, Homo sapiens
ttccttcagatcata

SEQ ID NO: 1546155 - DNA, 15 bp, Homo sapiens
tccttcagatcataa

SEQ ID NO: 1546156 - DNA, 15 bp, Homo sapiens
ccttcagatcataac

SEQ ID NO: 1546157 - DNA, 15 bp, Homo sapiens
cttcagatcataacc

SEQ ID NO: 1546158 - DNA, 15 bp, Homo sapiens
ttcagatcataaccc

SEQ ID NO: 1546159 - DNA, 15 bp, Homo sapiens
tcagatcataaccca

SEQ ID NO: 1546160 - DNA, 15 bp, Homo sapiens
cagatcataacccaa

SEQ ID NO: 1546161 - DNA, 15 bp, Homo sapiens
agatcataacccaaa

SEQ ID NO: 1546162 - DNA, 15 bp, Homo sapiens
gatcataacccaaag

SEQ ID NO: 1546163 - DNA, 15 bp, Homo sapiens
atcataacccaaagt

SEQ ID NO: 1546164 - DNA, 15 bp, Homo sapiens
tcataacccaaagtt

SEQ ID NO: 1546165 - DNA, 15 bp, Homo sapiens
cataacccaaagttg

SEQ ID NO: 1546166 - DNA, 15 bp, Homo sapiens
ataacccaaagttgt

SEQ ID NO: 1546167 - DNA, 15 bp, Homo sapiens
taacccaaagttgtg

SEQ ID NO: 1546168 - DNA, 15 bp, Homo sapiens
aacccaaagttgtga

SEQ ID NO: 1546169 - DNA, 15 bp, Homo sapiens
acccaaagttgtgat

SEQ ID NO: 1546170 - DNA, 15 bp, Homo sapiens
cccaaagttgtgatt

SEQ ID NO: 1546171 - DNA, 15 bp, Homo sapiens
ccaaagttgtgattt

SEQ ID NO: 1546172 - DNA, 15 bp, Homo sapiens
caaagttgtgatttt

SEQ ID NO: 1546173 - DNA, 15 bp, Homo sapiens
aaagttgtgattttg

SEQ ID NO: 1546174 - DNA, 15 bp, Homo sapiens
aagttgtgattttga

SEQ ID NO: 1546175 - DNA, 15 bp, Homo sapiens
agttgtgattttgaa

SEQ ID NO: 1546176 - DNA, 15 bp, Homo sapiens
gttgtgattttgaaa

SEQ ID NO: 1546177 - DNA, 15 bp, Homo sapiens
ttgtgattttgaaaa

SEQ ID NO: 1546178 - DNA, 15 bp, Homo sapiens
tgtgattttgaaaag

SEQ ID NO: 1546179 - DNA, 15 bp, Homo sapiens
gtgattttgaaaagt

SEQ ID NO: 1546180 - DNA, 15 bp, Homo sapiens
tgattttgaaaagtc

SEQ ID NO: 1546181 - DNA, 15 bp, Homo sapiens
gattttgaaaagtca

SEQ ID NO: 1546182 - DNA, 15 bp, Homo sapiens
attttgaaaagtcat

SEQ ID NO: 1546183 - DNA, 15 bp, Homo sapiens
ttttgaaaagtcatg

SEQ ID NO: 1546184 - DNA, 15 bp, Homo sapiens
tttgaaaagtcatgt

SEQ ID NO: 1546185 - DNA, 15 bp, Homo sapiens
ttgaaaagtcatgtc

SEQ ID NO: 1546186 - DNA, 15 bp, Homo sapiens
tgaaaagtcatgtcc

SEQ ID NO: 1546187 - DNA, 15 bp, Homo sapiens
gaaaagtcatgtccc

SEQ ID NO: 1546188 - DNA, 15 bp, Homo sapiens
aaaagtcatgtcccc

SEQ ID NO: 1546189 - DNA, 15 bp, Homo sapiens
aaagtcatgtccccc

SEQ ID NO: 1546190 - DNA, 15 bp, Homo sapiens
aagtcatgtccccct

SEQ ID NO: 1546191 - DNA, 15 bp, Homo sapiens
agtcatgtccccctt

SEQ ID NO: 1546192 - DNA, 15 bp, Homo sapiens
gtcatgtcccccttc

SEQ ID NO: 1546193 - DNA, 15 bp, Homo sapiens
tcatgtcccccttca

SEQ ID NO: 1546194 - DNA, 15 bp, Homo sapiens
catgtcccccttcag

SEQ ID NO: 1546195 - DNA, 15 bp, Homo sapiens
atgtcccccttcaga

SEQ ID NO: 1546196 - DNA, 15 bp, Homo sapiens
tgtcccccttcagat

SEQ ID NO: 1546197 - DNA, 15 bp, Homo sapiens
gtcccccttcagatt

SEQ ID NO: 1546198 - DNA, 15 bp, Homo sapiens
tcccccttcagattt

SEQ ID NO: 1546199 - DNA, 15 bp, Homo sapiens
cccccttcagatttc

SEQ ID NO: 1546200 - DNA, 15 bp, Homo sapiens
ccccttcagatttct

SEQ ID NO: 1546201 - DNA, 15 bp, Homo sapiens
cccttcagatttctt

SEQ ID NO: 1546202 - DNA, 15 bp, Homo sapiens
ccttcagatttcttg

SEQ ID NO: 1546203 - DNA, 15 bp, Homo sapiens
cttcagatttcttgt

SEQ ID NO: 1546204 - DNA, 15 bp, Homo sapiens
ttcagatttcttgtt

SEQ ID NO: 1546205 - DNA, 15 bp, Homo sapiens
tcagatttcttgttt

SEQ ID NO: 1546206 - DNA, 15 bp, Homo sapiens
cagatttcttgtttt

SEQ ID NO: 1546207 - DNA, 15 bp, Homo sapiens
agatttcttgttttc

SEQ ID NO: 1546208 - DNA, 15 bp, Homo sapiens
gatttcttgttttct

SEQ ID NO: 1546209 - DNA, 15 bp, Homo sapiens
atttcttgttttctg

SEQ ID NO: 1546210 - DNA, 15 bp, Homo sapiens
tttcttgttttctgc

SEQ ID NO: 1546211 - DNA, 15 bp, Homo sapiens
ttcttgttttctgct

SEQ ID NO: 1546212 - DNA, 15 bp, Homo sapiens
tcttgttttctgcta

SEQ ID NO: 1546213 - DNA, 15 bp, Homo sapiens
cttgttttctgctac

SEQ ID NO: 1546214 - DNA, 15 bp, Homo sapiens
ttgttttctgctact

SEQ ID NO: 1546215 - DNA, 15 bp, Homo sapiens
tgttttctgctactt

SEQ ID NO: 1546216 - DNA, 15 bp, Homo sapiens
gttttctgctacttc

SEQ ID NO: 1546217 - DNA, 15 bp, Homo sapiens
ttttctgctacttct

SEQ ID NO: 1546218 - DNA, 15 bp, Homo sapiens
tttctgctacttctc

SEQ ID NO: 1546219 - DNA, 15 bp, Homo sapiens
ttctgctacttctca

SEQ ID NO: 1546220 - DNA, 15 bp, Homo sapiens
tctgctacttctcat

SEQ ID NO: 1546221 - DNA, 15 bp, Homo sapiens
ctgctacttctcatg

SEQ ID NO: 1546222 - DNA, 15 bp, Homo sapiens
tgctacttctcatgt

SEQ ID NO: 1546223 - DNA, 15 bp, Homo sapiens
gctacttctcatgtg

SEQ ID NO: 1546224 - DNA, 15 bp, Homo sapiens
ctacttctcatgtgg

SEQ ID NO: 1546225 - DNA, 15 bp, Homo sapiens
tacttctcatgtgga

SEQ ID NO: 1546226 - DNA, 15 bp, Homo sapiens
acttctcatgtggaa

SEQ ID NO: 1546227 - DNA, 15 bp, Homo sapiens
cttctcatgtggaat

SEQ ID NO: 1546228 - DNA, 15 bp, Homo sapiens
ttctcatgtggaatt

SEQ ID NO: 1546229 - DNA, 15 bp, Homo sapiens
tctcatgtggaattg

SEQ ID NO: 1546230 - DNA, 15 bp, Homo sapiens
ctcatgtggaattgc

SEQ ID NO: 1546231 - DNA, 15 bp, Homo sapiens
tcatgtggaattgct

SEQ ID NO: 1546232 - DNA, 15 bp, Homo sapiens
catgtggaattgctt

SEQ ID NO: 1546233 - DNA, 15 bp, Homo sapiens
atgtggaattgcttt

SEQ ID NO: 1546234 - DNA, 15 bp, Homo sapiens
tgtggaattgctttg

SEQ ID NO: 1546235 - DNA, 15 bp, Homo sapiens
gtggaattgctttgg

SEQ ID NO: 1546236 - DNA, 15 bp, Homo sapiens
tggaattgctttggc

SEQ ID NO: 1546237 - DNA, 15 bp, Homo sapiens
ggaattgctttggct

SEQ ID NO: 1546238 - DNA, 15 bp, Homo sapiens
gaattgctttggctc

SEQ ID NO: 1546239 - DNA, 15 bp, Homo sapiens
aattgctttggctct

SEQ ID NO: 1546240 - DNA, 15 bp, Homo sapiens
attgctttggctctt

SEQ ID NO: 1546241 - DNA, 15 bp, Homo sapiens
ttgctttggctcttc

SEQ ID NO: 1546242 - DNA, 15 bp, Homo sapiens
tgctttggctcttct

SEQ ID NO: 1546243 - DNA, 15 bp, Homo sapiens
gctttggctcttctt

SEQ ID NO: 1546244 - DNA, 15 bp, Homo sapiens
ctttggctcttctta

SEQ ID NO: 1546245 - DNA, 15 bp, Homo sapiens
tttggctcttcttag

SEQ ID NO: 1546246 - DNA, 15 bp, Homo sapiens
ttggctcttcttagt

SEQ ID NO: 1546247 - DNA, 15 bp, Homo sapiens
tggctcttcttagtt

SEQ ID NO: 1546248 - DNA, 15 bp, Homo sapiens
ggctcttcttagttc

SEQ ID NO: 1546249 - DNA, 15 bp, Homo sapiens
gctcttcttagttct

SEQ ID NO: 1546250 - DNA, 15 bp, Homo sapiens
ctcttcttagttctc

SEQ ID NO: 1546251 - DNA, 15 bp, Homo sapiens
tcttcttagttctct

SEQ ID NO: 1546252 - DNA, 15 bp, Homo sapiens
cttcttagttctctt

SEQ ID NO: 1546253 - DNA, 15 bp, Homo sapiens
ttcttagttctcttg

SEQ ID NO: 1546254 - DNA, 15 bp, Homo sapiens
tcttagttctcttga

SEQ ID NO: 1546255 - DNA, 15 bp, Homo sapiens
cttagttctcttgag

SEQ ID NO: 1546256 - DNA, 15 bp, Homo sapiens
ttagttctcttgagt

SEQ ID NO: 1546257 - DNA, 15 bp, Homo sapiens
tagttctcttgagtc

SEQ ID NO: 1546258 - DNA, 15 bp, Homo sapiens
agttctcttgagtct

SEQ ID NO: 1546259 - DNA, 15 bp, Homo sapiens
gttctcttgagtcta

SEQ ID NO: 1546260 - DNA, 15 bp, Homo sapiens
ttctcttgagtctaa

SEQ ID NO: 1546261 - DNA, 15 bp, Homo sapiens
tctcttgagtctaaa

SEQ ID NO: 1546262 - DNA, 15 bp, Homo sapiens
ctcttgagtctaaat

SEQ ID NO: 1546263 - DNA, 15 bp, Homo sapiens
tcttgagtctaaatt

SEQ ID NO: 1546264 - DNA, 15 bp, Homo sapiens
cttgagtctaaatta

SEQ ID NO: 1546265 - DNA, 15 bp, Homo sapiens
ttgagtctaaattat

SEQ ID NO: 1546266 - DNA, 15 bp, Homo sapiens
tgagtctaaattatt

SEQ ID NO: 1546267 - DNA, 15 bp, Homo sapiens
gagtctaaattattc

SEQ ID NO: 1546268 - DNA, 15 bp, Homo sapiens
agtctaaattattcc

SEQ ID NO: 1546269 - DNA, 15 bp, Homo sapiens
gtctaaattattcct

SEQ ID NO: 1546270 - DNA, 15 bp, Homo sapiens
tctaaattattcctt

SEQ ID NO: 1546271 - DNA, 15 bp, Homo sapiens
ctaaattattcctta

SEQ ID NO: 1546272 - DNA, 15 bp, Homo sapiens
taaattattccttat

SEQ ID NO: 1546273 - DNA, 15 bp, Homo sapiens
aaattattccttata

SEQ ID NO: 1546274 - DNA, 15 bp, Homo sapiens
aattattccttataa

SEQ ID NO: 1546275 - DNA, 15 bp, Homo sapiens
attattccttataag

SEQ ID NO: 1546276 - DNA, 15 bp, Homo sapiens
ttattccttataagt

SEQ ID NO: 1546277 - DNA, 15 bp, Homo sapiens
tattccttataagtt

SEQ ID NO: 1546278 - DNA, 15 bp, Homo sapiens
attccttataagttg

SEQ ID NO: 1546279 - DNA, 15 bp, Homo sapiens
ttccttataagttgg

SEQ ID NO: 1546280 - DNA, 15 bp, Homo sapiens
tccttataagttggt

SEQ ID NO: 1546281 - DNA, 15 bp, Homo sapiens
ccttataagttggtg

SEQ ID NO: 1546282 - DNA, 15 bp, Homo sapiens
cttataagttggtgc

SEQ ID NO: 1546283 - DNA, 15 bp, Homo sapiens
ttataagttggtgca

SEQ ID NO: 1546284 - DNA, 15 bp, Homo sapiens
tataagttggtgcaa

SEQ ID NO: 1546285 - DNA, 15 bp, Homo sapiens
ataagttggtgcaag

SEQ ID NO: 1546286 - DNA, 15 bp, Homo sapiens
taagttggtgcaagc

SEQ ID NO: 1546287 - DNA, 15 bp, Homo sapiens
aagttggtgcaagca

SEQ ID NO: 1546288 - DNA, 15 bp, Homo sapiens
agttggtgcaagcat

SEQ ID NO: 1546289 - DNA, 15 bp, Homo sapiens
gttggtgcaagcatc

SEQ ID NO: 1546290 - DNA, 15 bp, Homo sapiens
ttggtgcaagcatct

SEQ ID NO: 1546291 - DNA, 15 bp, Homo sapiens
tggtgcaagcatctg

SEQ ID NO: 1546292 - DNA, 15 bp, Homo sapiens
ggtgcaagcatctga

SEQ ID NO: 1546293 - DNA, 15 bp, Homo sapiens
gtgcaagcatctgat

SEQ ID NO: 1546294 - DNA, 15 bp, Homo sapiens
tgcaagcatctgatt

SEQ ID NO: 1546295 - DNA, 15 bp, Homo sapiens
gcaagcatctgatta

SEQ ID NO: 1546296 - DNA, 15 bp, Homo sapiens
caagcatctgattat

SEQ ID NO: 1546297 - DNA, 15 bp, Homo sapiens
aagcatctgattatt

SEQ ID NO: 1546298 - DNA, 15 bp, Homo sapiens
agcatctgattattt

SEQ ID NO: 1546299 - DNA, 15 bp, Homo sapiens
gcatctgattatttt

SEQ ID NO: 1546300 - DNA, 15 bp, Homo sapiens
catctgattattttg

SEQ ID NO: 1546301 - DNA, 15 bp, Homo sapiens
atctgattattttgt

SEQ ID NO: 1546302 - DNA, 15 bp, Homo sapiens
tctgattattttgtt

SEQ ID NO: 1546303 - DNA, 15 bp, Homo sapiens
ctgattattttgtta

SEQ ID NO: 1546304 - DNA, 15 bp, Homo sapiens
tgattattttgttat

SEQ ID NO: 1546305 - DNA, 15 bp, Homo sapiens
gattattttgttatc

SEQ ID NO: 1546306 - DNA, 15 bp, Homo sapiens
attattttgttatca

SEQ ID NO: 1546307 - DNA, 15 bp, Homo sapiens
ttattttgttatcat

SEQ ID NO: 1546308 - DNA, 15 bp, Homo sapiens
tattttgttatcatt

SEQ ID NO: 1546309 - DNA, 15 bp, Homo sapiens
attttgttatcatta

SEQ ID NO: 1546310 - DNA, 15 bp, Homo sapiens
ttttgttatcattac

SEQ ID NO: 1546311 - DNA, 15 bp, Homo sapiens
tttgttatcattact

SEQ ID NO: 1546312 - DNA, 15 bp, Homo sapiens
ttgttatcattactg

SEQ ID NO: 1546313 - DNA, 15 bp, Homo sapiens
tgttatcattactgt

SEQ ID NO: 1546314 - DNA, 15 bp, Homo sapiens
gttatcattactgtt

SEQ ID NO: 1546315 - DNA, 15 bp, Homo sapiens
ttatcattactgtta

SEQ ID NO: 1546316 - DNA, 15 bp, Homo sapiens
tatcattactgttat

SEQ ID NO: 1546317 - DNA, 15 bp, Homo sapiens
atcattactgttatg

SEQ ID NO: 1546318 - DNA, 15 bp, Homo sapiens
tcattactgttatgc

SEQ ID NO: 1546319 - DNA, 15 bp, Homo sapiens
cattactgttatgct

SEQ ID NO: 1546320 - DNA, 15 bp, Homo sapiens
attactgttatgctc

SEQ ID NO: 1546321 - DNA, 15 bp, Homo sapiens
ttactgttatgctca

SEQ ID NO: 1546322 - DNA, 15 bp, Homo sapiens
tactgttatgctcaa

SEQ ID NO: 1546323 - DNA, 15 bp, Homo sapiens
actgttatgctcaag

SEQ ID NO: 1546324 - DNA, 15 bp, Homo sapiens
ctgttatgctcaagc

SEQ ID NO: 1546325 - DNA, 15 bp, Homo sapiens
tgttatgctcaagca

SEQ ID NO: 1546326 - DNA, 15 bp, Homo sapiens
gttatgctcaagcat

SEQ ID NO: 1546327 - DNA, 15 bp, Homo sapiens
ttatgctcaagcatt

SEQ ID NO: 1546328 - DNA, 15 bp, Homo sapiens
tatgctcaagcattc

SEQ ID NO: 1546329 - DNA, 15 bp, Homo sapiens
atgctcaagcattca

SEQ ID NO: 1546330 - DNA, 15 bp, Homo sapiens
tgctcaagcattcac

SEQ ID NO: 1546331 - DNA, 15 bp, Homo sapiens
gctcaagcattcaca

SEQ ID NO: 1546332 - DNA, 15 bp, Homo sapiens
ctcaagcattcacag

SEQ ID NO: 1546333 - DNA, 15 bp, Homo sapiens
tcaagcattcacaga

SEQ ID NO: 1546334 - DNA, 15 bp, Homo sapiens
caagcattcacagag

SEQ ID NO: 1546335 - DNA, 15 bp, Homo sapiens
aagcattcacagagt

SEQ ID NO: 1546336 - DNA, 15 bp, Homo sapiens
agcattcacagagtg

SEQ ID NO: 1546337 - DNA, 15 bp, Homo sapiens
gcattcacagagtgg

SEQ ID NO: 1546338 - DNA, 15 bp, Homo sapiens
cattcacagagtgga

SEQ ID NO: 1546339 - DNA, 15 bp, Homo sapiens
attcacagagtggaa

SEQ ID NO: 1546340 - DNA, 15 bp, Homo sapiens
ttcacagagtggaac

SEQ ID NO: 1546341 - DNA, 15 bp, Homo sapiens
tcacagagtggaaca

SEQ ID NO: 1546342 - DNA, 15 bp, Homo sapiens
cacagagtggaacac

SEQ ID NO: 1546343 - DNA, 15 bp, Homo sapiens
acagagtggaacaca

SEQ ID NO: 1546344 - DNA, 15 bp, Homo sapiens
cagagtggaacacat

SEQ ID NO: 1546345 - DNA, 15 bp, Homo sapiens
agagtggaacacatt

SEQ ID NO: 1546346 - DNA, 15 bp, Homo sapiens
gagtggaacacattt

SEQ ID NO: 1546347 - DNA, 15 bp, Homo sapiens
agtggaacacatttt

SEQ ID NO: 1546348 - DNA, 15 bp, Homo sapiens
gtggaacacatttta

SEQ ID NO: 1546349 - DNA, 15 bp, Homo sapiens
tggaacacattttaa

SEQ ID NO: 1546350 - DNA, 15 bp, Homo sapiens
ggaacacattttaat

SEQ ID NO: 1546351 - DNA, 15 bp, Homo sapiens
gaacacattttaata

SEQ ID NO: 1546352 - DNA, 15 bp, Homo sapiens
aacacattttaatat

SEQ ID NO: 1546353 - DNA, 15 bp, Homo sapiens
acacattttaatatc

SEQ ID NO: 1546354 - DNA, 15 bp, Homo sapiens
cacattttaatatca

SEQ ID NO: 1546355 - DNA, 15 bp, Homo sapiens
acattttaatatcaa

SEQ ID NO: 1546356 - DNA, 15 bp, Homo sapiens
cattttaatatcaat

SEQ ID NO: 1546357 - DNA, 15 bp, Homo sapiens
attttaatatcaatt

SEQ ID NO: 1546358 - DNA, 15 bp, Homo sapiens
ttttaatatcaattg

SEQ ID NO: 1546359 - DNA, 15 bp, Homo sapiens
tttaatatcaattgc

SEQ ID NO: 1546360 - DNA, 15 bp, Homo sapiens
ttaatatcaattgct

SEQ ID NO: 1546361 - DNA, 15 bp, Homo sapiens
taatatcaattgctt

SEQ ID NO: 1546362 - DNA, 15 bp, Homo sapiens
aatatcaattgcttt

SEQ ID NO: 1546363 - DNA, 15 bp, Homo sapiens
atatcaattgctttc

SEQ ID NO: 1546364 - DNA, 15 bp, Homo sapiens
tatcaattgctttct

SEQ ID NO: 1546365 - DNA, 15 bp, Homo sapiens
atcaattgctttcta

SEQ ID NO: 1546366 - DNA, 15 bp, Homo sapiens
tcaattgctttctat

SEQ ID NO: 1546367 - DNA, 15 bp, Homo sapiens
caattgctttctatt

SEQ ID NO: 1546368 - DNA, 15 bp, Homo sapiens
aattgctttctattt

SEQ ID NO: 1546369 - DNA, 15 bp, Homo sapiens
attgctttctatttc

SEQ ID NO: 1546370 - DNA, 15 bp, Homo sapiens
ttgctttctatttct

SEQ ID NO: 1546371 - DNA, 15 bp, Homo sapiens
tgctttctatttctc

SEQ ID NO: 1546372 - DNA, 15 bp, Homo sapiens
gctttctatttctcc

SEQ ID NO: 1546373 - DNA, 15 bp, Homo sapiens
ctttctatttctcct

SEQ ID NO: 1546374 - DNA, 15 bp, Homo sapiens
tttctatttctcctt

SEQ ID NO: 1546375 - DNA, 15 bp, Homo sapiens
ttctatttctccttt

SEQ ID NO: 1546376 - DNA, 15 bp, Homo sapiens
tctatttctccttta

SEQ ID NO: 1546377 - DNA, 15 bp, Homo sapiens
ctatttctcctttat

SEQ ID NO: 1546378 - DNA, 15 bp, Homo sapiens
tatttctcctttata

SEQ ID NO: 1546379 - DNA, 15 bp, Homo sapiens
atttctcctttatat

SEQ ID NO: 1546380 - DNA, 15 bp, Homo sapiens
tttctcctttatatt

SEQ ID NO: 1546381 - DNA, 15 bp, Homo sapiens
ttctcctttatatta

SEQ ID NO: 1546382 - DNA, 15 bp, Homo sapiens
tctcctttatattac

SEQ ID NO: 1546383 - DNA, 15 bp, Homo sapiens
ctcctttatattaca

SEQ ID NO: 1546384 - DNA, 15 bp, Homo sapiens
tcctttatattacag

SEQ ID NO: 1546385 - DNA, 15 bp, Homo sapiens
cctttatattacagt

SEQ ID NO: 1546386 - DNA, 15 bp, Homo sapiens
ctttatattacagtt

SEQ ID NO: 1546387 - DNA, 15 bp, Homo sapiens
tttatattacagttc

SEQ ID NO: 1546388 - DNA, 15 bp, Homo sapiens
ttatattacagttca

SEQ ID NO: 1546389 - DNA, 15 bp, Homo sapiens
tatattacagttcag

SEQ ID NO: 1546390 - DNA, 15 bp, Homo sapiens
atattacagttcagg

SEQ ID NO: 1546391 - DNA, 15 bp, Homo sapiens
tattacagttcagga

SEQ ID NO: 1546392 - DNA, 15 bp, Homo sapiens
attacagttcaggac

SEQ ID NO: 1546393 - DNA, 15 bp, Homo sapiens
ttacagttcaggaca

SEQ ID NO: 1546394 - DNA, 15 bp, Homo sapiens
tacagttcaggacat

SEQ ID NO: 1546395 - DNA, 15 bp, Homo sapiens
acagttcaggacatt

SEQ ID NO: 1546396 - DNA, 15 bp, Homo sapiens
cagttcaggacattg

SEQ ID NO: 1546397 - DNA, 15 bp, Homo sapiens
agttcaggacattgt

SEQ ID NO: 1546398 - DNA, 15 bp, Homo sapiens
gttcaggacattgta

SEQ ID NO: 1546399 - DNA, 15 bp, Homo sapiens
ttcaggacattgtat

SEQ ID NO: 1546400 - DNA, 15 bp, Homo sapiens
tcaggacattgtatt

SEQ ID NO: 1546401 - DNA, 15 bp, Homo sapiens
caggacattgtatta

SEQ ID NO: 1546402 - DNA, 15 bp, Homo sapiens
aggacattgtattaa

SEQ ID NO: 1546403 - DNA, 15 bp, Homo sapiens
ggacattgtattaat

SEQ ID NO: 1546404 - DNA, 15 bp, Homo sapiens
gacattgtattaatt

SEQ ID NO: 1546405 - DNA, 15 bp, Homo sapiens
acattgtattaatta

SEQ ID NO: 1546406 - DNA, 15 bp, Homo sapiens
cattgtattaattat

SEQ ID NO: 1546407 - DNA, 15 bp, Homo sapiens
attgtattaattatt

SEQ ID NO: 1546408 - DNA, 15 bp, Homo sapiens
ttgtattaattatta

SEQ ID NO: 1546409 - DNA, 15 bp, Homo sapiens
tgtattaattattaa

SEQ ID NO: 1546410 - DNA, 15 bp, Homo sapiens
gtattaattattaaa

SEQ ID NO: 1546411 - DNA, 15 bp, Homo sapiens
tattaattattaaaa

SEQ ID NO: 1546412 - DNA, 15 bp, Homo sapiens
attaattattaaaat

SEQ ID NO: 1546413 - DNA, 15 bp, Homo sapiens
ttaattattaaaatt

SEQ ID NO: 1546414 - DNA, 15 bp, Homo sapiens
taattattaaaattc

SEQ ID NO: 1546415 - DNA, 15 bp, Homo sapiens
aattattaaaattct

SEQ ID NO: 1546416 - DNA, 15 bp, Homo sapiens
attattaaaattcta

SEQ ID NO: 1546417 - DNA, 15 bp, Homo sapiens
ttattaaaattctat

SEQ ID NO: 1546418 - DNA, 15 bp, Homo sapiens
tattaaaattctatt

SEQ ID NO: 1546419 - DNA, 15 bp, Homo sapiens
attaaaattctattc

SEQ ID NO: 1546420 - DNA, 15 bp, Homo sapiens
ttaaaattctattcg

SEQ ID NO: 1546421 - DNA, 15 bp, Homo sapiens
taaaattctattcgt

SEQ ID NO: 1546422 - DNA, 15 bp, Homo sapiens
aaaattctattcgta

SEQ ID NO: 1546423 - DNA, 15 bp, Homo sapiens
aaattctattcgtag

SEQ ID NO: 1546424 - DNA, 15 bp, Homo sapiens
aattctattcgtagg

SEQ ID NO: 1546425 - DNA, 15 bp, Homo sapiens
attctattcgtaggt

SEQ ID NO: 1546426 - DNA, 15 bp, Homo sapiens
ttctattcgtaggta

SEQ ID NO: 1546427 - DNA, 15 bp, Homo sapiens
tctattcgtaggtag

SEQ ID NO: 1546428 - DNA, 15 bp, Homo sapiens
ctattcgtaggtagg

SEQ ID NO: 1546429 - DNA, 15 bp, Homo sapiens
tattcgtaggtaggt

SEQ ID NO: 1546430 - DNA, 15 bp, Homo sapiens
attcgtaggtaggtt

SEQ ID NO: 1546431 - DNA, 15 bp, Homo sapiens
ttcgtaggtaggtta

SEQ ID NO: 1546432 - DNA, 15 bp, Homo sapiens
tcgtaggtaggttat

SEQ ID NO: 1546433 - DNA, 15 bp, Homo sapiens
cgtaggtaggttata

SEQ ID NO: 1546434 - DNA, 15 bp, Homo sapiens
gtaggtaggttatat

SEQ ID NO: 1546435 - DNA, 15 bp, Homo sapiens
taggtaggttatatg

SEQ ID NO: 1546436 - DNA, 15 bp, Homo sapiens
aggtaggttatatga

SEQ ID NO: 1546437 - DNA, 15 bp, Homo sapiens
ggtaggttatatgac

SEQ ID NO: 1546438 - DNA, 15 bp, Homo sapiens
gtaggttatatgact

SEQ ID NO: 1546439 - DNA, 15 bp, Homo sapiens
taggttatatgactg

SEQ ID NO: 1546440 - DNA, 15 bp, Homo sapiens
aggttatatgactga

SEQ ID NO: 1546441 - DNA, 15 bp, Homo sapiens
ggttatatgactgaa

SEQ ID NO: 1546442 - DNA, 15 bp, Homo sapiens
gttatatgactgaat

SEQ ID NO: 1546443 - DNA, 15 bp, Homo sapiens
ttatatgactgaatt

SEQ ID NO: 1546444 - DNA, 15 bp, Homo sapiens
tatatgactgaattg

SEQ ID NO: 1546445 - DNA, 15 bp, Homo sapiens
atatgactgaattga

SEQ ID NO: 1546446 - DNA, 15 bp, Homo sapiens
tatgactgaattgaa

SEQ ID NO: 1546447 - DNA, 15 bp, Homo sapiens
atgactgaattgaaa

SEQ ID NO: 1546448 - DNA, 15 bp, Homo sapiens
tgactgaattgaaat

SEQ ID NO: 1546449 - DNA, 15 bp, Homo sapiens
gactgaattgaaata

SEQ ID NO: 1546450 - DNA, 15 bp, Homo sapiens
actgaattgaaatag

SEQ ID NO: 1546451 - DNA, 15 bp, Homo sapiens
ctgaattgaaataga

SEQ ID NO: 1546452 - DNA, 15 bp, Homo sapiens
tgaattgaaatagat

SEQ ID NO: 1546453 - DNA, 15 bp, Homo sapiens
gaattgaaatagata

SEQ ID NO: 1546454 - DNA, 15 bp, Homo sapiens
aattgaaatagataa

SEQ ID NO: 1546455 - DNA, 15 bp, Homo sapiens
attgaaatagataaa

SEQ ID NO: 1546456 - DNA, 15 bp, Homo sapiens
ttgaaatagataaaa

SEQ ID NO: 1546457 - DNA, 15 bp, Homo sapiens
tgaaatagataaaat

SEQ ID NO: 1546458 - DNA, 15 bp, Homo sapiens
gaaatagataaaatg

SEQ ID NO: 1546459 - DNA, 15 bp, Homo sapiens
aaatagataaaatga

SEQ ID NO: 1546460 - DNA, 15 bp, Homo sapiens
aatagataaaatgaa

SEQ ID NO: 1546461 - DNA, 15 bp, Homo sapiens
atagataaaatgaat

SEQ ID NO: 1546462 - DNA, 15 bp, Homo sapiens
tagataaaatgaatt

SEQ ID NO: 1546463 - DNA, 15 bp, Homo sapiens
agataaaatgaattt

SEQ ID NO: 1546464 - DNA, 15 bp, Homo sapiens
gataaaatgaatttc

SEQ ID NO: 1546465 - DNA, 15 bp, Homo sapiens
ataaaatgaatttct

SEQ ID NO: 1546466 - DNA, 15 bp, Homo sapiens
taaaatgaatttctt

SEQ ID NO: 1546467 - DNA, 15 bp, Homo sapiens
aaaatgaatttcttt

SEQ ID NO: 1546468 - DNA, 15 bp, Homo sapiens
aaatgaatttctttt

SEQ ID NO: 1546469 - DNA, 15 bp, Homo sapiens
aatgaatttcttttc

SEQ ID NO: 1546470 - DNA, 15 bp, Homo sapiens
atgaatttcttttct

SEQ ID NO: 1546471 - DNA, 15 bp, Homo sapiens
tgaatttcttttcta

SEQ ID NO: 1546472 - DNA, 15 bp, Homo sapiens
gaatttcttttctag

SEQ ID NO: 1546473 - DNA, 15 bp, Homo sapiens
aatttcttttctaga

SEQ ID NO: 1546474 - DNA, 15 bp, Homo sapiens
atttcttttctagat

SEQ ID NO: 1546475 - DNA, 15 bp, Homo sapiens
tttcttttctagata

SEQ ID NO: 1546476 - DNA, 15 bp, Homo sapiens
ttcttttctagataa

SEQ ID NO: 1546477 - DNA, 15 bp, Homo sapiens
tcttttctagataac

SEQ ID NO: 1546478 - DNA, 15 bp, Homo sapiens
cttttctagataaca

SEQ ID NO: 1546479 - DNA, 15 bp, Homo sapiens
ttttctagataacaa

SEQ ID NO: 1546480 - DNA, 15 bp, Homo sapiens
tttctagataacaaa

SEQ ID NO: 1546481 - DNA, 15 bp, Homo sapiens
ttctagataacaaag

SEQ ID NO: 1546482 - DNA, 15 bp, Homo sapiens
tctagataacaaagg

SEQ ID NO: 1546483 - DNA, 15 bp, Homo sapiens
ctagataacaaagga

SEQ ID NO: 1546484 - DNA, 15 bp, Homo sapiens
tagataacaaaggag

SEQ ID NO: 1546485 - DNA, 15 bp, Homo sapiens
agataacaaaggagg

SEQ ID NO: 1546486 - DNA, 15 bp, Homo sapiens
gataacaaaggaggt

SEQ ID NO: 1546487 - DNA, 15 bp, Homo sapiens
ataacaaaggaggtg

SEQ ID NO: 1546488 - DNA, 15 bp, Homo sapiens
taacaaaggaggtgt

SEQ ID NO: 1546489 - DNA, 15 bp, Homo sapiens
aacaaaggaggtgtc

SEQ ID NO: 1546490 - DNA, 15 bp, Homo sapiens
acaaaggaggtgtca

SEQ ID NO: 1546491 - DNA, 15 bp, Homo sapiens
caaaggaggtgtcat

SEQ ID NO: 1546492 - DNA, 15 bp, Homo sapiens
aaaggaggtgtcata

SEQ ID NO: 1546493 - DNA, 15 bp, Homo sapiens
aaggaggtgtcataa

SEQ ID NO: 1546494 - DNA, 15 bp, Homo sapiens
aggaggtgtcataaa

SEQ ID NO: 1546495 - DNA, 15 bp, Homo sapiens
ggaggtgtcataaaa

SEQ ID NO: 1546496 - DNA, 15 bp, Homo sapiens
gaggtgtcataaaac

SEQ ID NO: 1546497 - DNA, 15 bp, Homo sapiens
aggtgtcataaaaca

SEQ ID NO: 1546498 - DNA, 15 bp, Homo sapiens
ggtgtcataaaacac

SEQ ID NO: 1546499 - DNA, 15 bp, Homo sapiens
gtgtcataaaacact

SEQ ID NO: 1546500 - DNA, 15 bp, Homo sapiens
tgtcataaaacactt

SEQ ID NO: 1546501 - DNA, 15 bp, Homo sapiens
gtcataaaacacttg

SEQ ID NO: 1546502 - DNA, 15 bp, Homo sapiens
tcataaaacacttgt

SEQ ID NO: 1546503 - DNA, 15 bp, Homo sapiens
cataaaacacttgtt

SEQ ID NO: 1546504 - DNA, 15 bp, Homo sapiens
ataaaacacttgtta

SEQ ID NO: 1546505 - DNA, 15 bp, Homo sapiens
taaaacacttgttat

SEQ ID NO: 1546506 - DNA, 15 bp, Homo sapiens
aaaacacttgttatg

SEQ ID NO: 1546507 - DNA, 15 bp, Homo sapiens
aaacacttgttatgg

SEQ ID NO: 1546508 - DNA, 15 bp, Homo sapiens
aacacttgttatggg

SEQ ID NO: 1546509 - DNA, 15 bp, Homo sapiens
acacttgttatgggc

SEQ ID NO: 1546510 - DNA, 15 bp, Homo sapiens
cacttgttatgggcc

SEQ ID NO: 1546511 - DNA, 15 bp, Homo sapiens
acttgttatgggcca

SEQ ID NO: 1546512 - DNA, 15 bp, Homo sapiens
cttgttatgggccag

SEQ ID NO: 1546513 - DNA, 15 bp, Homo sapiens
ttgttatgggccagt

SEQ ID NO: 1546514 - DNA, 15 bp, Homo sapiens
tgttatgggccagtg

SEQ ID NO: 1546515 - DNA, 15 bp, Homo sapiens
gttatgggccagtgt

SEQ ID NO: 1546516 - DNA, 15 bp, Homo sapiens
ttatgggccagtgtg

SEQ ID NO: 1546517 - DNA, 15 bp, Homo sapiens
tatgggccagtgtga

SEQ ID NO: 1546518 - DNA, 15 bp, Homo sapiens
atgggccagtgtgat

SEQ ID NO: 1546519 - DNA, 15 bp, Homo sapiens
tgggccagtgtgatg

SEQ ID NO: 1546520 - DNA, 15 bp, Homo sapiens
gggccagtgtgatgg

SEQ ID NO: 1546521 - DNA, 15 bp, Homo sapiens
ggccagtgtgatggc

SEQ ID NO: 1546522 - DNA, 15 bp, Homo sapiens
gccagtgtgatggct

SEQ ID NO: 1546523 - DNA, 15 bp, Homo sapiens
ccagtgtgatggctc

SEQ ID NO: 1546524 - DNA, 15 bp, Homo sapiens
cagtgtgatggctca

SEQ ID NO: 1546525 - DNA, 15 bp, Homo sapiens
agtgtgatggctcat

SEQ ID NO: 1546526 - DNA, 15 bp, Homo sapiens
gtgtgatggctcatg

SEQ ID NO: 1546527 - DNA, 15 bp, Homo sapiens
tgtgatggctcatgc

SEQ ID NO: 1546528 - DNA, 15 bp, Homo sapiens
gtgatggctcatgcc

SEQ ID NO: 1546529 - DNA, 15 bp, Homo sapiens
tgatggctcatgcct

SEQ ID NO: 1546530 - DNA, 15 bp, Homo sapiens
gatggctcatgccta

SEQ ID NO: 1546531 - DNA, 15 bp, Homo sapiens
atggctcatgcctat

SEQ ID NO: 1546532 - DNA, 15 bp, Homo sapiens
tcatgcctataatct

SEQ ID NO: 1546533 - DNA, 15 bp, Homo sapiens
catgcctataatctc

SEQ ID NO: 1546534 - DNA, 15 bp, Homo sapiens
atgcctataatctca

SEQ ID NO: 1546535 - DNA, 15 bp, Homo sapiens
tgcctataatctcag

SEQ ID NO: 1546536 - DNA, 15 bp, Homo sapiens
gcctataatctcagt

SEQ ID NO: 1546537 - DNA, 15 bp, Homo sapiens
cctataatctcagtg

SEQ ID NO: 1546538 - DNA, 15 bp, Homo sapiens
ctataatctcagtgc

SEQ ID NO: 1546539 - DNA, 15 bp, Homo sapiens
tataatctcagtgct

SEQ ID NO: 1546540 - DNA, 15 bp, Homo sapiens
ataatctcagtgctt

SEQ ID NO: 1546541 - DNA, 15 bp, Homo sapiens
taatctcagtgcttt

SEQ ID NO: 1546542 - DNA, 15 bp, Homo sapiens
aatctcagtgctttg

SEQ ID NO: 1546543 - DNA, 15 bp, Homo sapiens
atctcagtgctttga

SEQ ID NO: 1546544 - DNA, 15 bp, Homo sapiens
tctcagtgctttgag

SEQ ID NO: 1546545 - DNA, 15 bp, Homo sapiens
ctcagtgctttgaga

SEQ ID NO: 1546546 - DNA, 15 bp, Homo sapiens
tcagtgctttgagag

SEQ ID NO: 1546547 - DNA, 15 bp, Homo sapiens
cagtgctttgagagg

SEQ ID NO: 1546548 - DNA, 15 bp, Homo sapiens
agtgctttgagaggc

SEQ ID NO: 1546549 - DNA, 15 bp, Homo sapiens
gtgctttgagaggct

SEQ ID NO: 1546550 - DNA, 15 bp, Homo sapiens
tgctttgagaggctg

SEQ ID NO: 1546551 - DNA, 15 bp, Homo sapiens
gctttgagaggctga

SEQ ID NO: 1546552 - DNA, 15 bp, Homo sapiens
ttgagaggctgaggt

SEQ ID NO: 1546553 - DNA, 15 bp, Homo sapiens
tgagaggctgaggtg

SEQ ID NO: 1546554 - DNA, 15 bp, Homo sapiens
agaggctgaggtgga

SEQ ID NO: 1546555 - DNA, 15 bp, Homo sapiens
gaggctgaggtggag

SEQ ID NO: 1546556 - DNA, 15 bp, Homo sapiens
aggctgaggtggagg

SEQ ID NO: 1546557 - DNA, 15 bp, Homo sapiens
ggctgaggtggagga

SEQ ID NO: 1546558 - DNA, 15 bp, Homo sapiens
gctgaggtggaggat

SEQ ID NO: 1546559 - DNA, 15 bp, Homo sapiens
ctgaggtggaggatt

SEQ ID NO: 1546560 - DNA, 15 bp, Homo sapiens
tgaggtggaggattg

SEQ ID NO: 1546561 - DNA, 15 bp, Homo sapiens
gaggtggaggattgc

SEQ ID NO: 1546562 - DNA, 15 bp, Homo sapiens
aggtggaggattgct

SEQ ID NO: 1546563 - DNA, 15 bp, Homo sapiens
ggtggaggattgctt

SEQ ID NO: 1546564 - DNA, 15 bp, Homo sapiens
gtggaggattgcttg

SEQ ID NO: 1546565 - DNA, 15 bp, Homo sapiens
tggaggattgcttga

SEQ ID NO: 1546566 - DNA, 15 bp, Homo sapiens
ggattgcttgaggcc

SEQ ID NO: 1546567 - DNA, 15 bp, Homo sapiens
attgcttgaggccag

SEQ ID NO: 1546568 - DNA, 15 bp, Homo sapiens
ttgcttgaggccagg

SEQ ID NO: 1546569 - DNA, 15 bp, Homo sapiens
gcttgaggccaggaa

SEQ ID NO: 1546570 - DNA, 15 bp, Homo sapiens
tgaggccaggaattt

SEQ ID NO: 1546571 - DNA, 15 bp, Homo sapiens
gaggccaggaatttg

SEQ ID NO: 1546572 - DNA, 15 bp, Homo sapiens
aggccaggaatttga

SEQ ID NO: 1546573 - DNA, 15 bp, Homo sapiens
ggccaggaatttgag

SEQ ID NO: 1546574 - DNA, 15 bp, Homo sapiens
gccaggaatttgaga

SEQ ID NO: 1546575 - DNA, 15 bp, Homo sapiens
gagaccagcctgggg

SEQ ID NO: 1546576 - DNA, 15 bp, Homo sapiens
agaccagcctggggc

SEQ ID NO: 1546577 - DNA, 15 bp, Homo sapiens
gaccagcctggggca

SEQ ID NO: 1546578 - DNA, 15 bp, Homo sapiens
accagcctggggcaa

SEQ ID NO: 1546579 - DNA, 15 bp, Homo sapiens
ccagcctggggcaac

SEQ ID NO: 1546580 - DNA, 15 bp, Homo sapiens
cagcctggggcaaca

SEQ ID NO: 1546581 - DNA, 15 bp, Homo sapiens
agcctggggcaacat

SEQ ID NO: 1546582 - DNA, 15 bp, Homo sapiens
gcctggggcaacata

SEQ ID NO: 1546583 - DNA, 15 bp, Homo sapiens
cctggggcaacatag

SEQ ID NO: 1546584 - DNA, 15 bp, Homo sapiens
ctggggcaacatagc

SEQ ID NO: 1546585 - DNA, 15 bp, Homo sapiens
tggggcaacatagca

SEQ ID NO: 1546586 - DNA, 15 bp, Homo sapiens
ggggcaacatagcaa

SEQ ID NO: 1546587 - DNA, 15 bp, Homo sapiens
acatagcaagacccc

SEQ ID NO: 1546588 - DNA, 15 bp, Homo sapiens
catagcaagacccca

SEQ ID NO: 1546589 - DNA, 15 bp, Homo sapiens
atagcaagaccccat

SEQ ID NO: 1546590 - DNA, 15 bp, Homo sapiens
tagcaagaccccatc

SEQ ID NO: 1546591 - DNA, 15 bp, Homo sapiens
aagaccccatctctt

SEQ ID NO: 1546592 - DNA, 15 bp, Homo sapiens
agaccccatctctta

SEQ ID NO: 1546593 - DNA, 15 bp, Homo sapiens
gaccccatctcttaa

SEQ ID NO: 1546594 - DNA, 15 bp, Homo sapiens
accccatctcttaaa

SEQ ID NO: 1546595 - DNA, 15 bp, Homo sapiens
ccccatctcttaaaa

SEQ ID NO: 1546596 - DNA, 15 bp, Homo sapiens
cccatctcttaaaaa

SEQ ID NO: 1546597 - DNA, 15 bp, Homo sapiens
tcttaaaaaaaaaag

SEQ ID NO: 1546598 - DNA, 15 bp, Homo sapiens
cttaaaaaaaaaagg

SEQ ID NO: 1546599 - DNA, 15 bp, Homo sapiens
ttaaaaaaaaaaggg

SEQ ID NO: 1546600 - DNA, 15 bp, Homo sapiens
taaaaaaaaaagggt

SEQ ID NO: 1546601 - DNA, 15 bp, Homo sapiens
aaaaaaaaaagggtg

SEQ ID NO: 1546602 - DNA, 15 bp, Homo sapiens
aaaaaaaaagggtgg

SEQ ID NO: 1546603 - DNA, 15 bp, Homo sapiens
aaaaaaaagggtggg

SEQ ID NO: 1546604 - DNA, 15 bp, Homo sapiens
aaaaaaagggtgggg

SEQ ID NO: 1546605 - DNA, 15 bp, Homo sapiens
aaaaaagggtggggc

SEQ ID NO: 1546606 - DNA, 15 bp, Homo sapiens
aaaaagggtggggcg

SEQ ID NO: 1546607 - DNA, 15 bp, Homo sapiens
aaaagggtggggcgg

SEQ ID NO: 1546608 - DNA, 15 bp, Homo sapiens
aaagggtggggcggg

SEQ ID NO: 1546609 - DNA, 15 bp, Homo sapiens
aagggtggggcgggg

SEQ ID NO: 1546610 - DNA, 15 bp, Homo sapiens
agggtggggcggggg

SEQ ID NO: 1546611 - DNA, 15 bp, Homo sapiens
gggtggggcgggggg

SEQ ID NO: 1546612 - DNA, 15 bp, Homo sapiens
ggtggggcggggggg

SEQ ID NO: 1546613 - DNA, 15 bp, Homo sapiens
gtggggcgggggggc

SEQ ID NO: 1546614 - DNA, 15 bp, Homo sapiens
tggggcgggggggca

SEQ ID NO: 1546615 - DNA, 15 bp, Homo sapiens
ggggcgggggggcac

SEQ ID NO: 1546616 - DNA, 15 bp, Homo sapiens
gggcgggggggcact

SEQ ID NO: 1546617 - DNA, 15 bp, Homo sapiens
ggcgggggggcactg

SEQ ID NO: 1546618 - DNA, 15 bp, Homo sapiens
gcgggggggcactgc

SEQ ID NO: 1546619 - DNA, 15 bp, Homo sapiens
cgggggggcactgct

SEQ ID NO: 1546620 - DNA, 15 bp, Homo sapiens
gggggggcactgctg

SEQ ID NO: 1546621 - DNA, 15 bp, Homo sapiens
ggggggcactgctgg

SEQ ID NO: 1546622 - DNA, 15 bp, Homo sapiens
gggggcactgctggg

SEQ ID NO: 1546623 - DNA, 15 bp, Homo sapiens
ggggcactgctgggc

SEQ ID NO: 1546624 - DNA, 15 bp, Homo sapiens
gggcactgctgggcg

SEQ ID NO: 1546625 - DNA, 15 bp, Homo sapiens
ggcactgctgggcgc

SEQ ID NO: 1546626 - DNA, 15 bp, Homo sapiens
gcactgctgggcgcg

SEQ ID NO: 1546627 - DNA, 15 bp, Homo sapiens
cactgctgggcgcgg

SEQ ID NO: 1546628 - DNA, 15 bp, Homo sapiens
actgctgggcgcggt

SEQ ID NO: 1546629 - DNA, 15 bp, Homo sapiens
ctgctgggcgcggtg

SEQ ID NO: 1546630 - DNA, 15 bp, Homo sapiens
tgctgggcgcggtgg

SEQ ID NO: 1546631 - DNA, 15 bp, Homo sapiens
gggaagccaaagcag

SEQ ID NO: 1546632 - DNA, 15 bp, Homo sapiens
ggaagccaaagcagg

SEQ ID NO: 1546633 - DNA, 15 bp, Homo sapiens
gaagccaaagcaggt

SEQ ID NO: 1546634 - DNA, 15 bp, Homo sapiens
aagccaaagcaggtg

SEQ ID NO: 1546635 - DNA, 15 bp, Homo sapiens
agccaaagcaggtgg

SEQ ID NO: 1546636 - DNA, 15 bp, Homo sapiens
gccaaagcaggtgga

SEQ ID NO: 1546637 - DNA, 15 bp, Homo sapiens
ccaaagcaggtggat

SEQ ID NO: 1546638 - DNA, 15 bp, Homo sapiens
caaagcaggtggatc

SEQ ID NO: 1546639 - DNA, 15 bp, Homo sapiens
aaagcaggtggatca

SEQ ID NO: 1546640 - DNA, 15 bp, Homo sapiens
aagcaggtggatcaa

SEQ ID NO: 1546641 - DNA, 15 bp, Homo sapiens
agcaggtggatcaaa

SEQ ID NO: 1546642 - DNA, 15 bp, Homo sapiens
gcaggtggatcaaaa

SEQ ID NO: 1546643 - DNA, 15 bp, Homo sapiens
caggtggatcaaaag

SEQ ID NO: 1546644 - DNA, 15 bp, Homo sapiens
aggtggatcaaaagg

SEQ ID NO: 1546645 - DNA, 15 bp, Homo sapiens
ggtggatcaaaaggt

SEQ ID NO: 1546646 - DNA, 15 bp, Homo sapiens
gtggatcaaaaggtc

SEQ ID NO: 1546647 - DNA, 15 bp, Homo sapiens
tggatcaaaaggtca

SEQ ID NO: 1546648 - DNA, 15 bp, Homo sapiens
ggatcaaaaggtcag

SEQ ID NO: 1546649 - DNA, 15 bp, Homo sapiens
gatcaaaaggtcagg

SEQ ID NO: 1546650 - DNA, 15 bp, Homo sapiens
atcaaaaggtcagga

SEQ ID NO: 1546651 - DNA, 15 bp, Homo sapiens
tcaaaaggtcaggag

SEQ ID NO: 1546652 - DNA, 15 bp, Homo sapiens
caaaaggtcaggagt

SEQ ID NO: 1546653 - DNA, 15 bp, Homo sapiens
aaaaggtcaggagtt

SEQ ID NO: 1546654 - DNA, 15 bp, Homo sapiens
aaaggtcaggagttc

SEQ ID NO: 1546655 - DNA, 15 bp, Homo sapiens
attagccgggcatga

SEQ ID NO: 1546656 - DNA, 15 bp, Homo sapiens
ttagccgggcatgat

SEQ ID NO: 1546657 - DNA, 15 bp, Homo sapiens
tagccgggcatgatg

SEQ ID NO: 1546658 - DNA, 15 bp, Homo sapiens
agccgggcatgatgg

SEQ ID NO: 1546659 - DNA, 15 bp, Homo sapiens
gccgggcatgatggc

SEQ ID NO: 1546660 - DNA, 15 bp, Homo sapiens
ccgggcatgatggcg

SEQ ID NO: 1546661 - DNA, 15 bp, Homo sapiens
cgggcatgatggcgg

SEQ ID NO: 1546662 - DNA, 15 bp, Homo sapiens
gggcatgatggcggg

SEQ ID NO: 1546663 - DNA, 15 bp, Homo sapiens
ggcatgatggcgggt

SEQ ID NO: 1546664 - DNA, 15 bp, Homo sapiens
gcatgatggcgggtg

SEQ ID NO: 1546665 - DNA, 15 bp, Homo sapiens
catgatggcgggtgc

SEQ ID NO: 1546666 - DNA, 15 bp, Homo sapiens
atgatggcgggtgct

SEQ ID NO: 1546667 - DNA, 15 bp, Homo sapiens
tgatggcgggtgctt

SEQ ID NO: 1546668 - DNA, 15 bp, Homo sapiens
gatggcgggtgctta

SEQ ID NO: 1546669 - DNA, 15 bp, Homo sapiens
atggcgggtgcttat

SEQ ID NO: 1546670 - DNA, 15 bp, Homo sapiens
tggcgggtgcttata

SEQ ID NO: 1546671 - DNA, 15 bp, Homo sapiens
ggcgggtgcttataa

SEQ ID NO: 1546672 - DNA, 15 bp, Homo sapiens
gcgggtgcttataat

SEQ ID NO: 1546673 - DNA, 15 bp, Homo sapiens
cgggtgcttataatc

SEQ ID NO: 1546674 - DNA, 15 bp, Homo sapiens
gggtgcttataatcc

SEQ ID NO: 1546675 - DNA, 15 bp, Homo sapiens
ggtgcttataatccc

SEQ ID NO: 1546676 - DNA, 15 bp, Homo sapiens
gtgcttataatccca

SEQ ID NO: 1546677 - DNA, 15 bp, Homo sapiens
cttataatcccagct

SEQ ID NO: 1546678 - DNA, 15 bp, Homo sapiens
ttataatcccagcta

SEQ ID NO: 1546679 - DNA, 15 bp, Homo sapiens
gtgagcagagattgc

SEQ ID NO: 1546680 - DNA, 15 bp, Homo sapiens
tgagcagagattgca

SEQ ID NO: 1546681 - DNA, 15 bp, Homo sapiens
gagcagagattgcac

SEQ ID NO: 1546682 - DNA, 15 bp, Homo sapiens
agcagagattgcacc

SEQ ID NO: 1546683 - DNA, 15 bp, Homo sapiens
gcagagattgcacca

SEQ ID NO: 1546684 - DNA, 15 bp, Homo sapiens
cagagattgcaccac

SEQ ID NO: 1546685 - DNA, 15 bp, Homo sapiens
agagattgcaccact

SEQ ID NO: 1546686 - DNA, 15 bp, Homo sapiens
gggcaacagagcgaa

SEQ ID NO: 1546687 - DNA, 15 bp, Homo sapiens
ggcaacagagcgaaa

SEQ ID NO: 1546688 - DNA, 15 bp, Homo sapiens
gcaacagagcgaaac

SEQ ID NO: 1546689 - DNA, 15 bp, Homo sapiens
caacagagcgaaact

SEQ ID NO: 1546690 - DNA, 15 bp, Homo sapiens
aacagagcgaaactc

SEQ ID NO: 1546691 - DNA, 15 bp, Homo sapiens
acagagcgaaactct

SEQ ID NO: 1546692 - DNA, 15 bp, Homo sapiens
cagagcgaaactctg

SEQ ID NO: 1546693 - DNA, 15 bp, Homo sapiens
agagcgaaactctgt

SEQ ID NO: 1546694 - DNA, 15 bp, Homo sapiens
gagcgaaactctgtc

SEQ ID NO: 1546695 - DNA, 15 bp, Homo sapiens
agcgaaactctgtct

SEQ ID NO: 1546696 - DNA, 15 bp, Homo sapiens
gcgaaactctgtctc

SEQ ID NO: 1546697 - DNA, 15 bp, Homo sapiens
cgaaactctgtctca

SEQ ID NO: 1546698 - DNA, 15 bp, Homo sapiens
aaactctgtctcaaa

SEQ ID NO: 1546699 - DNA, 15 bp, Homo sapiens
aactctgtctcaaaa

SEQ ID NO: 1546700 - DNA, 15 bp, Homo sapiens
tctgtctcaaaaatg

SEQ ID NO: 1546701 - DNA, 15 bp, Homo sapiens
ctgtctcaaaaatga

SEQ ID NO: 1546702 - DNA, 15 bp, Homo sapiens
tgtctcaaaaatgaa

SEQ ID NO: 1546703 - DNA, 15 bp, Homo sapiens
gtctcaaaaatgaat

SEQ ID NO: 1546704 - DNA, 15 bp, Homo sapiens
tctcaaaaatgaatt

SEQ ID NO: 1546705 - DNA, 15 bp, Homo sapiens
ctcaaaaatgaatta

SEQ ID NO: 1546706 - DNA, 15 bp, Homo sapiens
tcaaaaatgaattaa

SEQ ID NO: 1546707 - DNA, 15 bp, Homo sapiens
caaaaatgaattaat

SEQ ID NO: 1546708 - DNA, 15 bp, Homo sapiens
aaaaatgaattaatt

SEQ ID NO: 1546709 - DNA, 15 bp, Homo sapiens
aaaatgaattaatta

SEQ ID NO: 1546710 - DNA, 15 bp, Homo sapiens
aaatgaattaattaa

SEQ ID NO: 1546711 - DNA, 15 bp, Homo sapiens
aatgaattaattaat

SEQ ID NO: 1546712 - DNA, 15 bp, Homo sapiens
atgaattaattaatt

SEQ ID NO: 1546713 - DNA, 15 bp, Homo sapiens
tgaattaattaatta

SEQ ID NO: 1546714 - DNA, 15 bp, Homo sapiens
gaattaattaattaa

SEQ ID NO: 1546715 - DNA, 15 bp, Homo sapiens
attaattaattaaaa

SEQ ID NO: 1546716 - DNA, 15 bp, Homo sapiens
ttaattaattaaaaa

SEQ ID NO: 1546717 - DNA, 15 bp, Homo sapiens
taattaattaaaaaa

SEQ ID NO: 1546718 - DNA, 15 bp, Homo sapiens
aattaattaaaaaaa

SEQ ID NO: 1546719 - DNA, 15 bp, Homo sapiens
attaattaaaaaaag

SEQ ID NO: 1546720 - DNA, 15 bp, Homo sapiens
ttaattaaaaaaaga

SEQ ID NO: 1546721 - DNA, 15 bp, Homo sapiens
taattaaaaaaagaa

SEQ ID NO: 1546722 - DNA, 15 bp, Homo sapiens
aattaaaaaaagaaa

SEQ ID NO: 1546723 - DNA, 15 bp, Homo sapiens
attaaaaaaagaaaa

SEQ ID NO: 1546724 - DNA, 15 bp, Homo sapiens
ttaaaaaaagaaaaa

SEQ ID NO: 1546725 - DNA, 15 bp, Homo sapiens
taaaaaaagaaaaaa

SEQ ID NO: 1546726 - DNA, 15 bp, Homo sapiens
gaaaaaaaaaacact

SEQ ID NO: 1546727 - DNA, 15 bp, Homo sapiens
aaaaaaaaaacactg

SEQ ID NO: 1546728 - DNA, 15 bp, Homo sapiens
aaaaaaaaacactgg

SEQ ID NO: 1546729 - DNA, 15 bp, Homo sapiens
aaaaaaaacactggg

SEQ ID NO: 1546730 - DNA, 15 bp, Homo sapiens
aaaaaaacactgggc

SEQ ID NO: 1546731 - DNA, 15 bp, Homo sapiens
aaaaaacactgggca

SEQ ID NO: 1546732 - DNA, 15 bp, Homo sapiens
aaaaacactgggcag

SEQ ID NO: 1546733 - DNA, 15 bp, Homo sapiens
aaaacactgggcagg

SEQ ID NO: 1546734 - DNA, 15 bp, Homo sapiens
aaacactgggcaggg

SEQ ID NO: 1546735 - DNA, 15 bp, Homo sapiens
aacactgggcagggt

SEQ ID NO: 1546736 - DNA, 15 bp, Homo sapiens
acactgggcagggtg

SEQ ID NO: 1546737 - DNA, 15 bp, Homo sapiens
cactgggcagggtgg

SEQ ID NO: 1546738 - DNA, 15 bp, Homo sapiens
actgggcagggtggt

SEQ ID NO: 1546739 - DNA, 15 bp, Homo sapiens
ctgggcagggtggtg

SEQ ID NO: 1546740 - DNA, 15 bp, Homo sapiens
tgggcagggtggtgt

SEQ ID NO: 1546741 - DNA, 15 bp, Homo sapiens
gggcagggtggtgtg

SEQ ID NO: 1546742 - DNA, 15 bp, Homo sapiens
ggcagggtggtgtgc

SEQ ID NO: 1546743 - DNA, 15 bp, Homo sapiens
gcagggtggtgtgca

SEQ ID NO: 1546744 - DNA, 15 bp, Homo sapiens
cagggtggtgtgcac

SEQ ID NO: 1546745 - DNA, 15 bp, Homo sapiens
agggtggtgtgcacc

SEQ ID NO: 1546746 - DNA, 15 bp, Homo sapiens
gggtggtgtgcacct

SEQ ID NO: 1546747 - DNA, 15 bp, Homo sapiens
tgtgcacctgtagtc

SEQ ID NO: 1546748 - DNA, 15 bp, Homo sapiens
gtgcacctgtagtcc

SEQ ID NO: 1546749 - DNA, 15 bp, Homo sapiens
cacctgtagtcccaa

SEQ ID NO: 1546750 - DNA, 15 bp, Homo sapiens
acctgtagtcccaac

SEQ ID NO: 1546751 - DNA, 15 bp, Homo sapiens
agtcccaactactcc

SEQ ID NO: 1546752 - DNA, 15 bp, Homo sapiens
gtcccaactactcca

SEQ ID NO: 1546753 - DNA, 15 bp, Homo sapiens
tcccaactactccag

SEQ ID NO: 1546754 - DNA, 15 bp, Homo sapiens
cccaactactccaga

SEQ ID NO: 1546755 - DNA, 15 bp, Homo sapiens
ccaactactccagag

SEQ ID NO: 1546756 - DNA, 15 bp, Homo sapiens
caactactccagagg

SEQ ID NO: 1546757 - DNA, 15 bp, Homo sapiens
aactactccagaggc

SEQ ID NO: 1546758 - DNA, 15 bp, Homo sapiens
actactccagaggct

SEQ ID NO: 1546759 - DNA, 15 bp, Homo sapiens
ctactccagaggctg

SEQ ID NO: 1546760 - DNA, 15 bp, Homo sapiens
tactccagaggctga

SEQ ID NO: 1546761 - DNA, 15 bp, Homo sapiens
actccagaggctgag

SEQ ID NO: 1546762 - DNA, 15 bp, Homo sapiens
ctccagaggctgagg

SEQ ID NO: 1546763 - DNA, 15 bp, Homo sapiens
tccagaggctgaggc

SEQ ID NO: 1546764 - DNA, 15 bp, Homo sapiens
ccagaggctgaggca

SEQ ID NO: 1546765 - DNA, 15 bp, Homo sapiens
cagaggctgaggcag

SEQ ID NO: 1546766 - DNA, 15 bp, Homo sapiens
ggctgaggcaggaag

SEQ ID NO: 1546767 - DNA, 15 bp, Homo sapiens
gctgaggcaggaagg

SEQ ID NO: 1546768 - DNA, 15 bp, Homo sapiens
ctgaggcaggaagga

SEQ ID NO: 1546769 - DNA, 15 bp, Homo sapiens
tgaggcaggaaggag

SEQ ID NO: 1546770 - DNA, 15 bp, Homo sapiens
gaggcaggaaggagc

SEQ ID NO: 1546771 - DNA, 15 bp, Homo sapiens
aggcaggaaggagca

SEQ ID NO: 1546772 - DNA, 15 bp, Homo sapiens
ggcaggaaggagcac

SEQ ID NO: 1546773 - DNA, 15 bp, Homo sapiens
gcaggaaggagcact

SEQ ID NO: 1546774 - DNA, 15 bp, Homo sapiens
caggaaggagcactt

SEQ ID NO: 1546775 - DNA, 15 bp, Homo sapiens
aggaaggagcacttg

SEQ ID NO: 1546776 - DNA, 15 bp, Homo sapiens
ggaaggagcacttga

SEQ ID NO: 1546777 - DNA, 15 bp, Homo sapiens
gaaggagcacttgag

SEQ ID NO: 1546778 - DNA, 15 bp, Homo sapiens
aaggagcacttgagc

SEQ ID NO: 1546779 - DNA, 15 bp, Homo sapiens
aggagcacttgagcc

SEQ ID NO: 1546780 - DNA, 15 bp, Homo sapiens
ggagcacttgagccc

SEQ ID NO: 1546781 - DNA, 15 bp, Homo sapiens
gagcacttgagccca

SEQ ID NO: 1546782 - DNA, 15 bp, Homo sapiens
agcacttgagcccag

SEQ ID NO: 1546783 - DNA, 15 bp, Homo sapiens
gcacttgagcccagg

SEQ ID NO: 1546784 - DNA, 15 bp, Homo sapiens
agcccaggaggttgt

SEQ ID NO: 1546785 - DNA, 15 bp, Homo sapiens
gcccaggaggttgtc

SEQ ID NO: 1546786 - DNA, 15 bp, Homo sapiens
cccaggaggttgtct

SEQ ID NO: 1546787 - DNA, 15 bp, Homo sapiens
ccaggaggttgtctg

SEQ ID NO: 1546788 - DNA, 15 bp, Homo sapiens
caggaggttgtctgc

SEQ ID NO: 1546789 - DNA, 15 bp, Homo sapiens
aggaggttgtctgca

SEQ ID NO: 1546790 - DNA, 15 bp, Homo sapiens
ggaggttgtctgcag

SEQ ID NO: 1546791 - DNA, 15 bp, Homo sapiens
gaggttgtctgcagt

SEQ ID NO: 1546792 - DNA, 15 bp, Homo sapiens
aggttgtctgcagtg

SEQ ID NO: 1546793 - DNA, 15 bp, Homo sapiens
ggttgtctgcagtga

SEQ ID NO: 1546794 - DNA, 15 bp, Homo sapiens
gttgtctgcagtgag

SEQ ID NO: 1546795 - DNA, 15 bp, Homo sapiens
ttgtctgcagtgagc

SEQ ID NO: 1546796 - DNA, 15 bp, Homo sapiens
tgtctgcagtgagct

SEQ ID NO: 1546797 - DNA, 15 bp, Homo sapiens
gtctgcagtgagctc

SEQ ID NO: 1546798 - DNA, 15 bp, Homo sapiens
tctgcagtgagctct

SEQ ID NO: 1546799 - DNA, 15 bp, Homo sapiens
ctgcagtgagctcta

SEQ ID NO: 1546800 - DNA, 15 bp, Homo sapiens
tgcagtgagctctac

SEQ ID NO: 1546801 - DNA, 15 bp, Homo sapiens
gcagtgagctctact

SEQ ID NO: 1546802 - DNA, 15 bp, Homo sapiens
cagtgagctctactc

SEQ ID NO: 1546803 - DNA, 15 bp, Homo sapiens
agtgagctctactca

SEQ ID NO: 1546804 - DNA, 15 bp, Homo sapiens
gtgagctctactcat

SEQ ID NO: 1546805 - DNA, 15 bp, Homo sapiens
tgagctctactcatg

SEQ ID NO: 1546806 - DNA, 15 bp, Homo sapiens
gagctctactcatgc

SEQ ID NO: 1546807 - DNA, 15 bp, Homo sapiens
agctctactcatgcc

SEQ ID NO: 1546808 - DNA, 15 bp, Homo sapiens
gctctactcatgcca

SEQ ID NO: 1546809 - DNA, 15 bp, Homo sapiens
ctctactcatgccac

SEQ ID NO: 1546810 - DNA, 15 bp, Homo sapiens
tctactcatgccact

SEQ ID NO: 1546811 - DNA, 15 bp, Homo sapiens
ctactcatgccactg

SEQ ID NO: 1546812 - DNA, 15 bp, Homo sapiens
tactcatgccactgc

SEQ ID NO: 1546813 - DNA, 15 bp, Homo sapiens
actcatgccactgca

SEQ ID NO: 1546814 - DNA, 15 bp, Homo sapiens
ctcatgccactgcac

SEQ ID NO: 1546815 - DNA, 15 bp, Homo sapiens
ctgggtgacagagct

SEQ ID NO: 1546816 - DNA, 15 bp, Homo sapiens
tgggtgacagagctc

SEQ ID NO: 1546817 - DNA, 15 bp, Homo sapiens
gggtgacagagctca

SEQ ID NO: 1546818 - DNA, 15 bp, Homo sapiens
ggtgacagagctcag

SEQ ID NO: 1546819 - DNA, 15 bp, Homo sapiens
gtgacagagctcagt

SEQ ID NO: 1546820 - DNA, 15 bp, Homo sapiens
tgacagagctcagtg

SEQ ID NO: 1546821 - DNA, 15 bp, Homo sapiens
gacagagctcagtgg

SEQ ID NO: 1546822 - DNA, 15 bp, Homo sapiens
acagagctcagtggc

SEQ ID NO: 1546823 - DNA, 15 bp, Homo sapiens
cagagctcagtggct

SEQ ID NO: 1546824 - DNA, 15 bp, Homo sapiens
agagctcagtggctt

SEQ ID NO: 1546825 - DNA, 15 bp, Homo sapiens
gagctcagtggctta

SEQ ID NO: 1546826 - DNA, 15 bp, Homo sapiens
agctcagtggcttac

SEQ ID NO: 1546827 - DNA, 15 bp, Homo sapiens
gctcagtggcttaca

SEQ ID NO: 1546828 - DNA, 15 bp, Homo sapiens
ctcagtggcttacac

SEQ ID NO: 1546829 - DNA, 15 bp, Homo sapiens
tcagtggcttacacc

SEQ ID NO: 1546830 - DNA, 15 bp, Homo sapiens
gaggctgaagcaggc

SEQ ID NO: 1546831 - DNA, 15 bp, Homo sapiens
aggctgaagcaggca

SEQ ID NO: 1546832 - DNA, 15 bp, Homo sapiens
ggctgaagcaggcag

SEQ ID NO: 1546833 - DNA, 15 bp, Homo sapiens
gctgaagcaggcaga

SEQ ID NO: 1546834 - DNA, 15 bp, Homo sapiens
ctgaagcaggcagat

SEQ ID NO: 1546835 - DNA, 15 bp, Homo sapiens
tgaagcaggcagatc

SEQ ID NO: 1546836 - DNA, 15 bp, Homo sapiens
aagcaggcagatcac

SEQ ID NO: 1546837 - DNA, 15 bp, Homo sapiens
agcaggcagatcacc

SEQ ID NO: 1546838 - DNA, 15 bp, Homo sapiens
caggcagatcaccta

SEQ ID NO: 1546839 - DNA, 15 bp, Homo sapiens
aggcagatcacctaa

SEQ ID NO: 1546840 - DNA, 15 bp, Homo sapiens
ggcagatcacctaag

SEQ ID NO: 1546841 - DNA, 15 bp, Homo sapiens
gcagatcacctaaga

SEQ ID NO: 1546842 - DNA, 15 bp, Homo sapiens
cagatcacctaagat

SEQ ID NO: 1546843 - DNA, 15 bp, Homo sapiens
agatcacctaagatc

SEQ ID NO: 1546844 - DNA, 15 bp, Homo sapiens
gatcacctaagatca

SEQ ID NO: 1546845 - DNA, 15 bp, Homo sapiens
atcacctaagatcag

SEQ ID NO: 1546846 - DNA, 15 bp, Homo sapiens
tcacctaagatcagg

SEQ ID NO: 1546847 - DNA, 15 bp, Homo sapiens
cacctaagatcagga

SEQ ID NO: 1546848 - DNA, 15 bp, Homo sapiens
acctaagatcaggag

SEQ ID NO: 1546849 - DNA, 15 bp, Homo sapiens
cctaagatcaggagt

SEQ ID NO: 1546850 - DNA, 15 bp, Homo sapiens
ctaagatcaggagtt

SEQ ID NO: 1546851 - DNA, 15 bp, Homo sapiens
taagatcaggagttc

SEQ ID NO: 1546852 - DNA, 15 bp, Homo sapiens
aagatcaggagttcg

SEQ ID NO: 1546853 - DNA, 15 bp, Homo sapiens
aggagttcgagaccg

SEQ ID NO: 1546854 - DNA, 15 bp, Homo sapiens
ggagttcgagaccgg

SEQ ID NO: 1546855 - DNA, 15 bp, Homo sapiens
gagttcgagaccggc

SEQ ID NO: 1546856 - DNA, 15 bp, Homo sapiens
agttcgagaccggct

SEQ ID NO: 1546857 - DNA, 15 bp, Homo sapiens
gttcgagaccggctg

SEQ ID NO: 1546858 - DNA, 15 bp, Homo sapiens
ttcgagaccggctgg

SEQ ID NO: 1546859 - DNA, 15 bp, Homo sapiens
tcgagaccggctggc

SEQ ID NO: 1546860 - DNA, 15 bp, Homo sapiens
cgagaccggctggcc

SEQ ID NO: 1546861 - DNA, 15 bp, Homo sapiens
gagaccggctggcca

SEQ ID NO: 1546862 - DNA, 15 bp, Homo sapiens
agaccggctggccaa

SEQ ID NO: 1546863 - DNA, 15 bp, Homo sapiens
gaccggctggccaac

SEQ ID NO: 1546864 - DNA, 15 bp, Homo sapiens
accggctggccaaca

SEQ ID NO: 1546865 - DNA, 15 bp, Homo sapiens
ccggctggccaacat

SEQ ID NO: 1546866 - DNA, 15 bp, Homo sapiens
cggctggccaacatg

SEQ ID NO: 1546867 - DNA, 15 bp, Homo sapiens
ggctggccaacatga

SEQ ID NO: 1546868 - DNA, 15 bp, Homo sapiens
gctggccaacatgat

SEQ ID NO: 1546869 - DNA, 15 bp, Homo sapiens
ctggccaacatgata

SEQ ID NO: 1546870 - DNA, 15 bp, Homo sapiens
tggccaacatgataa

SEQ ID NO: 1546871 - DNA, 15 bp, Homo sapiens
ggccaacatgataaa

SEQ ID NO: 1546872 - DNA, 15 bp, Homo sapiens
gccaacatgataaaa

SEQ ID NO: 1546873 - DNA, 15 bp, Homo sapiens
ccaacatgataaaac

SEQ ID NO: 1546874 - DNA, 15 bp, Homo sapiens
caacatgataaaacc

SEQ ID NO: 1546875 - DNA, 15 bp, Homo sapiens
aacatgataaaaccc

SEQ ID NO: 1546876 - DNA, 15 bp, Homo sapiens
acatgataaaacccc

SEQ ID NO: 1546877 - DNA, 15 bp, Homo sapiens
catgataaaaccccg

SEQ ID NO: 1546878 - DNA, 15 bp, Homo sapiens
atgataaaaccccgt

SEQ ID NO: 1546879 - DNA, 15 bp, Homo sapiens
tgataaaaccccgtc

SEQ ID NO: 1546880 - DNA, 15 bp, Homo sapiens
gataaaaccccgtct

SEQ ID NO: 1546881 - DNA, 15 bp, Homo sapiens
ataaaaccccgtctt

SEQ ID NO: 1546882 - DNA, 15 bp, Homo sapiens
taaaaccccgtcttt

SEQ ID NO: 1546883 - DNA, 15 bp, Homo sapiens
aaaaccccgtcttta

SEQ ID NO: 1546884 - DNA, 15 bp, Homo sapiens
aaaccccgtctttac

SEQ ID NO: 1546885 - DNA, 15 bp, Homo sapiens
aaccccgtctttact

SEQ ID NO: 1546886 - DNA, 15 bp, Homo sapiens
accccgtctttacta

SEQ ID NO: 1546887 - DNA, 15 bp, Homo sapiens
ccccgtctttactaa

SEQ ID NO: 1546888 - DNA, 15 bp, Homo sapiens
cccgtctttactaaa

SEQ ID NO: 1546889 - DNA, 15 bp, Homo sapiens
ccgtctttactaaaa

SEQ ID NO: 1546890 - DNA, 15 bp, Homo sapiens
cgtctttactaaaaa

SEQ ID NO: 1546891 - DNA, 15 bp, Homo sapiens
gtctttactaaaaat

SEQ ID NO: 1546892 - DNA, 15 bp, Homo sapiens
ctttactaaaaataa

SEQ ID NO: 1546893 - DNA, 15 bp, Homo sapiens
tttactaaaaataaa

SEQ ID NO: 1546894 - DNA, 15 bp, Homo sapiens
ttactaaaaataaaa

SEQ ID NO: 1546895 - DNA, 15 bp, Homo sapiens
taaaataaaaaatat

SEQ ID NO: 1546896 - DNA, 15 bp, Homo sapiens
aaaataaaaaatata

SEQ ID NO: 1546897 - DNA, 15 bp, Homo sapiens
aaataaaaaatatat

SEQ ID NO: 1546898 - DNA, 15 bp, Homo sapiens
aataaaaaatatata

SEQ ID NO: 1546899 - DNA, 15 bp, Homo sapiens
ataaaaaatatatat

SEQ ID NO: 1546900 - DNA, 15 bp, Homo sapiens
taaaaaatatatata

SEQ ID NO: 1546901 - DNA, 15 bp, Homo sapiens
aaaaaatatatataa

SEQ ID NO: 1546902 - DNA, 15 bp, Homo sapiens
aaaaatatatataaa

SEQ ID NO: 1546903 - DNA, 15 bp, Homo sapiens
aaaatatatataaaa

SEQ ID NO: 1546904 - DNA, 15 bp, Homo sapiens
aaatatatataaaaa

SEQ ID NO: 1546905 - DNA, 15 bp, Homo sapiens
aatatatataaaaat

SEQ ID NO: 1546906 - DNA, 15 bp, Homo sapiens
atatatataaaaatt

SEQ ID NO: 1546907 - DNA, 15 bp, Homo sapiens
tatatataaaaatta

SEQ ID NO: 1546908 - DNA, 15 bp, Homo sapiens
atatataaaaattag

SEQ ID NO: 1546909 - DNA, 15 bp, Homo sapiens
tatataaaaattagc

SEQ ID NO: 1546910 - DNA, 15 bp, Homo sapiens
tataaaaattagctg

SEQ ID NO: 1546911 - DNA, 15 bp, Homo sapiens
ataaaaattagctgg

SEQ ID NO: 1546912 - DNA, 15 bp, Homo sapiens
taaaaattagctggg

SEQ ID NO: 1546913 - DNA, 15 bp, Homo sapiens
gtgtggtggcacatg

SEQ ID NO: 1546914 - DNA, 15 bp, Homo sapiens
tgtggtggcacatgc

SEQ ID NO: 1546915 - DNA, 15 bp, Homo sapiens
ggtggcacatgccta

SEQ ID NO: 1546916 - DNA, 15 bp, Homo sapiens
gtggcacatgcctat

SEQ ID NO: 1546917 - DNA, 15 bp, Homo sapiens
tggcacatgcctata

SEQ ID NO: 1546918 - DNA, 15 bp, Homo sapiens
ggcacatgcctataa

SEQ ID NO: 1546919 - DNA, 15 bp, Homo sapiens
gcacatgcctataat

SEQ ID NO: 1546920 - DNA, 15 bp, Homo sapiens
cacatgcctataatc

SEQ ID NO: 1546921 - DNA, 15 bp, Homo sapiens
ctataatcccagctg

SEQ ID NO: 1546922 - DNA, 15 bp, Homo sapiens
tataatcccagctgc

SEQ ID NO: 1546923 - DNA, 15 bp, Homo sapiens
ataatcccagctgct

SEQ ID NO: 1546924 - DNA, 15 bp, Homo sapiens
ccagctgcttgggag

SEQ ID NO: 1546925 - DNA, 15 bp, Homo sapiens
cagctgcttgggagg

SEQ ID NO: 1546926 - DNA, 15 bp, Homo sapiens
agctgcttgggaggc

SEQ ID NO: 1546927 - DNA, 15 bp, Homo sapiens
gctgcttgggaggct

SEQ ID NO: 1546928 - DNA, 15 bp, Homo sapiens
ctgcttgggaggctg

SEQ ID NO: 1546929 - DNA, 15 bp, Homo sapiens
tgcttgggaggctga

SEQ ID NO: 1546930 - DNA, 15 bp, Homo sapiens
gcttgggaggctgag

SEQ ID NO: 1546931 - DNA, 15 bp, Homo sapiens
tgggaggctgaggaa

SEQ ID NO: 1546932 - DNA, 15 bp, Homo sapiens
gggaggctgaggaac

SEQ ID NO: 1546933 - DNA, 15 bp, Homo sapiens
ggaggctgaggaaca

SEQ ID NO: 1546934 - DNA, 15 bp, Homo sapiens
gaggctgaggaacaa

SEQ ID NO: 1546935 - DNA, 15 bp, Homo sapiens
aggctgaggaacaag

SEQ ID NO: 1546936 - DNA, 15 bp, Homo sapiens
ggctgaggaacaaga

SEQ ID NO: 1546937 - DNA, 15 bp, Homo sapiens
gctgaggaacaagaa

SEQ ID NO: 1546938 - DNA, 15 bp, Homo sapiens
ctgaggaacaagaat

SEQ ID NO: 1546939 - DNA, 15 bp, Homo sapiens
tgaggaacaagaatg

SEQ ID NO: 1546940 - DNA, 15 bp, Homo sapiens
gaggaacaagaatgg

SEQ ID NO: 1546941 - DNA, 15 bp, Homo sapiens
aggaacaagaatggc

SEQ ID NO: 1546942 - DNA, 15 bp, Homo sapiens
ggaacaagaatggct

SEQ ID NO: 1546943 - DNA, 15 bp, Homo sapiens
gaacaagaatggctt

SEQ ID NO: 1546944 - DNA, 15 bp, Homo sapiens
aacaagaatggcttg

SEQ ID NO: 1546945 - DNA, 15 bp, Homo sapiens
acaagaatggcttga

SEQ ID NO: 1546946 - DNA, 15 bp, Homo sapiens
caagaatggcttgaa

SEQ ID NO: 1546947 - DNA, 15 bp, Homo sapiens
aagaatggcttgaac

SEQ ID NO: 1546948 - DNA, 15 bp, Homo sapiens
ggaggcagaggtggc

SEQ ID NO: 1546949 - DNA, 15 bp, Homo sapiens
gaggcagaggtggca

SEQ ID NO: 1546950 - DNA, 15 bp, Homo sapiens
aggcagaggtggcag

SEQ ID NO: 1546951 - DNA, 15 bp, Homo sapiens
aggtggcagtgagct

SEQ ID NO: 1546952 - DNA, 15 bp, Homo sapiens
gctgggggctgctcc

SEQ ID NO: 1546953 - DNA, 15 bp, Homo sapiens
ctgggggctgctccc

SEQ ID NO: 1546954 - DNA, 15 bp, Homo sapiens
tgggggctgctccca

SEQ ID NO: 1546955 - DNA, 15 bp, Homo sapiens
gggggctgctcccac

SEQ ID NO: 1546956 - DNA, 15 bp, Homo sapiens
ggggctgctcccacc

SEQ ID NO: 1546957 - DNA, 15 bp, Homo sapiens
gggctgctcccacct

SEQ ID NO: 1546958 - DNA, 15 bp, Homo sapiens
ggctgctcccacctg

SEQ ID NO: 1546959 - DNA, 15 bp, Homo sapiens
gctgctcccacctga

SEQ ID NO: 1546960 - DNA, 15 bp, Homo sapiens
ctgctcccacctgaa

SEQ ID NO: 1546961 - DNA, 15 bp, Homo sapiens
tgctcccacctgaag

SEQ ID NO: 1546962 - DNA, 15 bp, Homo sapiens
gctcccacctgaagg

SEQ ID NO: 1546963 - DNA, 15 bp, Homo sapiens
ctcccacctgaaggc

SEQ ID NO: 1546964 - DNA, 15 bp, Homo sapiens
tcccacctgaaggcc

SEQ ID NO: 1546965 - DNA, 15 bp, Homo sapiens
cccacctgaaggccc

SEQ ID NO: 1546966 - DNA, 15 bp, Homo sapiens
ccacctgaaggcccc

SEQ ID NO: 1546967 - DNA, 15 bp, Homo sapiens
cacctgaaggccccc

SEQ ID NO: 1546968 - DNA, 15 bp, Homo sapiens
acctgaaggccccca

SEQ ID NO: 1546969 - DNA, 15 bp, Homo sapiens
cctgaaggcccccat

SEQ ID NO: 1546970 - DNA, 15 bp, Homo sapiens
ctgaaggcccccatc

SEQ ID NO: 1546971 - DNA, 15 bp, Homo sapiens
tgaaggcccccatcc

SEQ ID NO: 1546972 - DNA, 15 bp, Homo sapiens
gaaggcccccatccc

SEQ ID NO: 1546973 - DNA, 15 bp, Homo sapiens
aaggcccccatccca

SEQ ID NO: 1546974 - DNA, 15 bp, Homo sapiens
aggcccccatcccac

SEQ ID NO: 1546975 - DNA, 15 bp, Homo sapiens
ggcccccatcccaca

SEQ ID NO: 1546976 - DNA, 15 bp, Homo sapiens
gcccccatcccacag

SEQ ID NO: 1546977 - DNA, 15 bp, Homo sapiens
cccccatcccacagg

SEQ ID NO: 1546978 - DNA, 15 bp, Homo sapiens
ccccatcccacaggc

SEQ ID NO: 1546979 - DNA, 15 bp, Homo sapiens
cccatcccacaggcc

SEQ ID NO: 1546980 - DNA, 15 bp, Homo sapiens
ccatcccacaggcct

SEQ ID NO: 1546981 - DNA, 15 bp, Homo sapiens
catcccacaggcctt

SEQ ID NO: 1546982 - DNA, 15 bp, Homo sapiens
atcccacaggccttc

SEQ ID NO: 1546983 - DNA, 15 bp, Homo sapiens
tcccacaggccttca

SEQ ID NO: 1546984 - DNA, 15 bp, Homo sapiens
cccacaggccttcag

SEQ ID NO: 1546985 - DNA, 15 bp, Homo sapiens
ccacaggccttcagc

SEQ ID NO: 1546986 - DNA, 15 bp, Homo sapiens
cacaggccttcagct

SEQ ID NO: 1546987 - DNA, 15 bp, Homo sapiens
acaggccttcagctg

SEQ ID NO: 1546988 - DNA, 15 bp, Homo sapiens
caggccttcagctgt

SEQ ID NO: 1546989 - DNA, 15 bp, Homo sapiens
aggccttcagctgta

SEQ ID NO: 1546990 - DNA, 15 bp, Homo sapiens
ggccttcagctgtat

SEQ ID NO: 1546991 - DNA, 15 bp, Homo sapiens
gccttcagctgtatc

SEQ ID NO: 1546992 - DNA, 15 bp, Homo sapiens
ccttcagctgtatcg

SEQ ID NO: 1546993 - DNA, 15 bp, Homo sapiens
cttcagctgtatcga

SEQ ID NO: 1546994 - DNA, 15 bp, Homo sapiens
ttcagctgtatcgac

SEQ ID NO: 1546995 - DNA, 15 bp, Homo sapiens
tcagctgtatcgacc

SEQ ID NO: 1546996 - DNA, 15 bp, Homo sapiens
cagctgtatcgacca

SEQ ID NO: 1546997 - DNA, 15 bp, Homo sapiens
agctgtatcgaccag

SEQ ID NO: 1546998 - DNA, 15 bp, Homo sapiens
gctgtatcgaccaga

SEQ ID NO: 1546999 - DNA, 15 bp, Homo sapiens
ctgtatcgaccagaa

SEQ ID NO: 1547000 - DNA, 15 bp, Homo sapiens
tgtatcgaccagaat

SEQ ID NO: 1547001 - DNA, 15 bp, Homo sapiens
gtatcgaccagaatc

SEQ ID NO: 1547002 - DNA, 15 bp, Homo sapiens
tatcgaccagaatcg

SEQ ID NO: 1547003 - DNA, 15 bp, Homo sapiens
atcgaccagaatcgt

SEQ ID NO: 1547004 - DNA, 15 bp, Homo sapiens
tcgaccagaatcgtg

SEQ ID NO: 1547005 - DNA, 15 bp, Homo sapiens
cgaccagaatcgtga

SEQ ID NO: 1547006 - DNA, 15 bp, Homo sapiens
gaccagaatcgtgat

SEQ ID NO: 1547007 - DNA, 15 bp, Homo sapiens
accagaatcgtgatg

SEQ ID NO: 1547008 - DNA, 15 bp, Homo sapiens
ccagaatcgtgatgg

SEQ ID NO: 1547009 - DNA, 15 bp, Homo sapiens
cagaatcgtgatggc

SEQ ID NO: 1547010 - DNA, 15 bp, Homo sapiens
agaatcgtgatggca

SEQ ID NO: 1547011 - DNA, 15 bp, Homo sapiens
gaatcgtgatggcat

SEQ ID NO: 1547012 - DNA, 15 bp, Homo sapiens
aatcgtgatggcatc

SEQ ID NO: 1547013 - DNA, 15 bp, Homo sapiens
atcgtgatggcatca

SEQ ID NO: 1547014 - DNA, 15 bp, Homo sapiens
tcgtgatggcatcat

SEQ ID NO: 1547015 - DNA, 15 bp, Homo sapiens
cgtgatggcatcatc

SEQ ID NO: 1547016 - DNA, 15 bp, Homo sapiens
gtgatggcatcatct

SEQ ID NO: 1547017 - DNA, 15 bp, Homo sapiens
tgatggcatcatctg

SEQ ID NO: 1547018 - DNA, 15 bp, Homo sapiens
gatggcatcatctgc

SEQ ID NO: 1547019 - DNA, 15 bp, Homo sapiens
atggcatcatctgca

SEQ ID NO: 1547020 - DNA, 15 bp, Homo sapiens
tggcatcatctgcaa

SEQ ID NO: 1547021 - DNA, 15 bp, Homo sapiens
ggcatcatctgcaag

SEQ ID NO: 1547022 - DNA, 15 bp, Homo sapiens
gcatcatctgcaagg

SEQ ID NO: 1547023 - DNA, 15 bp, Homo sapiens
catcatctgcaaggc

SEQ ID NO: 1547024 - DNA, 15 bp, Homo sapiens
atcatctgcaaggca

SEQ ID NO: 1547025 - DNA, 15 bp, Homo sapiens
tcatctgcaaggcag

SEQ ID NO: 1547026 - DNA, 15 bp, Homo sapiens
catctgcaaggcaga

SEQ ID NO: 1547027 - DNA, 15 bp, Homo sapiens
atctgcaaggcagac

SEQ ID NO: 1547028 - DNA, 15 bp, Homo sapiens
tctgcaaggcagacc

SEQ ID NO: 1547029 - DNA, 15 bp, Homo sapiens
ctgcaaggcagacct

SEQ ID NO: 1547030 - DNA, 15 bp, Homo sapiens
tgcaaggcagacctg

SEQ ID NO: 1547031 - DNA, 15 bp, Homo sapiens
gcaaggcagacctga

SEQ ID NO: 1547032 - DNA, 15 bp, Homo sapiens
caaggcagacctgag

SEQ ID NO: 1547033 - DNA, 15 bp, Homo sapiens
aaggcagacctgagg

SEQ ID NO: 1547034 - DNA, 15 bp, Homo sapiens
aggcagacctgaggg

SEQ ID NO: 1547035 - DNA, 15 bp, Homo sapiens
ggcagacctgaggga

SEQ ID NO: 1547036 - DNA, 15 bp, Homo sapiens
gcagacctgagggag

SEQ ID NO: 1547037 - DNA, 15 bp, Homo sapiens
cagacctgagggaga

SEQ ID NO: 1547038 - DNA, 15 bp, Homo sapiens
agacctgagggagac

SEQ ID NO: 1547039 - DNA, 15 bp, Homo sapiens
gacctgagggagacc

SEQ ID NO: 1547040 - DNA, 15 bp, Homo sapiens
acctgagggagacct

SEQ ID NO: 1547041 - DNA, 15 bp, Homo sapiens
cctgagggagaccta

SEQ ID NO: 1547042 - DNA, 15 bp, Homo sapiens
ctgagggagacctac

SEQ ID NO: 1547043 - DNA, 15 bp, Homo sapiens
tgagggagacctact

SEQ ID NO: 1547044 - DNA, 15 bp, Homo sapiens
gagggagacctactc

SEQ ID NO: 1547045 - DNA, 15 bp, Homo sapiens
agggagacctactcc

SEQ ID NO: 1547046 - DNA, 15 bp, Homo sapiens
gggagacctactccc

SEQ ID NO: 1547047 - DNA, 15 bp, Homo sapiens
ggagacctactccca

SEQ ID NO: 1547048 - DNA, 15 bp, Homo sapiens
gagacctactcccag

SEQ ID NO: 1547049 - DNA, 15 bp, Homo sapiens
agacctactcccagc

SEQ ID NO: 1547050 - DNA, 15 bp, Homo sapiens
gacctactcccagct

SEQ ID NO: 1547051 - DNA, 15 bp, Homo sapiens
acctactcccagctg

SEQ ID NO: 1547052 - DNA, 15 bp, Homo sapiens
cctactcccagctgg

SEQ ID NO: 1547053 - DNA, 15 bp, Homo sapiens
ctactcccagctggg

SEQ ID NO: 1547054 - DNA, 15 bp, Homo sapiens
tactcccagctgggt

SEQ ID NO: 1547055 - DNA, 15 bp, Homo sapiens
actcccagctgggtg

SEQ ID NO: 1547056 - DNA, 15 bp, Homo sapiens
ctcccagctgggtgc

SEQ ID NO: 1547057 - DNA, 15 bp, Homo sapiens
tcccagctgggtgcg

SEQ ID NO: 1547058 - DNA, 15 bp, Homo sapiens
cccagctgggtgcgt

SEQ ID NO: 1547059 - DNA, 15 bp, Homo sapiens
ccagctgggtgcgtg

SEQ ID NO: 1547060 - DNA, 15 bp, Homo sapiens
cagctgggtgcgtgc

SEQ ID NO: 1547061 - DNA, 15 bp, Homo sapiens
agctgggtgcgtgca

SEQ ID NO: 1547062 - DNA, 15 bp, Homo sapiens
gctgggtgcgtgcac

SEQ ID NO: 1547063 - DNA, 15 bp, Homo sapiens
ctgggtgcgtgcacc

SEQ ID NO: 1547064 - DNA, 15 bp, Homo sapiens
tgggtgcgtgcaccc

SEQ ID NO: 1547065 - DNA, 15 bp, Homo sapiens
gggtgcgtgcaccca

SEQ ID NO: 1547066 - DNA, 15 bp, Homo sapiens
ggtgcgtgcacccac

SEQ ID NO: 1547067 - DNA, 15 bp, Homo sapiens
gtgcgtgcacccacc

SEQ ID NO: 1547068 - DNA, 15 bp, Homo sapiens
tgcgtgcacccacct

SEQ ID NO: 1547069 - DNA, 15 bp, Homo sapiens
gcgtgcacccacctc

SEQ ID NO: 1547070 - DNA, 15 bp, Homo sapiens
cgtgcacccacctcc

SEQ ID NO: 1547071 - DNA, 15 bp, Homo sapiens
gtgcacccacctccc

SEQ ID NO: 1547072 - DNA, 15 bp, Homo sapiens
tgcacccacctccca

SEQ ID NO: 1547073 - DNA, 15 bp, Homo sapiens
gcacccacctcccac

SEQ ID NO: 1547074 - DNA, 15 bp, Homo sapiens
cacccacctcccacc

SEQ ID NO: 1547075 - DNA, 15 bp, Homo sapiens
acccacctcccaccc

SEQ ID NO: 1547076 - DNA, 15 bp, Homo sapiens
cccacctcccaccct

SEQ ID NO: 1547077 - DNA, 15 bp, Homo sapiens
ccacctcccaccctg

SEQ ID NO: 1547078 - DNA, 15 bp, Homo sapiens
acctcccaccctgcg

SEQ ID NO: 1547079 - DNA, 15 bp, Homo sapiens
cctcccaccctgcgc

SEQ ID NO: 1547080 - DNA, 15 bp, Homo sapiens
ctcccaccctgcgca

SEQ ID NO: 1547081 - DNA, 15 bp, Homo sapiens
tcccaccctgcgcac

SEQ ID NO: 1547082 - DNA, 15 bp, Homo sapiens
cccaccctgcgcact

SEQ ID NO: 1547083 - DNA, 15 bp, Homo sapiens
ccaccctgcgcactg

SEQ ID NO: 1547084 - DNA, 15 bp, Homo sapiens
caccctgcgcactgg

SEQ ID NO: 1547085 - DNA, 15 bp, Homo sapiens
accctgcgcactggg

SEQ ID NO: 1547086 - DNA, 15 bp, Homo sapiens
ccctgcgcactgggg

SEQ ID NO: 1547087 - DNA, 15 bp, Homo sapiens
cctgcgcactggggt

SEQ ID NO: 1547088 - DNA, 15 bp, Homo sapiens
ctgcgcactggggtc

SEQ ID NO: 1547089 - DNA, 15 bp, Homo sapiens
tgcgcactggggtcc

SEQ ID NO: 1547090 - DNA, 15 bp, Homo sapiens
gcgcactggggtccc

SEQ ID NO: 1547091 - DNA, 15 bp, Homo sapiens
cgcactggggtccct

SEQ ID NO: 1547092 - DNA, 15 bp, Homo sapiens
gcactggggtcccta

SEQ ID NO: 1547093 - DNA, 15 bp, Homo sapiens
cactggggtccctac

SEQ ID NO: 1547094 - DNA, 15 bp, Homo sapiens
actggggtccctact

SEQ ID NO: 1547095 - DNA, 15 bp, Homo sapiens
ctggggtccctactc

SEQ ID NO: 1547096 - DNA, 15 bp, Homo sapiens
tggggtccctactct

SEQ ID NO: 1547097 - DNA, 15 bp, Homo sapiens
ggggtccctactctg

SEQ ID NO: 1547098 - DNA, 15 bp, Homo sapiens
gggtccctactctga

SEQ ID NO: 1547099 - DNA, 15 bp, Homo sapiens
ggtccctactctgag

SEQ ID NO: 1547100 - DNA, 15 bp, Homo sapiens
gtccctactctgagc

SEQ ID NO: 1547101 - DNA, 15 bp, Homo sapiens
tccctactctgagct

SEQ ID NO: 1547102 - DNA, 15 bp, Homo sapiens
ccctactctgagctg

SEQ ID NO: 1547103 - DNA, 15 bp, Homo sapiens
cctactctgagctgc

SEQ ID NO: 1547104 - DNA, 15 bp, Homo sapiens
ctactctgagctgct

SEQ ID NO: 1547105 - DNA, 15 bp, Homo sapiens
tactctgagctgctg

SEQ ID NO: 1547106 - DNA, 15 bp, Homo sapiens
actctgagctgctgg

SEQ ID NO: 1547107 - DNA, 15 bp, Homo sapiens
ctctgagctgctggg

SEQ ID NO: 1547108 - DNA, 15 bp, Homo sapiens
tctgagctgctgggc

SEQ ID NO: 1547109 - DNA, 15 bp, Homo sapiens
ctgagctgctgggcg

SEQ ID NO: 1547110 - DNA, 15 bp, Homo sapiens
tgagctgctgggcgg

SEQ ID NO: 1547111 - DNA, 15 bp, Homo sapiens
gagctgctgggcggg

SEQ ID NO: 1547112 - DNA, 15 bp, Homo sapiens
agctgctgggcgggt

SEQ ID NO: 1547113 - DNA, 15 bp, Homo sapiens
gctgctgggcgggtg

SEQ ID NO: 1547114 - DNA, 15 bp, Homo sapiens
ctgctgggcgggtgg

SEQ ID NO: 1547115 - DNA, 15 bp, Homo sapiens
tgctgggcgggtggg

SEQ ID NO: 1547116 - DNA, 15 bp, Homo sapiens
gctgggcgggtggga

SEQ ID NO: 1547117 - DNA, 15 bp, Homo sapiens
ctgggcgggtgggag

SEQ ID NO: 1547118 - DNA, 15 bp, Homo sapiens
tgggcgggtgggagt

SEQ ID NO: 1547119 - DNA, 15 bp, Homo sapiens
gggcgggtgggagtg

SEQ ID NO: 1547120 - DNA, 15 bp, Homo sapiens
ggcgggtgggagtgg

SEQ ID NO: 1547121 - DNA, 15 bp, Homo sapiens
gcgggtgggagtggc

SEQ ID NO: 1547122 - DNA, 15 bp, Homo sapiens
cgggtgggagtggct

SEQ ID NO: 1547123 - DNA, 15 bp, Homo sapiens
gggtgggagtggctg

SEQ ID NO: 1547124 - DNA, 15 bp, Homo sapiens
ggtgggagtggctgg

SEQ ID NO: 1547125 - DNA, 15 bp, Homo sapiens
gtgggagtggctggg

SEQ ID NO: 1547126 - DNA, 15 bp, Homo sapiens
tgggagtggctgggg

SEQ ID NO: 1547127 - DNA, 15 bp, Homo sapiens
gggagtggctggggg

SEQ ID NO: 1547128 - DNA, 15 bp, Homo sapiens
ggagtggctgggggg

SEQ ID NO: 1547129 - DNA, 15 bp, Homo sapiens
gagtggctgggggga

SEQ ID NO: 1547130 - DNA, 15 bp, Homo sapiens
agtggctggggggac

SEQ ID NO: 1547131 - DNA, 15 bp, Homo sapiens
gtggctggggggaca

SEQ ID NO: 1547132 - DNA, 15 bp, Homo sapiens
tggctggggggacag

SEQ ID NO: 1547133 - DNA, 15 bp, Homo sapiens
ggctggggggacagg

SEQ ID NO: 1547134 - DNA, 15 bp, Homo sapiens
gctggggggacagga

SEQ ID NO: 1547135 - DNA, 15 bp, Homo sapiens
ctggggggacaggac

SEQ ID NO: 1547136 - DNA, 15 bp, Homo sapiens
tggggggacaggact

SEQ ID NO: 1547137 - DNA, 15 bp, Homo sapiens
ggggggacaggactc

SEQ ID NO: 1547138 - DNA, 15 bp, Homo sapiens
gggggacaggactct

SEQ ID NO: 1547139 - DNA, 15 bp, Homo sapiens
ggggacaggactctg

SEQ ID NO: 1547140 - DNA, 15 bp, Homo sapiens
gggacaggactctgc

SEQ ID NO: 1547141 - DNA, 15 bp, Homo sapiens
ggacaggactctgct

SEQ ID NO: 1547142 - DNA, 15 bp, Homo sapiens
gacaggactctgctc

SEQ ID NO: 1547143 - DNA, 15 bp, Homo sapiens
acaggactctgctcc

SEQ ID NO: 1547144 - DNA, 15 bp, Homo sapiens
caggactctgctccc

SEQ ID NO: 1547145 - DNA, 15 bp, Homo sapiens
aggactctgctcccc

SEQ ID NO: 1547146 - DNA, 15 bp, Homo sapiens
ggactctgctcccct

SEQ ID NO: 1547147 - DNA, 15 bp, Homo sapiens
gactctgctcccctg

SEQ ID NO: 1547148 - DNA, 15 bp, Homo sapiens
actctgctcccctgc

SEQ ID NO: 1547149 - DNA, 15 bp, Homo sapiens
ctctgctcccctgct

SEQ ID NO: 1547150 - DNA, 15 bp, Homo sapiens
tctgctcccctgctt

SEQ ID NO: 1547151 - DNA, 15 bp, Homo sapiens
ctgctcccctgcttc

SEQ ID NO: 1547152 - DNA, 15 bp, Homo sapiens
tgctcccctgcttcc

SEQ ID NO: 1547153 - DNA, 15 bp, Homo sapiens
gctcccctgcttccc

SEQ ID NO: 1547154 - DNA, 15 bp, Homo sapiens
ctcccctgcttcccc

SEQ ID NO: 1547155 - DNA, 15 bp, Homo sapiens
tcccctgcttcccct

SEQ ID NO: 1547156 - DNA, 15 bp, Homo sapiens
cccctgcttcccctc

SEQ ID NO: 1547157 - DNA, 15 bp, Homo sapiens
ccctgcttcccctcc

SEQ ID NO: 1547158 - DNA, 15 bp, Homo sapiens
cctgcttcccctcct

SEQ ID NO: 1547159 - DNA, 15 bp, Homo sapiens
ctgcttcccctcctc

SEQ ID NO: 1547160 - DNA, 15 bp, Homo sapiens
tgcttcccctcctcc

SEQ ID NO: 1547161 - DNA, 15 bp, Homo sapiens
gcttcccctcctccc

SEQ ID NO: 1547162 - DNA, 15 bp, Homo sapiens
cttcccctcctcccc

SEQ ID NO: 1547163 - DNA, 15 bp, Homo sapiens
ttcccctcctccccg

SEQ ID NO: 1547164 - DNA, 15 bp, Homo sapiens
tcccctcctccccgt

SEQ ID NO: 1547165 - DNA, 15 bp, Homo sapiens
cccctcctccccgtc

SEQ ID NO: 1547166 - DNA, 15 bp, Homo sapiens
ccctcctccccgtct

SEQ ID NO: 1547167 - DNA, 15 bp, Homo sapiens
cctcctccccgtctc

SEQ ID NO: 1547168 - DNA, 15 bp, Homo sapiens
ctcctccccgtctcc

SEQ ID NO: 1547169 - DNA, 15 bp, Homo sapiens
tcctccccgtctcct

SEQ ID NO: 1547170 - DNA, 15 bp, Homo sapiens
cctccccgtctcctc

SEQ ID NO: 1547171 - DNA, 15 bp, Homo sapiens
ctccccgtctcctca

SEQ ID NO: 1547172 - DNA, 15 bp, Homo sapiens
tccccgtctcctcac

SEQ ID NO: 1547173 - DNA, 15 bp, Homo sapiens
ccccgtctcctcaca

SEQ ID NO: 1547174 - DNA, 15 bp, Homo sapiens
cccgtctcctcacac

SEQ ID NO: 1547175 - DNA, 15 bp, Homo sapiens
ccgtctcctcacact

SEQ ID NO: 1547176 - DNA, 15 bp, Homo sapiens
cgtctcctcacactg

SEQ ID NO: 1547177 - DNA, 15 bp, Homo sapiens
gtctcctcacactgc

SEQ ID NO: 1547178 - DNA, 15 bp, Homo sapiens
tctcctcacactgcc

SEQ ID NO: 1547179 - DNA, 15 bp, Homo sapiens
ctcctcacactgccc

SEQ ID NO: 1547180 - DNA, 15 bp, Homo sapiens
tcctcacactgccct

SEQ ID NO: 1547181 - DNA, 15 bp, Homo sapiens
cctcacactgccctt

SEQ ID NO: 1547182 - DNA, 15 bp, Homo sapiens
ctcacactgcccttc

SEQ ID NO: 1547183 - DNA, 15 bp, Homo sapiens
tcacactgcccttcc

SEQ ID NO: 1547184 - DNA, 15 bp, Homo sapiens
cacactgcccttccc

SEQ ID NO: 1547185 - DNA, 15 bp, Homo sapiens
acactgcccttcccc

SEQ ID NO: 1547186 - DNA, 15 bp, Homo sapiens
cactgcccttccccc

SEQ ID NO: 1547187 - DNA, 15 bp, Homo sapiens
actgcccttcccccc

SEQ ID NO: 1547188 - DNA, 15 bp, Homo sapiens
ctgcccttcccccct

SEQ ID NO: 1547189 - DNA, 15 bp, Homo sapiens
tgcccttcccccctt

SEQ ID NO: 1547190 - DNA, 15 bp, Homo sapiens
gcccttccccccttg

SEQ ID NO: 1547191 - DNA, 15 bp, Homo sapiens
cccttccccccttgt

SEQ ID NO: 1547192 - DNA, 15 bp, Homo sapiens
ccttccccccttgtc

SEQ ID NO: 1547193 - DNA, 15 bp, Homo sapiens
cttccccccttgtca

SEQ ID NO: 1547194 - DNA, 15 bp, Homo sapiens
ttccccccttgtcac

SEQ ID NO: 1547195 - DNA, 15 bp, Homo sapiens
tccccccttgtcacg

SEQ ID NO: 1547196 - DNA, 15 bp, Homo sapiens
ccccccttgtcacgc

SEQ ID NO: 1547197 - DNA, 15 bp, Homo sapiens
cccccttgtcacgcc

SEQ ID NO: 1547198 - DNA, 15 bp, Homo sapiens
ccccttgtcacgcct

SEQ ID NO: 1547199 - DNA, 15 bp, Homo sapiens
cccttgtcacgcctt

SEQ ID NO: 1547200 - DNA, 15 bp, Homo sapiens
ccttgtcacgccttg

SEQ ID NO: 1547201 - DNA, 15 bp, Homo sapiens
cttgtcacgccttgc

SEQ ID NO: 1547202 - DNA, 15 bp, Homo sapiens
ttgtcacgccttgct

SEQ ID NO: 1547203 - DNA, 15 bp, Homo sapiens
tgtcacgccttgctt

SEQ ID NO: 1547204 - DNA, 15 bp, Homo sapiens
gtcacgccttgcttc

SEQ ID NO: 1547205 - DNA, 15 bp, Homo sapiens
tcacgccttgcttcc

SEQ ID NO: 1547206 - DNA, 15 bp, Homo sapiens
cacgccttgcttcca

SEQ ID NO: 1547207 - DNA, 15 bp, Homo sapiens
acgccttgcttccac

SEQ ID NO: 1547208 - DNA, 15 bp, Homo sapiens
cgccttgcttccact

SEQ ID NO: 1547209 - DNA, 15 bp, Homo sapiens
gccttgcttccactt

SEQ ID NO: 1547210 - DNA, 15 bp, Homo sapiens
ccttgcttccacttc

SEQ ID NO: 1547211 - DNA, 15 bp, Homo sapiens
cttgcttccacttca

SEQ ID NO: 1547212 - DNA, 15 bp, Homo sapiens
ttgcttccacttcac

SEQ ID NO: 1547213 - DNA, 15 bp, Homo sapiens
tgcttccacttcacc

SEQ ID NO: 1547214 - DNA, 15 bp, Homo sapiens
gcttccacttcacct

SEQ ID NO: 1547215 - DNA, 15 bp, Homo sapiens
cttccacttcacctt

SEQ ID NO: 1547216 - DNA, 15 bp, Homo sapiens
ttccacttcaccttc

SEQ ID NO: 1547217 - DNA, 15 bp, Homo sapiens
tccacttcaccttcc

SEQ ID NO: 1547218 - DNA, 15 bp, Homo sapiens
ccacttcaccttccc

SEQ ID NO: 1547219 - DNA, 15 bp, Homo sapiens
cacttcaccttcccg

SEQ ID NO: 1547220 - DNA, 15 bp, Homo sapiens
acttcaccttcccga

SEQ ID NO: 1547221 - DNA, 15 bp, Homo sapiens
cttcaccttcccgac

SEQ ID NO: 1547222 - DNA, 15 bp, Homo sapiens
ttcaccttcccgacc

SEQ ID NO: 1547223 - DNA, 15 bp, Homo sapiens
tcaccttcccgaccc

SEQ ID NO: 1547224 - DNA, 15 bp, Homo sapiens
caccttcccgaccca

SEQ ID NO: 1547225 - DNA, 15 bp, Homo sapiens
accttcccgacccac

SEQ ID NO: 1547226 - DNA, 15 bp, Homo sapiens
ccttcccgacccaca

SEQ ID NO: 1547227 - DNA, 15 bp, Homo sapiens
cttcccgacccacag

SEQ ID NO: 1547228 - DNA, 15 bp, Homo sapiens
ttcccgacccacagc

SEQ ID NO: 1547229 - DNA, 15 bp, Homo sapiens
tcccgacccacagct

SEQ ID NO: 1547230 - DNA, 15 bp, Homo sapiens
cccgacccacagctg

SEQ ID NO: 1547231 - DNA, 15 bp, Homo sapiens
ccgacccacagctgc

SEQ ID NO: 1547232 - DNA, 15 bp, Homo sapiens
cgacccacagctgcc

SEQ ID NO: 1547233 - DNA, 15 bp, Homo sapiens
gacccacagctgcct

SEQ ID NO: 1547234 - DNA, 15 bp, Homo sapiens
acccacagctgcctc

SEQ ID NO: 1547235 - DNA, 15 bp, Homo sapiens
cccacagctgcctct

SEQ ID NO: 1547236 - DNA, 15 bp, Homo sapiens
ccacagctgcctctg

SEQ ID NO: 1547237 - DNA, 15 bp, Homo sapiens
cacagctgcctctgc

SEQ ID NO: 1547238 - DNA, 15 bp, Homo sapiens
acagctgcctctgcc

SEQ ID NO: 1547239 - DNA, 15 bp, Homo sapiens
cagctgcctctgccc

SEQ ID NO: 1547240 - DNA, 15 bp, Homo sapiens
agctgcctctgcccc

SEQ ID NO: 1547241 - DNA, 15 bp, Homo sapiens
gctgcctctgcccct

SEQ ID NO: 1547242 - DNA, 15 bp, Homo sapiens
ctgcctctgcccctc

SEQ ID NO: 1547243 - DNA, 15 bp, Homo sapiens
tgcctctgcccctcc

SEQ ID NO: 1547244 - DNA, 15 bp, Homo sapiens
gcctctgcccctcca

SEQ ID NO: 1547245 - DNA, 15 bp, Homo sapiens
cctctgcccctccag

SEQ ID NO: 1547246 - DNA, 15 bp, Homo sapiens
ctctgcccctccagc

SEQ ID NO: 1547247 - DNA, 15 bp, Homo sapiens
tctgcccctccagcc

SEQ ID NO: 1547248 - DNA, 15 bp, Homo sapiens
ctgcccctccagccc

SEQ ID NO: 1547249 - DNA, 15 bp, Homo sapiens
tgcccctccagcccc

SEQ ID NO: 1547250 - DNA, 15 bp, Homo sapiens
gcccctccagcccct

SEQ ID NO: 1547251 - DNA, 15 bp, Homo sapiens
cccctccagcccctg

SEQ ID NO: 1547252 - DNA, 15 bp, Homo sapiens
ccctccagcccctgt

SEQ ID NO: 1547253 - DNA, 15 bp, Homo sapiens
cctccagcccctgtg

SEQ ID NO: 1547254 - DNA, 15 bp, Homo sapiens
ctccagcccctgtgg

SEQ ID NO: 1547255 - DNA, 15 bp, Homo sapiens
tccagcccctgtggc

SEQ ID NO: 1547256 - DNA, 15 bp, Homo sapiens
ccagcccctgtggcc

SEQ ID NO: 1547257 - DNA, 15 bp, Homo sapiens
cagcccctgtggcca

SEQ ID NO: 1547258 - DNA, 15 bp, Homo sapiens
agcccctgtggccag

SEQ ID NO: 1547259 - DNA, 15 bp, Homo sapiens
gcccctgtggccagg

SEQ ID NO: 1547260 - DNA, 15 bp, Homo sapiens
cccctgtggccagga

SEQ ID NO: 1547261 - DNA, 15 bp, Homo sapiens
ccctgtggccaggat

SEQ ID NO: 1547262 - DNA, 15 bp, Homo sapiens
cctgtggccaggatg

SEQ ID NO: 1547263 - DNA, 15 bp, Homo sapiens
ctgtggccaggatgg

SEQ ID NO: 1547264 - DNA, 15 bp, Homo sapiens
tgtggccaggatgga

SEQ ID NO: 1547265 - DNA, 15 bp, Homo sapiens
gtggccaggatggag

SEQ ID NO: 1547266 - DNA, 15 bp, Homo sapiens
tggccaggatggagg

SEQ ID NO: 1547267 - DNA, 15 bp, Homo sapiens
ggccaggatggaggg

SEQ ID NO: 1547268 - DNA, 15 bp, Homo sapiens
gccaggatggaggga

SEQ ID NO: 1547269 - DNA, 15 bp, Homo sapiens
ccaggatggagggag

SEQ ID NO: 1547270 - DNA, 15 bp, Homo sapiens
caggatggagggagg

SEQ ID NO: 1547271 - DNA, 15 bp, Homo sapiens
aggatggagggaggg

SEQ ID NO: 1547272 - DNA, 15 bp, Homo sapiens
ggatggagggagggc

SEQ ID NO: 1547273 - DNA, 15 bp, Homo sapiens
gatggagggagggcg

SEQ ID NO: 1547274 - DNA, 15 bp, Homo sapiens
atggagggagggcgg

SEQ ID NO: 1547275 - DNA, 15 bp, Homo sapiens
tggagggagggcggc

SEQ ID NO: 1547276 - DNA, 15 bp, Homo sapiens
ggagggagggcggcc

SEQ ID NO: 1547277 - DNA, 15 bp, Homo sapiens
gagggagggcggcct

SEQ ID NO: 1547278 - DNA, 15 bp, Homo sapiens
agggagggcggcctg

SEQ ID NO: 1547279 - DNA, 15 bp, Homo sapiens
gggagggcggcctgg

SEQ ID NO: 1547280 - DNA, 15 bp, Homo sapiens
ggagggcggcctggg

SEQ ID NO: 1547281 - DNA, 15 bp, Homo sapiens
gagggcggcctgggc

SEQ ID NO: 1547282 - DNA, 15 bp, Homo sapiens
agggcggcctgggcc

SEQ ID NO: 1547283 - DNA, 15 bp, Homo sapiens
gggcggcctgggcct

SEQ ID NO: 1547284 - DNA, 15 bp, Homo sapiens
ggcggcctgggcctt

SEQ ID NO: 1547285 - DNA, 15 bp, Homo sapiens
gcggcctgggccttc

SEQ ID NO: 1547286 - DNA, 15 bp, Homo sapiens
cggcctgggccttct

SEQ ID NO: 1547287 - DNA, 15 bp, Homo sapiens
ggcctgggccttctg

SEQ ID NO: 1547288 - DNA, 15 bp, Homo sapiens
gcctgggccttctgg

SEQ ID NO: 1547289 - DNA, 15 bp, Homo sapiens
cctgggccttctggg

SEQ ID NO: 1547290 - DNA, 15 bp, Homo sapiens
ctgggccttctgggg

SEQ ID NO: 1547291 - DNA, 15 bp, Homo sapiens
tgggccttctggggg

SEQ ID NO: 1547292 - DNA, 15 bp, Homo sapiens
gggccttctggggga

SEQ ID NO: 1547293 - DNA, 15 bp, Homo sapiens
ggccttctgggggac

SEQ ID NO: 1547294 - DNA, 15 bp, Homo sapiens
gccttctgggggaca

SEQ ID NO: 1547295 - DNA, 15 bp, Homo sapiens
ccttctgggggacac

SEQ ID NO: 1547296 - DNA, 15 bp, Homo sapiens
cttctgggggacacc

SEQ ID NO: 1547297 - DNA, 15 bp, Homo sapiens
ttctgggggacaccc

SEQ ID NO: 1547298 - DNA, 15 bp, Homo sapiens
tctgggggacaccca

SEQ ID NO: 1547299 - DNA, 15 bp, Homo sapiens
ctgggggacacccag

SEQ ID NO: 1547300 - DNA, 15 bp, Homo sapiens
tgggggacacccagg

SEQ ID NO: 1547301 - DNA, 15 bp, Homo sapiens
gggggacacccaggg

SEQ ID NO: 1547302 - DNA, 15 bp, Homo sapiens
ggggacacccagggt

SEQ ID NO: 1547303 - DNA, 15 bp, Homo sapiens
gggacacccagggtc

SEQ ID NO: 1547304 - DNA, 15 bp, Homo sapiens
ggacacccagggtcc

SEQ ID NO: 1547305 - DNA, 15 bp, Homo sapiens
gacacccagggtccc

SEQ ID NO: 1547306 - DNA, 15 bp, Homo sapiens
acacccagggtccct

SEQ ID NO: 1547307 - DNA, 15 bp, Homo sapiens
cacccagggtccctg

SEQ ID NO: 1547308 - DNA, 15 bp, Homo sapiens
acccagggtccctgt

SEQ ID NO: 1547309 - DNA, 15 bp, Homo sapiens
cccagggtccctgtg

SEQ ID NO: 1547310 - DNA, 15 bp, Homo sapiens
ccagggtccctgtgt

SEQ ID NO: 1547311 - DNA, 15 bp, Homo sapiens
cagggtccctgtgtg

SEQ ID NO: 1547312 - DNA, 15 bp, Homo sapiens
agggtccctgtgtgc

SEQ ID NO: 1547313 - DNA, 15 bp, Homo sapiens
gggtccctgtgtgca

SEQ ID NO: 1547314 - DNA, 15 bp, Homo sapiens
ggtccctgtgtgcac

SEQ ID NO: 1547315 - DNA, 15 bp, Homo sapiens
gtccctgtgtgcacc

SEQ ID NO: 1547316 - DNA, 15 bp, Homo sapiens
tccctgtgtgcacct

SEQ ID NO: 1547317 - DNA, 15 bp, Homo sapiens
ccctgtgtgcacctc

SEQ ID NO: 1547318 - DNA, 15 bp, Homo sapiens
cctgtgtgcacctca

SEQ ID NO: 1547319 - DNA, 15 bp, Homo sapiens
ctgtgtgcacctcat

SEQ ID NO: 1547320 - DNA, 15 bp, Homo sapiens
tgtgtgcacctcatg

SEQ ID NO: 1547321 - DNA, 15 bp, Homo sapiens
gtgtgcacctcatgc

SEQ ID NO: 1547322 - DNA, 15 bp, Homo sapiens
tgtgcacctcatgcc

SEQ ID NO: 1547323 - DNA, 15 bp, Homo sapiens
gtgcacctcatgccc

SEQ ID NO: 1547324 - DNA, 15 bp, Homo sapiens
tgcacctcatgcccc

SEQ ID NO: 1547325 - DNA, 15 bp, Homo sapiens
gcacctcatgcccca

SEQ ID NO: 1547326 - DNA, 15 bp, Homo sapiens
cacctcatgccccac

SEQ ID NO: 1547327 - DNA, 15 bp, Homo sapiens
acctcatgccccacc

SEQ ID NO: 1547328 - DNA, 15 bp, Homo sapiens
cctcatgccccaccc

SEQ ID NO: 1547329 - DNA, 15 bp, Homo sapiens
ctcatgccccacccc

SEQ ID NO: 1547330 - DNA, 15 bp, Homo sapiens
tcatgccccaccccc

SEQ ID NO: 1547331 - DNA, 15 bp, Homo sapiens
catgccccaccccca

SEQ ID NO: 1547332 - DNA, 15 bp, Homo sapiens
atgccccacccccac

SEQ ID NO: 1547333 - DNA, 15 bp, Homo sapiens
tgccccacccccacc

SEQ ID NO: 1547334 - DNA, 15 bp, Homo sapiens
gccccacccccacca

SEQ ID NO: 1547335 - DNA, 15 bp, Homo sapiens
ccccacccccaccag

SEQ ID NO: 1547336 - DNA, 15 bp, Homo sapiens
cccacccccaccagg

SEQ ID NO: 1547337 - DNA, 15 bp, Homo sapiens
ccacccccaccaggg

SEQ ID NO: 1547338 - DNA, 15 bp, Homo sapiens
cacccccaccaggga

SEQ ID NO: 1547339 - DNA, 15 bp, Homo sapiens
acccccaccagggaa

SEQ ID NO: 1547340 - DNA, 15 bp, Homo sapiens
cccccaccagggaag

SEQ ID NO: 1547341 - DNA, 15 bp, Homo sapiens
ccccaccagggaagg

SEQ ID NO: 1547342 - DNA, 15 bp, Homo sapiens
cccaccagggaaggt

SEQ ID NO: 1547343 - DNA, 15 bp, Homo sapiens
ccaccagggaaggtg

SEQ ID NO: 1547344 - DNA, 15 bp, Homo sapiens
caccagggaaggtga

SEQ ID NO: 1547345 - DNA, 15 bp, Homo sapiens
accagggaaggtgag

SEQ ID NO: 1547346 - DNA, 15 bp, Homo sapiens
ccagggaaggtgagt

SEQ ID NO: 1547347 - DNA, 15 bp, Homo sapiens
cagggaaggtgagtg

SEQ ID NO: 1547348 - DNA, 15 bp, Homo sapiens
agggaaggtgagtgt

SEQ ID NO: 1547349 - DNA, 15 bp, Homo sapiens
gggaaggtgagtgtc

SEQ ID NO: 1547350 - DNA, 15 bp, Homo sapiens
ggaaggtgagtgtcc

SEQ ID NO: 1547351 - DNA, 15 bp, Homo sapiens
gaaggtgagtgtccc

SEQ ID NO: 1547352 - DNA, 15 bp, Homo sapiens
aaggtgagtgtccca

SEQ ID NO: 1547353 - DNA, 15 bp, Homo sapiens
aggtgagtgtcccag

SEQ ID NO: 1547354 - DNA, 15 bp, Homo sapiens
ggtgagtgtcccaga

SEQ ID NO: 1547355 - DNA, 15 bp, Homo sapiens
gtgagtgtcccagag

SEQ ID NO: 1547356 - DNA, 15 bp, Homo sapiens
tgagtgtcccagagg

SEQ ID NO: 1547357 - DNA, 15 bp, Homo sapiens
gagtgtcccagagga

SEQ ID NO: 1547358 - DNA, 15 bp, Homo sapiens
gtgtcccagaggagg

SEQ ID NO: 1547359 - DNA, 15 bp, Homo sapiens
tgtcccagaggagga

SEQ ID NO: 1547360 - DNA, 15 bp, Homo sapiens
gtcccagaggaggag

SEQ ID NO: 1547361 - DNA, 15 bp, Homo sapiens
tcccagaggaggagc

SEQ ID NO: 1547362 - DNA, 15 bp, Homo sapiens
cccagaggaggagct

SEQ ID NO: 1547363 - DNA, 15 bp, Homo sapiens
ccagaggaggagctg

SEQ ID NO: 1547364 - DNA, 15 bp, Homo sapiens
cagaggaggagctgg

SEQ ID NO: 1547365 - DNA, 15 bp, Homo sapiens
agaggaggagctgga

SEQ ID NO: 1547366 - DNA, 15 bp, Homo sapiens
gaggaggagctggac

SEQ ID NO: 1547367 - DNA, 15 bp, Homo sapiens
aggaggagctggacg

SEQ ID NO: 1547368 - DNA, 15 bp, Homo sapiens
ggaggagctggacgc

SEQ ID NO: 1547369 - DNA, 15 bp, Homo sapiens
gaggagctggacgcc

SEQ ID NO: 1547370 - DNA, 15 bp, Homo sapiens
aggagctggacgcca

SEQ ID NO: 1547371 - DNA, 15 bp, Homo sapiens
ggagctggacgccat

SEQ ID NO: 1547372 - DNA, 15 bp, Homo sapiens
gagctggacgccatg

SEQ ID NO: 1547373 - DNA, 15 bp, Homo sapiens
agctggacgccatgc

SEQ ID NO: 1547374 - DNA, 15 bp, Homo sapiens
gctggacgccatgct

SEQ ID NO: 1547375 - DNA, 15 bp, Homo sapiens
ctggacgccatgctg

SEQ ID NO: 1547376 - DNA, 15 bp, Homo sapiens
tggacgccatgctgc

SEQ ID NO: 1547377 - DNA, 15 bp, Homo sapiens
ggacgccatgctgca

SEQ ID NO: 1547378 - DNA, 15 bp, Homo sapiens
gacgccatgctgcaa

SEQ ID NO: 1547379 - DNA, 15 bp, Homo sapiens
acgccatgctgcaag

SEQ ID NO: 1547380 - DNA, 15 bp, Homo sapiens
cgccatgctgcaaga

SEQ ID NO: 1547381 - DNA, 15 bp, Homo sapiens
gccatgctgcaagag

SEQ ID NO: 1547382 - DNA, 15 bp, Homo sapiens
ccatgctgcaagagg

SEQ ID NO: 1547383 - DNA, 15 bp, Homo sapiens
catgctgcaagaggg

SEQ ID NO: 1547384 - DNA, 15 bp, Homo sapiens
atgctgcaagagggc

SEQ ID NO: 1547385 - DNA, 15 bp, Homo sapiens
tgctgcaagagggca

SEQ ID NO: 1547386 - DNA, 15 bp, Homo sapiens
gctgcaagagggcaa

SEQ ID NO: 1547387 - DNA, 15 bp, Homo sapiens
ctgcaagagggcaag

SEQ ID NO: 1547388 - DNA, 15 bp, Homo sapiens
tgcaagagggcaagg

SEQ ID NO: 1547389 - DNA, 15 bp, Homo sapiens
gcaagagggcaaggg

SEQ ID NO: 1547390 - DNA, 15 bp, Homo sapiens
caagagggcaagggc

SEQ ID NO: 1547391 - DNA, 15 bp, Homo sapiens
aagagggcaagggcc

SEQ ID NO: 1547392 - DNA, 15 bp, Homo sapiens
agagggcaagggccc

SEQ ID NO: 1547393 - DNA, 15 bp, Homo sapiens
gagggcaagggcccc

SEQ ID NO: 1547394 - DNA, 15 bp, Homo sapiens
agggcaagggcccca

SEQ ID NO: 1547395 - DNA, 15 bp, Homo sapiens
gggcaagggccccat

SEQ ID NO: 1547396 - DNA, 15 bp, Homo sapiens
ggcaagggccccatc

SEQ ID NO: 1547397 - DNA, 15 bp, Homo sapiens
gcaagggccccatca

SEQ ID NO: 1547398 - DNA, 15 bp, Homo sapiens
caagggccccatcaa

SEQ ID NO: 1547399 - DNA, 15 bp, Homo sapiens
aagggccccatcaac

SEQ ID NO: 1547400 - DNA, 15 bp, Homo sapiens
agggccccatcaact

SEQ ID NO: 1547401 - DNA, 15 bp, Homo sapiens
gggccccatcaactt

SEQ ID NO: 1547402 - DNA, 15 bp, Homo sapiens
ggccccatcaacttc

SEQ ID NO: 1547403 - DNA, 15 bp, Homo sapiens
gccccatcaacttca

SEQ ID NO: 1547404 - DNA, 15 bp, Homo sapiens
ccccatcaacttcac

SEQ ID NO: 1547405 - DNA, 15 bp, Homo sapiens
cccatcaacttcacc

SEQ ID NO: 1547406 - DNA, 15 bp, Homo sapiens
ccatcaacttcaccg

SEQ ID NO: 1547407 - DNA, 15 bp, Homo sapiens
catcaacttcaccgt

SEQ ID NO: 1547408 - DNA, 15 bp, Homo sapiens
atcaacttcaccgtc

SEQ ID NO: 1547409 - DNA, 15 bp, Homo sapiens
tcaacttcaccgtct

SEQ ID NO: 1547410 - DNA, 15 bp, Homo sapiens
caacttcaccgtctt

SEQ ID NO: 1547411 - DNA, 15 bp, Homo sapiens
aacttcaccgtcttc

SEQ ID NO: 1547412 - DNA, 15 bp, Homo sapiens
acttcaccgtcttcc

SEQ ID NO: 1547413 - DNA, 15 bp, Homo sapiens
cttcaccgtcttcct

SEQ ID NO: 1547414 - DNA, 15 bp, Homo sapiens
ttcaccgtcttcctc

SEQ ID NO: 1547415 - DNA, 15 bp, Homo sapiens
tcaccgtcttcctca

SEQ ID NO: 1547416 - DNA, 15 bp, Homo sapiens
caccgtcttcctcac

SEQ ID NO: 1547417 - DNA, 15 bp, Homo sapiens
accgtcttcctcacg

SEQ ID NO: 1547418 - DNA, 15 bp, Homo sapiens
ccgtcttcctcacgc

SEQ ID NO: 1547419 - DNA, 15 bp, Homo sapiens
cgtcttcctcacgct

SEQ ID NO: 1547420 - DNA, 15 bp, Homo sapiens
gtcttcctcacgctc

SEQ ID NO: 1547421 - DNA, 15 bp, Homo sapiens
tcttcctcacgctct

SEQ ID NO: 1547422 - DNA, 15 bp, Homo sapiens
cttcctcacgctctt

SEQ ID NO: 1547423 - DNA, 15 bp, Homo sapiens
ttcctcacgctcttt

SEQ ID NO: 1547424 - DNA, 15 bp, Homo sapiens
tcctcacgctctttg

SEQ ID NO: 1547425 - DNA, 15 bp, Homo sapiens
cctcacgctctttgg

SEQ ID NO: 1547426 - DNA, 15 bp, Homo sapiens
ctcacgctctttggg

SEQ ID NO: 1547427 - DNA, 15 bp, Homo sapiens
tcacgctctttgggg

SEQ ID NO: 1547428 - DNA, 15 bp, Homo sapiens
cacgctctttgggga

SEQ ID NO: 1547429 - DNA, 15 bp, Homo sapiens
acgctctttggggag

SEQ ID NO: 1547430 - DNA, 15 bp, Homo sapiens
cgctctttggggaga

SEQ ID NO: 1547431 - DNA, 15 bp, Homo sapiens
gctctttggggagaa

SEQ ID NO: 1547432 - DNA, 15 bp, Homo sapiens
ctctttggggagaag

SEQ ID NO: 1547433 - DNA, 15 bp, Homo sapiens
tctttggggagaagc

SEQ ID NO: 1547434 - DNA, 15 bp, Homo sapiens
ctttggggagaagct

SEQ ID NO: 1547435 - DNA, 15 bp, Homo sapiens
tttggggagaagctc

SEQ ID NO: 1547436 - DNA, 15 bp, Homo sapiens
ttggggagaagctca

SEQ ID NO: 1547437 - DNA, 15 bp, Homo sapiens
tggggagaagctcaa

SEQ ID NO: 1547438 - DNA, 15 bp, Homo sapiens
ggggagaagctcaat

SEQ ID NO: 1547439 - DNA, 15 bp, Homo sapiens
gggagaagctcaatg

SEQ ID NO: 1547440 - DNA, 15 bp, Homo sapiens
ggagaagctcaatgg

SEQ ID NO: 1547441 - DNA, 15 bp, Homo sapiens
gagaagctcaatggt

SEQ ID NO: 1547442 - DNA, 15 bp, Homo sapiens
agaagctcaatggtg

SEQ ID NO: 1547443 - DNA, 15 bp, Homo sapiens
gaagctcaatggtga

SEQ ID NO: 1547444 - DNA, 15 bp, Homo sapiens
aagctcaatggtgag

SEQ ID NO: 1547445 - DNA, 15 bp, Homo sapiens
agctcaatggtgagc

SEQ ID NO: 1547446 - DNA, 15 bp, Homo sapiens
gctcaatggtgagcc

SEQ ID NO: 1547447 - DNA, 15 bp, Homo sapiens
ctcaatggtgagcct

SEQ ID NO: 1547448 - DNA, 15 bp, Homo sapiens
tcaatggtgagcctg

SEQ ID NO: 1547449 - DNA, 15 bp, Homo sapiens
caatggtgagcctgg

SEQ ID NO: 1547450 - DNA, 15 bp, Homo sapiens
aatggtgagcctggg

SEQ ID NO: 1547451 - DNA, 15 bp, Homo sapiens
atggtgagcctggga

SEQ ID NO: 1547452 - DNA, 15 bp, Homo sapiens
tggtgagcctgggac

SEQ ID NO: 1547453 - DNA, 15 bp, Homo sapiens
ggtgagcctgggaca

SEQ ID NO: 1547454 - DNA, 15 bp, Homo sapiens
gtgagcctgggacag

SEQ ID NO: 1547455 - DNA, 15 bp, Homo sapiens
tgagcctgggacaga

SEQ ID NO: 1547456 - DNA, 15 bp, Homo sapiens
gagcctgggacagag

SEQ ID NO: 1547457 - DNA, 15 bp, Homo sapiens
agcctgggacagagc

SEQ ID NO: 1547458 - DNA, 15 bp, Homo sapiens
gcctgggacagagct

SEQ ID NO: 1547459 - DNA, 15 bp, Homo sapiens
cctgggacagagctg

SEQ ID NO: 1547460 - DNA, 15 bp, Homo sapiens
ctgggacagagctgg

SEQ ID NO: 1547461 - DNA, 15 bp, Homo sapiens
tgggacagagctggg

SEQ ID NO: 1547462 - DNA, 15 bp, Homo sapiens
gggacagagctgggc

SEQ ID NO: 1547463 - DNA, 15 bp, Homo sapiens
ggacagagctgggca

SEQ ID NO: 1547464 - DNA, 15 bp, Homo sapiens
gacagagctgggcac

SEQ ID NO: 1547465 - DNA, 15 bp, Homo sapiens
acagagctgggcacc

SEQ ID NO: 1547466 - DNA, 15 bp, Homo sapiens
cagagctgggcaccc

SEQ ID NO: 1547467 - DNA, 15 bp, Homo sapiens
agagctgggcaccct

SEQ ID NO: 1547468 - DNA, 15 bp, Homo sapiens
gagctgggcaccctt

SEQ ID NO: 1547469 - DNA, 15 bp, Homo sapiens
agctgggcacccttg

SEQ ID NO: 1547470 - DNA, 15 bp, Homo sapiens
gctgggcacccttgg

SEQ ID NO: 1547471 - DNA, 15 bp, Homo sapiens
ctgggcacccttggc

SEQ ID NO: 1547472 - DNA, 15 bp, Homo sapiens
tgggcacccttggcc

SEQ ID NO: 1547473 - DNA, 15 bp, Homo sapiens
gggcacccttggcca

SEQ ID NO: 1547474 - DNA, 15 bp, Homo sapiens
ggcacccttggccag

SEQ ID NO: 1547475 - DNA, 15 bp, Homo sapiens
gcacccttggccagg

SEQ ID NO: 1547476 - DNA, 15 bp, Homo sapiens
cacccttggccaggc

SEQ ID NO: 1547477 - DNA, 15 bp, Homo sapiens
acccttggccaggca

SEQ ID NO: 1547478 - DNA, 15 bp, Homo sapiens
cccttggccaggcag

SEQ ID NO: 1547479 - DNA, 15 bp, Homo sapiens
ccttggccaggcagg

SEQ ID NO: 1547480 - DNA, 15 bp, Homo sapiens
cttggccaggcaggg

SEQ ID NO: 1547481 - DNA, 15 bp, Homo sapiens
ttggccaggcaggga

SEQ ID NO: 1547482 - DNA, 15 bp, Homo sapiens
tggccaggcagggag

SEQ ID NO: 1547483 - DNA, 15 bp, Homo sapiens
ggccaggcagggagc

SEQ ID NO: 1547484 - DNA, 15 bp, Homo sapiens
gccaggcagggagcc

SEQ ID NO: 1547485 - DNA, 15 bp, Homo sapiens
ccaggcagggagcct

SEQ ID NO: 1547486 - DNA, 15 bp, Homo sapiens
caggcagggagcctg

SEQ ID NO: 1547487 - DNA, 15 bp, Homo sapiens
aggcagggagcctgc

SEQ ID NO: 1547488 - DNA, 15 bp, Homo sapiens
ggcagggagcctgca

SEQ ID NO: 1547489 - DNA, 15 bp, Homo sapiens
gcagggagcctgcac

SEQ ID NO: 1547490 - DNA, 15 bp, Homo sapiens
cagggagcctgcacc

SEQ ID NO: 1547491 - DNA, 15 bp, Homo sapiens
agggagcctgcaccc

SEQ ID NO: 1547492 - DNA, 15 bp, Homo sapiens
gggagcctgcaccct

SEQ ID NO: 1547493 - DNA, 15 bp, Homo sapiens
ggagcctgcaccctg

SEQ ID NO: 1547494 - DNA, 15 bp, Homo sapiens
gagcctgcaccctgc

SEQ ID NO: 1547495 - DNA, 15 bp, Homo sapiens
agcctgcaccctgcc

SEQ ID NO: 1547496 - DNA, 15 bp, Homo sapiens
gcctgcaccctgcct

SEQ ID NO: 1547497 - DNA, 15 bp, Homo sapiens
cctgcaccctgcctg

SEQ ID NO: 1547498 - DNA, 15 bp, Homo sapiens
ctgcaccctgcctga

SEQ ID NO: 1547499 - DNA, 15 bp, Homo sapiens
tgcaccctgcctgaa

SEQ ID NO: 1547500 - DNA, 15 bp, Homo sapiens
gcaccctgcctgaac

SEQ ID NO: 1547501 - DNA, 15 bp, Homo sapiens
caccctgcctgaacc

SEQ ID NO: 1547502 - DNA, 15 bp, Homo sapiens
accctgcctgaaccc

SEQ ID NO: 1547503 - DNA, 15 bp, Homo sapiens
ccctgcctgaacccc

SEQ ID NO: 1547504 - DNA, 15 bp, Homo sapiens
cctgcctgaacccca

SEQ ID NO: 1547505 - DNA, 15 bp, Homo sapiens
ctgcctgaaccccac

SEQ ID NO: 1547506 - DNA, 15 bp, Homo sapiens
tgcctgaaccccacc

SEQ ID NO: 1547507 - DNA, 15 bp, Homo sapiens
gcctgaaccccacct

SEQ ID NO: 1547508 - DNA, 15 bp, Homo sapiens
cctgaaccccacctg

SEQ ID NO: 1547509 - DNA, 15 bp, Homo sapiens
ctgaaccccacctga

SEQ ID NO: 1547510 - DNA, 15 bp, Homo sapiens
tgaaccccacctgaa

SEQ ID NO: 1547511 - DNA, 15 bp, Homo sapiens
gaaccccacctgaac

SEQ ID NO: 1547512 - DNA, 15 bp, Homo sapiens
aaccccacctgaacc

SEQ ID NO: 1547513 - DNA, 15 bp, Homo sapiens
accccacctgaaccc

SEQ ID NO: 1547514 - DNA, 15 bp, Homo sapiens
ccccacctgaaccct

SEQ ID NO: 1547515 - DNA, 15 bp, Homo sapiens
cccacctgaaccctg

SEQ ID NO: 1547516 - DNA, 15 bp, Homo sapiens
ccacctgaaccctgc

SEQ ID NO: 1547517 - DNA, 15 bp, Homo sapiens
cacctgaaccctgcc

SEQ ID NO: 1547518 - DNA, 15 bp, Homo sapiens
acctgaaccctgcct

SEQ ID NO: 1547519 - DNA, 15 bp, Homo sapiens
cctgaaccctgcctg

SEQ ID NO: 1547520 - DNA, 15 bp, Homo sapiens
ctgaaccctgcctga

SEQ ID NO: 1547521 - DNA, 15 bp, Homo sapiens
tgaaccctgcctgaa

SEQ ID NO: 1547522 - DNA, 15 bp, Homo sapiens
gaaccctgcctgaac

SEQ ID NO: 1547523 - DNA, 15 bp, Homo sapiens
aaccctgcctgaacc

SEQ ID NO: 1547524 - DNA, 15 bp, Homo sapiens
accccacctgaacct

SEQ ID NO: 1547525 - DNA, 15 bp, Homo sapiens
ccccacctgaacctt

SEQ ID NO: 1547526 - DNA, 15 bp, Homo sapiens
cccacctgaacctta

SEQ ID NO: 1547527 - DNA, 15 bp, Homo sapiens
ccacctgaaccttac

SEQ ID NO: 1547528 - DNA, 15 bp, Homo sapiens
cacctgaaccttaca

SEQ ID NO: 1547529 - DNA, 15 bp, Homo sapiens
acctgaaccttacat

SEQ ID NO: 1547530 - DNA, 15 bp, Homo sapiens
cctgaaccttacatg

SEQ ID NO: 1547531 - DNA, 15 bp, Homo sapiens
ctgaaccttacatga

SEQ ID NO: 1547532 - DNA, 15 bp, Homo sapiens
tgaaccttacatgaa

SEQ ID NO: 1547533 - DNA, 15 bp, Homo sapiens
gaaccttacatgaac

SEQ ID NO: 1547534 - DNA, 15 bp, Homo sapiens
aaccttacatgaacc

SEQ ID NO: 1547535 - DNA, 15 bp, Homo sapiens
accttacatgaaccc

SEQ ID NO: 1547536 - DNA, 15 bp, Homo sapiens
ccttacatgaacccc

SEQ ID NO: 1547537 - DNA, 15 bp, Homo sapiens
cttacatgaacccca

SEQ ID NO: 1547538 - DNA, 15 bp, Homo sapiens
ttacatgaaccccac

SEQ ID NO: 1547539 - DNA, 15 bp, Homo sapiens
tacatgaaccccacc

SEQ ID NO: 1547540 - DNA, 15 bp, Homo sapiens
acatgaaccccacct

SEQ ID NO: 1547541 - DNA, 15 bp, Homo sapiens
catgaaccccacctg

SEQ ID NO: 1547542 - DNA, 15 bp, Homo sapiens
atgaaccccacctga

SEQ ID NO: 1547543 - DNA, 15 bp, Homo sapiens
cccacctgaacccta

SEQ ID NO: 1547544 - DNA, 15 bp, Homo sapiens
ccacctgaaccctaa

SEQ ID NO: 1547545 - DNA, 15 bp, Homo sapiens
cacctgaaccctaac

SEQ ID NO: 1547546 - DNA, 15 bp, Homo sapiens
acctgaaccctaact

SEQ ID NO: 1547547 - DNA, 15 bp, Homo sapiens
cctgaaccctaactg

SEQ ID NO: 1547548 - DNA, 15 bp, Homo sapiens
ctgaaccctaactga

SEQ ID NO: 1547549 - DNA, 15 bp, Homo sapiens
tgaaccctaactgaa

SEQ ID NO: 1547550 - DNA, 15 bp, Homo sapiens
gaaccctaactgaac

SEQ ID NO: 1547551 - DNA, 15 bp, Homo sapiens
aaccctaactgaacc

SEQ ID NO: 1547552 - DNA, 15 bp, Homo sapiens
accctaactgaaccc

SEQ ID NO: 1547553 - DNA, 15 bp, Homo sapiens
ccctaactgaacccc

SEQ ID NO: 1547554 - DNA, 15 bp, Homo sapiens
cctaactgaacccca

SEQ ID NO: 1547555 - DNA, 15 bp, Homo sapiens
ctaactgaaccccac

SEQ ID NO: 1547556 - DNA, 15 bp, Homo sapiens
taactgaaccccacc

SEQ ID NO: 1547557 - DNA, 15 bp, Homo sapiens
aactgaaccccacct

SEQ ID NO: 1547558 - DNA, 15 bp, Homo sapiens
actgaaccccacctg

SEQ ID NO: 1547559 - DNA, 15 bp, Homo sapiens
ctgaaccccacctgg

SEQ ID NO: 1547560 - DNA, 15 bp, Homo sapiens
tgaaccccacctgga

SEQ ID NO: 1547561 - DNA, 15 bp, Homo sapiens
gaaccccacctggac

SEQ ID NO: 1547562 - DNA, 15 bp, Homo sapiens
aaccccacctggacc

SEQ ID NO: 1547563 - DNA, 15 bp, Homo sapiens
accccacctggaccc

SEQ ID NO: 1547564 - DNA, 15 bp, Homo sapiens
ccccacctggaccca

SEQ ID NO: 1547565 - DNA, 15 bp, Homo sapiens
cccacctggacccac

SEQ ID NO: 1547566 - DNA, 15 bp, Homo sapiens
ccacctggacccacc

SEQ ID NO: 1547567 - DNA, 15 bp, Homo sapiens
cacctggacccacct

SEQ ID NO: 1547568 - DNA, 15 bp, Homo sapiens
acctggacccacctg

SEQ ID NO: 1547569 - DNA, 15 bp, Homo sapiens
cctggacccacctgg

SEQ ID NO: 1547570 - DNA, 15 bp, Homo sapiens
ctggacccacctgga

SEQ ID NO: 1547571 - DNA, 15 bp, Homo sapiens
tggacccacctggac

SEQ ID NO: 1547572 - DNA, 15 bp, Homo sapiens
ggacccacctggact

SEQ ID NO: 1547573 - DNA, 15 bp, Homo sapiens
gacccacctggactc

SEQ ID NO: 1547574 - DNA, 15 bp, Homo sapiens
acccacctggactct

SEQ ID NO: 1547575 - DNA, 15 bp, Homo sapiens
cccacctggactctt

SEQ ID NO: 1547576 - DNA, 15 bp, Homo sapiens
ccacctggactcttc

SEQ ID NO: 1547577 - DNA, 15 bp, Homo sapiens
cacctggactcttcc

SEQ ID NO: 1547578 - DNA, 15 bp, Homo sapiens
acctggactcttcct

SEQ ID NO: 1547579 - DNA, 15 bp, Homo sapiens
cctggactcttcctg

SEQ ID NO: 1547580 - DNA, 15 bp, Homo sapiens
ctggactcttcctgg

SEQ ID NO: 1547581 - DNA, 15 bp, Homo sapiens
tggactcttcctggc

SEQ ID NO: 1547582 - DNA, 15 bp, Homo sapiens
ggactcttcctggcc

SEQ ID NO: 1547583 - DNA, 15 bp, Homo sapiens
gactcttcctggcca

SEQ ID NO: 1547584 - DNA, 15 bp, Homo sapiens
actcttcctggccat

SEQ ID NO: 1547585 - DNA, 15 bp, Homo sapiens
ctcttcctggccatg

SEQ ID NO: 1547586 - DNA, 15 bp, Homo sapiens
tcttcctggccatga

SEQ ID NO: 1547587 - DNA, 15 bp, Homo sapiens
tgcctcttggcccac

SEQ ID NO: 1547588 - DNA, 15 bp, Homo sapiens
gcctcttggcccaca

SEQ ID NO: 1547589 - DNA, 15 bp, Homo sapiens
cctcttggcccacat

SEQ ID NO: 1547590 - DNA, 15 bp, Homo sapiens
ctcttggcccacatt

SEQ ID NO: 1547591 - DNA, 15 bp, Homo sapiens
tcttggcccacattt

SEQ ID NO: 1547592 - DNA, 15 bp, Homo sapiens
cttggcccacatttg

SEQ ID NO: 1547593 - DNA, 15 bp, Homo sapiens
ttggcccacatttgc

SEQ ID NO: 1547594 - DNA, 15 bp, Homo sapiens
tggcccacatttgca

SEQ ID NO: 1547595 - DNA, 15 bp, Homo sapiens
ggcccacatttgcac

SEQ ID NO: 1547596 - DNA, 15 bp, Homo sapiens
gcccacatttgcact

SEQ ID NO: 1547597 - DNA, 15 bp, Homo sapiens
cccacatttgcactg

SEQ ID NO: 1547598 - DNA, 15 bp, Homo sapiens
ccacatttgcactga

SEQ ID NO: 1547599 - DNA, 15 bp, Homo sapiens
cacatttgcactgac

SEQ ID NO: 1547600 - DNA, 15 bp, Homo sapiens
acatttgcactgact

SEQ ID NO: 1547601 - DNA, 15 bp, Homo sapiens
catttgcactgactc

SEQ ID NO: 1547602 - DNA, 15 bp, Homo sapiens
atttgcactgactcc

SEQ ID NO: 1547603 - DNA, 15 bp, Homo sapiens
tttgcactgactcct

SEQ ID NO: 1547604 - DNA, 15 bp, Homo sapiens
ttgcactgactcctc

SEQ ID NO: 1547605 - DNA, 15 bp, Homo sapiens
tgcactgactcctca

SEQ ID NO: 1547606 - DNA, 15 bp, Homo sapiens
gcactgactcctcac

SEQ ID NO: 1547607 - DNA, 15 bp, Homo sapiens
cactgactcctcact

SEQ ID NO: 1547608 - DNA, 15 bp, Homo sapiens
actgactcctcactc

SEQ ID NO: 1547609 - DNA, 15 bp, Homo sapiens
ctgactcctcactct

SEQ ID NO: 1547610 - DNA, 15 bp, Homo sapiens
tgactcctcactctg

SEQ ID NO: 1547611 - DNA, 15 bp, Homo sapiens
gactcctcactctgc

SEQ ID NO: 1547612 - DNA, 15 bp, Homo sapiens
actcctcactctgcc

SEQ ID NO: 1547613 - DNA, 15 bp, Homo sapiens
ctcctcactctgccc

SEQ ID NO: 1547614 - DNA, 15 bp, Homo sapiens
tcctcactctgccca

SEQ ID NO: 1547615 - DNA, 15 bp, Homo sapiens
cctcactctgcccag

SEQ ID NO: 1547616 - DNA, 15 bp, Homo sapiens
ctcactctgcccaga

SEQ ID NO: 1547617 - DNA, 15 bp, Homo sapiens
tcactctgcccagag

SEQ ID NO: 1547618 - DNA, 15 bp, Homo sapiens
cactctgcccagagt

SEQ ID NO: 1547619 - DNA, 15 bp, Homo sapiens
actctgcccagagtc

SEQ ID NO: 1547620 - DNA, 15 bp, Homo sapiens
ctctgcccagagtca

SEQ ID NO: 1547621 - DNA, 15 bp, Homo sapiens
tctgcccagagtcag

SEQ ID NO: 1547622 - DNA, 15 bp, Homo sapiens
ctgcccagagtcagc

SEQ ID NO: 1547623 - DNA, 15 bp, Homo sapiens
tgcccagagtcagcc

SEQ ID NO: 1547624 - DNA, 15 bp, Homo sapiens
gcccagagtcagcca

SEQ ID NO: 1547625 - DNA, 15 bp, Homo sapiens
cccagagtcagccaa

SEQ ID NO: 1547626 - DNA, 15 bp, Homo sapiens
ccagagtcagccaag

SEQ ID NO: 1547627 - DNA, 15 bp, Homo sapiens
cagagtcagccaaga

SEQ ID NO: 1547628 - DNA, 15 bp, Homo sapiens
agagtcagccaagag

SEQ ID NO: 1547629 - DNA, 15 bp, Homo sapiens
gagtcagccaagaga

SEQ ID NO: 1547630 - DNA, 15 bp, Homo sapiens
agtcagccaagagaa

SEQ ID NO: 1547631 - DNA, 15 bp, Homo sapiens
gtcagccaagagaaa

SEQ ID NO: 1547632 - DNA, 15 bp, Homo sapiens
tcagccaagagaaaa

SEQ ID NO: 1547633 - DNA, 15 bp, Homo sapiens
cagccaagagaaaaa

SEQ ID NO: 1547634 - DNA, 15 bp, Homo sapiens
agccaagagaaaaac

SEQ ID NO: 1547635 - DNA, 15 bp, Homo sapiens
gccaagagaaaaaca

SEQ ID NO: 1547636 - DNA, 15 bp, Homo sapiens
ccaagagaaaaacat

SEQ ID NO: 1547637 - DNA, 15 bp, Homo sapiens
caagagaaaaacatt

SEQ ID NO: 1547638 - DNA, 15 bp, Homo sapiens
aagagaaaaacatta

SEQ ID NO: 1547639 - DNA, 15 bp, Homo sapiens
agagaaaaacattaa

SEQ ID NO: 1547640 - DNA, 15 bp, Homo sapiens
gagaaaaacattaac

SEQ ID NO: 1547641 - DNA, 15 bp, Homo sapiens
agaaaaacattaacc

SEQ ID NO: 1547642 - DNA, 15 bp, Homo sapiens
gaaaaacattaaccc

SEQ ID NO: 1547643 - DNA, 15 bp, Homo sapiens
aaaaacattaaccca

SEQ ID NO: 1547644 - DNA, 15 bp, Homo sapiens
aaaacattaacccag

SEQ ID NO: 1547645 - DNA, 15 bp, Homo sapiens
aaacattaacccaga

SEQ ID NO: 1547646 - DNA, 15 bp, Homo sapiens
aacattaacccagag

SEQ ID NO: 1547647 - DNA, 15 bp, Homo sapiens
acattaacccagagt

SEQ ID NO: 1547648 - DNA, 15 bp, Homo sapiens
cattaacccagagtc

SEQ ID NO: 1547649 - DNA, 15 bp, Homo sapiens
attaacccagagtct

SEQ ID NO: 1547650 - DNA, 15 bp, Homo sapiens
ttaacccagagtctg

SEQ ID NO: 1547651 - DNA, 15 bp, Homo sapiens
taacccagagtctgg

SEQ ID NO: 1547652 - DNA, 15 bp, Homo sapiens
aacccagagtctggg

SEQ ID NO: 1547653 - DNA, 15 bp, Homo sapiens
acccagagtctgggg

SEQ ID NO: 1547654 - DNA, 15 bp, Homo sapiens
cccagagtctggggt

SEQ ID NO: 1547655 - DNA, 15 bp, Homo sapiens
ccagagtctggggtc

SEQ ID NO: 1547656 - DNA, 15 bp, Homo sapiens
cagagtctggggtct

SEQ ID NO: 1547657 - DNA, 15 bp, Homo sapiens
agagtctggggtcta

SEQ ID NO: 1547658 - DNA, 15 bp, Homo sapiens
gagtctggggtctag

SEQ ID NO: 1547659 - DNA, 15 bp, Homo sapiens
agtctggggtctagg

SEQ ID NO: 1547660 - DNA, 15 bp, Homo sapiens
gtctggggtctaggg

SEQ ID NO: 1547661 - DNA, 15 bp, Homo sapiens
tctggggtctagggt

SEQ ID NO: 1547662 - DNA, 15 bp, Homo sapiens
ctggggtctagggtt

SEQ ID NO: 1547663 - DNA, 15 bp, Homo sapiens
tggggtctagggttg

SEQ ID NO: 1547664 - DNA, 15 bp, Homo sapiens
ggggtctagggttga

SEQ ID NO: 1547665 - DNA, 15 bp, Homo sapiens
gggtctagggttgaa

SEQ ID NO: 1547666 - DNA, 15 bp, Homo sapiens
ggtctagggttgaaa

SEQ ID NO: 1547667 - DNA, 15 bp, Homo sapiens
gtctagggttgaaaa

SEQ ID NO: 1547668 - DNA, 15 bp, Homo sapiens
tctagggttgaaaag

SEQ ID NO: 1547669 - DNA, 15 bp, Homo sapiens
ctagggttgaaaagc

SEQ ID NO: 1547670 - DNA, 15 bp, Homo sapiens
tagggttgaaaagct

SEQ ID NO: 1547671 - DNA, 15 bp, Homo sapiens
agggttgaaaagcta

SEQ ID NO: 1547672 - DNA, 15 bp, Homo sapiens
gggttgaaaagctaa

SEQ ID NO: 1547673 - DNA, 15 bp, Homo sapiens
ggttgaaaagctaag

SEQ ID NO: 1547674 - DNA, 15 bp, Homo sapiens
gttgaaaagctaagg

SEQ ID NO: 1547675 - DNA, 15 bp, Homo sapiens
ttgaaaagctaaggc

SEQ ID NO: 1547676 - DNA, 15 bp, Homo sapiens
tgaaaagctaaggca

SEQ ID NO: 1547677 - DNA, 15 bp, Homo sapiens
gaaaagctaaggcaa

SEQ ID NO: 1547678 - DNA, 15 bp, Homo sapiens
aaaagctaaggcaaa

SEQ ID NO: 1547679 - DNA, 15 bp, Homo sapiens
aaagctaaggcaaaa

SEQ ID NO: 1547680 - DNA, 15 bp, Homo sapiens
aagctaaggcaaaaa

SEQ ID NO: 1547681 - DNA, 15 bp, Homo sapiens
agctaaggcaaaaag

SEQ ID NO: 1547682 - DNA, 15 bp, Homo sapiens
gctaaggcaaaaagc

SEQ ID NO: 1547683 - DNA, 15 bp, Homo sapiens
ctaaggcaaaaagca

SEQ ID NO: 1547684 - DNA, 15 bp, Homo sapiens
taaggcaaaaagcac

SEQ ID NO: 1547685 - DNA, 15 bp, Homo sapiens
aaggcaaaaagcaca

SEQ ID NO: 1547686 - DNA, 15 bp, Homo sapiens
aggcaaaaagcacag

SEQ ID NO: 1547687 - DNA, 15 bp, Homo sapiens
ggcaaaaagcacaga

SEQ ID NO: 1547688 - DNA, 15 bp, Homo sapiens
gcaaaaagcacagat

SEQ ID NO: 1547689 - DNA, 15 bp, Homo sapiens
caaaaagcacagatg

SEQ ID NO: 1547690 - DNA, 15 bp, Homo sapiens
aaaaagcacagatgc

SEQ ID NO: 1547691 - DNA, 15 bp, Homo sapiens
aaaagcacagatgca

SEQ ID NO: 1547692 - DNA, 15 bp, Homo sapiens
aaagcacagatgcag

SEQ ID NO: 1547693 - DNA, 15 bp, Homo sapiens
aagcacagatgcagg

SEQ ID NO: 1547694 - DNA, 15 bp, Homo sapiens
agcacagatgcaggg

SEQ ID NO: 1547695 - DNA, 15 bp, Homo sapiens
gcacagatgcagggg

SEQ ID NO: 1547696 - DNA, 15 bp, Homo sapiens
cacagatgcaggggg

SEQ ID NO: 1547697 - DNA, 15 bp, Homo sapiens
acagatgcagggggc

SEQ ID NO: 1547698 - DNA, 15 bp, Homo sapiens
cagatgcagggggca

SEQ ID NO: 1547699 - DNA, 15 bp, Homo sapiens
agatgcagggggcag

SEQ ID NO: 1547700 - DNA, 15 bp, Homo sapiens
gatgcagggggcaga

SEQ ID NO: 1547701 - DNA, 15 bp, Homo sapiens
atgcagggggcagac

SEQ ID NO: 1547702 - DNA, 15 bp, Homo sapiens
tgcagggggcagaca

SEQ ID NO: 1547703 - DNA, 15 bp, Homo sapiens
gcagggggcagacag

SEQ ID NO: 1547704 - DNA, 15 bp, Homo sapiens
cagggggcagacaga

SEQ ID NO: 1547705 - DNA, 15 bp, Homo sapiens
agggggcagacagaa

SEQ ID NO: 1547706 - DNA, 15 bp, Homo sapiens
gggggcagacagaaa

SEQ ID NO: 1547707 - DNA, 15 bp, Homo sapiens
ggggcagacagaaag

SEQ ID NO: 1547708 - DNA, 15 bp, Homo sapiens
gggcagacagaaagg

SEQ ID NO: 1547709 - DNA, 15 bp, Homo sapiens
ggcagacagaaaggc

SEQ ID NO: 1547710 - DNA, 15 bp, Homo sapiens
gcagacagaaaggcc

SEQ ID NO: 1547711 - DNA, 15 bp, Homo sapiens
cagacagaaaggcca

SEQ ID NO: 1547712 - DNA, 15 bp, Homo sapiens
agacagaaaggccac

SEQ ID NO: 1547713 - DNA, 15 bp, Homo sapiens
gacagaaaggccaca

SEQ ID NO: 1547714 - DNA, 15 bp, Homo sapiens
acagaaaggccacag

SEQ ID NO: 1547715 - DNA, 15 bp, Homo sapiens
cagaaaggccacagg

SEQ ID NO: 1547716 - DNA, 15 bp, Homo sapiens
agaaaggccacagga

SEQ ID NO: 1547717 - DNA, 15 bp, Homo sapiens
gaaaggccacaggac

SEQ ID NO: 1547718 - DNA, 15 bp, Homo sapiens
aaaggccacaggact

SEQ ID NO: 1547719 - DNA, 15 bp, Homo sapiens
aaggccacaggactc

SEQ ID NO: 1547720 - DNA, 15 bp, Homo sapiens
aggccacaggactca

SEQ ID NO: 1547721 - DNA, 15 bp, Homo sapiens
ggccacaggactcag

SEQ ID NO: 1547722 - DNA, 15 bp, Homo sapiens
gccacaggactcagg

SEQ ID NO: 1547723 - DNA, 15 bp, Homo sapiens
ccacaggactcaggt

SEQ ID NO: 1547724 - DNA, 15 bp, Homo sapiens
cacaggactcaggtg

SEQ ID NO: 1547725 - DNA, 15 bp, Homo sapiens
acaggactcaggtga

SEQ ID NO: 1547726 - DNA, 15 bp, Homo sapiens
caggactcaggtgag

SEQ ID NO: 1547727 - DNA, 15 bp, Homo sapiens
aggactcaggtgagg

SEQ ID NO: 1547728 - DNA, 15 bp, Homo sapiens
ggactcaggtgaggt

SEQ ID NO: 1547729 - DNA, 15 bp, Homo sapiens
gactcaggtgaggtc

SEQ ID NO: 1547730 - DNA, 15 bp, Homo sapiens
actcaggtgaggtct

SEQ ID NO: 1547731 - DNA, 15 bp, Homo sapiens
ctcaggtgaggtctc

SEQ ID NO: 1547732 - DNA, 15 bp, Homo sapiens
tcaggtgaggtctct

SEQ ID NO: 1547733 - DNA, 15 bp, Homo sapiens
caggtgaggtctctg

SEQ ID NO: 1547734 - DNA, 15 bp, Homo sapiens
aggtgaggtctctgc

SEQ ID NO: 1547735 - DNA, 15 bp, Homo sapiens
ggtgaggtctctgcc

SEQ ID NO: 1547736 - DNA, 15 bp, Homo sapiens
gtgaggtctctgccg

SEQ ID NO: 1547737 - DNA, 15 bp, Homo sapiens
tgaggtctctgccgg

SEQ ID NO: 1547738 - DNA, 15 bp, Homo sapiens
gaggtctctgccggg

SEQ ID NO: 1547739 - DNA, 15 bp, Homo sapiens
aggtctctgccgggc

SEQ ID NO: 1547740 - DNA, 15 bp, Homo sapiens
ggtctctgccgggct

SEQ ID NO: 1547741 - DNA, 15 bp, Homo sapiens
gtctctgccgggctg

SEQ ID NO: 1547742 - DNA, 15 bp, Homo sapiens
tctctgccgggctgg

SEQ ID NO: 1547743 - DNA, 15 bp, Homo sapiens
ctctgccgggctggg

SEQ ID NO: 1547744 - DNA, 15 bp, Homo sapiens
tctgccgggctgggc

SEQ ID NO: 1547745 - DNA, 15 bp, Homo sapiens
ctgccgggctgggcc

SEQ ID NO: 1547746 - DNA, 15 bp, Homo sapiens
tgccgggctgggcca

SEQ ID NO: 1547747 - DNA, 15 bp, Homo sapiens
gccgggctgggccag

SEQ ID NO: 1547748 - DNA, 15 bp, Homo sapiens
ccgggctgggccagg

SEQ ID NO: 1547749 - DNA, 15 bp, Homo sapiens
cgggctgggccagga

SEQ ID NO: 1547750 - DNA, 15 bp, Homo sapiens
gggctgggccaggag

SEQ ID NO: 1547751 - DNA, 15 bp, Homo sapiens
ggctgggccaggagc

SEQ ID NO: 1547752 - DNA, 15 bp, Homo sapiens
gctgggccaggagcc

SEQ ID NO: 1547753 - DNA, 15 bp, Homo sapiens
ctgggccaggagcca

SEQ ID NO: 1547754 - DNA, 15 bp, Homo sapiens
tgggccaggagccag

SEQ ID NO: 1547755 - DNA, 15 bp, Homo sapiens
gggccaggagccagg

SEQ ID NO: 1547756 - DNA, 15 bp, Homo sapiens
ggccaggagccaggg

SEQ ID NO: 1547757 - DNA, 15 bp, Homo sapiens
gccaggagccagggg

SEQ ID NO: 1547758 - DNA, 15 bp, Homo sapiens
ccaggagccagggga

SEQ ID NO: 1547759 - DNA, 15 bp, Homo sapiens
caggagccaggggac

SEQ ID NO: 1547760 - DNA, 15 bp, Homo sapiens
aggagccaggggact

SEQ ID NO: 1547761 - DNA, 15 bp, Homo sapiens
ggagccaggggactg

SEQ ID NO: 1547762 - DNA, 15 bp, Homo sapiens
gagccaggggactgc

SEQ ID NO: 1547763 - DNA, 15 bp, Homo sapiens
agccaggggactgcc

SEQ ID NO: 1547764 - DNA, 15 bp, Homo sapiens
gccaggggactgcca

SEQ ID NO: 1547765 - DNA, 15 bp, Homo sapiens
ccaggggactgccac

SEQ ID NO: 1547766 - DNA, 15 bp, Homo sapiens
caggggactgccact

SEQ ID NO: 1547767 - DNA, 15 bp, Homo sapiens
aggggactgccactc

SEQ ID NO: 1547768 - DNA, 15 bp, Homo sapiens
ggggactgccactca

SEQ ID NO: 1547769 - DNA, 15 bp, Homo sapiens
gggactgccactcac

SEQ ID NO: 1547770 - DNA, 15 bp, Homo sapiens
ggactgccactcacc

SEQ ID NO: 1547771 - DNA, 15 bp, Homo sapiens
gactgccactcacca

SEQ ID NO: 1547772 - DNA, 15 bp, Homo sapiens
actgccactcaccag

SEQ ID NO: 1547773 - DNA, 15 bp, Homo sapiens
ctgccactcaccagt

SEQ ID NO: 1547774 - DNA, 15 bp, Homo sapiens
tgccactcaccagtg

SEQ ID NO: 1547775 - DNA, 15 bp, Homo sapiens
gccactcaccagtgt

SEQ ID NO: 1547776 - DNA, 15 bp, Homo sapiens
ccactcaccagtgtc

SEQ ID NO: 1547777 - DNA, 15 bp, Homo sapiens
cactcaccagtgtcc

SEQ ID NO: 1547778 - DNA, 15 bp, Homo sapiens
actcaccagtgtccc

SEQ ID NO: 1547779 - DNA, 15 bp, Homo sapiens
ctcaccagtgtcccc

SEQ ID NO: 1547780 - DNA, 15 bp, Homo sapiens
tcaccagtgtcccct

SEQ ID NO: 1547781 - DNA, 15 bp, Homo sapiens
caccagtgtcccctg

SEQ ID NO: 1547782 - DNA, 15 bp, Homo sapiens
accagtgtcccctgc

SEQ ID NO: 1547783 - DNA, 15 bp, Homo sapiens
ccagtgtcccctgca

SEQ ID NO: 1547784 - DNA, 15 bp, Homo sapiens
cagtgtcccctgcag

SEQ ID NO: 1547785 - DNA, 15 bp, Homo sapiens
agtgtcccctgcagg

SEQ ID NO: 1547786 - DNA, 15 bp, Homo sapiens
gtgtcccctgcaggt

SEQ ID NO: 1547787 - DNA, 15 bp, Homo sapiens
tgtcccctgcaggtg

SEQ ID NO: 1547788 - DNA, 15 bp, Homo sapiens
gtcccctgcaggtgg

SEQ ID NO: 1547789 - DNA, 15 bp, Homo sapiens
tcccctgcaggtgga

SEQ ID NO: 1547790 - DNA, 15 bp, Homo sapiens
cccctgcaggtggag

SEQ ID NO: 1547791 - DNA, 15 bp, Homo sapiens
ccctgcaggtggagc

SEQ ID NO: 1547792 - DNA, 15 bp, Homo sapiens
cctgcaggtggagca

SEQ ID NO: 1547793 - DNA, 15 bp, Homo sapiens
ctgcaggtggagcag

SEQ ID NO: 1547794 - DNA, 15 bp, Homo sapiens
tgcaggtggagcaga

SEQ ID NO: 1547795 - DNA, 15 bp, Homo sapiens
gcaggtggagcagat

SEQ ID NO: 1547796 - DNA, 15 bp, Homo sapiens
caggtggagcagatg

SEQ ID NO: 1547797 - DNA, 15 bp, Homo sapiens
aggtggagcagatgt

SEQ ID NO: 1547798 - DNA, 15 bp, Homo sapiens
ggtggagcagatgtt

SEQ ID NO: 1547799 - DNA, 15 bp, Homo sapiens
gtggagcagatgttc

SEQ ID NO: 1547800 - DNA, 15 bp, Homo sapiens
tggagcagatgttcg

SEQ ID NO: 1547801 - DNA, 15 bp, Homo sapiens
ggagcagatgttcgc

SEQ ID NO: 1547802 - DNA, 15 bp, Homo sapiens
gagcagatgttcgcc

SEQ ID NO: 1547803 - DNA, 15 bp, Homo sapiens
agcagatgttcgccc

SEQ ID NO: 1547804 - DNA, 15 bp, Homo sapiens
gcagatgttcgccct

SEQ ID NO: 1547805 - DNA, 15 bp, Homo sapiens
cagatgttcgccctg

SEQ ID NO: 1547806 - DNA, 15 bp, Homo sapiens
agatgttcgccctga

SEQ ID NO: 1547807 - DNA, 15 bp, Homo sapiens
gatgttcgccctgac

SEQ ID NO: 1547808 - DNA, 15 bp, Homo sapiens
atgttcgccctgaca

SEQ ID NO: 1547809 - DNA, 15 bp, Homo sapiens
tgttcgccctgacac

SEQ ID NO: 1547810 - DNA, 15 bp, Homo sapiens
gttcgccctgacacc

SEQ ID NO: 1547811 - DNA, 15 bp, Homo sapiens
ttcgccctgacaccc

SEQ ID NO: 1547812 - DNA, 15 bp, Homo sapiens
tcgccctgacaccca

SEQ ID NO: 1547813 - DNA, 15 bp, Homo sapiens
cgccctgacacccat

SEQ ID NO: 1547814 - DNA, 15 bp, Homo sapiens
gccctgacacccatg

SEQ ID NO: 1547815 - DNA, 15 bp, Homo sapiens
ccctgacacccatgg

SEQ ID NO: 1547816 - DNA, 15 bp, Homo sapiens
cctgacacccatgga

SEQ ID NO: 1547817 - DNA, 15 bp, Homo sapiens
ctgacacccatggac

SEQ ID NO: 1547818 - DNA, 15 bp, Homo sapiens
tgacacccatggacc

SEQ ID NO: 1547819 - DNA, 15 bp, Homo sapiens
gacacccatggacct

SEQ ID NO: 1547820 - DNA, 15 bp, Homo sapiens
acacccatggacctg

SEQ ID NO: 1547821 - DNA, 15 bp, Homo sapiens
cacccatggacctgg

SEQ ID NO: 1547822 - DNA, 15 bp, Homo sapiens
acccatggacctggc

SEQ ID NO: 1547823 - DNA, 15 bp, Homo sapiens
cccatggacctggcg

SEQ ID NO: 1547824 - DNA, 15 bp, Homo sapiens
ccatggacctggcgg

SEQ ID NO: 1547825 - DNA, 15 bp, Homo sapiens
catggacctggcggg

SEQ ID NO: 1547826 - DNA, 15 bp, Homo sapiens
atggacctggcgggg

SEQ ID NO: 1547827 - DNA, 15 bp, Homo sapiens
tggacctggcgggga

SEQ ID NO: 1547828 - DNA, 15 bp, Homo sapiens
ggacctggcggggaa

SEQ ID NO: 1547829 - DNA, 15 bp, Homo sapiens
gacctggcggggaac

SEQ ID NO: 1547830 - DNA, 15 bp, Homo sapiens
acctggcggggaaca

SEQ ID NO: 1547831 - DNA, 15 bp, Homo sapiens
cctggcggggaacat

SEQ ID NO: 1547832 - DNA, 15 bp, Homo sapiens
ctggcggggaacatc

SEQ ID NO: 1547833 - DNA, 15 bp, Homo sapiens
tggcggggaacatcg

SEQ ID NO: 1547834 - DNA, 15 bp, Homo sapiens
ggcggggaacatcga

SEQ ID NO: 1547835 - DNA, 15 bp, Homo sapiens
gcggggaacatcgac

SEQ ID NO: 1547836 - DNA, 15 bp, Homo sapiens
cggggaacatcgact

SEQ ID NO: 1547837 - DNA, 15 bp, Homo sapiens
ggggaacatcgacta

SEQ ID NO: 1547838 - DNA, 15 bp, Homo sapiens
gggaacatcgactac

SEQ ID NO: 1547839 - DNA, 15 bp, Homo sapiens
ggaacatcgactaca

SEQ ID NO: 1547840 - DNA, 15 bp, Homo sapiens
gaacatcgactacaa

SEQ ID NO: 1547841 - DNA, 15 bp, Homo sapiens
aacatcgactacaag

SEQ ID NO: 1547842 - DNA, 15 bp, Homo sapiens
acatcgactacaagt

SEQ ID NO: 1547843 - DNA, 15 bp, Homo sapiens
catcgactacaagtc

SEQ ID NO: 1547844 - DNA, 15 bp, Homo sapiens
atcgactacaagtca

SEQ ID NO: 1547845 - DNA, 15 bp, Homo sapiens
tcgactacaagtcac

SEQ ID NO: 1547846 - DNA, 15 bp, Homo sapiens
cgactacaagtcact

SEQ ID NO: 1547847 - DNA, 15 bp, Homo sapiens
gactacaagtcactg

SEQ ID NO: 1547848 - DNA, 15 bp, Homo sapiens
actacaagtcactgt

SEQ ID NO: 1547849 - DNA, 15 bp, Homo sapiens
ctacaagtcactgtg

SEQ ID NO: 1547850 - DNA, 15 bp, Homo sapiens
tacaagtcactgtgc

SEQ ID NO: 1547851 - DNA, 15 bp, Homo sapiens
acaagtcactgtgct

SEQ ID NO: 1547852 - DNA, 15 bp, Homo sapiens
caagtcactgtgcta

SEQ ID NO: 1547853 - DNA, 15 bp, Homo sapiens
aagtcactgtgctac

SEQ ID NO: 1547854 - DNA, 15 bp, Homo sapiens
agtcactgtgctaca

SEQ ID NO: 1547855 - DNA, 15 bp, Homo sapiens
gtcactgtgctacat

SEQ ID NO: 1547856 - DNA, 15 bp, Homo sapiens
tcactgtgctacatc

SEQ ID NO: 1547857 - DNA, 15 bp, Homo sapiens
cactgtgctacatca

SEQ ID NO: 1547858 - DNA, 15 bp, Homo sapiens
actgtgctacatcat

SEQ ID NO: 1547859 - DNA, 15 bp, Homo sapiens
ctgtgctacatcatc

SEQ ID NO: 1547860 - DNA, 15 bp, Homo sapiens
tgtgctacatcatca

SEQ ID NO: 1547861 - DNA, 15 bp, Homo sapiens
gtgctacatcatcac

SEQ ID NO: 1547862 - DNA, 15 bp, Homo sapiens
tgctacatcatcacc

SEQ ID NO: 1547863 - DNA, 15 bp, Homo sapiens
gctacatcatcaccc

SEQ ID NO: 1547864 - DNA, 15 bp, Homo sapiens
ctacatcatcaccca

SEQ ID NO: 1547865 - DNA, 15 bp, Homo sapiens
tacatcatcacccat

SEQ ID NO: 1547866 - DNA, 15 bp, Homo sapiens
acatcatcacccatg

SEQ ID NO: 1547867 - DNA, 15 bp, Homo sapiens
catcatcacccatgg

SEQ ID NO: 1547868 - DNA, 15 bp, Homo sapiens
atcatcacccatgga

SEQ ID NO: 1547869 - DNA, 15 bp, Homo sapiens
tcatcacccatggag

SEQ ID NO: 1547870 - DNA, 15 bp, Homo sapiens
catcacccatggaga

SEQ ID NO: 1547871 - DNA, 15 bp, Homo sapiens
atcacccatggagac

SEQ ID NO: 1547872 - DNA, 15 bp, Homo sapiens
tcacccatggagacg

SEQ ID NO: 1547873 - DNA, 15 bp, Homo sapiens
cacccatggagacga

SEQ ID NO: 1547874 - DNA, 15 bp, Homo sapiens
acccatggagacgag

SEQ ID NO: 1547875 - DNA, 15 bp, Homo sapiens
cccatggagacgaga

SEQ ID NO: 1547876 - DNA, 15 bp, Homo sapiens
ccatggagacgagaa

SEQ ID NO: 1547877 - DNA, 15 bp, Homo sapiens
catggagacgagaaa

SEQ ID NO: 1547878 - DNA, 15 bp, Homo sapiens
atggagacgagaaag

SEQ ID NO: 1547879 - DNA, 15 bp, Homo sapiens
tggagacgagaaaga

SEQ ID NO: 1547880 - DNA, 15 bp, Homo sapiens
ggagacgagaaagag

SEQ ID NO: 1547881 - DNA, 15 bp, Homo sapiens
gagacgagaaagagg

SEQ ID NO: 1547882 - DNA, 15 bp, Homo sapiens
agacgagaaagagga

SEQ ID NO: 1547883 - DNA, 15 bp, Homo sapiens
gacgagaaagaggaa

SEQ ID NO: 1547884 - DNA, 15 bp, Homo sapiens
acgagaaagaggaat

SEQ ID NO: 1547885 - DNA, 15 bp, Homo sapiens
cgagaaagaggaatg

SEQ ID NO: 1547886 - DNA, 15 bp, Homo sapiens
gagaaagaggaatga

SEQ ID NO: 1547887 - DNA, 15 bp, Homo sapiens
agaaagaggaatgag

SEQ ID NO: 1547888 - DNA, 15 bp, Homo sapiens
gaaagaggaatgagg

SEQ ID NO: 1547889 - DNA, 15 bp, Homo sapiens
aaagaggaatgaggg

SEQ ID NO: 1547890 - DNA, 15 bp, Homo sapiens
aagaggaatgagggg

SEQ ID NO: 1547891 - DNA, 15 bp, Homo sapiens
agaggaatgaggggc

SEQ ID NO: 1547892 - DNA, 15 bp, Homo sapiens
gaggaatgaggggca

SEQ ID NO: 1547893 - DNA, 15 bp, Homo sapiens
aggaatgaggggcag

SEQ ID NO: 1547894 - DNA, 15 bp, Homo sapiens
ggaatgaggggcagg

SEQ ID NO: 1547895 - DNA, 15 bp, Homo sapiens
gaatgaggggcaggg

SEQ ID NO: 1547896 - DNA, 15 bp, Homo sapiens
aatgaggggcagggc

SEQ ID NO: 1547897 - DNA, 15 bp, Homo sapiens
atgaggggcagggcc

SEQ ID NO: 1547898 - DNA, 15 bp, Homo sapiens
tgaggggcagggcca

SEQ ID NO: 1547899 - DNA, 15 bp, Homo sapiens
gaggggcagggccag

SEQ ID NO: 1547900 - DNA, 15 bp, Homo sapiens
aggggcagggccagg

SEQ ID NO: 1547901 - DNA, 15 bp, Homo sapiens
ggggcagggccaggc

SEQ ID NO: 1547902 - DNA, 15 bp, Homo sapiens
gggcagggccaggcc

SEQ ID NO: 1547903 - DNA, 15 bp, Homo sapiens
ggcagggccaggccc

SEQ ID NO: 1547904 - DNA, 15 bp, Homo sapiens
gcagggccaggccca

SEQ ID NO: 1547905 - DNA, 15 bp, Homo sapiens
cagggccaggcccac

SEQ ID NO: 1547906 - DNA, 15 bp, Homo sapiens
agggccaggcccacg

SEQ ID NO: 1547907 - DNA, 15 bp, Homo sapiens
gggccaggcccacgg

SEQ ID NO: 1547908 - DNA, 15 bp, Homo sapiens
ggccaggcccacggg

SEQ ID NO: 1547909 - DNA, 15 bp, Homo sapiens
gccaggcccacgggg

SEQ ID NO: 1547910 - DNA, 15 bp, Homo sapiens
ccaggcccacggggg

SEQ ID NO: 1547911 - DNA, 15 bp, Homo sapiens
caggcccacgggggg

SEQ ID NO: 1547912 - DNA, 15 bp, Homo sapiens
aggcccacggggggg

SEQ ID NO: 1547913 - DNA, 15 bp, Homo sapiens
ggcccacgggggggc

SEQ ID NO: 1547914 - DNA, 15 bp, Homo sapiens
gcccacgggggggca

SEQ ID NO: 1547915 - DNA, 15 bp, Homo sapiens
cccacgggggggcac

SEQ ID NO: 1547916 - DNA, 15 bp, Homo sapiens
ccacgggggggcacc

SEQ ID NO: 1547917 - DNA, 15 bp, Homo sapiens
cacgggggggcacct

SEQ ID NO: 1547918 - DNA, 15 bp, Homo sapiens
acgggggggcacctc

SEQ ID NO: 1547919 - DNA, 15 bp, Homo sapiens
cgggggggcacctca

SEQ ID NO: 1547920 - DNA, 15 bp, Homo sapiens
gggggggcacctcaa

SEQ ID NO: 1547921 - DNA, 15 bp, Homo sapiens
ggggggcacctcaat

SEQ ID NO: 1547922 - DNA, 15 bp, Homo sapiens
gggggcacctcaata

SEQ ID NO: 1547923 - DNA, 15 bp, Homo sapiens
ggggcacctcaataa

SEQ ID NO: 1547924 - DNA, 15 bp, Homo sapiens
gggcacctcaataaa

SEQ ID NO: 1547925 - DNA, 15 bp, Homo sapiens
ggcacctcaataaac

SEQ ID NO: 1547926 - DNA, 15 bp, Homo sapiens
gcacctcaataaact

SEQ ID NO: 1547927 - DNA, 15 bp, Homo sapiens
cacctcaataaactc

SEQ ID NO: 1547928 - DNA, 15 bp, Homo sapiens
acctcaataaactct

SEQ ID NO: 1547929 - DNA, 15 bp, Homo sapiens
cctcaataaactctg

SEQ ID NO: 1547930 - DNA, 15 bp, Homo sapiens
ctcaataaactctgt

SEQ ID NO: 1547931 - DNA, 15 bp, Homo sapiens
tcaataaactctgtt

SEQ ID NO: 1547932 - DNA, 15 bp, Homo sapiens
caataaactctgttg

SEQ ID NO: 1547933 - DNA, 15 bp, Homo sapiens
aataaactctgttgc

SEQ ID NO: 1547934 - DNA, 15 bp, Homo sapiens
ataaactctgttgca

SEQ ID NO: 1547935 - DNA, 15 bp, Homo sapiens
taaactctgttgcaa

SEQ ID NO: 1547936 - DNA, 15 bp, Homo sapiens
aaactctgttgcaaa

SEQ ID NO: 1547937 - DNA, 15 bp, Homo sapiens
aactctgttgcaaaa

SEQ ID NO: 1547938 - DNA, 15 bp, Homo sapiens
actctgttgcaaaat

SEQ ID NO: 1547939 - DNA, 15 bp, Homo sapiens
ctctgttgcaaaatt

SEQ ID NO: 1547940 - DNA, 15 bp, Homo sapiens
tctgttgcaaaattg

SEQ ID NO: 1547941 - DNA, 15 bp, Homo sapiens
ctgttgcaaaattgg

SEQ ID NO: 1547942 - DNA, 15 bp, Homo sapiens
tgttgcaaaattgga

SEQ ID NO: 1547943 - DNA, 15 bp, Homo sapiens
gttgcaaaattggaa

SEQ ID NO: 1547944 - DNA, 15 bp, Homo sapiens
ttgcaaaattggaat

SEQ ID NO: 1547945 - DNA, 15 bp, Homo sapiens
tgcaaaattggaatt

SEQ ID NO: 1547946 - DNA, 15 bp, Homo sapiens
gcaaaattggaattg

SEQ ID NO: 1547947 - DNA, 15 bp, Homo sapiens
caaaattggaattgc

SEQ ID NO: 1547948 - DNA, 15 bp, Homo sapiens
aaaattggaattgct

SEQ ID NO: 1547949 - DNA, 15 bp, Homo sapiens
aaattggaattgctg

SEQ ID NO: 1547950 - DNA, 15 bp, Homo sapiens
aattggaattgctgt

SEQ ID NO: 1547951 - DNA, 15 bp, Homo sapiens
attggaattgctgtg

SEQ ID NO: 1547952 - DNA, 15 bp, Homo sapiens
ttggaattgctgtgg

SEQ ID NO: 1547953 - DNA, 15 bp, Homo sapiens
tggaattgctgtggt

SEQ ID NO: 1547954 - DNA, 15 bp, Homo sapiens
ggaattgctgtggtg

SEQ ID NO: 1547955 - DNA, 15 bp, Homo sapiens
gaattgctgtggtgt

SEQ ID NO: 1547956 - DNA, 15 bp, Homo sapiens
aattgctgtggtgtc

SEQ ID NO: 1547957 - DNA, 15 bp, Homo sapiens
attgctgtggtgtct

SEQ ID NO: 1547958 - DNA, 15 bp, Homo sapiens
ttgctgtggtgtctt

SEQ ID NO: 1547959 - DNA, 15 bp, Homo sapiens
tgctgtggtgtcttg

SEQ ID NO: 1547960 - DNA, 15 bp, Homo sapiens
gctgtggtgtcttgt

SEQ ID NO: 1547961 - DNA, 15 bp, Homo sapiens
ctgtggtgtcttgtc

SEQ ID NO: 1547962 - DNA, 15 bp, Homo sapiens
tgtggtgtcttgtct

SEQ ID NO: 1547963 - DNA, 15 bp, Homo sapiens
gtggtgtcttgtctg

SEQ ID NO: 1547964 - DNA, 15 bp, Homo sapiens
tggtgtcttgtctgt

SEQ ID NO: 1547965 - DNA, 15 bp, Homo sapiens
ggtgtcttgtctgtg

SEQ ID NO: 1547966 - DNA, 15 bp, Homo sapiens
gtgtcttgtctgtga

SEQ ID NO: 1547967 - DNA, 15 bp, Homo sapiens
tgtcttgtctgtgac

SEQ ID NO: 1547968 - DNA, 15 bp, Homo sapiens
gtcttgtctgtgaca

SEQ ID NO: 1547969 - DNA, 15 bp, Homo sapiens
tcttgtctgtgacag

SEQ ID NO: 1547970 - DNA, 15 bp, Homo sapiens
cttgtctgtgacaga

SEQ ID NO: 1547971 - DNA, 15 bp, Homo sapiens
ttgtctgtgacagat

SEQ ID NO: 1547972 - DNA, 15 bp, Homo sapiens
tgtctgtgacagatg

SEQ ID NO: 1547973 - DNA, 15 bp, Homo sapiens
gtctgtgacagatgg

SEQ ID NO: 1547974 - DNA, 15 bp, Homo sapiens
tctgtgacagatggg

SEQ ID NO: 1547975 - DNA, 15 bp, Homo sapiens
ctgtgacagatgggt

SEQ ID NO: 1547976 - DNA, 15 bp, Homo sapiens
tgtgacagatgggtt

SEQ ID NO: 1547977 - DNA, 15 bp, Homo sapiens
gtgacagatgggttg

SEQ ID NO: 1547978 - DNA, 15 bp, Homo sapiens
tgacagatgggttgg

SEQ ID NO: 1547979 - DNA, 15 bp, Homo sapiens
gacagatgggttggg

SEQ ID NO: 1547980 - DNA, 15 bp, Homo sapiens
acagatgggttgggg

SEQ ID NO: 1547981 - DNA, 15 bp, Homo sapiens
cagatgggttgggga

SEQ ID NO: 1547982 - DNA, 15 bp, Homo sapiens
agatgggttggggac

SEQ ID NO: 1547983 - DNA, 15 bp, Homo sapiens
gatgggttggggacc

SEQ ID NO: 1547984 - DNA, 15 bp, Homo sapiens
atgggttggggacca

SEQ ID NO: 1547985 - DNA, 15 bp, Homo sapiens
tgggttggggaccag

SEQ ID NO: 1547986 - DNA, 15 bp, Homo sapiens
gggttggggaccagc

SEQ ID NO: 1547987 - DNA, 15 bp, Homo sapiens
ggttggggaccagcc

SEQ ID NO: 1547988 - DNA, 15 bp, Homo sapiens
gttggggaccagcca

SEQ ID NO: 1547989 - DNA, 15 bp, Homo sapiens
ttggggaccagccaa

SEQ ID NO: 1547990 - DNA, 15 bp, Homo sapiens
tggggaccagccaag

SEQ ID NO: 1547991 - DNA, 15 bp, Homo sapiens
ggggaccagccaagg

SEQ ID NO: 1547992 - DNA, 15 bp, Homo sapiens
gggaccagccaaggg

SEQ ID NO: 1547993 - DNA, 15 bp, Homo sapiens
ggaccagccaagggg

SEQ ID NO: 1547994 - DNA, 15 bp, Homo sapiens
gaccagccaaggggg

SEQ ID NO: 1547995 - DNA, 15 bp, Homo sapiens
accagccaaggggga

SEQ ID NO: 1547996 - DNA, 15 bp, Homo sapiens
ccagccaagggggat

SEQ ID NO: 1547997 - DNA, 15 bp, Homo sapiens
cagccaagggggatc

SEQ ID NO: 1547998 - DNA, 15 bp, Homo sapiens
agccaagggggatcc

SEQ ID NO: 1547999 - DNA, 15 bp, Homo sapiens
gccaagggggatccc

SEQ ID NO: 1548000 - DNA, 15 bp, Homo sapiens
ccaagggggatccca

SEQ ID NO: 1548001 - DNA, 15 bp, Homo sapiens
caagggggatcccag

SEQ ID NO: 1548002 - DNA, 15 bp, Homo sapiens
aagggggatcccagg

SEQ ID NO: 1548003 - DNA, 15 bp, Homo sapiens
agggggatcccaggg

SEQ ID NO: 1548004 - DNA, 15 bp, Homo sapiens
gggggatcccagggt

SEQ ID NO: 1548005 - DNA, 15 bp, Homo sapiens
ggggatcccagggtc

SEQ ID NO: 1548006 - DNA, 15 bp, Homo sapiens
gggatcccagggtct

SEQ ID NO: 1548007 - DNA, 15 bp, Homo sapiens
ggatcccagggtctc

SEQ ID NO: 1548008 - DNA, 15 bp, Homo sapiens
gatcccagggtctca

SEQ ID NO: 1548009 - DNA, 15 bp, Homo sapiens
atcccagggtctcag

SEQ ID NO: 1548010 - DNA, 15 bp, Homo sapiens
tcccagggtctcagt

SEQ ID NO: 1548011 - DNA, 15 bp, Homo sapiens
cccagggtctcagtg

SEQ ID NO: 1548012 - DNA, 15 bp, Homo sapiens
ccagggtctcagtgc

SEQ ID NO: 1548013 - DNA, 15 bp, Homo sapiens
cagggtctcagtgcg

SEQ ID NO: 1548014 - DNA, 15 bp, Homo sapiens
agggtctcagtgcgc

SEQ ID NO: 1548015 - DNA, 15 bp, Homo sapiens
gggtctcagtgcgca

SEQ ID NO: 1548016 - DNA, 15 bp, Homo sapiens
ggtctcagtgcgcac

SEQ ID NO: 1548017 - DNA, 15 bp, Homo sapiens
gtctcagtgcgcaca

SEQ ID NO: 1548018 - DNA, 15 bp, Homo sapiens
tctcagtgcgcacat

SEQ ID NO: 1548019 - DNA, 15 bp, Homo sapiens
ctcagtgcgcacatc

SEQ ID NO: 1548020 - DNA, 15 bp, Homo sapiens
tcagtgcgcacatca

SEQ ID NO: 1548021 - DNA, 15 bp, Homo sapiens
cagtgcgcacatcac

SEQ ID NO: 1548022 - DNA, 15 bp, Homo sapiens
agtgcgcacatcacc

SEQ ID NO: 1548023 - DNA, 15 bp, Homo sapiens
gtgcgcacatcacca

SEQ ID NO: 1548024 - DNA, 15 bp, Homo sapiens
tgcgcacatcaccat

SEQ ID NO: 1548025 - DNA, 15 bp, Homo sapiens
gcgcacatcaccatg

SEQ ID NO: 1548026 - DNA, 15 bp, Homo sapiens
cgcacatcaccatga

SEQ ID NO: 1548027 - DNA, 15 bp, Homo sapiens
gcacatcaccatgat

SEQ ID NO: 1548028 - DNA, 15 bp, Homo sapiens
cacatcaccatgatc

SEQ ID NO: 1548029 - DNA, 15 bp, Homo sapiens
acatcaccatgatca

SEQ ID NO: 1548030 - DNA, 15 bp, Homo sapiens
catcaccatgatcat

SEQ ID NO: 1548031 - DNA, 15 bp, Homo sapiens
atcaccatgatcatg

SEQ ID NO: 1548032 - DNA, 15 bp, Homo sapiens
tcaccatgatcatgg

SEQ ID NO: 1548033 - DNA, 15 bp, Homo sapiens
caccatgatcatggc

SEQ ID NO: 1548034 - DNA, 15 bp, Homo sapiens
accatgatcatggcc

SEQ ID NO: 1548035 - DNA, 15 bp, Homo sapiens
ccatgatcatggcca

SEQ ID NO: 1548036 - DNA, 15 bp, Homo sapiens
catgatcatggccac

SEQ ID NO: 1548037 - DNA, 15 bp, Homo sapiens
atgatcatggccacc

SEQ ID NO: 1548038 - DNA, 15 bp, Homo sapiens
tgatcatggccacca

SEQ ID NO: 1548039 - DNA, 15 bp, Homo sapiens
gatcatggccaccat

SEQ ID NO: 1548040 - DNA, 15 bp, Homo sapiens
atcatggccaccatc

SEQ ID NO: 1548041 - DNA, 15 bp, Homo sapiens
tcatggccaccatct

SEQ ID NO: 1548042 - DNA, 15 bp, Homo sapiens
catggccaccatcta

SEQ ID NO: 1548043 - DNA, 15 bp, Homo sapiens
atggccaccatctac

SEQ ID NO: 1548044 - DNA, 15 bp, Homo sapiens
tggccaccatctacc

SEQ ID NO: 1548045 - DNA, 15 bp, Homo sapiens
ggccaccatctacct

SEQ ID NO: 1548046 - DNA, 15 bp, Homo sapiens
gccaccatctacctc

SEQ ID NO: 1548047 - DNA, 15 bp, Homo sapiens
ccaccatctacctcc

SEQ ID NO: 1548048 - DNA, 15 bp, Homo sapiens
caccatctacctcct

SEQ ID NO: 1548049 - DNA, 15 bp, Homo sapiens
accatctacctcctg

SEQ ID NO: 1548050 - DNA, 15 bp, Homo sapiens
ccatctacctcctgg

SEQ ID NO: 1548051 - DNA, 15 bp, Homo sapiens
catctacctcctggg

SEQ ID NO: 1548052 - DNA, 15 bp, Homo sapiens
atctacctcctggga

SEQ ID NO: 1548053 - DNA, 15 bp, Homo sapiens
tctacctcctgggag

SEQ ID NO: 1548054 - DNA, 15 bp, Homo sapiens
ctacctcctgggagc

SEQ ID NO: 1548055 - DNA, 15 bp, Homo sapiens
tacctcctgggagct

SEQ ID NO: 1548056 - DNA, 15 bp, Homo sapiens
acctcctgggagctg

SEQ ID NO: 1548057 - DNA, 15 bp, Homo sapiens
cctcctgggagctgg

SEQ ID NO: 1548058 - DNA, 15 bp, Homo sapiens
ctcctgggagctggc

SEQ ID NO: 1548059 - DNA, 15 bp, Homo sapiens
tcctgggagctggcc

SEQ ID NO: 1548060 - DNA, 15 bp, Homo sapiens
cctgggagctggccc

SEQ ID NO: 1548061 - DNA, 15 bp, Homo sapiens
ctgggagctggcccc

SEQ ID NO: 1548062 - DNA, 15 bp, Homo sapiens
tgggagctggcccct

SEQ ID NO: 1548063 - DNA, 15 bp, Homo sapiens
gggagctggcccctc

SEQ ID NO: 1548064 - DNA, 15 bp, Homo sapiens
ggagctggcccctcg

SEQ ID NO: 1548065 - DNA, 15 bp, Homo sapiens
gagctggcccctcgc

SEQ ID NO: 1548066 - DNA, 15 bp, Homo sapiens
agctggcccctcgcc

SEQ ID NO: 1548067 - DNA, 15 bp, Homo sapiens
gctggcccctcgcca

SEQ ID NO: 1548068 - DNA, 15 bp, Homo sapiens
ctggcccctcgccag

SEQ ID NO: 1548069 - DNA, 15 bp, Homo sapiens
tggcccctcgccagc

SEQ ID NO: 1548070 - DNA, 15 bp, Homo sapiens
ggcccctcgccagct

SEQ ID NO: 1548071 - DNA, 15 bp, Homo sapiens
gcccctcgccagctc

SEQ ID NO: 1548072 - DNA, 15 bp, Homo sapiens
cccctcgccagctca

SEQ ID NO: 1548073 - DNA, 15 bp, Homo sapiens
ccctcgccagctcac

SEQ ID NO: 1548074 - DNA, 15 bp, Homo sapiens
cctcgccagctcacc

SEQ ID NO: 1548075 - DNA, 15 bp, Homo sapiens
ctcgccagctcacct

SEQ ID NO: 1548076 - DNA, 15 bp, Homo sapiens
tcgccagctcacctt

SEQ ID NO: 1548077 - DNA, 15 bp, Homo sapiens
cgccagctcaccttg

SEQ ID NO: 1548078 - DNA, 15 bp, Homo sapiens
gccagctcaccttga

SEQ ID NO: 1548079 - DNA, 15 bp, Homo sapiens
ccagctcaccttgat

SEQ ID NO: 1548080 - DNA, 15 bp, Homo sapiens
cagctcaccttgatt

SEQ ID NO: 1548081 - DNA, 15 bp, Homo sapiens
agctcaccttgattc

SEQ ID NO: 1548082 - DNA, 15 bp, Homo sapiens
gctcaccttgattca

SEQ ID NO: 1548083 - DNA, 15 bp, Homo sapiens
ctcaccttgattcac

SEQ ID NO: 1548084 - DNA, 15 bp, Homo sapiens
tcaccttgattcact

SEQ ID NO: 1548085 - DNA, 15 bp, Homo sapiens
caccttgattcactc

SEQ ID NO: 1548086 - DNA, 15 bp, Homo sapiens
accttgattcactcc

SEQ ID NO: 1548087 - DNA, 15 bp, Homo sapiens
ccttgattcactccc

SEQ ID NO: 1548088 - DNA, 15 bp, Homo sapiens
cttgattcactccca

SEQ ID NO: 1548089 - DNA, 15 bp, Homo sapiens
ttgattcactcccat

SEQ ID NO: 1548090 - DNA, 15 bp, Homo sapiens
tgattcactcccatg

SEQ ID NO: 1548091 - DNA, 15 bp, Homo sapiens
gattcactcccatga

SEQ ID NO: 1548092 - DNA, 15 bp, Homo sapiens
attcactcccatgat

SEQ ID NO: 1548093 - DNA, 15 bp, Homo sapiens
ttcactcccatgatg

SEQ ID NO: 1548094 - DNA, 15 bp, Homo sapiens
tcactcccatgatgc

SEQ ID NO: 1548095 - DNA, 15 bp, Homo sapiens
cactcccatgatgcc

SEQ ID NO: 1548096 - DNA, 15 bp, Homo sapiens
actcccatgatgcca

SEQ ID NO: 1548097 - DNA, 15 bp, Homo sapiens
ctcccatgatgccaa

SEQ ID NO: 1548098 - DNA, 15 bp, Homo sapiens
tcccatgatgccaag

SEQ ID NO: 1548099 - DNA, 15 bp, Homo sapiens
cccatgatgccaagt

SEQ ID NO: 1548100 - DNA, 15 bp, Homo sapiens
ccatgatgccaagtg

SEQ ID NO: 1548101 - DNA, 15 bp, Homo sapiens
catgatgccaagtga

SEQ ID NO: 1548102 - DNA, 15 bp, Homo sapiens
atgatgccaagtgaa

SEQ ID NO: 1548103 - DNA, 15 bp, Homo sapiens
tgatgccaagtgaag

SEQ ID NO: 1548104 - DNA, 15 bp, Homo sapiens
gatgccaagtgaagt

SEQ ID NO: 1548105 - DNA, 15 bp, Homo sapiens
atgccaagtgaagtg

SEQ ID NO: 1548106 - DNA, 15 bp, Homo sapiens
tgccaagtgaagtgt

SEQ ID NO: 1548107 - DNA, 15 bp, Homo sapiens
gccaagtgaagtgtg

SEQ ID NO: 1548108 - DNA, 15 bp, Homo sapiens
ccaagtgaagtgtga

SEQ ID NO: 1548109 - DNA, 15 bp, Homo sapiens
caagtgaagtgtgaa

SEQ ID NO: 1548110 - DNA, 15 bp, Homo sapiens
aagtgaagtgtgaac

SEQ ID NO: 1548111 - DNA, 15 bp, Homo sapiens
agtgaagtgtgaact

SEQ ID NO: 1548112 - DNA, 15 bp, Homo sapiens
gtgaagtgtgaacta

SEQ ID NO: 1548113 - DNA, 15 bp, Homo sapiens
tgaagtgtgaactat

SEQ ID NO: 1548114 - DNA, 15 bp, Homo sapiens
gaagtgtgaactatg

SEQ ID NO: 1548115 - DNA, 15 bp, Homo sapiens
aagtgtgaactatga

SEQ ID NO: 1548116 - DNA, 15 bp, Homo sapiens
agtgtgaactatgat

SEQ ID NO: 1548117 - DNA, 15 bp, Homo sapiens
gtgtgaactatgatc

SEQ ID NO: 1548118 - DNA, 15 bp, Homo sapiens
tgtgaactatgatca

SEQ ID NO: 1548119 - DNA, 15 bp, Homo sapiens
tgaactatgatcatg

SEQ ID NO: 1548120 - DNA, 15 bp, Homo sapiens
gaactatgatcatgc

SEQ ID NO: 1548121 - DNA, 15 bp, Homo sapiens
aactatgatcatgcc

SEQ ID NO: 1548122 - DNA, 15 bp, Homo sapiens
actatgatcatgcct

SEQ ID NO: 1548123 - DNA, 15 bp, Homo sapiens
ctatgatcatgccta

SEQ ID NO: 1548124 - DNA, 15 bp, Homo sapiens
tatgatcatgcctag

SEQ ID NO: 1548125 - DNA, 15 bp, Homo sapiens
atgatcatgcctagt

SEQ ID NO: 1548126 - DNA, 15 bp, Homo sapiens
tgatcatgcctagtt

SEQ ID NO: 1548127 - DNA, 15 bp, Homo sapiens
gatcatgcctagttt

SEQ ID NO: 1548128 - DNA, 15 bp, Homo sapiens
atcatgcctagttta

SEQ ID NO: 1548129 - DNA, 15 bp, Homo sapiens
tcatgcctagtttac

SEQ ID NO: 1548130 - DNA, 15 bp, Homo sapiens
catgcctagtttaca

SEQ ID NO: 1548131 - DNA, 15 bp, Homo sapiens
atgcctagtttacag

SEQ ID NO: 1548132 - DNA, 15 bp, Homo sapiens
tgcctagtttacaga

SEQ ID NO: 1548133 - DNA, 15 bp, Homo sapiens
gcctagtttacagat

SEQ ID NO: 1548134 - DNA, 15 bp, Homo sapiens
cctagtttacagatg

SEQ ID NO: 1548135 - DNA, 15 bp, Homo sapiens
ctagtttacagatga

SEQ ID NO: 1548136 - DNA, 15 bp, Homo sapiens
tagtttacagatgag

SEQ ID NO: 1548137 - DNA, 15 bp, Homo sapiens
agtttacagatgagg

SEQ ID NO: 1548138 - DNA, 15 bp, Homo sapiens
gtttacagatgagga

SEQ ID NO: 1548139 - DNA, 15 bp, Homo sapiens
tttacagatgaggac

SEQ ID NO: 1548140 - DNA, 15 bp, Homo sapiens
ttacagatgaggaca

SEQ ID NO: 1548141 - DNA, 15 bp, Homo sapiens
tacagatgaggacac

SEQ ID NO: 1548142 - DNA, 15 bp, Homo sapiens
acagatgaggacact

SEQ ID NO: 1548143 - DNA, 15 bp, Homo sapiens
cagatgaggacactg

SEQ ID NO: 1548144 - DNA, 15 bp, Homo sapiens
agatgaggacactga

SEQ ID NO: 1548145 - DNA, 15 bp, Homo sapiens
gatgaggacactgag

SEQ ID NO: 1548146 - DNA, 15 bp, Homo sapiens
atgaggacactgagg

SEQ ID NO: 1548147 - DNA, 15 bp, Homo sapiens
tgaggacactgaggc

SEQ ID NO: 1548148 - DNA, 15 bp, Homo sapiens
gaggacactgaggcc

SEQ ID NO: 1548149 - DNA, 15 bp, Homo sapiens
aggacactgaggccc

SEQ ID NO: 1548150 - DNA, 15 bp, Homo sapiens
ggacactgaggccca

SEQ ID NO: 1548151 - DNA, 15 bp, Homo sapiens
gacactgaggcccag

SEQ ID NO: 1548152 - DNA, 15 bp, Homo sapiens
acactgaggcccaga

SEQ ID NO: 1548153 - DNA, 15 bp, Homo sapiens
cactgaggcccagaa

SEQ ID NO: 1548154 - DNA, 15 bp, Homo sapiens
actgaggcccagaaa

SEQ ID NO: 1548155 - DNA, 15 bp, Homo sapiens
ctgaggcccagaaag

SEQ ID NO: 1548156 - DNA, 15 bp, Homo sapiens
tgaggcccagaaagt

SEQ ID NO: 1548157 - DNA, 15 bp, Homo sapiens
gaggcccagaaagtg

SEQ ID NO: 1548158 - DNA, 15 bp, Homo sapiens
aggcccagaaagtgt

SEQ ID NO: 1548159 - DNA, 15 bp, Homo sapiens
ggcccagaaagtgtg

SEQ ID NO: 1548160 - DNA, 15 bp, Homo sapiens
gcccagaaagtgtga

SEQ ID NO: 1548161 - DNA, 15 bp, Homo sapiens
cccagaaagtgtgag

SEQ ID NO: 1548162 - DNA, 15 bp, Homo sapiens
ccagaaagtgtgagc

SEQ ID NO: 1548163 - DNA, 15 bp, Homo sapiens
cagaaagtgtgagca

SEQ ID NO: 1548164 - DNA, 15 bp, Homo sapiens
agaaagtgtgagcat

SEQ ID NO: 1548165 - DNA, 15 bp, Homo sapiens
gaaagtgtgagcatc

SEQ ID NO: 1548166 - DNA, 15 bp, Homo sapiens
aaagtgtgagcatct

SEQ ID NO: 1548167 - DNA, 15 bp, Homo sapiens
aagtgtgagcatctt

SEQ ID NO: 1548168 - DNA, 15 bp, Homo sapiens
agtgtgagcatctta

SEQ ID NO: 1548169 - DNA, 15 bp, Homo sapiens
gtgtgagcatcttac

SEQ ID NO: 1548170 - DNA, 15 bp, Homo sapiens
tgtgagcatcttacc

SEQ ID NO: 1548171 - DNA, 15 bp, Homo sapiens
gtgagcatcttacca

SEQ ID NO: 1548172 - DNA, 15 bp, Homo sapiens
tgagcatcttaccaa

SEQ ID NO: 1548173 - DNA, 15 bp, Homo sapiens
gagcatcttaccaag

SEQ ID NO: 1548174 - DNA, 15 bp, Homo sapiens
agcatcttaccaagg

SEQ ID NO: 1548175 - DNA, 15 bp, Homo sapiens
gcatcttaccaaggc

SEQ ID NO: 1548176 - DNA, 15 bp, Homo sapiens
catcttaccaaggcc

SEQ ID NO: 1548177 - DNA, 15 bp, Homo sapiens
atcttaccaaggcca

SEQ ID NO: 1548178 - DNA, 15 bp, Homo sapiens
tcttaccaaggccag

SEQ ID NO: 1548179 - DNA, 15 bp, Homo sapiens
cttaccaaggccagc

SEQ ID NO: 1548180 - DNA, 15 bp, Homo sapiens
ttaccaaggccagcc

SEQ ID NO: 1548181 - DNA, 15 bp, Homo sapiens
taccaaggccagccc

SEQ ID NO: 1548182 - DNA, 15 bp, Homo sapiens
accaaggccagccct

SEQ ID NO: 1548183 - DNA, 15 bp, Homo sapiens
ccaaggccagccctc

SEQ ID NO: 1548184 - DNA, 15 bp, Homo sapiens
caaggccagccctct

SEQ ID NO: 1548185 - DNA, 15 bp, Homo sapiens
aaggccagccctcta

SEQ ID NO: 1548186 - DNA, 15 bp, Homo sapiens
aggccagccctctag

SEQ ID NO: 1548187 - DNA, 15 bp, Homo sapiens
ggccagccctctaga

SEQ ID NO: 1548188 - DNA, 15 bp, Homo sapiens
gccagccctctagaa

SEQ ID NO: 1548189 - DNA, 15 bp, Homo sapiens
ccagccctctagaag

SEQ ID NO: 1548190 - DNA, 15 bp, Homo sapiens
cagccctctagaaga

SEQ ID NO: 1548191 - DNA, 15 bp, Homo sapiens
agccctctagaagag

SEQ ID NO: 1548192 - DNA, 15 bp, Homo sapiens
gccctctagaagagg

SEQ ID NO: 1548193 - DNA, 15 bp, Homo sapiens
ccctctagaagagga

SEQ ID NO: 1548194 - DNA, 15 bp, Homo sapiens
cctctagaagaggag

SEQ ID NO: 1548195 - DNA, 15 bp, Homo sapiens
ctctagaagaggaga

SEQ ID NO: 1548196 - DNA, 15 bp, Homo sapiens
tctagaagaggagat

SEQ ID NO: 1548197 - DNA, 15 bp, Homo sapiens
ctagaagaggagatg

SEQ ID NO: 1548198 - DNA, 15 bp, Homo sapiens
tagaagaggagatgg

SEQ ID NO: 1548199 - DNA, 15 bp, Homo sapiens
agaagaggagatggt

SEQ ID NO: 1548200 - DNA, 15 bp, Homo sapiens
gaagaggagatggtg

SEQ ID NO: 1548201 - DNA, 15 bp, Homo sapiens
aggagatggtgggat

SEQ ID NO: 1548202 - DNA, 15 bp, Homo sapiens
ggagatggtgggatt

SEQ ID NO: 1548203 - DNA, 15 bp, Homo sapiens
gagatggtgggattt

SEQ ID NO: 1548204 - DNA, 15 bp, Homo sapiens
agatggtgggattta

SEQ ID NO: 1548205 - DNA, 15 bp, Homo sapiens
gatggtgggatttac

SEQ ID NO: 1548206 - DNA, 15 bp, Homo sapiens
atggtgggatttaca

SEQ ID NO: 1548207 - DNA, 15 bp, Homo sapiens
tggtgggatttacac

SEQ ID NO: 1548208 - DNA, 15 bp, Homo sapiens
ggtgggatttacacc

SEQ ID NO: 1548209 - DNA, 15 bp, Homo sapiens
gtgggatttacacca

SEQ ID NO: 1548210 - DNA, 15 bp, Homo sapiens
tgggatttacaccac

SEQ ID NO: 1548211 - DNA, 15 bp, Homo sapiens
gggatttacaccacc

SEQ ID NO: 1548212 - DNA, 15 bp, Homo sapiens
ggatttacaccacct

SEQ ID NO: 1548213 - DNA, 15 bp, Homo sapiens
gatttacaccacctc

SEQ ID NO: 1548214 - DNA, 15 bp, Homo sapiens
atttacaccacctcc

SEQ ID NO: 1548215 - DNA, 15 bp, Homo sapiens
tttacaccacctcca

SEQ ID NO: 1548216 - DNA, 15 bp, Homo sapiens
ttacaccacctccac

SEQ ID NO: 1548217 - DNA, 15 bp, Homo sapiens
tacaccacctccacc

SEQ ID NO: 1548218 - DNA, 15 bp, Homo sapiens
acaccacctccacca

SEQ ID NO: 1548219 - DNA, 15 bp, Homo sapiens
caccacctccaccaa

SEQ ID NO: 1548220 - DNA, 15 bp, Homo sapiens
accacctccaccaag

SEQ ID NO: 1548221 - DNA, 15 bp, Homo sapiens
ccacctccaccaagc

SEQ ID NO: 1548222 - DNA, 15 bp, Homo sapiens
cacctccaccaagcc

SEQ ID NO: 1548223 - DNA, 15 bp, Homo sapiens
acctccaccaagccc

SEQ ID NO: 1548224 - DNA, 15 bp, Homo sapiens
cctccaccaagccca

SEQ ID NO: 1548225 - DNA, 15 bp, Homo sapiens
ctccaccaagcccag

SEQ ID NO: 1548226 - DNA, 15 bp, Homo sapiens
tccaccaagcccagg

SEQ ID NO: 1548227 - DNA, 15 bp, Homo sapiens
ccaccaagcccagga

SEQ ID NO: 1548228 - DNA, 15 bp, Homo sapiens
caccaagcccaggaa

SEQ ID NO: 1548229 - DNA, 15 bp, Homo sapiens
accaagcccaggaat

SEQ ID NO: 1548230 - DNA, 15 bp, Homo sapiens
ccaagcccaggaatg

SEQ ID NO: 1548231 - DNA, 15 bp, Homo sapiens
caagcccaggaatga

SEQ ID NO: 1548232 - DNA, 15 bp, Homo sapiens
aagcccaggaatgag

SEQ ID NO: 1548233 - DNA, 15 bp, Homo sapiens
agcccaggaatgagc

SEQ ID NO: 1548234 - DNA, 15 bp, Homo sapiens
gcccaggaatgagcc

SEQ ID NO: 1548235 - DNA, 15 bp, Homo sapiens
cccaggaatgagcca

SEQ ID NO: 1548236 - DNA, 15 bp, Homo sapiens
ccaggaatgagccac

SEQ ID NO: 1548237 - DNA, 15 bp, Homo sapiens
caggaatgagccaca

SEQ ID NO: 1548238 - DNA, 15 bp, Homo sapiens
aggaatgagccacaa

SEQ ID NO: 1548239 - DNA, 15 bp, Homo sapiens
ggaatgagccacaaa

SEQ ID NO: 1548240 - DNA, 15 bp, Homo sapiens
gaatgagccacaaag

SEQ ID NO: 1548241 - DNA, 15 bp, Homo sapiens
aatgagccacaaagt

SEQ ID NO: 1548242 - DNA, 15 bp, Homo sapiens
atgagccacaaagtg

SEQ ID NO: 1548243 - DNA, 15 bp, Homo sapiens
tgagccacaaagtgg

SEQ ID NO: 1548244 - DNA, 15 bp, Homo sapiens
gagccacaaagtggg

SEQ ID NO: 1548245 - DNA, 15 bp, Homo sapiens
agccacaaagtgggc

SEQ ID NO: 1548246 - DNA, 15 bp, Homo sapiens
gccacaaagtgggca

SEQ ID NO: 1548247 - DNA, 15 bp, Homo sapiens
ccacaaagtgggcac

SEQ ID NO: 1548248 - DNA, 15 bp, Homo sapiens
cacaaagtgggcact

SEQ ID NO: 1548249 - DNA, 15 bp, Homo sapiens
acaaagtgggcactg

SEQ ID NO: 1548250 - DNA, 15 bp, Homo sapiens
caaagtgggcactgc

SEQ ID NO: 1548251 - DNA, 15 bp, Homo sapiens
aaagtgggcactgcc

SEQ ID NO: 1548252 - DNA, 15 bp, Homo sapiens
aagtgggcactgccc

SEQ ID NO: 1548253 - DNA, 15 bp, Homo sapiens
agtgggcactgccca

SEQ ID NO: 1548254 - DNA, 15 bp, Homo sapiens
gtgggcactgcccag

SEQ ID NO: 1548255 - DNA, 15 bp, Homo sapiens
tgggcactgcccagc

SEQ ID NO: 1548256 - DNA, 15 bp, Homo sapiens
gggcactgcccagct

SEQ ID NO: 1548257 - DNA, 15 bp, Homo sapiens
ggcactgcccagcta

SEQ ID NO: 1548258 - DNA, 15 bp, Homo sapiens
gcactgcccagctac

SEQ ID NO: 1548259 - DNA, 15 bp, Homo sapiens
cactgcccagctact

SEQ ID NO: 1548260 - DNA, 15 bp, Homo sapiens
actgcccagctactt

SEQ ID NO: 1548261 - DNA, 15 bp, Homo sapiens
ctgcccagctacttg

SEQ ID NO: 1548262 - DNA, 15 bp, Homo sapiens
tgcccagctacttgg

SEQ ID NO: 1548263 - DNA, 15 bp, Homo sapiens
gcccagctacttggg

SEQ ID NO: 1548264 - DNA, 15 bp, Homo sapiens
cccagctacttgggg

SEQ ID NO: 1548265 - DNA, 15 bp, Homo sapiens
ccagctacttggggc

SEQ ID NO: 1548266 - DNA, 15 bp, Homo sapiens
cagctacttggggct

SEQ ID NO: 1548267 - DNA, 15 bp, Homo sapiens
agctacttggggctg

SEQ ID NO: 1548268 - DNA, 15 bp, Homo sapiens
gctacttggggctgt

SEQ ID NO: 1548269 - DNA, 15 bp, Homo sapiens
ctacttggggctgtg

SEQ ID NO: 1548270 - DNA, 15 bp, Homo sapiens
tacttggggctgtgc

SEQ ID NO: 1548271 - DNA, 15 bp, Homo sapiens
acttggggctgtgca

SEQ ID NO: 1548272 - DNA, 15 bp, Homo sapiens
cttggggctgtgcag

SEQ ID NO: 1548273 - DNA, 15 bp, Homo sapiens
ttggggctgtgcaga

SEQ ID NO: 1548274 - DNA, 15 bp, Homo sapiens
tggggctgtgcagag

SEQ ID NO: 1548275 - DNA, 15 bp, Homo sapiens
ggggctgtgcagaga

SEQ ID NO: 1548276 - DNA, 15 bp, Homo sapiens
gggctgtgcagagaa

SEQ ID NO: 1548277 - DNA, 15 bp, Homo sapiens
ggctgtgcagagaag

SEQ ID NO: 1548278 - DNA, 15 bp, Homo sapiens
gctgtgcagagaaga

SEQ ID NO: 1548279 - DNA, 15 bp, Homo sapiens
ctgtgcagagaagag

SEQ ID NO: 1548280 - DNA, 15 bp, Homo sapiens
tgtgcagagaagagg

SEQ ID NO: 1548281 - DNA, 15 bp, Homo sapiens
gtgcagagaagaggc

SEQ ID NO: 1548282 - DNA, 15 bp, Homo sapiens
tgcagagaagaggct

SEQ ID NO: 1548283 - DNA, 15 bp, Homo sapiens
gcagagaagaggctg

SEQ ID NO: 1548284 - DNA, 15 bp, Homo sapiens
cagagaagaggctgc

SEQ ID NO: 1548285 - DNA, 15 bp, Homo sapiens
agagaagaggctgct

SEQ ID NO: 1548286 - DNA, 15 bp, Homo sapiens
gagaagaggctgctt

SEQ ID NO: 1548287 - DNA, 15 bp, Homo sapiens
agaagaggctgcttg

SEQ ID NO: 1548288 - DNA, 15 bp, Homo sapiens
gaagaggctgcttgc

SEQ ID NO: 1548289 - DNA, 15 bp, Homo sapiens
aagaggctgcttgct

SEQ ID NO: 1548290 - DNA, 15 bp, Homo sapiens
agaggctgcttgctg

SEQ ID NO: 1548291 - DNA, 15 bp, Homo sapiens
gaggctgcttgctgg

SEQ ID NO: 1548292 - DNA, 15 bp, Homo sapiens
aggctgcttgctggg

SEQ ID NO: 1548293 - DNA, 15 bp, Homo sapiens
ggctgcttgctgggc

SEQ ID NO: 1548294 - DNA, 15 bp, Homo sapiens
gctgcttgctgggca

SEQ ID NO: 1548295 - DNA, 15 bp, Homo sapiens
ctgcttgctgggcac

SEQ ID NO: 1548296 - DNA, 15 bp, Homo sapiens
tgcttgctgggcact

SEQ ID NO: 1548297 - DNA, 15 bp, Homo sapiens
gcttgctgggcactc

SEQ ID NO: 1548298 - DNA, 15 bp, Homo sapiens
cttgctgggcactca

SEQ ID NO: 1548299 - DNA, 15 bp, Homo sapiens
ttgctgggcactcag

SEQ ID NO: 1548300 - DNA, 15 bp, Homo sapiens
tgctgggcactcagc

SEQ ID NO: 1548301 - DNA, 15 bp, Homo sapiens
gctgggcactcagca

SEQ ID NO: 1548302 - DNA, 15 bp, Homo sapiens
ctgggcactcagcaa

SEQ ID NO: 1548303 - DNA, 15 bp, Homo sapiens
tgggcactcagcaaa

SEQ ID NO: 1548304 - DNA, 15 bp, Homo sapiens
gggcactcagcaaac

SEQ ID NO: 1548305 - DNA, 15 bp, Homo sapiens
ggcactcagcaaact

SEQ ID NO: 1548306 - DNA, 15 bp, Homo sapiens
gcactcagcaaactc

SEQ ID NO: 1548307 - DNA, 15 bp, Homo sapiens
cactcagcaaactct

SEQ ID NO: 1548308 - DNA, 15 bp, Homo sapiens
actcagcaaactctg

SEQ ID NO: 1548309 - DNA, 15 bp, Homo sapiens
ctcagcaaactctgc

SEQ ID NO: 1548310 - DNA, 15 bp, Homo sapiens
tcagcaaactctgcc

SEQ ID NO: 1548311 - DNA, 15 bp, Homo sapiens
cagcaaactctgccc

SEQ ID NO: 1548312 - DNA, 15 bp, Homo sapiens
agcaaactctgccca

SEQ ID NO: 1548313 - DNA, 15 bp, Homo sapiens
gcaaactctgcccaa

SEQ ID NO: 1548314 - DNA, 15 bp, Homo sapiens
caaactctgcccaac

SEQ ID NO: 1548315 - DNA, 15 bp, Homo sapiens
aaactctgcccaaca

SEQ ID NO: 1548316 - DNA, 15 bp, Homo sapiens
aactctgcccaacag

SEQ ID NO: 1548317 - DNA, 15 bp, Homo sapiens
actctgcccaacagc

SEQ ID NO: 1548318 - DNA, 15 bp, Homo sapiens
ctctgcccaacagcc

SEQ ID NO: 1548319 - DNA, 15 bp, Homo sapiens
tctgcccaacagccc

SEQ ID NO: 1548320 - DNA, 15 bp, Homo sapiens
ctgcccaacagccca

SEQ ID NO: 1548321 - DNA, 15 bp, Homo sapiens
tgcccaacagcccag

SEQ ID NO: 1548322 - DNA, 15 bp, Homo sapiens
gcccaacagcccagc

SEQ ID NO: 1548323 - DNA, 15 bp, Homo sapiens
cccaacagcccagcg

SEQ ID NO: 1548324 - DNA, 15 bp, Homo sapiens
ccaacagcccagcgg

SEQ ID NO: 1548325 - DNA, 15 bp, Homo sapiens
caacagcccagcggg

SEQ ID NO: 1548326 - DNA, 15 bp, Homo sapiens
aacagcccagcgggt

SEQ ID NO: 1548327 - DNA, 15 bp, Homo sapiens
acagcccagcgggtg

SEQ ID NO: 1548328 - DNA, 15 bp, Homo sapiens
cagcccagcgggtgg

SEQ ID NO: 1548329 - DNA, 15 bp, Homo sapiens
agcccagcgggtggg

SEQ ID NO: 1548330 - DNA, 15 bp, Homo sapiens
gcccagcgggtgggc

SEQ ID NO: 1548331 - DNA, 15 bp, Homo sapiens
cccagcgggtgggca

SEQ ID NO: 1548332 - DNA, 15 bp, Homo sapiens
ccagcgggtgggcag

SEQ ID NO: 1548333 - DNA, 15 bp, Homo sapiens
cagcgggtgggcagc

SEQ ID NO: 1548334 - DNA, 15 bp, Homo sapiens
agcgggtgggcagca

SEQ ID NO: 1548335 - DNA, 15 bp, Homo sapiens
gcgggtgggcagcag

SEQ ID NO: 1548336 - DNA, 15 bp, Homo sapiens
cgggtgggcagcagc

SEQ ID NO: 1548337 - DNA, 15 bp, Homo sapiens
gggtgggcagcagcc

SEQ ID NO: 1548338 - DNA, 15 bp, Homo sapiens
ggtgggcagcagccc

SEQ ID NO: 1548339 - DNA, 15 bp, Homo sapiens
gtgggcagcagccct

SEQ ID NO: 1548340 - DNA, 15 bp, Homo sapiens
tgggcagcagccctg

SEQ ID NO: 1548341 - DNA, 15 bp, Homo sapiens
gggcagcagccctgg

SEQ ID NO: 1548342 - DNA, 15 bp, Homo sapiens
ggcagcagccctggg

SEQ ID NO: 1548343 - DNA, 15 bp, Homo sapiens
gcagcagccctggga

SEQ ID NO: 1548344 - DNA, 15 bp, Homo sapiens
cagcagccctgggac

SEQ ID NO: 1548345 - DNA, 15 bp, Homo sapiens
agcagccctgggacc

SEQ ID NO: 1548346 - DNA, 15 bp, Homo sapiens
gcagccctgggaccc

SEQ ID NO: 1548347 - DNA, 15 bp, Homo sapiens
cagccctgggacccc

SEQ ID NO: 1548348 - DNA, 15 bp, Homo sapiens
agccctgggaccccc

SEQ ID NO: 1548349 - DNA, 15 bp, Homo sapiens
gccctgggaccccca

SEQ ID NO: 1548350 - DNA, 15 bp, Homo sapiens
ccctgggacccccac

SEQ ID NO: 1548351 - DNA, 15 bp, Homo sapiens
cctgggacccccaca

SEQ ID NO: 1548352 - DNA, 15 bp, Homo sapiens
ctgggacccccacac

SEQ ID NO: 1548353 - DNA, 15 bp, Homo sapiens
tgggacccccacacc

SEQ ID NO: 1548354 - DNA, 15 bp, Homo sapiens
gggacccccacaccc

SEQ ID NO: 1548355 - DNA, 15 bp, Homo sapiens
ggacccccacaccca

SEQ ID NO: 1548356 - DNA, 15 bp, Homo sapiens
gacccccacacccaa

SEQ ID NO: 1548357 - DNA, 15 bp, Homo sapiens
acccccacacccaac

SEQ ID NO: 1548358 - DNA, 15 bp, Homo sapiens
cccccacacccaacc

SEQ ID NO: 1548359 - DNA, 15 bp, Homo sapiens
ccccacacccaacca

SEQ ID NO: 1548360 - DNA, 15 bp, Homo sapiens
cccacacccaaccac

SEQ ID NO: 1548361 - DNA, 15 bp, Homo sapiens
ccacacccaaccaca

SEQ ID NO: 1548362 - DNA, 15 bp, Homo sapiens
cacacccaaccacac

SEQ ID NO: 1548363 - DNA, 15 bp, Homo sapiens
acacccaaccacaca

SEQ ID NO: 1548364 - DNA, 15 bp, Homo sapiens
cacccaaccacacag

SEQ ID NO: 1548365 - DNA, 15 bp, Homo sapiens
acccaaccacacagc

SEQ ID NO: 1548366 - DNA, 15 bp, Homo sapiens
cccaaccacacagcc

SEQ ID NO: 1548367 - DNA, 15 bp, Homo sapiens
ccaaccacacagcct

SEQ ID NO: 1548368 - DNA, 15 bp, Homo sapiens
caaccacacagcctc

SEQ ID NO: 1548369 - DNA, 15 bp, Homo sapiens
aaccacacagcctcc

SEQ ID NO: 1548370 - DNA, 15 bp, Homo sapiens
accacacagcctccc

SEQ ID NO: 1548371 - DNA, 15 bp, Homo sapiens
ccacacagcctcccc

SEQ ID NO: 1548372 - DNA, 15 bp, Homo sapiens
cacacagcctcccct

SEQ ID NO: 1548373 - DNA, 15 bp, Homo sapiens
acacagcctcccctg

SEQ ID NO: 1548374 - DNA, 15 bp, Homo sapiens
cacagcctcccctgg

SEQ ID NO: 1548375 - DNA, 15 bp, Homo sapiens
acagcctcccctggc

SEQ ID NO: 1548376 - DNA, 15 bp, Homo sapiens
cagcctcccctggcc

SEQ ID NO: 1548377 - DNA, 15 bp, Homo sapiens
agcctcccctggccc

SEQ ID NO: 1548378 - DNA, 15 bp, Homo sapiens
gcctcccctggccca

SEQ ID NO: 1548379 - DNA, 15 bp, Homo sapiens
cctcccctggcccac

SEQ ID NO: 1548380 - DNA, 15 bp, Homo sapiens
ctcccctggcccact

SEQ ID NO: 1548381 - DNA, 15 bp, Homo sapiens
tcccctggcccactg

SEQ ID NO: 1548382 - DNA, 15 bp, Homo sapiens
cccctggcccactgc

SEQ ID NO: 1548383 - DNA, 15 bp, Homo sapiens
ccctggcccactgct

SEQ ID NO: 1548384 - DNA, 15 bp, Homo sapiens
cctggcccactgctc

SEQ ID NO: 1548385 - DNA, 15 bp, Homo sapiens
ctggcccactgctcg

SEQ ID NO: 1548386 - DNA, 15 bp, Homo sapiens
tggcccactgctcgc

SEQ ID NO: 1548387 - DNA, 15 bp, Homo sapiens
ggcccactgctcgca

SEQ ID NO: 1548388 - DNA, 15 bp, Homo sapiens
gcccactgctcgcac

SEQ ID NO: 1548389 - DNA, 15 bp, Homo sapiens
cccactgctcgcacc

SEQ ID NO: 1548390 - DNA, 15 bp, Homo sapiens
ccactgctcgcaccc

SEQ ID NO: 1548391 - DNA, 15 bp, Homo sapiens
cactgctcgcacccc

SEQ ID NO: 1548392 - DNA, 15 bp, Homo sapiens
actgctcgcacccca

SEQ ID NO: 1548393 - DNA, 15 bp, Homo sapiens
ctgctcgcaccccat

SEQ ID NO: 1548394 - DNA, 15 bp, Homo sapiens
tgctcgcaccccatc

SEQ ID NO: 1548395 - DNA, 15 bp, Homo sapiens
gctcgcaccccatct

SEQ ID NO: 1548396 - DNA, 15 bp, Homo sapiens
ctcgcaccccatctc

SEQ ID NO: 1548397 - DNA, 15 bp, Homo sapiens
tcgcaccccatctca

SEQ ID NO: 1548398 - DNA, 15 bp, Homo sapiens
cgcaccccatctcaa

SEQ ID NO: 1548399 - DNA, 15 bp, Homo sapiens
gcaccccatctcaat

SEQ ID NO: 1548400 - DNA, 15 bp, Homo sapiens
caccccatctcaata

SEQ ID NO: 1548401 - DNA, 15 bp, Homo sapiens
accccatctcaatac

SEQ ID NO: 1548402 - DNA, 15 bp, Homo sapiens
ccccatctcaataca

SEQ ID NO: 1548403 - DNA, 15 bp, Homo sapiens
cccatctcaatacac

SEQ ID NO: 1548404 - DNA, 15 bp, Homo sapiens
ccatctcaatacact

SEQ ID NO: 1548405 - DNA, 15 bp, Homo sapiens
catctcaatacactg

SEQ ID NO: 1548406 - DNA, 15 bp, Homo sapiens
atctcaatacactgg

SEQ ID NO: 1548407 - DNA, 15 bp, Homo sapiens
tctcaatacactggc

SEQ ID NO: 1548408 - DNA, 15 bp, Homo sapiens
ctcaatacactggct

SEQ ID NO: 1548409 - DNA, 15 bp, Homo sapiens
tcaatacactggctt

SEQ ID NO: 1548410 - DNA, 15 bp, Homo sapiens
caatacactggcttg

SEQ ID NO: 1548411 - DNA, 15 bp, Homo sapiens
aatacactggcttgg

SEQ ID NO: 1548412 - DNA, 15 bp, Homo sapiens
atacactggcttggg

SEQ ID NO: 1548413 - DNA, 15 bp, Homo sapiens
tacactggcttgggt

SEQ ID NO: 1548414 - DNA, 15 bp, Homo sapiens
acactggcttgggtg

SEQ ID NO: 1548415 - DNA, 15 bp, Homo sapiens
cactggcttgggtgc

SEQ ID NO: 1548416 - DNA, 15 bp, Homo sapiens
actggcttgggtgcc

SEQ ID NO: 1548417 - DNA, 15 bp, Homo sapiens
ctggcttgggtgcct

SEQ ID NO: 1548418 - DNA, 15 bp, Homo sapiens
tggcttgggtgcctc

SEQ ID NO: 1548419 - DNA, 15 bp, Homo sapiens
ggcttgggtgcctcc

SEQ ID NO: 1548420 - DNA, 15 bp, Homo sapiens
gcttgggtgcctccc

SEQ ID NO: 1548421 - DNA, 15 bp, Homo sapiens
cttgggtgcctccct

SEQ ID NO: 1548422 - DNA, 15 bp, Homo sapiens
ttgggtgcctccctg

SEQ ID NO: 1548423 - DNA, 15 bp, Homo sapiens
tgggtgcctccctgc

SEQ ID NO: 1548424 - DNA, 15 bp, Homo sapiens
gggtgcctccctgca

SEQ ID NO: 1548425 - DNA, 15 bp, Homo sapiens
ggtgcctccctgcat

SEQ ID NO: 1548426 - DNA, 15 bp, Homo sapiens
gtgcctccctgcatg

SEQ ID NO: 1548427 - DNA, 15 bp, Homo sapiens
tgcctccctgcatgg

SEQ ID NO: 1548428 - DNA, 15 bp, Homo sapiens
gcctccctgcatggg

SEQ ID NO: 1548429 - DNA, 15 bp, Homo sapiens
cctccctgcatgggc

SEQ ID NO: 1548430 - DNA, 15 bp, Homo sapiens
ctccctgcatgggcc

SEQ ID NO: 1548431 - DNA, 15 bp, Homo sapiens
tccctgcatgggccc

SEQ ID NO: 1548432 - DNA, 15 bp, Homo sapiens
ccctgcatgggccct

SEQ ID NO: 1548433 - DNA, 15 bp, Homo sapiens
cctgcatgggccctt

SEQ ID NO: 1548434 - DNA, 15 bp, Homo sapiens
ctgcatgggcccttt

SEQ ID NO: 1548435 - DNA, 15 bp, Homo sapiens
tgcatgggccctttg

SEQ ID NO: 1548436 - DNA, 15 bp, Homo sapiens
gcatgggccctttgt

SEQ ID NO: 1548437 - DNA, 15 bp, Homo sapiens
catgggccctttgtg

SEQ ID NO: 1548438 - DNA, 15 bp, Homo sapiens
atgggccctttgtga

SEQ ID NO: 1548439 - DNA, 15 bp, Homo sapiens
tgggccctttgtgaa

SEQ ID NO: 1548440 - DNA, 15 bp, Homo sapiens
gggccctttgtgaaa

SEQ ID NO: 1548441 - DNA, 15 bp, Homo sapiens
ggccctttgtgaaag

SEQ ID NO: 1548442 - DNA, 15 bp, Homo sapiens
gccctttgtgaaagg

SEQ ID NO: 1548443 - DNA, 15 bp, Homo sapiens
ccctttgtgaaaggc

SEQ ID NO: 1548444 - DNA, 15 bp, Homo sapiens
cctttgtgaaaggca

SEQ ID NO: 1548445 - DNA, 15 bp, Homo sapiens
ctttgtgaaaggcag

SEQ ID NO: 1548446 - DNA, 15 bp, Homo sapiens
tttgtgaaaggcaga

SEQ ID NO: 1548447 - DNA, 15 bp, Homo sapiens
ttgtgaaaggcagag

SEQ ID NO: 1548448 - DNA, 15 bp, Homo sapiens
tgtgaaaggcagaga

SEQ ID NO: 1548449 - DNA, 15 bp, Homo sapiens
gtgaaaggcagagag

SEQ ID NO: 1548450 - DNA, 15 bp, Homo sapiens
tgaaaggcagagagg

SEQ ID NO: 1548451 - DNA, 15 bp, Homo sapiens
gaaaggcagagaggt

SEQ ID NO: 1548452 - DNA, 15 bp, Homo sapiens
aaaggcagagaggta

SEQ ID NO: 1548453 - DNA, 15 bp, Homo sapiens
aaggcagagaggtac

SEQ ID NO: 1548454 - DNA, 15 bp, Homo sapiens
aggcagagaggtacc

SEQ ID NO: 1548455 - DNA, 15 bp, Homo sapiens
ggcagagaggtaccc

SEQ ID NO: 1548456 - DNA, 15 bp, Homo sapiens
gcagagaggtaccca

SEQ ID NO: 1548457 - DNA, 15 bp, Homo sapiens
cagagaggtacccat

SEQ ID NO: 1548458 - DNA, 15 bp, Homo sapiens
agagaggtacccatt

SEQ ID NO: 1548459 - DNA, 15 bp, Homo sapiens
gagaggtacccattt

SEQ ID NO: 1548460 - DNA, 15 bp, Homo sapiens
agaggtacccatttg

SEQ ID NO: 1548461 - DNA, 15 bp, Homo sapiens
gaggtacccatttga

SEQ ID NO: 1548462 - DNA, 15 bp, Homo sapiens
aggtacccatttgaa

SEQ ID NO: 1548463 - DNA, 15 bp, Homo sapiens
ggtacccatttgaaa

SEQ ID NO: 1548464 - DNA, 15 bp, Homo sapiens
gtacccatttgaaac

SEQ ID NO: 1548465 - DNA, 15 bp, Homo sapiens
tacccatttgaaaca

SEQ ID NO: 1548466 - DNA, 15 bp, Homo sapiens
acccatttgaaacac

SEQ ID NO: 1548467 - DNA, 15 bp, Homo sapiens
cccatttgaaacaca

SEQ ID NO: 1548468 - DNA, 15 bp, Homo sapiens
ccatttgaaacacaa

SEQ ID NO: 1548469 - DNA, 15 bp, Homo sapiens
catttgaaacacaac

SEQ ID NO: 1548470 - DNA, 15 bp, Homo sapiens
atttgaaacacaacc

SEQ ID NO: 1548471 - DNA, 15 bp, Homo sapiens
tttgaaacacaacca

SEQ ID NO: 1548472 - DNA, 15 bp, Homo sapiens
ttgaaacacaaccag

SEQ ID NO: 1548473 - DNA, 15 bp, Homo sapiens
tgaaacacaaccagc

SEQ ID NO: 1548474 - DNA, 15 bp, Homo sapiens
gaaacacaaccagct

SEQ ID NO: 1548475 - DNA, 15 bp, Homo sapiens
aaacacaaccagctt

SEQ ID NO: 1548476 - DNA, 15 bp, Homo sapiens
aacacaaccagcttc

SEQ ID NO: 1548477 - DNA, 15 bp, Homo sapiens
acacaaccagcttct

SEQ ID NO: 1548478 - DNA, 15 bp, Homo sapiens
cacaaccagcttctc

SEQ ID NO: 1548479 - DNA, 15 bp, Homo sapiens
acaaccagcttctca

SEQ ID NO: 1548480 - DNA, 15 bp, Homo sapiens
caaccagcttctcat

SEQ ID NO: 1548481 - DNA, 15 bp, Homo sapiens
aaccagcttctcatt

SEQ ID NO: 1548482 - DNA, 15 bp, Homo sapiens
accagcttctcattg

SEQ ID NO: 1548483 - DNA, 15 bp, Homo sapiens
ccagcttctcattgc

SEQ ID NO: 1548484 - DNA, 15 bp, Homo sapiens
cagcttctcattgca

SEQ ID NO: 1548485 - DNA, 15 bp, Homo sapiens
agcttctcattgcaa

SEQ ID NO: 1548486 - DNA, 15 bp, Homo sapiens
gcttctcattgcaaa

SEQ ID NO: 1548487 - DNA, 15 bp, Homo sapiens
cttctcattgcaaat

SEQ ID NO: 1548488 - DNA, 15 bp, Homo sapiens
ttctcattgcaaata

SEQ ID NO: 1548489 - DNA, 15 bp, Homo sapiens
tctcattgcaaatac

SEQ ID NO: 1548490 - DNA, 15 bp, Homo sapiens
ctcattgcaaataca

SEQ ID NO: 1548491 - DNA, 15 bp, Homo sapiens
tcattgcaaatacag

SEQ ID NO: 1548492 - DNA, 15 bp, Homo sapiens
cattgcaaatacagg

SEQ ID NO: 1548493 - DNA, 15 bp, Homo sapiens
attgcaaatacaggc

SEQ ID NO: 1548494 - DNA, 15 bp, Homo sapiens
ttgcaaatacaggca

SEQ ID NO: 1548495 - DNA, 15 bp, Homo sapiens
tgcaaatacaggcaa

SEQ ID NO: 1548496 - DNA, 15 bp, Homo sapiens
gcaaatacaggcaag

SEQ ID NO: 1548497 - DNA, 15 bp, Homo sapiens
caaatacaggcaagg

SEQ ID NO: 1548498 - DNA, 15 bp, Homo sapiens
aaatacaggcaaggc

SEQ ID NO: 1548499 - DNA, 15 bp, Homo sapiens
aatacaggcaaggca

SEQ ID NO: 1548500 - DNA, 15 bp, Homo sapiens
atacaggcaaggcac

SEQ ID NO: 1548501 - DNA, 15 bp, Homo sapiens
tacaggcaaggcact

SEQ ID NO: 1548502 - DNA, 15 bp, Homo sapiens
acaggcaaggcacta

SEQ ID NO: 1548503 - DNA, 15 bp, Homo sapiens
caggcaaggcactaa

SEQ ID NO: 1548504 - DNA, 15 bp, Homo sapiens
aggcaaggcactaag

SEQ ID NO: 1548505 - DNA, 15 bp, Homo sapiens
ggcaaggcactaaga

SEQ ID NO: 1548506 - DNA, 15 bp, Homo sapiens
gcaaggcactaagac

SEQ ID NO: 1548507 - DNA, 15 bp, Homo sapiens
caaggcactaagaca

SEQ ID NO: 1548508 - DNA, 15 bp, Homo sapiens
aaggcactaagacat

SEQ ID NO: 1548509 - DNA, 15 bp, Homo sapiens
aggcactaagacatg

SEQ ID NO: 1548510 - DNA, 15 bp, Homo sapiens
ggcactaagacatga

SEQ ID NO: 1548511 - DNA, 15 bp, Homo sapiens
gcactaagacatgag

SEQ ID NO: 1548512 - DNA, 15 bp, Homo sapiens
cactaagacatgagg

SEQ ID NO: 1548513 - DNA, 15 bp, Homo sapiens
actaagacatgagga

SEQ ID NO: 1548514 - DNA, 15 bp, Homo sapiens
ctaagacatgaggaa

SEQ ID NO: 1548515 - DNA, 15 bp, Homo sapiens
taagacatgaggaac

SEQ ID NO: 1548516 - DNA, 15 bp, Homo sapiens
aagacatgaggaaca

SEQ ID NO: 1548517 - DNA, 15 bp, Homo sapiens
agacatgaggaacat

SEQ ID NO: 1548518 - DNA, 15 bp, Homo sapiens
gacatgaggaacatg

SEQ ID NO: 1548519 - DNA, 15 bp, Homo sapiens
acatgaggaacatgg

SEQ ID NO: 1548520 - DNA, 15 bp, Homo sapiens
catgaggaacatgga

SEQ ID NO: 1548521 - DNA, 15 bp, Homo sapiens
atgaggaacatggac

SEQ ID NO: 1548522 - DNA, 15 bp, Homo sapiens
tgaggaacatggaca

SEQ ID NO: 1548523 - DNA, 15 bp, Homo sapiens
gaggaacatggacac

SEQ ID NO: 1548524 - DNA, 15 bp, Homo sapiens
aggaacatggacacc

SEQ ID NO: 1548525 - DNA, 15 bp, Homo sapiens
ggaacatggacacca

SEQ ID NO: 1548526 - DNA, 15 bp, Homo sapiens
gaacatggacaccaa

SEQ ID NO: 1548527 - DNA, 15 bp, Homo sapiens
aacatggacaccaaa

SEQ ID NO: 1548528 - DNA, 15 bp, Homo sapiens
acatggacaccaaag

SEQ ID NO: 1548529 - DNA, 15 bp, Homo sapiens
catggacaccaaagc

SEQ ID NO: 1548530 - DNA, 15 bp, Homo sapiens
atggacaccaaagca

SEQ ID NO: 1548531 - DNA, 15 bp, Homo sapiens
tggacaccaaagcag

SEQ ID NO: 1548532 - DNA, 15 bp, Homo sapiens
ggacaccaaagcagg

SEQ ID NO: 1548533 - DNA, 15 bp, Homo sapiens
gacaccaaagcaggg

SEQ ID NO: 1548534 - DNA, 15 bp, Homo sapiens
acaccaaagcagggg

SEQ ID NO: 1548535 - DNA, 15 bp, Homo sapiens
caccaaagcaggggc

SEQ ID NO: 1548536 - DNA, 15 bp, Homo sapiens
accaaagcaggggcc

SEQ ID NO: 1548537 - DNA, 15 bp, Homo sapiens
ccaaagcaggggcca

SEQ ID NO: 1548538 - DNA, 15 bp, Homo sapiens
caaagcaggggccag

SEQ ID NO: 1548539 - DNA, 15 bp, Homo sapiens
aaagcaggggccagg

SEQ ID NO: 1548540 - DNA, 15 bp, Homo sapiens
aagcaggggccaggt

SEQ ID NO: 1548541 - DNA, 15 bp, Homo sapiens
agcaggggccaggta

SEQ ID NO: 1548542 - DNA, 15 bp, Homo sapiens
gcaggggccaggtaa

SEQ ID NO: 1548543 - DNA, 15 bp, Homo sapiens
caggggccaggtaac

SEQ ID NO: 1548544 - DNA, 15 bp, Homo sapiens
aggggccaggtaaca

SEQ ID NO: 1548545 - DNA, 15 bp, Homo sapiens
ggggccaggtaacat

SEQ ID NO: 1548546 - DNA, 15 bp, Homo sapiens
gggccaggtaacatg

SEQ ID NO: 1548547 - DNA, 15 bp, Homo sapiens
ggccaggtaacatgc

SEQ ID NO: 1548548 - DNA, 15 bp, Homo sapiens
gccaggtaacatgca

SEQ ID NO: 1548549 - DNA, 15 bp, Homo sapiens
ccaggtaacatgcaa

SEQ ID NO: 1548550 - DNA, 15 bp, Homo sapiens
caggtaacatgcaaa

SEQ ID NO: 1548551 - DNA, 15 bp, Homo sapiens
aggtaacatgcaaat

SEQ ID NO: 1548552 - DNA, 15 bp, Homo sapiens
ggtaacatgcaaatt

SEQ ID NO: 1548553 - DNA, 15 bp, Homo sapiens
gtaacatgcaaattt

SEQ ID NO: 1548554 - DNA, 15 bp, Homo sapiens
taacatgcaaatttc

SEQ ID NO: 1548555 - DNA, 15 bp, Homo sapiens
aacatgcaaatttct

SEQ ID NO: 1548556 - DNA, 15 bp, Homo sapiens
acatgcaaatttcta

SEQ ID NO: 1548557 - DNA, 15 bp, Homo sapiens
catgcaaatttctag

SEQ ID NO: 1548558 - DNA, 15 bp, Homo sapiens
atgcaaatttctaga

SEQ ID NO: 1548559 - DNA, 15 bp, Homo sapiens
tgcaaatttctagag

SEQ ID NO: 1548560 - DNA, 15 bp, Homo sapiens
gcaaatttctagagg

SEQ ID NO: 1548561 - DNA, 15 bp, Homo sapiens
caaatttctagagga

SEQ ID NO: 1548562 - DNA, 15 bp, Homo sapiens
aaatttctagaggaa

SEQ ID NO: 1548563 - DNA, 15 bp, Homo sapiens
aatttctagaggaaa

SEQ ID NO: 1548564 - DNA, 15 bp, Homo sapiens
atttctagaggaaat

SEQ ID NO: 1548565 - DNA, 15 bp, Homo sapiens
tttctagaggaaatg

SEQ ID NO: 1548566 - DNA, 15 bp, Homo sapiens
ttctagaggaaatgc

SEQ ID NO: 1548567 - DNA, 15 bp, Homo sapiens
tctagaggaaatgcc

SEQ ID NO: 1548568 - DNA, 15 bp, Homo sapiens
ctagaggaaatgccc

SEQ ID NO: 1548569 - DNA, 15 bp, Homo sapiens
tagaggaaatgccca

SEQ ID NO: 1548570 - DNA, 15 bp, Homo sapiens
agaggaaatgcccag

SEQ ID NO: 1548571 - DNA, 15 bp, Homo sapiens
gaggaaatgcccaga

SEQ ID NO: 1548572 - DNA, 15 bp, Homo sapiens
aggaaatgcccagaa

SEQ ID NO: 1548573 - DNA, 15 bp, Homo sapiens
ggaaatgcccagaac

SEQ ID NO: 1548574 - DNA, 15 bp, Homo sapiens
gaaatgcccagaacc

SEQ ID NO: 1548575 - DNA, 15 bp, Homo sapiens
aaatgcccagaacct

SEQ ID NO: 1548576 - DNA, 15 bp, Homo sapiens
aatgcccagaacctg

SEQ ID NO: 1548577 - DNA, 15 bp, Homo sapiens
atgcccagaacctgg

SEQ ID NO: 1548578 - DNA, 15 bp, Homo sapiens
tgcccagaacctggc

SEQ ID NO: 1548579 - DNA, 15 bp, Homo sapiens
gcccagaacctggca

SEQ ID NO: 1548580 - DNA, 15 bp, Homo sapiens
cccagaacctggcat

SEQ ID NO: 1548581 - DNA, 15 bp, Homo sapiens
ccagaacctggcatc

SEQ ID NO: 1548582 - DNA, 15 bp, Homo sapiens
cagaacctggcatca

SEQ ID NO: 1548583 - DNA, 15 bp, Homo sapiens
agaacctggcatcat

SEQ ID NO: 1548584 - DNA, 15 bp, Homo sapiens
gaacctggcatcatg

SEQ ID NO: 1548585 - DNA, 15 bp, Homo sapiens
aacctggcatcatgc

SEQ ID NO: 1548586 - DNA, 15 bp, Homo sapiens
acctggcatcatgcc

SEQ ID NO: 1548587 - DNA, 15 bp, Homo sapiens
cctggcatcatgcct

SEQ ID NO: 1548588 - DNA, 15 bp, Homo sapiens
ctggcatcatgcctc

SEQ ID NO: 1548589 - DNA, 15 bp, Homo sapiens
tggcatcatgcctcc

SEQ ID NO: 1548590 - DNA, 15 bp, Homo sapiens
ggcatcatgcctcct

SEQ ID NO: 1548591 - DNA, 15 bp, Homo sapiens
gcatcatgcctcctg

SEQ ID NO: 1548592 - DNA, 15 bp, Homo sapiens
catcatgcctcctga

SEQ ID NO: 1548593 - DNA, 15 bp, Homo sapiens
atcatgcctcctgag

SEQ ID NO: 1548594 - DNA, 15 bp, Homo sapiens
tcatgcctcctgagc

SEQ ID NO: 1548595 - DNA, 15 bp, Homo sapiens
catgcctcctgagcc

SEQ ID NO: 1548596 - DNA, 15 bp, Homo sapiens
atgcctcctgagccc

SEQ ID NO: 1548597 - DNA, 15 bp, Homo sapiens
tgcctcctgagcccc

SEQ ID NO: 1548598 - DNA, 15 bp, Homo sapiens
gcctcctgagcccct

SEQ ID NO: 1548599 - DNA, 15 bp, Homo sapiens
cctcctgagcccctc

SEQ ID NO: 1548600 - DNA, 15 bp, Homo sapiens
ctcctgagcccctca

SEQ ID NO: 1548601 - DNA, 15 bp, Homo sapiens
tcctgagcccctcat

SEQ ID NO: 1548602 - DNA, 15 bp, Homo sapiens
cctgagcccctcatg

SEQ ID NO: 1548603 - DNA, 15 bp, Homo sapiens
ctgagcccctcatgc

SEQ ID NO: 1548604 - DNA, 15 bp, Homo sapiens
tgagcccctcatgcg

SEQ ID NO: 1548605 - DNA, 15 bp, Homo sapiens
gagcccctcatgcgc

SEQ ID NO: 1548606 - DNA, 15 bp, Homo sapiens
agcccctcatgcgcc

SEQ ID NO: 1548607 - DNA, 15 bp, Homo sapiens
gcccctcatgcgccg

SEQ ID NO: 1548608 - DNA, 15 bp, Homo sapiens
cccctcatgcgccgt

SEQ ID NO: 1548609 - DNA, 15 bp, Homo sapiens
ccctcatgcgccgtg

SEQ ID NO: 1548610 - DNA, 15 bp, Homo sapiens
cctcatgcgccgtga

SEQ ID NO: 1548611 - DNA, 15 bp, Homo sapiens
ctcatgcgccgtgag

SEQ ID NO: 1548612 - DNA, 15 bp, Homo sapiens
tcatgcgccgtgagg

SEQ ID NO: 1548613 - DNA, 15 bp, Homo sapiens
catgcgccgtgaggg

SEQ ID NO: 1548614 - DNA, 15 bp, Homo sapiens
atgcgccgtgagggg

SEQ ID NO: 1548615 - DNA, 15 bp, Homo sapiens
tgcgccgtgaggggt

SEQ ID NO: 1548616 - DNA, 15 bp, Homo sapiens
gcgccgtgaggggta

SEQ ID NO: 1548617 - DNA, 15 bp, Homo sapiens
cgccgtgaggggtaa

SEQ ID NO: 1548618 - DNA, 15 bp, Homo sapiens
gccgtgaggggtaag

SEQ ID NO: 1548619 - DNA, 15 bp, Homo sapiens
ccgtgaggggtaaga

SEQ ID NO: 1548620 - DNA, 15 bp, Homo sapiens
cgtgaggggtaagag

SEQ ID NO: 1548621 - DNA, 15 bp, Homo sapiens
gtgaggggtaagagg

SEQ ID NO: 1548622 - DNA, 15 bp, Homo sapiens
tgaggggtaagaggg

SEQ ID NO: 1548623 - DNA, 15 bp, Homo sapiens
gaggggtaagagggt

SEQ ID NO: 1548624 - DNA, 15 bp, Homo sapiens
aggggtaagagggtc

SEQ ID NO: 1548625 - DNA, 15 bp, Homo sapiens
ggggtaagagggtca

SEQ ID NO: 1548626 - DNA, 15 bp, Homo sapiens
gggtaagagggtcag

SEQ ID NO: 1548627 - DNA, 15 bp, Homo sapiens
ggtaagagggtcaga

SEQ ID NO: 1548628 - DNA, 15 bp, Homo sapiens
gtaagagggtcagac

SEQ ID NO: 1548629 - DNA, 15 bp, Homo sapiens
taagagggtcagaca

SEQ ID NO: 1548630 - DNA, 15 bp, Homo sapiens
aagagggtcagacag

SEQ ID NO: 1548631 - DNA, 15 bp, Homo sapiens
agagggtcagacagc

SEQ ID NO: 1548632 - DNA, 15 bp, Homo sapiens
gagggtcagacagct

SEQ ID NO: 1548633 - DNA, 15 bp, Homo sapiens
agggtcagacagctg

SEQ ID NO: 1548634 - DNA, 15 bp, Homo sapiens
gggtcagacagctgg

SEQ ID NO: 1548635 - DNA, 15 bp, Homo sapiens
ggtcagacagctgga

SEQ ID NO: 1548636 - DNA, 15 bp, Homo sapiens
gtcagacagctggag

SEQ ID NO: 1548637 - DNA, 15 bp, Homo sapiens
tcagacagctggagt

SEQ ID NO: 1548638 - DNA, 15 bp, Homo sapiens
cagacagctggagtg

SEQ ID NO: 1548639 - DNA, 15 bp, Homo sapiens
agacagctggagtgt

SEQ ID NO: 1548640 - DNA, 15 bp, Homo sapiens
gacagctggagtgta

SEQ ID NO: 1548641 - DNA, 15 bp, Homo sapiens
acagctggagtgtag

SEQ ID NO: 1548642 - DNA, 15 bp, Homo sapiens
cagctggagtgtagg

SEQ ID NO: 1548643 - DNA, 15 bp, Homo sapiens
agctggagtgtaggg

SEQ ID NO: 1548644 - DNA, 15 bp, Homo sapiens
gctggagtgtaggga

SEQ ID NO: 1548645 - DNA, 15 bp, Homo sapiens
ctggagtgtagggag

SEQ ID NO: 1548646 - DNA, 15 bp, Homo sapiens
tggagtgtagggaga

SEQ ID NO: 1548647 - DNA, 15 bp, Homo sapiens
ggagtgtagggagac

SEQ ID NO: 1548648 - DNA, 15 bp, Homo sapiens
gagtgtagggagacg

SEQ ID NO: 1548649 - DNA, 15 bp, Homo sapiens
agtgtagggagacga

SEQ ID NO: 1548650 - DNA, 15 bp, Homo sapiens
gtgtagggagacgac

SEQ ID NO: 1548651 - DNA, 15 bp, Homo sapiens
tgtagggagacgact

SEQ ID NO: 1548652 - DNA, 15 bp, Homo sapiens
gtagggagacgactt

SEQ ID NO: 1548653 - DNA, 15 bp, Homo sapiens
tagggagacgacttc

SEQ ID NO: 1548654 - DNA, 15 bp, Homo sapiens
agggagacgacttct

SEQ ID NO: 1548655 - DNA, 15 bp, Homo sapiens
gggagacgacttctc

SEQ ID NO: 1548656 - DNA, 15 bp, Homo sapiens
ggagacgacttctca

SEQ ID NO: 1548657 - DNA, 15 bp, Homo sapiens
gagacgacttctcag

SEQ ID NO: 1548658 - DNA, 15 bp, Homo sapiens
agacgacttctcagg

SEQ ID NO: 1548659 - DNA, 15 bp, Homo sapiens
gacgacttctcagga

SEQ ID NO: 1548660 - DNA, 15 bp, Homo sapiens
acgacttctcaggag

SEQ ID NO: 1548661 - DNA, 15 bp, Homo sapiens
cgacttctcaggaga

SEQ ID NO: 1548662 - DNA, 15 bp, Homo sapiens
gacttctcaggagag

SEQ ID NO: 1548663 - DNA, 15 bp, Homo sapiens
acttctcaggagaga

SEQ ID NO: 1548664 - DNA, 15 bp, Homo sapiens
cttctcaggagagaa

SEQ ID NO: 1548665 - DNA, 15 bp, Homo sapiens
ttctcaggagagaat

SEQ ID NO: 1548666 - DNA, 15 bp, Homo sapiens
tctcaggagagaata

SEQ ID NO: 1548667 - DNA, 15 bp, Homo sapiens
ctcaggagagaatag

SEQ ID NO: 1548668 - DNA, 15 bp, Homo sapiens
tcaggagagaatagt

SEQ ID NO: 1548669 - DNA, 15 bp, Homo sapiens
caggagagaatagtt

SEQ ID NO: 1548670 - DNA, 15 bp, Homo sapiens
aggagagaatagtta

SEQ ID NO: 1548671 - DNA, 15 bp, Homo sapiens
ggagagaatagttag

SEQ ID NO: 1548672 - DNA, 15 bp, Homo sapiens
gagagaatagttagt

SEQ ID NO: 1548673 - DNA, 15 bp, Homo sapiens
agagaatagttagtg

SEQ ID NO: 1548674 - DNA, 15 bp, Homo sapiens
gagaatagttagtgc

SEQ ID NO: 1548675 - DNA, 15 bp, Homo sapiens
agaatagttagtgct

SEQ ID NO: 1548676 - DNA, 15 bp, Homo sapiens
gaatagttagtgctc

SEQ ID NO: 1548677 - DNA, 15 bp, Homo sapiens
aatagttagtgctcc

SEQ ID NO: 1548678 - DNA, 15 bp, Homo sapiens
atagttagtgctccc

SEQ ID NO: 1548679 - DNA, 15 bp, Homo sapiens
tagttagtgctcccg

SEQ ID NO: 1548680 - DNA, 15 bp, Homo sapiens
agttagtgctcccgt

SEQ ID NO: 1548681 - DNA, 15 bp, Homo sapiens
gttagtgctcccgtc

SEQ ID NO: 1548682 - DNA, 15 bp, Homo sapiens
ttagtgctcccgtca

SEQ ID NO: 1548683 - DNA, 15 bp, Homo sapiens
tagtgctcccgtcac

SEQ ID NO: 1548684 - DNA, 15 bp, Homo sapiens
agtgctcccgtcacc

SEQ ID NO: 1548685 - DNA, 15 bp, Homo sapiens
gtgctcccgtcaccc

SEQ ID NO: 1548686 - DNA, 15 bp, Homo sapiens
tgctcccgtcaccct

SEQ ID NO: 1548687 - DNA, 15 bp, Homo sapiens
gctcccgtcaccctt

SEQ ID NO: 1548688 - DNA, 15 bp, Homo sapiens
ctcccgtcacccttc

SEQ ID NO: 1548689 - DNA, 15 bp, Homo sapiens
tcccgtcacccttca

SEQ ID NO: 1548690 - DNA, 15 bp, Homo sapiens
cccgtcacccttcat

SEQ ID NO: 1548691 - DNA, 15 bp, Homo sapiens
ccgtcacccttcatc

SEQ ID NO: 1548692 - DNA, 15 bp, Homo sapiens
cgtcacccttcatct

SEQ ID NO: 1548693 - DNA, 15 bp, Homo sapiens
gtcacccttcatctg

SEQ ID NO: 1548694 - DNA, 15 bp, Homo sapiens
tcacccttcatctga

SEQ ID NO: 1548695 - DNA, 15 bp, Homo sapiens
cacccttcatctgag

SEQ ID NO: 1548696 - DNA, 15 bp, Homo sapiens
acccttcatctgaga

SEQ ID NO: 1548697 - DNA, 15 bp, Homo sapiens
cccttcatctgagaa

SEQ ID NO: 1548698 - DNA, 15 bp, Homo sapiens
ccttcatctgagaac

SEQ ID NO: 1548699 - DNA, 15 bp, Homo sapiens
cttcatctgagaacc

SEQ ID NO: 1548700 - DNA, 15 bp, Homo sapiens
ttcatctgagaaccc

SEQ ID NO: 1548701 - DNA, 15 bp, Homo sapiens
tcatctgagaaccca

SEQ ID NO: 1548702 - DNA, 15 bp, Homo sapiens
catctgagaacccaa

SEQ ID NO: 1548703 - DNA, 15 bp, Homo sapiens
atctgagaacccaag

SEQ ID NO: 1548704 - DNA, 15 bp, Homo sapiens
tctgagaacccaaga

SEQ ID NO: 1548705 - DNA, 15 bp, Homo sapiens
ctgagaacccaagag

SEQ ID NO: 1548706 - DNA, 15 bp, Homo sapiens
tgagaacccaagagc

SEQ ID NO: 1548707 - DNA, 15 bp, Homo sapiens
gagaacccaagagct

SEQ ID NO: 1548708 - DNA, 15 bp, Homo sapiens
agaacccaagagcta

SEQ ID NO: 1548709 - DNA, 15 bp, Homo sapiens
gaacccaagagctag

SEQ ID NO: 1548710 - DNA, 15 bp, Homo sapiens
aacccaagagctaga

SEQ ID NO: 1548711 - DNA, 15 bp, Homo sapiens
acccaagagctagag

SEQ ID NO: 1548712 - DNA, 15 bp, Homo sapiens
cccaagagctagagg

SEQ ID NO: 1548713 - DNA, 15 bp, Homo sapiens
ccaagagctagagga

SEQ ID NO: 1548714 - DNA, 15 bp, Homo sapiens
caagagctagaggag

SEQ ID NO: 1548715 - DNA, 15 bp, Homo sapiens
aagagctagaggaga

SEQ ID NO: 1548716 - DNA, 15 bp, Homo sapiens
agagctagaggagaa

SEQ ID NO: 1548717 - DNA, 15 bp, Homo sapiens
gagctagaggagaaa

SEQ ID NO: 1548718 - DNA, 15 bp, Homo sapiens
agctagaggagaaag

SEQ ID NO: 1548719 - DNA, 15 bp, Homo sapiens
gctagaggagaaagt

SEQ ID NO: 1548720 - DNA, 15 bp, Homo sapiens
ctagaggagaaagtg

SEQ ID NO: 1548721 - DNA, 15 bp, Homo sapiens
tagaggagaaagtga

SEQ ID NO: 1548722 - DNA, 15 bp, Homo sapiens
agaggagaaagtgat

SEQ ID NO: 1548723 - DNA, 15 bp, Homo sapiens
gaggagaaagtgatc

SEQ ID NO: 1548724 - DNA, 15 bp, Homo sapiens
aggagaaagtgatcc

SEQ ID NO: 1548725 - DNA, 15 bp, Homo sapiens
ggagaaagtgatcct

SEQ ID NO: 1548726 - DNA, 15 bp, Homo sapiens
gagaaagtgatcctc

SEQ ID NO: 1548727 - DNA, 15 bp, Homo sapiens
agaaagtgatcctca

SEQ ID NO: 1548728 - DNA, 15 bp, Homo sapiens
gaaagtgatcctcat

SEQ ID NO: 1548729 - DNA, 15 bp, Homo sapiens
aaagtgatcctcatg

SEQ ID NO: 1548730 - DNA, 15 bp, Homo sapiens
aagtgatcctcatga

SEQ ID NO: 1548731 - DNA, 15 bp, Homo sapiens
agtgatcctcatgag

SEQ ID NO: 1548732 - DNA, 15 bp, Homo sapiens
gtgatcctcatgagt

SEQ ID NO: 1548733 - DNA, 15 bp, Homo sapiens
tgatcctcatgagta

SEQ ID NO: 1548734 - DNA, 15 bp, Homo sapiens
gatcctcatgagtac

SEQ ID NO: 1548735 - DNA, 15 bp, Homo sapiens
atcctcatgagtacc

SEQ ID NO: 1548736 - DNA, 15 bp, Homo sapiens
tcctcatgagtacca

SEQ ID NO: 1548737 - DNA, 15 bp, Homo sapiens
cctcatgagtaccag

SEQ ID NO: 1548738 - DNA, 15 bp, Homo sapiens
ctcatgagtaccaga

SEQ ID NO: 1548739 - DNA, 15 bp, Homo sapiens
tcatgagtaccagag

SEQ ID NO: 1548740 - DNA, 15 bp, Homo sapiens
catgagtaccagagg

SEQ ID NO: 1548741 - DNA, 15 bp, Homo sapiens
atgagtaccagagga

SEQ ID NO: 1548742 - DNA, 15 bp, Homo sapiens
tgagtaccagaggag

SEQ ID NO: 1548743 - DNA, 15 bp, Homo sapiens
gagtaccagaggagc

SEQ ID NO: 1548744 - DNA, 15 bp, Homo sapiens
agtaccagaggagca

SEQ ID NO: 1548745 - DNA, 15 bp, Homo sapiens
gtaccagaggagcag

SEQ ID NO: 1548746 - DNA, 15 bp, Homo sapiens
taccagaggagcagc

SEQ ID NO: 1548747 - DNA, 15 bp, Homo sapiens
accagaggagcagca

SEQ ID NO: 1548748 - DNA, 15 bp, Homo sapiens
ccagaggagcagcag

SEQ ID NO: 1548749 - DNA, 15 bp, Homo sapiens
cagaggagcagcagg

SEQ ID NO: 1548750 - DNA, 15 bp, Homo sapiens
agaggagcagcaggg

SEQ ID NO: 1548751 - DNA, 15 bp, Homo sapiens
gaggagcagcagggg

SEQ ID NO: 1548752 - DNA, 15 bp, Homo sapiens
aggagcagcagggga

SEQ ID NO: 1548753 - DNA, 15 bp, Homo sapiens
ggagcagcaggggac

SEQ ID NO: 1548754 - DNA, 15 bp, Homo sapiens
gagcagcaggggaca

SEQ ID NO: 1548755 - DNA, 15 bp, Homo sapiens
agcagcaggggacat

SEQ ID NO: 1548756 - DNA, 15 bp, Homo sapiens
gcagcaggggacatc

SEQ ID NO: 1548757 - DNA, 15 bp, Homo sapiens
cagcaggggacatcc

SEQ ID NO: 1548758 - DNA, 15 bp, Homo sapiens
agcaggggacatcca

SEQ ID NO: 1548759 - DNA, 15 bp, Homo sapiens
gcaggggacatccaa

SEQ ID NO: 1548760 - DNA, 15 bp, Homo sapiens
caggggacatccaaa

SEQ ID NO: 1548761 - DNA, 15 bp, Homo sapiens
aggggacatccaaag

SEQ ID NO: 1548762 - DNA, 15 bp, Homo sapiens
ggggacatccaaagc

SEQ ID NO: 1548763 - DNA, 15 bp, Homo sapiens
gggacatccaaagca

SEQ ID NO: 1548764 - DNA, 15 bp, Homo sapiens
ggacatccaaagcac

SEQ ID NO: 1548765 - DNA, 15 bp, Homo sapiens
gacatccaaagcacc

SEQ ID NO: 1548766 - DNA, 15 bp, Homo sapiens
acatccaaagcacca

SEQ ID NO: 1548767 - DNA, 15 bp, Homo sapiens
catccaaagcaccag

SEQ ID NO: 1548768 - DNA, 15 bp, Homo sapiens
atccaaagcaccaga

SEQ ID NO: 1548769 - DNA, 15 bp, Homo sapiens
tccaaagcaccagag

SEQ ID NO: 1548770 - DNA, 15 bp, Homo sapiens
ccaaagcaccagaga

SEQ ID NO: 1548771 - DNA, 15 bp, Homo sapiens
caaagcaccagagag

SEQ ID NO: 1548772 - DNA, 15 bp, Homo sapiens
aaagcaccagagaga

SEQ ID NO: 1548773 - DNA, 15 bp, Homo sapiens
aagcaccagagagag

SEQ ID NO: 1548774 - DNA, 15 bp, Homo sapiens
agcaccagagagaga

SEQ ID NO: 1548775 - DNA, 15 bp, Homo sapiens
gcaccagagagagaa

SEQ ID NO: 1548776 - DNA, 15 bp, Homo sapiens
caccagagagagaaa

SEQ ID NO: 1548777 - DNA, 15 bp, Homo sapiens
accagagagagaaac

SEQ ID NO: 1548778 - DNA, 15 bp, Homo sapiens
ccagagagagaaaca

SEQ ID NO: 1548779 - DNA, 15 bp, Homo sapiens
cagagagagaaacag

SEQ ID NO: 1548780 - DNA, 15 bp, Homo sapiens
agagagagaaacaga

SEQ ID NO: 1548781 - DNA, 15 bp, Homo sapiens
gagagagaaacagag

SEQ ID NO: 1548782 - DNA, 15 bp, Homo sapiens
gagagaaacagagac

SEQ ID NO: 1548783 - DNA, 15 bp, Homo sapiens
agagaaacagagaca

SEQ ID NO: 1548784 - DNA, 15 bp, Homo sapiens
gagaaacagagacag

SEQ ID NO: 1548785 - DNA, 15 bp, Homo sapiens
agaaacagagacaga

SEQ ID NO: 1548786 - DNA, 15 bp, Homo sapiens
gaaacagagacagag

SEQ ID NO: 1548787 - DNA, 15 bp, Homo sapiens
aaacagagacagaga

SEQ ID NO: 1548788 - DNA, 15 bp, Homo sapiens
aacagagacagagag

SEQ ID NO: 1548789 - DNA, 15 bp, Homo sapiens
acagagacagagaga

SEQ ID NO: 1548790 - DNA, 15 bp, Homo sapiens
cagagacagagagac

SEQ ID NO: 1548791 - DNA, 15 bp, Homo sapiens
agagagacaggcagt

SEQ ID NO: 1548792 - DNA, 15 bp, Homo sapiens
gagagacaggcagtg

SEQ ID NO: 1548793 - DNA, 15 bp, Homo sapiens
agagacaggcagtga

SEQ ID NO: 1548794 - DNA, 15 bp, Homo sapiens
gagacaggcagtgac

SEQ ID NO: 1548795 - DNA, 15 bp, Homo sapiens
agacaggcagtgaca

SEQ ID NO: 1548796 - DNA, 15 bp, Homo sapiens
gacaggcagtgacag

SEQ ID NO: 1548797 - DNA, 15 bp, Homo sapiens
acaggcagtgacagc

SEQ ID NO: 1548798 - DNA, 15 bp, Homo sapiens
caggcagtgacagct

SEQ ID NO: 1548799 - DNA, 15 bp, Homo sapiens
aggcagtgacagctc

SEQ ID NO: 1548800 - DNA, 15 bp, Homo sapiens
ggcagtgacagctca

SEQ ID NO: 1548801 - DNA, 15 bp, Homo sapiens
gcagtgacagctcaa

SEQ ID NO: 1548802 - DNA, 15 bp, Homo sapiens
cagtgacagctcaaa

SEQ ID NO: 1548803 - DNA, 15 bp, Homo sapiens
agtgacagctcaaac

SEQ ID NO: 1548804 - DNA, 15 bp, Homo sapiens
gtgacagctcaaacc

SEQ ID NO: 1548805 - DNA, 15 bp, Homo sapiens
tgacagctcaaacct

SEQ ID NO: 1548806 - DNA, 15 bp, Homo sapiens
gacagctcaaacctc

SEQ ID NO: 1548807 - DNA, 15 bp, Homo sapiens
acagctcaaacctca

SEQ ID NO: 1548808 - DNA, 15 bp, Homo sapiens
cagctcaaacctcag

SEQ ID NO: 1548809 - DNA, 15 bp, Homo sapiens
agctcaaacctcagc

SEQ ID NO: 1548810 - DNA, 15 bp, Homo sapiens
gctcaaacctcagcc

SEQ ID NO: 1548811 - DNA, 15 bp, Homo sapiens
ctcaaacctcagcca

SEQ ID NO: 1548812 - DNA, 15 bp, Homo sapiens
tcaaacctcagccag

SEQ ID NO: 1548813 - DNA, 15 bp, Homo sapiens
caaacctcagccaga

SEQ ID NO: 1548814 - DNA, 15 bp, Homo sapiens
aaacctcagccagat

SEQ ID NO: 1548815 - DNA, 15 bp, Homo sapiens
aacctcagccagatc

SEQ ID NO: 1548816 - DNA, 15 bp, Homo sapiens
acctcagccagatcc

SEQ ID NO: 1548817 - DNA, 15 bp, Homo sapiens
cctcagccagatcca

SEQ ID NO: 1548818 - DNA, 15 bp, Homo sapiens
ctcagccagatccag

SEQ ID NO: 1548819 - DNA, 15 bp, Homo sapiens
tcagccagatccaga

SEQ ID NO: 1548820 - DNA, 15 bp, Homo sapiens
cagccagatccagag

SEQ ID NO: 1548821 - DNA, 15 bp, Homo sapiens
agccagatccagagc

SEQ ID NO: 1548822 - DNA, 15 bp, Homo sapiens
gccagatccagagca

SEQ ID NO: 1548823 - DNA, 15 bp, Homo sapiens
ccagatccagagcat

SEQ ID NO: 1548824 - DNA, 15 bp, Homo sapiens
cagatccagagcata

SEQ ID NO: 1548825 - DNA, 15 bp, Homo sapiens
agatccagagcatac

SEQ ID NO: 1548826 - DNA, 15 bp, Homo sapiens
gatccagagcataca

SEQ ID NO: 1548827 - DNA, 15 bp, Homo sapiens
atccagagcatacaa

SEQ ID NO: 1548828 - DNA, 15 bp, Homo sapiens
tccagagcatacaaa

SEQ ID NO: 1548829 - DNA, 15 bp, Homo sapiens
ccagagcatacaaag

SEQ ID NO: 1548830 - DNA, 15 bp, Homo sapiens
cagagcatacaaagt

SEQ ID NO: 1548831 - DNA, 15 bp, Homo sapiens
agagcatacaaagtc

SEQ ID NO: 1548832 - DNA, 15 bp, Homo sapiens
gagcatacaaagtct

SEQ ID NO: 1548833 - DNA, 15 bp, Homo sapiens
agcatacaaagtctc

SEQ ID NO: 1548834 - DNA, 15 bp, Homo sapiens
gcatacaaagtctcc

SEQ ID NO: 1548835 - DNA, 15 bp, Homo sapiens
catacaaagtctcct

SEQ ID NO: 1548836 - DNA, 15 bp, Homo sapiens
atacaaagtctcctg

SEQ ID NO: 1548837 - DNA, 15 bp, Homo sapiens
tacaaagtctcctgc

SEQ ID NO: 1548838 - DNA, 15 bp, Homo sapiens
acaaagtctcctgcc

SEQ ID NO: 1548839 - DNA, 15 bp, Homo sapiens
caaagtctcctgcct

SEQ ID NO: 1548840 - DNA, 15 bp, Homo sapiens
aaagtctcctgccta

SEQ ID NO: 1548841 - DNA, 15 bp, Homo sapiens
aagtctcctgcctac

SEQ ID NO: 1548842 - DNA, 15 bp, Homo sapiens
agtctcctgcctaca

SEQ ID NO: 1548843 - DNA, 15 bp, Homo sapiens
gtctcctgcctacag

SEQ ID NO: 1548844 - DNA, 15 bp, Homo sapiens
tctcctgcctacagg

SEQ ID NO: 1548845 - DNA, 15 bp, Homo sapiens
ctcctgcctacagga

SEQ ID NO: 1548846 - DNA, 15 bp, Homo sapiens
tcctgcctacaggac

SEQ ID NO: 1548847 - DNA, 15 bp, Homo sapiens
cctgcctacaggaca

SEQ ID NO: 1548848 - DNA, 15 bp, Homo sapiens
ctgcctacaggacag

SEQ ID NO: 1548849 - DNA, 15 bp, Homo sapiens
tgcctacaggacagc

SEQ ID NO: 1548850 - DNA, 15 bp, Homo sapiens
gcctacaggacagcc

SEQ ID NO: 1548851 - DNA, 15 bp, Homo sapiens
cctacaggacagccc

SEQ ID NO: 1548852 - DNA, 15 bp, Homo sapiens
ctacaggacagccca

SEQ ID NO: 1548853 - DNA, 15 bp, Homo sapiens
tacaggacagcccag

SEQ ID NO: 1548854 - DNA, 15 bp, Homo sapiens
acaggacagcccagt

SEQ ID NO: 1548855 - DNA, 15 bp, Homo sapiens
caggacagcccagta

SEQ ID NO: 1548856 - DNA, 15 bp, Homo sapiens
aggacagcccagtaa

SEQ ID NO: 1548857 - DNA, 15 bp, Homo sapiens
ggacagcccagtaag

SEQ ID NO: 1548858 - DNA, 15 bp, Homo sapiens
gacagcccagtaaga

SEQ ID NO: 1548859 - DNA, 15 bp, Homo sapiens
acagcccagtaagag

SEQ ID NO: 1548860 - DNA, 15 bp, Homo sapiens
cagcccagtaagagc

SEQ ID NO: 1548861 - DNA, 15 bp, Homo sapiens
agcccagtaagagct

SEQ ID NO: 1548862 - DNA, 15 bp, Homo sapiens
gcccagtaagagctc

SEQ ID NO: 1548863 - DNA, 15 bp, Homo sapiens
cccagtaagagctct

SEQ ID NO: 1548864 - DNA, 15 bp, Homo sapiens
ccagtaagagctctc

SEQ ID NO: 1548865 - DNA, 15 bp, Homo sapiens
cagtaagagctctca

SEQ ID NO: 1548866 - DNA, 15 bp, Homo sapiens
agtaagagctctcag

SEQ ID NO: 1548867 - DNA, 15 bp, Homo sapiens
gtaagagctctcagc

SEQ ID NO: 1548868 - DNA, 15 bp, Homo sapiens
taagagctctcagct

SEQ ID NO: 1548869 - DNA, 15 bp, Homo sapiens
aagagctctcagctt

SEQ ID NO: 1548870 - DNA, 15 bp, Homo sapiens
agagctctcagcttg

SEQ ID NO: 1548871 - DNA, 15 bp, Homo sapiens
gagctctcagcttgc

SEQ ID NO: 1548872 - DNA, 15 bp, Homo sapiens
agctctcagcttgcc

SEQ ID NO: 1548873 - DNA, 15 bp, Homo sapiens
gctctcagcttgcct

SEQ ID NO: 1548874 - DNA, 15 bp, Homo sapiens
ctctcagcttgcctc

SEQ ID NO: 1548875 - DNA, 15 bp, Homo sapiens
tctcagcttgcctcc

SEQ ID NO: 1548876 - DNA, 15 bp, Homo sapiens
ctcagcttgcctcct

SEQ ID NO: 1548877 - DNA, 15 bp, Homo sapiens
tcagcttgcctcctt

SEQ ID NO: 1548878 - DNA, 15 bp, Homo sapiens
cagcttgcctccttc

SEQ ID NO: 1548879 - DNA, 15 bp, Homo sapiens
agcttgcctccttcc

SEQ ID NO: 1548880 - DNA, 15 bp, Homo sapiens
gcttgcctccttccc

SEQ ID NO: 1548881 - DNA, 15 bp, Homo sapiens
cttgcctccttccct

SEQ ID NO: 1548882 - DNA, 15 bp, Homo sapiens
ttgcctccttccctc

SEQ ID NO: 1548883 - DNA, 15 bp, Homo sapiens
tgcctccttccctcc

SEQ ID NO: 1548884 - DNA, 15 bp, Homo sapiens
gcctccttccctccc

SEQ ID NO: 1548885 - DNA, 15 bp, Homo sapiens
cctccttccctcccc

SEQ ID NO: 1548886 - DNA, 15 bp, Homo sapiens
ctccttccctcccca

SEQ ID NO: 1548887 - DNA, 15 bp, Homo sapiens
tccttccctccccac

SEQ ID NO: 1548888 - DNA, 15 bp, Homo sapiens
ccttccctccccaca

SEQ ID NO: 1548889 - DNA, 15 bp, Homo sapiens
cttccctccccacaa

SEQ ID NO: 1548890 - DNA, 15 bp, Homo sapiens
ttccctccccacaag

SEQ ID NO: 1548891 - DNA, 15 bp, Homo sapiens
tccctccccacaagc

SEQ ID NO: 1548892 - DNA, 15 bp, Homo sapiens
ccctccccacaagcc

SEQ ID NO: 1548893 - DNA, 15 bp, Homo sapiens
cctccccacaagccc

SEQ ID NO: 1548894 - DNA, 15 bp, Homo sapiens
ctccccacaagccct

SEQ ID NO: 1548895 - DNA, 15 bp, Homo sapiens
tccccacaagccctg

SEQ ID NO: 1548896 - DNA, 15 bp, Homo sapiens
ccccacaagccctgc

SEQ ID NO: 1548897 - DNA, 15 bp, Homo sapiens
cccacaagccctgct

SEQ ID NO: 1548898 - DNA, 15 bp, Homo sapiens
ccacaagccctgctg

SEQ ID NO: 1548899 - DNA, 15 bp, Homo sapiens
cacaagccctgctgc

SEQ ID NO: 1548900 - DNA, 15 bp, Homo sapiens
acaagccctgctgca

SEQ ID NO: 1548901 - DNA, 15 bp, Homo sapiens
caagccctgctgcaa

SEQ ID NO: 1548902 - DNA, 15 bp, Homo sapiens
aagccctgctgcaat

SEQ ID NO: 1548903 - DNA, 15 bp, Homo sapiens
agccctgctgcaatc

SEQ ID NO: 1548904 - DNA, 15 bp, Homo sapiens
gccctgctgcaatcc

SEQ ID NO: 1548905 - DNA, 15 bp, Homo sapiens
ccctgctgcaatccc

SEQ ID NO: 1548906 - DNA, 15 bp, Homo sapiens
cctgctgcaatccct

SEQ ID NO: 1548907 - DNA, 15 bp, Homo sapiens
ctgctgcaatccctg

SEQ ID NO: 1548908 - DNA, 15 bp, Homo sapiens
tgctgcaatccctgt

SEQ ID NO: 1548909 - DNA, 15 bp, Homo sapiens
gctgcaatccctgta

SEQ ID NO: 1548910 - DNA, 15 bp, Homo sapiens
ctgcaatccctgtac

SEQ ID NO: 1548911 - DNA, 15 bp, Homo sapiens
tgcaatccctgtacc

SEQ ID NO: 1548912 - DNA, 15 bp, Homo sapiens
gcaatccctgtacct

SEQ ID NO: 1548913 - DNA, 15 bp, Homo sapiens
caatccctgtacctg

SEQ ID NO: 1548914 - DNA, 15 bp, Homo sapiens
aatccctgtacctgg

SEQ ID NO: 1548915 - DNA, 15 bp, Homo sapiens
atccctgtacctggg

SEQ ID NO: 1548916 - DNA, 15 bp, Homo sapiens
tccctgtacctgggg

SEQ ID NO: 1548917 - DNA, 15 bp, Homo sapiens
ccctgtacctggggg

SEQ ID NO: 1548918 - DNA, 15 bp, Homo sapiens
cctgtacctgggggt

SEQ ID NO: 1548919 - DNA, 15 bp, Homo sapiens
ctgtacctgggggtc

SEQ ID NO: 1548920 - DNA, 15 bp, Homo sapiens
tgtacctgggggtca

SEQ ID NO: 1548921 - DNA, 15 bp, Homo sapiens
gtacctgggggtcag

SEQ ID NO: 1548922 - DNA, 15 bp, Homo sapiens
tacctgggggtcagt

SEQ ID NO: 1548923 - DNA, 15 bp, Homo sapiens
acctgggggtcagtg

SEQ ID NO: 1548924 - DNA, 15 bp, Homo sapiens
cctgggggtcagtgg

SEQ ID NO: 1548925 - DNA, 15 bp, Homo sapiens
ctgggggtcagtggg

SEQ ID NO: 1548926 - DNA, 15 bp, Homo sapiens
tgggggtcagtggga

SEQ ID NO: 1548927 - DNA, 15 bp, Homo sapiens
gggggtcagtgggaa

SEQ ID NO: 1548928 - DNA, 15 bp, Homo sapiens
ggggtcagtgggaag

SEQ ID NO: 1548929 - DNA, 15 bp, Homo sapiens
gggtcagtgggaagg

SEQ ID NO: 1548930 - DNA, 15 bp, Homo sapiens
ggtcagtgggaagga

SEQ ID NO: 1548931 - DNA, 15 bp, Homo sapiens
gtcagtgggaaggag

SEQ ID NO: 1548932 - DNA, 15 bp, Homo sapiens
tcagtgggaaggagg

SEQ ID NO: 1548933 - DNA, 15 bp, Homo sapiens
cagtgggaaggaggt

SEQ ID NO: 1548934 - DNA, 15 bp, Homo sapiens
agtgggaaggaggtg

SEQ ID NO: 1548935 - DNA, 15 bp, Homo sapiens
gtgggaaggaggtga

SEQ ID NO: 1548936 - DNA, 15 bp, Homo sapiens
tgggaaggaggtgag

SEQ ID NO: 1548937 - DNA, 15 bp, Homo sapiens
gggaaggaggtgagc

SEQ ID NO: 1548938 - DNA, 15 bp, Homo sapiens
ggaaggaggtgagcg

SEQ ID NO: 1548939 - DNA, 15 bp, Homo sapiens
gaaggaggtgagcga

SEQ ID NO: 1548940 - DNA, 15 bp, Homo sapiens
aaggaggtgagcgag

SEQ ID NO: 1548941 - DNA, 15 bp, Homo sapiens
aggaggtgagcgaga

SEQ ID NO: 1548942 - DNA, 15 bp, Homo sapiens
ggaggtgagcgagaa

SEQ ID NO: 1548943 - DNA, 15 bp, Homo sapiens
gaggtgagcgagaaa

SEQ ID NO: 1548944 - DNA, 15 bp, Homo sapiens
aggtgagcgagaaag

SEQ ID NO: 1548945 - DNA, 15 bp, Homo sapiens
ggtgagcgagaaagg

SEQ ID NO: 1548946 - DNA, 15 bp, Homo sapiens
gtgagcgagaaagga

SEQ ID NO: 1548947 - DNA, 15 bp, Homo sapiens
tgagcgagaaaggag

SEQ ID NO: 1548948 - DNA, 15 bp, Homo sapiens
agcgagaaaggaggg

SEQ ID NO: 1548949 - DNA, 15 bp, Homo sapiens
gcgagaaaggagggg

SEQ ID NO: 1548950 - DNA, 15 bp, Homo sapiens
cgagaaaggaggggc

SEQ ID NO: 1548951 - DNA, 15 bp, Homo sapiens
gagaaaggaggggca

SEQ ID NO: 1548952 - DNA, 15 bp, Homo sapiens
agaaaggaggggcac

SEQ ID NO: 1548953 - DNA, 15 bp, Homo sapiens
gaaaggaggggcacc

SEQ ID NO: 1548954 - DNA, 15 bp, Homo sapiens
aaaggaggggcaccc

SEQ ID NO: 1548955 - DNA, 15 bp, Homo sapiens
aaggaggggcacccc

SEQ ID NO: 1548956 - DNA, 15 bp, Homo sapiens
aggaggggcacccct

SEQ ID NO: 1548957 - DNA, 15 bp, Homo sapiens
ggaggggcacccctt

SEQ ID NO: 1548958 - DNA, 15 bp, Homo sapiens
gaggggcaccccttc

SEQ ID NO: 1548959 - DNA, 15 bp, Homo sapiens
aggggcaccccttcc

SEQ ID NO: 1548960 - DNA, 15 bp, Homo sapiens
ggggcaccccttcct

SEQ ID NO: 1548961 - DNA, 15 bp, Homo sapiens
gggcaccccttcctg

SEQ ID NO: 1548962 - DNA, 15 bp, Homo sapiens
ggcaccccttcctga

SEQ ID NO: 1548963 - DNA, 15 bp, Homo sapiens
gcaccccttcctgaa

SEQ ID NO: 1548964 - DNA, 15 bp, Homo sapiens
caccccttcctgaag

SEQ ID NO: 1548965 - DNA, 15 bp, Homo sapiens
accccttcctgaagg

SEQ ID NO: 1548966 - DNA, 15 bp, Homo sapiens
ccccttcctgaaggc

SEQ ID NO: 1548967 - DNA, 15 bp, Homo sapiens
cccttcctgaaggcc

SEQ ID NO: 1548968 - DNA, 15 bp, Homo sapiens
ccttcctgaaggccc

SEQ ID NO: 1548969 - DNA, 15 bp, Homo sapiens
cttcctgaaggcccc

SEQ ID NO: 1548970 - DNA, 15 bp, Homo sapiens
ttcctgaaggcccca

SEQ ID NO: 1548971 - DNA, 15 bp, Homo sapiens
tcctgaaggccccaa

SEQ ID NO: 1548972 - DNA, 15 bp, Homo sapiens
cctgaaggccccaag

SEQ ID NO: 1548973 - DNA, 15 bp, Homo sapiens
ctgaaggccccaaga

SEQ ID NO: 1548974 - DNA, 15 bp, Homo sapiens
tgaaggccccaagag

SEQ ID NO: 1548975 - DNA, 15 bp, Homo sapiens
gaaggccccaagagg

SEQ ID NO: 1548976 - DNA, 15 bp, Homo sapiens
aaggccccaagagga

SEQ ID NO: 1548977 - DNA, 15 bp, Homo sapiens
aggccccaagaggaa

SEQ ID NO: 1548978 - DNA, 15 bp, Homo sapiens
ggccccaagaggaaa

SEQ ID NO: 1548979 - DNA, 15 bp, Homo sapiens
gccccaagaggaaag

SEQ ID NO: 1548980 - DNA, 15 bp, Homo sapiens
ccccaagaggaaagg

SEQ ID NO: 1548981 - DNA, 15 bp, Homo sapiens
cccaagaggaaaggc

SEQ ID NO: 1548982 - DNA, 15 bp, Homo sapiens
ccaagaggaaaggcg

SEQ ID NO: 1548983 - DNA, 15 bp, Homo sapiens
caagaggaaaggcgt

SEQ ID NO: 1548984 - DNA, 15 bp, Homo sapiens
aagaggaaaggcgtt

SEQ ID NO: 1548985 - DNA, 15 bp, Homo sapiens
agaggaaaggcgttt

SEQ ID NO: 1548986 - DNA, 15 bp, Homo sapiens
gaggaaaggcgtttt

SEQ ID NO: 1548987 - DNA, 15 bp, Homo sapiens
aggaaaggcgttttc

SEQ ID NO: 1548988 - DNA, 15 bp, Homo sapiens
ggaaaggcgttttca

SEQ ID NO: 1548989 - DNA, 15 bp, Homo sapiens
gaaaggcgttttcac

SEQ ID NO: 1548990 - DNA, 15 bp, Homo sapiens
aaaggcgttttcacc

SEQ ID NO: 1548991 - DNA, 15 bp, Homo sapiens
aaggcgttttcaccc

SEQ ID NO: 1548992 - DNA, 15 bp, Homo sapiens
aggcgttttcaccca

SEQ ID NO: 1548993 - DNA, 15 bp, Homo sapiens
ggcgttttcacccag

SEQ ID NO: 1548994 - DNA, 15 bp, Homo sapiens
gcgttttcacccaga

SEQ ID NO: 1548995 - DNA, 15 bp, Homo sapiens
cgttttcacccagac

SEQ ID NO: 1548996 - DNA, 15 bp, Homo sapiens
gttttcacccagaca

SEQ ID NO: 1548997 - DNA, 15 bp, Homo sapiens
ttttcacccagacag

SEQ ID NO: 1548998 - DNA, 15 bp, Homo sapiens
tttcacccagacagg

SEQ ID NO: 1548999 - DNA, 15 bp, Homo sapiens
ttcacccagacaggt

SEQ ID NO: 1549000 - DNA, 15 bp, Homo sapiens
tcacccagacaggtg

SEQ ID NO: 1549001 - DNA, 15 bp, Homo sapiens
cacccagacaggtgt

SEQ ID NO: 1549002 - DNA, 15 bp, Homo sapiens
acccagacaggtgtt

SEQ ID NO: 1549003 - DNA, 15 bp, Homo sapiens
cccagacaggtgttc

SEQ ID NO: 1549004 - DNA, 15 bp, Homo sapiens
ccagacaggtgttca

SEQ ID NO: 1549005 - DNA, 15 bp, Homo sapiens
cagacaggtgttcag

SEQ ID NO: 1549006 - DNA, 15 bp, Homo sapiens
agacaggtgttcagt

SEQ ID NO: 1549007 - DNA, 15 bp, Homo sapiens
gacaggtgttcagtt

SEQ ID NO: 1549008 - DNA, 15 bp, Homo sapiens
acaggtgttcagttt

SEQ ID NO: 1549009 - DNA, 15 bp, Homo sapiens
caggtgttcagtttt

SEQ ID NO: 1549010 - DNA, 15 bp, Homo sapiens
aggtgttcagttttg

SEQ ID NO: 1549011 - DNA, 15 bp, Homo sapiens
ggtgttcagttttga

SEQ ID NO: 1549012 - DNA, 15 bp, Homo sapiens
gtgttcagttttgat

SEQ ID NO: 1549013 - DNA, 15 bp, Homo sapiens
tgttcagttttgatt

SEQ ID NO: 1549014 - DNA, 15 bp, Homo sapiens
gttcagttttgattt

SEQ ID NO: 1549015 - DNA, 15 bp, Homo sapiens
ttcagttttgatttt

SEQ ID NO: 1549016 - DNA, 15 bp, Homo sapiens
tcagttttgatttta

SEQ ID NO: 1549017 - DNA, 15 bp, Homo sapiens
cagttttgattttat

SEQ ID NO: 1549018 - DNA, 15 bp, Homo sapiens
agttttgattttatc

SEQ ID NO: 1549019 - DNA, 15 bp, Homo sapiens
gttttgattttatct

SEQ ID NO: 1549020 - DNA, 15 bp, Homo sapiens
ttttgattttatctg

SEQ ID NO: 1549021 - DNA, 15 bp, Homo sapiens
tttgattttatctgg

SEQ ID NO: 1549022 - DNA, 15 bp, Homo sapiens
ttgattttatctggc

SEQ ID NO: 1549023 - DNA, 15 bp, Homo sapiens
tgattttatctggcg

SEQ ID NO: 1549024 - DNA, 15 bp, Homo sapiens
gattttatctggcgc

SEQ ID NO: 1549025 - DNA, 15 bp, Homo sapiens
attttatctggcgcc

SEQ ID NO: 1549026 - DNA, 15 bp, Homo sapiens
ttttatctggcgcct

SEQ ID NO: 1549027 - DNA, 15 bp, Homo sapiens
tttatctggcgcctg

SEQ ID NO: 1549028 - DNA, 15 bp, Homo sapiens
ttatctggcgcctgg

SEQ ID NO: 1549029 - DNA, 15 bp, Homo sapiens
tatctggcgcctggc

SEQ ID NO: 1549030 - DNA, 15 bp, Homo sapiens
atctggcgcctggca

SEQ ID NO: 1549031 - DNA, 15 bp, Homo sapiens
tctggcgcctggcaa

SEQ ID NO: 1549032 - DNA, 15 bp, Homo sapiens
ctggcgcctggcaat

SEQ ID NO: 1549033 - DNA, 15 bp, Homo sapiens
tggcgcctggcaatt

SEQ ID NO: 1549034 - DNA, 15 bp, Homo sapiens
ggcgcctggcaattt

SEQ ID NO: 1549035 - DNA, 15 bp, Homo sapiens
gcgcctggcaattta

SEQ ID NO: 1549036 - DNA, 15 bp, Homo sapiens
cgcctggcaatttaa

SEQ ID NO: 1549037 - DNA, 15 bp, Homo sapiens
gcctggcaatttaat

SEQ ID NO: 1549038 - DNA, 15 bp, Homo sapiens
cctggcaatttaatt

SEQ ID NO: 1549039 - DNA, 15 bp, Homo sapiens
ctggcaatttaatta

SEQ ID NO: 1549040 - DNA, 15 bp, Homo sapiens
tggcaatttaattac

SEQ ID NO: 1549041 - DNA, 15 bp, Homo sapiens
ggcaatttaattact

SEQ ID NO: 1549042 - DNA, 15 bp, Homo sapiens
gcaatttaattacta

SEQ ID NO: 1549043 - DNA, 15 bp, Homo sapiens
caatttaattactaa

SEQ ID NO: 1549044 - DNA, 15 bp, Homo sapiens
aatttaattactaaa

SEQ ID NO: 1549045 - DNA, 15 bp, Homo sapiens
atttaattactaaat

SEQ ID NO: 1549046 - DNA, 15 bp, Homo sapiens
tttaattactaaatt

SEQ ID NO: 1549047 - DNA, 15 bp, Homo sapiens
ttaattactaaattg

SEQ ID NO: 1549048 - DNA, 15 bp, Homo sapiens
taattactaaattga

SEQ ID NO: 1549049 - DNA, 15 bp, Homo sapiens
aattactaaattgaa

SEQ ID NO: 1549050 - DNA, 15 bp, Homo sapiens
attactaaattgaaa

SEQ ID NO: 1549051 - DNA, 15 bp, Homo sapiens
ttactaaattgaaac

SEQ ID NO: 1549052 - DNA, 15 bp, Homo sapiens
tactaaattgaaact

SEQ ID NO: 1549053 - DNA, 15 bp, Homo sapiens
actaaattgaaactt

SEQ ID NO: 1549054 - DNA, 15 bp, Homo sapiens
ctaaattgaaacttg

SEQ ID NO: 1549055 - DNA, 15 bp, Homo sapiens
taaattgaaacttga

SEQ ID NO: 1549056 - DNA, 15 bp, Homo sapiens
aaattgaaacttgag

SEQ ID NO: 1549057 - DNA, 15 bp, Homo sapiens
aattgaaacttgaga

SEQ ID NO: 1549058 - DNA, 15 bp, Homo sapiens
attgaaacttgagac

SEQ ID NO: 1549059 - DNA, 15 bp, Homo sapiens
ttgaaacttgagact

SEQ ID NO: 1549060 - DNA, 15 bp, Homo sapiens
tgaaacttgagactt

SEQ ID NO: 1549061 - DNA, 15 bp, Homo sapiens
gaaacttgagacttt

SEQ ID NO: 1549062 - DNA, 15 bp, Homo sapiens
aaacttgagactttc

SEQ ID NO: 1549063 - DNA, 15 bp, Homo sapiens
aacttgagactttct

SEQ ID NO: 1549064 - DNA, 15 bp, Homo sapiens
acttgagactttctg

SEQ ID NO: 1549065 - DNA, 15 bp, Homo sapiens
cttgagactttctgg

SEQ ID NO: 1549066 - DNA, 15 bp, Homo sapiens
ttgagactttctgga

SEQ ID NO: 1549067 - DNA, 15 bp, Homo sapiens
tgagactttctggaa

SEQ ID NO: 1549068 - DNA, 15 bp, Homo sapiens
gagactttctggaat

SEQ ID NO: 1549069 - DNA, 15 bp, Homo sapiens
agactttctggaatt

SEQ ID NO: 1549070 - DNA, 15 bp, Homo sapiens
gactttctggaatta

SEQ ID NO: 1549071 - DNA, 15 bp, Homo sapiens
actttctggaattat

SEQ ID NO: 1549072 - DNA, 15 bp, Homo sapiens
ctttctggaattatg

SEQ ID NO: 1549073 - DNA, 15 bp, Homo sapiens
tttctggaattatgg

SEQ ID NO: 1549074 - DNA, 15 bp, Homo sapiens
ttctggaattatggc

SEQ ID NO: 1549075 - DNA, 15 bp, Homo sapiens
tctggaattatggca

SEQ ID NO: 1549076 - DNA, 15 bp, Homo sapiens
ctggaattatggcat

SEQ ID NO: 1549077 - DNA, 15 bp, Homo sapiens
tggaattatggcatt

SEQ ID NO: 1549078 - DNA, 15 bp, Homo sapiens
ggaattatggcattt

SEQ ID NO: 1549079 - DNA, 15 bp, Homo sapiens
gaattatggcatttt

SEQ ID NO: 1549080 - DNA, 15 bp, Homo sapiens
aattatggcattttc

SEQ ID NO: 1549081 - DNA, 15 bp, Homo sapiens
attatggcattttct

SEQ ID NO: 1549082 - DNA, 15 bp, Homo sapiens
ttatggcattttctg

SEQ ID NO: 1549083 - DNA, 15 bp, Homo sapiens
tatggcattttctgt

SEQ ID NO: 1549084 - DNA, 15 bp, Homo sapiens
atggcattttctgtt

SEQ ID NO: 1549085 - DNA, 15 bp, Homo sapiens
tggcattttctgttg

SEQ ID NO: 1549086 - DNA, 15 bp, Homo sapiens
ggcattttctgttgc

SEQ ID NO: 1549087 - DNA, 15 bp, Homo sapiens
gcattttctgttgct

SEQ ID NO: 1549088 - DNA, 15 bp, Homo sapiens
cattttctgttgctt

SEQ ID NO: 1549089 - DNA, 15 bp, Homo sapiens
attttctgttgctta

SEQ ID NO: 1549090 - DNA, 15 bp, Homo sapiens
ttttctgttgcttag

SEQ ID NO: 1549091 - DNA, 15 bp, Homo sapiens
tttctgttgcttaga

SEQ ID NO: 1549092 - DNA, 15 bp, Homo sapiens
ttctgttgcttagag

SEQ ID NO: 1549093 - DNA, 15 bp, Homo sapiens
tctgttgcttagaga

SEQ ID NO: 1549094 - DNA, 15 bp, Homo sapiens
ctgttgcttagagag

SEQ ID NO: 1549095 - DNA, 15 bp, Homo sapiens
tgttgcttagagaga

SEQ ID NO: 1549096 - DNA, 15 bp, Homo sapiens
gttgcttagagagat

SEQ ID NO: 1549097 - DNA, 15 bp, Homo sapiens
ttgcttagagagatt

SEQ ID NO: 1549098 - DNA, 15 bp, Homo sapiens
tgcttagagagatta

SEQ ID NO: 1549099 - DNA, 15 bp, Homo sapiens
gcttagagagattac

SEQ ID NO: 1549100 - DNA, 15 bp, Homo sapiens
cttagagagattaca

SEQ ID NO: 1549101 - DNA, 15 bp, Homo sapiens
ttagagagattacaa

SEQ ID NO: 1549102 - DNA, 15 bp, Homo sapiens
tagagagattacaaa

SEQ ID NO: 1549103 - DNA, 15 bp, Homo sapiens
agagagattacaaaa

SEQ ID NO: 1549104 - DNA, 15 bp, Homo sapiens
gagagattacaaaag

SEQ ID NO: 1549105 - DNA, 15 bp, Homo sapiens
agagattacaaaagt

SEQ ID NO: 1549106 - DNA, 15 bp, Homo sapiens
gagattacaaaagtc

SEQ ID NO: 1549107 - DNA, 15 bp, Homo sapiens
agattacaaaagtca

SEQ ID NO: 1549108 - DNA, 15 bp, Homo sapiens
gattacaaaagtcac

SEQ ID NO: 1549109 - DNA, 15 bp, Homo sapiens
attacaaaagtcacg

SEQ ID NO: 1549110 - DNA, 15 bp, Homo sapiens
ttacaaaagtcacga

SEQ ID NO: 1549111 - DNA, 15 bp, Homo sapiens
tacaaaagtcacgaa

SEQ ID NO: 1549112 - DNA, 15 bp, Homo sapiens
acaaaagtcacgaac

SEQ ID NO: 1549113 - DNA, 15 bp, Homo sapiens
caaaagtcacgaact

SEQ ID NO: 1549114 - DNA, 15 bp, Homo sapiens
aaaagtcacgaactg

SEQ ID NO: 1549115 - DNA, 15 bp, Homo sapiens
aaagtcacgaactgc

SEQ ID NO: 1549116 - DNA, 15 bp, Homo sapiens
aagtcacgaactgcc

SEQ ID NO: 1549117 - DNA, 15 bp, Homo sapiens
agtcacgaactgcct

SEQ ID NO: 1549118 - DNA, 15 bp, Homo sapiens
gtcacgaactgcctg

SEQ ID NO: 1549119 - DNA, 15 bp, Homo sapiens
tcacgaactgcctga

SEQ ID NO: 1549120 - DNA, 15 bp, Homo sapiens
cacgaactgcctgag

SEQ ID NO: 1549121 - DNA, 15 bp, Homo sapiens
acgaactgcctgagt

SEQ ID NO: 1549122 - DNA, 15 bp, Homo sapiens
cgaactgcctgagtt

SEQ ID NO: 1549123 - DNA, 15 bp, Homo sapiens
gaactgcctgagttt

SEQ ID NO: 1549124 - DNA, 15 bp, Homo sapiens
aactgcctgagtttc

SEQ ID NO: 1549125 - DNA, 15 bp, Homo sapiens
actgcctgagtttcc

SEQ ID NO: 1549126 - DNA, 15 bp, Homo sapiens
ctgcctgagtttcca

SEQ ID NO: 1549127 - DNA, 15 bp, Homo sapiens
tgcctgagtttccat

SEQ ID NO: 1549128 - DNA, 15 bp, Homo sapiens
gcctgagtttccatc

SEQ ID NO: 1549129 - DNA, 15 bp, Homo sapiens
cctgagtttccatcc

SEQ ID NO: 1549130 - DNA, 15 bp, Homo sapiens
ctgagtttccatcct

SEQ ID NO: 1549131 - DNA, 15 bp, Homo sapiens
tgagtttccatcctg

SEQ ID NO: 1549132 - DNA, 15 bp, Homo sapiens
gagtttccatcctga

SEQ ID NO: 1549133 - DNA, 15 bp, Homo sapiens
agtttccatcctgaa

SEQ ID NO: 1549134 - DNA, 15 bp, Homo sapiens
gtttccatcctgaaa

SEQ ID NO: 1549135 - DNA, 15 bp, Homo sapiens
tttccatcctgaaag

SEQ ID NO: 1549136 - DNA, 15 bp, Homo sapiens
ttccatcctgaaagc

SEQ ID NO: 1549137 - DNA, 15 bp, Homo sapiens
tccatcctgaaagca

SEQ ID NO: 1549138 - DNA, 15 bp, Homo sapiens
ccatcctgaaagcag

SEQ ID NO: 1549139 - DNA, 15 bp, Homo sapiens
catcctgaaagcagg

SEQ ID NO: 1549140 - DNA, 15 bp, Homo sapiens
atcctgaaagcaggc

SEQ ID NO: 1549141 - DNA, 15 bp, Homo sapiens
tcctgaaagcaggcc

SEQ ID NO: 1549142 - DNA, 15 bp, Homo sapiens
cctgaaagcaggcca

SEQ ID NO: 1549143 - DNA, 15 bp, Homo sapiens
ctgaaagcaggccac

SEQ ID NO: 1549144 - DNA, 15 bp, Homo sapiens
tgaaagcaggccacc

SEQ ID NO: 1549145 - DNA, 15 bp, Homo sapiens
gaaagcaggccacca

SEQ ID NO: 1549146 - DNA, 15 bp, Homo sapiens
aaagcaggccaccag

SEQ ID NO: 1549147 - DNA, 15 bp, Homo sapiens
aagcaggccaccagc

SEQ ID NO: 1549148 - DNA, 15 bp, Homo sapiens
agcaggccaccagcc

SEQ ID NO: 1549149 - DNA, 15 bp, Homo sapiens
gcaggccaccagccc

SEQ ID NO: 1549150 - DNA, 15 bp, Homo sapiens
caggccaccagccca

SEQ ID NO: 1549151 - DNA, 15 bp, Homo sapiens
aggccaccagcccac

SEQ ID NO: 1549152 - DNA, 15 bp, Homo sapiens
ggccaccagcccact

SEQ ID NO: 1549153 - DNA, 15 bp, Homo sapiens
gccaccagcccactc

SEQ ID NO: 1549154 - DNA, 15 bp, Homo sapiens
ccaccagcccactcc

SEQ ID NO: 1549155 - DNA, 15 bp, Homo sapiens
caccagcccactcca

SEQ ID NO: 1549156 - DNA, 15 bp, Homo sapiens
accagcccactccac

SEQ ID NO: 1549157 - DNA, 15 bp, Homo sapiens
ccagcccactccact

SEQ ID NO: 1549158 - DNA, 15 bp, Homo sapiens
cagcccactccactg

SEQ ID NO: 1549159 - DNA, 15 bp, Homo sapiens
agcccactccactga

SEQ ID NO: 1549160 - DNA, 15 bp, Homo sapiens
gcccactccactgac

SEQ ID NO: 1549161 - DNA, 15 bp, Homo sapiens
cccactccactgacc

SEQ ID NO: 1549162 - DNA, 15 bp, Homo sapiens
ccactccactgacca

SEQ ID NO: 1549163 - DNA, 15 bp, Homo sapiens
cactccactgaccat

SEQ ID NO: 1549164 - DNA, 15 bp, Homo sapiens
actccactgaccatg

SEQ ID NO: 1549165 - DNA, 15 bp, Homo sapiens
ctccactgaccatgc

SEQ ID NO: 1549166 - DNA, 15 bp, Homo sapiens
tccactgaccatgct

SEQ ID NO: 1549167 - DNA, 15 bp, Homo sapiens
ccactgaccatgctg

SEQ ID NO: 1549168 - DNA, 15 bp, Homo sapiens
cactgaccatgctgg

SEQ ID NO: 1549169 - DNA, 15 bp, Homo sapiens
actgaccatgctgga

SEQ ID NO: 1549170 - DNA, 15 bp, Homo sapiens
ctgaccatgctggaa

SEQ ID NO: 1549171 - DNA, 15 bp, Homo sapiens
tgaccatgctggaac

SEQ ID NO: 1549172 - DNA, 15 bp, Homo sapiens
gaccatgctggaaca

SEQ ID NO: 1549173 - DNA, 15 bp, Homo sapiens
accatgctggaacag

SEQ ID NO: 1549174 - DNA, 15 bp, Homo sapiens
ccatgctggaacagt

SEQ ID NO: 1549175 - DNA, 15 bp, Homo sapiens
catgctggaacagtg

SEQ ID NO: 1549176 - DNA, 15 bp, Homo sapiens
atgctggaacagtgg

SEQ ID NO: 1549177 - DNA, 15 bp, Homo sapiens
tgctggaacagtgga

SEQ ID NO: 1549178 - DNA, 15 bp, Homo sapiens
gctggaacagtggat

SEQ ID NO: 1549179 - DNA, 15 bp, Homo sapiens
ctggaacagtggatg

SEQ ID NO: 1549180 - DNA, 15 bp, Homo sapiens
tggaacagtggatga

SEQ ID NO: 1549181 - DNA, 15 bp, Homo sapiens
ggaacagtggatgaa

SEQ ID NO: 1549182 - DNA, 15 bp, Homo sapiens
gaacagtggatgaac

SEQ ID NO: 1549183 - DNA, 15 bp, Homo sapiens
aacagtggatgaaca

SEQ ID NO: 1549184 - DNA, 15 bp, Homo sapiens
acagtggatgaacaa

SEQ ID NO: 1549185 - DNA, 15 bp, Homo sapiens
cagtggatgaacaaa

SEQ ID NO: 1549186 - DNA, 15 bp, Homo sapiens
agtggatgaacaaaa

SEQ ID NO: 1549187 - DNA, 15 bp, Homo sapiens
gtggatgaacaaaat

SEQ ID NO: 1549188 - DNA, 15 bp, Homo sapiens
tggatgaacaaaatc

SEQ ID NO: 1549189 - DNA, 15 bp, Homo sapiens
ggatgaacaaaatca

SEQ ID NO: 1549190 - DNA, 15 bp, Homo sapiens
gatgaacaaaatcaa

SEQ ID NO: 1549191 - DNA, 15 bp, Homo sapiens
atgaacaaaatcaag

SEQ ID NO: 1549192 - DNA, 15 bp, Homo sapiens
tgaacaaaatcaagt

SEQ ID NO: 1549193 - DNA, 15 bp, Homo sapiens
gaacaaaatcaagta

SEQ ID NO: 1549194 - DNA, 15 bp, Homo sapiens
aacaaaatcaagtac

SEQ ID NO: 1549195 - DNA, 15 bp, Homo sapiens
acaaaatcaagtacc

SEQ ID NO: 1549196 - DNA, 15 bp, Homo sapiens
caaaatcaagtacca

SEQ ID NO: 1549197 - DNA, 15 bp, Homo sapiens
aaaatcaagtaccat

SEQ ID NO: 1549198 - DNA, 15 bp, Homo sapiens
aaatcaagtaccatt

SEQ ID NO: 1549199 - DNA, 15 bp, Homo sapiens
aatcaagtaccatta

SEQ ID NO: 1549200 - DNA, 15 bp, Homo sapiens
atcaagtaccattag

SEQ ID NO: 1549201 - DNA, 15 bp, Homo sapiens
tcaagtaccattagg

SEQ ID NO: 1549202 - DNA, 15 bp, Homo sapiens
caagtaccattagga

SEQ ID NO: 1549203 - DNA, 15 bp, Homo sapiens
aagtaccattaggat

SEQ ID NO: 1549204 - DNA, 15 bp, Homo sapiens
agtaccattaggatt

SEQ ID NO: 1549205 - DNA, 15 bp, Homo sapiens
gtaccattaggattc

SEQ ID NO: 1549206 - DNA, 15 bp, Homo sapiens
taccattaggattct

SEQ ID NO: 1549207 - DNA, 15 bp, Homo sapiens
accattaggattcta

SEQ ID NO: 1549208 - DNA, 15 bp, Homo sapiens
ccattaggattctac

SEQ ID NO: 1549209 - DNA, 15 bp, Homo sapiens
cattaggattctacc

SEQ ID NO: 1549210 - DNA, 15 bp, Homo sapiens
attaggattctacca

SEQ ID NO: 1549211 - DNA, 15 bp, Homo sapiens
ttaggattctaccac

SEQ ID NO: 1549212 - DNA, 15 bp, Homo sapiens
taggattctaccaca

SEQ ID NO: 1549213 - DNA, 15 bp, Homo sapiens
aggattctaccacat

SEQ ID NO: 1549214 - DNA, 15 bp, Homo sapiens
ggattctaccacatg

SEQ ID NO: 1549215 - DNA, 15 bp, Homo sapiens
gattctaccacatga

SEQ ID NO: 1549216 - DNA, 15 bp, Homo sapiens
attctaccacatgag

SEQ ID NO: 1549217 - DNA, 15 bp, Homo sapiens
ttctaccacatgagt

SEQ ID NO: 1549218 - DNA, 15 bp, Homo sapiens
tctaccacatgagtc

SEQ ID NO: 1549219 - DNA, 15 bp, Homo sapiens
ctaccacatgagtct

SEQ ID NO: 1549220 - DNA, 15 bp, Homo sapiens
taccacatgagtctg

SEQ ID NO: 1549221 - DNA, 15 bp, Homo sapiens
accacatgagtctgc

SEQ ID NO: 1549222 - DNA, 15 bp, Homo sapiens
ccacatgagtctgct

SEQ ID NO: 1549223 - DNA, 15 bp, Homo sapiens
cacatgagtctgctt

SEQ ID NO: 1549224 - DNA, 15 bp, Homo sapiens
acatgagtctgcttg

SEQ ID NO: 1549225 - DNA, 15 bp, Homo sapiens
catgagtctgcttgt

SEQ ID NO: 1549226 - DNA, 15 bp, Homo sapiens
atgagtctgcttgtt

SEQ ID NO: 1549227 - DNA, 15 bp, Homo sapiens
tgagtctgcttgttc

SEQ ID NO: 1549228 - DNA, 15 bp, Homo sapiens
gagtctgcttgttca

SEQ ID NO: 1549229 - DNA, 15 bp, Homo sapiens
agtctgcttgttcaa

SEQ ID NO: 1549230 - DNA, 15 bp, Homo sapiens
gtctgcttgttcaac

SEQ ID NO: 1549231 - DNA, 15 bp, Homo sapiens
tctgcttgttcaaca

SEQ ID NO: 1549232 - DNA, 15 bp, Homo sapiens
ctgcttgttcaacaa

SEQ ID NO: 1549233 - DNA, 15 bp, Homo sapiens
tgcttgttcaacaag

SEQ ID NO: 1549234 - DNA, 15 bp, Homo sapiens
gcttgttcaacaagc

SEQ ID NO: 1549235 - DNA, 15 bp, Homo sapiens
cttgttcaacaagct

SEQ ID NO: 1549236 - DNA, 15 bp, Homo sapiens
ttgttcaacaagctg

SEQ ID NO: 1549237 - DNA, 15 bp, Homo sapiens
tgttcaacaagctga

SEQ ID NO: 1549238 - DNA, 15 bp, Homo sapiens
gttcaacaagctgat

SEQ ID NO: 1549239 - DNA, 15 bp, Homo sapiens
ttcaacaagctgatt

SEQ ID NO: 1549240 - DNA, 15 bp, Homo sapiens
tcaacaagctgattt

SEQ ID NO: 1549241 - DNA, 15 bp, Homo sapiens
caacaagctgatttc

SEQ ID NO: 1549242 - DNA, 15 bp, Homo sapiens
aacaagctgatttca

SEQ ID NO: 1549243 - DNA, 15 bp, Homo sapiens
acaagctgatttcat

SEQ ID NO: 1549244 - DNA, 15 bp, Homo sapiens
caagctgatttcata

SEQ ID NO: 1549245 - DNA, 15 bp, Homo sapiens
aagctgatttcataa

SEQ ID NO: 1549246 - DNA, 15 bp, Homo sapiens
agctgatttcataaa

SEQ ID NO: 1549247 - DNA, 15 bp, Homo sapiens
gctgatttcataaag

SEQ ID NO: 1549248 - DNA, 15 bp, Homo sapiens
ctgatttcataaagt

SEQ ID NO: 1549249 - DNA, 15 bp, Homo sapiens
tgatttcataaagta

SEQ ID NO: 1549250 - DNA, 15 bp, Homo sapiens
gatttcataaagtaa

SEQ ID NO: 1549251 - DNA, 15 bp, Homo sapiens
atttcataaagtaag

SEQ ID NO: 1549252 - DNA, 15 bp, Homo sapiens
tttcataaagtaagg

SEQ ID NO: 1549253 - DNA, 15 bp, Homo sapiens
ttcataaagtaaggg

SEQ ID NO: 1549254 - DNA, 15 bp, Homo sapiens
tcataaagtaaggga

SEQ ID NO: 1549255 - DNA, 15 bp, Homo sapiens
cataaagtaagggat

SEQ ID NO: 1549256 - DNA, 15 bp, Homo sapiens
ataaagtaagggatc

SEQ ID NO: 1549257 - DNA, 15 bp, Homo sapiens
taaagtaagggatca

SEQ ID NO: 1549258 - DNA, 15 bp, Homo sapiens
aaagtaagggatcat

SEQ ID NO: 1549259 - DNA, 15 bp, Homo sapiens
aagtaagggatcatg

SEQ ID NO: 1549260 - DNA, 15 bp, Homo sapiens
agtaagggatcatgt

SEQ ID NO: 1549261 - DNA, 15 bp, Homo sapiens
gtaagggatcatgtt

SEQ ID NO: 1549262 - DNA, 15 bp, Homo sapiens
taagggatcatgtta

SEQ ID NO: 1549263 - DNA, 15 bp, Homo sapiens
aagggatcatgttat

SEQ ID NO: 1549264 - DNA, 15 bp, Homo sapiens
agggatcatgttata

SEQ ID NO: 1549265 - DNA, 15 bp, Homo sapiens
gggatcatgttataa

SEQ ID NO: 1549266 - DNA, 15 bp, Homo sapiens
ggatcatgttataat

SEQ ID NO: 1549267 - DNA, 15 bp, Homo sapiens
gatcatgttataatc

SEQ ID NO: 1549268 - DNA, 15 bp, Homo sapiens
atcatgttataatcc

SEQ ID NO: 1549269 - DNA, 15 bp, Homo sapiens
tcatgttataatcca

SEQ ID NO: 1549270 - DNA, 15 bp, Homo sapiens
catgttataatccaa

SEQ ID NO: 1549271 - DNA, 15 bp, Homo sapiens
atgttataatccaag

SEQ ID NO: 1549272 - DNA, 15 bp, Homo sapiens
tgttataatccaagc

SEQ ID NO: 1549273 - DNA, 15 bp, Homo sapiens
gttataatccaagct

SEQ ID NO: 1549274 - DNA, 15 bp, Homo sapiens
ttataatccaagctc

SEQ ID NO: 1549275 - DNA, 15 bp, Homo sapiens
tataatccaagctct

SEQ ID NO: 1549276 - DNA, 15 bp, Homo sapiens
ataatccaagctcta

SEQ ID NO: 1549277 - DNA, 15 bp, Homo sapiens
taatccaagctctac

SEQ ID NO: 1549278 - DNA, 15 bp, Homo sapiens
aatccaagctctaca

SEQ ID NO: 1549279 - DNA, 15 bp, Homo sapiens
atccaagctctacag

SEQ ID NO: 1549280 - DNA, 15 bp, Homo sapiens
tccaagctctacagg

SEQ ID NO: 1549281 - DNA, 15 bp, Homo sapiens
ccaagctctacaggg

SEQ ID NO: 1549282 - DNA, 15 bp, Homo sapiens
caagctctacagggg

SEQ ID NO: 1549283 - DNA, 15 bp, Homo sapiens
aagctctacaggggt

SEQ ID NO: 1549284 - DNA, 15 bp, Homo sapiens
agctctacaggggta

SEQ ID NO: 1549285 - DNA, 15 bp, Homo sapiens
gctctacaggggtaa

SEQ ID NO: 1549286 - DNA, 15 bp, Homo sapiens
ctctacaggggtaaa

SEQ ID NO: 1549287 - DNA, 15 bp, Homo sapiens
tctacaggggtaaat

SEQ ID NO: 1549288 - DNA, 15 bp, Homo sapiens
ctacaggggtaaatt

SEQ ID NO: 1549289 - DNA, 15 bp, Homo sapiens
tacaggggtaaattg

SEQ ID NO: 1549290 - DNA, 15 bp, Homo sapiens
acaggggtaaattgt

SEQ ID NO: 1549291 - DNA, 15 bp, Homo sapiens
caggggtaaattgtg

SEQ ID NO: 1549292 - DNA, 15 bp, Homo sapiens
aggggtaaattgtga

SEQ ID NO: 1549293 - DNA, 15 bp, Homo sapiens
ggggtaaattgtgaa

SEQ ID NO: 1549294 - DNA, 15 bp, Homo sapiens
gggtaaattgtgaaa

SEQ ID NO: 1549295 - DNA, 15 bp, Homo sapiens
ggtaaattgtgaaag

SEQ ID NO: 1549296 - DNA, 15 bp, Homo sapiens
gtaaattgtgaaaga

SEQ ID NO: 1549297 - DNA, 15 bp, Homo sapiens
taaattgtgaaagac

SEQ ID NO: 1549298 - DNA, 15 bp, Homo sapiens
aaattgtgaaagact

SEQ ID NO: 1549299 - DNA, 15 bp, Homo sapiens
aattgtgaaagacta

SEQ ID NO: 1549300 - DNA, 15 bp, Homo sapiens
attgtgaaagactaa

SEQ ID NO: 1549301 - DNA, 15 bp, Homo sapiens
ttgtgaaagactaaa

SEQ ID NO: 1549302 - DNA, 15 bp, Homo sapiens
tgtgaaagactaaaa

SEQ ID NO: 1549303 - DNA, 15 bp, Homo sapiens
gtgaaagactaaaat

SEQ ID NO: 1549304 - DNA, 15 bp, Homo sapiens
tgaaagactaaaatg

SEQ ID NO: 1549305 - DNA, 15 bp, Homo sapiens
gaaagactaaaatga

SEQ ID NO: 1549306 - DNA, 15 bp, Homo sapiens
aaagactaaaatgaa

SEQ ID NO: 1549307 - DNA, 15 bp, Homo sapiens
aagactaaaatgaac

SEQ ID NO: 1549308 - DNA, 15 bp, Homo sapiens
agactaaaatgaacc

SEQ ID NO: 1549309 - DNA, 15 bp, Homo sapiens
gactaaaatgaacca

SEQ ID NO: 1549310 - DNA, 15 bp, Homo sapiens
actaaaatgaaccaa

SEQ ID NO: 1549311 - DNA, 15 bp, Homo sapiens
ctaaaatgaaccaaa

SEQ ID NO: 1549312 - DNA, 15 bp, Homo sapiens
taaaatgaaccaaaa

SEQ ID NO: 1549313 - DNA, 15 bp, Homo sapiens
aaaatgaaccaaaaa

SEQ ID NO: 1549314 - DNA, 15 bp, Homo sapiens
aaatgaaccaaaaag

SEQ ID NO: 1549315 - DNA, 15 bp, Homo sapiens
aatgaaccaaaaaga

SEQ ID NO: 1549316 - DNA, 15 bp, Homo sapiens
atgaaccaaaaagat

SEQ ID NO: 1549317 - DNA, 15 bp, Homo sapiens
tgaaccaaaaagatc

SEQ ID NO: 1549318 - DNA, 15 bp, Homo sapiens
gaaccaaaaagatca

SEQ ID NO: 1549319 - DNA, 15 bp, Homo sapiens
aaccaaaaagatcat

SEQ ID NO: 1549320 - DNA, 15 bp, Homo sapiens
accaaaaagatcata

SEQ ID NO: 1549321 - DNA, 15 bp, Homo sapiens
ccaaaaagatcatag

SEQ ID NO: 1549322 - DNA, 15 bp, Homo sapiens
caaaaagatcatagg

SEQ ID NO: 1549323 - DNA, 15 bp, Homo sapiens
aaaaagatcataggt

SEQ ID NO: 1549324 - DNA, 15 bp, Homo sapiens
aaaagatcataggtg

SEQ ID NO: 1549325 - DNA, 15 bp, Homo sapiens
aaagatcataggtgt

SEQ ID NO: 1549326 - DNA, 15 bp, Homo sapiens
aagatcataggtgtc

SEQ ID NO: 1549327 - DNA, 15 bp, Homo sapiens
agatcataggtgtcc

SEQ ID NO: 1549328 - DNA, 15 bp, Homo sapiens
gatcataggtgtcca

SEQ ID NO: 1549329 - DNA, 15 bp, Homo sapiens
atcataggtgtccag

SEQ ID NO: 1549330 - DNA, 15 bp, Homo sapiens
tcataggtgtccagt

SEQ ID NO: 1549331 - DNA, 15 bp, Homo sapiens
cataggtgtccagtt

SEQ ID NO: 1549332 - DNA, 15 bp, Homo sapiens
ataggtgtccagtta

SEQ ID NO: 1549333 - DNA, 15 bp, Homo sapiens
taggtgtccagttat

SEQ ID NO: 1549334 - DNA, 15 bp, Homo sapiens
aggtgtccagttatc

SEQ ID NO: 1549335 - DNA, 15 bp, Homo sapiens
ggtgtccagttatct

SEQ ID NO: 1549336 - DNA, 15 bp, Homo sapiens
gtgtccagttatctg

SEQ ID NO: 1549337 - DNA, 15 bp, Homo sapiens
tgtccagttatctga

SEQ ID NO: 1549338 - DNA, 15 bp, Homo sapiens
gtccagttatctgat

SEQ ID NO: 1549339 - DNA, 15 bp, Homo sapiens
tccagttatctgatt

SEQ ID NO: 1549340 - DNA, 15 bp, Homo sapiens
ccagttatctgattt

SEQ ID NO: 1549341 - DNA, 15 bp, Homo sapiens
cagttatctgatttg

SEQ ID NO: 1549342 - DNA, 15 bp, Homo sapiens
agttatctgatttga

SEQ ID NO: 1549343 - DNA, 15 bp, Homo sapiens
gttatctgatttgat

SEQ ID NO: 1549344 - DNA, 15 bp, Homo sapiens
ttatctgatttgatg

SEQ ID NO: 1549345 - DNA, 15 bp, Homo sapiens
tatctgatttgatgg

SEQ ID NO: 1549346 - DNA, 15 bp, Homo sapiens
atctgatttgatggg

SEQ ID NO: 1549347 - DNA, 15 bp, Homo sapiens
tctgatttgatgggg

SEQ ID NO: 1549348 - DNA, 15 bp, Homo sapiens
ctgatttgatggggt

SEQ ID NO: 1549349 - DNA, 15 bp, Homo sapiens
tgatttgatggggtg

SEQ ID NO: 1549350 - DNA, 15 bp, Homo sapiens
gatttgatggggtgt

SEQ ID NO: 1549351 - DNA, 15 bp, Homo sapiens
atttgatggggtgtc

SEQ ID NO: 1549352 - DNA, 15 bp, Homo sapiens
tttgatggggtgtct

SEQ ID NO: 1549353 - DNA, 15 bp, Homo sapiens
ttgatggggtgtctg

SEQ ID NO: 1549354 - DNA, 15 bp, Homo sapiens
tgatggggtgtctga

SEQ ID NO: 1549355 - DNA, 15 bp, Homo sapiens
gatggggtgtctgaa

SEQ ID NO: 1549356 - DNA, 15 bp, Homo sapiens
atggggtgtctgaac

SEQ ID NO: 1549357 - DNA, 15 bp, Homo sapiens
tggggtgtctgaacc

SEQ ID NO: 1549358 - DNA, 15 bp, Homo sapiens
ggggtgtctgaacct

SEQ ID NO: 1549359 - DNA, 15 bp, Homo sapiens
gggtgtctgaacctt

SEQ ID NO: 1549360 - DNA, 15 bp, Homo sapiens
ggtgtctgaaccttt

SEQ ID NO: 1549361 - DNA, 15 bp, Homo sapiens
gtgtctgaacctttt

SEQ ID NO: 1549362 - DNA, 15 bp, Homo sapiens
tgtctgaaccttttg

SEQ ID NO: 1549363 - DNA, 15 bp, Homo sapiens
gtctgaaccttttgt

SEQ ID NO: 1549364 - DNA, 15 bp, Homo sapiens
tctgaaccttttgtt

SEQ ID NO: 1549365 - DNA, 15 bp, Homo sapiens
ctgaaccttttgtta

SEQ ID NO: 1549366 - DNA, 15 bp, Homo sapiens
tgaaccttttgttat

SEQ ID NO: 1549367 - DNA, 15 bp, Homo sapiens
gaaccttttgttatc

SEQ ID NO: 1549368 - DNA, 15 bp, Homo sapiens
aaccttttgttatct

SEQ ID NO: 1549369 - DNA, 15 bp, Homo sapiens
accttttgttatctt

SEQ ID NO: 1549370 - DNA, 15 bp, Homo sapiens
ccttttgttatcttt

SEQ ID NO: 1549371 - DNA, 15 bp, Homo sapiens
cttttgttatctttg

SEQ ID NO: 1549372 - DNA, 15 bp, Homo sapiens
ttttgttatctttga

SEQ ID NO: 1549373 - DNA, 15 bp, Homo sapiens
tttgttatctttgag

SEQ ID NO: 1549374 - DNA, 15 bp, Homo sapiens
ttgttatctttgagc

SEQ ID NO: 1549375 - DNA, 15 bp, Homo sapiens
tgttatctttgagct

SEQ ID NO: 1549376 - DNA, 15 bp, Homo sapiens
gttatctttgagctg

SEQ ID NO: 1549377 - DNA, 15 bp, Homo sapiens
ttatctttgagctgt

SEQ ID NO: 1549378 - DNA, 15 bp, Homo sapiens
tatctttgagctgtt

SEQ ID NO: 1549379 - DNA, 15 bp, Homo sapiens
atctttgagctgttt

SEQ ID NO: 1549380 - DNA, 15 bp, Homo sapiens
tctttgagctgtttc

SEQ ID NO: 1549381 - DNA, 15 bp, Homo sapiens
ctttgagctgtttca

SEQ ID NO: 1549382 - DNA, 15 bp, Homo sapiens
tttgagctgtttcaa

SEQ ID NO: 1549383 - DNA, 15 bp, Homo sapiens
ttgagctgtttcaaa

SEQ ID NO: 1549384 - DNA, 15 bp, Homo sapiens
tgagctgtttcaaaa

SEQ ID NO: 1549385 - DNA, 15 bp, Homo sapiens
gagctgtttcaaaac

SEQ ID NO: 1549386 - DNA, 15 bp, Homo sapiens
agctgtttcaaaact

SEQ ID NO: 1549387 - DNA, 15 bp, Homo sapiens
gctgtttcaaaactc

SEQ ID NO: 1549388 - DNA, 15 bp, Homo sapiens
ctgtttcaaaactct

SEQ ID NO: 1549389 - DNA, 15 bp, Homo sapiens
tgtttcaaaactctc

SEQ ID NO: 1549390 - DNA, 15 bp, Homo sapiens
gtttcaaaactctct

SEQ ID NO: 1549391 - DNA, 15 bp, Homo sapiens
tttcaaaactctcta

SEQ ID NO: 1549392 - DNA, 15 bp, Homo sapiens
ttcaaaactctctaa

SEQ ID NO: 1549393 - DNA, 15 bp, Homo sapiens
tcaaaactctctaaa

SEQ ID NO: 1549394 - DNA, 15 bp, Homo sapiens
caaaactctctaaat

SEQ ID NO: 1549395 - DNA, 15 bp, Homo sapiens
aaaactctctaaatt

SEQ ID NO: 1549396 - DNA, 15 bp, Homo sapiens
aaactctctaaatta

SEQ ID NO: 1549397 - DNA, 15 bp, Homo sapiens
aactctctaaattat

SEQ ID NO: 1549398 - DNA, 15 bp, Homo sapiens
actctctaaattatt

SEQ ID NO: 1549399 - DNA, 15 bp, Homo sapiens
ctctctaaattatta

SEQ ID NO: 1549400 - DNA, 15 bp, Homo sapiens
tctctaaattattat

SEQ ID NO: 1549401 - DNA, 15 bp, Homo sapiens
ctctaaattattatt

SEQ ID NO: 1549402 - DNA, 15 bp, Homo sapiens
tctaaattattatta

SEQ ID NO: 1549403 - DNA, 15 bp, Homo sapiens
ctaaattattattat

SEQ ID NO: 1549404 - DNA, 15 bp, Homo sapiens
taaattattattatt

SEQ ID NO: 1549405 - DNA, 15 bp, Homo sapiens
attatttttgagaca

SEQ ID NO: 1549406 - DNA, 15 bp, Homo sapiens
agtctctctctgtca

SEQ ID NO: 1549407 - DNA, 15 bp, Homo sapiens
agtggcatgatctca

SEQ ID NO: 1549408 - DNA, 15 bp, Homo sapiens
attctcatgcctcac

SEQ ID NO: 1549409 - DNA, 15 bp, Homo sapiens
ttctcatgcctcacc

SEQ ID NO: 1549410 - DNA, 15 bp, Homo sapiens
tctcatgcctcaccc

SEQ ID NO: 1549411 - DNA, 15 bp, Homo sapiens
ctcatgcctcaccct

SEQ ID NO: 1549412 - DNA, 15 bp, Homo sapiens
tcatgcctcaccctc

SEQ ID NO: 1549413 - DNA, 15 bp, Homo sapiens
catgcctcaccctcc

SEQ ID NO: 1549414 - DNA, 15 bp, Homo sapiens
atgcctcaccctccc

SEQ ID NO: 1549415 - DNA, 15 bp, Homo sapiens
ctcccaagtagctag

SEQ ID NO: 1549416 - DNA, 15 bp, Homo sapiens
tcccaagtagctagt

SEQ ID NO: 1549417 - DNA, 15 bp, Homo sapiens
cccaagtagctagta

SEQ ID NO: 1549418 - DNA, 15 bp, Homo sapiens
ccaagtagctagtat

SEQ ID NO: 1549419 - DNA, 15 bp, Homo sapiens
caagtagctagtatt

SEQ ID NO: 1549420 - DNA, 15 bp, Homo sapiens
aagtagctagtatta

SEQ ID NO: 1549421 - DNA, 15 bp, Homo sapiens
agtagctagtattac

SEQ ID NO: 1549422 - DNA, 15 bp, Homo sapiens
gtagctagtattaca

SEQ ID NO: 1549423 - DNA, 15 bp, Homo sapiens
tagctagtattacag

SEQ ID NO: 1549424 - DNA, 15 bp, Homo sapiens
agctagtattacaga

SEQ ID NO: 1549425 - DNA, 15 bp, Homo sapiens
gctagtattacagat

SEQ ID NO: 1549426 - DNA, 15 bp, Homo sapiens
ctagtattacagatg

SEQ ID NO: 1549427 - DNA, 15 bp, Homo sapiens
tagtattacagatgg

SEQ ID NO: 1549428 - DNA, 15 bp, Homo sapiens
agtattacagatggg

SEQ ID NO: 1549429 - DNA, 15 bp, Homo sapiens
gtattacagatgggc

SEQ ID NO: 1549430 - DNA, 15 bp, Homo sapiens
tattacagatgggca

SEQ ID NO: 1549431 - DNA, 15 bp, Homo sapiens
attacagatgggcac

SEQ ID NO: 1549432 - DNA, 15 bp, Homo sapiens
ttacagatgggcaca

SEQ ID NO: 1549433 - DNA, 15 bp, Homo sapiens
tacagatgggcacac

SEQ ID NO: 1549434 - DNA, 15 bp, Homo sapiens
acagatgggcacacc

SEQ ID NO: 1549435 - DNA, 15 bp, Homo sapiens
cagatgggcacacct

SEQ ID NO: 1549436 - DNA, 15 bp, Homo sapiens
agatgggcacacctt

SEQ ID NO: 1549437 - DNA, 15 bp, Homo sapiens
gatgggcacaccttg

SEQ ID NO: 1549438 - DNA, 15 bp, Homo sapiens
atgggcacaccttgc

SEQ ID NO: 1549439 - DNA, 15 bp, Homo sapiens
tgggcacaccttgcc

SEQ ID NO: 1549440 - DNA, 15 bp, Homo sapiens
gggcacaccttgcct

SEQ ID NO: 1549441 - DNA, 15 bp, Homo sapiens
ggcacaccttgcctg

SEQ ID NO: 1549442 - DNA, 15 bp, Homo sapiens
gcacaccttgcctgg

SEQ ID NO: 1549443 - DNA, 15 bp, Homo sapiens
cacaccttgcctggc

SEQ ID NO: 1549444 - DNA, 15 bp, Homo sapiens
acaccttgcctggct

SEQ ID NO: 1549445 - DNA, 15 bp, Homo sapiens
caccttgcctggcta

SEQ ID NO: 1549446 - DNA, 15 bp, Homo sapiens
accttgcctggctaa

SEQ ID NO: 1549447 - DNA, 15 bp, Homo sapiens
ccttgcctggctaat

SEQ ID NO: 1549448 - DNA, 15 bp, Homo sapiens
cttgcctggctaatt

SEQ ID NO: 1549449 - DNA, 15 bp, Homo sapiens
ttgcctggctaattt

SEQ ID NO: 1549450 - DNA, 15 bp, Homo sapiens
ttttaatagagacgt

SEQ ID NO: 1549451 - DNA, 15 bp, Homo sapiens
tttaatagagacgtg

SEQ ID NO: 1549452 - DNA, 15 bp, Homo sapiens
ttaatagagacgtgg

SEQ ID NO: 1549453 - DNA, 15 bp, Homo sapiens
taatagagacgtggt

SEQ ID NO: 1549454 - DNA, 15 bp, Homo sapiens
aatagagacgtggtt

SEQ ID NO: 1549455 - DNA, 15 bp, Homo sapiens
atagagacgtggttt

SEQ ID NO: 1549456 - DNA, 15 bp, Homo sapiens
tagagacgtggtttc

SEQ ID NO: 1549457 - DNA, 15 bp, Homo sapiens
agagacgtggtttca

SEQ ID NO: 1549458 - DNA, 15 bp, Homo sapiens
gagacgtggtttcac

SEQ ID NO: 1549459 - DNA, 15 bp, Homo sapiens
agacgtggtttcacc

SEQ ID NO: 1549460 - DNA, 15 bp, Homo sapiens
gacgtggtttcacca

SEQ ID NO: 1549461 - DNA, 15 bp, Homo sapiens
acgtggtttcaccat

SEQ ID NO: 1549462 - DNA, 15 bp, Homo sapiens
cgtggtttcaccatg

SEQ ID NO: 1549463 - DNA, 15 bp, Homo sapiens
gtggtttcaccatgt

SEQ ID NO: 1549464 - DNA, 15 bp, Homo sapiens
tggtttcaccatgtt

SEQ ID NO: 1549465 - DNA, 15 bp, Homo sapiens
aactcctgacctccg

SEQ ID NO: 1549466 - DNA, 15 bp, Homo sapiens
actcctgacctccgt

SEQ ID NO: 1549467 - DNA, 15 bp, Homo sapiens
ctcctgacctccgtt

SEQ ID NO: 1549468 - DNA, 15 bp, Homo sapiens
tcctgacctccgttg

SEQ ID NO: 1549469 - DNA, 15 bp, Homo sapiens
cctgacctccgttga

SEQ ID NO: 1549470 - DNA, 15 bp, Homo sapiens
ctgacctccgttgat

SEQ ID NO: 1549471 - DNA, 15 bp, Homo sapiens
tgacctccgttgatc

SEQ ID NO: 1549472 - DNA, 15 bp, Homo sapiens
gacctccgttgatcc

SEQ ID NO: 1549473 - DNA, 15 bp, Homo sapiens
acctccgttgatcca

SEQ ID NO: 1549474 - DNA, 15 bp, Homo sapiens
cctccgttgatccac

SEQ ID NO: 1549475 - DNA, 15 bp, Homo sapiens
ctccgttgatccacc

SEQ ID NO: 1549476 - DNA, 15 bp, Homo sapiens
tccgttgatccacct

SEQ ID NO: 1549477 - DNA, 15 bp, Homo sapiens
ccgttgatccacctg

SEQ ID NO: 1549478 - DNA, 15 bp, Homo sapiens
cgttgatccacctgc

SEQ ID NO: 1549479 - DNA, 15 bp, Homo sapiens
gttgatccacctgcc

SEQ ID NO: 1549480 - DNA, 15 bp, Homo sapiens
ttgatccacctgcct

SEQ ID NO: 1549481 - DNA, 15 bp, Homo sapiens
gatccacctgcctct

SEQ ID NO: 1549482 - DNA, 15 bp, Homo sapiens
atccacctgcctctg

SEQ ID NO: 1549483 - DNA, 15 bp, Homo sapiens
tccacctgcctctgc

SEQ ID NO: 1549484 - DNA, 15 bp, Homo sapiens
ccacctgcctctgcc

SEQ ID NO: 1549485 - DNA, 15 bp, Homo sapiens
cacctgcctctgcct

SEQ ID NO: 1549486 - DNA, 15 bp, Homo sapiens
acctgcctctgcctc

SEQ ID NO: 1549487 - DNA, 15 bp, Homo sapiens
cctgcctctgcctcc

SEQ ID NO: 1549488 - DNA, 15 bp, Homo sapiens
ctgcctctgcctccc

SEQ ID NO: 1549489 - DNA, 15 bp, Homo sapiens
tgcctctgcctccca

SEQ ID NO: 1549490 - DNA, 15 bp, Homo sapiens
gcctctgcctcccaa

SEQ ID NO: 1549491 - DNA, 15 bp, Homo sapiens
cctctgcctcccaaa

SEQ ID NO: 1549492 - DNA, 15 bp, Homo sapiens
tctgcctcccaaagt

SEQ ID NO: 1549493 - DNA, 15 bp, Homo sapiens
ctgcctcccaaagtg

SEQ ID NO: 1549494 - DNA, 15 bp, Homo sapiens
tgcctcccaaagtgc

SEQ ID NO: 1549495 - DNA, 15 bp, Homo sapiens
gctgggattacaggg

SEQ ID NO: 1549496 - DNA, 15 bp, Homo sapiens
ctgggattacagggg

SEQ ID NO: 1549497 - DNA, 15 bp, Homo sapiens
tgggattacaggggt

SEQ ID NO: 1549498 - DNA, 15 bp, Homo sapiens
gggattacaggggtg

SEQ ID NO: 1549499 - DNA, 15 bp, Homo sapiens
ggattacaggggtga

SEQ ID NO: 1549500 - DNA, 15 bp, Homo sapiens
gattacaggggtgag

SEQ ID NO: 1549501 - DNA, 15 bp, Homo sapiens
attacaggggtgagc

SEQ ID NO: 1549502 - DNA, 15 bp, Homo sapiens
caggggtgagccacc

SEQ ID NO: 1549503 - DNA, 15 bp, Homo sapiens
aggggtgagccaccg

SEQ ID NO: 1549504 - DNA, 15 bp, Homo sapiens
ggggtgagccaccgt

SEQ ID NO: 1549505 - DNA, 15 bp, Homo sapiens
gggtgagccaccgtg

SEQ ID NO: 1549506 - DNA, 15 bp, Homo sapiens
ggtgagccaccgtgc

SEQ ID NO: 1549507 - DNA, 15 bp, Homo sapiens
gtgagccaccgtgcc

SEQ ID NO: 1549508 - DNA, 15 bp, Homo sapiens
tgagccaccgtgccc

SEQ ID NO: 1549509 - DNA, 15 bp, Homo sapiens
gagccaccgtgccct

SEQ ID NO: 1549510 - DNA, 15 bp, Homo sapiens
agccaccgtgccctg

SEQ ID NO: 1549511 - DNA, 15 bp, Homo sapiens
gccaccgtgccctgc

SEQ ID NO: 1549512 - DNA, 15 bp, Homo sapiens
ccaccgtgccctgcc

SEQ ID NO: 1549513 - DNA, 15 bp, Homo sapiens
caccgtgccctgcca

SEQ ID NO: 1549514 - DNA, 15 bp, Homo sapiens
accgtgccctgccac

SEQ ID NO: 1549515 - DNA, 15 bp, Homo sapiens
ccgtgccctgccaca

SEQ ID NO: 1549516 - DNA, 15 bp, Homo sapiens
cgtgccctgccacaa

SEQ ID NO: 1549517 - DNA, 15 bp, Homo sapiens
gtgccctgccacaac

SEQ ID NO: 1549518 - DNA, 15 bp, Homo sapiens
tgccctgccacaact

SEQ ID NO: 1549519 - DNA, 15 bp, Homo sapiens
gccctgccacaactc

SEQ ID NO: 1549520 - DNA, 15 bp, Homo sapiens
ccctgccacaactct

SEQ ID NO: 1549521 - DNA, 15 bp, Homo sapiens
cctgccacaactcta

SEQ ID NO: 1549522 - DNA, 15 bp, Homo sapiens
ctgccacaactctaa

SEQ ID NO: 1549523 - DNA, 15 bp, Homo sapiens
tgccacaactctaaa

SEQ ID NO: 1549524 - DNA, 15 bp, Homo sapiens
gccacaactctaaat

SEQ ID NO: 1549525 - DNA, 15 bp, Homo sapiens
ccacaactctaaatt

SEQ ID NO: 1549526 - DNA, 15 bp, Homo sapiens
cacaactctaaatta

SEQ ID NO: 1549527 - DNA, 15 bp, Homo sapiens
acaactctaaattat

SEQ ID NO: 1549528 - DNA, 15 bp, Homo sapiens
caactctaaattata

SEQ ID NO: 1549529 - DNA, 15 bp, Homo sapiens
aactctaaattataa

SEQ ID NO: 1549530 - DNA, 15 bp, Homo sapiens
actctaaattataac

SEQ ID NO: 1549531 - DNA, 15 bp, Homo sapiens
ctctaaattataact

SEQ ID NO: 1549532 - DNA, 15 bp, Homo sapiens
tctaaattataacta

SEQ ID NO: 1549533 - DNA, 15 bp, Homo sapiens
ctaaattataactaa

SEQ ID NO: 1549534 - DNA, 15 bp, Homo sapiens
taaattataactaat

SEQ ID NO: 1549535 - DNA, 15 bp, Homo sapiens
aaattataactaata

SEQ ID NO: 1549536 - DNA, 15 bp, Homo sapiens
aattataactaatag

SEQ ID NO: 1549537 - DNA, 15 bp, Homo sapiens
attataactaatagc

SEQ ID NO: 1549538 - DNA, 15 bp, Homo sapiens
ttataactaatagca

SEQ ID NO: 1549539 - DNA, 15 bp, Homo sapiens
tataactaatagcaa

SEQ ID NO: 1549540 - DNA, 15 bp, Homo sapiens
ataactaatagcaag

SEQ ID NO: 1549541 - DNA, 15 bp, Homo sapiens
taactaatagcaagg

SEQ ID NO: 1549542 - DNA, 15 bp, Homo sapiens
aactaatagcaaggc

SEQ ID NO: 1549543 - DNA, 15 bp, Homo sapiens
actaatagcaaggca

SEQ ID NO: 1549544 - DNA, 15 bp, Homo sapiens
ctaatagcaaggcaa

SEQ ID NO: 1549545 - DNA, 15 bp, Homo sapiens
taatagcaaggcaat

SEQ ID NO: 1549546 - DNA, 15 bp, Homo sapiens
aatagcaaggcaatg

SEQ ID NO: 1549547 - DNA, 15 bp, Homo sapiens
atagcaaggcaatgg

SEQ ID NO: 1549548 - DNA, 15 bp, Homo sapiens
tagcaaggcaatggt

SEQ ID NO: 1549549 - DNA, 15 bp, Homo sapiens
agcaaggcaatggtt

SEQ ID NO: 1549550 - DNA, 15 bp, Homo sapiens
gcaaggcaatggttc

SEQ ID NO: 1549551 - DNA, 15 bp, Homo sapiens
aaggcaatggttctt

SEQ ID NO: 1549552 - DNA, 15 bp, Homo sapiens
aggcaatggttcttc

SEQ ID NO: 1549553 - DNA, 15 bp, Homo sapiens
ggcaatggttcttct

SEQ ID NO: 1549554 - DNA, 15 bp, Homo sapiens
gcaatggttcttctc

SEQ ID NO: 1549555 - DNA, 15 bp, Homo sapiens
caatggttcttctct

SEQ ID NO: 1549556 - DNA, 15 bp, Homo sapiens
aatggttcttctcta

SEQ ID NO: 1549557 - DNA, 15 bp, Homo sapiens
atggttcttctctat

SEQ ID NO: 1549558 - DNA, 15 bp, Homo sapiens
tggttcttctctatt

SEQ ID NO: 1549559 - DNA, 15 bp, Homo sapiens
ggttcttctctatta

SEQ ID NO: 1549560 - DNA, 15 bp, Homo sapiens
gttcttctctattaa

SEQ ID NO: 1549561 - DNA, 15 bp, Homo sapiens
ttcttctctattaac

SEQ ID NO: 1549562 - DNA, 15 bp, Homo sapiens
tcttctctattaacg

SEQ ID NO: 1549563 - DNA, 15 bp, Homo sapiens
cttctctattaacgt

SEQ ID NO: 1549564 - DNA, 15 bp, Homo sapiens
ttctctattaacgtg

SEQ ID NO: 1549565 - DNA, 15 bp, Homo sapiens
tctctattaacgtgc

SEQ ID NO: 1549566 - DNA, 15 bp, Homo sapiens
ctctattaacgtgca

SEQ ID NO: 1549567 - DNA, 15 bp, Homo sapiens
tctattaacgtgcaa

SEQ ID NO: 1549568 - DNA, 15 bp, Homo sapiens
ctattaacgtgcaaa

SEQ ID NO: 1549569 - DNA, 15 bp, Homo sapiens
tattaacgtgcaaat

SEQ ID NO: 1549570 - DNA, 15 bp, Homo sapiens
attaacgtgcaaata

SEQ ID NO: 1549571 - DNA, 15 bp, Homo sapiens
ttaacgtgcaaataa

SEQ ID NO: 1549572 - DNA, 15 bp, Homo sapiens
taacgtgcaaataaa

SEQ ID NO: 1549573 - DNA, 15 bp, Homo sapiens
aacgtgcaaataaat

SEQ ID NO: 1549574 - DNA, 15 bp, Homo sapiens
acgtgcaaataaatg

SEQ ID NO: 1549575 - DNA, 15 bp, Homo sapiens
cgtgcaaataaatgt

SEQ ID NO: 1549576 - DNA, 15 bp, Homo sapiens
gtgcaaataaatgtt

SEQ ID NO: 1549577 - DNA, 15 bp, Homo sapiens
tgcaaataaatgttg

SEQ ID NO: 1549578 - DNA, 15 bp, Homo sapiens
gcaaataaatgttgt

SEQ ID NO: 1549579 - DNA, 15 bp, Homo sapiens
caaataaatgttgtc

SEQ ID NO: 1549580 - DNA, 15 bp, Homo sapiens
aaataaatgttgtcc

SEQ ID NO: 1549581 - DNA, 15 bp, Homo sapiens
aataaatgttgtcca

SEQ ID NO: 1549582 - DNA, 15 bp, Homo sapiens
ataaatgttgtccag

SEQ ID NO: 1549583 - DNA, 15 bp, Homo sapiens
taaatgttgtccagt

SEQ ID NO: 1549584 - DNA, 15 bp, Homo sapiens
aaatgttgtccagtg

SEQ ID NO: 1549585 - DNA, 15 bp, Homo sapiens
aatgttgtccagtgg

SEQ ID NO: 1549586 - DNA, 15 bp, Homo sapiens
atgttgtccagtgga

SEQ ID NO: 1549587 - DNA, 15 bp, Homo sapiens
tgttgtccagtggaa

SEQ ID NO: 1549588 - DNA, 15 bp, Homo sapiens
gttgtccagtggaag

SEQ ID NO: 1549589 - DNA, 15 bp, Homo sapiens
ttgtccagtggaagc

SEQ ID NO: 1549590 - DNA, 15 bp, Homo sapiens
tgtccagtggaagca

SEQ ID NO: 1549591 - DNA, 15 bp, Homo sapiens
gtccagtggaagcac

SEQ ID NO: 1549592 - DNA, 15 bp, Homo sapiens
tccagtggaagcaca

SEQ ID NO: 1549593 - DNA, 15 bp, Homo sapiens
ccagtggaagcacaa

SEQ ID NO: 1549594 - DNA, 15 bp, Homo sapiens
cagtggaagcacaac

SEQ ID NO: 1549595 - DNA, 15 bp, Homo sapiens
agtggaagcacaact

SEQ ID NO: 1549596 - DNA, 15 bp, Homo sapiens
gtggaagcacaactg

SEQ ID NO: 1549597 - DNA, 15 bp, Homo sapiens
tggaagcacaactga

SEQ ID NO: 1549598 - DNA, 15 bp, Homo sapiens
ggaagcacaactgat

SEQ ID NO: 1549599 - DNA, 15 bp, Homo sapiens
gaagcacaactgatt

SEQ ID NO: 1549600 - DNA, 15 bp, Homo sapiens
aagcacaactgattt

SEQ ID NO: 1549601 - DNA, 15 bp, Homo sapiens
agcacaactgatttt

SEQ ID NO: 1549602 - DNA, 15 bp, Homo sapiens
gcacaactgattttt

SEQ ID NO: 1549603 - DNA, 15 bp, Homo sapiens
cacaactgatttttc

SEQ ID NO: 1549604 - DNA, 15 bp, Homo sapiens
acaactgatttttcc

SEQ ID NO: 1549605 - DNA, 15 bp, Homo sapiens
caactgatttttccc

SEQ ID NO: 1549606 - DNA, 15 bp, Homo sapiens
aactgatttttccct

SEQ ID NO: 1549607 - DNA, 15 bp, Homo sapiens
actgatttttccctt

SEQ ID NO: 1549608 - DNA, 15 bp, Homo sapiens
ctgatttttcccttc

SEQ ID NO: 1549609 - DNA, 15 bp, Homo sapiens
tgatttttcccttct

SEQ ID NO: 1549610 - DNA, 15 bp, Homo sapiens
gatttttcccttctc

SEQ ID NO: 1549611 - DNA, 15 bp, Homo sapiens
atttttcccttctct

SEQ ID NO: 1549612 - DNA, 15 bp, Homo sapiens
tttttcccttctctg

SEQ ID NO: 1549613 - DNA, 15 bp, Homo sapiens
ttttcccttctctgt

SEQ ID NO: 1549614 - DNA, 15 bp, Homo sapiens
tttcccttctctgtg

SEQ ID NO: 1549615 - DNA, 15 bp, Homo sapiens
ttcccttctctgtgg

SEQ ID NO: 1549616 - DNA, 15 bp, Homo sapiens
tcccttctctgtgga

SEQ ID NO: 1549617 - DNA, 15 bp, Homo sapiens
cccttctctgtggaa

SEQ ID NO: 1549618 - DNA, 15 bp, Homo sapiens
ccttctctgtggaag

SEQ ID NO: 1549619 - DNA, 15 bp, Homo sapiens
cttctctgtggaaga

SEQ ID NO: 1549620 - DNA, 15 bp, Homo sapiens
ttctctgtggaagaa

SEQ ID NO: 1549621 - DNA, 15 bp, Homo sapiens
tctctgtggaagaag

SEQ ID NO: 1549622 - DNA, 15 bp, Homo sapiens
ctctgtggaagaagc

SEQ ID NO: 1549623 - DNA, 15 bp, Homo sapiens
tctgtggaagaagcc

SEQ ID NO: 1549624 - DNA, 15 bp, Homo sapiens
ctgtggaagaagcca

SEQ ID NO: 1549625 - DNA, 15 bp, Homo sapiens
tgtggaagaagccaa

SEQ ID NO: 1549626 - DNA, 15 bp, Homo sapiens
gtggaagaagccaat

SEQ ID NO: 1549627 - DNA, 15 bp, Homo sapiens
tggaagaagccaatt

SEQ ID NO: 1549628 - DNA, 15 bp, Homo sapiens
ggaagaagccaattt

SEQ ID NO: 1549629 - DNA, 15 bp, Homo sapiens
gaagaagccaatttt

SEQ ID NO: 1549630 - DNA, 15 bp, Homo sapiens
aagaagccaattttg

SEQ ID NO: 1549631 - DNA, 15 bp, Homo sapiens
agaagccaattttgc

SEQ ID NO: 1549632 - DNA, 15 bp, Homo sapiens
gaagccaattttgca

SEQ ID NO: 1549633 - DNA, 15 bp, Homo sapiens
aagccaattttgcat

SEQ ID NO: 1549634 - DNA, 15 bp, Homo sapiens
agccaattttgcatc

SEQ ID NO: 1549635 - DNA, 15 bp, Homo sapiens
gccaattttgcatct

SEQ ID NO: 1549636 - DNA, 15 bp, Homo sapiens
ccaattttgcatcta

SEQ ID NO: 1549637 - DNA, 15 bp, Homo sapiens
caattttgcatctat

SEQ ID NO: 1549638 - DNA, 15 bp, Homo sapiens
aattttgcatctatt

SEQ ID NO: 1549639 - DNA, 15 bp, Homo sapiens
attttgcatctatta

SEQ ID NO: 1549640 - DNA, 15 bp, Homo sapiens
ttttgcatctattaa

SEQ ID NO: 1549641 - DNA, 15 bp, Homo sapiens
tttgcatctattaag

SEQ ID NO: 1549642 - DNA, 15 bp, Homo sapiens
ttgcatctattaagc

SEQ ID NO: 1549643 - DNA, 15 bp, Homo sapiens
tgcatctattaagca

SEQ ID NO: 1549644 - DNA, 15 bp, Homo sapiens
gcatctattaagcaa

SEQ ID NO: 1549645 - DNA, 15 bp, Homo sapiens
catctattaagcaaa

SEQ ID NO: 1549646 - DNA, 15 bp, Homo sapiens
atctattaagcaaat

SEQ ID NO: 1549647 - DNA, 15 bp, Homo sapiens
tctattaagcaaatt

SEQ ID NO: 1549648 - DNA, 15 bp, Homo sapiens
ctattaagcaaattc

SEQ ID NO: 1549649 - DNA, 15 bp, Homo sapiens
tattaagcaaattca

SEQ ID NO: 1549650 - DNA, 15 bp, Homo sapiens
attaagcaaattcat

SEQ ID NO: 1549651 - DNA, 15 bp, Homo sapiens
ttaagcaaattcatc

SEQ ID NO: 1549652 - DNA, 15 bp, Homo sapiens
taagcaaattcatct

SEQ ID NO: 1549653 - DNA, 15 bp, Homo sapiens
aagcaaattcatctg

SEQ ID NO: 1549654 - DNA, 15 bp, Homo sapiens
agcaaattcatctgg

SEQ ID NO: 1549655 - DNA, 15 bp, Homo sapiens
gcaaattcatctggg

SEQ ID NO: 1549656 - DNA, 15 bp, Homo sapiens
caaattcatctgggc

SEQ ID NO: 1549657 - DNA, 15 bp, Homo sapiens
aaattcatctgggca

SEQ ID NO: 1549658 - DNA, 15 bp, Homo sapiens
aattcatctgggcat

SEQ ID NO: 1549659 - DNA, 15 bp, Homo sapiens
attcatctgggcatt

SEQ ID NO: 1549660 - DNA, 15 bp, Homo sapiens
ttcatctgggcattc

SEQ ID NO: 1549661 - DNA, 15 bp, Homo sapiens
tcatctgggcattcc

SEQ ID NO: 1549662 - DNA, 15 bp, Homo sapiens
catctgggcattcct

SEQ ID NO: 1549663 - DNA, 15 bp, Homo sapiens
atctgggcattccta

SEQ ID NO: 1549664 - DNA, 15 bp, Homo sapiens
tctgggcattcctaa

SEQ ID NO: 1549665 - DNA, 15 bp, Homo sapiens
ctgggcattcctaac

SEQ ID NO: 1549666 - DNA, 15 bp, Homo sapiens
tgggcattcctaacc

SEQ ID NO: 1549667 - DNA, 15 bp, Homo sapiens
gggcattcctaaccg

SEQ ID NO: 1549668 - DNA, 15 bp, Homo sapiens
ggcattcctaaccgt

SEQ ID NO: 1549669 - DNA, 15 bp, Homo sapiens
gcattcctaaccgtc

SEQ ID NO: 1549670 - DNA, 15 bp, Homo sapiens
cattcctaaccgtct

SEQ ID NO: 1549671 - DNA, 15 bp, Homo sapiens
attcctaaccgtcta

SEQ ID NO: 1549672 - DNA, 15 bp, Homo sapiens
ttcctaaccgtctac

SEQ ID NO: 1549673 - DNA, 15 bp, Homo sapiens
tcctaaccgtctaca

SEQ ID NO: 1549674 - DNA, 15 bp, Homo sapiens
cctaaccgtctacac

SEQ ID NO: 1549675 - DNA, 15 bp, Homo sapiens
ctaaccgtctacaca

SEQ ID NO: 1549676 - DNA, 15 bp, Homo sapiens
taaccgtctacacat

SEQ ID NO: 1549677 - DNA, 15 bp, Homo sapiens
aaccgtctacacatg

SEQ ID NO: 1549678 - DNA, 15 bp, Homo sapiens
accgtctacacatgc

SEQ ID NO: 1549679 - DNA, 15 bp, Homo sapiens
ccgtctacacatgca

SEQ ID NO: 1549680 - DNA, 15 bp, Homo sapiens
cgtctacacatgcac

SEQ ID NO: 1549681 - DNA, 15 bp, Homo sapiens
gtctacacatgcacc

SEQ ID NO: 1549682 - DNA, 15 bp, Homo sapiens
tctacacatgcaccg

SEQ ID NO: 1549683 - DNA, 15 bp, Homo sapiens
ctacacatgcaccgg

SEQ ID NO: 1549684 - DNA, 15 bp, Homo sapiens
tacacatgcaccggc

SEQ ID NO: 1549685 - DNA, 15 bp, Homo sapiens
acacatgcaccggct

SEQ ID NO: 1549686 - DNA, 15 bp, Homo sapiens
cacatgcaccggctc

SEQ ID NO: 1549687 - DNA, 15 bp, Homo sapiens
acatgcaccggctct

SEQ ID NO: 1549688 - DNA, 15 bp, Homo sapiens
catgcaccggctctt

SEQ ID NO: 1549689 - DNA, 15 bp, Homo sapiens
atgcaccggctcttt

SEQ ID NO: 1549690 - DNA, 15 bp, Homo sapiens
tgcaccggctctttg

SEQ ID NO: 1549691 - DNA, 15 bp, Homo sapiens
gcaccggctctttga

SEQ ID NO: 1549692 - DNA, 15 bp, Homo sapiens
caccggctctttgaa

SEQ ID NO: 1549693 - DNA, 15 bp, Homo sapiens
accggctctttgaat

SEQ ID NO: 1549694 - DNA, 15 bp, Homo sapiens
ccggctctttgaatt

SEQ ID NO: 1549695 - DNA, 15 bp, Homo sapiens
cggctctttgaattc

SEQ ID NO: 1549696 - DNA, 15 bp, Homo sapiens
ggctctttgaattct

SEQ ID NO: 1549697 - DNA, 15 bp, Homo sapiens
gctctttgaattctt

SEQ ID NO: 1549698 - DNA, 15 bp, Homo sapiens
ctctttgaattcttc

SEQ ID NO: 1549699 - DNA, 15 bp, Homo sapiens
tctttgaattcttct

SEQ ID NO: 1549700 - DNA, 15 bp, Homo sapiens
ctttgaattcttctc

SEQ ID NO: 1549701 - DNA, 15 bp, Homo sapiens
tttgaattcttctct

SEQ ID NO: 1549702 - DNA, 15 bp, Homo sapiens
ttgaattcttctctg

SEQ ID NO: 1549703 - DNA, 15 bp, Homo sapiens
tgaattcttctctga

SEQ ID NO: 1549704 - DNA, 15 bp, Homo sapiens
gaattcttctctgaa

SEQ ID NO: 1549705 - DNA, 15 bp, Homo sapiens
aattcttctctgaac

SEQ ID NO: 1549706 - DNA, 15 bp, Homo sapiens
attcttctctgaacc

SEQ ID NO: 1549707 - DNA, 15 bp, Homo sapiens
ttcttctctgaacca

SEQ ID NO: 1549708 - DNA, 15 bp, Homo sapiens
tcttctctgaaccag

SEQ ID NO: 1549709 - DNA, 15 bp, Homo sapiens
cttctctgaaccagg

SEQ ID NO: 1549710 - DNA, 15 bp, Homo sapiens
ttctctgaaccaggc

SEQ ID NO: 1549711 - DNA, 15 bp, Homo sapiens
tctctgaaccaggcc

SEQ ID NO: 1549712 - DNA, 15 bp, Homo sapiens
ctctgaaccaggccc

SEQ ID NO: 1549713 - DNA, 15 bp, Homo sapiens
tctgaaccaggccca

SEQ ID NO: 1549714 - DNA, 15 bp, Homo sapiens
ctgaaccaggcccag

SEQ ID NO: 1549715 - DNA, 15 bp, Homo sapiens
tgaaccaggcccagg

SEQ ID NO: 1549716 - DNA, 15 bp, Homo sapiens
gaaccaggcccagga

SEQ ID NO: 1549717 - DNA, 15 bp, Homo sapiens
aaccaggcccaggaa

SEQ ID NO: 1549718 - DNA, 15 bp, Homo sapiens
accaggcccaggaat

SEQ ID NO: 1549719 - DNA, 15 bp, Homo sapiens
ccaggcccaggaata

SEQ ID NO: 1549720 - DNA, 15 bp, Homo sapiens
caggcccaggaataa

SEQ ID NO: 1549721 - DNA, 15 bp, Homo sapiens
aggcccaggaataag

SEQ ID NO: 1549722 - DNA, 15 bp, Homo sapiens
ggcccaggaataagc

SEQ ID NO: 1549723 - DNA, 15 bp, Homo sapiens
gcccaggaataagcc

SEQ ID NO: 1549724 - DNA, 15 bp, Homo sapiens
cccaggaataagcca

SEQ ID NO: 1549725 - DNA, 15 bp, Homo sapiens
ccaggaataagccac

SEQ ID NO: 1549726 - DNA, 15 bp, Homo sapiens
caggaataagccaca

SEQ ID NO: 1549727 - DNA, 15 bp, Homo sapiens
aggaataagccacaa

SEQ ID NO: 1549728 - DNA, 15 bp, Homo sapiens
ggaataagccacaag

SEQ ID NO: 1549729 - DNA, 15 bp, Homo sapiens
gaataagccacaaga

SEQ ID NO: 1549730 - DNA, 15 bp, Homo sapiens
aataagccacaagat

SEQ ID NO: 1549731 - DNA, 15 bp, Homo sapiens
ataagccacaagatg

SEQ ID NO: 1549732 - DNA, 15 bp, Homo sapiens
taagccacaagatga

SEQ ID NO: 1549733 - DNA, 15 bp, Homo sapiens
aagccacaagatgag

SEQ ID NO: 1549734 - DNA, 15 bp, Homo sapiens
agccacaagatgagc

SEQ ID NO: 1549735 - DNA, 15 bp, Homo sapiens
gccacaagatgagca

SEQ ID NO: 1549736 - DNA, 15 bp, Homo sapiens
ccacaagatgagcac

SEQ ID NO: 1549737 - DNA, 15 bp, Homo sapiens
cacaagatgagcact

SEQ ID NO: 1549738 - DNA, 15 bp, Homo sapiens
acaagatgagcactg

SEQ ID NO: 1549739 - DNA, 15 bp, Homo sapiens
caagatgagcactgc

SEQ ID NO: 1549740 - DNA, 15 bp, Homo sapiens
aagatgagcactgcc

SEQ ID NO: 1549741 - DNA, 15 bp, Homo sapiens
agatgagcactgccc

SEQ ID NO: 1549742 - DNA, 15 bp, Homo sapiens
gatgagcactgccca

SEQ ID NO: 1549743 - DNA, 15 bp, Homo sapiens
atgagcactgcccag

SEQ ID NO: 1549744 - DNA, 15 bp, Homo sapiens
tgagcactgcccagc

SEQ ID NO: 1549745 - DNA, 15 bp, Homo sapiens
gagcactgcccagct

SEQ ID NO: 1549746 - DNA, 15 bp, Homo sapiens
agcactgcccagctc

SEQ ID NO: 1549747 - DNA, 15 bp, Homo sapiens
gcactgcccagctcc

SEQ ID NO: 1549748 - DNA, 15 bp, Homo sapiens
cactgcccagctcct

SEQ ID NO: 1549749 - DNA, 15 bp, Homo sapiens
actgcccagctcctt

SEQ ID NO: 1549750 - DNA, 15 bp, Homo sapiens
ctgcccagctccttg

SEQ ID NO: 1549751 - DNA, 15 bp, Homo sapiens
tgcccagctccttgg

SEQ ID NO: 1549752 - DNA, 15 bp, Homo sapiens
gcccagctccttggg

SEQ ID NO: 1549753 - DNA, 15 bp, Homo sapiens
cccagctccttgggc

SEQ ID NO: 1549754 - DNA, 15 bp, Homo sapiens
ccagctccttgggct

SEQ ID NO: 1549755 - DNA, 15 bp, Homo sapiens
cagctccttgggctg

SEQ ID NO: 1549756 - DNA, 15 bp, Homo sapiens
agctccttgggctgt

SEQ ID NO: 1549757 - DNA, 15 bp, Homo sapiens
gctccttgggctgtc

SEQ ID NO: 1549758 - DNA, 15 bp, Homo sapiens
ctccttgggctgtca

SEQ ID NO: 1549759 - DNA, 15 bp, Homo sapiens
tccttgggctgtcac

SEQ ID NO: 1549760 - DNA, 15 bp, Homo sapiens
ccttgggctgtcaca

SEQ ID NO: 1549761 - DNA, 15 bp, Homo sapiens
cttgggctgtcacat

SEQ ID NO: 1549762 - DNA, 15 bp, Homo sapiens
ttgggctgtcacatc

SEQ ID NO: 1549763 - DNA, 15 bp, Homo sapiens
tgggctgtcacatct

SEQ ID NO: 1549764 - DNA, 15 bp, Homo sapiens
gggctgtcacatctt

SEQ ID NO: 1549765 - DNA, 15 bp, Homo sapiens
ggctgtcacatctta

SEQ ID NO: 1549766 - DNA, 15 bp, Homo sapiens
gctgtcacatcttat

SEQ ID NO: 1549767 - DNA, 15 bp, Homo sapiens
ctgtcacatcttatt

SEQ ID NO: 1549768 - DNA, 15 bp, Homo sapiens
tgtcacatcttattg

SEQ ID NO: 1549769 - DNA, 15 bp, Homo sapiens
gtcacatcttattga

SEQ ID NO: 1549770 - DNA, 15 bp, Homo sapiens
tcacatcttattgat

SEQ ID NO: 1549771 - DNA, 15 bp, Homo sapiens
cacatcttattgatt

SEQ ID NO: 1549772 - DNA, 15 bp, Homo sapiens
acatcttattgattc

SEQ ID NO: 1549773 - DNA, 15 bp, Homo sapiens
catcttattgattcc

SEQ ID NO: 1549774 - DNA, 15 bp, Homo sapiens
atcttattgattccc

SEQ ID NO: 1549775 - DNA, 15 bp, Homo sapiens
tcttattgattccca

SEQ ID NO: 1549776 - DNA, 15 bp, Homo sapiens
cttattgattcccac

SEQ ID NO: 1549777 - DNA, 15 bp, Homo sapiens
ttattgattcccaca

SEQ ID NO: 1549778 - DNA, 15 bp, Homo sapiens
tattgattcccacat

SEQ ID NO: 1549779 - DNA, 15 bp, Homo sapiens
attgattcccacatg

SEQ ID NO: 1549780 - DNA, 15 bp, Homo sapiens
ttgattcccacatga

SEQ ID NO: 1549781 - DNA, 15 bp, Homo sapiens
tgattcccacatgaa

SEQ ID NO: 1549782 - DNA, 15 bp, Homo sapiens
gattcccacatgaat

SEQ ID NO: 1549783 - DNA, 15 bp, Homo sapiens
attcccacatgaatt

SEQ ID NO: 1549784 - DNA, 15 bp, Homo sapiens
ttcccacatgaattc

SEQ ID NO: 1549785 - DNA, 15 bp, Homo sapiens
tcccacatgaattca

SEQ ID NO: 1549786 - DNA, 15 bp, Homo sapiens
cccacatgaattcac

SEQ ID NO: 1549787 - DNA, 15 bp, Homo sapiens
ccacatgaattcaca

SEQ ID NO: 1549788 - DNA, 15 bp, Homo sapiens
cacatgaattcacaa

SEQ ID NO: 1549789 - DNA, 15 bp, Homo sapiens
acatgaattcacaag

SEQ ID NO: 1549790 - DNA, 15 bp, Homo sapiens
catgaattcacaagt

SEQ ID NO: 1549791 - DNA, 15 bp, Homo sapiens
atgaattcacaagta

SEQ ID NO: 1549792 - DNA, 15 bp, Homo sapiens
tgaattcacaagtaa

SEQ ID NO: 1549793 - DNA, 15 bp, Homo sapiens
gaattcacaagtaaa

SEQ ID NO: 1549794 - DNA, 15 bp, Homo sapiens
aattcacaagtaaat

SEQ ID NO: 1549795 - DNA, 15 bp, Homo sapiens
attcacaagtaaata

SEQ ID NO: 1549796 - DNA, 15 bp, Homo sapiens
ttcacaagtaaataa

SEQ ID NO: 1549797 - DNA, 15 bp, Homo sapiens
tcacaagtaaataaa

SEQ ID NO: 1549798 - DNA, 15 bp, Homo sapiens
cacaagtaaataaaa

SEQ ID NO: 1549799 - DNA, 15 bp, Homo sapiens
acaagtaaataaaat

SEQ ID NO: 1549800 - DNA, 15 bp, Homo sapiens
caagtaaataaaata

SEQ ID NO: 1549801 - DNA, 15 bp, Homo sapiens
aagtaaataaaatat

SEQ ID NO: 1549802 - DNA, 15 bp, Homo sapiens
agtaaataaaatatt

SEQ ID NO: 1549803 - DNA, 15 bp, Homo sapiens
gtaaataaaatattt

SEQ ID NO: 1549804 - DNA, 15 bp, Homo sapiens
taaataaaatatttg

SEQ ID NO: 1549805 - DNA, 15 bp, Homo sapiens
aaataaaatatttgg

SEQ ID NO: 1549806 - DNA, 15 bp, Homo sapiens
aataaaatatttggc

SEQ ID NO: 1549807 - DNA, 15 bp, Homo sapiens
ataaaatatttggcg

SEQ ID NO: 1549808 - DNA, 15 bp, Homo sapiens
taaaatatttggcgg

SEQ ID NO: 1549809 - DNA, 15 bp, Homo sapiens
aaaatatttggcggt

SEQ ID NO: 1549810 - DNA, 15 bp, Homo sapiens
aaatatttggcggtt

SEQ ID NO: 1549811 - DNA, 15 bp, Homo sapiens
aatatttggcggttg

SEQ ID NO: 1549812 - DNA, 15 bp, Homo sapiens
atatttggcggttgt

SEQ ID NO: 1549813 - DNA, 15 bp, Homo sapiens
tatttggcggttgtt

SEQ ID NO: 1549814 - DNA, 15 bp, Homo sapiens
atttggcggttgttc

SEQ ID NO: 1549815 - DNA, 15 bp, Homo sapiens
tttggcggttgttca

SEQ ID NO: 1549816 - DNA, 15 bp, Homo sapiens
ttggcggttgttcac

SEQ ID NO: 1549817 - DNA, 15 bp, Homo sapiens
tggcggttgttcact

SEQ ID NO: 1549818 - DNA, 15 bp, Homo sapiens
ggcggttgttcactt

SEQ ID NO: 1549819 - DNA, 15 bp, Homo sapiens
gcggttgttcactta

SEQ ID NO: 1549820 - DNA, 15 bp, Homo sapiens
cggttgttcacttag

SEQ ID NO: 1549821 - DNA, 15 bp, Homo sapiens
ggttgttcacttagt

SEQ ID NO: 1549822 - DNA, 15 bp, Homo sapiens
gttgttcacttagta

SEQ ID NO: 1549823 - DNA, 15 bp, Homo sapiens
ttgttcacttagtat

SEQ ID NO: 1549824 - DNA, 15 bp, Homo sapiens
tgttcacttagtatg

SEQ ID NO: 1549825 - DNA, 15 bp, Homo sapiens
gttcacttagtatgc

SEQ ID NO: 1549826 - DNA, 15 bp, Homo sapiens
ttcacttagtatgca

SEQ ID NO: 1549827 - DNA, 15 bp, Homo sapiens
tcacttagtatgcaa

SEQ ID NO: 1549828 - DNA, 15 bp, Homo sapiens
cacttagtatgcaag

SEQ ID NO: 1549829 - DNA, 15 bp, Homo sapiens
acttagtatgcaagt

SEQ ID NO: 1549830 - DNA, 15 bp, Homo sapiens
cttagtatgcaagtc

SEQ ID NO: 1549831 - DNA, 15 bp, Homo sapiens
ttagtatgcaagtca

SEQ ID NO: 1549832 - DNA, 15 bp, Homo sapiens
tagtatgcaagtcaa

SEQ ID NO: 1549833 - DNA, 15 bp, Homo sapiens
agtatgcaagtcaat

SEQ ID NO: 1549834 - DNA, 15 bp, Homo sapiens
gtatgcaagtcaata

SEQ ID NO: 1549835 - DNA, 15 bp, Homo sapiens
tatgcaagtcaatat

SEQ ID NO: 1549836 - DNA, 15 bp, Homo sapiens
atgcaagtcaatatt

SEQ ID NO: 1549837 - DNA, 15 bp, Homo sapiens
tgcaagtcaatattt

SEQ ID NO: 1549838 - DNA, 15 bp, Homo sapiens
gcaagtcaatatttt

SEQ ID NO: 1549839 - DNA, 15 bp, Homo sapiens
caagtcaatattttg

SEQ ID NO: 1549840 - DNA, 15 bp, Homo sapiens
aagtcaatattttgc

SEQ ID NO: 1549841 - DNA, 15 bp, Homo sapiens
agtcaatattttgct

SEQ ID NO: 1549842 - DNA, 15 bp, Homo sapiens
gtcaatattttgctt

SEQ ID NO: 1549843 - DNA, 15 bp, Homo sapiens
tcaatattttgcttt

SEQ ID NO: 1549844 - DNA, 15 bp, Homo sapiens
caatattttgcttta

SEQ ID NO: 1549845 - DNA, 15 bp, Homo sapiens
aatattttgctttaa

SEQ ID NO: 1549846 - DNA, 15 bp, Homo sapiens
atattttgctttaaa

SEQ ID NO: 1549847 - DNA, 15 bp, Homo sapiens
tattttgctttaaaa

SEQ ID NO: 1549848 - DNA, 15 bp, Homo sapiens
attttgctttaaaaa

SEQ ID NO: 1549849 - DNA, 15 bp, Homo sapiens
ttttgctttaaaaat

SEQ ID NO: 1549850 - DNA, 15 bp, Homo sapiens
tttgctttaaaaata

SEQ ID NO: 1549851 - DNA, 15 bp, Homo sapiens
ttgctttaaaaatat

SEQ ID NO: 1549852 - DNA, 15 bp, Homo sapiens
tgctttaaaaatatt

SEQ ID NO: 1549853 - DNA, 15 bp, Homo sapiens
gctttaaaaatatta

SEQ ID NO: 1549854 - DNA, 15 bp, Homo sapiens
ctttaaaaatattat

SEQ ID NO: 1549855 - DNA, 15 bp, Homo sapiens
tttaaaaatattatc

SEQ ID NO: 1549856 - DNA, 15 bp, Homo sapiens
ttaaaaatattatcc

SEQ ID NO: 1549857 - DNA, 15 bp, Homo sapiens
taaaaatattatcct

SEQ ID NO: 1549858 - DNA, 15 bp, Homo sapiens
aaaaatattatcctt

SEQ ID NO: 1549859 - DNA, 15 bp, Homo sapiens
aaaatattatccttt

SEQ ID NO: 1549860 - DNA, 15 bp, Homo sapiens
aaatattatcctttc

SEQ ID NO: 1549861 - DNA, 15 bp, Homo sapiens
aatattatcctttca

SEQ ID NO: 1549862 - DNA, 15 bp, Homo sapiens
atattatcctttcac

SEQ ID NO: 1549863 - DNA, 15 bp, Homo sapiens
tattatcctttcaca

SEQ ID NO: 1549864 - DNA, 15 bp, Homo sapiens
attatcctttcacac

SEQ ID NO: 1549865 - DNA, 15 bp, Homo sapiens
ttatcctttcacact

SEQ ID NO: 1549866 - DNA, 15 bp, Homo sapiens
tatcctttcacactc

SEQ ID NO: 1549867 - DNA, 15 bp, Homo sapiens
atcctttcacactcc

SEQ ID NO: 1549868 - DNA, 15 bp, Homo sapiens
tcctttcacactcct

SEQ ID NO: 1549869 - DNA, 15 bp, Homo sapiens
cctttcacactcctg

SEQ ID NO: 1549870 - DNA, 15 bp, Homo sapiens
ctttcacactcctga

SEQ ID NO: 1549871 - DNA, 15 bp, Homo sapiens
tttcacactcctgat

SEQ ID NO: 1549872 - DNA, 15 bp, Homo sapiens
ttcacactcctgata

SEQ ID NO: 1549873 - DNA, 15 bp, Homo sapiens
tcacactcctgatat

SEQ ID NO: 1549874 - DNA, 15 bp, Homo sapiens
cacactcctgatata

SEQ ID NO: 1549875 - DNA, 15 bp, Homo sapiens
acactcctgatatag

SEQ ID NO: 1549876 - DNA, 15 bp, Homo sapiens
cactcctgatatagt

SEQ ID NO: 1549877 - DNA, 15 bp, Homo sapiens
actcctgatatagtt

SEQ ID NO: 1549878 - DNA, 15 bp, Homo sapiens
ctcctgatatagttg

SEQ ID NO: 1549879 - DNA, 15 bp, Homo sapiens
tcctgatatagttgt

SEQ ID NO: 1549880 - DNA, 15 bp, Homo sapiens
cctgatatagttgtc

SEQ ID NO: 1549881 - DNA, 15 bp, Homo sapiens
ctgatatagttgtct

SEQ ID NO: 1549882 - DNA, 15 bp, Homo sapiens
tgatatagttgtctg

SEQ ID NO: 1549883 - DNA, 15 bp, Homo sapiens
gatatagttgtctga

SEQ ID NO: 1549884 - DNA, 15 bp, Homo sapiens
atatagttgtctgat

SEQ ID NO: 1549885 - DNA, 15 bp, Homo sapiens
tatagttgtctgata

SEQ ID NO: 1549886 - DNA, 15 bp, Homo sapiens
atagttgtctgataa

SEQ ID NO: 1549887 - DNA, 15 bp, Homo sapiens
tagttgtctgataag

SEQ ID NO: 1549888 - DNA, 15 bp, Homo sapiens
agttgtctgataagg

SEQ ID NO: 1549889 - DNA, 15 bp, Homo sapiens
gttgtctgataaggt

SEQ ID NO: 1549890 - DNA, 15 bp, Homo sapiens
ttgtctgataaggtt

SEQ ID NO: 1549891 - DNA, 15 bp, Homo sapiens
tgtctgataaggtta

SEQ ID NO: 1549892 - DNA, 15 bp, Homo sapiens
gtctgataaggttag

SEQ ID NO: 1549893 - DNA, 15 bp, Homo sapiens
tctgataaggttagt

SEQ ID NO: 1549894 - DNA, 15 bp, Homo sapiens
ctgataaggttagtc

SEQ ID NO: 1549895 - DNA, 15 bp, Homo sapiens
tgataaggttagtcc

SEQ ID NO: 1549896 - DNA, 15 bp, Homo sapiens
gataaggttagtcct

SEQ ID NO: 1549897 - DNA, 15 bp, Homo sapiens
ataaggttagtcctt

SEQ ID NO: 1549898 - DNA, 15 bp, Homo sapiens
taaggttagtccttc

SEQ ID NO: 1549899 - DNA, 15 bp, Homo sapiens
aaggttagtccttcc

SEQ ID NO: 1549900 - DNA, 15 bp, Homo sapiens
aggttagtccttccc

SEQ ID NO: 1549901 - DNA, 15 bp, Homo sapiens
ggttagtccttccca

SEQ ID NO: 1549902 - DNA, 15 bp, Homo sapiens
gttagtccttcccac

SEQ ID NO: 1549903 - DNA, 15 bp, Homo sapiens
ttagtccttcccaca

SEQ ID NO: 1549904 - DNA, 15 bp, Homo sapiens
tagtccttcccacac

SEQ ID NO: 1549905 - DNA, 15 bp, Homo sapiens
agtccttcccacacc

SEQ ID NO: 1549906 - DNA, 15 bp, Homo sapiens
gtccttcccacacca

SEQ ID NO: 1549907 - DNA, 15 bp, Homo sapiens
tccttcccacaccaa

SEQ ID NO: 1549908 - DNA, 15 bp, Homo sapiens
ccttcccacaccaaa

SEQ ID NO: 1549909 - DNA, 15 bp, Homo sapiens
cttcccacaccaaaa

SEQ ID NO: 1549910 - DNA, 15 bp, Homo sapiens
ttcccacaccaaaac

SEQ ID NO: 1549911 - DNA, 15 bp, Homo sapiens
tcccacaccaaaact

SEQ ID NO: 1549912 - DNA, 15 bp, Homo sapiens
cccacaccaaaactg

SEQ ID NO: 1549913 - DNA, 15 bp, Homo sapiens
ccacaccaaaactgc

SEQ ID NO: 1549914 - DNA, 15 bp, Homo sapiens
cacaccaaaactgcc

SEQ ID NO: 1549915 - DNA, 15 bp, Homo sapiens
acaccaaaactgcct

SEQ ID NO: 1549916 - DNA, 15 bp, Homo sapiens
caccaaaactgcctg

SEQ ID NO: 1549917 - DNA, 15 bp, Homo sapiens
accaaaactgcctgt

SEQ ID NO: 1549918 - DNA, 15 bp, Homo sapiens
ccaaaactgcctgta

SEQ ID NO: 1549919 - DNA, 15 bp, Homo sapiens
caaaactgcctgtat

SEQ ID NO: 1549920 - DNA, 15 bp, Homo sapiens
aaaactgcctgtatt

SEQ ID NO: 1549921 - DNA, 15 bp, Homo sapiens
aaactgcctgtatta

SEQ ID NO: 1549922 - DNA, 15 bp, Homo sapiens
aactgcctgtattag

SEQ ID NO: 1549923 - DNA, 15 bp, Homo sapiens
actgcctgtattagt

SEQ ID NO: 1549924 - DNA, 15 bp, Homo sapiens
ctgcctgtattagtg

SEQ ID NO: 1549925 - DNA, 15 bp, Homo sapiens
tgcctgtattagtgt

SEQ ID NO: 1549926 - DNA, 15 bp, Homo sapiens
gcctgtattagtgtt

SEQ ID NO: 1549927 - DNA, 15 bp, Homo sapiens
cctgtattagtgttg

SEQ ID NO: 1549928 - DNA, 15 bp, Homo sapiens
ctgtattagtgttgt

SEQ ID NO: 1549929 - DNA, 15 bp, Homo sapiens
tgtattagtgttgtt

SEQ ID NO: 1549930 - DNA, 15 bp, Homo sapiens
gtattagtgttgttt

SEQ ID NO: 1549931 - DNA, 15 bp, Homo sapiens
tattagtgttgtttg

SEQ ID NO: 1549932 - DNA, 15 bp, Homo sapiens
attagtgttgtttgg

SEQ ID NO: 1549933 - DNA, 15 bp, Homo sapiens
ttagtgttgtttgga

SEQ ID NO: 1549934 - DNA, 15 bp, Homo sapiens
tagtgttgtttggaa

SEQ ID NO: 1549935 - DNA, 15 bp, Homo sapiens
agtgttgtttggaat

SEQ ID NO: 1549936 - DNA, 15 bp, Homo sapiens
gtgttgtttggaata

SEQ ID NO: 1549937 - DNA, 15 bp, Homo sapiens
tgttgtttggaataa

SEQ ID NO: 1549938 - DNA, 15 bp, Homo sapiens
gttgtttggaataaa

SEQ ID NO: 1549939 - DNA, 15 bp, Homo sapiens
ttgtttggaataaac

SEQ ID NO: 1549940 - DNA, 15 bp, Homo sapiens
tgtttggaataaact

SEQ ID NO: 1549941 - DNA, 15 bp, Homo sapiens
gtttggaataaactg

SEQ ID NO: 1549942 - DNA, 15 bp, Homo sapiens
tttggaataaactga

SEQ ID NO: 1549943 - DNA, 15 bp, Homo sapiens
ttggaataaactgag

SEQ ID NO: 1549944 - DNA, 15 bp, Homo sapiens
tggaataaactgagg

SEQ ID NO: 1549945 - DNA, 15 bp, Homo sapiens
ggaataaactgaggg

SEQ ID NO: 1549946 - DNA, 15 bp, Homo sapiens
gaataaactgagggt

SEQ ID NO: 1549947 - DNA, 15 bp, Homo sapiens
aataaactgagggta

SEQ ID NO: 1549948 - DNA, 15 bp, Homo sapiens
ataaactgagggtag

SEQ ID NO: 1549949 - DNA, 15 bp, Homo sapiens
taaactgagggtaga

SEQ ID NO: 1549950 - DNA, 15 bp, Homo sapiens
aaactgagggtagaa

SEQ ID NO: 1549951 - DNA, 15 bp, Homo sapiens
aactgagggtagaat

SEQ ID NO: 1549952 - DNA, 15 bp, Homo sapiens
actgagggtagaatg

SEQ ID NO: 1549953 - DNA, 15 bp, Homo sapiens
ctgagggtagaatgt

SEQ ID NO: 1549954 - DNA, 15 bp, Homo sapiens
tgagggtagaatgta

SEQ ID NO: 1549955 - DNA, 15 bp, Homo sapiens
gagggtagaatgtat

SEQ ID NO: 1549956 - DNA, 15 bp, Homo sapiens
agggtagaatgtata

SEQ ID NO: 1549957 - DNA, 15 bp, Homo sapiens
gggtagaatgtatat

SEQ ID NO: 1549958 - DNA, 15 bp, Homo sapiens
ggtagaatgtatatg

SEQ ID NO: 1549959 - DNA, 15 bp, Homo sapiens
gtagaatgtatatgg

SEQ ID NO: 1549960 - DNA, 15 bp, Homo sapiens
tagaatgtatatggt

SEQ ID NO: 1549961 - DNA, 15 bp, Homo sapiens
agaatgtatatggtg

SEQ ID NO: 1549962 - DNA, 15 bp, Homo sapiens
gaatgtatatggtgt

SEQ ID NO: 1549963 - DNA, 15 bp, Homo sapiens
aatgtatatggtgtg

SEQ ID NO: 1549964 - DNA, 15 bp, Homo sapiens
atgtatatggtgtgt

SEQ ID NO: 1549965 - DNA, 15 bp, Homo sapiens
tgtatatggtgtgtg

SEQ ID NO: 1549966 - DNA, 15 bp, Homo sapiens
gtatatggtgtgtgt

SEQ ID NO: 1549967 - DNA, 15 bp, Homo sapiens
tatatggtgtgtgta

SEQ ID NO: 1549968 - DNA, 15 bp, Homo sapiens
atatggtgtgtgtat

SEQ ID NO: 1549969 - DNA, 15 bp, Homo sapiens
tatggtgtgtgtatg

SEQ ID NO: 1549970 - DNA, 15 bp, Homo sapiens
atggtgtgtgtatgt

SEQ ID NO: 1549971 - DNA, 15 bp, Homo sapiens
tggtgtgtgtatgtg

SEQ ID NO: 1549972 - DNA, 15 bp, Homo sapiens
ggtgtgtgtatgtgg

SEQ ID NO: 1549973 - DNA, 15 bp, Homo sapiens
gtgtgtgtatgtggt

SEQ ID NO: 1549974 - DNA, 15 bp, Homo sapiens
tgtgtgtatgtggtg

SEQ ID NO: 1549975 - DNA, 15 bp, Homo sapiens
gtgtgtatgtggtgt

SEQ ID NO: 1549976 - DNA, 15 bp, Homo sapiens
tgtgtatgtggtgtg

SEQ ID NO: 1549977 - DNA, 15 bp, Homo sapiens
gtgtatgtggtgtgt

SEQ ID NO: 1549978 - DNA, 15 bp, Homo sapiens
tgtatgtggtgtgtg

SEQ ID NO: 1549979 - DNA, 15 bp, Homo sapiens
gtatgtggtgtgtgt

SEQ ID NO: 1549980 - DNA, 15 bp, Homo sapiens
tatgtggtgtgtgtg

SEQ ID NO: 1549981 - DNA, 15 bp, Homo sapiens
atgtggtgtgtgtgt

SEQ ID NO: 1549982 - DNA, 15 bp, Homo sapiens
tgtggtgtgtgtgtt

SEQ ID NO: 1549983 - DNA, 15 bp, Homo sapiens
gtggtgtgtgtgttt

SEQ ID NO: 1549984 - DNA, 15 bp, Homo sapiens
tggtgtgtgtgtttg

SEQ ID NO: 1549985 - DNA, 15 bp, Homo sapiens
ggtgtgtgtgtttgt

SEQ ID NO: 1549986 - DNA, 15 bp, Homo sapiens
gtgtgtttgtgtgtg

SEQ ID NO: 1549987 - DNA, 15 bp, Homo sapiens
gtttgtgtgtgtgtg

SEQ ID NO: 1549988 - DNA, 15 bp, Homo sapiens
agaccctggatgcaa

SEQ ID NO: 1549989 - DNA, 15 bp, Homo sapiens
gaccctggatgcaaa

SEQ ID NO: 1549990 - DNA, 15 bp, Homo sapiens
accctggatgcaaac

SEQ ID NO: 1549991 - DNA, 15 bp, Homo sapiens
ccctggatgcaaaca

SEQ ID NO: 1549992 - DNA, 15 bp, Homo sapiens
cctggatgcaaacaa

SEQ ID NO: 1549993 - DNA, 15 bp, Homo sapiens
ctggatgcaaacaaa

SEQ ID NO: 1549994 - DNA, 15 bp, Homo sapiens
tggatgcaaacaaag

SEQ ID NO: 1549995 - DNA, 15 bp, Homo sapiens
ggatgcaaacaaagg

SEQ ID NO: 1549996 - DNA, 15 bp, Homo sapiens
gatgcaaacaaaggc

SEQ ID NO: 1549997 - DNA, 15 bp, Homo sapiens
atgcaaacaaaggcc

SEQ ID NO: 1549998 - DNA, 15 bp, Homo sapiens
tgcaaacaaaggccc

SEQ ID NO: 1549999 - DNA, 15 bp, Homo sapiens
gcaaacaaaggcccg

SEQ ID NO: 1550000 - DNA, 15 bp, Homo sapiens
caaacaaaggcccga

SEQ ID NO: 1550001 - DNA, 15 bp, Homo sapiens
aaacaaaggcccgag

SEQ ID NO: 1550002 - DNA, 15 bp, Homo sapiens
aacaaaggcccgagg

SEQ ID NO: 1550003 - DNA, 15 bp, Homo sapiens
acaaaggcccgaggg

SEQ ID NO: 1550004 - DNA, 15 bp, Homo sapiens
caaaggcccgaggga

SEQ ID NO: 1550005 - DNA, 15 bp, Homo sapiens
aaaggcccgagggag

SEQ ID NO: 1550006 - DNA, 15 bp, Homo sapiens
aaggcccgagggagc

SEQ ID NO: 1550007 - DNA, 15 bp, Homo sapiens
aggcccgagggagcc

SEQ ID NO: 1550008 - DNA, 15 bp, Homo sapiens
ggcccgagggagcct

SEQ ID NO: 1550009 - DNA, 15 bp, Homo sapiens
gcccgagggagcctc

SEQ ID NO: 1550010 - DNA, 15 bp, Homo sapiens
cccgagggagcctct

SEQ ID NO: 1550011 - DNA, 15 bp, Homo sapiens
ccgagggagcctctt

SEQ ID NO: 1550012 - DNA, 15 bp, Homo sapiens
cgagggagcctcttc

SEQ ID NO: 1550013 - DNA, 15 bp, Homo sapiens
gagggagcctcttcc

SEQ ID NO: 1550014 - DNA, 15 bp, Homo sapiens
agggagcctcttccc

SEQ ID NO: 1550015 - DNA, 15 bp, Homo sapiens
gggagcctcttccct

SEQ ID NO: 1550016 - DNA, 15 bp, Homo sapiens
ggagcctcttccctc

SEQ ID NO: 1550017 - DNA, 15 bp, Homo sapiens
gagcctcttccctcg

SEQ ID NO: 1550018 - DNA, 15 bp, Homo sapiens
agcctcttccctcgc

SEQ ID NO: 1550019 - DNA, 15 bp, Homo sapiens
gcctcttccctcgca

SEQ ID NO: 1550020 - DNA, 15 bp, Homo sapiens
cctcttccctcgcag

SEQ ID NO: 1550021 - DNA, 15 bp, Homo sapiens
ctcttccctcgcagt

SEQ ID NO: 1550022 - DNA, 15 bp, Homo sapiens
tcttccctcgcagtg

SEQ ID NO: 1550023 - DNA, 15 bp, Homo sapiens
cttccctcgcagtgc

SEQ ID NO: 1550024 - DNA, 15 bp, Homo sapiens
ttccctcgcagtgca

SEQ ID NO: 1550025 - DNA, 15 bp, Homo sapiens
tccctcgcagtgcag

SEQ ID NO: 1550026 - DNA, 15 bp, Homo sapiens
ccctcgcagtgcagg

SEQ ID NO: 1550027 - DNA, 15 bp, Homo sapiens
cctcgcagtgcaggc

SEQ ID NO: 1550028 - DNA, 15 bp, Homo sapiens
ctcgcagtgcaggcc

SEQ ID NO: 1550029 - DNA, 15 bp, Homo sapiens
tcgcagtgcaggcct

SEQ ID NO: 1550030 - DNA, 15 bp, Homo sapiens
cgcagtgcaggcctc

SEQ ID NO: 1550031 - DNA, 15 bp, Homo sapiens
gcagtgcaggcctca

SEQ ID NO: 1550032 - DNA, 15 bp, Homo sapiens
cagtgcaggcctcac

SEQ ID NO: 1550033 - DNA, 15 bp, Homo sapiens
agtgcaggcctcacc

SEQ ID NO: 1550034 - DNA, 15 bp, Homo sapiens
gtgcaggcctcacct

SEQ ID NO: 1550035 - DNA, 15 bp, Homo sapiens
tgcaggcctcacctg

SEQ ID NO: 1550036 - DNA, 15 bp, Homo sapiens
gcaggcctcacctgg

SEQ ID NO: 1550037 - DNA, 15 bp, Homo sapiens
caggcctcacctggg

SEQ ID NO: 1550038 - DNA, 15 bp, Homo sapiens
aggcctcacctgggg

SEQ ID NO: 1550039 - DNA, 15 bp, Homo sapiens
ggcctcacctggggc

SEQ ID NO: 1550040 - DNA, 15 bp, Homo sapiens
gcctcacctggggct

SEQ ID NO: 1550041 - DNA, 15 bp, Homo sapiens
cctcacctggggctc

SEQ ID NO: 1550042 - DNA, 15 bp, Homo sapiens
ctcacctggggctca

SEQ ID NO: 1550043 - DNA, 15 bp, Homo sapiens
tcacctggggctcag

SEQ ID NO: 1550044 - DNA, 15 bp, Homo sapiens
cacctggggctcaga

SEQ ID NO: 1550045 - DNA, 15 bp, Homo sapiens
acctggggctcagag

SEQ ID NO: 1550046 - DNA, 15 bp, Homo sapiens
cctggggctcagagt

SEQ ID NO: 1550047 - DNA, 15 bp, Homo sapiens
ctggggctcagagtc

SEQ ID NO: 1550048 - DNA, 15 bp, Homo sapiens
tggggctcagagtca

SEQ ID NO: 1550049 - DNA, 15 bp, Homo sapiens
ggggctcagagtcag

SEQ ID NO: 1550050 - DNA, 15 bp, Homo sapiens
gggctcagagtcaga

SEQ ID NO: 1550051 - DNA, 15 bp, Homo sapiens
ggctcagagtcagaa

SEQ ID NO: 1550052 - DNA, 15 bp, Homo sapiens
gctcagagtcagaat

SEQ ID NO: 1550053 - DNA, 15 bp, Homo sapiens
ctcagagtcagaatc

SEQ ID NO: 1550054 - DNA, 15 bp, Homo sapiens
tcagagtcagaatct

SEQ ID NO: 1550055 - DNA, 15 bp, Homo sapiens
cagagtcagaatctg

SEQ ID NO: 1550056 - DNA, 15 bp, Homo sapiens
agagtcagaatctgc

SEQ ID NO: 1550057 - DNA, 15 bp, Homo sapiens
gagtcagaatctgca

SEQ ID NO: 1550058 - DNA, 15 bp, Homo sapiens
agtcagaatctgcat

SEQ ID NO: 1550059 - DNA, 15 bp, Homo sapiens
gtcagaatctgcatt

SEQ ID NO: 1550060 - DNA, 15 bp, Homo sapiens
tcagaatctgcattt

SEQ ID NO: 1550061 - DNA, 15 bp, Homo sapiens
cagaatctgcatttt

SEQ ID NO: 1550062 - DNA, 15 bp, Homo sapiens
agaatctgcatttta

SEQ ID NO: 1550063 - DNA, 15 bp, Homo sapiens
gaatctgcattttat

SEQ ID NO: 1550064 - DNA, 15 bp, Homo sapiens
aatctgcattttatt

SEQ ID NO: 1550065 - DNA, 15 bp, Homo sapiens
atctgcattttattc

SEQ ID NO: 1550066 - DNA, 15 bp, Homo sapiens
tctgcattttattcc

SEQ ID NO: 1550067 - DNA, 15 bp, Homo sapiens
ctgcattttattccc

SEQ ID NO: 1550068 - DNA, 15 bp, Homo sapiens
tgcattttattccct

SEQ ID NO: 1550069 - DNA, 15 bp, Homo sapiens
gcattttattcccta

SEQ ID NO: 1550070 - DNA, 15 bp, Homo sapiens
cattttattccctag

SEQ ID NO: 1550071 - DNA, 15 bp, Homo sapiens
attttattccctagg

SEQ ID NO: 1550072 - DNA, 15 bp, Homo sapiens
ttttattccctagga

SEQ ID NO: 1550073 - DNA, 15 bp, Homo sapiens
tttattccctaggac

SEQ ID NO: 1550074 - DNA, 15 bp, Homo sapiens
ttattccctaggaca

SEQ ID NO: 1550075 - DNA, 15 bp, Homo sapiens
tattccctaggacaa

SEQ ID NO: 1550076 - DNA, 15 bp, Homo sapiens
attccctaggacaac

SEQ ID NO: 1550077 - DNA, 15 bp, Homo sapiens
ttccctaggacaacc

SEQ ID NO: 1550078 - DNA, 15 bp, Homo sapiens
tccctaggacaacct

SEQ ID NO: 1550079 - DNA, 15 bp, Homo sapiens
ccctaggacaacctc

SEQ ID NO: 1550080 - DNA, 15 bp, Homo sapiens
cctaggacaacctct

SEQ ID NO: 1550081 - DNA, 15 bp, Homo sapiens
ctaggacaacctcta

SEQ ID NO: 1550082 - DNA, 15 bp, Homo sapiens
taggacaacctctag

SEQ ID NO: 1550083 - DNA, 15 bp, Homo sapiens
aggacaacctctagt

SEQ ID NO: 1550084 - DNA, 15 bp, Homo sapiens
ggacaacctctagtc

SEQ ID NO: 1550085 - DNA, 15 bp, Homo sapiens
gacaacctctagtca

SEQ ID NO: 1550086 - DNA, 15 bp, Homo sapiens
acaacctctagtcag

SEQ ID NO: 1550087 - DNA, 15 bp, Homo sapiens
caacctctagtcagg

SEQ ID NO: 1550088 - DNA, 15 bp, Homo sapiens
aacctctagtcaggg

SEQ ID NO: 1550089 - DNA, 15 bp, Homo sapiens
acctctagtcagggc

SEQ ID NO: 1550090 - DNA, 15 bp, Homo sapiens
cctctagtcagggca

SEQ ID NO: 1550091 - DNA, 15 bp, Homo sapiens
ctctagtcagggcag

SEQ ID NO: 1550092 - DNA, 15 bp, Homo sapiens
tctagtcagggcaga

SEQ ID NO: 1550093 - DNA, 15 bp, Homo sapiens
ctagtcagggcagag

SEQ ID NO: 1550094 - DNA, 15 bp, Homo sapiens
tagtcagggcagagg

SEQ ID NO: 1550095 - DNA, 15 bp, Homo sapiens
agtcagggcagaggc

SEQ ID NO: 1550096 - DNA, 15 bp, Homo sapiens
gtcagggcagaggcc

SEQ ID NO: 1550097 - DNA, 15 bp, Homo sapiens
tcagggcagaggccg

SEQ ID NO: 1550098 - DNA, 15 bp, Homo sapiens
cagggcagaggccgg

SEQ ID NO: 1550099 - DNA, 15 bp, Homo sapiens
agggcagaggccggc

SEQ ID NO: 1550100 - DNA, 15 bp, Homo sapiens
gggcagaggccggct

SEQ ID NO: 1550101 - DNA, 15 bp, Homo sapiens
ggcagaggccggctg

SEQ ID NO: 1550102 - DNA, 15 bp, Homo sapiens
gcagaggccggctgt

SEQ ID NO: 1550103 - DNA, 15 bp, Homo sapiens
cagaggccggctgtg

SEQ ID NO: 1550104 - DNA, 15 bp, Homo sapiens
agaggccggctgtgc

SEQ ID NO: 1550105 - DNA, 15 bp, Homo sapiens
gaggccggctgtgct

SEQ ID NO: 1550106 - DNA, 15 bp, Homo sapiens
aggccggctgtgctg

SEQ ID NO: 1550107 - DNA, 15 bp, Homo sapiens
ggccggctgtgctgc

SEQ ID NO: 1550108 - DNA, 15 bp, Homo sapiens
gccggctgtgctgcc

SEQ ID NO: 1550109 - DNA, 15 bp, Homo sapiens
ccggctgtgctgccc

SEQ ID NO: 1550110 - DNA, 15 bp, Homo sapiens
cggctgtgctgccca

SEQ ID NO: 1550111 - DNA, 15 bp, Homo sapiens
ggctgtgctgcccaa

SEQ ID NO: 1550112 - DNA, 15 bp, Homo sapiens
gctgtgctgcccaag

SEQ ID NO: 1550113 - DNA, 15 bp, Homo sapiens
ctgtgctgcccaagt

SEQ ID NO: 1550114 - DNA, 15 bp, Homo sapiens
tgtgctgcccaagtg

SEQ ID NO: 1550115 - DNA, 15 bp, Homo sapiens
gtgctgcccaagtgc

SEQ ID NO: 1550116 - DNA, 15 bp, Homo sapiens
tgctgcccaagtgcc

SEQ ID NO: 1550117 - DNA, 15 bp, Homo sapiens
gctgcccaagtgccc

SEQ ID NO: 1550118 - DNA, 15 bp, Homo sapiens
ctgcccaagtgccct

SEQ ID NO: 1550119 - DNA, 15 bp, Homo sapiens
tgcccaagtgcccta

SEQ ID NO: 1550120 - DNA, 15 bp, Homo sapiens
gcccaagtgccctaa

SEQ ID NO: 1550121 - DNA, 15 bp, Homo sapiens
cccaagtgccctaac

SEQ ID NO: 1550122 - DNA, 15 bp, Homo sapiens
ccaagtgccctaacc

SEQ ID NO: 1550123 - DNA, 15 bp, Homo sapiens
caagtgccctaaccc

SEQ ID NO: 1550124 - DNA, 15 bp, Homo sapiens
aagtgccctaaccct

SEQ ID NO: 1550125 - DNA, 15 bp, Homo sapiens
agtgccctaacccta

SEQ ID NO: 1550126 - DNA, 15 bp, Homo sapiens
gtgccctaaccctag

SEQ ID NO: 1550127 - DNA, 15 bp, Homo sapiens
tgccctaaccctagc

SEQ ID NO: 1550128 - DNA, 15 bp, Homo sapiens
gccctaaccctagct

SEQ ID NO: 1550129 - DNA, 15 bp, Homo sapiens
ccctaaccctagctt

SEQ ID NO: 1550130 - DNA, 15 bp, Homo sapiens
cctaaccctagcttt

SEQ ID NO: 1550131 - DNA, 15 bp, Homo sapiens
ctaaccctagctttg

SEQ ID NO: 1550132 - DNA, 15 bp, Homo sapiens
taaccctagctttga

SEQ ID NO: 1550133 - DNA, 15 bp, Homo sapiens
aaccctagctttgag

SEQ ID NO: 1550134 - DNA, 15 bp, Homo sapiens
accctagctttgagg

SEQ ID NO: 1550135 - DNA, 15 bp, Homo sapiens
ccctagctttgaggc

SEQ ID NO: 1550136 - DNA, 15 bp, Homo sapiens
cctagctttgaggca

SEQ ID NO: 1550137 - DNA, 15 bp, Homo sapiens
ctagctttgaggcac

SEQ ID NO: 1550138 - DNA, 15 bp, Homo sapiens
tagctttgaggcacc

SEQ ID NO: 1550139 - DNA, 15 bp, Homo sapiens
agctttgaggcacca

SEQ ID NO: 1550140 - DNA, 15 bp, Homo sapiens
gctttgaggcaccag

SEQ ID NO: 1550141 - DNA, 15 bp, Homo sapiens
ctttgaggcaccaga

SEQ ID NO: 1550142 - DNA, 15 bp, Homo sapiens
tttgaggcaccagaa

SEQ ID NO: 1550143 - DNA, 15 bp, Homo sapiens
ttgaggcaccagaag

SEQ ID NO: 1550144 - DNA, 15 bp, Homo sapiens
tgaggcaccagaagg

SEQ ID NO: 1550145 - DNA, 15 bp, Homo sapiens
gaggcaccagaaggg

SEQ ID NO: 1550146 - DNA, 15 bp, Homo sapiens
aggcaccagaagggc

SEQ ID NO: 1550147 - DNA, 15 bp, Homo sapiens
ggcaccagaagggca

SEQ ID NO: 1550148 - DNA, 15 bp, Homo sapiens
gcaccagaagggcaa

SEQ ID NO: 1550149 - DNA, 15 bp, Homo sapiens
caccagaagggcaaa

SEQ ID NO: 1550150 - DNA, 15 bp, Homo sapiens
accagaagggcaaat

SEQ ID NO: 1550151 - DNA, 15 bp, Homo sapiens
ccagaagggcaaatg

SEQ ID NO: 1550152 - DNA, 15 bp, Homo sapiens
cagaagggcaaatgc

SEQ ID NO: 1550153 - DNA, 15 bp, Homo sapiens
agaagggcaaatgca

SEQ ID NO: 1550154 - DNA, 15 bp, Homo sapiens
gaagggcaaatgcaa

SEQ ID NO: 1550155 - DNA, 15 bp, Homo sapiens
aagggcaaatgcaaa

SEQ ID NO: 1550156 - DNA, 15 bp, Homo sapiens
agggcaaatgcaaat

SEQ ID NO: 1550157 - DNA, 15 bp, Homo sapiens
gggcaaatgcaaatt

SEQ ID NO: 1550158 - DNA, 15 bp, Homo sapiens
ggcaaatgcaaatta

SEQ ID NO: 1550159 - DNA, 15 bp, Homo sapiens
gcaaatgcaaattaa

SEQ ID NO: 1550160 - DNA, 15 bp, Homo sapiens
caaatgcaaattaaa

SEQ ID NO: 1550161 - DNA, 15 bp, Homo sapiens
aatgcaaattaaaaa

SEQ ID NO: 1550162 - DNA, 15 bp, Homo sapiens
atgcaaattaaaaat

SEQ ID NO: 1550163 - DNA, 15 bp, Homo sapiens
tgcaaattaaaaatg

SEQ ID NO: 1550164 - DNA, 15 bp, Homo sapiens
gcaaattaaaaatga

SEQ ID NO: 1550165 - DNA, 15 bp, Homo sapiens
caaattaaaaatgag

SEQ ID NO: 1550166 - DNA, 15 bp, Homo sapiens
aaattaaaaatgaga

SEQ ID NO: 1550167 - DNA, 15 bp, Homo sapiens
aattaaaaatgagaa

SEQ ID NO: 1550168 - DNA, 15 bp, Homo sapiens
attaaaaatgagaat

SEQ ID NO: 1550169 - DNA, 15 bp, Homo sapiens
ttaaaaatgagaata

SEQ ID NO: 1550170 - DNA, 15 bp, Homo sapiens
taaaaatgagaataa

SEQ ID NO: 1550171 - DNA, 15 bp, Homo sapiens
aaaaatgagaataag

SEQ ID NO: 1550172 - DNA, 15 bp, Homo sapiens
aaaatgagaataagt

SEQ ID NO: 1550173 - DNA, 15 bp, Homo sapiens
aaatgagaataagtt

SEQ ID NO: 1550174 - DNA, 15 bp, Homo sapiens
aatgagaataagttt

SEQ ID NO: 1550175 - DNA, 15 bp, Homo sapiens
atgagaataagttta

SEQ ID NO: 1550176 - DNA, 15 bp, Homo sapiens
tgagaataagtttat

SEQ ID NO: 1550177 - DNA, 15 bp, Homo sapiens
gagaataagtttatt

SEQ ID NO: 1550178 - DNA, 15 bp, Homo sapiens
agaataagtttattc

SEQ ID NO: 1550179 - DNA, 15 bp, Homo sapiens
gaataagtttattct

SEQ ID NO: 1550180 - DNA, 15 bp, Homo sapiens
aataagtttattctc

SEQ ID NO: 1550181 - DNA, 15 bp, Homo sapiens
ataagtttattctcc

SEQ ID NO: 1550182 - DNA, 15 bp, Homo sapiens
taagtttattctcct

SEQ ID NO: 1550183 - DNA, 15 bp, Homo sapiens
aagtttattctcctt

SEQ ID NO: 1550184 - DNA, 15 bp, Homo sapiens
agtttattctccttg

SEQ ID NO: 1550185 - DNA, 15 bp, Homo sapiens
gtttattctccttgg

SEQ ID NO: 1550186 - DNA, 15 bp, Homo sapiens
tttattctccttggt

SEQ ID NO: 1550187 - DNA, 15 bp, Homo sapiens
ttattctccttggtg

SEQ ID NO: 1550188 - DNA, 15 bp, Homo sapiens
tattctccttggtga

SEQ ID NO: 1550189 - DNA, 15 bp, Homo sapiens
attctccttggtgaa

SEQ ID NO: 1550190 - DNA, 15 bp, Homo sapiens
ttctccttggtgaaa

SEQ ID NO: 1550191 - DNA, 15 bp, Homo sapiens
tctccttggtgaaaa

SEQ ID NO: 1550192 - DNA, 15 bp, Homo sapiens
ctccttggtgaaaaa

SEQ ID NO: 1550193 - DNA, 15 bp, Homo sapiens
tccttggtgaaaaaa

SEQ ID NO: 1550194 - DNA, 15 bp, Homo sapiens
ccttggtgaaaaaaa

SEQ ID NO: 1550195 - DNA, 15 bp, Homo sapiens
cttggtgaaaaaaaa

SEQ ID NO: 1550196 - DNA, 15 bp, Homo sapiens
ttggtgaaaaaaaaa

SEQ ID NO: 1550197 - DNA, 15 bp, Homo sapiens
tggtgaaaaaaaaaa

SEQ ID NO: 1550198 - DNA, 15 bp, Homo sapiens
ggtgaaaaaaaaaaa

SEQ ID NO: 1550199 - DNA, 15 bp, Homo sapiens
gtgaaaaaaaaaaaa

SEQ ID NO: 1550200 - DNA, 15 bp, Homo sapiens
tgaaaaaaaaaaaaa

SEQ ID NO: 1550201 - DNA, 15 bp, Homo sapiens
aaaaaaaaagacttt

SEQ ID NO: 1550202 - DNA, 15 bp, Homo sapiens
aaaaaaaagactttc

SEQ ID NO: 1550203 - DNA, 15 bp, Homo sapiens
aaaaaaagactttcc

SEQ ID NO: 1550204 - DNA, 15 bp, Homo sapiens
aaaaaagactttccc

SEQ ID NO: 1550205 - DNA, 15 bp, Homo sapiens
aaaaagactttcccc

SEQ ID NO: 1550206 - DNA, 15 bp, Homo sapiens
aaaagactttcccct

SEQ ID NO: 1550207 - DNA, 15 bp, Homo sapiens
aaagactttcccctc

SEQ ID NO: 1550208 - DNA, 15 bp, Homo sapiens
aagactttcccctct

SEQ ID NO: 1550209 - DNA, 15 bp, Homo sapiens
agactttcccctctc

SEQ ID NO: 1550210 - DNA, 15 bp, Homo sapiens
gactttcccctctcc

SEQ ID NO: 1550211 - DNA, 15 bp, Homo sapiens
actttcccctctcct

SEQ ID NO: 1550212 - DNA, 15 bp, Homo sapiens
ctttcccctctcctt

SEQ ID NO: 1550213 - DNA, 15 bp, Homo sapiens
tttcccctctccttt

SEQ ID NO: 1550214 - DNA, 15 bp, Homo sapiens
ttcccctctcctttt

SEQ ID NO: 1550215 - DNA, 15 bp, Homo sapiens
tcccctctccttttt

SEQ ID NO: 1550216 - DNA, 15 bp, Homo sapiens
cccctctcctttttc

SEQ ID NO: 1550217 - DNA, 15 bp, Homo sapiens
ccctctcctttttct

SEQ ID NO: 1550218 - DNA, 15 bp, Homo sapiens
cctctcctttttctt

SEQ ID NO: 1550219 - DNA, 15 bp, Homo sapiens
ctctcctttttcttt

SEQ ID NO: 1550220 - DNA, 15 bp, Homo sapiens
tctcctttttcttta

SEQ ID NO: 1550221 - DNA, 15 bp, Homo sapiens
ctcctttttctttag

SEQ ID NO: 1550222 - DNA, 15 bp, Homo sapiens
tcctttttctttaga

SEQ ID NO: 1550223 - DNA, 15 bp, Homo sapiens
cctttttctttagaa

SEQ ID NO: 1550224 - DNA, 15 bp, Homo sapiens
ctttttctttagaaa

SEQ ID NO: 1550225 - DNA, 15 bp, Homo sapiens
tttttctttagaaaa

SEQ ID NO: 1550226 - DNA, 15 bp, Homo sapiens
ttttctttagaaaat

SEQ ID NO: 1550227 - DNA, 15 bp, Homo sapiens
tttctttagaaaatc

SEQ ID NO: 1550228 - DNA, 15 bp, Homo sapiens
ttctttagaaaatct

SEQ ID NO: 1550229 - DNA, 15 bp, Homo sapiens
tctttagaaaatcta

SEQ ID NO: 1550230 - DNA, 15 bp, Homo sapiens
ctttagaaaatctat

SEQ ID NO: 1550231 - DNA, 15 bp, Homo sapiens
tttagaaaatctatc

SEQ ID NO: 1550232 - DNA, 15 bp, Homo sapiens
ttagaaaatctatca

SEQ ID NO: 1550233 - DNA, 15 bp, Homo sapiens
tagaaaatctatcat

SEQ ID NO: 1550234 - DNA, 15 bp, Homo sapiens
agaaaatctatcatt

SEQ ID NO: 1550235 - DNA, 15 bp, Homo sapiens
gaaaatctatcattg

SEQ ID NO: 1550236 - DNA, 15 bp, Homo sapiens
aaaatctatcattgc

SEQ ID NO: 1550237 - DNA, 15 bp, Homo sapiens
aaatctatcattgca

SEQ ID NO: 1550238 - DNA, 15 bp, Homo sapiens
aatctatcattgcaa

SEQ ID NO: 1550239 - DNA, 15 bp, Homo sapiens
atctatcattgcaag

SEQ ID NO: 1550240 - DNA, 15 bp, Homo sapiens
tctatcattgcaagt

SEQ ID NO: 1550241 - DNA, 15 bp, Homo sapiens
ctatcattgcaagtt

SEQ ID NO: 1550242 - DNA, 15 bp, Homo sapiens
tatcattgcaagttc

SEQ ID NO: 1550243 - DNA, 15 bp, Homo sapiens
atcattgcaagttcc

SEQ ID NO: 1550244 - DNA, 15 bp, Homo sapiens
tcattgcaagttcct

SEQ ID NO: 1550245 - DNA, 15 bp, Homo sapiens
cattgcaagttcctt

SEQ ID NO: 1550246 - DNA, 15 bp, Homo sapiens
attgcaagttccttc

SEQ ID NO: 1550247 - DNA, 15 bp, Homo sapiens
ttgcaagttccttcc

SEQ ID NO: 1550248 - DNA, 15 bp, Homo sapiens
tgcaagttccttcct

SEQ ID NO: 1550249 - DNA, 15 bp, Homo sapiens
gcaagttccttcctg

SEQ ID NO: 1550250 - DNA, 15 bp, Homo sapiens
caagttccttcctgg

SEQ ID NO: 1550251 - DNA, 15 bp, Homo sapiens
aagttccttcctgga

SEQ ID NO: 1550252 - DNA, 15 bp, Homo sapiens
agttccttcctggac

SEQ ID NO: 1550253 - DNA, 15 bp, Homo sapiens
gttccttcctggact

SEQ ID NO: 1550254 - DNA, 15 bp, Homo sapiens
ttccttcctggactt

SEQ ID NO: 1550255 - DNA, 15 bp, Homo sapiens
tccttcctggacttt

SEQ ID NO: 1550256 - DNA, 15 bp, Homo sapiens
ccttcctggactttt

SEQ ID NO: 1550257 - DNA, 15 bp, Homo sapiens
cttcctggacttttt

SEQ ID NO: 1550258 - DNA, 15 bp, Homo sapiens
ttcctggactttttt

SEQ ID NO: 1550259 - DNA, 15 bp, Homo sapiens
tcctggacttttttt

SEQ ID NO: 1550260 - DNA, 15 bp, Homo sapiens
cctggacttttttta

SEQ ID NO: 1550261 - DNA, 15 bp, Homo sapiens
ctggactttttttat

SEQ ID NO: 1550262 - DNA, 15 bp, Homo sapiens
tggactttttttatg

SEQ ID NO: 1550263 - DNA, 15 bp, Homo sapiens
ggactttttttatgt

SEQ ID NO: 1550264 - DNA, 15 bp, Homo sapiens
gactttttttatgta

SEQ ID NO: 1550265 - DNA, 15 bp, Homo sapiens
actttttttatgtag

SEQ ID NO: 1550266 - DNA, 15 bp, Homo sapiens
ctttttttatgtaga

SEQ ID NO: 1550267 - DNA, 15 bp, Homo sapiens
tttttttatgtagat

SEQ ID NO: 1550268 - DNA, 15 bp, Homo sapiens
ttttttatgtagatc

SEQ ID NO: 1550269 - DNA, 15 bp, Homo sapiens
tttttatgtagatct

SEQ ID NO: 1550270 - DNA, 15 bp, Homo sapiens
ttttatgtagatctg

SEQ ID NO: 1550271 - DNA, 15 bp, Homo sapiens
tttatgtagatctgt

SEQ ID NO: 1550272 - DNA, 15 bp, Homo sapiens
ttatgtagatctgtt

SEQ ID NO: 1550273 - DNA, 15 bp, Homo sapiens
tatgtagatctgttc

SEQ ID NO: 1550274 - DNA, 15 bp, Homo sapiens
atgtagatctgttca

SEQ ID NO: 1550275 - DNA, 15 bp, Homo sapiens
tgtagatctgttcaa

SEQ ID NO: 1550276 - DNA, 15 bp, Homo sapiens
gtagatctgttcaaa

SEQ ID NO: 1550277 - DNA, 15 bp, Homo sapiens
tagatctgttcaaaa

SEQ ID NO: 1550278 - DNA, 15 bp, Homo sapiens
agatctgttcaaaag

SEQ ID NO: 1550279 - DNA, 15 bp, Homo sapiens
gatctgttcaaaagc

SEQ ID NO: 1550280 - DNA, 15 bp, Homo sapiens
atctgttcaaaagct

SEQ ID NO: 1550281 - DNA, 15 bp, Homo sapiens
tctgttcaaaagcta

SEQ ID NO: 1550282 - DNA, 15 bp, Homo sapiens
ctgttcaaaagctaa

SEQ ID NO: 1550283 - DNA, 15 bp, Homo sapiens
tgttcaaaagctaaa

SEQ ID NO: 1550284 - DNA, 15 bp, Homo sapiens
gttcaaaagctaaat

SEQ ID NO: 1550285 - DNA, 15 bp, Homo sapiens
ttcaaaagctaaata

SEQ ID NO: 1550286 - DNA, 15 bp, Homo sapiens
tcaaaagctaaataa

SEQ ID NO: 1550287 - DNA, 15 bp, Homo sapiens
caaaagctaaataag

SEQ ID NO: 1550288 - DNA, 15 bp, Homo sapiens
aaaagctaaataagc

SEQ ID NO: 1550289 - DNA, 15 bp, Homo sapiens
aaagctaaataagcc

SEQ ID NO: 1550290 - DNA, 15 bp, Homo sapiens
aagctaaataagcct

SEQ ID NO: 1550291 - DNA, 15 bp, Homo sapiens
agctaaataagcctc

SEQ ID NO: 1550292 - DNA, 15 bp, Homo sapiens
gctaaataagcctct

SEQ ID NO: 1550293 - DNA, 15 bp, Homo sapiens
ctaaataagcctctt

SEQ ID NO: 1550294 - DNA, 15 bp, Homo sapiens
taaataagcctcttt

SEQ ID NO: 1550295 - DNA, 15 bp, Homo sapiens
aaataagcctctttc

SEQ ID NO: 1550296 - DNA, 15 bp, Homo sapiens
aataagcctctttca

SEQ ID NO: 1550297 - DNA, 15 bp, Homo sapiens
ataagcctctttcaa

SEQ ID NO: 1550298 - DNA, 15 bp, Homo sapiens
taagcctctttcaag

SEQ ID NO: 1550299 - DNA, 15 bp, Homo sapiens
aagcctctttcaagt

SEQ ID NO: 1550300 - DNA, 15 bp, Homo sapiens
agcctctttcaagtt

SEQ ID NO: 1550301 - DNA, 15 bp, Homo sapiens
gcctctttcaagttt

SEQ ID NO: 1550302 - DNA, 15 bp, Homo sapiens
cctctttcaagtttc

SEQ ID NO: 1550303 - DNA, 15 bp, Homo sapiens
ctctttcaagtttca

SEQ ID NO: 1550304 - DNA, 15 bp, Homo sapiens
tctttcaagtttcac

SEQ ID NO: 1550305 - DNA, 15 bp, Homo sapiens
ctttcaagtttcaca

SEQ ID NO: 1550306 - DNA, 15 bp, Homo sapiens
tttcaagtttcacat

SEQ ID NO: 1550307 - DNA, 15 bp, Homo sapiens
ttcaagtttcacatc

SEQ ID NO: 1550308 - DNA, 15 bp, Homo sapiens
tcaagtttcacatcc

SEQ ID NO: 1550309 - DNA, 15 bp, Homo sapiens
caagtttcacatccc

SEQ ID NO: 1550310 - DNA, 15 bp, Homo sapiens
aagtttcacatccca

SEQ ID NO: 1550311 - DNA, 15 bp, Homo sapiens
agtttcacatcccag

SEQ ID NO: 1550312 - DNA, 15 bp, Homo sapiens
gtttcacatcccagg

SEQ ID NO: 1550313 - DNA, 15 bp, Homo sapiens
tttcacatcccagga

SEQ ID NO: 1550314 - DNA, 15 bp, Homo sapiens
ttcacatcccaggaa

SEQ ID NO: 1550315 - DNA, 15 bp, Homo sapiens
tcacatcccaggaat

SEQ ID NO: 1550316 - DNA, 15 bp, Homo sapiens
cacatcccaggaatg

SEQ ID NO: 1550317 - DNA, 15 bp, Homo sapiens
acatcccaggaatgt

SEQ ID NO: 1550318 - DNA, 15 bp, Homo sapiens
catcccaggaatgtc

SEQ ID NO: 1550319 - DNA, 15 bp, Homo sapiens
atcccaggaatgtct

SEQ ID NO: 1550320 - DNA, 15 bp, Homo sapiens
tcccaggaatgtctc

SEQ ID NO: 1550321 - DNA, 15 bp, Homo sapiens
cccaggaatgtctcc

SEQ ID NO: 1550322 - DNA, 15 bp, Homo sapiens
ccaggaatgtctcct

SEQ ID NO: 1550323 - DNA, 15 bp, Homo sapiens
caggaatgtctcctt

SEQ ID NO: 1550324 - DNA, 15 bp, Homo sapiens
aggaatgtctcctta

SEQ ID NO: 1550325 - DNA, 15 bp, Homo sapiens
ggaatgtctccttaa

SEQ ID NO: 1550326 - DNA, 15 bp, Homo sapiens
gaatgtctccttaag

SEQ ID NO: 1550327 - DNA, 15 bp, Homo sapiens
aatgtctccttaagg

SEQ ID NO: 1550328 - DNA, 15 bp, Homo sapiens
atgtctccttaagga

SEQ ID NO: 1550329 - DNA, 15 bp, Homo sapiens
tgtctccttaaggac

SEQ ID NO: 1550330 - DNA, 15 bp, Homo sapiens
gtctccttaaggacc

SEQ ID NO: 1550331 - DNA, 15 bp, Homo sapiens
tctccttaaggacct

SEQ ID NO: 1550332 - DNA, 15 bp, Homo sapiens
ctccttaaggaccta

SEQ ID NO: 1550333 - DNA, 15 bp, Homo sapiens
tccttaaggacctag

SEQ ID NO: 1550334 - DNA, 15 bp, Homo sapiens
ccttaaggacctagg

SEQ ID NO: 1550335 - DNA, 15 bp, Homo sapiens
cttaaggacctagga

SEQ ID NO: 1550336 - DNA, 15 bp, Homo sapiens
ttaaggacctaggag

SEQ ID NO: 1550337 - DNA, 15 bp, Homo sapiens
taaggacctaggagc

SEQ ID NO: 1550338 - DNA, 15 bp, Homo sapiens
aaggacctaggagcc

SEQ ID NO: 1550339 - DNA, 15 bp, Homo sapiens
aggacctaggagcca

SEQ ID NO: 1550340 - DNA, 15 bp, Homo sapiens
ggacctaggagccac

SEQ ID NO: 1550341 - DNA, 15 bp, Homo sapiens
gacctaggagccacc

SEQ ID NO: 1550342 - DNA, 15 bp, Homo sapiens
acctaggagccacca

SEQ ID NO: 1550343 - DNA, 15 bp, Homo sapiens
cctaggagccaccat

SEQ ID NO: 1550344 - DNA, 15 bp, Homo sapiens
ctaggagccaccatt

SEQ ID NO: 1550345 - DNA, 15 bp, Homo sapiens
taggagccaccattt

SEQ ID NO: 1550346 - DNA, 15 bp, Homo sapiens
aggagccaccatttg

SEQ ID NO: 1550347 - DNA, 15 bp, Homo sapiens
ggagccaccatttga

SEQ ID NO: 1550348 - DNA, 15 bp, Homo sapiens
gagccaccatttgaa

SEQ ID NO: 1550349 - DNA, 15 bp, Homo sapiens
agccaccatttgaag

SEQ ID NO: 1550350 - DNA, 15 bp, Homo sapiens
gccaccatttgaagt

SEQ ID NO: 1550351 - DNA, 15 bp, Homo sapiens
ccaccatttgaagtg

SEQ ID NO: 1550352 - DNA, 15 bp, Homo sapiens
caccatttgaagtgt

SEQ ID NO: 1550353 - DNA, 15 bp, Homo sapiens
accatttgaagtgta

SEQ ID NO: 1550354 - DNA, 15 bp, Homo sapiens
ccatttgaagtgtaa

SEQ ID NO: 1550355 - DNA, 15 bp, Homo sapiens
catttgaagtgtaat

SEQ ID NO: 1550356 - DNA, 15 bp, Homo sapiens
atttgaagtgtaatc

SEQ ID NO: 1550357 - DNA, 15 bp, Homo sapiens
tttgaagtgtaatca

SEQ ID NO: 1550358 - DNA, 15 bp, Homo sapiens
ttgaagtgtaatcac

SEQ ID NO: 1550359 - DNA, 15 bp, Homo sapiens
tgaagtgtaatcacc

SEQ ID NO: 1550360 - DNA, 15 bp, Homo sapiens
gaagtgtaatcacca

SEQ ID NO: 1550361 - DNA, 15 bp, Homo sapiens
aagtgtaatcaccaa

SEQ ID NO: 1550362 - DNA, 15 bp, Homo sapiens
agtgtaatcaccaag

SEQ ID NO: 1550363 - DNA, 15 bp, Homo sapiens
gtgtaatcaccaagg

SEQ ID NO: 1550364 - DNA, 15 bp, Homo sapiens
tgtaatcaccaaggg

SEQ ID NO: 1550365 - DNA, 15 bp, Homo sapiens
gtaatcaccaaggga

SEQ ID NO: 1550366 - DNA, 15 bp, Homo sapiens
taatcaccaagggag

SEQ ID NO: 1550367 - DNA, 15 bp, Homo sapiens
aatcaccaagggaga

SEQ ID NO: 1550368 - DNA, 15 bp, Homo sapiens
atcaccaagggagat

SEQ ID NO: 1550369 - DNA, 15 bp, Homo sapiens
tcaccaagggagata

SEQ ID NO: 1550370 - DNA, 15 bp, Homo sapiens
caccaagggagatac

SEQ ID NO: 1550371 - DNA, 15 bp, Homo sapiens
accaagggagataca

SEQ ID NO: 1550372 - DNA, 15 bp, Homo sapiens
ccaagggagatacat

SEQ ID NO: 1550373 - DNA, 15 bp, Homo sapiens
caagggagatacatc

SEQ ID NO: 1550374 - DNA, 15 bp, Homo sapiens
aagggagatacatcc

SEQ ID NO: 1550375 - DNA, 15 bp, Homo sapiens
agggagatacatcct

SEQ ID NO: 1550376 - DNA, 15 bp, Homo sapiens
gggagatacatcctt

SEQ ID NO: 1550377 - DNA, 15 bp, Homo sapiens
ggagatacatcctta

SEQ ID NO: 1550378 - DNA, 15 bp, Homo sapiens
gagatacatccttat

SEQ ID NO: 1550379 - DNA, 15 bp, Homo sapiens
agatacatccttatc

SEQ ID NO: 1550380 - DNA, 15 bp, Homo sapiens
gatacatccttatct

SEQ ID NO: 1550381 - DNA, 15 bp, Homo sapiens
atacatccttatctc

SEQ ID NO: 1550382 - DNA, 15 bp, Homo sapiens
tacatccttatctcc

SEQ ID NO: 1550383 - DNA, 15 bp, Homo sapiens
acatccttatctccc

SEQ ID NO: 1550384 - DNA, 15 bp, Homo sapiens
catccttatctccca

SEQ ID NO: 1550385 - DNA, 15 bp, Homo sapiens
atccttatctcccag

SEQ ID NO: 1550386 - DNA, 15 bp, Homo sapiens
tccttatctcccagt

SEQ ID NO: 1550387 - DNA, 15 bp, Homo sapiens
ccttatctcccagtt

SEQ ID NO: 1550388 - DNA, 15 bp, Homo sapiens
cttatctcccagttt

SEQ ID NO: 1550389 - DNA, 15 bp, Homo sapiens
ttatctcccagtttc

SEQ ID NO: 1550390 - DNA, 15 bp, Homo sapiens
tatctcccagtttcc

SEQ ID NO: 1550391 - DNA, 15 bp, Homo sapiens
atctcccagtttccg

SEQ ID NO: 1550392 - DNA, 15 bp, Homo sapiens
tctcccagtttccgt

SEQ ID NO: 1550393 - DNA, 15 bp, Homo sapiens
ctcccagtttccgtg

SEQ ID NO: 1550394 - DNA, 15 bp, Homo sapiens
tcccagtttccgtgg

SEQ ID NO: 1550395 - DNA, 15 bp, Homo sapiens
cccagtttccgtggg

SEQ ID NO: 1550396 - DNA, 15 bp, Homo sapiens
ccagtttccgtgggc

SEQ ID NO: 1550397 - DNA, 15 bp, Homo sapiens
cagtttccgtgggca

SEQ ID NO: 1550398 - DNA, 15 bp, Homo sapiens
agtttccgtgggcaa

SEQ ID NO: 1550399 - DNA, 15 bp, Homo sapiens
gtttccgtgggcaaa

SEQ ID NO: 1550400 - DNA, 15 bp, Homo sapiens
tttccgtgggcaaag

SEQ ID NO: 1550401 - DNA, 15 bp, Homo sapiens
ttccgtgggcaaagg

SEQ ID NO: 1550402 - DNA, 15 bp, Homo sapiens
tccgtgggcaaaggg

SEQ ID NO: 1550403 - DNA, 15 bp, Homo sapiens
ccgtgggcaaagggg

SEQ ID NO: 1550404 - DNA, 15 bp, Homo sapiens
cgtgggcaaagggga

SEQ ID NO: 1550405 - DNA, 15 bp, Homo sapiens
gtgggcaaaggggag

SEQ ID NO: 1550406 - DNA, 15 bp, Homo sapiens
tgggcaaaggggagc

SEQ ID NO: 1550407 - DNA, 15 bp, Homo sapiens
gggcaaaggggagcc

SEQ ID NO: 1550408 - DNA, 15 bp, Homo sapiens
ggcaaaggggagcct

SEQ ID NO: 1550409 - DNA, 15 bp, Homo sapiens
gcaaaggggagccta

SEQ ID NO: 1550410 - DNA, 15 bp, Homo sapiens
caaaggggagcctaa

SEQ ID NO: 1550411 - DNA, 15 bp, Homo sapiens
aaaggggagcctaac

SEQ ID NO: 1550412 - DNA, 15 bp, Homo sapiens
aaggggagcctaact

SEQ ID NO: 1550413 - DNA, 15 bp, Homo sapiens
aggggagcctaactt

SEQ ID NO: 1550414 - DNA, 15 bp, Homo sapiens
ggggagcctaacttt

SEQ ID NO: 1550415 - DNA, 15 bp, Homo sapiens
gggagcctaacttta

SEQ ID NO: 1550416 - DNA, 15 bp, Homo sapiens
ggagcctaactttag

SEQ ID NO: 1550417 - DNA, 15 bp, Homo sapiens
gagcctaactttagc

SEQ ID NO: 1550418 - DNA, 15 bp, Homo sapiens
agcctaactttagcc

SEQ ID NO: 1550419 - DNA, 15 bp, Homo sapiens
gcctaactttagccc

SEQ ID NO: 1550420 - DNA, 15 bp, Homo sapiens
cctaactttagcccg

SEQ ID NO: 1550421 - DNA, 15 bp, Homo sapiens
ctaactttagcccgg

SEQ ID NO: 1550422 - DNA, 15 bp, Homo sapiens
taactttagcccggt

SEQ ID NO: 1550423 - DNA, 15 bp, Homo sapiens
aactttagcccggtg

SEQ ID NO: 1550424 - DNA, 15 bp, Homo sapiens
actttagcccggtgc

SEQ ID NO: 1550425 - DNA, 15 bp, Homo sapiens
ctttagcccggtgcc

SEQ ID NO: 1550426 - DNA, 15 bp, Homo sapiens
tttagcccggtgcct

SEQ ID NO: 1550427 - DNA, 15 bp, Homo sapiens
ttagcccggtgccta

SEQ ID NO: 1550428 - DNA, 15 bp, Homo sapiens
tagcccggtgcctag

SEQ ID NO: 1550429 - DNA, 15 bp, Homo sapiens
agcccggtgcctagc

SEQ ID NO: 1550430 - DNA, 15 bp, Homo sapiens
gcccggtgcctagct

SEQ ID NO: 1550431 - DNA, 15 bp, Homo sapiens
cccggtgcctagctc

SEQ ID NO: 1550432 - DNA, 15 bp, Homo sapiens
ccggtgcctagctca

SEQ ID NO: 1550433 - DNA, 15 bp, Homo sapiens
cggtgcctagctcaa

SEQ ID NO: 1550434 - DNA, 15 bp, Homo sapiens
ggtgcctagctcaag

SEQ ID NO: 1550435 - DNA, 15 bp, Homo sapiens
gtgcctagctcaagt

SEQ ID NO: 1550436 - DNA, 15 bp, Homo sapiens
tgcctagctcaagtt

SEQ ID NO: 1550437 - DNA, 15 bp, Homo sapiens
gcctagctcaagttg

SEQ ID NO: 1550438 - DNA, 15 bp, Homo sapiens
cctagctcaagttgc

SEQ ID NO: 1550439 - DNA, 15 bp, Homo sapiens
ctagctcaagttgca

SEQ ID NO: 1550440 - DNA, 15 bp, Homo sapiens
tagctcaagttgcaa

SEQ ID NO: 1550441 - DNA, 15 bp, Homo sapiens
agctcaagttgcaaa

SEQ ID NO: 1550442 - DNA, 15 bp, Homo sapiens
gctcaagttgcaaac

SEQ ID NO: 1550443 - DNA, 15 bp, Homo sapiens
ctcaagttgcaaaca

SEQ ID NO: 1550444 - DNA, 15 bp, Homo sapiens
tcaagttgcaaacac

SEQ ID NO: 1550445 - DNA, 15 bp, Homo sapiens
caagttgcaaacaca

SEQ ID NO: 1550446 - DNA, 15 bp, Homo sapiens
aagttgcaaacacac

SEQ ID NO: 1550447 - DNA, 15 bp, Homo sapiens
agttgcaaacacact

SEQ ID NO: 1550448 - DNA, 15 bp, Homo sapiens
gttgcaaacacactt

SEQ ID NO: 1550449 - DNA, 15 bp, Homo sapiens
ttgcaaacacacttc

SEQ ID NO: 1550450 - DNA, 15 bp, Homo sapiens
tgcaaacacacttcc

SEQ ID NO: 1550451 - DNA, 15 bp, Homo sapiens
gcaaacacacttcca

SEQ ID NO: 1550452 - DNA, 15 bp, Homo sapiens
caaacacacttccag

SEQ ID NO: 1550453 - DNA, 15 bp, Homo sapiens
aaacacacttccagt

SEQ ID NO: 1550454 - DNA, 15 bp, Homo sapiens
aacacacttccagtc

SEQ ID NO: 1550455 - DNA, 15 bp, Homo sapiens
acacacttccagtct

SEQ ID NO: 1550456 - DNA, 15 bp, Homo sapiens
cacacttccagtctt

SEQ ID NO: 1550457 - DNA, 15 bp, Homo sapiens
acacttccagtctta

SEQ ID NO: 1550458 - DNA, 15 bp, Homo sapiens
cacttccagtcttaa

SEQ ID NO: 1550459 - DNA, 15 bp, Homo sapiens
acttccagtcttaaa

SEQ ID NO: 1550460 - DNA, 15 bp, Homo sapiens
cttccagtcttaaag

SEQ ID NO: 1550461 - DNA, 15 bp, Homo sapiens
ttccagtcttaaagg

SEQ ID NO: 1550462 - DNA, 15 bp, Homo sapiens
tccagtcttaaagga

SEQ ID NO: 1550463 - DNA, 15 bp, Homo sapiens
ccagtcttaaaggaa

SEQ ID NO: 1550464 - DNA, 15 bp, Homo sapiens
cagtcttaaaggaat

SEQ ID NO: 1550465 - DNA, 15 bp, Homo sapiens
agtcttaaaggaatg

SEQ ID NO: 1550466 - DNA, 15 bp, Homo sapiens
gtcttaaaggaatga

SEQ ID NO: 1550467 - DNA, 15 bp, Homo sapiens
tcttaaaggaatgaa

SEQ ID NO: 1550468 - DNA, 15 bp, Homo sapiens
ttaaaggaatgaatt

SEQ ID NO: 1550469 - DNA, 15 bp, Homo sapiens
taaaggaatgaattt

SEQ ID NO: 1550470 - DNA, 15 bp, Homo sapiens
aaaggaatgaattta

SEQ ID NO: 1550471 - DNA, 15 bp, Homo sapiens
aaggaatgaatttat

SEQ ID NO: 1550472 - DNA, 15 bp, Homo sapiens
aggaatgaatttatt

SEQ ID NO: 1550473 - DNA, 15 bp, Homo sapiens
ggaatgaatttattt

SEQ ID NO: 1550474 - DNA, 15 bp, Homo sapiens
gaatgaatttatttt

SEQ ID NO: 1550475 - DNA, 15 bp, Homo sapiens
aatgaatttattttt

SEQ ID NO: 1550476 - DNA, 15 bp, Homo sapiens
atgaatttatttttt

SEQ ID NO: 1550477 - DNA, 15 bp, Homo sapiens
tgaatttattttttt

SEQ ID NO: 1550478 - DNA, 15 bp, Homo sapiens
gaatttatttttttt

SEQ ID NO: 1550479 - DNA, 15 bp, Homo sapiens
aatttattttttttc

SEQ ID NO: 1550480 - DNA, 15 bp, Homo sapiens
atttattttttttcc

SEQ ID NO: 1550481 - DNA, 15 bp, Homo sapiens
tttattttttttcct

SEQ ID NO: 1550482 - DNA, 15 bp, Homo sapiens
ttattttttttcctt

SEQ ID NO: 1550483 - DNA, 15 bp, Homo sapiens
tattttttttccttt

SEQ ID NO: 1550484 - DNA, 15 bp, Homo sapiens
attttttttccttta

SEQ ID NO: 1550485 - DNA, 15 bp, Homo sapiens
tttttttcctttagg

SEQ ID NO: 1550486 - DNA, 15 bp, Homo sapiens
ttttttcctttaggc

SEQ ID NO: 1550487 - DNA, 15 bp, Homo sapiens
tttttcctttaggca

SEQ ID NO: 1550488 - DNA, 15 bp, Homo sapiens
ttttcctttaggcaa

SEQ ID NO: 1550489 - DNA, 15 bp, Homo sapiens
tttcctttaggcaaa

SEQ ID NO: 1550490 - DNA, 15 bp, Homo sapiens
ttcctttaggcaaac

SEQ ID NO: 1550491 - DNA, 15 bp, Homo sapiens
tcctttaggcaaacc

SEQ ID NO: 1550492 - DNA, 15 bp, Homo sapiens
cctttaggcaaaccc

SEQ ID NO: 1550493 - DNA, 15 bp, Homo sapiens
ctttaggcaaaccca

SEQ ID NO: 1550494 - DNA, 15 bp, Homo sapiens
tttaggcaaacccag

SEQ ID NO: 1550495 - DNA, 15 bp, Homo sapiens
ttaggcaaacccagg

SEQ ID NO: 1550496 - DNA, 15 bp, Homo sapiens
taggcaaacccaggt

SEQ ID NO: 1550497 - DNA, 15 bp, Homo sapiens
aggcaaacccaggta

SEQ ID NO: 1550498 - DNA, 15 bp, Homo sapiens
ggcaaacccaggtag

SEQ ID NO: 1550499 - DNA, 15 bp, Homo sapiens
gcaaacccaggtagc

SEQ ID NO: 1550500 - DNA, 15 bp, Homo sapiens
caaacccaggtagcc

SEQ ID NO: 1550501 - DNA, 15 bp, Homo sapiens
aaacccaggtagcca

SEQ ID NO: 1550502 - DNA, 15 bp, Homo sapiens
aacccaggtagccac

SEQ ID NO: 1550503 - DNA, 15 bp, Homo sapiens
acccaggtagccacc

SEQ ID NO: 1550504 - DNA, 15 bp, Homo sapiens
cccaggtagccacca

SEQ ID NO: 1550505 - DNA, 15 bp, Homo sapiens
ccaggtagccaccac

SEQ ID NO: 1550506 - DNA, 15 bp, Homo sapiens
caggtagccaccaca

SEQ ID NO: 1550507 - DNA, 15 bp, Homo sapiens
aggtagccaccacag

SEQ ID NO: 1550508 - DNA, 15 bp, Homo sapiens
ggtagccaccacagt

SEQ ID NO: 1550509 - DNA, 15 bp, Homo sapiens
gtagccaccacagtt

SEQ ID NO: 1550510 - DNA, 15 bp, Homo sapiens
tagccaccacagtta

SEQ ID NO: 1550511 - DNA, 15 bp, Homo sapiens
agccaccacagttac

SEQ ID NO: 1550512 - DNA, 15 bp, Homo sapiens
gccaccacagttacc

SEQ ID NO: 1550513 - DNA, 15 bp, Homo sapiens
ccaccacagttacct

SEQ ID NO: 1550514 - DNA, 15 bp, Homo sapiens
caccacagttacctg

SEQ ID NO: 1550515 - DNA, 15 bp, Homo sapiens
accacagttacctgg

SEQ ID NO: 1550516 - DNA, 15 bp, Homo sapiens
ccacagttacctggg

SEQ ID NO: 1550517 - DNA, 15 bp, Homo sapiens
cacagttacctgggg

SEQ ID NO: 1550518 - DNA, 15 bp, Homo sapiens
acagttacctgggga

SEQ ID NO: 1550519 - DNA, 15 bp, Homo sapiens
cagttacctggggat

SEQ ID NO: 1550520 - DNA, 15 bp, Homo sapiens
agttacctggggatt

SEQ ID NO: 1550521 - DNA, 15 bp, Homo sapiens
gttacctggggattc

SEQ ID NO: 1550522 - DNA, 15 bp, Homo sapiens
ttacctggggattca

SEQ ID NO: 1550523 - DNA, 15 bp, Homo sapiens
tacctggggattcac

SEQ ID NO: 1550524 - DNA, 15 bp, Homo sapiens
acctggggattcaca

SEQ ID NO: 1550525 - DNA, 15 bp, Homo sapiens
cctggggattcacag

SEQ ID NO: 1550526 - DNA, 15 bp, Homo sapiens
ctggggattcacaga

SEQ ID NO: 1550527 - DNA, 15 bp, Homo sapiens
tggggattcacagag

SEQ ID NO: 1550528 - DNA, 15 bp, Homo sapiens
ggggattcacagaga

SEQ ID NO: 1550529 - DNA, 15 bp, Homo sapiens
gggattcacagagaa

SEQ ID NO: 1550530 - DNA, 15 bp, Homo sapiens
ggattcacagagaac

SEQ ID NO: 1550531 - DNA, 15 bp, Homo sapiens
gattcacagagaact

SEQ ID NO: 1550532 - DNA, 15 bp, Homo sapiens
attcacagagaactg

SEQ ID NO: 1550533 - DNA, 15 bp, Homo sapiens
ttcacagagaactgt

SEQ ID NO: 1550534 - DNA, 15 bp, Homo sapiens
tcacagagaactgtg

SEQ ID NO: 1550535 - DNA, 15 bp, Homo sapiens
cacagagaactgtgt

SEQ ID NO: 1550536 - DNA, 15 bp, Homo sapiens
acagagaactgtgtg

SEQ ID NO: 1550537 - DNA, 15 bp, Homo sapiens
cagagaactgtgtgt

SEQ ID NO: 1550538 - DNA, 15 bp, Homo sapiens
agagaactgtgtgtg

SEQ ID NO: 1550539 - DNA, 15 bp, Homo sapiens
gagaactgtgtgtga

SEQ ID NO: 1550540 - DNA, 15 bp, Homo sapiens
agaactgtgtgtgac

SEQ ID NO: 1550541 - DNA, 15 bp, Homo sapiens
gaactgtgtgtgacc

SEQ ID NO: 1550542 - DNA, 15 bp, Homo sapiens
aactgtgtgtgacca

SEQ ID NO: 1550543 - DNA, 15 bp, Homo sapiens
actgtgtgtgaccac

SEQ ID NO: 1550544 - DNA, 15 bp, Homo sapiens
ctgtgtgtgaccact

SEQ ID NO: 1550545 - DNA, 15 bp, Homo sapiens
tgtgtgtgaccactg

SEQ ID NO: 1550546 - DNA, 15 bp, Homo sapiens
gtgtgtgaccactgg

SEQ ID NO: 1550547 - DNA, 15 bp, Homo sapiens
tgtgtgaccactggt

SEQ ID NO: 1550548 - DNA, 15 bp, Homo sapiens
gtgtgaccactggtg

SEQ ID NO: 1550549 - DNA, 15 bp, Homo sapiens
tgtgaccactggtgc

SEQ ID NO: 1550550 - DNA, 15 bp, Homo sapiens
gtgaccactggtgct

SEQ ID NO: 1550551 - DNA, 15 bp, Homo sapiens
tgaccactggtgctg

SEQ ID NO: 1550552 - DNA, 15 bp, Homo sapiens
gaccactggtgctgt

SEQ ID NO: 1550553 - DNA, 15 bp, Homo sapiens
accactggtgctgtc

SEQ ID NO: 1550554 - DNA, 15 bp, Homo sapiens
ccactggtgctgtca

SEQ ID NO: 1550555 - DNA, 15 bp, Homo sapiens
cactggtgctgtcaa

SEQ ID NO: 1550556 - DNA, 15 bp, Homo sapiens
actggtgctgtcaag

SEQ ID NO: 1550557 - DNA, 15 bp, Homo sapiens
ctggtgctgtcaagt

SEQ ID NO: 1550558 - DNA, 15 bp, Homo sapiens
tggtgctgtcaagtc

SEQ ID NO: 1550559 - DNA, 15 bp, Homo sapiens
ggtgctgtcaagtcc

SEQ ID NO: 1550560 - DNA, 15 bp, Homo sapiens
gtgctgtcaagtcct

SEQ ID NO: 1550561 - DNA, 15 bp, Homo sapiens
tgctgtcaagtcctc

SEQ ID NO: 1550562 - DNA, 15 bp, Homo sapiens
gctgtcaagtcctct

SEQ ID NO: 1550563 - DNA, 15 bp, Homo sapiens
ctgtcaagtcctctt

SEQ ID NO: 1550564 - DNA, 15 bp, Homo sapiens
tgtcaagtcctctta

SEQ ID NO: 1550565 - DNA, 15 bp, Homo sapiens
gtcaagtcctcttac

SEQ ID NO: 1550566 - DNA, 15 bp, Homo sapiens
tcaagtcctcttacc

SEQ ID NO: 1550567 - DNA, 15 bp, Homo sapiens
caagtcctcttacct

SEQ ID NO: 1550568 - DNA, 15 bp, Homo sapiens
aagtcctcttacctg

SEQ ID NO: 1550569 - DNA, 15 bp, Homo sapiens
agtcctcttacctga

SEQ ID NO: 1550570 - DNA, 15 bp, Homo sapiens
gtcctcttacctgag

SEQ ID NO: 1550571 - DNA, 15 bp, Homo sapiens
tcctcttacctgagc

SEQ ID NO: 1550572 - DNA, 15 bp, Homo sapiens
cctcttacctgagca

SEQ ID NO: 1550573 - DNA, 15 bp, Homo sapiens
ctcttacctgagcac

SEQ ID NO: 1550574 - DNA, 15 bp, Homo sapiens
tcttacctgagcacc

SEQ ID NO: 1550575 - DNA, 15 bp, Homo sapiens
cttacctgagcacct

SEQ ID NO: 1550576 - DNA, 15 bp, Homo sapiens
ttacctgagcacctg

SEQ ID NO: 1550577 - DNA, 15 bp, Homo sapiens
tacctgagcacctgt

SEQ ID NO: 1550578 - DNA, 15 bp, Homo sapiens
acctgagcacctgtg

SEQ ID NO: 1550579 - DNA, 15 bp, Homo sapiens
cctgagcacctgtga

SEQ ID NO: 1550580 - DNA, 15 bp, Homo sapiens
ctgagcacctgtgac

SEQ ID NO: 1550581 - DNA, 15 bp, Homo sapiens
tgagcacctgtgacg

SEQ ID NO: 1550582 - DNA, 15 bp, Homo sapiens
gagcacctgtgacgt

SEQ ID NO: 1550583 - DNA, 15 bp, Homo sapiens
agcacctgtgacgtt

SEQ ID NO: 1550584 - DNA, 15 bp, Homo sapiens
gcacctgtgacgttt

SEQ ID NO: 1550585 - DNA, 15 bp, Homo sapiens
cacctgtgacgtttc

SEQ ID NO: 1550586 - DNA, 15 bp, Homo sapiens
acctgtgacgtttcc

SEQ ID NO: 1550587 - DNA, 15 bp, Homo sapiens
cctgtgacgtttccc

SEQ ID NO: 1550588 - DNA, 15 bp, Homo sapiens
ctgtgacgtttccct

SEQ ID NO: 1550589 - DNA, 15 bp, Homo sapiens
tgtgacgtttccctt

SEQ ID NO: 1550590 - DNA, 15 bp, Homo sapiens
gtgacgtttcccttg

SEQ ID NO: 1550591 - DNA, 15 bp, Homo sapiens
tgacgtttcccttga

SEQ ID NO: 1550592 - DNA, 15 bp, Homo sapiens
gacgtttcccttgag

SEQ ID NO: 1550593 - DNA, 15 bp, Homo sapiens
acgtttcccttgaga

SEQ ID NO: 1550594 - DNA, 15 bp, Homo sapiens
cgtttcccttgagaa

SEQ ID NO: 1550595 - DNA, 15 bp, Homo sapiens
gtttcccttgagaac

SEQ ID NO: 1550596 - DNA, 15 bp, Homo sapiens
tttcccttgagaacg

SEQ ID NO: 1550597 - DNA, 15 bp, Homo sapiens
ttcccttgagaacgt

SEQ ID NO: 1550598 - DNA, 15 bp, Homo sapiens
tcccttgagaacgtg

SEQ ID NO: 1550599 - DNA, 15 bp, Homo sapiens
cccttgagaacgtgt

SEQ ID NO: 1550600 - DNA, 15 bp, Homo sapiens
ccttgagaacgtgta

SEQ ID NO: 1550601 - DNA, 15 bp, Homo sapiens
cttgagaacgtgtac

SEQ ID NO: 1550602 - DNA, 15 bp, Homo sapiens
ttgagaacgtgtacg

SEQ ID NO: 1550603 - DNA, 15 bp, Homo sapiens
tgagaacgtgtacgg

SEQ ID NO: 1550604 - DNA, 15 bp, Homo sapiens
gagaacgtgtacggg

SEQ ID NO: 1550605 - DNA, 15 bp, Homo sapiens
agaacgtgtacggga

SEQ ID NO: 1550606 - DNA, 15 bp, Homo sapiens
gaacgtgtacgggat

SEQ ID NO: 1550607 - DNA, 15 bp, Homo sapiens
aacgtgtacgggatg

SEQ ID NO: 1550608 - DNA, 15 bp, Homo sapiens
acgtgtacgggatgg

SEQ ID NO: 1550609 - DNA, 15 bp, Homo sapiens
cgtgtacgggatggg

SEQ ID NO: 1550610 - DNA, 15 bp, Homo sapiens
gtgtacgggatgggt

SEQ ID NO: 1550611 - DNA, 15 bp, Homo sapiens
tgtacgggatgggtt

SEQ ID NO: 1550612 - DNA, 15 bp, Homo sapiens
gtacgggatgggttg

SEQ ID NO: 1550613 - DNA, 15 bp, Homo sapiens
tacgggatgggttgc

SEQ ID NO: 1550614 - DNA, 15 bp, Homo sapiens
acgggatgggttgca

SEQ ID NO: 1550615 - DNA, 15 bp, Homo sapiens
cgggatgggttgcac

SEQ ID NO: 1550616 - DNA, 15 bp, Homo sapiens
gggatgggttgcacc

SEQ ID NO: 1550617 - DNA, 15 bp, Homo sapiens
ggatgggttgcacct

SEQ ID NO: 1550618 - DNA, 15 bp, Homo sapiens
gatgggttgcacctg

SEQ ID NO: 1550619 - DNA, 15 bp, Homo sapiens
atgggttgcacctgg

SEQ ID NO: 1550620 - DNA, 15 bp, Homo sapiens
tgggttgcacctggt

SEQ ID NO: 1550621 - DNA, 15 bp, Homo sapiens
gggttgcacctggtt

SEQ ID NO: 1550622 - DNA, 15 bp, Homo sapiens
ggttgcacctggtta

SEQ ID NO: 1550623 - DNA, 15 bp, Homo sapiens
gttgcacctggttat

SEQ ID NO: 1550624 - DNA, 15 bp, Homo sapiens
ttgcacctggttata

SEQ ID NO: 1550625 - DNA, 15 bp, Homo sapiens
tgcacctggttatat

SEQ ID NO: 1550626 - DNA, 15 bp, Homo sapiens
gcacctggttatata

SEQ ID NO: 1550627 - DNA, 15 bp, Homo sapiens
cacctggttatatac

SEQ ID NO: 1550628 - DNA, 15 bp, Homo sapiens
acctggttatataca

SEQ ID NO: 1550629 - DNA, 15 bp, Homo sapiens
cctggttatatacaa

SEQ ID NO: 1550630 - DNA, 15 bp, Homo sapiens
ctggttatatacaag

SEQ ID NO: 1550631 - DNA, 15 bp, Homo sapiens
tggttatatacaagc

SEQ ID NO: 1550632 - DNA, 15 bp, Homo sapiens
ggttatatacaagcg

SEQ ID NO: 1550633 - DNA, 15 bp, Homo sapiens
gttatatacaagcgt

SEQ ID NO: 1550634 - DNA, 15 bp, Homo sapiens
ttatatacaagcgtg

SEQ ID NO: 1550635 - DNA, 15 bp, Homo sapiens
tatatacaagcgtga

SEQ ID NO: 1550636 - DNA, 15 bp, Homo sapiens
atatacaagcgtgag

SEQ ID NO: 1550637 - DNA, 15 bp, Homo sapiens
tatacaagcgtgaga

SEQ ID NO: 1550638 - DNA, 15 bp, Homo sapiens
atacaagcgtgagac

SEQ ID NO: 1550639 - DNA, 15 bp, Homo sapiens
tacaagcgtgagact

SEQ ID NO: 1550640 - DNA, 15 bp, Homo sapiens
acaagcgtgagactt

SEQ ID NO: 1550641 - DNA, 15 bp, Homo sapiens
caagcgtgagacttc

SEQ ID NO: 1550642 - DNA, 15 bp, Homo sapiens
aagcgtgagacttct

SEQ ID NO: 1550643 - DNA, 15 bp, Homo sapiens
agcgtgagacttctt

SEQ ID NO: 1550644 - DNA, 15 bp, Homo sapiens
gcgtgagacttcttt

SEQ ID NO: 1550645 - DNA, 15 bp, Homo sapiens
cgtgagacttctttc

SEQ ID NO: 1550646 - DNA, 15 bp, Homo sapiens
gtgagacttctttct

SEQ ID NO: 1550647 - DNA, 15 bp, Homo sapiens
tgagacttctttctg

SEQ ID NO: 1550648 - DNA, 15 bp, Homo sapiens
gagacttctttctgc

SEQ ID NO: 1550649 - DNA, 15 bp, Homo sapiens
agacttctttctgcc

SEQ ID NO: 1550650 - DNA, 15 bp, Homo sapiens
gacttctttctgcct

SEQ ID NO: 1550651 - DNA, 15 bp, Homo sapiens
acttctttctgcctt

SEQ ID NO: 1550652 - DNA, 15 bp, Homo sapiens
cttctttctgccttt

SEQ ID NO: 1550653 - DNA, 15 bp, Homo sapiens
ttctttctgcctttg

SEQ ID NO: 1550654 - DNA, 15 bp, Homo sapiens
tctttctgcctttgt

SEQ ID NO: 1550655 - DNA, 15 bp, Homo sapiens
ctttctgcctttgta

SEQ ID NO: 1550656 - DNA, 15 bp, Homo sapiens
tttctgcctttgtaa

SEQ ID NO: 1550657 - DNA, 15 bp, Homo sapiens
ttctgcctttgtaat

SEQ ID NO: 1550658 - DNA, 15 bp, Homo sapiens
tctgcctttgtaatt

SEQ ID NO: 1550659 - DNA, 15 bp, Homo sapiens
ctgcctttgtaattt

SEQ ID NO: 1550660 - DNA, 15 bp, Homo sapiens
tgcctttgtaattta

SEQ ID NO: 1550661 - DNA, 15 bp, Homo sapiens
gcctttgtaatttat

SEQ ID NO: 1550662 - DNA, 15 bp, Homo sapiens
cctttgtaatttatt

SEQ ID NO: 1550663 - DNA, 15 bp, Homo sapiens
ctttgtaatttatta

SEQ ID NO: 1550664 - DNA, 15 bp, Homo sapiens
tttgtaatttattag

SEQ ID NO: 1550665 - DNA, 15 bp, Homo sapiens
ttgtaatttattagc

SEQ ID NO: 1550666 - DNA, 15 bp, Homo sapiens
tgtaatttattagca

SEQ ID NO: 1550667 - DNA, 15 bp, Homo sapiens
gtaatttattagcag

SEQ ID NO: 1550668 - DNA, 15 bp, Homo sapiens
taatttattagcaga

SEQ ID NO: 1550669 - DNA, 15 bp, Homo sapiens
aatttattagcagat

SEQ ID NO: 1550670 - DNA, 15 bp, Homo sapiens
atttattagcagatt

SEQ ID NO: 1550671 - DNA, 15 bp, Homo sapiens
tttattagcagatta

SEQ ID NO: 1550672 - DNA, 15 bp, Homo sapiens
ttattagcagattat

SEQ ID NO: 1550673 - DNA, 15 bp, Homo sapiens
tattagcagattatc

SEQ ID NO: 1550674 - DNA, 15 bp, Homo sapiens
attagcagattatct

SEQ ID NO: 1550675 - DNA, 15 bp, Homo sapiens
ttagcagattatctg

SEQ ID NO: 1550676 - DNA, 15 bp, Homo sapiens
tagcagattatctgt

SEQ ID NO: 1550677 - DNA, 15 bp, Homo sapiens
agcagattatctgtg

SEQ ID NO: 1550678 - DNA, 15 bp, Homo sapiens
gcagattatctgtga

SEQ ID NO: 1550679 - DNA, 15 bp, Homo sapiens
cagattatctgtgat

SEQ ID NO: 1550680 - DNA, 15 bp, Homo sapiens
agattatctgtgatg

SEQ ID NO: 1550681 - DNA, 15 bp, Homo sapiens
gattatctgtgatga

SEQ ID NO: 1550682 - DNA, 15 bp, Homo sapiens
attatctgtgatgag

SEQ ID NO: 1550683 - DNA, 15 bp, Homo sapiens
ttatctgtgatgagc

SEQ ID NO: 1550684 - DNA, 15 bp, Homo sapiens
tatctgtgatgagca

SEQ ID NO: 1550685 - DNA, 15 bp, Homo sapiens
atctgtgatgagcat

SEQ ID NO: 1550686 - DNA, 15 bp, Homo sapiens
tctgtgatgagcatc

SEQ ID NO: 1550687 - DNA, 15 bp, Homo sapiens
ctgtgatgagcatcg

SEQ ID NO: 1550688 - DNA, 15 bp, Homo sapiens
tgtgatgagcatcgc

SEQ ID NO: 1550689 - DNA, 15 bp, Homo sapiens
gtgatgagcatcgca

SEQ ID NO: 1550690 - DNA, 15 bp, Homo sapiens
tgatgagcatcgcaa

SEQ ID NO: 1550691 - DNA, 15 bp, Homo sapiens
gatgagcatcgcaat

SEQ ID NO: 1550692 - DNA, 15 bp, Homo sapiens
atgagcatcgcaatc

SEQ ID NO: 1550693 - DNA, 15 bp, Homo sapiens
tgagcatcgcaatct

SEQ ID NO: 1550694 - DNA, 15 bp, Homo sapiens
gagcatcgcaatctg

SEQ ID NO: 1550695 - DNA, 15 bp, Homo sapiens
agcatcgcaatctgt

SEQ ID NO: 1550696 - DNA, 15 bp, Homo sapiens
gcatcgcaatctgtt

SEQ ID NO: 1550697 - DNA, 15 bp, Homo sapiens
catcgcaatctgttt

SEQ ID NO: 1550698 - DNA, 15 bp, Homo sapiens
atcgcaatctgttta

SEQ ID NO: 1550699 - DNA, 15 bp, Homo sapiens
tcgcaatctgtttaa

SEQ ID NO: 1550700 - DNA, 15 bp, Homo sapiens
cgcaatctgtttaat

SEQ ID NO: 1550701 - DNA, 15 bp, Homo sapiens
gcaatctgtttaatg

SEQ ID NO: 1550702 - DNA, 15 bp, Homo sapiens
caatctgtttaatgc

SEQ ID NO: 1550703 - DNA, 15 bp, Homo sapiens
aatctgtttaatgcc

SEQ ID NO: 1550704 - DNA, 15 bp, Homo sapiens
atctgtttaatgcct

SEQ ID NO: 1550705 - DNA, 15 bp, Homo sapiens
tctgtttaatgccta

SEQ ID NO: 1550706 - DNA, 15 bp, Homo sapiens
ctgtttaatgcctat

SEQ ID NO: 1550707 - DNA, 15 bp, Homo sapiens
tgtttaatgcctatt

SEQ ID NO: 1550708 - DNA, 15 bp, Homo sapiens
gtttaatgcctattc

SEQ ID NO: 1550709 - DNA, 15 bp, Homo sapiens
tttaatgcctattca

SEQ ID NO: 1550710 - DNA, 15 bp, Homo sapiens
ttaatgcctattcaa

SEQ ID NO: 1550711 - DNA, 15 bp, Homo sapiens
taatgcctattcaat

SEQ ID NO: 1550712 - DNA, 15 bp, Homo sapiens
aatgcctattcaata

SEQ ID NO: 1550713 - DNA, 15 bp, Homo sapiens
atgcctattcaataa

SEQ ID NO: 1550714 - DNA, 15 bp, Homo sapiens
tgcctattcaataat

SEQ ID NO: 1550715 - DNA, 15 bp, Homo sapiens
gcctattcaataatt

SEQ ID NO: 1550716 - DNA, 15 bp, Homo sapiens
cctattcaataatta

SEQ ID NO: 1550717 - DNA, 15 bp, Homo sapiens
ctattcaataattaa

SEQ ID NO: 1550718 - DNA, 15 bp, Homo sapiens
tattcaataattaaa

SEQ ID NO: 1550719 - DNA, 15 bp, Homo sapiens
attcaataattaaat

SEQ ID NO: 1550720 - DNA, 15 bp, Homo sapiens
ttcaataattaaatt

SEQ ID NO: 1550721 - DNA, 15 bp, Homo sapiens
tcaataattaaattt

SEQ ID NO: 1550722 - DNA, 15 bp, Homo sapiens
caataattaaatttt

SEQ ID NO: 1550723 - DNA, 15 bp, Homo sapiens
aataattaaattttt

SEQ ID NO: 1550724 - DNA, 15 bp, Homo sapiens
ataattaaatttttc

SEQ ID NO: 1550725 - DNA, 15 bp, Homo sapiens
taattaaatttttct

SEQ ID NO: 1550726 - DNA, 15 bp, Homo sapiens
aattaaatttttctt

SEQ ID NO: 1550727 - DNA, 15 bp, Homo sapiens
attaaatttttcttt

SEQ ID NO: 1550728 - DNA, 15 bp, Homo sapiens
ttaaatttttctttc

SEQ ID NO: 1550729 - DNA, 15 bp, Homo sapiens
taaatttttctttct

SEQ ID NO: 1550730 - DNA, 15 bp, Homo sapiens
aaatttttctttctc

SEQ ID NO: 1550731 - DNA, 15 bp, Homo sapiens
tctttctcttctttt

SEQ ID NO: 1550732 - DNA, 15 bp, Homo sapiens
ctttctcttcttttg

SEQ ID NO: 1550733 - DNA, 15 bp, Homo sapiens
tttctcttcttttgt

SEQ ID NO: 1550734 - DNA, 15 bp, Homo sapiens
ttctcttcttttgtg

SEQ ID NO: 1550735 - DNA, 15 bp, Homo sapiens
tctcttcttttgtgg

SEQ ID NO: 1550736 - DNA, 15 bp, Homo sapiens
ctcttcttttgtgga

SEQ ID NO: 1550737 - DNA, 15 bp, Homo sapiens
tcttcttttgtggaa

SEQ ID NO: 1550738 - DNA, 15 bp, Homo sapiens
cttcttttgtggaaa

SEQ ID NO: 1550739 - DNA, 15 bp, Homo sapiens
ttcttttgtggaaag

SEQ ID NO: 1550740 - DNA, 15 bp, Homo sapiens
tcttttgtggaaagg

SEQ ID NO: 1550741 - DNA, 15 bp, Homo sapiens
cttttgtggaaaggt

SEQ ID NO: 1550742 - DNA, 15 bp, Homo sapiens
ttttgtggaaaggtt

SEQ ID NO: 1550743 - DNA, 15 bp, Homo sapiens
tttgtggaaaggttt

SEQ ID NO: 1550744 - DNA, 15 bp, Homo sapiens
ttgtggaaaggtttt

SEQ ID NO: 1550745 - DNA, 15 bp, Homo sapiens
tgtggaaaggttttc

SEQ ID NO: 1550746 - DNA, 15 bp, Homo sapiens
gtggaaaggttttct

SEQ ID NO: 1550747 - DNA, 15 bp, Homo sapiens
tggaaaggttttctg

SEQ ID NO: 1550748 - DNA, 15 bp, Homo sapiens
ggaaaggttttctgc

SEQ ID NO: 1550749 - DNA, 15 bp, Homo sapiens
gaaaggttttctgca

SEQ ID NO: 1550750 - DNA, 15 bp, Homo sapiens
aaaggttttctgcat

SEQ ID NO: 1550751 - DNA, 15 bp, Homo sapiens
aaggttttctgcatt

SEQ ID NO: 1550752 - DNA, 15 bp, Homo sapiens
aggttttctgcattg

SEQ ID NO: 1550753 - DNA, 15 bp, Homo sapiens
ggttttctgcattgg

SEQ ID NO: 1550754 - DNA, 15 bp, Homo sapiens
gttttctgcattggc

SEQ ID NO: 1550755 - DNA, 15 bp, Homo sapiens
ttttctgcattggca

SEQ ID NO: 1550756 - DNA, 15 bp, Homo sapiens
tttctgcattggcag

SEQ ID NO: 1550757 - DNA, 15 bp, Homo sapiens
ttctgcattggcagg

SEQ ID NO: 1550758 - DNA, 15 bp, Homo sapiens
tctgcattggcagga

SEQ ID NO: 1550759 - DNA, 15 bp, Homo sapiens
ctgcattggcaggag

SEQ ID NO: 1550760 - DNA, 15 bp, Homo sapiens
tgcattggcaggaga

SEQ ID NO: 1550761 - DNA, 15 bp, Homo sapiens
gcattggcaggagat

SEQ ID NO: 1550762 - DNA, 15 bp, Homo sapiens
cattggcaggagatt

SEQ ID NO: 1550763 - DNA, 15 bp, Homo sapiens
attggcaggagattt

SEQ ID NO: 1550764 - DNA, 15 bp, Homo sapiens
ttggcaggagatttt

SEQ ID NO: 1550765 - DNA, 15 bp, Homo sapiens
tggcaggagattttt

SEQ ID NO: 1550766 - DNA, 15 bp, Homo sapiens
ggcaggagatttttg

SEQ ID NO: 1550767 - DNA, 15 bp, Homo sapiens
gcaggagatttttgt

SEQ ID NO: 1550768 - DNA, 15 bp, Homo sapiens
caggagatttttgtt

SEQ ID NO: 1550769 - DNA, 15 bp, Homo sapiens
aggagatttttgttt

SEQ ID NO: 1550770 - DNA, 15 bp, Homo sapiens
ggagatttttgtttt

SEQ ID NO: 1550771 - DNA, 15 bp, Homo sapiens
gagatttttgttttc

SEQ ID NO: 1550772 - DNA, 15 bp, Homo sapiens
agatttttgttttcg

SEQ ID NO: 1550773 - DNA, 15 bp, Homo sapiens
gatttttgttttcga

SEQ ID NO: 1550774 - DNA, 15 bp, Homo sapiens
atttttgttttcgat

SEQ ID NO: 1550775 - DNA, 15 bp, Homo sapiens
tttttgttttcgatt

SEQ ID NO: 1550776 - DNA, 15 bp, Homo sapiens
ttttgttttcgatta

SEQ ID NO: 1550777 - DNA, 15 bp, Homo sapiens
tttgttttcgattat

SEQ ID NO: 1550778 - DNA, 15 bp, Homo sapiens
ttgttttcgattatg

SEQ ID NO: 1550779 - DNA, 15 bp, Homo sapiens
tgttttcgattatgt

SEQ ID NO: 1550780 - DNA, 15 bp, Homo sapiens
gttttcgattatgtc

SEQ ID NO: 1550781 - DNA, 15 bp, Homo sapiens
ttttcgattatgtcc

SEQ ID NO: 1550782 - DNA, 15 bp, Homo sapiens
tttcgattatgtccc

SEQ ID NO: 1550783 - DNA, 15 bp, Homo sapiens
ttcgattatgtcccc

SEQ ID NO: 1550784 - DNA, 15 bp, Homo sapiens
tcgattatgtcccca

SEQ ID NO: 1550785 - DNA, 15 bp, Homo sapiens
cgattatgtccccaa

SEQ ID NO: 1550786 - DNA, 15 bp, Homo sapiens
gattatgtccccaac

SEQ ID NO: 1550787 - DNA, 15 bp, Homo sapiens
attatgtccccaaca

SEQ ID NO: 1550788 - DNA, 15 bp, Homo sapiens
ttatgtccccaacat

SEQ ID NO: 1550789 - DNA, 15 bp, Homo sapiens
tatgtccccaacatg

SEQ ID NO: 1550790 - DNA, 15 bp, Homo sapiens
atgtccccaacatgc

SEQ ID NO: 1550791 - DNA, 15 bp, Homo sapiens
tgtccccaacatgcc

SEQ ID NO: 1550792 - DNA, 15 bp, Homo sapiens
gtccccaacatgcct

SEQ ID NO: 1550793 - DNA, 15 bp, Homo sapiens
tccccaacatgcctg

SEQ ID NO: 1550794 - DNA, 15 bp, Homo sapiens
ccccaacatgcctga

SEQ ID NO: 1550795 - DNA, 15 bp, Homo sapiens
cccaacatgcctgat

SEQ ID NO: 1550796 - DNA, 15 bp, Homo sapiens
ccaacatgcctgatg

SEQ ID NO: 1550797 - DNA, 15 bp, Homo sapiens
caacatgcctgatgt

SEQ ID NO: 1550798 - DNA, 15 bp, Homo sapiens
aacatgcctgatgtt

SEQ ID NO: 1550799 - DNA, 15 bp, Homo sapiens
acatgcctgatgttc

SEQ ID NO: 1550800 - DNA, 15 bp, Homo sapiens
catgcctgatgttcc

SEQ ID NO: 1550801 - DNA, 15 bp, Homo sapiens
atgcctgatgttcca

SEQ ID NO: 1550802 - DNA, 15 bp, Homo sapiens
tgcctgatgttccac

SEQ ID NO: 1550803 - DNA, 15 bp, Homo sapiens
gcctgatgttccacc

SEQ ID NO: 1550804 - DNA, 15 bp, Homo sapiens
cctgatgttccaccc

SEQ ID NO: 1550805 - DNA, 15 bp, Homo sapiens
ctgatgttccacccc

SEQ ID NO: 1550806 - DNA, 15 bp, Homo sapiens
tgatgttccacccct

SEQ ID NO: 1550807 - DNA, 15 bp, Homo sapiens
gatgttccacccctc

SEQ ID NO: 1550808 - DNA, 15 bp, Homo sapiens
atgttccacccctca

SEQ ID NO: 1550809 - DNA, 15 bp, Homo sapiens
tgttccacccctcaa

SEQ ID NO: 1550810 - DNA, 15 bp, Homo sapiens
gttccacccctcaag

SEQ ID NO: 1550811 - DNA, 15 bp, Homo sapiens
ttccacccctcaaga

SEQ ID NO: 1550812 - DNA, 15 bp, Homo sapiens
tccacccctcaagag

SEQ ID NO: 1550813 - DNA, 15 bp, Homo sapiens
ccacccctcaagagc

SEQ ID NO: 1550814 - DNA, 15 bp, Homo sapiens
cacccctcaagagcc

SEQ ID NO: 1550815 - DNA, 15 bp, Homo sapiens
acccctcaagagcct

SEQ ID NO: 1550816 - DNA, 15 bp, Homo sapiens
cccctcaagagcctc

SEQ ID NO: 1550817 - DNA, 15 bp, Homo sapiens
ccctcaagagcctca

SEQ ID NO: 1550818 - DNA, 15 bp, Homo sapiens
cctcaagagcctcag

SEQ ID NO: 1550819 - DNA, 15 bp, Homo sapiens
ctcaagagcctcagc

SEQ ID NO: 1550820 - DNA, 15 bp, Homo sapiens
tcaagagcctcagcc

SEQ ID NO: 1550821 - DNA, 15 bp, Homo sapiens
caagagcctcagcct

SEQ ID NO: 1550822 - DNA, 15 bp, Homo sapiens
aagagcctcagcctt

SEQ ID NO: 1550823 - DNA, 15 bp, Homo sapiens
agagcctcagccttg

SEQ ID NO: 1550824 - DNA, 15 bp, Homo sapiens
gagcctcagccttgc

SEQ ID NO: 1550825 - DNA, 15 bp, Homo sapiens
agcctcagccttgcc

SEQ ID NO: 1550826 - DNA, 15 bp, Homo sapiens
gcctcagccttgccc

SEQ ID NO: 1550827 - DNA, 15 bp, Homo sapiens
cctcagccttgccca

SEQ ID NO: 1550828 - DNA, 15 bp, Homo sapiens
ctcagccttgcccag

SEQ ID NO: 1550829 - DNA, 15 bp, Homo sapiens
tcagccttgcccagg

SEQ ID NO: 1550830 - DNA, 15 bp, Homo sapiens
cagccttgcccaggg

SEQ ID NO: 1550831 - DNA, 15 bp, Homo sapiens
agccttgcccaggga

SEQ ID NO: 1550832 - DNA, 15 bp, Homo sapiens
gccttgcccagggag

SEQ ID NO: 1550833 - DNA, 15 bp, Homo sapiens
ccttgcccagggagg

SEQ ID NO: 1550834 - DNA, 15 bp, Homo sapiens
cttgcccagggaggg

SEQ ID NO: 1550835 - DNA, 15 bp, Homo sapiens
ttgcccagggagggc

SEQ ID NO: 1550836 - DNA, 15 bp, Homo sapiens
tgcccagggagggca

SEQ ID NO: 1550837 - DNA, 15 bp, Homo sapiens
gcccagggagggcat

SEQ ID NO: 1550838 - DNA, 15 bp, Homo sapiens
cccagggagggcatg

SEQ ID NO: 1550839 - DNA, 15 bp, Homo sapiens
ccagggagggcatgg

SEQ ID NO: 1550840 - DNA, 15 bp, Homo sapiens
cagggagggcatggg

SEQ ID NO: 1550841 - DNA, 15 bp, Homo sapiens
agggagggcatgggg

SEQ ID NO: 1550842 - DNA, 15 bp, Homo sapiens
gggagggcatggggg

SEQ ID NO: 1550843 - DNA, 15 bp, Homo sapiens
ggagggcatgggggt

SEQ ID NO: 1550844 - DNA, 15 bp, Homo sapiens
gagggcatgggggtg

SEQ ID NO: 1550845 - DNA, 15 bp, Homo sapiens
agggcatgggggtga

SEQ ID NO: 1550846 - DNA, 15 bp, Homo sapiens
gggcatgggggtgag

SEQ ID NO: 1550847 - DNA, 15 bp, Homo sapiens
ggcatgggggtgagt

SEQ ID NO: 1550848 - DNA, 15 bp, Homo sapiens
gcatgggggtgagtg

SEQ ID NO: 1550849 - DNA, 15 bp, Homo sapiens
catgggggtgagtgg

SEQ ID NO: 1550850 - DNA, 15 bp, Homo sapiens
atgggggtgagtggc

SEQ ID NO: 1550851 - DNA, 15 bp, Homo sapiens
tgggggtgagtggcc

SEQ ID NO: 1550852 - DNA, 15 bp, Homo sapiens
gggggtgagtggcct

SEQ ID NO: 1550853 - DNA, 15 bp, Homo sapiens
ggggtgagtggcctc

SEQ ID NO: 1550854 - DNA, 15 bp, Homo sapiens
gggtgagtggcctct

SEQ ID NO: 1550855 - DNA, 15 bp, Homo sapiens
ggtgagtggcctctc

SEQ ID NO: 1550856 - DNA, 15 bp, Homo sapiens
gtgagtggcctctcc

SEQ ID NO: 1550857 - DNA, 15 bp, Homo sapiens
tgagtggcctctccc

SEQ ID NO: 1550858 - DNA, 15 bp, Homo sapiens
gagtggcctctccca

SEQ ID NO: 1550859 - DNA, 15 bp, Homo sapiens
agtggcctctcccac

SEQ ID NO: 1550860 - DNA, 15 bp, Homo sapiens
gtggcctctcccaca

SEQ ID NO: 1550861 - DNA, 15 bp, Homo sapiens
tggcctctcccacag

SEQ ID NO: 1550862 - DNA, 15 bp, Homo sapiens
ggcctctcccacaga

SEQ ID NO: 1550863 - DNA, 15 bp, Homo sapiens
gcctctcccacagag

SEQ ID NO: 1550864 - DNA, 15 bp, Homo sapiens
cctctcccacagaga

SEQ ID NO: 1550865 - DNA, 15 bp, Homo sapiens
ctctcccacagagag

SEQ ID NO: 1550866 - DNA, 15 bp, Homo sapiens
tctcccacagagagt

SEQ ID NO: 1550867 - DNA, 15 bp, Homo sapiens
ctcccacagagagtg

SEQ ID NO: 1550868 - DNA, 15 bp, Homo sapiens
tcccacagagagtgc

SEQ ID NO: 1550869 - DNA, 15 bp, Homo sapiens
cccacagagagtgct

SEQ ID NO: 1550870 - DNA, 15 bp, Homo sapiens
ccacagagagtgctg

SEQ ID NO: 1550871 - DNA, 15 bp, Homo sapiens
cacagagagtgctgg

SEQ ID NO: 1550872 - DNA, 15 bp, Homo sapiens
acagagagtgctggc

SEQ ID NO: 1550873 - DNA, 15 bp, Homo sapiens
cagagagtgctggcc

SEQ ID NO: 1550874 - DNA, 15 bp, Homo sapiens
agagagtgctggcca

SEQ ID NO: 1550875 - DNA, 15 bp, Homo sapiens
gagagtgctggccaa

SEQ ID NO: 1550876 - DNA, 15 bp, Homo sapiens
agagtgctggccaag

SEQ ID NO: 1550877 - DNA, 15 bp, Homo sapiens
gagtgctggccaagt

SEQ ID NO: 1550878 - DNA, 15 bp, Homo sapiens
agtgctggccaagtt

SEQ ID NO: 1550879 - DNA, 15 bp, Homo sapiens
gtgctggccaagttg

SEQ ID NO: 1550880 - DNA, 15 bp, Homo sapiens
tgctggccaagttgg

SEQ ID NO: 1550881 - DNA, 15 bp, Homo sapiens
gctggccaagttggc

SEQ ID NO: 1550882 - DNA, 15 bp, Homo sapiens
ctggccaagttggcc

SEQ ID NO: 1550883 - DNA, 15 bp, Homo sapiens
tggccaagttggccc

SEQ ID NO: 1550884 - DNA, 15 bp, Homo sapiens
ggccaagttggccca

SEQ ID NO: 1550885 - DNA, 15 bp, Homo sapiens
gccaagttggcccag

SEQ ID NO: 1550886 - DNA, 15 bp, Homo sapiens
ccaagttggcccagg

SEQ ID NO: 1550887 - DNA, 15 bp, Homo sapiens
caagttggcccaggt

SEQ ID NO: 1550888 - DNA, 15 bp, Homo sapiens
aagttggcccaggtg

SEQ ID NO: 1550889 - DNA, 15 bp, Homo sapiens
agttggcccaggtgc

SEQ ID NO: 1550890 - DNA, 15 bp, Homo sapiens
gttggcccaggtgcg

SEQ ID NO: 1550891 - DNA, 15 bp, Homo sapiens
ttggcccaggtgcgc

SEQ ID NO: 1550892 - DNA, 15 bp, Homo sapiens
tggcccaggtgcgca

SEQ ID NO: 1550893 - DNA, 15 bp, Homo sapiens
ggcccaggtgcgcag

SEQ ID NO: 1550894 - DNA, 15 bp, Homo sapiens
gcccaggtgcgcagc

SEQ ID NO: 1550895 - DNA, 15 bp, Homo sapiens
cccaggtgcgcagca

SEQ ID NO: 1550896 - DNA, 15 bp, Homo sapiens
ccaggtgcgcagcaa

SEQ ID NO: 1550897 - DNA, 15 bp, Homo sapiens
caggtgcgcagcaag

SEQ ID NO: 1550898 - DNA, 15 bp, Homo sapiens
aggtgcgcagcaagg

SEQ ID NO: 1550899 - DNA, 15 bp, Homo sapiens
ggtgcgcagcaaggg

SEQ ID NO: 1550900 - DNA, 15 bp, Homo sapiens
gtgcgcagcaagggc

SEQ ID NO: 1550901 - DNA, 15 bp, Homo sapiens
tgcgcagcaagggct

SEQ ID NO: 1550902 - DNA, 15 bp, Homo sapiens
gcgcagcaagggctg

SEQ ID NO: 1550903 - DNA, 15 bp, Homo sapiens
cgcagcaagggctgc

SEQ ID NO: 1550904 - DNA, 15 bp, Homo sapiens
gcagcaagggctgct

SEQ ID NO: 1550905 - DNA, 15 bp, Homo sapiens
cagcaagggctgctg

SEQ ID NO: 1550906 - DNA, 15 bp, Homo sapiens
agcaagggctgctgc

SEQ ID NO: 1550907 - DNA, 15 bp, Homo sapiens
gcaagggctgctgcc

SEQ ID NO: 1550908 - DNA, 15 bp, Homo sapiens
caagggctgctgccc

SEQ ID NO: 1550909 - DNA, 15 bp, Homo sapiens
aagggctgctgccca

SEQ ID NO: 1550910 - DNA, 15 bp, Homo sapiens
agggctgctgcccaa

SEQ ID NO: 1550911 - DNA, 15 bp, Homo sapiens
gggctgctgcccaaa

SEQ ID NO: 1550912 - DNA, 15 bp, Homo sapiens
ggctgctgcccaaag

SEQ ID NO: 1550913 - DNA, 15 bp, Homo sapiens
gctgctgcccaaagg

SEQ ID NO: 1550914 - DNA, 15 bp, Homo sapiens
ctgctgcccaaaggc

SEQ ID NO: 1550915 - DNA, 15 bp, Homo sapiens
tgctgcccaaaggct

SEQ ID NO: 1550916 - DNA, 15 bp, Homo sapiens
gctgcccaaaggctc

SEQ ID NO: 1550917 - DNA, 15 bp, Homo sapiens
ctgcccaaaggctcc

SEQ ID NO: 1550918 - DNA, 15 bp, Homo sapiens
tgcccaaaggctccc

SEQ ID NO: 1550919 - DNA, 15 bp, Homo sapiens
gcccaaaggctccct

SEQ ID NO: 1550920 - DNA, 15 bp, Homo sapiens
cccaaaggctccctc

SEQ ID NO: 1550921 - DNA, 15 bp, Homo sapiens
ccaaaggctccctcc

SEQ ID NO: 1550922 - DNA, 15 bp, Homo sapiens
caaaggctccctcct

SEQ ID NO: 1550923 - DNA, 15 bp, Homo sapiens
aaaggctccctcctg

SEQ ID NO: 1550924 - DNA, 15 bp, Homo sapiens
aaggctccctcctgg

SEQ ID NO: 1550925 - DNA, 15 bp, Homo sapiens
aggctccctcctggt

SEQ ID NO: 1550926 - DNA, 15 bp, Homo sapiens
ggctccctcctggtt

SEQ ID NO: 1550927 - DNA, 15 bp, Homo sapiens
gctccctcctggttg

SEQ ID NO: 1550928 - DNA, 15 bp, Homo sapiens
ctccctcctggttgg

SEQ ID NO: 1550929 - DNA, 15 bp, Homo sapiens
tccctcctggttggc

SEQ ID NO: 1550930 - DNA, 15 bp, Homo sapiens
ccctcctggttggca

SEQ ID NO: 1550931 - DNA, 15 bp, Homo sapiens
cctcctggttggcat

SEQ ID NO: 1550932 - DNA, 15 bp, Homo sapiens
ctcctggttggcatg

SEQ ID NO: 1550933 - DNA, 15 bp, Homo sapiens
tcctggttggcatgg

SEQ ID NO: 1550934 - DNA, 15 bp, Homo sapiens
cctggttggcatggg

SEQ ID NO: 1550935 - DNA, 15 bp, Homo sapiens
ctggttggcatgggt

SEQ ID NO: 1550936 - DNA, 15 bp, Homo sapiens
tggttggcatgggtc

SEQ ID NO: 1550937 - DNA, 15 bp, Homo sapiens
ggttggcatgggtcg

SEQ ID NO: 1550938 - DNA, 15 bp, Homo sapiens
gttggcatgggtcgg

SEQ ID NO: 1550939 - DNA, 15 bp, Homo sapiens
ttggcatgggtcggg

SEQ ID NO: 1550940 - DNA, 15 bp, Homo sapiens
tggcatgggtcggga

SEQ ID NO: 1550941 - DNA, 15 bp, Homo sapiens
ggcatgggtcgggac

SEQ ID NO: 1550942 - DNA, 15 bp, Homo sapiens
gcatgggtcgggacc

SEQ ID NO: 1550943 - DNA, 15 bp, Homo sapiens
catgggtcgggaccc

SEQ ID NO: 1550944 - DNA, 15 bp, Homo sapiens
atgggtcgggaccct

SEQ ID NO: 1550945 - DNA, 15 bp, Homo sapiens
tgggtcgggaccctg

SEQ ID NO: 1550946 - DNA, 15 bp, Homo sapiens
gggtcgggaccctgt

SEQ ID NO: 1550947 - DNA, 15 bp, Homo sapiens
ggtcgggaccctgtt

SEQ ID NO: 1550948 - DNA, 15 bp, Homo sapiens
gtcgggaccctgttg

SEQ ID NO: 1550949 - DNA, 15 bp, Homo sapiens
tcgggaccctgttgt

SEQ ID NO: 1550950 - DNA, 15 bp, Homo sapiens
cgggaccctgttgtg

SEQ ID NO: 1550951 - DNA, 15 bp, Homo sapiens
gggaccctgttgtgt

SEQ ID NO: 1550952 - DNA, 15 bp, Homo sapiens
ggaccctgttgtgtt

SEQ ID NO: 1550953 - DNA, 15 bp, Homo sapiens
gaccctgttgtgttg

SEQ ID NO: 1550954 - DNA, 15 bp, Homo sapiens
accctgttgtgttgt

SEQ ID NO: 1550955 - DNA, 15 bp, Homo sapiens
ccctgttgtgttgtg

SEQ ID NO: 1550956 - DNA, 15 bp, Homo sapiens
cctgttgtgttgtgt

SEQ ID NO: 1550957 - DNA, 15 bp, Homo sapiens
ctgttgtgttgtgtt

SEQ ID NO: 1550958 - DNA, 15 bp, Homo sapiens
tgttgtgttgtgttt

SEQ ID NO: 1550959 - DNA, 15 bp, Homo sapiens
gttgtgttgtgtttt

SEQ ID NO: 1550960 - DNA, 15 bp, Homo sapiens
ttgtgttgtgttttc

SEQ ID NO: 1550961 - DNA, 15 bp, Homo sapiens
tgtgttgtgttttcg

SEQ ID NO: 1550962 - DNA, 15 bp, Homo sapiens
gtgttgtgttttcgc

SEQ ID NO: 1550963 - DNA, 15 bp, Homo sapiens
tgttgtgttttcgct

SEQ ID NO: 1550964 - DNA, 15 bp, Homo sapiens
gttgtgttttcgctc

SEQ ID NO: 1550965 - DNA, 15 bp, Homo sapiens
ttgtgttttcgctct

SEQ ID NO: 1550966 - DNA, 15 bp, Homo sapiens
tgtgttttcgctctt

SEQ ID NO: 1550967 - DNA, 15 bp, Homo sapiens
gtgttttcgctcttt

SEQ ID NO: 1550968 - DNA, 15 bp, Homo sapiens
tgttttcgctctttt

SEQ ID NO: 1550969 - DNA, 15 bp, Homo sapiens
gttttcgctcttttt

SEQ ID NO: 1550970 - DNA, 15 bp, Homo sapiens
ttttcgctctttttc

SEQ ID NO: 1550971 - DNA, 15 bp, Homo sapiens
tttcgctctttttcg

SEQ ID NO: 1550972 - DNA, 15 bp, Homo sapiens
ttcgctctttttcgt

SEQ ID NO: 1550973 - DNA, 15 bp, Homo sapiens
tcgctctttttcgta

SEQ ID NO: 1550974 - DNA, 15 bp, Homo sapiens
cgctctttttcgtag

SEQ ID NO: 1550975 - DNA, 15 bp, Homo sapiens
gctctttttcgtaga

SEQ ID NO: 1550976 - DNA, 15 bp, Homo sapiens
ctctttttcgtagag

SEQ ID NO: 1550977 - DNA, 15 bp, Homo sapiens
tctttttcgtagagt

SEQ ID NO: 1550978 - DNA, 15 bp, Homo sapiens
ctttttcgtagagtt

SEQ ID NO: 1550979 - DNA, 15 bp, Homo sapiens
tttttcgtagagttc

SEQ ID NO: 1550980 - DNA, 15 bp, Homo sapiens
ttttcgtagagttca

SEQ ID NO: 1550981 - DNA, 15 bp, Homo sapiens
tttcgtagagttcaa

SEQ ID NO: 1550982 - DNA, 15 bp, Homo sapiens
ttcgtagagttcaag

SEQ ID NO: 1550983 - DNA, 15 bp, Homo sapiens
tcgtagagttcaagg

SEQ ID NO: 1550984 - DNA, 15 bp, Homo sapiens
cgtagagttcaaggg

SEQ ID NO: 1550985 - DNA, 15 bp, Homo sapiens
gtagagttcaagggg

SEQ ID NO: 1550986 - DNA, 15 bp, Homo sapiens
tagagttcaaggggg

SEQ ID NO: 1550987 - DNA, 15 bp, Homo sapiens
agagttcaagggggt

SEQ ID NO: 1550988 - DNA, 15 bp, Homo sapiens
gagttcaagggggtc

SEQ ID NO: 1550989 - DNA, 15 bp, Homo sapiens
agttcaagggggtcc

SEQ ID NO: 1550990 - DNA, 15 bp, Homo sapiens
gttcaagggggtcct

SEQ ID NO: 1550991 - DNA, 15 bp, Homo sapiens
ttcaagggggtcctg

SEQ ID NO: 1550992 - DNA, 15 bp, Homo sapiens
tcaagggggtcctgc

SEQ ID NO: 1550993 - DNA, 15 bp, Homo sapiens
caagggggtcctgct

SEQ ID NO: 1550994 - DNA, 15 bp, Homo sapiens
aagggggtcctgcta

SEQ ID NO: 1550995 - DNA, 15 bp, Homo sapiens
agggggtcctgctat

SEQ ID NO: 1550996 - DNA, 15 bp, Homo sapiens
gggggtcctgctatg

SEQ ID NO: 1550997 - DNA, 15 bp, Homo sapiens
ggggtcctgctatgt

SEQ ID NO: 1550998 - DNA, 15 bp, Homo sapiens
gggtcctgctatgtt

SEQ ID NO: 1550999 - DNA, 15 bp, Homo sapiens
ggtcctgctatgttg

SEQ ID NO: 1551000 - DNA, 15 bp, Homo sapiens
gtcctgctatgttgt

SEQ ID NO: 1551001 - DNA, 15 bp, Homo sapiens
tcctgctatgttgtc

SEQ ID NO: 1551002 - DNA, 15 bp, Homo sapiens
cctgctatgttgtcc

SEQ ID NO: 1551003 - DNA, 15 bp, Homo sapiens
ctgctatgttgtcca

SEQ ID NO: 1551004 - DNA, 15 bp, Homo sapiens
gctatgttgtccaga

SEQ ID NO: 1551005 - DNA, 15 bp, Homo sapiens
ctatgttgtccagac

SEQ ID NO: 1551006 - DNA, 15 bp, Homo sapiens
tatgttgtccagact

SEQ ID NO: 1551007 - DNA, 15 bp, Homo sapiens
atgttgtccagactg

SEQ ID NO: 1551008 - DNA, 15 bp, Homo sapiens
tgttgtccagactgg

SEQ ID NO: 1551009 - DNA, 15 bp, Homo sapiens
gttgtccagactggt

SEQ ID NO: 1551010 - DNA, 15 bp, Homo sapiens
ttgtccagactggtc

SEQ ID NO: 1551011 - DNA, 15 bp, Homo sapiens
tgtccagactggtct

SEQ ID NO: 1551012 - DNA, 15 bp, Homo sapiens
gtccagactggtctt

SEQ ID NO: 1551013 - DNA, 15 bp, Homo sapiens
tccagactggtcttg

SEQ ID NO: 1551014 - DNA, 15 bp, Homo sapiens
actggtcttgaactg

SEQ ID NO: 1551015 - DNA, 15 bp, Homo sapiens
ctggtcttgaactga

SEQ ID NO: 1551016 - DNA, 15 bp, Homo sapiens
tggtcttgaactgac

SEQ ID NO: 1551017 - DNA, 15 bp, Homo sapiens
ggtcttgaactgacc

SEQ ID NO: 1551018 - DNA, 15 bp, Homo sapiens
gtcttgaactgacct

SEQ ID NO: 1551019 - DNA, 15 bp, Homo sapiens
tcttgaactgacctc

SEQ ID NO: 1551020 - DNA, 15 bp, Homo sapiens
cttgaactgacctca

SEQ ID NO: 1551021 - DNA, 15 bp, Homo sapiens
ttgaactgacctcaa

SEQ ID NO: 1551022 - DNA, 15 bp, Homo sapiens
tgaactgacctcaag

SEQ ID NO: 1551023 - DNA, 15 bp, Homo sapiens
gaactgacctcaagg

SEQ ID NO: 1551024 - DNA, 15 bp, Homo sapiens
aactgacctcaaggg

SEQ ID NO: 1551025 - DNA, 15 bp, Homo sapiens
actgacctcaaggga

SEQ ID NO: 1551026 - DNA, 15 bp, Homo sapiens
ctgacctcaagggat

SEQ ID NO: 1551027 - DNA, 15 bp, Homo sapiens
tgacctcaagggatc

SEQ ID NO: 1551028 - DNA, 15 bp, Homo sapiens
gacctcaagggatcc

SEQ ID NO: 1551029 - DNA, 15 bp, Homo sapiens
acctcaagggatcct

SEQ ID NO: 1551030 - DNA, 15 bp, Homo sapiens
cctcaagggatcctc

SEQ ID NO: 1551031 - DNA, 15 bp, Homo sapiens
ctcaagggatcctct

SEQ ID NO: 1551032 - DNA, 15 bp, Homo sapiens
tcaagggatcctctc

SEQ ID NO: 1551033 - DNA, 15 bp, Homo sapiens
caagggatcctctcg

SEQ ID NO: 1551034 - DNA, 15 bp, Homo sapiens
aagggatcctctcgt

SEQ ID NO: 1551035 - DNA, 15 bp, Homo sapiens
agggatcctctcgtc

SEQ ID NO: 1551036 - DNA, 15 bp, Homo sapiens
gggatcctctcgtct

SEQ ID NO: 1551037 - DNA, 15 bp, Homo sapiens
ggatcctctcgtctc

SEQ ID NO: 1551038 - DNA, 15 bp, Homo sapiens
gatcctctcgtctca

SEQ ID NO: 1551039 - DNA, 15 bp, Homo sapiens
atcctctcgtctcag

SEQ ID NO: 1551040 - DNA, 15 bp, Homo sapiens
tcctctcgtctcagc

SEQ ID NO: 1551041 - DNA, 15 bp, Homo sapiens
cctctcgtctcagcc

SEQ ID NO: 1551042 - DNA, 15 bp, Homo sapiens
ctctcgtctcagcct

SEQ ID NO: 1551043 - DNA, 15 bp, Homo sapiens
tctcgtctcagcctc

SEQ ID NO: 1551044 - DNA, 15 bp, Homo sapiens
ctcgtctcagcctcc

SEQ ID NO: 1551045 - DNA, 15 bp, Homo sapiens
tcgtctcagcctccc

SEQ ID NO: 1551046 - DNA, 15 bp, Homo sapiens
cgtctcagcctccca

SEQ ID NO: 1551047 - DNA, 15 bp, Homo sapiens
tgctgggattactgt

SEQ ID NO: 1551048 - DNA, 15 bp, Homo sapiens
gctgggattactgtg

SEQ ID NO: 1551049 - DNA, 15 bp, Homo sapiens
ctgggattactgtgc

SEQ ID NO: 1551050 - DNA, 15 bp, Homo sapiens
tgggattactgtgcc

SEQ ID NO: 1551051 - DNA, 15 bp, Homo sapiens
gggattactgtgccc

SEQ ID NO: 1551052 - DNA, 15 bp, Homo sapiens
ggattactgtgccca

SEQ ID NO: 1551053 - DNA, 15 bp, Homo sapiens
gattactgtgcccag

SEQ ID NO: 1551054 - DNA, 15 bp, Homo sapiens
attactgtgcccagc

SEQ ID NO: 1551055 - DNA, 15 bp, Homo sapiens
ttactgtgcccagct

SEQ ID NO: 1551056 - DNA, 15 bp, Homo sapiens
tactgtgcccagctt

SEQ ID NO: 1551057 - DNA, 15 bp, Homo sapiens
actgtgcccagcttt

SEQ ID NO: 1551058 - DNA, 15 bp, Homo sapiens
ctgtgcccagctttg

SEQ ID NO: 1551059 - DNA, 15 bp, Homo sapiens
tgtgcccagctttgt

SEQ ID NO: 1551060 - DNA, 15 bp, Homo sapiens
gtgcccagctttgtg

SEQ ID NO: 1551061 - DNA, 15 bp, Homo sapiens
tgcccagctttgtgt

SEQ ID NO: 1551062 - DNA, 15 bp, Homo sapiens
gcccagctttgtgtt

SEQ ID NO: 1551063 - DNA, 15 bp, Homo sapiens
cccagctttgtgttg

SEQ ID NO: 1551064 - DNA, 15 bp, Homo sapiens
ccagctttgtgttgt

SEQ ID NO: 1551065 - DNA, 15 bp, Homo sapiens
cagctttgtgttgta

SEQ ID NO: 1551066 - DNA, 15 bp, Homo sapiens
agctttgtgttgtat

SEQ ID NO: 1551067 - DNA, 15 bp, Homo sapiens
gctttgtgttgtatt

SEQ ID NO: 1551068 - DNA, 15 bp, Homo sapiens
ctttgtgttgtattt

SEQ ID NO: 1551069 - DNA, 15 bp, Homo sapiens
tttgtgttgtatttt

SEQ ID NO: 1551070 - DNA, 15 bp, Homo sapiens
ttgtgttgtattttc

SEQ ID NO: 1551071 - DNA, 15 bp, Homo sapiens
tgtgttgtattttct

SEQ ID NO: 1551072 - DNA, 15 bp, Homo sapiens
gtgttgtattttctg

SEQ ID NO: 1551073 - DNA, 15 bp, Homo sapiens
tgttgtattttctga

SEQ ID NO: 1551074 - DNA, 15 bp, Homo sapiens
gttgtattttctgat

SEQ ID NO: 1551075 - DNA, 15 bp, Homo sapiens
ttgtattttctgatc

SEQ ID NO: 1551076 - DNA, 15 bp, Homo sapiens
tgtattttctgatct

SEQ ID NO: 1551077 - DNA, 15 bp, Homo sapiens
gtattttctgatctt

SEQ ID NO: 1551078 - DNA, 15 bp, Homo sapiens
tattttctgatctta

SEQ ID NO: 1551079 - DNA, 15 bp, Homo sapiens
attttctgatcttat

SEQ ID NO: 1551080 - DNA, 15 bp, Homo sapiens
ttttctgatcttatc

SEQ ID NO: 1551081 - DNA, 15 bp, Homo sapiens
tttctgatcttatcc

SEQ ID NO: 1551082 - DNA, 15 bp, Homo sapiens
ttctgatcttatcct

SEQ ID NO: 1551083 - DNA, 15 bp, Homo sapiens
tctgatcttatcctg

SEQ ID NO: 1551084 - DNA, 15 bp, Homo sapiens
ctgatcttatcctgc

SEQ ID NO: 1551085 - DNA, 15 bp, Homo sapiens
tgatcttatcctgca

SEQ ID NO: 1551086 - DNA, 15 bp, Homo sapiens
gatcttatcctgcaa

SEQ ID NO: 1551087 - DNA, 15 bp, Homo sapiens
atcttatcctgcaac

SEQ ID NO: 1551088 - DNA, 15 bp, Homo sapiens
tcttatcctgcaacc

SEQ ID NO: 1551089 - DNA, 15 bp, Homo sapiens
cttatcctgcaacct

SEQ ID NO: 1551090 - DNA, 15 bp, Homo sapiens
ttatcctgcaacctc

SEQ ID NO: 1551091 - DNA, 15 bp, Homo sapiens
tatcctgcaacctct

SEQ ID NO: 1551092 - DNA, 15 bp, Homo sapiens
atcctgcaacctctt

SEQ ID NO: 1551093 - DNA, 15 bp, Homo sapiens
tcctgcaacctcttg

SEQ ID NO: 1551094 - DNA, 15 bp, Homo sapiens
cctgcaacctcttga

SEQ ID NO: 1551095 - DNA, 15 bp, Homo sapiens
ctgcaacctcttgag

SEQ ID NO: 1551096 - DNA, 15 bp, Homo sapiens
tgcaacctcttgagc

SEQ ID NO: 1551097 - DNA, 15 bp, Homo sapiens
gcaacctcttgagcc

SEQ ID NO: 1551098 - DNA, 15 bp, Homo sapiens
caacctcttgagccc

SEQ ID NO: 1551099 - DNA, 15 bp, Homo sapiens
aacctcttgagcccc

SEQ ID NO: 1551100 - DNA, 15 bp, Homo sapiens
acctcttgagccccc

SEQ ID NO: 1551101 - DNA, 15 bp, Homo sapiens
cctcttgagccccca

SEQ ID NO: 1551102 - DNA, 15 bp, Homo sapiens
ctcttgagcccccaa

SEQ ID NO: 1551103 - DNA, 15 bp, Homo sapiens
tcttgagcccccaac

SEQ ID NO: 1551104 - DNA, 15 bp, Homo sapiens
cttgagcccccaacc

SEQ ID NO: 1551105 - DNA, 15 bp, Homo sapiens
ttgagcccccaacct

SEQ ID NO: 1551106 - DNA, 15 bp, Homo sapiens
tgagcccccaacctg

SEQ ID NO: 1551107 - DNA, 15 bp, Homo sapiens
gagcccccaacctgg

SEQ ID NO: 1551108 - DNA, 15 bp, Homo sapiens
gcccccaacctgggc

SEQ ID NO: 1551109 - DNA, 15 bp, Homo sapiens
cccccaacctgggcc

SEQ ID NO: 1551110 - DNA, 15 bp, Homo sapiens
ccccaacctgggccc

SEQ ID NO: 1551111 - DNA, 15 bp, Homo sapiens
cccaacctgggcccc

SEQ ID NO: 1551112 - DNA, 15 bp, Homo sapiens
ccaacctgggcccca

SEQ ID NO: 1551113 - DNA, 15 bp, Homo sapiens
caacctgggccccag

SEQ ID NO: 1551114 - DNA, 15 bp, Homo sapiens
aacctgggccccagt

SEQ ID NO: 1551115 - DNA, 15 bp, Homo sapiens
acctgggccccagtt

SEQ ID NO: 1551116 - DNA, 15 bp, Homo sapiens
cctgggccccagttc

SEQ ID NO: 1551117 - DNA, 15 bp, Homo sapiens
ctgggccccagttcc

SEQ ID NO: 1551118 - DNA, 15 bp, Homo sapiens
tgggccccagttcct

SEQ ID NO: 1551119 - DNA, 15 bp, Homo sapiens
gggccccagttcctg

SEQ ID NO: 1551120 - DNA, 15 bp, Homo sapiens
ggccccagttcctgc

SEQ ID NO: 1551121 - DNA, 15 bp, Homo sapiens
gccccagttcctgct

SEQ ID NO: 1551122 - DNA, 15 bp, Homo sapiens
ccccagttcctgctg

SEQ ID NO: 1551123 - DNA, 15 bp, Homo sapiens
cccagttcctgctgt

SEQ ID NO: 1551124 - DNA, 15 bp, Homo sapiens
ccagttcctgctgtg

SEQ ID NO: 1551125 - DNA, 15 bp, Homo sapiens
cagttcctgctgtgc

SEQ ID NO: 1551126 - DNA, 15 bp, Homo sapiens
agttcctgctgtgcc

SEQ ID NO: 1551127 - DNA, 15 bp, Homo sapiens
gttcctgctgtgccc

SEQ ID NO: 1551128 - DNA, 15 bp, Homo sapiens
ttcctgctgtgcccc

SEQ ID NO: 1551129 - DNA, 15 bp, Homo sapiens
tcctgctgtgcccca

SEQ ID NO: 1551130 - DNA, 15 bp, Homo sapiens
cctgctgtgccccag

SEQ ID NO: 1551131 - DNA, 15 bp, Homo sapiens
ctgctgtgccccagc

SEQ ID NO: 1551132 - DNA, 15 bp, Homo sapiens
tgctgtgccccagcc

SEQ ID NO: 1551133 - DNA, 15 bp, Homo sapiens
gctgtgccccagcct

SEQ ID NO: 1551134 - DNA, 15 bp, Homo sapiens
ctgtgccccagcctg

SEQ ID NO: 1551135 - DNA, 15 bp, Homo sapiens
tgtgccccagcctgc

SEQ ID NO: 1551136 - DNA, 15 bp, Homo sapiens
gtgccccagcctgcc

SEQ ID NO: 1551137 - DNA, 15 bp, Homo sapiens
tgccccagcctgcca

SEQ ID NO: 1551138 - DNA, 15 bp, Homo sapiens
gccccagcctgccag

SEQ ID NO: 1551139 - DNA, 15 bp, Homo sapiens
ccccagcctgccagc

SEQ ID NO: 1551140 - DNA, 15 bp, Homo sapiens
cccagcctgccagcc

SEQ ID NO: 1551141 - DNA, 15 bp, Homo sapiens
ccagcctgccagccc

SEQ ID NO: 1551142 - DNA, 15 bp, Homo sapiens
cagcctgccagccct

SEQ ID NO: 1551143 - DNA, 15 bp, Homo sapiens
agcctgccagccctc

SEQ ID NO: 1551144 - DNA, 15 bp, Homo sapiens
gcctgccagccctct

SEQ ID NO: 1551145 - DNA, 15 bp, Homo sapiens
cctgccagccctctc

SEQ ID NO: 1551146 - DNA, 15 bp, Homo sapiens
ctgccagccctctct

SEQ ID NO: 1551147 - DNA, 15 bp, Homo sapiens
tgccagccctctctc

SEQ ID NO: 1551148 - DNA, 15 bp, Homo sapiens
gccagccctctctct

SEQ ID NO: 1551149 - DNA, 15 bp, Homo sapiens
ccagccctctctctc

SEQ ID NO: 1551150 - DNA, 15 bp, Homo sapiens
cagccctctctctct

SEQ ID NO: 1551151 - DNA, 15 bp, Homo sapiens
agccctctctctctg

SEQ ID NO: 1551152 - DNA, 15 bp, Homo sapiens
gccctctctctctgc

SEQ ID NO: 1551153 - DNA, 15 bp, Homo sapiens
ccctctctctctgca

SEQ ID NO: 1551154 - DNA, 15 bp, Homo sapiens
cctctctctctgcat

SEQ ID NO: 1551155 - DNA, 15 bp, Homo sapiens
ctctctctctgcata

SEQ ID NO: 1551156 - DNA, 15 bp, Homo sapiens
tctctctctgcatat

SEQ ID NO: 1551157 - DNA, 15 bp, Homo sapiens
ctctctctgcatatt

SEQ ID NO: 1551158 - DNA, 15 bp, Homo sapiens
tctctctgcatattc

SEQ ID NO: 1551159 - DNA, 15 bp, Homo sapiens
ctctctgcatattct

SEQ ID NO: 1551160 - DNA, 15 bp, Homo sapiens
tctctgcatattctt

SEQ ID NO: 1551161 - DNA, 15 bp, Homo sapiens
ctctgcatattcttt

SEQ ID NO: 1551162 - DNA, 15 bp, Homo sapiens
tctgcatattctttc

SEQ ID NO: 1551163 - DNA, 15 bp, Homo sapiens
ctgcatattctttct

SEQ ID NO: 1551164 - DNA, 15 bp, Homo sapiens
tgcatattctttctt

SEQ ID NO: 1551165 - DNA, 15 bp, Homo sapiens
gcatattctttcttt

SEQ ID NO: 1551166 - DNA, 15 bp, Homo sapiens
catattctttcttta

SEQ ID NO: 1551167 - DNA, 15 bp, Homo sapiens
atattctttctttag

SEQ ID NO: 1551168 - DNA, 15 bp, Homo sapiens
tattctttctttagc

SEQ ID NO: 1551169 - DNA, 15 bp, Homo sapiens
attctttctttagct

SEQ ID NO: 1551170 - DNA, 15 bp, Homo sapiens
ttctttctttagctg

SEQ ID NO: 1551171 - DNA, 15 bp, Homo sapiens
tctttctttagctga

SEQ ID NO: 1551172 - DNA, 15 bp, Homo sapiens
ctttctttagctgag

SEQ ID NO: 1551173 - DNA, 15 bp, Homo sapiens
tttctttagctgagt

SEQ ID NO: 1551174 - DNA, 15 bp, Homo sapiens
ttctttagctgagtt

SEQ ID NO: 1551175 - DNA, 15 bp, Homo sapiens
tctttagctgagtta

SEQ ID NO: 1551176 - DNA, 15 bp, Homo sapiens
ctttagctgagttaa

SEQ ID NO: 1551177 - DNA, 15 bp, Homo sapiens
tttagctgagttaac

SEQ ID NO: 1551178 - DNA, 15 bp, Homo sapiens
ttagctgagttaaca

SEQ ID NO: 1551179 - DNA, 15 bp, Homo sapiens
tagctgagttaacac

SEQ ID NO: 1551180 - DNA, 15 bp, Homo sapiens
agctgagttaacacc

SEQ ID NO: 1551181 - DNA, 15 bp, Homo sapiens
gctgagttaacacca

SEQ ID NO: 1551182 - DNA, 15 bp, Homo sapiens
ctgagttaacaccac

SEQ ID NO: 1551183 - DNA, 15 bp, Homo sapiens
tgagttaacaccact

SEQ ID NO: 1551184 - DNA, 15 bp, Homo sapiens
gagttaacaccactg

SEQ ID NO: 1551185 - DNA, 15 bp, Homo sapiens
agttaacaccactga

SEQ ID NO: 1551186 - DNA, 15 bp, Homo sapiens
gttaacaccactgat

SEQ ID NO: 1551187 - DNA, 15 bp, Homo sapiens
ttaacaccactgata

SEQ ID NO: 1551188 - DNA, 15 bp, Homo sapiens
taacaccactgataa

SEQ ID NO: 1551189 - DNA, 15 bp, Homo sapiens
aacaccactgataag

SEQ ID NO: 1551190 - DNA, 15 bp, Homo sapiens
acaccactgataagg

SEQ ID NO: 1551191 - DNA, 15 bp, Homo sapiens
caccactgataaggt

SEQ ID NO: 1551192 - DNA, 15 bp, Homo sapiens
accactgataaggtt

SEQ ID NO: 1551193 - DNA, 15 bp, Homo sapiens
ccactgataaggtta

SEQ ID NO: 1551194 - DNA, 15 bp, Homo sapiens
cactgataaggttaa

SEQ ID NO: 1551195 - DNA, 15 bp, Homo sapiens
actgataaggttaaa

SEQ ID NO: 1551196 - DNA, 15 bp, Homo sapiens
ctgataaggttaaag

SEQ ID NO: 1551197 - DNA, 15 bp, Homo sapiens
tgataaggttaaaga

SEQ ID NO: 1551198 - DNA, 15 bp, Homo sapiens
gataaggttaaagac

SEQ ID NO: 1551199 - DNA, 15 bp, Homo sapiens
ataaggttaaagaca

SEQ ID NO: 1551200 - DNA, 15 bp, Homo sapiens
taaggttaaagacag

SEQ ID NO: 1551201 - DNA, 15 bp, Homo sapiens
aaggttaaagacagg

SEQ ID NO: 1551202 - DNA, 15 bp, Homo sapiens
aggttaaagacaggc

SEQ ID NO: 1551203 - DNA, 15 bp, Homo sapiens
ggttaaagacaggct

SEQ ID NO: 1551204 - DNA, 15 bp, Homo sapiens
gttaaagacaggctc

SEQ ID NO: 1551205 - DNA, 15 bp, Homo sapiens
ttaaagacaggctct

SEQ ID NO: 1551206 - DNA, 15 bp, Homo sapiens
taaagacaggctctt

SEQ ID NO: 1551207 - DNA, 15 bp, Homo sapiens
aaagacaggctctta

SEQ ID NO: 1551208 - DNA, 15 bp, Homo sapiens
aagacaggctcttaa

SEQ ID NO: 1551209 - DNA, 15 bp, Homo sapiens
agacaggctcttaaa

SEQ ID NO: 1551210 - DNA, 15 bp, Homo sapiens
gacaggctcttaaat

SEQ ID NO: 1551211 - DNA, 15 bp, Homo sapiens
acaggctcttaaatt

SEQ ID NO: 1551212 - DNA, 15 bp, Homo sapiens
caggctcttaaattt

SEQ ID NO: 1551213 - DNA, 15 bp, Homo sapiens
aggctcttaaatttc

SEQ ID NO: 1551214 - DNA, 15 bp, Homo sapiens
ggctcttaaatttct

SEQ ID NO: 1551215 - DNA, 15 bp, Homo sapiens
gctcttaaatttctg

SEQ ID NO: 1551216 - DNA, 15 bp, Homo sapiens
ctcttaaatttctgc

SEQ ID NO: 1551217 - DNA, 15 bp, Homo sapiens
tcttaaatttctgcc

SEQ ID NO: 1551218 - DNA, 15 bp, Homo sapiens
cttaaatttctgccc

SEQ ID NO: 1551219 - DNA, 15 bp, Homo sapiens
ttaaatttctgccct

SEQ ID NO: 1551220 - DNA, 15 bp, Homo sapiens
taaatttctgccctg

SEQ ID NO: 1551221 - DNA, 15 bp, Homo sapiens
aaatttctgccctgg

SEQ ID NO: 1551222 - DNA, 15 bp, Homo sapiens
aatttctgccctggc

SEQ ID NO: 1551223 - DNA, 15 bp, Homo sapiens
atttctgccctggca

SEQ ID NO: 1551224 - DNA, 15 bp, Homo sapiens
tttctgccctggcat

SEQ ID NO: 1551225 - DNA, 15 bp, Homo sapiens
ttctgccctggcatg

SEQ ID NO: 1551226 - DNA, 15 bp, Homo sapiens
tctgccctggcatga

SEQ ID NO: 1551227 - DNA, 15 bp, Homo sapiens
ctgccctggcatgag

SEQ ID NO: 1551228 - DNA, 15 bp, Homo sapiens
tgccctggcatgaga

SEQ ID NO: 1551229 - DNA, 15 bp, Homo sapiens
gccctggcatgagaa

SEQ ID NO: 1551230 - DNA, 15 bp, Homo sapiens
ccctggcatgagaaa

SEQ ID NO: 1551231 - DNA, 15 bp, Homo sapiens
cctggcatgagaaat

SEQ ID NO: 1551232 - DNA, 15 bp, Homo sapiens
ctggcatgagaaata

SEQ ID NO: 1551233 - DNA, 15 bp, Homo sapiens
gctcattcccctacc

SEQ ID NO: 1551234 - DNA, 15 bp, Homo sapiens
ctcattcccctaccc

SEQ ID NO: 1551235 - DNA, 15 bp, Homo sapiens
tcattcccctaccct

SEQ ID NO: 1551236 - DNA, 15 bp, Homo sapiens
cattcccctaccctg

SEQ ID NO: 1551237 - DNA, 15 bp, Homo sapiens
attcccctaccctgg

SEQ ID NO: 1551238 - DNA, 15 bp, Homo sapiens
ttcccctaccctggt

SEQ ID NO: 1551239 - DNA, 15 bp, Homo sapiens
tcccctaccctggtc

SEQ ID NO: 1551240 - DNA, 15 bp, Homo sapiens
cccctaccctggtcc

SEQ ID NO: 1551241 - DNA, 15 bp, Homo sapiens
ccctaccctggtcct

SEQ ID NO: 1551242 - DNA, 15 bp, Homo sapiens
cctaccctggtcctt

SEQ ID NO: 1551243 - DNA, 15 bp, Homo sapiens
ctaccctggtcctta

SEQ ID NO: 1551244 - DNA, 15 bp, Homo sapiens
taccctggtccttac

SEQ ID NO: 1551245 - DNA, 15 bp, Homo sapiens
accctggtccttacc

SEQ ID NO: 1551246 - DNA, 15 bp, Homo sapiens
ccctggtccttacct

SEQ ID NO: 1551247 - DNA, 15 bp, Homo sapiens
cctggtccttacctc

SEQ ID NO: 1551248 - DNA, 15 bp, Homo sapiens
ctggtccttacctct

SEQ ID NO: 1551249 - DNA, 15 bp, Homo sapiens
tggtccttacctctc

SEQ ID NO: 1551250 - DNA, 15 bp, Homo sapiens
ggtccttacctctcc

SEQ ID NO: 1551251 - DNA, 15 bp, Homo sapiens
gtccttacctctcca

SEQ ID NO: 1551252 - DNA, 15 bp, Homo sapiens
tccttacctctccaa

SEQ ID NO: 1551253 - DNA, 15 bp, Homo sapiens
ccttacctctccaat

SEQ ID NO: 1551254 - DNA, 15 bp, Homo sapiens
cttacctctccaata

SEQ ID NO: 1551255 - DNA, 15 bp, Homo sapiens
ttacctctccaatac

SEQ ID NO: 1551256 - DNA, 15 bp, Homo sapiens
tacctctccaatacc

SEQ ID NO: 1551257 - DNA, 15 bp, Homo sapiens
acctctccaataccc

SEQ ID NO: 1551258 - DNA, 15 bp, Homo sapiens
cctctccaataccct

SEQ ID NO: 1551259 - DNA, 15 bp, Homo sapiens
ctctccaataccctg

SEQ ID NO: 1551260 - DNA, 15 bp, Homo sapiens
tctccaataccctgg

SEQ ID NO: 1551261 - DNA, 15 bp, Homo sapiens
ctccaataccctggt

SEQ ID NO: 1551262 - DNA, 15 bp, Homo sapiens
tccaataccctggtg

SEQ ID NO: 1551263 - DNA, 15 bp, Homo sapiens
ccaataccctggtga

SEQ ID NO: 1551264 - DNA, 15 bp, Homo sapiens
caataccctggtgag

SEQ ID NO: 1551265 - DNA, 15 bp, Homo sapiens
aataccctggtgagg

SEQ ID NO: 1551266 - DNA, 15 bp, Homo sapiens
ataccctggtgaggg

SEQ ID NO: 1551267 - DNA, 15 bp, Homo sapiens
taccctggtgaggga

SEQ ID NO: 1551268 - DNA, 15 bp, Homo sapiens
accctggtgagggag

SEQ ID NO: 1551269 - DNA, 15 bp, Homo sapiens
ccctggtgagggagc

SEQ ID NO: 1551270 - DNA, 15 bp, Homo sapiens
cctggtgagggagcg

SEQ ID NO: 1551271 - DNA, 15 bp, Homo sapiens
ctggtgagggagcgg

SEQ ID NO: 1551272 - DNA, 15 bp, Homo sapiens
tggtgagggagcggg

SEQ ID NO: 1551273 - DNA, 15 bp, Homo sapiens
ggtgagggagcgggc

SEQ ID NO: 1551274 - DNA, 15 bp, Homo sapiens
gtgagggagcgggcc

SEQ ID NO: 1551275 - DNA, 15 bp, Homo sapiens
tgagggagcgggcct

SEQ ID NO: 1551276 - DNA, 15 bp, Homo sapiens
gagggagcgggccta

SEQ ID NO: 1551277 - DNA, 15 bp, Homo sapiens
agggagcgggcctac

SEQ ID NO: 1551278 - DNA, 15 bp, Homo sapiens
gggagcgggcctact

SEQ ID NO: 1551279 - DNA, 15 bp, Homo sapiens
ggagcgggcctactg

SEQ ID NO: 1551280 - DNA, 15 bp, Homo sapiens
gagcgggcctactga

SEQ ID NO: 1551281 - DNA, 15 bp, Homo sapiens
agcgggcctactgag

SEQ ID NO: 1551282 - DNA, 15 bp, Homo sapiens
gcgggcctactgagg

SEQ ID NO: 1551283 - DNA, 15 bp, Homo sapiens
cgggcctactgagga

SEQ ID NO: 1551284 - DNA, 15 bp, Homo sapiens
gggcctactgaggag

SEQ ID NO: 1551285 - DNA, 15 bp, Homo sapiens
ggcctactgaggaga

SEQ ID NO: 1551286 - DNA, 15 bp, Homo sapiens
gcctactgaggagac

SEQ ID NO: 1551287 - DNA, 15 bp, Homo sapiens
cctactgaggagaca

SEQ ID NO: 1551288 - DNA, 15 bp, Homo sapiens
ctactgaggagacag

SEQ ID NO: 1551289 - DNA, 15 bp, Homo sapiens
tactgaggagacagg

SEQ ID NO: 1551290 - DNA, 15 bp, Homo sapiens
actgaggagacaggc

SEQ ID NO: 1551291 - DNA, 15 bp, Homo sapiens
tgaggagacaggcaa

SEQ ID NO: 1551292 - DNA, 15 bp, Homo sapiens
gaggagacaggcaag

SEQ ID NO: 1551293 - DNA, 15 bp, Homo sapiens
aggagacaggcaagc

SEQ ID NO: 1551294 - DNA, 15 bp, Homo sapiens
ggagacaggcaagcc

SEQ ID NO: 1551295 - DNA, 15 bp, Homo sapiens
gagacaggcaagcct

SEQ ID NO: 1551296 - DNA, 15 bp, Homo sapiens
agacaggcaagcctt

SEQ ID NO: 1551297 - DNA, 15 bp, Homo sapiens
gacaggcaagccttt

SEQ ID NO: 1551298 - DNA, 15 bp, Homo sapiens
acaggcaagcctttg

SEQ ID NO: 1551299 - DNA, 15 bp, Homo sapiens
caggcaagcctttga

SEQ ID NO: 1551300 - DNA, 15 bp, Homo sapiens
aggcaagcctttgac

SEQ ID NO: 1551301 - DNA, 15 bp, Homo sapiens
ggcaagcctttgaca

SEQ ID NO: 1551302 - DNA, 15 bp, Homo sapiens
gcaagcctttgacac

SEQ ID NO: 1551303 - DNA, 15 bp, Homo sapiens
caagcctttgacact

SEQ ID NO: 1551304 - DNA, 15 bp, Homo sapiens
aagcctttgacactc

SEQ ID NO: 1551305 - DNA, 15 bp, Homo sapiens
agcctttgacactca

SEQ ID NO: 1551306 - DNA, 15 bp, Homo sapiens
gcctttgacactcaa

SEQ ID NO: 1551307 - DNA, 15 bp, Homo sapiens
cctttgacactcaaa

SEQ ID NO: 1551308 - DNA, 15 bp, Homo sapiens
ctttgacactcaaag

SEQ ID NO: 1551309 - DNA, 15 bp, Homo sapiens
tttgacactcaaagt

SEQ ID NO: 1551310 - DNA, 15 bp, Homo sapiens
ttgacactcaaagtt

SEQ ID NO: 1551311 - DNA, 15 bp, Homo sapiens
tgacactcaaagtta

SEQ ID NO: 1551312 - DNA, 15 bp, Homo sapiens
gacactcaaagttaa

SEQ ID NO: 1551313 - DNA, 15 bp, Homo sapiens
acactcaaagttaaa

SEQ ID NO: 1551314 - DNA, 15 bp, Homo sapiens
cactcaaagttaaaa

SEQ ID NO: 1551315 - DNA, 15 bp, Homo sapiens
actcaaagttaaaat

SEQ ID NO: 1551316 - DNA, 15 bp, Homo sapiens
ctcaaagttaaaatc

SEQ ID NO: 1551317 - DNA, 15 bp, Homo sapiens
tcaaagttaaaatca

SEQ ID NO: 1551318 - DNA, 15 bp, Homo sapiens
caaagttaaaatcag

SEQ ID NO: 1551319 - DNA, 15 bp, Homo sapiens
aaagttaaaatcaga

SEQ ID NO: 1551320 - DNA, 15 bp, Homo sapiens
aagttaaaatcagac

SEQ ID NO: 1551321 - DNA, 15 bp, Homo sapiens
agttaaaatcagaca

SEQ ID NO: 1551322 - DNA, 15 bp, Homo sapiens
gttaaaatcagacac

SEQ ID NO: 1551323 - DNA, 15 bp, Homo sapiens
ttaaaatcagacaca

SEQ ID NO: 1551324 - DNA, 15 bp, Homo sapiens
taaaatcagacacaa

SEQ ID NO: 1551325 - DNA, 15 bp, Homo sapiens
aaaatcagacacaac

SEQ ID NO: 1551326 - DNA, 15 bp, Homo sapiens
aaatcagacacaact

SEQ ID NO: 1551327 - DNA, 15 bp, Homo sapiens
aatcagacacaactg

SEQ ID NO: 1551328 - DNA, 15 bp, Homo sapiens
atcagacacaactgg

SEQ ID NO: 1551329 - DNA, 15 bp, Homo sapiens
tcagacacaactgga

SEQ ID NO: 1551330 - DNA, 15 bp, Homo sapiens
cagacacaactggat

SEQ ID NO: 1551331 - DNA, 15 bp, Homo sapiens
agacacaactggatt

SEQ ID NO: 1551332 - DNA, 15 bp, Homo sapiens
gacacaactggattc

SEQ ID NO: 1551333 - DNA, 15 bp, Homo sapiens
acacaactggattca

SEQ ID NO: 1551334 - DNA, 15 bp, Homo sapiens
cacaactggattcaa

SEQ ID NO: 1551335 - DNA, 15 bp, Homo sapiens
acaactggattcaaa

SEQ ID NO: 1551336 - DNA, 15 bp, Homo sapiens
caactggattcaaat

SEQ ID NO: 1551337 - DNA, 15 bp, Homo sapiens
aactggattcaaata

SEQ ID NO: 1551338 - DNA, 15 bp, Homo sapiens
actggattcaaatat

SEQ ID NO: 1551339 - DNA, 15 bp, Homo sapiens
ctggattcaaatata

SEQ ID NO: 1551340 - DNA, 15 bp, Homo sapiens
tggattcaaatatag

SEQ ID NO: 1551341 - DNA, 15 bp, Homo sapiens
ggattcaaatatagg

SEQ ID NO: 1551342 - DNA, 15 bp, Homo sapiens
gattcaaatataggg

SEQ ID NO: 1551343 - DNA, 15 bp, Homo sapiens
attcaaatatagggt

SEQ ID NO: 1551344 - DNA, 15 bp, Homo sapiens
ttcaaatatagggtc

SEQ ID NO: 1551345 - DNA, 15 bp, Homo sapiens
tcaaatatagggtct

SEQ ID NO: 1551346 - DNA, 15 bp, Homo sapiens
caaatatagggtctg

SEQ ID NO: 1551347 - DNA, 15 bp, Homo sapiens
aaatatagggtctgc

SEQ ID NO: 1551348 - DNA, 15 bp, Homo sapiens
aatatagggtctgct

SEQ ID NO: 1551349 - DNA, 15 bp, Homo sapiens
atatagggtctgcta

SEQ ID NO: 1551350 - DNA, 15 bp, Homo sapiens
tatagggtctgctat

SEQ ID NO: 1551351 - DNA, 15 bp, Homo sapiens
atagggtctgctatt

SEQ ID NO: 1551352 - DNA, 15 bp, Homo sapiens
tagggtctgctatta

SEQ ID NO: 1551353 - DNA, 15 bp, Homo sapiens
agggtctgctattag

SEQ ID NO: 1551354 - DNA, 15 bp, Homo sapiens
gggtctgctattagc

SEQ ID NO: 1551355 - DNA, 15 bp, Homo sapiens
ggtctgctattagct

SEQ ID NO: 1551356 - DNA, 15 bp, Homo sapiens
gtctgctattagctg

SEQ ID NO: 1551357 - DNA, 15 bp, Homo sapiens
tctgctattagctgg

SEQ ID NO: 1551358 - DNA, 15 bp, Homo sapiens
ctgctattagctggt

SEQ ID NO: 1551359 - DNA, 15 bp, Homo sapiens
tgctattagctggtg

SEQ ID NO: 1551360 - DNA, 15 bp, Homo sapiens
gctattagctggtga

SEQ ID NO: 1551361 - DNA, 15 bp, Homo sapiens
ctattagctggtgat

SEQ ID NO: 1551362 - DNA, 15 bp, Homo sapiens
tattagctggtgatc

SEQ ID NO: 1551363 - DNA, 15 bp, Homo sapiens
attagctggtgatct

SEQ ID NO: 1551364 - DNA, 15 bp, Homo sapiens
ttagctggtgatctg

SEQ ID NO: 1551365 - DNA, 15 bp, Homo sapiens
tagctggtgatctgg

SEQ ID NO: 1551366 - DNA, 15 bp, Homo sapiens
agctggtgatctgga

SEQ ID NO: 1551367 - DNA, 15 bp, Homo sapiens
gctggtgatctggag

SEQ ID NO: 1551368 - DNA, 15 bp, Homo sapiens
ctggtgatctggagt

SEQ ID NO: 1551369 - DNA, 15 bp, Homo sapiens
tggtgatctggagtt

SEQ ID NO: 1551370 - DNA, 15 bp, Homo sapiens
ggtgatctggagttg

SEQ ID NO: 1551371 - DNA, 15 bp, Homo sapiens
gtgatctggagttgg

SEQ ID NO: 1551372 - DNA, 15 bp, Homo sapiens
tgatctggagttgga

SEQ ID NO: 1551373 - DNA, 15 bp, Homo sapiens
gatctggagttggac

SEQ ID NO: 1551374 - DNA, 15 bp, Homo sapiens
atctggagttggaca

SEQ ID NO: 1551375 - DNA, 15 bp, Homo sapiens
tctggagttggacac

SEQ ID NO: 1551376 - DNA, 15 bp, Homo sapiens
ctggagttggacact

SEQ ID NO: 1551377 - DNA, 15 bp, Homo sapiens
tggagttggacactt

SEQ ID NO: 1551378 - DNA, 15 bp, Homo sapiens
ggagttggacacttg

SEQ ID NO: 1551379 - DNA, 15 bp, Homo sapiens
gagttggacacttgg

SEQ ID NO: 1551380 - DNA, 15 bp, Homo sapiens
agttggacacttggt

SEQ ID NO: 1551381 - DNA, 15 bp, Homo sapiens
gttggacacttggtt

SEQ ID NO: 1551382 - DNA, 15 bp, Homo sapiens
ttggacacttggtta

SEQ ID NO: 1551383 - DNA, 15 bp, Homo sapiens
tggacacttggttat

SEQ ID NO: 1551384 - DNA, 15 bp, Homo sapiens
ggacacttggttatc

SEQ ID NO: 1551385 - DNA, 15 bp, Homo sapiens
gacacttggttatcc

SEQ ID NO: 1551386 - DNA, 15 bp, Homo sapiens
acacttggttatccc

SEQ ID NO: 1551387 - DNA, 15 bp, Homo sapiens
cacttggttatcccc

SEQ ID NO: 1551388 - DNA, 15 bp, Homo sapiens
acttggttatcccca

SEQ ID NO: 1551389 - DNA, 15 bp, Homo sapiens
cttggttatccccaa

SEQ ID NO: 1551390 - DNA, 15 bp, Homo sapiens
ttggttatccccaat

SEQ ID NO: 1551391 - DNA, 15 bp, Homo sapiens
tggttatccccaata

SEQ ID NO: 1551392 - DNA, 15 bp, Homo sapiens
ggttatccccaatac

SEQ ID NO: 1551393 - DNA, 15 bp, Homo sapiens
gttatccccaataca

SEQ ID NO: 1551394 - DNA, 15 bp, Homo sapiens
ttatccccaatacat

SEQ ID NO: 1551395 - DNA, 15 bp, Homo sapiens
tatccccaatacatg

SEQ ID NO: 1551396 - DNA, 15 bp, Homo sapiens
atccccaatacatgt

SEQ ID NO: 1551397 - DNA, 15 bp, Homo sapiens
tccccaatacatgtc

SEQ ID NO: 1551398 - DNA, 15 bp, Homo sapiens
ccccaatacatgtcc

SEQ ID NO: 1551399 - DNA, 15 bp, Homo sapiens
cccaatacatgtcct

SEQ ID NO: 1551400 - DNA, 15 bp, Homo sapiens
ccaatacatgtcctt

SEQ ID NO: 1551401 - DNA, 15 bp, Homo sapiens
caatacatgtcctta

SEQ ID NO: 1551402 - DNA, 15 bp, Homo sapiens
aatacatgtccttat

SEQ ID NO: 1551403 - DNA, 15 bp, Homo sapiens
atacatgtccttatc

SEQ ID NO: 1551404 - DNA, 15 bp, Homo sapiens
tacatgtccttatct

SEQ ID NO: 1551405 - DNA, 15 bp, Homo sapiens
acatgtccttatctg

SEQ ID NO: 1551406 - DNA, 15 bp, Homo sapiens
catgtccttatctgt

SEQ ID NO: 1551407 - DNA, 15 bp, Homo sapiens
atgtccttatctgta

SEQ ID NO: 1551408 - DNA, 15 bp, Homo sapiens
tgtccttatctgtaa

SEQ ID NO: 1551409 - DNA, 15 bp, Homo sapiens
gtccttatctgtaaa

SEQ ID NO: 1551410 - DNA, 15 bp, Homo sapiens
tccttatctgtaaat

SEQ ID NO: 1551411 - DNA, 15 bp, Homo sapiens
ccttatctgtaaata

SEQ ID NO: 1551412 - DNA, 15 bp, Homo sapiens
cttatctgtaaataa

SEQ ID NO: 1551413 - DNA, 15 bp, Homo sapiens
ttatctgtaaataag

SEQ ID NO: 1551414 - DNA, 15 bp, Homo sapiens
tatctgtaaataagg

SEQ ID NO: 1551415 - DNA, 15 bp, Homo sapiens
atctgtaaataagga

SEQ ID NO: 1551416 - DNA, 15 bp, Homo sapiens
tctgtaaataaggat

SEQ ID NO: 1551417 - DNA, 15 bp, Homo sapiens
ctgtaaataaggatc

SEQ ID NO: 1551418 - DNA, 15 bp, Homo sapiens
tgtaaataaggatca

SEQ ID NO: 1551419 - DNA, 15 bp, Homo sapiens
gtaaataaggatcat

SEQ ID NO: 1551420 - DNA, 15 bp, Homo sapiens
taaataaggatcata

SEQ ID NO: 1551421 - DNA, 15 bp, Homo sapiens
aaataaggatcataa

SEQ ID NO: 1551422 - DNA, 15 bp, Homo sapiens
aataaggatcataag

SEQ ID NO: 1551423 - DNA, 15 bp, Homo sapiens
ataaggatcataagc

SEQ ID NO: 1551424 - DNA, 15 bp, Homo sapiens
taaggatcataagct

SEQ ID NO: 1551425 - DNA, 15 bp, Homo sapiens
aaggatcataagctc

SEQ ID NO: 1551426 - DNA, 15 bp, Homo sapiens
aggatcataagctct

SEQ ID NO: 1551427 - DNA, 15 bp, Homo sapiens
ggatcataagctcta

SEQ ID NO: 1551428 - DNA, 15 bp, Homo sapiens
gatcataagctctat

SEQ ID NO: 1551429 - DNA, 15 bp, Homo sapiens
atcataagctctatc

SEQ ID NO: 1551430 - DNA, 15 bp, Homo sapiens
tcataagctctatca

SEQ ID NO: 1551431 - DNA, 15 bp, Homo sapiens
cataagctctatcac

SEQ ID NO: 1551432 - DNA, 15 bp, Homo sapiens
ataagctctatcaca

SEQ ID NO: 1551433 - DNA, 15 bp, Homo sapiens
taagctctatcacat

SEQ ID NO: 1551434 - DNA, 15 bp, Homo sapiens
aagctctatcacata

SEQ ID NO: 1551435 - DNA, 15 bp, Homo sapiens
agctctatcacatag

SEQ ID NO: 1551436 - DNA, 15 bp, Homo sapiens
gctctatcacatagg

SEQ ID NO: 1551437 - DNA, 15 bp, Homo sapiens
ctctatcacataggg

SEQ ID NO: 1551438 - DNA, 15 bp, Homo sapiens
tctatcacatagggt

SEQ ID NO: 1551439 - DNA, 15 bp, Homo sapiens
ctatcacatagggtt

SEQ ID NO: 1551440 - DNA, 15 bp, Homo sapiens
tatcacatagggtta

SEQ ID NO: 1551441 - DNA, 15 bp, Homo sapiens
atcacatagggttat

SEQ ID NO: 1551442 - DNA, 15 bp, Homo sapiens
tcacatagggttatg

SEQ ID NO: 1551443 - DNA, 15 bp, Homo sapiens
cacatagggttatgg

SEQ ID NO: 1551444 - DNA, 15 bp, Homo sapiens
acatagggttatgga

SEQ ID NO: 1551445 - DNA, 15 bp, Homo sapiens
catagggttatggag

SEQ ID NO: 1551446 - DNA, 15 bp, Homo sapiens
atagggttatggagg

SEQ ID NO: 1551447 - DNA, 15 bp, Homo sapiens
tagggttatggaggg

SEQ ID NO: 1551448 - DNA, 15 bp, Homo sapiens
agggttatggagggg

SEQ ID NO: 1551449 - DNA, 15 bp, Homo sapiens
ggttatggaggggat

SEQ ID NO: 1551450 - DNA, 15 bp, Homo sapiens
gttatggaggggatt

SEQ ID NO: 1551451 - DNA, 15 bp, Homo sapiens
ttatggaggggattg

SEQ ID NO: 1551452 - DNA, 15 bp, Homo sapiens
tatggaggggattga

SEQ ID NO: 1551453 - DNA, 15 bp, Homo sapiens
atggaggggattgag

SEQ ID NO: 1551454 - DNA, 15 bp, Homo sapiens
tggaggggattgaga

SEQ ID NO: 1551455 - DNA, 15 bp, Homo sapiens
ggaggggattgagac

SEQ ID NO: 1551456 - DNA, 15 bp, Homo sapiens
gaggggattgagaca

SEQ ID NO: 1551457 - DNA, 15 bp, Homo sapiens
aggggattgagacac

SEQ ID NO: 1551458 - DNA, 15 bp, Homo sapiens
ggggattgagacact

SEQ ID NO: 1551459 - DNA, 15 bp, Homo sapiens
gggattgagacactg

SEQ ID NO: 1551460 - DNA, 15 bp, Homo sapiens
ggattgagacactgg

SEQ ID NO: 1551461 - DNA, 15 bp, Homo sapiens
gattgagacactggc

SEQ ID NO: 1551462 - DNA, 15 bp, Homo sapiens
attgagacactggcc

SEQ ID NO: 1551463 - DNA, 15 bp, Homo sapiens
ttgagacactggccc

SEQ ID NO: 1551464 - DNA, 15 bp, Homo sapiens
tgagacactggcccc

SEQ ID NO: 1551465 - DNA, 15 bp, Homo sapiens
gagacactggcccct

SEQ ID NO: 1551466 - DNA, 15 bp, Homo sapiens
agacactggcccctg

SEQ ID NO: 1551467 - DNA, 15 bp, Homo sapiens
gacactggcccctga

SEQ ID NO: 1551468 - DNA, 15 bp, Homo sapiens
acactggcccctgaa

SEQ ID NO: 1551469 - DNA, 15 bp, Homo sapiens
cactggcccctgaaa

SEQ ID NO: 1551470 - DNA, 15 bp, Homo sapiens
actggcccctgaaat

SEQ ID NO: 1551471 - DNA, 15 bp, Homo sapiens
ctggcccctgaaatg

SEQ ID NO: 1551472 - DNA, 15 bp, Homo sapiens
tggcccctgaaatgg

SEQ ID NO: 1551473 - DNA, 15 bp, Homo sapiens
ggcccctgaaatggc

SEQ ID NO: 1551474 - DNA, 15 bp, Homo sapiens
gcccctgaaatggca

SEQ ID NO: 1551475 - DNA, 15 bp, Homo sapiens
cccctgaaatggcaa

SEQ ID NO: 1551476 - DNA, 15 bp, Homo sapiens
ccctgaaatggcaac

SEQ ID NO: 1551477 - DNA, 15 bp, Homo sapiens
cctgaaatggcaact

SEQ ID NO: 1551478 - DNA, 15 bp, Homo sapiens
ctgaaatggcaactt

SEQ ID NO: 1551479 - DNA, 15 bp, Homo sapiens
tgaaatggcaacttt

SEQ ID NO: 1551480 - DNA, 15 bp, Homo sapiens
gaaatggcaacttta

SEQ ID NO: 1551481 - DNA, 15 bp, Homo sapiens
aaatggcaactttag

SEQ ID NO: 1551482 - DNA, 15 bp, Homo sapiens
aatggcaactttagt

SEQ ID NO: 1551483 - DNA, 15 bp, Homo sapiens
atggcaactttagtc

SEQ ID NO: 1551484 - DNA, 15 bp, Homo sapiens
tggcaactttagtca

SEQ ID NO: 1551485 - DNA, 15 bp, Homo sapiens
ggcaactttagtcac

SEQ ID NO: 1551486 - DNA, 15 bp, Homo sapiens
gcaactttagtcact

SEQ ID NO: 1551487 - DNA, 15 bp, Homo sapiens
caactttagtcactt

SEQ ID NO: 1551488 - DNA, 15 bp, Homo sapiens
aactttagtcacttt

SEQ ID NO: 1551489 - DNA, 15 bp, Homo sapiens
actttagtcacttta

SEQ ID NO: 1551490 - DNA, 15 bp, Homo sapiens
ctttagtcactttag

SEQ ID NO: 1551491 - DNA, 15 bp, Homo sapiens
tttagtcactttagt

SEQ ID NO: 1551492 - DNA, 15 bp, Homo sapiens
ttagtcactttagtc

SEQ ID NO: 1551493 - DNA, 15 bp, Homo sapiens
tagtcactttagtca

SEQ ID NO: 1551494 - DNA, 15 bp, Homo sapiens
agtcactttagtcaa

SEQ ID NO: 1551495 - DNA, 15 bp, Homo sapiens
gtcactttagtcaaa

SEQ ID NO: 1551496 - DNA, 15 bp, Homo sapiens
tcactttagtcaaat

SEQ ID NO: 1551497 - DNA, 15 bp, Homo sapiens
cactttagtcaaatg

SEQ ID NO: 1551498 - DNA, 15 bp, Homo sapiens
actttagtcaaatgg

SEQ ID NO: 1551499 - DNA, 15 bp, Homo sapiens
ctttagtcaaatggc

SEQ ID NO: 1551500 - DNA, 15 bp, Homo sapiens
tttagtcaaatggca

SEQ ID NO: 1551501 - DNA, 15 bp, Homo sapiens
ttagtcaaatggcag

SEQ ID NO: 1551502 - DNA, 15 bp, Homo sapiens
tagtcaaatggcaga

SEQ ID NO: 1551503 - DNA, 15 bp, Homo sapiens
agtcaaatggcagaa

SEQ ID NO: 1551504 - DNA, 15 bp, Homo sapiens
gtcaaatggcagaac

SEQ ID NO: 1551505 - DNA, 15 bp, Homo sapiens
tcaaatggcagaact

SEQ ID NO: 1551506 - DNA, 15 bp, Homo sapiens
caaatggcagaactg

SEQ ID NO: 1551507 - DNA, 15 bp, Homo sapiens
aaatggcagaactga

SEQ ID NO: 1551508 - DNA, 15 bp, Homo sapiens
aatggcagaactgac

SEQ ID NO: 1551509 - DNA, 15 bp, Homo sapiens
atggcagaactgacc

SEQ ID NO: 1551510 - DNA, 15 bp, Homo sapiens
tggcagaactgaccc

SEQ ID NO: 1551511 - DNA, 15 bp, Homo sapiens
ggcagaactgaccca

SEQ ID NO: 1551512 - DNA, 15 bp, Homo sapiens
gcagaactgacccat

SEQ ID NO: 1551513 - DNA, 15 bp, Homo sapiens
cagaactgacccatt

SEQ ID NO: 1551514 - DNA, 15 bp, Homo sapiens
agaactgacccattt

SEQ ID NO: 1551515 - DNA, 15 bp, Homo sapiens
gaactgacccatttg

SEQ ID NO: 1551516 - DNA, 15 bp, Homo sapiens
aactgacccatttgt

SEQ ID NO: 1551517 - DNA, 15 bp, Homo sapiens
actgacccatttgtc

SEQ ID NO: 1551518 - DNA, 15 bp, Homo sapiens
ctgacccatttgtcc

SEQ ID NO: 1551519 - DNA, 15 bp, Homo sapiens
tgacccatttgtcct

SEQ ID NO: 1551520 - DNA, 15 bp, Homo sapiens
gacccatttgtcctt

SEQ ID NO: 1551521 - DNA, 15 bp, Homo sapiens
acccatttgtccttg

SEQ ID NO: 1551522 - DNA, 15 bp, Homo sapiens
cccatttgtccttgg

SEQ ID NO: 1551523 - DNA, 15 bp, Homo sapiens
ccatttgtccttggg

SEQ ID NO: 1551524 - DNA, 15 bp, Homo sapiens
catttgtccttgggg

SEQ ID NO: 1551525 - DNA, 15 bp, Homo sapiens
atttgtccttgggga

SEQ ID NO: 1551526 - DNA, 15 bp, Homo sapiens
tttgtccttggggat

SEQ ID NO: 1551527 - DNA, 15 bp, Homo sapiens
ttgtccttggggatc

SEQ ID NO: 1551528 - DNA, 15 bp, Homo sapiens
tgtccttggggatcc

SEQ ID NO: 1551529 - DNA, 15 bp, Homo sapiens
gtccttggggatcca

SEQ ID NO: 1551530 - DNA, 15 bp, Homo sapiens
tccttggggatccag

SEQ ID NO: 1551531 - DNA, 15 bp, Homo sapiens
ccttggggatccaga

SEQ ID NO: 1551532 - DNA, 15 bp, Homo sapiens
cttggggatccagaa

SEQ ID NO: 1551533 - DNA, 15 bp, Homo sapiens
ttggggatccagaag

SEQ ID NO: 1551534 - DNA, 15 bp, Homo sapiens
tggggatccagaagt

SEQ ID NO: 1551535 - DNA, 15 bp, Homo sapiens
ggggatccagaagtg

SEQ ID NO: 1551536 - DNA, 15 bp, Homo sapiens
gggatccagaagtgt

SEQ ID NO: 1551537 - DNA, 15 bp, Homo sapiens
ggatccagaagtgtt

SEQ ID NO: 1551538 - DNA, 15 bp, Homo sapiens
gatccagaagtgttt

SEQ ID NO: 1551539 - DNA, 15 bp, Homo sapiens
atccagaagtgtttt

SEQ ID NO: 1551540 - DNA, 15 bp, Homo sapiens
tccagaagtgttttc

SEQ ID NO: 1551541 - DNA, 15 bp, Homo sapiens
ccagaagtgttttcc

SEQ ID NO: 1551542 - DNA, 15 bp, Homo sapiens
cagaagtgttttcca

SEQ ID NO: 1551543 - DNA, 15 bp, Homo sapiens
agaagtgttttccag

SEQ ID NO: 1551544 - DNA, 15 bp, Homo sapiens
gaagtgttttccagg

SEQ ID NO: 1551545 - DNA, 15 bp, Homo sapiens
aagtgttttccaggg

SEQ ID NO: 1551546 - DNA, 15 bp, Homo sapiens
agtgttttccagggc

SEQ ID NO: 1551547 - DNA, 15 bp, Homo sapiens
gtgttttccagggct

SEQ ID NO: 1551548 - DNA, 15 bp, Homo sapiens
tgttttccagggctg

SEQ ID NO: 1551549 - DNA, 15 bp, Homo sapiens
gttttccagggctgc

SEQ ID NO: 1551550 - DNA, 15 bp, Homo sapiens
ttttccagggctgca

SEQ ID NO: 1551551 - DNA, 15 bp, Homo sapiens
tttccagggctgcag

SEQ ID NO: 1551552 - DNA, 15 bp, Homo sapiens
ttccagggctgcagg

SEQ ID NO: 1551553 - DNA, 15 bp, Homo sapiens
tccagggctgcagga

SEQ ID NO: 1551554 - DNA, 15 bp, Homo sapiens
ccagggctgcaggat

SEQ ID NO: 1551555 - DNA, 15 bp, Homo sapiens
cagggctgcaggata

SEQ ID NO: 1551556 - DNA, 15 bp, Homo sapiens
agggctgcaggatag

SEQ ID NO: 1551557 - DNA, 15 bp, Homo sapiens
gggctgcaggatagt

SEQ ID NO: 1551558 - DNA, 15 bp, Homo sapiens
ggctgcaggatagta

SEQ ID NO: 1551559 - DNA, 15 bp, Homo sapiens
gctgcaggatagtat

SEQ ID NO: 1551560 - DNA, 15 bp, Homo sapiens
ctgcaggatagtatg

SEQ ID NO: 1551561 - DNA, 15 bp, Homo sapiens
tgcaggatagtatga

SEQ ID NO: 1551562 - DNA, 15 bp, Homo sapiens
gcaggatagtatgag

SEQ ID NO: 1551563 - DNA, 15 bp, Homo sapiens
caggatagtatgaga

SEQ ID NO: 1551564 - DNA, 15 bp, Homo sapiens
aggatagtatgagag

SEQ ID NO: 1551565 - DNA, 15 bp, Homo sapiens
ggatagtatgagaga

SEQ ID NO: 1551566 - DNA, 15 bp, Homo sapiens
gatagtatgagagag

SEQ ID NO: 1551567 - DNA, 15 bp, Homo sapiens
atagtatgagagagg

SEQ ID NO: 1551568 - DNA, 15 bp, Homo sapiens
tagtatgagagaggg

SEQ ID NO: 1551569 - DNA, 15 bp, Homo sapiens
agtatgagagagggg

SEQ ID NO: 1551570 - DNA, 15 bp, Homo sapiens
gtatgagagaggggc

SEQ ID NO: 1551571 - DNA, 15 bp, Homo sapiens
tatgagagaggggct

SEQ ID NO: 1551572 - DNA, 15 bp, Homo sapiens
atgagagaggggctg

SEQ ID NO: 1551573 - DNA, 15 bp, Homo sapiens
tgagagaggggctgt

SEQ ID NO: 1551574 - DNA, 15 bp, Homo sapiens
gagagaggggctgtt

SEQ ID NO: 1551575 - DNA, 15 bp, Homo sapiens
agagaggggctgttg

SEQ ID NO: 1551576 - DNA, 15 bp, Homo sapiens
gagaggggctgttgg

SEQ ID NO: 1551577 - DNA, 15 bp, Homo sapiens
aggggctgttggaga

SEQ ID NO: 1551578 - DNA, 15 bp, Homo sapiens
ggggctgttggagac

SEQ ID NO: 1551579 - DNA, 15 bp, Homo sapiens
gggctgttggagacc

SEQ ID NO: 1551580 - DNA, 15 bp, Homo sapiens
ggctgttggagaccc

SEQ ID NO: 1551581 - DNA, 15 bp, Homo sapiens
gctgttggagaccct

SEQ ID NO: 1551582 - DNA, 15 bp, Homo sapiens
ctgttggagaccctg

SEQ ID NO: 1551583 - DNA, 15 bp, Homo sapiens
tgttggagaccctgg

SEQ ID NO: 1551584 - DNA, 15 bp, Homo sapiens
gttggagaccctggg

SEQ ID NO: 1551585 - DNA, 15 bp, Homo sapiens
ttggagaccctgggt

SEQ ID NO: 1551586 - DNA, 15 bp, Homo sapiens
tggagaccctgggtc

SEQ ID NO: 1551587 - DNA, 15 bp, Homo sapiens
ggagaccctgggtct

SEQ ID NO: 1551588 - DNA, 15 bp, Homo sapiens
gagaccctgggtctc

SEQ ID NO: 1551589 - DNA, 15 bp, Homo sapiens
agaccctgggtctct

SEQ ID NO: 1551590 - DNA, 15 bp, Homo sapiens
gaccctgggtctctg

SEQ ID NO: 1551591 - DNA, 15 bp, Homo sapiens
accctgggtctctgt

SEQ ID NO: 1551592 - DNA, 15 bp, Homo sapiens
ccctgggtctctgta

SEQ ID NO: 1551593 - DNA, 15 bp, Homo sapiens
cctgggtctctgtac

SEQ ID NO: 1551594 - DNA, 15 bp, Homo sapiens
ctgggtctctgtact

SEQ ID NO: 1551595 - DNA, 15 bp, Homo sapiens
tgggtctctgtactc

SEQ ID NO: 1551596 - DNA, 15 bp, Homo sapiens
gggtctctgtactct

SEQ ID NO: 1551597 - DNA, 15 bp, Homo sapiens
ggtctctgtactcta

SEQ ID NO: 1551598 - DNA, 15 bp, Homo sapiens
gtctctgtactctag

SEQ ID NO: 1551599 - DNA, 15 bp, Homo sapiens
tctctgtactctagt

SEQ ID NO: 1551600 - DNA, 15 bp, Homo sapiens
ctctgtactctagtg

SEQ ID NO: 1551601 - DNA, 15 bp, Homo sapiens
tctgtactctagtga

SEQ ID NO: 1551602 - DNA, 15 bp, Homo sapiens
ctgtactctagtgaa

SEQ ID NO: 1551603 - DNA, 15 bp, Homo sapiens
tgtactctagtgaat

SEQ ID NO: 1551604 - DNA, 15 bp, Homo sapiens
gtactctagtgaatg

SEQ ID NO: 1551605 - DNA, 15 bp, Homo sapiens
tactctagtgaatgg

SEQ ID NO: 1551606 - DNA, 15 bp, Homo sapiens
actctagtgaatggc

SEQ ID NO: 1551607 - DNA, 15 bp, Homo sapiens
ctctagtgaatggca

SEQ ID NO: 1551608 - DNA, 15 bp, Homo sapiens
tctagtgaatggcag

SEQ ID NO: 1551609 - DNA, 15 bp, Homo sapiens
ctagtgaatggcagg

SEQ ID NO: 1551610 - DNA, 15 bp, Homo sapiens
tagtgaatggcaggt

SEQ ID NO: 1551611 - DNA, 15 bp, Homo sapiens
agtgaatggcaggtg

SEQ ID NO: 1551612 - DNA, 15 bp, Homo sapiens
gtgaatggcaggtgg

SEQ ID NO: 1551613 - DNA, 15 bp, Homo sapiens
tgaatggcaggtgga

SEQ ID NO: 1551614 - DNA, 15 bp, Homo sapiens
gaatggcaggtggag

SEQ ID NO: 1551615 - DNA, 15 bp, Homo sapiens
aatggcaggtggagt

SEQ ID NO: 1551616 - DNA, 15 bp, Homo sapiens
atggcaggtggagtc

SEQ ID NO: 1551617 - DNA, 15 bp, Homo sapiens
tggcaggtggagtcc

SEQ ID NO: 1551618 - DNA, 15 bp, Homo sapiens
ggcaggtggagtcca

SEQ ID NO: 1551619 - DNA, 15 bp, Homo sapiens
gcaggtggagtccag

SEQ ID NO: 1551620 - DNA, 15 bp, Homo sapiens
caggtggagtccagg

SEQ ID NO: 1551621 - DNA, 15 bp, Homo sapiens
aggtggagtccaggg

SEQ ID NO: 1551622 - DNA, 15 bp, Homo sapiens
ggtggagtccagggc

SEQ ID NO: 1551623 - DNA, 15 bp, Homo sapiens
gtggagtccagggct

SEQ ID NO: 1551624 - DNA, 15 bp, Homo sapiens
tggagtccagggctg

SEQ ID NO: 1551625 - DNA, 15 bp, Homo sapiens
ggagtccagggctga

SEQ ID NO: 1551626 - DNA, 15 bp, Homo sapiens
gagtccagggctgag

SEQ ID NO: 1551627 - DNA, 15 bp, Homo sapiens
agtccagggctgagc

SEQ ID NO: 1551628 - DNA, 15 bp, Homo sapiens
gtccagggctgagcc

SEQ ID NO: 1551629 - DNA, 15 bp, Homo sapiens
tccagggctgagcct

SEQ ID NO: 1551630 - DNA, 15 bp, Homo sapiens
ccagggctgagcctt

SEQ ID NO: 1551631 - DNA, 15 bp, Homo sapiens
cagggctgagccttg

SEQ ID NO: 1551632 - DNA, 15 bp, Homo sapiens
agggctgagccttga

SEQ ID NO: 1551633 - DNA, 15 bp, Homo sapiens
gggctgagccttgat

SEQ ID NO: 1551634 - DNA, 15 bp, Homo sapiens
ggctgagccttgatc

SEQ ID NO: 1551635 - DNA, 15 bp, Homo sapiens
gctgagccttgatca

SEQ ID NO: 1551636 - DNA, 15 bp, Homo sapiens
ctgagccttgatcag

SEQ ID NO: 1551637 - DNA, 15 bp, Homo sapiens
tgagccttgatcagt

SEQ ID NO: 1551638 - DNA, 15 bp, Homo sapiens
gagccttgatcagtg

SEQ ID NO: 1551639 - DNA, 15 bp, Homo sapiens
agccttgatcagtgc

SEQ ID NO: 1551640 - DNA, 15 bp, Homo sapiens
gccttgatcagtgcg

SEQ ID NO: 1551641 - DNA, 15 bp, Homo sapiens
ccttgatcagtgcgg

SEQ ID NO: 1551642 - DNA, 15 bp, Homo sapiens
cttgatcagtgcgga

SEQ ID NO: 1551643 - DNA, 15 bp, Homo sapiens
ttgatcagtgcggac

SEQ ID NO: 1551644 - DNA, 15 bp, Homo sapiens
tgatcagtgcggaca

SEQ ID NO: 1551645 - DNA, 15 bp, Homo sapiens
gatcagtgcggacat

SEQ ID NO: 1551646 - DNA, 15 bp, Homo sapiens
atcagtgcggacatt

SEQ ID NO: 1551647 - DNA, 15 bp, Homo sapiens
tcagtgcggacattg

SEQ ID NO: 1551648 - DNA, 15 bp, Homo sapiens
cagtgcggacattgt

SEQ ID NO: 1551649 - DNA, 15 bp, Homo sapiens
agtgcggacattgtt

SEQ ID NO: 1551650 - DNA, 15 bp, Homo sapiens
gtgcggacattgttc

SEQ ID NO: 1551651 - DNA, 15 bp, Homo sapiens
tgcggacattgttct

SEQ ID NO: 1551652 - DNA, 15 bp, Homo sapiens
gcggacattgttcta

SEQ ID NO: 1551653 - DNA, 15 bp, Homo sapiens
cggacattgttctaa

SEQ ID NO: 1551654 - DNA, 15 bp, Homo sapiens
ggacattgttctaag

SEQ ID NO: 1551655 - DNA, 15 bp, Homo sapiens
gacattgttctaagc

SEQ ID NO: 1551656 - DNA, 15 bp, Homo sapiens
acattgttctaagct

SEQ ID NO: 1551657 - DNA, 15 bp, Homo sapiens
cattgttctaagctg

SEQ ID NO: 1551658 - DNA, 15 bp, Homo sapiens
attgttctaagctgg

SEQ ID NO: 1551659 - DNA, 15 bp, Homo sapiens
ttgttctaagctggg

SEQ ID NO: 1551660 - DNA, 15 bp, Homo sapiens
tgttctaagctgggt

SEQ ID NO: 1551661 - DNA, 15 bp, Homo sapiens
gttctaagctgggtt

SEQ ID NO: 1551662 - DNA, 15 bp, Homo sapiens
ttctaagctgggttt

SEQ ID NO: 1551663 - DNA, 15 bp, Homo sapiens
tctaagctgggtttc

SEQ ID NO: 1551664 - DNA, 15 bp, Homo sapiens
ctaagctgggtttcc

SEQ ID NO: 1551665 - DNA, 15 bp, Homo sapiens
taagctgggtttcct

SEQ ID NO: 1551666 - DNA, 15 bp, Homo sapiens
aagctgggtttcctc

SEQ ID NO: 1551667 - DNA, 15 bp, Homo sapiens
agctgggtttcctcc

SEQ ID NO: 1551668 - DNA, 15 bp, Homo sapiens
gctgggtttcctcct

SEQ ID NO: 1551669 - DNA, 15 bp, Homo sapiens
ctgggtttcctcctg

SEQ ID NO: 1551670 - DNA, 15 bp, Homo sapiens
tgggtttcctcctgg

SEQ ID NO: 1551671 - DNA, 15 bp, Homo sapiens
gggtttcctcctgga

SEQ ID NO: 1551672 - DNA, 15 bp, Homo sapiens
ggtttcctcctggac

SEQ ID NO: 1551673 - DNA, 15 bp, Homo sapiens
gtttcctcctggaca

SEQ ID NO: 1551674 - DNA, 15 bp, Homo sapiens
tttcctcctggacag

SEQ ID NO: 1551675 - DNA, 15 bp, Homo sapiens
ttcctcctggacagg

SEQ ID NO: 1551676 - DNA, 15 bp, Homo sapiens
tcctcctggacagga

SEQ ID NO: 1551677 - DNA, 15 bp, Homo sapiens
cctcctggacaggac

SEQ ID NO: 1551678 - DNA, 15 bp, Homo sapiens
ctcctggacaggacc

SEQ ID NO: 1551679 - DNA, 15 bp, Homo sapiens
tcctggacaggaccc

SEQ ID NO: 1551680 - DNA, 15 bp, Homo sapiens
cctggacaggaccca

SEQ ID NO: 1551681 - DNA, 15 bp, Homo sapiens
tggacaggacccagg

SEQ ID NO: 1551682 - DNA, 15 bp, Homo sapiens
ggacaggacccaggc

SEQ ID NO: 1551683 - DNA, 15 bp, Homo sapiens
gacaggacccaggct

SEQ ID NO: 1551684 - DNA, 15 bp, Homo sapiens
acaggacccaggctg

SEQ ID NO: 1551685 - DNA, 15 bp, Homo sapiens
caggacccaggctgg

SEQ ID NO: 1551686 - DNA, 15 bp, Homo sapiens
aggacccaggctggg

SEQ ID NO: 1551687 - DNA, 15 bp, Homo sapiens
ggacccaggctgggg

SEQ ID NO: 1551688 - DNA, 15 bp, Homo sapiens
gacccaggctggggg

SEQ ID NO: 1551689 - DNA, 15 bp, Homo sapiens
acccaggctgggggc

SEQ ID NO: 1551690 - DNA, 15 bp, Homo sapiens
cccaggctgggggct

SEQ ID NO: 1551691 - DNA, 15 bp, Homo sapiens
ccaggctgggggctg

SEQ ID NO: 1551692 - DNA, 15 bp, Homo sapiens
caggctgggggctgg

SEQ ID NO: 1551693 - DNA, 15 bp, Homo sapiens
aggctgggggctggg

SEQ ID NO: 1551694 - DNA, 15 bp, Homo sapiens
ggctgggggctgggg

SEQ ID NO: 1551695 - DNA, 15 bp, Homo sapiens
gctgggggctggggc

SEQ ID NO: 1551696 - DNA, 15 bp, Homo sapiens
ctgggggctggggca

SEQ ID NO: 1551697 - DNA, 15 bp, Homo sapiens
tgggggctggggcag

SEQ ID NO: 1551698 - DNA, 15 bp, Homo sapiens
gggggctggggcagg

SEQ ID NO: 1551699 - DNA, 15 bp, Homo sapiens
ggggctggggcagga

SEQ ID NO: 1551700 - DNA, 15 bp, Homo sapiens
gggctggggcaggag

SEQ ID NO: 1551701 - DNA, 15 bp, Homo sapiens
ggctggggcaggagc

SEQ ID NO: 1551702 - DNA, 15 bp, Homo sapiens
gctggggcaggagca

SEQ ID NO: 1551703 - DNA, 15 bp, Homo sapiens
ctggggcaggagcaa

SEQ ID NO: 1551704 - DNA, 15 bp, Homo sapiens
tggggcaggagcaac

SEQ ID NO: 1551705 - DNA, 15 bp, Homo sapiens
ggggcaggagcaacc

SEQ ID NO: 1551706 - DNA, 15 bp, Homo sapiens
gggcaggagcaacca

SEQ ID NO: 1551707 - DNA, 15 bp, Homo sapiens
ggcaggagcaaccaa

SEQ ID NO: 1551708 - DNA, 15 bp, Homo sapiens
gcaggagcaaccaag

SEQ ID NO: 1551709 - DNA, 15 bp, Homo sapiens
caggagcaaccaaga

SEQ ID NO: 1551710 - DNA, 15 bp, Homo sapiens
aggagcaaccaagaa

SEQ ID NO: 1551711 - DNA, 15 bp, Homo sapiens
ggagcaaccaagaaa

SEQ ID NO: 1551712 - DNA, 15 bp, Homo sapiens
gagcaaccaagaaac

SEQ ID NO: 1551713 - DNA, 15 bp, Homo sapiens
agcaaccaagaaacc

SEQ ID NO: 1551714 - DNA, 15 bp, Homo sapiens
gcaaccaagaaacca

SEQ ID NO: 1551715 - DNA, 15 bp, Homo sapiens
caaccaagaaaccac

SEQ ID NO: 1551716 - DNA, 15 bp, Homo sapiens
aaccaagaaaccaca

SEQ ID NO: 1551717 - DNA, 15 bp, Homo sapiens
accaagaaaccacat

SEQ ID NO: 1551718 - DNA, 15 bp, Homo sapiens
ccaagaaaccacatc

SEQ ID NO: 1551719 - DNA, 15 bp, Homo sapiens
caagaaaccacatcc

SEQ ID NO: 1551720 - DNA, 15 bp, Homo sapiens
aagaaaccacatcct

SEQ ID NO: 1551721 - DNA, 15 bp, Homo sapiens
agaaaccacatcctg

SEQ ID NO: 1551722 - DNA, 15 bp, Homo sapiens
gaaaccacatcctgc

SEQ ID NO: 1551723 - DNA, 15 bp, Homo sapiens
aaaccacatcctgcc

SEQ ID NO: 1551724 - DNA, 15 bp, Homo sapiens
aaccacatcctgccc

SEQ ID NO: 1551725 - DNA, 15 bp, Homo sapiens
accacatcctgccct

SEQ ID NO: 1551726 - DNA, 15 bp, Homo sapiens
ccacatcctgccctc

SEQ ID NO: 1551727 - DNA, 15 bp, Homo sapiens
cacatcctgccctcg

SEQ ID NO: 1551728 - DNA, 15 bp, Homo sapiens
acatcctgccctcga

SEQ ID NO: 1551729 - DNA, 15 bp, Homo sapiens
catcctgccctcgaa

SEQ ID NO: 1551730 - DNA, 15 bp, Homo sapiens
atcctgccctcgaat

SEQ ID NO: 1551731 - DNA, 15 bp, Homo sapiens
tcctgccctcgaatg

SEQ ID NO: 1551732 - DNA, 15 bp, Homo sapiens
cctgccctcgaatgc

SEQ ID NO: 1551733 - DNA, 15 bp, Homo sapiens
ctgccctcgaatgcc

SEQ ID NO: 1551734 - DNA, 15 bp, Homo sapiens
tgccctcgaatgcct

SEQ ID NO: 1551735 - DNA, 15 bp, Homo sapiens
gccctcgaatgcctt

SEQ ID NO: 1551736 - DNA, 15 bp, Homo sapiens
ccctcgaatgccttg

SEQ ID NO: 1551737 - DNA, 15 bp, Homo sapiens
cctcgaatgccttgc

SEQ ID NO: 1551738 - DNA, 15 bp, Homo sapiens
ctcgaatgccttgca

SEQ ID NO: 1551739 - DNA, 15 bp, Homo sapiens
tcgaatgccttgcac

SEQ ID NO: 1551740 - DNA, 15 bp, Homo sapiens
cgaatgccttgcacc

SEQ ID NO: 1551741 - DNA, 15 bp, Homo sapiens
gaatgccttgcacca

SEQ ID NO: 1551742 - DNA, 15 bp, Homo sapiens
aatgccttgcaccaa

SEQ ID NO: 1551743 - DNA, 15 bp, Homo sapiens
atgccttgcaccaag

SEQ ID NO: 1551744 - DNA, 15 bp, Homo sapiens
tgccttgcaccaagg

SEQ ID NO: 1551745 - DNA, 15 bp, Homo sapiens
gccttgcaccaaggc

SEQ ID NO: 1551746 - DNA, 15 bp, Homo sapiens
ccttgcaccaaggca

SEQ ID NO: 1551747 - DNA, 15 bp, Homo sapiens
cttgcaccaaggcaa

SEQ ID NO: 1551748 - DNA, 15 bp, Homo sapiens
ttgcaccaaggcaaa

SEQ ID NO: 1551749 - DNA, 15 bp, Homo sapiens
tgcaccaaggcaaaa

SEQ ID NO: 1551750 - DNA, 15 bp, Homo sapiens
gcaccaaggcaaaac

SEQ ID NO: 1551751 - DNA, 15 bp, Homo sapiens
caccaaggcaaaaca

SEQ ID NO: 1551752 - DNA, 15 bp, Homo sapiens
accaaggcaaaacag

SEQ ID NO: 1551753 - DNA, 15 bp, Homo sapiens
ccaaggcaaaacagg

SEQ ID NO: 1551754 - DNA, 15 bp, Homo sapiens
caaggcaaaacaggc

SEQ ID NO: 1551755 - DNA, 15 bp, Homo sapiens
aaggcaaaacaggct

SEQ ID NO: 1551756 - DNA, 15 bp, Homo sapiens
aggcaaaacaggctt

SEQ ID NO: 1551757 - DNA, 15 bp, Homo sapiens
ggcaaaacaggcttc

SEQ ID NO: 1551758 - DNA, 15 bp, Homo sapiens
gcaaaacaggcttcc

SEQ ID NO: 1551759 - DNA, 15 bp, Homo sapiens
caaaacaggcttcct

SEQ ID NO: 1551760 - DNA, 15 bp, Homo sapiens
aaaacaggcttcctc

SEQ ID NO: 1551761 - DNA, 15 bp, Homo sapiens
aaacaggcttcctca

SEQ ID NO: 1551762 - DNA, 15 bp, Homo sapiens
aacaggcttcctcag

SEQ ID NO: 1551763 - DNA, 15 bp, Homo sapiens
acaggcttcctcagc

SEQ ID NO: 1551764 - DNA, 15 bp, Homo sapiens
caggcttcctcagct

SEQ ID NO: 1551765 - DNA, 15 bp, Homo sapiens
aggcttcctcagctg

SEQ ID NO: 1551766 - DNA, 15 bp, Homo sapiens
ggcttcctcagctgc

SEQ ID NO: 1551767 - DNA, 15 bp, Homo sapiens
gcttcctcagctgca

SEQ ID NO: 1551768 - DNA, 15 bp, Homo sapiens
cttcctcagctgcag

SEQ ID NO: 1551769 - DNA, 15 bp, Homo sapiens
ttcctcagctgcagc

SEQ ID NO: 1551770 - DNA, 15 bp, Homo sapiens
tcctcagctgcagcc

SEQ ID NO: 1551771 - DNA, 15 bp, Homo sapiens
cctcagctgcagcct

SEQ ID NO: 1551772 - DNA, 15 bp, Homo sapiens
ctcagctgcagcctg

SEQ ID NO: 1551773 - DNA, 15 bp, Homo sapiens
tcagctgcagcctgc

SEQ ID NO: 1551774 - DNA, 15 bp, Homo sapiens
cagctgcagcctgcc

SEQ ID NO: 1551775 - DNA, 15 bp, Homo sapiens
agctgcagcctgccc

SEQ ID NO: 1551776 - DNA, 15 bp, Homo sapiens
gctgcagcctgcccc

SEQ ID NO: 1551777 - DNA, 15 bp, Homo sapiens
ctgcagcctgcccct

SEQ ID NO: 1551778 - DNA, 15 bp, Homo sapiens
tgcagcctgccccta

SEQ ID NO: 1551779 - DNA, 15 bp, Homo sapiens
gcagcctgcccctag

SEQ ID NO: 1551780 - DNA, 15 bp, Homo sapiens
cagcctgcccctagg

SEQ ID NO: 1551781 - DNA, 15 bp, Homo sapiens
agcctgcccctagga

SEQ ID NO: 1551782 - DNA, 15 bp, Homo sapiens
gcctgcccctaggaa

SEQ ID NO: 1551783 - DNA, 15 bp, Homo sapiens
cctgcccctaggaaa

SEQ ID NO: 1551784 - DNA, 15 bp, Homo sapiens
ctgcccctaggaaaa

SEQ ID NO: 1551785 - DNA, 15 bp, Homo sapiens
tgcccctaggaaaat

SEQ ID NO: 1551786 - DNA, 15 bp, Homo sapiens
gcccctaggaaaatt

SEQ ID NO: 1551787 - DNA, 15 bp, Homo sapiens
cccctaggaaaattc

SEQ ID NO: 1551788 - DNA, 15 bp, Homo sapiens
ccctaggaaaattcc

SEQ ID NO: 1551789 - DNA, 15 bp, Homo sapiens
cctaggaaaattcct

SEQ ID NO: 1551790 - DNA, 15 bp, Homo sapiens
ctaggaaaattccta

SEQ ID NO: 1551791 - DNA, 15 bp, Homo sapiens
taggaaaattcctat

SEQ ID NO: 1551792 - DNA, 15 bp, Homo sapiens
aggaaaattcctatg

SEQ ID NO: 1551793 - DNA, 15 bp, Homo sapiens
ggaaaattcctatgt

SEQ ID NO: 1551794 - DNA, 15 bp, Homo sapiens
gaaaattcctatgtg

SEQ ID NO: 1551795 - DNA, 15 bp, Homo sapiens
aaaattcctatgtgt

SEQ ID NO: 1551796 - DNA, 15 bp, Homo sapiens
aaattcctatgtgtg

SEQ ID NO: 1551797 - DNA, 15 bp, Homo sapiens
aattcctatgtgtgt

SEQ ID NO: 1551798 - DNA, 15 bp, Homo sapiens
attcctatgtgtgtg

SEQ ID NO: 1551799 - DNA, 15 bp, Homo sapiens
ttcctatgtgtgtgt

SEQ ID NO: 1551800 - DNA, 15 bp, Homo sapiens
tcctatgtgtgtgtg

SEQ ID NO: 1551801 - DNA, 15 bp, Homo sapiens
cctatgtgtgtgtgg

SEQ ID NO: 1551802 - DNA, 15 bp, Homo sapiens
ctatgtgtgtgtggt

SEQ ID NO: 1551803 - DNA, 15 bp, Homo sapiens
tatgtgtgtgtggtg

SEQ ID NO: 1551804 - DNA, 15 bp, Homo sapiens
atgtgtgtgtggtgg

SEQ ID NO: 1551805 - DNA, 15 bp, Homo sapiens
tgtgtgtgtggtggt

SEQ ID NO: 1551806 - DNA, 15 bp, Homo sapiens
gtgtgtgtggtggtg

SEQ ID NO: 1551807 - DNA, 15 bp, Homo sapiens
tgtgtgtggtggtgg

SEQ ID NO: 1551808 - DNA, 15 bp, Homo sapiens
gtgtgtggtggtggt

SEQ ID NO: 1551809 - DNA, 15 bp, Homo sapiens
tgtgtggtggtggtg

SEQ ID NO: 1551810 - DNA, 15 bp, Homo sapiens
gtgtggtggtggtgg

SEQ ID NO: 1551811 - DNA, 15 bp, Homo sapiens
tgtggtggtggtggt

SEQ ID NO: 1551812 - DNA, 15 bp, Homo sapiens
gtggtggtggtggtg

SEQ ID NO: 1551813 - DNA, 15 bp, Homo sapiens
tggtggtggtggtgg

SEQ ID NO: 1551814 - DNA, 15 bp, Homo sapiens
ggtggtggtggtggt

SEQ ID NO: 1551815 - DNA, 15 bp, Homo sapiens
gtggtggtggtggtt

SEQ ID NO: 1551816 - DNA, 15 bp, Homo sapiens
tggtggtggtggttg

SEQ ID NO: 1551817 - DNA, 15 bp, Homo sapiens
ggtggtggtggttgg

SEQ ID NO: 1551818 - DNA, 15 bp, Homo sapiens
gtggtggtggttgga

SEQ ID NO: 1551819 - DNA, 15 bp, Homo sapiens
tggtggtggttggag

SEQ ID NO: 1551820 - DNA, 15 bp, Homo sapiens
ggtggtggttggagg

SEQ ID NO: 1551821 - DNA, 15 bp, Homo sapiens
gtggtggttggagga

SEQ ID NO: 1551822 - DNA, 15 bp, Homo sapiens
tggtggttggaggag

SEQ ID NO: 1551823 - DNA, 15 bp, Homo sapiens
ggtggttggaggagg

SEQ ID NO: 1551824 - DNA, 15 bp, Homo sapiens
gtggttggaggaggg

SEQ ID NO: 1551825 - DNA, 15 bp, Homo sapiens
tggttggaggagggg

SEQ ID NO: 1551826 - DNA, 15 bp, Homo sapiens
ggttggaggagggga

SEQ ID NO: 1551827 - DNA, 15 bp, Homo sapiens
gttggaggaggggac

SEQ ID NO: 1551828 - DNA, 15 bp, Homo sapiens
ttggaggaggggaca

SEQ ID NO: 1551829 - DNA, 15 bp, Homo sapiens
tggaggaggggacag

SEQ ID NO: 1551830 - DNA, 15 bp, Homo sapiens
ggaggaggggacaga

SEQ ID NO: 1551831 - DNA, 15 bp, Homo sapiens
gaggaggggacagag

SEQ ID NO: 1551832 - DNA, 15 bp, Homo sapiens
aggaggggacagaga

SEQ ID NO: 1551833 - DNA, 15 bp, Homo sapiens
ggaggggacagagat

SEQ ID NO: 1551834 - DNA, 15 bp, Homo sapiens
gaggggacagagata

SEQ ID NO: 1551835 - DNA, 15 bp, Homo sapiens
aggggacagagatac

SEQ ID NO: 1551836 - DNA, 15 bp, Homo sapiens
ggggacagagataca

SEQ ID NO: 1551837 - DNA, 15 bp, Homo sapiens
gggacagagatacag

SEQ ID NO: 1551838 - DNA, 15 bp, Homo sapiens
ggacagagatacaga

SEQ ID NO: 1551839 - DNA, 15 bp, Homo sapiens
gacagagatacagac

SEQ ID NO: 1551840 - DNA, 15 bp, Homo sapiens
acagagatacagaca

SEQ ID NO: 1551841 - DNA, 15 bp, Homo sapiens
cagagatacagacag

SEQ ID NO: 1551842 - DNA, 15 bp, Homo sapiens
agagatacagacagg

SEQ ID NO: 1551843 - DNA, 15 bp, Homo sapiens
gagatacagacaggt

SEQ ID NO: 1551844 - DNA, 15 bp, Homo sapiens
agatacagacaggta

SEQ ID NO: 1551845 - DNA, 15 bp, Homo sapiens
gatacagacaggtag

SEQ ID NO: 1551846 - DNA, 15 bp, Homo sapiens
atacagacaggtagt

SEQ ID NO: 1551847 - DNA, 15 bp, Homo sapiens
tacagacaggtagtc

SEQ ID NO: 1551848 - DNA, 15 bp, Homo sapiens
acagacaggtagtct

SEQ ID NO: 1551849 - DNA, 15 bp, Homo sapiens
cagacaggtagtctg

SEQ ID NO: 1551850 - DNA, 15 bp, Homo sapiens
agacaggtagtctga

SEQ ID NO: 1551851 - DNA, 15 bp, Homo sapiens
gacaggtagtctgag

SEQ ID NO: 1551852 - DNA, 15 bp, Homo sapiens
acaggtagtctgaga

SEQ ID NO: 1551853 - DNA, 15 bp, Homo sapiens
caggtagtctgagac

SEQ ID NO: 1551854 - DNA, 15 bp, Homo sapiens
aggtagtctgagaca

SEQ ID NO: 1551855 - DNA, 15 bp, Homo sapiens
ggtagtctgagacag

SEQ ID NO: 1551856 - DNA, 15 bp, Homo sapiens
gtagtctgagacaga

SEQ ID NO: 1551857 - DNA, 15 bp, Homo sapiens
tagtctgagacagac

SEQ ID NO: 1551858 - DNA, 15 bp, Homo sapiens
agtctgagacagacc

SEQ ID NO: 1551859 - DNA, 15 bp, Homo sapiens
gtctgagacagacca

SEQ ID NO: 1551860 - DNA, 15 bp, Homo sapiens
tctgagacagaccag

SEQ ID NO: 1551861 - DNA, 15 bp, Homo sapiens
ctgagacagaccagg

SEQ ID NO: 1551862 - DNA, 15 bp, Homo sapiens
tgagacagaccaggg

SEQ ID NO: 1551863 - DNA, 15 bp, Homo sapiens
gagacagaccagggg

SEQ ID NO: 1551864 - DNA, 15 bp, Homo sapiens
agacagaccaggggg

SEQ ID NO: 1551865 - DNA, 15 bp, Homo sapiens
gacagaccaggggga

SEQ ID NO: 1551866 - DNA, 15 bp, Homo sapiens
acagaccagggggag

SEQ ID NO: 1551867 - DNA, 15 bp, Homo sapiens
cagaccagggggaga

SEQ ID NO: 1551868 - DNA, 15 bp, Homo sapiens
agaccagggggagaa

SEQ ID NO: 1551869 - DNA, 15 bp, Homo sapiens
gaccagggggagaag

SEQ ID NO: 1551870 - DNA, 15 bp, Homo sapiens
accagggggagaagg

SEQ ID NO: 1551871 - DNA, 15 bp, Homo sapiens
ccagggggagaaggg

SEQ ID NO: 1551872 - DNA, 15 bp, Homo sapiens
cagggggagaaggga

SEQ ID NO: 1551873 - DNA, 15 bp, Homo sapiens
agggggagaagggag

SEQ ID NO: 1551874 - DNA, 15 bp, Homo sapiens
gggggagaagggagt

SEQ ID NO: 1551875 - DNA, 15 bp, Homo sapiens
ggggagaagggagta

SEQ ID NO: 1551876 - DNA, 15 bp, Homo sapiens
gggagaagggagtag

SEQ ID NO: 1551877 - DNA, 15 bp, Homo sapiens
ggagaagggagtagg

SEQ ID NO: 1551878 - DNA, 15 bp, Homo sapiens
gagaagggagtaggc

SEQ ID NO: 1551879 - DNA, 15 bp, Homo sapiens
agaagggagtaggct

SEQ ID NO: 1551880 - DNA, 15 bp, Homo sapiens
gaagggagtaggcta

SEQ ID NO: 1551881 - DNA, 15 bp, Homo sapiens
aagggagtaggctat

SEQ ID NO: 1551882 - DNA, 15 bp, Homo sapiens
agggagtaggctata

SEQ ID NO: 1551883 - DNA, 15 bp, Homo sapiens
gggagtaggctatat

SEQ ID NO: 1551884 - DNA, 15 bp, Homo sapiens
ggagtaggctatatg

SEQ ID NO: 1551885 - DNA, 15 bp, Homo sapiens
gagtaggctatatga

SEQ ID NO: 1551886 - DNA, 15 bp, Homo sapiens
agtaggctatatgaa

SEQ ID NO: 1551887 - DNA, 15 bp, Homo sapiens
gtaggctatatgaac

SEQ ID NO: 1551888 - DNA, 15 bp, Homo sapiens
taggctatatgaacc

SEQ ID NO: 1551889 - DNA, 15 bp, Homo sapiens
aggctatatgaaccc

SEQ ID NO: 1551890 - DNA, 15 bp, Homo sapiens
ggctatatgaacccc

SEQ ID NO: 1551891 - DNA, 15 bp, Homo sapiens
gctatatgaaccccc

SEQ ID NO: 1551892 - DNA, 15 bp, Homo sapiens
ctatatgaaccccca

SEQ ID NO: 1551893 - DNA, 15 bp, Homo sapiens
tatatgaacccccag

SEQ ID NO: 1551894 - DNA, 15 bp, Homo sapiens
atatgaacccccagt

SEQ ID NO: 1551895 - DNA, 15 bp, Homo sapiens
tatgaacccccagtt

SEQ ID NO: 1551896 - DNA, 15 bp, Homo sapiens
atgaacccccagttc

SEQ ID NO: 1551897 - DNA, 15 bp, Homo sapiens
tgaacccccagttcc

SEQ ID NO: 1551898 - DNA, 15 bp, Homo sapiens
gaacccccagttccc

SEQ ID NO: 1551899 - DNA, 15 bp, Homo sapiens
aacccccagttccca

SEQ ID NO: 1551900 - DNA, 15 bp, Homo sapiens
acccccagttcccag

SEQ ID NO: 1551901 - DNA, 15 bp, Homo sapiens
cccccagttcccagg

SEQ ID NO: 1551902 - DNA, 15 bp, Homo sapiens
ccccagttcccaggt

SEQ ID NO: 1551903 - DNA, 15 bp, Homo sapiens
cccagttcccaggta

SEQ ID NO: 1551904 - DNA, 15 bp, Homo sapiens
ccagttcccaggtat

SEQ ID NO: 1551905 - DNA, 15 bp, Homo sapiens
cagttcccaggtatg

SEQ ID NO: 1551906 - DNA, 15 bp, Homo sapiens
agttcccaggtatgt

SEQ ID NO: 1551907 - DNA, 15 bp, Homo sapiens
gttcccaggtatgtg

SEQ ID NO: 1551908 - DNA, 15 bp, Homo sapiens
ttcccaggtatgtgt

SEQ ID NO: 1551909 - DNA, 15 bp, Homo sapiens
tcccaggtatgtgtg

SEQ ID NO: 1551910 - DNA, 15 bp, Homo sapiens
cccaggtatgtgtga

SEQ ID NO: 1551911 - DNA, 15 bp, Homo sapiens
ccaggtatgtgtgag

SEQ ID NO: 1551912 - DNA, 15 bp, Homo sapiens
caggtatgtgtgagt

SEQ ID NO: 1551913 - DNA, 15 bp, Homo sapiens
aggtatgtgtgagtg

SEQ ID NO: 1551914 - DNA, 15 bp, Homo sapiens
ggtatgtgtgagtga

SEQ ID NO: 1551915 - DNA, 15 bp, Homo sapiens
gtatgtgtgagtgac

SEQ ID NO: 1551916 - DNA, 15 bp, Homo sapiens
tatgtgtgagtgacc

SEQ ID NO: 1551917 - DNA, 15 bp, Homo sapiens
atgtgtgagtgaccc

SEQ ID NO: 1551918 - DNA, 15 bp, Homo sapiens
tgtgtgagtgaccct

SEQ ID NO: 1551919 - DNA, 15 bp, Homo sapiens
gtgtgagtgaccctg

SEQ ID NO: 1551920 - DNA, 15 bp, Homo sapiens
tgtgagtgaccctgt

SEQ ID NO: 1551921 - DNA, 15 bp, Homo sapiens
gtgagtgaccctgtg

SEQ ID NO: 1551922 - DNA, 15 bp, Homo sapiens
tgagtgaccctgtgt

SEQ ID NO: 1551923 - DNA, 15 bp, Homo sapiens
gagtgaccctgtgtg

SEQ ID NO: 1551924 - DNA, 15 bp, Homo sapiens
agtgaccctgtgtgt

SEQ ID NO: 1551925 - DNA, 15 bp, Homo sapiens
gtgaccctgtgtgta

SEQ ID NO: 1551926 - DNA, 15 bp, Homo sapiens
tgaccctgtgtgtaa

SEQ ID NO: 1551927 - DNA, 15 bp, Homo sapiens
gaccctgtgtgtaac

SEQ ID NO: 1551928 - DNA, 15 bp, Homo sapiens
accctgtgtgtaaca

SEQ ID NO: 1551929 - DNA, 15 bp, Homo sapiens
ccctgtgtgtaacag

SEQ ID NO: 1551930 - DNA, 15 bp, Homo sapiens
cctgtgtgtaacagt

SEQ ID NO: 1551931 - DNA, 15 bp, Homo sapiens
ctgtgtgtaacagtc

SEQ ID NO: 1551932 - DNA, 15 bp, Homo sapiens
tgtgtgtaacagtct

SEQ ID NO: 1551933 - DNA, 15 bp, Homo sapiens
gtgtgtaacagtctg

SEQ ID NO: 1551934 - DNA, 15 bp, Homo sapiens
tgtgtaacagtctgt

SEQ ID NO: 1551935 - DNA, 15 bp, Homo sapiens
gtgtaacagtctgtg

SEQ ID NO: 1551936 - DNA, 15 bp, Homo sapiens
tgtaacagtctgtgt

SEQ ID NO: 1551937 - DNA, 15 bp, Homo sapiens
gtaacagtctgtgtg

SEQ ID NO: 1551938 - DNA, 15 bp, Homo sapiens
taacagtctgtgtgg

SEQ ID NO: 1551939 - DNA, 15 bp, Homo sapiens
aacagtctgtgtggg

SEQ ID NO: 1551940 - DNA, 15 bp, Homo sapiens
acagtctgtgtggga

SEQ ID NO: 1551941 - DNA, 15 bp, Homo sapiens
cagtctgtgtgggaa

SEQ ID NO: 1551942 - DNA, 15 bp, Homo sapiens
agtctgtgtgggaat

SEQ ID NO: 1551943 - DNA, 15 bp, Homo sapiens
gtctgtgtgggaatg

SEQ ID NO: 1551944 - DNA, 15 bp, Homo sapiens
tctgtgtgggaatga

SEQ ID NO: 1551945 - DNA, 15 bp, Homo sapiens
ctgtgtgggaatgag

SEQ ID NO: 1551946 - DNA, 15 bp, Homo sapiens
tgtgtgggaatgagt

SEQ ID NO: 1551947 - DNA, 15 bp, Homo sapiens
gtgtgggaatgagtc

SEQ ID NO: 1551948 - DNA, 15 bp, Homo sapiens
tgtgggaatgagtcc

SEQ ID NO: 1551949 - DNA, 15 bp, Homo sapiens
gtgggaatgagtccc

SEQ ID NO: 1551950 - DNA, 15 bp, Homo sapiens
tgggaatgagtccct

SEQ ID NO: 1551951 - DNA, 15 bp, Homo sapiens
gggaatgagtccctg

SEQ ID NO: 1551952 - DNA, 15 bp, Homo sapiens
ggaatgagtccctgt

SEQ ID NO: 1551953 - DNA, 15 bp, Homo sapiens
gaatgagtccctgtg

SEQ ID NO: 1551954 - DNA, 15 bp, Homo sapiens
aatgagtccctgtgt

SEQ ID NO: 1551955 - DNA, 15 bp, Homo sapiens
atgagtccctgtgtg

SEQ ID NO: 1551956 - DNA, 15 bp, Homo sapiens
tgagtccctgtgtgt

SEQ ID NO: 1551957 - DNA, 15 bp, Homo sapiens
gagtccctgtgtgtg

SEQ ID NO: 1551958 - DNA, 15 bp, Homo sapiens
agtccctgtgtgtgc

SEQ ID NO: 1551959 - DNA, 15 bp, Homo sapiens
gtccctgtgtgtgca

SEQ ID NO: 1551960 - DNA, 15 bp, Homo sapiens
tccctgtgtgtgcaa

SEQ ID NO: 1551961 - DNA, 15 bp, Homo sapiens
ccctgtgtgtgcaac

SEQ ID NO: 1551962 - DNA, 15 bp, Homo sapiens
cctgtgtgtgcaaca

SEQ ID NO: 1551963 - DNA, 15 bp, Homo sapiens
ctgtgtgtgcaacat

SEQ ID NO: 1551964 - DNA, 15 bp, Homo sapiens
tgtgtgtgcaacatc

SEQ ID NO: 1551965 - DNA, 15 bp, Homo sapiens
gtgtgtgcaacatct

SEQ ID NO: 1551966 - DNA, 15 bp, Homo sapiens
tgtgtgcaacatctc

SEQ ID NO: 1551967 - DNA, 15 bp, Homo sapiens
gtgtgcaacatctca

SEQ ID NO: 1551968 - DNA, 15 bp, Homo sapiens
tgtgcaacatctcag

SEQ ID NO: 1551969 - DNA, 15 bp, Homo sapiens
gtgcaacatctcagc

SEQ ID NO: 1551970 - DNA, 15 bp, Homo sapiens
tgcaacatctcagca

SEQ ID NO: 1551971 - DNA, 15 bp, Homo sapiens
gcaacatctcagcat

SEQ ID NO: 1551972 - DNA, 15 bp, Homo sapiens
caacatctcagcatg

SEQ ID NO: 1551973 - DNA, 15 bp, Homo sapiens
aacatctcagcatgc

SEQ ID NO: 1551974 - DNA, 15 bp, Homo sapiens
acatctcagcatgca

SEQ ID NO: 1551975 - DNA, 15 bp, Homo sapiens
catctcagcatgcaa

SEQ ID NO: 1551976 - DNA, 15 bp, Homo sapiens
atctcagcatgcaac

SEQ ID NO: 1551977 - DNA, 15 bp, Homo sapiens
tctcagcatgcaact

SEQ ID NO: 1551978 - DNA, 15 bp, Homo sapiens
ctcagcatgcaactg

SEQ ID NO: 1551979 - DNA, 15 bp, Homo sapiens
tcagcatgcaactgt

SEQ ID NO: 1551980 - DNA, 15 bp, Homo sapiens
cagcatgcaactgta

SEQ ID NO: 1551981 - DNA, 15 bp, Homo sapiens
agcatgcaactgtac

SEQ ID NO: 1551982 - DNA, 15 bp, Homo sapiens
gcatgcaactgtaca

SEQ ID NO: 1551983 - DNA, 15 bp, Homo sapiens
catgcaactgtacat

SEQ ID NO: 1551984 - DNA, 15 bp, Homo sapiens
atgcaactgtacatc

SEQ ID NO: 1551985 - DNA, 15 bp, Homo sapiens
tgcaactgtacatct

SEQ ID NO: 1551986 - DNA, 15 bp, Homo sapiens
gcaactgtacatctg

SEQ ID NO: 1551987 - DNA, 15 bp, Homo sapiens
caactgtacatctga

SEQ ID NO: 1551988 - DNA, 15 bp, Homo sapiens
aactgtacatctgac

SEQ ID NO: 1551989 - DNA, 15 bp, Homo sapiens
actgtacatctgaca

SEQ ID NO: 1551990 - DNA, 15 bp, Homo sapiens
ctgtacatctgacag

SEQ ID NO: 1551991 - DNA, 15 bp, Homo sapiens
tgtacatctgacagt

SEQ ID NO: 1551992 - DNA, 15 bp, Homo sapiens
gtacatctgacagtg

SEQ ID NO: 1551993 - DNA, 15 bp, Homo sapiens
tacatctgacagtgt

SEQ ID NO: 1551994 - DNA, 15 bp, Homo sapiens
acatctgacagtgtc

SEQ ID NO: 1551995 - DNA, 15 bp, Homo sapiens
catctgacagtgtct

SEQ ID NO: 1551996 - DNA, 15 bp, Homo sapiens
atctgacagtgtcta

SEQ ID NO: 1551997 - DNA, 15 bp, Homo sapiens
tctgacagtgtctat

SEQ ID NO: 1551998 - DNA, 15 bp, Homo sapiens
ctgacagtgtctatg

SEQ ID NO: 1551999 - DNA, 15 bp, Homo sapiens
tgacagtgtctatgt

SEQ ID NO: 1552000 - DNA, 15 bp, Homo sapiens
gacagtgtctatgtt

SEQ ID NO: 1552001 - DNA, 15 bp, Homo sapiens
acagtgtctatgttt

SEQ ID NO: 1552002 - DNA, 15 bp, Homo sapiens
cagtgtctatgtttt

SEQ ID NO: 1552003 - DNA, 15 bp, Homo sapiens
agtgtctatgttttt

SEQ ID NO: 1552004 - DNA, 15 bp, Homo sapiens
gtgtctatgtttttg

SEQ ID NO: 1552005 - DNA, 15 bp, Homo sapiens
ctatgtttttgtgac

SEQ ID NO: 1552006 - DNA, 15 bp, Homo sapiens
tatgtttttgtgacc

SEQ ID NO: 1552007 - DNA, 15 bp, Homo sapiens
atgtttttgtgaccc

SEQ ID NO: 1552008 - DNA, 15 bp, Homo sapiens
tgtttttgtgaccct

SEQ ID NO: 1552009 - DNA, 15 bp, Homo sapiens
gtttttgtgaccctg

SEQ ID NO: 1552010 - DNA, 15 bp, Homo sapiens
tttttgtgaccctgc

SEQ ID NO: 1552011 - DNA, 15 bp, Homo sapiens
ttttgtgaccctgca

SEQ ID NO: 1552012 - DNA, 15 bp, Homo sapiens
tttgtgaccctgcat

SEQ ID NO: 1552013 - DNA, 15 bp, Homo sapiens
ttgtgaccctgcata

SEQ ID NO: 1552014 - DNA, 15 bp, Homo sapiens
tgtgaccctgcatat

SEQ ID NO: 1552015 - DNA, 15 bp, Homo sapiens
gtgaccctgcatatg

SEQ ID NO: 1552016 - DNA, 15 bp, Homo sapiens
tgaccctgcatatga

SEQ ID NO: 1552017 - DNA, 15 bp, Homo sapiens
gaccctgcatatgat

SEQ ID NO: 1552018 - DNA, 15 bp, Homo sapiens
accctgcatatgata

SEQ ID NO: 1552019 - DNA, 15 bp, Homo sapiens
ccctgcatatgatac

SEQ ID NO: 1552020 - DNA, 15 bp, Homo sapiens
cctgcatatgatact

SEQ ID NO: 1552021 - DNA, 15 bp, Homo sapiens
ctgcatatgatactg

SEQ ID NO: 1552022 - DNA, 15 bp, Homo sapiens
tgcatatgatactgt

SEQ ID NO: 1552023 - DNA, 15 bp, Homo sapiens
gcatatgatactgtg

SEQ ID NO: 1552024 - DNA, 15 bp, Homo sapiens
catatgatactgtgt

SEQ ID NO: 1552025 - DNA, 15 bp, Homo sapiens
atatgatactgtgtc

SEQ ID NO: 1552026 - DNA, 15 bp, Homo sapiens
tatgatactgtgtct

SEQ ID NO: 1552027 - DNA, 15 bp, Homo sapiens
atgatactgtgtctg

SEQ ID NO: 1552028 - DNA, 15 bp, Homo sapiens
tgatactgtgtctgt

SEQ ID NO: 1552029 - DNA, 15 bp, Homo sapiens
gatactgtgtctgtg

SEQ ID NO: 1552030 - DNA, 15 bp, Homo sapiens
atactgtgtctgtgg

SEQ ID NO: 1552031 - DNA, 15 bp, Homo sapiens
tactgtgtctgtggg

SEQ ID NO: 1552032 - DNA, 15 bp, Homo sapiens
actgtgtctgtggga

SEQ ID NO: 1552033 - DNA, 15 bp, Homo sapiens
ctgtgtctgtgggag

SEQ ID NO: 1552034 - DNA, 15 bp, Homo sapiens
tgtgtctgtgggagg

SEQ ID NO: 1552035 - DNA, 15 bp, Homo sapiens
gtgtctgtgggaggg

SEQ ID NO: 1552036 - DNA, 15 bp, Homo sapiens
tgtctgtgggagggt

SEQ ID NO: 1552037 - DNA, 15 bp, Homo sapiens
gtctgtgggagggtc

SEQ ID NO: 1552038 - DNA, 15 bp, Homo sapiens
tctgtgggagggtct

SEQ ID NO: 1552039 - DNA, 15 bp, Homo sapiens
ctgtgggagggtctg

SEQ ID NO: 1552040 - DNA, 15 bp, Homo sapiens
tgtgggagggtctgt

SEQ ID NO: 1552041 - DNA, 15 bp, Homo sapiens
gtgggagggtctgtg

SEQ ID NO: 1552042 - DNA, 15 bp, Homo sapiens
tgggagggtctgtgt

SEQ ID NO: 1552043 - DNA, 15 bp, Homo sapiens
gggagggtctgtgtg

SEQ ID NO: 1552044 - DNA, 15 bp, Homo sapiens
ggagggtctgtgtgt

SEQ ID NO: 1552045 - DNA, 15 bp, Homo sapiens
gagggtctgtgtgtg

SEQ ID NO: 1552046 - DNA, 15 bp, Homo sapiens
agggtctgtgtgtgt

SEQ ID NO: 1552047 - DNA, 15 bp, Homo sapiens
gggtctgtgtgtgtg

SEQ ID NO: 1552048 - DNA, 15 bp, Homo sapiens
ggtctgtgtgtgtgt

SEQ ID NO: 1552049 - DNA, 15 bp, Homo sapiens
gtctgtgtgtgtgtg

SEQ ID NO: 1552050 - DNA, 15 bp, Homo sapiens
tgtgtgtgtgtgtgg

SEQ ID NO: 1552051 - DNA, 15 bp, Homo sapiens
gtgtgtgtgtgtggg

SEQ ID NO: 1552052 - DNA, 15 bp, Homo sapiens
tgtgtgtgtgtgggg

SEQ ID NO: 1552053 - DNA, 15 bp, Homo sapiens
gtgtgtgtgtggggg

SEQ ID NO: 1552054 - DNA, 15 bp, Homo sapiens
tgtgtgtgtgggggg

SEQ ID NO: 1552055 - DNA, 15 bp, Homo sapiens
gtgtgtgtggggggg

SEQ ID NO: 1552056 - DNA, 15 bp, Homo sapiens
tgtgtgtgggggggg

SEQ ID NO: 1552057 - DNA, 15 bp, Homo sapiens
gtgtgtggggggggg

SEQ ID NO: 1552058 - DNA, 15 bp, Homo sapiens
tgtgtgggggggggg

SEQ ID NO: 1552059 - DNA, 15 bp, Homo sapiens
gtgtggggggggggg

SEQ ID NO: 1552060 - DNA, 15 bp, Homo sapiens
tgtgggggggggggc

SEQ ID NO: 1552061 - DNA, 15 bp, Homo sapiens
gtgggggggggggca

SEQ ID NO: 1552062 - DNA, 15 bp, Homo sapiens
tgggggggggggcat

SEQ ID NO: 1552063 - DNA, 15 bp, Homo sapiens
gggggggggggcatc

SEQ ID NO: 1552064 - DNA, 15 bp, Homo sapiens
ggggggggggcatct

SEQ ID NO: 1552065 - DNA, 15 bp, Homo sapiens
gggggggggcatctt

SEQ ID NO: 1552066 - DNA, 15 bp, Homo sapiens
ggggggggcatcttg

SEQ ID NO: 1552067 - DNA, 15 bp, Homo sapiens
gggggggcatcttgg

SEQ ID NO: 1552068 - DNA, 15 bp, Homo sapiens
ggggggcatcttggt

SEQ ID NO: 1552069 - DNA, 15 bp, Homo sapiens
gggggcatcttggtg

SEQ ID NO: 1552070 - DNA, 15 bp, Homo sapiens
ggggcatcttggtgt

SEQ ID NO: 1552071 - DNA, 15 bp, Homo sapiens
gggcatcttggtgtg

SEQ ID NO: 1552072 - DNA, 15 bp, Homo sapiens
ggcatcttggtgtgt

SEQ ID NO: 1552073 - DNA, 15 bp, Homo sapiens
gcatcttggtgtgtg

SEQ ID NO: 1552074 - DNA, 15 bp, Homo sapiens
catcttggtgtgtga

SEQ ID NO: 1552075 - DNA, 15 bp, Homo sapiens
atcttggtgtgtgaa

SEQ ID NO: 1552076 - DNA, 15 bp, Homo sapiens
tcttggtgtgtgaat

SEQ ID NO: 1552077 - DNA, 15 bp, Homo sapiens
cttggtgtgtgaatg

SEQ ID NO: 1552078 - DNA, 15 bp, Homo sapiens
ttggtgtgtgaatgg

SEQ ID NO: 1552079 - DNA, 15 bp, Homo sapiens
tggtgtgtgaatggg

SEQ ID NO: 1552080 - DNA, 15 bp, Homo sapiens
ggtgtgtgaatgggt

SEQ ID NO: 1552081 - DNA, 15 bp, Homo sapiens
gtgtgtgaatgggtg

SEQ ID NO: 1552082 - DNA, 15 bp, Homo sapiens
tgtgtgaatgggtgt

SEQ ID NO: 1552083 - DNA, 15 bp, Homo sapiens
gtgtgaatgggtgtc

SEQ ID NO: 1552084 - DNA, 15 bp, Homo sapiens
tgtgaatgggtgtca

SEQ ID NO: 1552085 - DNA, 15 bp, Homo sapiens
gtgaatgggtgtcaa

SEQ ID NO: 1552086 - DNA, 15 bp, Homo sapiens
tgaatgggtgtcaac

SEQ ID NO: 1552087 - DNA, 15 bp, Homo sapiens
gaatgggtgtcaact

SEQ ID NO: 1552088 - DNA, 15 bp, Homo sapiens
aatgggtgtcaacta

SEQ ID NO: 1552089 - DNA, 15 bp, Homo sapiens
atgggtgtcaactag

SEQ ID NO: 1552090 - DNA, 15 bp, Homo sapiens
tgggtgtcaactagt

SEQ ID NO: 1552091 - DNA, 15 bp, Homo sapiens
gggtgtcaactagtg

SEQ ID NO: 1552092 - DNA, 15 bp, Homo sapiens
ggtgtcaactagtgt

SEQ ID NO: 1552093 - DNA, 15 bp, Homo sapiens
gtgtcaactagtgtg

SEQ ID NO: 1552094 - DNA, 15 bp, Homo sapiens
tgtcaactagtgtgt

SEQ ID NO: 1552095 - DNA, 15 bp, Homo sapiens
gtcaactagtgtgtg

SEQ ID NO: 1552096 - DNA, 15 bp, Homo sapiens
tcaactagtgtgtgt

SEQ ID NO: 1552097 - DNA, 15 bp, Homo sapiens
caactagtgtgtgtc

SEQ ID NO: 1552098 - DNA, 15 bp, Homo sapiens
aactagtgtgtgtct

SEQ ID NO: 1552099 - DNA, 15 bp, Homo sapiens
actagtgtgtgtcta

SEQ ID NO: 1552100 - DNA, 15 bp, Homo sapiens
ctagtgtgtgtctat

SEQ ID NO: 1552101 - DNA, 15 bp, Homo sapiens
tagtgtgtgtctata

SEQ ID NO: 1552102 - DNA, 15 bp, Homo sapiens
agtgtgtgtctatat

SEQ ID NO: 1552103 - DNA, 15 bp, Homo sapiens
gtgtgtgtctatatg

SEQ ID NO: 1552104 - DNA, 15 bp, Homo sapiens
tgtgtgtctatatgt

SEQ ID NO: 1552105 - DNA, 15 bp, Homo sapiens
gtgtgtctatatgtg

SEQ ID NO: 1552106 - DNA, 15 bp, Homo sapiens
tgtgtctatatgtgc

SEQ ID NO: 1552107 - DNA, 15 bp, Homo sapiens
gtgtctatatgtgca

SEQ ID NO: 1552108 - DNA, 15 bp, Homo sapiens
tgtctatatgtgcag

SEQ ID NO: 1552109 - DNA, 15 bp, Homo sapiens
gtctatatgtgcagg

SEQ ID NO: 1552110 - DNA, 15 bp, Homo sapiens
tctatatgtgcagga

SEQ ID NO: 1552111 - DNA, 15 bp, Homo sapiens
ctatatgtgcaggag

SEQ ID NO: 1552112 - DNA, 15 bp, Homo sapiens
tatatgtgcaggaga

SEQ ID NO: 1552113 - DNA, 15 bp, Homo sapiens
atatgtgcaggagag

SEQ ID NO: 1552114 - DNA, 15 bp, Homo sapiens
tatgtgcaggagaga

SEQ ID NO: 1552115 - DNA, 15 bp, Homo sapiens
atgtgcaggagagat

SEQ ID NO: 1552116 - DNA, 15 bp, Homo sapiens
tgtgcaggagagata

SEQ ID NO: 1552117 - DNA, 15 bp, Homo sapiens
gtgcaggagagatag

SEQ ID NO: 1552118 - DNA, 15 bp, Homo sapiens
tgcaggagagatagt

SEQ ID NO: 1552119 - DNA, 15 bp, Homo sapiens
gcaggagagatagtg

SEQ ID NO: 1552120 - DNA, 15 bp, Homo sapiens
caggagagatagtgt

SEQ ID NO: 1552121 - DNA, 15 bp, Homo sapiens
aggagagatagtgtg

SEQ ID NO: 1552122 - DNA, 15 bp, Homo sapiens
ggagagatagtgtgc

SEQ ID NO: 1552123 - DNA, 15 bp, Homo sapiens
gagagatagtgtgca

SEQ ID NO: 1552124 - DNA, 15 bp, Homo sapiens
agagatagtgtgcat

SEQ ID NO: 1552125 - DNA, 15 bp, Homo sapiens
gagatagtgtgcatg

SEQ ID NO: 1552126 - DNA, 15 bp, Homo sapiens
agatagtgtgcatgt

SEQ ID NO: 1552127 - DNA, 15 bp, Homo sapiens
gatagtgtgcatgtg

SEQ ID NO: 1552128 - DNA, 15 bp, Homo sapiens
atagtgtgcatgtga

SEQ ID NO: 1552129 - DNA, 15 bp, Homo sapiens
tagtgtgcatgtgag

SEQ ID NO: 1552130 - DNA, 15 bp, Homo sapiens
agtgtgcatgtgaga

SEQ ID NO: 1552131 - DNA, 15 bp, Homo sapiens
gtgtgcatgtgagag

SEQ ID NO: 1552132 - DNA, 15 bp, Homo sapiens
tgtgcatgtgagagt

SEQ ID NO: 1552133 - DNA, 15 bp, Homo sapiens
gtgcatgtgagagtg

SEQ ID NO: 1552134 - DNA, 15 bp, Homo sapiens
tgcatgtgagagtgt

SEQ ID NO: 1552135 - DNA, 15 bp, Homo sapiens
gcatgtgagagtgtc

SEQ ID NO: 1552136 - DNA, 15 bp, Homo sapiens
catgtgagagtgtct

SEQ ID NO: 1552137 - DNA, 15 bp, Homo sapiens
atgtgagagtgtctg

SEQ ID NO: 1552138 - DNA, 15 bp, Homo sapiens
tgtgagagtgtctgt

SEQ ID NO: 1552139 - DNA, 15 bp, Homo sapiens
gtgagagtgtctgtg

SEQ ID NO: 1552140 - DNA, 15 bp, Homo sapiens
tgagagtgtctgtgt

SEQ ID NO: 1552141 - DNA, 15 bp, Homo sapiens
gagagtgtctgtgtg

SEQ ID NO: 1552142 - DNA, 15 bp, Homo sapiens
agagtgtctgtgtgt

SEQ ID NO: 1552143 - DNA, 15 bp, Homo sapiens
gagtgtctgtgtgtt

SEQ ID NO: 1552144 - DNA, 15 bp, Homo sapiens
agtgtctgtgtgttc

SEQ ID NO: 1552145 - DNA, 15 bp, Homo sapiens
gtgtctgtgtgttcc

SEQ ID NO: 1552146 - DNA, 15 bp, Homo sapiens
tgtctgtgtgttcct

SEQ ID NO: 1552147 - DNA, 15 bp, Homo sapiens
gtctgtgtgttcctc

SEQ ID NO: 1552148 - DNA, 15 bp, Homo sapiens
tctgtgtgttcctct

SEQ ID NO: 1552149 - DNA, 15 bp, Homo sapiens
ctgtgtgttcctctg

SEQ ID NO: 1552150 - DNA, 15 bp, Homo sapiens
tgtgtgttcctctgt

SEQ ID NO: 1552151 - DNA, 15 bp, Homo sapiens
gtgtgttcctctgtg

SEQ ID NO: 1552152 - DNA, 15 bp, Homo sapiens
tgtgttcctctgtgt

SEQ ID NO: 1552153 - DNA, 15 bp, Homo sapiens
gtgttcctctgtgtg

SEQ ID NO: 1552154 - DNA, 15 bp, Homo sapiens
tgttcctctgtgtgt

SEQ ID NO: 1552155 - DNA, 15 bp, Homo sapiens
gttcctctgtgtgtg

SEQ ID NO: 1552156 - DNA, 15 bp, Homo sapiens
ttcctctgtgtgtgt

SEQ ID NO: 1552157 - DNA, 15 bp, Homo sapiens
tcctctgtgtgtgtg

SEQ ID NO: 1552158 - DNA, 15 bp, Homo sapiens
cctctgtgtgtgtgt

SEQ ID NO: 1552159 - DNA, 15 bp, Homo sapiens
ctctgtgtgtgtgtg

SEQ ID NO: 1552160 - DNA, 15 bp, Homo sapiens
ctgtgtgtgtgtgtt

SEQ ID NO: 1552161 - DNA, 15 bp, Homo sapiens
gtgtgtgtgtgttgg

SEQ ID NO: 1552162 - DNA, 15 bp, Homo sapiens
tgtgtgtgtgttggg

SEQ ID NO: 1552163 - DNA, 15 bp, Homo sapiens
gtgtgtgtgttgggg

SEQ ID NO: 1552164 - DNA, 15 bp, Homo sapiens
tgtgtgtgttgggga

SEQ ID NO: 1552165 - DNA, 15 bp, Homo sapiens
gtgtgtgttggggac

SEQ ID NO: 1552166 - DNA, 15 bp, Homo sapiens
tgtgtgttggggaca

SEQ ID NO: 1552167 - DNA, 15 bp, Homo sapiens
gtgtgttggggacag

SEQ ID NO: 1552168 - DNA, 15 bp, Homo sapiens
tgtgttggggacagt

SEQ ID NO: 1552169 - DNA, 15 bp, Homo sapiens
gtgttggggacagtg

SEQ ID NO: 1552170 - DNA, 15 bp, Homo sapiens
tgttggggacagtgt

SEQ ID NO: 1552171 - DNA, 15 bp, Homo sapiens
gttggggacagtgtc

SEQ ID NO: 1552172 - DNA, 15 bp, Homo sapiens
ttggggacagtgtct

SEQ ID NO: 1552173 - DNA, 15 bp, Homo sapiens
tggggacagtgtctc

SEQ ID NO: 1552174 - DNA, 15 bp, Homo sapiens
ggggacagtgtctca

SEQ ID NO: 1552175 - DNA, 15 bp, Homo sapiens
gggacagtgtctcag

SEQ ID NO: 1552176 - DNA, 15 bp, Homo sapiens
ggacagtgtctcagc

SEQ ID NO: 1552177 - DNA, 15 bp, Homo sapiens
gacagtgtctcagca

SEQ ID NO: 1552178 - DNA, 15 bp, Homo sapiens
acagtgtctcagcat

SEQ ID NO: 1552179 - DNA, 15 bp, Homo sapiens
cagtgtctcagcatg

SEQ ID NO: 1552180 - DNA, 15 bp, Homo sapiens
agtgtctcagcatgc

SEQ ID NO: 1552181 - DNA, 15 bp, Homo sapiens
gtgtctcagcatgcg

SEQ ID NO: 1552182 - DNA, 15 bp, Homo sapiens
tgtctcagcatgcga

SEQ ID NO: 1552183 - DNA, 15 bp, Homo sapiens
gtctcagcatgcgac

SEQ ID NO: 1552184 - DNA, 15 bp, Homo sapiens
tctcagcatgcgact

SEQ ID NO: 1552185 - DNA, 15 bp, Homo sapiens
ctcagcatgcgactg

SEQ ID NO: 1552186 - DNA, 15 bp, Homo sapiens
tcagcatgcgactgt

SEQ ID NO: 1552187 - DNA, 15 bp, Homo sapiens
cagcatgcgactgtg

SEQ ID NO: 1552188 - DNA, 15 bp, Homo sapiens
agcatgcgactgtgt

SEQ ID NO: 1552189 - DNA, 15 bp, Homo sapiens
gcatgcgactgtgta

SEQ ID NO: 1552190 - DNA, 15 bp, Homo sapiens
catgcgactgtgtac

SEQ ID NO: 1552191 - DNA, 15 bp, Homo sapiens
atgcgactgtgtacc

SEQ ID NO: 1552192 - DNA, 15 bp, Homo sapiens
tgcgactgtgtacct

SEQ ID NO: 1552193 - DNA, 15 bp, Homo sapiens
gcgactgtgtacctg

SEQ ID NO: 1552194 - DNA, 15 bp, Homo sapiens
cgactgtgtacctgg

SEQ ID NO: 1552195 - DNA, 15 bp, Homo sapiens
gactgtgtacctggc

SEQ ID NO: 1552196 - DNA, 15 bp, Homo sapiens
actgtgtacctggca

SEQ ID NO: 1552197 - DNA, 15 bp, Homo sapiens
ctgtgtacctggcag

SEQ ID NO: 1552198 - DNA, 15 bp, Homo sapiens
tgtgtacctggcagt

SEQ ID NO: 1552199 - DNA, 15 bp, Homo sapiens
gtgtacctggcagtc

SEQ ID NO: 1552200 - DNA, 15 bp, Homo sapiens
tgtacctggcagtct

SEQ ID NO: 1552201 - DNA, 15 bp, Homo sapiens
gtacctggcagtctg

SEQ ID NO: 1552202 - DNA, 15 bp, Homo sapiens
tacctggcagtctgt

SEQ ID NO: 1552203 - DNA, 15 bp, Homo sapiens
acctggcagtctgtg

SEQ ID NO: 1552204 - DNA, 15 bp, Homo sapiens
cctggcagtctgtga

SEQ ID NO: 1552205 - DNA, 15 bp, Homo sapiens
ctggcagtctgtgag

SEQ ID NO: 1552206 - DNA, 15 bp, Homo sapiens
tggcagtctgtgagt

SEQ ID NO: 1552207 - DNA, 15 bp, Homo sapiens
ggcagtctgtgagtg

SEQ ID NO: 1552208 - DNA, 15 bp, Homo sapiens
gcagtctgtgagtga

SEQ ID NO: 1552209 - DNA, 15 bp, Homo sapiens
cagtctgtgagtgat

SEQ ID NO: 1552210 - DNA, 15 bp, Homo sapiens
agtctgtgagtgatt

SEQ ID NO: 1552211 - DNA, 15 bp, Homo sapiens
gtctgtgagtgattg

SEQ ID NO: 1552212 - DNA, 15 bp, Homo sapiens
tctgtgagtgattgt

SEQ ID NO: 1552213 - DNA, 15 bp, Homo sapiens
ctgtgagtgattgtg

SEQ ID NO: 1552214 - DNA, 15 bp, Homo sapiens
tgtgagtgattgtgt

SEQ ID NO: 1552215 - DNA, 15 bp, Homo sapiens
gtgagtgattgtgtg

SEQ ID NO: 1552216 - DNA, 15 bp, Homo sapiens
tgagtgattgtgtgt

SEQ ID NO: 1552217 - DNA, 15 bp, Homo sapiens
gagtgattgtgtgtg

SEQ ID NO: 1552218 - DNA, 15 bp, Homo sapiens
agtgattgtgtgtgg

SEQ ID NO: 1552219 - DNA, 15 bp, Homo sapiens
gtgattgtgtgtggt

SEQ ID NO: 1552220 - DNA, 15 bp, Homo sapiens
tgattgtgtgtggtg

SEQ ID NO: 1552221 - DNA, 15 bp, Homo sapiens
gattgtgtgtggtgg

SEQ ID NO: 1552222 - DNA, 15 bp, Homo sapiens
attgtgtgtggtggg

SEQ ID NO: 1552223 - DNA, 15 bp, Homo sapiens
ttgtgtgtggtggga

SEQ ID NO: 1552224 - DNA, 15 bp, Homo sapiens
tgtgtgtggtgggag

SEQ ID NO: 1552225 - DNA, 15 bp, Homo sapiens
gtgtgtggtgggaga

SEQ ID NO: 1552226 - DNA, 15 bp, Homo sapiens
tgtgtggtgggagag

SEQ ID NO: 1552227 - DNA, 15 bp, Homo sapiens
gtgtggtgggagaga

SEQ ID NO: 1552228 - DNA, 15 bp, Homo sapiens
tgtggtgggagagag

SEQ ID NO: 1552229 - DNA, 15 bp, Homo sapiens
gtggtgggagagagt

SEQ ID NO: 1552230 - DNA, 15 bp, Homo sapiens
tggtgggagagagtc

SEQ ID NO: 1552231 - DNA, 15 bp, Homo sapiens
ggtgggagagagtct

SEQ ID NO: 1552232 - DNA, 15 bp, Homo sapiens
gtgggagagagtctg

SEQ ID NO: 1552233 - DNA, 15 bp, Homo sapiens
tgggagagagtctgt

SEQ ID NO: 1552234 - DNA, 15 bp, Homo sapiens
gggagagagtctgtg

SEQ ID NO: 1552235 - DNA, 15 bp, Homo sapiens
ggagagagtctgtgt

SEQ ID NO: 1552236 - DNA, 15 bp, Homo sapiens
gagagagtctgtgtc

SEQ ID NO: 1552237 - DNA, 15 bp, Homo sapiens
agagagtctgtgtca

SEQ ID NO: 1552238 - DNA, 15 bp, Homo sapiens
gagagtctgtgtcag

SEQ ID NO: 1552239 - DNA, 15 bp, Homo sapiens
agagtctgtgtcagt

SEQ ID NO: 1552240 - DNA, 15 bp, Homo sapiens
gagtctgtgtcagtg

SEQ ID NO: 1552241 - DNA, 15 bp, Homo sapiens
agtctgtgtcagtgt

SEQ ID NO: 1552242 - DNA, 15 bp, Homo sapiens
gtctgtgtcagtgtc

SEQ ID NO: 1552243 - DNA, 15 bp, Homo sapiens
tctgtgtcagtgtct

SEQ ID NO: 1552244 - DNA, 15 bp, Homo sapiens
ctgtgtcagtgtctc

SEQ ID NO: 1552245 - DNA, 15 bp, Homo sapiens
tgtgtcagtgtctca

SEQ ID NO: 1552246 - DNA, 15 bp, Homo sapiens
gtgtcagtgtctcag

SEQ ID NO: 1552247 - DNA, 15 bp, Homo sapiens
tgtcagtgtctcagt

SEQ ID NO: 1552248 - DNA, 15 bp, Homo sapiens
gtcagtgtctcagta

SEQ ID NO: 1552249 - DNA, 15 bp, Homo sapiens
tcagtgtctcagtat

SEQ ID NO: 1552250 - DNA, 15 bp, Homo sapiens
cagtgtctcagtatt

SEQ ID NO: 1552251 - DNA, 15 bp, Homo sapiens
agtgtctcagtattg

SEQ ID NO: 1552252 - DNA, 15 bp, Homo sapiens
gtgtctcagtattgg

SEQ ID NO: 1552253 - DNA, 15 bp, Homo sapiens
tgtctcagtattggg

SEQ ID NO: 1552254 - DNA, 15 bp, Homo sapiens
gtctcagtattggga

SEQ ID NO: 1552255 - DNA, 15 bp, Homo sapiens
tctcagtattgggaa

SEQ ID NO: 1552256 - DNA, 15 bp, Homo sapiens
ctcagtattgggaat

SEQ ID NO: 1552257 - DNA, 15 bp, Homo sapiens
tcagtattgggaatg

SEQ ID NO: 1552258 - DNA, 15 bp, Homo sapiens
cagtattgggaatgt

SEQ ID NO: 1552259 - DNA, 15 bp, Homo sapiens
agtattgggaatgtg

SEQ ID NO: 1552260 - DNA, 15 bp, Homo sapiens
gtattgggaatgtgc

SEQ ID NO: 1552261 - DNA, 15 bp, Homo sapiens
tattgggaatgtgct

SEQ ID NO: 1552262 - DNA, 15 bp, Homo sapiens
attgggaatgtgctt

SEQ ID NO: 1552263 - DNA, 15 bp, Homo sapiens
ttgggaatgtgcttg

SEQ ID NO: 1552264 - DNA, 15 bp, Homo sapiens
tgggaatgtgcttgg

SEQ ID NO: 1552265 - DNA, 15 bp, Homo sapiens
gggaatgtgcttggg

SEQ ID NO: 1552266 - DNA, 15 bp, Homo sapiens
ggaatgtgcttgggg

SEQ ID NO: 1552267 - DNA, 15 bp, Homo sapiens
gaatgtgcttggggg

SEQ ID NO: 1552268 - DNA, 15 bp, Homo sapiens
aatgtgcttgggggc

SEQ ID NO: 1552269 - DNA, 15 bp, Homo sapiens
atgtgcttgggggcg

SEQ ID NO: 1552270 - DNA, 15 bp, Homo sapiens
tgtgcttgggggcgt

SEQ ID NO: 1552271 - DNA, 15 bp, Homo sapiens
gtgcttgggggcgtg

SEQ ID NO: 1552272 - DNA, 15 bp, Homo sapiens
tgcttgggggcgtgt

SEQ ID NO: 1552273 - DNA, 15 bp, Homo sapiens
gcttgggggcgtgtg

SEQ ID NO: 1552274 - DNA, 15 bp, Homo sapiens
cttgggggcgtgtgt

SEQ ID NO: 1552275 - DNA, 15 bp, Homo sapiens
ttgggggcgtgtgtg

SEQ ID NO: 1552276 - DNA, 15 bp, Homo sapiens
tgggggcgtgtgtga

SEQ ID NO: 1552277 - DNA, 15 bp, Homo sapiens
gggggcgtgtgtgat

SEQ ID NO: 1552278 - DNA, 15 bp, Homo sapiens
ggggcgtgtgtgatg

SEQ ID NO: 1552279 - DNA, 15 bp, Homo sapiens
gggcgtgtgtgatga

SEQ ID NO: 1552280 - DNA, 15 bp, Homo sapiens
ggcgtgtgtgatgat

SEQ ID NO: 1552281 - DNA, 15 bp, Homo sapiens
gcgtgtgtgatgatg

SEQ ID NO: 1552282 - DNA, 15 bp, Homo sapiens
cgtgtgtgatgatgc

SEQ ID NO: 1552283 - DNA, 15 bp, Homo sapiens
gtgtgtgatgatgcg

SEQ ID NO: 1552284 - DNA, 15 bp, Homo sapiens
tgtgtgatgatgcgt

SEQ ID NO: 1552285 - DNA, 15 bp, Homo sapiens
gtgtgatgatgcgtg

SEQ ID NO: 1552286 - DNA, 15 bp, Homo sapiens
tgtgatgatgcgtgt

SEQ ID NO: 1552287 - DNA, 15 bp, Homo sapiens
gtgatgatgcgtgtg

SEQ ID NO: 1552288 - DNA, 15 bp, Homo sapiens
tgatgatgcgtgtga

SEQ ID NO: 1552289 - DNA, 15 bp, Homo sapiens
gatgatgcgtgtgac

SEQ ID NO: 1552290 - DNA, 15 bp, Homo sapiens
atgatgcgtgtgacc

SEQ ID NO: 1552291 - DNA, 15 bp, Homo sapiens
tgatgcgtgtgaccg

SEQ ID NO: 1552292 - DNA, 15 bp, Homo sapiens
gatgcgtgtgaccgt

SEQ ID NO: 1552293 - DNA, 15 bp, Homo sapiens
atgcgtgtgaccgtg

SEQ ID NO: 1552294 - DNA, 15 bp, Homo sapiens
tgcgtgtgaccgtgt

SEQ ID NO: 1552295 - DNA, 15 bp, Homo sapiens
gcgtgtgaccgtgtg

SEQ ID NO: 1552296 - DNA, 15 bp, Homo sapiens
cgtgtgaccgtgtgt

SEQ ID NO: 1552297 - DNA, 15 bp, Homo sapiens
gtgtgaccgtgtgtc

SEQ ID NO: 1552298 - DNA, 15 bp, Homo sapiens
tgtgaccgtgtgtcc

SEQ ID NO: 1552299 - DNA, 15 bp, Homo sapiens
gtgaccgtgtgtcca

SEQ ID NO: 1552300 - DNA, 15 bp, Homo sapiens
tgaccgtgtgtccac

SEQ ID NO: 1552301 - DNA, 15 bp, Homo sapiens
gaccgtgtgtccacg

SEQ ID NO: 1552302 - DNA, 15 bp, Homo sapiens
accgtgtgtccacgt

SEQ ID NO: 1552303 - DNA, 15 bp, Homo sapiens
ccgtgtgtccacgtg

SEQ ID NO: 1552304 - DNA, 15 bp, Homo sapiens
cgtgtgtccacgtgg

SEQ ID NO: 1552305 - DNA, 15 bp, Homo sapiens
gtgtgtccacgtggg

SEQ ID NO: 1552306 - DNA, 15 bp, Homo sapiens
tgtgtccacgtgggg

SEQ ID NO: 1552307 - DNA, 15 bp, Homo sapiens
gtgtccacgtggggg

SEQ ID NO: 1552308 - DNA, 15 bp, Homo sapiens
tgtccacgtgggggt

SEQ ID NO: 1552309 - DNA, 15 bp, Homo sapiens
gtccacgtgggggtt

SEQ ID NO: 1552310 - DNA, 15 bp, Homo sapiens
tccacgtgggggttt

SEQ ID NO: 1552311 - DNA, 15 bp, Homo sapiens
ccacgtgggggtttt

SEQ ID NO: 1552312 - DNA, 15 bp, Homo sapiens
cacgtgggggttttt

SEQ ID NO: 1552313 - DNA, 15 bp, Homo sapiens
acgtgggggtttttg

SEQ ID NO: 1552314 - DNA, 15 bp, Homo sapiens
cgtgggggtttttgt

SEQ ID NO: 1552315 - DNA, 15 bp, Homo sapiens
gtgggggtttttgtg

SEQ ID NO: 1552316 - DNA, 15 bp, Homo sapiens
tgggggtttttgtga

SEQ ID NO: 1552317 - DNA, 15 bp, Homo sapiens
gggggtttttgtgac

SEQ ID NO: 1552318 - DNA, 15 bp, Homo sapiens
ggggtttttgtgact

SEQ ID NO: 1552319 - DNA, 15 bp, Homo sapiens
gggtttttgtgactg

SEQ ID NO: 1552320 - DNA, 15 bp, Homo sapiens
ggtttttgtgactgt

SEQ ID NO: 1552321 - DNA, 15 bp, Homo sapiens
gtttttgtgactgta

SEQ ID NO: 1552322 - DNA, 15 bp, Homo sapiens
tttttgtgactgtaa

SEQ ID NO: 1552323 - DNA, 15 bp, Homo sapiens
ttttgtgactgtaag

SEQ ID NO: 1552324 - DNA, 15 bp, Homo sapiens
tttgtgactgtaaga

SEQ ID NO: 1552325 - DNA, 15 bp, Homo sapiens
ttgtgactgtaagaa

SEQ ID NO: 1552326 - DNA, 15 bp, Homo sapiens
tgtgactgtaagaac

SEQ ID NO: 1552327 - DNA, 15 bp, Homo sapiens
gtgactgtaagaaca

SEQ ID NO: 1552328 - DNA, 15 bp, Homo sapiens
tgactgtaagaacat

SEQ ID NO: 1552329 - DNA, 15 bp, Homo sapiens
gactgtaagaacatg

SEQ ID NO: 1552330 - DNA, 15 bp, Homo sapiens
actgtaagaacatgt

SEQ ID NO: 1552331 - DNA, 15 bp, Homo sapiens
ctgtaagaacatgtg

SEQ ID NO: 1552332 - DNA, 15 bp, Homo sapiens
tgtaagaacatgtgt

SEQ ID NO: 1552333 - DNA, 15 bp, Homo sapiens
gtaagaacatgtgtg

SEQ ID NO: 1552334 - DNA, 15 bp, Homo sapiens
taagaacatgtgtgt

SEQ ID NO: 1552335 - DNA, 15 bp, Homo sapiens
aagaacatgtgtgta

SEQ ID NO: 1552336 - DNA, 15 bp, Homo sapiens
agaacatgtgtgtag

SEQ ID NO: 1552337 - DNA, 15 bp, Homo sapiens
gaacatgtgtgtagt

SEQ ID NO: 1552338 - DNA, 15 bp, Homo sapiens
aacatgtgtgtagta

SEQ ID NO: 1552339 - DNA, 15 bp, Homo sapiens
acatgtgtgtagtat

SEQ ID NO: 1552340 - DNA, 15 bp, Homo sapiens
catgtgtgtagtatt

SEQ ID NO: 1552341 - DNA, 15 bp, Homo sapiens
atgtgtgtagtattc

SEQ ID NO: 1552342 - DNA, 15 bp, Homo sapiens
tgtgtgtagtattcc

SEQ ID NO: 1552343 - DNA, 15 bp, Homo sapiens
gtgtgtagtattcct

SEQ ID NO: 1552344 - DNA, 15 bp, Homo sapiens
tgtgtagtattcctt

SEQ ID NO: 1552345 - DNA, 15 bp, Homo sapiens
gtgtagtattccttt

SEQ ID NO: 1552346 - DNA, 15 bp, Homo sapiens
tgtagtattcctttt

SEQ ID NO: 1552347 - DNA, 15 bp, Homo sapiens
gtagtattccttttc

SEQ ID NO: 1552348 - DNA, 15 bp, Homo sapiens
tagtattccttttcc

SEQ ID NO: 1552349 - DNA, 15 bp, Homo sapiens
agtattccttttcct

SEQ ID NO: 1552350 - DNA, 15 bp, Homo sapiens
gtattccttttcctg

SEQ ID NO: 1552351 - DNA, 15 bp, Homo sapiens
tattccttttcctgt

SEQ ID NO: 1552352 - DNA, 15 bp, Homo sapiens
attccttttcctgtc

SEQ ID NO: 1552353 - DNA, 15 bp, Homo sapiens
ttccttttcctgtcc

SEQ ID NO: 1552354 - DNA, 15 bp, Homo sapiens
tccttttcctgtcct

SEQ ID NO: 1552355 - DNA, 15 bp, Homo sapiens
ccttttcctgtcctt

SEQ ID NO: 1552356 - DNA, 15 bp, Homo sapiens
cttttcctgtccttt

SEQ ID NO: 1552357 - DNA, 15 bp, Homo sapiens
ttttcctgtcctttc

SEQ ID NO: 1552358 - DNA, 15 bp, Homo sapiens
tttcctgtcctttcg

SEQ ID NO: 1552359 - DNA, 15 bp, Homo sapiens
ttcctgtcctttcgt

SEQ ID NO: 1552360 - DNA, 15 bp, Homo sapiens
tcctgtcctttcgtt

SEQ ID NO: 1552361 - DNA, 15 bp, Homo sapiens
cctgtcctttcgttc

SEQ ID NO: 1552362 - DNA, 15 bp, Homo sapiens
ctgtcctttcgttca

SEQ ID NO: 1552363 - DNA, 15 bp, Homo sapiens
tgtcctttcgttcag

SEQ ID NO: 1552364 - DNA, 15 bp, Homo sapiens
gtcctttcgttcaga

SEQ ID NO: 1552365 - DNA, 15 bp, Homo sapiens
tcctttcgttcagat

SEQ ID NO: 1552366 - DNA, 15 bp, Homo sapiens
cctttcgttcagata

SEQ ID NO: 1552367 - DNA, 15 bp, Homo sapiens
ctttcgttcagatat

SEQ ID NO: 1552368 - DNA, 15 bp, Homo sapiens
tttcgttcagatatc

SEQ ID NO: 1552369 - DNA, 15 bp, Homo sapiens
ttcgttcagatatct

SEQ ID NO: 1552370 - DNA, 15 bp, Homo sapiens
tcgttcagatatcta

SEQ ID NO: 1552371 - DNA, 15 bp, Homo sapiens
cgttcagatatctaa

SEQ ID NO: 1552372 - DNA, 15 bp, Homo sapiens
gttcagatatctaaa

SEQ ID NO: 1552373 - DNA, 15 bp, Homo sapiens
ttcagatatctaaag

SEQ ID NO: 1552374 - DNA, 15 bp, Homo sapiens
tcagatatctaaagc

SEQ ID NO: 1552375 - DNA, 15 bp, Homo sapiens
cagatatctaaagcc

SEQ ID NO: 1552376 - DNA, 15 bp, Homo sapiens
agatatctaaagccc

SEQ ID NO: 1552377 - DNA, 15 bp, Homo sapiens
gatatctaaagccct

SEQ ID NO: 1552378 - DNA, 15 bp, Homo sapiens
atatctaaagccctt

SEQ ID NO: 1552379 - DNA, 15 bp, Homo sapiens
tatctaaagccctta

SEQ ID NO: 1552380 - DNA, 15 bp, Homo sapiens
atctaaagcccttag

SEQ ID NO: 1552381 - DNA, 15 bp, Homo sapiens
tctaaagcccttagg

SEQ ID NO: 1552382 - DNA, 15 bp, Homo sapiens
ctaaagcccttaggg

SEQ ID NO: 1552383 - DNA, 15 bp, Homo sapiens
taaagcccttaggga

SEQ ID NO: 1552384 - DNA, 15 bp, Homo sapiens
aaagcccttagggaa

SEQ ID NO: 1552385 - DNA, 15 bp, Homo sapiens
aagcccttagggaaa

SEQ ID NO: 1552386 - DNA, 15 bp, Homo sapiens
agcccttagggaaaa

SEQ ID NO: 1552387 - DNA, 15 bp, Homo sapiens
gcccttagggaaaaa

SEQ ID NO: 1552388 - DNA, 15 bp, Homo sapiens
cccttagggaaaaaa

SEQ ID NO: 1552389 - DNA, 15 bp, Homo sapiens
ccttagggaaaaaaa

SEQ ID NO: 1552390 - DNA, 15 bp, Homo sapiens
ttagggaaaaaaaat

SEQ ID NO: 1552391 - DNA, 15 bp, Homo sapiens
tagggaaaaaaaatg

SEQ ID NO: 1552392 - DNA, 15 bp, Homo sapiens
agggaaaaaaaatgg

SEQ ID NO: 1552393 - DNA, 15 bp, Homo sapiens
gggaaaaaaaatgga

SEQ ID NO: 1552394 - DNA, 15 bp, Homo sapiens
ggaaaaaaaatggat

SEQ ID NO: 1552395 - DNA, 15 bp, Homo sapiens
gaaaaaaaatggatt

SEQ ID NO: 1552396 - DNA, 15 bp, Homo sapiens
aaaaaaaatggattg

SEQ ID NO: 1552397 - DNA, 15 bp, Homo sapiens
aaaaaaatggattgt

SEQ ID NO: 1552398 - DNA, 15 bp, Homo sapiens
aaaaaatggattgta

SEQ ID NO: 1552399 - DNA, 15 bp, Homo sapiens
aaaaatggattgtaa

SEQ ID NO: 1552400 - DNA, 15 bp, Homo sapiens
aaaatggattgtaag

SEQ ID NO: 1552401 - DNA, 15 bp, Homo sapiens
aaatggattgtaagc

SEQ ID NO: 1552402 - DNA, 15 bp, Homo sapiens
aatggattgtaagct

SEQ ID NO: 1552403 - DNA, 15 bp, Homo sapiens
atggattgtaagctc

SEQ ID NO: 1552404 - DNA, 15 bp, Homo sapiens
tggattgtaagctct

SEQ ID NO: 1552405 - DNA, 15 bp, Homo sapiens
ggattgtaagctctg

SEQ ID NO: 1552406 - DNA, 15 bp, Homo sapiens
gattgtaagctctga

SEQ ID NO: 1552407 - DNA, 15 bp, Homo sapiens
attgtaagctctgag

SEQ ID NO: 1552408 - DNA, 15 bp, Homo sapiens
ttgtaagctctgagc

SEQ ID NO: 1552409 - DNA, 15 bp, Homo sapiens
tgtaagctctgagct

SEQ ID NO: 1552410 - DNA, 15 bp, Homo sapiens
gtaagctctgagctt

SEQ ID NO: 1552411 - DNA, 15 bp, Homo sapiens
taagctctgagcttt

SEQ ID NO: 1552412 - DNA, 15 bp, Homo sapiens
aagctctgagctttt

SEQ ID NO: 1552413 - DNA, 15 bp, Homo sapiens
agctctgagcttttg

SEQ ID NO: 1552414 - DNA, 15 bp, Homo sapiens
gctctgagcttttga

SEQ ID NO: 1552415 - DNA, 15 bp, Homo sapiens
ctctgagcttttgaa

SEQ ID NO: 1552416 - DNA, 15 bp, Homo sapiens
tctgagcttttgaaa

SEQ ID NO: 1552417 - DNA, 15 bp, Homo sapiens
ctgagcttttgaaaa

SEQ ID NO: 1552418 - DNA, 15 bp, Homo sapiens
tgagcttttgaaaaa

SEQ ID NO: 1552419 - DNA, 15 bp, Homo sapiens
gagcttttgaaaaaa

SEQ ID NO: 1552420 - DNA, 15 bp, Homo sapiens
agcttttgaaaaaaa

SEQ ID NO: 1552421 - DNA, 15 bp, Homo sapiens
gcttttgaaaaaaaa

SEQ ID NO: 1552422 - DNA, 15 bp, Homo sapiens
cttttgaaaaaaaag

SEQ ID NO: 1552423 - DNA, 15 bp, Homo sapiens
ttttgaaaaaaaaga

SEQ ID NO: 1552424 - DNA, 15 bp, Homo sapiens
tttgaaaaaaaagaa

SEQ ID NO: 1552425 - DNA, 15 bp, Homo sapiens
ttgaaaaaaaagaaa

SEQ ID NO: 1552426 - DNA, 15 bp, Homo sapiens
tgaaaaaaaagaaag

SEQ ID NO: 1552427 - DNA, 15 bp, Homo sapiens
gaaaaaaaagaaaga

SEQ ID NO: 1552428 - DNA, 15 bp, Homo sapiens
aaagaaagaaaaaca

SEQ ID NO: 1552429 - DNA, 15 bp, Homo sapiens
aagaaagaaaaacaa

SEQ ID NO: 1552430 - DNA, 15 bp, Homo sapiens
agaaagaaaaacaag

SEQ ID NO: 1552431 - DNA, 15 bp, Homo sapiens
gaaagaaaaacaagg

SEQ ID NO: 1552432 - DNA, 15 bp, Homo sapiens
aaagaaaaacaaggg

SEQ ID NO: 1552433 - DNA, 15 bp, Homo sapiens
aagaaaaacaagggg

SEQ ID NO: 1552434 - DNA, 15 bp, Homo sapiens
agaaaaacaaggggc

SEQ ID NO: 1552435 - DNA, 15 bp, Homo sapiens
gaaaaacaaggggcg

SEQ ID NO: 1552436 - DNA, 15 bp, Homo sapiens
aaaaacaaggggcgg

SEQ ID NO: 1552437 - DNA, 15 bp, Homo sapiens
aaaacaaggggcggt

SEQ ID NO: 1552438 - DNA, 15 bp, Homo sapiens
aaacaaggggcggtc

SEQ ID NO: 1552439 - DNA, 15 bp, Homo sapiens
aacaaggggcggtca

SEQ ID NO: 1552440 - DNA, 15 bp, Homo sapiens
acaaggggcggtcaa

SEQ ID NO: 1552441 - DNA, 15 bp, Homo sapiens
caaggggcggtcaaa

SEQ ID NO: 1552442 - DNA, 15 bp, Homo sapiens
aaggggcggtcaaag

SEQ ID NO: 1552443 - DNA, 15 bp, Homo sapiens
aggggcggtcaaaga

SEQ ID NO: 1552444 - DNA, 15 bp, Homo sapiens
ggggcggtcaaagag

SEQ ID NO: 1552445 - DNA, 15 bp, Homo sapiens
gggcggtcaaagaga

SEQ ID NO: 1552446 - DNA, 15 bp, Homo sapiens
ggcggtcaaagagac

SEQ ID NO: 1552447 - DNA, 15 bp, Homo sapiens
gcggtcaaagagaca

SEQ ID NO: 1552448 - DNA, 15 bp, Homo sapiens
cggtcaaagagacag

SEQ ID NO: 1552449 - DNA, 15 bp, Homo sapiens
ggtcaaagagacagg

SEQ ID NO: 1552450 - DNA, 15 bp, Homo sapiens
gtcaaagagacaggg

SEQ ID NO: 1552451 - DNA, 15 bp, Homo sapiens
tcaaagagacagggg

SEQ ID NO: 1552452 - DNA, 15 bp, Homo sapiens
caaagagacaggggt

SEQ ID NO: 1552453 - DNA, 15 bp, Homo sapiens
aaagagacaggggtc

SEQ ID NO: 1552454 - DNA, 15 bp, Homo sapiens
aagagacaggggtct

SEQ ID NO: 1552455 - DNA, 15 bp, Homo sapiens
agagacaggggtctg

SEQ ID NO: 1552456 - DNA, 15 bp, Homo sapiens
gagacaggggtctgt

SEQ ID NO: 1552457 - DNA, 15 bp, Homo sapiens
agacaggggtctgtt

SEQ ID NO: 1552458 - DNA, 15 bp, Homo sapiens
gacaggggtctgttg

SEQ ID NO: 1552459 - DNA, 15 bp, Homo sapiens
acaggggtctgttga

SEQ ID NO: 1552460 - DNA, 15 bp, Homo sapiens
caggggtctgttgat

SEQ ID NO: 1552461 - DNA, 15 bp, Homo sapiens
aggggtctgttgatg

SEQ ID NO: 1552462 - DNA, 15 bp, Homo sapiens
ggggtctgttgatgg

SEQ ID NO: 1552463 - DNA, 15 bp, Homo sapiens
gggtctgttgatgga

SEQ ID NO: 1552464 - DNA, 15 bp, Homo sapiens
ggtctgttgatggaa

SEQ ID NO: 1552465 - DNA, 15 bp, Homo sapiens
gtctgttgatggaag

SEQ ID NO: 1552466 - DNA, 15 bp, Homo sapiens
tctgttgatggaagg

SEQ ID NO: 1552467 - DNA, 15 bp, Homo sapiens
ctgttgatggaaggg

SEQ ID NO: 1552468 - DNA, 15 bp, Homo sapiens
tgttgatggaagggg

SEQ ID NO: 1552469 - DNA, 15 bp, Homo sapiens
gttgatggaaggggt

SEQ ID NO: 1552470 - DNA, 15 bp, Homo sapiens
ttgatggaaggggtg

SEQ ID NO: 1552471 - DNA, 15 bp, Homo sapiens
tgatggaaggggtga

SEQ ID NO: 1552472 - DNA, 15 bp, Homo sapiens
gatggaaggggtgat

SEQ ID NO: 1552473 - DNA, 15 bp, Homo sapiens
atggaaggggtgatt

SEQ ID NO: 1552474 - DNA, 15 bp, Homo sapiens
tggaaggggtgattt

SEQ ID NO: 1552475 - DNA, 15 bp, Homo sapiens
ggaaggggtgatttg

SEQ ID NO: 1552476 - DNA, 15 bp, Homo sapiens
gaaggggtgatttga

SEQ ID NO: 1552477 - DNA, 15 bp, Homo sapiens
aaggggtgatttgac

SEQ ID NO: 1552478 - DNA, 15 bp, Homo sapiens
aggggtgatttgact

SEQ ID NO: 1552479 - DNA, 15 bp, Homo sapiens
ggggtgatttgactt

SEQ ID NO: 1552480 - DNA, 15 bp, Homo sapiens
gggtgatttgacttc

SEQ ID NO: 1552481 - DNA, 15 bp, Homo sapiens
ggtgatttgacttct

SEQ ID NO: 1552482 - DNA, 15 bp, Homo sapiens
gtgatttgacttctg

SEQ ID NO: 1552483 - DNA, 15 bp, Homo sapiens
tgatttgacttctgg

SEQ ID NO: 1552484 - DNA, 15 bp, Homo sapiens
gatttgacttctggg

SEQ ID NO: 1552485 - DNA, 15 bp, Homo sapiens
atttgacttctggga

SEQ ID NO: 1552486 - DNA, 15 bp, Homo sapiens
tttgacttctgggag

SEQ ID NO: 1552487 - DNA, 15 bp, Homo sapiens
ttgacttctgggagg

SEQ ID NO: 1552488 - DNA, 15 bp, Homo sapiens
tgacttctgggaggt

SEQ ID NO: 1552489 - DNA, 15 bp, Homo sapiens
gacttctgggaggtg

SEQ ID NO: 1552490 - DNA, 15 bp, Homo sapiens
acttctgggaggtga

SEQ ID NO: 1552491 - DNA, 15 bp, Homo sapiens
cttctgggaggtgac

SEQ ID NO: 1552492 - DNA, 15 bp, Homo sapiens
ttctgggaggtgaca

SEQ ID NO: 1552493 - DNA, 15 bp, Homo sapiens
tctgggaggtgacac

SEQ ID NO: 1552494 - DNA, 15 bp, Homo sapiens
ctgggaggtgacaca

SEQ ID NO: 1552495 - DNA, 15 bp, Homo sapiens
tgggaggtgacacag

SEQ ID NO: 1552496 - DNA, 15 bp, Homo sapiens
gggaggtgacacaga

SEQ ID NO: 1552497 - DNA, 15 bp, Homo sapiens
ggaggtgacacagag

SEQ ID NO: 1552498 - DNA, 15 bp, Homo sapiens
gaggtgacacagagg

SEQ ID NO: 1552499 - DNA, 15 bp, Homo sapiens
aggtgacacagagga

SEQ ID NO: 1552500 - DNA, 15 bp, Homo sapiens
ggtgacacagaggaa

SEQ ID NO: 1552501 - DNA, 15 bp, Homo sapiens
gtgacacagaggaag

SEQ ID NO: 1552502 - DNA, 15 bp, Homo sapiens
tgacacagaggaagg

SEQ ID NO: 1552503 - DNA, 15 bp, Homo sapiens
gacacagaggaagga

SEQ ID NO: 1552504 - DNA, 15 bp, Homo sapiens
acacagaggaaggag

SEQ ID NO: 1552505 - DNA, 15 bp, Homo sapiens
cacagaggaaggagg

SEQ ID NO: 1552506 - DNA, 15 bp, Homo sapiens
acagaggaaggaggt

SEQ ID NO: 1552507 - DNA, 15 bp, Homo sapiens
cagaggaaggaggtt

SEQ ID NO: 1552508 - DNA, 15 bp, Homo sapiens
agaggaaggaggttg

SEQ ID NO: 1552509 - DNA, 15 bp, Homo sapiens
gaggaaggaggttgg

SEQ ID NO: 1552510 - DNA, 15 bp, Homo sapiens
aggaaggaggttggg

SEQ ID NO: 1552511 - DNA, 15 bp, Homo sapiens
ggaaggaggttgggg

SEQ ID NO: 1552512 - DNA, 15 bp, Homo sapiens
gaaggaggttggggt

SEQ ID NO: 1552513 - DNA, 15 bp, Homo sapiens
aaggaggttggggtc

SEQ ID NO: 1552514 - DNA, 15 bp, Homo sapiens
aggaggttggggtcc

SEQ ID NO: 1552515 - DNA, 15 bp, Homo sapiens
ggaggttggggtcct

SEQ ID NO: 1552516 - DNA, 15 bp, Homo sapiens
gaggttggggtcctg

SEQ ID NO: 1552517 - DNA, 15 bp, Homo sapiens
aggttggggtcctgg

SEQ ID NO: 1552518 - DNA, 15 bp, Homo sapiens
ggttggggtcctggg

SEQ ID NO: 1552519 - DNA, 15 bp, Homo sapiens
gttggggtcctggga

SEQ ID NO: 1552520 - DNA, 15 bp, Homo sapiens
ttggggtcctgggag

SEQ ID NO: 1552521 - DNA, 15 bp, Homo sapiens
tggggtcctgggagg

SEQ ID NO: 1552522 - DNA, 15 bp, Homo sapiens
ggggtcctgggagga

SEQ ID NO: 1552523 - DNA, 15 bp, Homo sapiens
gggtcctgggaggag

SEQ ID NO: 1552524 - DNA, 15 bp, Homo sapiens
ggtcctgggaggaga

SEQ ID NO: 1552525 - DNA, 15 bp, Homo sapiens
gtcctgggaggagat

SEQ ID NO: 1552526 - DNA, 15 bp, Homo sapiens
tcctgggaggagatg

SEQ ID NO: 1552527 - DNA, 15 bp, Homo sapiens
cctgggaggagatgc

SEQ ID NO: 1552528 - DNA, 15 bp, Homo sapiens
ctgggaggagatgcc

SEQ ID NO: 1552529 - DNA, 15 bp, Homo sapiens
tgggaggagatgcca

SEQ ID NO: 1552530 - DNA, 15 bp, Homo sapiens
gggaggagatgccag

SEQ ID NO: 1552531 - DNA, 15 bp, Homo sapiens
ggaggagatgccagg

SEQ ID NO: 1552532 - DNA, 15 bp, Homo sapiens
gaggagatgccaggg

SEQ ID NO: 1552533 - DNA, 15 bp, Homo sapiens
aggagatgccaggga

SEQ ID NO: 1552534 - DNA, 15 bp, Homo sapiens
ggagatgccagggaa

SEQ ID NO: 1552535 - DNA, 15 bp, Homo sapiens
gagatgccagggaac

SEQ ID NO: 1552536 - DNA, 15 bp, Homo sapiens
agatgccagggaacc

SEQ ID NO: 1552537 - DNA, 15 bp, Homo sapiens
gatgccagggaacct

SEQ ID NO: 1552538 - DNA, 15 bp, Homo sapiens
atgccagggaacctg

SEQ ID NO: 1552539 - DNA, 15 bp, Homo sapiens
tgccagggaacctga

SEQ ID NO: 1552540 - DNA, 15 bp, Homo sapiens
gccagggaacctgaa

SEQ ID NO: 1552541 - DNA, 15 bp, Homo sapiens
ccagggaacctgaag

SEQ ID NO: 1552542 - DNA, 15 bp, Homo sapiens
cagggaacctgaagg

SEQ ID NO: 1552543 - DNA, 15 bp, Homo sapiens
agggaacctgaaggg

SEQ ID NO: 1552544 - DNA, 15 bp, Homo sapiens
gggaacctgaagggc

SEQ ID NO: 1552545 - DNA, 15 bp, Homo sapiens
ggaacctgaagggct

SEQ ID NO: 1552546 - DNA, 15 bp, Homo sapiens
gaacctgaagggctg

SEQ ID NO: 1552547 - DNA, 15 bp, Homo sapiens
aacctgaagggctgg

SEQ ID NO: 1552548 - DNA, 15 bp, Homo sapiens
acctgaagggctgga

SEQ ID NO: 1552549 - DNA, 15 bp, Homo sapiens
cctgaagggctggac

SEQ ID NO: 1552550 - DNA, 15 bp, Homo sapiens
ctgaagggctggact

SEQ ID NO: 1552551 - DNA, 15 bp, Homo sapiens
tgaagggctggactt

SEQ ID NO: 1552552 - DNA, 15 bp, Homo sapiens
gaagggctggactta

SEQ ID NO: 1552553 - DNA, 15 bp, Homo sapiens
aagggctggacttag

SEQ ID NO: 1552554 - DNA, 15 bp, Homo sapiens
agggctggacttagt

SEQ ID NO: 1552555 - DNA, 15 bp, Homo sapiens
gggctggacttagtt

SEQ ID NO: 1552556 - DNA, 15 bp, Homo sapiens
ggctggacttagttg

SEQ ID NO: 1552557 - DNA, 15 bp, Homo sapiens
gctggacttagttgg

SEQ ID NO: 1552558 - DNA, 15 bp, Homo sapiens
ctggacttagttggg

SEQ ID NO: 1552559 - DNA, 15 bp, Homo sapiens
tggacttagttgggg

SEQ ID NO: 1552560 - DNA, 15 bp, Homo sapiens
ggacttagttggggg

SEQ ID NO: 1552561 - DNA, 15 bp, Homo sapiens
gacttagttggggga

SEQ ID NO: 1552562 - DNA, 15 bp, Homo sapiens
acttagttgggggac

SEQ ID NO: 1552563 - DNA, 15 bp, Homo sapiens
cttagttgggggact

SEQ ID NO: 1552564 - DNA, 15 bp, Homo sapiens
ttagttgggggactc

SEQ ID NO: 1552565 - DNA, 15 bp, Homo sapiens
tagttgggggactcc

SEQ ID NO: 1552566 - DNA, 15 bp, Homo sapiens
agttgggggactcca

SEQ ID NO: 1552567 - DNA, 15 bp, Homo sapiens
gttgggggactccag

SEQ ID NO: 1552568 - DNA, 15 bp, Homo sapiens
ttgggggactccaga

SEQ ID NO: 1552569 - DNA, 15 bp, Homo sapiens
tgggggactccagaa

SEQ ID NO: 1552570 - DNA, 15 bp, Homo sapiens
gggggactccagaaa

SEQ ID NO: 1552571 - DNA, 15 bp, Homo sapiens
ggggactccagaaat

SEQ ID NO: 1552572 - DNA, 15 bp, Homo sapiens
gggactccagaaatt

SEQ ID NO: 1552573 - DNA, 15 bp, Homo sapiens
ggactccagaaattt

SEQ ID NO: 1552574 - DNA, 15 bp, Homo sapiens
gactccagaaatttg

SEQ ID NO: 1552575 - DNA, 15 bp, Homo sapiens
actccagaaatttga

SEQ ID NO: 1552576 - DNA, 15 bp, Homo sapiens
ctccagaaatttgag

SEQ ID NO: 1552577 - DNA, 15 bp, Homo sapiens
tccagaaatttgagt

SEQ ID NO: 1552578 - DNA, 15 bp, Homo sapiens
ccagaaatttgagtt

SEQ ID NO: 1552579 - DNA, 15 bp, Homo sapiens
cagaaatttgagttg

SEQ ID NO: 1552580 - DNA, 15 bp, Homo sapiens
agaaatttgagttgg

SEQ ID NO: 1552581 - DNA, 15 bp, Homo sapiens
gaaatttgagttgga

SEQ ID NO: 1552582 - DNA, 15 bp, Homo sapiens
aaatttgagttggaa

SEQ ID NO: 1552583 - DNA, 15 bp, Homo sapiens
aatttgagttggaat

SEQ ID NO: 1552584 - DNA, 15 bp, Homo sapiens
atttgagttggaatc

SEQ ID NO: 1552585 - DNA, 15 bp, Homo sapiens
tttgagttggaatcc

SEQ ID NO: 1552586 - DNA, 15 bp, Homo sapiens
ttgagttggaatccc

SEQ ID NO: 1552587 - DNA, 15 bp, Homo sapiens
tgagttggaatccct

SEQ ID NO: 1552588 - DNA, 15 bp, Homo sapiens
gagttggaatccctc

SEQ ID NO: 1552589 - DNA, 15 bp, Homo sapiens
agttggaatccctcc

SEQ ID NO: 1552590 - DNA, 15 bp, Homo sapiens
gttggaatccctcct

SEQ ID NO: 1552591 - DNA, 15 bp, Homo sapiens
ttggaatccctcctt

SEQ ID NO: 1552592 - DNA, 15 bp, Homo sapiens
tggaatccctccttc

SEQ ID NO: 1552593 - DNA, 15 bp, Homo sapiens
ggaatccctccttcc

SEQ ID NO: 1552594 - DNA, 15 bp, Homo sapiens
gaatccctccttcct

SEQ ID NO: 1552595 - DNA, 15 bp, Homo sapiens
aatccctccttcctc

SEQ ID NO: 1552596 - DNA, 15 bp, Homo sapiens
atccctccttcctcc

SEQ ID NO: 1552597 - DNA, 15 bp, Homo sapiens
tccctccttcctcct

SEQ ID NO: 1552598 - DNA, 15 bp, Homo sapiens
ccctccttcctcctt

SEQ ID NO: 1552599 - DNA, 15 bp, Homo sapiens
cctccttcctccttc

SEQ ID NO: 1552600 - DNA, 15 bp, Homo sapiens
ctccttcctccttct

SEQ ID NO: 1552601 - DNA, 15 bp, Homo sapiens
tccttcctccttctg

SEQ ID NO: 1552602 - DNA, 15 bp, Homo sapiens
ccttcctccttctga

SEQ ID NO: 1552603 - DNA, 15 bp, Homo sapiens
cttcctccttctgag

SEQ ID NO: 1552604 - DNA, 15 bp, Homo sapiens
ttcctccttctgaga

SEQ ID NO: 1552605 - DNA, 15 bp, Homo sapiens
tcctccttctgagag

SEQ ID NO: 1552606 - DNA, 15 bp, Homo sapiens
cctccttctgagagg

SEQ ID NO: 1552607 - DNA, 15 bp, Homo sapiens
ctccttctgagaggc

SEQ ID NO: 1552608 - DNA, 15 bp, Homo sapiens
tccttctgagaggcc

SEQ ID NO: 1552609 - DNA, 15 bp, Homo sapiens
ccttctgagaggcct

SEQ ID NO: 1552610 - DNA, 15 bp, Homo sapiens
cttctgagaggcctt

SEQ ID NO: 1552611 - DNA, 15 bp, Homo sapiens
ttctgagaggccttc

SEQ ID NO: 1552612 - DNA, 15 bp, Homo sapiens
tctgagaggccttcc

SEQ ID NO: 1552613 - DNA, 15 bp, Homo sapiens
ctgagaggccttcct

SEQ ID NO: 1552614 - DNA, 15 bp, Homo sapiens
tgagaggccttcctg

SEQ ID NO: 1552615 - DNA, 15 bp, Homo sapiens
gagaggccttcctgc

SEQ ID NO: 1552616 - DNA, 15 bp, Homo sapiens
agaggccttcctgca

SEQ ID NO: 1552617 - DNA, 15 bp, Homo sapiens
gaggccttcctgcat

SEQ ID NO: 1552618 - DNA, 15 bp, Homo sapiens
aggccttcctgcatg

SEQ ID NO: 1552619 - DNA, 15 bp, Homo sapiens
ggccttcctgcatgt

SEQ ID NO: 1552620 - DNA, 15 bp, Homo sapiens
gccttcctgcatgtc

SEQ ID NO: 1552621 - DNA, 15 bp, Homo sapiens
ccttcctgcatgtct

SEQ ID NO: 1552622 - DNA, 15 bp, Homo sapiens
cttcctgcatgtctc

SEQ ID NO: 1552623 - DNA, 15 bp, Homo sapiens
ttcctgcatgtctcc

SEQ ID NO: 1552624 - DNA, 15 bp, Homo sapiens
tcctgcatgtctccc

SEQ ID NO: 1552625 - DNA, 15 bp, Homo sapiens
cctgcatgtctccca

SEQ ID NO: 1552626 - DNA, 15 bp, Homo sapiens
ctgcatgtctcccac

SEQ ID NO: 1552627 - DNA, 15 bp, Homo sapiens
tgcatgtctcccacc

SEQ ID NO: 1552628 - DNA, 15 bp, Homo sapiens
gcatgtctcccacct

SEQ ID NO: 1552629 - DNA, 15 bp, Homo sapiens
catgtctcccacctc

SEQ ID NO: 1552630 - DNA, 15 bp, Homo sapiens
atgtctcccacctct

SEQ ID NO: 1552631 - DNA, 15 bp, Homo sapiens
tgtctcccacctctg

SEQ ID NO: 1552632 - DNA, 15 bp, Homo sapiens
gtctcccacctctgt

SEQ ID NO: 1552633 - DNA, 15 bp, Homo sapiens
tctcccacctctgtg

SEQ ID NO: 1552634 - DNA, 15 bp, Homo sapiens
ctcccacctctgtgc

SEQ ID NO: 1552635 - DNA, 15 bp, Homo sapiens
tcccacctctgtgcc

SEQ ID NO: 1552636 - DNA, 15 bp, Homo sapiens
cccacctctgtgcca

SEQ ID NO: 1552637 - DNA, 15 bp, Homo sapiens
ccacctctgtgccac

SEQ ID NO: 1552638 - DNA, 15 bp, Homo sapiens
cacctctgtgccacc

SEQ ID NO: 1552639 - DNA, 15 bp, Homo sapiens
acctctgtgccacct

SEQ ID NO: 1552640 - DNA, 15 bp, Homo sapiens
cctctgtgccacctc

SEQ ID NO: 1552641 - DNA, 15 bp, Homo sapiens
ctctgtgccacctcc

SEQ ID NO: 1552642 - DNA, 15 bp, Homo sapiens
tctgtgccacctcct

SEQ ID NO: 1552643 - DNA, 15 bp, Homo sapiens
ctgtgccacctcctt

SEQ ID NO: 1552644 - DNA, 15 bp, Homo sapiens
tgtgccacctccttc

SEQ ID NO: 1552645 - DNA, 15 bp, Homo sapiens
gtgccacctccttcc

SEQ ID NO: 1552646 - DNA, 15 bp, Homo sapiens
tgccacctccttccc

SEQ ID NO: 1552647 - DNA, 15 bp, Homo sapiens
gccacctccttcccg

SEQ ID NO: 1552648 - DNA, 15 bp, Homo sapiens
ccacctccttcccgt

SEQ ID NO: 1552649 - DNA, 15 bp, Homo sapiens
cacctccttcccgtc

SEQ ID NO: 1552650 - DNA, 15 bp, Homo sapiens
acctccttcccgtca

SEQ ID NO: 1552651 - DNA, 15 bp, Homo sapiens
cctccttcccgtcac

SEQ ID NO: 1552652 - DNA, 15 bp, Homo sapiens
ctccttcccgtcacc

SEQ ID NO: 1552653 - DNA, 15 bp, Homo sapiens
tccttcccgtcacca

SEQ ID NO: 1552654 - DNA, 15 bp, Homo sapiens
ccttcccgtcaccaa

SEQ ID NO: 1552655 - DNA, 15 bp, Homo sapiens
cttcccgtcaccaaa

SEQ ID NO: 1552656 - DNA, 15 bp, Homo sapiens
ttcccgtcaccaaaa

SEQ ID NO: 1552657 - DNA, 15 bp, Homo sapiens
tcccgtcaccaaaat

SEQ ID NO: 1552658 - DNA, 15 bp, Homo sapiens
cccgtcaccaaaatg

SEQ ID NO: 1552659 - DNA, 15 bp, Homo sapiens
ccgtcaccaaaatgg

SEQ ID NO: 1552660 - DNA, 15 bp, Homo sapiens
cgtcaccaaaatggt

SEQ ID NO: 1552661 - DNA, 15 bp, Homo sapiens
gtcaccaaaatggtc

SEQ ID NO: 1552662 - DNA, 15 bp, Homo sapiens
tcaccaaaatggtcc

SEQ ID NO: 1552663 - DNA, 15 bp, Homo sapiens
caccaaaatggtccc

SEQ ID NO: 1552664 - DNA, 15 bp, Homo sapiens
accaaaatggtcccc

SEQ ID NO: 1552665 - DNA, 15 bp, Homo sapiens
ccaaaatggtcccca

SEQ ID NO: 1552666 - DNA, 15 bp, Homo sapiens
caaaatggtccccag

SEQ ID NO: 1552667 - DNA, 15 bp, Homo sapiens
aaaatggtccccaga

SEQ ID NO: 1552668 - DNA, 15 bp, Homo sapiens
aaatggtccccagag

SEQ ID NO: 1552669 - DNA, 15 bp, Homo sapiens
aatggtccccagaga

SEQ ID NO: 1552670 - DNA, 15 bp, Homo sapiens
atggtccccagagaa

SEQ ID NO: 1552671 - DNA, 15 bp, Homo sapiens
tggtccccagagaaa

SEQ ID NO: 1552672 - DNA, 15 bp, Homo sapiens
ggtccccagagaaag

SEQ ID NO: 1552673 - DNA, 15 bp, Homo sapiens
gtccccagagaaaga

SEQ ID NO: 1552674 - DNA, 15 bp, Homo sapiens
tccccagagaaagaa

SEQ ID NO: 1552675 - DNA, 15 bp, Homo sapiens
ccccagagaaagaaa

SEQ ID NO: 1552676 - DNA, 15 bp, Homo sapiens
cccagagaaagaaag

SEQ ID NO: 1552677 - DNA, 15 bp, Homo sapiens
ccagagaaagaaaga

SEQ ID NO: 1552678 - DNA, 15 bp, Homo sapiens
cagagaaagaaagaa

SEQ ID NO: 1552679 - DNA, 15 bp, Homo sapiens
agagaaagaaagaat

SEQ ID NO: 1552680 - DNA, 15 bp, Homo sapiens
gagaaagaaagaatc

SEQ ID NO: 1552681 - DNA, 15 bp, Homo sapiens
agaaagaaagaatct

SEQ ID NO: 1552682 - DNA, 15 bp, Homo sapiens
gaaagaaagaatctg

SEQ ID NO: 1552683 - DNA, 15 bp, Homo sapiens
aaagaaagaatctga

SEQ ID NO: 1552684 - DNA, 15 bp, Homo sapiens
aagaaagaatctgat

SEQ ID NO: 1552685 - DNA, 15 bp, Homo sapiens
agaaagaatctgata

SEQ ID NO: 1552686 - DNA, 15 bp, Homo sapiens
gaaagaatctgatac

SEQ ID NO: 1552687 - DNA, 15 bp, Homo sapiens
aaagaatctgataca

SEQ ID NO: 1552688 - DNA, 15 bp, Homo sapiens
aagaatctgatacac

SEQ ID NO: 1552689 - DNA, 15 bp, Homo sapiens
agaatctgatacact

SEQ ID NO: 1552690 - DNA, 15 bp, Homo sapiens
gaatctgatacactt

SEQ ID NO: 1552691 - DNA, 15 bp, Homo sapiens
aatctgatacactta

SEQ ID NO: 1552692 - DNA, 15 bp, Homo sapiens
atctgatacacttat

SEQ ID NO: 1552693 - DNA, 15 bp, Homo sapiens
tctgatacacttatt

SEQ ID NO: 1552694 - DNA, 15 bp, Homo sapiens
ctgatacacttattc

SEQ ID NO: 1552695 - DNA, 15 bp, Homo sapiens
tgatacacttattcg

SEQ ID NO: 1552696 - DNA, 15 bp, Homo sapiens
gatacacttattcgc

SEQ ID NO: 1552697 - DNA, 15 bp, Homo sapiens
atacacttattcgca

SEQ ID NO: 1552698 - DNA, 15 bp, Homo sapiens
tacacttattcgcac

SEQ ID NO: 1552699 - DNA, 15 bp, Homo sapiens
acacttattcgcact

SEQ ID NO: 1552700 - DNA, 15 bp, Homo sapiens
cacttattcgcactg

SEQ ID NO: 1552701 - DNA, 15 bp, Homo sapiens
acttattcgcactga

SEQ ID NO: 1552702 - DNA, 15 bp, Homo sapiens
cttattcgcactgag

SEQ ID NO: 1552703 - DNA, 15 bp, Homo sapiens
ttattcgcactgaga

SEQ ID NO: 1552704 - DNA, 15 bp, Homo sapiens
tattcgcactgagaa

SEQ ID NO: 1552705 - DNA, 15 bp, Homo sapiens
attcgcactgagaaa

SEQ ID NO: 1552706 - DNA, 15 bp, Homo sapiens
ttcgcactgagaaat

SEQ ID NO: 1552707 - DNA, 15 bp, Homo sapiens
tcgcactgagaaata

SEQ ID NO: 1552708 - DNA, 15 bp, Homo sapiens
cgcactgagaaatag

SEQ ID NO: 1552709 - DNA, 15 bp, Homo sapiens
gcactgagaaatagg

SEQ ID NO: 1552710 - DNA, 15 bp, Homo sapiens
cactgagaaatagga

SEQ ID NO: 1552711 - DNA, 15 bp, Homo sapiens
actgagaaataggag

SEQ ID NO: 1552712 - DNA, 15 bp, Homo sapiens
ctgagaaataggagt

SEQ ID NO: 1552713 - DNA, 15 bp, Homo sapiens
tgagaaataggagtg

SEQ ID NO: 1552714 - DNA, 15 bp, Homo sapiens
gagaaataggagtgc

SEQ ID NO: 1552715 - DNA, 15 bp, Homo sapiens
agaaataggagtgcc

SEQ ID NO: 1552716 - DNA, 15 bp, Homo sapiens
gaaataggagtgcct

SEQ ID NO: 1552717 - DNA, 15 bp, Homo sapiens
aaataggagtgcctt

SEQ ID NO: 1552718 - DNA, 15 bp, Homo sapiens
aataggagtgccttt

SEQ ID NO: 1552719 - DNA, 15 bp, Homo sapiens
ataggagtgcctttc

SEQ ID NO: 1552720 - DNA, 15 bp, Homo sapiens
taggagtgcctttca

SEQ ID NO: 1552721 - DNA, 15 bp, Homo sapiens
aggagtgcctttcag

SEQ ID NO: 1552722 - DNA, 15 bp, Homo sapiens
ggagtgcctttcaga

SEQ ID NO: 1552723 - DNA, 15 bp, Homo sapiens
gagtgcctttcagat

SEQ ID NO: 1552724 - DNA, 15 bp, Homo sapiens
agtgcctttcagatt

SEQ ID NO: 1552725 - DNA, 15 bp, Homo sapiens
gtgcctttcagattg

SEQ ID NO: 1552726 - DNA, 15 bp, Homo sapiens
tgcctttcagattgg

SEQ ID NO: 1552727 - DNA, 15 bp, Homo sapiens
gcctttcagattggc

SEQ ID NO: 1552728 - DNA, 15 bp, Homo sapiens
cctttcagattggca

SEQ ID NO: 1552729 - DNA, 15 bp, Homo sapiens
ctttcagattggcag

SEQ ID NO: 1552730 - DNA, 15 bp, Homo sapiens
tttcagattggcagc

SEQ ID NO: 1552731 - DNA, 15 bp, Homo sapiens
ttcagattggcagcc

SEQ ID NO: 1552732 - DNA, 15 bp, Homo sapiens
tcagattggcagcca

SEQ ID NO: 1552733 - DNA, 15 bp, Homo sapiens
cagattggcagccag

SEQ ID NO: 1552734 - DNA, 15 bp, Homo sapiens
agattggcagccagt

SEQ ID NO: 1552735 - DNA, 15 bp, Homo sapiens
gattggcagccagtg

SEQ ID NO: 1552736 - DNA, 15 bp, Homo sapiens
attggcagccagtgt

SEQ ID NO: 1552737 - DNA, 15 bp, Homo sapiens
ttggcagccagtgtt

SEQ ID NO: 1552738 - DNA, 15 bp, Homo sapiens
tggcagccagtgttt

SEQ ID NO: 1552739 - DNA, 15 bp, Homo sapiens
ggcagccagtgtttg

SEQ ID NO: 1552740 - DNA, 15 bp, Homo sapiens
gcagccagtgtttgg

SEQ ID NO: 1552741 - DNA, 15 bp, Homo sapiens
cagccagtgtttgga

SEQ ID NO: 1552742 - DNA, 15 bp, Homo sapiens
agccagtgtttggag

SEQ ID NO: 1552743 - DNA, 15 bp, Homo sapiens
gccagtgtttggaga

SEQ ID NO: 1552744 - DNA, 15 bp, Homo sapiens
ccagtgtttggagag

SEQ ID NO: 1552745 - DNA, 15 bp, Homo sapiens
cagtgtttggagagg

SEQ ID NO: 1552746 - DNA, 15 bp, Homo sapiens
agtgtttggagaggg

SEQ ID NO: 1552747 - DNA, 15 bp, Homo sapiens
gtgtttggagaggga

SEQ ID NO: 1552748 - DNA, 15 bp, Homo sapiens
tgtttggagagggag

SEQ ID NO: 1552749 - DNA, 15 bp, Homo sapiens
gtttggagagggagc

SEQ ID NO: 1552750 - DNA, 15 bp, Homo sapiens
tttggagagggagcc

SEQ ID NO: 1552751 - DNA, 15 bp, Homo sapiens
ttggagagggagccc

SEQ ID NO: 1552752 - DNA, 15 bp, Homo sapiens
tggagagggagcccc

SEQ ID NO: 1552753 - DNA, 15 bp, Homo sapiens
ggagagggagcccct

SEQ ID NO: 1552754 - DNA, 15 bp, Homo sapiens
gagagggagcccctt

SEQ ID NO: 1552755 - DNA, 15 bp, Homo sapiens
agagggagccccttc

SEQ ID NO: 1552756 - DNA, 15 bp, Homo sapiens
gagggagccccttcc

SEQ ID NO: 1552757 - DNA, 15 bp, Homo sapiens
agggagccccttcct

SEQ ID NO: 1552758 - DNA, 15 bp, Homo sapiens
gggagccccttcctg

SEQ ID NO: 1552759 - DNA, 15 bp, Homo sapiens
ggagccccttcctgg

SEQ ID NO: 1552760 - DNA, 15 bp, Homo sapiens
gagccccttcctggg

SEQ ID NO: 1552761 - DNA, 15 bp, Homo sapiens
agccccttcctgggg

SEQ ID NO: 1552762 - DNA, 15 bp, Homo sapiens
gccccttcctggggt

SEQ ID NO: 1552763 - DNA, 15 bp, Homo sapiens
ccccttcctggggtg

SEQ ID NO: 1552764 - DNA, 15 bp, Homo sapiens
cccttcctggggtgt

SEQ ID NO: 1552765 - DNA, 15 bp, Homo sapiens
ccttcctggggtgtt

SEQ ID NO: 1552766 - DNA, 15 bp, Homo sapiens
cttcctggggtgttg

SEQ ID NO: 1552767 - DNA, 15 bp, Homo sapiens
ttcctggggtgttgg

SEQ ID NO: 1552768 - DNA, 15 bp, Homo sapiens
tcctggggtgttgga

SEQ ID NO: 1552769 - DNA, 15 bp, Homo sapiens
cctggggtgttggaa

SEQ ID NO: 1552770 - DNA, 15 bp, Homo sapiens
ctggggtgttggaaa

SEQ ID NO: 1552771 - DNA, 15 bp, Homo sapiens
tggggtgttggaaag

SEQ ID NO: 1552772 - DNA, 15 bp, Homo sapiens
ggggtgttggaaagc

SEQ ID NO: 1552773 - DNA, 15 bp, Homo sapiens
gggtgttggaaagcc

SEQ ID NO: 1552774 - DNA, 15 bp, Homo sapiens
ggtgttggaaagccc

SEQ ID NO: 1552775 - DNA, 15 bp, Homo sapiens
gtgttggaaagccca

SEQ ID NO: 1552776 - DNA, 15 bp, Homo sapiens
tgttggaaagcccac

SEQ ID NO: 1552777 - DNA, 15 bp, Homo sapiens
gttggaaagcccacc

SEQ ID NO: 1552778 - DNA, 15 bp, Homo sapiens
ttggaaagcccacca

SEQ ID NO: 1552779 - DNA, 15 bp, Homo sapiens
tggaaagcccaccac

SEQ ID NO: 1552780 - DNA, 15 bp, Homo sapiens
ggaaagcccaccacc

SEQ ID NO: 1552781 - DNA, 15 bp, Homo sapiens
gaaagcccaccaccc

SEQ ID NO: 1552782 - DNA, 15 bp, Homo sapiens
aaagcccaccacccc

SEQ ID NO: 1552783 - DNA, 15 bp, Homo sapiens
aagcccaccaccccg

SEQ ID NO: 1552784 - DNA, 15 bp, Homo sapiens
agcccaccaccccgg

SEQ ID NO: 1552785 - DNA, 15 bp, Homo sapiens
gcccaccaccccggg

SEQ ID NO: 1552786 - DNA, 15 bp, Homo sapiens
cccaccaccccgggg

SEQ ID NO: 1552787 - DNA, 15 bp, Homo sapiens
ccaccaccccggggg

SEQ ID NO: 1552788 - DNA, 15 bp, Homo sapiens
caccaccccgggggc

SEQ ID NO: 1552789 - DNA, 15 bp, Homo sapiens
accaccccgggggct

SEQ ID NO: 1552790 - DNA, 15 bp, Homo sapiens
ccaccccgggggctt

SEQ ID NO: 1552791 - DNA, 15 bp, Homo sapiens
caccccgggggcttc

SEQ ID NO: 1552792 - DNA, 15 bp, Homo sapiens
accccgggggcttcc

SEQ ID NO: 1552793 - DNA, 15 bp, Homo sapiens
ccccgggggcttcca

SEQ ID NO: 1552794 - DNA, 15 bp, Homo sapiens
cccgggggcttccac

SEQ ID NO: 1552795 - DNA, 15 bp, Homo sapiens
ccgggggcttccact

SEQ ID NO: 1552796 - DNA, 15 bp, Homo sapiens
cgggggcttccactc

SEQ ID NO: 1552797 - DNA, 15 bp, Homo sapiens
gggggcttccactcc

SEQ ID NO: 1552798 - DNA, 15 bp, Homo sapiens
ggggcttccactcca

SEQ ID NO: 1552799 - DNA, 15 bp, Homo sapiens
gggcttccactccac

SEQ ID NO: 1552800 - DNA, 15 bp, Homo sapiens
ggcttccactccacc

SEQ ID NO: 1552801 - DNA, 15 bp, Homo sapiens
gcttccactccacct

SEQ ID NO: 1552802 - DNA, 15 bp, Homo sapiens
cttccactccacctg

SEQ ID NO: 1552803 - DNA, 15 bp, Homo sapiens
ttccactccacctgc

SEQ ID NO: 1552804 - DNA, 15 bp, Homo sapiens
tccactccacctgct

SEQ ID NO: 1552805 - DNA, 15 bp, Homo sapiens
ccactccacctgctt

SEQ ID NO: 1552806 - DNA, 15 bp, Homo sapiens
cactccacctgcttc

SEQ ID NO: 1552807 - DNA, 15 bp, Homo sapiens
actccacctgcttcc

SEQ ID NO: 1552808 - DNA, 15 bp, Homo sapiens
ctccacctgcttcct

SEQ ID NO: 1552809 - DNA, 15 bp, Homo sapiens
tccacctgcttcctt

SEQ ID NO: 1552810 - DNA, 15 bp, Homo sapiens
ccacctgcttccttc

SEQ ID NO: 1552811 - DNA, 15 bp, Homo sapiens
cacctgcttccttct

SEQ ID NO: 1552812 - DNA, 15 bp, Homo sapiens
acctgcttccttctc

SEQ ID NO: 1552813 - DNA, 15 bp, Homo sapiens
cctgcttccttctct

SEQ ID NO: 1552814 - DNA, 15 bp, Homo sapiens
ctgcttccttctctg

SEQ ID NO: 1552815 - DNA, 15 bp, Homo sapiens
tgcttccttctctgc

SEQ ID NO: 1552816 - DNA, 15 bp, Homo sapiens
gcttccttctctgct

SEQ ID NO: 1552817 - DNA, 15 bp, Homo sapiens
cttccttctctgctg

SEQ ID NO: 1552818 - DNA, 15 bp, Homo sapiens
ttccttctctgctgt

SEQ ID NO: 1552819 - DNA, 15 bp, Homo sapiens
tccttctctgctgtc

SEQ ID NO: 1552820 - DNA, 15 bp, Homo sapiens
ccttctctgctgtcc

SEQ ID NO: 1552821 - DNA, 15 bp, Homo sapiens
cttctctgctgtcct

SEQ ID NO: 1552822 - DNA, 15 bp, Homo sapiens
ttctctgctgtcctt

SEQ ID NO: 1552823 - DNA, 15 bp, Homo sapiens
tctctgctgtccttc

SEQ ID NO: 1552824 - DNA, 15 bp, Homo sapiens
ctctgctgtccttcc

SEQ ID NO: 1552825 - DNA, 15 bp, Homo sapiens
tctgctgtccttcct

SEQ ID NO: 1552826 - DNA, 15 bp, Homo sapiens
ctgctgtccttcctt

SEQ ID NO: 1552827 - DNA, 15 bp, Homo sapiens
tgctgtccttccttc

SEQ ID NO: 1552828 - DNA, 15 bp, Homo sapiens
gctgtccttccttcc

SEQ ID NO: 1552829 - DNA, 15 bp, Homo sapiens
ctgtccttccttcca

SEQ ID NO: 1552830 - DNA, 15 bp, Homo sapiens
tgtccttccttccaa

SEQ ID NO: 1552831 - DNA, 15 bp, Homo sapiens
gtccttccttccaac

SEQ ID NO: 1552832 - DNA, 15 bp, Homo sapiens
tccttccttccaacg

SEQ ID NO: 1552833 - DNA, 15 bp, Homo sapiens
ccttccttccaacgc

SEQ ID NO: 1552834 - DNA, 15 bp, Homo sapiens
cttccttccaacgct

SEQ ID NO: 1552835 - DNA, 15 bp, Homo sapiens
ttccttccaacgctg

SEQ ID NO: 1552836 - DNA, 15 bp, Homo sapiens
tccttccaacgctgc

SEQ ID NO: 1552837 - DNA, 15 bp, Homo sapiens
ccttccaacgctgcc

SEQ ID NO: 1552838 - DNA, 15 bp, Homo sapiens
cttccaacgctgcct

SEQ ID NO: 1552839 - DNA, 15 bp, Homo sapiens
ttccaacgctgcctg

SEQ ID NO: 1552840 - DNA, 15 bp, Homo sapiens
tccaacgctgcctgc

SEQ ID NO: 1552841 - DNA, 15 bp, Homo sapiens
ccaacgctgcctgct

SEQ ID NO: 1552842 - DNA, 15 bp, Homo sapiens
caacgctgcctgctt

SEQ ID NO: 1552843 - DNA, 15 bp, Homo sapiens
aacgctgcctgcttg

SEQ ID NO: 1552844 - DNA, 15 bp, Homo sapiens
acgctgcctgcttgt

SEQ ID NO: 1552845 - DNA, 15 bp, Homo sapiens
cgctgcctgcttgta

SEQ ID NO: 1552846 - DNA, 15 bp, Homo sapiens
gctgcctgcttgtac

SEQ ID NO: 1552847 - DNA, 15 bp, Homo sapiens
ctgcctgcttgtaca

SEQ ID NO: 1552848 - DNA, 15 bp, Homo sapiens
tgcctgcttgtacag

SEQ ID NO: 1552849 - DNA, 15 bp, Homo sapiens
gcctgcttgtacagg

SEQ ID NO: 1552850 - DNA, 15 bp, Homo sapiens
cctgcttgtacaggg

SEQ ID NO: 1552851 - DNA, 15 bp, Homo sapiens
ctgcttgtacagggc

SEQ ID NO: 1552852 - DNA, 15 bp, Homo sapiens
tgcttgtacagggct

SEQ ID NO: 1552853 - DNA, 15 bp, Homo sapiens
gcttgtacagggctt

SEQ ID NO: 1552854 - DNA, 15 bp, Homo sapiens
cttgtacagggcttg

SEQ ID NO: 1552855 - DNA, 15 bp, Homo sapiens
ttgtacagggcttga

SEQ ID NO: 1552856 - DNA, 15 bp, Homo sapiens
tgtacagggcttgag

SEQ ID NO: 1552857 - DNA, 15 bp, Homo sapiens
gtacagggcttgaga

SEQ ID NO: 1552858 - DNA, 15 bp, Homo sapiens
tacagggcttgagaa

SEQ ID NO: 1552859 - DNA, 15 bp, Homo sapiens
acagggcttgagaag

SEQ ID NO: 1552860 - DNA, 15 bp, Homo sapiens
cagggcttgagaagt

SEQ ID NO: 1552861 - DNA, 15 bp, Homo sapiens
agggcttgagaagtc

SEQ ID NO: 1552862 - DNA, 15 bp, Homo sapiens
gggcttgagaagtca

SEQ ID NO: 1552863 - DNA, 15 bp, Homo sapiens
ggcttgagaagtcac

SEQ ID NO: 1552864 - DNA, 15 bp, Homo sapiens
gcttgagaagtcaca

SEQ ID NO: 1552865 - DNA, 15 bp, Homo sapiens
cttgagaagtcacaa

SEQ ID NO: 1552866 - DNA, 15 bp, Homo sapiens
ttgagaagtcacaaa

SEQ ID NO: 1552867 - DNA, 15 bp, Homo sapiens
tgagaagtcacaaag

SEQ ID NO: 1552868 - DNA, 15 bp, Homo sapiens
gagaagtcacaaaga

SEQ ID NO: 1552869 - DNA, 15 bp, Homo sapiens
agaagtcacaaagat

SEQ ID NO: 1552870 - DNA, 15 bp, Homo sapiens
gaagtcacaaagatt

SEQ ID NO: 1552871 - DNA, 15 bp, Homo sapiens
aagtcacaaagattt

SEQ ID NO: 1552872 - DNA, 15 bp, Homo sapiens
agtcacaaagatttt

SEQ ID NO: 1552873 - DNA, 15 bp, Homo sapiens
gtcacaaagattttc

SEQ ID NO: 1552874 - DNA, 15 bp, Homo sapiens
tcacaaagattttca

SEQ ID NO: 1552875 - DNA, 15 bp, Homo sapiens
cacaaagattttcac

SEQ ID NO: 1552876 - DNA, 15 bp, Homo sapiens
acaaagattttcacc

SEQ ID NO: 1552877 - DNA, 15 bp, Homo sapiens
caaagattttcacct

SEQ ID NO: 1552878 - DNA, 15 bp, Homo sapiens
aaagattttcacctg

SEQ ID NO: 1552879 - DNA, 15 bp, Homo sapiens
aagattttcacctgc

SEQ ID NO: 1552880 - DNA, 15 bp, Homo sapiens
agattttcacctgct

SEQ ID NO: 1552881 - DNA, 15 bp, Homo sapiens
gattttcacctgctt

SEQ ID NO: 1552882 - DNA, 15 bp, Homo sapiens
attttcacctgcttt

SEQ ID NO: 1552883 - DNA, 15 bp, Homo sapiens
ttttcacctgcttta

SEQ ID NO: 1552884 - DNA, 15 bp, Homo sapiens
tttcacctgctttat

SEQ ID NO: 1552885 - DNA, 15 bp, Homo sapiens
ttcacctgctttatc

SEQ ID NO: 1552886 - DNA, 15 bp, Homo sapiens
tcacctgctttatct

SEQ ID NO: 1552887 - DNA, 15 bp, Homo sapiens
cacctgctttatctt

SEQ ID NO: 1552888 - DNA, 15 bp, Homo sapiens
acctgctttatcttg

SEQ ID NO: 1552889 - DNA, 15 bp, Homo sapiens
cctgctttatcttgt

SEQ ID NO: 1552890 - DNA, 15 bp, Homo sapiens
ctgctttatcttgtt

SEQ ID NO: 1552891 - DNA, 15 bp, Homo sapiens
tgctttatcttgttg

SEQ ID NO: 1552892 - DNA, 15 bp, Homo sapiens
gctttatcttgttgg

SEQ ID NO: 1552893 - DNA, 15 bp, Homo sapiens
ctttatcttgttgga

SEQ ID NO: 1552894 - DNA, 15 bp, Homo sapiens
tttatcttgttggat

SEQ ID NO: 1552895 - DNA, 15 bp, Homo sapiens
ttatcttgttggatc

SEQ ID NO: 1552896 - DNA, 15 bp, Homo sapiens
tatcttgttggatct

SEQ ID NO: 1552897 - DNA, 15 bp, Homo sapiens
atcttgttggatctg

SEQ ID NO: 1552898 - DNA, 15 bp, Homo sapiens
tcttgttggatctgt

SEQ ID NO: 1552899 - DNA, 15 bp, Homo sapiens
cttgttggatctgtg

SEQ ID NO: 1552900 - DNA, 15 bp, Homo sapiens
ttgttggatctgtgc

SEQ ID NO: 1552901 - DNA, 15 bp, Homo sapiens
tgttggatctgtgca

SEQ ID NO: 1552902 - DNA, 15 bp, Homo sapiens
gttggatctgtgcag

SEQ ID NO: 1552903 - DNA, 15 bp, Homo sapiens
ttggatctgtgcagt

SEQ ID NO: 1552904 - DNA, 15 bp, Homo sapiens
tggatctgtgcagtt

SEQ ID NO: 1552905 - DNA, 15 bp, Homo sapiens
ggatctgtgcagttt

SEQ ID NO: 1552906 - DNA, 15 bp, Homo sapiens
gatctgtgcagtttg

SEQ ID NO: 1552907 - DNA, 15 bp, Homo sapiens
atctgtgcagtttga

SEQ ID NO: 1552908 - DNA, 15 bp, Homo sapiens
tctgtgcagtttgag

SEQ ID NO: 1552909 - DNA, 15 bp, Homo sapiens
ctgtgcagtttgaga

SEQ ID NO: 1552910 - DNA, 15 bp, Homo sapiens
tgtgcagtttgagaa

SEQ ID NO: 1552911 - DNA, 15 bp, Homo sapiens
gtgcagtttgagaag

SEQ ID NO: 1552912 - DNA, 15 bp, Homo sapiens
tgcagtttgagaaga

SEQ ID NO: 1552913 - DNA, 15 bp, Homo sapiens
gcagtttgagaagaa

SEQ ID NO: 1552914 - DNA, 15 bp, Homo sapiens
cagtttgagaagaat

SEQ ID NO: 1552915 - DNA, 15 bp, Homo sapiens
agtttgagaagaatg

SEQ ID NO: 1552916 - DNA, 15 bp, Homo sapiens
gtttgagaagaatga

SEQ ID NO: 1552917 - DNA, 15 bp, Homo sapiens
tttgagaagaatgat

SEQ ID NO: 1552918 - DNA, 15 bp, Homo sapiens
ttgagaagaatgata

SEQ ID NO: 1552919 - DNA, 15 bp, Homo sapiens
tgagaagaatgatat

SEQ ID NO: 1552920 - DNA, 15 bp, Homo sapiens
gagaagaatgatatg

SEQ ID NO: 1552921 - DNA, 15 bp, Homo sapiens
agaagaatgatatgc

SEQ ID NO: 1552922 - DNA, 15 bp, Homo sapiens
gaagaatgatatgcc

SEQ ID NO: 1552923 - DNA, 15 bp, Homo sapiens
aagaatgatatgccc

SEQ ID NO: 1552924 - DNA, 15 bp, Homo sapiens
agaatgatatgccca

SEQ ID NO: 1552925 - DNA, 15 bp, Homo sapiens
gaatgatatgcccat

SEQ ID NO: 1552926 - DNA, 15 bp, Homo sapiens
aatgatatgcccatt

SEQ ID NO: 1552927 - DNA, 15 bp, Homo sapiens
atgatatgcccattt

SEQ ID NO: 1552928 - DNA, 15 bp, Homo sapiens
tgatatgcccatttt

SEQ ID NO: 1552929 - DNA, 15 bp, Homo sapiens
gatatgcccatttta

SEQ ID NO: 1552930 - DNA, 15 bp, Homo sapiens
atatgcccattttat

SEQ ID NO: 1552931 - DNA, 15 bp, Homo sapiens
tatgcccattttatg

SEQ ID NO: 1552932 - DNA, 15 bp, Homo sapiens
atgcccattttatgg

SEQ ID NO: 1552933 - DNA, 15 bp, Homo sapiens
tgcccattttatgga

SEQ ID NO: 1552934 - DNA, 15 bp, Homo sapiens
gcccattttatggac

SEQ ID NO: 1552935 - DNA, 15 bp, Homo sapiens
cccattttatggacg

SEQ ID NO: 1552936 - DNA, 15 bp, Homo sapiens
ccattttatggacgg

SEQ ID NO: 1552937 - DNA, 15 bp, Homo sapiens
cattttatggacggc

SEQ ID NO: 1552938 - DNA, 15 bp, Homo sapiens
attttatggacggca

SEQ ID NO: 1552939 - DNA, 15 bp, Homo sapiens
ttttatggacggcag

SEQ ID NO: 1552940 - DNA, 15 bp, Homo sapiens
tttatggacggcaga

SEQ ID NO: 1552941 - DNA, 15 bp, Homo sapiens
ttatggacggcagaa

SEQ ID NO: 1552942 - DNA, 15 bp, Homo sapiens
tatggacggcagaac

SEQ ID NO: 1552943 - DNA, 15 bp, Homo sapiens
atggacggcagaact

SEQ ID NO: 1552944 - DNA, 15 bp, Homo sapiens
tggacggcagaactg

SEQ ID NO: 1552945 - DNA, 15 bp, Homo sapiens
ggacggcagaactgg

SEQ ID NO: 1552946 - DNA, 15 bp, Homo sapiens
gacggcagaactggc

SEQ ID NO: 1552947 - DNA, 15 bp, Homo sapiens
acggcagaactggca

SEQ ID NO: 1552948 - DNA, 15 bp, Homo sapiens
cggcagaactggcaa

SEQ ID NO: 1552949 - DNA, 15 bp, Homo sapiens
ggcagaactggcaac

SEQ ID NO: 1552950 - DNA, 15 bp, Homo sapiens
gcagaactggcaact

SEQ ID NO: 1552951 - DNA, 15 bp, Homo sapiens
cagaactggcaactg

SEQ ID NO: 1552952 - DNA, 15 bp, Homo sapiens
agaactggcaactga

SEQ ID NO: 1552953 - DNA, 15 bp, Homo sapiens
gaactggcaactgat

SEQ ID NO: 1552954 - DNA, 15 bp, Homo sapiens
aactggcaactgatg

SEQ ID NO: 1552955 - DNA, 15 bp, Homo sapiens
actggcaactgatga

SEQ ID NO: 1552956 - DNA, 15 bp, Homo sapiens
ctggcaactgatgag

SEQ ID NO: 1552957 - DNA, 15 bp, Homo sapiens
tggcaactgatgagg

SEQ ID NO: 1552958 - DNA, 15 bp, Homo sapiens
ggcaactgatgagga

SEQ ID NO: 1552959 - DNA, 15 bp, Homo sapiens
gcaactgatgaggaa

SEQ ID NO: 1552960 - DNA, 15 bp, Homo sapiens
caactgatgaggaaa

SEQ ID NO: 1552961 - DNA, 15 bp, Homo sapiens
tgaggaaactgaggt

SEQ ID NO: 1552962 - DNA, 15 bp, Homo sapiens
gaggaaactgaggtc

SEQ ID NO: 1552963 - DNA, 15 bp, Homo sapiens
aggaaactgaggtcc

SEQ ID NO: 1552964 - DNA, 15 bp, Homo sapiens
ggaaactgaggtcct

SEQ ID NO: 1552965 - DNA, 15 bp, Homo sapiens
gaaactgaggtccta

SEQ ID NO: 1552966 - DNA, 15 bp, Homo sapiens
aaactgaggtcctaa

SEQ ID NO: 1552967 - DNA, 15 bp, Homo sapiens
aactgaggtcctaaa

SEQ ID NO: 1552968 - DNA, 15 bp, Homo sapiens
actgaggtcctaaaa

SEQ ID NO: 1552969 - DNA, 15 bp, Homo sapiens
ctgaggtcctaaaag

SEQ ID NO: 1552970 - DNA, 15 bp, Homo sapiens
tgaggtcctaaaaga

SEQ ID NO: 1552971 - DNA, 15 bp, Homo sapiens
gaggtcctaaaagat

SEQ ID NO: 1552972 - DNA, 15 bp, Homo sapiens
aggtcctaaaagata

SEQ ID NO: 1552973 - DNA, 15 bp, Homo sapiens
ggtcctaaaagataa

SEQ ID NO: 1552974 - DNA, 15 bp, Homo sapiens
gtcctaaaagataaa

SEQ ID NO: 1552975 - DNA, 15 bp, Homo sapiens
tcctaaaagataaat

SEQ ID NO: 1552976 - DNA, 15 bp, Homo sapiens
cctaaaagataaatc

SEQ ID NO: 1552977 - DNA, 15 bp, Homo sapiens
ctaaaagataaatcg

SEQ ID NO: 1552978 - DNA, 15 bp, Homo sapiens
taaaagataaatcgt

SEQ ID NO: 1552979 - DNA, 15 bp, Homo sapiens
aaaagataaatcgtg

SEQ ID NO: 1552980 - DNA, 15 bp, Homo sapiens
aaagataaatcgtgt

SEQ ID NO: 1552981 - DNA, 15 bp, Homo sapiens
aagataaatcgtgtc

SEQ ID NO: 1552982 - DNA, 15 bp, Homo sapiens
agataaatcgtgtcc

SEQ ID NO: 1552983 - DNA, 15 bp, Homo sapiens
gataaatcgtgtccc

SEQ ID NO: 1552984 - DNA, 15 bp, Homo sapiens
ataaatcgtgtccca

SEQ ID NO: 1552985 - DNA, 15 bp, Homo sapiens
taaatcgtgtcccac

SEQ ID NO: 1552986 - DNA, 15 bp, Homo sapiens
aaatcgtgtcccaca

SEQ ID NO: 1552987 - DNA, 15 bp, Homo sapiens
aatcgtgtcccacag

SEQ ID NO: 1552988 - DNA, 15 bp, Homo sapiens
atcgtgtcccacagt

SEQ ID NO: 1552989 - DNA, 15 bp, Homo sapiens
tcgtgtcccacagtc

SEQ ID NO: 1552990 - DNA, 15 bp, Homo sapiens
cgtgtcccacagtcc

SEQ ID NO: 1552991 - DNA, 15 bp, Homo sapiens
gtgtcccacagtcct

SEQ ID NO: 1552992 - DNA, 15 bp, Homo sapiens
tgtcccacagtcctg

SEQ ID NO: 1552993 - DNA, 15 bp, Homo sapiens
gtcccacagtcctgc

SEQ ID NO: 1552994 - DNA, 15 bp, Homo sapiens
tcccacagtcctgca

SEQ ID NO: 1552995 - DNA, 15 bp, Homo sapiens
cccacagtcctgcat

SEQ ID NO: 1552996 - DNA, 15 bp, Homo sapiens
ccacagtcctgcatt

SEQ ID NO: 1552997 - DNA, 15 bp, Homo sapiens
cacagtcctgcatta

SEQ ID NO: 1552998 - DNA, 15 bp, Homo sapiens
acagtcctgcattaa

SEQ ID NO: 1552999 - DNA, 15 bp, Homo sapiens
cagtcctgcattaac

SEQ ID NO: 1553000 - DNA, 15 bp, Homo sapiens
agtcctgcattaaca

SEQ ID NO: 1553001 - DNA, 15 bp, Homo sapiens
gtcctgcattaacag

SEQ ID NO: 1553002 - DNA, 15 bp, Homo sapiens
tcctgcattaacaga

SEQ ID NO: 1553003 - DNA, 15 bp, Homo sapiens
cctgcattaacagag

SEQ ID NO: 1553004 - DNA, 15 bp, Homo sapiens
ctgcattaacagagc

SEQ ID NO: 1553005 - DNA, 15 bp, Homo sapiens
tgcattaacagagct

SEQ ID NO: 1553006 - DNA, 15 bp, Homo sapiens
gcattaacagagctg

SEQ ID NO: 1553007 - DNA, 15 bp, Homo sapiens
cattaacagagctgg

SEQ ID NO: 1553008 - DNA, 15 bp, Homo sapiens
attaacagagctggg

SEQ ID NO: 1553009 - DNA, 15 bp, Homo sapiens
ttaacagagctggga

SEQ ID NO: 1553010 - DNA, 15 bp, Homo sapiens
taacagagctgggat

SEQ ID NO: 1553011 - DNA, 15 bp, Homo sapiens
aacagagctgggatt

SEQ ID NO: 1553012 - DNA, 15 bp, Homo sapiens
acagagctgggattt

SEQ ID NO: 1553013 - DNA, 15 bp, Homo sapiens
agagctgggatttag

SEQ ID NO: 1553014 - DNA, 15 bp, Homo sapiens
gagctgggatttaga

SEQ ID NO: 1553015 - DNA, 15 bp, Homo sapiens
agctgggatttagac

SEQ ID NO: 1553016 - DNA, 15 bp, Homo sapiens
gctgggatttagacc

SEQ ID NO: 1553017 - DNA, 15 bp, Homo sapiens
ctgggatttagacca

SEQ ID NO: 1553018 - DNA, 15 bp, Homo sapiens
tgggatttagaccaa

SEQ ID NO: 1553019 - DNA, 15 bp, Homo sapiens
gggatttagaccaag

SEQ ID NO: 1553020 - DNA, 15 bp, Homo sapiens
ggatttagaccaaga

SEQ ID NO: 1553021 - DNA, 15 bp, Homo sapiens
gatttagaccaagaa

SEQ ID NO: 1553022 - DNA, 15 bp, Homo sapiens
atttagaccaagaac

SEQ ID NO: 1553023 - DNA, 15 bp, Homo sapiens
tttagaccaagaact

SEQ ID NO: 1553024 - DNA, 15 bp, Homo sapiens
ttagaccaagaactt

SEQ ID NO: 1553025 - DNA, 15 bp, Homo sapiens
tagaccaagaactta

SEQ ID NO: 1553026 - DNA, 15 bp, Homo sapiens
agaccaagaacttat

SEQ ID NO: 1553027 - DNA, 15 bp, Homo sapiens
gaccaagaacttata

SEQ ID NO: 1553028 - DNA, 15 bp, Homo sapiens
accaagaacttataa

SEQ ID NO: 1553029 - DNA, 15 bp, Homo sapiens
ccaagaacttataaa

SEQ ID NO: 1553030 - DNA, 15 bp, Homo sapiens
caagaacttataaat

SEQ ID NO: 1553031 - DNA, 15 bp, Homo sapiens
aagaacttataaatc

SEQ ID NO: 1553032 - DNA, 15 bp, Homo sapiens
agaacttataaatcg

SEQ ID NO: 1553033 - DNA, 15 bp, Homo sapiens
gaacttataaatcgc

SEQ ID NO: 1553034 - DNA, 15 bp, Homo sapiens
aacttataaatcgct

SEQ ID NO: 1553035 - DNA, 15 bp, Homo sapiens
acttataaatcgctg

SEQ ID NO: 1553036 - DNA, 15 bp, Homo sapiens
cttataaatcgctgt

SEQ ID NO: 1553037 - DNA, 15 bp, Homo sapiens
ttataaatcgctgtc

SEQ ID NO: 1553038 - DNA, 15 bp, Homo sapiens
tataaatcgctgtcc

SEQ ID NO: 1553039 - DNA, 15 bp, Homo sapiens
ataaatcgctgtcca

SEQ ID NO: 1553040 - DNA, 15 bp, Homo sapiens
taaatcgctgtccag

SEQ ID NO: 1553041 - DNA, 15 bp, Homo sapiens
aaatcgctgtccagt

SEQ ID NO: 1553042 - DNA, 15 bp, Homo sapiens
aatcgctgtccagtg

SEQ ID NO: 1553043 - DNA, 15 bp, Homo sapiens
atcgctgtccagtgc

SEQ ID NO: 1553044 - DNA, 15 bp, Homo sapiens
tcgctgtccagtgct

SEQ ID NO: 1553045 - DNA, 15 bp, Homo sapiens
cgctgtccagtgctc

SEQ ID NO: 1553046 - DNA, 15 bp, Homo sapiens
gctgtccagtgctcc

SEQ ID NO: 1553047 - DNA, 15 bp, Homo sapiens
ctgtccagtgctcct

SEQ ID NO: 1553048 - DNA, 15 bp, Homo sapiens
tgtccagtgctcctt

SEQ ID NO: 1553049 - DNA, 15 bp, Homo sapiens
gtccagtgctccttc

SEQ ID NO: 1553050 - DNA, 15 bp, Homo sapiens
tccagtgctccttcc

SEQ ID NO: 1553051 - DNA, 15 bp, Homo sapiens
ccagtgctccttcct

SEQ ID NO: 1553052 - DNA, 15 bp, Homo sapiens
cagtgctccttcctg

SEQ ID NO: 1553053 - DNA, 15 bp, Homo sapiens
agtgctccttcctgt

SEQ ID NO: 1553054 - DNA, 15 bp, Homo sapiens
gtgctccttcctgta

SEQ ID NO: 1553055 - DNA, 15 bp, Homo sapiens
tgctccttcctgtag

SEQ ID NO: 1553056 - DNA, 15 bp, Homo sapiens
gctccttcctgtaga

SEQ ID NO: 1553057 - DNA, 15 bp, Homo sapiens
ctccttcctgtagac

SEQ ID NO: 1553058 - DNA, 15 bp, Homo sapiens
tccttcctgtagacc

SEQ ID NO: 1553059 - DNA, 15 bp, Homo sapiens
ccttcctgtagacca

SEQ ID NO: 1553060 - DNA, 15 bp, Homo sapiens
cttcctgtagaccac

SEQ ID NO: 1553061 - DNA, 15 bp, Homo sapiens
ttcctgtagaccaca

SEQ ID NO: 1553062 - DNA, 15 bp, Homo sapiens
tcctgtagaccacac

SEQ ID NO: 1553063 - DNA, 15 bp, Homo sapiens
cctgtagaccacacc

SEQ ID NO: 1553064 - DNA, 15 bp, Homo sapiens
ctgtagaccacacca

SEQ ID NO: 1553065 - DNA, 15 bp, Homo sapiens
tgtagaccacaccac

SEQ ID NO: 1553066 - DNA, 15 bp, Homo sapiens
gtagaccacaccact

SEQ ID NO: 1553067 - DNA, 15 bp, Homo sapiens
tagaccacaccactc

SEQ ID NO: 1553068 - DNA, 15 bp, Homo sapiens
agaccacaccactcc

SEQ ID NO: 1553069 - DNA, 15 bp, Homo sapiens
gaccacaccactccc

SEQ ID NO: 1553070 - DNA, 15 bp, Homo sapiens
accacaccactccct

SEQ ID NO: 1553071 - DNA, 15 bp, Homo sapiens
ccacaccactccctc

SEQ ID NO: 1553072 - DNA, 15 bp, Homo sapiens
cacaccactccctcc

SEQ ID NO: 1553073 - DNA, 15 bp, Homo sapiens
acaccactccctcct

SEQ ID NO: 1553074 - DNA, 15 bp, Homo sapiens
caccactccctcctg

SEQ ID NO: 1553075 - DNA, 15 bp, Homo sapiens
accactccctcctgg

SEQ ID NO: 1553076 - DNA, 15 bp, Homo sapiens
ccactccctcctggt

SEQ ID NO: 1553077 - DNA, 15 bp, Homo sapiens
cactccctcctggtg

SEQ ID NO: 1553078 - DNA, 15 bp, Homo sapiens
actccctcctggtgt

SEQ ID NO: 1553079 - DNA, 15 bp, Homo sapiens
ctccctcctggtgtc

SEQ ID NO: 1553080 - DNA, 15 bp, Homo sapiens
tccctcctggtgtcc

SEQ ID NO: 1553081 - DNA, 15 bp, Homo sapiens
ccctcctggtgtcct

SEQ ID NO: 1553082 - DNA, 15 bp, Homo sapiens
cctcctggtgtcctc

SEQ ID NO: 1553083 - DNA, 15 bp, Homo sapiens
ctcctggtgtcctct

SEQ ID NO: 1553084 - DNA, 15 bp, Homo sapiens
tcctggtgtcctctt

SEQ ID NO: 1553085 - DNA, 15 bp, Homo sapiens
cctggtgtcctcttt

SEQ ID NO: 1553086 - DNA, 15 bp, Homo sapiens
ctggtgtcctctttc

SEQ ID NO: 1553087 - DNA, 15 bp, Homo sapiens
tggtgtcctctttcc

SEQ ID NO: 1553088 - DNA, 15 bp, Homo sapiens
ggtgtcctctttcct

SEQ ID NO: 1553089 - DNA, 15 bp, Homo sapiens
gtgtcctctttcctg

SEQ ID NO: 1553090 - DNA, 15 bp, Homo sapiens
tgtcctctttcctgt

SEQ ID NO: 1553091 - DNA, 15 bp, Homo sapiens
gtcctctttcctgtc

SEQ ID NO: 1553092 - DNA, 15 bp, Homo sapiens
tcctctttcctgtct

SEQ ID NO: 1553093 - DNA, 15 bp, Homo sapiens
cctctttcctgtctc

SEQ ID NO: 1553094 - DNA, 15 bp, Homo sapiens
ctctttcctgtctcc

SEQ ID NO: 1553095 - DNA, 15 bp, Homo sapiens
tctttcctgtctcct

SEQ ID NO: 1553096 - DNA, 15 bp, Homo sapiens
ctttcctgtctcctg

SEQ ID NO: 1553097 - DNA, 15 bp, Homo sapiens
tttcctgtctcctgc

SEQ ID NO: 1553098 - DNA, 15 bp, Homo sapiens
ttcctgtctcctgct

SEQ ID NO: 1553099 - DNA, 15 bp, Homo sapiens
tcctgtctcctgctt

SEQ ID NO: 1553100 - DNA, 15 bp, Homo sapiens
cctgtctcctgcttc

SEQ ID NO: 1553101 - DNA, 15 bp, Homo sapiens
ctgtctcctgcttcc

SEQ ID NO: 1553102 - DNA, 15 bp, Homo sapiens
tgtctcctgcttcct

SEQ ID NO: 1553103 - DNA, 15 bp, Homo sapiens
tctcctgcttcctcc

SEQ ID NO: 1553104 - DNA, 15 bp, Homo sapiens
ctcctgcttcctcca

SEQ ID NO: 1553105 - DNA, 15 bp, Homo sapiens
tcctgcttcctccaa

SEQ ID NO: 1553106 - DNA, 15 bp, Homo sapiens
cctgcttcctccaaa

SEQ ID NO: 1553107 - DNA, 15 bp, Homo sapiens
ctgcttcctccaaaa

SEQ ID NO: 1553108 - DNA, 15 bp, Homo sapiens
tgcttcctccaaaaa

SEQ ID NO: 1553109 - DNA, 15 bp, Homo sapiens
gcttcctccaaaaac

SEQ ID NO: 1553110 - DNA, 15 bp, Homo sapiens
cttcctccaaaaact

SEQ ID NO: 1553111 - DNA, 15 bp, Homo sapiens
ttcctccaaaaactc

SEQ ID NO: 1553112 - DNA, 15 bp, Homo sapiens
tcctccaaaaactcc

SEQ ID NO: 1553113 - DNA, 15 bp, Homo sapiens
cctccaaaaactcct

SEQ ID NO: 1553114 - DNA, 15 bp, Homo sapiens
ctccaaaaactcctg

SEQ ID NO: 1553115 - DNA, 15 bp, Homo sapiens
tccaaaaactcctga

SEQ ID NO: 1553116 - DNA, 15 bp, Homo sapiens
ccaaaaactcctgaa

SEQ ID NO: 1553117 - DNA, 15 bp, Homo sapiens
caaaaactcctgaat

SEQ ID NO: 1553118 - DNA, 15 bp, Homo sapiens
aaaaactcctgaatc

SEQ ID NO: 1553119 - DNA, 15 bp, Homo sapiens
aaaactcctgaatct

SEQ ID NO: 1553120 - DNA, 15 bp, Homo sapiens
aaactcctgaatctg

SEQ ID NO: 1553121 - DNA, 15 bp, Homo sapiens
aactcctgaatctga

SEQ ID NO: 1553122 - DNA, 15 bp, Homo sapiens
actcctgaatctgag

SEQ ID NO: 1553123 - DNA, 15 bp, Homo sapiens
ctcctgaatctgagg

SEQ ID NO: 1553124 - DNA, 15 bp, Homo sapiens
tcctgaatctgaggg

SEQ ID NO: 1553125 - DNA, 15 bp, Homo sapiens
cctgaatctgaggga

SEQ ID NO: 1553126 - DNA, 15 bp, Homo sapiens
ctgaatctgagggat

SEQ ID NO: 1553127 - DNA, 15 bp, Homo sapiens
tgaatctgagggatg

SEQ ID NO: 1553128 - DNA, 15 bp, Homo sapiens
gaatctgagggatgc

SEQ ID NO: 1553129 - DNA, 15 bp, Homo sapiens
aatctgagggatgcc

SEQ ID NO: 1553130 - DNA, 15 bp, Homo sapiens
atctgagggatgccc

SEQ ID NO: 1553131 - DNA, 15 bp, Homo sapiens
tctgagggatgcccc

SEQ ID NO: 1553132 - DNA, 15 bp, Homo sapiens
ctgagggatgcccct

SEQ ID NO: 1553133 - DNA, 15 bp, Homo sapiens
tgagggatgcccctt

SEQ ID NO: 1553134 - DNA, 15 bp, Homo sapiens
gagggatgccccttc

SEQ ID NO: 1553135 - DNA, 15 bp, Homo sapiens
agggatgccccttcc

SEQ ID NO: 1553136 - DNA, 15 bp, Homo sapiens
gggatgccccttcct

SEQ ID NO: 1553137 - DNA, 15 bp, Homo sapiens
ggatgccccttcctt

SEQ ID NO: 1553138 - DNA, 15 bp, Homo sapiens
tgagccccctcccta

SEQ ID NO: 1553139 - DNA, 15 bp, Homo sapiens
gagccccctccctaa

SEQ ID NO: 1553140 - DNA, 15 bp, Homo sapiens
agccccctccctaac

SEQ ID NO: 1553141 - DNA, 15 bp, Homo sapiens
gccccctccctaacc

SEQ ID NO: 1553142 - DNA, 15 bp, Homo sapiens
ccccctccctaacct

SEQ ID NO: 1553143 - DNA, 15 bp, Homo sapiens
cccctccctaacctg

SEQ ID NO: 1553144 - DNA, 15 bp, Homo sapiens
ccctccctaacctgg

SEQ ID NO: 1553145 - DNA, 15 bp, Homo sapiens
cctccctaacctggt

SEQ ID NO: 1553146 - DNA, 15 bp, Homo sapiens
ctccctaacctggta

SEQ ID NO: 1553147 - DNA, 15 bp, Homo sapiens
tccctaacctggtac

SEQ ID NO: 1553148 - DNA, 15 bp, Homo sapiens
ccctaacctggtacc

SEQ ID NO: 1553149 - DNA, 15 bp, Homo sapiens
cctaacctggtacct

SEQ ID NO: 1553150 - DNA, 15 bp, Homo sapiens
ctaacctggtacctg

SEQ ID NO: 1553151 - DNA, 15 bp, Homo sapiens
taacctggtacctgc

SEQ ID NO: 1553152 - DNA, 15 bp, Homo sapiens
aacctggtacctgcc

SEQ ID NO: 1553153 - DNA, 15 bp, Homo sapiens
acctggtacctgccg

SEQ ID NO: 1553154 - DNA, 15 bp, Homo sapiens
cctggtacctgccgt

SEQ ID NO: 1553155 - DNA, 15 bp, Homo sapiens
ctggtacctgccgtg

SEQ ID NO: 1553156 - DNA, 15 bp, Homo sapiens
tggtacctgccgtgg

SEQ ID NO: 1553157 - DNA, 15 bp, Homo sapiens
ggtacctgccgtggg

SEQ ID NO: 1553158 - DNA, 15 bp, Homo sapiens
gtacctgccgtgggt

SEQ ID NO: 1553159 - DNA, 15 bp, Homo sapiens
tacctgccgtgggtc

SEQ ID NO: 1553160 - DNA, 15 bp, Homo sapiens
acctgccgtgggtca

SEQ ID NO: 1553161 - DNA, 15 bp, Homo sapiens
cctgccgtgggtcag

SEQ ID NO: 1553162 - DNA, 15 bp, Homo sapiens
ctgccgtgggtcagc

SEQ ID NO: 1553163 - DNA, 15 bp, Homo sapiens
tgccgtgggtcagca

SEQ ID NO: 1553164 - DNA, 15 bp, Homo sapiens
gccgtgggtcagcag

SEQ ID NO: 1553165 - DNA, 15 bp, Homo sapiens
ccgtgggtcagcagt

SEQ ID NO: 1553166 - DNA, 15 bp, Homo sapiens
cgtgggtcagcagtg

SEQ ID NO: 1553167 - DNA, 15 bp, Homo sapiens
gtgggtcagcagtgg

SEQ ID NO: 1553168 - DNA, 15 bp, Homo sapiens
tgggtcagcagtggt

SEQ ID NO: 1553169 - DNA, 15 bp, Homo sapiens
gggtcagcagtggtg

SEQ ID NO: 1553170 - DNA, 15 bp, Homo sapiens
ggtcagcagtggtga

SEQ ID NO: 1553171 - DNA, 15 bp, Homo sapiens
gtcagcagtggtgag

SEQ ID NO: 1553172 - DNA, 15 bp, Homo sapiens
tcagcagtggtgagc

SEQ ID NO: 1553173 - DNA, 15 bp, Homo sapiens
gtacctgccctgggt

SEQ ID NO: 1553174 - DNA, 15 bp, Homo sapiens
tacctgccctgggtc

SEQ ID NO: 1553175 - DNA, 15 bp, Homo sapiens
acctgccctgggtca

SEQ ID NO: 1553176 - DNA, 15 bp, Homo sapiens
cctgccctgggtcag

SEQ ID NO: 1553177 - DNA, 15 bp, Homo sapiens
ctgccctgggtcagc

SEQ ID NO: 1553178 - DNA, 15 bp, Homo sapiens
tgccctgggtcagca

SEQ ID NO: 1553179 - DNA, 15 bp, Homo sapiens
gccctgggtcagcag

SEQ ID NO: 1553180 - DNA, 15 bp, Homo sapiens
ccctgggtcagcagt

SEQ ID NO: 1553181 - DNA, 15 bp, Homo sapiens
cctgggtcagcagtg

SEQ ID NO: 1553182 - DNA, 15 bp, Homo sapiens
ctgggtcagcagtgg

SEQ ID NO: 1553183 - DNA, 15 bp, Homo sapiens
cagcagtggtgagct

SEQ ID NO: 1553184 - DNA, 15 bp, Homo sapiens
agcagtggtgagctc

SEQ ID NO: 1553185 - DNA, 15 bp, Homo sapiens
gcagtggtgagctcc

SEQ ID NO: 1553186 - DNA, 15 bp, Homo sapiens
cagtggtgagctccc

SEQ ID NO: 1553187 - DNA, 15 bp, Homo sapiens
agtggtgagctccct

SEQ ID NO: 1553188 - DNA, 15 bp, Homo sapiens
gtggtgagctccctc

SEQ ID NO: 1553189 - DNA, 15 bp, Homo sapiens
tggtgagctccctcc

SEQ ID NO: 1553190 - DNA, 15 bp, Homo sapiens
ggtgagctccctccc

SEQ ID NO: 1553191 - DNA, 15 bp, Homo sapiens
gtgagctccctcccc

SEQ ID NO: 1553192 - DNA, 15 bp, Homo sapiens
tgagctccctccccc

SEQ ID NO: 1553193 - DNA, 15 bp, Homo sapiens
gagctccctccccca

SEQ ID NO: 1553194 - DNA, 15 bp, Homo sapiens
agctccctcccccac

SEQ ID NO: 1553195 - DNA, 15 bp, Homo sapiens
gctccctcccccacc

SEQ ID NO: 1553196 - DNA, 15 bp, Homo sapiens
ctccctcccccaccg

SEQ ID NO: 1553197 - DNA, 15 bp, Homo sapiens
tccctcccccaccgt

SEQ ID NO: 1553198 - DNA, 15 bp, Homo sapiens
ccctcccccaccgtc

SEQ ID NO: 1553199 - DNA, 15 bp, Homo sapiens
cctcccccaccgtcc

SEQ ID NO: 1553200 - DNA, 15 bp, Homo sapiens
ctcccccaccgtccc

SEQ ID NO: 1553201 - DNA, 15 bp, Homo sapiens
tcccccaccgtcccc

SEQ ID NO: 1553202 - DNA, 15 bp, Homo sapiens
cccccaccgtcccct

SEQ ID NO: 1553203 - DNA, 15 bp, Homo sapiens
ccccaccgtcccctg

SEQ ID NO: 1553204 - DNA, 15 bp, Homo sapiens
cccaccgtcccctgt

SEQ ID NO: 1553205 - DNA, 15 bp, Homo sapiens
ccaccgtcccctgta

SEQ ID NO: 1553206 - DNA, 15 bp, Homo sapiens
caccgtcccctgtat

SEQ ID NO: 1553207 - DNA, 15 bp, Homo sapiens
accgtcccctgtatc

SEQ ID NO: 1553208 - DNA, 15 bp, Homo sapiens
ccgtcccctgtatcg

SEQ ID NO: 1553209 - DNA, 15 bp, Homo sapiens
cgtcccctgtatcga

SEQ ID NO: 1553210 - DNA, 15 bp, Homo sapiens
gtcccctgtatcgag

SEQ ID NO: 1553211 - DNA, 15 bp, Homo sapiens
tcccctgtatcgagg

SEQ ID NO: 1553212 - DNA, 15 bp, Homo sapiens
cccctgtatcgagga

SEQ ID NO: 1553213 - DNA, 15 bp, Homo sapiens
ccctgtatcgaggag

SEQ ID NO: 1553214 - DNA, 15 bp, Homo sapiens
cctgtatcgaggagg

SEQ ID NO: 1553215 - DNA, 15 bp, Homo sapiens
ctgtatcgaggaggc

SEQ ID NO: 1553216 - DNA, 15 bp, Homo sapiens
tgtatcgaggaggct

SEQ ID NO: 1553217 - DNA, 15 bp, Homo sapiens
gtatcgaggaggctg

SEQ ID NO: 1553218 - DNA, 15 bp, Homo sapiens
tatcgaggaggctga

SEQ ID NO: 1553219 - DNA, 15 bp, Homo sapiens
atcgaggaggctgag

SEQ ID NO: 1553220 - DNA, 15 bp, Homo sapiens
tcgaggaggctgagg

SEQ ID NO: 1553221 - DNA, 15 bp, Homo sapiens
cgaggaggctgaggt

SEQ ID NO: 1553222 - DNA, 15 bp, Homo sapiens
gaggaggctgaggtc

SEQ ID NO: 1553223 - DNA, 15 bp, Homo sapiens
aggaggctgaggtca

SEQ ID NO: 1553224 - DNA, 15 bp, Homo sapiens
ggaggctgaggtcaa

SEQ ID NO: 1553225 - DNA, 15 bp, Homo sapiens
gaggctgaggtcaag

SEQ ID NO: 1553226 - DNA, 15 bp, Homo sapiens
aggctgaggtcaagg

SEQ ID NO: 1553227 - DNA, 15 bp, Homo sapiens
ggctgaggtcaaggc

SEQ ID NO: 1553228 - DNA, 15 bp, Homo sapiens
gctgaggtcaaggcg

SEQ ID NO: 1553229 - DNA, 15 bp, Homo sapiens
ctgaggtcaaggcgc

SEQ ID NO: 1553230 - DNA, 15 bp, Homo sapiens
tgaggtcaaggcgct

SEQ ID NO: 1553231 - DNA, 15 bp, Homo sapiens
gaggtcaaggcgctg

SEQ ID NO: 1553232 - DNA, 15 bp, Homo sapiens
aggtcaaggcgctgc

SEQ ID NO: 1553233 - DNA, 15 bp, Homo sapiens
ggtcaaggcgctgct

SEQ ID NO: 1553234 - DNA, 15 bp, Homo sapiens
gtcaaggcgctgctt

SEQ ID NO: 1553235 - DNA, 15 bp, Homo sapiens
tcaaggcgctgcttc

SEQ ID NO: 1553236 - DNA, 15 bp, Homo sapiens
caaggcgctgcttcc

SEQ ID NO: 1553237 - DNA, 15 bp, Homo sapiens
aaggcgctgcttcct

SEQ ID NO: 1553238 - DNA, 15 bp, Homo sapiens
aggcgctgcttcctt

SEQ ID NO: 1553239 - DNA, 15 bp, Homo sapiens
ggcgctgcttccttt

SEQ ID NO: 1553240 - DNA, 15 bp, Homo sapiens
gcgctgcttcctttc

SEQ ID NO: 1553241 - DNA, 15 bp, Homo sapiens
cgctgcttcctttcc

SEQ ID NO: 1553242 - DNA, 15 bp, Homo sapiens
gctgcttcctttcct

SEQ ID NO: 1553243 - DNA, 15 bp, Homo sapiens
ctgcttcctttcctc

SEQ ID NO: 1553244 - DNA, 15 bp, Homo sapiens
tgcttcctttcctct

SEQ ID NO: 1553245 - DNA, 15 bp, Homo sapiens
gcttcctttcctctg

SEQ ID NO: 1553246 - DNA, 15 bp, Homo sapiens
cttcctttcctctga

SEQ ID NO: 1553247 - DNA, 15 bp, Homo sapiens
ttcctttcctctgag

SEQ ID NO: 1553248 - DNA, 15 bp, Homo sapiens
tcctttcctctgaga

SEQ ID NO: 1553249 - DNA, 15 bp, Homo sapiens
cctttcctctgagac

SEQ ID NO: 1553250 - DNA, 15 bp, Homo sapiens
ctttcctctgagaca

SEQ ID NO: 1553251 - DNA, 15 bp, Homo sapiens
tttcctctgagacac

SEQ ID NO: 1553252 - DNA, 15 bp, Homo sapiens
ttcctctgagacaca

SEQ ID NO: 1553253 - DNA, 15 bp, Homo sapiens
tcctctgagacacag

SEQ ID NO: 1553254 - DNA, 15 bp, Homo sapiens
cctctgagacacagc

SEQ ID NO: 1553255 - DNA, 15 bp, Homo sapiens
ctctgagacacagcc

SEQ ID NO: 1553256 - DNA, 15 bp, Homo sapiens
tctgagacacagccc

SEQ ID NO: 1553257 - DNA, 15 bp, Homo sapiens
ctgagacacagccct

SEQ ID NO: 1553258 - DNA, 15 bp, Homo sapiens
tgagacacagccctc

SEQ ID NO: 1553259 - DNA, 15 bp, Homo sapiens
gagacacagccctcc

SEQ ID NO: 1553260 - DNA, 15 bp, Homo sapiens
agacacagccctccc

SEQ ID NO: 1553261 - DNA, 15 bp, Homo sapiens
gacacagccctcccc

SEQ ID NO: 1553262 - DNA, 15 bp, Homo sapiens
acacagccctcccca

SEQ ID NO: 1553263 - DNA, 15 bp, Homo sapiens
cacagccctccccac

SEQ ID NO: 1553264 - DNA, 15 bp, Homo sapiens
acagccctccccacc

SEQ ID NO: 1553265 - DNA, 15 bp, Homo sapiens
cagccctccccaccc

SEQ ID NO: 1553266 - DNA, 15 bp, Homo sapiens
agccctccccaccca

SEQ ID NO: 1553267 - DNA, 15 bp, Homo sapiens
gccctccccacccag

SEQ ID NO: 1553268 - DNA, 15 bp, Homo sapiens
ccctccccacccaga

SEQ ID NO: 1553269 - DNA, 15 bp, Homo sapiens
cctccccacccagaa

SEQ ID NO: 1553270 - DNA, 15 bp, Homo sapiens
ctccccacccagaat

SEQ ID NO: 1553271 - DNA, 15 bp, Homo sapiens
tccccacccagaatg

SEQ ID NO: 1553272 - DNA, 15 bp, Homo sapiens
ccccacccagaatgt

SEQ ID NO: 1553273 - DNA, 15 bp, Homo sapiens
cccacccagaatgtc

SEQ ID NO: 1553274 - DNA, 15 bp, Homo sapiens
ccacccagaatgtct

SEQ ID NO: 1553275 - DNA, 15 bp, Homo sapiens
cacccagaatgtctt

SEQ ID NO: 1553276 - DNA, 15 bp, Homo sapiens
acccagaatgtcttt

SEQ ID NO: 1553277 - DNA, 15 bp, Homo sapiens
cccagaatgtcttta

SEQ ID NO: 1553278 - DNA, 15 bp, Homo sapiens
ccagaatgtctttag

SEQ ID NO: 1553279 - DNA, 15 bp, Homo sapiens
cagaatgtctttagg

SEQ ID NO: 1553280 - DNA, 15 bp, Homo sapiens
agaatgtctttaggc

SEQ ID NO: 1553281 - DNA, 15 bp, Homo sapiens
gaatgtctttaggcc

SEQ ID NO: 1553282 - DNA, 15 bp, Homo sapiens
aatgtctttaggcct

SEQ ID NO: 1553283 - DNA, 15 bp, Homo sapiens
atgtctttaggcctc

SEQ ID NO: 1553284 - DNA, 15 bp, Homo sapiens
tgtctttaggcctcc

SEQ ID NO: 1553285 - DNA, 15 bp, Homo sapiens
gtctttaggcctcct

SEQ ID NO: 1553286 - DNA, 15 bp, Homo sapiens
tctttaggcctccta

SEQ ID NO: 1553287 - DNA, 15 bp, Homo sapiens
ctttaggcctcctag

SEQ ID NO: 1553288 - DNA, 15 bp, Homo sapiens
tttaggcctcctagt

SEQ ID NO: 1553289 - DNA, 15 bp, Homo sapiens
ttaggcctcctagtg

SEQ ID NO: 1553290 - DNA, 15 bp, Homo sapiens
taggcctcctagtga

SEQ ID NO: 1553291 - DNA, 15 bp, Homo sapiens
aggcctcctagtgag

SEQ ID NO: 1553292 - DNA, 15 bp, Homo sapiens
ggcctcctagtgagt

SEQ ID NO: 1553293 - DNA, 15 bp, Homo sapiens
gcctcctagtgagtg

SEQ ID NO: 1553294 - DNA, 15 bp, Homo sapiens
cctcctagtgagtgg

SEQ ID NO: 1553295 - DNA, 15 bp, Homo sapiens
ctcctagtgagtggt

SEQ ID NO: 1553296 - DNA, 15 bp, Homo sapiens
tcctagtgagtggtc

SEQ ID NO: 1553297 - DNA, 15 bp, Homo sapiens
cctagtgagtggtcc

SEQ ID NO: 1553298 - DNA, 15 bp, Homo sapiens
ctagtgagtggtccg

SEQ ID NO: 1553299 - DNA, 15 bp, Homo sapiens
tagtgagtggtccgc

SEQ ID NO: 1553300 - DNA, 15 bp, Homo sapiens
agtgagtggtccgcc

SEQ ID NO: 1553301 - DNA, 15 bp, Homo sapiens
gtgagtggtccgcct

SEQ ID NO: 1553302 - DNA, 15 bp, Homo sapiens
tgagtggtccgcctg

SEQ ID NO: 1553303 - DNA, 15 bp, Homo sapiens
gagtggtccgcctgc

SEQ ID NO: 1553304 - DNA, 15 bp, Homo sapiens
agtggtccgcctgcc

SEQ ID NO: 1553305 - DNA, 15 bp, Homo sapiens
gtggtccgcctgcct

SEQ ID NO: 1553306 - DNA, 15 bp, Homo sapiens
tggtccgcctgcctt

SEQ ID NO: 1553307 - DNA, 15 bp, Homo sapiens
ggtccgcctgccttt

SEQ ID NO: 1553308 - DNA, 15 bp, Homo sapiens
gtccgcctgcctttc

SEQ ID NO: 1553309 - DNA, 15 bp, Homo sapiens
tccgcctgcctttcc

SEQ ID NO: 1553310 - DNA, 15 bp, Homo sapiens
ccgcctgcctttcct

SEQ ID NO: 1553311 - DNA, 15 bp, Homo sapiens
cgcctgcctttcctg

SEQ ID NO: 1553312 - DNA, 15 bp, Homo sapiens
gcctgcctttcctgg

SEQ ID NO: 1553313 - DNA, 15 bp, Homo sapiens
cctgcctttcctggg

SEQ ID NO: 1553314 - DNA, 15 bp, Homo sapiens
ctgcctttcctgggg

SEQ ID NO: 1553315 - DNA, 15 bp, Homo sapiens
tgcctttcctggggt

SEQ ID NO: 1553316 - DNA, 15 bp, Homo sapiens
gcctttcctggggtg

SEQ ID NO: 1553317 - DNA, 15 bp, Homo sapiens
cctttcctggggtga

SEQ ID NO: 1553318 - DNA, 15 bp, Homo sapiens
ctttcctggggtgag

SEQ ID NO: 1553319 - DNA, 15 bp, Homo sapiens
tttcctggggtgagg

SEQ ID NO: 1553320 - DNA, 15 bp, Homo sapiens
ttcctggggtgaggg

SEQ ID NO: 1553321 - DNA, 15 bp, Homo sapiens
tcctggggtgagggg

SEQ ID NO: 1553322 - DNA, 15 bp, Homo sapiens
cctggggtgagggga

SEQ ID NO: 1553323 - DNA, 15 bp, Homo sapiens
ctggggtgaggggag

SEQ ID NO: 1553324 - DNA, 15 bp, Homo sapiens
tggggtgaggggagc

SEQ ID NO: 1553325 - DNA, 15 bp, Homo sapiens
ggggtgaggggagca

SEQ ID NO: 1553326 - DNA, 15 bp, Homo sapiens
gggtgaggggagcag

SEQ ID NO: 1553327 - DNA, 15 bp, Homo sapiens
ggtgaggggagcagt

SEQ ID NO: 1553328 - DNA, 15 bp, Homo sapiens
gtgaggggagcagtc

SEQ ID NO: 1553329 - DNA, 15 bp, Homo sapiens
tgaggggagcagtca

SEQ ID NO: 1553330 - DNA, 15 bp, Homo sapiens
gaggggagcagtcag

SEQ ID NO: 1553331 - DNA, 15 bp, Homo sapiens
aggggagcagtcagt

SEQ ID NO: 1553332 - DNA, 15 bp, Homo sapiens
ggggagcagtcagta

SEQ ID NO: 1553333 - DNA, 15 bp, Homo sapiens
gggagcagtcagtag

SEQ ID NO: 1553334 - DNA, 15 bp, Homo sapiens
ggagcagtcagtagt

SEQ ID NO: 1553335 - DNA, 15 bp, Homo sapiens
gagcagtcagtagtg

SEQ ID NO: 1553336 - DNA, 15 bp, Homo sapiens
agcagtcagtagtga

SEQ ID NO: 1553337 - DNA, 15 bp, Homo sapiens
gcagtcagtagtgat

SEQ ID NO: 1553338 - DNA, 15 bp, Homo sapiens
cagtcagtagtgata

SEQ ID NO: 1553339 - DNA, 15 bp, Homo sapiens
agtcagtagtgataa

SEQ ID NO: 1553340 - DNA, 15 bp, Homo sapiens
gtcagtagtgataag

SEQ ID NO: 1553341 - DNA, 15 bp, Homo sapiens
tcagtagtgataagt

SEQ ID NO: 1553342 - DNA, 15 bp, Homo sapiens
cagtagtgataagtt

SEQ ID NO: 1553343 - DNA, 15 bp, Homo sapiens
agtagtgataagttt

SEQ ID NO: 1553344 - DNA, 15 bp, Homo sapiens
gtagtgataagtttc

SEQ ID NO: 1553345 - DNA, 15 bp, Homo sapiens
tagtgataagtttca

SEQ ID NO: 1553346 - DNA, 15 bp, Homo sapiens
agtgataagtttcat

SEQ ID NO: 1553347 - DNA, 15 bp, Homo sapiens
gtgataagtttcatg

SEQ ID NO: 1553348 - DNA, 15 bp, Homo sapiens
tgataagtttcatga

SEQ ID NO: 1553349 - DNA, 15 bp, Homo sapiens
gataagtttcatgat

SEQ ID NO: 1553350 - DNA, 15 bp, Homo sapiens
ataagtttcatgatg

SEQ ID NO: 1553351 - DNA, 15 bp, Homo sapiens
taagtttcatgatgg

SEQ ID NO: 1553352 - DNA, 15 bp, Homo sapiens
aagtttcatgatggc

SEQ ID NO: 1553353 - DNA, 15 bp, Homo sapiens
agtttcatgatggcc

SEQ ID NO: 1553354 - DNA, 15 bp, Homo sapiens
gtttcatgatggcct

SEQ ID NO: 1553355 - DNA, 15 bp, Homo sapiens
tttcatgatggcctg

SEQ ID NO: 1553356 - DNA, 15 bp, Homo sapiens
ttcatgatggcctga

SEQ ID NO: 1553357 - DNA, 15 bp, Homo sapiens
tcatgatggcctgag

SEQ ID NO: 1553358 - DNA, 15 bp, Homo sapiens
catgatggcctgagg

SEQ ID NO: 1553359 - DNA, 15 bp, Homo sapiens
atgatggcctgaggt

SEQ ID NO: 1553360 - DNA, 15 bp, Homo sapiens
tgatggcctgaggta

SEQ ID NO: 1553361 - DNA, 15 bp, Homo sapiens
gatggcctgaggtac

SEQ ID NO: 1553362 - DNA, 15 bp, Homo sapiens
atggcctgaggtacc

SEQ ID NO: 1553363 - DNA, 15 bp, Homo sapiens
tggcctgaggtacca

SEQ ID NO: 1553364 - DNA, 15 bp, Homo sapiens
ggcctgaggtaccac

SEQ ID NO: 1553365 - DNA, 15 bp, Homo sapiens
gcctgaggtaccacc

SEQ ID NO: 1553366 - DNA, 15 bp, Homo sapiens
cctgaggtaccacct

SEQ ID NO: 1553367 - DNA, 15 bp, Homo sapiens
ctgaggtaccacctg

SEQ ID NO: 1553368 - DNA, 15 bp, Homo sapiens
tgaggtaccacctgg

SEQ ID NO: 1553369 - DNA, 15 bp, Homo sapiens
gaggtaccacctggg

SEQ ID NO: 1553370 - DNA, 15 bp, Homo sapiens
aggtaccacctgggt

SEQ ID NO: 1553371 - DNA, 15 bp, Homo sapiens
ggtaccacctgggtc

SEQ ID NO: 1553372 - DNA, 15 bp, Homo sapiens
gtaccacctgggtct

SEQ ID NO: 1553373 - DNA, 15 bp, Homo sapiens
taccacctgggtctg

SEQ ID NO: 1553374 - DNA, 15 bp, Homo sapiens
accacctgggtctgg

SEQ ID NO: 1553375 - DNA, 15 bp, Homo sapiens
ccacctgggtctggg

SEQ ID NO: 1553376 - DNA, 15 bp, Homo sapiens
cacctgggtctgggc

SEQ ID NO: 1553377 - DNA, 15 bp, Homo sapiens
acctgggtctgggcg

SEQ ID NO: 1553378 - DNA, 15 bp, Homo sapiens
cctgggtctgggcgt

SEQ ID NO: 1553379 - DNA, 15 bp, Homo sapiens
ctgggtctgggcgtg

SEQ ID NO: 1553380 - DNA, 15 bp, Homo sapiens
tgggtctgggcgtga

SEQ ID NO: 1553381 - DNA, 15 bp, Homo sapiens
gggtctgggcgtgag

SEQ ID NO: 1553382 - DNA, 15 bp, Homo sapiens
ggtctgggcgtgagg

SEQ ID NO: 1553383 - DNA, 15 bp, Homo sapiens
gtctgggcgtgaggc

SEQ ID NO: 1553384 - DNA, 15 bp, Homo sapiens
tctgggcgtgaggcc

SEQ ID NO: 1553385 - DNA, 15 bp, Homo sapiens
ctgggcgtgaggcca

SEQ ID NO: 1553386 - DNA, 15 bp, Homo sapiens
tgggcgtgaggccag

SEQ ID NO: 1553387 - DNA, 15 bp, Homo sapiens
gggcgtgaggccagt

SEQ ID NO: 1553388 - DNA, 15 bp, Homo sapiens
ggcgtgaggccagtg

SEQ ID NO: 1553389 - DNA, 15 bp, Homo sapiens
gcgtgaggccagtgc

SEQ ID NO: 1553390 - DNA, 15 bp, Homo sapiens
cgtgaggccagtgct

SEQ ID NO: 1553391 - DNA, 15 bp, Homo sapiens
gtgaggccagtgctg

SEQ ID NO: 1553392 - DNA, 15 bp, Homo sapiens
tgaggccagtgctgg

SEQ ID NO: 1553393 - DNA, 15 bp, Homo sapiens
gaggccagtgctggc

SEQ ID NO: 1553394 - DNA, 15 bp, Homo sapiens
aggccagtgctggcc

SEQ ID NO: 1553395 - DNA, 15 bp, Homo sapiens
ggccagtgctggcca

SEQ ID NO: 1553396 - DNA, 15 bp, Homo sapiens
gccagtgctggccag

SEQ ID NO: 1553397 - DNA, 15 bp, Homo sapiens
ccagtgctggccagt

SEQ ID NO: 1553398 - DNA, 15 bp, Homo sapiens
cagtgctggccagtg

SEQ ID NO: 1553399 - DNA, 15 bp, Homo sapiens
agtgctggccagtgt

SEQ ID NO: 1553400 - DNA, 15 bp, Homo sapiens
gtgctggccagtgtg

SEQ ID NO: 1553401 - DNA, 15 bp, Homo sapiens
tgctggccagtgtgt

SEQ ID NO: 1553402 - DNA, 15 bp, Homo sapiens
gctggccagtgtgtg

SEQ ID NO: 1553403 - DNA, 15 bp, Homo sapiens
ctggccagtgtgtgg

SEQ ID NO: 1553404 - DNA, 15 bp, Homo sapiens
tggccagtgtgtggg

SEQ ID NO: 1553405 - DNA, 15 bp, Homo sapiens
ggccagtgtgtgggg

SEQ ID NO: 1553406 - DNA, 15 bp, Homo sapiens
gccagtgtgtgggga

SEQ ID NO: 1553407 - DNA, 15 bp, Homo sapiens
ccagtgtgtggggaa

SEQ ID NO: 1553408 - DNA, 15 bp, Homo sapiens
cagtgtgtggggaag

SEQ ID NO: 1553409 - DNA, 15 bp, Homo sapiens
agtgtgtggggaagg

SEQ ID NO: 1553410 - DNA, 15 bp, Homo sapiens
gtgtgtggggaaggg

SEQ ID NO: 1553411 - DNA, 15 bp, Homo sapiens
tgtgtggggaaggga

SEQ ID NO: 1553412 - DNA, 15 bp, Homo sapiens
gtgtggggaagggaa

SEQ ID NO: 1553413 - DNA, 15 bp, Homo sapiens
tgtggggaagggaaa

SEQ ID NO: 1553414 - DNA, 15 bp, Homo sapiens
gtggggaagggaaag

SEQ ID NO: 1553415 - DNA, 15 bp, Homo sapiens
tggggaagggaaagt

SEQ ID NO: 1553416 - DNA, 15 bp, Homo sapiens
ggggaagggaaagta

SEQ ID NO: 1553417 - DNA, 15 bp, Homo sapiens
gggaagggaaagtaa

SEQ ID NO: 1553418 - DNA, 15 bp, Homo sapiens
ggaagggaaagtaag

SEQ ID NO: 1553419 - DNA, 15 bp, Homo sapiens
gaagggaaagtaagt

SEQ ID NO: 1553420 - DNA, 15 bp, Homo sapiens
aagggaaagtaagtg

SEQ ID NO: 1553421 - DNA, 15 bp, Homo sapiens
agggaaagtaagtgt

SEQ ID NO: 1553422 - DNA, 15 bp, Homo sapiens
gggaaagtaagtgtc

SEQ ID NO: 1553423 - DNA, 15 bp, Homo sapiens
ggaaagtaagtgtct

SEQ ID NO: 1553424 - DNA, 15 bp, Homo sapiens
gaaagtaagtgtctg

SEQ ID NO: 1553425 - DNA, 15 bp, Homo sapiens
aaagtaagtgtctga

SEQ ID NO: 1553426 - DNA, 15 bp, Homo sapiens
aagtaagtgtctgaa

SEQ ID NO: 1553427 - DNA, 15 bp, Homo sapiens
agtaagtgtctgaag

SEQ ID NO: 1553428 - DNA, 15 bp, Homo sapiens
gtaagtgtctgaaga

SEQ ID NO: 1553429 - DNA, 15 bp, Homo sapiens
taagtgtctgaagag

SEQ ID NO: 1553430 - DNA, 15 bp, Homo sapiens
aagtgtctgaagaga

SEQ ID NO: 1553431 - DNA, 15 bp, Homo sapiens
agtgtctgaagagaa

SEQ ID NO: 1553432 - DNA, 15 bp, Homo sapiens
gtgtctgaagagaaa

SEQ ID NO: 1553433 - DNA, 15 bp, Homo sapiens
tgtctgaagagaaat

SEQ ID NO: 1553434 - DNA, 15 bp, Homo sapiens
gtctgaagagaaatg

SEQ ID NO: 1553435 - DNA, 15 bp, Homo sapiens
tctgaagagaaatgc

SEQ ID NO: 1553436 - DNA, 15 bp, Homo sapiens
ctgaagagaaatgcg

SEQ ID NO: 1553437 - DNA, 15 bp, Homo sapiens
tgaagagaaatgcga

SEQ ID NO: 1553438 - DNA, 15 bp, Homo sapiens
gaagagaaatgcgac

SEQ ID NO: 1553439 - DNA, 15 bp, Homo sapiens
aagagaaatgcgacc

SEQ ID NO: 1553440 - DNA, 15 bp, Homo sapiens
agagaaatgcgaccc

SEQ ID NO: 1553441 - DNA, 15 bp, Homo sapiens
gagaaatgcgacccc

SEQ ID NO: 1553442 - DNA, 15 bp, Homo sapiens
agaaatgcgacccct

SEQ ID NO: 1553443 - DNA, 15 bp, Homo sapiens
gaaatgcgacccctt

SEQ ID NO: 1553444 - DNA, 15 bp, Homo sapiens
aaatgcgaccccttc

SEQ ID NO: 1553445 - DNA, 15 bp, Homo sapiens
aatgcgaccccttcc

SEQ ID NO: 1553446 - DNA, 15 bp, Homo sapiens
atgcgaccccttcca

SEQ ID NO: 1553447 - DNA, 15 bp, Homo sapiens
tgcgaccccttccaa

SEQ ID NO: 1553448 - DNA, 15 bp, Homo sapiens
gcgaccccttccaat

SEQ ID NO: 1553449 - DNA, 15 bp, Homo sapiens
cgaccccttccaatt

SEQ ID NO: 1553450 - DNA, 15 bp, Homo sapiens
gaccccttccaattc

SEQ ID NO: 1553451 - DNA, 15 bp, Homo sapiens
accccttccaattca

SEQ ID NO: 1553452 - DNA, 15 bp, Homo sapiens
ccccttccaattcag

SEQ ID NO: 1553453 - DNA, 15 bp, Homo sapiens
cccttccaattcagt

SEQ ID NO: 1553454 - DNA, 15 bp, Homo sapiens
ccttccaattcagta

SEQ ID NO: 1553455 - DNA, 15 bp, Homo sapiens
cttccaattcagtag

SEQ ID NO: 1553456 - DNA, 15 bp, Homo sapiens
ttccaattcagtagt

SEQ ID NO: 1553457 - DNA, 15 bp, Homo sapiens
tccaattcagtagtc

SEQ ID NO: 1553458 - DNA, 15 bp, Homo sapiens
ccaattcagtagtca

SEQ ID NO: 1553459 - DNA, 15 bp, Homo sapiens
caattcagtagtcag

SEQ ID NO: 1553460 - DNA, 15 bp, Homo sapiens
aattcagtagtcagg

SEQ ID NO: 1553461 - DNA, 15 bp, Homo sapiens
attcagtagtcagga

SEQ ID NO: 1553462 - DNA, 15 bp, Homo sapiens
ttcagtagtcaggaa

SEQ ID NO: 1553463 - DNA, 15 bp, Homo sapiens
tcagtagtcaggaaa

SEQ ID NO: 1553464 - DNA, 15 bp, Homo sapiens
gtagtcaggaaaaga

SEQ ID NO: 1553465 - DNA, 15 bp, Homo sapiens
tagtcaggaaaagag

SEQ ID NO: 1553466 - DNA, 15 bp, Homo sapiens
agtcaggaaaagagc

SEQ ID NO: 1553467 - DNA, 15 bp, Homo sapiens
gtcaggaaaagagct

SEQ ID NO: 1553468 - DNA, 15 bp, Homo sapiens
tcaggaaaagagctg

SEQ ID NO: 1553469 - DNA, 15 bp, Homo sapiens
caggaaaagagctgg

SEQ ID NO: 1553470 - DNA, 15 bp, Homo sapiens
aggaaaagagctggg

SEQ ID NO: 1553471 - DNA, 15 bp, Homo sapiens
ggaaaagagctgggt

SEQ ID NO: 1553472 - DNA, 15 bp, Homo sapiens
gaaaagagctgggtg

SEQ ID NO: 1553473 - DNA, 15 bp, Homo sapiens
aaaagagctgggtgg

SEQ ID NO: 1553474 - DNA, 15 bp, Homo sapiens
aaagagctgggtggg

SEQ ID NO: 1553475 - DNA, 15 bp, Homo sapiens
aagagctgggtgggg

SEQ ID NO: 1553476 - DNA, 15 bp, Homo sapiens
agagctgggtgggga

SEQ ID NO: 1553477 - DNA, 15 bp, Homo sapiens
gagctgggtggggac

SEQ ID NO: 1553478 - DNA, 15 bp, Homo sapiens
agctgggtggggaca

SEQ ID NO: 1553479 - DNA, 15 bp, Homo sapiens
gctgggtggggacag

SEQ ID NO: 1553480 - DNA, 15 bp, Homo sapiens
ctgggtggggacaga

SEQ ID NO: 1553481 - DNA, 15 bp, Homo sapiens
tgggtggggacagac

SEQ ID NO: 1553482 - DNA, 15 bp, Homo sapiens
gggtggggacagact

SEQ ID NO: 1553483 - DNA, 15 bp, Homo sapiens
ggtggggacagactc

SEQ ID NO: 1553484 - DNA, 15 bp, Homo sapiens
gtggggacagactct

SEQ ID NO: 1553485 - DNA, 15 bp, Homo sapiens
tggggacagactctt

SEQ ID NO: 1553486 - DNA, 15 bp, Homo sapiens
ggggacagactcttg

SEQ ID NO: 1553487 - DNA, 15 bp, Homo sapiens
gggacagactcttgc

SEQ ID NO: 1553488 - DNA, 15 bp, Homo sapiens
ggacagactcttgcg

SEQ ID NO: 1553489 - DNA, 15 bp, Homo sapiens
gacagactcttgcgg

SEQ ID NO: 1553490 - DNA, 15 bp, Homo sapiens
acagactcttgcggg

SEQ ID NO: 1553491 - DNA, 15 bp, Homo sapiens
cagactcttgcgggg

SEQ ID NO: 1553492 - DNA, 15 bp, Homo sapiens
agactcttgcgggga

SEQ ID NO: 1553493 - DNA, 15 bp, Homo sapiens
gactcttgcggggag

SEQ ID NO: 1553494 - DNA, 15 bp, Homo sapiens
actcttgcggggagg

SEQ ID NO: 1553495 - DNA, 15 bp, Homo sapiens
ctcttgcggggaggg

SEQ ID NO: 1553496 - DNA, 15 bp, Homo sapiens
tcttgcggggaggga

SEQ ID NO: 1553497 - DNA, 15 bp, Homo sapiens
cttgcggggagggaa

SEQ ID NO: 1553498 - DNA, 15 bp, Homo sapiens
ttgcggggagggaag

SEQ ID NO: 1553499 - DNA, 15 bp, Homo sapiens
tgcggggagggaagc

SEQ ID NO: 1553500 - DNA, 15 bp, Homo sapiens
gcggggagggaagct

SEQ ID NO: 1553501 - DNA, 15 bp, Homo sapiens
cggggagggaagcta

SEQ ID NO: 1553502 - DNA, 15 bp, Homo sapiens
ggggagggaagctac

SEQ ID NO: 1553503 - DNA, 15 bp, Homo sapiens
gggagggaagctacc

SEQ ID NO: 1553504 - DNA, 15 bp, Homo sapiens
ggagggaagctaccc

SEQ ID NO: 1553505 - DNA, 15 bp, Homo sapiens
gagggaagctaccca

SEQ ID NO: 1553506 - DNA, 15 bp, Homo sapiens
agggaagctacccag

SEQ ID NO: 1553507 - DNA, 15 bp, Homo sapiens
gggaagctacccagg

SEQ ID NO: 1553508 - DNA, 15 bp, Homo sapiens
ggaagctacccaggg

SEQ ID NO: 1553509 - DNA, 15 bp, Homo sapiens
gaagctacccagggt

SEQ ID NO: 1553510 - DNA, 15 bp, Homo sapiens
aagctacccagggtg

SEQ ID NO: 1553511 - DNA, 15 bp, Homo sapiens
agctacccagggtgt

SEQ ID NO: 1553512 - DNA, 15 bp, Homo sapiens
gctacccagggtgtc

SEQ ID NO: 1553513 - DNA, 15 bp, Homo sapiens
ctacccagggtgtct

SEQ ID NO: 1553514 - DNA, 15 bp, Homo sapiens
tacccagggtgtctg

SEQ ID NO: 1553515 - DNA, 15 bp, Homo sapiens
acccagggtgtctgc

SEQ ID NO: 1553516 - DNA, 15 bp, Homo sapiens
cccagggtgtctgct

SEQ ID NO: 1553517 - DNA, 15 bp, Homo sapiens
ccagggtgtctgctg

SEQ ID NO: 1553518 - DNA, 15 bp, Homo sapiens
cagggtgtctgctgt

SEQ ID NO: 1553519 - DNA, 15 bp, Homo sapiens
agggtgtctgctgtg

SEQ ID NO: 1553520 - DNA, 15 bp, Homo sapiens
gggtgtctgctgtgt

SEQ ID NO: 1553521 - DNA, 15 bp, Homo sapiens
ggtgtctgctgtgtg

SEQ ID NO: 1553522 - DNA, 15 bp, Homo sapiens
gtgtctgctgtgtgt

SEQ ID NO: 1553523 - DNA, 15 bp, Homo sapiens
tgtctgctgtgtgta

SEQ ID NO: 1553524 - DNA, 15 bp, Homo sapiens
gtctgctgtgtgtat

SEQ ID NO: 1553525 - DNA, 15 bp, Homo sapiens
tctgctgtgtgtata

SEQ ID NO: 1553526 - DNA, 15 bp, Homo sapiens
ctgctgtgtgtatac

SEQ ID NO: 1553527 - DNA, 15 bp, Homo sapiens
tgctgtgtgtataca

SEQ ID NO: 1553528 - DNA, 15 bp, Homo sapiens
gctgtgtgtatacat

SEQ ID NO: 1553529 - DNA, 15 bp, Homo sapiens
ctgtgtgtatacatg

SEQ ID NO: 1553530 - DNA, 15 bp, Homo sapiens
tgtgtgtatacatgt

SEQ ID NO: 1553531 - DNA, 15 bp, Homo sapiens
gtgtgtatacatgta

SEQ ID NO: 1553532 - DNA, 15 bp, Homo sapiens
tgtgtatacatgtat

SEQ ID NO: 1553533 - DNA, 15 bp, Homo sapiens
gtgtatacatgtatg

SEQ ID NO: 1553534 - DNA, 15 bp, Homo sapiens
tgtatacatgtatgt

SEQ ID NO: 1553535 - DNA, 15 bp, Homo sapiens
gtatacatgtatgta

SEQ ID NO: 1553536 - DNA, 15 bp, Homo sapiens
tatacatgtatgtat

SEQ ID NO: 1553537 - DNA, 15 bp, Homo sapiens
atacatgtatgtatg

SEQ ID NO: 1553538 - DNA, 15 bp, Homo sapiens
acatgtatgtatgat

SEQ ID NO: 1553539 - DNA, 15 bp, Homo sapiens
catgtatgtatgata

SEQ ID NO: 1553540 - DNA, 15 bp, Homo sapiens
atgtatgtatgatat

SEQ ID NO: 1553541 - DNA, 15 bp, Homo sapiens
tgtatgtatgatatg

SEQ ID NO: 1553542 - DNA, 15 bp, Homo sapiens
gtatgtatgatatgt

SEQ ID NO: 1553543 - DNA, 15 bp, Homo sapiens
tatgtatgatatgtg

SEQ ID NO: 1553544 - DNA, 15 bp, Homo sapiens
atgtatgatatgtgt

SEQ ID NO: 1553545 - DNA, 15 bp, Homo sapiens
tgtatgatatgtgta

SEQ ID NO: 1553546 - DNA, 15 bp, Homo sapiens
gtatgatatgtgtat

SEQ ID NO: 1553547 - DNA, 15 bp, Homo sapiens
tatgatatgtgtatg

SEQ ID NO: 1553548 - DNA, 15 bp, Homo sapiens
atgatatgtgtatgc

SEQ ID NO: 1553549 - DNA, 15 bp, Homo sapiens
tgatatgtgtatgca

SEQ ID NO: 1553550 - DNA, 15 bp, Homo sapiens
gatatgtgtatgcag

SEQ ID NO: 1553551 - DNA, 15 bp, Homo sapiens
atatgtgtatgcagg

SEQ ID NO: 1553552 - DNA, 15 bp, Homo sapiens
tatgtgtatgcaggt

SEQ ID NO: 1553553 - DNA, 15 bp, Homo sapiens
atgtgtatgcaggtg

SEQ ID NO: 1553554 - DNA, 15 bp, Homo sapiens
tgtgtatgcaggtgg

SEQ ID NO: 1553555 - DNA, 15 bp, Homo sapiens
gtgtatgcaggtggc

SEQ ID NO: 1553556 - DNA, 15 bp, Homo sapiens
tgtatgcaggtggcc

SEQ ID NO: 1553557 - DNA, 15 bp, Homo sapiens
gtatgcaggtggccc

SEQ ID NO: 1553558 - DNA, 15 bp, Homo sapiens
tatgcaggtggccca

SEQ ID NO: 1553559 - DNA, 15 bp, Homo sapiens
atgcaggtggcccat

SEQ ID NO: 1553560 - DNA, 15 bp, Homo sapiens
tgcaggtggcccata

SEQ ID NO: 1553561 - DNA, 15 bp, Homo sapiens
gcaggtggcccatac

SEQ ID NO: 1553562 - DNA, 15 bp, Homo sapiens
caggtggcccatacc

SEQ ID NO: 1553563 - DNA, 15 bp, Homo sapiens
aggtggcccatacct

SEQ ID NO: 1553564 - DNA, 15 bp, Homo sapiens
ggtggcccatacctg

SEQ ID NO: 1553565 - DNA, 15 bp, Homo sapiens
gtggcccatacctgg

SEQ ID NO: 1553566 - DNA, 15 bp, Homo sapiens
tggcccatacctggc

SEQ ID NO: 1553567 - DNA, 15 bp, Homo sapiens
ggcccatacctggca

SEQ ID NO: 1553568 - DNA, 15 bp, Homo sapiens
gcccatacctggcag

SEQ ID NO: 1553569 - DNA, 15 bp, Homo sapiens
cccatacctggcagt

SEQ ID NO: 1553570 - DNA, 15 bp, Homo sapiens
ccatacctggcagtg

SEQ ID NO: 1553571 - DNA, 15 bp, Homo sapiens
catacctggcagtga

SEQ ID NO: 1553572 - DNA, 15 bp, Homo sapiens
atacctggcagtgac

SEQ ID NO: 1553573 - DNA, 15 bp, Homo sapiens
tacctggcagtgaca

SEQ ID NO: 1553574 - DNA, 15 bp, Homo sapiens
acctggcagtgacat

SEQ ID NO: 1553575 - DNA, 15 bp, Homo sapiens
cctggcagtgacatt

SEQ ID NO: 1553576 - DNA, 15 bp, Homo sapiens
ctggcagtgacattt

SEQ ID NO: 1553577 - DNA, 15 bp, Homo sapiens
tggcagtgacattta

SEQ ID NO: 1553578 - DNA, 15 bp, Homo sapiens
ggcagtgacatttag

SEQ ID NO: 1553579 - DNA, 15 bp, Homo sapiens
gcagtgacatttagc

SEQ ID NO: 1553580 - DNA, 15 bp, Homo sapiens
cagtgacatttagct

SEQ ID NO: 1553581 - DNA, 15 bp, Homo sapiens
agtgacatttagcta

SEQ ID NO: 1553582 - DNA, 15 bp, Homo sapiens
gtgacatttagctac

SEQ ID NO: 1553583 - DNA, 15 bp, Homo sapiens
tgacatttagctact

SEQ ID NO: 1553584 - DNA, 15 bp, Homo sapiens
gacatttagctactt

SEQ ID NO: 1553585 - DNA, 15 bp, Homo sapiens
acatttagctacttc

SEQ ID NO: 1553586 - DNA, 15 bp, Homo sapiens
catttagctacttcc

SEQ ID NO: 1553587 - DNA, 15 bp, Homo sapiens
atttagctacttcct

SEQ ID NO: 1553588 - DNA, 15 bp, Homo sapiens
tttagctacttcctc

SEQ ID NO: 1553589 - DNA, 15 bp, Homo sapiens
ttagctacttcctca

SEQ ID NO: 1553590 - DNA, 15 bp, Homo sapiens
tagctacttcctcac

SEQ ID NO: 1553591 - DNA, 15 bp, Homo sapiens
agctacttcctcact

SEQ ID NO: 1553592 - DNA, 15 bp, Homo sapiens
gctacttcctcactc

SEQ ID NO: 1553593 - DNA, 15 bp, Homo sapiens
ctacttcctcactct

SEQ ID NO: 1553594 - DNA, 15 bp, Homo sapiens
tacttcctcactctt

SEQ ID NO: 1553595 - DNA, 15 bp, Homo sapiens
acttcctcactcttt

SEQ ID NO: 1553596 - DNA, 15 bp, Homo sapiens
cttcctcactcttta

SEQ ID NO: 1553597 - DNA, 15 bp, Homo sapiens
ttcctcactctttag

SEQ ID NO: 1553598 - DNA, 15 bp, Homo sapiens
tcctcactctttaga

SEQ ID NO: 1553599 - DNA, 15 bp, Homo sapiens
cctcactctttagag

SEQ ID NO: 1553600 - DNA, 15 bp, Homo sapiens
ctcactctttagagg

SEQ ID NO: 1553601 - DNA, 15 bp, Homo sapiens
tcactctttagaggt

SEQ ID NO: 1553602 - DNA, 15 bp, Homo sapiens
cactctttagaggtt

SEQ ID NO: 1553603 - DNA, 15 bp, Homo sapiens
actctttagaggttc

SEQ ID NO: 1553604 - DNA, 15 bp, Homo sapiens
ctctttagaggttca

SEQ ID NO: 1553605 - DNA, 15 bp, Homo sapiens
tctttagaggttcac

SEQ ID NO: 1553606 - DNA, 15 bp, Homo sapiens
ctttagaggttcact

SEQ ID NO: 1553607 - DNA, 15 bp, Homo sapiens
tttagaggttcactg

SEQ ID NO: 1553608 - DNA, 15 bp, Homo sapiens
ttagaggttcactgg

SEQ ID NO: 1553609 - DNA, 15 bp, Homo sapiens
tagaggttcactggg

SEQ ID NO: 1553610 - DNA, 15 bp, Homo sapiens
agaggttcactggga

SEQ ID NO: 1553611 - DNA, 15 bp, Homo sapiens
gaggttcactgggag

SEQ ID NO: 1553612 - DNA, 15 bp, Homo sapiens
aggttcactgggaga

SEQ ID NO: 1553613 - DNA, 15 bp, Homo sapiens
ggttcactgggagaa

SEQ ID NO: 1553614 - DNA, 15 bp, Homo sapiens
gttcactgggagaag

SEQ ID NO: 1553615 - DNA, 15 bp, Homo sapiens
ttcactgggagaagt

SEQ ID NO: 1553616 - DNA, 15 bp, Homo sapiens
tcactgggagaagtg

SEQ ID NO: 1553617 - DNA, 15 bp, Homo sapiens
cactgggagaagtga

SEQ ID NO: 1553618 - DNA, 15 bp, Homo sapiens
actgggagaagtgat

SEQ ID NO: 1553619 - DNA, 15 bp, Homo sapiens
ctgggagaagtgatc

SEQ ID NO: 1553620 - DNA, 15 bp, Homo sapiens
tgggagaagtgatca

SEQ ID NO: 1553621 - DNA, 15 bp, Homo sapiens
gggagaagtgatcag

SEQ ID NO: 1553622 - DNA, 15 bp, Homo sapiens
ggagaagtgatcagg

SEQ ID NO: 1553623 - DNA, 15 bp, Homo sapiens
gagaagtgatcaggg

SEQ ID NO: 1553624 - DNA, 15 bp, Homo sapiens
agaagtgatcagggc

SEQ ID NO: 1553625 - DNA, 15 bp, Homo sapiens
gaagtgatcagggca

SEQ ID NO: 1553626 - DNA, 15 bp, Homo sapiens
aagtgatcagggcat

SEQ ID NO: 1553627 - DNA, 15 bp, Homo sapiens
agtgatcagggcatt

SEQ ID NO: 1553628 - DNA, 15 bp, Homo sapiens
gtgatcagggcattg

SEQ ID NO: 1553629 - DNA, 15 bp, Homo sapiens
tgatcagggcattgg

SEQ ID NO: 1553630 - DNA, 15 bp, Homo sapiens
gatcagggcattggt

SEQ ID NO: 1553631 - DNA, 15 bp, Homo sapiens
atcagggcattggtg

SEQ ID NO: 1553632 - DNA, 15 bp, Homo sapiens
tcagggcattggtgg

SEQ ID NO: 1553633 - DNA, 15 bp, Homo sapiens
cagggcattggtggg

SEQ ID NO: 1553634 - DNA, 15 bp, Homo sapiens
agggcattggtgggg

SEQ ID NO: 1553635 - DNA, 15 bp, Homo sapiens
gggcattggtggggt

SEQ ID NO: 1553636 - DNA, 15 bp, Homo sapiens
ggcattggtggggtg

SEQ ID NO: 1553637 - DNA, 15 bp, Homo sapiens
gcattggtggggtga

SEQ ID NO: 1553638 - DNA, 15 bp, Homo sapiens
cattggtggggtgac

SEQ ID NO: 1553639 - DNA, 15 bp, Homo sapiens
attggtggggtgacg

SEQ ID NO: 1553640 - DNA, 15 bp, Homo sapiens
ttggtggggtgacga

SEQ ID NO: 1553641 - DNA, 15 bp, Homo sapiens
tggtggggtgacgaa

SEQ ID NO: 1553642 - DNA, 15 bp, Homo sapiens
ggtggggtgacgaac

SEQ ID NO: 1553643 - DNA, 15 bp, Homo sapiens
gtggggtgacgaacc

SEQ ID NO: 1553644 - DNA, 15 bp, Homo sapiens
tggggtgacgaaccc

SEQ ID NO: 1553645 - DNA, 15 bp, Homo sapiens
ggggtgacgaacccc

SEQ ID NO: 1553646 - DNA, 15 bp, Homo sapiens
gggtgacgaacccca

SEQ ID NO: 1553647 - DNA, 15 bp, Homo sapiens
ggtgacgaaccccac

SEQ ID NO: 1553648 - DNA, 15 bp, Homo sapiens
gtgacgaaccccacc

SEQ ID NO: 1553649 - DNA, 15 bp, Homo sapiens
tgacgaaccccacca

SEQ ID NO: 1553650 - DNA, 15 bp, Homo sapiens
gacgaaccccaccag

SEQ ID NO: 1553651 - DNA, 15 bp, Homo sapiens
acgaaccccaccaga

SEQ ID NO: 1553652 - DNA, 15 bp, Homo sapiens
cgaaccccaccagac

SEQ ID NO: 1553653 - DNA, 15 bp, Homo sapiens
gaaccccaccagact

SEQ ID NO: 1553654 - DNA, 15 bp, Homo sapiens
aaccccaccagactc

SEQ ID NO: 1553655 - DNA, 15 bp, Homo sapiens
accccaccagactca

SEQ ID NO: 1553656 - DNA, 15 bp, Homo sapiens
ccccaccagactcag

SEQ ID NO: 1553657 - DNA, 15 bp, Homo sapiens
cccaccagactcagc

SEQ ID NO: 1553658 - DNA, 15 bp, Homo sapiens
ccaccagactcagcc

SEQ ID NO: 1553659 - DNA, 15 bp, Homo sapiens
caccagactcagccc

SEQ ID NO: 1553660 - DNA, 15 bp, Homo sapiens
accagactcagccct

SEQ ID NO: 1553661 - DNA, 15 bp, Homo sapiens
ccagactcagccctc

SEQ ID NO: 1553662 - DNA, 15 bp, Homo sapiens
cagactcagccctcc

SEQ ID NO: 1553663 - DNA, 15 bp, Homo sapiens
agactcagccctcct

SEQ ID NO: 1553664 - DNA, 15 bp, Homo sapiens
gactcagccctcctc

SEQ ID NO: 1553665 - DNA, 15 bp, Homo sapiens
actcagccctcctca

SEQ ID NO: 1553666 - DNA, 15 bp, Homo sapiens
ctcagccctcctcag

SEQ ID NO: 1553667 - DNA, 15 bp, Homo sapiens
tcagccctcctcagc

SEQ ID NO: 1553668 - DNA, 15 bp, Homo sapiens
cagccctcctcagct

SEQ ID NO: 1553669 - DNA, 15 bp, Homo sapiens
agccctcctcagctc

SEQ ID NO: 1553670 - DNA, 15 bp, Homo sapiens
ccctcctcagctcac

SEQ ID NO: 1553671 - DNA, 15 bp, Homo sapiens
cctcctcagctcact

SEQ ID NO: 1553672 - DNA, 15 bp, Homo sapiens
ctcctcagctcactc

SEQ ID NO: 1553673 - DNA, 15 bp, Homo sapiens
tcctcagctcactcc

SEQ ID NO: 1553674 - DNA, 15 bp, Homo sapiens
cctcagctcactcct

SEQ ID NO: 1553675 - DNA, 15 bp, Homo sapiens
ctcagctcactcctg

SEQ ID NO: 1553676 - DNA, 15 bp, Homo sapiens
tcagctcactcctgc

SEQ ID NO: 1553677 - DNA, 15 bp, Homo sapiens
cagctcactcctgcc

SEQ ID NO: 1553678 - DNA, 15 bp, Homo sapiens
agctcactcctgcct

SEQ ID NO: 1553679 - DNA, 15 bp, Homo sapiens
gctcactcctgcctg

SEQ ID NO: 1553680 - DNA, 15 bp, Homo sapiens
ctcactcctgcctgc

SEQ ID NO: 1553681 - DNA, 15 bp, Homo sapiens
tcactcctgcctgca

SEQ ID NO: 1553682 - DNA, 15 bp, Homo sapiens
cactcctgcctgcaa

SEQ ID NO: 1553683 - DNA, 15 bp, Homo sapiens
actcctgcctgcaag

SEQ ID NO: 1553684 - DNA, 15 bp, Homo sapiens
ctcctgcctgcaagg

SEQ ID NO: 1553685 - DNA, 15 bp, Homo sapiens
tcctgcctgcaaggg

SEQ ID NO: 1553686 - DNA, 15 bp, Homo sapiens
cctgcctgcaagggg

SEQ ID NO: 1553687 - DNA, 15 bp, Homo sapiens
ctgcctgcaaggggg

SEQ ID NO: 1553688 - DNA, 15 bp, Homo sapiens
tgcctgcaaggggga

SEQ ID NO: 1553689 - DNA, 15 bp, Homo sapiens
gcctgcaagggggac

SEQ ID NO: 1553690 - DNA, 15 bp, Homo sapiens
cctgcaagggggacc

SEQ ID NO: 1553691 - DNA, 15 bp, Homo sapiens
ctgcaagggggacct

SEQ ID NO: 1553692 - DNA, 15 bp, Homo sapiens
tgcaagggggacctt

SEQ ID NO: 1553693 - DNA, 15 bp, Homo sapiens
gcaagggggaccttg

SEQ ID NO: 1553694 - DNA, 15 bp, Homo sapiens
caagggggaccttgt

SEQ ID NO: 1553695 - DNA, 15 bp, Homo sapiens
aagggggaccttgta

SEQ ID NO: 1553696 - DNA, 15 bp, Homo sapiens
agggggaccttgtac

SEQ ID NO: 1553697 - DNA, 15 bp, Homo sapiens
gggggaccttgtact

SEQ ID NO: 1553698 - DNA, 15 bp, Homo sapiens
ggggaccttgtactg

SEQ ID NO: 1553699 - DNA, 15 bp, Homo sapiens
gggaccttgtactgg

SEQ ID NO: 1553700 - DNA, 15 bp, Homo sapiens
ggaccttgtactggg

SEQ ID NO: 1553701 - DNA, 15 bp, Homo sapiens
gaccttgtactgggg

SEQ ID NO: 1553702 - DNA, 15 bp, Homo sapiens
accttgtactgggga

SEQ ID NO: 1553703 - DNA, 15 bp, Homo sapiens
ccttgtactggggaa

SEQ ID NO: 1553704 - DNA, 15 bp, Homo sapiens
cttgtactggggaag

SEQ ID NO: 1553705 - DNA, 15 bp, Homo sapiens
ttgtactggggaaga

SEQ ID NO: 1553706 - DNA, 15 bp, Homo sapiens
tgtactggggaagat

SEQ ID NO: 1553707 - DNA, 15 bp, Homo sapiens
gtactggggaagatg

SEQ ID NO: 1553708 - DNA, 15 bp, Homo sapiens
tactggggaagatgt

SEQ ID NO: 1553709 - DNA, 15 bp, Homo sapiens
actggggaagatgtg

SEQ ID NO: 1553710 - DNA, 15 bp, Homo sapiens
ctggggaagatgtga

SEQ ID NO: 1553711 - DNA, 15 bp, Homo sapiens
tggggaagatgtgac

SEQ ID NO: 1553712 - DNA, 15 bp, Homo sapiens
ggggaagatgtgact

SEQ ID NO: 1553713 - DNA, 15 bp, Homo sapiens
gggaagatgtgactg

SEQ ID NO: 1553714 - DNA, 15 bp, Homo sapiens
ggaagatgtgactgg

SEQ ID NO: 1553715 - DNA, 15 bp, Homo sapiens
gaagatgtgactggg

SEQ ID NO: 1553716 - DNA, 15 bp, Homo sapiens
aagatgtgactgggt

SEQ ID NO: 1553717 - DNA, 15 bp, Homo sapiens
agatgtgactgggta

SEQ ID NO: 1553718 - DNA, 15 bp, Homo sapiens
gatgtgactgggtag

SEQ ID NO: 1553719 - DNA, 15 bp, Homo sapiens
atgtgactgggtagg

SEQ ID NO: 1553720 - DNA, 15 bp, Homo sapiens
tgtgactgggtaggt

SEQ ID NO: 1553721 - DNA, 15 bp, Homo sapiens
gtgactgggtaggtg

SEQ ID NO: 1553722 - DNA, 15 bp, Homo sapiens
tgactgggtaggtgg

SEQ ID NO: 1553723 - DNA, 15 bp, Homo sapiens
gactgggtaggtggg

SEQ ID NO: 1553724 - DNA, 15 bp, Homo sapiens
actgggtaggtggga

SEQ ID NO: 1553725 - DNA, 15 bp, Homo sapiens
ctgggtaggtgggaa

SEQ ID NO: 1553726 - DNA, 15 bp, Homo sapiens
tgggtaggtgggaag

SEQ ID NO: 1553727 - DNA, 15 bp, Homo sapiens
gggtaggtgggaagg

SEQ ID NO: 1553728 - DNA, 15 bp, Homo sapiens
ggtaggtgggaaggt

SEQ ID NO: 1553729 - DNA, 15 bp, Homo sapiens
gtaggtgggaaggtc

SEQ ID NO: 1553730 - DNA, 15 bp, Homo sapiens
taggtgggaaggtca

SEQ ID NO: 1553731 - DNA, 15 bp, Homo sapiens
aggtgggaaggtcat

SEQ ID NO: 1553732 - DNA, 15 bp, Homo sapiens
ggtgggaaggtcatt

SEQ ID NO: 1553733 - DNA, 15 bp, Homo sapiens
gtgggaaggtcattt

SEQ ID NO: 1553734 - DNA, 15 bp, Homo sapiens
tgggaaggtcatttc

SEQ ID NO: 1553735 - DNA, 15 bp, Homo sapiens
gggaaggtcatttca

SEQ ID NO: 1553736 - DNA, 15 bp, Homo sapiens
ggaaggtcatttcat

SEQ ID NO: 1553737 - DNA, 15 bp, Homo sapiens
gaaggtcatttcatt

SEQ ID NO: 1553738 - DNA, 15 bp, Homo sapiens
aaggtcatttcattg

SEQ ID NO: 1553739 - DNA, 15 bp, Homo sapiens
aggtcatttcattgg

SEQ ID NO: 1553740 - DNA, 15 bp, Homo sapiens
ggtcatttcattggg

SEQ ID NO: 1553741 - DNA, 15 bp, Homo sapiens
gtcatttcattgggg

SEQ ID NO: 1553742 - DNA, 15 bp, Homo sapiens
tcatttcattggggg

SEQ ID NO: 1553743 - DNA, 15 bp, Homo sapiens
catttcattgggggt

SEQ ID NO: 1553744 - DNA, 15 bp, Homo sapiens
atttcattgggggta

SEQ ID NO: 1553745 - DNA, 15 bp, Homo sapiens
tttcattgggggtac

SEQ ID NO: 1553746 - DNA, 15 bp, Homo sapiens
ttcattgggggtaca

SEQ ID NO: 1553747 - DNA, 15 bp, Homo sapiens
tcattgggggtacag

SEQ ID NO: 1553748 - DNA, 15 bp, Homo sapiens
cattgggggtacaga

SEQ ID NO: 1553749 - DNA, 15 bp, Homo sapiens
attgggggtacagag

SEQ ID NO: 1553750 - DNA, 15 bp, Homo sapiens
ttgggggtacagaga

SEQ ID NO: 1553751 - DNA, 15 bp, Homo sapiens
tgggggtacagagat

SEQ ID NO: 1553752 - DNA, 15 bp, Homo sapiens
gggggtacagagatt

SEQ ID NO: 1553753 - DNA, 15 bp, Homo sapiens
ggggtacagagattt

SEQ ID NO: 1553754 - DNA, 15 bp, Homo sapiens
gggtacagagatttg

SEQ ID NO: 1553755 - DNA, 15 bp, Homo sapiens
ggtacagagatttgc

SEQ ID NO: 1553756 - DNA, 15 bp, Homo sapiens
gtacagagatttgca

SEQ ID NO: 1553757 - DNA, 15 bp, Homo sapiens
tacagagatttgcag

SEQ ID NO: 1553758 - DNA, 15 bp, Homo sapiens
acagagatttgcaga

SEQ ID NO: 1553759 - DNA, 15 bp, Homo sapiens
cagagatttgcagag

SEQ ID NO: 1553760 - DNA, 15 bp, Homo sapiens
agagatttgcagagg

SEQ ID NO: 1553761 - DNA, 15 bp, Homo sapiens
gagatttgcagaggc

SEQ ID NO: 1553762 - DNA, 15 bp, Homo sapiens
agatttgcagaggct

SEQ ID NO: 1553763 - DNA, 15 bp, Homo sapiens
gatttgcagaggctg

SEQ ID NO: 1553764 - DNA, 15 bp, Homo sapiens
atttgcagaggctgc

SEQ ID NO: 1553765 - DNA, 15 bp, Homo sapiens
tttgcagaggctgca

SEQ ID NO: 1553766 - DNA, 15 bp, Homo sapiens
ttgcagaggctgcaa

SEQ ID NO: 1553767 - DNA, 15 bp, Homo sapiens
tgcagaggctgcaag

SEQ ID NO: 1553768 - DNA, 15 bp, Homo sapiens
gcagaggctgcaaga

SEQ ID NO: 1553769 - DNA, 15 bp, Homo sapiens
cagaggctgcaagag

SEQ ID NO: 1553770 - DNA, 15 bp, Homo sapiens
agaggctgcaagagg

SEQ ID NO: 1553771 - DNA, 15 bp, Homo sapiens
gaggctgcaagagga

SEQ ID NO: 1553772 - DNA, 15 bp, Homo sapiens
aggctgcaagaggat

SEQ ID NO: 1553773 - DNA, 15 bp, Homo sapiens
ggctgcaagaggatc

SEQ ID NO: 1553774 - DNA, 15 bp, Homo sapiens
gctgcaagaggatcc

SEQ ID NO: 1553775 - DNA, 15 bp, Homo sapiens
ctgcaagaggatccc

SEQ ID NO: 1553776 - DNA, 15 bp, Homo sapiens
tgcaagaggatccct

SEQ ID NO: 1553777 - DNA, 15 bp, Homo sapiens
gcaagaggatccctg

SEQ ID NO: 1553778 - DNA, 15 bp, Homo sapiens
caagaggatccctga

SEQ ID NO: 1553779 - DNA, 15 bp, Homo sapiens
aagaggatccctgac

SEQ ID NO: 1553780 - DNA, 15 bp, Homo sapiens
agaggatccctgact

SEQ ID NO: 1553781 - DNA, 15 bp, Homo sapiens
gaggatccctgactg

SEQ ID NO: 1553782 - DNA, 15 bp, Homo sapiens
aggatccctgactgg

SEQ ID NO: 1553783 - DNA, 15 bp, Homo sapiens
ggatccctgactgga

SEQ ID NO: 1553784 - DNA, 15 bp, Homo sapiens
gatccctgactggag

SEQ ID NO: 1553785 - DNA, 15 bp, Homo sapiens
atccctgactggagg

SEQ ID NO: 1553786 - DNA, 15 bp, Homo sapiens
tccctgactggaggg

SEQ ID NO: 1553787 - DNA, 15 bp, Homo sapiens
ccctgactggagggt

SEQ ID NO: 1553788 - DNA, 15 bp, Homo sapiens
cctgactggagggtt

SEQ ID NO: 1553789 - DNA, 15 bp, Homo sapiens
ctgactggagggtta

SEQ ID NO: 1553790 - DNA, 15 bp, Homo sapiens
tgactggagggttag

SEQ ID NO: 1553791 - DNA, 15 bp, Homo sapiens
gactggagggttagt

SEQ ID NO: 1553792 - DNA, 15 bp, Homo sapiens
actggagggttagtt

SEQ ID NO: 1553793 - DNA, 15 bp, Homo sapiens
ctggagggttagtta

SEQ ID NO: 1553794 - DNA, 15 bp, Homo sapiens
tggagggttagttaa

SEQ ID NO: 1553795 - DNA, 15 bp, Homo sapiens
ggagggttagttaat

SEQ ID NO: 1553796 - DNA, 15 bp, Homo sapiens
gagggttagttaatg

SEQ ID NO: 1553797 - DNA, 15 bp, Homo sapiens
agggttagttaatgt

SEQ ID NO: 1553798 - DNA, 15 bp, Homo sapiens
gggttagttaatgtg

SEQ ID NO: 1553799 - DNA, 15 bp, Homo sapiens
ggttagttaatgtgc

SEQ ID NO: 1553800 - DNA, 15 bp, Homo sapiens
gttagttaatgtgcc

SEQ ID NO: 1553801 - DNA, 15 bp, Homo sapiens
ttagttaatgtgccc

SEQ ID NO: 1553802 - DNA, 15 bp, Homo sapiens
tagttaatgtgcccc

SEQ ID NO: 1553803 - DNA, 15 bp, Homo sapiens
agttaatgtgccccg

SEQ ID NO: 1553804 - DNA, 15 bp, Homo sapiens
gttaatgtgccccgc

SEQ ID NO: 1553805 - DNA, 15 bp, Homo sapiens
ttaatgtgccccgct

SEQ ID NO: 1553806 - DNA, 15 bp, Homo sapiens
taatgtgccccgcta

SEQ ID NO: 1553807 - DNA, 15 bp, Homo sapiens
aatgtgccccgctat

SEQ ID NO: 1553808 - DNA, 15 bp, Homo sapiens
atgtgccccgctatc

SEQ ID NO: 1553809 - DNA, 15 bp, Homo sapiens
tgtgccccgctatct

SEQ ID NO: 1553810 - DNA, 15 bp, Homo sapiens
gtgccccgctatcta

SEQ ID NO: 1553811 - DNA, 15 bp, Homo sapiens
tgccccgctatctat

SEQ ID NO: 1553812 - DNA, 15 bp, Homo sapiens
gccccgctatctatc

SEQ ID NO: 1553813 - DNA, 15 bp, Homo sapiens
ccccgctatctatcc

SEQ ID NO: 1553814 - DNA, 15 bp, Homo sapiens
cccgctatctatccc

SEQ ID NO: 1553815 - DNA, 15 bp, Homo sapiens
ccgctatctatccca

SEQ ID NO: 1553816 - DNA, 15 bp, Homo sapiens
cgctatctatcccag

SEQ ID NO: 1553817 - DNA, 15 bp, Homo sapiens
gctatctatcccagc

SEQ ID NO: 1553818 - DNA, 15 bp, Homo sapiens
ctatctatcccagcc

SEQ ID NO: 1553819 - DNA, 15 bp, Homo sapiens
tatctatcccagcct

SEQ ID NO: 1553820 - DNA, 15 bp, Homo sapiens
atctatcccagcctc

SEQ ID NO: 1553821 - DNA, 15 bp, Homo sapiens
tctatcccagcctcc

SEQ ID NO: 1553822 - DNA, 15 bp, Homo sapiens
ctatcccagcctccc

SEQ ID NO: 1553823 - DNA, 15 bp, Homo sapiens
tatcccagcctccct

SEQ ID NO: 1553824 - DNA, 15 bp, Homo sapiens
atcccagcctccctt

SEQ ID NO: 1553825 - DNA, 15 bp, Homo sapiens
tcccagcctcccttg

SEQ ID NO: 1553826 - DNA, 15 bp, Homo sapiens
cccagcctcccttgc

SEQ ID NO: 1553827 - DNA, 15 bp, Homo sapiens
ccagcctcccttgct

SEQ ID NO: 1553828 - DNA, 15 bp, Homo sapiens
cagcctcccttgctg

SEQ ID NO: 1553829 - DNA, 15 bp, Homo sapiens
agcctcccttgctga

SEQ ID NO: 1553830 - DNA, 15 bp, Homo sapiens
gcctcccttgctgag

SEQ ID NO: 1553831 - DNA, 15 bp, Homo sapiens
cctcccttgctgagc

SEQ ID NO: 1553832 - DNA, 15 bp, Homo sapiens
ctcccttgctgagcc

SEQ ID NO: 1553833 - DNA, 15 bp, Homo sapiens
tcccttgctgagccc

SEQ ID NO: 1553834 - DNA, 15 bp, Homo sapiens
cccttgctgagccca

SEQ ID NO: 1553835 - DNA, 15 bp, Homo sapiens
ccttgctgagcccag

SEQ ID NO: 1553836 - DNA, 15 bp, Homo sapiens
cttgctgagcccagt

SEQ ID NO: 1553837 - DNA, 15 bp, Homo sapiens
ttgctgagcccagtt

SEQ ID NO: 1553838 - DNA, 15 bp, Homo sapiens
tgctgagcccagttt

SEQ ID NO: 1553839 - DNA, 15 bp, Homo sapiens
gctgagcccagtttc

SEQ ID NO: 1553840 - DNA, 15 bp, Homo sapiens
ctgagcccagtttca

SEQ ID NO: 1553841 - DNA, 15 bp, Homo sapiens
tgagcccagtttcac

SEQ ID NO: 1553842 - DNA, 15 bp, Homo sapiens
gagcccagtttcacc

SEQ ID NO: 1553843 - DNA, 15 bp, Homo sapiens
agcccagtttcaccc

SEQ ID NO: 1553844 - DNA, 15 bp, Homo sapiens
gcccagtttcaccca

SEQ ID NO: 1553845 - DNA, 15 bp, Homo sapiens
cccagtttcacccag

SEQ ID NO: 1553846 - DNA, 15 bp, Homo sapiens
ccagtttcacccagg

SEQ ID NO: 1553847 - DNA, 15 bp, Homo sapiens
cagtttcacccaggc

SEQ ID NO: 1553848 - DNA, 15 bp, Homo sapiens
agtttcacccaggca

SEQ ID NO: 1553849 - DNA, 15 bp, Homo sapiens
gtttcacccaggcac

SEQ ID NO: 1553850 - DNA, 15 bp, Homo sapiens
tttcacccaggcacc

SEQ ID NO: 1553851 - DNA, 15 bp, Homo sapiens
ttcacccaggcaccg

SEQ ID NO: 1553852 - DNA, 15 bp, Homo sapiens
tcacccaggcaccgt

SEQ ID NO: 1553853 - DNA, 15 bp, Homo sapiens
cacccaggcaccgtg

SEQ ID NO: 1553854 - DNA, 15 bp, Homo sapiens
acccaggcaccgtgg

SEQ ID NO: 1553855 - DNA, 15 bp, Homo sapiens
cccaggcaccgtgga

SEQ ID NO: 1553856 - DNA, 15 bp, Homo sapiens
ccaggcaccgtggag

SEQ ID NO: 1553857 - DNA, 15 bp, Homo sapiens
caggcaccgtggagg

SEQ ID NO: 1553858 - DNA, 15 bp, Homo sapiens
aggcaccgtggagga

SEQ ID NO: 1553859 - DNA, 15 bp, Homo sapiens
ggcaccgtggaggat

SEQ ID NO: 1553860 - DNA, 15 bp, Homo sapiens
gcaccgtggaggata

SEQ ID NO: 1553861 - DNA, 15 bp, Homo sapiens
caccgtggaggataa

SEQ ID NO: 1553862 - DNA, 15 bp, Homo sapiens
accgtggaggataac

SEQ ID NO: 1553863 - DNA, 15 bp, Homo sapiens
ccgtggaggataaca

SEQ ID NO: 1553864 - DNA, 15 bp, Homo sapiens
cgtggaggataacag

SEQ ID NO: 1553865 - DNA, 15 bp, Homo sapiens
gtggaggataacagg

SEQ ID NO: 1553866 - DNA, 15 bp, Homo sapiens
tggaggataacagga

SEQ ID NO: 1553867 - DNA, 15 bp, Homo sapiens
ggaggataacaggag

SEQ ID NO: 1553868 - DNA, 15 bp, Homo sapiens
gaggataacaggaga

SEQ ID NO: 1553869 - DNA, 15 bp, Homo sapiens
aggataacaggagac

SEQ ID NO: 1553870 - DNA, 15 bp, Homo sapiens
ggataacaggagaca

SEQ ID NO: 1553871 - DNA, 15 bp, Homo sapiens
gataacaggagacaa

SEQ ID NO: 1553872 - DNA, 15 bp, Homo sapiens
ataacaggagacaag

SEQ ID NO: 1553873 - DNA, 15 bp, Homo sapiens
taacaggagacaagc

SEQ ID NO: 1553874 - DNA, 15 bp, Homo sapiens
aacaggagacaagca

SEQ ID NO: 1553875 - DNA, 15 bp, Homo sapiens
acaggagacaagcac

SEQ ID NO: 1553876 - DNA, 15 bp, Homo sapiens
caggagacaagcacc

SEQ ID NO: 1553877 - DNA, 15 bp, Homo sapiens
aggagacaagcaccc

SEQ ID NO: 1553878 - DNA, 15 bp, Homo sapiens
ggagacaagcaccct

SEQ ID NO: 1553879 - DNA, 15 bp, Homo sapiens
gagacaagcaccctc

SEQ ID NO: 1553880 - DNA, 15 bp, Homo sapiens
agacaagcaccctca

SEQ ID NO: 1553881 - DNA, 15 bp, Homo sapiens
gacaagcaccctcat

SEQ ID NO: 1553882 - DNA, 15 bp, Homo sapiens
acaagcaccctcatg

SEQ ID NO: 1553883 - DNA, 15 bp, Homo sapiens
caagcaccctcatgg

SEQ ID NO: 1553884 - DNA, 15 bp, Homo sapiens
aagcaccctcatggc

SEQ ID NO: 1553885 - DNA, 15 bp, Homo sapiens
agcaccctcatggca

SEQ ID NO: 1553886 - DNA, 15 bp, Homo sapiens
gcaccctcatggcaa

SEQ ID NO: 1553887 - DNA, 15 bp, Homo sapiens
caccctcatggcaag

SEQ ID NO: 1553888 - DNA, 15 bp, Homo sapiens
accctcatggcaagg

SEQ ID NO: 1553889 - DNA, 15 bp, Homo sapiens
ccctcatggcaagga

SEQ ID NO: 1553890 - DNA, 15 bp, Homo sapiens
cctcatggcaaggag

SEQ ID NO: 1553891 - DNA, 15 bp, Homo sapiens
ctcatggcaaggagc

SEQ ID NO: 1553892 - DNA, 15 bp, Homo sapiens
tcatggcaaggagct

SEQ ID NO: 1553893 - DNA, 15 bp, Homo sapiens
catggcaaggagctc

SEQ ID NO: 1553894 - DNA, 15 bp, Homo sapiens
atggcaaggagctcc

SEQ ID NO: 1553895 - DNA, 15 bp, Homo sapiens
tggcaaggagctccc

SEQ ID NO: 1553896 - DNA, 15 bp, Homo sapiens
ggcaaggagctccca

SEQ ID NO: 1553897 - DNA, 15 bp, Homo sapiens
gcaaggagctcccag

SEQ ID NO: 1553898 - DNA, 15 bp, Homo sapiens
caaggagctcccagt

SEQ ID NO: 1553899 - DNA, 15 bp, Homo sapiens
aaggagctcccagtc

SEQ ID NO: 1553900 - DNA, 15 bp, Homo sapiens
aggagctcccagtct

SEQ ID NO: 1553901 - DNA, 15 bp, Homo sapiens
ggagctcccagtctc

SEQ ID NO: 1553902 - DNA, 15 bp, Homo sapiens
gagctcccagtctcc

SEQ ID NO: 1553903 - DNA, 15 bp, Homo sapiens
agctcccagtctcca

SEQ ID NO: 1553904 - DNA, 15 bp, Homo sapiens
gctcccagtctccat

SEQ ID NO: 1553905 - DNA, 15 bp, Homo sapiens
ctcccagtctccata

SEQ ID NO: 1553906 - DNA, 15 bp, Homo sapiens
tcccagtctccataa

SEQ ID NO: 1553907 - DNA, 15 bp, Homo sapiens
cccagtctccataag

SEQ ID NO: 1553908 - DNA, 15 bp, Homo sapiens
ccagtctccataagg

SEQ ID NO: 1553909 - DNA, 15 bp, Homo sapiens
cagtctccataaggg

SEQ ID NO: 1553910 - DNA, 15 bp, Homo sapiens
agtctccataagggg

SEQ ID NO: 1553911 - DNA, 15 bp, Homo sapiens
gtctccataagggga

SEQ ID NO: 1553912 - DNA, 15 bp, Homo sapiens
tctccataaggggag

SEQ ID NO: 1553913 - DNA, 15 bp, Homo sapiens
ctccataaggggaga

SEQ ID NO: 1553914 - DNA, 15 bp, Homo sapiens
tccataaggggagaa

SEQ ID NO: 1553915 - DNA, 15 bp, Homo sapiens
ccataaggggagaaa

SEQ ID NO: 1553916 - DNA, 15 bp, Homo sapiens
cataaggggagaaaa

SEQ ID NO: 1553917 - DNA, 15 bp, Homo sapiens
ataaggggagaaaag

SEQ ID NO: 1553918 - DNA, 15 bp, Homo sapiens
taaggggagaaaaga

SEQ ID NO: 1553919 - DNA, 15 bp, Homo sapiens
aaggggagaaaagat

SEQ ID NO: 1553920 - DNA, 15 bp, Homo sapiens
aggggagaaaagata

SEQ ID NO: 1553921 - DNA, 15 bp, Homo sapiens
ggggagaaaagatat

SEQ ID NO: 1553922 - DNA, 15 bp, Homo sapiens
gggagaaaagatatt

SEQ ID NO: 1553923 - DNA, 15 bp, Homo sapiens
ggagaaaagatattt

SEQ ID NO: 1553924 - DNA, 15 bp, Homo sapiens
gagaaaagatatttc

SEQ ID NO: 1553925 - DNA, 15 bp, Homo sapiens
agaaaagatatttcc

SEQ ID NO: 1553926 - DNA, 15 bp, Homo sapiens
gaaaagatatttccc

SEQ ID NO: 1553927 - DNA, 15 bp, Homo sapiens
aaaagatatttccct

SEQ ID NO: 1553928 - DNA, 15 bp, Homo sapiens
aaagatatttcccta

SEQ ID NO: 1553929 - DNA, 15 bp, Homo sapiens
aagatatttccctat

SEQ ID NO: 1553930 - DNA, 15 bp, Homo sapiens
agatatttccctatc

SEQ ID NO: 1553931 - DNA, 15 bp, Homo sapiens
gatatttccctatca

SEQ ID NO: 1553932 - DNA, 15 bp, Homo sapiens
atatttccctatcat

SEQ ID NO: 1553933 - DNA, 15 bp, Homo sapiens
tatttccctatcatc

SEQ ID NO: 1553934 - DNA, 15 bp, Homo sapiens
atttccctatcatca

SEQ ID NO: 1553935 - DNA, 15 bp, Homo sapiens
ttccctatcatcatc

SEQ ID NO: 1553936 - DNA, 15 bp, Homo sapiens
tccctatcatcatca

SEQ ID NO: 1553937 - DNA, 15 bp, Homo sapiens
ccctatcatcatcat

SEQ ID NO: 1553938 - DNA, 15 bp, Homo sapiens
cctatcatcatcatc

SEQ ID NO: 1553939 - DNA, 15 bp, Homo sapiens
ctatcatcatcatca

SEQ ID NO: 1553940 - DNA, 15 bp, Homo sapiens
tatcatcatcatcat

SEQ ID NO: 1553941 - DNA, 15 bp, Homo sapiens
atcatcatcatcatc

SEQ ID NO: 1553942 - DNA, 15 bp, Homo sapiens
tcatcatcatcatca

SEQ ID NO: 1553943 - DNA, 15 bp, Homo sapiens
catcatcatcatcac

SEQ ID NO: 1553944 - DNA, 15 bp, Homo sapiens
atcatcatcatcacc

SEQ ID NO: 1553945 - DNA, 15 bp, Homo sapiens
tcatcatcatcacca

SEQ ID NO: 1553946 - DNA, 15 bp, Homo sapiens
catcatcatcaccat

SEQ ID NO: 1553947 - DNA, 15 bp, Homo sapiens
atcatcatcaccatc

SEQ ID NO: 1553948 - DNA, 15 bp, Homo sapiens
tcatcatcaccatca

SEQ ID NO: 1553949 - DNA, 15 bp, Homo sapiens
catcatcaccatcac

SEQ ID NO: 1553950 - DNA, 15 bp, Homo sapiens
atcatcaccatcacc

SEQ ID NO: 1553951 - DNA, 15 bp, Homo sapiens
tcatcaccatcacca

SEQ ID NO: 1553952 - DNA, 15 bp, Homo sapiens
catcaccatcaccat

SEQ ID NO: 1553953 - DNA, 15 bp, Homo sapiens
atcaccatcaccatc

SEQ ID NO: 1553954 - DNA, 15 bp, Homo sapiens
tcaccatcaccatca

SEQ ID NO: 1553955 - DNA, 15 bp, Homo sapiens
caccatcaccatcat

SEQ ID NO: 1553956 - DNA, 15 bp, Homo sapiens
accatcaccatcatc

SEQ ID NO: 1553957 - DNA, 15 bp, Homo sapiens
ccatcaccatcatca

SEQ ID NO: 1553958 - DNA, 15 bp, Homo sapiens
catcaccatcatcat

SEQ ID NO: 1553959 - DNA, 15 bp, Homo sapiens
atcaccatcatcatc

SEQ ID NO: 1553960 - DNA, 15 bp, Homo sapiens
tcaccatcatcatcg

SEQ ID NO: 1553961 - DNA, 15 bp, Homo sapiens
caccatcatcatcgt

SEQ ID NO: 1553962 - DNA, 15 bp, Homo sapiens
accatcatcatcgtc

SEQ ID NO: 1553963 - DNA, 15 bp, Homo sapiens
ccatcatcatcgtca

SEQ ID NO: 1553964 - DNA, 15 bp, Homo sapiens
catcatcatcgtcat

SEQ ID NO: 1553965 - DNA, 15 bp, Homo sapiens
atcatcatcgtcatc

SEQ ID NO: 1553966 - DNA, 15 bp, Homo sapiens
tcatcatcgtcatca

SEQ ID NO: 1553967 - DNA, 15 bp, Homo sapiens
catcatcgtcatcat

SEQ ID NO: 1553968 - DNA, 15 bp, Homo sapiens
atcatcgtcatcata

SEQ ID NO: 1553969 - DNA, 15 bp, Homo sapiens
tcatcgtcatcatag

SEQ ID NO: 1553970 - DNA, 15 bp, Homo sapiens
catcgtcatcatagc

SEQ ID NO: 1553971 - DNA, 15 bp, Homo sapiens
atcgtcatcatagcc

SEQ ID NO: 1553972 - DNA, 15 bp, Homo sapiens
tcgtcatcatagcca

SEQ ID NO: 1553973 - DNA, 15 bp, Homo sapiens
cgtcatcatagccag

SEQ ID NO: 1553974 - DNA, 15 bp, Homo sapiens
gtcatcatagccagc

SEQ ID NO: 1553975 - DNA, 15 bp, Homo sapiens
tcatcatagccagca

SEQ ID NO: 1553976 - DNA, 15 bp, Homo sapiens
catcatagccagcat

SEQ ID NO: 1553977 - DNA, 15 bp, Homo sapiens
atcatagccagcatt

SEQ ID NO: 1553978 - DNA, 15 bp, Homo sapiens
tcatagccagcattt

SEQ ID NO: 1553979 - DNA, 15 bp, Homo sapiens
catagccagcattta

SEQ ID NO: 1553980 - DNA, 15 bp, Homo sapiens
atagccagcatttat

SEQ ID NO: 1553981 - DNA, 15 bp, Homo sapiens
tagccagcatttatt

SEQ ID NO: 1553982 - DNA, 15 bp, Homo sapiens
agccagcatttattg

SEQ ID NO: 1553983 - DNA, 15 bp, Homo sapiens
gccagcatttattga

SEQ ID NO: 1553984 - DNA, 15 bp, Homo sapiens
ccagcatttattgag

SEQ ID NO: 1553985 - DNA, 15 bp, Homo sapiens
cagcatttattgagt

SEQ ID NO: 1553986 - DNA, 15 bp, Homo sapiens
agcatttattgagta

SEQ ID NO: 1553987 - DNA, 15 bp, Homo sapiens
gcatttattgagtac

SEQ ID NO: 1553988 - DNA, 15 bp, Homo sapiens
catttattgagtacc

SEQ ID NO: 1553989 - DNA, 15 bp, Homo sapiens
atttattgagtacct

SEQ ID NO: 1553990 - DNA, 15 bp, Homo sapiens
tttattgagtaccta

SEQ ID NO: 1553991 - DNA, 15 bp, Homo sapiens
ttattgagtacctac

SEQ ID NO: 1553992 - DNA, 15 bp, Homo sapiens
tattgagtacctact

SEQ ID NO: 1553993 - DNA, 15 bp, Homo sapiens
attgagtacctactg

SEQ ID NO: 1553994 - DNA, 15 bp, Homo sapiens
ttgagtacctactgt

SEQ ID NO: 1553995 - DNA, 15 bp, Homo sapiens
tgagtacctactgtg

SEQ ID NO: 1553996 - DNA, 15 bp, Homo sapiens
gagtacctactgtgt

SEQ ID NO: 1553997 - DNA, 15 bp, Homo sapiens
agtacctactgtgtg

SEQ ID NO: 1553998 - DNA, 15 bp, Homo sapiens
gtacctactgtgtgc

SEQ ID NO: 1553999 - DNA, 15 bp, Homo sapiens
tacctactgtgtgcc

SEQ ID NO: 1554000 - DNA, 15 bp, Homo sapiens
cctactgtgtgccaa

SEQ ID NO: 1554001 - DNA, 15 bp, Homo sapiens
ctactgtgtgccaag

SEQ ID NO: 1554002 - DNA, 15 bp, Homo sapiens
tactgtgtgccaagt

SEQ ID NO: 1554003 - DNA, 15 bp, Homo sapiens
actgtgtgccaagtc

SEQ ID NO: 1554004 - DNA, 15 bp, Homo sapiens
ctgtgtgccaagtcc

SEQ ID NO: 1554005 - DNA, 15 bp, Homo sapiens
tgtgtgccaagtcct

SEQ ID NO: 1554006 - DNA, 15 bp, Homo sapiens
gtgtgccaagtcctg

SEQ ID NO: 1554007 - DNA, 15 bp, Homo sapiens
tgtgccaagtcctgc

SEQ ID NO: 1554008 - DNA, 15 bp, Homo sapiens
gtgccaagtcctgcc

SEQ ID NO: 1554009 - DNA, 15 bp, Homo sapiens
tgccaagtcctgccc

SEQ ID NO: 1554010 - DNA, 15 bp, Homo sapiens
gccaagtcctgccct

SEQ ID NO: 1554011 - DNA, 15 bp, Homo sapiens
ccaagtcctgcccta

SEQ ID NO: 1554012 - DNA, 15 bp, Homo sapiens
caagtcctgccctaa

SEQ ID NO: 1554013 - DNA, 15 bp, Homo sapiens
aagtcctgccctaaa

SEQ ID NO: 1554014 - DNA, 15 bp, Homo sapiens
agtcctgccctaaaa

SEQ ID NO: 1554015 - DNA, 15 bp, Homo sapiens
gtcctgccctaaaag

SEQ ID NO: 1554016 - DNA, 15 bp, Homo sapiens
tcctgccctaaaagc

SEQ ID NO: 1554017 - DNA, 15 bp, Homo sapiens
cctgccctaaaagca

SEQ ID NO: 1554018 - DNA, 15 bp, Homo sapiens
ctgccctaaaagcag

SEQ ID NO: 1554019 - DNA, 15 bp, Homo sapiens
tgccctaaaagcagg

SEQ ID NO: 1554020 - DNA, 15 bp, Homo sapiens
gccctaaaagcaggg

SEQ ID NO: 1554021 - DNA, 15 bp, Homo sapiens
ccctaaaagcagggc

SEQ ID NO: 1554022 - DNA, 15 bp, Homo sapiens
cctaaaagcagggct

SEQ ID NO: 1554023 - DNA, 15 bp, Homo sapiens
ctaaaagcagggctt

SEQ ID NO: 1554024 - DNA, 15 bp, Homo sapiens
taaaagcagggcttt

SEQ ID NO: 1554025 - DNA, 15 bp, Homo sapiens
aaaagcagggcttta

SEQ ID NO: 1554026 - DNA, 15 bp, Homo sapiens
aaagcagggctttat

SEQ ID NO: 1554027 - DNA, 15 bp, Homo sapiens
aagcagggctttata

SEQ ID NO: 1554028 - DNA, 15 bp, Homo sapiens
agcagggctttataa

SEQ ID NO: 1554029 - DNA, 15 bp, Homo sapiens
gcagggctttataac

SEQ ID NO: 1554030 - DNA, 15 bp, Homo sapiens
cagggctttataact

SEQ ID NO: 1554031 - DNA, 15 bp, Homo sapiens
agggctttataacta

SEQ ID NO: 1554032 - DNA, 15 bp, Homo sapiens
gggctttataactac

SEQ ID NO: 1554033 - DNA, 15 bp, Homo sapiens
ggctttataactacc

SEQ ID NO: 1554034 - DNA, 15 bp, Homo sapiens
gctttataactaccc

SEQ ID NO: 1554035 - DNA, 15 bp, Homo sapiens
ctttataactaccct

SEQ ID NO: 1554036 - DNA, 15 bp, Homo sapiens
tttataactaccctg

SEQ ID NO: 1554037 - DNA, 15 bp, Homo sapiens
ttataactaccctgt

SEQ ID NO: 1554038 - DNA, 15 bp, Homo sapiens
tataactaccctgtg

SEQ ID NO: 1554039 - DNA, 15 bp, Homo sapiens
ataactaccctgtgg

SEQ ID NO: 1554040 - DNA, 15 bp, Homo sapiens
taactaccctgtggt

SEQ ID NO: 1554041 - DNA, 15 bp, Homo sapiens
aactaccctgtggtt

SEQ ID NO: 1554042 - DNA, 15 bp, Homo sapiens
actaccctgtggtta

SEQ ID NO: 1554043 - DNA, 15 bp, Homo sapiens
ctaccctgtggttat

SEQ ID NO: 1554044 - DNA, 15 bp, Homo sapiens
taccctgtggttata

SEQ ID NO: 1554045 - DNA, 15 bp, Homo sapiens
accctgtggttatac

SEQ ID NO: 1554046 - DNA, 15 bp, Homo sapiens
ccctgtggttatacc

SEQ ID NO: 1554047 - DNA, 15 bp, Homo sapiens
cctgtggttatacct

SEQ ID NO: 1554048 - DNA, 15 bp, Homo sapiens
ctgtggttatacctg

SEQ ID NO: 1554049 - DNA, 15 bp, Homo sapiens
tgtggttatacctgc

SEQ ID NO: 1554050 - DNA, 15 bp, Homo sapiens
gtggttatacctgct

SEQ ID NO: 1554051 - DNA, 15 bp, Homo sapiens
tggttatacctgctg

SEQ ID NO: 1554052 - DNA, 15 bp, Homo sapiens
ggttatacctgctgt

SEQ ID NO: 1554053 - DNA, 15 bp, Homo sapiens
gttatacctgctgta

SEQ ID NO: 1554054 - DNA, 15 bp, Homo sapiens
ttatacctgctgtac

SEQ ID NO: 1554055 - DNA, 15 bp, Homo sapiens
tatacctgctgtaca

SEQ ID NO: 1554056 - DNA, 15 bp, Homo sapiens
atacctgctgtacag

SEQ ID NO: 1554057 - DNA, 15 bp, Homo sapiens
tacctgctgtacaga

SEQ ID NO: 1554058 - DNA, 15 bp, Homo sapiens
acctgctgtacagat

SEQ ID NO: 1554059 - DNA, 15 bp, Homo sapiens
cctgctgtacagatg

SEQ ID NO: 1554060 - DNA, 15 bp, Homo sapiens
ctgctgtacagatga

SEQ ID NO: 1554061 - DNA, 15 bp, Homo sapiens
tgctgtacagatgag

SEQ ID NO: 1554062 - DNA, 15 bp, Homo sapiens
gctgtacagatgagg

SEQ ID NO: 1554063 - DNA, 15 bp, Homo sapiens
ctgtacagatgagga

SEQ ID NO: 1554064 - DNA, 15 bp, Homo sapiens
tgtacagatgaggaa

SEQ ID NO: 1554065 - DNA, 15 bp, Homo sapiens
gtacagatgaggaaa

SEQ ID NO: 1554066 - DNA, 15 bp, Homo sapiens
gatgaggaaactgaa

SEQ ID NO: 1554067 - DNA, 15 bp, Homo sapiens
atgaggaaactgaag

SEQ ID NO: 1554068 - DNA, 15 bp, Homo sapiens
tgaggaaactgaagc

SEQ ID NO: 1554069 - DNA, 15 bp, Homo sapiens
gaggaaactgaagca

SEQ ID NO: 1554070 - DNA, 15 bp, Homo sapiens
aggaaactgaagcac

SEQ ID NO: 1554071 - DNA, 15 bp, Homo sapiens
ggaaactgaagcaca

SEQ ID NO: 1554072 - DNA, 15 bp, Homo sapiens
gaaactgaagcacaa

SEQ ID NO: 1554073 - DNA, 15 bp, Homo sapiens
aaactgaagcacaaa

SEQ ID NO: 1554074 - DNA, 15 bp, Homo sapiens
aactgaagcacaaaa

SEQ ID NO: 1554075 - DNA, 15 bp, Homo sapiens
actgaagcacaaaaa

SEQ ID NO: 1554076 - DNA, 15 bp, Homo sapiens
ctgaagcacaaaaag

SEQ ID NO: 1554077 - DNA, 15 bp, Homo sapiens
tgaagcacaaaaagt

SEQ ID NO: 1554078 - DNA, 15 bp, Homo sapiens
gaagcacaaaaagtt

SEQ ID NO: 1554079 - DNA, 15 bp, Homo sapiens
aagcacaaaaagttt

SEQ ID NO: 1554080 - DNA, 15 bp, Homo sapiens
agcacaaaaagttta

SEQ ID NO: 1554081 - DNA, 15 bp, Homo sapiens
gcacaaaaagtttaa

SEQ ID NO: 1554082 - DNA, 15 bp, Homo sapiens
cacaaaaagtttaag

SEQ ID NO: 1554083 - DNA, 15 bp, Homo sapiens
acaaaaagtttaagt

SEQ ID NO: 1554084 - DNA, 15 bp, Homo sapiens
caaaaagtttaagtc

SEQ ID NO: 1554085 - DNA, 15 bp, Homo sapiens
aaaaagtttaagtca

SEQ ID NO: 1554086 - DNA, 15 bp, Homo sapiens
aaaagtttaagtcac

SEQ ID NO: 1554087 - DNA, 15 bp, Homo sapiens
aaagtttaagtcact

SEQ ID NO: 1554088 - DNA, 15 bp, Homo sapiens
aagtttaagtcactt

SEQ ID NO: 1554089 - DNA, 15 bp, Homo sapiens
agtttaagtcacttg

SEQ ID NO: 1554090 - DNA, 15 bp, Homo sapiens
gtttaagtcacttgt

SEQ ID NO: 1554091 - DNA, 15 bp, Homo sapiens
tttaagtcacttgtt

SEQ ID NO: 1554092 - DNA, 15 bp, Homo sapiens
ttaagtcacttgttc

SEQ ID NO: 1554093 - DNA, 15 bp, Homo sapiens
taagtcacttgttcc

SEQ ID NO: 1554094 - DNA, 15 bp, Homo sapiens
aagtcacttgttcca

SEQ ID NO: 1554095 - DNA, 15 bp, Homo sapiens
agtcacttgttccaa

SEQ ID NO: 1554096 - DNA, 15 bp, Homo sapiens
gtcacttgttccaaa

SEQ ID NO: 1554097 - DNA, 15 bp, Homo sapiens
tcacttgttccaaat

SEQ ID NO: 1554098 - DNA, 15 bp, Homo sapiens
cacttgttccaaatg

SEQ ID NO: 1554099 - DNA, 15 bp, Homo sapiens
acttgttccaaatga

SEQ ID NO: 1554100 - DNA, 15 bp, Homo sapiens
cttgttccaaatgat

SEQ ID NO: 1554101 - DNA, 15 bp, Homo sapiens
ttgttccaaatgatg

SEQ ID NO: 1554102 - DNA, 15 bp, Homo sapiens
tgttccaaatgatgt

SEQ ID NO: 1554103 - DNA, 15 bp, Homo sapiens
gttccaaatgatgtg

SEQ ID NO: 1554104 - DNA, 15 bp, Homo sapiens
ttccaaatgatgtgg

SEQ ID NO: 1554105 - DNA, 15 bp, Homo sapiens
tccaaatgatgtggt

SEQ ID NO: 1554106 - DNA, 15 bp, Homo sapiens
ccaaatgatgtggtc

SEQ ID NO: 1554107 - DNA, 15 bp, Homo sapiens
caaatgatgtggtca

SEQ ID NO: 1554108 - DNA, 15 bp, Homo sapiens
aaatgatgtggtcaa

SEQ ID NO: 1554109 - DNA, 15 bp, Homo sapiens
aatgatgtggtcaat

SEQ ID NO: 1554110 - DNA, 15 bp, Homo sapiens
atgatgtggtcaatg

SEQ ID NO: 1554111 - DNA, 15 bp, Homo sapiens
tgatgtggtcaatgg

SEQ ID NO: 1554112 - DNA, 15 bp, Homo sapiens
gatgtggtcaatggc

SEQ ID NO: 1554113 - DNA, 15 bp, Homo sapiens
atgtggtcaatggca

SEQ ID NO: 1554114 - DNA, 15 bp, Homo sapiens
tgtggtcaatggcag

SEQ ID NO: 1554115 - DNA, 15 bp, Homo sapiens
gtggtcaatggcaga

SEQ ID NO: 1554116 - DNA, 15 bp, Homo sapiens
tggtcaatggcagag

SEQ ID NO: 1554117 - DNA, 15 bp, Homo sapiens
ggtcaatggcagagc

SEQ ID NO: 1554118 - DNA, 15 bp, Homo sapiens
gtcaatggcagagcc

SEQ ID NO: 1554119 - DNA, 15 bp, Homo sapiens
tcaatggcagagcca

SEQ ID NO: 1554120 - DNA, 15 bp, Homo sapiens
caatggcagagccag

SEQ ID NO: 1554121 - DNA, 15 bp, Homo sapiens
agccaggatttgaat

SEQ ID NO: 1554122 - DNA, 15 bp, Homo sapiens
gccaggatttgaatc

SEQ ID NO: 1554123 - DNA, 15 bp, Homo sapiens
ccaggatttgaatcc

SEQ ID NO: 1554124 - DNA, 15 bp, Homo sapiens
caggatttgaatcca

SEQ ID NO: 1554125 - DNA, 15 bp, Homo sapiens
aggatttgaatccaa

SEQ ID NO: 1554126 - DNA, 15 bp, Homo sapiens
ggatttgaatccaat

SEQ ID NO: 1554127 - DNA, 15 bp, Homo sapiens
gatttgaatccaatt

SEQ ID NO: 1554128 - DNA, 15 bp, Homo sapiens
atttgaatccaattc

SEQ ID NO: 1554129 - DNA, 15 bp, Homo sapiens
tttgaatccaattcg

SEQ ID NO: 1554130 - DNA, 15 bp, Homo sapiens
ttgaatccaattcgt

SEQ ID NO: 1554131 - DNA, 15 bp, Homo sapiens
tgaatccaattcgtg

SEQ ID NO: 1554132 - DNA, 15 bp, Homo sapiens
gaatccaattcgtgc

SEQ ID NO: 1554133 - DNA, 15 bp, Homo sapiens
aatccaattcgtgct

SEQ ID NO: 1554134 - DNA, 15 bp, Homo sapiens
atccaattcgtgctc

SEQ ID NO: 1554135 - DNA, 15 bp, Homo sapiens
tccaattcgtgctcc

SEQ ID NO: 1554136 - DNA, 15 bp, Homo sapiens
ccaattcgtgctcct

SEQ ID NO: 1554137 - DNA, 15 bp, Homo sapiens
caattcgtgctccta

SEQ ID NO: 1554138 - DNA, 15 bp, Homo sapiens
aattcgtgctcctat

SEQ ID NO: 1554139 - DNA, 15 bp, Homo sapiens
attcgtgctcctatc

SEQ ID NO: 1554140 - DNA, 15 bp, Homo sapiens
ttcgtgctcctatca

SEQ ID NO: 1554141 - DNA, 15 bp, Homo sapiens
tcgtgctcctatcat

SEQ ID NO: 1554142 - DNA, 15 bp, Homo sapiens
cgtgctcctatcatc

SEQ ID NO: 1554143 - DNA, 15 bp, Homo sapiens
gtgctcctatcatca

SEQ ID NO: 1554144 - DNA, 15 bp, Homo sapiens
tgctcctatcatcac

SEQ ID NO: 1554145 - DNA, 15 bp, Homo sapiens
gctcctatcatcaca

SEQ ID NO: 1554146 - DNA, 15 bp, Homo sapiens
ctcctatcatcacac

SEQ ID NO: 1554147 - DNA, 15 bp, Homo sapiens
tcctatcatcacacc

SEQ ID NO: 1554148 - DNA, 15 bp, Homo sapiens
cctatcatcacacct

SEQ ID NO: 1554149 - DNA, 15 bp, Homo sapiens
ctatcatcacacctt

SEQ ID NO: 1554150 - DNA, 15 bp, Homo sapiens
tatcatcacaccttg

SEQ ID NO: 1554151 - DNA, 15 bp, Homo sapiens
atcatcacaccttga

SEQ ID NO: 1554152 - DNA, 15 bp, Homo sapiens
tcatcacaccttgaa

SEQ ID NO: 1554153 - DNA, 15 bp, Homo sapiens
catcacaccttgaag

SEQ ID NO: 1554154 - DNA, 15 bp, Homo sapiens
atcacaccttgaagg

SEQ ID NO: 1554155 - DNA, 15 bp, Homo sapiens
tcacaccttgaaggg

SEQ ID NO: 1554156 - DNA, 15 bp, Homo sapiens
cacaccttgaagggg

SEQ ID NO: 1554157 - DNA, 15 bp, Homo sapiens
acaccttgaaggggc

SEQ ID NO: 1554158 - DNA, 15 bp, Homo sapiens
caccttgaaggggct

SEQ ID NO: 1554159 - DNA, 15 bp, Homo sapiens
accttgaaggggctg

SEQ ID NO: 1554160 - DNA, 15 bp, Homo sapiens
ccttgaaggggctgg

SEQ ID NO: 1554161 - DNA, 15 bp, Homo sapiens
cttgaaggggctgga

SEQ ID NO: 1554162 - DNA, 15 bp, Homo sapiens
ttgaaggggctggag

SEQ ID NO: 1554163 - DNA, 15 bp, Homo sapiens
tgaaggggctggagc

SEQ ID NO: 1554164 - DNA, 15 bp, Homo sapiens
gaaggggctggagcc

SEQ ID NO: 1554165 - DNA, 15 bp, Homo sapiens
aaggggctggagccc

SEQ ID NO: 1554166 - DNA, 15 bp, Homo sapiens
aggggctggagccca

SEQ ID NO: 1554167 - DNA, 15 bp, Homo sapiens
ggggctggagcccaa

SEQ ID NO: 1554168 - DNA, 15 bp, Homo sapiens
gggctggagcccaag

SEQ ID NO: 1554169 - DNA, 15 bp, Homo sapiens
ggctggagcccaagc

SEQ ID NO: 1554170 - DNA, 15 bp, Homo sapiens
gctggagcccaagca

SEQ ID NO: 1554171 - DNA, 15 bp, Homo sapiens
ctggagcccaagcag

SEQ ID NO: 1554172 - DNA, 15 bp, Homo sapiens
tggagcccaagcagc

SEQ ID NO: 1554173 - DNA, 15 bp, Homo sapiens
ggagcccaagcagca

SEQ ID NO: 1554174 - DNA, 15 bp, Homo sapiens
gagcccaagcagcaa

SEQ ID NO: 1554175 - DNA, 15 bp, Homo sapiens
agcccaagcagcaac

SEQ ID NO: 1554176 - DNA, 15 bp, Homo sapiens
gcccaagcagcaact

SEQ ID NO: 1554177 - DNA, 15 bp, Homo sapiens
cccaagcagcaactg

SEQ ID NO: 1554178 - DNA, 15 bp, Homo sapiens
ccaagcagcaactgg

SEQ ID NO: 1554179 - DNA, 15 bp, Homo sapiens
caagcagcaactggc

SEQ ID NO: 1554180 - DNA, 15 bp, Homo sapiens
aagcagcaactggcc

SEQ ID NO: 1554181 - DNA, 15 bp, Homo sapiens
agcagcaactggccc

SEQ ID NO: 1554182 - DNA, 15 bp, Homo sapiens
gcagcaactggccca

SEQ ID NO: 1554183 - DNA, 15 bp, Homo sapiens
cagcaactggcccag

SEQ ID NO: 1554184 - DNA, 15 bp, Homo sapiens
agcaactggcccaga

SEQ ID NO: 1554185 - DNA, 15 bp, Homo sapiens
gcaactggcccagaa

SEQ ID NO: 1554186 - DNA, 15 bp, Homo sapiens
caactggcccagaaa

SEQ ID NO: 1554187 - DNA, 15 bp, Homo sapiens
aactggcccagaaac

SEQ ID NO: 1554188 - DNA, 15 bp, Homo sapiens
actggcccagaaaca

SEQ ID NO: 1554189 - DNA, 15 bp, Homo sapiens
ctggcccagaaacaa

SEQ ID NO: 1554190 - DNA, 15 bp, Homo sapiens
tggcccagaaacaag

SEQ ID NO: 1554191 - DNA, 15 bp, Homo sapiens
ggcccagaaacaagt

SEQ ID NO: 1554192 - DNA, 15 bp, Homo sapiens
gcccagaaacaagtg

SEQ ID NO: 1554193 - DNA, 15 bp, Homo sapiens
cccagaaacaagtgc

SEQ ID NO: 1554194 - DNA, 15 bp, Homo sapiens
ccagaaacaagtgcg

SEQ ID NO: 1554195 - DNA, 15 bp, Homo sapiens
cagaaacaagtgcgg

SEQ ID NO: 1554196 - DNA, 15 bp, Homo sapiens
agaaacaagtgcggg

SEQ ID NO: 1554197 - DNA, 15 bp, Homo sapiens
gaaacaagtgcgggc

SEQ ID NO: 1554198 - DNA, 15 bp, Homo sapiens
aaacaagtgcgggca

SEQ ID NO: 1554199 - DNA, 15 bp, Homo sapiens
aacaagtgcgggcat

SEQ ID NO: 1554200 - DNA, 15 bp, Homo sapiens
acaagtgcgggcatg

SEQ ID NO: 1554201 - DNA, 15 bp, Homo sapiens
caagtgcgggcatga

SEQ ID NO: 1554202 - DNA, 15 bp, Homo sapiens
aagtgcgggcatgag

SEQ ID NO: 1554203 - DNA, 15 bp, Homo sapiens
agtgcgggcatgagg

SEQ ID NO: 1554204 - DNA, 15 bp, Homo sapiens
gtgcgggcatgaggt

SEQ ID NO: 1554205 - DNA, 15 bp, Homo sapiens
tgcgggcatgaggtt

SEQ ID NO: 1554206 - DNA, 15 bp, Homo sapiens
gcgggcatgaggtta

SEQ ID NO: 1554207 - DNA, 15 bp, Homo sapiens
cgggcatgaggttat

SEQ ID NO: 1554208 - DNA, 15 bp, Homo sapiens
gggcatgaggttatg

SEQ ID NO: 1554209 - DNA, 15 bp, Homo sapiens
ggcatgaggttatgc

SEQ ID NO: 1554210 - DNA, 15 bp, Homo sapiens
gcatgaggttatgct

SEQ ID NO: 1554211 - DNA, 15 bp, Homo sapiens
catgaggttatgctc

SEQ ID NO: 1554212 - DNA, 15 bp, Homo sapiens
atgaggttatgctct

SEQ ID NO: 1554213 - DNA, 15 bp, Homo sapiens
tgaggttatgctctg

SEQ ID NO: 1554214 - DNA, 15 bp, Homo sapiens
gaggttatgctctgg

SEQ ID NO: 1554215 - DNA, 15 bp, Homo sapiens
aggttatgctctggg

SEQ ID NO: 1554216 - DNA, 15 bp, Homo sapiens
ggttatgctctgggg

SEQ ID NO: 1554217 - DNA, 15 bp, Homo sapiens
gttatgctctgggga

SEQ ID NO: 1554218 - DNA, 15 bp, Homo sapiens
ttatgctctggggaa

SEQ ID NO: 1554219 - DNA, 15 bp, Homo sapiens
tatgctctggggaag

SEQ ID NO: 1554220 - DNA, 15 bp, Homo sapiens
atgctctggggaagc

SEQ ID NO: 1554221 - DNA, 15 bp, Homo sapiens
tgctctggggaagcc

SEQ ID NO: 1554222 - DNA, 15 bp, Homo sapiens
gctctggggaagcca

SEQ ID NO: 1554223 - DNA, 15 bp, Homo sapiens
ctctggggaagccag

SEQ ID NO: 1554224 - DNA, 15 bp, Homo sapiens
tctggggaagccagg

SEQ ID NO: 1554225 - DNA, 15 bp, Homo sapiens
ctggggaagccaggt

SEQ ID NO: 1554226 - DNA, 15 bp, Homo sapiens
tggggaagccaggtg

SEQ ID NO: 1554227 - DNA, 15 bp, Homo sapiens
ggggaagccaggtgt

SEQ ID NO: 1554228 - DNA, 15 bp, Homo sapiens
gggaagccaggtgtc

SEQ ID NO: 1554229 - DNA, 15 bp, Homo sapiens
ggaagccaggtgtct

SEQ ID NO: 1554230 - DNA, 15 bp, Homo sapiens
gaagccaggtgtctt

SEQ ID NO: 1554231 - DNA, 15 bp, Homo sapiens
aagccaggtgtcttc

SEQ ID NO: 1554232 - DNA, 15 bp, Homo sapiens
agccaggtgtcttcc

SEQ ID NO: 1554233 - DNA, 15 bp, Homo sapiens
gccaggtgtcttcct

SEQ ID NO: 1554234 - DNA, 15 bp, Homo sapiens
ccaggtgtcttcctg

SEQ ID NO: 1554235 - DNA, 15 bp, Homo sapiens
caggtgtcttcctgg

SEQ ID NO: 1554236 - DNA, 15 bp, Homo sapiens
aggtgtcttcctgga

SEQ ID NO: 1554237 - DNA, 15 bp, Homo sapiens
ggtgtcttcctggag

SEQ ID NO: 1554238 - DNA, 15 bp, Homo sapiens
gtgtcttcctggagg

SEQ ID NO: 1554239 - DNA, 15 bp, Homo sapiens
tgtcttcctggagga

SEQ ID NO: 1554240 - DNA, 15 bp, Homo sapiens
gtcttcctggaggag

SEQ ID NO: 1554241 - DNA, 15 bp, Homo sapiens
tcttcctggaggagg

SEQ ID NO: 1554242 - DNA, 15 bp, Homo sapiens
cctggaggaggtggc

SEQ ID NO: 1554243 - DNA, 15 bp, Homo sapiens
ctggaggaggtggcc

SEQ ID NO: 1554244 - DNA, 15 bp, Homo sapiens
tggaggaggtggcct

SEQ ID NO: 1554245 - DNA, 15 bp, Homo sapiens
ggaggaggtggcctg

SEQ ID NO: 1554246 - DNA, 15 bp, Homo sapiens
gaggaggtggcctgg

SEQ ID NO: 1554247 - DNA, 15 bp, Homo sapiens
aggaggtggcctggt

SEQ ID NO: 1554248 - DNA, 15 bp, Homo sapiens
ggaggtggcctggtg

SEQ ID NO: 1554249 - DNA, 15 bp, Homo sapiens
gaggtggcctggtgg

SEQ ID NO: 1554250 - DNA, 15 bp, Homo sapiens
aggtggcctggtggg

SEQ ID NO: 1554251 - DNA, 15 bp, Homo sapiens
ggtggcctggtgggg

SEQ ID NO: 1554252 - DNA, 15 bp, Homo sapiens
gtggcctggtggggc

SEQ ID NO: 1554253 - DNA, 15 bp, Homo sapiens
tggcctggtggggcc

SEQ ID NO: 1554254 - DNA, 15 bp, Homo sapiens
ggcctggtggggccc

SEQ ID NO: 1554255 - DNA, 15 bp, Homo sapiens
gcctggtggggccca

SEQ ID NO: 1554256 - DNA, 15 bp, Homo sapiens
cctggtggggcccaa

SEQ ID NO: 1554257 - DNA, 15 bp, Homo sapiens
ctggtggggcccaat

SEQ ID NO: 1554258 - DNA, 15 bp, Homo sapiens
tggtggggcccaatg

SEQ ID NO: 1554259 - DNA, 15 bp, Homo sapiens
ggtggggcccaatgt

SEQ ID NO: 1554260 - DNA, 15 bp, Homo sapiens
gtggggcccaatgta

SEQ ID NO: 1554261 - DNA, 15 bp, Homo sapiens
tggggcccaatgtaa

SEQ ID NO: 1554262 - DNA, 15 bp, Homo sapiens
ggggcccaatgtaag

SEQ ID NO: 1554263 - DNA, 15 bp, Homo sapiens
gggcccaatgtaagc

SEQ ID NO: 1554264 - DNA, 15 bp, Homo sapiens
ggcccaatgtaagct

SEQ ID NO: 1554265 - DNA, 15 bp, Homo sapiens
gcccaatgtaagctt

SEQ ID NO: 1554266 - DNA, 15 bp, Homo sapiens
cccaatgtaagcttc

SEQ ID NO: 1554267 - DNA, 15 bp, Homo sapiens
ccaatgtaagcttca

SEQ ID NO: 1554268 - DNA, 15 bp, Homo sapiens
caatgtaagcttcac

SEQ ID NO: 1554269 - DNA, 15 bp, Homo sapiens
aatgtaagcttcacc

SEQ ID NO: 1554270 - DNA, 15 bp, Homo sapiens
atgtaagcttcacct

SEQ ID NO: 1554271 - DNA, 15 bp, Homo sapiens
tgtaagcttcacctt

SEQ ID NO: 1554272 - DNA, 15 bp, Homo sapiens
gtaagcttcaccttg

SEQ ID NO: 1554273 - DNA, 15 bp, Homo sapiens
taagcttcaccttgg

SEQ ID NO: 1554274 - DNA, 15 bp, Homo sapiens
aagcttcaccttggc

SEQ ID NO: 1554275 - DNA, 15 bp, Homo sapiens
agcttcaccttggca

SEQ ID NO: 1554276 - DNA, 15 bp, Homo sapiens
gcttcaccttggcac

SEQ ID NO: 1554277 - DNA, 15 bp, Homo sapiens
cttcaccttggcacg

SEQ ID NO: 1554278 - DNA, 15 bp, Homo sapiens
ttcaccttggcacgt

SEQ ID NO: 1554279 - DNA, 15 bp, Homo sapiens
tcaccttggcacgtg

SEQ ID NO: 1554280 - DNA, 15 bp, Homo sapiens
caccttggcacgtgg

SEQ ID NO: 1554281 - DNA, 15 bp, Homo sapiens
accttggcacgtggg

SEQ ID NO: 1554282 - DNA, 15 bp, Homo sapiens
ccttggcacgtggga

SEQ ID NO: 1554283 - DNA, 15 bp, Homo sapiens
cttggcacgtgggac

SEQ ID NO: 1554284 - DNA, 15 bp, Homo sapiens
ttggcacgtgggact

SEQ ID NO: 1554285 - DNA, 15 bp, Homo sapiens
tggcacgtgggactg

SEQ ID NO: 1554286 - DNA, 15 bp, Homo sapiens
ggcacgtgggactga

SEQ ID NO: 1554287 - DNA, 15 bp, Homo sapiens
gcacgtgggactgaa

SEQ ID NO: 1554288 - DNA, 15 bp, Homo sapiens
cacgtgggactgaag

SEQ ID NO: 1554289 - DNA, 15 bp, Homo sapiens
acgtgggactgaagt

SEQ ID NO: 1554290 - DNA, 15 bp, Homo sapiens
cgtgggactgaagtc

SEQ ID NO: 1554291 - DNA, 15 bp, Homo sapiens
gtgggactgaagtca

SEQ ID NO: 1554292 - DNA, 15 bp, Homo sapiens
tgggactgaagtcag

SEQ ID NO: 1554293 - DNA, 15 bp, Homo sapiens
gggactgaagtcaga

SEQ ID NO: 1554294 - DNA, 15 bp, Homo sapiens
ggactgaagtcagat

SEQ ID NO: 1554295 - DNA, 15 bp, Homo sapiens
gactgaagtcagatg

SEQ ID NO: 1554296 - DNA, 15 bp, Homo sapiens
actgaagtcagatga

SEQ ID NO: 1554297 - DNA, 15 bp, Homo sapiens
ctgaagtcagatgag

SEQ ID NO: 1554298 - DNA, 15 bp, Homo sapiens
tgaagtcagatgagg

SEQ ID NO: 1554299 - DNA, 15 bp, Homo sapiens
gaagtcagatgaggc

SEQ ID NO: 1554300 - DNA, 15 bp, Homo sapiens
aagtcagatgaggcc

SEQ ID NO: 1554301 - DNA, 15 bp, Homo sapiens
agtcagatgaggccc

SEQ ID NO: 1554302 - DNA, 15 bp, Homo sapiens
gtcagatgaggccca

SEQ ID NO: 1554303 - DNA, 15 bp, Homo sapiens
tcagatgaggcccag

SEQ ID NO: 1554304 - DNA, 15 bp, Homo sapiens
cagatgaggcccagg

SEQ ID NO: 1554305 - DNA, 15 bp, Homo sapiens
agatgaggcccaggc

SEQ ID NO: 1554306 - DNA, 15 bp, Homo sapiens
gatgaggcccaggct

SEQ ID NO: 1554307 - DNA, 15 bp, Homo sapiens
atgaggcccaggctg

SEQ ID NO: 1554308 - DNA, 15 bp, Homo sapiens
tgaggcccaggctgg

SEQ ID NO: 1554309 - DNA, 15 bp, Homo sapiens
gaggcccaggctggt

SEQ ID NO: 1554310 - DNA, 15 bp, Homo sapiens
aggcccaggctggtc

SEQ ID NO: 1554311 - DNA, 15 bp, Homo sapiens
ggcccaggctggtct

SEQ ID NO: 1554312 - DNA, 15 bp, Homo sapiens
ccaggctggtctcct

SEQ ID NO: 1554313 - DNA, 15 bp, Homo sapiens
caggctggtctccta

SEQ ID NO: 1554314 - DNA, 15 bp, Homo sapiens
aggctggtctcctaa

SEQ ID NO: 1554315 - DNA, 15 bp, Homo sapiens
ggctggtctcctaaa

SEQ ID NO: 1554316 - DNA, 15 bp, Homo sapiens
gctggtctcctaaaa

SEQ ID NO: 1554317 - DNA, 15 bp, Homo sapiens
ctggtctcctaaaag

SEQ ID NO: 1554318 - DNA, 15 bp, Homo sapiens
tggtctcctaaaagt

SEQ ID NO: 1554319 - DNA, 15 bp, Homo sapiens
ggtctcctaaaagta

SEQ ID NO: 1554320 - DNA, 15 bp, Homo sapiens
gtctcctaaaagtac

SEQ ID NO: 1554321 - DNA, 15 bp, Homo sapiens
tctcctaaaagtact

SEQ ID NO: 1554322 - DNA, 15 bp, Homo sapiens
ctcctaaaagtactg

SEQ ID NO: 1554323 - DNA, 15 bp, Homo sapiens
tcctaaaagtactgt

SEQ ID NO: 1554324 - DNA, 15 bp, Homo sapiens
cctaaaagtactgtc

SEQ ID NO: 1554325 - DNA, 15 bp, Homo sapiens
ctaaaagtactgtct

SEQ ID NO: 1554326 - DNA, 15 bp, Homo sapiens
taaaagtactgtctc

SEQ ID NO: 1554327 - DNA, 15 bp, Homo sapiens
aaaagtactgtctcc

SEQ ID NO: 1554328 - DNA, 15 bp, Homo sapiens
aaagtactgtctcct

SEQ ID NO: 1554329 - DNA, 15 bp, Homo sapiens
aagtactgtctcctt

SEQ ID NO: 1554330 - DNA, 15 bp, Homo sapiens
agtactgtctccttg

SEQ ID NO: 1554331 - DNA, 15 bp, Homo sapiens
gtactgtctccttgt

SEQ ID NO: 1554332 - DNA, 15 bp, Homo sapiens
tactgtctccttgtc

SEQ ID NO: 1554333 - DNA, 15 bp, Homo sapiens
actgtctccttgtcc

SEQ ID NO: 1554334 - DNA, 15 bp, Homo sapiens
ctgtctccttgtcca

SEQ ID NO: 1554335 - DNA, 15 bp, Homo sapiens
tgtctccttgtccac

SEQ ID NO: 1554336 - DNA, 15 bp, Homo sapiens
gtctccttgtccaca

SEQ ID NO: 1554337 - DNA, 15 bp, Homo sapiens
tctccttgtccacac

SEQ ID NO: 1554338 - DNA, 15 bp, Homo sapiens
ctccttgtccacact

SEQ ID NO: 1554339 - DNA, 15 bp, Homo sapiens
tccttgtccacactc

SEQ ID NO: 1554340 - DNA, 15 bp, Homo sapiens
ccttgtccacactca

SEQ ID NO: 1554341 - DNA, 15 bp, Homo sapiens
cttgtccacactcac

SEQ ID NO: 1554342 - DNA, 15 bp, Homo sapiens
ttgtccacactcaca

SEQ ID NO: 1554343 - DNA, 15 bp, Homo sapiens
tgtccacactcacag

SEQ ID NO: 1554344 - DNA, 15 bp, Homo sapiens
gtccacactcacagt

SEQ ID NO: 1554345 - DNA, 15 bp, Homo sapiens
tccacactcacagta

SEQ ID NO: 1554346 - DNA, 15 bp, Homo sapiens
ccacactcacagtac

SEQ ID NO: 1554347 - DNA, 15 bp, Homo sapiens
cacactcacagtaca

SEQ ID NO: 1554348 - DNA, 15 bp, Homo sapiens
acactcacagtacac

SEQ ID NO: 1554349 - DNA, 15 bp, Homo sapiens
cactcacagtacact

SEQ ID NO: 1554350 - DNA, 15 bp, Homo sapiens
actcacagtacactc

SEQ ID NO: 1554351 - DNA, 15 bp, Homo sapiens
ctcacagtacactca

SEQ ID NO: 1554352 - DNA, 15 bp, Homo sapiens
tcacagtacactcac

SEQ ID NO: 1554353 - DNA, 15 bp, Homo sapiens
cacagtacactcacc

SEQ ID NO: 1554354 - DNA, 15 bp, Homo sapiens
acagtacactcacct

SEQ ID NO: 1554355 - DNA, 15 bp, Homo sapiens
cagtacactcacctc

SEQ ID NO: 1554356 - DNA, 15 bp, Homo sapiens
agtacactcacctct

SEQ ID NO: 1554357 - DNA, 15 bp, Homo sapiens
gtacactcacctctc

SEQ ID NO: 1554358 - DNA, 15 bp, Homo sapiens
tacactcacctctcc

SEQ ID NO: 1554359 - DNA, 15 bp, Homo sapiens
acactcacctctccc

SEQ ID NO: 1554360 - DNA, 15 bp, Homo sapiens
cactcacctctcccc

SEQ ID NO: 1554361 - DNA, 15 bp, Homo sapiens
actcacctctcccca

SEQ ID NO: 1554362 - DNA, 15 bp, Homo sapiens
ctcacctctccccaa

SEQ ID NO: 1554363 - DNA, 15 bp, Homo sapiens
tcacctctccccaag

SEQ ID NO: 1554364 - DNA, 15 bp, Homo sapiens
cacctctccccaagg

SEQ ID NO: 1554365 - DNA, 15 bp, Homo sapiens
acctctccccaagga

SEQ ID NO: 1554366 - DNA, 15 bp, Homo sapiens
cctctccccaaggag

SEQ ID NO: 1554367 - DNA, 15 bp, Homo sapiens
ctctccccaaggagc

SEQ ID NO: 1554368 - DNA, 15 bp, Homo sapiens
tctccccaaggagca

SEQ ID NO: 1554369 - DNA, 15 bp, Homo sapiens
ctccccaaggagcag

SEQ ID NO: 1554370 - DNA, 15 bp, Homo sapiens
tccccaaggagcagg

SEQ ID NO: 1554371 - DNA, 15 bp, Homo sapiens
ccccaaggagcaggg

SEQ ID NO: 1554372 - DNA, 15 bp, Homo sapiens
cccaaggagcaggga

SEQ ID NO: 1554373 - DNA, 15 bp, Homo sapiens
ccaaggagcagggag

SEQ ID NO: 1554374 - DNA, 15 bp, Homo sapiens
caaggagcagggaga

SEQ ID NO: 1554375 - DNA, 15 bp, Homo sapiens
aaggagcagggagag

SEQ ID NO: 1554376 - DNA, 15 bp, Homo sapiens
aggagcagggagagc

SEQ ID NO: 1554377 - DNA, 15 bp, Homo sapiens
ggagcagggagagcc

SEQ ID NO: 1554378 - DNA, 15 bp, Homo sapiens
gagcagggagagcct

SEQ ID NO: 1554379 - DNA, 15 bp, Homo sapiens
agcagggagagcctg

SEQ ID NO: 1554380 - DNA, 15 bp, Homo sapiens
gcagggagagcctgg

SEQ ID NO: 1554381 - DNA, 15 bp, Homo sapiens
cagggagagcctggg

SEQ ID NO: 1554382 - DNA, 15 bp, Homo sapiens
agggagagcctgggc

SEQ ID NO: 1554383 - DNA, 15 bp, Homo sapiens
gggagagcctgggcc

SEQ ID NO: 1554384 - DNA, 15 bp, Homo sapiens
ggagagcctgggcct

SEQ ID NO: 1554385 - DNA, 15 bp, Homo sapiens
gagagcctgggccta

SEQ ID NO: 1554386 - DNA, 15 bp, Homo sapiens
agagcctgggcctag

SEQ ID NO: 1554387 - DNA, 15 bp, Homo sapiens
gagcctgggcctaga

SEQ ID NO: 1554388 - DNA, 15 bp, Homo sapiens
agcctgggcctagaa

SEQ ID NO: 1554389 - DNA, 15 bp, Homo sapiens
gcctgggcctagaag

SEQ ID NO: 1554390 - DNA, 15 bp, Homo sapiens
cctgggcctagaagg

SEQ ID NO: 1554391 - DNA, 15 bp, Homo sapiens
ctgggcctagaagga

SEQ ID NO: 1554392 - DNA, 15 bp, Homo sapiens
tgggcctagaaggag

SEQ ID NO: 1554393 - DNA, 15 bp, Homo sapiens
gggcctagaaggagg

SEQ ID NO: 1554394 - DNA, 15 bp, Homo sapiens
ggcctagaaggaggc

SEQ ID NO: 1554395 - DNA, 15 bp, Homo sapiens
gcctagaaggaggca

SEQ ID NO: 1554396 - DNA, 15 bp, Homo sapiens
cctagaaggaggcag

SEQ ID NO: 1554397 - DNA, 15 bp, Homo sapiens
ctagaaggaggcagg

SEQ ID NO: 1554398 - DNA, 15 bp, Homo sapiens
tagaaggaggcagga

SEQ ID NO: 1554399 - DNA, 15 bp, Homo sapiens
agaaggaggcaggag

SEQ ID NO: 1554400 - DNA, 15 bp, Homo sapiens
gaaggaggcaggagc

SEQ ID NO: 1554401 - DNA, 15 bp, Homo sapiens
aaggaggcaggagcc

SEQ ID NO: 1554402 - DNA, 15 bp, Homo sapiens
aggaggcaggagcct

SEQ ID NO: 1554403 - DNA, 15 bp, Homo sapiens
ggaggcaggagcctg

SEQ ID NO: 1554404 - DNA, 15 bp, Homo sapiens
gaggcaggagcctgg

SEQ ID NO: 1554405 - DNA, 15 bp, Homo sapiens
aggcaggagcctggg

SEQ ID NO: 1554406 - DNA, 15 bp, Homo sapiens
ggcaggagcctgggc

SEQ ID NO: 1554407 - DNA, 15 bp, Homo sapiens
gcaggagcctgggcc

SEQ ID NO: 1554408 - DNA, 15 bp, Homo sapiens
caggagcctgggccc

SEQ ID NO: 1554409 - DNA, 15 bp, Homo sapiens
aggagcctgggccca

SEQ ID NO: 1554410 - DNA, 15 bp, Homo sapiens
ggagcctgggcccat

SEQ ID NO: 1554411 - DNA, 15 bp, Homo sapiens
gagcctgggcccatc

SEQ ID NO: 1554412 - DNA, 15 bp, Homo sapiens
agcctgggcccatca

SEQ ID NO: 1554413 - DNA, 15 bp, Homo sapiens
gcctgggcccatcag

SEQ ID NO: 1554414 - DNA, 15 bp, Homo sapiens
cctgggcccatcagt

SEQ ID NO: 1554415 - DNA, 15 bp, Homo sapiens
ctgggcccatcagtg

SEQ ID NO: 1554416 - DNA, 15 bp, Homo sapiens
tgggcccatcagtgg

SEQ ID NO: 1554417 - DNA, 15 bp, Homo sapiens
gggcccatcagtggc

SEQ ID NO: 1554418 - DNA, 15 bp, Homo sapiens
ggcccatcagtggcc

SEQ ID NO: 1554419 - DNA, 15 bp, Homo sapiens
gcccatcagtggcct

SEQ ID NO: 1554420 - DNA, 15 bp, Homo sapiens
cccatcagtggcctg

SEQ ID NO: 1554421 - DNA, 15 bp, Homo sapiens
ccatcagtggcctgc

SEQ ID NO: 1554422 - DNA, 15 bp, Homo sapiens
catcagtggcctgcc

SEQ ID NO: 1554423 - DNA, 15 bp, Homo sapiens
atcagtggcctgcct

SEQ ID NO: 1554424 - DNA, 15 bp, Homo sapiens
tcagtggcctgcctt

SEQ ID NO: 1554425 - DNA, 15 bp, Homo sapiens
cagtggcctgccttc

SEQ ID NO: 1554426 - DNA, 15 bp, Homo sapiens
agtggcctgccttct

SEQ ID NO: 1554427 - DNA, 15 bp, Homo sapiens
gtggcctgccttctc

SEQ ID NO: 1554428 - DNA, 15 bp, Homo sapiens
tggcctgccttctcc

SEQ ID NO: 1554429 - DNA, 15 bp, Homo sapiens
ggcctgccttctcca

SEQ ID NO: 1554430 - DNA, 15 bp, Homo sapiens
gcctgccttctccaa

SEQ ID NO: 1554431 - DNA, 15 bp, Homo sapiens
cctgccttctccaat

SEQ ID NO: 1554432 - DNA, 15 bp, Homo sapiens
ctgccttctccaata

SEQ ID NO: 1554433 - DNA, 15 bp, Homo sapiens
tgccttctccaatac

SEQ ID NO: 1554434 - DNA, 15 bp, Homo sapiens
gccttctccaatact

SEQ ID NO: 1554435 - DNA, 15 bp, Homo sapiens
ccttctccaatactg

SEQ ID NO: 1554436 - DNA, 15 bp, Homo sapiens
cttctccaatactgc

SEQ ID NO: 1554437 - DNA, 15 bp, Homo sapiens
ttctccaatactgcc

SEQ ID NO: 1554438 - DNA, 15 bp, Homo sapiens
tctccaatactgcct

SEQ ID NO: 1554439 - DNA, 15 bp, Homo sapiens
ctccaatactgcctg

SEQ ID NO: 1554440 - DNA, 15 bp, Homo sapiens
tccaatactgcctgt

SEQ ID NO: 1554441 - DNA, 15 bp, Homo sapiens
ccaatactgcctgtt

SEQ ID NO: 1554442 - DNA, 15 bp, Homo sapiens
caatactgcctgttg

SEQ ID NO: 1554443 - DNA, 15 bp, Homo sapiens
aatactgcctgttgg

SEQ ID NO: 1554444 - DNA, 15 bp, Homo sapiens
atactgcctgttgga

SEQ ID NO: 1554445 - DNA, 15 bp, Homo sapiens
tactgcctgttggaa

SEQ ID NO: 1554446 - DNA, 15 bp, Homo sapiens
actgcctgttggaag

SEQ ID NO: 1554447 - DNA, 15 bp, Homo sapiens
ctgcctgttggaagc

SEQ ID NO: 1554448 - DNA, 15 bp, Homo sapiens
tgcctgttggaagca

SEQ ID NO: 1554449 - DNA, 15 bp, Homo sapiens
gcctgttggaagcac

SEQ ID NO: 1554450 - DNA, 15 bp, Homo sapiens
cctgttggaagcact

SEQ ID NO: 1554451 - DNA, 15 bp, Homo sapiens
ctgttggaagcactt

SEQ ID NO: 1554452 - DNA, 15 bp, Homo sapiens
tgttggaagcacttt

SEQ ID NO: 1554453 - DNA, 15 bp, Homo sapiens
gttggaagcactttc

SEQ ID NO: 1554454 - DNA, 15 bp, Homo sapiens
ttggaagcactttcc

SEQ ID NO: 1554455 - DNA, 15 bp, Homo sapiens
tggaagcactttccg

SEQ ID NO: 1554456 - DNA, 15 bp, Homo sapiens
ggaagcactttccgt

SEQ ID NO: 1554457 - DNA, 15 bp, Homo sapiens
gaagcactttccgtg

SEQ ID NO: 1554458 - DNA, 15 bp, Homo sapiens
aagcactttccgtgc

SEQ ID NO: 1554459 - DNA, 15 bp, Homo sapiens
agcactttccgtgct

SEQ ID NO: 1554460 - DNA, 15 bp, Homo sapiens
gcactttccgtgcta

SEQ ID NO: 1554461 - DNA, 15 bp, Homo sapiens
cactttccgtgctac

SEQ ID NO: 1554462 - DNA, 15 bp, Homo sapiens
actttccgtgctaca

SEQ ID NO: 1554463 - DNA, 15 bp, Homo sapiens
ctttccgtgctacac

SEQ ID NO: 1554464 - DNA, 15 bp, Homo sapiens
tttccgtgctacact

SEQ ID NO: 1554465 - DNA, 15 bp, Homo sapiens
ttccgtgctacactc

SEQ ID NO: 1554466 - DNA, 15 bp, Homo sapiens
tccgtgctacactct

SEQ ID NO: 1554467 - DNA, 15 bp, Homo sapiens
ccgtgctacactctt

SEQ ID NO: 1554468 - DNA, 15 bp, Homo sapiens
cgtgctacactcttt

SEQ ID NO: 1554469 - DNA, 15 bp, Homo sapiens
gtgctacactctttt

SEQ ID NO: 1554470 - DNA, 15 bp, Homo sapiens
tgctacactcttttc

SEQ ID NO: 1554471 - DNA, 15 bp, Homo sapiens
gctacactcttttca

SEQ ID NO: 1554472 - DNA, 15 bp, Homo sapiens
ctacactcttttcat

SEQ ID NO: 1554473 - DNA, 15 bp, Homo sapiens
tacactcttttcatc

SEQ ID NO: 1554474 - DNA, 15 bp, Homo sapiens
acactcttttcatcc

SEQ ID NO: 1554475 - DNA, 15 bp, Homo sapiens
cactcttttcatcct

SEQ ID NO: 1554476 - DNA, 15 bp, Homo sapiens
actcttttcatcctc

SEQ ID NO: 1554477 - DNA, 15 bp, Homo sapiens
ctcttttcatcctca

SEQ ID NO: 1554478 - DNA, 15 bp, Homo sapiens
tcttttcatcctcac

SEQ ID NO: 1554479 - DNA, 15 bp, Homo sapiens
cttttcatcctcaca

SEQ ID NO: 1554480 - DNA, 15 bp, Homo sapiens
ttttcatcctcacaa

SEQ ID NO: 1554481 - DNA, 15 bp, Homo sapiens
tttcatcctcacaac

SEQ ID NO: 1554482 - DNA, 15 bp, Homo sapiens
ttcatcctcacaacc

SEQ ID NO: 1554483 - DNA, 15 bp, Homo sapiens
tcatcctcacaaccc

SEQ ID NO: 1554484 - DNA, 15 bp, Homo sapiens
atcctcacaaccctc

SEQ ID NO: 1554485 - DNA, 15 bp, Homo sapiens
tcctcacaaccctct

SEQ ID NO: 1554486 - DNA, 15 bp, Homo sapiens
cctcacaaccctctg

SEQ ID NO: 1554487 - DNA, 15 bp, Homo sapiens
ctcacaaccctctga

SEQ ID NO: 1554488 - DNA, 15 bp, Homo sapiens
tcacaaccctctgag

SEQ ID NO: 1554489 - DNA, 15 bp, Homo sapiens
cacaaccctctgagg

SEQ ID NO: 1554490 - DNA, 15 bp, Homo sapiens
acaaccctctgaggc

SEQ ID NO: 1554491 - DNA, 15 bp, Homo sapiens
caaccctctgaggca

SEQ ID NO: 1554492 - DNA, 15 bp, Homo sapiens
aaccctctgaggcaa

SEQ ID NO: 1554493 - DNA, 15 bp, Homo sapiens
accctctgaggcaag

SEQ ID NO: 1554494 - DNA, 15 bp, Homo sapiens
ccctctgaggcaagt

SEQ ID NO: 1554495 - DNA, 15 bp, Homo sapiens
cctctgaggcaagta

SEQ ID NO: 1554496 - DNA, 15 bp, Homo sapiens
ctctgaggcaagtac

SEQ ID NO: 1554497 - DNA, 15 bp, Homo sapiens
tctgaggcaagtact

SEQ ID NO: 1554498 - DNA, 15 bp, Homo sapiens
ctgaggcaagtactc

SEQ ID NO: 1554499 - DNA, 15 bp, Homo sapiens
tgaggcaagtactct

SEQ ID NO: 1554500 - DNA, 15 bp, Homo sapiens
gaggcaagtactctg

SEQ ID NO: 1554501 - DNA, 15 bp, Homo sapiens
aggcaagtactctga

SEQ ID NO: 1554502 - DNA, 15 bp, Homo sapiens
ggcaagtactctgat

SEQ ID NO: 1554503 - DNA, 15 bp, Homo sapiens
gcaagtactctgatt

SEQ ID NO: 1554504 - DNA, 15 bp, Homo sapiens
caagtactctgatta

SEQ ID NO: 1554505 - DNA, 15 bp, Homo sapiens
aagtactctgattac

SEQ ID NO: 1554506 - DNA, 15 bp, Homo sapiens
agtactctgattacc

SEQ ID NO: 1554507 - DNA, 15 bp, Homo sapiens
gtactctgattaccc

SEQ ID NO: 1554508 - DNA, 15 bp, Homo sapiens
tactctgattaccct

SEQ ID NO: 1554509 - DNA, 15 bp, Homo sapiens
actctgattaccctc

SEQ ID NO: 1554510 - DNA, 15 bp, Homo sapiens
ctctgattaccctcc

SEQ ID NO: 1554511 - DNA, 15 bp, Homo sapiens
tctgattaccctccc

SEQ ID NO: 1554512 - DNA, 15 bp, Homo sapiens
ctgattaccctccca

SEQ ID NO: 1554513 - DNA, 15 bp, Homo sapiens
tgattaccctcccat

SEQ ID NO: 1554514 - DNA, 15 bp, Homo sapiens
gattaccctcccatt

SEQ ID NO: 1554515 - DNA, 15 bp, Homo sapiens
attaccctcccattt

SEQ ID NO: 1554516 - DNA, 15 bp, Homo sapiens
ttaccctcccatttt

SEQ ID NO: 1554517 - DNA, 15 bp, Homo sapiens
taccctcccattttc

SEQ ID NO: 1554518 - DNA, 15 bp, Homo sapiens
accctcccattttca

SEQ ID NO: 1554519 - DNA, 15 bp, Homo sapiens
ccctcccattttcag

SEQ ID NO: 1554520 - DNA, 15 bp, Homo sapiens
cctcccattttcaga

SEQ ID NO: 1554521 - DNA, 15 bp, Homo sapiens
ctcccattttcagat

SEQ ID NO: 1554522 - DNA, 15 bp, Homo sapiens
tcccattttcagatg

SEQ ID NO: 1554523 - DNA, 15 bp, Homo sapiens
cccattttcagatgg

SEQ ID NO: 1554524 - DNA, 15 bp, Homo sapiens
ccattttcagatggg

SEQ ID NO: 1554525 - DNA, 15 bp, Homo sapiens
cattttcagatgggg

SEQ ID NO: 1554526 - DNA, 15 bp, Homo sapiens
attttcagatgggga

SEQ ID NO: 1554527 - DNA, 15 bp, Homo sapiens
ttttcagatggggaa

SEQ ID NO: 1554528 - DNA, 15 bp, Homo sapiens
tttcagatggggaaa

SEQ ID NO: 1554529 - DNA, 15 bp, Homo sapiens
ttcagatggggaaac

SEQ ID NO: 1554530 - DNA, 15 bp, Homo sapiens
tcagatggggaaact

SEQ ID NO: 1554531 - DNA, 15 bp, Homo sapiens
cagatggggaaacta

SEQ ID NO: 1554532 - DNA, 15 bp, Homo sapiens
agatggggaaactaa

SEQ ID NO: 1554533 - DNA, 15 bp, Homo sapiens
gatggggaaactaag

SEQ ID NO: 1554534 - DNA, 15 bp, Homo sapiens
atggggaaactaagg

SEQ ID NO: 1554535 - DNA, 15 bp, Homo sapiens
tggggaaactaaggc

SEQ ID NO: 1554536 - DNA, 15 bp, Homo sapiens
ggggaaactaaggca

SEQ ID NO: 1554537 - DNA, 15 bp, Homo sapiens
gggaaactaaggcac

SEQ ID NO: 1554538 - DNA, 15 bp, Homo sapiens
ggaaactaaggcaca

SEQ ID NO: 1554539 - DNA, 15 bp, Homo sapiens
gaaactaaggcacag

SEQ ID NO: 1554540 - DNA, 15 bp, Homo sapiens
aaactaaggcacaga

SEQ ID NO: 1554541 - DNA, 15 bp, Homo sapiens
aactaaggcacagag

SEQ ID NO: 1554542 - DNA, 15 bp, Homo sapiens
actaaggcacagagg

SEQ ID NO: 1554543 - DNA, 15 bp, Homo sapiens
ctaaggcacagaggt

SEQ ID NO: 1554544 - DNA, 15 bp, Homo sapiens
taaggcacagaggtg

SEQ ID NO: 1554545 - DNA, 15 bp, Homo sapiens
aaggcacagaggtgc

SEQ ID NO: 1554546 - DNA, 15 bp, Homo sapiens
aggcacagaggtgct

SEQ ID NO: 1554547 - DNA, 15 bp, Homo sapiens
ggcacagaggtgctc

SEQ ID NO: 1554548 - DNA, 15 bp, Homo sapiens
gcacagaggtgctca

SEQ ID NO: 1554549 - DNA, 15 bp, Homo sapiens
cacagaggtgctcag

SEQ ID NO: 1554550 - DNA, 15 bp, Homo sapiens
acagaggtgctcagt

SEQ ID NO: 1554551 - DNA, 15 bp, Homo sapiens
cagaggtgctcagtg

SEQ ID NO: 1554552 - DNA, 15 bp, Homo sapiens
agaggtgctcagtga

SEQ ID NO: 1554553 - DNA, 15 bp, Homo sapiens
gaggtgctcagtgac

SEQ ID NO: 1554554 - DNA, 15 bp, Homo sapiens
aggtgctcagtgact

SEQ ID NO: 1554555 - DNA, 15 bp, Homo sapiens
ggtgctcagtgactt

SEQ ID NO: 1554556 - DNA, 15 bp, Homo sapiens
gtgctcagtgacttt

SEQ ID NO: 1554557 - DNA, 15 bp, Homo sapiens
tgctcagtgactttt

SEQ ID NO: 1554558 - DNA, 15 bp, Homo sapiens
gctcagtgacttttg

SEQ ID NO: 1554559 - DNA, 15 bp, Homo sapiens
ctcagtgacttttgc

SEQ ID NO: 1554560 - DNA, 15 bp, Homo sapiens
tcagtgacttttgca

SEQ ID NO: 1554561 - DNA, 15 bp, Homo sapiens
cagtgacttttgcaa

SEQ ID NO: 1554562 - DNA, 15 bp, Homo sapiens
agtgacttttgcaag

SEQ ID NO: 1554563 - DNA, 15 bp, Homo sapiens
gtgacttttgcaagc

SEQ ID NO: 1554564 - DNA, 15 bp, Homo sapiens
tgacttttgcaagct

SEQ ID NO: 1554565 - DNA, 15 bp, Homo sapiens
gacttttgcaagctc

SEQ ID NO: 1554566 - DNA, 15 bp, Homo sapiens
acttttgcaagctca

SEQ ID NO: 1554567 - DNA, 15 bp, Homo sapiens
cttttgcaagctcac

SEQ ID NO: 1554568 - DNA, 15 bp, Homo sapiens
ttttgcaagctcaca

SEQ ID NO: 1554569 - DNA, 15 bp, Homo sapiens
tttgcaagctcacac

SEQ ID NO: 1554570 - DNA, 15 bp, Homo sapiens
ttgcaagctcacaca

SEQ ID NO: 1554571 - DNA, 15 bp, Homo sapiens
tgcaagctcacacag

SEQ ID NO: 1554572 - DNA, 15 bp, Homo sapiens
gcaagctcacacagc

SEQ ID NO: 1554573 - DNA, 15 bp, Homo sapiens
caagctcacacagcc

SEQ ID NO: 1554574 - DNA, 15 bp, Homo sapiens
aagctcacacagcca

SEQ ID NO: 1554575 - DNA, 15 bp, Homo sapiens
agctcacacagccat

SEQ ID NO: 1554576 - DNA, 15 bp, Homo sapiens
gctcacacagccatt

SEQ ID NO: 1554577 - DNA, 15 bp, Homo sapiens
ctcacacagccatta

SEQ ID NO: 1554578 - DNA, 15 bp, Homo sapiens
tcacacagccattag

SEQ ID NO: 1554579 - DNA, 15 bp, Homo sapiens
cacacagccattagt

SEQ ID NO: 1554580 - DNA, 15 bp, Homo sapiens
acacagccattagtg

SEQ ID NO: 1554581 - DNA, 15 bp, Homo sapiens
cacagccattagtgg

SEQ ID NO: 1554582 - DNA, 15 bp, Homo sapiens
acagccattagtggg

SEQ ID NO: 1554583 - DNA, 15 bp, Homo sapiens
cagccattagtgggc

SEQ ID NO: 1554584 - DNA, 15 bp, Homo sapiens
agccattagtgggcg

SEQ ID NO: 1554585 - DNA, 15 bp, Homo sapiens
gccattagtgggcga

SEQ ID NO: 1554586 - DNA, 15 bp, Homo sapiens
ccattagtgggcgac

SEQ ID NO: 1554587 - DNA, 15 bp, Homo sapiens
cattagtgggcgacc

SEQ ID NO: 1554588 - DNA, 15 bp, Homo sapiens
attagtgggcgaccc

SEQ ID NO: 1554589 - DNA, 15 bp, Homo sapiens
ttagtgggcgaccca

SEQ ID NO: 1554590 - DNA, 15 bp, Homo sapiens
tagtgggcgacccag

SEQ ID NO: 1554591 - DNA, 15 bp, Homo sapiens
agtgggcgacccaga

SEQ ID NO: 1554592 - DNA, 15 bp, Homo sapiens
gtgggcgacccagaa

SEQ ID NO: 1554593 - DNA, 15 bp, Homo sapiens
tgggcgacccagaag

SEQ ID NO: 1554594 - DNA, 15 bp, Homo sapiens
gggcgacccagaagc

SEQ ID NO: 1554595 - DNA, 15 bp, Homo sapiens
ggcgacccagaagct

SEQ ID NO: 1554596 - DNA, 15 bp, Homo sapiens
gcgacccagaagctt

SEQ ID NO: 1554597 - DNA, 15 bp, Homo sapiens
cgacccagaagcttg

SEQ ID NO: 1554598 - DNA, 15 bp, Homo sapiens
gacccagaagcttgg

SEQ ID NO: 1554599 - DNA, 15 bp, Homo sapiens
acccagaagcttggt

SEQ ID NO: 1554600 - DNA, 15 bp, Homo sapiens
cccagaagcttggtt

SEQ ID NO: 1554601 - DNA, 15 bp, Homo sapiens
ccagaagcttggttt

SEQ ID NO: 1554602 - DNA, 15 bp, Homo sapiens
cagaagcttggttta

SEQ ID NO: 1554603 - DNA, 15 bp, Homo sapiens
agaagcttggtttag

SEQ ID NO: 1554604 - DNA, 15 bp, Homo sapiens
gaagcttggtttaga

SEQ ID NO: 1554605 - DNA, 15 bp, Homo sapiens
aagcttggtttagag

SEQ ID NO: 1554606 - DNA, 15 bp, Homo sapiens
agcttggtttagagt

SEQ ID NO: 1554607 - DNA, 15 bp, Homo sapiens
gcttggtttagagtc

SEQ ID NO: 1554608 - DNA, 15 bp, Homo sapiens
cttggtttagagtca

SEQ ID NO: 1554609 - DNA, 15 bp, Homo sapiens
ttggtttagagtcag

SEQ ID NO: 1554610 - DNA, 15 bp, Homo sapiens
tggtttagagtcagt

SEQ ID NO: 1554611 - DNA, 15 bp, Homo sapiens
ggtttagagtcagtg

SEQ ID NO: 1554612 - DNA, 15 bp, Homo sapiens
gtttagagtcagtgt

SEQ ID NO: 1554613 - DNA, 15 bp, Homo sapiens
tttagagtcagtgtg

SEQ ID NO: 1554614 - DNA, 15 bp, Homo sapiens
ttagagtcagtgtgg

SEQ ID NO: 1554615 - DNA, 15 bp, Homo sapiens
tagagtcagtgtggc

SEQ ID NO: 1554616 - DNA, 15 bp, Homo sapiens
agagtcagtgtggct

SEQ ID NO: 1554617 - DNA, 15 bp, Homo sapiens
gagtcagtgtggcta

SEQ ID NO: 1554618 - DNA, 15 bp, Homo sapiens
agtcagtgtggctaa

SEQ ID NO: 1554619 - DNA, 15 bp, Homo sapiens
gtcagtgtggctaat

SEQ ID NO: 1554620 - DNA, 15 bp, Homo sapiens
tcagtgtggctaatt

SEQ ID NO: 1554621 - DNA, 15 bp, Homo sapiens
cagtgtggctaattg

SEQ ID NO: 1554622 - DNA, 15 bp, Homo sapiens
agtgtggctaattgc

SEQ ID NO: 1554623 - DNA, 15 bp, Homo sapiens
gtgtggctaattgct

SEQ ID NO: 1554624 - DNA, 15 bp, Homo sapiens
tgtggctaattgcta

SEQ ID NO: 1554625 - DNA, 15 bp, Homo sapiens
gtggctaattgctac

SEQ ID NO: 1554626 - DNA, 15 bp, Homo sapiens
tggctaattgctaca

SEQ ID NO: 1554627 - DNA, 15 bp, Homo sapiens
ggctaattgctacac

SEQ ID NO: 1554628 - DNA, 15 bp, Homo sapiens
gctaattgctacacc

SEQ ID NO: 1554629 - DNA, 15 bp, Homo sapiens
ctaattgctacacca

SEQ ID NO: 1554630 - DNA, 15 bp, Homo sapiens
taattgctacaccaa

SEQ ID NO: 1554631 - DNA, 15 bp, Homo sapiens
aattgctacaccaaa

SEQ ID NO: 1554632 - DNA, 15 bp, Homo sapiens
attgctacaccaaag

SEQ ID NO: 1554633 - DNA, 15 bp, Homo sapiens
ttgctacaccaaagt

SEQ ID NO: 1554634 - DNA, 15 bp, Homo sapiens
tgctacaccaaagtc

SEQ ID NO: 1554635 - DNA, 15 bp, Homo sapiens
gctacaccaaagtct

SEQ ID NO: 1554636 - DNA, 15 bp, Homo sapiens
ctacaccaaagtctt

SEQ ID NO: 1554637 - DNA, 15 bp, Homo sapiens
tacaccaaagtcttc

SEQ ID NO: 1554638 - DNA, 15 bp, Homo sapiens
acaccaaagtcttcc

SEQ ID NO: 1554639 - DNA, 15 bp, Homo sapiens
caccaaagtcttcct

SEQ ID NO: 1554640 - DNA, 15 bp, Homo sapiens
accaaagtcttcctt

SEQ ID NO: 1554641 - DNA, 15 bp, Homo sapiens
ccaaagtcttccttg

SEQ ID NO: 1554642 - DNA, 15 bp, Homo sapiens
caaagtcttccttgg

SEQ ID NO: 1554643 - DNA, 15 bp, Homo sapiens
aaagtcttccttggg

SEQ ID NO: 1554644 - DNA, 15 bp, Homo sapiens
aagtcttccttgggg

SEQ ID NO: 1554645 - DNA, 15 bp, Homo sapiens
agtcttccttggggg

SEQ ID NO: 1554646 - DNA, 15 bp, Homo sapiens
gtcttccttgggggt

SEQ ID NO: 1554647 - DNA, 15 bp, Homo sapiens
tcttccttgggggtg

SEQ ID NO: 1554648 - DNA, 15 bp, Homo sapiens
cttccttgggggtgt

SEQ ID NO: 1554649 - DNA, 15 bp, Homo sapiens
ttccttgggggtgtg

SEQ ID NO: 1554650 - DNA, 15 bp, Homo sapiens
tccttgggggtgtgt

SEQ ID NO: 1554651 - DNA, 15 bp, Homo sapiens
ccttgggggtgtgtg

SEQ ID NO: 1554652 - DNA, 15 bp, Homo sapiens
cttgggggtgtgtgt

SEQ ID NO: 1554653 - DNA, 15 bp, Homo sapiens
ttgggggtgtgtgtg

SEQ ID NO: 1554654 - DNA, 15 bp, Homo sapiens
tgggggtgtgtgtgt

SEQ ID NO: 1554655 - DNA, 15 bp, Homo sapiens
gggggtgtgtgtgtg

SEQ ID NO: 1554656 - DNA, 15 bp, Homo sapiens
ggggtgtgtgtgtgt

SEQ ID NO: 1554657 - DNA, 15 bp, Homo sapiens
gggtgtgtgtgtgtg

SEQ ID NO: 1554658 - DNA, 15 bp, Homo sapiens
ggtgtgtgtgtgtgc

SEQ ID NO: 1554659 - DNA, 15 bp, Homo sapiens
gtgtgtgtgtgtgcc

SEQ ID NO: 1554660 - DNA, 15 bp, Homo sapiens
tgtgtgtgtgtgccc

SEQ ID NO: 1554661 - DNA, 15 bp, Homo sapiens
gtgtgtgtgtgccct

SEQ ID NO: 1554662 - DNA, 15 bp, Homo sapiens
tgtgtgtgtgccctt

SEQ ID NO: 1554663 - DNA, 15 bp, Homo sapiens
gtgtgtgtgcccttg

SEQ ID NO: 1554664 - DNA, 15 bp, Homo sapiens
tgtgtgtgcccttgc

SEQ ID NO: 1554665 - DNA, 15 bp, Homo sapiens
gtgtgtgcccttgca

SEQ ID NO: 1554666 - DNA, 15 bp, Homo sapiens
tgtgtgcccttgcat

SEQ ID NO: 1554667 - DNA, 15 bp, Homo sapiens
gtgtgcccttgcatg

SEQ ID NO: 1554668 - DNA, 15 bp, Homo sapiens
tgtgcccttgcatgt

SEQ ID NO: 1554669 - DNA, 15 bp, Homo sapiens
gtgcccttgcatgtg

SEQ ID NO: 1554670 - DNA, 15 bp, Homo sapiens
tgcccttgcatgtgg

SEQ ID NO: 1554671 - DNA, 15 bp, Homo sapiens
gcccttgcatgtggc

SEQ ID NO: 1554672 - DNA, 15 bp, Homo sapiens
cccttgcatgtggct

SEQ ID NO: 1554673 - DNA, 15 bp, Homo sapiens
ccttgcatgtggctc

SEQ ID NO: 1554674 - DNA, 15 bp, Homo sapiens
cttgcatgtggctct

SEQ ID NO: 1554675 - DNA, 15 bp, Homo sapiens
ttgcatgtggctctg

SEQ ID NO: 1554676 - DNA, 15 bp, Homo sapiens
tgcatgtggctctgg

SEQ ID NO: 1554677 - DNA, 15 bp, Homo sapiens
gcatgtggctctggc

SEQ ID NO: 1554678 - DNA, 15 bp, Homo sapiens
catgtggctctggcc

SEQ ID NO: 1554679 - DNA, 15 bp, Homo sapiens
atgtggctctggcct

SEQ ID NO: 1554680 - DNA, 15 bp, Homo sapiens
tgtggctctggcctg

SEQ ID NO: 1554681 - DNA, 15 bp, Homo sapiens
gtggctctggcctgg

SEQ ID NO: 1554682 - DNA, 15 bp, Homo sapiens
tggctctggcctgga

SEQ ID NO: 1554683 - DNA, 15 bp, Homo sapiens
ggctctggcctggag

SEQ ID NO: 1554684 - DNA, 15 bp, Homo sapiens
gctctggcctggaga

SEQ ID NO: 1554685 - DNA, 15 bp, Homo sapiens
ctctggcctggagac

SEQ ID NO: 1554686 - DNA, 15 bp, Homo sapiens
tctggcctggagaca

SEQ ID NO: 1554687 - DNA, 15 bp, Homo sapiens
ctggcctggagacag

SEQ ID NO: 1554688 - DNA, 15 bp, Homo sapiens
tggcctggagacagg

SEQ ID NO: 1554689 - DNA, 15 bp, Homo sapiens
ggcctggagacaggt

SEQ ID NO: 1554690 - DNA, 15 bp, Homo sapiens
gcctggagacaggtg

SEQ ID NO: 1554691 - DNA, 15 bp, Homo sapiens
cctggagacaggtga

SEQ ID NO: 1554692 - DNA, 15 bp, Homo sapiens
ctggagacaggtgag

SEQ ID NO: 1554693 - DNA, 15 bp, Homo sapiens
tggagacaggtgagt

SEQ ID NO: 1554694 - DNA, 15 bp, Homo sapiens
ggagacaggtgagtg

SEQ ID NO: 1554695 - DNA, 15 bp, Homo sapiens
gagacaggtgagtga

SEQ ID NO: 1554696 - DNA, 15 bp, Homo sapiens
agacaggtgagtgat

SEQ ID NO: 1554697 - DNA, 15 bp, Homo sapiens
gacaggtgagtgatc

SEQ ID NO: 1554698 - DNA, 15 bp, Homo sapiens
acaggtgagtgatct

SEQ ID NO: 1554699 - DNA, 15 bp, Homo sapiens
caggtgagtgatctg

SEQ ID NO: 1554700 - DNA, 15 bp, Homo sapiens
aggtgagtgatctgg

SEQ ID NO: 1554701 - DNA, 15 bp, Homo sapiens
ggtgagtgatctgga

SEQ ID NO: 1554702 - DNA, 15 bp, Homo sapiens
gtgagtgatctggat

SEQ ID NO: 1554703 - DNA, 15 bp, Homo sapiens
tgagtgatctggatg

SEQ ID NO: 1554704 - DNA, 15 bp, Homo sapiens
gagtgatctggatgc

SEQ ID NO: 1554705 - DNA, 15 bp, Homo sapiens
agtgatctggatgcc

SEQ ID NO: 1554706 - DNA, 15 bp, Homo sapiens
gtgatctggatgccc

SEQ ID NO: 1554707 - DNA, 15 bp, Homo sapiens
tgatctggatgccct

SEQ ID NO: 1554708 - DNA, 15 bp, Homo sapiens
gatctggatgccctc

SEQ ID NO: 1554709 - DNA, 15 bp, Homo sapiens
atctggatgccctct

SEQ ID NO: 1554710 - DNA, 15 bp, Homo sapiens
tctggatgccctctg

SEQ ID NO: 1554711 - DNA, 15 bp, Homo sapiens
ctggatgccctctgc

SEQ ID NO: 1554712 - DNA, 15 bp, Homo sapiens
tggatgccctctgct

SEQ ID NO: 1554713 - DNA, 15 bp, Homo sapiens
ggatgccctctgctg

SEQ ID NO: 1554714 - DNA, 15 bp, Homo sapiens
gatgccctctgctgt

SEQ ID NO: 1554715 - DNA, 15 bp, Homo sapiens
atgccctctgctgtc

SEQ ID NO: 1554716 - DNA, 15 bp, Homo sapiens
tgccctctgctgtct

SEQ ID NO: 1554717 - DNA, 15 bp, Homo sapiens
gccctctgctgtctg

SEQ ID NO: 1554718 - DNA, 15 bp, Homo sapiens
ccctctgctgtctgg

SEQ ID NO: 1554719 - DNA, 15 bp, Homo sapiens
cctctgctgtctggg

SEQ ID NO: 1554720 - DNA, 15 bp, Homo sapiens
ctctgctgtctgggc

SEQ ID NO: 1554721 - DNA, 15 bp, Homo sapiens
tctgctgtctgggca

SEQ ID NO: 1554722 - DNA, 15 bp, Homo sapiens
ctgctgtctgggcac

SEQ ID NO: 1554723 - DNA, 15 bp, Homo sapiens
tgctgtctgggcaca

SEQ ID NO: 1554724 - DNA, 15 bp, Homo sapiens
gctgtctgggcacac

SEQ ID NO: 1554725 - DNA, 15 bp, Homo sapiens
ctgtctgggcacacc

SEQ ID NO: 1554726 - DNA, 15 bp, Homo sapiens
tgtctgggcacacct

SEQ ID NO: 1554727 - DNA, 15 bp, Homo sapiens
gtctgggcacacctc

SEQ ID NO: 1554728 - DNA, 15 bp, Homo sapiens
tctgggcacacctct

SEQ ID NO: 1554729 - DNA, 15 bp, Homo sapiens
ctgggcacacctcta

SEQ ID NO: 1554730 - DNA, 15 bp, Homo sapiens
tgggcacacctctag

SEQ ID NO: 1554731 - DNA, 15 bp, Homo sapiens
gggcacacctctagg

SEQ ID NO: 1554732 - DNA, 15 bp, Homo sapiens
ggcacacctctaggg

SEQ ID NO: 1554733 - DNA, 15 bp, Homo sapiens
gcacacctctaggga

SEQ ID NO: 1554734 - DNA, 15 bp, Homo sapiens
cacacctctagggac

SEQ ID NO: 1554735 - DNA, 15 bp, Homo sapiens
acacctctagggaca

SEQ ID NO: 1554736 - DNA, 15 bp, Homo sapiens
cacctctagggacag

SEQ ID NO: 1554737 - DNA, 15 bp, Homo sapiens
acctctagggacagg

SEQ ID NO: 1554738 - DNA, 15 bp, Homo sapiens
cctctagggacaggg

SEQ ID NO: 1554739 - DNA, 15 bp, Homo sapiens
ctctagggacagggg

SEQ ID NO: 1554740 - DNA, 15 bp, Homo sapiens
tctagggacaggggt

SEQ ID NO: 1554741 - DNA, 15 bp, Homo sapiens
ctagggacaggggtg

SEQ ID NO: 1554742 - DNA, 15 bp, Homo sapiens
tagggacaggggtga

SEQ ID NO: 1554743 - DNA, 15 bp, Homo sapiens
agggacaggggtgag

SEQ ID NO: 1554744 - DNA, 15 bp, Homo sapiens
gggacaggggtgagc

SEQ ID NO: 1554745 - DNA, 15 bp, Homo sapiens
ggacaggggtgagct

SEQ ID NO: 1554746 - DNA, 15 bp, Homo sapiens
gacaggggtgagctg

SEQ ID NO: 1554747 - DNA, 15 bp, Homo sapiens
acaggggtgagctgt

SEQ ID NO: 1554748 - DNA, 15 bp, Homo sapiens
caggggtgagctgtc

SEQ ID NO: 1554749 - DNA, 15 bp, Homo sapiens
aggggtgagctgtct

SEQ ID NO: 1554750 - DNA, 15 bp, Homo sapiens
ggggtgagctgtctg

SEQ ID NO: 1554751 - DNA, 15 bp, Homo sapiens
gggtgagctgtctgc

SEQ ID NO: 1554752 - DNA, 15 bp, Homo sapiens
ggtgagctgtctgcc

SEQ ID NO: 1554753 - DNA, 15 bp, Homo sapiens
gtgagctgtctgccc

SEQ ID NO: 1554754 - DNA, 15 bp, Homo sapiens
tgagctgtctgccct

SEQ ID NO: 1554755 - DNA, 15 bp, Homo sapiens
gagctgtctgccctc

SEQ ID NO: 1554756 - DNA, 15 bp, Homo sapiens
agctgtctgccctct

SEQ ID NO: 1554757 - DNA, 15 bp, Homo sapiens
gctgtctgccctctc

SEQ ID NO: 1554758 - DNA, 15 bp, Homo sapiens
ctgtctgccctctcc

SEQ ID NO: 1554759 - DNA, 15 bp, Homo sapiens
tgtctgccctctcct

SEQ ID NO: 1554760 - DNA, 15 bp, Homo sapiens
gtctgccctctccta

SEQ ID NO: 1554761 - DNA, 15 bp, Homo sapiens
tctgccctctcctat

SEQ ID NO: 1554762 - DNA, 15 bp, Homo sapiens
ctgccctctcctatg

SEQ ID NO: 1554763 - DNA, 15 bp, Homo sapiens
tgccctctcctatga

SEQ ID NO: 1554764 - DNA, 15 bp, Homo sapiens
gccctctcctatgaa

SEQ ID NO: 1554765 - DNA, 15 bp, Homo sapiens
ccctctcctatgaac

SEQ ID NO: 1554766 - DNA, 15 bp, Homo sapiens
cctctcctatgaact

SEQ ID NO: 1554767 - DNA, 15 bp, Homo sapiens
ctctcctatgaactc

SEQ ID NO: 1554768 - DNA, 15 bp, Homo sapiens
tctcctatgaactct

SEQ ID NO: 1554769 - DNA, 15 bp, Homo sapiens
ctcctatgaactctg

SEQ ID NO: 1554770 - DNA, 15 bp, Homo sapiens
tcctatgaactctgc

SEQ ID NO: 1554771 - DNA, 15 bp, Homo sapiens
cctatgaactctgca

SEQ ID NO: 1554772 - DNA, 15 bp, Homo sapiens
ctatgaactctgcaa

SEQ ID NO: 1554773 - DNA, 15 bp, Homo sapiens
tatgaactctgcaat

SEQ ID NO: 1554774 - DNA, 15 bp, Homo sapiens
atgaactctgcaatc

SEQ ID NO: 1554775 - DNA, 15 bp, Homo sapiens
tgaactctgcaatct

SEQ ID NO: 1554776 - DNA, 15 bp, Homo sapiens
gaactctgcaatctg

SEQ ID NO: 1554777 - DNA, 15 bp, Homo sapiens
aactctgcaatctgg

SEQ ID NO: 1554778 - DNA, 15 bp, Homo sapiens
actctgcaatctggt

SEQ ID NO: 1554779 - DNA, 15 bp, Homo sapiens
ctctgcaatctggtg

SEQ ID NO: 1554780 - DNA, 15 bp, Homo sapiens
tctgcaatctggtgg

SEQ ID NO: 1554781 - DNA, 15 bp, Homo sapiens
ctgcaatctggtggt

SEQ ID NO: 1554782 - DNA, 15 bp, Homo sapiens
tgcaatctggtggtt

SEQ ID NO: 1554783 - DNA, 15 bp, Homo sapiens
gcaatctggtggttc

SEQ ID NO: 1554784 - DNA, 15 bp, Homo sapiens
caatctggtggttct

SEQ ID NO: 1554785 - DNA, 15 bp, Homo sapiens
aatctggtggttctg

SEQ ID NO: 1554786 - DNA, 15 bp, Homo sapiens
atctggtggttctgc

SEQ ID NO: 1554787 - DNA, 15 bp, Homo sapiens
tctggtggttctgct

SEQ ID NO: 1554788 - DNA, 15 bp, Homo sapiens
ctggtggttctgctg

SEQ ID NO: 1554789 - DNA, 15 bp, Homo sapiens
tggtggttctgctga

SEQ ID NO: 1554790 - DNA, 15 bp, Homo sapiens
ggtggttctgctgac

SEQ ID NO: 1554791 - DNA, 15 bp, Homo sapiens
gtggttctgctgact

SEQ ID NO: 1554792 - DNA, 15 bp, Homo sapiens
tggttctgctgacta

SEQ ID NO: 1554793 - DNA, 15 bp, Homo sapiens
ggttctgctgactag

SEQ ID NO: 1554794 - DNA, 15 bp, Homo sapiens
gttctgctgactagc

SEQ ID NO: 1554795 - DNA, 15 bp, Homo sapiens
ttctgctgactagcc

SEQ ID NO: 1554796 - DNA, 15 bp, Homo sapiens
tctgctgactagccg

SEQ ID NO: 1554797 - DNA, 15 bp, Homo sapiens
ctgctgactagccgt

SEQ ID NO: 1554798 - DNA, 15 bp, Homo sapiens
tgctgactagccgtg

SEQ ID NO: 1554799 - DNA, 15 bp, Homo sapiens
gctgactagccgtgt

SEQ ID NO: 1554800 - DNA, 15 bp, Homo sapiens
ctgactagccgtgta

SEQ ID NO: 1554801 - DNA, 15 bp, Homo sapiens
tgactagccgtgtaa

SEQ ID NO: 1554802 - DNA, 15 bp, Homo sapiens
gactagccgtgtaag

SEQ ID NO: 1554803 - DNA, 15 bp, Homo sapiens
actagccgtgtaagc

SEQ ID NO: 1554804 - DNA, 15 bp, Homo sapiens
ctagccgtgtaagca

SEQ ID NO: 1554805 - DNA, 15 bp, Homo sapiens
tagccgtgtaagcag

SEQ ID NO: 1554806 - DNA, 15 bp, Homo sapiens
agccgtgtaagcagg

SEQ ID NO: 1554807 - DNA, 15 bp, Homo sapiens
gccgtgtaagcagga

SEQ ID NO: 1554808 - DNA, 15 bp, Homo sapiens
ccgtgtaagcaggag

SEQ ID NO: 1554809 - DNA, 15 bp, Homo sapiens
cgtgtaagcaggagc

SEQ ID NO: 1554810 - DNA, 15 bp, Homo sapiens
gtgtaagcaggagca

SEQ ID NO: 1554811 - DNA, 15 bp, Homo sapiens
tgtaagcaggagcaa

SEQ ID NO: 1554812 - DNA, 15 bp, Homo sapiens
gtaagcaggagcaag

SEQ ID NO: 1554813 - DNA, 15 bp, Homo sapiens
taagcaggagcaagt

SEQ ID NO: 1554814 - DNA, 15 bp, Homo sapiens
aagcaggagcaagtt

SEQ ID NO: 1554815 - DNA, 15 bp, Homo sapiens
agcaggagcaagttg

SEQ ID NO: 1554816 - DNA, 15 bp, Homo sapiens
gcaggagcaagttgc

SEQ ID NO: 1554817 - DNA, 15 bp, Homo sapiens
caggagcaagttgcc

SEQ ID NO: 1554818 - DNA, 15 bp, Homo sapiens
aggagcaagttgcca

SEQ ID NO: 1554819 - DNA, 15 bp, Homo sapiens
ggagcaagttgccag

SEQ ID NO: 1554820 - DNA, 15 bp, Homo sapiens
gagcaagttgccaga

SEQ ID NO: 1554821 - DNA, 15 bp, Homo sapiens
agcaagttgccagac

SEQ ID NO: 1554822 - DNA, 15 bp, Homo sapiens
gcaagttgccagacc

SEQ ID NO: 1554823 - DNA, 15 bp, Homo sapiens
caagttgccagacct

SEQ ID NO: 1554824 - DNA, 15 bp, Homo sapiens
aagttgccagacctc

SEQ ID NO: 1554825 - DNA, 15 bp, Homo sapiens
agttgccagacctct

SEQ ID NO: 1554826 - DNA, 15 bp, Homo sapiens
gttgccagacctctc

SEQ ID NO: 1554827 - DNA, 15 bp, Homo sapiens
ttgccagacctctct

SEQ ID NO: 1554828 - DNA, 15 bp, Homo sapiens
tgccagacctctctg

SEQ ID NO: 1554829 - DNA, 15 bp, Homo sapiens
gccagacctctctgt

SEQ ID NO: 1554830 - DNA, 15 bp, Homo sapiens
ccagacctctctgtg

SEQ ID NO: 1554831 - DNA, 15 bp, Homo sapiens
cagacctctctgtgc

SEQ ID NO: 1554832 - DNA, 15 bp, Homo sapiens
agacctctctgtgcc

SEQ ID NO: 1554833 - DNA, 15 bp, Homo sapiens
gacctctctgtgcct

SEQ ID NO: 1554834 - DNA, 15 bp, Homo sapiens
acctctctgtgcctt

SEQ ID NO: 1554835 - DNA, 15 bp, Homo sapiens
cctctctgtgccttg

SEQ ID NO: 1554836 - DNA, 15 bp, Homo sapiens
ctctctgtgccttgg

SEQ ID NO: 1554837 - DNA, 15 bp, Homo sapiens
tctctgtgccttggt

SEQ ID NO: 1554838 - DNA, 15 bp, Homo sapiens
ctctgtgccttggtt

SEQ ID NO: 1554839 - DNA, 15 bp, Homo sapiens
tctgtgccttggttg

SEQ ID NO: 1554840 - DNA, 15 bp, Homo sapiens
ctgtgccttggttga

SEQ ID NO: 1554841 - DNA, 15 bp, Homo sapiens
tgtgccttggttgac

SEQ ID NO: 1554842 - DNA, 15 bp, Homo sapiens
gtgccttggttgact

SEQ ID NO: 1554843 - DNA, 15 bp, Homo sapiens
tgccttggttgactc

SEQ ID NO: 1554844 - DNA, 15 bp, Homo sapiens
gccttggttgactca

SEQ ID NO: 1554845 - DNA, 15 bp, Homo sapiens
ccttggttgactcat

SEQ ID NO: 1554846 - DNA, 15 bp, Homo sapiens
cttggttgactcatc

SEQ ID NO: 1554847 - DNA, 15 bp, Homo sapiens
ttggttgactcatct

SEQ ID NO: 1554848 - DNA, 15 bp, Homo sapiens
tggttgactcatctg

SEQ ID NO: 1554849 - DNA, 15 bp, Homo sapiens
ggttgactcatctgg

SEQ ID NO: 1554850 - DNA, 15 bp, Homo sapiens
gttgactcatctggg

SEQ ID NO: 1554851 - DNA, 15 bp, Homo sapiens
ttgactcatctggga

SEQ ID NO: 1554852 - DNA, 15 bp, Homo sapiens
tgactcatctgggag

SEQ ID NO: 1554853 - DNA, 15 bp, Homo sapiens
gactcatctgggaga

SEQ ID NO: 1554854 - DNA, 15 bp, Homo sapiens
actcatctgggagat

SEQ ID NO: 1554855 - DNA, 15 bp, Homo sapiens
ctcatctgggagatg

SEQ ID NO: 1554856 - DNA, 15 bp, Homo sapiens
tcatctgggagatgg

SEQ ID NO: 1554857 - DNA, 15 bp, Homo sapiens
catctgggagatggt

SEQ ID NO: 1554858 - DNA, 15 bp, Homo sapiens
atctgggagatggta

SEQ ID NO: 1554859 - DNA, 15 bp, Homo sapiens
tctgggagatggtat

SEQ ID NO: 1554860 - DNA, 15 bp, Homo sapiens
ctgggagatggtata

SEQ ID NO: 1554861 - DNA, 15 bp, Homo sapiens
tgggagatggtatag

SEQ ID NO: 1554862 - DNA, 15 bp, Homo sapiens
gggagatggtataga

SEQ ID NO: 1554863 - DNA, 15 bp, Homo sapiens
ggagatggtatagag

SEQ ID NO: 1554864 - DNA, 15 bp, Homo sapiens
gagatggtatagagc

SEQ ID NO: 1554865 - DNA, 15 bp, Homo sapiens
agatggtatagagcc

SEQ ID NO: 1554866 - DNA, 15 bp, Homo sapiens
gatggtatagagcca

SEQ ID NO: 1554867 - DNA, 15 bp, Homo sapiens
atggtatagagccaa

SEQ ID NO: 1554868 - DNA, 15 bp, Homo sapiens
tggtatagagccaag

SEQ ID NO: 1554869 - DNA, 15 bp, Homo sapiens
ggtatagagccaagt

SEQ ID NO: 1554870 - DNA, 15 bp, Homo sapiens
gtatagagccaagtg

SEQ ID NO: 1554871 - DNA, 15 bp, Homo sapiens
tatagagccaagtga

SEQ ID NO: 1554872 - DNA, 15 bp, Homo sapiens
atagagccaagtgac

SEQ ID NO: 1554873 - DNA, 15 bp, Homo sapiens
tagagccaagtgaca

SEQ ID NO: 1554874 - DNA, 15 bp, Homo sapiens
agagccaagtgacat

SEQ ID NO: 1554875 - DNA, 15 bp, Homo sapiens
gagccaagtgacatg

SEQ ID NO: 1554876 - DNA, 15 bp, Homo sapiens
agccaagtgacatgg

SEQ ID NO: 1554877 - DNA, 15 bp, Homo sapiens
gccaagtgacatggg

SEQ ID NO: 1554878 - DNA, 15 bp, Homo sapiens
ccaagtgacatgggt

SEQ ID NO: 1554879 - DNA, 15 bp, Homo sapiens
caagtgacatgggtg

SEQ ID NO: 1554880 - DNA, 15 bp, Homo sapiens
aagtgacatgggtgt

SEQ ID NO: 1554881 - DNA, 15 bp, Homo sapiens
agtgacatgggtgtc

SEQ ID NO: 1554882 - DNA, 15 bp, Homo sapiens
gtgacatgggtgtcg

SEQ ID NO: 1554883 - DNA, 15 bp, Homo sapiens
tgacatgggtgtcgg

SEQ ID NO: 1554884 - DNA, 15 bp, Homo sapiens
gacatgggtgtcggg

SEQ ID NO: 1554885 - DNA, 15 bp, Homo sapiens
acatgggtgtcggga

SEQ ID NO: 1554886 - DNA, 15 bp, Homo sapiens
catgggtgtcgggag

SEQ ID NO: 1554887 - DNA, 15 bp, Homo sapiens
atgggtgtcgggagg

SEQ ID NO: 1554888 - DNA, 15 bp, Homo sapiens
tgggtgtcgggagga

SEQ ID NO: 1554889 - DNA, 15 bp, Homo sapiens
gggtgtcgggaggac

SEQ ID NO: 1554890 - DNA, 15 bp, Homo sapiens
ggtgtcgggaggacc

SEQ ID NO: 1554891 - DNA, 15 bp, Homo sapiens
gtgtcgggaggacca

SEQ ID NO: 1554892 - DNA, 15 bp, Homo sapiens
tgtcgggaggaccac

SEQ ID NO: 1554893 - DNA, 15 bp, Homo sapiens
gtcgggaggaccaca

SEQ ID NO: 1554894 - DNA, 15 bp, Homo sapiens
tcgggaggaccacag

SEQ ID NO: 1554895 - DNA, 15 bp, Homo sapiens
cgggaggaccacagg

SEQ ID NO: 1554896 - DNA, 15 bp, Homo sapiens
gggaggaccacaggg

SEQ ID NO: 1554897 - DNA, 15 bp, Homo sapiens
ggaggaccacagggc

SEQ ID NO: 1554898 - DNA, 15 bp, Homo sapiens
gaggaccacagggcc

SEQ ID NO: 1554899 - DNA, 15 bp, Homo sapiens
aggaccacagggcct

SEQ ID NO: 1554900 - DNA, 15 bp, Homo sapiens
ggaccacagggcctt

SEQ ID NO: 1554901 - DNA, 15 bp, Homo sapiens
gaccacagggccttg

SEQ ID NO: 1554902 - DNA, 15 bp, Homo sapiens
accacagggccttga

SEQ ID NO: 1554903 - DNA, 15 bp, Homo sapiens
ccacagggccttgag

SEQ ID NO: 1554904 - DNA, 15 bp, Homo sapiens
cacagggccttgaga

SEQ ID NO: 1554905 - DNA, 15 bp, Homo sapiens
acagggccttgagaa

SEQ ID NO: 1554906 - DNA, 15 bp, Homo sapiens
cagggccttgagaaa

SEQ ID NO: 1554907 - DNA, 15 bp, Homo sapiens
agggccttgagaaat

SEQ ID NO: 1554908 - DNA, 15 bp, Homo sapiens
gggccttgagaaatg

SEQ ID NO: 1554909 - DNA, 15 bp, Homo sapiens
ggccttgagaaatgg

SEQ ID NO: 1554910 - DNA, 15 bp, Homo sapiens
gccttgagaaatggt

SEQ ID NO: 1554911 - DNA, 15 bp, Homo sapiens
ccttgagaaatggta

SEQ ID NO: 1554912 - DNA, 15 bp, Homo sapiens
cttgagaaatggtag

SEQ ID NO: 1554913 - DNA, 15 bp, Homo sapiens
ttgagaaatggtagc

SEQ ID NO: 1554914 - DNA, 15 bp, Homo sapiens
tgagaaatggtagct

SEQ ID NO: 1554915 - DNA, 15 bp, Homo sapiens
gagaaatggtagctg

SEQ ID NO: 1554916 - DNA, 15 bp, Homo sapiens
agaaatggtagctgt

SEQ ID NO: 1554917 - DNA, 15 bp, Homo sapiens
gaaatggtagctgtt

SEQ ID NO: 1554918 - DNA, 15 bp, Homo sapiens
aaatggtagctgtta

SEQ ID NO: 1554919 - DNA, 15 bp, Homo sapiens
aatggtagctgttaa

SEQ ID NO: 1554920 - DNA, 15 bp, Homo sapiens
atggtagctgttaat

SEQ ID NO: 1554921 - DNA, 15 bp, Homo sapiens
ccgactctgctgccc

SEQ ID NO: 1554922 - DNA, 15 bp, Homo sapiens
cgactctgctgccct

SEQ ID NO: 1554923 - DNA, 15 bp, Homo sapiens
gactctgctgccctc

SEQ ID NO: 1554924 - DNA, 15 bp, Homo sapiens
actctgctgccctct

SEQ ID NO: 1554925 - DNA, 15 bp, Homo sapiens
ctctgctgccctctc

SEQ ID NO: 1554926 - DNA, 15 bp, Homo sapiens
tctgctgccctctcc

SEQ ID NO: 1554927 - DNA, 15 bp, Homo sapiens
ctgctgccctctcct

SEQ ID NO: 1554928 - DNA, 15 bp, Homo sapiens
tgctgccctctcctc

SEQ ID NO: 1554929 - DNA, 15 bp, Homo sapiens
gctgccctctcctca

SEQ ID NO: 1554930 - DNA, 15 bp, Homo sapiens
ctgccctctcctcac

SEQ ID NO: 1554931 - DNA, 15 bp, Homo sapiens
tgccctctcctcact

SEQ ID NO: 1554932 - DNA, 15 bp, Homo sapiens
gccctctcctcactc

SEQ ID NO: 1554933 - DNA, 15 bp, Homo sapiens
ccctctcctcactcc

SEQ ID NO: 1554934 - DNA, 15 bp, Homo sapiens
cctctcctcactccc

SEQ ID NO: 1554935 - DNA, 15 bp, Homo sapiens
ctctcctcactccct

SEQ ID NO: 1554936 - DNA, 15 bp, Homo sapiens
tctcctcactccctg

SEQ ID NO: 1554937 - DNA, 15 bp, Homo sapiens
ctcctcactccctga

SEQ ID NO: 1554938 - DNA, 15 bp, Homo sapiens
tcctcactccctgag

SEQ ID NO: 1554939 - DNA, 15 bp, Homo sapiens
cctcactccctgagt

SEQ ID NO: 1554940 - DNA, 15 bp, Homo sapiens
ctcactccctgagtt

SEQ ID NO: 1554941 - DNA, 15 bp, Homo sapiens
tcactccctgagtta

SEQ ID NO: 1554942 - DNA, 15 bp, Homo sapiens
cactccctgagttac

SEQ ID NO: 1554943 - DNA, 15 bp, Homo sapiens
actccctgagttacg

SEQ ID NO: 1554944 - DNA, 15 bp, Homo sapiens
ctccctgagttacgg

SEQ ID NO: 1554945 - DNA, 15 bp, Homo sapiens
tccctgagttacgga

SEQ ID NO: 1554946 - DNA, 15 bp, Homo sapiens
ccctgagttacggat

SEQ ID NO: 1554947 - DNA, 15 bp, Homo sapiens
cctgagttacggatg

SEQ ID NO: 1554948 - DNA, 15 bp, Homo sapiens
ctgagttacggatgc

SEQ ID NO: 1554949 - DNA, 15 bp, Homo sapiens
tgagttacggatgct

SEQ ID NO: 1554950 - DNA, 15 bp, Homo sapiens
gagttacggatgctc

SEQ ID NO: 1554951 - DNA, 15 bp, Homo sapiens
agttacggatgctca

SEQ ID NO: 1554952 - DNA, 15 bp, Homo sapiens
gttacggatgctcag

SEQ ID NO: 1554953 - DNA, 15 bp, Homo sapiens
ttacggatgctcaga

SEQ ID NO: 1554954 - DNA, 15 bp, Homo sapiens
tacggatgctcagag

SEQ ID NO: 1554955 - DNA, 15 bp, Homo sapiens
acggatgctcagaga

SEQ ID NO: 1554956 - DNA, 15 bp, Homo sapiens
cggatgctcagagac

SEQ ID NO: 1554957 - DNA, 15 bp, Homo sapiens
ggatgctcagagaca

SEQ ID NO: 1554958 - DNA, 15 bp, Homo sapiens
gatgctcagagacaa

SEQ ID NO: 1554959 - DNA, 15 bp, Homo sapiens
atgctcagagacaac

SEQ ID NO: 1554960 - DNA, 15 bp, Homo sapiens
tgctcagagacaact

SEQ ID NO: 1554961 - DNA, 15 bp, Homo sapiens
gctcagagacaacta

SEQ ID NO: 1554962 - DNA, 15 bp, Homo sapiens
ctcagagacaactac

SEQ ID NO: 1554963 - DNA, 15 bp, Homo sapiens
tcagagacaactacc

SEQ ID NO: 1554964 - DNA, 15 bp, Homo sapiens
cagagacaactacca

SEQ ID NO: 1554965 - DNA, 15 bp, Homo sapiens
agagacaactaccac

SEQ ID NO: 1554966 - DNA, 15 bp, Homo sapiens
gagacaactaccaca

SEQ ID NO: 1554967 - DNA, 15 bp, Homo sapiens
agacaactaccacag

SEQ ID NO: 1554968 - DNA, 15 bp, Homo sapiens
gacaactaccacagg

SEQ ID NO: 1554969 - DNA, 15 bp, Homo sapiens
acaactaccacaggc

SEQ ID NO: 1554970 - DNA, 15 bp, Homo sapiens
caactaccacaggct

SEQ ID NO: 1554971 - DNA, 15 bp, Homo sapiens
aactaccacaggctc

SEQ ID NO: 1554972 - DNA, 15 bp, Homo sapiens
actaccacaggctca

SEQ ID NO: 1554973 - DNA, 15 bp, Homo sapiens
ctaccacaggctcaa

SEQ ID NO: 1554974 - DNA, 15 bp, Homo sapiens
taccacaggctcaag

SEQ ID NO: 1554975 - DNA, 15 bp, Homo sapiens
accacaggctcaagc

SEQ ID NO: 1554976 - DNA, 15 bp, Homo sapiens
ccacaggctcaagct

SEQ ID NO: 1554977 - DNA, 15 bp, Homo sapiens
cacaggctcaagctg

SEQ ID NO: 1554978 - DNA, 15 bp, Homo sapiens
acaggctcaagctgc

SEQ ID NO: 1554979 - DNA, 15 bp, Homo sapiens
caggctcaagctgcg

SEQ ID NO: 1554980 - DNA, 15 bp, Homo sapiens
aggctcaagctgcgt

SEQ ID NO: 1554981 - DNA, 15 bp, Homo sapiens
ggctcaagctgcgta

SEQ ID NO: 1554982 - DNA, 15 bp, Homo sapiens
gctcaagctgcgtaa

SEQ ID NO: 1554983 - DNA, 15 bp, Homo sapiens
ctcaagctgcgtaat

SEQ ID NO: 1554984 - DNA, 15 bp, Homo sapiens
tcaagctgcgtaatt

SEQ ID NO: 1554985 - DNA, 15 bp, Homo sapiens
caagctgcgtaattg

SEQ ID NO: 1554986 - DNA, 15 bp, Homo sapiens
aagctgcgtaattgc

SEQ ID NO: 1554987 - DNA, 15 bp, Homo sapiens
agctgcgtaattgct

SEQ ID NO: 1554988 - DNA, 15 bp, Homo sapiens
gctgcgtaattgctg

SEQ ID NO: 1554989 - DNA, 15 bp, Homo sapiens
ctgcgtaattgctgc

SEQ ID NO: 1554990 - DNA, 15 bp, Homo sapiens
tgcgtaattgctgcc

SEQ ID NO: 1554991 - DNA, 15 bp, Homo sapiens
gcgtaattgctgcct

SEQ ID NO: 1554992 - DNA, 15 bp, Homo sapiens
cgtaattgctgcctc

SEQ ID NO: 1554993 - DNA, 15 bp, Homo sapiens
gtaattgctgcctct

SEQ ID NO: 1554994 - DNA, 15 bp, Homo sapiens
taattgctgcctctg

SEQ ID NO: 1554995 - DNA, 15 bp, Homo sapiens
aattgctgcctctgg

SEQ ID NO: 1554996 - DNA, 15 bp, Homo sapiens
attgctgcctctggc

SEQ ID NO: 1554997 - DNA, 15 bp, Homo sapiens
ttgctgcctctggcc

SEQ ID NO: 1554998 - DNA, 15 bp, Homo sapiens
tgctgcctctggcct

SEQ ID NO: 1554999 - DNA, 15 bp, Homo sapiens
gctgcctctggcctg

SEQ ID NO: 1555000 - DNA, 15 bp, Homo sapiens
ctgcctctggcctgt

SEQ ID NO: 1555001 - DNA, 15 bp, Homo sapiens
tgcctctggcctgtc

SEQ ID NO: 1555002 - DNA, 15 bp, Homo sapiens
gcctctggcctgtcc

SEQ ID NO: 1555003 - DNA, 15 bp, Homo sapiens
cctctggcctgtcct

SEQ ID NO: 1555004 - DNA, 15 bp, Homo sapiens
ctctggcctgtcctg

SEQ ID NO: 1555005 - DNA, 15 bp, Homo sapiens
tctggcctgtcctgg

SEQ ID NO: 1555006 - DNA, 15 bp, Homo sapiens
ctggcctgtcctgga

SEQ ID NO: 1555007 - DNA, 15 bp, Homo sapiens
tggcctgtcctggag

SEQ ID NO: 1555008 - DNA, 15 bp, Homo sapiens
ggcctgtcctggagc

SEQ ID NO: 1555009 - DNA, 15 bp, Homo sapiens
gcctgtcctggagct

SEQ ID NO: 1555010 - DNA, 15 bp, Homo sapiens
cctgtcctggagctt

SEQ ID NO: 1555011 - DNA, 15 bp, Homo sapiens
ctgtcctggagcttt

SEQ ID NO: 1555012 - DNA, 15 bp, Homo sapiens
tgtcctggagctttc

SEQ ID NO: 1555013 - DNA, 15 bp, Homo sapiens
gtcctggagctttcc

SEQ ID NO: 1555014 - DNA, 15 bp, Homo sapiens
tcctggagctttcct

SEQ ID NO: 1555015 - DNA, 15 bp, Homo sapiens
cctggagctttcctt

SEQ ID NO: 1555016 - DNA, 15 bp, Homo sapiens
ctggagctttccttg

SEQ ID NO: 1555017 - DNA, 15 bp, Homo sapiens
tggagctttccttgg

SEQ ID NO: 1555018 - DNA, 15 bp, Homo sapiens
ggagctttccttggc

SEQ ID NO: 1555019 - DNA, 15 bp, Homo sapiens
gagctttccttggca

SEQ ID NO: 1555020 - DNA, 15 bp, Homo sapiens
agctttccttggcaa

SEQ ID NO: 1555021 - DNA, 15 bp, Homo sapiens
gctttccttggcaaa

SEQ ID NO: 1555022 - DNA, 15 bp, Homo sapiens
ctttccttggcaaag

SEQ ID NO: 1555023 - DNA, 15 bp, Homo sapiens
tttccttggcaaagg

SEQ ID NO: 1555024 - DNA, 15 bp, Homo sapiens
ttccttggcaaaggt

SEQ ID NO: 1555025 - DNA, 15 bp, Homo sapiens
tccttggcaaaggtt

SEQ ID NO: 1555026 - DNA, 15 bp, Homo sapiens
ccttggcaaaggttg

SEQ ID NO: 1555027 - DNA, 15 bp, Homo sapiens
cttggcaaaggttgg

SEQ ID NO: 1555028 - DNA, 15 bp, Homo sapiens
ttggcaaaggttggc

SEQ ID NO: 1555029 - DNA, 15 bp, Homo sapiens
tggcaaaggttggca

SEQ ID NO: 1555030 - DNA, 15 bp, Homo sapiens
ggcaaaggttggcag

SEQ ID NO: 1555031 - DNA, 15 bp, Homo sapiens
gcaaaggttggcagc

SEQ ID NO: 1555032 - DNA, 15 bp, Homo sapiens
caaaggttggcagcg

SEQ ID NO: 1555033 - DNA, 15 bp, Homo sapiens
aaaggttggcagcgg

SEQ ID NO: 1555034 - DNA, 15 bp, Homo sapiens
aaggttggcagcgga

SEQ ID NO: 1555035 - DNA, 15 bp, Homo sapiens
aggttggcagcggag

SEQ ID NO: 1555036 - DNA, 15 bp, Homo sapiens
ggttggcagcggagg

SEQ ID NO: 1555037 - DNA, 15 bp, Homo sapiens
gttggcagcggaggc

SEQ ID NO: 1555038 - DNA, 15 bp, Homo sapiens
ttggcagcggaggct

SEQ ID NO: 1555039 - DNA, 15 bp, Homo sapiens
tggcagcggaggctt

SEQ ID NO: 1555040 - DNA, 15 bp, Homo sapiens
ggcagcggaggcttc

SEQ ID NO: 1555041 - DNA, 15 bp, Homo sapiens
gcagcggaggcttcc

SEQ ID NO: 1555042 - DNA, 15 bp, Homo sapiens
cagcggaggcttccc

SEQ ID NO: 1555043 - DNA, 15 bp, Homo sapiens
agcggaggcttccct

SEQ ID NO: 1555044 - DNA, 15 bp, Homo sapiens
gcggaggcttccctg

SEQ ID NO: 1555045 - DNA, 15 bp, Homo sapiens
cggaggcttccctga

SEQ ID NO: 1555046 - DNA, 15 bp, Homo sapiens
ggaggcttccctgac

SEQ ID NO: 1555047 - DNA, 15 bp, Homo sapiens
gaggcttccctgacc

SEQ ID NO: 1555048 - DNA, 15 bp, Homo sapiens
aggcttccctgaccc

SEQ ID NO: 1555049 - DNA, 15 bp, Homo sapiens
ggcttccctgacccc

SEQ ID NO: 1555050 - DNA, 15 bp, Homo sapiens
gcttccctgaccccc

SEQ ID NO: 1555051 - DNA, 15 bp, Homo sapiens
cttccctgaccccca

SEQ ID NO: 1555052 - DNA, 15 bp, Homo sapiens
ttccctgacccccac

SEQ ID NO: 1555053 - DNA, 15 bp, Homo sapiens
tccctgacccccacc

SEQ ID NO: 1555054 - DNA, 15 bp, Homo sapiens
ccctgacccccaccc

SEQ ID NO: 1555055 - DNA, 15 bp, Homo sapiens
cctgacccccaccca

SEQ ID NO: 1555056 - DNA, 15 bp, Homo sapiens
ctgacccccacccag

SEQ ID NO: 1555057 - DNA, 15 bp, Homo sapiens
tgacccccacccagg

SEQ ID NO: 1555058 - DNA, 15 bp, Homo sapiens
gacccccacccaggt

SEQ ID NO: 1555059 - DNA, 15 bp, Homo sapiens
acccccacccaggtg

SEQ ID NO: 1555060 - DNA, 15 bp, Homo sapiens
cccccacccaggtgt

SEQ ID NO: 1555061 - DNA, 15 bp, Homo sapiens
ccccacccaggtgtg

SEQ ID NO: 1555062 - DNA, 15 bp, Homo sapiens
cccacccaggtgtgt

SEQ ID NO: 1555063 - DNA, 15 bp, Homo sapiens
ccacccaggtgtgtg

SEQ ID NO: 1555064 - DNA, 15 bp, Homo sapiens
cacccaggtgtgtgg

SEQ ID NO: 1555065 - DNA, 15 bp, Homo sapiens
acccaggtgtgtggg

SEQ ID NO: 1555066 - DNA, 15 bp, Homo sapiens
cccaggtgtgtggga

SEQ ID NO: 1555067 - DNA, 15 bp, Homo sapiens
ccaggtgtgtgggag

SEQ ID NO: 1555068 - DNA, 15 bp, Homo sapiens
caggtgtgtgggagc

SEQ ID NO: 1555069 - DNA, 15 bp, Homo sapiens
aggtgtgtgggagca

SEQ ID NO: 1555070 - DNA, 15 bp, Homo sapiens
ggtgtgtgggagcag

SEQ ID NO: 1555071 - DNA, 15 bp, Homo sapiens
gtgtgtgggagcagt

SEQ ID NO: 1555072 - DNA, 15 bp, Homo sapiens
tgtgtgggagcagtt

SEQ ID NO: 1555073 - DNA, 15 bp, Homo sapiens
gtgtgggagcagttc

SEQ ID NO: 1555074 - DNA, 15 bp, Homo sapiens
tgtgggagcagttct

SEQ ID NO: 1555075 - DNA, 15 bp, Homo sapiens
gtgggagcagttctg

SEQ ID NO: 1555076 - DNA, 15 bp, Homo sapiens
tgggagcagttctga

SEQ ID NO: 1555077 - DNA, 15 bp, Homo sapiens
gggagcagttctgaa

SEQ ID NO: 1555078 - DNA, 15 bp, Homo sapiens
ggagcagttctgaag

SEQ ID NO: 1555079 - DNA, 15 bp, Homo sapiens
gagcagttctgaaga

SEQ ID NO: 1555080 - DNA, 15 bp, Homo sapiens
agcagttctgaagaa

SEQ ID NO: 1555081 - DNA, 15 bp, Homo sapiens
gcagttctgaagaag

SEQ ID NO: 1555082 - DNA, 15 bp, Homo sapiens
cagttctgaagaagg

SEQ ID NO: 1555083 - DNA, 15 bp, Homo sapiens
agttctgaagaaggg

SEQ ID NO: 1555084 - DNA, 15 bp, Homo sapiens
gttctgaagaagggg

SEQ ID NO: 1555085 - DNA, 15 bp, Homo sapiens
ttctgaagaagggga

SEQ ID NO: 1555086 - DNA, 15 bp, Homo sapiens
tctgaagaaggggac

SEQ ID NO: 1555087 - DNA, 15 bp, Homo sapiens
ctgaagaaggggaca

SEQ ID NO: 1555088 - DNA, 15 bp, Homo sapiens
tgaagaaggggacag

SEQ ID NO: 1555089 - DNA, 15 bp, Homo sapiens
gaagaaggggacagt

SEQ ID NO: 1555090 - DNA, 15 bp, Homo sapiens
aagaaggggacagtt

SEQ ID NO: 1555091 - DNA, 15 bp, Homo sapiens
agaaggggacagttc

SEQ ID NO: 1555092 - DNA, 15 bp, Homo sapiens
gaaggggacagttct

SEQ ID NO: 1555093 - DNA, 15 bp, Homo sapiens
aaggggacagttctg

SEQ ID NO: 1555094 - DNA, 15 bp, Homo sapiens
aggggacagttctgg

SEQ ID NO: 1555095 - DNA, 15 bp, Homo sapiens
ggggacagttctgga

SEQ ID NO: 1555096 - DNA, 15 bp, Homo sapiens
gggacagttctggag

SEQ ID NO: 1555097 - DNA, 15 bp, Homo sapiens
ggacagttctggagc

SEQ ID NO: 1555098 - DNA, 15 bp, Homo sapiens
gacagttctggagct

SEQ ID NO: 1555099 - DNA, 15 bp, Homo sapiens
acagttctggagctt

SEQ ID NO: 1555100 - DNA, 15 bp, Homo sapiens
cagttctggagcttt

SEQ ID NO: 1555101 - DNA, 15 bp, Homo sapiens
agttctggagctttc

SEQ ID NO: 1555102 - DNA, 15 bp, Homo sapiens
gttctggagctttct

SEQ ID NO: 1555103 - DNA, 15 bp, Homo sapiens
ttctggagctttctt

SEQ ID NO: 1555104 - DNA, 15 bp, Homo sapiens
tctggagctttcttg

SEQ ID NO: 1555105 - DNA, 15 bp, Homo sapiens
ctggagctttcttgg

SEQ ID NO: 1555106 - DNA, 15 bp, Homo sapiens
tggagctttcttggg

SEQ ID NO: 1555107 - DNA, 15 bp, Homo sapiens
ggagctttcttgggc

SEQ ID NO: 1555108 - DNA, 15 bp, Homo sapiens
gagctttcttgggct

SEQ ID NO: 1555109 - DNA, 15 bp, Homo sapiens
agctttcttgggctg

SEQ ID NO: 1555110 - DNA, 15 bp, Homo sapiens
gctttcttgggctga

SEQ ID NO: 1555111 - DNA, 15 bp, Homo sapiens
ctttcttgggctgat

SEQ ID NO: 1555112 - DNA, 15 bp, Homo sapiens
tttcttgggctgatc

SEQ ID NO: 1555113 - DNA, 15 bp, Homo sapiens
ttcttgggctgatca

SEQ ID NO: 1555114 - DNA, 15 bp, Homo sapiens
tcttgggctgatcaa

SEQ ID NO: 1555115 - DNA, 15 bp, Homo sapiens
cttgggctgatcaag

SEQ ID NO: 1555116 - DNA, 15 bp, Homo sapiens
ttgggctgatcaagc

SEQ ID NO: 1555117 - DNA, 15 bp, Homo sapiens
tgggctgatcaagcg

SEQ ID NO: 1555118 - DNA, 15 bp, Homo sapiens
gggctgatcaagcga

SEQ ID NO: 1555119 - DNA, 15 bp, Homo sapiens
ggctgatcaagcgag

SEQ ID NO: 1555120 - DNA, 15 bp, Homo sapiens
gctgatcaagcgagt

SEQ ID NO: 1555121 - DNA, 15 bp, Homo sapiens
ctgatcaagcgagta

SEQ ID NO: 1555122 - DNA, 15 bp, Homo sapiens
tgatcaagcgagtag

SEQ ID NO: 1555123 - DNA, 15 bp, Homo sapiens
gatcaagcgagtagc

SEQ ID NO: 1555124 - DNA, 15 bp, Homo sapiens
atcaagcgagtagcc

SEQ ID NO: 1555125 - DNA, 15 bp, Homo sapiens
tcaagcgagtagcct

SEQ ID NO: 1555126 - DNA, 15 bp, Homo sapiens
caagcgagtagcctg

SEQ ID NO: 1555127 - DNA, 15 bp, Homo sapiens
aagcgagtagcctgt

SEQ ID NO: 1555128 - DNA, 15 bp, Homo sapiens
agcgagtagcctgtg

SEQ ID NO: 1555129 - DNA, 15 bp, Homo sapiens
gcgagtagcctgtgg

SEQ ID NO: 1555130 - DNA, 15 bp, Homo sapiens
cgagtagcctgtgga

SEQ ID NO: 1555131 - DNA, 15 bp, Homo sapiens
gagtagcctgtggag

SEQ ID NO: 1555132 - DNA, 15 bp, Homo sapiens
agtagcctgtggaga

SEQ ID NO: 1555133 - DNA, 15 bp, Homo sapiens
gtagcctgtggagaa

SEQ ID NO: 1555134 - DNA, 15 bp, Homo sapiens
tagcctgtggagaaa

SEQ ID NO: 1555135 - DNA, 15 bp, Homo sapiens
agcctgtggagaaac

SEQ ID NO: 1555136 - DNA, 15 bp, Homo sapiens
gcctgtggagaaacg

SEQ ID NO: 1555137 - DNA, 15 bp, Homo sapiens
cctgtggagaaacgt

SEQ ID NO: 1555138 - DNA, 15 bp, Homo sapiens
ctgtggagaaacgtc

SEQ ID NO: 1555139 - DNA, 15 bp, Homo sapiens
tgtggagaaacgtca

SEQ ID NO: 1555140 - DNA, 15 bp, Homo sapiens
gtggagaaacgtcac

SEQ ID NO: 1555141 - DNA, 15 bp, Homo sapiens
tggagaaacgtcaca

SEQ ID NO: 1555142 - DNA, 15 bp, Homo sapiens
ggagaaacgtcacag

SEQ ID NO: 1555143 - DNA, 15 bp, Homo sapiens
gagaaacgtcacagt

SEQ ID NO: 1555144 - DNA, 15 bp, Homo sapiens
agaaacgtcacagtg

SEQ ID NO: 1555145 - DNA, 15 bp, Homo sapiens
gaaacgtcacagtgt

SEQ ID NO: 1555146 - DNA, 15 bp, Homo sapiens
aaacgtcacagtgtg

SEQ ID NO: 1555147 - DNA, 15 bp, Homo sapiens
aacgtcacagtgtgc

SEQ ID NO: 1555148 - DNA, 15 bp, Homo sapiens
acgtcacagtgtgcc

SEQ ID NO: 1555149 - DNA, 15 bp, Homo sapiens
cgtcacagtgtgccc

SEQ ID NO: 1555150 - DNA, 15 bp, Homo sapiens
gtcacagtgtgccct

SEQ ID NO: 1555151 - DNA, 15 bp, Homo sapiens
tcacagtgtgccctg

SEQ ID NO: 1555152 - DNA, 15 bp, Homo sapiens
cacagtgtgccctgg

SEQ ID NO: 1555153 - DNA, 15 bp, Homo sapiens
acagtgtgccctggt

SEQ ID NO: 1555154 - DNA, 15 bp, Homo sapiens
cagtgtgccctggtg

SEQ ID NO: 1555155 - DNA, 15 bp, Homo sapiens
agtgtgccctggtgt

SEQ ID NO: 1555156 - DNA, 15 bp, Homo sapiens
gtgtgccctggtgtc

SEQ ID NO: 1555157 - DNA, 15 bp, Homo sapiens
tgtgccctggtgtca

SEQ ID NO: 1555158 - DNA, 15 bp, Homo sapiens
gtgccctggtgtcaa

SEQ ID NO: 1555159 - DNA, 15 bp, Homo sapiens
tgccctggtgtcaag

SEQ ID NO: 1555160 - DNA, 15 bp, Homo sapiens
gccctggtgtcaagg

SEQ ID NO: 1555161 - DNA, 15 bp, Homo sapiens
ccctggtgtcaagga

SEQ ID NO: 1555162 - DNA, 15 bp, Homo sapiens
cctggtgtcaaggag

SEQ ID NO: 1555163 - DNA, 15 bp, Homo sapiens
ctggtgtcaaggaga

SEQ ID NO: 1555164 - DNA, 15 bp, Homo sapiens
tggtgtcaaggagaa

SEQ ID NO: 1555165 - DNA, 15 bp, Homo sapiens
ggtgtcaaggagaag

SEQ ID NO: 1555166 - DNA, 15 bp, Homo sapiens
gtgtcaaggagaagg

SEQ ID NO: 1555167 - DNA, 15 bp, Homo sapiens
tgtcaaggagaagga

SEQ ID NO: 1555168 - DNA, 15 bp, Homo sapiens
gtcaaggagaaggaa

SEQ ID NO: 1555169 - DNA, 15 bp, Homo sapiens
tcaaggagaaggaag

SEQ ID NO: 1555170 - DNA, 15 bp, Homo sapiens
caaggagaaggaagg

SEQ ID NO: 1555171 - DNA, 15 bp, Homo sapiens
aaggagaaggaaggg

SEQ ID NO: 1555172 - DNA, 15 bp, Homo sapiens
aggagaaggaaggga

SEQ ID NO: 1555173 - DNA, 15 bp, Homo sapiens
ggagaaggaagggag

SEQ ID NO: 1555174 - DNA, 15 bp, Homo sapiens
gagaaggaagggagt

SEQ ID NO: 1555175 - DNA, 15 bp, Homo sapiens
agaaggaagggagtt

SEQ ID NO: 1555176 - DNA, 15 bp, Homo sapiens
gaaggaagggagtta

SEQ ID NO: 1555177 - DNA, 15 bp, Homo sapiens
aaggaagggagttat

SEQ ID NO: 1555178 - DNA, 15 bp, Homo sapiens
aggaagggagttatc

SEQ ID NO: 1555179 - DNA, 15 bp, Homo sapiens
ggaagggagttatct

SEQ ID NO: 1555180 - DNA, 15 bp, Homo sapiens
gaagggagttatctc

SEQ ID NO: 1555181 - DNA, 15 bp, Homo sapiens
aagggagttatctca

SEQ ID NO: 1555182 - DNA, 15 bp, Homo sapiens
agggagttatctcag

SEQ ID NO: 1555183 - DNA, 15 bp, Homo sapiens
gggagttatctcagg

SEQ ID NO: 1555184 - DNA, 15 bp, Homo sapiens
ggagttatctcaggc

SEQ ID NO: 1555185 - DNA, 15 bp, Homo sapiens
gagttatctcaggca

SEQ ID NO: 1555186 - DNA, 15 bp, Homo sapiens
agttatctcaggcag

SEQ ID NO: 1555187 - DNA, 15 bp, Homo sapiens
gttatctcaggcagg

SEQ ID NO: 1555188 - DNA, 15 bp, Homo sapiens
ttatctcaggcaggg

SEQ ID NO: 1555189 - DNA, 15 bp, Homo sapiens
tatctcaggcagggt

SEQ ID NO: 1555190 - DNA, 15 bp, Homo sapiens
atctcaggcagggtc

SEQ ID NO: 1555191 - DNA, 15 bp, Homo sapiens
tctcaggcagggtcc

SEQ ID NO: 1555192 - DNA, 15 bp, Homo sapiens
ctcaggcagggtcct

SEQ ID NO: 1555193 - DNA, 15 bp, Homo sapiens
tcaggcagggtcctg

SEQ ID NO: 1555194 - DNA, 15 bp, Homo sapiens
caggcagggtcctgg

SEQ ID NO: 1555195 - DNA, 15 bp, Homo sapiens
aggcagggtcctggc

SEQ ID NO: 1555196 - DNA, 15 bp, Homo sapiens
ggcagggtcctggca

SEQ ID NO: 1555197 - DNA, 15 bp, Homo sapiens
gcagggtcctggcag

SEQ ID NO: 1555198 - DNA, 15 bp, Homo sapiens
cagggtcctggcaga

SEQ ID NO: 1555199 - DNA, 15 bp, Homo sapiens
agggtcctggcagaa

SEQ ID NO: 1555200 - DNA, 15 bp, Homo sapiens
gggtcctggcagaaa

SEQ ID NO: 1555201 - DNA, 15 bp, Homo sapiens
ggtcctggcagaaaa

SEQ ID NO: 1555202 - DNA, 15 bp, Homo sapiens
gtcctggcagaaaac

SEQ ID NO: 1555203 - DNA, 15 bp, Homo sapiens
tcctggcagaaaaca

SEQ ID NO: 1555204 - DNA, 15 bp, Homo sapiens
cctggcagaaaacat

SEQ ID NO: 1555205 - DNA, 15 bp, Homo sapiens
ctggcagaaaacatg

SEQ ID NO: 1555206 - DNA, 15 bp, Homo sapiens
tggcagaaaacatgc

SEQ ID NO: 1555207 - DNA, 15 bp, Homo sapiens
ggcagaaaacatgct

SEQ ID NO: 1555208 - DNA, 15 bp, Homo sapiens
gcagaaaacatgctc

SEQ ID NO: 1555209 - DNA, 15 bp, Homo sapiens
cagaaaacatgctca

SEQ ID NO: 1555210 - DNA, 15 bp, Homo sapiens
agaaaacatgctcag

SEQ ID NO: 1555211 - DNA, 15 bp, Homo sapiens
gaaaacatgctcagt

SEQ ID NO: 1555212 - DNA, 15 bp, Homo sapiens
aaaacatgctcagtt

SEQ ID NO: 1555213 - DNA, 15 bp, Homo sapiens
aaacatgctcagttg

SEQ ID NO: 1555214 - DNA, 15 bp, Homo sapiens
aacatgctcagttgg

SEQ ID NO: 1555215 - DNA, 15 bp, Homo sapiens
acatgctcagttggc

SEQ ID NO: 1555216 - DNA, 15 bp, Homo sapiens
catgctcagttggca

SEQ ID NO: 1555217 - DNA, 15 bp, Homo sapiens
atgctcagttggcaa

SEQ ID NO: 1555218 - DNA, 15 bp, Homo sapiens
tgctcagttggcaat

SEQ ID NO: 1555219 - DNA, 15 bp, Homo sapiens
gctcagttggcaatt

SEQ ID NO: 1555220 - DNA, 15 bp, Homo sapiens
ctcagttggcaattt

SEQ ID NO: 1555221 - DNA, 15 bp, Homo sapiens
tcagttggcaatttg

SEQ ID NO: 1555222 - DNA, 15 bp, Homo sapiens
cagttggcaatttgg

SEQ ID NO: 1555223 - DNA, 15 bp, Homo sapiens
agttggcaatttgga

SEQ ID NO: 1555224 - DNA, 15 bp, Homo sapiens
gttggcaatttggag

SEQ ID NO: 1555225 - DNA, 15 bp, Homo sapiens
ttggcaatttggaga

SEQ ID NO: 1555226 - DNA, 15 bp, Homo sapiens
tggcaatttggagag

SEQ ID NO: 1555227 - DNA, 15 bp, Homo sapiens
ggcaatttggagaga

SEQ ID NO: 1555228 - DNA, 15 bp, Homo sapiens
gcaatttggagagaa

SEQ ID NO: 1555229 - DNA, 15 bp, Homo sapiens
caatttggagagaat

SEQ ID NO: 1555230 - DNA, 15 bp, Homo sapiens
aatttggagagaatt

SEQ ID NO: 1555231 - DNA, 15 bp, Homo sapiens
atttggagagaattt

SEQ ID NO: 1555232 - DNA, 15 bp, Homo sapiens
tttggagagaattta

SEQ ID NO: 1555233 - DNA, 15 bp, Homo sapiens
ttggagagaatttaa

SEQ ID NO: 1555234 - DNA, 15 bp, Homo sapiens
tggagagaatttaat

SEQ ID NO: 1555235 - DNA, 15 bp, Homo sapiens
ggagagaatttaatg

SEQ ID NO: 1555236 - DNA, 15 bp, Homo sapiens
gagagaatttaatgt

SEQ ID NO: 1555237 - DNA, 15 bp, Homo sapiens
agagaatttaatgtt

SEQ ID NO: 1555238 - DNA, 15 bp, Homo sapiens
gagaatttaatgttg

SEQ ID NO: 1555239 - DNA, 15 bp, Homo sapiens
agaatttaatgttgg

SEQ ID NO: 1555240 - DNA, 15 bp, Homo sapiens
gaatttaatgttggg

SEQ ID NO: 1555241 - DNA, 15 bp, Homo sapiens
aatttaatgttgggg

SEQ ID NO: 1555242 - DNA, 15 bp, Homo sapiens
atttaatgttgggga

SEQ ID NO: 1555243 - DNA, 15 bp, Homo sapiens
tttaatgttggggag

SEQ ID NO: 1555244 - DNA, 15 bp, Homo sapiens
ttaatgttggggagg

SEQ ID NO: 1555245 - DNA, 15 bp, Homo sapiens
taatgttggggaggg

SEQ ID NO: 1555246 - DNA, 15 bp, Homo sapiens
aatgttggggagggg

SEQ ID NO: 1555247 - DNA, 15 bp, Homo sapiens
atgttggggaggggt

SEQ ID NO: 1555248 - DNA, 15 bp, Homo sapiens
tgttggggaggggtc

SEQ ID NO: 1555249 - DNA, 15 bp, Homo sapiens
gttggggaggggtca

SEQ ID NO: 1555250 - DNA, 15 bp, Homo sapiens
ttggggaggggtcat

SEQ ID NO: 1555251 - DNA, 15 bp, Homo sapiens
tggggaggggtcatt

SEQ ID NO: 1555252 - DNA, 15 bp, Homo sapiens
ggggaggggtcattt

SEQ ID NO: 1555253 - DNA, 15 bp, Homo sapiens
gggaggggtcatttt

SEQ ID NO: 1555254 - DNA, 15 bp, Homo sapiens
ggaggggtcattttc

SEQ ID NO: 1555255 - DNA, 15 bp, Homo sapiens
gaggggtcattttca

SEQ ID NO: 1555256 - DNA, 15 bp, Homo sapiens
aggggtcattttcag

SEQ ID NO: 1555257 - DNA, 15 bp, Homo sapiens
ggggtcattttcaga

SEQ ID NO: 1555258 - DNA, 15 bp, Homo sapiens
gggtcattttcagag

SEQ ID NO: 1555259 - DNA, 15 bp, Homo sapiens
ggtcattttcagagg

SEQ ID NO: 1555260 - DNA, 15 bp, Homo sapiens
gtcattttcagaggc

SEQ ID NO: 1555261 - DNA, 15 bp, Homo sapiens
tcattttcagaggct

SEQ ID NO: 1555262 - DNA, 15 bp, Homo sapiens
cattttcagaggctg

SEQ ID NO: 1555263 - DNA, 15 bp, Homo sapiens
attttcagaggctgg

SEQ ID NO: 1555264 - DNA, 15 bp, Homo sapiens
ttttcagaggctggc

SEQ ID NO: 1555265 - DNA, 15 bp, Homo sapiens
tttcagaggctggca

SEQ ID NO: 1555266 - DNA, 15 bp, Homo sapiens
ttcagaggctggcaa

SEQ ID NO: 1555267 - DNA, 15 bp, Homo sapiens
tcagaggctggcaag

SEQ ID NO: 1555268 - DNA, 15 bp, Homo sapiens
cagaggctggcaagg

SEQ ID NO: 1555269 - DNA, 15 bp, Homo sapiens
agaggctggcaaggt

SEQ ID NO: 1555270 - DNA, 15 bp, Homo sapiens
gaggctggcaaggta

SEQ ID NO: 1555271 - DNA, 15 bp, Homo sapiens
aggctggcaaggtaa

SEQ ID NO: 1555272 - DNA, 15 bp, Homo sapiens
ggctggcaaggtaaa

SEQ ID NO: 1555273 - DNA, 15 bp, Homo sapiens
gctggcaaggtaaag

SEQ ID NO: 1555274 - DNA, 15 bp, Homo sapiens
ctggcaaggtaaagg

SEQ ID NO: 1555275 - DNA, 15 bp, Homo sapiens
tggcaaggtaaaggg

SEQ ID NO: 1555276 - DNA, 15 bp, Homo sapiens
ggcaaggtaaaggga

SEQ ID NO: 1555277 - DNA, 15 bp, Homo sapiens
gcaaggtaaagggac

SEQ ID NO: 1555278 - DNA, 15 bp, Homo sapiens
caaggtaaagggacc

SEQ ID NO: 1555279 - DNA, 15 bp, Homo sapiens
aaggtaaagggacca

SEQ ID NO: 1555280 - DNA, 15 bp, Homo sapiens
aggtaaagggaccaa

SEQ ID NO: 1555281 - DNA, 15 bp, Homo sapiens
ggtaaagggaccaat

SEQ ID NO: 1555282 - DNA, 15 bp, Homo sapiens
gtaaagggaccaatg

SEQ ID NO: 1555283 - DNA, 15 bp, Homo sapiens
taaagggaccaatga

SEQ ID NO: 1555284 - DNA, 15 bp, Homo sapiens
aaagggaccaatgag

SEQ ID NO: 1555285 - DNA, 15 bp, Homo sapiens
aagggaccaatgagg

SEQ ID NO: 1555286 - DNA, 15 bp, Homo sapiens
agggaccaatgaggc

SEQ ID NO: 1555287 - DNA, 15 bp, Homo sapiens
gggaccaatgaggca

SEQ ID NO: 1555288 - DNA, 15 bp, Homo sapiens
ggaccaatgaggcat

SEQ ID NO: 1555289 - DNA, 15 bp, Homo sapiens
gaccaatgaggcata

SEQ ID NO: 1555290 - DNA, 15 bp, Homo sapiens
accaatgaggcatat

SEQ ID NO: 1555291 - DNA, 15 bp, Homo sapiens
ccaatgaggcatata

SEQ ID NO: 1555292 - DNA, 15 bp, Homo sapiens
caatgaggcatataa

SEQ ID NO: 1555293 - DNA, 15 bp, Homo sapiens
aatgaggcatataaa

SEQ ID NO: 1555294 - DNA, 15 bp, Homo sapiens
atgaggcatataaag

SEQ ID NO: 1555295 - DNA, 15 bp, Homo sapiens
tgaggcatataaagc

SEQ ID NO: 1555296 - DNA, 15 bp, Homo sapiens
gaggcatataaagca

SEQ ID NO: 1555297 - DNA, 15 bp, Homo sapiens
aggcatataaagcac

SEQ ID NO: 1555298 - DNA, 15 bp, Homo sapiens
ggcatataaagcacc

SEQ ID NO: 1555299 - DNA, 15 bp, Homo sapiens
gcatataaagcacca

SEQ ID NO: 1555300 - DNA, 15 bp, Homo sapiens
catataaagcaccag

SEQ ID NO: 1555301 - DNA, 15 bp, Homo sapiens
atataaagcaccagg

SEQ ID NO: 1555302 - DNA, 15 bp, Homo sapiens
tataaagcaccaggg

SEQ ID NO: 1555303 - DNA, 15 bp, Homo sapiens
ataaagcaccaggga

SEQ ID NO: 1555304 - DNA, 15 bp, Homo sapiens
taaagcaccagggac

SEQ ID NO: 1555305 - DNA, 15 bp, Homo sapiens
aaagcaccagggact

SEQ ID NO: 1555306 - DNA, 15 bp, Homo sapiens
aagcaccagggacta

SEQ ID NO: 1555307 - DNA, 15 bp, Homo sapiens
agcaccagggactac

SEQ ID NO: 1555308 - DNA, 15 bp, Homo sapiens
gcaccagggactaca

SEQ ID NO: 1555309 - DNA, 15 bp, Homo sapiens
caccagggactacaa

SEQ ID NO: 1555310 - DNA, 15 bp, Homo sapiens
accagggactacaac

SEQ ID NO: 1555311 - DNA, 15 bp, Homo sapiens
ccagggactacaaca

SEQ ID NO: 1555312 - DNA, 15 bp, Homo sapiens
cagggactacaacaa

SEQ ID NO: 1555313 - DNA, 15 bp, Homo sapiens
agggactacaacaat

SEQ ID NO: 1555314 - DNA, 15 bp, Homo sapiens
gggactacaacaatg

SEQ ID NO: 1555315 - DNA, 15 bp, Homo sapiens
ggactacaacaatgg

SEQ ID NO: 1555316 - DNA, 15 bp, Homo sapiens
gactacaacaatgga

SEQ ID NO: 1555317 - DNA, 15 bp, Homo sapiens
actacaacaatggaa

SEQ ID NO: 1555318 - DNA, 15 bp, Homo sapiens
ctacaacaatggaaa

SEQ ID NO: 1555319 - DNA, 15 bp, Homo sapiens
tacaacaatggaaag

SEQ ID NO: 1555320 - DNA, 15 bp, Homo sapiens
acaacaatggaaagc

SEQ ID NO: 1555321 - DNA, 15 bp, Homo sapiens
caacaatggaaagct

SEQ ID NO: 1555322 - DNA, 15 bp, Homo sapiens
aacaatggaaagctt

SEQ ID NO: 1555323 - DNA, 15 bp, Homo sapiens
acaatggaaagcttg

SEQ ID NO: 1555324 - DNA, 15 bp, Homo sapiens
caatggaaagcttga

SEQ ID NO: 1555325 - DNA, 15 bp, Homo sapiens
aatggaaagcttgag

SEQ ID NO: 1555326 - DNA, 15 bp, Homo sapiens
atggaaagcttgagc

SEQ ID NO: 1555327 - DNA, 15 bp, Homo sapiens
tggaaagcttgagca

SEQ ID NO: 1555328 - DNA, 15 bp, Homo sapiens
ggaaagcttgagcac

SEQ ID NO: 1555329 - DNA, 15 bp, Homo sapiens
gaaagcttgagcacc

SEQ ID NO: 1555330 - DNA, 15 bp, Homo sapiens
aaagcttgagcaccc

SEQ ID NO: 1555331 - DNA, 15 bp, Homo sapiens
aagcttgagcacccc

SEQ ID NO: 1555332 - DNA, 15 bp, Homo sapiens
agcttgagcacccct

SEQ ID NO: 1555333 - DNA, 15 bp, Homo sapiens
gcttgagcaccccta

SEQ ID NO: 1555334 - DNA, 15 bp, Homo sapiens
cttgagcacccctag

SEQ ID NO: 1555335 - DNA, 15 bp, Homo sapiens
ttgagcacccctaga

SEQ ID NO: 1555336 - DNA, 15 bp, Homo sapiens
tgagcacccctagac

SEQ ID NO: 1555337 - DNA, 15 bp, Homo sapiens
gagcacccctagacc

SEQ ID NO: 1555338 - DNA, 15 bp, Homo sapiens
agcacccctagacct

SEQ ID NO: 1555339 - DNA, 15 bp, Homo sapiens
gcacccctagacctg

SEQ ID NO: 1555340 - DNA, 15 bp, Homo sapiens
cacccctagacctga

SEQ ID NO: 1555341 - DNA, 15 bp, Homo sapiens
acccctagacctgag

SEQ ID NO: 1555342 - DNA, 15 bp, Homo sapiens
cccctagacctgaga

SEQ ID NO: 1555343 - DNA, 15 bp, Homo sapiens
ccctagacctgagaa

SEQ ID NO: 1555344 - DNA, 15 bp, Homo sapiens
cctagacctgagaag

SEQ ID NO: 1555345 - DNA, 15 bp, Homo sapiens
ctagacctgagaagg

SEQ ID NO: 1555346 - DNA, 15 bp, Homo sapiens
tagacctgagaagga

SEQ ID NO: 1555347 - DNA, 15 bp, Homo sapiens
agacctgagaaggaa

SEQ ID NO: 1555348 - DNA, 15 bp, Homo sapiens
gacctgagaaggaag

SEQ ID NO: 1555349 - DNA, 15 bp, Homo sapiens
acctgagaaggaagg

SEQ ID NO: 1555350 - DNA, 15 bp, Homo sapiens
cctgagaaggaaggg

SEQ ID NO: 1555351 - DNA, 15 bp, Homo sapiens
ctgagaaggaaggga

SEQ ID NO: 1555352 - DNA, 15 bp, Homo sapiens
tgagaaggaagggac

SEQ ID NO: 1555353 - DNA, 15 bp, Homo sapiens
gagaaggaagggaca

SEQ ID NO: 1555354 - DNA, 15 bp, Homo sapiens
agaaggaagggacaa

SEQ ID NO: 1555355 - DNA, 15 bp, Homo sapiens
gaaggaagggacaag

SEQ ID NO: 1555356 - DNA, 15 bp, Homo sapiens
aaggaagggacaaga

SEQ ID NO: 1555357 - DNA, 15 bp, Homo sapiens
aggaagggacaagaa

SEQ ID NO: 1555358 - DNA, 15 bp, Homo sapiens
ggaagggacaagaat

SEQ ID NO: 1555359 - DNA, 15 bp, Homo sapiens
gaagggacaagaatg

SEQ ID NO: 1555360 - DNA, 15 bp, Homo sapiens
aagggacaagaatgg

SEQ ID NO: 1555361 - DNA, 15 bp, Homo sapiens
agggacaagaatggg

SEQ ID NO: 1555362 - DNA, 15 bp, Homo sapiens
gggacaagaatgggg

SEQ ID NO: 1555363 - DNA, 15 bp, Homo sapiens
ggacaagaatggggc

SEQ ID NO: 1555364 - DNA, 15 bp, Homo sapiens
gacaagaatggggct

SEQ ID NO: 1555365 - DNA, 15 bp, Homo sapiens
acaagaatggggctg

SEQ ID NO: 1555366 - DNA, 15 bp, Homo sapiens
caagaatggggctgg

SEQ ID NO: 1555367 - DNA, 15 bp, Homo sapiens
aagaatggggctggg

SEQ ID NO: 1555368 - DNA, 15 bp, Homo sapiens
agaatggggctgggg

SEQ ID NO: 1555369 - DNA, 15 bp, Homo sapiens
gaatggggctggggg

SEQ ID NO: 1555370 - DNA, 15 bp, Homo sapiens
aatggggctgggggg

SEQ ID NO: 1555371 - DNA, 15 bp, Homo sapiens
atggggctggggggt

SEQ ID NO: 1555372 - DNA, 15 bp, Homo sapiens
tggggctggggggtc

SEQ ID NO: 1555373 - DNA, 15 bp, Homo sapiens
ggggctggggggtcc

SEQ ID NO: 1555374 - DNA, 15 bp, Homo sapiens
gggctggggggtccc

SEQ ID NO: 1555375 - DNA, 15 bp, Homo sapiens
ggctggggggtcccc

SEQ ID NO: 1555376 - DNA, 15 bp, Homo sapiens
gctggggggtcccca

SEQ ID NO: 1555377 - DNA, 15 bp, Homo sapiens
ctggggggtccccat

SEQ ID NO: 1555378 - DNA, 15 bp, Homo sapiens
tggggggtccccatg

SEQ ID NO: 1555379 - DNA, 15 bp, Homo sapiens
ggggggtccccatga

SEQ ID NO: 1555380 - DNA, 15 bp, Homo sapiens
gggggtccccatgac

SEQ ID NO: 1555381 - DNA, 15 bp, Homo sapiens
ggggtccccatgaca

SEQ ID NO: 1555382 - DNA, 15 bp, Homo sapiens
gggtccccatgacag

SEQ ID NO: 1555383 - DNA, 15 bp, Homo sapiens
ggtccccatgacagc

SEQ ID NO: 1555384 - DNA, 15 bp, Homo sapiens
gtccccatgacagct

SEQ ID NO: 1555385 - DNA, 15 bp, Homo sapiens
tccccatgacagctg

SEQ ID NO: 1555386 - DNA, 15 bp, Homo sapiens
ccccatgacagctgg

SEQ ID NO: 1555387 - DNA, 15 bp, Homo sapiens
cccatgacagctggg

SEQ ID NO: 1555388 - DNA, 15 bp, Homo sapiens
ccatgacagctgggc

SEQ ID NO: 1555389 - DNA, 15 bp, Homo sapiens
catgacagctgggct

SEQ ID NO: 1555390 - DNA, 15 bp, Homo sapiens
atgacagctgggcta

SEQ ID NO: 1555391 - DNA, 15 bp, Homo sapiens
tgacagctgggctac

SEQ ID NO: 1555392 - DNA, 15 bp, Homo sapiens
gacagctgggctaca

SEQ ID NO: 1555393 - DNA, 15 bp, Homo sapiens
acagctgggctacaa

SEQ ID NO: 1555394 - DNA, 15 bp, Homo sapiens
cagctgggctacaat

SEQ ID NO: 1555395 - DNA, 15 bp, Homo sapiens
agctgggctacaatg

SEQ ID NO: 1555396 - DNA, 15 bp, Homo sapiens
gctgggctacaatgg

SEQ ID NO: 1555397 - DNA, 15 bp, Homo sapiens
ctgggctacaatgga

SEQ ID NO: 1555398 - DNA, 15 bp, Homo sapiens
tgggctacaatggag

SEQ ID NO: 1555399 - DNA, 15 bp, Homo sapiens
gggctacaatggaga

SEQ ID NO: 1555400 - DNA, 15 bp, Homo sapiens
ggctacaatggagaa

SEQ ID NO: 1555401 - DNA, 15 bp, Homo sapiens
gctacaatggagaag

SEQ ID NO: 1555402 - DNA, 15 bp, Homo sapiens
ctacaatggagaagc

SEQ ID NO: 1555403 - DNA, 15 bp, Homo sapiens
tacaatggagaagcc

SEQ ID NO: 1555404 - DNA, 15 bp, Homo sapiens
acaatggagaagcca

SEQ ID NO: 1555405 - DNA, 15 bp, Homo sapiens
caatggagaagccac

SEQ ID NO: 1555406 - DNA, 15 bp, Homo sapiens
aatggagaagccacc

SEQ ID NO: 1555407 - DNA, 15 bp, Homo sapiens
atggagaagccaccc

SEQ ID NO: 1555408 - DNA, 15 bp, Homo sapiens
tggagaagccaccca

SEQ ID NO: 1555409 - DNA, 15 bp, Homo sapiens
ggagaagccacccag

SEQ ID NO: 1555410 - DNA, 15 bp, Homo sapiens
gagaagccacccagc

SEQ ID NO: 1555411 - DNA, 15 bp, Homo sapiens
agaagccacccagca

SEQ ID NO: 1555412 - DNA, 15 bp, Homo sapiens
gaagccacccagcag

SEQ ID NO: 1555413 - DNA, 15 bp, Homo sapiens
aagccacccagcagg

SEQ ID NO: 1555414 - DNA, 15 bp, Homo sapiens
agccacccagcaggg

SEQ ID NO: 1555415 - DNA, 15 bp, Homo sapiens
gccacccagcagggc

SEQ ID NO: 1555416 - DNA, 15 bp, Homo sapiens
ccacccagcagggct

SEQ ID NO: 1555417 - DNA, 15 bp, Homo sapiens
cacccagcagggctg

SEQ ID NO: 1555418 - DNA, 15 bp, Homo sapiens
acccagcagggctgt

SEQ ID NO: 1555419 - DNA, 15 bp, Homo sapiens
cccagcagggctgtg

SEQ ID NO: 1555420 - DNA, 15 bp, Homo sapiens
ccagcagggctgtgg

SEQ ID NO: 1555421 - DNA, 15 bp, Homo sapiens
cagcagggctgtggc

SEQ ID NO: 1555422 - DNA, 15 bp, Homo sapiens
agcagggctgtggcc

SEQ ID NO: 1555423 - DNA, 15 bp, Homo sapiens
gcagggctgtggcca

SEQ ID NO: 1555424 - DNA, 15 bp, Homo sapiens
cagggctgtggccac

SEQ ID NO: 1555425 - DNA, 15 bp, Homo sapiens
agggctgtggccaca

SEQ ID NO: 1555426 - DNA, 15 bp, Homo sapiens
gggctgtggccacag

SEQ ID NO: 1555427 - DNA, 15 bp, Homo sapiens
ggctgtggccacaga

SEQ ID NO: 1555428 - DNA, 15 bp, Homo sapiens
gctgtggccacagag

SEQ ID NO: 1555429 - DNA, 15 bp, Homo sapiens
ctgtggccacagagg

SEQ ID NO: 1555430 - DNA, 15 bp, Homo sapiens
tgtggccacagaggg

SEQ ID NO: 1555431 - DNA, 15 bp, Homo sapiens
gtggccacagagggg

SEQ ID NO: 1555432 - DNA, 15 bp, Homo sapiens
tggccacagagggga

SEQ ID NO: 1555433 - DNA, 15 bp, Homo sapiens
ggccacagaggggac

SEQ ID NO: 1555434 - DNA, 15 bp, Homo sapiens
gccacagaggggaca

SEQ ID NO: 1555435 - DNA, 15 bp, Homo sapiens
ccacagaggggacaa

SEQ ID NO: 1555436 - DNA, 15 bp, Homo sapiens
cacagaggggacaaa

SEQ ID NO: 1555437 - DNA, 15 bp, Homo sapiens
acagaggggacaaag

SEQ ID NO: 1555438 - DNA, 15 bp, Homo sapiens
cagaggggacaaagt

SEQ ID NO: 1555439 - DNA, 15 bp, Homo sapiens
agaggggacaaagtc

SEQ ID NO: 1555440 - DNA, 15 bp, Homo sapiens
gaggggacaaagtca

SEQ ID NO: 1555441 - DNA, 15 bp, Homo sapiens
aggggacaaagtcac

SEQ ID NO: 1555442 - DNA, 15 bp, Homo sapiens
ggggacaaagtcaca

SEQ ID NO: 1555443 - DNA, 15 bp, Homo sapiens
gggacaaagtcacag

SEQ ID NO: 1555444 - DNA, 15 bp, Homo sapiens
ggacaaagtcacagg

SEQ ID NO: 1555445 - DNA, 15 bp, Homo sapiens
gacaaagtcacaggc

SEQ ID NO: 1555446 - DNA, 15 bp, Homo sapiens
acaaagtcacaggca

SEQ ID NO: 1555447 - DNA, 15 bp, Homo sapiens
caaagtcacaggcag

SEQ ID NO: 1555448 - DNA, 15 bp, Homo sapiens
aaagtcacaggcaga

SEQ ID NO: 1555449 - DNA, 15 bp, Homo sapiens
aagtcacaggcagac

SEQ ID NO: 1555450 - DNA, 15 bp, Homo sapiens
agtcacaggcagact

SEQ ID NO: 1555451 - DNA, 15 bp, Homo sapiens
gtcacaggcagactt

SEQ ID NO: 1555452 - DNA, 15 bp, Homo sapiens
tcacaggcagacttc

SEQ ID NO: 1555453 - DNA, 15 bp, Homo sapiens
cacaggcagacttca

SEQ ID NO: 1555454 - DNA, 15 bp, Homo sapiens
acaggcagacttcaa

SEQ ID NO: 1555455 - DNA, 15 bp, Homo sapiens
caggcagacttcaaa

SEQ ID NO: 1555456 - DNA, 15 bp, Homo sapiens
aggcagacttcaaat

SEQ ID NO: 1555457 - DNA, 15 bp, Homo sapiens
ggcagacttcaaatc

SEQ ID NO: 1555458 - DNA, 15 bp, Homo sapiens
gcagacttcaaatca

SEQ ID NO: 1555459 - DNA, 15 bp, Homo sapiens
cagacttcaaatcaa

SEQ ID NO: 1555460 - DNA, 15 bp, Homo sapiens
agacttcaaatcaag

SEQ ID NO: 1555461 - DNA, 15 bp, Homo sapiens
gacttcaaatcaagg

SEQ ID NO: 1555462 - DNA, 15 bp, Homo sapiens
acttcaaatcaaggc

SEQ ID NO: 1555463 - DNA, 15 bp, Homo sapiens
cttcaaatcaaggca

SEQ ID NO: 1555464 - DNA, 15 bp, Homo sapiens
ttcaaatcaaggcag

SEQ ID NO: 1555465 - DNA, 15 bp, Homo sapiens
tcaaatcaaggcagg

SEQ ID NO: 1555466 - DNA, 15 bp, Homo sapiens
caaatcaaggcaggg

SEQ ID NO: 1555467 - DNA, 15 bp, Homo sapiens
aaatcaaggcaggga

SEQ ID NO: 1555468 - DNA, 15 bp, Homo sapiens
aatcaaggcagggag

SEQ ID NO: 1555469 - DNA, 15 bp, Homo sapiens
atcaaggcagggagg

SEQ ID NO: 1555470 - DNA, 15 bp, Homo sapiens
tcaaggcagggaggg

SEQ ID NO: 1555471 - DNA, 15 bp, Homo sapiens
caaggcagggaggga

SEQ ID NO: 1555472 - DNA, 15 bp, Homo sapiens
aaggcagggagggag

SEQ ID NO: 1555473 - DNA, 15 bp, Homo sapiens
aggcagggagggagc

SEQ ID NO: 1555474 - DNA, 15 bp, Homo sapiens
ggcagggagggagca

SEQ ID NO: 1555475 - DNA, 15 bp, Homo sapiens
gcagggagggagcag

SEQ ID NO: 1555476 - DNA, 15 bp, Homo sapiens
cagggagggagcagg

SEQ ID NO: 1555477 - DNA, 15 bp, Homo sapiens
agggagggagcaggg

SEQ ID NO: 1555478 - DNA, 15 bp, Homo sapiens
gggagggagcagggg

SEQ ID NO: 1555479 - DNA, 15 bp, Homo sapiens
ggagggagcagggga

SEQ ID NO: 1555480 - DNA, 15 bp, Homo sapiens
gagggagcaggggag

SEQ ID NO: 1555481 - DNA, 15 bp, Homo sapiens
agggagcaggggaga

SEQ ID NO: 1555482 - DNA, 15 bp, Homo sapiens
gggagcaggggagaa

SEQ ID NO: 1555483 - DNA, 15 bp, Homo sapiens
ggagcaggggagaac

SEQ ID NO: 1555484 - DNA, 15 bp, Homo sapiens
gagcaggggagaaca

SEQ ID NO: 1555485 - DNA, 15 bp, Homo sapiens
agcaggggagaacac

SEQ ID NO: 1555486 - DNA, 15 bp, Homo sapiens
gcaggggagaacacc

SEQ ID NO: 1555487 - DNA, 15 bp, Homo sapiens
caggggagaacaccc

SEQ ID NO: 1555488 - DNA, 15 bp, Homo sapiens
aggggagaacaccca

SEQ ID NO: 1555489 - DNA, 15 bp, Homo sapiens
ggggagaacacccag

SEQ ID NO: 1555490 - DNA, 15 bp, Homo sapiens
gggagaacacccagc

SEQ ID NO: 1555491 - DNA, 15 bp, Homo sapiens
ggagaacacccagcc

SEQ ID NO: 1555492 - DNA, 15 bp, Homo sapiens
gagaacacccagcct

SEQ ID NO: 1555493 - DNA, 15 bp, Homo sapiens
agaacacccagcctc

SEQ ID NO: 1555494 - DNA, 15 bp, Homo sapiens
gaacacccagcctct

SEQ ID NO: 1555495 - DNA, 15 bp, Homo sapiens
aacacccagcctctc

SEQ ID NO: 1555496 - DNA, 15 bp, Homo sapiens
acacccagcctctct

SEQ ID NO: 1555497 - DNA, 15 bp, Homo sapiens
cacccagcctctctc

SEQ ID NO: 1555498 - DNA, 15 bp, Homo sapiens
acccagcctctctct

SEQ ID NO: 1555499 - DNA, 15 bp, Homo sapiens
cccagcctctctctc

SEQ ID NO: 1555500 - DNA, 15 bp, Homo sapiens
ccagcctctctctcc

SEQ ID NO: 1555501 - DNA, 15 bp, Homo sapiens
cagcctctctctccc

SEQ ID NO: 1555502 - DNA, 15 bp, Homo sapiens
agcctctctctccct

SEQ ID NO: 1555503 - DNA, 15 bp, Homo sapiens
cctctctctccctct

SEQ ID NO: 1555504 - DNA, 15 bp, Homo sapiens
ctctctctccctctg

SEQ ID NO: 1555505 - DNA, 15 bp, Homo sapiens
tctctctccctctgc

SEQ ID NO: 1555506 - DNA, 15 bp, Homo sapiens
ctctctccctctgcc

SEQ ID NO: 1555507 - DNA, 15 bp, Homo sapiens
tctctccctctgccc

SEQ ID NO: 1555508 - DNA, 15 bp, Homo sapiens
ctctccctctgccct

SEQ ID NO: 1555509 - DNA, 15 bp, Homo sapiens
tctccctctgccctt

SEQ ID NO: 1555510 - DNA, 15 bp, Homo sapiens
ctccctctgcccttc

SEQ ID NO: 1555511 - DNA, 15 bp, Homo sapiens
tccctctgcccttcc

SEQ ID NO: 1555512 - DNA, 15 bp, Homo sapiens
ccctctgcccttcca

SEQ ID NO: 1555513 - DNA, 15 bp, Homo sapiens
cctctgcccttccat

SEQ ID NO: 1555514 - DNA, 15 bp, Homo sapiens
ctctgcccttccatc

SEQ ID NO: 1555515 - DNA, 15 bp, Homo sapiens
tctgcccttccatct

SEQ ID NO: 1555516 - DNA, 15 bp, Homo sapiens
ctgcccttccatctt

SEQ ID NO: 1555517 - DNA, 15 bp, Homo sapiens
tgcccttccatcttc

SEQ ID NO: 1555518 - DNA, 15 bp, Homo sapiens
gcccttccatcttct

SEQ ID NO: 1555519 - DNA, 15 bp, Homo sapiens
cccttccatcttctg

SEQ ID NO: 1555520 - DNA, 15 bp, Homo sapiens
ccttccatcttctgc

SEQ ID NO: 1555521 - DNA, 15 bp, Homo sapiens
cttccatcttctgcc

SEQ ID NO: 1555522 - DNA, 15 bp, Homo sapiens
ttccatcttctgcca

SEQ ID NO: 1555523 - DNA, 15 bp, Homo sapiens
tccatcttctgccaa

SEQ ID NO: 1555524 - DNA, 15 bp, Homo sapiens
ccatcttctgccaat

SEQ ID NO: 1555525 - DNA, 15 bp, Homo sapiens
catcttctgccaatg

SEQ ID NO: 1555526 - DNA, 15 bp, Homo sapiens
atcttctgccaatgc

SEQ ID NO: 1555527 - DNA, 15 bp, Homo sapiens
tcttctgccaatgcc

SEQ ID NO: 1555528 - DNA, 15 bp, Homo sapiens
cttctgccaatgcct

SEQ ID NO: 1555529 - DNA, 15 bp, Homo sapiens
ttctgccaatgcctc

SEQ ID NO: 1555530 - DNA, 15 bp, Homo sapiens
tctgccaatgcctcc

SEQ ID NO: 1555531 - DNA, 15 bp, Homo sapiens
ctgccaatgcctccc

SEQ ID NO: 1555532 - DNA, 15 bp, Homo sapiens
tgccaatgcctccca

SEQ ID NO: 1555533 - DNA, 15 bp, Homo sapiens
gccaatgcctcccac

SEQ ID NO: 1555534 - DNA, 15 bp, Homo sapiens
ccaatgcctcccact

SEQ ID NO: 1555535 - DNA, 15 bp, Homo sapiens
caatgcctcccactg

SEQ ID NO: 1555536 - DNA, 15 bp, Homo sapiens
aatgcctcccactgg

SEQ ID NO: 1555537 - DNA, 15 bp, Homo sapiens
atgcctcccactggc

SEQ ID NO: 1555538 - DNA, 15 bp, Homo sapiens
tgcctcccactggcc

SEQ ID NO: 1555539 - DNA, 15 bp, Homo sapiens
gcctcccactggccc

SEQ ID NO: 1555540 - DNA, 15 bp, Homo sapiens
cctcccactggccca

SEQ ID NO: 1555541 - DNA, 15 bp, Homo sapiens
ctcccactggcccaa

SEQ ID NO: 1555542 - DNA, 15 bp, Homo sapiens
tcccactggcccaac

SEQ ID NO: 1555543 - DNA, 15 bp, Homo sapiens
cccactggcccaacc

SEQ ID NO: 1555544 - DNA, 15 bp, Homo sapiens
ccactggcccaaccc

SEQ ID NO: 1555545 - DNA, 15 bp, Homo sapiens
cactggcccaaccca

SEQ ID NO: 1555546 - DNA, 15 bp, Homo sapiens
actggcccaacccaa

SEQ ID NO: 1555547 - DNA, 15 bp, Homo sapiens
ctggcccaacccaac

SEQ ID NO: 1555548 - DNA, 15 bp, Homo sapiens
tggcccaacccaaca

SEQ ID NO: 1555549 - DNA, 15 bp, Homo sapiens
ggcccaacccaacag

SEQ ID NO: 1555550 - DNA, 15 bp, Homo sapiens
gcccaacccaacaga

SEQ ID NO: 1555551 - DNA, 15 bp, Homo sapiens
cccaacccaacagag

SEQ ID NO: 1555552 - DNA, 15 bp, Homo sapiens
ccaacccaacagagg

SEQ ID NO: 1555553 - DNA, 15 bp, Homo sapiens
caacccaacagaggc

SEQ ID NO: 1555554 - DNA, 15 bp, Homo sapiens
aacccaacagaggcc

SEQ ID NO: 1555555 - DNA, 15 bp, Homo sapiens
acccaacagaggcca

SEQ ID NO: 1555556 - DNA, 15 bp, Homo sapiens
cccaacagaggccag

SEQ ID NO: 1555557 - DNA, 15 bp, Homo sapiens
ccaacagaggccagg

SEQ ID NO: 1555558 - DNA, 15 bp, Homo sapiens
caacagaggccaggg

SEQ ID NO: 1555559 - DNA, 15 bp, Homo sapiens
aacagaggccaggga

SEQ ID NO: 1555560 - DNA, 15 bp, Homo sapiens
acagaggccagggaa

SEQ ID NO: 1555561 - DNA, 15 bp, Homo sapiens
cagaggccagggaag

SEQ ID NO: 1555562 - DNA, 15 bp, Homo sapiens
agaggccagggaagc

SEQ ID NO: 1555563 - DNA, 15 bp, Homo sapiens
gaggccagggaagcc

SEQ ID NO: 1555564 - DNA, 15 bp, Homo sapiens
aggccagggaagccg

SEQ ID NO: 1555565 - DNA, 15 bp, Homo sapiens
ggccagggaagccga

SEQ ID NO: 1555566 - DNA, 15 bp, Homo sapiens
gccagggaagccgag

SEQ ID NO: 1555567 - DNA, 15 bp, Homo sapiens
ccagggaagccgagg

SEQ ID NO: 1555568 - DNA, 15 bp, Homo sapiens
cagggaagccgaggg

SEQ ID NO: 1555569 - DNA, 15 bp, Homo sapiens
agggaagccgagggg

SEQ ID NO: 1555570 - DNA, 15 bp, Homo sapiens
gggaagccgaggggt

SEQ ID NO: 1555571 - DNA, 15 bp, Homo sapiens
ggaagccgaggggtg

SEQ ID NO: 1555572 - DNA, 15 bp, Homo sapiens
gaagccgaggggtgc

SEQ ID NO: 1555573 - DNA, 15 bp, Homo sapiens
aagccgaggggtgct

SEQ ID NO: 1555574 - DNA, 15 bp, Homo sapiens
agccgaggggtgctg

SEQ ID NO: 1555575 - DNA, 15 bp, Homo sapiens
gccgaggggtgctgt

SEQ ID NO: 1555576 - DNA, 15 bp, Homo sapiens
ccgaggggtgctgtc

SEQ ID NO: 1555577 - DNA, 15 bp, Homo sapiens
cgaggggtgctgtcc

SEQ ID NO: 1555578 - DNA, 15 bp, Homo sapiens
gaggggtgctgtccc

SEQ ID NO: 1555579 - DNA, 15 bp, Homo sapiens
aggggtgctgtccca

SEQ ID NO: 1555580 - DNA, 15 bp, Homo sapiens
ggggtgctgtcccat

SEQ ID NO: 1555581 - DNA, 15 bp, Homo sapiens
gggtgctgtcccatg

SEQ ID NO: 1555582 - DNA, 15 bp, Homo sapiens
ggtgctgtcccatgg

SEQ ID NO: 1555583 - DNA, 15 bp, Homo sapiens
gtgctgtcccatggc

SEQ ID NO: 1555584 - DNA, 15 bp, Homo sapiens
tgctgtcccatggct

SEQ ID NO: 1555585 - DNA, 15 bp, Homo sapiens
gctgtcccatggctc

SEQ ID NO: 1555586 - DNA, 15 bp, Homo sapiens
ctgtcccatggctca

SEQ ID NO: 1555587 - DNA, 15 bp, Homo sapiens
tgtcccatggctcag

SEQ ID NO: 1555588 - DNA, 15 bp, Homo sapiens
gtcccatggctcagg

SEQ ID NO: 1555589 - DNA, 15 bp, Homo sapiens
tcccatggctcaggc

SEQ ID NO: 1555590 - DNA, 15 bp, Homo sapiens
cccatggctcaggct

SEQ ID NO: 1555591 - DNA, 15 bp, Homo sapiens
ccatggctcaggctt

SEQ ID NO: 1555592 - DNA, 15 bp, Homo sapiens
catggctcaggcttc

SEQ ID NO: 1555593 - DNA, 15 bp, Homo sapiens
atggctcaggcttct

SEQ ID NO: 1555594 - DNA, 15 bp, Homo sapiens
tggctcaggcttcta

SEQ ID NO: 1555595 - DNA, 15 bp, Homo sapiens
ggctcaggcttctag

SEQ ID NO: 1555596 - DNA, 15 bp, Homo sapiens
gctcaggcttctaga

SEQ ID NO: 1555597 - DNA, 15 bp, Homo sapiens
ctcaggcttctagag

SEQ ID NO: 1555598 - DNA, 15 bp, Homo sapiens
tcaggcttctagagt

SEQ ID NO: 1555599 - DNA, 15 bp, Homo sapiens
caggcttctagagtt

SEQ ID NO: 1555600 - DNA, 15 bp, Homo sapiens
aggcttctagagttc

SEQ ID NO: 1555601 - DNA, 15 bp, Homo sapiens
ggcttctagagttca

SEQ ID NO: 1555602 - DNA, 15 bp, Homo sapiens
gcttctagagttcag

SEQ ID NO: 1555603 - DNA, 15 bp, Homo sapiens
cttctagagttcaga

SEQ ID NO: 1555604 - DNA, 15 bp, Homo sapiens
ttctagagttcagaa

SEQ ID NO: 1555605 - DNA, 15 bp, Homo sapiens
tctagagttcagaat

SEQ ID NO: 1555606 - DNA, 15 bp, Homo sapiens
ctagagttcagaatg

SEQ ID NO: 1555607 - DNA, 15 bp, Homo sapiens
tagagttcagaatgg

SEQ ID NO: 1555608 - DNA, 15 bp, Homo sapiens
agagttcagaatgga

SEQ ID NO: 1555609 - DNA, 15 bp, Homo sapiens
gagttcagaatggag

SEQ ID NO: 1555610 - DNA, 15 bp, Homo sapiens
agttcagaatggagc

SEQ ID NO: 1555611 - DNA, 15 bp, Homo sapiens
gttcagaatggagca

SEQ ID NO: 1555612 - DNA, 15 bp, Homo sapiens
ttcagaatggagcag

SEQ ID NO: 1555613 - DNA, 15 bp, Homo sapiens
tcagaatggagcaga

SEQ ID NO: 1555614 - DNA, 15 bp, Homo sapiens
cagaatggagcagag

SEQ ID NO: 1555615 - DNA, 15 bp, Homo sapiens
agaatggagcagagg

SEQ ID NO: 1555616 - DNA, 15 bp, Homo sapiens
gaatggagcagagga

SEQ ID NO: 1555617 - DNA, 15 bp, Homo sapiens
aatggagcagaggag

SEQ ID NO: 1555618 - DNA, 15 bp, Homo sapiens
atggagcagaggagt

SEQ ID NO: 1555619 - DNA, 15 bp, Homo sapiens
tggagcagaggagtg

SEQ ID NO: 1555620 - DNA, 15 bp, Homo sapiens
ggagcagaggagtgg

SEQ ID NO: 1555621 - DNA, 15 bp, Homo sapiens
gagcagaggagtggt

SEQ ID NO: 1555622 - DNA, 15 bp, Homo sapiens
agcagaggagtggtg

SEQ ID NO: 1555623 - DNA, 15 bp, Homo sapiens
gcagaggagtggtga

SEQ ID NO: 1555624 - DNA, 15 bp, Homo sapiens
cagaggagtggtgat

SEQ ID NO: 1555625 - DNA, 15 bp, Homo sapiens
agaggagtggtgatc

SEQ ID NO: 1555626 - DNA, 15 bp, Homo sapiens
gaggagtggtgatct

SEQ ID NO: 1555627 - DNA, 15 bp, Homo sapiens
aggagtggtgatctg

SEQ ID NO: 1555628 - DNA, 15 bp, Homo sapiens
ggagtggtgatctga

SEQ ID NO: 1555629 - DNA, 15 bp, Homo sapiens
gagtggtgatctgag

SEQ ID NO: 1555630 - DNA, 15 bp, Homo sapiens
agtggtgatctgaga

SEQ ID NO: 1555631 - DNA, 15 bp, Homo sapiens
gtggtgatctgagaa

SEQ ID NO: 1555632 - DNA, 15 bp, Homo sapiens
tggtgatctgagaaa

SEQ ID NO: 1555633 - DNA, 15 bp, Homo sapiens
ggtgatctgagaaac

SEQ ID NO: 1555634 - DNA, 15 bp, Homo sapiens
gtgatctgagaaaca

SEQ ID NO: 1555635 - DNA, 15 bp, Homo sapiens
tgatctgagaaacag

SEQ ID NO: 1555636 - DNA, 15 bp, Homo sapiens
gatctgagaaacagc

SEQ ID NO: 1555637 - DNA, 15 bp, Homo sapiens
atctgagaaacagca

SEQ ID NO: 1555638 - DNA, 15 bp, Homo sapiens
tctgagaaacagcaa

SEQ ID NO: 1555639 - DNA, 15 bp, Homo sapiens
ctgagaaacagcaaa

SEQ ID NO: 1555640 - DNA, 15 bp, Homo sapiens
tgagaaacagcaaaa

SEQ ID NO: 1555641 - DNA, 15 bp, Homo sapiens
gagaaacagcaaaag

SEQ ID NO: 1555642 - DNA, 15 bp, Homo sapiens
agaaacagcaaaagt

SEQ ID NO: 1555643 - DNA, 15 bp, Homo sapiens
gaaacagcaaaagtc

SEQ ID NO: 1555644 - DNA, 15 bp, Homo sapiens
aaacagcaaaagtca

SEQ ID NO: 1555645 - DNA, 15 bp, Homo sapiens
aacagcaaaagtcaa

SEQ ID NO: 1555646 - DNA, 15 bp, Homo sapiens
acagcaaaagtcaaa

SEQ ID NO: 1555647 - DNA, 15 bp, Homo sapiens
cagcaaaagtcaaaa

SEQ ID NO: 1555648 - DNA, 15 bp, Homo sapiens
agcaaaagtcaaaac

SEQ ID NO: 1555649 - DNA, 15 bp, Homo sapiens
gcaaaagtcaaaaca

SEQ ID NO: 1555650 - DNA, 15 bp, Homo sapiens
caaaagtcaaaacaa

SEQ ID NO: 1555651 - DNA, 15 bp, Homo sapiens
aaaagtcaaaacaat

SEQ ID NO: 1555652 - DNA, 15 bp, Homo sapiens
aaagtcaaaacaatc

SEQ ID NO: 1555653 - DNA, 15 bp, Homo sapiens
aagtcaaaacaatca

SEQ ID NO: 1555654 - DNA, 15 bp, Homo sapiens
agtcaaaacaatcac

SEQ ID NO: 1555655 - DNA, 15 bp, Homo sapiens
gtcaaaacaatcacc

SEQ ID NO: 1555656 - DNA, 15 bp, Homo sapiens
tcaaaacaatcacca

SEQ ID NO: 1555657 - DNA, 15 bp, Homo sapiens
caaaacaatcaccag

SEQ ID NO: 1555658 - DNA, 15 bp, Homo sapiens
aaaacaatcaccaga

SEQ ID NO: 1555659 - DNA, 15 bp, Homo sapiens
aaacaatcaccagac

SEQ ID NO: 1555660 - DNA, 15 bp, Homo sapiens
aacaatcaccagacc

SEQ ID NO: 1555661 - DNA, 15 bp, Homo sapiens
acaatcaccagaccc

SEQ ID NO: 1555662 - DNA, 15 bp, Homo sapiens
caatcaccagacccc

SEQ ID NO: 1555663 - DNA, 15 bp, Homo sapiens
aatcaccagacccct

SEQ ID NO: 1555664 - DNA, 15 bp, Homo sapiens
atcaccagacccctg

SEQ ID NO: 1555665 - DNA, 15 bp, Homo sapiens
tcaccagacccctga

SEQ ID NO: 1555666 - DNA, 15 bp, Homo sapiens
caccagacccctgag

SEQ ID NO: 1555667 - DNA, 15 bp, Homo sapiens
accagacccctgagc

SEQ ID NO: 1555668 - DNA, 15 bp, Homo sapiens
ccagacccctgagct

SEQ ID NO: 1555669 - DNA, 15 bp, Homo sapiens
cagacccctgagctg

SEQ ID NO: 1555670 - DNA, 15 bp, Homo sapiens
agacccctgagctgg

SEQ ID NO: 1555671 - DNA, 15 bp, Homo sapiens
gacccctgagctggg

SEQ ID NO: 1555672 - DNA, 15 bp, Homo sapiens
acccctgagctgggt

SEQ ID NO: 1555673 - DNA, 15 bp, Homo sapiens
cccctgagctgggtt

SEQ ID NO: 1555674 - DNA, 15 bp, Homo sapiens
ccctgagctgggttg

SEQ ID NO: 1555675 - DNA, 15 bp, Homo sapiens
cctgagctgggttgt

SEQ ID NO: 1555676 - DNA, 15 bp, Homo sapiens
ctgagctgggttgtg

SEQ ID NO: 1555677 - DNA, 15 bp, Homo sapiens
tgagctgggttgtgt

SEQ ID NO: 1555678 - DNA, 15 bp, Homo sapiens
gagctgggttgtgtt

SEQ ID NO: 1555679 - DNA, 15 bp, Homo sapiens
agctgggttgtgtta

SEQ ID NO: 1555680 - DNA, 15 bp, Homo sapiens
gctgggttgtgttag

SEQ ID NO: 1555681 - DNA, 15 bp, Homo sapiens
ctgggttgtgttagg

SEQ ID NO: 1555682 - DNA, 15 bp, Homo sapiens
tgggttgtgttagga

SEQ ID NO: 1555683 - DNA, 15 bp, Homo sapiens
gggttgtgttaggag

SEQ ID NO: 1555684 - DNA, 15 bp, Homo sapiens
ggttgtgttaggagc

SEQ ID NO: 1555685 - DNA, 15 bp, Homo sapiens
gttgtgttaggagct

SEQ ID NO: 1555686 - DNA, 15 bp, Homo sapiens
ttgtgttaggagcta

SEQ ID NO: 1555687 - DNA, 15 bp, Homo sapiens
tgtgttaggagctag

SEQ ID NO: 1555688 - DNA, 15 bp, Homo sapiens
gtgttaggagctagg

SEQ ID NO: 1555689 - DNA, 15 bp, Homo sapiens
tgttaggagctaggg

SEQ ID NO: 1555690 - DNA, 15 bp, Homo sapiens
gttaggagctaggga

SEQ ID NO: 1555691 - DNA, 15 bp, Homo sapiens
ttaggagctagggat

SEQ ID NO: 1555692 - DNA, 15 bp, Homo sapiens
taggagctagggatg

SEQ ID NO: 1555693 - DNA, 15 bp, Homo sapiens
aggagctagggatgc

SEQ ID NO: 1555694 - DNA, 15 bp, Homo sapiens
ggagctagggatgcc

SEQ ID NO: 1555695 - DNA, 15 bp, Homo sapiens
gagctagggatgcca

SEQ ID NO: 1555696 - DNA, 15 bp, Homo sapiens
agctagggatgccac

SEQ ID NO: 1555697 - DNA, 15 bp, Homo sapiens
gctagggatgccact

SEQ ID NO: 1555698 - DNA, 15 bp, Homo sapiens
ctagggatgccactg

SEQ ID NO: 1555699 - DNA, 15 bp, Homo sapiens
tagggatgccactga

SEQ ID NO: 1555700 - DNA, 15 bp, Homo sapiens
agggatgccactgag

SEQ ID NO: 1555701 - DNA, 15 bp, Homo sapiens
gggatgccactgaga

SEQ ID NO: 1555702 - DNA, 15 bp, Homo sapiens
ggatgccactgagac

SEQ ID NO: 1555703 - DNA, 15 bp, Homo sapiens
gatgccactgagacc

SEQ ID NO: 1555704 - DNA, 15 bp, Homo sapiens
atgccactgagacct

SEQ ID NO: 1555705 - DNA, 15 bp, Homo sapiens
tgccactgagacctt

SEQ ID NO: 1555706 - DNA, 15 bp, Homo sapiens
gccactgagacctta

SEQ ID NO: 1555707 - DNA, 15 bp, Homo sapiens
ccactgagaccttag

SEQ ID NO: 1555708 - DNA, 15 bp, Homo sapiens
cactgagaccttaga

SEQ ID NO: 1555709 - DNA, 15 bp, Homo sapiens
actgagaccttagag

SEQ ID NO: 1555710 - DNA, 15 bp, Homo sapiens
ctgagaccttagagg

SEQ ID NO: 1555711 - DNA, 15 bp, Homo sapiens
tgagaccttagaggt

SEQ ID NO: 1555712 - DNA, 15 bp, Homo sapiens
gagaccttagaggtg

SEQ ID NO: 1555713 - DNA, 15 bp, Homo sapiens
agaccttagaggtgt

SEQ ID NO: 1555714 - DNA, 15 bp, Homo sapiens
gaccttagaggtgtg

SEQ ID NO: 1555715 - DNA, 15 bp, Homo sapiens
accttagaggtgtgt

SEQ ID NO: 1555716 - DNA, 15 bp, Homo sapiens
ccttagaggtgtgtg

SEQ ID NO: 1555717 - DNA, 15 bp, Homo sapiens
cttagaggtgtgtga

SEQ ID NO: 1555718 - DNA, 15 bp, Homo sapiens
ttagaggtgtgtgag

SEQ ID NO: 1555719 - DNA, 15 bp, Homo sapiens
tagaggtgtgtgagt

SEQ ID NO: 1555720 - DNA, 15 bp, Homo sapiens
agaggtgtgtgagtg

SEQ ID NO: 1555721 - DNA, 15 bp, Homo sapiens
gaggtgtgtgagtgt

SEQ ID NO: 1555722 - DNA, 15 bp, Homo sapiens
aggtgtgtgagtgtg

SEQ ID NO: 1555723 - DNA, 15 bp, Homo sapiens
ggtgtgtgagtgtgt

SEQ ID NO: 1555724 - DNA, 15 bp, Homo sapiens
gtgtgagtgtgtgca

SEQ ID NO: 1555725 - DNA, 15 bp, Homo sapiens
tgtgagtgtgtgcat

SEQ ID NO: 1555726 - DNA, 15 bp, Homo sapiens
gtgagtgtgtgcatt

SEQ ID NO: 1555727 - DNA, 15 bp, Homo sapiens
tgagtgtgtgcattg

SEQ ID NO: 1555728 - DNA, 15 bp, Homo sapiens
gagtgtgtgcattgg

SEQ ID NO: 1555729 - DNA, 15 bp, Homo sapiens
agtgtgtgcattggg

SEQ ID NO: 1555730 - DNA, 15 bp, Homo sapiens
gtgtgtgcattgggg

SEQ ID NO: 1555731 - DNA, 15 bp, Homo sapiens
tgtgtgcattgggga

SEQ ID NO: 1555732 - DNA, 15 bp, Homo sapiens
gtgtgcattggggag

SEQ ID NO: 1555733 - DNA, 15 bp, Homo sapiens
tgtgcattggggaga

SEQ ID NO: 1555734 - DNA, 15 bp, Homo sapiens
gtgcattggggagaa

SEQ ID NO: 1555735 - DNA, 15 bp, Homo sapiens
tgcattggggagaag

SEQ ID NO: 1555736 - DNA, 15 bp, Homo sapiens
gcattggggagaagg

SEQ ID NO: 1555737 - DNA, 15 bp, Homo sapiens
cattggggagaaggg

SEQ ID NO: 1555738 - DNA, 15 bp, Homo sapiens
attggggagaagggg

SEQ ID NO: 1555739 - DNA, 15 bp, Homo sapiens
ttggggagaaggggt

SEQ ID NO: 1555740 - DNA, 15 bp, Homo sapiens
tggggagaaggggta

SEQ ID NO: 1555741 - DNA, 15 bp, Homo sapiens
ggggagaaggggtaa

SEQ ID NO: 1555742 - DNA, 15 bp, Homo sapiens
gggagaaggggtaac

SEQ ID NO: 1555743 - DNA, 15 bp, Homo sapiens
ggagaaggggtaacc

SEQ ID NO: 1555744 - DNA, 15 bp, Homo sapiens
gagaaggggtaaccc

SEQ ID NO: 1555745 - DNA, 15 bp, Homo sapiens
agaaggggtaacccc

SEQ ID NO: 1555746 - DNA, 15 bp, Homo sapiens
gaaggggtaaccccc

SEQ ID NO: 1555747 - DNA, 15 bp, Homo sapiens
aaggggtaacccccc

SEQ ID NO: 1555748 - DNA, 15 bp, Homo sapiens
aggggtaacccccct

SEQ ID NO: 1555749 - DNA, 15 bp, Homo sapiens
ggggtaacccccctc

SEQ ID NO: 1555750 - DNA, 15 bp, Homo sapiens
gggtaacccccctcc

SEQ ID NO: 1555751 - DNA, 15 bp, Homo sapiens
ggtaacccccctcca

SEQ ID NO: 1555752 - DNA, 15 bp, Homo sapiens
gtaacccccctccat

SEQ ID NO: 1555753 - DNA, 15 bp, Homo sapiens
taacccccctccatg

SEQ ID NO: 1555754 - DNA, 15 bp, Homo sapiens
aacccccctccatgg

SEQ ID NO: 1555755 - DNA, 15 bp, Homo sapiens
acccccctccatgga

SEQ ID NO: 1555756 - DNA, 15 bp, Homo sapiens
cccccctccatggag

SEQ ID NO: 1555757 - DNA, 15 bp, Homo sapiens
ccccctccatggagc

SEQ ID NO: 1555758 - DNA, 15 bp, Homo sapiens
cccctccatggagct

SEQ ID NO: 1555759 - DNA, 15 bp, Homo sapiens
ccctccatggagctg

SEQ ID NO: 1555760 - DNA, 15 bp, Homo sapiens
cctccatggagctga

SEQ ID NO: 1555761 - DNA, 15 bp, Homo sapiens
ctccatggagctgaa

SEQ ID NO: 1555762 - DNA, 15 bp, Homo sapiens
tccatggagctgaag

SEQ ID NO: 1555763 - DNA, 15 bp, Homo sapiens
ccatggagctgaagg

SEQ ID NO: 1555764 - DNA, 15 bp, Homo sapiens
catggagctgaaggt

SEQ ID NO: 1555765 - DNA, 15 bp, Homo sapiens
atggagctgaaggtc

SEQ ID NO: 1555766 - DNA, 15 bp, Homo sapiens
tggagctgaaggtcg

SEQ ID NO: 1555767 - DNA, 15 bp, Homo sapiens
ggagctgaaggtcgg

SEQ ID NO: 1555768 - DNA, 15 bp, Homo sapiens
gagctgaaggtcggc

SEQ ID NO: 1555769 - DNA, 15 bp, Homo sapiens
agctgaaggtcggct

SEQ ID NO: 1555770 - DNA, 15 bp, Homo sapiens
gctgaaggtcggctc

SEQ ID NO: 1555771 - DNA, 15 bp, Homo sapiens
ctgaaggtcggctca

SEQ ID NO: 1555772 - DNA, 15 bp, Homo sapiens
tgaaggtcggctcag

SEQ ID NO: 1555773 - DNA, 15 bp, Homo sapiens
gaaggtcggctcagc

SEQ ID NO: 1555774 - DNA, 15 bp, Homo sapiens
aaggtcggctcagca

SEQ ID NO: 1555775 - DNA, 15 bp, Homo sapiens
aggtcggctcagcag

SEQ ID NO: 1555776 - DNA, 15 bp, Homo sapiens
ggtcggctcagcagc

SEQ ID NO: 1555777 - DNA, 15 bp, Homo sapiens
gtcggctcagcagcc

SEQ ID NO: 1555778 - DNA, 15 bp, Homo sapiens
tcggctcagcagccc

SEQ ID NO: 1555779 - DNA, 15 bp, Homo sapiens
cggctcagcagccca

SEQ ID NO: 1555780 - DNA, 15 bp, Homo sapiens
ggctcagcagcccag

SEQ ID NO: 1555781 - DNA, 15 bp, Homo sapiens
gctcagcagcccagg

SEQ ID NO: 1555782 - DNA, 15 bp, Homo sapiens
ctcagcagcccaggc

SEQ ID NO: 1555783 - DNA, 15 bp, Homo sapiens
tcagcagcccaggca

SEQ ID NO: 1555784 - DNA, 15 bp, Homo sapiens
cagcagcccaggcag

SEQ ID NO: 1555785 - DNA, 15 bp, Homo sapiens
agcagcccaggcagt

SEQ ID NO: 1555786 - DNA, 15 bp, Homo sapiens
gcagcccaggcagtg

SEQ ID NO: 1555787 - DNA, 15 bp, Homo sapiens
cagcccaggcagtgg

SEQ ID NO: 1555788 - DNA, 15 bp, Homo sapiens
agcccaggcagtggt

SEQ ID NO: 1555789 - DNA, 15 bp, Homo sapiens
gcccaggcagtggta

SEQ ID NO: 1555790 - DNA, 15 bp, Homo sapiens
cccaggcagtggtac

SEQ ID NO: 1555791 - DNA, 15 bp, Homo sapiens
ccaggcagtggtact

SEQ ID NO: 1555792 - DNA, 15 bp, Homo sapiens
caggcagtggtactg

SEQ ID NO: 1555793 - DNA, 15 bp, Homo sapiens
aggcagtggtactga

SEQ ID NO: 1555794 - DNA, 15 bp, Homo sapiens
ggcagtggtactgag

SEQ ID NO: 1555795 - DNA, 15 bp, Homo sapiens
gcagtggtactgagg

SEQ ID NO: 1555796 - DNA, 15 bp, Homo sapiens
cagtggtactgaggg

SEQ ID NO: 1555797 - DNA, 15 bp, Homo sapiens
agtggtactgaggga

SEQ ID NO: 1555798 - DNA, 15 bp, Homo sapiens
gtggtactgagggag

SEQ ID NO: 1555799 - DNA, 15 bp, Homo sapiens
tggtactgagggagg

SEQ ID NO: 1555800 - DNA, 15 bp, Homo sapiens
ggtactgagggaggc

SEQ ID NO: 1555801 - DNA, 15 bp, Homo sapiens
gtactgagggaggcc

SEQ ID NO: 1555802 - DNA, 15 bp, Homo sapiens
tactgagggaggcca

SEQ ID NO: 1555803 - DNA, 15 bp, Homo sapiens
actgagggaggccag

SEQ ID NO: 1555804 - DNA, 15 bp, Homo sapiens
ctgagggaggccaga

SEQ ID NO: 1555805 - DNA, 15 bp, Homo sapiens
tgagggaggccagag

SEQ ID NO: 1555806 - DNA, 15 bp, Homo sapiens
gagggaggccagagc

SEQ ID NO: 1555807 - DNA, 15 bp, Homo sapiens
agggaggccagagcc

SEQ ID NO: 1555808 - DNA, 15 bp, Homo sapiens
gggaggccagagcca

SEQ ID NO: 1555809 - DNA, 15 bp, Homo sapiens
ggaggccagagccac

SEQ ID NO: 1555810 - DNA, 15 bp, Homo sapiens
gaggccagagccacc

SEQ ID NO: 1555811 - DNA, 15 bp, Homo sapiens
aggccagagccaccc

SEQ ID NO: 1555812 - DNA, 15 bp, Homo sapiens
ggccagagccacccc

SEQ ID NO: 1555813 - DNA, 15 bp, Homo sapiens
gccagagccacccct

SEQ ID NO: 1555814 - DNA, 15 bp, Homo sapiens
ccagagccacccctt

SEQ ID NO: 1555815 - DNA, 15 bp, Homo sapiens
cagagccaccccttc

SEQ ID NO: 1555816 - DNA, 15 bp, Homo sapiens
agagccaccccttct

SEQ ID NO: 1555817 - DNA, 15 bp, Homo sapiens
gagccaccccttctg

SEQ ID NO: 1555818 - DNA, 15 bp, Homo sapiens
agccaccccttctgc

SEQ ID NO: 1555819 - DNA, 15 bp, Homo sapiens
gccaccccttctgcc

SEQ ID NO: 1555820 - DNA, 15 bp, Homo sapiens
ccaccccttctgcca

SEQ ID NO: 1555821 - DNA, 15 bp, Homo sapiens
caccccttctgccag

SEQ ID NO: 1555822 - DNA, 15 bp, Homo sapiens
accccttctgccagg

SEQ ID NO: 1555823 - DNA, 15 bp, Homo sapiens
ccccttctgccagga

SEQ ID NO: 1555824 - DNA, 15 bp, Homo sapiens
cccttctgccaggag

SEQ ID NO: 1555825 - DNA, 15 bp, Homo sapiens
ccttctgccaggagt

SEQ ID NO: 1555826 - DNA, 15 bp, Homo sapiens
cttctgccaggagtg

SEQ ID NO: 1555827 - DNA, 15 bp, Homo sapiens
ttctgccaggagtgt

SEQ ID NO: 1555828 - DNA, 15 bp, Homo sapiens
tctgccaggagtgtg

SEQ ID NO: 1555829 - DNA, 15 bp, Homo sapiens
ctgccaggagtgtgg

SEQ ID NO: 1555830 - DNA, 15 bp, Homo sapiens
tgccaggagtgtggc

SEQ ID NO: 1555831 - DNA, 15 bp, Homo sapiens
gccaggagtgtggcg

SEQ ID NO: 1555832 - DNA, 15 bp, Homo sapiens
ccaggagtgtggcgg

SEQ ID NO: 1555833 - DNA, 15 bp, Homo sapiens
caggagtgtggcggc

SEQ ID NO: 1555834 - DNA, 15 bp, Homo sapiens
aggagtgtggcggca

SEQ ID NO: 1555835 - DNA, 15 bp, Homo sapiens
ggagtgtggcggcat

SEQ ID NO: 1555836 - DNA, 15 bp, Homo sapiens
gagtgtggcggcatt

SEQ ID NO: 1555837 - DNA, 15 bp, Homo sapiens
agtgtggcggcatta

SEQ ID NO: 1555838 - DNA, 15 bp, Homo sapiens
gtgtggcggcattag

SEQ ID NO: 1555839 - DNA, 15 bp, Homo sapiens
tgtggcggcattagg

SEQ ID NO: 1555840 - DNA, 15 bp, Homo sapiens
gtggcggcattagga

SEQ ID NO: 1555841 - DNA, 15 bp, Homo sapiens
tggcggcattaggaa

SEQ ID NO: 1555842 - DNA, 15 bp, Homo sapiens
ggcggcattaggaag

SEQ ID NO: 1555843 - DNA, 15 bp, Homo sapiens
gcggcattaggaagg

SEQ ID NO: 1555844 - DNA, 15 bp, Homo sapiens
cggcattaggaaggc

SEQ ID NO: 1555845 - DNA, 15 bp, Homo sapiens
ggcattaggaaggct

SEQ ID NO: 1555846 - DNA, 15 bp, Homo sapiens
gcattaggaaggctt

SEQ ID NO: 1555847 - DNA, 15 bp, Homo sapiens
cattaggaaggcttc

SEQ ID NO: 1555848 - DNA, 15 bp, Homo sapiens
attaggaaggcttcc

SEQ ID NO: 1555849 - DNA, 15 bp, Homo sapiens
ttaggaaggcttcca

SEQ ID NO: 1555850 - DNA, 15 bp, Homo sapiens
taggaaggcttccag

SEQ ID NO: 1555851 - DNA, 15 bp, Homo sapiens
aggaaggcttccagg

SEQ ID NO: 1555852 - DNA, 15 bp, Homo sapiens
ggaaggcttccaggg

SEQ ID NO: 1555853 - DNA, 15 bp, Homo sapiens
gaaggcttccaggga

SEQ ID NO: 1555854 - DNA, 15 bp, Homo sapiens
aaggcttccagggac

SEQ ID NO: 1555855 - DNA, 15 bp, Homo sapiens
aggcttccagggaca

SEQ ID NO: 1555856 - DNA, 15 bp, Homo sapiens
ggcttccagggacag

SEQ ID NO: 1555857 - DNA, 15 bp, Homo sapiens
gcttccagggacagg

SEQ ID NO: 1555858 - DNA, 15 bp, Homo sapiens
cttccagggacaggt

SEQ ID NO: 1555859 - DNA, 15 bp, Homo sapiens
ttccagggacaggtg

SEQ ID NO: 1555860 - DNA, 15 bp, Homo sapiens
tccagggacaggtga

SEQ ID NO: 1555861 - DNA, 15 bp, Homo sapiens
ccagggacaggtgac

SEQ ID NO: 1555862 - DNA, 15 bp, Homo sapiens
cagggacaggtgaca

SEQ ID NO: 1555863 - DNA, 15 bp, Homo sapiens
agggacaggtgacac

SEQ ID NO: 1555864 - DNA, 15 bp, Homo sapiens
gggacaggtgacact

SEQ ID NO: 1555865 - DNA, 15 bp, Homo sapiens
ggacaggtgacactg

SEQ ID NO: 1555866 - DNA, 15 bp, Homo sapiens
gacaggtgacactgg

SEQ ID NO: 1555867 - DNA, 15 bp, Homo sapiens
acaggtgacactggg

SEQ ID NO: 1555868 - DNA, 15 bp, Homo sapiens
caggtgacactgggg

SEQ ID NO: 1555869 - DNA, 15 bp, Homo sapiens
aggtgacactggggc

SEQ ID NO: 1555870 - DNA, 15 bp, Homo sapiens
ggtgacactggggcc

SEQ ID NO: 1555871 - DNA, 15 bp, Homo sapiens
gtgacactggggcca

SEQ ID NO: 1555872 - DNA, 15 bp, Homo sapiens
tgacactggggccag

SEQ ID NO: 1555873 - DNA, 15 bp, Homo sapiens
gacactggggccaga

SEQ ID NO: 1555874 - DNA, 15 bp, Homo sapiens
acactggggccagac

SEQ ID NO: 1555875 - DNA, 15 bp, Homo sapiens
cactggggccagacg

SEQ ID NO: 1555876 - DNA, 15 bp, Homo sapiens
actggggccagacgt

SEQ ID NO: 1555877 - DNA, 15 bp, Homo sapiens
ctggggccagacgtg

SEQ ID NO: 1555878 - DNA, 15 bp, Homo sapiens
tggggccagacgtga

SEQ ID NO: 1555879 - DNA, 15 bp, Homo sapiens
ggggccagacgtgaa

SEQ ID NO: 1555880 - DNA, 15 bp, Homo sapiens
gggccagacgtgaaa

SEQ ID NO: 1555881 - DNA, 15 bp, Homo sapiens
ggccagacgtgaaag

SEQ ID NO: 1555882 - DNA, 15 bp, Homo sapiens
gccagacgtgaaaga

SEQ ID NO: 1555883 - DNA, 15 bp, Homo sapiens
ccagacgtgaaagaa

SEQ ID NO: 1555884 - DNA, 15 bp, Homo sapiens
cagacgtgaaagaac

SEQ ID NO: 1555885 - DNA, 15 bp, Homo sapiens
agacgtgaaagaaca

SEQ ID NO: 1555886 - DNA, 15 bp, Homo sapiens
gacgtgaaagaacag

SEQ ID NO: 1555887 - DNA, 15 bp, Homo sapiens
acgtgaaagaacagg

SEQ ID NO: 1555888 - DNA, 15 bp, Homo sapiens
cgtgaaagaacaggc

SEQ ID NO: 1555889 - DNA, 15 bp, Homo sapiens
gtgaaagaacaggca

SEQ ID NO: 1555890 - DNA, 15 bp, Homo sapiens
tgaaagaacaggcag

SEQ ID NO: 1555891 - DNA, 15 bp, Homo sapiens
gaaagaacaggcaga

SEQ ID NO: 1555892 - DNA, 15 bp, Homo sapiens
aaagaacaggcagat

SEQ ID NO: 1555893 - DNA, 15 bp, Homo sapiens
aagaacaggcagatg

SEQ ID NO: 1555894 - DNA, 15 bp, Homo sapiens
agaacaggcagatgc

SEQ ID NO: 1555895 - DNA, 15 bp, Homo sapiens
gaacaggcagatgca

SEQ ID NO: 1555896 - DNA, 15 bp, Homo sapiens
aacaggcagatgcag

SEQ ID NO: 1555897 - DNA, 15 bp, Homo sapiens
acaggcagatgcaga

SEQ ID NO: 1555898 - DNA, 15 bp, Homo sapiens
caggcagatgcagaa

SEQ ID NO: 1555899 - DNA, 15 bp, Homo sapiens
aggcagatgcagaag

SEQ ID NO: 1555900 - DNA, 15 bp, Homo sapiens
ggcagatgcagaagg

SEQ ID NO: 1555901 - DNA, 15 bp, Homo sapiens
gcagatgcagaaggg

SEQ ID NO: 1555902 - DNA, 15 bp, Homo sapiens
cagatgcagaaggga

SEQ ID NO: 1555903 - DNA, 15 bp, Homo sapiens
agatgcagaagggaa

SEQ ID NO: 1555904 - DNA, 15 bp, Homo sapiens
gatgcagaagggaaa

SEQ ID NO: 1555905 - DNA, 15 bp, Homo sapiens
atgcagaagggaaaa

SEQ ID NO: 1555906 - DNA, 15 bp, Homo sapiens
tgcagaagggaaaag

SEQ ID NO: 1555907 - DNA, 15 bp, Homo sapiens
gcagaagggaaaagg

SEQ ID NO: 1555908 - DNA, 15 bp, Homo sapiens
cagaagggaaaagga

SEQ ID NO: 1555909 - DNA, 15 bp, Homo sapiens
agaagggaaaaggaa

SEQ ID NO: 1555910 - DNA, 15 bp, Homo sapiens
gaagggaaaaggaag

SEQ ID NO: 1555911 - DNA, 15 bp, Homo sapiens
aagggaaaaggaagc

SEQ ID NO: 1555912 - DNA, 15 bp, Homo sapiens
agggaaaaggaagct

SEQ ID NO: 1555913 - DNA, 15 bp, Homo sapiens
gggaaaaggaagctc

SEQ ID NO: 1555914 - DNA, 15 bp, Homo sapiens
ggaaaaggaagctcc

SEQ ID NO: 1555915 - DNA, 15 bp, Homo sapiens
gaaaaggaagctcct

SEQ ID NO: 1555916 - DNA, 15 bp, Homo sapiens
aaaaggaagctcctc

SEQ ID NO: 1555917 - DNA, 15 bp, Homo sapiens
aaaggaagctcctcc

SEQ ID NO: 1555918 - DNA, 15 bp, Homo sapiens
aaggaagctcctcca

SEQ ID NO: 1555919 - DNA, 15 bp, Homo sapiens
aggaagctcctccaa

SEQ ID NO: 1555920 - DNA, 15 bp, Homo sapiens
ggaagctcctccaag

SEQ ID NO: 1555921 - DNA, 15 bp, Homo sapiens
gaagctcctccaagg

SEQ ID NO: 1555922 - DNA, 15 bp, Homo sapiens
aagctcctccaagga

SEQ ID NO: 1555923 - DNA, 15 bp, Homo sapiens
agctcctccaaggaa

SEQ ID NO: 1555924 - DNA, 15 bp, Homo sapiens
gctcctccaaggaat

SEQ ID NO: 1555925 - DNA, 15 bp, Homo sapiens
ctcctccaaggaatg

SEQ ID NO: 1555926 - DNA, 15 bp, Homo sapiens
tcctccaaggaatga

SEQ ID NO: 1555927 - DNA, 15 bp, Homo sapiens
cctccaaggaatgag

SEQ ID NO: 1555928 - DNA, 15 bp, Homo sapiens
ctccaaggaatgagg

SEQ ID NO: 1555929 - DNA, 15 bp, Homo sapiens
tccaaggaatgaggg

SEQ ID NO: 1555930 - DNA, 15 bp, Homo sapiens
ccaaggaatgagggt

SEQ ID NO: 1555931 - DNA, 15 bp, Homo sapiens
caaggaatgagggtt

SEQ ID NO: 1555932 - DNA, 15 bp, Homo sapiens
aaggaatgagggttc

SEQ ID NO: 1555933 - DNA, 15 bp, Homo sapiens
aggaatgagggttcc

SEQ ID NO: 1555934 - DNA, 15 bp, Homo sapiens
ggaatgagggttcca

SEQ ID NO: 1555935 - DNA, 15 bp, Homo sapiens
gaatgagggttccag

SEQ ID NO: 1555936 - DNA, 15 bp, Homo sapiens
aatgagggttccagg

SEQ ID NO: 1555937 - DNA, 15 bp, Homo sapiens
atgagggttccaggc

SEQ ID NO: 1555938 - DNA, 15 bp, Homo sapiens
tgagggttccaggca

SEQ ID NO: 1555939 - DNA, 15 bp, Homo sapiens
gagggttccaggcag

SEQ ID NO: 1555940 - DNA, 15 bp, Homo sapiens
agggttccaggcagc

SEQ ID NO: 1555941 - DNA, 15 bp, Homo sapiens
gggttccaggcagca

SEQ ID NO: 1555942 - DNA, 15 bp, Homo sapiens
ggttccaggcagcac

SEQ ID NO: 1555943 - DNA, 15 bp, Homo sapiens
gttccaggcagcacc

SEQ ID NO: 1555944 - DNA, 15 bp, Homo sapiens
ttccaggcagcaccc

SEQ ID NO: 1555945 - DNA, 15 bp, Homo sapiens
tccaggcagcaccct

SEQ ID NO: 1555946 - DNA, 15 bp, Homo sapiens
ccaggcagcaccctg

SEQ ID NO: 1555947 - DNA, 15 bp, Homo sapiens
caggcagcaccctgg

SEQ ID NO: 1555948 - DNA, 15 bp, Homo sapiens
aggcagcaccctgga

SEQ ID NO: 1555949 - DNA, 15 bp, Homo sapiens
ggcagcaccctggac

SEQ ID NO: 1555950 - DNA, 15 bp, Homo sapiens
gcagcaccctggaca

SEQ ID NO: 1555951 - DNA, 15 bp, Homo sapiens
cagcaccctggacat

SEQ ID NO: 1555952 - DNA, 15 bp, Homo sapiens
agcaccctggacatg

SEQ ID NO: 1555953 - DNA, 15 bp, Homo sapiens
gcaccctggacatgg

SEQ ID NO: 1555954 - DNA, 15 bp, Homo sapiens
caccctggacatggg

SEQ ID NO: 1555955 - DNA, 15 bp, Homo sapiens
accctggacatgggg

SEQ ID NO: 1555956 - DNA, 15 bp, Homo sapiens
ccctggacatggggc

SEQ ID NO: 1555957 - DNA, 15 bp, Homo sapiens
cctggacatggggcc

SEQ ID NO: 1555958 - DNA, 15 bp, Homo sapiens
ctggacatggggcca

SEQ ID NO: 1555959 - DNA, 15 bp, Homo sapiens
tggacatggggccag

SEQ ID NO: 1555960 - DNA, 15 bp, Homo sapiens
ggacatggggccagg

SEQ ID NO: 1555961 - DNA, 15 bp, Homo sapiens
gacatggggccaggc

SEQ ID NO: 1555962 - DNA, 15 bp, Homo sapiens
acatggggccaggcc

SEQ ID NO: 1555963 - DNA, 15 bp, Homo sapiens
catggggccaggcca

SEQ ID NO: 1555964 - DNA, 15 bp, Homo sapiens
atggggccaggccac

SEQ ID NO: 1555965 - DNA, 15 bp, Homo sapiens
tggggccaggccacg

SEQ ID NO: 1555966 - DNA, 15 bp, Homo sapiens
ggggccaggccacgg

SEQ ID NO: 1555967 - DNA, 15 bp, Homo sapiens
gggccaggccacggg

SEQ ID NO: 1555968 - DNA, 15 bp, Homo sapiens
ggccaggccacgggc

SEQ ID NO: 1555969 - DNA, 15 bp, Homo sapiens
gccaggccacgggcc

SEQ ID NO: 1555970 - DNA, 15 bp, Homo sapiens
ccaggccacgggcct

SEQ ID NO: 1555971 - DNA, 15 bp, Homo sapiens
caggccacgggcctc

SEQ ID NO: 1555972 - DNA, 15 bp, Homo sapiens
aggccacgggcctcg

SEQ ID NO: 1555973 - DNA, 15 bp, Homo sapiens
ggccacgggcctcgg

SEQ ID NO: 1555974 - DNA, 15 bp, Homo sapiens
gccacgggcctcgga

SEQ ID NO: 1555975 - DNA, 15 bp, Homo sapiens
ccacgggcctcggaa

SEQ ID NO: 1555976 - DNA, 15 bp, Homo sapiens
cacgggcctcggaac

SEQ ID NO: 1555977 - DNA, 15 bp, Homo sapiens
acgggcctcggaact

SEQ ID NO: 1555978 - DNA, 15 bp, Homo sapiens
cgggcctcggaacta

SEQ ID NO: 1555979 - DNA, 15 bp, Homo sapiens
gggcctcggaactac

SEQ ID NO: 1555980 - DNA, 15 bp, Homo sapiens
ggcctcggaactacg

SEQ ID NO: 1555981 - DNA, 15 bp, Homo sapiens
gcctcggaactacgc

SEQ ID NO: 1555982 - DNA, 15 bp, Homo sapiens
cctcggaactacgca

SEQ ID NO: 1555983 - DNA, 15 bp, Homo sapiens
ctcggaactacgcag

SEQ ID NO: 1555984 - DNA, 15 bp, Homo sapiens
tcggaactacgcagt

SEQ ID NO: 1555985 - DNA, 15 bp, Homo sapiens
cggaactacgcagtg

SEQ ID NO: 1555986 - DNA, 15 bp, Homo sapiens
ggaactacgcagtgt

SEQ ID NO: 1555987 - DNA, 15 bp, Homo sapiens
gaactacgcagtgtc

SEQ ID NO: 1555988 - DNA, 15 bp, Homo sapiens
aactacgcagtgtcc

SEQ ID NO: 1555989 - DNA, 15 bp, Homo sapiens
actacgcagtgtcct

SEQ ID NO: 1555990 - DNA, 15 bp, Homo sapiens
ctacgcagtgtcctg

SEQ ID NO: 1555991 - DNA, 15 bp, Homo sapiens
tacgcagtgtcctgg

SEQ ID NO: 1555992 - DNA, 15 bp, Homo sapiens
acgcagtgtcctgga

SEQ ID NO: 1555993 - DNA, 15 bp, Homo sapiens
cgcagtgtcctggag

SEQ ID NO: 1555994 - DNA, 15 bp, Homo sapiens
gcagtgtcctggaga

SEQ ID NO: 1555995 - DNA, 15 bp, Homo sapiens
cagtgtcctggagaa

SEQ ID NO: 1555996 - DNA, 15 bp, Homo sapiens
agtgtcctggagaag

SEQ ID NO: 1555997 - DNA, 15 bp, Homo sapiens
gtgtcctggagaagc

SEQ ID NO: 1555998 - DNA, 15 bp, Homo sapiens
tgtcctggagaagcc

SEQ ID NO: 1555999 - DNA, 15 bp, Homo sapiens
gtcctggagaagcca

SEQ ID NO: 1556000 - DNA, 15 bp, Homo sapiens
tcctggagaagccag

SEQ ID NO: 1556001 - DNA, 15 bp, Homo sapiens
cctggagaagccagc

SEQ ID NO: 1556002 - DNA, 15 bp, Homo sapiens
ctggagaagccagcc

SEQ ID NO: 1556003 - DNA, 15 bp, Homo sapiens
tggagaagccagcca

SEQ ID NO: 1556004 - DNA, 15 bp, Homo sapiens
ggagaagccagccaa

SEQ ID NO: 1556005 - DNA, 15 bp, Homo sapiens
gagaagccagccaag

SEQ ID NO: 1556006 - DNA, 15 bp, Homo sapiens
agaagccagccaagc

SEQ ID NO: 1556007 - DNA, 15 bp, Homo sapiens
gaagccagccaagcc

SEQ ID NO: 1556008 - DNA, 15 bp, Homo sapiens
aagccagccaagccc

SEQ ID NO: 1556009 - DNA, 15 bp, Homo sapiens
agccagccaagccct

SEQ ID NO: 1556010 - DNA, 15 bp, Homo sapiens
gccagccaagccctt

SEQ ID NO: 1556011 - DNA, 15 bp, Homo sapiens
ccagccaagcccttg

SEQ ID NO: 1556012 - DNA, 15 bp, Homo sapiens
cagccaagcccttga

SEQ ID NO: 1556013 - DNA, 15 bp, Homo sapiens
agccaagcccttgaa

SEQ ID NO: 1556014 - DNA, 15 bp, Homo sapiens
gccaagcccttgaat

SEQ ID NO: 1556015 - DNA, 15 bp, Homo sapiens
ccaagcccttgaatt

SEQ ID NO: 1556016 - DNA, 15 bp, Homo sapiens
caagcccttgaattc

SEQ ID NO: 1556017 - DNA, 15 bp, Homo sapiens
aagcccttgaattct

SEQ ID NO: 1556018 - DNA, 15 bp, Homo sapiens
agcccttgaattctg

SEQ ID NO: 1556019 - DNA, 15 bp, Homo sapiens
gcccttgaattctga

SEQ ID NO: 1556020 - DNA, 15 bp, Homo sapiens
cccttgaattctgac

SEQ ID NO: 1556021 - DNA, 15 bp, Homo sapiens
ccttgaattctgacc

SEQ ID NO: 1556022 - DNA, 15 bp, Homo sapiens
cttgaattctgaccc

SEQ ID NO: 1556023 - DNA, 15 bp, Homo sapiens
ttgaattctgacccc

SEQ ID NO: 1556024 - DNA, 15 bp, Homo sapiens
tgaattctgacccct

SEQ ID NO: 1556025 - DNA, 15 bp, Homo sapiens
gaattctgacccctc

SEQ ID NO: 1556026 - DNA, 15 bp, Homo sapiens
aattctgacccctct

SEQ ID NO: 1556027 - DNA, 15 bp, Homo sapiens
attctgacccctcta

SEQ ID NO: 1556028 - DNA, 15 bp, Homo sapiens
ttctgacccctctaa

SEQ ID NO: 1556029 - DNA, 15 bp, Homo sapiens
tctgacccctctaat

SEQ ID NO: 1556030 - DNA, 15 bp, Homo sapiens
ctgacccctctaatt

SEQ ID NO: 1556031 - DNA, 15 bp, Homo sapiens
tgacccctctaattg

SEQ ID NO: 1556032 - DNA, 15 bp, Homo sapiens
gacccctctaattga

SEQ ID NO: 1556033 - DNA, 15 bp, Homo sapiens
acccctctaattgag

SEQ ID NO: 1556034 - DNA, 15 bp, Homo sapiens
cccctctaattgaga

SEQ ID NO: 1556035 - DNA, 15 bp, Homo sapiens
ccctctaattgagaa

SEQ ID NO: 1556036 - DNA, 15 bp, Homo sapiens
cctctaattgagaac

SEQ ID NO: 1556037 - DNA, 15 bp, Homo sapiens
ctctaattgagaact

SEQ ID NO: 1556038 - DNA, 15 bp, Homo sapiens
tctaattgagaactt

SEQ ID NO: 1556039 - DNA, 15 bp, Homo sapiens
ctaattgagaacttg

SEQ ID NO: 1556040 - DNA, 15 bp, Homo sapiens
taattgagaacttgg

SEQ ID NO: 1556041 - DNA, 15 bp, Homo sapiens
aattgagaacttggg

SEQ ID NO: 1556042 - DNA, 15 bp, Homo sapiens
attgagaacttgggt

SEQ ID NO: 1556043 - DNA, 15 bp, Homo sapiens
ttgagaacttgggtc

SEQ ID NO: 1556044 - DNA, 15 bp, Homo sapiens
tgagaacttgggtct

SEQ ID NO: 1556045 - DNA, 15 bp, Homo sapiens
gagaacttgggtctc

SEQ ID NO: 1556046 - DNA, 15 bp, Homo sapiens
agaacttgggtctca

SEQ ID NO: 1556047 - DNA, 15 bp, Homo sapiens
gaacttgggtctcag

SEQ ID NO: 1556048 - DNA, 15 bp, Homo sapiens
aacttgggtctcagg

SEQ ID NO: 1556049 - DNA, 15 bp, Homo sapiens
acttgggtctcagga

SEQ ID NO: 1556050 - DNA, 15 bp, Homo sapiens
cttgggtctcaggat

SEQ ID NO: 1556051 - DNA, 15 bp, Homo sapiens
ttgggtctcaggatt

SEQ ID NO: 1556052 - DNA, 15 bp, Homo sapiens
tgggtctcaggattg

SEQ ID NO: 1556053 - DNA, 15 bp, Homo sapiens
gggtctcaggattgt

SEQ ID NO: 1556054 - DNA, 15 bp, Homo sapiens
ggtctcaggattgtg

SEQ ID NO: 1556055 - DNA, 15 bp, Homo sapiens
gtctcaggattgtgc

SEQ ID NO: 1556056 - DNA, 15 bp, Homo sapiens
tctcaggattgtgca

SEQ ID NO: 1556057 - DNA, 15 bp, Homo sapiens
ctcaggattgtgcag

SEQ ID NO: 1556058 - DNA, 15 bp, Homo sapiens
tcaggattgtgcaga

SEQ ID NO: 1556059 - DNA, 15 bp, Homo sapiens
caggattgtgcagag

SEQ ID NO: 1556060 - DNA, 15 bp, Homo sapiens
aggattgtgcagaga

SEQ ID NO: 1556061 - DNA, 15 bp, Homo sapiens
ggattgtgcagagag

SEQ ID NO: 1556062 - DNA, 15 bp, Homo sapiens
gattgtgcagagaga

SEQ ID NO: 1556063 - DNA, 15 bp, Homo sapiens
attgtgcagagagag

SEQ ID NO: 1556064 - DNA, 15 bp, Homo sapiens
ttgtgcagagagagc

SEQ ID NO: 1556065 - DNA, 15 bp, Homo sapiens
tgtgcagagagagca

SEQ ID NO: 1556066 - DNA, 15 bp, Homo sapiens
gtgcagagagagcag

SEQ ID NO: 1556067 - DNA, 15 bp, Homo sapiens
tgcagagagagcagg

SEQ ID NO: 1556068 - DNA, 15 bp, Homo sapiens
gcagagagagcagga

SEQ ID NO: 1556069 - DNA, 15 bp, Homo sapiens
cagagagagcaggag

SEQ ID NO: 1556070 - DNA, 15 bp, Homo sapiens
agagagagcaggagc

SEQ ID NO: 1556071 - DNA, 15 bp, Homo sapiens
gagagagcaggagca

SEQ ID NO: 1556072 - DNA, 15 bp, Homo sapiens
agagagcaggagcag

SEQ ID NO: 1556073 - DNA, 15 bp, Homo sapiens
gagagcaggagcaga

SEQ ID NO: 1556074 - DNA, 15 bp, Homo sapiens
agagcaggagcagat

SEQ ID NO: 1556075 - DNA, 15 bp, Homo sapiens
gagcaggagcagatg

SEQ ID NO: 1556076 - DNA, 15 bp, Homo sapiens
agcaggagcagatga

SEQ ID NO: 1556077 - DNA, 15 bp, Homo sapiens
gcaggagcagatgag

SEQ ID NO: 1556078 - DNA, 15 bp, Homo sapiens
caggagcagatgagt

SEQ ID NO: 1556079 - DNA, 15 bp, Homo sapiens
aggagcagatgagtc

SEQ ID NO: 1556080 - DNA, 15 bp, Homo sapiens
ggagcagatgagtca

SEQ ID NO: 1556081 - DNA, 15 bp, Homo sapiens
gagcagatgagtcaa

SEQ ID NO: 1556082 - DNA, 15 bp, Homo sapiens
agcagatgagtcaaa

SEQ ID NO: 1556083 - DNA, 15 bp, Homo sapiens
gcagatgagtcaaag

SEQ ID NO: 1556084 - DNA, 15 bp, Homo sapiens
cagatgagtcaaaga

SEQ ID NO: 1556085 - DNA, 15 bp, Homo sapiens
agatgagtcaaagac

SEQ ID NO: 1556086 - DNA, 15 bp, Homo sapiens
gatgagtcaaagaca

SEQ ID NO: 1556087 - DNA, 15 bp, Homo sapiens
atgagtcaaagacag

SEQ ID NO: 1556088 - DNA, 15 bp, Homo sapiens
tgagtcaaagacaga

SEQ ID NO: 1556089 - DNA, 15 bp, Homo sapiens
gagtcaaagacagaa

SEQ ID NO: 1556090 - DNA, 15 bp, Homo sapiens
agtcaaagacagaag

SEQ ID NO: 1556091 - DNA, 15 bp, Homo sapiens
gtcaaagacagaaga

SEQ ID NO: 1556092 - DNA, 15 bp, Homo sapiens
tcaaagacagaagat

SEQ ID NO: 1556093 - DNA, 15 bp, Homo sapiens
caaagacagaagata

SEQ ID NO: 1556094 - DNA, 15 bp, Homo sapiens
aaagacagaagatat

SEQ ID NO: 1556095 - DNA, 15 bp, Homo sapiens
aagacagaagatatt

SEQ ID NO: 1556096 - DNA, 15 bp, Homo sapiens
agacagaagatattc

SEQ ID NO: 1556097 - DNA, 15 bp, Homo sapiens
gacagaagatattca

SEQ ID NO: 1556098 - DNA, 15 bp, Homo sapiens
acagaagatattcaa

SEQ ID NO: 1556099 - DNA, 15 bp, Homo sapiens
cagaagatattcaaa

SEQ ID NO: 1556100 - DNA, 15 bp, Homo sapiens
agaagatattcaaag

SEQ ID NO: 1556101 - DNA, 15 bp, Homo sapiens
gaagatattcaaagg

SEQ ID NO: 1556102 - DNA, 15 bp, Homo sapiens
aagatattcaaagga

SEQ ID NO: 1556103 - DNA, 15 bp, Homo sapiens
agatattcaaaggaa

SEQ ID NO: 1556104 - DNA, 15 bp, Homo sapiens
gatattcaaaggaaa

SEQ ID NO: 1556105 - DNA, 15 bp, Homo sapiens
atattcaaaggaaat

SEQ ID NO: 1556106 - DNA, 15 bp, Homo sapiens
tattcaaaggaaatg

SEQ ID NO: 1556107 - DNA, 15 bp, Homo sapiens
attcaaaggaaatgg

SEQ ID NO: 1556108 - DNA, 15 bp, Homo sapiens
ttcaaaggaaatggc

SEQ ID NO: 1556109 - DNA, 15 bp, Homo sapiens
tcaaaggaaatggct

SEQ ID NO: 1556110 - DNA, 15 bp, Homo sapiens
caaaggaaatggctg

SEQ ID NO: 1556111 - DNA, 15 bp, Homo sapiens
aaaggaaatggctgg

SEQ ID NO: 1556112 - DNA, 15 bp, Homo sapiens
aaggaaatggctggt

SEQ ID NO: 1556113 - DNA, 15 bp, Homo sapiens
aggaaatggctggta

SEQ ID NO: 1556114 - DNA, 15 bp, Homo sapiens
ggaaatggctggtac

SEQ ID NO: 1556115 - DNA, 15 bp, Homo sapiens
gaaatggctggtaca

SEQ ID NO: 1556116 - DNA, 15 bp, Homo sapiens
aaatggctggtacaa

SEQ ID NO: 1556117 - DNA, 15 bp, Homo sapiens
aatggctggtacaaa

SEQ ID NO: 1556118 - DNA, 15 bp, Homo sapiens
atggctggtacaaac

SEQ ID NO: 1556119 - DNA, 15 bp, Homo sapiens
tggctggtacaaacg

SEQ ID NO: 1556120 - DNA, 15 bp, Homo sapiens
ggctggtacaaacga

SEQ ID NO: 1556121 - DNA, 15 bp, Homo sapiens
gctggtacaaacgag

SEQ ID NO: 1556122 - DNA, 15 bp, Homo sapiens
ctggtacaaacgaga

SEQ ID NO: 1556123 - DNA, 15 bp, Homo sapiens
tggtacaaacgagac

SEQ ID NO: 1556124 - DNA, 15 bp, Homo sapiens
ggtacaaacgagact

SEQ ID NO: 1556125 - DNA, 15 bp, Homo sapiens
gtacaaacgagactg

SEQ ID NO: 1556126 - DNA, 15 bp, Homo sapiens
tacaaacgagactgg

SEQ ID NO: 1556127 - DNA, 15 bp, Homo sapiens
acaaacgagactggg

SEQ ID NO: 1556128 - DNA, 15 bp, Homo sapiens
caaacgagactggga

SEQ ID NO: 1556129 - DNA, 15 bp, Homo sapiens
aaacgagactgggag

SEQ ID NO: 1556130 - DNA, 15 bp, Homo sapiens
aacgagactgggagg

SEQ ID NO: 1556131 - DNA, 15 bp, Homo sapiens
acgagactgggagga

SEQ ID NO: 1556132 - DNA, 15 bp, Homo sapiens
cgagactgggaggag

SEQ ID NO: 1556133 - DNA, 15 bp, Homo sapiens
gagactgggaggaga

SEQ ID NO: 1556134 - DNA, 15 bp, Homo sapiens
agactgggaggagaa

SEQ ID NO: 1556135 - DNA, 15 bp, Homo sapiens
gactgggaggagaag

SEQ ID NO: 1556136 - DNA, 15 bp, Homo sapiens
actgggaggagaagg

SEQ ID NO: 1556137 - DNA, 15 bp, Homo sapiens
ctgggaggagaaggc

SEQ ID NO: 1556138 - DNA, 15 bp, Homo sapiens
tgggaggagaaggct

SEQ ID NO: 1556139 - DNA, 15 bp, Homo sapiens
gggaggagaaggctg

SEQ ID NO: 1556140 - DNA, 15 bp, Homo sapiens
ggaggagaaggctga

SEQ ID NO: 1556141 - DNA, 15 bp, Homo sapiens
gaggagaaggctgaa

SEQ ID NO: 1556142 - DNA, 15 bp, Homo sapiens
aggagaaggctgaag

SEQ ID NO: 1556143 - DNA, 15 bp, Homo sapiens
ggagaaggctgaagt

SEQ ID NO: 1556144 - DNA, 15 bp, Homo sapiens
gagaaggctgaagtg

SEQ ID NO: 1556145 - DNA, 15 bp, Homo sapiens
agaaggctgaagtgg

SEQ ID NO: 1556146 - DNA, 15 bp, Homo sapiens
gaaggctgaagtggc

SEQ ID NO: 1556147 - DNA, 15 bp, Homo sapiens
aaggctgaagtggct

SEQ ID NO: 1556148 - DNA, 15 bp, Homo sapiens
aggctgaagtggctt

SEQ ID NO: 1556149 - DNA, 15 bp, Homo sapiens
ggctgaagtggcttc

SEQ ID NO: 1556150 - DNA, 15 bp, Homo sapiens
gctgaagtggcttca

SEQ ID NO: 1556151 - DNA, 15 bp, Homo sapiens
ctgaagtggcttcag

SEQ ID NO: 1556152 - DNA, 15 bp, Homo sapiens
tgaagtggcttcaga

SEQ ID NO: 1556153 - DNA, 15 bp, Homo sapiens
gaagtggcttcagag

SEQ ID NO: 1556154 - DNA, 15 bp, Homo sapiens
aagtggcttcagaga

SEQ ID NO: 1556155 - DNA, 15 bp, Homo sapiens
agtggcttcagagag

SEQ ID NO: 1556156 - DNA, 15 bp, Homo sapiens
gtggcttcagagagc

SEQ ID NO: 1556157 - DNA, 15 bp, Homo sapiens
tggcttcagagagcc

SEQ ID NO: 1556158 - DNA, 15 bp, Homo sapiens
ggcttcagagagcct

SEQ ID NO: 1556159 - DNA, 15 bp, Homo sapiens
gcttcagagagcctg

SEQ ID NO: 1556160 - DNA, 15 bp, Homo sapiens
cttcagagagcctgt

SEQ ID NO: 1556161 - DNA, 15 bp, Homo sapiens
ttcagagagcctgtt

SEQ ID NO: 1556162 - DNA, 15 bp, Homo sapiens
tcagagagcctgttg

SEQ ID NO: 1556163 - DNA, 15 bp, Homo sapiens
cagagagcctgttgg

SEQ ID NO: 1556164 - DNA, 15 bp, Homo sapiens
agagagcctgttggc

SEQ ID NO: 1556165 - DNA, 15 bp, Homo sapiens
gagagcctgttggcc

SEQ ID NO: 1556166 - DNA, 15 bp, Homo sapiens
agagcctgttggccg

SEQ ID NO: 1556167 - DNA, 15 bp, Homo sapiens
gagcctgttggccgc

SEQ ID NO: 1556168 - DNA, 15 bp, Homo sapiens
agcctgttggccgcc

SEQ ID NO: 1556169 - DNA, 15 bp, Homo sapiens
gcctgttggccgccc

SEQ ID NO: 1556170 - DNA, 15 bp, Homo sapiens
cctgttggccgcccg

SEQ ID NO: 1556171 - DNA, 15 bp, Homo sapiens
ctgttggccgcccga

SEQ ID NO: 1556172 - DNA, 15 bp, Homo sapiens
tgttggccgcccgag

SEQ ID NO: 1556173 - DNA, 15 bp, Homo sapiens
gttggccgcccgagg

SEQ ID NO: 1556174 - DNA, 15 bp, Homo sapiens
ttggccgcccgaggg

SEQ ID NO: 1556175 - DNA, 15 bp, Homo sapiens
tggccgcccgagggc

SEQ ID NO: 1556176 - DNA, 15 bp, Homo sapiens
ggccgcccgagggcc

SEQ ID NO: 1556177 - DNA, 15 bp, Homo sapiens
gccgcccgagggccc

SEQ ID NO: 1556178 - DNA, 15 bp, Homo sapiens
ccgcccgagggccct

SEQ ID NO: 1556179 - DNA, 15 bp, Homo sapiens
cgcccgagggccctt

SEQ ID NO: 1556180 - DNA, 15 bp, Homo sapiens
gcccgagggcccttc

SEQ ID NO: 1556181 - DNA, 15 bp, Homo sapiens
cccgagggcccttca

SEQ ID NO: 1556182 - DNA, 15 bp, Homo sapiens
ccgagggcccttcag

SEQ ID NO: 1556183 - DNA, 15 bp, Homo sapiens
cgagggcccttcagc

SEQ ID NO: 1556184 - DNA, 15 bp, Homo sapiens
gagggcccttcagca

SEQ ID NO: 1556185 - DNA, 15 bp, Homo sapiens
agggcccttcagcag

SEQ ID NO: 1556186 - DNA, 15 bp, Homo sapiens
gggcccttcagcagc

SEQ ID NO: 1556187 - DNA, 15 bp, Homo sapiens
ggcccttcagcagcc

SEQ ID NO: 1556188 - DNA, 15 bp, Homo sapiens
gcccttcagcagcct

SEQ ID NO: 1556189 - DNA, 15 bp, Homo sapiens
cccttcagcagcctc

SEQ ID NO: 1556190 - DNA, 15 bp, Homo sapiens
ccttcagcagcctcg

SEQ ID NO: 1556191 - DNA, 15 bp, Homo sapiens
cttcagcagcctcgt

SEQ ID NO: 1556192 - DNA, 15 bp, Homo sapiens
ttcagcagcctcgtt

SEQ ID NO: 1556193 - DNA, 15 bp, Homo sapiens
tcagcagcctcgttt

SEQ ID NO: 1556194 - DNA, 15 bp, Homo sapiens
cagcagcctcgttta

SEQ ID NO: 1556195 - DNA, 15 bp, Homo sapiens
agcagcctcgtttac

SEQ ID NO: 1556196 - DNA, 15 bp, Homo sapiens
gcagcctcgtttacc

SEQ ID NO: 1556197 - DNA, 15 bp, Homo sapiens
cagcctcgtttaccc

SEQ ID NO: 1556198 - DNA, 15 bp, Homo sapiens
agcctcgtttaccca

SEQ ID NO: 1556199 - DNA, 15 bp, Homo sapiens
gcctcgtttacccac

SEQ ID NO: 1556200 - DNA, 15 bp, Homo sapiens
cctcgtttacccaca

SEQ ID NO: 1556201 - DNA, 15 bp, Homo sapiens
ctcgtttacccacaa

SEQ ID NO: 1556202 - DNA, 15 bp, Homo sapiens
tcgtttacccacaaa

SEQ ID NO: 1556203 - DNA, 15 bp, Homo sapiens
cgtttacccacaaac

SEQ ID NO: 1556204 - DNA, 15 bp, Homo sapiens
gtttacccacaaaca

SEQ ID NO: 1556205 - DNA, 15 bp, Homo sapiens
tttacccacaaacag

SEQ ID NO: 1556206 - DNA, 15 bp, Homo sapiens
ttacccacaaacagc

SEQ ID NO: 1556207 - DNA, 15 bp, Homo sapiens
tacccacaaacagct

SEQ ID NO: 1556208 - DNA, 15 bp, Homo sapiens
acccacaaacagctg

SEQ ID NO: 1556209 - DNA, 15 bp, Homo sapiens
cccacaaacagctga

SEQ ID NO: 1556210 - DNA, 15 bp, Homo sapiens
ccacaaacagctgat

SEQ ID NO: 1556211 - DNA, 15 bp, Homo sapiens
cacaaacagctgatc

SEQ ID NO: 1556212 - DNA, 15 bp, Homo sapiens
acaaacagctgatct

SEQ ID NO: 1556213 - DNA, 15 bp, Homo sapiens
caaacagctgatctg

SEQ ID NO: 1556214 - DNA, 15 bp, Homo sapiens
aaacagctgatctgc

SEQ ID NO: 1556215 - DNA, 15 bp, Homo sapiens
aacagctgatctgct

SEQ ID NO: 1556216 - DNA, 15 bp, Homo sapiens
acagctgatctgctt

SEQ ID NO: 1556217 - DNA, 15 bp, Homo sapiens
cagctgatctgcttg

SEQ ID NO: 1556218 - DNA, 15 bp, Homo sapiens
agctgatctgcttgt

SEQ ID NO: 1556219 - DNA, 15 bp, Homo sapiens
gctgatctgcttgtt

SEQ ID NO: 1556220 - DNA, 15 bp, Homo sapiens
ctgatctgcttgtta

SEQ ID NO: 1556221 - DNA, 15 bp, Homo sapiens
tgatctgcttgttac

SEQ ID NO: 1556222 - DNA, 15 bp, Homo sapiens
gatctgcttgttaca

SEQ ID NO: 1556223 - DNA, 15 bp, Homo sapiens
atctgcttgttacaa

SEQ ID NO: 1556224 - DNA, 15 bp, Homo sapiens
tctgcttgttacaaa

SEQ ID NO: 1556225 - DNA, 15 bp, Homo sapiens
ctgcttgttacaaat

SEQ ID NO: 1556226 - DNA, 15 bp, Homo sapiens
tgcttgttacaaatc

SEQ ID NO: 1556227 - DNA, 15 bp, Homo sapiens
gcttgttacaaatca

SEQ ID NO: 1556228 - DNA, 15 bp, Homo sapiens
cttgttacaaatcat

SEQ ID NO: 1556229 - DNA, 15 bp, Homo sapiens
ttgttacaaatcatt

SEQ ID NO: 1556230 - DNA, 15 bp, Homo sapiens
tgttacaaatcattc

SEQ ID NO: 1556231 - DNA, 15 bp, Homo sapiens
gttacaaatcattcc

SEQ ID NO: 1556232 - DNA, 15 bp, Homo sapiens
ttacaaatcattcca

SEQ ID NO: 1556233 - DNA, 15 bp, Homo sapiens
tacaaatcattccag

SEQ ID NO: 1556234 - DNA, 15 bp, Homo sapiens
acaaatcattccagc

SEQ ID NO: 1556235 - DNA, 15 bp, Homo sapiens
caaatcattccagcc

SEQ ID NO: 1556236 - DNA, 15 bp, Homo sapiens
aaatcattccagcct

SEQ ID NO: 1556237 - DNA, 15 bp, Homo sapiens
aatcattccagcctc

SEQ ID NO: 1556238 - DNA, 15 bp, Homo sapiens
atcattccagcctca

SEQ ID NO: 1556239 - DNA, 15 bp, Homo sapiens
tcattccagcctcat

SEQ ID NO: 1556240 - DNA, 15 bp, Homo sapiens
cattccagcctcatt

SEQ ID NO: 1556241 - DNA, 15 bp, Homo sapiens
attccagcctcatta

SEQ ID NO: 1556242 - DNA, 15 bp, Homo sapiens
ttccagcctcattag

SEQ ID NO: 1556243 - DNA, 15 bp, Homo sapiens
tccagcctcattagc

SEQ ID NO: 1556244 - DNA, 15 bp, Homo sapiens
ccagcctcattagct

SEQ ID NO: 1556245 - DNA, 15 bp, Homo sapiens
cagcctcattagcta

SEQ ID NO: 1556246 - DNA, 15 bp, Homo sapiens
agcctcattagctac

SEQ ID NO: 1556247 - DNA, 15 bp, Homo sapiens
gcctcattagctaca

SEQ ID NO: 1556248 - DNA, 15 bp, Homo sapiens
cctcattagctacac

SEQ ID NO: 1556249 - DNA, 15 bp, Homo sapiens
ctcattagctacacc

SEQ ID NO: 1556250 - DNA, 15 bp, Homo sapiens
tcattagctacacct

SEQ ID NO: 1556251 - DNA, 15 bp, Homo sapiens
cattagctacacctc

SEQ ID NO: 1556252 - DNA, 15 bp, Homo sapiens
attagctacacctcc

SEQ ID NO: 1556253 - DNA, 15 bp, Homo sapiens
ttagctacacctcct

SEQ ID NO: 1556254 - DNA, 15 bp, Homo sapiens
tagctacacctcctc

SEQ ID NO: 1556255 - DNA, 15 bp, Homo sapiens
agctacacctcctcc

SEQ ID NO: 1556256 - DNA, 15 bp, Homo sapiens
gctacacctcctcct

SEQ ID NO: 1556257 - DNA, 15 bp, Homo sapiens
ctacacctcctcctg

SEQ ID NO: 1556258 - DNA, 15 bp, Homo sapiens
tacacctcctcctga

SEQ ID NO: 1556259 - DNA, 15 bp, Homo sapiens
acacctcctcctgat

SEQ ID NO: 1556260 - DNA, 15 bp, Homo sapiens
cacctcctcctgatc

SEQ ID NO: 1556261 - DNA, 15 bp, Homo sapiens
acctcctcctgatcc

SEQ ID NO: 1556262 - DNA, 15 bp, Homo sapiens
cctcctcctgatccc

SEQ ID NO: 1556263 - DNA, 15 bp, Homo sapiens
ctcctcctgatccct

SEQ ID NO: 1556264 - DNA, 15 bp, Homo sapiens
tcctcctgatcccta

SEQ ID NO: 1556265 - DNA, 15 bp, Homo sapiens
cctcctgatccctac

SEQ ID NO: 1556266 - DNA, 15 bp, Homo sapiens
ctcctgatccctacc

SEQ ID NO: 1556267 - DNA, 15 bp, Homo sapiens
tcctgatccctacct

SEQ ID NO: 1556268 - DNA, 15 bp, Homo sapiens
cctgatccctacctg

SEQ ID NO: 1556269 - DNA, 15 bp, Homo sapiens
ctgatccctacctgt

SEQ ID NO: 1556270 - DNA, 15 bp, Homo sapiens
tgatccctacctgtt

SEQ ID NO: 1556271 - DNA, 15 bp, Homo sapiens
gatccctacctgttt

SEQ ID NO: 1556272 - DNA, 15 bp, Homo sapiens
atccctacctgtttg

SEQ ID NO: 1556273 - DNA, 15 bp, Homo sapiens
tccctacctgtttgt

SEQ ID NO: 1556274 - DNA, 15 bp, Homo sapiens
ccctacctgtttgtt

SEQ ID NO: 1556275 - DNA, 15 bp, Homo sapiens
cctacctgtttgtta

SEQ ID NO: 1556276 - DNA, 15 bp, Homo sapiens
ctacctgtttgttag

SEQ ID NO: 1556277 - DNA, 15 bp, Homo sapiens
tacctgtttgttagc

SEQ ID NO: 1556278 - DNA, 15 bp, Homo sapiens
acctgtttgttagct

SEQ ID NO: 1556279 - DNA, 15 bp, Homo sapiens
cctgtttgttagctt

SEQ ID NO: 1556280 - DNA, 15 bp, Homo sapiens
ctgtttgttagctta

SEQ ID NO: 1556281 - DNA, 15 bp, Homo sapiens
tgtttgttagcttag

SEQ ID NO: 1556282 - DNA, 15 bp, Homo sapiens
gtttgttagcttagt

SEQ ID NO: 1556283 - DNA, 15 bp, Homo sapiens
tttgttagcttagtt

SEQ ID NO: 1556284 - DNA, 15 bp, Homo sapiens
ttgttagcttagttc

SEQ ID NO: 1556285 - DNA, 15 bp, Homo sapiens
tgttagcttagttct

SEQ ID NO: 1556286 - DNA, 15 bp, Homo sapiens
gttagcttagttcta

SEQ ID NO: 1556287 - DNA, 15 bp, Homo sapiens
ttagcttagttctaa

SEQ ID NO: 1556288 - DNA, 15 bp, Homo sapiens
tagcttagttctaat

SEQ ID NO: 1556289 - DNA, 15 bp, Homo sapiens
agcttagttctaatt

SEQ ID NO: 1556290 - DNA, 15 bp, Homo sapiens
gcttagttctaatta

SEQ ID NO: 1556291 - DNA, 15 bp, Homo sapiens
cttagttctaattat

SEQ ID NO: 1556292 - DNA, 15 bp, Homo sapiens
ttagttctaattata

SEQ ID NO: 1556293 - DNA, 15 bp, Homo sapiens
tagttctaattatat

SEQ ID NO: 1556294 - DNA, 15 bp, Homo sapiens
agttctaattatatg

SEQ ID NO: 1556295 - DNA, 15 bp, Homo sapiens
gttctaattatatga

SEQ ID NO: 1556296 - DNA, 15 bp, Homo sapiens
ttctaattatatgag

SEQ ID NO: 1556297 - DNA, 15 bp, Homo sapiens
tctaattatatgaga

SEQ ID NO: 1556298 - DNA, 15 bp, Homo sapiens
ctaattatatgagag

SEQ ID NO: 1556299 - DNA, 15 bp, Homo sapiens
taattatatgagagt

SEQ ID NO: 1556300 - DNA, 15 bp, Homo sapiens
aattatatgagagtc

SEQ ID NO: 1556301 - DNA, 15 bp, Homo sapiens
attatatgagagtca

SEQ ID NO: 1556302 - DNA, 15 bp, Homo sapiens
ttatatgagagtcat

SEQ ID NO: 1556303 - DNA, 15 bp, Homo sapiens
tatatgagagtcata

SEQ ID NO: 1556304 - DNA, 15 bp, Homo sapiens
atatgagagtcataa

SEQ ID NO: 1556305 - DNA, 15 bp, Homo sapiens
tatgagagtcataaa

SEQ ID NO: 1556306 - DNA, 15 bp, Homo sapiens
atgagagtcataaaa

SEQ ID NO: 1556307 - DNA, 15 bp, Homo sapiens
tgagagtcataaaat

SEQ ID NO: 1556308 - DNA, 15 bp, Homo sapiens
gagagtcataaaatg

SEQ ID NO: 1556309 - DNA, 15 bp, Homo sapiens
agagtcataaaatgc

SEQ ID NO: 1556310 - DNA, 15 bp, Homo sapiens
gagtcataaaatgct

SEQ ID NO: 1556311 - DNA, 15 bp, Homo sapiens
agtcataaaatgctt

SEQ ID NO: 1556312 - DNA, 15 bp, Homo sapiens
gtcataaaatgcttt

SEQ ID NO: 1556313 - DNA, 15 bp, Homo sapiens
tcataaaatgcttta

SEQ ID NO: 1556314 - DNA, 15 bp, Homo sapiens
cataaaatgctttaa

SEQ ID NO: 1556315 - DNA, 15 bp, Homo sapiens
ataaaatgctttaaa

SEQ ID NO: 1556316 - DNA, 15 bp, Homo sapiens
taaaatgctttaaaa

SEQ ID NO: 1556317 - DNA, 15 bp, Homo sapiens
aaaatgctttaaaaa

SEQ ID NO: 1556318 - DNA, 15 bp, Homo sapiens
aaatgctttaaaaat

SEQ ID NO: 1556319 - DNA, 15 bp, Homo sapiens
aatgctttaaaaata

SEQ ID NO: 1556320 - DNA, 15 bp, Homo sapiens
atgctttaaaaataa

SEQ ID NO: 1556321 - DNA, 15 bp, Homo sapiens
tgctttaaaaataac

SEQ ID NO: 1556322 - DNA, 15 bp, Homo sapiens
gctttaaaaataacc

SEQ ID NO: 1556323 - DNA, 15 bp, Homo sapiens
ctttaaaaataacct

SEQ ID NO: 1556324 - DNA, 15 bp, Homo sapiens
tttaaaaataaccta

SEQ ID NO: 1556325 - DNA, 15 bp, Homo sapiens
ttaaaaataacctat

SEQ ID NO: 1556326 - DNA, 15 bp, Homo sapiens
taaaaataacctata

SEQ ID NO: 1556327 - DNA, 15 bp, Homo sapiens
aaaaataacctataa

SEQ ID NO: 1556328 - DNA, 15 bp, Homo sapiens
aaaataacctataac

SEQ ID NO: 1556329 - DNA, 15 bp, Homo sapiens
aaataacctataact

SEQ ID NO: 1556330 - DNA, 15 bp, Homo sapiens
aataacctataactc

SEQ ID NO: 1556331 - DNA, 15 bp, Homo sapiens
ataacctataactca

SEQ ID NO: 1556332 - DNA, 15 bp, Homo sapiens
taacctataactcac

SEQ ID NO: 1556333 - DNA, 15 bp, Homo sapiens
aacctataactcaca

SEQ ID NO: 1556334 - DNA, 15 bp, Homo sapiens
acctataactcacag

SEQ ID NO: 1556335 - DNA, 15 bp, Homo sapiens
cctataactcacagt

SEQ ID NO: 1556336 - DNA, 15 bp, Homo sapiens
ctataactcacagtt

SEQ ID NO: 1556337 - DNA, 15 bp, Homo sapiens
tataactcacagttc

SEQ ID NO: 1556338 - DNA, 15 bp, Homo sapiens
ataactcacagttct

SEQ ID NO: 1556339 - DNA, 15 bp, Homo sapiens
taactcacagttctt

SEQ ID NO: 1556340 - DNA, 15 bp, Homo sapiens
aactcacagttcttg

SEQ ID NO: 1556341 - DNA, 15 bp, Homo sapiens
actcacagttcttgg

SEQ ID NO: 1556342 - DNA, 15 bp, Homo sapiens
ctcacagttcttgga

SEQ ID NO: 1556343 - DNA, 15 bp, Homo sapiens
tcacagttcttggaa

SEQ ID NO: 1556344 - DNA, 15 bp, Homo sapiens
cacagttcttggaaa

SEQ ID NO: 1556345 - DNA, 15 bp, Homo sapiens
acagttcttggaaac

SEQ ID NO: 1556346 - DNA, 15 bp, Homo sapiens
cagttcttggaaact

SEQ ID NO: 1556347 - DNA, 15 bp, Homo sapiens
agttcttggaaactc

SEQ ID NO: 1556348 - DNA, 15 bp, Homo sapiens
gttcttggaaactct

SEQ ID NO: 1556349 - DNA, 15 bp, Homo sapiens
ttcttggaaactctg

SEQ ID NO: 1556350 - DNA, 15 bp, Homo sapiens
tcttggaaactctgg

SEQ ID NO: 1556351 - DNA, 15 bp, Homo sapiens
cttggaaactctggc

SEQ ID NO: 1556352 - DNA, 15 bp, Homo sapiens
ttggaaactctggcg

SEQ ID NO: 1556353 - DNA, 15 bp, Homo sapiens
tggaaactctggcgg

SEQ ID NO: 1556354 - DNA, 15 bp, Homo sapiens
ggaaactctggcggg

SEQ ID NO: 1556355 - DNA, 15 bp, Homo sapiens
gaaactctggcgggt

SEQ ID NO: 1556356 - DNA, 15 bp, Homo sapiens
aaactctggcgggtg

SEQ ID NO: 1556357 - DNA, 15 bp, Homo sapiens
aactctggcgggtgc

SEQ ID NO: 1556358 - DNA, 15 bp, Homo sapiens
actctggcgggtgcc

SEQ ID NO: 1556359 - DNA, 15 bp, Homo sapiens
ctctggcgggtgcct

SEQ ID NO: 1556360 - DNA, 15 bp, Homo sapiens
tctggcgggtgcctc

SEQ ID NO: 1556361 - DNA, 15 bp, Homo sapiens
ctggcgggtgcctcc

SEQ ID NO: 1556362 - DNA, 15 bp, Homo sapiens
tggcgggtgcctccc

SEQ ID NO: 1556363 - DNA, 15 bp, Homo sapiens
ggcgggtgcctcccc

SEQ ID NO: 1556364 - DNA, 15 bp, Homo sapiens
gcgggtgcctcccct

SEQ ID NO: 1556365 - DNA, 15 bp, Homo sapiens
cgggtgcctcccctg

SEQ ID NO: 1556366 - DNA, 15 bp, Homo sapiens
gggtgcctcccctga

SEQ ID NO: 1556367 - DNA, 15 bp, Homo sapiens
ggtgcctcccctgag

SEQ ID NO: 1556368 - DNA, 15 bp, Homo sapiens
gtgcctcccctgagt

SEQ ID NO: 1556369 - DNA, 15 bp, Homo sapiens
tgcctcccctgagta

SEQ ID NO: 1556370 - DNA, 15 bp, Homo sapiens
gcctcccctgagtaa

SEQ ID NO: 1556371 - DNA, 15 bp, Homo sapiens
cctcccctgagtaat

SEQ ID NO: 1556372 - DNA, 15 bp, Homo sapiens
ctcccctgagtaatg

SEQ ID NO: 1556373 - DNA, 15 bp, Homo sapiens
tcccctgagtaatgt

SEQ ID NO: 1556374 - DNA, 15 bp, Homo sapiens
cccctgagtaatgtg

SEQ ID NO: 1556375 - DNA, 15 bp, Homo sapiens
ccctgagtaatgtgg

SEQ ID NO: 1556376 - DNA, 15 bp, Homo sapiens
cctgagtaatgtgga

SEQ ID NO: 1556377 - DNA, 15 bp, Homo sapiens
ctgagtaatgtggag

SEQ ID NO: 1556378 - DNA, 15 bp, Homo sapiens
tgagtaatgtggagc

SEQ ID NO: 1556379 - DNA, 15 bp, Homo sapiens
gagtaatgtggagcc

SEQ ID NO: 1556380 - DNA, 15 bp, Homo sapiens
agtaatgtggagcct

SEQ ID NO: 1556381 - DNA, 15 bp, Homo sapiens
gtaatgtggagcctg

SEQ ID NO: 1556382 - DNA, 15 bp, Homo sapiens
taatgtggagcctgg

SEQ ID NO: 1556383 - DNA, 15 bp, Homo sapiens
aatgtggagcctggg

SEQ ID NO: 1556384 - DNA, 15 bp, Homo sapiens
atgtggagcctgggg

SEQ ID NO: 1556385 - DNA, 15 bp, Homo sapiens
tgtggagcctggggg

SEQ ID NO: 1556386 - DNA, 15 bp, Homo sapiens
gtggagcctgggggt

SEQ ID NO: 1556387 - DNA, 15 bp, Homo sapiens
tggagcctgggggtt

SEQ ID NO: 1556388 - DNA, 15 bp, Homo sapiens
ggagcctgggggttt

SEQ ID NO: 1556389 - DNA, 15 bp, Homo sapiens
gagcctgggggtttt

SEQ ID NO: 1556390 - DNA, 15 bp, Homo sapiens
agcctgggggttttt

SEQ ID NO: 1556391 - DNA, 15 bp, Homo sapiens
gcctgggggttttta

SEQ ID NO: 1556392 - DNA, 15 bp, Homo sapiens
cctgggggtttttac

SEQ ID NO: 1556393 - DNA, 15 bp, Homo sapiens
ctgggggtttttacg

SEQ ID NO: 1556394 - DNA, 15 bp, Homo sapiens
tgggggtttttacga

SEQ ID NO: 1556395 - DNA, 15 bp, Homo sapiens
gggggtttttacgac

SEQ ID NO: 1556396 - DNA, 15 bp, Homo sapiens
ggggtttttacgaca

SEQ ID NO: 1556397 - DNA, 15 bp, Homo sapiens
gggtttttacgacag

SEQ ID NO: 1556398 - DNA, 15 bp, Homo sapiens
ggtttttacgacagc

SEQ ID NO: 1556399 - DNA, 15 bp, Homo sapiens
gtttttacgacagcc

SEQ ID NO: 1556400 - DNA, 15 bp, Homo sapiens
tttttacgacagcct

SEQ ID NO: 1556401 - DNA, 15 bp, Homo sapiens
ttttacgacagcctg

SEQ ID NO: 1556402 - DNA, 15 bp, Homo sapiens
tttacgacagcctgg

SEQ ID NO: 1556403 - DNA, 15 bp, Homo sapiens
ttacgacagcctggg

SEQ ID NO: 1556404 - DNA, 15 bp, Homo sapiens
tacgacagcctgggg

SEQ ID NO: 1556405 - DNA, 15 bp, Homo sapiens
acgacagcctggggt

SEQ ID NO: 1556406 - DNA, 15 bp, Homo sapiens
cgacagcctggggtt

SEQ ID NO: 1556407 - DNA, 15 bp, Homo sapiens
gacagcctggggttg

SEQ ID NO: 1556408 - DNA, 15 bp, Homo sapiens
acagcctggggttgc

SEQ ID NO: 1556409 - DNA, 15 bp, Homo sapiens
cagcctggggttgcc

SEQ ID NO: 1556410 - DNA, 15 bp, Homo sapiens
agcctggggttgcca

SEQ ID NO: 1556411 - DNA, 15 bp, Homo sapiens
gcctggggttgccaa

SEQ ID NO: 1556412 - DNA, 15 bp, Homo sapiens
cctggggttgccaag

SEQ ID NO: 1556413 - DNA, 15 bp, Homo sapiens
ctggggttgccaagg

SEQ ID NO: 1556414 - DNA, 15 bp, Homo sapiens
tggggttgccaaggg

SEQ ID NO: 1556415 - DNA, 15 bp, Homo sapiens
ggggttgccaagggg

SEQ ID NO: 1556416 - DNA, 15 bp, Homo sapiens
gggttgccaagggga

SEQ ID NO: 1556417 - DNA, 15 bp, Homo sapiens
ggttgccaaggggaa

SEQ ID NO: 1556418 - DNA, 15 bp, Homo sapiens
gttgccaaggggaaa

SEQ ID NO: 1556419 - DNA, 15 bp, Homo sapiens
ttgccaaggggaaac

SEQ ID NO: 1556420 - DNA, 15 bp, Homo sapiens
tgccaaggggaaact

SEQ ID NO: 1556421 - DNA, 15 bp, Homo sapiens
gccaaggggaaactg

SEQ ID NO: 1556422 - DNA, 15 bp, Homo sapiens
ccaaggggaaactga

SEQ ID NO: 1556423 - DNA, 15 bp, Homo sapiens
caaggggaaactgag

SEQ ID NO: 1556424 - DNA, 15 bp, Homo sapiens
aaggggaaactgagg

SEQ ID NO: 1556425 - DNA, 15 bp, Homo sapiens
aggggaaactgaggc

SEQ ID NO: 1556426 - DNA, 15 bp, Homo sapiens
ggggaaactgaggcc

SEQ ID NO: 1556427 - DNA, 15 bp, Homo sapiens
gggaaactgaggccc

SEQ ID NO: 1556428 - DNA, 15 bp, Homo sapiens
ggaaactgaggccca

SEQ ID NO: 1556429 - DNA, 15 bp, Homo sapiens
gaaactgaggcccaa

SEQ ID NO: 1556430 - DNA, 15 bp, Homo sapiens
aaactgaggcccaag

SEQ ID NO: 1556431 - DNA, 15 bp, Homo sapiens
aactgaggcccaagc

SEQ ID NO: 1556432 - DNA, 15 bp, Homo sapiens
actgaggcccaagct

SEQ ID NO: 1556433 - DNA, 15 bp, Homo sapiens
ctgaggcccaagctt

SEQ ID NO: 1556434 - DNA, 15 bp, Homo sapiens
tgaggcccaagcttg

SEQ ID NO: 1556435 - DNA, 15 bp, Homo sapiens
gaggcccaagcttgt

SEQ ID NO: 1556436 - DNA, 15 bp, Homo sapiens
aggcccaagcttgtc

SEQ ID NO: 1556437 - DNA, 15 bp, Homo sapiens
ggcccaagcttgtcc

SEQ ID NO: 1556438 - DNA, 15 bp, Homo sapiens
gcccaagcttgtccc

SEQ ID NO: 1556439 - DNA, 15 bp, Homo sapiens
cccaagcttgtcccc

SEQ ID NO: 1556440 - DNA, 15 bp, Homo sapiens
ccaagcttgtcccca

SEQ ID NO: 1556441 - DNA, 15 bp, Homo sapiens
caagcttgtccccag

SEQ ID NO: 1556442 - DNA, 15 bp, Homo sapiens
aagcttgtccccaga

SEQ ID NO: 1556443 - DNA, 15 bp, Homo sapiens
agcttgtccccagag

SEQ ID NO: 1556444 - DNA, 15 bp, Homo sapiens
gcttgtccccagagg

SEQ ID NO: 1556445 - DNA, 15 bp, Homo sapiens
cttgtccccagagga

SEQ ID NO: 1556446 - DNA, 15 bp, Homo sapiens
ttgtccccagaggag

SEQ ID NO: 1556447 - DNA, 15 bp, Homo sapiens
tgtccccagaggagt

SEQ ID NO: 1556448 - DNA, 15 bp, Homo sapiens
gtccccagaggagtt

SEQ ID NO: 1556449 - DNA, 15 bp, Homo sapiens
tccccagaggagttc

SEQ ID NO: 1556450 - DNA, 15 bp, Homo sapiens
ccccagaggagttct

SEQ ID NO: 1556451 - DNA, 15 bp, Homo sapiens
cccagaggagttctg

SEQ ID NO: 1556452 - DNA, 15 bp, Homo sapiens
ccagaggagttctgg

SEQ ID NO: 1556453 - DNA, 15 bp, Homo sapiens
cagaggagttctggc

SEQ ID NO: 1556454 - DNA, 15 bp, Homo sapiens
agaggagttctggct

SEQ ID NO: 1556455 - DNA, 15 bp, Homo sapiens
gaggagttctggctg

SEQ ID NO: 1556456 - DNA, 15 bp, Homo sapiens
aggagttctggctga

SEQ ID NO: 1556457 - DNA, 15 bp, Homo sapiens
ggagttctggctgaa

SEQ ID NO: 1556458 - DNA, 15 bp, Homo sapiens
gagttctggctgaag

SEQ ID NO: 1556459 - DNA, 15 bp, Homo sapiens
agttctggctgaagt

SEQ ID NO: 1556460 - DNA, 15 bp, Homo sapiens
gttctggctgaagtg

SEQ ID NO: 1556461 - DNA, 15 bp, Homo sapiens
ttctggctgaagtgg

SEQ ID NO: 1556462 - DNA, 15 bp, Homo sapiens
tctggctgaagtggt

SEQ ID NO: 1556463 - DNA, 15 bp, Homo sapiens
ctggctgaagtggtg

SEQ ID NO: 1556464 - DNA, 15 bp, Homo sapiens
tggctgaagtggtgt

SEQ ID NO: 1556465 - DNA, 15 bp, Homo sapiens
ggctgaagtggtgtc

SEQ ID NO: 1556466 - DNA, 15 bp, Homo sapiens
gctgaagtggtgtca

SEQ ID NO: 1556467 - DNA, 15 bp, Homo sapiens
ctgaagtggtgtcac

SEQ ID NO: 1556468 - DNA, 15 bp, Homo sapiens
tgaagtggtgtcaca

SEQ ID NO: 1556469 - DNA, 15 bp, Homo sapiens
gaagtggtgtcacaa

SEQ ID NO: 1556470 - DNA, 15 bp, Homo sapiens
aagtggtgtcacaag

SEQ ID NO: 1556471 - DNA, 15 bp, Homo sapiens
agtggtgtcacaagc

SEQ ID NO: 1556472 - DNA, 15 bp, Homo sapiens
gtggtgtcacaagct

SEQ ID NO: 1556473 - DNA, 15 bp, Homo sapiens
tggtgtcacaagctc

SEQ ID NO: 1556474 - DNA, 15 bp, Homo sapiens
ggtgtcacaagctcc

SEQ ID NO: 1556475 - DNA, 15 bp, Homo sapiens
gtgtcacaagctcca

SEQ ID NO: 1556476 - DNA, 15 bp, Homo sapiens
tgtcacaagctccat

SEQ ID NO: 1556477 - DNA, 15 bp, Homo sapiens
gtcacaagctccatc

SEQ ID NO: 1556478 - DNA, 15 bp, Homo sapiens
tcacaagctccatct

SEQ ID NO: 1556479 - DNA, 15 bp, Homo sapiens
cacaagctccatctc

SEQ ID NO: 1556480 - DNA, 15 bp, Homo sapiens
acaagctccatctcc

SEQ ID NO: 1556481 - DNA, 15 bp, Homo sapiens
caagctccatctcca

SEQ ID NO: 1556482 - DNA, 15 bp, Homo sapiens
aagctccatctccag

SEQ ID NO: 1556483 - DNA, 15 bp, Homo sapiens
agctccatctccagc

SEQ ID NO: 1556484 - DNA, 15 bp, Homo sapiens
gctccatctccagcc

SEQ ID NO: 1556485 - DNA, 15 bp, Homo sapiens
ctccatctccagcct

SEQ ID NO: 1556486 - DNA, 15 bp, Homo sapiens
tccatctccagcctc

SEQ ID NO: 1556487 - DNA, 15 bp, Homo sapiens
ccatctccagcctca

SEQ ID NO: 1556488 - DNA, 15 bp, Homo sapiens
catctccagcctcag

SEQ ID NO: 1556489 - DNA, 15 bp, Homo sapiens
atctccagcctcagt

SEQ ID NO: 1556490 - DNA, 15 bp, Homo sapiens
tctccagcctcagtg

SEQ ID NO: 1556491 - DNA, 15 bp, Homo sapiens
ctccagcctcagtga

SEQ ID NO: 1556492 - DNA, 15 bp, Homo sapiens
tccagcctcagtgaa

SEQ ID NO: 1556493 - DNA, 15 bp, Homo sapiens
ccagcctcagtgaag

SEQ ID NO: 1556494 - DNA, 15 bp, Homo sapiens
cagcctcagtgaagg

SEQ ID NO: 1556495 - DNA, 15 bp, Homo sapiens
agcctcagtgaagga

SEQ ID NO: 1556496 - DNA, 15 bp, Homo sapiens
gcctcagtgaaggag

SEQ ID NO: 1556497 - DNA, 15 bp, Homo sapiens
cctcagtgaaggagt

SEQ ID NO: 1556498 - DNA, 15 bp, Homo sapiens
ctcagtgaaggagtg

SEQ ID NO: 1556499 - DNA, 15 bp, Homo sapiens
tcagtgaaggagtgc

SEQ ID NO: 1556500 - DNA, 15 bp, Homo sapiens
cagtgaaggagtgcc

SEQ ID NO: 1556501 - DNA, 15 bp, Homo sapiens
agtgaaggagtgccc

SEQ ID NO: 1556502 - DNA, 15 bp, Homo sapiens
gtgaaggagtgcccc

SEQ ID NO: 1556503 - DNA, 15 bp, Homo sapiens
tgaaggagtgcccct

SEQ ID NO: 1556504 - DNA, 15 bp, Homo sapiens
gaaggagtgcccctt

SEQ ID NO: 1556505 - DNA, 15 bp, Homo sapiens
aaggagtgccccttc

SEQ ID NO: 1556506 - DNA, 15 bp, Homo sapiens
aggagtgccccttca

SEQ ID NO: 1556507 - DNA, 15 bp, Homo sapiens
ggagtgccccttcaa

SEQ ID NO: 1556508 - DNA, 15 bp, Homo sapiens
gagtgccccttcaag

SEQ ID NO: 1556509 - DNA, 15 bp, Homo sapiens
agtgccccttcaaga

SEQ ID NO: 1556510 - DNA, 15 bp, Homo sapiens
gtgccccttcaagaa

SEQ ID NO: 1556511 - DNA, 15 bp, Homo sapiens
tgccccttcaagaaa

SEQ ID NO: 1556512 - DNA, 15 bp, Homo sapiens
gccccttcaagaaac

SEQ ID NO: 1556513 - DNA, 15 bp, Homo sapiens
ccccttcaagaaacc

SEQ ID NO: 1556514 - DNA, 15 bp, Homo sapiens
cccttcaagaaaccg

SEQ ID NO: 1556515 - DNA, 15 bp, Homo sapiens
ccttcaagaaaccgg

SEQ ID NO: 1556516 - DNA, 15 bp, Homo sapiens
cttcaagaaaccggc

SEQ ID NO: 1556517 - DNA, 15 bp, Homo sapiens
ttcaagaaaccggca

SEQ ID NO: 1556518 - DNA, 15 bp, Homo sapiens
tcaagaaaccggcat

SEQ ID NO: 1556519 - DNA, 15 bp, Homo sapiens
caagaaaccggcatg

SEQ ID NO: 1556520 - DNA, 15 bp, Homo sapiens
aagaaaccggcatgg

SEQ ID NO: 1556521 - DNA, 15 bp, Homo sapiens
agaaaccggcatggg

SEQ ID NO: 1556522 - DNA, 15 bp, Homo sapiens
gaaaccggcatgggg

SEQ ID NO: 1556523 - DNA, 15 bp, Homo sapiens
aaaccggcatggggg

SEQ ID NO: 1556524 - DNA, 15 bp, Homo sapiens
aaccggcatggggga

SEQ ID NO: 1556525 - DNA, 15 bp, Homo sapiens
accggcatgggggag

SEQ ID NO: 1556526 - DNA, 15 bp, Homo sapiens
ccggcatgggggagg

SEQ ID NO: 1556527 - DNA, 15 bp, Homo sapiens
cggcatgggggagga

SEQ ID NO: 1556528 - DNA, 15 bp, Homo sapiens
ggcatgggggaggat

SEQ ID NO: 1556529 - DNA, 15 bp, Homo sapiens
gcatgggggaggatg

SEQ ID NO: 1556530 - DNA, 15 bp, Homo sapiens
catgggggaggatgt

SEQ ID NO: 1556531 - DNA, 15 bp, Homo sapiens
atgggggaggatgtt

SEQ ID NO: 1556532 - DNA, 15 bp, Homo sapiens
tgggggaggatgttt

SEQ ID NO: 1556533 - DNA, 15 bp, Homo sapiens
gggggaggatgtttc

SEQ ID NO: 1556534 - DNA, 15 bp, Homo sapiens
ggggaggatgtttca

SEQ ID NO: 1556535 - DNA, 15 bp, Homo sapiens
gggaggatgtttcaa

SEQ ID NO: 1556536 - DNA, 15 bp, Homo sapiens
ggaggatgtttcaaa

SEQ ID NO: 1556537 - DNA, 15 bp, Homo sapiens
gaggatgtttcaaag

SEQ ID NO: 1556538 - DNA, 15 bp, Homo sapiens
aggatgtttcaaagg

SEQ ID NO: 1556539 - DNA, 15 bp, Homo sapiens
ggatgtttcaaaggt

SEQ ID NO: 1556540 - DNA, 15 bp, Homo sapiens
gatgtttcaaaggtc

SEQ ID NO: 1556541 - DNA, 15 bp, Homo sapiens
atgtttcaaaggtct

SEQ ID NO: 1556542 - DNA, 15 bp, Homo sapiens
tgtttcaaaggtcta

SEQ ID NO: 1556543 - DNA, 15 bp, Homo sapiens
gtttcaaaggtctac

SEQ ID NO: 1556544 - DNA, 15 bp, Homo sapiens
tttcaaaggtctact

SEQ ID NO: 1556545 - DNA, 15 bp, Homo sapiens
ttcaaaggtctacta

SEQ ID NO: 1556546 - DNA, 15 bp, Homo sapiens
tcaaaggtctactat

SEQ ID NO: 1556547 - DNA, 15 bp, Homo sapiens
caaaggtctactatg

SEQ ID NO: 1556548 - DNA, 15 bp, Homo sapiens
aaaggtctactatgt

SEQ ID NO: 1556549 - DNA, 15 bp, Homo sapiens
aaggtctactatgta

SEQ ID NO: 1556550 - DNA, 15 bp, Homo sapiens
aggtctactatgtac

SEQ ID NO: 1556551 - DNA, 15 bp, Homo sapiens
ggtctactatgtacc

SEQ ID NO: 1556552 - DNA, 15 bp, Homo sapiens
gtctactatgtaccg

SEQ ID NO: 1556553 - DNA, 15 bp, Homo sapiens
tctactatgtaccgg

SEQ ID NO: 1556554 - DNA, 15 bp, Homo sapiens
ctactatgtaccggg

SEQ ID NO: 1556555 - DNA, 15 bp, Homo sapiens
tactatgtaccgggc

SEQ ID NO: 1556556 - DNA, 15 bp, Homo sapiens
actatgtaccgggca

SEQ ID NO: 1556557 - DNA, 15 bp, Homo sapiens
ctatgtaccgggcac

SEQ ID NO: 1556558 - DNA, 15 bp, Homo sapiens
tatgtaccgggcact

SEQ ID NO: 1556559 - DNA, 15 bp, Homo sapiens
atgtaccgggcactt

SEQ ID NO: 1556560 - DNA, 15 bp, Homo sapiens
tgtaccgggcacttc

SEQ ID NO: 1556561 - DNA, 15 bp, Homo sapiens
gtaccgggcacttca

SEQ ID NO: 1556562 - DNA, 15 bp, Homo sapiens
taccgggcacttcac

SEQ ID NO: 1556563 - DNA, 15 bp, Homo sapiens
accgggcacttcaca

SEQ ID NO: 1556564 - DNA, 15 bp, Homo sapiens
ccgggcacttcacat

SEQ ID NO: 1556565 - DNA, 15 bp, Homo sapiens
cgggcacttcacatg

SEQ ID NO: 1556566 - DNA, 15 bp, Homo sapiens
gggcacttcacatgc

SEQ ID NO: 1556567 - DNA, 15 bp, Homo sapiens
ggcacttcacatgct

SEQ ID NO: 1556568 - DNA, 15 bp, Homo sapiens
gcacttcacatgctt

SEQ ID NO: 1556569 - DNA, 15 bp, Homo sapiens
cacttcacatgcttt

SEQ ID NO: 1556570 - DNA, 15 bp, Homo sapiens
acttcacatgcttta

SEQ ID NO: 1556571 - DNA, 15 bp, Homo sapiens
cttcacatgctttat

SEQ ID NO: 1556572 - DNA, 15 bp, Homo sapiens
ttcacatgctttatc

SEQ ID NO: 1556573 - DNA, 15 bp, Homo sapiens
tcacatgctttatct

SEQ ID NO: 1556574 - DNA, 15 bp, Homo sapiens
cacatgctttatctt

SEQ ID NO: 1556575 - DNA, 15 bp, Homo sapiens
acatgctttatcttc

SEQ ID NO: 1556576 - DNA, 15 bp, Homo sapiens
catgctttatcttct

SEQ ID NO: 1556577 - DNA, 15 bp, Homo sapiens
atgctttatcttctg

SEQ ID NO: 1556578 - DNA, 15 bp, Homo sapiens
tgctttatcttctgg

SEQ ID NO: 1556579 - DNA, 15 bp, Homo sapiens
gctttatcttctggg

SEQ ID NO: 1556580 - DNA, 15 bp, Homo sapiens
ctttatcttctggga

SEQ ID NO: 1556581 - DNA, 15 bp, Homo sapiens
tttatcttctgggaa

SEQ ID NO: 1556582 - DNA, 15 bp, Homo sapiens
ttatcttctgggaag

SEQ ID NO: 1556583 - DNA, 15 bp, Homo sapiens
tatcttctgggaagt

SEQ ID NO: 1556584 - DNA, 15 bp, Homo sapiens
atcttctgggaagtc

SEQ ID NO: 1556585 - DNA, 15 bp, Homo sapiens
tcttctgggaagtca

SEQ ID NO: 1556586 - DNA, 15 bp, Homo sapiens
cttctgggaagtcat

SEQ ID NO: 1556587 - DNA, 15 bp, Homo sapiens
ttctgggaagtcatt

SEQ ID NO: 1556588 - DNA, 15 bp, Homo sapiens
tctgggaagtcatta

SEQ ID NO: 1556589 - DNA, 15 bp, Homo sapiens
ctgggaagtcattat

SEQ ID NO: 1556590 - DNA, 15 bp, Homo sapiens
tgggaagtcattatg

SEQ ID NO: 1556591 - DNA, 15 bp, Homo sapiens
gggaagtcattatgc

SEQ ID NO: 1556592 - DNA, 15 bp, Homo sapiens
ggaagtcattatgct

SEQ ID NO: 1556593 - DNA, 15 bp, Homo sapiens
gaagtcattatgctt

SEQ ID NO: 1556594 - DNA, 15 bp, Homo sapiens
aagtcattatgcttc

SEQ ID NO: 1556595 - DNA, 15 bp, Homo sapiens
agtcattatgcttcc

SEQ ID NO: 1556596 - DNA, 15 bp, Homo sapiens
gtcattatgcttccc

SEQ ID NO: 1556597 - DNA, 15 bp, Homo sapiens
tcattatgcttccca

SEQ ID NO: 1556598 - DNA, 15 bp, Homo sapiens
cattatgcttcccat

SEQ ID NO: 1556599 - DNA, 15 bp, Homo sapiens
attatgcttcccatt

SEQ ID NO: 1556600 - DNA, 15 bp, Homo sapiens
ttatgcttcccattt

SEQ ID NO: 1556601 - DNA, 15 bp, Homo sapiens
tatgcttcccatttt

SEQ ID NO: 1556602 - DNA, 15 bp, Homo sapiens
atgcttcccatttta

SEQ ID NO: 1556603 - DNA, 15 bp, Homo sapiens
tgcttcccattttac

SEQ ID NO: 1556604 - DNA, 15 bp, Homo sapiens
gcttcccattttaca

SEQ ID NO: 1556605 - DNA, 15 bp, Homo sapiens
cttcccattttacag

SEQ ID NO: 1556606 - DNA, 15 bp, Homo sapiens
ttcccattttacaga

SEQ ID NO: 1556607 - DNA, 15 bp, Homo sapiens
tcccattttacagat

SEQ ID NO: 1556608 - DNA, 15 bp, Homo sapiens
cccattttacagata

SEQ ID NO: 1556609 - DNA, 15 bp, Homo sapiens
ccattttacagataa

SEQ ID NO: 1556610 - DNA, 15 bp, Homo sapiens
cattttacagataag

SEQ ID NO: 1556611 - DNA, 15 bp, Homo sapiens
attttacagataagg

SEQ ID NO: 1556612 - DNA, 15 bp, Homo sapiens
ttttacagataagga

SEQ ID NO: 1556613 - DNA, 15 bp, Homo sapiens
tttacagataaggaa

SEQ ID NO: 1556614 - DNA, 15 bp, Homo sapiens
ataaggaaactgagg

SEQ ID NO: 1556615 - DNA, 15 bp, Homo sapiens
taaggaaactgaggc

SEQ ID NO: 1556616 - DNA, 15 bp, Homo sapiens
aaggaaactgaggcc

SEQ ID NO: 1556617 - DNA, 15 bp, Homo sapiens
aggaaactgaggcct

SEQ ID NO: 1556618 - DNA, 15 bp, Homo sapiens
ggaaactgaggcctg

SEQ ID NO: 1556619 - DNA, 15 bp, Homo sapiens
gaaactgaggcctga

SEQ ID NO: 1556620 - DNA, 15 bp, Homo sapiens
aaactgaggcctgag

SEQ ID NO: 1556621 - DNA, 15 bp, Homo sapiens
aactgaggcctgagg

SEQ ID NO: 1556622 - DNA, 15 bp, Homo sapiens
actgaggcctgagga

SEQ ID NO: 1556623 - DNA, 15 bp, Homo sapiens
ctgaggcctgaggat

SEQ ID NO: 1556624 - DNA, 15 bp, Homo sapiens
tgaggcctgaggatg

SEQ ID NO: 1556625 - DNA, 15 bp, Homo sapiens
gaggcctgaggatgt

SEQ ID NO: 1556626 - DNA, 15 bp, Homo sapiens
aggcctgaggatgtg

SEQ ID NO: 1556627 - DNA, 15 bp, Homo sapiens
ggcctgaggatgtga

SEQ ID NO: 1556628 - DNA, 15 bp, Homo sapiens
gcctgaggatgtgaa

SEQ ID NO: 1556629 - DNA, 15 bp, Homo sapiens
cctgaggatgtgaag

SEQ ID NO: 1556630 - DNA, 15 bp, Homo sapiens
ctgaggatgtgaagg

SEQ ID NO: 1556631 - DNA, 15 bp, Homo sapiens
tgaggatgtgaaggg

SEQ ID NO: 1556632 - DNA, 15 bp, Homo sapiens
gaggatgtgaaggga

SEQ ID NO: 1556633 - DNA, 15 bp, Homo sapiens
aggatgtgaagggac

SEQ ID NO: 1556634 - DNA, 15 bp, Homo sapiens
ggatgtgaagggaca

SEQ ID NO: 1556635 - DNA, 15 bp, Homo sapiens
gatgtgaagggacat

SEQ ID NO: 1556636 - DNA, 15 bp, Homo sapiens
atgtgaagggacatg

SEQ ID NO: 1556637 - DNA, 15 bp, Homo sapiens
tgtgaagggacatgc

SEQ ID NO: 1556638 - DNA, 15 bp, Homo sapiens
gtgaagggacatgct

SEQ ID NO: 1556639 - DNA, 15 bp, Homo sapiens
tgaagggacatgctc

SEQ ID NO: 1556640 - DNA, 15 bp, Homo sapiens
gaagggacatgctca

SEQ ID NO: 1556641 - DNA, 15 bp, Homo sapiens
aagggacatgctcaa

SEQ ID NO: 1556642 - DNA, 15 bp, Homo sapiens
agggacatgctcaac

SEQ ID NO: 1556643 - DNA, 15 bp, Homo sapiens
gggacatgctcaaca

SEQ ID NO: 1556644 - DNA, 15 bp, Homo sapiens
ggacatgctcaacat

SEQ ID NO: 1556645 - DNA, 15 bp, Homo sapiens
gacatgctcaacatc

SEQ ID NO: 1556646 - DNA, 15 bp, Homo sapiens
acatgctcaacatcc

SEQ ID NO: 1556647 - DNA, 15 bp, Homo sapiens
catgctcaacatccc

SEQ ID NO: 1556648 - DNA, 15 bp, Homo sapiens
atgctcaacatccca

SEQ ID NO: 1556649 - DNA, 15 bp, Homo sapiens
tgctcaacatcccac

SEQ ID NO: 1556650 - DNA, 15 bp, Homo sapiens
gctcaacatcccaca

SEQ ID NO: 1556651 - DNA, 15 bp, Homo sapiens
ctcaacatcccacag

SEQ ID NO: 1556652 - DNA, 15 bp, Homo sapiens
tcaacatcccacagc

SEQ ID NO: 1556653 - DNA, 15 bp, Homo sapiens
caacatcccacagct

SEQ ID NO: 1556654 - DNA, 15 bp, Homo sapiens
aacatcccacagctg

SEQ ID NO: 1556655 - DNA, 15 bp, Homo sapiens
acatcccacagctgg

SEQ ID NO: 1556656 - DNA, 15 bp, Homo sapiens
catcccacagctggt

SEQ ID NO: 1556657 - DNA, 15 bp, Homo sapiens
atcccacagctggtt

SEQ ID NO: 1556658 - DNA, 15 bp, Homo sapiens
tcccacagctggttg

SEQ ID NO: 1556659 - DNA, 15 bp, Homo sapiens
cccacagctggttga

SEQ ID NO: 1556660 - DNA, 15 bp, Homo sapiens
ccacagctggttgaa

SEQ ID NO: 1556661 - DNA, 15 bp, Homo sapiens
cacagctggttgaag

SEQ ID NO: 1556662 - DNA, 15 bp, Homo sapiens
acagctggttgaagg

SEQ ID NO: 1556663 - DNA, 15 bp, Homo sapiens
cagctggttgaaggc

SEQ ID NO: 1556664 - DNA, 15 bp, Homo sapiens
agctggttgaaggca

SEQ ID NO: 1556665 - DNA, 15 bp, Homo sapiens
gctggttgaaggcag

SEQ ID NO: 1556666 - DNA, 15 bp, Homo sapiens
ctggttgaaggcaga

SEQ ID NO: 1556667 - DNA, 15 bp, Homo sapiens
tggttgaaggcagaa

SEQ ID NO: 1556668 - DNA, 15 bp, Homo sapiens
ggttgaaggcagaac

SEQ ID NO: 1556669 - DNA, 15 bp, Homo sapiens
gttgaaggcagaacc

SEQ ID NO: 1556670 - DNA, 15 bp, Homo sapiens
ttgaaggcagaacca

SEQ ID NO: 1556671 - DNA, 15 bp, Homo sapiens
tgaaggcagaaccag

SEQ ID NO: 1556672 - DNA, 15 bp, Homo sapiens
gaaggcagaaccagg

SEQ ID NO: 1556673 - DNA, 15 bp, Homo sapiens
aaggcagaaccagga

SEQ ID NO: 1556674 - DNA, 15 bp, Homo sapiens
aggcagaaccaggat

SEQ ID NO: 1556675 - DNA, 15 bp, Homo sapiens
ggcagaaccaggatt

SEQ ID NO: 1556676 - DNA, 15 bp, Homo sapiens
gcagaaccaggattt

SEQ ID NO: 1556677 - DNA, 15 bp, Homo sapiens
cagaaccaggatttg

SEQ ID NO: 1556678 - DNA, 15 bp, Homo sapiens
agaaccaggatttga

SEQ ID NO: 1556679 - DNA, 15 bp, Homo sapiens
gaaccaggatttgaa

SEQ ID NO: 1556680 - DNA, 15 bp, Homo sapiens
actctgtgctagtaa

SEQ ID NO: 1556681 - DNA, 15 bp, Homo sapiens
ctctgtgctagtaat

SEQ ID NO: 1556682 - DNA, 15 bp, Homo sapiens
tctgtgctagtaatg

SEQ ID NO: 1556683 - DNA, 15 bp, Homo sapiens
ctgtgctagtaatgc

SEQ ID NO: 1556684 - DNA, 15 bp, Homo sapiens
tgtgctagtaatgca

SEQ ID NO: 1556685 - DNA, 15 bp, Homo sapiens
gtgctagtaatgcac

SEQ ID NO: 1556686 - DNA, 15 bp, Homo sapiens
tgctagtaatgcaca

SEQ ID NO: 1556687 - DNA, 15 bp, Homo sapiens
gctagtaatgcacac

SEQ ID NO: 1556688 - DNA, 15 bp, Homo sapiens
ctagtaatgcacaca

SEQ ID NO: 1556689 - DNA, 15 bp, Homo sapiens
tagtaatgcacacat

SEQ ID NO: 1556690 - DNA, 15 bp, Homo sapiens
agtaatgcacacatc

SEQ ID NO: 1556691 - DNA, 15 bp, Homo sapiens
gtaatgcacacatct

SEQ ID NO: 1556692 - DNA, 15 bp, Homo sapiens
taatgcacacatctg

SEQ ID NO: 1556693 - DNA, 15 bp, Homo sapiens
aatgcacacatctgt

SEQ ID NO: 1556694 - DNA, 15 bp, Homo sapiens
atgcacacatctgtg

SEQ ID NO: 1556695 - DNA, 15 bp, Homo sapiens
tgcacacatctgtgc

SEQ ID NO: 1556696 - DNA, 15 bp, Homo sapiens
gcacacatctgtgca

SEQ ID NO: 1556697 - DNA, 15 bp, Homo sapiens
cacacatctgtgcac

SEQ ID NO: 1556698 - DNA, 15 bp, Homo sapiens
acacatctgtgcaca

SEQ ID NO: 1556699 - DNA, 15 bp, Homo sapiens
cacatctgtgcacac

SEQ ID NO: 1556700 - DNA, 15 bp, Homo sapiens
acatctgtgcacaca

SEQ ID NO: 1556701 - DNA, 15 bp, Homo sapiens
catctgtgcacacac

SEQ ID NO: 1556702 - DNA, 15 bp, Homo sapiens
atctgtgcacacacc

SEQ ID NO: 1556703 - DNA, 15 bp, Homo sapiens
tctgtgcacacacca

SEQ ID NO: 1556704 - DNA, 15 bp, Homo sapiens
ctgtgcacacaccac

SEQ ID NO: 1556705 - DNA, 15 bp, Homo sapiens
tgtgcacacaccacc

SEQ ID NO: 1556706 - DNA, 15 bp, Homo sapiens
gtgcacacaccacct

SEQ ID NO: 1556707 - DNA, 15 bp, Homo sapiens
tgcacacaccacctc

SEQ ID NO: 1556708 - DNA, 15 bp, Homo sapiens
gcacacaccacctcc

SEQ ID NO: 1556709 - DNA, 15 bp, Homo sapiens
cacacaccacctccc

SEQ ID NO: 1556710 - DNA, 15 bp, Homo sapiens
acacaccacctcccc

SEQ ID NO: 1556711 - DNA, 15 bp, Homo sapiens
cacaccacctcccca

SEQ ID NO: 1556712 - DNA, 15 bp, Homo sapiens
acaccacctccccac

SEQ ID NO: 1556713 - DNA, 15 bp, Homo sapiens
caccacctccccacc

SEQ ID NO: 1556714 - DNA, 15 bp, Homo sapiens
accacctccccaccc

SEQ ID NO: 1556715 - DNA, 15 bp, Homo sapiens
ccacctccccaccct

SEQ ID NO: 1556716 - DNA, 15 bp, Homo sapiens
cacctccccaccctc

SEQ ID NO: 1556717 - DNA, 15 bp, Homo sapiens
acctccccaccctcc

SEQ ID NO: 1556718 - DNA, 15 bp, Homo sapiens
cctccccaccctccc

SEQ ID NO: 1556719 - DNA, 15 bp, Homo sapiens
ctccccaccctccca

SEQ ID NO: 1556720 - DNA, 15 bp, Homo sapiens
tccccaccctcccaa

SEQ ID NO: 1556721 - DNA, 15 bp, Homo sapiens
ccccaccctcccaac

SEQ ID NO: 1556722 - DNA, 15 bp, Homo sapiens
cccaccctcccaact

SEQ ID NO: 1556723 - DNA, 15 bp, Homo sapiens
ccaccctcccaactg

SEQ ID NO: 1556724 - DNA, 15 bp, Homo sapiens
caccctcccaactgg

SEQ ID NO: 1556725 - DNA, 15 bp, Homo sapiens
accctcccaactggc

SEQ ID NO: 1556726 - DNA, 15 bp, Homo sapiens
ccctcccaactggct

SEQ ID NO: 1556727 - DNA, 15 bp, Homo sapiens
cctcccaactggctc

SEQ ID NO: 1556728 - DNA, 15 bp, Homo sapiens
ctcccaactggctct

SEQ ID NO: 1556729 - DNA, 15 bp, Homo sapiens
tcccaactggctctg

SEQ ID NO: 1556730 - DNA, 15 bp, Homo sapiens
cccaactggctctga

SEQ ID NO: 1556731 - DNA, 15 bp, Homo sapiens
ccaactggctctgaa

SEQ ID NO: 1556732 - DNA, 15 bp, Homo sapiens
caactggctctgaac

SEQ ID NO: 1556733 - DNA, 15 bp, Homo sapiens
aactggctctgaaca

SEQ ID NO: 1556734 - DNA, 15 bp, Homo sapiens
actggctctgaacag

SEQ ID NO: 1556735 - DNA, 15 bp, Homo sapiens
ctggctctgaacaga

SEQ ID NO: 1556736 - DNA, 15 bp, Homo sapiens
tggctctgaacagag

SEQ ID NO: 1556737 - DNA, 15 bp, Homo sapiens
ggctctgaacagagg

SEQ ID NO: 1556738 - DNA, 15 bp, Homo sapiens
gctctgaacagaggg

SEQ ID NO: 1556739 - DNA, 15 bp, Homo sapiens
ctctgaacagaggga

SEQ ID NO: 1556740 - DNA, 15 bp, Homo sapiens
tctgaacagagggag

SEQ ID NO: 1556741 - DNA, 15 bp, Homo sapiens
ctgaacagagggagc

SEQ ID NO: 1556742 - DNA, 15 bp, Homo sapiens
tgaacagagggagca

SEQ ID NO: 1556743 - DNA, 15 bp, Homo sapiens
gaacagagggagcag

SEQ ID NO: 1556744 - DNA, 15 bp, Homo sapiens
aacagagggagcagg

SEQ ID NO: 1556745 - DNA, 15 bp, Homo sapiens
acagagggagcagga

SEQ ID NO: 1556746 - DNA, 15 bp, Homo sapiens
cagagggagcaggaa

SEQ ID NO: 1556747 - DNA, 15 bp, Homo sapiens
agagggagcaggaat

SEQ ID NO: 1556748 - DNA, 15 bp, Homo sapiens
gagggagcaggaatg

SEQ ID NO: 1556749 - DNA, 15 bp, Homo sapiens
agggagcaggaatgg

SEQ ID NO: 1556750 - DNA, 15 bp, Homo sapiens
gggagcaggaatggt

SEQ ID NO: 1556751 - DNA, 15 bp, Homo sapiens
ggagcaggaatggtg

SEQ ID NO: 1556752 - DNA, 15 bp, Homo sapiens
gagcaggaatggtgc

SEQ ID NO: 1556753 - DNA, 15 bp, Homo sapiens
agcaggaatggtgca

SEQ ID NO: 1556754 - DNA, 15 bp, Homo sapiens
gcaggaatggtgcag

SEQ ID NO: 1556755 - DNA, 15 bp, Homo sapiens
caggaatggtgcagc

SEQ ID NO: 1556756 - DNA, 15 bp, Homo sapiens
aggaatggtgcagcg

SEQ ID NO: 1556757 - DNA, 15 bp, Homo sapiens
ggaatggtgcagcgg

SEQ ID NO: 1556758 - DNA, 15 bp, Homo sapiens
gaatggtgcagcggc

SEQ ID NO: 1556759 - DNA, 15 bp, Homo sapiens
aatggtgcagcggcc

SEQ ID NO: 1556760 - DNA, 15 bp, Homo sapiens
atggtgcagcggccg

SEQ ID NO: 1556761 - DNA, 15 bp, Homo sapiens
tggtgcagcggccgg

SEQ ID NO: 1556762 - DNA, 15 bp, Homo sapiens
ggtgcagcggccggg

SEQ ID NO: 1556763 - DNA, 15 bp, Homo sapiens
gtgcagcggccgggg

SEQ ID NO: 1556764 - DNA, 15 bp, Homo sapiens
tgcagcggccggggg

SEQ ID NO: 1556765 - DNA, 15 bp, Homo sapiens
gcagcggccgggggt

SEQ ID NO: 1556766 - DNA, 15 bp, Homo sapiens
cagcggccgggggtc

SEQ ID NO: 1556767 - DNA, 15 bp, Homo sapiens
agcggccgggggtcc

SEQ ID NO: 1556768 - DNA, 15 bp, Homo sapiens
gcggccgggggtcca

SEQ ID NO: 1556769 - DNA, 15 bp, Homo sapiens
cggccgggggtccac

SEQ ID NO: 1556770 - DNA, 15 bp, Homo sapiens
ggccgggggtccaca

SEQ ID NO: 1556771 - DNA, 15 bp, Homo sapiens
gccgggggtccacac

SEQ ID NO: 1556772 - DNA, 15 bp, Homo sapiens
ccgggggtccacact

SEQ ID NO: 1556773 - DNA, 15 bp, Homo sapiens
cgggggtccacactg

SEQ ID NO: 1556774 - DNA, 15 bp, Homo sapiens
gggggtccacactgg

SEQ ID NO: 1556775 - DNA, 15 bp, Homo sapiens
ggggtccacactggc

SEQ ID NO: 1556776 - DNA, 15 bp, Homo sapiens
gggtccacactggca

SEQ ID NO: 1556777 - DNA, 15 bp, Homo sapiens
ggtccacactggcaa

SEQ ID NO: 1556778 - DNA, 15 bp, Homo sapiens
gtccacactggcaag

SEQ ID NO: 1556779 - DNA, 15 bp, Homo sapiens
tccacactggcaagg

SEQ ID NO: 1556780 - DNA, 15 bp, Homo sapiens
ccacactggcaaggg

SEQ ID NO: 1556781 - DNA, 15 bp, Homo sapiens
cacactggcaagggg

SEQ ID NO: 1556782 - DNA, 15 bp, Homo sapiens
acactggcaaggggg

SEQ ID NO: 1556783 - DNA, 15 bp, Homo sapiens
cactggcaagggggc

SEQ ID NO: 1556784 - DNA, 15 bp, Homo sapiens
actggcaagggggcc

SEQ ID NO: 1556785 - DNA, 15 bp, Homo sapiens
ctggcaagggggcct

SEQ ID NO: 1556786 - DNA, 15 bp, Homo sapiens
tggcaagggggcctg

SEQ ID NO: 1556787 - DNA, 15 bp, Homo sapiens
ggcaagggggcctgc

SEQ ID NO: 1556788 - DNA, 15 bp, Homo sapiens
gcaagggggcctgct

SEQ ID NO: 1556789 - DNA, 15 bp, Homo sapiens
caagggggcctgctg

SEQ ID NO: 1556790 - DNA, 15 bp, Homo sapiens
aagggggcctgctgg

SEQ ID NO: 1556791 - DNA, 15 bp, Homo sapiens
agggggcctgctggg

SEQ ID NO: 1556792 - DNA, 15 bp, Homo sapiens
gggggcctgctggga

SEQ ID NO: 1556793 - DNA, 15 bp, Homo sapiens
ggggcctgctgggag

SEQ ID NO: 1556794 - DNA, 15 bp, Homo sapiens
gggcctgctgggagg

SEQ ID NO: 1556795 - DNA, 15 bp, Homo sapiens
ggcctgctgggagga

SEQ ID NO: 1556796 - DNA, 15 bp, Homo sapiens
gcctgctgggaggag

SEQ ID NO: 1556797 - DNA, 15 bp, Homo sapiens
cctgctgggaggaga

SEQ ID NO: 1556798 - DNA, 15 bp, Homo sapiens
ctgctgggaggagac

SEQ ID NO: 1556799 - DNA, 15 bp, Homo sapiens
tgctgggaggagact

SEQ ID NO: 1556800 - DNA, 15 bp, Homo sapiens
gctgggaggagactg

SEQ ID NO: 1556801 - DNA, 15 bp, Homo sapiens
ctgggaggagactga

SEQ ID NO: 1556802 - DNA, 15 bp, Homo sapiens
tgggaggagactgaa

SEQ ID NO: 1556803 - DNA, 15 bp, Homo sapiens
gggaggagactgaat

SEQ ID NO: 1556804 - DNA, 15 bp, Homo sapiens
ggaggagactgaatg

SEQ ID NO: 1556805 - DNA, 15 bp, Homo sapiens
gaggagactgaatgt

SEQ ID NO: 1556806 - DNA, 15 bp, Homo sapiens
aggagactgaatgtt

SEQ ID NO: 1556807 - DNA, 15 bp, Homo sapiens
ggagactgaatgttg

SEQ ID NO: 1556808 - DNA, 15 bp, Homo sapiens
gagactgaatgttga

SEQ ID NO: 1556809 - DNA, 15 bp, Homo sapiens
agactgaatgttgag

SEQ ID NO: 1556810 - DNA, 15 bp, Homo sapiens
gactgaatgttgaga

SEQ ID NO: 1556811 - DNA, 15 bp, Homo sapiens
actgaatgttgagaa

SEQ ID NO: 1556812 - DNA, 15 bp, Homo sapiens
ctgaatgttgagaaa

SEQ ID NO: 1556813 - DNA, 15 bp, Homo sapiens
tgaatgttgagaaat

SEQ ID NO: 1556814 - DNA, 15 bp, Homo sapiens
gaatgttgagaaatc

SEQ ID NO: 1556815 - DNA, 15 bp, Homo sapiens
aatgttgagaaatct

SEQ ID NO: 1556816 - DNA, 15 bp, Homo sapiens
atgttgagaaatctg

SEQ ID NO: 1556817 - DNA, 15 bp, Homo sapiens
tgttgagaaatctga

SEQ ID NO: 1556818 - DNA, 15 bp, Homo sapiens
gttgagaaatctgag

SEQ ID NO: 1556819 - DNA, 15 bp, Homo sapiens
ttgagaaatctgagc

SEQ ID NO: 1556820 - DNA, 15 bp, Homo sapiens
tgagaaatctgagcc

SEQ ID NO: 1556821 - DNA, 15 bp, Homo sapiens
gagaaatctgagccc

SEQ ID NO: 1556822 - DNA, 15 bp, Homo sapiens
agaaatctgagccca

SEQ ID NO: 1556823 - DNA, 15 bp, Homo sapiens
gaaatctgagcccag

SEQ ID NO: 1556824 - DNA, 15 bp, Homo sapiens
aaatctgagcccaga

SEQ ID NO: 1556825 - DNA, 15 bp, Homo sapiens
aatctgagcccagag

SEQ ID NO: 1556826 - DNA, 15 bp, Homo sapiens
atctgagcccagagg

SEQ ID NO: 1556827 - DNA, 15 bp, Homo sapiens
tctgagcccagagga

SEQ ID NO: 1556828 - DNA, 15 bp, Homo sapiens
ctgagcccagaggaa

SEQ ID NO: 1556829 - DNA, 15 bp, Homo sapiens
tgagcccagaggaag

SEQ ID NO: 1556830 - DNA, 15 bp, Homo sapiens
gagcccagaggaagg

SEQ ID NO: 1556831 - DNA, 15 bp, Homo sapiens
agcccagaggaaggg

SEQ ID NO: 1556832 - DNA, 15 bp, Homo sapiens
gcccagaggaagggc

SEQ ID NO: 1556833 - DNA, 15 bp, Homo sapiens
cccagaggaagggca

SEQ ID NO: 1556834 - DNA, 15 bp, Homo sapiens
ccagaggaagggcag

SEQ ID NO: 1556835 - DNA, 15 bp, Homo sapiens
cagaggaagggcaga

SEQ ID NO: 1556836 - DNA, 15 bp, Homo sapiens
agaggaagggcagag

SEQ ID NO: 1556837 - DNA, 15 bp, Homo sapiens
gaggaagggcagagg

SEQ ID NO: 1556838 - DNA, 15 bp, Homo sapiens
aggaagggcagagga

SEQ ID NO: 1556839 - DNA, 15 bp, Homo sapiens
ggaagggcagaggag

SEQ ID NO: 1556840 - DNA, 15 bp, Homo sapiens
gaagggcagaggaga

SEQ ID NO: 1556841 - DNA, 15 bp, Homo sapiens
aagggcagaggagaa

SEQ ID NO: 1556842 - DNA, 15 bp, Homo sapiens
agggcagaggagaat

SEQ ID NO: 1556843 - DNA, 15 bp, Homo sapiens
gggcagaggagaatg

SEQ ID NO: 1556844 - DNA, 15 bp, Homo sapiens
ggcagaggagaatgg

SEQ ID NO: 1556845 - DNA, 15 bp, Homo sapiens
gcagaggagaatggc

SEQ ID NO: 1556846 - DNA, 15 bp, Homo sapiens
cagaggagaatggca

SEQ ID NO: 1556847 - DNA, 15 bp, Homo sapiens
agaggagaatggcac

SEQ ID NO: 1556848 - DNA, 15 bp, Homo sapiens
gaggagaatggcaca

SEQ ID NO: 1556849 - DNA, 15 bp, Homo sapiens
aggagaatggcacat

SEQ ID NO: 1556850 - DNA, 15 bp, Homo sapiens
ggagaatggcacatg

SEQ ID NO: 1556851 - DNA, 15 bp, Homo sapiens
gagaatggcacatgc

SEQ ID NO: 1556852 - DNA, 15 bp, Homo sapiens
agaatggcacatgcc

SEQ ID NO: 1556853 - DNA, 15 bp, Homo sapiens
gaatggcacatgcca

SEQ ID NO: 1556854 - DNA, 15 bp, Homo sapiens
aatggcacatgccac

SEQ ID NO: 1556855 - DNA, 15 bp, Homo sapiens
atggcacatgccaca

SEQ ID NO: 1556856 - DNA, 15 bp, Homo sapiens
tggcacatgccacat

SEQ ID NO: 1556857 - DNA, 15 bp, Homo sapiens
ggcacatgccacatt

SEQ ID NO: 1556858 - DNA, 15 bp, Homo sapiens
gcacatgccacattc

SEQ ID NO: 1556859 - DNA, 15 bp, Homo sapiens
cacatgccacattct

SEQ ID NO: 1556860 - DNA, 15 bp, Homo sapiens
acatgccacattctt

SEQ ID NO: 1556861 - DNA, 15 bp, Homo sapiens
catgccacattcttt

SEQ ID NO: 1556862 - DNA, 15 bp, Homo sapiens
atgccacattctttc

SEQ ID NO: 1556863 - DNA, 15 bp, Homo sapiens
tgccacattctttcc

SEQ ID NO: 1556864 - DNA, 15 bp, Homo sapiens
gccacattctttcct

SEQ ID NO: 1556865 - DNA, 15 bp, Homo sapiens
ccacattctttccta

SEQ ID NO: 1556866 - DNA, 15 bp, Homo sapiens
cacattctttcctat

SEQ ID NO: 1556867 - DNA, 15 bp, Homo sapiens
acattctttcctatt

SEQ ID NO: 1556868 - DNA, 15 bp, Homo sapiens
cattctttcctatta

SEQ ID NO: 1556869 - DNA, 15 bp, Homo sapiens
attctttcctattaa

SEQ ID NO: 1556870 - DNA, 15 bp, Homo sapiens
ttctttcctattaac

SEQ ID NO: 1556871 - DNA, 15 bp, Homo sapiens
tctttcctattaaca

SEQ ID NO: 1556872 - DNA, 15 bp, Homo sapiens
ctttcctattaacag

SEQ ID NO: 1556873 - DNA, 15 bp, Homo sapiens
tttcctattaacagc

SEQ ID NO: 1556874 - DNA, 15 bp, Homo sapiens
ttcctattaacagca

SEQ ID NO: 1556875 - DNA, 15 bp, Homo sapiens
tcctattaacagcaa

SEQ ID NO: 1556876 - DNA, 15 bp, Homo sapiens
cctattaacagcaag

SEQ ID NO: 1556877 - DNA, 15 bp, Homo sapiens
ctattaacagcaagt

SEQ ID NO: 1556878 - DNA, 15 bp, Homo sapiens
tattaacagcaagtt

SEQ ID NO: 1556879 - DNA, 15 bp, Homo sapiens
attaacagcaagttt

SEQ ID NO: 1556880 - DNA, 15 bp, Homo sapiens
ttaacagcaagtttg

SEQ ID NO: 1556881 - DNA, 15 bp, Homo sapiens
taacagcaagtttgg

SEQ ID NO: 1556882 - DNA, 15 bp, Homo sapiens
aacagcaagtttggc

SEQ ID NO: 1556883 - DNA, 15 bp, Homo sapiens
acagcaagtttggct

SEQ ID NO: 1556884 - DNA, 15 bp, Homo sapiens
cagcaagtttggctg

SEQ ID NO: 1556885 - DNA, 15 bp, Homo sapiens
agcaagtttggctgc

SEQ ID NO: 1556886 - DNA, 15 bp, Homo sapiens
gcaagtttggctgct

SEQ ID NO: 1556887 - DNA, 15 bp, Homo sapiens
caagtttggctgcta

SEQ ID NO: 1556888 - DNA, 15 bp, Homo sapiens
aagtttggctgctaa

SEQ ID NO: 1556889 - DNA, 15 bp, Homo sapiens
agtttggctgctaac

SEQ ID NO: 1556890 - DNA, 15 bp, Homo sapiens
gtttggctgctaact

SEQ ID NO: 1556891 - DNA, 15 bp, Homo sapiens
tttggctgctaactt

SEQ ID NO: 1556892 - DNA, 15 bp, Homo sapiens
ttggctgctaacttg

SEQ ID NO: 1556893 - DNA, 15 bp, Homo sapiens
tggctgctaacttgg

SEQ ID NO: 1556894 - DNA, 15 bp, Homo sapiens
ggctgctaacttggg

SEQ ID NO: 1556895 - DNA, 15 bp, Homo sapiens
gctgctaacttggga

SEQ ID NO: 1556896 - DNA, 15 bp, Homo sapiens
ctgctaacttgggac

SEQ ID NO: 1556897 - DNA, 15 bp, Homo sapiens
tgctaacttgggacc

SEQ ID NO: 1556898 - DNA, 15 bp, Homo sapiens
gctaacttgggacct

SEQ ID NO: 1556899 - DNA, 15 bp, Homo sapiens
ctaacttgggacctc

SEQ ID NO: 1556900 - DNA, 15 bp, Homo sapiens
taacttgggacctcc

SEQ ID NO: 1556901 - DNA, 15 bp, Homo sapiens
aacttgggacctccg

SEQ ID NO: 1556902 - DNA, 15 bp, Homo sapiens
acttgggacctccgg

SEQ ID NO: 1556903 - DNA, 15 bp, Homo sapiens
cttgggacctccgga

SEQ ID NO: 1556904 - DNA, 15 bp, Homo sapiens
ttgggacctccggag

SEQ ID NO: 1556905 - DNA, 15 bp, Homo sapiens
tgggacctccggagg

SEQ ID NO: 1556906 - DNA, 15 bp, Homo sapiens
gggacctccggaggc

SEQ ID NO: 1556907 - DNA, 15 bp, Homo sapiens
ggacctccggaggca

SEQ ID NO: 1556908 - DNA, 15 bp, Homo sapiens
gacctccggaggcaa

SEQ ID NO: 1556909 - DNA, 15 bp, Homo sapiens
acctccggaggcaaa

SEQ ID NO: 1556910 - DNA, 15 bp, Homo sapiens
cctccggaggcaaag

SEQ ID NO: 1556911 - DNA, 15 bp, Homo sapiens
ctccggaggcaaaga

SEQ ID NO: 1556912 - DNA, 15 bp, Homo sapiens
tccggaggcaaagag

SEQ ID NO: 1556913 - DNA, 15 bp, Homo sapiens
ccggaggcaaagagc

SEQ ID NO: 1556914 - DNA, 15 bp, Homo sapiens
cggaggcaaagagct

SEQ ID NO: 1556915 - DNA, 15 bp, Homo sapiens
ggaggcaaagagctg

SEQ ID NO: 1556916 - DNA, 15 bp, Homo sapiens
gaggcaaagagctgg

SEQ ID NO: 1556917 - DNA, 15 bp, Homo sapiens
aggcaaagagctggc

SEQ ID NO: 1556918 - DNA, 15 bp, Homo sapiens
ggcaaagagctggcg

SEQ ID NO: 1556919 - DNA, 15 bp, Homo sapiens
gcaaagagctggcgg

SEQ ID NO: 1556920 - DNA, 15 bp, Homo sapiens
caaagagctggcgga

SEQ ID NO: 1556921 - DNA, 15 bp, Homo sapiens
aaagagctggcggat

SEQ ID NO: 1556922 - DNA, 15 bp, Homo sapiens
aagagctggcggatt

SEQ ID NO: 1556923 - DNA, 15 bp, Homo sapiens
agagctggcggattt

SEQ ID NO: 1556924 - DNA, 15 bp, Homo sapiens
gagctggcggatttt

SEQ ID NO: 1556925 - DNA, 15 bp, Homo sapiens
agctggcggatttta

SEQ ID NO: 1556926 - DNA, 15 bp, Homo sapiens
gctggcggattttag

SEQ ID NO: 1556927 - DNA, 15 bp, Homo sapiens
ctggcggattttagt

SEQ ID NO: 1556928 - DNA, 15 bp, Homo sapiens
tggcggattttagtc

SEQ ID NO: 1556929 - DNA, 15 bp, Homo sapiens
ggcggattttagtct

SEQ ID NO: 1556930 - DNA, 15 bp, Homo sapiens
gcggattttagtctt

SEQ ID NO: 1556931 - DNA, 15 bp, Homo sapiens
cggattttagtcttg

SEQ ID NO: 1556932 - DNA, 15 bp, Homo sapiens
ggattttagtcttga

SEQ ID NO: 1556933 - DNA, 15 bp, Homo sapiens
gattttagtcttgac

SEQ ID NO: 1556934 - DNA, 15 bp, Homo sapiens
attttagtcttgact

SEQ ID NO: 1556935 - DNA, 15 bp, Homo sapiens
ttttagtcttgactc

SEQ ID NO: 1556936 - DNA, 15 bp, Homo sapiens
tttagtcttgactct

SEQ ID NO: 1556937 - DNA, 15 bp, Homo sapiens
ttagtcttgactctg

SEQ ID NO: 1556938 - DNA, 15 bp, Homo sapiens
tagtcttgactctgc

SEQ ID NO: 1556939 - DNA, 15 bp, Homo sapiens
agtcttgactctgct

SEQ ID NO: 1556940 - DNA, 15 bp, Homo sapiens
gtcttgactctgcta

SEQ ID NO: 1556941 - DNA, 15 bp, Homo sapiens
tcttgactctgctac

SEQ ID NO: 1556942 - DNA, 15 bp, Homo sapiens
cttgactctgctact

SEQ ID NO: 1556943 - DNA, 15 bp, Homo sapiens
ttgactctgctactt

SEQ ID NO: 1556944 - DNA, 15 bp, Homo sapiens
tgactctgctacttt

SEQ ID NO: 1556945 - DNA, 15 bp, Homo sapiens
gactctgctactttc

SEQ ID NO: 1556946 - DNA, 15 bp, Homo sapiens
actctgctactttct

SEQ ID NO: 1556947 - DNA, 15 bp, Homo sapiens
ctctgctactttcta

SEQ ID NO: 1556948 - DNA, 15 bp, Homo sapiens
tctgctactttctag

SEQ ID NO: 1556949 - DNA, 15 bp, Homo sapiens
ctgctactttctagt

SEQ ID NO: 1556950 - DNA, 15 bp, Homo sapiens
tgctactttctagtt

SEQ ID NO: 1556951 - DNA, 15 bp, Homo sapiens
gctactttctagttg

SEQ ID NO: 1556952 - DNA, 15 bp, Homo sapiens
tgggtacacacatga

SEQ ID NO: 1556953 - DNA, 15 bp, Homo sapiens
gggtacacacatgac

SEQ ID NO: 1556954 - DNA, 15 bp, Homo sapiens
ggtacacacatgact

SEQ ID NO: 1556955 - DNA, 15 bp, Homo sapiens
gtacacacatgactg

SEQ ID NO: 1556956 - DNA, 15 bp, Homo sapiens
tacacacatgactgt

SEQ ID NO: 1556957 - DNA, 15 bp, Homo sapiens
acacacatgactgtg

SEQ ID NO: 1556958 - DNA, 15 bp, Homo sapiens
cacacatgactgtgt

SEQ ID NO: 1556959 - DNA, 15 bp, Homo sapiens
acacatgactgtgtt

SEQ ID NO: 1556960 - DNA, 15 bp, Homo sapiens
cacatgactgtgttg

SEQ ID NO: 1556961 - DNA, 15 bp, Homo sapiens
acatgactgtgttgg

SEQ ID NO: 1556962 - DNA, 15 bp, Homo sapiens
catgactgtgttggt

SEQ ID NO: 1556963 - DNA, 15 bp, Homo sapiens
atgactgtgttggta

SEQ ID NO: 1556964 - DNA, 15 bp, Homo sapiens
tgactgtgttggtag

SEQ ID NO: 1556965 - DNA, 15 bp, Homo sapiens
gactgtgttggtagg

SEQ ID NO: 1556966 - DNA, 15 bp, Homo sapiens
actgtgttggtaggt

SEQ ID NO: 1556967 - DNA, 15 bp, Homo sapiens
ctgtgttggtaggtc

SEQ ID NO: 1556968 - DNA, 15 bp, Homo sapiens
tgtgttggtaggtcc

SEQ ID NO: 1556969 - DNA, 15 bp, Homo sapiens
gtgttggtaggtcct

SEQ ID NO: 1556970 - DNA, 15 bp, Homo sapiens
tgttggtaggtcctt

SEQ ID NO: 1556971 - DNA, 15 bp, Homo sapiens
gttggtaggtccttg

SEQ ID NO: 1556972 - DNA, 15 bp, Homo sapiens
ttggtaggtccttga

SEQ ID NO: 1556973 - DNA, 15 bp, Homo sapiens
tggtaggtccttgaa

SEQ ID NO: 1556974 - DNA, 15 bp, Homo sapiens
ggtaggtccttgaaa

SEQ ID NO: 1556975 - DNA, 15 bp, Homo sapiens
gtaggtccttgaaag

SEQ ID NO: 1556976 - DNA, 15 bp, Homo sapiens
taggtccttgaaagc

SEQ ID NO: 1556977 - DNA, 15 bp, Homo sapiens
aggtccttgaaagct

SEQ ID NO: 1556978 - DNA, 15 bp, Homo sapiens
ggtccttgaaagctt

SEQ ID NO: 1556979 - DNA, 15 bp, Homo sapiens
gtccttgaaagcttg

SEQ ID NO: 1556980 - DNA, 15 bp, Homo sapiens
tccttgaaagcttgt

SEQ ID NO: 1556981 - DNA, 15 bp, Homo sapiens
ccttgaaagcttgtt

SEQ ID NO: 1556982 - DNA, 15 bp, Homo sapiens
cttgaaagcttgttt

SEQ ID NO: 1556983 - DNA, 15 bp, Homo sapiens
ttgaaagcttgtttg

SEQ ID NO: 1556984 - DNA, 15 bp, Homo sapiens
tgaaagcttgtttgg

SEQ ID NO: 1556985 - DNA, 15 bp, Homo sapiens
gaaagcttgtttggg

SEQ ID NO: 1556986 - DNA, 15 bp, Homo sapiens
aaagcttgtttgggg

SEQ ID NO: 1556987 - DNA, 15 bp, Homo sapiens
aagcttgtttggggg

SEQ ID NO: 1556988 - DNA, 15 bp, Homo sapiens
agcttgtttgggggc

SEQ ID NO: 1556989 - DNA, 15 bp, Homo sapiens
gcttgtttgggggct

SEQ ID NO: 1556990 - DNA, 15 bp, Homo sapiens
cttgtttgggggctg

SEQ ID NO: 1556991 - DNA, 15 bp, Homo sapiens
ttgtttgggggctgt

SEQ ID NO: 1556992 - DNA, 15 bp, Homo sapiens
tgtttgggggctgtg

SEQ ID NO: 1556993 - DNA, 15 bp, Homo sapiens
gtttgggggctgtgt

SEQ ID NO: 1556994 - DNA, 15 bp, Homo sapiens
tttgggggctgtgtg

SEQ ID NO: 1556995 - DNA, 15 bp, Homo sapiens
ttgggggctgtgtgc

SEQ ID NO: 1556996 - DNA, 15 bp, Homo sapiens
tgggggctgtgtgca

SEQ ID NO: 1556997 - DNA, 15 bp, Homo sapiens
gggggctgtgtgcat

SEQ ID NO: 1556998 - DNA, 15 bp, Homo sapiens
ggggctgtgtgcatc

SEQ ID NO: 1556999 - DNA, 15 bp, Homo sapiens
gggctgtgtgcatct

SEQ ID NO: 1557000 - DNA, 15 bp, Homo sapiens
ggctgtgtgcatctc

SEQ ID NO: 1557001 - DNA, 15 bp, Homo sapiens
gctgtgtgcatctct

SEQ ID NO: 1557002 - DNA, 15 bp, Homo sapiens
ctgtgtgcatctctg

SEQ ID NO: 1557003 - DNA, 15 bp, Homo sapiens
tgtgtgcatctctgt

SEQ ID NO: 1557004 - DNA, 15 bp, Homo sapiens
gtgtgcatctctgtg

SEQ ID NO: 1557005 - DNA, 15 bp, Homo sapiens
tgtgcatctctgtgt

SEQ ID NO: 1557006 - DNA, 15 bp, Homo sapiens
gtgcatctctgtgta

SEQ ID NO: 1557007 - DNA, 15 bp, Homo sapiens
tgcatctctgtgtat

SEQ ID NO: 1557008 - DNA, 15 bp, Homo sapiens
gcatctctgtgtatg

SEQ ID NO: 1557009 - DNA, 15 bp, Homo sapiens
catctctgtgtatga

SEQ ID NO: 1557010 - DNA, 15 bp, Homo sapiens
atctctgtgtatgac

SEQ ID NO: 1557011 - DNA, 15 bp, Homo sapiens
tctctgtgtatgact

SEQ ID NO: 1557012 - DNA, 15 bp, Homo sapiens
ctctgtgtatgactg

SEQ ID NO: 1557013 - DNA, 15 bp, Homo sapiens
tctgtgtatgactgt

SEQ ID NO: 1557014 - DNA, 15 bp, Homo sapiens
ctgtgtatgactgtg

SEQ ID NO: 1557015 - DNA, 15 bp, Homo sapiens
tgtgtatgactgtgt

SEQ ID NO: 1557016 - DNA, 15 bp, Homo sapiens
gtgtatgactgtgta

SEQ ID NO: 1557017 - DNA, 15 bp, Homo sapiens
tgtatgactgtgtat

SEQ ID NO: 1557018 - DNA, 15 bp, Homo sapiens
gtatgactgtgtatt

SEQ ID NO: 1557019 - DNA, 15 bp, Homo sapiens
tatgactgtgtattt

SEQ ID NO: 1557020 - DNA, 15 bp, Homo sapiens
atgactgtgtatttg

SEQ ID NO: 1557021 - DNA, 15 bp, Homo sapiens
tgactgtgtatttgg

SEQ ID NO: 1557022 - DNA, 15 bp, Homo sapiens
gactgtgtatttgga

SEQ ID NO: 1557023 - DNA, 15 bp, Homo sapiens
actgtgtatttggac

SEQ ID NO: 1557024 - DNA, 15 bp, Homo sapiens
ctgtgtatttggact

SEQ ID NO: 1557025 - DNA, 15 bp, Homo sapiens
tgtgtatttggacta

SEQ ID NO: 1557026 - DNA, 15 bp, Homo sapiens
gtgtatttggactat

SEQ ID NO: 1557027 - DNA, 15 bp, Homo sapiens
tgtatttggactatg

SEQ ID NO: 1557028 - DNA, 15 bp, Homo sapiens
gtatttggactatgc

SEQ ID NO: 1557029 - DNA, 15 bp, Homo sapiens
tatttggactatgcg

SEQ ID NO: 1557030 - DNA, 15 bp, Homo sapiens
atttggactatgcgt

SEQ ID NO: 1557031 - DNA, 15 bp, Homo sapiens
tttggactatgcgtg

SEQ ID NO: 1557032 - DNA, 15 bp, Homo sapiens
ttggactatgcgtgt

SEQ ID NO: 1557033 - DNA, 15 bp, Homo sapiens
tggactatgcgtgtg

SEQ ID NO: 1557034 - DNA, 15 bp, Homo sapiens
ggactatgcgtgtgt

SEQ ID NO: 1557035 - DNA, 15 bp, Homo sapiens
gactatgcgtgtgtg

SEQ ID NO: 1557036 - DNA, 15 bp, Homo sapiens
actatgcgtgtgtgt

SEQ ID NO: 1557037 - DNA, 15 bp, Homo sapiens
ctatgcgtgtgtgtt

SEQ ID NO: 1557038 - DNA, 15 bp, Homo sapiens
tatgcgtgtgtgttg

SEQ ID NO: 1557039 - DNA, 15 bp, Homo sapiens
atgcgtgtgtgttgt

SEQ ID NO: 1557040 - DNA, 15 bp, Homo sapiens
tgcgtgtgtgttgtg

SEQ ID NO: 1557041 - DNA, 15 bp, Homo sapiens
gcgtgtgtgttgtgt

SEQ ID NO: 1557042 - DNA, 15 bp, Homo sapiens
cgtgtgtgttgtgtg

SEQ ID NO: 1557043 - DNA, 15 bp, Homo sapiens
gtgtgtgttgtgtgg

SEQ ID NO: 1557044 - DNA, 15 bp, Homo sapiens
tgtgtgttgtgtggc

SEQ ID NO: 1557045 - DNA, 15 bp, Homo sapiens
gtgtgttgtgtggct

SEQ ID NO: 1557046 - DNA, 15 bp, Homo sapiens
tgtgttgtgtggctg

SEQ ID NO: 1557047 - DNA, 15 bp, Homo sapiens
gtgttgtgtggctgt

SEQ ID NO: 1557048 - DNA, 15 bp, Homo sapiens
tgttgtgtggctgtg

SEQ ID NO: 1557049 - DNA, 15 bp, Homo sapiens
gttgtgtggctgtgc

SEQ ID NO: 1557050 - DNA, 15 bp, Homo sapiens
ttgtgtggctgtgca

SEQ ID NO: 1557051 - DNA, 15 bp, Homo sapiens
tgtgtggctgtgcac

SEQ ID NO: 1557052 - DNA, 15 bp, Homo sapiens
gtgtggctgtgcact

SEQ ID NO: 1557053 - DNA, 15 bp, Homo sapiens
tgtggctgtgcactg

SEQ ID NO: 1557054 - DNA, 15 bp, Homo sapiens
gtggctgtgcactgg

SEQ ID NO: 1557055 - DNA, 15 bp, Homo sapiens
tggctgtgcactggc

SEQ ID NO: 1557056 - DNA, 15 bp, Homo sapiens
ggctgtgcactggca

SEQ ID NO: 1557057 - DNA, 15 bp, Homo sapiens
gctgtgcactggcag

SEQ ID NO: 1557058 - DNA, 15 bp, Homo sapiens
ctgtgcactggcagg

SEQ ID NO: 1557059 - DNA, 15 bp, Homo sapiens
tgtgcactggcaggg

SEQ ID NO: 1557060 - DNA, 15 bp, Homo sapiens
gtgcactggcagggc

SEQ ID NO: 1557061 - DNA, 15 bp, Homo sapiens
tgcactggcagggct

SEQ ID NO: 1557062 - DNA, 15 bp, Homo sapiens
gcactggcagggctc

SEQ ID NO: 1557063 - DNA, 15 bp, Homo sapiens
cactggcagggctct

SEQ ID NO: 1557064 - DNA, 15 bp, Homo sapiens
actggcagggctctg

SEQ ID NO: 1557065 - DNA, 15 bp, Homo sapiens
ctggcagggctctgt

SEQ ID NO: 1557066 - DNA, 15 bp, Homo sapiens
tggcagggctctgtg

SEQ ID NO: 1557067 - DNA, 15 bp, Homo sapiens
ggcagggctctgtgg

SEQ ID NO: 1557068 - DNA, 15 bp, Homo sapiens
gcagggctctgtggg

SEQ ID NO: 1557069 - DNA, 15 bp, Homo sapiens
cagggctctgtgggt

SEQ ID NO: 1557070 - DNA, 15 bp, Homo sapiens
agggctctgtgggtc

SEQ ID NO: 1557071 - DNA, 15 bp, Homo sapiens
gggctctgtgggtcc

SEQ ID NO: 1557072 - DNA, 15 bp, Homo sapiens
ggctctgtgggtcca

SEQ ID NO: 1557073 - DNA, 15 bp, Homo sapiens
gctctgtgggtccat

SEQ ID NO: 1557074 - DNA, 15 bp, Homo sapiens
ctctgtgggtccatg

SEQ ID NO: 1557075 - DNA, 15 bp, Homo sapiens
tctgtgggtccatgg

SEQ ID NO: 1557076 - DNA, 15 bp, Homo sapiens
ctgtgggtccatggg

SEQ ID NO: 1557077 - DNA, 15 bp, Homo sapiens
tgtgggtccatggga

SEQ ID NO: 1557078 - DNA, 15 bp, Homo sapiens
gtgggtccatgggac

SEQ ID NO: 1557079 - DNA, 15 bp, Homo sapiens
tgggtccatgggact

SEQ ID NO: 1557080 - DNA, 15 bp, Homo sapiens
gggtccatgggactg

SEQ ID NO: 1557081 - DNA, 15 bp, Homo sapiens
ggtccatgggactgg

SEQ ID NO: 1557082 - DNA, 15 bp, Homo sapiens
gtccatgggactggt

SEQ ID NO: 1557083 - DNA, 15 bp, Homo sapiens
tccatgggactggtt

SEQ ID NO: 1557084 - DNA, 15 bp, Homo sapiens
ccatgggactggttt

SEQ ID NO: 1557085 - DNA, 15 bp, Homo sapiens
catgggactggtttt

SEQ ID NO: 1557086 - DNA, 15 bp, Homo sapiens
atgggactggttttt

SEQ ID NO: 1557087 - DNA, 15 bp, Homo sapiens
tgggactggtttttg

SEQ ID NO: 1557088 - DNA, 15 bp, Homo sapiens
gggactggtttttgg

SEQ ID NO: 1557089 - DNA, 15 bp, Homo sapiens
ggactggtttttggg

SEQ ID NO: 1557090 - DNA, 15 bp, Homo sapiens
gactggtttttgggt

SEQ ID NO: 1557091 - DNA, 15 bp, Homo sapiens
actggtttttgggtg

SEQ ID NO: 1557092 - DNA, 15 bp, Homo sapiens
ctggtttttgggtgg

SEQ ID NO: 1557093 - DNA, 15 bp, Homo sapiens
tggtttttgggtggc

SEQ ID NO: 1557094 - DNA, 15 bp, Homo sapiens
ggtttttgggtggct

SEQ ID NO: 1557095 - DNA, 15 bp, Homo sapiens
gtttttgggtggctc

SEQ ID NO: 1557096 - DNA, 15 bp, Homo sapiens
tttttgggtggctcc

SEQ ID NO: 1557097 - DNA, 15 bp, Homo sapiens
ttttgggtggctcct

SEQ ID NO: 1557098 - DNA, 15 bp, Homo sapiens
tttgggtggctcctg

SEQ ID NO: 1557099 - DNA, 15 bp, Homo sapiens
ttgggtggctcctgg

SEQ ID NO: 1557100 - DNA, 15 bp, Homo sapiens
tgggtggctcctggg

SEQ ID NO: 1557101 - DNA, 15 bp, Homo sapiens
gggtggctcctggga

SEQ ID NO: 1557102 - DNA, 15 bp, Homo sapiens
ggtggctcctgggag

SEQ ID NO: 1557103 - DNA, 15 bp, Homo sapiens
gtggctcctgggagc

SEQ ID NO: 1557104 - DNA, 15 bp, Homo sapiens
tggctcctgggagct

SEQ ID NO: 1557105 - DNA, 15 bp, Homo sapiens
ggctcctgggagctg

SEQ ID NO: 1557106 - DNA, 15 bp, Homo sapiens
gctcctgggagctgt

SEQ ID NO: 1557107 - DNA, 15 bp, Homo sapiens
ctcctgggagctgtg

SEQ ID NO: 1557108 - DNA, 15 bp, Homo sapiens
tcctgggagctgtgt

SEQ ID NO: 1557109 - DNA, 15 bp, Homo sapiens
cctgggagctgtgtg

SEQ ID NO: 1557110 - DNA, 15 bp, Homo sapiens
ctgggagctgtgtgt

SEQ ID NO: 1557111 - DNA, 15 bp, Homo sapiens
tgggagctgtgtgtg

SEQ ID NO: 1557112 - DNA, 15 bp, Homo sapiens
gggagctgtgtgtgt

SEQ ID NO: 1557113 - DNA, 15 bp, Homo sapiens
ggagctgtgtgtgtg

SEQ ID NO: 1557114 - DNA, 15 bp, Homo sapiens
gagctgtgtgtgtgg

SEQ ID NO: 1557115 - DNA, 15 bp, Homo sapiens
agctgtgtgtgtggc

SEQ ID NO: 1557116 - DNA, 15 bp, Homo sapiens
gctgtgtgtgtggca

SEQ ID NO: 1557117 - DNA, 15 bp, Homo sapiens
ctgtgtgtgtggcac

SEQ ID NO: 1557118 - DNA, 15 bp, Homo sapiens
tgtgtgtgtggcact

SEQ ID NO: 1557119 - DNA, 15 bp, Homo sapiens
gtgtgtgtggcactc

SEQ ID NO: 1557120 - DNA, 15 bp, Homo sapiens
tgtgtgtggcactca

SEQ ID NO: 1557121 - DNA, 15 bp, Homo sapiens
gtgtgtggcactcaa

SEQ ID NO: 1557122 - DNA, 15 bp, Homo sapiens
tgtgtggcactcaac

SEQ ID NO: 1557123 - DNA, 15 bp, Homo sapiens
gtgtggcactcaaca

SEQ ID NO: 1557124 - DNA, 15 bp, Homo sapiens
tgtggcactcaacat

SEQ ID NO: 1557125 - DNA, 15 bp, Homo sapiens
gtggcactcaacatg

SEQ ID NO: 1557126 - DNA, 15 bp, Homo sapiens
tggcactcaacatgg

SEQ ID NO: 1557127 - DNA, 15 bp, Homo sapiens
ggcactcaacatggc

SEQ ID NO: 1557128 - DNA, 15 bp, Homo sapiens
gcactcaacatggcc

SEQ ID NO: 1557129 - DNA, 15 bp, Homo sapiens
cactcaacatggcca

SEQ ID NO: 1557130 - DNA, 15 bp, Homo sapiens
actcaacatggccat

SEQ ID NO: 1557131 - DNA, 15 bp, Homo sapiens
ctcaacatggccatg

SEQ ID NO: 1557132 - DNA, 15 bp, Homo sapiens
tcaacatggccatgt

SEQ ID NO: 1557133 - DNA, 15 bp, Homo sapiens
caacatggccatgtg

SEQ ID NO: 1557134 - DNA, 15 bp, Homo sapiens
aacatggccatgtgc

SEQ ID NO: 1557135 - DNA, 15 bp, Homo sapiens
acatggccatgtgca

SEQ ID NO: 1557136 - DNA, 15 bp, Homo sapiens
catggccatgtgcat

SEQ ID NO: 1557137 - DNA, 15 bp, Homo sapiens
atggccatgtgcatt

SEQ ID NO: 1557138 - DNA, 15 bp, Homo sapiens
tggccatgtgcattg

SEQ ID NO: 1557139 - DNA, 15 bp, Homo sapiens
ggccatgtgcattgg

SEQ ID NO: 1557140 - DNA, 15 bp, Homo sapiens
gccatgtgcattggc

SEQ ID NO: 1557141 - DNA, 15 bp, Homo sapiens
ccatgtgcattggcg

SEQ ID NO: 1557142 - DNA, 15 bp, Homo sapiens
catgtgcattggcgg

SEQ ID NO: 1557143 - DNA, 15 bp, Homo sapiens
atgtgcattggcggc

SEQ ID NO: 1557144 - DNA, 15 bp, Homo sapiens
tgtgcattggcggcc

SEQ ID NO: 1557145 - DNA, 15 bp, Homo sapiens
gtgcattggcggcct

SEQ ID NO: 1557146 - DNA, 15 bp, Homo sapiens
tgcattggcggcctc

SEQ ID NO: 1557147 - DNA, 15 bp, Homo sapiens
gcattggcggcctct

SEQ ID NO: 1557148 - DNA, 15 bp, Homo sapiens
cattggcggcctctg

SEQ ID NO: 1557149 - DNA, 15 bp, Homo sapiens
attggcggcctctgt

SEQ ID NO: 1557150 - DNA, 15 bp, Homo sapiens
ttggcggcctctgtg

SEQ ID NO: 1557151 - DNA, 15 bp, Homo sapiens
tggcggcctctgtgc

SEQ ID NO: 1557152 - DNA, 15 bp, Homo sapiens
ggcggcctctgtgcc

SEQ ID NO: 1557153 - DNA, 15 bp, Homo sapiens
gcggcctctgtgcct

SEQ ID NO: 1557154 - DNA, 15 bp, Homo sapiens
cggcctctgtgcctg

SEQ ID NO: 1557155 - DNA, 15 bp, Homo sapiens
ggcctctgtgcctgc

SEQ ID NO: 1557156 - DNA, 15 bp, Homo sapiens
gcctctgtgcctgca

SEQ ID NO: 1557157 - DNA, 15 bp, Homo sapiens
cctctgtgcctgcac

SEQ ID NO: 1557158 - DNA, 15 bp, Homo sapiens
ctctgtgcctgcacc

SEQ ID NO: 1557159 - DNA, 15 bp, Homo sapiens
tctgtgcctgcacct

SEQ ID NO: 1557160 - DNA, 15 bp, Homo sapiens
ctgtgcctgcacctg

SEQ ID NO: 1557161 - DNA, 15 bp, Homo sapiens
tgtgcctgcacctga

SEQ ID NO: 1557162 - DNA, 15 bp, Homo sapiens
gtgcctgcacctgag

SEQ ID NO: 1557163 - DNA, 15 bp, Homo sapiens
tgcctgcacctgagc

SEQ ID NO: 1557164 - DNA, 15 bp, Homo sapiens
gcctgcacctgagct

SEQ ID NO: 1557165 - DNA, 15 bp, Homo sapiens
cctgcacctgagctg

SEQ ID NO: 1557166 - DNA, 15 bp, Homo sapiens
ctgcacctgagctgg

SEQ ID NO: 1557167 - DNA, 15 bp, Homo sapiens
tgcacctgagctggg

SEQ ID NO: 1557168 - DNA, 15 bp, Homo sapiens
gcacctgagctgggg

SEQ ID NO: 1557169 - DNA, 15 bp, Homo sapiens
cacctgagctggggg

SEQ ID NO: 1557170 - DNA, 15 bp, Homo sapiens
acctgagctgggggt

SEQ ID NO: 1557171 - DNA, 15 bp, Homo sapiens
cctgagctgggggtc

SEQ ID NO: 1557172 - DNA, 15 bp, Homo sapiens
ctgagctgggggtcc

SEQ ID NO: 1557173 - DNA, 15 bp, Homo sapiens
tgagctgggggtcct

SEQ ID NO: 1557174 - DNA, 15 bp, Homo sapiens
gagctgggggtcctg

SEQ ID NO: 1557175 - DNA, 15 bp, Homo sapiens
agctgggggtcctgt

SEQ ID NO: 1557176 - DNA, 15 bp, Homo sapiens
gctgggggtcctgtg

SEQ ID NO: 1557177 - DNA, 15 bp, Homo sapiens
ctgggggtcctgtga

SEQ ID NO: 1557178 - DNA, 15 bp, Homo sapiens
tgggggtcctgtgag

SEQ ID NO: 1557179 - DNA, 15 bp, Homo sapiens
gggggtcctgtgagt

SEQ ID NO: 1557180 - DNA, 15 bp, Homo sapiens
ggggtcctgtgagtc

SEQ ID NO: 1557181 - DNA, 15 bp, Homo sapiens
gggtcctgtgagtcc

SEQ ID NO: 1557182 - DNA, 15 bp, Homo sapiens
ggtcctgtgagtcct

SEQ ID NO: 1557183 - DNA, 15 bp, Homo sapiens
gtcctgtgagtcctg

SEQ ID NO: 1557184 - DNA, 15 bp, Homo sapiens
tcctgtgagtcctgc

SEQ ID NO: 1557185 - DNA, 15 bp, Homo sapiens
cctgtgagtcctgct

SEQ ID NO: 1557186 - DNA, 15 bp, Homo sapiens
ctgtgagtcctgctg

SEQ ID NO: 1557187 - DNA, 15 bp, Homo sapiens
tgtgagtcctgctgg

SEQ ID NO: 1557188 - DNA, 15 bp, Homo sapiens
gtgagtcctgctgga

SEQ ID NO: 1557189 - DNA, 15 bp, Homo sapiens
tgagtcctgctggat

SEQ ID NO: 1557190 - DNA, 15 bp, Homo sapiens
gagtcctgctggatg

SEQ ID NO: 1557191 - DNA, 15 bp, Homo sapiens
agtcctgctggatgc

SEQ ID NO: 1557192 - DNA, 15 bp, Homo sapiens
gtcctgctggatgca

SEQ ID NO: 1557193 - DNA, 15 bp, Homo sapiens
tcctgctggatgcat

SEQ ID NO: 1557194 - DNA, 15 bp, Homo sapiens
cctgctggatgcatg

SEQ ID NO: 1557195 - DNA, 15 bp, Homo sapiens
ctgctggatgcatgt

SEQ ID NO: 1557196 - DNA, 15 bp, Homo sapiens
tgctggatgcatgtg

SEQ ID NO: 1557197 - DNA, 15 bp, Homo sapiens
gctggatgcatgtgt

SEQ ID NO: 1557198 - DNA, 15 bp, Homo sapiens
ctggatgcatgtgtg

SEQ ID NO: 1557199 - DNA, 15 bp, Homo sapiens
tggatgcatgtgtgc

SEQ ID NO: 1557200 - DNA, 15 bp, Homo sapiens
ggatgcatgtgtgca

SEQ ID NO: 1557201 - DNA, 15 bp, Homo sapiens
gatgcatgtgtgcat

SEQ ID NO: 1557202 - DNA, 15 bp, Homo sapiens
atgcatgtgtgcatc

SEQ ID NO: 1557203 - DNA, 15 bp, Homo sapiens
tgcatgtgtgcatct

SEQ ID NO: 1557204 - DNA, 15 bp, Homo sapiens
gcatgtgtgcatctc

SEQ ID NO: 1557205 - DNA, 15 bp, Homo sapiens
catgtgtgcatctct

SEQ ID NO: 1557206 - DNA, 15 bp, Homo sapiens
atgtgtgcatctctc

SEQ ID NO: 1557207 - DNA, 15 bp, Homo sapiens
tgtgtgcatctctct

SEQ ID NO: 1557208 - DNA, 15 bp, Homo sapiens
gtgtgcatctctctc

SEQ ID NO: 1557209 - DNA, 15 bp, Homo sapiens
tgtgcatctctctcc

SEQ ID NO: 1557210 - DNA, 15 bp, Homo sapiens
gtgcatctctctccc

SEQ ID NO: 1557211 - DNA, 15 bp, Homo sapiens
tgcatctctctccct

SEQ ID NO: 1557212 - DNA, 15 bp, Homo sapiens
gcatctctctccctc

SEQ ID NO: 1557213 - DNA, 15 bp, Homo sapiens
catctctctccctcc

SEQ ID NO: 1557214 - DNA, 15 bp, Homo sapiens
atctctctccctccc

SEQ ID NO: 1557215 - DNA, 15 bp, Homo sapiens
tctctctccctcccc

SEQ ID NO: 1557216 - DNA, 15 bp, Homo sapiens
ctctctccctcccca

SEQ ID NO: 1557217 - DNA, 15 bp, Homo sapiens
tctctccctccccag

SEQ ID NO: 1557218 - DNA, 15 bp, Homo sapiens
ctctccctccccagc

SEQ ID NO: 1557219 - DNA, 15 bp, Homo sapiens
tctccctccccagct

SEQ ID NO: 1557220 - DNA, 15 bp, Homo sapiens
ctccctccccagctg

SEQ ID NO: 1557221 - DNA, 15 bp, Homo sapiens
tccctccccagctgc

SEQ ID NO: 1557222 - DNA, 15 bp, Homo sapiens
ccctccccagctgct

SEQ ID NO: 1557223 - DNA, 15 bp, Homo sapiens
cctccccagctgctg

SEQ ID NO: 1557224 - DNA, 15 bp, Homo sapiens
ctccccagctgctgg

SEQ ID NO: 1557225 - DNA, 15 bp, Homo sapiens
tccccagctgctgga

SEQ ID NO: 1557226 - DNA, 15 bp, Homo sapiens
ccccagctgctggac

SEQ ID NO: 1557227 - DNA, 15 bp, Homo sapiens
cccagctgctggacc

SEQ ID NO: 1557228 - DNA, 15 bp, Homo sapiens
ccagctgctggacca

SEQ ID NO: 1557229 - DNA, 15 bp, Homo sapiens
cagctgctggaccag

SEQ ID NO: 1557230 - DNA, 15 bp, Homo sapiens
agctgctggaccagg

SEQ ID NO: 1557231 - DNA, 15 bp, Homo sapiens
gctgctggaccagga

SEQ ID NO: 1557232 - DNA, 15 bp, Homo sapiens
ctgctggaccaggaa

SEQ ID NO: 1557233 - DNA, 15 bp, Homo sapiens
tgctggaccaggaac

SEQ ID NO: 1557234 - DNA, 15 bp, Homo sapiens
gctggaccaggaact

SEQ ID NO: 1557235 - DNA, 15 bp, Homo sapiens
ctggaccaggaactc

SEQ ID NO: 1557236 - DNA, 15 bp, Homo sapiens
tggaccaggaactcc

SEQ ID NO: 1557237 - DNA, 15 bp, Homo sapiens
ggaccaggaactcca

SEQ ID NO: 1557238 - DNA, 15 bp, Homo sapiens
gaccaggaactccaa

SEQ ID NO: 1557239 - DNA, 15 bp, Homo sapiens
accaggaactccaac

SEQ ID NO: 1557240 - DNA, 15 bp, Homo sapiens
ccaggaactccaaca

SEQ ID NO: 1557241 - DNA, 15 bp, Homo sapiens
caggaactccaacat

SEQ ID NO: 1557242 - DNA, 15 bp, Homo sapiens
aggaactccaacatg

SEQ ID NO: 1557243 - DNA, 15 bp, Homo sapiens
ggaactccaacatga

SEQ ID NO: 1557244 - DNA, 15 bp, Homo sapiens
gaactccaacatgaa

SEQ ID NO: 1557245 - DNA, 15 bp, Homo sapiens
aactccaacatgaac

SEQ ID NO: 1557246 - DNA, 15 bp, Homo sapiens
actccaacatgaact

SEQ ID NO: 1557247 - DNA, 15 bp, Homo sapiens
ctccaacatgaacta

SEQ ID NO: 1557248 - DNA, 15 bp, Homo sapiens
tccaacatgaactac

SEQ ID NO: 1557249 - DNA, 15 bp, Homo sapiens
ccaacatgaactact

SEQ ID NO: 1557250 - DNA, 15 bp, Homo sapiens
caacatgaactactg

SEQ ID NO: 1557251 - DNA, 15 bp, Homo sapiens
aacatgaactactgg

SEQ ID NO: 1557252 - DNA, 15 bp, Homo sapiens
acatgaactactggc

SEQ ID NO: 1557253 - DNA, 15 bp, Homo sapiens
catgaactactggct

SEQ ID NO: 1557254 - DNA, 15 bp, Homo sapiens
atgaactactggctc

SEQ ID NO: 1557255 - DNA, 15 bp, Homo sapiens
tgaactactggctca

SEQ ID NO: 1557256 - DNA, 15 bp, Homo sapiens
gaactactggctcat

SEQ ID NO: 1557257 - DNA, 15 bp, Homo sapiens
aactactggctcatt

SEQ ID NO: 1557258 - DNA, 15 bp, Homo sapiens
actactggctcatta

SEQ ID NO: 1557259 - DNA, 15 bp, Homo sapiens
ctactggctcattat

SEQ ID NO: 1557260 - DNA, 15 bp, Homo sapiens
tactggctcattatc

SEQ ID NO: 1557261 - DNA, 15 bp, Homo sapiens
actggctcattatcc

SEQ ID NO: 1557262 - DNA, 15 bp, Homo sapiens
ctggctcattatccg

SEQ ID NO: 1557263 - DNA, 15 bp, Homo sapiens
tggctcattatccgg

SEQ ID NO: 1557264 - DNA, 15 bp, Homo sapiens
ggctcattatccggc

SEQ ID NO: 1557265 - DNA, 15 bp, Homo sapiens
gctcattatccggct

SEQ ID NO: 1557266 - DNA, 15 bp, Homo sapiens
ctcattatccggctg

SEQ ID NO: 1557267 - DNA, 15 bp, Homo sapiens
tcattatccggctgc

SEQ ID NO: 1557268 - DNA, 15 bp, Homo sapiens
cattatccggctgcc

SEQ ID NO: 1557269 - DNA, 15 bp, Homo sapiens
attatccggctgccc

SEQ ID NO: 1557270 - DNA, 15 bp, Homo sapiens
ttatccggctgccca

SEQ ID NO: 1557271 - DNA, 15 bp, Homo sapiens
tatccggctgcccat

SEQ ID NO: 1557272 - DNA, 15 bp, Homo sapiens
atccggctgcccatt

SEQ ID NO: 1557273 - DNA, 15 bp, Homo sapiens
tccggctgcccattc

SEQ ID NO: 1557274 - DNA, 15 bp, Homo sapiens
ccggctgcccattct

SEQ ID NO: 1557275 - DNA, 15 bp, Homo sapiens
cggctgcccattctc

SEQ ID NO: 1557276 - DNA, 15 bp, Homo sapiens
ggctgcccattctct

SEQ ID NO: 1557277 - DNA, 15 bp, Homo sapiens
gctgcccattctctt

SEQ ID NO: 1557278 - DNA, 15 bp, Homo sapiens
ctgcccattctcttt

SEQ ID NO: 1557279 - DNA, 15 bp, Homo sapiens
tgcccattctctttg

SEQ ID NO: 1557280 - DNA, 15 bp, Homo sapiens
gcccattctctttgc

SEQ ID NO: 1557281 - DNA, 15 bp, Homo sapiens
cccattctctttgcc

SEQ ID NO: 1557282 - DNA, 15 bp, Homo sapiens
ccattctctttgcca

SEQ ID NO: 1557283 - DNA, 15 bp, Homo sapiens
cattctctttgccat

SEQ ID NO: 1557284 - DNA, 15 bp, Homo sapiens
attctctttgccatt

SEQ ID NO: 1557285 - DNA, 15 bp, Homo sapiens
ttctctttgccattg

SEQ ID NO: 1557286 - DNA, 15 bp, Homo sapiens
tctctttgccattgg

SEQ ID NO: 1557287 - DNA, 15 bp, Homo sapiens
ctctttgccattggg

SEQ ID NO: 1557288 - DNA, 15 bp, Homo sapiens
tctttgccattgggg

SEQ ID NO: 1557289 - DNA, 15 bp, Homo sapiens
ctttgccattggggt

SEQ ID NO: 1557290 - DNA, 15 bp, Homo sapiens
tttgccattggggtg

SEQ ID NO: 1557291 - DNA, 15 bp, Homo sapiens
ttgccattggggtga

SEQ ID NO: 1557292 - DNA, 15 bp, Homo sapiens
tgccattggggtgag

SEQ ID NO: 1557293 - DNA, 15 bp, Homo sapiens
gccattggggtgagt

SEQ ID NO: 1557294 - DNA, 15 bp, Homo sapiens
ccattggggtgagtg

SEQ ID NO: 1557295 - DNA, 15 bp, Homo sapiens
cattggggtgagtga

SEQ ID NO: 1557296 - DNA, 15 bp, Homo sapiens
attggggtgagtgat

SEQ ID NO: 1557297 - DNA, 15 bp, Homo sapiens
ttggggtgagtgatg

SEQ ID NO: 1557298 - DNA, 15 bp, Homo sapiens
tggggtgagtgatgg

SEQ ID NO: 1557299 - DNA, 15 bp, Homo sapiens
ggggtgagtgatggt

SEQ ID NO: 1557300 - DNA, 15 bp, Homo sapiens
gggtgagtgatggtg

SEQ ID NO: 1557301 - DNA, 15 bp, Homo sapiens
ggtgagtgatggtgt

SEQ ID NO: 1557302 - DNA, 15 bp, Homo sapiens
gtgagtgatggtgtc

SEQ ID NO: 1557303 - DNA, 15 bp, Homo sapiens
tgagtgatggtgtca

SEQ ID NO: 1557304 - DNA, 15 bp, Homo sapiens
gagtgatggtgtcag

SEQ ID NO: 1557305 - DNA, 15 bp, Homo sapiens
agtgatggtgtcagg

SEQ ID NO: 1557306 - DNA, 15 bp, Homo sapiens
gtgatggtgtcaggg

SEQ ID NO: 1557307 - DNA, 15 bp, Homo sapiens
tgatggtgtcaggga

SEQ ID NO: 1557308 - DNA, 15 bp, Homo sapiens
atggtgtcagggatg

SEQ ID NO: 1557309 - DNA, 15 bp, Homo sapiens
tggtgtcagggatgg

SEQ ID NO: 1557310 - DNA, 15 bp, Homo sapiens
ggtgtcagggatggg

SEQ ID NO: 1557311 - DNA, 15 bp, Homo sapiens
gtgtcagggatggga

SEQ ID NO: 1557312 - DNA, 15 bp, Homo sapiens
tgtcagggatgggag

SEQ ID NO: 1557313 - DNA, 15 bp, Homo sapiens
gtcagggatgggagt

SEQ ID NO: 1557314 - DNA, 15 bp, Homo sapiens
tcagggatgggagtg

SEQ ID NO: 1557315 - DNA, 15 bp, Homo sapiens
cagggatgggagtgg

SEQ ID NO: 1557316 - DNA, 15 bp, Homo sapiens
agggatgggagtggc

SEQ ID NO: 1557317 - DNA, 15 bp, Homo sapiens
gggatgggagtggca

SEQ ID NO: 1557318 - DNA, 15 bp, Homo sapiens
ggatgggagtggcag

SEQ ID NO: 1557319 - DNA, 15 bp, Homo sapiens
gatgggagtggcagc

SEQ ID NO: 1557320 - DNA, 15 bp, Homo sapiens
atgggagtggcagct

SEQ ID NO: 1557321 - DNA, 15 bp, Homo sapiens
tgggagtggcagcta

SEQ ID NO: 1557322 - DNA, 15 bp, Homo sapiens
gggagtggcagctat

SEQ ID NO: 1557323 - DNA, 15 bp, Homo sapiens
ggagtggcagctatg

SEQ ID NO: 1557324 - DNA, 15 bp, Homo sapiens
gagtggcagctatga

SEQ ID NO: 1557325 - DNA, 15 bp, Homo sapiens
agtggcagctatgat

SEQ ID NO: 1557326 - DNA, 15 bp, Homo sapiens
gtggcagctatgata

SEQ ID NO: 1557327 - DNA, 15 bp, Homo sapiens
tggcagctatgatag

SEQ ID NO: 1557328 - DNA, 15 bp, Homo sapiens
ggcagctatgatagg

SEQ ID NO: 1557329 - DNA, 15 bp, Homo sapiens
gcagctatgataggg

SEQ ID NO: 1557330 - DNA, 15 bp, Homo sapiens
cagctatgatagggc

SEQ ID NO: 1557331 - DNA, 15 bp, Homo sapiens
agctatgatagggct

SEQ ID NO: 1557332 - DNA, 15 bp, Homo sapiens
gctatgatagggctg

SEQ ID NO: 1557333 - DNA, 15 bp, Homo sapiens
ctatgatagggctgg

SEQ ID NO: 1557334 - DNA, 15 bp, Homo sapiens
tatgatagggctggg

SEQ ID NO: 1557335 - DNA, 15 bp, Homo sapiens
atgatagggctgggc

SEQ ID NO: 1557336 - DNA, 15 bp, Homo sapiens
tgatagggctgggct

SEQ ID NO: 1557337 - DNA, 15 bp, Homo sapiens
gatagggctgggctg

SEQ ID NO: 1557338 - DNA, 15 bp, Homo sapiens
atagggctgggctgg

SEQ ID NO: 1557339 - DNA, 15 bp, Homo sapiens
tagggctgggctggt

SEQ ID NO: 1557340 - DNA, 15 bp, Homo sapiens
agggctgggctggtg

SEQ ID NO: 1557341 - DNA, 15 bp, Homo sapiens
gggctgggctggtgc

SEQ ID NO: 1557342 - DNA, 15 bp, Homo sapiens
ggctgggctggtgcc

SEQ ID NO: 1557343 - DNA, 15 bp, Homo sapiens
gctgggctggtgccc

SEQ ID NO: 1557344 - DNA, 15 bp, Homo sapiens
ctgggctggtgcccc

SEQ ID NO: 1557345 - DNA, 15 bp, Homo sapiens
tgggctggtgccccc

SEQ ID NO: 1557346 - DNA, 15 bp, Homo sapiens
gggctggtgccccct

SEQ ID NO: 1557347 - DNA, 15 bp, Homo sapiens
ggctggtgccccctg

SEQ ID NO: 1557348 - DNA, 15 bp, Homo sapiens
gctggtgccccctgc

SEQ ID NO: 1557349 - DNA, 15 bp, Homo sapiens
ctggtgccccctgcc

SEQ ID NO: 1557350 - DNA, 15 bp, Homo sapiens
tggtgccccctgcca

SEQ ID NO: 1557351 - DNA, 15 bp, Homo sapiens
ggtgccccctgccaa

SEQ ID NO: 1557352 - DNA, 15 bp, Homo sapiens
gtgccccctgccaat

SEQ ID NO: 1557353 - DNA, 15 bp, Homo sapiens
tgccccctgccaatc

SEQ ID NO: 1557354 - DNA, 15 bp, Homo sapiens
gccccctgccaatcc

SEQ ID NO: 1557355 - DNA, 15 bp, Homo sapiens
ccccctgccaatccc

SEQ ID NO: 1557356 - DNA, 15 bp, Homo sapiens
cccctgccaatcccc

SEQ ID NO: 1557357 - DNA, 15 bp, Homo sapiens
ccctgccaatccccg

SEQ ID NO: 1557358 - DNA, 15 bp, Homo sapiens
cctgccaatccccgg

SEQ ID NO: 1557359 - DNA, 15 bp, Homo sapiens
ctgccaatccccggc

SEQ ID NO: 1557360 - DNA, 15 bp, Homo sapiens
tgccaatccccggcc

SEQ ID NO: 1557361 - DNA, 15 bp, Homo sapiens
gccaatccccggccc

SEQ ID NO: 1557362 - DNA, 15 bp, Homo sapiens
ccaatccccggcccc

SEQ ID NO: 1557363 - DNA, 15 bp, Homo sapiens
caatccccggcccca

SEQ ID NO: 1557364 - DNA, 15 bp, Homo sapiens
aatccccggccccac

SEQ ID NO: 1557365 - DNA, 15 bp, Homo sapiens
atccccggccccacc

SEQ ID NO: 1557366 - DNA, 15 bp, Homo sapiens
tccccggccccaccc

SEQ ID NO: 1557367 - DNA, 15 bp, Homo sapiens
ccccggccccacccc

SEQ ID NO: 1557368 - DNA, 15 bp, Homo sapiens
cccggccccaccccg

SEQ ID NO: 1557369 - DNA, 15 bp, Homo sapiens
ccggccccaccccgc

SEQ ID NO: 1557370 - DNA, 15 bp, Homo sapiens
cggccccaccccgca

SEQ ID NO: 1557371 - DNA, 15 bp, Homo sapiens
ggccccaccccgcag

SEQ ID NO: 1557372 - DNA, 15 bp, Homo sapiens
gccccaccccgcagg

SEQ ID NO: 1557373 - DNA, 15 bp, Homo sapiens
ccccaccccgcaggt

SEQ ID NO: 1557374 - DNA, 15 bp, Homo sapiens
cccaccccgcaggtg

SEQ ID NO: 1557375 - DNA, 15 bp, Homo sapiens
ccaccccgcaggtga

SEQ ID NO: 1557376 - DNA, 15 bp, Homo sapiens
caccccgcaggtgaa

SEQ ID NO: 1557377 - DNA, 15 bp, Homo sapiens
accccgcaggtgaac

SEQ ID NO: 1557378 - DNA, 15 bp, Homo sapiens
ccccgcaggtgaact

SEQ ID NO: 1557379 - DNA, 15 bp, Homo sapiens
cccgcaggtgaactt

SEQ ID NO: 1557380 - DNA, 15 bp, Homo sapiens
ccgcaggtgaacttc

SEQ ID NO: 1557381 - DNA, 15 bp, Homo sapiens
cgcaggtgaacttcc

SEQ ID NO: 1557382 - DNA, 15 bp, Homo sapiens
gcaggtgaacttcct

SEQ ID NO: 1557383 - DNA, 15 bp, Homo sapiens
caggtgaacttcctc

SEQ ID NO: 1557384 - DNA, 15 bp, Homo sapiens
aggtgaacttcctca

SEQ ID NO: 1557385 - DNA, 15 bp, Homo sapiens
ggtgaacttcctcat

SEQ ID NO: 1557386 - DNA, 15 bp, Homo sapiens
gtgaacttcctcatc

SEQ ID NO: 1557387 - DNA, 15 bp, Homo sapiens
tgaacttcctcatct

SEQ ID NO: 1557388 - DNA, 15 bp, Homo sapiens
gaacttcctcatctt

SEQ ID NO: 1557389 - DNA, 15 bp, Homo sapiens
aacttcctcatcttt

SEQ ID NO: 1557390 - DNA, 15 bp, Homo sapiens
acttcctcatctttg

SEQ ID NO: 1557391 - DNA, 15 bp, Homo sapiens
cttcctcatctttgt

SEQ ID NO: 1557392 - DNA, 15 bp, Homo sapiens
ttcctcatctttgtt

SEQ ID NO: 1557393 - DNA, 15 bp, Homo sapiens
tcctcatctttgttc

SEQ ID NO: 1557394 - DNA, 15 bp, Homo sapiens
cctcatctttgttcg

SEQ ID NO: 1557395 - DNA, 15 bp, Homo sapiens
ctcatctttgttcgg

SEQ ID NO: 1557396 - DNA, 15 bp, Homo sapiens
tcatctttgttcggg

SEQ ID NO: 1557397 - DNA, 15 bp, Homo sapiens
catctttgttcgggt

SEQ ID NO: 1557398 - DNA, 15 bp, Homo sapiens
atctttgttcgggtc

SEQ ID NO: 1557399 - DNA, 15 bp, Homo sapiens
tctttgttcgggtca

SEQ ID NO: 1557400 - DNA, 15 bp, Homo sapiens
ctttgttcgggtcat

SEQ ID NO: 1557401 - DNA, 15 bp, Homo sapiens
tttgttcgggtcatc

SEQ ID NO: 1557402 - DNA, 15 bp, Homo sapiens
ttgttcgggtcatct

SEQ ID NO: 1557403 - DNA, 15 bp, Homo sapiens
tgttcgggtcatctg

SEQ ID NO: 1557404 - DNA, 15 bp, Homo sapiens
gttcgggtcatctgc

SEQ ID NO: 1557405 - DNA, 15 bp, Homo sapiens
ttcgggtcatctgca

SEQ ID NO: 1557406 - DNA, 15 bp, Homo sapiens
tcgggtcatctgcat

SEQ ID NO: 1557407 - DNA, 15 bp, Homo sapiens
cgggtcatctgcatc

SEQ ID NO: 1557408 - DNA, 15 bp, Homo sapiens
gggtcatctgcatcg

SEQ ID NO: 1557409 - DNA, 15 bp, Homo sapiens
ggtcatctgcatcgt

SEQ ID NO: 1557410 - DNA, 15 bp, Homo sapiens
gtcatctgcatcgtg

SEQ ID NO: 1557411 - DNA, 15 bp, Homo sapiens
tcatctgcatcgtgg

SEQ ID NO: 1557412 - DNA, 15 bp, Homo sapiens
catctgcatcgtggt

SEQ ID NO: 1557413 - DNA, 15 bp, Homo sapiens
atctgcatcgtggta

SEQ ID NO: 1557414 - DNA, 15 bp, Homo sapiens
tctgcatcgtggtat

SEQ ID NO: 1557415 - DNA, 15 bp, Homo sapiens
ctgcatcgtggtatc

SEQ ID NO: 1557416 - DNA, 15 bp, Homo sapiens
tgcatcgtggtatcc

SEQ ID NO: 1557417 - DNA, 15 bp, Homo sapiens
gcatcgtggtatcca

SEQ ID NO: 1557418 - DNA, 15 bp, Homo sapiens
catcgtggtatccaa

SEQ ID NO: 1557419 - DNA, 15 bp, Homo sapiens
atcgtggtatccaaa

SEQ ID NO: 1557420 - DNA, 15 bp, Homo sapiens
tcgtggtatccaaac

SEQ ID NO: 1557421 - DNA, 15 bp, Homo sapiens
cgtggtatccaaact

SEQ ID NO: 1557422 - DNA, 15 bp, Homo sapiens
gtggtatccaaactg

SEQ ID NO: 1557423 - DNA, 15 bp, Homo sapiens
tggtatccaaactga

SEQ ID NO: 1557424 - DNA, 15 bp, Homo sapiens
ggtatccaaactgaa

SEQ ID NO: 1557425 - DNA, 15 bp, Homo sapiens
gtatccaaactgaag

SEQ ID NO: 1557426 - DNA, 15 bp, Homo sapiens
tatccaaactgaagg

SEQ ID NO: 1557427 - DNA, 15 bp, Homo sapiens
atccaaactgaaggc

SEQ ID NO: 1557428 - DNA, 15 bp, Homo sapiens
tccaaactgaaggcc

SEQ ID NO: 1557429 - DNA, 15 bp, Homo sapiens
ccaaactgaaggcca

SEQ ID NO: 1557430 - DNA, 15 bp, Homo sapiens
caaactgaaggccaa

SEQ ID NO: 1557431 - DNA, 15 bp, Homo sapiens
aaactgaaggccaat

SEQ ID NO: 1557432 - DNA, 15 bp, Homo sapiens
aactgaaggccaatc

SEQ ID NO: 1557433 - DNA, 15 bp, Homo sapiens
actgaaggccaatct

SEQ ID NO: 1557434 - DNA, 15 bp, Homo sapiens
ctgaaggccaatctc

SEQ ID NO: 1557435 - DNA, 15 bp, Homo sapiens
tgaaggccaatctca

SEQ ID NO: 1557436 - DNA, 15 bp, Homo sapiens
gaaggccaatctcat

SEQ ID NO: 1557437 - DNA, 15 bp, Homo sapiens
aaggccaatctcatg

SEQ ID NO: 1557438 - DNA, 15 bp, Homo sapiens
aggccaatctcatgt

SEQ ID NO: 1557439 - DNA, 15 bp, Homo sapiens
ggccaatctcatgtg

SEQ ID NO: 1557440 - DNA, 15 bp, Homo sapiens
gccaatctcatgtgc

SEQ ID NO: 1557441 - DNA, 15 bp, Homo sapiens
ccaatctcatgtgca

SEQ ID NO: 1557442 - DNA, 15 bp, Homo sapiens
caatctcatgtgcaa

SEQ ID NO: 1557443 - DNA, 15 bp, Homo sapiens
aatctcatgtgcaag

SEQ ID NO: 1557444 - DNA, 15 bp, Homo sapiens
atctcatgtgcaaga

SEQ ID NO: 1557445 - DNA, 15 bp, Homo sapiens
tctcatgtgcaagac

SEQ ID NO: 1557446 - DNA, 15 bp, Homo sapiens
ctcatgtgcaagaca

SEQ ID NO: 1557447 - DNA, 15 bp, Homo sapiens
tcatgtgcaagacag

SEQ ID NO: 1557448 - DNA, 15 bp, Homo sapiens
catgtgcaagacaga

SEQ ID NO: 1557449 - DNA, 15 bp, Homo sapiens
atgtgcaagacagac

SEQ ID NO: 1557450 - DNA, 15 bp, Homo sapiens
tgtgcaagacagaca

SEQ ID NO: 1557451 - DNA, 15 bp, Homo sapiens
gtgcaagacagacat

SEQ ID NO: 1557452 - DNA, 15 bp, Homo sapiens
tgcaagacagacatc

SEQ ID NO: 1557453 - DNA, 15 bp, Homo sapiens
gcaagacagacatca

SEQ ID NO: 1557454 - DNA, 15 bp, Homo sapiens
caagacagacatcaa

SEQ ID NO: 1557455 - DNA, 15 bp, Homo sapiens
aagacagacatcaaa

SEQ ID NO: 1557456 - DNA, 15 bp, Homo sapiens
agacagacatcaaat

SEQ ID NO: 1557457 - DNA, 15 bp, Homo sapiens
gacagacatcaaatg

SEQ ID NO: 1557458 - DNA, 15 bp, Homo sapiens
acagacatcaaatgc

SEQ ID NO: 1557459 - DNA, 15 bp, Homo sapiens
cagacatcaaatgca

SEQ ID NO: 1557460 - DNA, 15 bp, Homo sapiens
agacatcaaatgcag

SEQ ID NO: 1557461 - DNA, 15 bp, Homo sapiens
gacatcaaatgcagg

SEQ ID NO: 1557462 - DNA, 15 bp, Homo sapiens
acatcaaatgcaggt

SEQ ID NO: 1557463 - DNA, 15 bp, Homo sapiens
catcaaatgcaggtg

SEQ ID NO: 1557464 - DNA, 15 bp, Homo sapiens
atcaaatgcaggtga

SEQ ID NO: 1557465 - DNA, 15 bp, Homo sapiens
tcaaatgcaggtgat

SEQ ID NO: 1557466 - DNA, 15 bp, Homo sapiens
caaatgcaggtgatg

SEQ ID NO: 1557467 - DNA, 15 bp, Homo sapiens
aaatgcaggtgatgt

SEQ ID NO: 1557468 - DNA, 15 bp, Homo sapiens
aatgcaggtgatgta

SEQ ID NO: 1557469 - DNA, 15 bp, Homo sapiens
atgcaggtgatgtaa

SEQ ID NO: 1557470 - DNA, 15 bp, Homo sapiens
tgcaggtgatgtaac

SEQ ID NO: 1557471 - DNA, 15 bp, Homo sapiens
gcaggtgatgtaact

SEQ ID NO: 1557472 - DNA, 15 bp, Homo sapiens
caggtgatgtaactg

SEQ ID NO: 1557473 - DNA, 15 bp, Homo sapiens
aggtgatgtaactga

SEQ ID NO: 1557474 - DNA, 15 bp, Homo sapiens
ggtgatgtaactgag

SEQ ID NO: 1557475 - DNA, 15 bp, Homo sapiens
gtgatgtaactgagc

SEQ ID NO: 1557476 - DNA, 15 bp, Homo sapiens
tgatgtaactgagct

SEQ ID NO: 1557477 - DNA, 15 bp, Homo sapiens
gatgtaactgagctg

SEQ ID NO: 1557478 - DNA, 15 bp, Homo sapiens
atgtaactgagctgg

SEQ ID NO: 1557479 - DNA, 15 bp, Homo sapiens
tgtaactgagctggc

SEQ ID NO: 1557480 - DNA, 15 bp, Homo sapiens
gtaactgagctggct

SEQ ID NO: 1557481 - DNA, 15 bp, Homo sapiens
taactgagctggctt

SEQ ID NO: 1557482 - DNA, 15 bp, Homo sapiens
aactgagctggcttt

SEQ ID NO: 1557483 - DNA, 15 bp, Homo sapiens
actgagctggcttta

SEQ ID NO: 1557484 - DNA, 15 bp, Homo sapiens
ctgagctggctttac

SEQ ID NO: 1557485 - DNA, 15 bp, Homo sapiens
tgagctggctttact

SEQ ID NO: 1557486 - DNA, 15 bp, Homo sapiens
gagctggctttactg

SEQ ID NO: 1557487 - DNA, 15 bp, Homo sapiens
agctggctttactga

SEQ ID NO: 1557488 - DNA, 15 bp, Homo sapiens
gctggctttactgag

SEQ ID NO: 1557489 - DNA, 15 bp, Homo sapiens
ctggctttactgagg

SEQ ID NO: 1557490 - DNA, 15 bp, Homo sapiens
tggctttactgagga

SEQ ID NO: 1557491 - DNA, 15 bp, Homo sapiens
ggctttactgaggac

SEQ ID NO: 1557492 - DNA, 15 bp, Homo sapiens
gctttactgaggacc

SEQ ID NO: 1557493 - DNA, 15 bp, Homo sapiens
ctttactgaggaccc

SEQ ID NO: 1557494 - DNA, 15 bp, Homo sapiens
tttactgaggaccct

SEQ ID NO: 1557495 - DNA, 15 bp, Homo sapiens
ttactgaggaccctc

SEQ ID NO: 1557496 - DNA, 15 bp, Homo sapiens
tactgaggaccctca

SEQ ID NO: 1557497 - DNA, 15 bp, Homo sapiens
actgaggaccctcag

SEQ ID NO: 1557498 - DNA, 15 bp, Homo sapiens
ctgaggaccctcagc

SEQ ID NO: 1557499 - DNA, 15 bp, Homo sapiens
tgaggaccctcagca

SEQ ID NO: 1557500 - DNA, 15 bp, Homo sapiens
gaggaccctcagcaa

SEQ ID NO: 1557501 - DNA, 15 bp, Homo sapiens
aggaccctcagcaag

SEQ ID NO: 1557502 - DNA, 15 bp, Homo sapiens
ggaccctcagcaagt

SEQ ID NO: 1557503 - DNA, 15 bp, Homo sapiens
gaccctcagcaagtg

SEQ ID NO: 1557504 - DNA, 15 bp, Homo sapiens
accctcagcaagtgc

SEQ ID NO: 1557505 - DNA, 15 bp, Homo sapiens
ccctcagcaagtgcc

SEQ ID NO: 1557506 - DNA, 15 bp, Homo sapiens
cctcagcaagtgccc

SEQ ID NO: 1557507 - DNA, 15 bp, Homo sapiens
ctcagcaagtgcccc

SEQ ID NO: 1557508 - DNA, 15 bp, Homo sapiens
tcagcaagtgcccct

SEQ ID NO: 1557509 - DNA, 15 bp, Homo sapiens
cagcaagtgcccctt

SEQ ID NO: 1557510 - DNA, 15 bp, Homo sapiens
agcaagtgccccttt

SEQ ID NO: 1557511 - DNA, 15 bp, Homo sapiens
gcaagtgcccctttc

SEQ ID NO: 1557512 - DNA, 15 bp, Homo sapiens
caagtgcccctttcc

SEQ ID NO: 1557513 - DNA, 15 bp, Homo sapiens
aagtgcccctttcct

SEQ ID NO: 1557514 - DNA, 15 bp, Homo sapiens
agtgcccctttcctt

SEQ ID NO: 1557515 - DNA, 15 bp, Homo sapiens
gtgcccctttccttc

SEQ ID NO: 1557516 - DNA, 15 bp, Homo sapiens
tgcccctttccttct

SEQ ID NO: 1557517 - DNA, 15 bp, Homo sapiens
gcccctttccttcta

SEQ ID NO: 1557518 - DNA, 15 bp, Homo sapiens
cccctttccttctag

SEQ ID NO: 1557519 - DNA, 15 bp, Homo sapiens
ccctttccttctagc

SEQ ID NO: 1557520 - DNA, 15 bp, Homo sapiens
cctttccttctagca

SEQ ID NO: 1557521 - DNA, 15 bp, Homo sapiens
ctttccttctagcag

SEQ ID NO: 1557522 - DNA, 15 bp, Homo sapiens
tttccttctagcaga

SEQ ID NO: 1557523 - DNA, 15 bp, Homo sapiens
ttccttctagcagag

SEQ ID NO: 1557524 - DNA, 15 bp, Homo sapiens
tccttctagcagaga

SEQ ID NO: 1557525 - DNA, 15 bp, Homo sapiens
ccttctagcagagag

SEQ ID NO: 1557526 - DNA, 15 bp, Homo sapiens
cttctagcagagaga

SEQ ID NO: 1557527 - DNA, 15 bp, Homo sapiens
ttctagcagagagag

SEQ ID NO: 1557528 - DNA, 15 bp, Homo sapiens
tctagcagagagaga

SEQ ID NO: 1557529 - DNA, 15 bp, Homo sapiens
ctagcagagagagag

SEQ ID NO: 1557530 - DNA, 15 bp, Homo sapiens
tagcagagagagaga

SEQ ID NO: 1557531 - DNA, 15 bp, Homo sapiens
agcagagagagagag

SEQ ID NO: 1557532 - DNA, 15 bp, Homo sapiens
gcagagagagagaga

SEQ ID NO: 1557533 - DNA, 15 bp, Homo sapiens
cagagagagagagag

SEQ ID NO: 1557534 - DNA, 15 bp, Homo sapiens
agagagagagagatc

SEQ ID NO: 1557535 - DNA, 15 bp, Homo sapiens
gagagagagagatcc

SEQ ID NO: 1557536 - DNA, 15 bp, Homo sapiens
agagagagagatcct

SEQ ID NO: 1557537 - DNA, 15 bp, Homo sapiens
gagagagagatcctg

SEQ ID NO: 1557538 - DNA, 15 bp, Homo sapiens
agagagagatcctgg

SEQ ID NO: 1557539 - DNA, 15 bp, Homo sapiens
gagagagatcctggg

SEQ ID NO: 1557540 - DNA, 15 bp, Homo sapiens
agagagatcctggga

SEQ ID NO: 1557541 - DNA, 15 bp, Homo sapiens
gagagatcctgggat

SEQ ID NO: 1557542 - DNA, 15 bp, Homo sapiens
agagatcctgggatg

SEQ ID NO: 1557543 - DNA, 15 bp, Homo sapiens
gagatcctgggatgc

SEQ ID NO: 1557544 - DNA, 15 bp, Homo sapiens
agatcctgggatgct

SEQ ID NO: 1557545 - DNA, 15 bp, Homo sapiens
gatcctgggatgctt

SEQ ID NO: 1557546 - DNA, 15 bp, Homo sapiens
atcctgggatgctta

SEQ ID NO: 1557547 - DNA, 15 bp, Homo sapiens
tcctgggatgcttag

SEQ ID NO: 1557548 - DNA, 15 bp, Homo sapiens
cctgggatgcttagc

SEQ ID NO: 1557549 - DNA, 15 bp, Homo sapiens
ctgggatgcttagct

SEQ ID NO: 1557550 - DNA, 15 bp, Homo sapiens
tgggatgcttagctt

SEQ ID NO: 1557551 - DNA, 15 bp, Homo sapiens
gggatgcttagctta

SEQ ID NO: 1557552 - DNA, 15 bp, Homo sapiens
ggatgcttagcttag

SEQ ID NO: 1557553 - DNA, 15 bp, Homo sapiens
gatgcttagcttaga

SEQ ID NO: 1557554 - DNA, 15 bp, Homo sapiens
atgcttagcttagag

SEQ ID NO: 1557555 - DNA, 15 bp, Homo sapiens
tgcttagcttagagc

SEQ ID NO: 1557556 - DNA, 15 bp, Homo sapiens
gcttagcttagagcc

SEQ ID NO: 1557557 - DNA, 15 bp, Homo sapiens
cttagcttagagccc

SEQ ID NO: 1557558 - DNA, 15 bp, Homo sapiens
ttagcttagagccct

SEQ ID NO: 1557559 - DNA, 15 bp, Homo sapiens
tagcttagagcccta

SEQ ID NO: 1557560 - DNA, 15 bp, Homo sapiens
agcttagagccctac

SEQ ID NO: 1557561 - DNA, 15 bp, Homo sapiens
gcttagagccctaca

SEQ ID NO: 1557562 - DNA, 15 bp, Homo sapiens
cttagagccctacac

SEQ ID NO: 1557563 - DNA, 15 bp, Homo sapiens
ttagagccctacact

SEQ ID NO: 1557564 - DNA, 15 bp, Homo sapiens
tagagccctacacta

SEQ ID NO: 1557565 - DNA, 15 bp, Homo sapiens
agagccctacactac

SEQ ID NO: 1557566 - DNA, 15 bp, Homo sapiens
gagccctacactacc

SEQ ID NO: 1557567 - DNA, 15 bp, Homo sapiens
agccctacactaccc

SEQ ID NO: 1557568 - DNA, 15 bp, Homo sapiens
gccctacactaccct

SEQ ID NO: 1557569 - DNA, 15 bp, Homo sapiens
ccctacactaccctc

SEQ ID NO: 1557570 - DNA, 15 bp, Homo sapiens
cctacactaccctct

SEQ ID NO: 1557571 - DNA, 15 bp, Homo sapiens
ctacactaccctctc

SEQ ID NO: 1557572 - DNA, 15 bp, Homo sapiens
tacactaccctctcc

SEQ ID NO: 1557573 - DNA, 15 bp, Homo sapiens
acactaccctctcct

SEQ ID NO: 1557574 - DNA, 15 bp, Homo sapiens
cactaccctctcctt

SEQ ID NO: 1557575 - DNA, 15 bp, Homo sapiens
actaccctctccttc

SEQ ID NO: 1557576 - DNA, 15 bp, Homo sapiens
ctaccctctccttcc

SEQ ID NO: 1557577 - DNA, 15 bp, Homo sapiens
taccctctccttcca

SEQ ID NO: 1557578 - DNA, 15 bp, Homo sapiens
accctctccttccac

SEQ ID NO: 1557579 - DNA, 15 bp, Homo sapiens
ccctctccttccacc

SEQ ID NO: 1557580 - DNA, 15 bp, Homo sapiens
cctctccttccaccc

SEQ ID NO: 1557581 - DNA, 15 bp, Homo sapiens
ctctccttccaccca

SEQ ID NO: 1557582 - DNA, 15 bp, Homo sapiens
tctccttccacccag

SEQ ID NO: 1557583 - DNA, 15 bp, Homo sapiens
ctccttccacccagg

SEQ ID NO: 1557584 - DNA, 15 bp, Homo sapiens
tccttccacccaggc

SEQ ID NO: 1557585 - DNA, 15 bp, Homo sapiens
ccttccacccaggcc

SEQ ID NO: 1557586 - DNA, 15 bp, Homo sapiens
cttccacccaggcct

SEQ ID NO: 1557587 - DNA, 15 bp, Homo sapiens
ttccacccaggcctg

SEQ ID NO: 1557588 - DNA, 15 bp, Homo sapiens
tccacccaggcctgg

SEQ ID NO: 1557589 - DNA, 15 bp, Homo sapiens
ccacccaggcctggc

SEQ ID NO: 1557590 - DNA, 15 bp, Homo sapiens
cacccaggcctggcc

SEQ ID NO: 1557591 - DNA, 15 bp, Homo sapiens
acccaggcctggcct

SEQ ID NO: 1557592 - DNA, 15 bp, Homo sapiens
cccaggcctggcctt

SEQ ID NO: 1557593 - DNA, 15 bp, Homo sapiens
ccaggcctggccttg

SEQ ID NO: 1557594 - DNA, 15 bp, Homo sapiens
caggcctggccttgg

SEQ ID NO: 1557595 - DNA, 15 bp, Homo sapiens
aggcctggccttgga

SEQ ID NO: 1557596 - DNA, 15 bp, Homo sapiens
ggcctggccttggac

SEQ ID NO: 1557597 - DNA, 15 bp, Homo sapiens
gcctggccttggacc

SEQ ID NO: 1557598 - DNA, 15 bp, Homo sapiens
cctggccttggaccc

SEQ ID NO: 1557599 - DNA, 15 bp, Homo sapiens
ctggccttggacccc

SEQ ID NO: 1557600 - DNA, 15 bp, Homo sapiens
tggccttggacccca

SEQ ID NO: 1557601 - DNA, 15 bp, Homo sapiens
ggccttggaccccaa

SEQ ID NO: 1557602 - DNA, 15 bp, Homo sapiens
gccttggaccccaaa

SEQ ID NO: 1557603 - DNA, 15 bp, Homo sapiens
ccttggaccccaaac

SEQ ID NO: 1557604 - DNA, 15 bp, Homo sapiens
cttggaccccaaacc

SEQ ID NO: 1557605 - DNA, 15 bp, Homo sapiens
ttggaccccaaaccc

SEQ ID NO: 1557606 - DNA, 15 bp, Homo sapiens
tggaccccaaaccct

SEQ ID NO: 1557607 - DNA, 15 bp, Homo sapiens
ggaccccaaaccctt

SEQ ID NO: 1557608 - DNA, 15 bp, Homo sapiens
gaccccaaacccttg

SEQ ID NO: 1557609 - DNA, 15 bp, Homo sapiens
accccaaacccttgc

SEQ ID NO: 1557610 - DNA, 15 bp, Homo sapiens
ccccaaacccttgct

SEQ ID NO: 1557611 - DNA, 15 bp, Homo sapiens
cccaaacccttgctt

SEQ ID NO: 1557612 - DNA, 15 bp, Homo sapiens
ccaaacccttgcttt

SEQ ID NO: 1557613 - DNA, 15 bp, Homo sapiens
caaacccttgctttt

SEQ ID NO: 1557614 - DNA, 15 bp, Homo sapiens
aaacccttgcttttg

SEQ ID NO: 1557615 - DNA, 15 bp, Homo sapiens
aacccttgcttttgc

SEQ ID NO: 1557616 - DNA, 15 bp, Homo sapiens
acccttgcttttgcc

SEQ ID NO: 1557617 - DNA, 15 bp, Homo sapiens
cccttgcttttgccc

SEQ ID NO: 1557618 - DNA, 15 bp, Homo sapiens
ccttgcttttgccct

SEQ ID NO: 1557619 - DNA, 15 bp, Homo sapiens
cttgcttttgccctg

SEQ ID NO: 1557620 - DNA, 15 bp, Homo sapiens
ttgcttttgccctgt

SEQ ID NO: 1557621 - DNA, 15 bp, Homo sapiens
tgcttttgccctgtc

SEQ ID NO: 1557622 - DNA, 15 bp, Homo sapiens
gcttttgccctgtct

SEQ ID NO: 1557623 - DNA, 15 bp, Homo sapiens
cttttgccctgtctc

SEQ ID NO: 1557624 - DNA, 15 bp, Homo sapiens
ttttgccctgtctct

SEQ ID NO: 1557625 - DNA, 15 bp, Homo sapiens
tttgccctgtctctg

SEQ ID NO: 1557626 - DNA, 15 bp, Homo sapiens
ttgccctgtctctgg

SEQ ID NO: 1557627 - DNA, 15 bp, Homo sapiens
tgccctgtctctggg

SEQ ID NO: 1557628 - DNA, 15 bp, Homo sapiens
gccctgtctctgggc

SEQ ID NO: 1557629 - DNA, 15 bp, Homo sapiens
ccctgtctctgggca

SEQ ID NO: 1557630 - DNA, 15 bp, Homo sapiens
cctgtctctgggcag

SEQ ID NO: 1557631 - DNA, 15 bp, Homo sapiens
ctgtctctgggcagc

SEQ ID NO: 1557632 - DNA, 15 bp, Homo sapiens
tgtctctgggcagcc

SEQ ID NO: 1557633 - DNA, 15 bp, Homo sapiens
gtctctgggcagccc

SEQ ID NO: 1557634 - DNA, 15 bp, Homo sapiens
tctctgggcagcccc

SEQ ID NO: 1557635 - DNA, 15 bp, Homo sapiens
ctctgggcagcccct

SEQ ID NO: 1557636 - DNA, 15 bp, Homo sapiens
tctgggcagcccctg

SEQ ID NO: 1557637 - DNA, 15 bp, Homo sapiens
ctgggcagcccctgg

SEQ ID NO: 1557638 - DNA, 15 bp, Homo sapiens
tgggcagcccctgga

SEQ ID NO: 1557639 - DNA, 15 bp, Homo sapiens
gggcagcccctggac

SEQ ID NO: 1557640 - DNA, 15 bp, Homo sapiens
ggcagcccctggact

SEQ ID NO: 1557641 - DNA, 15 bp, Homo sapiens
gcagcccctggactt

SEQ ID NO: 1557642 - DNA, 15 bp, Homo sapiens
cagcccctggacttg

SEQ ID NO: 1557643 - DNA, 15 bp, Homo sapiens
agcccctggacttgt

SEQ ID NO: 1557644 - DNA, 15 bp, Homo sapiens
gcccctggacttgtt

SEQ ID NO: 1557645 - DNA, 15 bp, Homo sapiens
cccctggacttgttg

SEQ ID NO: 1557646 - DNA, 15 bp, Homo sapiens
ccctggacttgttgg

SEQ ID NO: 1557647 - DNA, 15 bp, Homo sapiens
cctggacttgttggg

SEQ ID NO: 1557648 - DNA, 15 bp, Homo sapiens
ctggacttgttgggg

SEQ ID NO: 1557649 - DNA, 15 bp, Homo sapiens
tggacttgttggggt

SEQ ID NO: 1557650 - DNA, 15 bp, Homo sapiens
ggacttgttggggtc

SEQ ID NO: 1557651 - DNA, 15 bp, Homo sapiens
gacttgttggggtct

SEQ ID NO: 1557652 - DNA, 15 bp, Homo sapiens
acttgttggggtctt

SEQ ID NO: 1557653 - DNA, 15 bp, Homo sapiens
cttgttggggtcttg

SEQ ID NO: 1557654 - DNA, 15 bp, Homo sapiens
ttgttggggtcttga

SEQ ID NO: 1557655 - DNA, 15 bp, Homo sapiens
tgttggggtcttgac

SEQ ID NO: 1557656 - DNA, 15 bp, Homo sapiens
gttggggtcttgacc

SEQ ID NO: 1557657 - DNA, 15 bp, Homo sapiens
ttggggtcttgacct

SEQ ID NO: 1557658 - DNA, 15 bp, Homo sapiens
tggggtcttgacctc

SEQ ID NO: 1557659 - DNA, 15 bp, Homo sapiens
ggggtcttgacctct

SEQ ID NO: 1557660 - DNA, 15 bp, Homo sapiens
gggtcttgacctcta

SEQ ID NO: 1557661 - DNA, 15 bp, Homo sapiens
ggtcttgacctctat

SEQ ID NO: 1557662 - DNA, 15 bp, Homo sapiens
gtcttgacctctatt

SEQ ID NO: 1557663 - DNA, 15 bp, Homo sapiens
tcttgacctctattc

SEQ ID NO: 1557664 - DNA, 15 bp, Homo sapiens
cttgacctctattct

SEQ ID NO: 1557665 - DNA, 15 bp, Homo sapiens
ttgacctctattctt

SEQ ID NO: 1557666 - DNA, 15 bp, Homo sapiens
tgacctctattcttt

SEQ ID NO: 1557667 - DNA, 15 bp, Homo sapiens
gacctctattctttc

SEQ ID NO: 1557668 - DNA, 15 bp, Homo sapiens
acctctattctttcc

SEQ ID NO: 1557669 - DNA, 15 bp, Homo sapiens
cctctattctttccc

SEQ ID NO: 1557670 - DNA, 15 bp, Homo sapiens
ctctattctttccct

SEQ ID NO: 1557671 - DNA, 15 bp, Homo sapiens
tctattctttccctc

SEQ ID NO: 1557672 - DNA, 15 bp, Homo sapiens
ctattctttccctcc

SEQ ID NO: 1557673 - DNA, 15 bp, Homo sapiens
tattctttccctcca

SEQ ID NO: 1557674 - DNA, 15 bp, Homo sapiens
attctttccctccag

SEQ ID NO: 1557675 - DNA, 15 bp, Homo sapiens
ttctttccctccagg

SEQ ID NO: 1557676 - DNA, 15 bp, Homo sapiens
tctttccctccaggc

SEQ ID NO: 1557677 - DNA, 15 bp, Homo sapiens
ctttccctccaggca

SEQ ID NO: 1557678 - DNA, 15 bp, Homo sapiens
tttccctccaggcag

SEQ ID NO: 1557679 - DNA, 15 bp, Homo sapiens
ttccctccaggcagc

SEQ ID NO: 1557680 - DNA, 15 bp, Homo sapiens
tccctccaggcagcc

SEQ ID NO: 1557681 - DNA, 15 bp, Homo sapiens
ccctccaggcagcct

SEQ ID NO: 1557682 - DNA, 15 bp, Homo sapiens
cctccaggcagcctg

SEQ ID NO: 1557683 - DNA, 15 bp, Homo sapiens
ctccaggcagcctgt

SEQ ID NO: 1557684 - DNA, 15 bp, Homo sapiens
tccaggcagcctgtc

SEQ ID NO: 1557685 - DNA, 15 bp, Homo sapiens
ccaggcagcctgtcc

SEQ ID NO: 1557686 - DNA, 15 bp, Homo sapiens
caggcagcctgtccc

SEQ ID NO: 1557687 - DNA, 15 bp, Homo sapiens
aggcagcctgtccca

SEQ ID NO: 1557688 - DNA, 15 bp, Homo sapiens
ggcagcctgtcccag

SEQ ID NO: 1557689 - DNA, 15 bp, Homo sapiens
gcagcctgtcccagg

SEQ ID NO: 1557690 - DNA, 15 bp, Homo sapiens
cagcctgtcccaggg

SEQ ID NO: 1557691 - DNA, 15 bp, Homo sapiens
agcctgtcccagggt

SEQ ID NO: 1557692 - DNA, 15 bp, Homo sapiens
gcctgtcccagggta

SEQ ID NO: 1557693 - DNA, 15 bp, Homo sapiens
cctgtcccagggtat

SEQ ID NO: 1557694 - DNA, 15 bp, Homo sapiens
ctgtcccagggtatt

SEQ ID NO: 1557695 - DNA, 15 bp, Homo sapiens
tgtcccagggtattt

SEQ ID NO: 1557696 - DNA, 15 bp, Homo sapiens
gtcccagggtatttg

SEQ ID NO: 1557697 - DNA, 15 bp, Homo sapiens
tcccagggtatttgg

SEQ ID NO: 1557698 - DNA, 15 bp, Homo sapiens
cccagggtatttggg

SEQ ID NO: 1557699 - DNA, 15 bp, Homo sapiens
ccagggtatttgggg

SEQ ID NO: 1557700 - DNA, 15 bp, Homo sapiens
cagggtatttggggt

SEQ ID NO: 1557701 - DNA, 15 bp, Homo sapiens
agggtatttggggtg

SEQ ID NO: 1557702 - DNA, 15 bp, Homo sapiens
gggtatttggggtgg

SEQ ID NO: 1557703 - DNA, 15 bp, Homo sapiens
ggtatttggggtggg

SEQ ID NO: 1557704 - DNA, 15 bp, Homo sapiens
gtatttggggtggga

SEQ ID NO: 1557705 - DNA, 15 bp, Homo sapiens
tatttggggtgggag

SEQ ID NO: 1557706 - DNA, 15 bp, Homo sapiens
atttggggtgggaga

SEQ ID NO: 1557707 - DNA, 15 bp, Homo sapiens
tttggggtgggagaa

SEQ ID NO: 1557708 - DNA, 15 bp, Homo sapiens
ttggggtgggagaac

SEQ ID NO: 1557709 - DNA, 15 bp, Homo sapiens
tggggtgggagaaca

SEQ ID NO: 1557710 - DNA, 15 bp, Homo sapiens
ggggtgggagaacat

SEQ ID NO: 1557711 - DNA, 15 bp, Homo sapiens
gggtgggagaacatc

SEQ ID NO: 1557712 - DNA, 15 bp, Homo sapiens
ggtgggagaacatcc

SEQ ID NO: 1557713 - DNA, 15 bp, Homo sapiens
gtgggagaacatcca

SEQ ID NO: 1557714 - DNA, 15 bp, Homo sapiens
tgggagaacatccat

SEQ ID NO: 1557715 - DNA, 15 bp, Homo sapiens
gggagaacatccatg

SEQ ID NO: 1557716 - DNA, 15 bp, Homo sapiens
ggagaacatccatga

SEQ ID NO: 1557717 - DNA, 15 bp, Homo sapiens
gagaacatccatgac

SEQ ID NO: 1557718 - DNA, 15 bp, Homo sapiens
agaacatccatgacc

SEQ ID NO: 1557719 - DNA, 15 bp, Homo sapiens
gaacatccatgaccc

SEQ ID NO: 1557720 - DNA, 15 bp, Homo sapiens
aacatccatgaccca

SEQ ID NO: 1557721 - DNA, 15 bp, Homo sapiens
acatccatgacccag

SEQ ID NO: 1557722 - DNA, 15 bp, Homo sapiens
catccatgacccaga

SEQ ID NO: 1557723 - DNA, 15 bp, Homo sapiens
atccatgacccagat

SEQ ID NO: 1557724 - DNA, 15 bp, Homo sapiens
tccatgacccagata

SEQ ID NO: 1557725 - DNA, 15 bp, Homo sapiens
ccatgacccagatat

SEQ ID NO: 1557726 - DNA, 15 bp, Homo sapiens
catgacccagatatc

SEQ ID NO: 1557727 - DNA, 15 bp, Homo sapiens
atgacccagatatca

SEQ ID NO: 1557728 - DNA, 15 bp, Homo sapiens
tgacccagatatcag

SEQ ID NO: 1557729 - DNA, 15 bp, Homo sapiens
gacccagatatcagg

SEQ ID NO: 1557730 - DNA, 15 bp, Homo sapiens
acccagatatcagga

SEQ ID NO: 1557731 - DNA, 15 bp, Homo sapiens
cccagatatcaggac

SEQ ID NO: 1557732 - DNA, 15 bp, Homo sapiens
ccagatatcaggact

SEQ ID NO: 1557733 - DNA, 15 bp, Homo sapiens
cagatatcaggactt

SEQ ID NO: 1557734 - DNA, 15 bp, Homo sapiens
agatatcaggacttg

SEQ ID NO: 1557735 - DNA, 15 bp, Homo sapiens
gatatcaggacttgg

SEQ ID NO: 1557736 - DNA, 15 bp, Homo sapiens
atatcaggacttggt

SEQ ID NO: 1557737 - DNA, 15 bp, Homo sapiens
tatcaggacttggta

SEQ ID NO: 1557738 - DNA, 15 bp, Homo sapiens
atcaggacttggtag

SEQ ID NO: 1557739 - DNA, 15 bp, Homo sapiens
tcaggacttggtagg

SEQ ID NO: 1557740 - DNA, 15 bp, Homo sapiens
caggacttggtagga

SEQ ID NO: 1557741 - DNA, 15 bp, Homo sapiens
aggacttggtaggaa

SEQ ID NO: 1557742 - DNA, 15 bp, Homo sapiens
ggacttggtaggaag

SEQ ID NO: 1557743 - DNA, 15 bp, Homo sapiens
gacttggtaggaagt

SEQ ID NO: 1557744 - DNA, 15 bp, Homo sapiens
acttggtaggaagtg

SEQ ID NO: 1557745 - DNA, 15 bp, Homo sapiens
cttggtaggaagtgg

SEQ ID NO: 1557746 - DNA, 15 bp, Homo sapiens
ttggtaggaagtggg

SEQ ID NO: 1557747 - DNA, 15 bp, Homo sapiens
tggtaggaagtgggg

SEQ ID NO: 1557748 - DNA, 15 bp, Homo sapiens
ggtaggaagtgggga

SEQ ID NO: 1557749 - DNA, 15 bp, Homo sapiens
gtaggaagtggggag

SEQ ID NO: 1557750 - DNA, 15 bp, Homo sapiens
taggaagtggggagg

SEQ ID NO: 1557751 - DNA, 15 bp, Homo sapiens
aggaagtggggaggg

SEQ ID NO: 1557752 - DNA, 15 bp, Homo sapiens
ggaagtggggagggt

SEQ ID NO: 1557753 - DNA, 15 bp, Homo sapiens
gaagtggggagggta

SEQ ID NO: 1557754 - DNA, 15 bp, Homo sapiens
aagtggggagggtag

SEQ ID NO: 1557755 - DNA, 15 bp, Homo sapiens
agtggggagggtaga

SEQ ID NO: 1557756 - DNA, 15 bp, Homo sapiens
gtggggagggtagag

SEQ ID NO: 1557757 - DNA, 15 bp, Homo sapiens
tggggagggtagaga

SEQ ID NO: 1557758 - DNA, 15 bp, Homo sapiens
ggggagggtagagaa

SEQ ID NO: 1557759 - DNA, 15 bp, Homo sapiens
gggagggtagagaaa

SEQ ID NO: 1557760 - DNA, 15 bp, Homo sapiens
ggagggtagagaaag

SEQ ID NO: 1557761 - DNA, 15 bp, Homo sapiens
gagggtagagaaagg

SEQ ID NO: 1557762 - DNA, 15 bp, Homo sapiens
agggtagagaaaggg

SEQ ID NO: 1557763 - DNA, 15 bp, Homo sapiens
gggtagagaaaggga

SEQ ID NO: 1557764 - DNA, 15 bp, Homo sapiens
ggtagagaaagggaa

SEQ ID NO: 1557765 - DNA, 15 bp, Homo sapiens
gtagagaaagggaag

SEQ ID NO: 1557766 - DNA, 15 bp, Homo sapiens
tagagaaagggaaga

SEQ ID NO: 1557767 - DNA, 15 bp, Homo sapiens
agagaaagggaagaa

SEQ ID NO: 1557768 - DNA, 15 bp, Homo sapiens
gagaaagggaagaag

SEQ ID NO: 1557769 - DNA, 15 bp, Homo sapiens
agaaagggaagaaga

SEQ ID NO: 1557770 - DNA, 15 bp, Homo sapiens
gaaagggaagaagag

SEQ ID NO: 1557771 - DNA, 15 bp, Homo sapiens
aaagggaagaagagt

SEQ ID NO: 1557772 - DNA, 15 bp, Homo sapiens
aagggaagaagagtc

SEQ ID NO: 1557773 - DNA, 15 bp, Homo sapiens
agggaagaagagtcc

SEQ ID NO: 1557774 - DNA, 15 bp, Homo sapiens
gggaagaagagtcca

SEQ ID NO: 1557775 - DNA, 15 bp, Homo sapiens
ggaagaagagtccat

SEQ ID NO: 1557776 - DNA, 15 bp, Homo sapiens
gaagaagagtccatg

SEQ ID NO: 1557777 - DNA, 15 bp, Homo sapiens
aagaagagtccatgg

SEQ ID NO: 1557778 - DNA, 15 bp, Homo sapiens
agaagagtccatggg

SEQ ID NO: 1557779 - DNA, 15 bp, Homo sapiens
gaagagtccatggga

SEQ ID NO: 1557780 - DNA, 15 bp, Homo sapiens
aagagtccatgggag

SEQ ID NO: 1557781 - DNA, 15 bp, Homo sapiens
agagtccatgggaga

SEQ ID NO: 1557782 - DNA, 15 bp, Homo sapiens
gagtccatgggagag

SEQ ID NO: 1557783 - DNA, 15 bp, Homo sapiens
agtccatgggagagg

SEQ ID NO: 1557784 - DNA, 15 bp, Homo sapiens
gtccatgggagaggt

SEQ ID NO: 1557785 - DNA, 15 bp, Homo sapiens
tccatgggagaggtc

SEQ ID NO: 1557786 - DNA, 15 bp, Homo sapiens
ccatgggagaggtcc

SEQ ID NO: 1557787 - DNA, 15 bp, Homo sapiens
catgggagaggtcca

SEQ ID NO: 1557788 - DNA, 15 bp, Homo sapiens
atgggagaggtccag

SEQ ID NO: 1557789 - DNA, 15 bp, Homo sapiens
tgggagaggtccaga

SEQ ID NO: 1557790 - DNA, 15 bp, Homo sapiens
gggagaggtccagaa

SEQ ID NO: 1557791 - DNA, 15 bp, Homo sapiens
ggagaggtccagaat

SEQ ID NO: 1557792 - DNA, 15 bp, Homo sapiens
gagaggtccagaatg

SEQ ID NO: 1557793 - DNA, 15 bp, Homo sapiens
agaggtccagaatga

SEQ ID NO: 1557794 - DNA, 15 bp, Homo sapiens
gaggtccagaatgac

SEQ ID NO: 1557795 - DNA, 15 bp, Homo sapiens
aggtccagaatgact

SEQ ID NO: 1557796 - DNA, 15 bp, Homo sapiens
ggtccagaatgactc

SEQ ID NO: 1557797 - DNA, 15 bp, Homo sapiens
gtccagaatgactcg

SEQ ID NO: 1557798 - DNA, 15 bp, Homo sapiens
tccagaatgactcga

SEQ ID NO: 1557799 - DNA, 15 bp, Homo sapiens
ccagaatgactcgag

SEQ ID NO: 1557800 - DNA, 15 bp, Homo sapiens
cagaatgactcgaga

SEQ ID NO: 1557801 - DNA, 15 bp, Homo sapiens
agaatgactcgagat

SEQ ID NO: 1557802 - DNA, 15 bp, Homo sapiens
gaatgactcgagatc

SEQ ID NO: 1557803 - DNA, 15 bp, Homo sapiens
aatgactcgagatct

SEQ ID NO: 1557804 - DNA, 15 bp, Homo sapiens
atgactcgagatctc

SEQ ID NO: 1557805 - DNA, 15 bp, Homo sapiens
tgactcgagatctct

SEQ ID NO: 1557806 - DNA, 15 bp, Homo sapiens
gactcgagatctctg

SEQ ID NO: 1557807 - DNA, 15 bp, Homo sapiens
actcgagatctctgc

SEQ ID NO: 1557808 - DNA, 15 bp, Homo sapiens
ctcgagatctctgcc

SEQ ID NO: 1557809 - DNA, 15 bp, Homo sapiens
tcgagatctctgccc

SEQ ID NO: 1557810 - DNA, 15 bp, Homo sapiens
cgagatctctgccct

SEQ ID NO: 1557811 - DNA, 15 bp, Homo sapiens
gagatctctgccctg

SEQ ID NO: 1557812 - DNA, 15 bp, Homo sapiens
agatctctgccctgc

SEQ ID NO: 1557813 - DNA, 15 bp, Homo sapiens
gatctctgccctgcc

SEQ ID NO: 1557814 - DNA, 15 bp, Homo sapiens
atctctgccctgccc

SEQ ID NO: 1557815 - DNA, 15 bp, Homo sapiens
tctctgccctgcccc

SEQ ID NO: 1557816 - DNA, 15 bp, Homo sapiens
ctctgccctgcccct

SEQ ID NO: 1557817 - DNA, 15 bp, Homo sapiens
tctgccctgcccctc

SEQ ID NO: 1557818 - DNA, 15 bp, Homo sapiens
ctgccctgcccctca

SEQ ID NO: 1557819 - DNA, 15 bp, Homo sapiens
tgccctgcccctcag

SEQ ID NO: 1557820 - DNA, 15 bp, Homo sapiens
gccctgcccctcaga

SEQ ID NO: 1557821 - DNA, 15 bp, Homo sapiens
ccctgcccctcagac

SEQ ID NO: 1557822 - DNA, 15 bp, Homo sapiens
cctgcccctcagact

SEQ ID NO: 1557823 - DNA, 15 bp, Homo sapiens
ctgcccctcagactt

SEQ ID NO: 1557824 - DNA, 15 bp, Homo sapiens
tgcccctcagacttg

SEQ ID NO: 1557825 - DNA, 15 bp, Homo sapiens
gcccctcagacttgc

SEQ ID NO: 1557826 - DNA, 15 bp, Homo sapiens
cccctcagacttgcc

SEQ ID NO: 1557827 - DNA, 15 bp, Homo sapiens
ccctcagacttgcca

SEQ ID NO: 1557828 - DNA, 15 bp, Homo sapiens
cctcagacttgccaa

SEQ ID NO: 1557829 - DNA, 15 bp, Homo sapiens
ctcagacttgccaag

SEQ ID NO: 1557830 - DNA, 15 bp, Homo sapiens
tcagacttgccaagt

SEQ ID NO: 1557831 - DNA, 15 bp, Homo sapiens
cagacttgccaagtc

SEQ ID NO: 1557832 - DNA, 15 bp, Homo sapiens
agacttgccaagtcc

SEQ ID NO: 1557833 - DNA, 15 bp, Homo sapiens
gacttgccaagtcca

SEQ ID NO: 1557834 - DNA, 15 bp, Homo sapiens
acttgccaagtccac

SEQ ID NO: 1557835 - DNA, 15 bp, Homo sapiens
cttgccaagtccacg

SEQ ID NO: 1557836 - DNA, 15 bp, Homo sapiens
ttgccaagtccacgc

SEQ ID NO: 1557837 - DNA, 15 bp, Homo sapiens
tgccaagtccacgct

SEQ ID NO: 1557838 - DNA, 15 bp, Homo sapiens
gccaagtccacgctg

SEQ ID NO: 1557839 - DNA, 15 bp, Homo sapiens
ccaagtccacgctga

SEQ ID NO: 1557840 - DNA, 15 bp, Homo sapiens
caagtccacgctgac

SEQ ID NO: 1557841 - DNA, 15 bp, Homo sapiens
aagtccacgctgaca

SEQ ID NO: 1557842 - DNA, 15 bp, Homo sapiens
agtccacgctgacac

SEQ ID NO: 1557843 - DNA, 15 bp, Homo sapiens
gtccacgctgacact

SEQ ID NO: 1557844 - DNA, 15 bp, Homo sapiens
tccacgctgacactc

SEQ ID NO: 1557845 - DNA, 15 bp, Homo sapiens
ccacgctgacactca

SEQ ID NO: 1557846 - DNA, 15 bp, Homo sapiens
cacgctgacactcat

SEQ ID NO: 1557847 - DNA, 15 bp, Homo sapiens
acgctgacactcatc

SEQ ID NO: 1557848 - DNA, 15 bp, Homo sapiens
cgctgacactcatcc

SEQ ID NO: 1557849 - DNA, 15 bp, Homo sapiens
gctgacactcatccc

SEQ ID NO: 1557850 - DNA, 15 bp, Homo sapiens
ctgacactcatcccc

SEQ ID NO: 1557851 - DNA, 15 bp, Homo sapiens
tgacactcatccccc

SEQ ID NO: 1557852 - DNA, 15 bp, Homo sapiens
gacactcatccccct

SEQ ID NO: 1557853 - DNA, 15 bp, Homo sapiens
acactcatccccctg

SEQ ID NO: 1557854 - DNA, 15 bp, Homo sapiens
cactcatccccctgc

SEQ ID NO: 1557855 - DNA, 15 bp, Homo sapiens
actcatccccctgct

SEQ ID NO: 1557856 - DNA, 15 bp, Homo sapiens
ctcatccccctgctg

SEQ ID NO: 1557857 - DNA, 15 bp, Homo sapiens
tcatccccctgctgg

SEQ ID NO: 1557858 - DNA, 15 bp, Homo sapiens
catccccctgctggg

SEQ ID NO: 1557859 - DNA, 15 bp, Homo sapiens
atccccctgctgggg

SEQ ID NO: 1557860 - DNA, 15 bp, Homo sapiens
tccccctgctgggga

SEQ ID NO: 1557861 - DNA, 15 bp, Homo sapiens
ccccctgctggggac

SEQ ID NO: 1557862 - DNA, 15 bp, Homo sapiens
cccctgctggggact

SEQ ID NO: 1557863 - DNA, 15 bp, Homo sapiens
ccctgctggggactc

SEQ ID NO: 1557864 - DNA, 15 bp, Homo sapiens
cctgctggggactca

SEQ ID NO: 1557865 - DNA, 15 bp, Homo sapiens
ctgctggggactcat

SEQ ID NO: 1557866 - DNA, 15 bp, Homo sapiens
tgctggggactcatg

SEQ ID NO: 1557867 - DNA, 15 bp, Homo sapiens
gctggggactcatga

SEQ ID NO: 1557868 - DNA, 15 bp, Homo sapiens
ctggggactcatgag

SEQ ID NO: 1557869 - DNA, 15 bp, Homo sapiens
tggggactcatgagg

SEQ ID NO: 1557870 - DNA, 15 bp, Homo sapiens
ggggactcatgaggt

SEQ ID NO: 1557871 - DNA, 15 bp, Homo sapiens
gggactcatgaggtc

SEQ ID NO: 1557872 - DNA, 15 bp, Homo sapiens
ggactcatgaggtca

SEQ ID NO: 1557873 - DNA, 15 bp, Homo sapiens
gactcatgaggtcat

SEQ ID NO: 1557874 - DNA, 15 bp, Homo sapiens
actcatgaggtcatc

SEQ ID NO: 1557875 - DNA, 15 bp, Homo sapiens
ctcatgaggtcatct

SEQ ID NO: 1557876 - DNA, 15 bp, Homo sapiens
tcatgaggtcatctt

SEQ ID NO: 1557877 - DNA, 15 bp, Homo sapiens
catgaggtcatcttt

SEQ ID NO: 1557878 - DNA, 15 bp, Homo sapiens
atgaggtcatctttg

SEQ ID NO: 1557879 - DNA, 15 bp, Homo sapiens
tgaggtcatctttgc

SEQ ID NO: 1557880 - DNA, 15 bp, Homo sapiens
gaggtcatctttgcc

SEQ ID NO: 1557881 - DNA, 15 bp, Homo sapiens
aggtcatctttgcct

SEQ ID NO: 1557882 - DNA, 15 bp, Homo sapiens
ggtcatctttgcctt

SEQ ID NO: 1557883 - DNA, 15 bp, Homo sapiens
gtcatctttgccttt

SEQ ID NO: 1557884 - DNA, 15 bp, Homo sapiens
tcatctttgcctttg

SEQ ID NO: 1557885 - DNA, 15 bp, Homo sapiens
catctttgcctttgt

SEQ ID NO: 1557886 - DNA, 15 bp, Homo sapiens
atctttgcctttgtg

SEQ ID NO: 1557887 - DNA, 15 bp, Homo sapiens
tctttgcctttgtga

SEQ ID NO: 1557888 - DNA, 15 bp, Homo sapiens
ctttgcctttgtgat

SEQ ID NO: 1557889 - DNA, 15 bp, Homo sapiens
tttgcctttgtgatg

SEQ ID NO: 1557890 - DNA, 15 bp, Homo sapiens
ttgcctttgtgatgg

SEQ ID NO: 1557891 - DNA, 15 bp, Homo sapiens
tgcctttgtgatgga

SEQ ID NO: 1557892 - DNA, 15 bp, Homo sapiens
gcctttgtgatggac

SEQ ID NO: 1557893 - DNA, 15 bp, Homo sapiens
cctttgtgatggacg

SEQ ID NO: 1557894 - DNA, 15 bp, Homo sapiens
ctttgtgatggacga

SEQ ID NO: 1557895 - DNA, 15 bp, Homo sapiens
tttgtgatggacgag

SEQ ID NO: 1557896 - DNA, 15 bp, Homo sapiens
ttgtgatggacgagc

SEQ ID NO: 1557897 - DNA, 15 bp, Homo sapiens
tgtgatggacgagca

SEQ ID NO: 1557898 - DNA, 15 bp, Homo sapiens
gtgatggacgagcac

SEQ ID NO: 1557899 - DNA, 15 bp, Homo sapiens
tgatggacgagcacg

SEQ ID NO: 1557900 - DNA, 15 bp, Homo sapiens
gatggacgagcacgc

SEQ ID NO: 1557901 - DNA, 15 bp, Homo sapiens
atggacgagcacgcc

SEQ ID NO: 1557902 - DNA, 15 bp, Homo sapiens
tggacgagcacgccc

SEQ ID NO: 1557903 - DNA, 15 bp, Homo sapiens
ggacgagcacgcccg

SEQ ID NO: 1557904 - DNA, 15 bp, Homo sapiens
gacgagcacgcccgg

SEQ ID NO: 1557905 - DNA, 15 bp, Homo sapiens
acgagcacgcccggg

SEQ ID NO: 1557906 - DNA, 15 bp, Homo sapiens
cgagcacgcccgggg

SEQ ID NO: 1557907 - DNA, 15 bp, Homo sapiens
gagcacgcccggggg

SEQ ID NO: 1557908 - DNA, 15 bp, Homo sapiens
agcacgcccggggga

SEQ ID NO: 1557909 - DNA, 15 bp, Homo sapiens
gcacgcccgggggac

SEQ ID NO: 1557910 - DNA, 15 bp, Homo sapiens
cacgcccgggggacc

SEQ ID NO: 1557911 - DNA, 15 bp, Homo sapiens
acgcccgggggaccc

SEQ ID NO: 1557912 - DNA, 15 bp, Homo sapiens
cgcccgggggaccct

SEQ ID NO: 1557913 - DNA, 15 bp, Homo sapiens
gcccgggggaccctg

SEQ ID NO: 1557914 - DNA, 15 bp, Homo sapiens
cccgggggaccctgc

SEQ ID NO: 1557915 - DNA, 15 bp, Homo sapiens
ccgggggaccctgcg

SEQ ID NO: 1557916 - DNA, 15 bp, Homo sapiens
cgggggaccctgcgc

SEQ ID NO: 1557917 - DNA, 15 bp, Homo sapiens
gggggaccctgcgct

SEQ ID NO: 1557918 - DNA, 15 bp, Homo sapiens
ggggaccctgcgctt

SEQ ID NO: 1557919 - DNA, 15 bp, Homo sapiens
gggaccctgcgcttc

SEQ ID NO: 1557920 - DNA, 15 bp, Homo sapiens
ggaccctgcgcttca

SEQ ID NO: 1557921 - DNA, 15 bp, Homo sapiens
gaccctgcgcttcat

SEQ ID NO: 1557922 - DNA, 15 bp, Homo sapiens
accctgcgcttcatc

SEQ ID NO: 1557923 - DNA, 15 bp, Homo sapiens
ccctgcgcttcatca

SEQ ID NO: 1557924 - DNA, 15 bp, Homo sapiens
cctgcgcttcatcaa

SEQ ID NO: 1557925 - DNA, 15 bp, Homo sapiens
ctgcgcttcatcaag

SEQ ID NO: 1557926 - DNA, 15 bp, Homo sapiens
tgcgcttcatcaagc

SEQ ID NO: 1557927 - DNA, 15 bp, Homo sapiens
gcgcttcatcaagct

SEQ ID NO: 1557928 - DNA, 15 bp, Homo sapiens
cgcttcatcaagctg

SEQ ID NO: 1557929 - DNA, 15 bp, Homo sapiens
gcttcatcaagctgt

SEQ ID NO: 1557930 - DNA, 15 bp, Homo sapiens
cttcatcaagctgtt

SEQ ID NO: 1557931 - DNA, 15 bp, Homo sapiens
ttcatcaagctgttt

SEQ ID NO: 1557932 - DNA, 15 bp, Homo sapiens
tcatcaagctgttta

SEQ ID NO: 1557933 - DNA, 15 bp, Homo sapiens
catcaagctgtttac

SEQ ID NO: 1557934 - DNA, 15 bp, Homo sapiens
atcaagctgtttaca

SEQ ID NO: 1557935 - DNA, 15 bp, Homo sapiens
tcaagctgtttacag

SEQ ID NO: 1557936 - DNA, 15 bp, Homo sapiens
caagctgtttacaga

SEQ ID NO: 1557937 - DNA, 15 bp, Homo sapiens
aagctgtttacagag

SEQ ID NO: 1557938 - DNA, 15 bp, Homo sapiens
agctgtttacagagc

SEQ ID NO: 1557939 - DNA, 15 bp, Homo sapiens
gctgtttacagagct

SEQ ID NO: 1557940 - DNA, 15 bp, Homo sapiens
ctgtttacagagctc

SEQ ID NO: 1557941 - DNA, 15 bp, Homo sapiens
tgtttacagagctct

SEQ ID NO: 1557942 - DNA, 15 bp, Homo sapiens
gtttacagagctctc

SEQ ID NO: 1557943 - DNA, 15 bp, Homo sapiens
tttacagagctctcc

SEQ ID NO: 1557944 - DNA, 15 bp, Homo sapiens
ttacagagctctcct

SEQ ID NO: 1557945 - DNA, 15 bp, Homo sapiens
tacagagctctcctt

SEQ ID NO: 1557946 - DNA, 15 bp, Homo sapiens
acagagctctccttc

SEQ ID NO: 1557947 - DNA, 15 bp, Homo sapiens
cagagctctccttca

SEQ ID NO: 1557948 - DNA, 15 bp, Homo sapiens
agagctctccttcac

SEQ ID NO: 1557949 - DNA, 15 bp, Homo sapiens
gagctctccttcacc

SEQ ID NO: 1557950 - DNA, 15 bp, Homo sapiens
agctctccttcacct

SEQ ID NO: 1557951 - DNA, 15 bp, Homo sapiens
gctctccttcacctc

SEQ ID NO: 1557952 - DNA, 15 bp, Homo sapiens
ctctccttcacctcc

SEQ ID NO: 1557953 - DNA, 15 bp, Homo sapiens
tctccttcacctcct

SEQ ID NO: 1557954 - DNA, 15 bp, Homo sapiens
ctccttcacctcctt

SEQ ID NO: 1557955 - DNA, 15 bp, Homo sapiens
tccttcacctccttc

SEQ ID NO: 1557956 - DNA, 15 bp, Homo sapiens
ccttcacctccttcc

SEQ ID NO: 1557957 - DNA, 15 bp, Homo sapiens
cttcacctccttcca

SEQ ID NO: 1557958 - DNA, 15 bp, Homo sapiens
ttcacctccttccag

SEQ ID NO: 1557959 - DNA, 15 bp, Homo sapiens
tcacctccttccagg

SEQ ID NO: 1557960 - DNA, 15 bp, Homo sapiens
cacctccttccaggt

SEQ ID NO: 1557961 - DNA, 15 bp, Homo sapiens
acctccttccaggtg

SEQ ID NO: 1557962 - DNA, 15 bp, Homo sapiens
cctccttccaggtga

SEQ ID NO: 1557963 - DNA, 15 bp, Homo sapiens
ctccttccaggtgac

SEQ ID NO: 1557964 - DNA, 15 bp, Homo sapiens
tccttccaggtgact

SEQ ID NO: 1557965 - DNA, 15 bp, Homo sapiens
ccttccaggtgactt

SEQ ID NO: 1557966 - DNA, 15 bp, Homo sapiens
cttccaggtgacttc

SEQ ID NO: 1557967 - DNA, 15 bp, Homo sapiens
ttccaggtgacttca

SEQ ID NO: 1557968 - DNA, 15 bp, Homo sapiens
tccaggtgacttcat

SEQ ID NO: 1557969 - DNA, 15 bp, Homo sapiens
ccaggtgacttcatg

SEQ ID NO: 1557970 - DNA, 15 bp, Homo sapiens
caggtgacttcatgc

SEQ ID NO: 1557971 - DNA, 15 bp, Homo sapiens
aggtgacttcatgct

SEQ ID NO: 1557972 - DNA, 15 bp, Homo sapiens
ggtgacttcatgctt

SEQ ID NO: 1557973 - DNA, 15 bp, Homo sapiens
gtgacttcatgcttg

SEQ ID NO: 1557974 - DNA, 15 bp, Homo sapiens
tgacttcatgcttgg

SEQ ID NO: 1557975 - DNA, 15 bp, Homo sapiens
gacttcatgcttggg

SEQ ID NO: 1557976 - DNA, 15 bp, Homo sapiens
acttcatgcttgggg

SEQ ID NO: 1557977 - DNA, 15 bp, Homo sapiens
cttcatgcttgggga

SEQ ID NO: 1557978 - DNA, 15 bp, Homo sapiens
ttcatgcttggggac

SEQ ID NO: 1557979 - DNA, 15 bp, Homo sapiens
tcatgcttggggaca

SEQ ID NO: 1557980 - DNA, 15 bp, Homo sapiens
catgcttggggacac

SEQ ID NO: 1557981 - DNA, 15 bp, Homo sapiens
atgcttggggacact

SEQ ID NO: 1557982 - DNA, 15 bp, Homo sapiens
tgcttggggacactt

SEQ ID NO: 1557983 - DNA, 15 bp, Homo sapiens
gcttggggacacttg

SEQ ID NO: 1557984 - DNA, 15 bp, Homo sapiens
cttggggacacttgc

SEQ ID NO: 1557985 - DNA, 15 bp, Homo sapiens
ttggggacacttgct

SEQ ID NO: 1557986 - DNA, 15 bp, Homo sapiens
tggggacacttgctt

SEQ ID NO: 1557987 - DNA, 15 bp, Homo sapiens
ggggacacttgcttg

SEQ ID NO: 1557988 - DNA, 15 bp, Homo sapiens
gggacacttgcttgt

SEQ ID NO: 1557989 - DNA, 15 bp, Homo sapiens
ggacacttgcttgta

SEQ ID NO: 1557990 - DNA, 15 bp, Homo sapiens
gacacttgcttgtaa

SEQ ID NO: 1557991 - DNA, 15 bp, Homo sapiens
acacttgcttgtaaa

SEQ ID NO: 1557992 - DNA, 15 bp, Homo sapiens
cacttgcttgtaaag

SEQ ID NO: 1557993 - DNA, 15 bp, Homo sapiens
acttgcttgtaaagt

SEQ ID NO: 1557994 - DNA, 15 bp, Homo sapiens
cttgcttgtaaagtc

SEQ ID NO: 1557995 - DNA, 15 bp, Homo sapiens
ttgcttgtaaagtcc

SEQ ID NO: 1557996 - DNA, 15 bp, Homo sapiens
tgcttgtaaagtcct

SEQ ID NO: 1557997 - DNA, 15 bp, Homo sapiens
gcttgtaaagtccta

SEQ ID NO: 1557998 - DNA, 15 bp, Homo sapiens
cttgtaaagtcctag

SEQ ID NO: 1557999 - DNA, 15 bp, Homo sapiens
ttgtaaagtcctaga

SEQ ID NO: 1558000 - DNA, 15 bp, Homo sapiens
tgtaaagtcctagag

SEQ ID NO: 1558001 - DNA, 15 bp, Homo sapiens
gtaaagtcctagagt

SEQ ID NO: 1558002 - DNA, 15 bp, Homo sapiens
taaagtcctagagtg

SEQ ID NO: 1558003 - DNA, 15 bp, Homo sapiens
aaagtcctagagtgg

SEQ ID NO: 1558004 - DNA, 15 bp, Homo sapiens
aagtcctagagtggg

SEQ ID NO: 1558005 - DNA, 15 bp, Homo sapiens
agtcctagagtgggg

SEQ ID NO: 1558006 - DNA, 15 bp, Homo sapiens
gtcctagagtggggg

SEQ ID NO: 1558007 - DNA, 15 bp, Homo sapiens
tcctagagtgggggt

SEQ ID NO: 1558008 - DNA, 15 bp, Homo sapiens
cctagagtgggggtg

SEQ ID NO: 1558009 - DNA, 15 bp, Homo sapiens
ctagagtgggggtgg

SEQ ID NO: 1558010 - DNA, 15 bp, Homo sapiens
tagagtgggggtggg

SEQ ID NO: 1558011 - DNA, 15 bp, Homo sapiens
agagtgggggtggga

SEQ ID NO: 1558012 - DNA, 15 bp, Homo sapiens
gagtgggggtgggac

SEQ ID NO: 1558013 - DNA, 15 bp, Homo sapiens
agtgggggtgggaca

SEQ ID NO: 1558014 - DNA, 15 bp, Homo sapiens
gtgggggtgggacag

SEQ ID NO: 1558015 - DNA, 15 bp, Homo sapiens
tgggggtgggacaga

SEQ ID NO: 1558016 - DNA, 15 bp, Homo sapiens
gggggtgggacagac

SEQ ID NO: 1558017 - DNA, 15 bp, Homo sapiens
ggggtgggacagaca

SEQ ID NO: 1558018 - DNA, 15 bp, Homo sapiens
gggtgggacagacac

SEQ ID NO: 1558019 - DNA, 15 bp, Homo sapiens
ggtgggacagacacc

SEQ ID NO: 1558020 - DNA, 15 bp, Homo sapiens
gtgggacagacacca

SEQ ID NO: 1558021 - DNA, 15 bp, Homo sapiens
tgggacagacaccag

SEQ ID NO: 1558022 - DNA, 15 bp, Homo sapiens
gggacagacaccagc

SEQ ID NO: 1558023 - DNA, 15 bp, Homo sapiens
ggacagacaccagcc

SEQ ID NO: 1558024 - DNA, 15 bp, Homo sapiens
gacagacaccagcct

SEQ ID NO: 1558025 - DNA, 15 bp, Homo sapiens
acagacaccagcctg

SEQ ID NO: 1558026 - DNA, 15 bp, Homo sapiens
cagacaccagcctgc

SEQ ID NO: 1558027 - DNA, 15 bp, Homo sapiens
agacaccagcctgca

SEQ ID NO: 1558028 - DNA, 15 bp, Homo sapiens
gacaccagcctgcat

SEQ ID NO: 1558029 - DNA, 15 bp, Homo sapiens
acaccagcctgcatc

SEQ ID NO: 1558030 - DNA, 15 bp, Homo sapiens
caccagcctgcatca

SEQ ID NO: 1558031 - DNA, 15 bp, Homo sapiens
accagcctgcatcat

SEQ ID NO: 1558032 - DNA, 15 bp, Homo sapiens
ccagcctgcatcatg

SEQ ID NO: 1558033 - DNA, 15 bp, Homo sapiens
cagcctgcatcatgc

SEQ ID NO: 1558034 - DNA, 15 bp, Homo sapiens
agcctgcatcatgca

SEQ ID NO: 1558035 - DNA, 15 bp, Homo sapiens
gcctgcatcatgcag

SEQ ID NO: 1558036 - DNA, 15 bp, Homo sapiens
cctgcatcatgcaga

SEQ ID NO: 1558037 - DNA, 15 bp, Homo sapiens
ctgcatcatgcagat

SEQ ID NO: 1558038 - DNA, 15 bp, Homo sapiens
tgcatcatgcagatg

SEQ ID NO: 1558039 - DNA, 15 bp, Homo sapiens
gcatcatgcagatgg

SEQ ID NO: 1558040 - DNA, 15 bp, Homo sapiens
catcatgcagatgga

SEQ ID NO: 1558041 - DNA, 15 bp, Homo sapiens
atcatgcagatggaa

SEQ ID NO: 1558042 - DNA, 15 bp, Homo sapiens
tcatgcagatggaaa

SEQ ID NO: 1558043 - DNA, 15 bp, Homo sapiens
catgcagatggaaaa

SEQ ID NO: 1558044 - DNA, 15 bp, Homo sapiens
atgcagatggaaaag

SEQ ID NO: 1558045 - DNA, 15 bp, Homo sapiens
tgcagatggaaaagg

SEQ ID NO: 1558046 - DNA, 15 bp, Homo sapiens
gcagatggaaaaggt

SEQ ID NO: 1558047 - DNA, 15 bp, Homo sapiens
cagatggaaaaggtg

SEQ ID NO: 1558048 - DNA, 15 bp, Homo sapiens
agatggaaaaggtgg

SEQ ID NO: 1558049 - DNA, 15 bp, Homo sapiens
gatggaaaaggtggg

SEQ ID NO: 1558050 - DNA, 15 bp, Homo sapiens
atggaaaaggtggga

SEQ ID NO: 1558051 - DNA, 15 bp, Homo sapiens
tggaaaaggtgggaa

SEQ ID NO: 1558052 - DNA, 15 bp, Homo sapiens
ggaaaaggtgggaag

SEQ ID NO: 1558053 - DNA, 15 bp, Homo sapiens
gaaaaggtgggaaga

SEQ ID NO: 1558054 - DNA, 15 bp, Homo sapiens
aaaaggtgggaagac

SEQ ID NO: 1558055 - DNA, 15 bp, Homo sapiens
aaaggtgggaagact

SEQ ID NO: 1558056 - DNA, 15 bp, Homo sapiens
aggtgggaagactgg

SEQ ID NO: 1558057 - DNA, 15 bp, Homo sapiens
ggtgggaagactggg

SEQ ID NO: 1558058 - DNA, 15 bp, Homo sapiens
gtgggaagactggga

SEQ ID NO: 1558059 - DNA, 15 bp, Homo sapiens
tgggaagactgggac

SEQ ID NO: 1558060 - DNA, 15 bp, Homo sapiens
gggaagactgggacc

SEQ ID NO: 1558061 - DNA, 15 bp, Homo sapiens
ggaagactgggacct

SEQ ID NO: 1558062 - DNA, 15 bp, Homo sapiens
gaagactgggacctg

SEQ ID NO: 1558063 - DNA, 15 bp, Homo sapiens
aagactgggacctgg

SEQ ID NO: 1558064 - DNA, 15 bp, Homo sapiens
agactgggacctgga

SEQ ID NO: 1558065 - DNA, 15 bp, Homo sapiens
gactgggacctggag

SEQ ID NO: 1558066 - DNA, 15 bp, Homo sapiens
actgggacctggagg

SEQ ID NO: 1558067 - DNA, 15 bp, Homo sapiens
ctgggacctggaggg

SEQ ID NO: 1558068 - DNA, 15 bp, Homo sapiens
tgggacctggagggg

SEQ ID NO: 1558069 - DNA, 15 bp, Homo sapiens
gggacctggaggggt

SEQ ID NO: 1558070 - DNA, 15 bp, Homo sapiens
ggacctggaggggtg

SEQ ID NO: 1558071 - DNA, 15 bp, Homo sapiens
gacctggaggggtga

SEQ ID NO: 1558072 - DNA, 15 bp, Homo sapiens
acctggaggggtgat

SEQ ID NO: 1558073 - DNA, 15 bp, Homo sapiens
cctggaggggtgatc

SEQ ID NO: 1558074 - DNA, 15 bp, Homo sapiens
ctggaggggtgatcc

SEQ ID NO: 1558075 - DNA, 15 bp, Homo sapiens
tggaggggtgatccc

SEQ ID NO: 1558076 - DNA, 15 bp, Homo sapiens
ggaggggtgatccct

SEQ ID NO: 1558077 - DNA, 15 bp, Homo sapiens
gaggggtgatccctg

SEQ ID NO: 1558078 - DNA, 15 bp, Homo sapiens
aggggtgatccctgc

SEQ ID NO: 1558079 - DNA, 15 bp, Homo sapiens
ggggtgatccctgcc

SEQ ID NO: 1558080 - DNA, 15 bp, Homo sapiens
gggtgatccctgccc

SEQ ID NO: 1558081 - DNA, 15 bp, Homo sapiens
ggtgatccctgccca

SEQ ID NO: 1558082 - DNA, 15 bp, Homo sapiens
gtgatccctgcccaa

SEQ ID NO: 1558083 - DNA, 15 bp, Homo sapiens
tgatccctgcccaaa

SEQ ID NO: 1558084 - DNA, 15 bp, Homo sapiens
gatccctgcccaaag

SEQ ID NO: 1558085 - DNA, 15 bp, Homo sapiens
atccctgcccaaagt

SEQ ID NO: 1558086 - DNA, 15 bp, Homo sapiens
tccctgcccaaagtc

SEQ ID NO: 1558087 - DNA, 15 bp, Homo sapiens
ccctgcccaaagtca

SEQ ID NO: 1558088 - DNA, 15 bp, Homo sapiens
cctgcccaaagtcac

SEQ ID NO: 1558089 - DNA, 15 bp, Homo sapiens
ctgcccaaagtcacc

SEQ ID NO: 1558090 - DNA, 15 bp, Homo sapiens
tgcccaaagtcacct

SEQ ID NO: 1558091 - DNA, 15 bp, Homo sapiens
gcccaaagtcaccta

SEQ ID NO: 1558092 - DNA, 15 bp, Homo sapiens
cccaaagtcacctag

SEQ ID NO: 1558093 - DNA, 15 bp, Homo sapiens
ccaaagtcacctagt

SEQ ID NO: 1558094 - DNA, 15 bp, Homo sapiens
caaagtcacctagtt

SEQ ID NO: 1558095 - DNA, 15 bp, Homo sapiens
aaagtcacctagttg

SEQ ID NO: 1558096 - DNA, 15 bp, Homo sapiens
aagtcacctagttgg

SEQ ID NO: 1558097 - DNA, 15 bp, Homo sapiens
agtcacctagttgga

SEQ ID NO: 1558098 - DNA, 15 bp, Homo sapiens
gtcacctagttggag

SEQ ID NO: 1558099 - DNA, 15 bp, Homo sapiens
tcacctagttggagc

SEQ ID NO: 1558100 - DNA, 15 bp, Homo sapiens
cacctagttggagca

SEQ ID NO: 1558101 - DNA, 15 bp, Homo sapiens
acctagttggagcag

SEQ ID NO: 1558102 - DNA, 15 bp, Homo sapiens
cctagttggagcaga

SEQ ID NO: 1558103 - DNA, 15 bp, Homo sapiens
ctagttggagcagag

SEQ ID NO: 1558104 - DNA, 15 bp, Homo sapiens
tagttggagcagagc

SEQ ID NO: 1558105 - DNA, 15 bp, Homo sapiens
agttggagcagagcc

SEQ ID NO: 1558106 - DNA, 15 bp, Homo sapiens
gttggagcagagcca

SEQ ID NO: 1558107 - DNA, 15 bp, Homo sapiens
ttggagcagagccag

SEQ ID NO: 1558108 - DNA, 15 bp, Homo sapiens
tggagcagagccaga

SEQ ID NO: 1558109 - DNA, 15 bp, Homo sapiens
ggagcagagccagaa

SEQ ID NO: 1558110 - DNA, 15 bp, Homo sapiens
gagcagagccagaac

SEQ ID NO: 1558111 - DNA, 15 bp, Homo sapiens
agcagagccagaact

SEQ ID NO: 1558112 - DNA, 15 bp, Homo sapiens
gcagagccagaacta

SEQ ID NO: 1558113 - DNA, 15 bp, Homo sapiens
cagagccagaactag

SEQ ID NO: 1558114 - DNA, 15 bp, Homo sapiens
agagccagaactagt

SEQ ID NO: 1558115 - DNA, 15 bp, Homo sapiens
gagccagaactagta

SEQ ID NO: 1558116 - DNA, 15 bp, Homo sapiens
agccagaactagtat

SEQ ID NO: 1558117 - DNA, 15 bp, Homo sapiens
gccagaactagtatc

SEQ ID NO: 1558118 - DNA, 15 bp, Homo sapiens
ccagaactagtatcc

SEQ ID NO: 1558119 - DNA, 15 bp, Homo sapiens
cagaactagtatccc

SEQ ID NO: 1558120 - DNA, 15 bp, Homo sapiens
agaactagtatcccc

SEQ ID NO: 1558121 - DNA, 15 bp, Homo sapiens
gaactagtatcccca

SEQ ID NO: 1558122 - DNA, 15 bp, Homo sapiens
aactagtatccccag

SEQ ID NO: 1558123 - DNA, 15 bp, Homo sapiens
actagtatccccagg

SEQ ID NO: 1558124 - DNA, 15 bp, Homo sapiens
ctagtatccccaggt

SEQ ID NO: 1558125 - DNA, 15 bp, Homo sapiens
tagtatccccaggtg

SEQ ID NO: 1558126 - DNA, 15 bp, Homo sapiens
agtatccccaggtgt

SEQ ID NO: 1558127 - DNA, 15 bp, Homo sapiens
gtatccccaggtgtc

SEQ ID NO: 1558128 - DNA, 15 bp, Homo sapiens
tatccccaggtgtcc

SEQ ID NO: 1558129 - DNA, 15 bp, Homo sapiens
atccccaggtgtccc

SEQ ID NO: 1558130 - DNA, 15 bp, Homo sapiens
tccccaggtgtccca

SEQ ID NO: 1558131 - DNA, 15 bp, Homo sapiens
ccccaggtgtcccaa

SEQ ID NO: 1558132 - DNA, 15 bp, Homo sapiens
cccaggtgtcccaat

SEQ ID NO: 1558133 - DNA, 15 bp, Homo sapiens
ccaggtgtcccaata

SEQ ID NO: 1558134 - DNA, 15 bp, Homo sapiens
caggtgtcccaatac

SEQ ID NO: 1558135 - DNA, 15 bp, Homo sapiens
aggtgtcccaatacc

SEQ ID NO: 1558136 - DNA, 15 bp, Homo sapiens
ggtgtcccaatacct

SEQ ID NO: 1558137 - DNA, 15 bp, Homo sapiens
gtgtcccaatacctg

SEQ ID NO: 1558138 - DNA, 15 bp, Homo sapiens
tgtcccaatacctgg

SEQ ID NO: 1558139 - DNA, 15 bp, Homo sapiens
gtcccaatacctggg

SEQ ID NO: 1558140 - DNA, 15 bp, Homo sapiens
tcccaatacctgggc

SEQ ID NO: 1558141 - DNA, 15 bp, Homo sapiens
cccaatacctgggcc

SEQ ID NO: 1558142 - DNA, 15 bp, Homo sapiens
ccaatacctgggcca

SEQ ID NO: 1558143 - DNA, 15 bp, Homo sapiens
caatacctgggccag

SEQ ID NO: 1558144 - DNA, 15 bp, Homo sapiens
aatacctgggccagt

SEQ ID NO: 1558145 - DNA, 15 bp, Homo sapiens
atacctgggccagtc

SEQ ID NO: 1558146 - DNA, 15 bp, Homo sapiens
tacctgggccagtct

SEQ ID NO: 1558147 - DNA, 15 bp, Homo sapiens
acctgggccagtctt

SEQ ID NO: 1558148 - DNA, 15 bp, Homo sapiens
cctgggccagtcttc

SEQ ID NO: 1558149 - DNA, 15 bp, Homo sapiens
ctgggccagtcttct

SEQ ID NO: 1558150 - DNA, 15 bp, Homo sapiens
tgggccagtcttctc

SEQ ID NO: 1558151 - DNA, 15 bp, Homo sapiens
gggccagtcttctct

SEQ ID NO: 1558152 - DNA, 15 bp, Homo sapiens
ggccagtcttctctg

SEQ ID NO: 1558153 - DNA, 15 bp, Homo sapiens
gccagtcttctctgt

SEQ ID NO: 1558154 - DNA, 15 bp, Homo sapiens
ccagtcttctctgta

SEQ ID NO: 1558155 - DNA, 15 bp, Homo sapiens
cagtcttctctgtaa

SEQ ID NO: 1558156 - DNA, 15 bp, Homo sapiens
agtcttctctgtaag

SEQ ID NO: 1558157 - DNA, 15 bp, Homo sapiens
gtcttctctgtaagc

SEQ ID NO: 1558158 - DNA, 15 bp, Homo sapiens
tcttctctgtaagca

SEQ ID NO: 1558159 - DNA, 15 bp, Homo sapiens
cttctctgtaagcac

SEQ ID NO: 1558160 - DNA, 15 bp, Homo sapiens
ttctctgtaagcaca

SEQ ID NO: 1558161 - DNA, 15 bp, Homo sapiens
tctctgtaagcacat

SEQ ID NO: 1558162 - DNA, 15 bp, Homo sapiens
ctctgtaagcacatg

SEQ ID NO: 1558163 - DNA, 15 bp, Homo sapiens
tctgtaagcacatgg

SEQ ID NO: 1558164 - DNA, 15 bp, Homo sapiens
ctgtaagcacatggg

SEQ ID NO: 1558165 - DNA, 15 bp, Homo sapiens
tgtaagcacatggga

SEQ ID NO: 1558166 - DNA, 15 bp, Homo sapiens
gtaagcacatgggac

SEQ ID NO: 1558167 - DNA, 15 bp, Homo sapiens
taagcacatgggaca

SEQ ID NO: 1558168 - DNA, 15 bp, Homo sapiens
aagcacatgggacaa

SEQ ID NO: 1558169 - DNA, 15 bp, Homo sapiens
agcacatgggacaag

SEQ ID NO: 1558170 - DNA, 15 bp, Homo sapiens
gcacatgggacaaga

SEQ ID NO: 1558171 - DNA, 15 bp, Homo sapiens
cacatgggacaagaa

SEQ ID NO: 1558172 - DNA, 15 bp, Homo sapiens
acatgggacaagaag

SEQ ID NO: 1558173 - DNA, 15 bp, Homo sapiens
catgggacaagaagc

SEQ ID NO: 1558174 - DNA, 15 bp, Homo sapiens
atgggacaagaagcc

SEQ ID NO: 1558175 - DNA, 15 bp, Homo sapiens
tgggacaagaagcct

SEQ ID NO: 1558176 - DNA, 15 bp, Homo sapiens
gggacaagaagcctt

SEQ ID NO: 1558177 - DNA, 15 bp, Homo sapiens
ggacaagaagccttc

SEQ ID NO: 1558178 - DNA, 15 bp, Homo sapiens
gacaagaagccttcc

SEQ ID NO: 1558179 - DNA, 15 bp, Homo sapiens
acaagaagccttcct

SEQ ID NO: 1558180 - DNA, 15 bp, Homo sapiens
caagaagccttcctg

SEQ ID NO: 1558181 - DNA, 15 bp, Homo sapiens
aagaagccttcctgg

SEQ ID NO: 1558182 - DNA, 15 bp, Homo sapiens
agaagccttcctgga

SEQ ID NO: 1558183 - DNA, 15 bp, Homo sapiens
gaagccttcctggat

SEQ ID NO: 1558184 - DNA, 15 bp, Homo sapiens
aagccttcctggatg

SEQ ID NO: 1558185 - DNA, 15 bp, Homo sapiens
agccttcctggatgt

SEQ ID NO: 1558186 - DNA, 15 bp, Homo sapiens
gccttcctggatgta

SEQ ID NO: 1558187 - DNA, 15 bp, Homo sapiens
ccttcctggatgtag

SEQ ID NO: 1558188 - DNA, 15 bp, Homo sapiens
cttcctggatgtagc

SEQ ID NO: 1558189 - DNA, 15 bp, Homo sapiens
ttcctggatgtagct

SEQ ID NO: 1558190 - DNA, 15 bp, Homo sapiens
tcctggatgtagctc

SEQ ID NO: 1558191 - DNA, 15 bp, Homo sapiens
cctggatgtagctct

SEQ ID NO: 1558192 - DNA, 15 bp, Homo sapiens
ctggatgtagctctg

SEQ ID NO: 1558193 - DNA, 15 bp, Homo sapiens
tggatgtagctctgg

SEQ ID NO: 1558194 - DNA, 15 bp, Homo sapiens
ggatgtagctctggg

SEQ ID NO: 1558195 - DNA, 15 bp, Homo sapiens
gatgtagctctgggt

SEQ ID NO: 1558196 - DNA, 15 bp, Homo sapiens
atgtagctctgggta

SEQ ID NO: 1558197 - DNA, 15 bp, Homo sapiens
tgtagctctgggtac

SEQ ID NO: 1558198 - DNA, 15 bp, Homo sapiens
gtagctctgggtacc

SEQ ID NO: 1558199 - DNA, 15 bp, Homo sapiens
tagctctgggtacca

SEQ ID NO: 1558200 - DNA, 15 bp, Homo sapiens
agctctgggtaccag

SEQ ID NO: 1558201 - DNA, 15 bp, Homo sapiens
gctctgggtaccagc

SEQ ID NO: 1558202 - DNA, 15 bp, Homo sapiens
ctctgggtaccagcc

SEQ ID NO: 1558203 - DNA, 15 bp, Homo sapiens
tctgggtaccagcct

SEQ ID NO: 1558204 - DNA, 15 bp, Homo sapiens
ctgggtaccagcctg

SEQ ID NO: 1558205 - DNA, 15 bp, Homo sapiens
tgggtaccagcctgg

SEQ ID NO: 1558206 - DNA, 15 bp, Homo sapiens
gggtaccagcctggc

SEQ ID NO: 1558207 - DNA, 15 bp, Homo sapiens
ggtaccagcctggca

SEQ ID NO: 1558208 - DNA, 15 bp, Homo sapiens
gtaccagcctggcat

SEQ ID NO: 1558209 - DNA, 15 bp, Homo sapiens
taccagcctggcatt

SEQ ID NO: 1558210 - DNA, 15 bp, Homo sapiens
accagcctggcattg

SEQ ID NO: 1558211 - DNA, 15 bp, Homo sapiens
ccagcctggcattgc

SEQ ID NO: 1558212 - DNA, 15 bp, Homo sapiens
cagcctggcattgca

SEQ ID NO: 1558213 - DNA, 15 bp, Homo sapiens
agcctggcattgcag

SEQ ID NO: 1558214 - DNA, 15 bp, Homo sapiens
gcctggcattgcagc

SEQ ID NO: 1558215 - DNA, 15 bp, Homo sapiens
cctggcattgcagct

SEQ ID NO: 1558216 - DNA, 15 bp, Homo sapiens
ctggcattgcagctg

SEQ ID NO: 1558217 - DNA, 15 bp, Homo sapiens
tggcattgcagctgc

SEQ ID NO: 1558218 - DNA, 15 bp, Homo sapiens
ggcattgcagctgcc

SEQ ID NO: 1558219 - DNA, 15 bp, Homo sapiens
gcattgcagctgcca

SEQ ID NO: 1558220 - DNA, 15 bp, Homo sapiens
cattgcagctgccat

SEQ ID NO: 1558221 - DNA, 15 bp, Homo sapiens
attgcagctgccatc

SEQ ID NO: 1558222 - DNA, 15 bp, Homo sapiens
ttgcagctgccatct

SEQ ID NO: 1558223 - DNA, 15 bp, Homo sapiens
tgcagctgccatcta

SEQ ID NO: 1558224 - DNA, 15 bp, Homo sapiens
gcagctgccatctac

SEQ ID NO: 1558225 - DNA, 15 bp, Homo sapiens
cagctgccatctact

SEQ ID NO: 1558226 - DNA, 15 bp, Homo sapiens
agctgccatctactt

SEQ ID NO: 1558227 - DNA, 15 bp, Homo sapiens
gctgccatctacttg

SEQ ID NO: 1558228 - DNA, 15 bp, Homo sapiens
ctgccatctacttgg

SEQ ID NO: 1558229 - DNA, 15 bp, Homo sapiens
tgccatctacttggt

SEQ ID NO: 1558230 - DNA, 15 bp, Homo sapiens
gccatctacttggtg

SEQ ID NO: 1558231 - DNA, 15 bp, Homo sapiens
ccatctacttggtgg

SEQ ID NO: 1558232 - DNA, 15 bp, Homo sapiens
catctacttggtggc

SEQ ID NO: 1558233 - DNA, 15 bp, Homo sapiens
atctacttggtggcg

SEQ ID NO: 1558234 - DNA, 15 bp, Homo sapiens
tctacttggtggcga

SEQ ID NO: 1558235 - DNA, 15 bp, Homo sapiens
ctacttggtggcgag

SEQ ID NO: 1558236 - DNA, 15 bp, Homo sapiens
tacttggtggcgagc

SEQ ID NO: 1558237 - DNA, 15 bp, Homo sapiens
acttggtggcgagca

SEQ ID NO: 1558238 - DNA, 15 bp, Homo sapiens
cttggtggcgagcac

SEQ ID NO: 1558239 - DNA, 15 bp, Homo sapiens
ttggtggcgagcacc

SEQ ID NO: 1558240 - DNA, 15 bp, Homo sapiens
tggtggcgagcaccc

SEQ ID NO: 1558241 - DNA, 15 bp, Homo sapiens
ggtggcgagcaccct

SEQ ID NO: 1558242 - DNA, 15 bp, Homo sapiens
gtggcgagcaccctg

SEQ ID NO: 1558243 - DNA, 15 bp, Homo sapiens
tggcgagcaccctgc

SEQ ID NO: 1558244 - DNA, 15 bp, Homo sapiens
ggcgagcaccctgcc

SEQ ID NO: 1558245 - DNA, 15 bp, Homo sapiens
gcgagcaccctgcca

SEQ ID NO: 1558246 - DNA, 15 bp, Homo sapiens
cgagcaccctgccag

SEQ ID NO: 1558247 - DNA, 15 bp, Homo sapiens
gagcaccctgccagg

SEQ ID NO: 1558248 - DNA, 15 bp, Homo sapiens
agcaccctgccaggt

SEQ ID NO: 1558249 - DNA, 15 bp, Homo sapiens
gcaccctgccaggtg

SEQ ID NO: 1558250 - DNA, 15 bp, Homo sapiens
caccctgccaggtgc

SEQ ID NO: 1558251 - DNA, 15 bp, Homo sapiens
accctgccaggtgct

SEQ ID NO: 1558252 - DNA, 15 bp, Homo sapiens
ccctgccaggtgctt

SEQ ID NO: 1558253 - DNA, 15 bp, Homo sapiens
cctgccaggtgcttt

SEQ ID NO: 1558254 - DNA, 15 bp, Homo sapiens
ctgccaggtgcttta

SEQ ID NO: 1558255 - DNA, 15 bp, Homo sapiens
tgccaggtgctttac

SEQ ID NO: 1558256 - DNA, 15 bp, Homo sapiens
gccaggtgctttaca

SEQ ID NO: 1558257 - DNA, 15 bp, Homo sapiens
ccaggtgctttacat

SEQ ID NO: 1558258 - DNA, 15 bp, Homo sapiens
caggtgctttacatg

SEQ ID NO: 1558259 - DNA, 15 bp, Homo sapiens
aggtgctttacatgc

SEQ ID NO: 1558260 - DNA, 15 bp, Homo sapiens
ggtgctttacatgca

SEQ ID NO: 1558261 - DNA, 15 bp, Homo sapiens
gtgctttacatgcat

SEQ ID NO: 1558262 - DNA, 15 bp, Homo sapiens
tgctttacatgcatt

SEQ ID NO: 1558263 - DNA, 15 bp, Homo sapiens
gctttacatgcattg

SEQ ID NO: 1558264 - DNA, 15 bp, Homo sapiens
ctttacatgcattgt

SEQ ID NO: 1558265 - DNA, 15 bp, Homo sapiens
tttacatgcattgtg

SEQ ID NO: 1558266 - DNA, 15 bp, Homo sapiens
ttacatgcattgtgc

SEQ ID NO: 1558267 - DNA, 15 bp, Homo sapiens
tacatgcattgtgca

SEQ ID NO: 1558268 - DNA, 15 bp, Homo sapiens
acatgcattgtgcat

SEQ ID NO: 1558269 - DNA, 15 bp, Homo sapiens
catgcattgtgcatt

SEQ ID NO: 1558270 - DNA, 15 bp, Homo sapiens
atgcattgtgcattt

SEQ ID NO: 1558271 - DNA, 15 bp, Homo sapiens
tgcattgtgcattta

SEQ ID NO: 1558272 - DNA, 15 bp, Homo sapiens
gcattgtgcatttac

SEQ ID NO: 1558273 - DNA, 15 bp, Homo sapiens
cattgtgcatttact

SEQ ID NO: 1558274 - DNA, 15 bp, Homo sapiens
attgtgcatttactc

SEQ ID NO: 1558275 - DNA, 15 bp, Homo sapiens
ttgtgcatttactcc

SEQ ID NO: 1558276 - DNA, 15 bp, Homo sapiens
tgtgcatttactcct

SEQ ID NO: 1558277 - DNA, 15 bp, Homo sapiens
gtgcatttactcctc

SEQ ID NO: 1558278 - DNA, 15 bp, Homo sapiens
tgcatttactcctca

SEQ ID NO: 1558279 - DNA, 15 bp, Homo sapiens
gcatttactcctcac

SEQ ID NO: 1558280 - DNA, 15 bp, Homo sapiens
catttactcctcaca

SEQ ID NO: 1558281 - DNA, 15 bp, Homo sapiens
atttactcctcacag

SEQ ID NO: 1558282 - DNA, 15 bp, Homo sapiens
tttactcctcacaga

SEQ ID NO: 1558283 - DNA, 15 bp, Homo sapiens
ttactcctcacagaa

SEQ ID NO: 1558284 - DNA, 15 bp, Homo sapiens
tactcctcacagaac

SEQ ID NO: 1558285 - DNA, 15 bp, Homo sapiens
actcctcacagaacc

SEQ ID NO: 1558286 - DNA, 15 bp, Homo sapiens
ctcctcacagaaccc

SEQ ID NO: 1558287 - DNA, 15 bp, Homo sapiens
tcctcacagaaccca

SEQ ID NO: 1558288 - DNA, 15 bp, Homo sapiens
cctcacagaacccag

SEQ ID NO: 1558289 - DNA, 15 bp, Homo sapiens
ctcacagaacccagg

SEQ ID NO: 1558290 - DNA, 15 bp, Homo sapiens
tcacagaacccagga

SEQ ID NO: 1558291 - DNA, 15 bp, Homo sapiens
cacagaacccaggag

SEQ ID NO: 1558292 - DNA, 15 bp, Homo sapiens
acagaacccaggaga

SEQ ID NO: 1558293 - DNA, 15 bp, Homo sapiens
cagaacccaggagat

SEQ ID NO: 1558294 - DNA, 15 bp, Homo sapiens
agaacccaggagatg

SEQ ID NO: 1558295 - DNA, 15 bp, Homo sapiens
gaacccaggagatgt

SEQ ID NO: 1558296 - DNA, 15 bp, Homo sapiens
aacccaggagatgtg

SEQ ID NO: 1558297 - DNA, 15 bp, Homo sapiens
acccaggagatgtgc

SEQ ID NO: 1558298 - DNA, 15 bp, Homo sapiens
cccaggagatgtgca

SEQ ID NO: 1558299 - DNA, 15 bp, Homo sapiens
ccaggagatgtgcag

SEQ ID NO: 1558300 - DNA, 15 bp, Homo sapiens
caggagatgtgcagg

SEQ ID NO: 1558301 - DNA, 15 bp, Homo sapiens
aggagatgtgcaggg

SEQ ID NO: 1558302 - DNA, 15 bp, Homo sapiens
ggagatgtgcagggt

SEQ ID NO: 1558303 - DNA, 15 bp, Homo sapiens
gagatgtgcagggtt

SEQ ID NO: 1558304 - DNA, 15 bp, Homo sapiens
agatgtgcagggtta

SEQ ID NO: 1558305 - DNA, 15 bp, Homo sapiens
gatgtgcagggttag

SEQ ID NO: 1558306 - DNA, 15 bp, Homo sapiens
atgtgcagggttagc

SEQ ID NO: 1558307 - DNA, 15 bp, Homo sapiens
tgtgcagggttagcc

SEQ ID NO: 1558308 - DNA, 15 bp, Homo sapiens
gtgcagggttagcct

SEQ ID NO: 1558309 - DNA, 15 bp, Homo sapiens
tgcagggttagcctc

SEQ ID NO: 1558310 - DNA, 15 bp, Homo sapiens
gcagggttagcctca

SEQ ID NO: 1558311 - DNA, 15 bp, Homo sapiens
cagggttagcctcac

SEQ ID NO: 1558312 - DNA, 15 bp, Homo sapiens
agggttagcctcact

SEQ ID NO: 1558313 - DNA, 15 bp, Homo sapiens
gggttagcctcactt

SEQ ID NO: 1558314 - DNA, 15 bp, Homo sapiens
ggttagcctcacttt

SEQ ID NO: 1558315 - DNA, 15 bp, Homo sapiens
gttagcctcacttta

SEQ ID NO: 1558316 - DNA, 15 bp, Homo sapiens
ttagcctcactttac

SEQ ID NO: 1558317 - DNA, 15 bp, Homo sapiens
tagcctcactttaca

SEQ ID NO: 1558318 - DNA, 15 bp, Homo sapiens
agcctcactttacag

SEQ ID NO: 1558319 - DNA, 15 bp, Homo sapiens
gcctcactttacaga

SEQ ID NO: 1558320 - DNA, 15 bp, Homo sapiens
cctcactttacagag

SEQ ID NO: 1558321 - DNA, 15 bp, Homo sapiens
ctcactttacagagg

SEQ ID NO: 1558322 - DNA, 15 bp, Homo sapiens
tcactttacagagga

SEQ ID NO: 1558323 - DNA, 15 bp, Homo sapiens
cactttacagaggag

SEQ ID NO: 1558324 - DNA, 15 bp, Homo sapiens
actttacagaggaga

SEQ ID NO: 1558325 - DNA, 15 bp, Homo sapiens
ctttacagaggagac

SEQ ID NO: 1558326 - DNA, 15 bp, Homo sapiens
tttacagaggagact

SEQ ID NO: 1558327 - DNA, 15 bp, Homo sapiens
ttacagaggagactc

SEQ ID NO: 1558328 - DNA, 15 bp, Homo sapiens
tacagaggagactca

SEQ ID NO: 1558329 - DNA, 15 bp, Homo sapiens
acagaggagactcag

SEQ ID NO: 1558330 - DNA, 15 bp, Homo sapiens
cagaggagactcaga

SEQ ID NO: 1558331 - DNA, 15 bp, Homo sapiens
agaggagactcagag

SEQ ID NO: 1558332 - DNA, 15 bp, Homo sapiens
gaggagactcagagg

SEQ ID NO: 1558333 - DNA, 15 bp, Homo sapiens
aggagactcagaggt

SEQ ID NO: 1558334 - DNA, 15 bp, Homo sapiens
ggagactcagaggtg

SEQ ID NO: 1558335 - DNA, 15 bp, Homo sapiens
gagactcagaggtgt

SEQ ID NO: 1558336 - DNA, 15 bp, Homo sapiens
agactcagaggtgtt

SEQ ID NO: 1558337 - DNA, 15 bp, Homo sapiens
gactcagaggtgtta

SEQ ID NO: 1558338 - DNA, 15 bp, Homo sapiens
actcagaggtgttaa

SEQ ID NO: 1558339 - DNA, 15 bp, Homo sapiens
ctcagaggtgttaaa

SEQ ID NO: 1558340 - DNA, 15 bp, Homo sapiens
tcagaggtgttaaaa

SEQ ID NO: 1558341 - DNA, 15 bp, Homo sapiens
cagaggtgttaaaac

SEQ ID NO: 1558342 - DNA, 15 bp, Homo sapiens
agaggtgttaaaacc

SEQ ID NO: 1558343 - DNA, 15 bp, Homo sapiens
gaggtgttaaaacca

SEQ ID NO: 1558344 - DNA, 15 bp, Homo sapiens
aggtgttaaaaccag

SEQ ID NO: 1558345 - DNA, 15 bp, Homo sapiens
ggtgttaaaaccaga

SEQ ID NO: 1558346 - DNA, 15 bp, Homo sapiens
gtgttaaaaccagag

SEQ ID NO: 1558347 - DNA, 15 bp, Homo sapiens
tgttaaaaccagagt

SEQ ID NO: 1558348 - DNA, 15 bp, Homo sapiens
gttaaaaccagagtt

SEQ ID NO: 1558349 - DNA, 15 bp, Homo sapiens
ttaaaaccagagtta

SEQ ID NO: 1558350 - DNA, 15 bp, Homo sapiens
taaaaccagagttac

SEQ ID NO: 1558351 - DNA, 15 bp, Homo sapiens
aaaaccagagttacg

SEQ ID NO: 1558352 - DNA, 15 bp, Homo sapiens
aaaccagagttacgg

SEQ ID NO: 1558353 - DNA, 15 bp, Homo sapiens
aaccagagttacggt

SEQ ID NO: 1558354 - DNA, 15 bp, Homo sapiens
accagagttacggtg

SEQ ID NO: 1558355 - DNA, 15 bp, Homo sapiens
ccagagttacggtgt

SEQ ID NO: 1558356 - DNA, 15 bp, Homo sapiens
cagagttacggtgtc

SEQ ID NO: 1558357 - DNA, 15 bp, Homo sapiens
agagttacggtgtca

SEQ ID NO: 1558358 - DNA, 15 bp, Homo sapiens
gagttacggtgtcac

SEQ ID NO: 1558359 - DNA, 15 bp, Homo sapiens
agttacggtgtcaca

SEQ ID NO: 1558360 - DNA, 15 bp, Homo sapiens
gttacggtgtcacag

SEQ ID NO: 1558361 - DNA, 15 bp, Homo sapiens
ttacggtgtcacagt

SEQ ID NO: 1558362 - DNA, 15 bp, Homo sapiens
tacggtgtcacagtt

SEQ ID NO: 1558363 - DNA, 15 bp, Homo sapiens
acggtgtcacagttt

SEQ ID NO: 1558364 - DNA, 15 bp, Homo sapiens
cggtgtcacagtttc

SEQ ID NO: 1558365 - DNA, 15 bp, Homo sapiens
ggtgtcacagtttca

SEQ ID NO: 1558366 - DNA, 15 bp, Homo sapiens
gtgtcacagtttcaa

SEQ ID NO: 1558367 - DNA, 15 bp, Homo sapiens
tgtcacagtttcaaa

SEQ ID NO: 1558368 - DNA, 15 bp, Homo sapiens
gtcacagtttcaaag

SEQ ID NO: 1558369 - DNA, 15 bp, Homo sapiens
tcacagtttcaaaga

SEQ ID NO: 1558370 - DNA, 15 bp, Homo sapiens
cacagtttcaaagaa

SEQ ID NO: 1558371 - DNA, 15 bp, Homo sapiens
acagtttcaaagaaa

SEQ ID NO: 1558372 - DNA, 15 bp, Homo sapiens
cagtttcaaagaaaa

SEQ ID NO: 1558373 - DNA, 15 bp, Homo sapiens
agtttcaaagaaaag

SEQ ID NO: 1558374 - DNA, 15 bp, Homo sapiens
gtttcaaagaaaaga

SEQ ID NO: 1558375 - DNA, 15 bp, Homo sapiens
tttcaaagaaaagaa

SEQ ID NO: 1558376 - DNA, 15 bp, Homo sapiens
ttcaaagaaaagaac

SEQ ID NO: 1558377 - DNA, 15 bp, Homo sapiens
tcaaagaaaagaact

SEQ ID NO: 1558378 - DNA, 15 bp, Homo sapiens
aaagaaaagaactga

SEQ ID NO: 1558379 - DNA, 15 bp, Homo sapiens
aagaaaagaactgat

SEQ ID NO: 1558380 - DNA, 15 bp, Homo sapiens
agaaaagaactgatc

SEQ ID NO: 1558381 - DNA, 15 bp, Homo sapiens
gaaaagaactgatcc

SEQ ID NO: 1558382 - DNA, 15 bp, Homo sapiens
aaaagaactgatcct

SEQ ID NO: 1558383 - DNA, 15 bp, Homo sapiens
aaagaactgatcctc

SEQ ID NO: 1558384 - DNA, 15 bp, Homo sapiens
aagaactgatcctct

SEQ ID NO: 1558385 - DNA, 15 bp, Homo sapiens
agaactgatcctctc

SEQ ID NO: 1558386 - DNA, 15 bp, Homo sapiens
gaactgatcctctcc

SEQ ID NO: 1558387 - DNA, 15 bp, Homo sapiens
aactgatcctctcca

SEQ ID NO: 1558388 - DNA, 15 bp, Homo sapiens
actgatcctctccac

SEQ ID NO: 1558389 - DNA, 15 bp, Homo sapiens
ctgatcctctccact

SEQ ID NO: 1558390 - DNA, 15 bp, Homo sapiens
tgatcctctccacta

SEQ ID NO: 1558391 - DNA, 15 bp, Homo sapiens
gatcctctccactag

SEQ ID NO: 1558392 - DNA, 15 bp, Homo sapiens
atcctctccactagc

SEQ ID NO: 1558393 - DNA, 15 bp, Homo sapiens
tcctctccactagca

SEQ ID NO: 1558394 - DNA, 15 bp, Homo sapiens
cctctccactagcat

SEQ ID NO: 1558395 - DNA, 15 bp, Homo sapiens
ctctccactagcatt

SEQ ID NO: 1558396 - DNA, 15 bp, Homo sapiens
tctccactagcatta

SEQ ID NO: 1558397 - DNA, 15 bp, Homo sapiens
ctccactagcattag

SEQ ID NO: 1558398 - DNA, 15 bp, Homo sapiens
tccactagcattaga

SEQ ID NO: 1558399 - DNA, 15 bp, Homo sapiens
ccactagcattagat

SEQ ID NO: 1558400 - DNA, 15 bp, Homo sapiens
cactagcattagatg

SEQ ID NO: 1558401 - DNA, 15 bp, Homo sapiens
actagcattagatga

SEQ ID NO: 1558402 - DNA, 15 bp, Homo sapiens
ctagcattagatgat

SEQ ID NO: 1558403 - DNA, 15 bp, Homo sapiens
tagcattagatgatg

SEQ ID NO: 1558404 - DNA, 15 bp, Homo sapiens
agcattagatgatgc

SEQ ID NO: 1558405 - DNA, 15 bp, Homo sapiens
gcattagatgatgct

SEQ ID NO: 1558406 - DNA, 15 bp, Homo sapiens
cattagatgatgcta

SEQ ID NO: 1558407 - DNA, 15 bp, Homo sapiens
attagatgatgctaa

SEQ ID NO: 1558408 - DNA, 15 bp, Homo sapiens
ttagatgatgctaag

SEQ ID NO: 1558409 - DNA, 15 bp, Homo sapiens
tagatgatgctaagg

SEQ ID NO: 1558410 - DNA, 15 bp, Homo sapiens
agatgatgctaaggg

SEQ ID NO: 1558411 - DNA, 15 bp, Homo sapiens
gatgatgctaagggg

SEQ ID NO: 1558412 - DNA, 15 bp, Homo sapiens
atgatgctaaggggg

SEQ ID NO: 1558413 - DNA, 15 bp, Homo sapiens
tgatgctaagggggt

SEQ ID NO: 1558414 - DNA, 15 bp, Homo sapiens
gatgctaagggggtg

SEQ ID NO: 1558415 - DNA, 15 bp, Homo sapiens
atgctaagggggtgt

SEQ ID NO: 1558416 - DNA, 15 bp, Homo sapiens
tgctaagggggtgta

SEQ ID NO: 1558417 - DNA, 15 bp, Homo sapiens
gctaagggggtgtaa

SEQ ID NO: 1558418 - DNA, 15 bp, Homo sapiens
ctaagggggtgtaaa

SEQ ID NO: 1558419 - DNA, 15 bp, Homo sapiens
taagggggtgtaaaa

SEQ ID NO: 1558420 - DNA, 15 bp, Homo sapiens
aagggggtgtaaaaa

SEQ ID NO: 1558421 - DNA, 15 bp, Homo sapiens
agggggtgtaaaaat

SEQ ID NO: 1558422 - DNA, 15 bp, Homo sapiens
gggggtgtaaaaata

SEQ ID NO: 1558423 - DNA, 15 bp, Homo sapiens
ggggtgtaaaaatac

SEQ ID NO: 1558424 - DNA, 15 bp, Homo sapiens
gggtgtaaaaataca

SEQ ID NO: 1558425 - DNA, 15 bp, Homo sapiens
ggtgtaaaaatacaa

SEQ ID NO: 1558426 - DNA, 15 bp, Homo sapiens
gtgtaaaaatacaaa

SEQ ID NO: 1558427 - DNA, 15 bp, Homo sapiens
tgtaaaaatacaaaa

SEQ ID NO: 1558428 - DNA, 15 bp, Homo sapiens
gtaaaaatacaaaaa

SEQ ID NO: 1558429 - DNA, 15 bp, Homo sapiens
aatacaaaaaaactg

SEQ ID NO: 1558430 - DNA, 15 bp, Homo sapiens
atacaaaaaaactgg

SEQ ID NO: 1558431 - DNA, 15 bp, Homo sapiens
tacaaaaaaactggt

SEQ ID NO: 1558432 - DNA, 15 bp, Homo sapiens
acaaaaaaactggtc

SEQ ID NO: 1558433 - DNA, 15 bp, Homo sapiens
caaaaaaactggtcc

SEQ ID NO: 1558434 - DNA, 15 bp, Homo sapiens
aaaaaaactggtccc

SEQ ID NO: 1558435 - DNA, 15 bp, Homo sapiens
aaaaaactggtccct

SEQ ID NO: 1558436 - DNA, 15 bp, Homo sapiens
aaaaactggtccctg

SEQ ID NO: 1558437 - DNA, 15 bp, Homo sapiens
aaaactggtccctgc

SEQ ID NO: 1558438 - DNA, 15 bp, Homo sapiens
aaactggtccctgcc

SEQ ID NO: 1558439 - DNA, 15 bp, Homo sapiens
aactggtccctgcct

SEQ ID NO: 1558440 - DNA, 15 bp, Homo sapiens
actggtccctgcctg

SEQ ID NO: 1558441 - DNA, 15 bp, Homo sapiens
ctggtccctgcctgc

SEQ ID NO: 1558442 - DNA, 15 bp, Homo sapiens
tggtccctgcctgcc

SEQ ID NO: 1558443 - DNA, 15 bp, Homo sapiens
ggtccctgcctgccc

SEQ ID NO: 1558444 - DNA, 15 bp, Homo sapiens
gtccctgcctgcccc

SEQ ID NO: 1558445 - DNA, 15 bp, Homo sapiens
tccctgcctgcccct

SEQ ID NO: 1558446 - DNA, 15 bp, Homo sapiens
ccctgcctgcccctc

SEQ ID NO: 1558447 - DNA, 15 bp, Homo sapiens
cctgcctgcccctca

SEQ ID NO: 1558448 - DNA, 15 bp, Homo sapiens
ctgcctgcccctcaa

SEQ ID NO: 1558449 - DNA, 15 bp, Homo sapiens
tgcctgcccctcaag

SEQ ID NO: 1558450 - DNA, 15 bp, Homo sapiens
gcctgcccctcaaga

SEQ ID NO: 1558451 - DNA, 15 bp, Homo sapiens
cctgcccctcaagag

SEQ ID NO: 1558452 - DNA, 15 bp, Homo sapiens
ctgcccctcaagagt

SEQ ID NO: 1558453 - DNA, 15 bp, Homo sapiens
tgcccctcaagagtg

SEQ ID NO: 1558454 - DNA, 15 bp, Homo sapiens
gcccctcaagagtgt

SEQ ID NO: 1558455 - DNA, 15 bp, Homo sapiens
cccctcaagagtgtc

SEQ ID NO: 1558456 - DNA, 15 bp, Homo sapiens
ccctcaagagtgtca

SEQ ID NO: 1558457 - DNA, 15 bp, Homo sapiens
cctcaagagtgtcat

SEQ ID NO: 1558458 - DNA, 15 bp, Homo sapiens
ctcaagagtgtcatg

SEQ ID NO: 1558459 - DNA, 15 bp, Homo sapiens
tcaagagtgtcatga

SEQ ID NO: 1558460 - DNA, 15 bp, Homo sapiens
caagagtgtcatgag

SEQ ID NO: 1558461 - DNA, 15 bp, Homo sapiens
aagagtgtcatgaga

SEQ ID NO: 1558462 - DNA, 15 bp, Homo sapiens
agagtgtcatgagat

SEQ ID NO: 1558463 - DNA, 15 bp, Homo sapiens
gagtgtcatgagatg

SEQ ID NO: 1558464 - DNA, 15 bp, Homo sapiens
agtgtcatgagatgc

SEQ ID NO: 1558465 - DNA, 15 bp, Homo sapiens
gtgtcatgagatgcc

SEQ ID NO: 1558466 - DNA, 15 bp, Homo sapiens
tgtcatgagatgcct

SEQ ID NO: 1558467 - DNA, 15 bp, Homo sapiens
gtcatgagatgcctg

SEQ ID NO: 1558468 - DNA, 15 bp, Homo sapiens
tcatgagatgcctgc

SEQ ID NO: 1558469 - DNA, 15 bp, Homo sapiens
catgagatgcctgca

SEQ ID NO: 1558470 - DNA, 15 bp, Homo sapiens
atgagatgcctgcac

SEQ ID NO: 1558471 - DNA, 15 bp, Homo sapiens
tgagatgcctgcaca

SEQ ID NO: 1558472 - DNA, 15 bp, Homo sapiens
gagatgcctgcacac

SEQ ID NO: 1558473 - DNA, 15 bp, Homo sapiens
agatgcctgcacaca

SEQ ID NO: 1558474 - DNA, 15 bp, Homo sapiens
gatgcctgcacacat

SEQ ID NO: 1558475 - DNA, 15 bp, Homo sapiens
atgcctgcacacatg

SEQ ID NO: 1558476 - DNA, 15 bp, Homo sapiens
tgcctgcacacatgt

SEQ ID NO: 1558477 - DNA, 15 bp, Homo sapiens
gcctgcacacatgtg

SEQ ID NO: 1558478 - DNA, 15 bp, Homo sapiens
cctgcacacatgtgg

SEQ ID NO: 1558479 - DNA, 15 bp, Homo sapiens
ctgcacacatgtggg

SEQ ID NO: 1558480 - DNA, 15 bp, Homo sapiens
tgcacacatgtgggc

SEQ ID NO: 1558481 - DNA, 15 bp, Homo sapiens
gcacacatgtgggct

SEQ ID NO: 1558482 - DNA, 15 bp, Homo sapiens
cacacatgtgggctc

SEQ ID NO: 1558483 - DNA, 15 bp, Homo sapiens
acacatgtgggctca

SEQ ID NO: 1558484 - DNA, 15 bp, Homo sapiens
cacatgtgggctcat

SEQ ID NO: 1558485 - DNA, 15 bp, Homo sapiens
acatgtgggctcatg

SEQ ID NO: 1558486 - DNA, 15 bp, Homo sapiens
catgtgggctcatgt

SEQ ID NO: 1558487 - DNA, 15 bp, Homo sapiens
atgtgggctcatgtg

SEQ ID NO: 1558488 - DNA, 15 bp, Homo sapiens
tgtgggctcatgtgt

SEQ ID NO: 1558489 - DNA, 15 bp, Homo sapiens
gtgggctcatgtgtg

SEQ ID NO: 1558490 - DNA, 15 bp, Homo sapiens
tgggctcatgtgtgt

SEQ ID NO: 1558491 - DNA, 15 bp, Homo sapiens
gggctcatgtgtgtg

SEQ ID NO: 1558492 - DNA, 15 bp, Homo sapiens
ggctcatgtgtgtgt

SEQ ID NO: 1558493 - DNA, 15 bp, Homo sapiens
gctcatgtgtgtgta

SEQ ID NO: 1558494 - DNA, 15 bp, Homo sapiens
ctcatgtgtgtgtat

SEQ ID NO: 1558495 - DNA, 15 bp, Homo sapiens
tcatgtgtgtgtatt

SEQ ID NO: 1558496 - DNA, 15 bp, Homo sapiens
catgtgtgtgtattt

SEQ ID NO: 1558497 - DNA, 15 bp, Homo sapiens
atgtgtgtgtattta

SEQ ID NO: 1558498 - DNA, 15 bp, Homo sapiens
tgtgtgtgtatttac

SEQ ID NO: 1558499 - DNA, 15 bp, Homo sapiens
gtgtgtgtatttaca

SEQ ID NO: 1558500 - DNA, 15 bp, Homo sapiens
tgtgtgtatttacat

SEQ ID NO: 1558501 - DNA, 15 bp, Homo sapiens
gtgtgtatttacata

SEQ ID NO: 1558502 - DNA, 15 bp, Homo sapiens
tgtgtatttacatac

SEQ ID NO: 1558503 - DNA, 15 bp, Homo sapiens
gtgtatttacataca

SEQ ID NO: 1558504 - DNA, 15 bp, Homo sapiens
tgtatttacatacat

SEQ ID NO: 1558505 - DNA, 15 bp, Homo sapiens
gtatttacatacatg

SEQ ID NO: 1558506 - DNA, 15 bp, Homo sapiens
atttacatacatgtg

SEQ ID NO: 1558507 - DNA, 15 bp, Homo sapiens
tttacatacatgtgc

SEQ ID NO: 1558508 - DNA, 15 bp, Homo sapiens
ttacatacatgtgca

SEQ ID NO: 1558509 - DNA, 15 bp, Homo sapiens
tacatacatgtgcag

SEQ ID NO: 1558510 - DNA, 15 bp, Homo sapiens
acatacatgtgcaga

SEQ ID NO: 1558511 - DNA, 15 bp, Homo sapiens
catacatgtgcagac

SEQ ID NO: 1558512 - DNA, 15 bp, Homo sapiens
atacatgtgcagaca

SEQ ID NO: 1558513 - DNA, 15 bp, Homo sapiens
tacatgtgcagacat

SEQ ID NO: 1558514 - DNA, 15 bp, Homo sapiens
acatgtgcagacata

SEQ ID NO: 1558515 - DNA, 15 bp, Homo sapiens
catgtgcagacatac

SEQ ID NO: 1558516 - DNA, 15 bp, Homo sapiens
atgtgcagacataca

SEQ ID NO: 1558517 - DNA, 15 bp, Homo sapiens
tgtgcagacatacag

SEQ ID NO: 1558518 - DNA, 15 bp, Homo sapiens
gtgcagacatacaga

SEQ ID NO: 1558519 - DNA, 15 bp, Homo sapiens
tgcagacatacagaa

SEQ ID NO: 1558520 - DNA, 15 bp, Homo sapiens
gcagacatacagaac

SEQ ID NO: 1558521 - DNA, 15 bp, Homo sapiens
cagacatacagaaca

SEQ ID NO: 1558522 - DNA, 15 bp, Homo sapiens
agacatacagaacac

SEQ ID NO: 1558523 - DNA, 15 bp, Homo sapiens
gacatacagaacaca

SEQ ID NO: 1558524 - DNA, 15 bp, Homo sapiens
acatacagaacacaa

SEQ ID NO: 1558525 - DNA, 15 bp, Homo sapiens
catacagaacacaat

SEQ ID NO: 1558526 - DNA, 15 bp, Homo sapiens
atacagaacacaatt

SEQ ID NO: 1558527 - DNA, 15 bp, Homo sapiens
tacagaacacaattc

SEQ ID NO: 1558528 - DNA, 15 bp, Homo sapiens
acagaacacaattct

SEQ ID NO: 1558529 - DNA, 15 bp, Homo sapiens
cagaacacaattctg

SEQ ID NO: 1558530 - DNA, 15 bp, Homo sapiens
agaacacaattctgg

SEQ ID NO: 1558531 - DNA, 15 bp, Homo sapiens
gaacacaattctgga

SEQ ID NO: 1558532 - DNA, 15 bp, Homo sapiens
aacacaattctggag

SEQ ID NO: 1558533 - DNA, 15 bp, Homo sapiens
acacaattctggagc

SEQ ID NO: 1558534 - DNA, 15 bp, Homo sapiens
cacaattctggagcc

SEQ ID NO: 1558535 - DNA, 15 bp, Homo sapiens
acaattctggagccc

SEQ ID NO: 1558536 - DNA, 15 bp, Homo sapiens
caattctggagccct

SEQ ID NO: 1558537 - DNA, 15 bp, Homo sapiens
aattctggagccctg

SEQ ID NO: 1558538 - DNA, 15 bp, Homo sapiens
attctggagccctgg

SEQ ID NO: 1558539 - DNA, 15 bp, Homo sapiens
ttctggagccctggg

SEQ ID NO: 1558540 - DNA, 15 bp, Homo sapiens
tctggagccctgggt

SEQ ID NO: 1558541 - DNA, 15 bp, Homo sapiens
ctggagccctgggtc

SEQ ID NO: 1558542 - DNA, 15 bp, Homo sapiens
tggagccctgggtct

SEQ ID NO: 1558543 - DNA, 15 bp, Homo sapiens
ggagccctgggtctc

SEQ ID NO: 1558544 - DNA, 15 bp, Homo sapiens
gagccctgggtctcc

SEQ ID NO: 1558545 - DNA, 15 bp, Homo sapiens
agccctgggtctcct

SEQ ID NO: 1558546 - DNA, 15 bp, Homo sapiens
gccctgggtctcctt

SEQ ID NO: 1558547 - DNA, 15 bp, Homo sapiens
ccctgggtctccttc

SEQ ID NO: 1558548 - DNA, 15 bp, Homo sapiens
cctgggtctccttca

SEQ ID NO: 1558549 - DNA, 15 bp, Homo sapiens
ctgggtctccttcat

SEQ ID NO: 1558550 - DNA, 15 bp, Homo sapiens
tgggtctccttcatg

SEQ ID NO: 1558551 - DNA, 15 bp, Homo sapiens
gggtctccttcatga

SEQ ID NO: 1558552 - DNA, 15 bp, Homo sapiens
ggtctccttcatgaa

SEQ ID NO: 1558553 - DNA, 15 bp, Homo sapiens
gtctccttcatgaac

SEQ ID NO: 1558554 - DNA, 15 bp, Homo sapiens
tctccttcatgaaca

SEQ ID NO: 1558555 - DNA, 15 bp, Homo sapiens
ctccttcatgaacag

SEQ ID NO: 1558556 - DNA, 15 bp, Homo sapiens
tccttcatgaacaga

SEQ ID NO: 1558557 - DNA, 15 bp, Homo sapiens
ccttcatgaacagat

SEQ ID NO: 1558558 - DNA, 15 bp, Homo sapiens
cttcatgaacagatg

SEQ ID NO: 1558559 - DNA, 15 bp, Homo sapiens
ttcatgaacagatgg

SEQ ID NO: 1558560 - DNA, 15 bp, Homo sapiens
tcatgaacagatggg

SEQ ID NO: 1558561 - DNA, 15 bp, Homo sapiens
catgaacagatgggg

SEQ ID NO: 1558562 - DNA, 15 bp, Homo sapiens
atgaacagatggggc

SEQ ID NO: 1558563 - DNA, 15 bp, Homo sapiens
tgaacagatggggct

SEQ ID NO: 1558564 - DNA, 15 bp, Homo sapiens
gaacagatggggctg

SEQ ID NO: 1558565 - DNA, 15 bp, Homo sapiens
aacagatggggctgg

SEQ ID NO: 1558566 - DNA, 15 bp, Homo sapiens
acagatggggctgga

SEQ ID NO: 1558567 - DNA, 15 bp, Homo sapiens
cagatggggctggag

SEQ ID NO: 1558568 - DNA, 15 bp, Homo sapiens
agatggggctggagt

SEQ ID NO: 1558569 - DNA, 15 bp, Homo sapiens
gatggggctggagtg

SEQ ID NO: 1558570 - DNA, 15 bp, Homo sapiens
atggggctggagtgg

SEQ ID NO: 1558571 - DNA, 15 bp, Homo sapiens
tggggctggagtggg

SEQ ID NO: 1558572 - DNA, 15 bp, Homo sapiens
ggggctggagtgggg

SEQ ID NO: 1558573 - DNA, 15 bp, Homo sapiens
gggctggagtgggga

SEQ ID NO: 1558574 - DNA, 15 bp, Homo sapiens
ggctggagtggggaa

SEQ ID NO: 1558575 - DNA, 15 bp, Homo sapiens
gctggagtggggaat

SEQ ID NO: 1558576 - DNA, 15 bp, Homo sapiens
ctggagtggggaata

SEQ ID NO: 1558577 - DNA, 15 bp, Homo sapiens
tggagtggggaatat

SEQ ID NO: 1558578 - DNA, 15 bp, Homo sapiens
ggagtggggaatatt

SEQ ID NO: 1558579 - DNA, 15 bp, Homo sapiens
gagtggggaatattc

SEQ ID NO: 1558580 - DNA, 15 bp, Homo sapiens
agtggggaatattct

SEQ ID NO: 1558581 - DNA, 15 bp, Homo sapiens
gtggggaatattctc

SEQ ID NO: 1558582 - DNA, 15 bp, Homo sapiens
tggggaatattctcc

SEQ ID NO: 1558583 - DNA, 15 bp, Homo sapiens
ggggaatattctcca

SEQ ID NO: 1558584 - DNA, 15 bp, Homo sapiens
gggaatattctccat

SEQ ID NO: 1558585 - DNA, 15 bp, Homo sapiens
ggaatattctccatg

SEQ ID NO: 1558586 - DNA, 15 bp, Homo sapiens
gaatattctccatga

SEQ ID NO: 1558587 - DNA, 15 bp, Homo sapiens
aatattctccatgat

SEQ ID NO: 1558588 - DNA, 15 bp, Homo sapiens
atattctccatgatc

SEQ ID NO: 1558589 - DNA, 15 bp, Homo sapiens
tattctccatgatca

SEQ ID NO: 1558590 - DNA, 15 bp, Homo sapiens
attctccatgatcag

SEQ ID NO: 1558591 - DNA, 15 bp, Homo sapiens
ttctccatgatcaga

SEQ ID NO: 1558592 - DNA, 15 bp, Homo sapiens
tctccatgatcagag

SEQ ID NO: 1558593 - DNA, 15 bp, Homo sapiens
ctccatgatcagagt

SEQ ID NO: 1558594 - DNA, 15 bp, Homo sapiens
tccatgatcagagtc

SEQ ID NO: 1558595 - DNA, 15 bp, Homo sapiens
ccatgatcagagtca

SEQ ID NO: 1558596 - DNA, 15 bp, Homo sapiens
catgatcagagtcat

SEQ ID NO: 1558597 - DNA, 15 bp, Homo sapiens
atgatcagagtcatt

SEQ ID NO: 1558598 - DNA, 15 bp, Homo sapiens
tgatcagagtcattg

SEQ ID NO: 1558599 - DNA, 15 bp, Homo sapiens
gatcagagtcattgt

SEQ ID NO: 1558600 - DNA, 15 bp, Homo sapiens
atcagagtcattgta

SEQ ID NO: 1558601 - DNA, 15 bp, Homo sapiens
tcagagtcattgtac

SEQ ID NO: 1558602 - DNA, 15 bp, Homo sapiens
cagagtcattgtact

SEQ ID NO: 1558603 - DNA, 15 bp, Homo sapiens
agagtcattgtactt

SEQ ID NO: 1558604 - DNA, 15 bp, Homo sapiens
gagtcattgtacttc

SEQ ID NO: 1558605 - DNA, 15 bp, Homo sapiens
agtcattgtacttca

SEQ ID NO: 1558606 - DNA, 15 bp, Homo sapiens
gtcattgtacttcac

SEQ ID NO: 1558607 - DNA, 15 bp, Homo sapiens
tcattgtacttcact

SEQ ID NO: 1558608 - DNA, 15 bp, Homo sapiens
cattgtacttcactg

SEQ ID NO: 1558609 - DNA, 15 bp, Homo sapiens
attgtacttcactgg

SEQ ID NO: 1558610 - DNA, 15 bp, Homo sapiens
ttgtacttcactgga

SEQ ID NO: 1558611 - DNA, 15 bp, Homo sapiens
tgtacttcactggat

SEQ ID NO: 1558612 - DNA, 15 bp, Homo sapiens
gtacttcactggatc

SEQ ID NO: 1558613 - DNA, 15 bp, Homo sapiens
tacttcactggatca

SEQ ID NO: 1558614 - DNA, 15 bp, Homo sapiens
acttcactggatcag

SEQ ID NO: 1558615 - DNA, 15 bp, Homo sapiens
cttcactggatcagg

SEQ ID NO: 1558616 - DNA, 15 bp, Homo sapiens
ttcactggatcaggc

SEQ ID NO: 1558617 - DNA, 15 bp, Homo sapiens
tcactggatcaggcc

SEQ ID NO: 1558618 - DNA, 15 bp, Homo sapiens
cactggatcaggcct

SEQ ID NO: 1558619 - DNA, 15 bp, Homo sapiens
actggatcaggcctc

SEQ ID NO: 1558620 - DNA, 15 bp, Homo sapiens
ctggatcaggcctcc

SEQ ID NO: 1558621 - DNA, 15 bp, Homo sapiens
tggatcaggcctcct

SEQ ID NO: 1558622 - DNA, 15 bp, Homo sapiens
ggatcaggcctcctc

SEQ ID NO: 1558623 - DNA, 15 bp, Homo sapiens
gatcaggcctcctca

SEQ ID NO: 1558624 - DNA, 15 bp, Homo sapiens
atcaggcctcctcaa

SEQ ID NO: 1558625 - DNA, 15 bp, Homo sapiens
tcaggcctcctcaag

SEQ ID NO: 1558626 - DNA, 15 bp, Homo sapiens
caggcctcctcaagg

SEQ ID NO: 1558627 - DNA, 15 bp, Homo sapiens
aggcctcctcaagga

SEQ ID NO: 1558628 - DNA, 15 bp, Homo sapiens
ggcctcctcaaggag

SEQ ID NO: 1558629 - DNA, 15 bp, Homo sapiens
gcctcctcaaggaga

SEQ ID NO: 1558630 - DNA, 15 bp, Homo sapiens
cctcctcaaggagag

SEQ ID NO: 1558631 - DNA, 15 bp, Homo sapiens
ctcctcaaggagagg

SEQ ID NO: 1558632 - DNA, 15 bp, Homo sapiens
tcctcaaggagaggt

SEQ ID NO: 1558633 - DNA, 15 bp, Homo sapiens
cctcaaggagaggtt

SEQ ID NO: 1558634 - DNA, 15 bp, Homo sapiens
ctcaaggagaggttg

SEQ ID NO: 1558635 - DNA, 15 bp, Homo sapiens
tcaaggagaggttgg

SEQ ID NO: 1558636 - DNA, 15 bp, Homo sapiens
caaggagaggttgga

SEQ ID NO: 1558637 - DNA, 15 bp, Homo sapiens
aaggagaggttggat

SEQ ID NO: 1558638 - DNA, 15 bp, Homo sapiens
aggagaggttggatg

SEQ ID NO: 1558639 - DNA, 15 bp, Homo sapiens
ggagaggttggatgt

SEQ ID NO: 1558640 - DNA, 15 bp, Homo sapiens
gagaggttggatgta

SEQ ID NO: 1558641 - DNA, 15 bp, Homo sapiens
agaggttggatgtag

SEQ ID NO: 1558642 - DNA, 15 bp, Homo sapiens
gaggttggatgtagg

SEQ ID NO: 1558643 - DNA, 15 bp, Homo sapiens
aggttggatgtagga

SEQ ID NO: 1558644 - DNA, 15 bp, Homo sapiens
ggttggatgtaggat

SEQ ID NO: 1558645 - DNA, 15 bp, Homo sapiens
gttggatgtaggatc

SEQ ID NO: 1558646 - DNA, 15 bp, Homo sapiens
ttggatgtaggatct

SEQ ID NO: 1558647 - DNA, 15 bp, Homo sapiens
tggatgtaggatctc

SEQ ID NO: 1558648 - DNA, 15 bp, Homo sapiens
ggatgtaggatctct

SEQ ID NO: 1558649 - DNA, 15 bp, Homo sapiens
gatgtaggatctcta

SEQ ID NO: 1558650 - DNA, 15 bp, Homo sapiens
atgtaggatctctac

SEQ ID NO: 1558651 - DNA, 15 bp, Homo sapiens
tgtaggatctctaca

SEQ ID NO: 1558652 - DNA, 15 bp, Homo sapiens
gtaggatctctacag

SEQ ID NO: 1558653 - DNA, 15 bp, Homo sapiens
taggatctctacagc

SEQ ID NO: 1558654 - DNA, 15 bp, Homo sapiens
aggatctctacagct

SEQ ID NO: 1558655 - DNA, 15 bp, Homo sapiens
ggatctctacagctt

SEQ ID NO: 1558656 - DNA, 15 bp, Homo sapiens
gatctctacagcttc

SEQ ID NO: 1558657 - DNA, 15 bp, Homo sapiens
atctctacagcttct

SEQ ID NO: 1558658 - DNA, 15 bp, Homo sapiens
tctctacagcttctg

SEQ ID NO: 1558659 - DNA, 15 bp, Homo sapiens
ctctacagcttctgg

SEQ ID NO: 1558660 - DNA, 15 bp, Homo sapiens
tctacagcttctggg

SEQ ID NO: 1558661 - DNA, 15 bp, Homo sapiens
ctacagcttctgggc

SEQ ID NO: 1558662 - DNA, 15 bp, Homo sapiens
tacagcttctgggca

SEQ ID NO: 1558663 - DNA, 15 bp, Homo sapiens
acagcttctgggcag

SEQ ID NO: 1558664 - DNA, 15 bp, Homo sapiens
cagcttctgggcagc

SEQ ID NO: 1558665 - DNA, 15 bp, Homo sapiens
agcttctgggcagct

SEQ ID NO: 1558666 - DNA, 15 bp, Homo sapiens
gcttctgggcagctt

SEQ ID NO: 1558667 - DNA, 15 bp, Homo sapiens
cttctgggcagcttc

SEQ ID NO: 1558668 - DNA, 15 bp, Homo sapiens
ttctgggcagcttct

SEQ ID NO: 1558669 - DNA, 15 bp, Homo sapiens
tctgggcagcttctg

SEQ ID NO: 1558670 - DNA, 15 bp, Homo sapiens
ctgggcagcttctga

SEQ ID NO: 1558671 - DNA, 15 bp, Homo sapiens
tgggcagcttctgag

SEQ ID NO: 1558672 - DNA, 15 bp, Homo sapiens
gggcagcttctgagc

SEQ ID NO: 1558673 - DNA, 15 bp, Homo sapiens
ggcagcttctgagca

SEQ ID NO: 1558674 - DNA, 15 bp, Homo sapiens
gcagcttctgagcag

SEQ ID NO: 1558675 - DNA, 15 bp, Homo sapiens
cagcttctgagcagg

SEQ ID NO: 1558676 - DNA, 15 bp, Homo sapiens
agcttctgagcaggg

SEQ ID NO: 1558677 - DNA, 15 bp, Homo sapiens
gcttctgagcagggt

SEQ ID NO: 1558678 - DNA, 15 bp, Homo sapiens
cttctgagcagggtc

SEQ ID NO: 1558679 - DNA, 15 bp, Homo sapiens
ttctgagcagggtct

SEQ ID NO: 1558680 - DNA, 15 bp, Homo sapiens
tctgagcagggtctc

SEQ ID NO: 1558681 - DNA, 15 bp, Homo sapiens
ctgagcagggtctcc

SEQ ID NO: 1558682 - DNA, 15 bp, Homo sapiens
tgagcagggtctcct

SEQ ID NO: 1558683 - DNA, 15 bp, Homo sapiens
gagcagggtctcctg

SEQ ID NO: 1558684 - DNA, 15 bp, Homo sapiens
agcagggtctcctgg

SEQ ID NO: 1558685 - DNA, 15 bp, Homo sapiens
gcagggtctcctgga

SEQ ID NO: 1558686 - DNA, 15 bp, Homo sapiens
cagggtctcctggac

SEQ ID NO: 1558687 - DNA, 15 bp, Homo sapiens
agggtctcctggacc

SEQ ID NO: 1558688 - DNA, 15 bp, Homo sapiens
gggtctcctggaccc

SEQ ID NO: 1558689 - DNA, 15 bp, Homo sapiens
ggtctcctggacccc

SEQ ID NO: 1558690 - DNA, 15 bp, Homo sapiens
gtctcctggacccca

SEQ ID NO: 1558691 - DNA, 15 bp, Homo sapiens
tctcctggaccccat

SEQ ID NO: 1558692 - DNA, 15 bp, Homo sapiens
ctcctggaccccatg

SEQ ID NO: 1558693 - DNA, 15 bp, Homo sapiens
tcctggaccccatgg

SEQ ID NO: 1558694 - DNA, 15 bp, Homo sapiens
cctggaccccatggc

SEQ ID NO: 1558695 - DNA, 15 bp, Homo sapiens
ctggaccccatggca

SEQ ID NO: 1558696 - DNA, 15 bp, Homo sapiens
tggaccccatggcac

SEQ ID NO: 1558697 - DNA, 15 bp, Homo sapiens
ggaccccatggcaca

SEQ ID NO: 1558698 - DNA, 15 bp, Homo sapiens
gaccccatggcacat

SEQ ID NO: 1558699 - DNA, 15 bp, Homo sapiens
accccatggcacatg

SEQ ID NO: 1558700 - DNA, 15 bp, Homo sapiens
ccccatggcacatgc

SEQ ID NO: 1558701 - DNA, 15 bp, Homo sapiens
cccatggcacatgcc

SEQ ID NO: 1558702 - DNA, 15 bp, Homo sapiens
ccatggcacatgcct

SEQ ID NO: 1558703 - DNA, 15 bp, Homo sapiens
atggcacatgcctgg

SEQ ID NO: 1558704 - DNA, 15 bp, Homo sapiens
tggcacatgcctggg

SEQ ID NO: 1558705 - DNA, 15 bp, Homo sapiens
ggcacatgcctggga

SEQ ID NO: 1558706 - DNA, 15 bp, Homo sapiens
gcacatgcctgggag

SEQ ID NO: 1558707 - DNA, 15 bp, Homo sapiens
cacatgcctgggaga

SEQ ID NO: 1558708 - DNA, 15 bp, Homo sapiens
acatgcctgggagac

SEQ ID NO: 1558709 - DNA, 15 bp, Homo sapiens
catgcctgggagacc

SEQ ID NO: 1558710 - DNA, 15 bp, Homo sapiens
atgcctgggagaccc

SEQ ID NO: 1558711 - DNA, 15 bp, Homo sapiens
tgcctgggagaccca

SEQ ID NO: 1558712 - DNA, 15 bp, Homo sapiens
gcctgggagacccat

SEQ ID NO: 1558713 - DNA, 15 bp, Homo sapiens
cctgggagacccatg

SEQ ID NO: 1558714 - DNA, 15 bp, Homo sapiens
ctgggagacccatgg

SEQ ID NO: 1558715 - DNA, 15 bp, Homo sapiens
tgggagacccatggg

SEQ ID NO: 1558716 - DNA, 15 bp, Homo sapiens
gggagacccatgggg

SEQ ID NO: 1558717 - DNA, 15 bp, Homo sapiens
ggagacccatgggga

SEQ ID NO: 1558718 - DNA, 15 bp, Homo sapiens
gagacccatggggag

SEQ ID NO: 1558719 - DNA, 15 bp, Homo sapiens
agacccatggggaga

SEQ ID NO: 1558720 - DNA, 15 bp, Homo sapiens
gacccatggggagag

SEQ ID NO: 1558721 - DNA, 15 bp, Homo sapiens
acccatggggagagg

SEQ ID NO: 1558722 - DNA, 15 bp, Homo sapiens
cccatggggagaggc

SEQ ID NO: 1558723 - DNA, 15 bp, Homo sapiens
ccatggggagaggct

SEQ ID NO: 1558724 - DNA, 15 bp, Homo sapiens
catggggagaggcta

SEQ ID NO: 1558725 - DNA, 15 bp, Homo sapiens
atggggagaggctag

SEQ ID NO: 1558726 - DNA, 15 bp, Homo sapiens
tggggagaggctagc

SEQ ID NO: 1558727 - DNA, 15 bp, Homo sapiens
ggtctgctgtagaca

SEQ ID NO: 1558728 - DNA, 15 bp, Homo sapiens
gtctgctgtagacac

SEQ ID NO: 1558729 - DNA, 15 bp, Homo sapiens
tctgctgtagacacc

SEQ ID NO: 1558730 - DNA, 15 bp, Homo sapiens
ctgctgtagacacca

SEQ ID NO: 1558731 - DNA, 15 bp, Homo sapiens
tgctgtagacaccag

SEQ ID NO: 1558732 - DNA, 15 bp, Homo sapiens
gctgtagacaccagg

SEQ ID NO: 1558733 - DNA, 15 bp, Homo sapiens
ctgtagacaccagga

SEQ ID NO: 1558734 - DNA, 15 bp, Homo sapiens
tgtagacaccaggaa

SEQ ID NO: 1558735 - DNA, 15 bp, Homo sapiens
gtagacaccaggaag

SEQ ID NO: 1558736 - DNA, 15 bp, Homo sapiens
tagacaccaggaagg

SEQ ID NO: 1558737 - DNA, 15 bp, Homo sapiens
agacaccaggaaggc

SEQ ID NO: 1558738 - DNA, 15 bp, Homo sapiens
gacaccaggaaggct

SEQ ID NO: 1558739 - DNA, 15 bp, Homo sapiens
acaccaggaaggctg

SEQ ID NO: 1558740 - DNA, 15 bp, Homo sapiens
caccaggaaggctgg

SEQ ID NO: 1558741 - DNA, 15 bp, Homo sapiens
accaggaaggctggg

SEQ ID NO: 1558742 - DNA, 15 bp, Homo sapiens
ccaggaaggctgggg

SEQ ID NO: 1558743 - DNA, 15 bp, Homo sapiens
caggaaggctggggg

SEQ ID NO: 1558744 - DNA, 15 bp, Homo sapiens
aggaaggctgggggt

SEQ ID NO: 1558745 - DNA, 15 bp, Homo sapiens
ggaaggctgggggtt

SEQ ID NO: 1558746 - DNA, 15 bp, Homo sapiens
gaaggctgggggttg

SEQ ID NO: 1558747 - DNA, 15 bp, Homo sapiens
aaggctgggggttgc

SEQ ID NO: 1558748 - DNA, 15 bp, Homo sapiens
aggctgggggttgcc

SEQ ID NO: 1558749 - DNA, 15 bp, Homo sapiens
ggctgggggttgccg

SEQ ID NO: 1558750 - DNA, 15 bp, Homo sapiens
gctgggggttgccgt

SEQ ID NO: 1558751 - DNA, 15 bp, Homo sapiens
ctgggggttgccgtc

SEQ ID NO: 1558752 - DNA, 15 bp, Homo sapiens
tgggggttgccgtcc

SEQ ID NO: 1558753 - DNA, 15 bp, Homo sapiens
gggggttgccgtccc

SEQ ID NO: 1558754 - DNA, 15 bp, Homo sapiens
ggggttgccgtcccc

SEQ ID NO: 1558755 - DNA, 15 bp, Homo sapiens
gggttgccgtccccc

SEQ ID NO: 1558756 - DNA, 15 bp, Homo sapiens
ggttgccgtccccct

SEQ ID NO: 1558757 - DNA, 15 bp, Homo sapiens
gttgccgtccccctt

SEQ ID NO: 1558758 - DNA, 15 bp, Homo sapiens
ttgccgtcccccttc

SEQ ID NO: 1558759 - DNA, 15 bp, Homo sapiens
tgccgtcccccttct

SEQ ID NO: 1558760 - DNA, 15 bp, Homo sapiens
gccgtcccccttctc

SEQ ID NO: 1558761 - DNA, 15 bp, Homo sapiens
ccgtcccccttctca

SEQ ID NO: 1558762 - DNA, 15 bp, Homo sapiens
cgtcccccttctcaa

SEQ ID NO: 1558763 - DNA, 15 bp, Homo sapiens
gtcccccttctcaag

SEQ ID NO: 1558764 - DNA, 15 bp, Homo sapiens
tcccccttctcaagc

SEQ ID NO: 1558765 - DNA, 15 bp, Homo sapiens
cccccttctcaagca

SEQ ID NO: 1558766 - DNA, 15 bp, Homo sapiens
ccccttctcaagcat

SEQ ID NO: 1558767 - DNA, 15 bp, Homo sapiens
cccttctcaagcatc

SEQ ID NO: 1558768 - DNA, 15 bp, Homo sapiens
ccttctcaagcatcc

SEQ ID NO: 1558769 - DNA, 15 bp, Homo sapiens
cttctcaagcatcca

SEQ ID NO: 1558770 - DNA, 15 bp, Homo sapiens
ttctcaagcatccaa

SEQ ID NO: 1558771 - DNA, 15 bp, Homo sapiens
tctcaagcatccaag

SEQ ID NO: 1558772 - DNA, 15 bp, Homo sapiens
ctcaagcatccaagc

SEQ ID NO: 1558773 - DNA, 15 bp, Homo sapiens
tcaagcatccaagct

SEQ ID NO: 1558774 - DNA, 15 bp, Homo sapiens
caagcatccaagctg

SEQ ID NO: 1558775 - DNA, 15 bp, Homo sapiens
aagcatccaagctga

SEQ ID NO: 1558776 - DNA, 15 bp, Homo sapiens
agcatccaagctgaa

SEQ ID NO: 1558777 - DNA, 15 bp, Homo sapiens
gcatccaagctgaaa

SEQ ID NO: 1558778 - DNA, 15 bp, Homo sapiens
catccaagctgaaac

SEQ ID NO: 1558779 - DNA, 15 bp, Homo sapiens
atccaagctgaaact

SEQ ID NO: 1558780 - DNA, 15 bp, Homo sapiens
tccaagctgaaactg

SEQ ID NO: 1558781 - DNA, 15 bp, Homo sapiens
ccaagctgaaactgg

SEQ ID NO: 1558782 - DNA, 15 bp, Homo sapiens
caagctgaaactgga

SEQ ID NO: 1558783 - DNA, 15 bp, Homo sapiens
aagctgaaactggac

SEQ ID NO: 1558784 - DNA, 15 bp, Homo sapiens
agctgaaactggact

SEQ ID NO: 1558785 - DNA, 15 bp, Homo sapiens
gctgaaactggactg

SEQ ID NO: 1558786 - DNA, 15 bp, Homo sapiens
ctgaaactggactgt

SEQ ID NO: 1558787 - DNA, 15 bp, Homo sapiens
tgaaactggactgtg

SEQ ID NO: 1558788 - DNA, 15 bp, Homo sapiens
gaaactggactgtgc

SEQ ID NO: 1558789 - DNA, 15 bp, Homo sapiens
aaactggactgtgcg

SEQ ID NO: 1558790 - DNA, 15 bp, Homo sapiens
aactggactgtgcgc

SEQ ID NO: 1558791 - DNA, 15 bp, Homo sapiens
actggactgtgcgct

SEQ ID NO: 1558792 - DNA, 15 bp, Homo sapiens
ctggactgtgcgctg

SEQ ID NO: 1558793 - DNA, 15 bp, Homo sapiens
tggactgtgcgctgt

SEQ ID NO: 1558794 - DNA, 15 bp, Homo sapiens
ggactgtgcgctgta

SEQ ID NO: 1558795 - DNA, 15 bp, Homo sapiens
gactgtgcgctgtaa

SEQ ID NO: 1558796 - DNA, 15 bp, Homo sapiens
actgtgcgctgtaaa

SEQ ID NO: 1558797 - DNA, 15 bp, Homo sapiens
ctgtgcgctgtaaag

SEQ ID NO: 1558798 - DNA, 15 bp, Homo sapiens
tgtgcgctgtaaaga

SEQ ID NO: 1558799 - DNA, 15 bp, Homo sapiens
gtgcgctgtaaagac

SEQ ID NO: 1558800 - DNA, 15 bp, Homo sapiens
tgcgctgtaaagaca

SEQ ID NO: 1558801 - DNA, 15 bp, Homo sapiens
gcgctgtaaagacag

SEQ ID NO: 1558802 - DNA, 15 bp, Homo sapiens
cgctgtaaagacaga

SEQ ID NO: 1558803 - DNA, 15 bp, Homo sapiens
gctgtaaagacagag

SEQ ID NO: 1558804 - DNA, 15 bp, Homo sapiens
ctgtaaagacagagt

SEQ ID NO: 1558805 - DNA, 15 bp, Homo sapiens
tgtaaagacagagtc

SEQ ID NO: 1558806 - DNA, 15 bp, Homo sapiens
gtaaagacagagtct

SEQ ID NO: 1558807 - DNA, 15 bp, Homo sapiens
aagacagagtctctc

SEQ ID NO: 1558808 - DNA, 15 bp, Homo sapiens
gacagagtctctctt

SEQ ID NO: 1558809 - DNA, 15 bp, Homo sapiens
acagagtctctcttc

SEQ ID NO: 1558810 - DNA, 15 bp, Homo sapiens
cagagtctctcttct

SEQ ID NO: 1558811 - DNA, 15 bp, Homo sapiens
agagtctctcttctc

SEQ ID NO: 1558812 - DNA, 15 bp, Homo sapiens
gagtctctcttctct

SEQ ID NO: 1558813 - DNA, 15 bp, Homo sapiens
agtctctcttctctc

SEQ ID NO: 1558814 - DNA, 15 bp, Homo sapiens
gtctctcttctctct

SEQ ID NO: 1558815 - DNA, 15 bp, Homo sapiens
tctctcttctctctc

SEQ ID NO: 1558816 - DNA, 15 bp, Homo sapiens
ctctcttctctctcc

SEQ ID NO: 1558817 - DNA, 15 bp, Homo sapiens
tctcttctctctccc

SEQ ID NO: 1558818 - DNA, 15 bp, Homo sapiens
ctcttctctctccca

SEQ ID NO: 1558819 - DNA, 15 bp, Homo sapiens
tcttctctctcccat

SEQ ID NO: 1558820 - DNA, 15 bp, Homo sapiens
cttctctctcccatc

SEQ ID NO: 1558821 - DNA, 15 bp, Homo sapiens
ttctctctcccatct

SEQ ID NO: 1558822 - DNA, 15 bp, Homo sapiens
tctctctcccatctc

SEQ ID NO: 1558823 - DNA, 15 bp, Homo sapiens
ctctctcccatctcc

SEQ ID NO: 1558824 - DNA, 15 bp, Homo sapiens
tctctcccatctcct

SEQ ID NO: 1558825 - DNA, 15 bp, Homo sapiens
ctctcccatctcctg

SEQ ID NO: 1558826 - DNA, 15 bp, Homo sapiens
tctcccatctcctgt

SEQ ID NO: 1558827 - DNA, 15 bp, Homo sapiens
ctcccatctcctgtc

SEQ ID NO: 1558828 - DNA, 15 bp, Homo sapiens
tcccatctcctgtct

SEQ ID NO: 1558829 - DNA, 15 bp, Homo sapiens
cccatctcctgtctc

SEQ ID NO: 1558830 - DNA, 15 bp, Homo sapiens
ccatctcctgtctcc

SEQ ID NO: 1558831 - DNA, 15 bp, Homo sapiens
catctcctgtctccc

SEQ ID NO: 1558832 - DNA, 15 bp, Homo sapiens
atctcctgtctccct

SEQ ID NO: 1558833 - DNA, 15 bp, Homo sapiens
tctcctgtctccctg

SEQ ID NO: 1558834 - DNA, 15 bp, Homo sapiens
ctcctgtctccctgt

SEQ ID NO: 1558835 - DNA, 15 bp, Homo sapiens
tcctgtctccctgtg

SEQ ID NO: 1558836 - DNA, 15 bp, Homo sapiens
cctgtctccctgtgt

SEQ ID NO: 1558837 - DNA, 15 bp, Homo sapiens
ctgtctccctgtgtt

SEQ ID NO: 1558838 - DNA, 15 bp, Homo sapiens
tgtctccctgtgttt

SEQ ID NO: 1558839 - DNA, 15 bp, Homo sapiens
gtctccctgtgtttc

SEQ ID NO: 1558840 - DNA, 15 bp, Homo sapiens
tctccctgtgtttca

SEQ ID NO: 1558841 - DNA, 15 bp, Homo sapiens
ctccctgtgtttcac

SEQ ID NO: 1558842 - DNA, 15 bp, Homo sapiens
tccctgtgtttcacc

SEQ ID NO: 1558843 - DNA, 15 bp, Homo sapiens
ccctgtgtttcaccc

SEQ ID NO: 1558844 - DNA, 15 bp, Homo sapiens
cctgtgtttcaccct

SEQ ID NO: 1558845 - DNA, 15 bp, Homo sapiens
ctgtgtttcaccctc

SEQ ID NO: 1558846 - DNA, 15 bp, Homo sapiens
tgtgtttcaccctcc

SEQ ID NO: 1558847 - DNA, 15 bp, Homo sapiens
gtgtttcaccctccc

SEQ ID NO: 1558848 - DNA, 15 bp, Homo sapiens
tgtttcaccctccct

SEQ ID NO: 1558849 - DNA, 15 bp, Homo sapiens
gtttcaccctccctc

SEQ ID NO: 1558850 - DNA, 15 bp, Homo sapiens
tttcaccctccctct

SEQ ID NO: 1558851 - DNA, 15 bp, Homo sapiens
ttcaccctccctctc

SEQ ID NO: 1558852 - DNA, 15 bp, Homo sapiens
tcaccctccctctca

SEQ ID NO: 1558853 - DNA, 15 bp, Homo sapiens
caccctccctctcat

SEQ ID NO: 1558854 - DNA, 15 bp, Homo sapiens
accctccctctcatt

SEQ ID NO: 1558855 - DNA, 15 bp, Homo sapiens
ccctccctctcattc

SEQ ID NO: 1558856 - DNA, 15 bp, Homo sapiens
cctccctctcattct

SEQ ID NO: 1558857 - DNA, 15 bp, Homo sapiens
ctccctctcattctc

SEQ ID NO: 1558858 - DNA, 15 bp, Homo sapiens
tccctctcattctct

SEQ ID NO: 1558859 - DNA, 15 bp, Homo sapiens
ccctctcattctctt

SEQ ID NO: 1558860 - DNA, 15 bp, Homo sapiens
cctctcattctcttc

SEQ ID NO: 1558861 - DNA, 15 bp, Homo sapiens
ctctcattctcttcc

SEQ ID NO: 1558862 - DNA, 15 bp, Homo sapiens
tctcattctcttccg

SEQ ID NO: 1558863 - DNA, 15 bp, Homo sapiens
ctcattctcttccgt

SEQ ID NO: 1558864 - DNA, 15 bp, Homo sapiens
tcattctcttccgtt

SEQ ID NO: 1558865 - DNA, 15 bp, Homo sapiens
cattctcttccgtta

SEQ ID NO: 1558866 - DNA, 15 bp, Homo sapiens
attctcttccgttaa

SEQ ID NO: 1558867 - DNA, 15 bp, Homo sapiens
ttctcttccgttaaa

SEQ ID NO: 1558868 - DNA, 15 bp, Homo sapiens
tctcttccgttaaat

SEQ ID NO: 1558869 - DNA, 15 bp, Homo sapiens
ctcttccgttaaata

SEQ ID NO: 1558870 - DNA, 15 bp, Homo sapiens
tcttccgttaaataa

SEQ ID NO: 1558871 - DNA, 15 bp, Homo sapiens
cttccgttaaataat

SEQ ID NO: 1558872 - DNA, 15 bp, Homo sapiens
ttccgttaaataata

SEQ ID NO: 1558873 - DNA, 15 bp, Homo sapiens
tccgttaaataatac

SEQ ID NO: 1558874 - DNA, 15 bp, Homo sapiens
ccgttaaataatact

SEQ ID NO: 1558875 - DNA, 15 bp, Homo sapiens
cgttaaataatactg

SEQ ID NO: 1558876 - DNA, 15 bp, Homo sapiens
gttaaataatactgt

SEQ ID NO: 1558877 - DNA, 15 bp, Homo sapiens
ttaaataatactgtg

SEQ ID NO: 1558878 - DNA, 15 bp, Homo sapiens
taaataatactgtga

SEQ ID NO: 1558879 - DNA, 15 bp, Homo sapiens
aaataatactgtgat

SEQ ID NO: 1558880 - DNA, 15 bp, Homo sapiens
aataatactgtgatg

SEQ ID NO: 1558881 - DNA, 15 bp, Homo sapiens
ataatactgtgatgg

SEQ ID NO: 1558882 - DNA, 15 bp, Homo sapiens
taatactgtgatgga

SEQ ID NO: 1558883 - DNA, 15 bp, Homo sapiens
aatactgtgatggat

SEQ ID NO: 1558884 - DNA, 15 bp, Homo sapiens
atactgtgatggatt

SEQ ID NO: 1558885 - DNA, 15 bp, Homo sapiens
tactgtgatggattg

SEQ ID NO: 1558886 - DNA, 15 bp, Homo sapiens
actgtgatggattgt

SEQ ID NO: 1558887 - DNA, 15 bp, Homo sapiens
ctgtgatggattgta

SEQ ID NO: 1558888 - DNA, 15 bp, Homo sapiens
tgtgatggattgtaa

SEQ ID NO: 1558889 - DNA, 15 bp, Homo sapiens
gtgatggattgtaaa

SEQ ID NO: 1558890 - DNA, 15 bp, Homo sapiens
tgatggattgtaaaa

SEQ ID NO: 1558891 - DNA, 15 bp, Homo sapiens
gatggattgtaaaag

SEQ ID NO: 1558892 - DNA, 15 bp, Homo sapiens
atggattgtaaaagg

SEQ ID NO: 1558893 - DNA, 15 bp, Homo sapiens
tggattgtaaaaggt

SEQ ID NO: 1558894 - DNA, 15 bp, Homo sapiens
ggattgtaaaaggta

SEQ ID NO: 1558895 - DNA, 15 bp, Homo sapiens
gattgtaaaaggtac

SEQ ID NO: 1558896 - DNA, 15 bp, Homo sapiens
attgtaaaaggtact

SEQ ID NO: 1558897 - DNA, 15 bp, Homo sapiens
ttgtaaaaggtactt

SEQ ID NO: 1558898 - DNA, 15 bp, Homo sapiens
tgtaaaaggtactta

SEQ ID NO: 1558899 - DNA, 15 bp, Homo sapiens
gtaaaaggtacttag

SEQ ID NO: 1558900 - DNA, 15 bp, Homo sapiens
taaaaggtacttagc

SEQ ID NO: 1558901 - DNA, 15 bp, Homo sapiens
aaaaggtacttagct

SEQ ID NO: 1558902 - DNA, 15 bp, Homo sapiens
aaaggtacttagctg

SEQ ID NO: 1558903 - DNA, 15 bp, Homo sapiens
aaggtacttagctga

SEQ ID NO: 1558904 - DNA, 15 bp, Homo sapiens
aggtacttagctgaa

SEQ ID NO: 1558905 - DNA, 15 bp, Homo sapiens
ggtacttagctgaat

SEQ ID NO: 1558906 - DNA, 15 bp, Homo sapiens
gtacttagctgaatc

SEQ ID NO: 1558907 - DNA, 15 bp, Homo sapiens
tacttagctgaatca

SEQ ID NO: 1558908 - DNA, 15 bp, Homo sapiens
acttagctgaatcac

SEQ ID NO: 1558909 - DNA, 15 bp, Homo sapiens
cttagctgaatcaca

SEQ ID NO: 1558910 - DNA, 15 bp, Homo sapiens
ttagctgaatcacag

SEQ ID NO: 1558911 - DNA, 15 bp, Homo sapiens
tagctgaatcacaga

SEQ ID NO: 1558912 - DNA, 15 bp, Homo sapiens
agctgaatcacagag

SEQ ID NO: 1558913 - DNA, 15 bp, Homo sapiens
gctgaatcacagagt

SEQ ID NO: 1558914 - DNA, 15 bp, Homo sapiens
ctgaatcacagagtt

SEQ ID NO: 1558915 - DNA, 15 bp, Homo sapiens
tgaatcacagagttt

SEQ ID NO: 1558916 - DNA, 15 bp, Homo sapiens
gaatcacagagttta

SEQ ID NO: 1558917 - DNA, 15 bp, Homo sapiens
aatcacagagtttag

SEQ ID NO: 1558918 - DNA, 15 bp, Homo sapiens
atcacagagtttaga

SEQ ID NO: 1558919 - DNA, 15 bp, Homo sapiens
tcacagagtttagag

SEQ ID NO: 1558920 - DNA, 15 bp, Homo sapiens
cacagagtttagaga

SEQ ID NO: 1558921 - DNA, 15 bp, Homo sapiens
acagagtttagagat

SEQ ID NO: 1558922 - DNA, 15 bp, Homo sapiens
cagagtttagagatg

SEQ ID NO: 1558923 - DNA, 15 bp, Homo sapiens
agagtttagagatgg

SEQ ID NO: 1558924 - DNA, 15 bp, Homo sapiens
gagtttagagatgga

SEQ ID NO: 1558925 - DNA, 15 bp, Homo sapiens
agtttagagatggaa

SEQ ID NO: 1558926 - DNA, 15 bp, Homo sapiens
gtttagagatggaaa

SEQ ID NO: 1558927 - DNA, 15 bp, Homo sapiens
tttagagatggaaaa

SEQ ID NO: 1558928 - DNA, 15 bp, Homo sapiens
ttagagatggaaaag

SEQ ID NO: 1558929 - DNA, 15 bp, Homo sapiens
tagagatggaaaaga

SEQ ID NO: 1558930 - DNA, 15 bp, Homo sapiens
agagatggaaaagac

SEQ ID NO: 1558931 - DNA, 15 bp, Homo sapiens
gagatggaaaagacc

SEQ ID NO: 1558932 - DNA, 15 bp, Homo sapiens
agatggaaaagacca

SEQ ID NO: 1558933 - DNA, 15 bp, Homo sapiens
gatggaaaagaccaa

SEQ ID NO: 1558934 - DNA, 15 bp, Homo sapiens
atggaaaagaccaat

SEQ ID NO: 1558935 - DNA, 15 bp, Homo sapiens
tggaaaagaccaatt

SEQ ID NO: 1558936 - DNA, 15 bp, Homo sapiens
ggaaaagaccaatta

SEQ ID NO: 1558937 - DNA, 15 bp, Homo sapiens
gaaaagaccaattag

SEQ ID NO: 1558938 - DNA, 15 bp, Homo sapiens
aaaagaccaattagg

SEQ ID NO: 1558939 - DNA, 15 bp, Homo sapiens
aaagaccaattaggt

SEQ ID NO: 1558940 - DNA, 15 bp, Homo sapiens
aagaccaattaggtc

SEQ ID NO: 1558941 - DNA, 15 bp, Homo sapiens
agaccaattaggtca

SEQ ID NO: 1558942 - DNA, 15 bp, Homo sapiens
gaccaattaggtcat

SEQ ID NO: 1558943 - DNA, 15 bp, Homo sapiens
accaattaggtcatc

SEQ ID NO: 1558944 - DNA, 15 bp, Homo sapiens
ccaattaggtcatca

SEQ ID NO: 1558945 - DNA, 15 bp, Homo sapiens
caattaggtcatcaa

SEQ ID NO: 1558946 - DNA, 15 bp, Homo sapiens
aattaggtcatcaag

SEQ ID NO: 1558947 - DNA, 15 bp, Homo sapiens
attaggtcatcaagc

SEQ ID NO: 1558948 - DNA, 15 bp, Homo sapiens
ttaggtcatcaagct

SEQ ID NO: 1558949 - DNA, 15 bp, Homo sapiens
taggtcatcaagctg

SEQ ID NO: 1558950 - DNA, 15 bp, Homo sapiens
aggtcatcaagctga

SEQ ID NO: 1558951 - DNA, 15 bp, Homo sapiens
ggtcatcaagctgat

SEQ ID NO: 1558952 - DNA, 15 bp, Homo sapiens
gtcatcaagctgatc

SEQ ID NO: 1558953 - DNA, 15 bp, Homo sapiens
tcatcaagctgatct

SEQ ID NO: 1558954 - DNA, 15 bp, Homo sapiens
catcaagctgatctc

SEQ ID NO: 1558955 - DNA, 15 bp, Homo sapiens
atcaagctgatctct

SEQ ID NO: 1558956 - DNA, 15 bp, Homo sapiens
tcaagctgatctctc

SEQ ID NO: 1558957 - DNA, 15 bp, Homo sapiens
caagctgatctctct

SEQ ID NO: 1558958 - DNA, 15 bp, Homo sapiens
aagctgatctctctc

SEQ ID NO: 1558959 - DNA, 15 bp, Homo sapiens
agctgatctctctcc

SEQ ID NO: 1558960 - DNA, 15 bp, Homo sapiens
gctgatctctctcct

SEQ ID NO: 1558961 - DNA, 15 bp, Homo sapiens
ctgatctctctcctg

SEQ ID NO: 1558962 - DNA, 15 bp, Homo sapiens
tgatctctctcctga

SEQ ID NO: 1558963 - DNA, 15 bp, Homo sapiens
gatctctctcctgag

SEQ ID NO: 1558964 - DNA, 15 bp, Homo sapiens
atctctctcctgagg

SEQ ID NO: 1558965 - DNA, 15 bp, Homo sapiens
tctctctcctgagga

SEQ ID NO: 1558966 - DNA, 15 bp, Homo sapiens
ctctctcctgaggag

SEQ ID NO: 1558967 - DNA, 15 bp, Homo sapiens
tctctcctgaggagc

SEQ ID NO: 1558968 - DNA, 15 bp, Homo sapiens
ctctcctgaggagct

SEQ ID NO: 1558969 - DNA, 15 bp, Homo sapiens
tctcctgaggagctg

SEQ ID NO: 1558970 - DNA, 15 bp, Homo sapiens
ctcctgaggagctgc

SEQ ID NO: 1558971 - DNA, 15 bp, Homo sapiens
tcctgaggagctgca

SEQ ID NO: 1558972 - DNA, 15 bp, Homo sapiens
cctgaggagctgcag

SEQ ID NO: 1558973 - DNA, 15 bp, Homo sapiens
ctgaggagctgcaga

SEQ ID NO: 1558974 - DNA, 15 bp, Homo sapiens
tgaggagctgcagaa

SEQ ID NO: 1558975 - DNA, 15 bp, Homo sapiens
gaggagctgcagaaa

SEQ ID NO: 1558976 - DNA, 15 bp, Homo sapiens
aggagctgcagaaaa

SEQ ID NO: 1558977 - DNA, 15 bp, Homo sapiens
ggagctgcagaaaat

SEQ ID NO: 1558978 - DNA, 15 bp, Homo sapiens
gagctgcagaaaata

SEQ ID NO: 1558979 - DNA, 15 bp, Homo sapiens
agctgcagaaaatag

SEQ ID NO: 1558980 - DNA, 15 bp, Homo sapiens
gctgcagaaaatagg

SEQ ID NO: 1558981 - DNA, 15 bp, Homo sapiens
ctgcagaaaatagga

SEQ ID NO: 1558982 - DNA, 15 bp, Homo sapiens
tgcagaaaataggag

SEQ ID NO: 1558983 - DNA, 15 bp, Homo sapiens
gcagaaaataggaga

SEQ ID NO: 1558984 - DNA, 15 bp, Homo sapiens
cagaaaataggagac

SEQ ID NO: 1558985 - DNA, 15 bp, Homo sapiens
agaaaataggagaca

SEQ ID NO: 1558986 - DNA, 15 bp, Homo sapiens
gaaaataggagacaa

SEQ ID NO: 1558987 - DNA, 15 bp, Homo sapiens
aaaataggagacaac

SEQ ID NO: 1558988 - DNA, 15 bp, Homo sapiens
aaataggagacaaca

SEQ ID NO: 1558989 - DNA, 15 bp, Homo sapiens
aataggagacaacaa

SEQ ID NO: 1558990 - DNA, 15 bp, Homo sapiens
ataggagacaacaat

SEQ ID NO: 1558991 - DNA, 15 bp, Homo sapiens
taggagacaacaata

SEQ ID NO: 1558992 - DNA, 15 bp, Homo sapiens
aggagacaacaataa

SEQ ID NO: 1558993 - DNA, 15 bp, Homo sapiens
ggagacaacaataaa

SEQ ID NO: 1558994 - DNA, 15 bp, Homo sapiens
gagacaacaataaac

SEQ ID NO: 1558995 - DNA, 15 bp, Homo sapiens
agacaacaataaaca

SEQ ID NO: 1558996 - DNA, 15 bp, Homo sapiens
gacaacaataaacaa

SEQ ID NO: 1558997 - DNA, 15 bp, Homo sapiens
acaacaataaacaat

SEQ ID NO: 1558998 - DNA, 15 bp, Homo sapiens
caacaataaacaatt

SEQ ID NO: 1558999 - DNA, 15 bp, Homo sapiens
aacaataaacaattt

SEQ ID NO: 1559000 - DNA, 15 bp, Homo sapiens
acaataaacaatttt

SEQ ID NO: 1559001 - DNA, 15 bp, Homo sapiens
caataaacaatttta

SEQ ID NO: 1559002 - DNA, 15 bp, Homo sapiens
aataaacaattttat

SEQ ID NO: 1559003 - DNA, 15 bp, Homo sapiens
ataaacaattttatt

SEQ ID NO: 1559004 - DNA, 15 bp, Homo sapiens
taaacaattttattg

SEQ ID NO: 1559005 - DNA, 15 bp, Homo sapiens
aaacaattttattgg

SEQ ID NO: 1559006 - DNA, 15 bp, Homo sapiens
aacaattttattggg

SEQ ID NO: 1559007 - DNA, 15 bp, Homo sapiens
acaattttattggga

SEQ ID NO: 1559008 - DNA, 15 bp, Homo sapiens
caattttattgggat

SEQ ID NO: 1559009 - DNA, 15 bp, Homo sapiens
aattttattgggata

SEQ ID NO: 1559010 - DNA, 15 bp, Homo sapiens
attttattgggatat

SEQ ID NO: 1559011 - DNA, 15 bp, Homo sapiens
ttttattgggatatt

SEQ ID NO: 1559012 - DNA, 15 bp, Homo sapiens
tttattgggatatta

SEQ ID NO: 1559013 - DNA, 15 bp, Homo sapiens
ttattgggatattaa

SEQ ID NO: 1559014 - DNA, 15 bp, Homo sapiens
tattgggatattaat

SEQ ID NO: 1559015 - DNA, 15 bp, Homo sapiens
attgggatattaatt

SEQ ID NO: 1559016 - DNA, 15 bp, Homo sapiens
ttgggatattaattt

SEQ ID NO: 1559017 - DNA, 15 bp, Homo sapiens
tgggatattaattta

SEQ ID NO: 1559018 - DNA, 15 bp, Homo sapiens
gggatattaatttag

SEQ ID NO: 1559019 - DNA, 15 bp, Homo sapiens
ggatattaatttagg

SEQ ID NO: 1559020 - DNA, 15 bp, Homo sapiens
gatattaatttagga

SEQ ID NO: 1559021 - DNA, 15 bp, Homo sapiens
atattaatttaggag

SEQ ID NO: 1559022 - DNA, 15 bp, Homo sapiens
tattaatttaggagc

SEQ ID NO: 1559023 - DNA, 15 bp, Homo sapiens
attaatttaggagcc

SEQ ID NO: 1559024 - DNA, 15 bp, Homo sapiens
ttaatttaggagccc

SEQ ID NO: 1559025 - DNA, 15 bp, Homo sapiens
taatttaggagcccg

SEQ ID NO: 1559026 - DNA, 15 bp, Homo sapiens
aatttaggagcccga

SEQ ID NO: 1559027 - DNA, 15 bp, Homo sapiens
atttaggagcccgaa

SEQ ID NO: 1559028 - DNA, 15 bp, Homo sapiens
tttaggagcccgaag

SEQ ID NO: 1559029 - DNA, 15 bp, Homo sapiens
ttaggagcccgaagg

SEQ ID NO: 1559030 - DNA, 15 bp, Homo sapiens
taggagcccgaaggc

SEQ ID NO: 1559031 - DNA, 15 bp, Homo sapiens
aggagcccgaaggcc

SEQ ID NO: 1559032 - DNA, 15 bp, Homo sapiens
ggagcccgaaggcct

SEQ ID NO: 1559033 - DNA, 15 bp, Homo sapiens
gagcccgaaggcctt

SEQ ID NO: 1559034 - DNA, 15 bp, Homo sapiens
agcccgaaggccttg

SEQ ID NO: 1559035 - DNA, 15 bp, Homo sapiens
gcccgaaggccttga

SEQ ID NO: 1559036 - DNA, 15 bp, Homo sapiens
cccgaaggccttgac

SEQ ID NO: 1559037 - DNA, 15 bp, Homo sapiens
ccgaaggccttgact

SEQ ID NO: 1559038 - DNA, 15 bp, Homo sapiens
cgaaggccttgactt

SEQ ID NO: 1559039 - DNA, 15 bp, Homo sapiens
gaaggccttgacttg

SEQ ID NO: 1559040 - DNA, 15 bp, Homo sapiens
aaggccttgacttgt

SEQ ID NO: 1559041 - DNA, 15 bp, Homo sapiens
aggccttgacttgtg

SEQ ID NO: 1559042 - DNA, 15 bp, Homo sapiens
ggccttgacttgtgt

SEQ ID NO: 1559043 - DNA, 15 bp, Homo sapiens
gccttgacttgtgtc

SEQ ID NO: 1559044 - DNA, 15 bp, Homo sapiens
ccttgacttgtgtct

SEQ ID NO: 1559045 - DNA, 15 bp, Homo sapiens
cttgacttgtgtctc

SEQ ID NO: 1559046 - DNA, 15 bp, Homo sapiens
ttgacttgtgtctct

SEQ ID NO: 1559047 - DNA, 15 bp, Homo sapiens
tgacttgtgtctctt

SEQ ID NO: 1559048 - DNA, 15 bp, Homo sapiens
gacttgtgtctctta

SEQ ID NO: 1559049 - DNA, 15 bp, Homo sapiens
acttgtgtctcttaa

SEQ ID NO: 1559050 - DNA, 15 bp, Homo sapiens
cttgtgtctcttaat

SEQ ID NO: 1559051 - DNA, 15 bp, Homo sapiens
ttgtgtctcttaata

SEQ ID NO: 1559052 - DNA, 15 bp, Homo sapiens
tgtgtctcttaatat

SEQ ID NO: 1559053 - DNA, 15 bp, Homo sapiens
gtgtctcttaatata

SEQ ID NO: 1559054 - DNA, 15 bp, Homo sapiens
tgtctcttaatataa

SEQ ID NO: 1559055 - DNA, 15 bp, Homo sapiens
gtctcttaatataat

SEQ ID NO: 1559056 - DNA, 15 bp, Homo sapiens
tctcttaatataatg

SEQ ID NO: 1559057 - DNA, 15 bp, Homo sapiens
ctcttaatataatgc

SEQ ID NO: 1559058 - DNA, 15 bp, Homo sapiens
tcttaatataatgca

SEQ ID NO: 1559059 - DNA, 15 bp, Homo sapiens
cttaatataatgcag

SEQ ID NO: 1559060 - DNA, 15 bp, Homo sapiens
ttaatataatgcagt

SEQ ID NO: 1559061 - DNA, 15 bp, Homo sapiens
taatataatgcagtg

SEQ ID NO: 1559062 - DNA, 15 bp, Homo sapiens
aatataatgcagtgg

SEQ ID NO: 1559063 - DNA, 15 bp, Homo sapiens
atataatgcagtgga

SEQ ID NO: 1559064 - DNA, 15 bp, Homo sapiens
tataatgcagtggat

SEQ ID NO: 1559065 - DNA, 15 bp, Homo sapiens
ataatgcagtggatt

SEQ ID NO: 1559066 - DNA, 15 bp, Homo sapiens
taatgcagtggattt

SEQ ID NO: 1559067 - DNA, 15 bp, Homo sapiens
aatgcagtggatttc

SEQ ID NO: 1559068 - DNA, 15 bp, Homo sapiens
atgcagtggatttct

SEQ ID NO: 1559069 - DNA, 15 bp, Homo sapiens
tgcagtggatttctt

SEQ ID NO: 1559070 - DNA, 15 bp, Homo sapiens
gcagtggatttcttc

SEQ ID NO: 1559071 - DNA, 15 bp, Homo sapiens
cagtggatttcttcc

SEQ ID NO: 1559072 - DNA, 15 bp, Homo sapiens
agtggatttcttccc

SEQ ID NO: 1559073 - DNA, 15 bp, Homo sapiens
gtggatttcttccct

SEQ ID NO: 1559074 - DNA, 15 bp, Homo sapiens
tggatttcttccctt

SEQ ID NO: 1559075 - DNA, 15 bp, Homo sapiens
ggatttcttcccttc

SEQ ID NO: 1559076 - DNA, 15 bp, Homo sapiens
gatttcttcccttcc

SEQ ID NO: 1559077 - DNA, 15 bp, Homo sapiens
atttcttcccttccc

SEQ ID NO: 1559078 - DNA, 15 bp, Homo sapiens
tttcttcccttcccc

SEQ ID NO: 1559079 - DNA, 15 bp, Homo sapiens
ttcttcccttcccca

SEQ ID NO: 1559080 - DNA, 15 bp, Homo sapiens
tcttcccttccccac

SEQ ID NO: 1559081 - DNA, 15 bp, Homo sapiens
cttcccttccccact

SEQ ID NO: 1559082 - DNA, 15 bp, Homo sapiens
ttcccttccccacta

SEQ ID NO: 1559083 - DNA, 15 bp, Homo sapiens
tcccttccccactaa

SEQ ID NO: 1559084 - DNA, 15 bp, Homo sapiens
cccttccccactaat

SEQ ID NO: 1559085 - DNA, 15 bp, Homo sapiens
ccttccccactaatg

SEQ ID NO: 1559086 - DNA, 15 bp, Homo sapiens
cttccccactaatgt

SEQ ID NO: 1559087 - DNA, 15 bp, Homo sapiens
ttccccactaatgta

SEQ ID NO: 1559088 - DNA, 15 bp, Homo sapiens
tccccactaatgtaa

SEQ ID NO: 1559089 - DNA, 15 bp, Homo sapiens
ccccactaatgtaat

SEQ ID NO: 1559090 - DNA, 15 bp, Homo sapiens
cccactaatgtaata

SEQ ID NO: 1559091 - DNA, 15 bp, Homo sapiens
ccactaatgtaatag

SEQ ID NO: 1559092 - DNA, 15 bp, Homo sapiens
cactaatgtaatagt

SEQ ID NO: 1559093 - DNA, 15 bp, Homo sapiens
actaatgtaatagtg

SEQ ID NO: 1559094 - DNA, 15 bp, Homo sapiens
ctaatgtaatagtgg

SEQ ID NO: 1559095 - DNA, 15 bp, Homo sapiens
taatgtaatagtggg

SEQ ID NO: 1559096 - DNA, 15 bp, Homo sapiens
aatgtaatagtgggg

SEQ ID NO: 1559097 - DNA, 15 bp, Homo sapiens
atgtaatagtggggc

SEQ ID NO: 1559098 - DNA, 15 bp, Homo sapiens
tgtaatagtggggcc

SEQ ID NO: 1559099 - DNA, 15 bp, Homo sapiens
gtaatagtggggcca

SEQ ID NO: 1559100 - DNA, 15 bp, Homo sapiens
taatagtggggccat

SEQ ID NO: 1559101 - DNA, 15 bp, Homo sapiens
aatagtggggccatt

SEQ ID NO: 1559102 - DNA, 15 bp, Homo sapiens
atagtggggccattt

SEQ ID NO: 1559103 - DNA, 15 bp, Homo sapiens
tagtggggccatttt

SEQ ID NO: 1559104 - DNA, 15 bp, Homo sapiens
agtggggccattttg

SEQ ID NO: 1559105 - DNA, 15 bp, Homo sapiens
gtggggccattttgt

SEQ ID NO: 1559106 - DNA, 15 bp, Homo sapiens
tggggccattttgtt

SEQ ID NO: 1559107 - DNA, 15 bp, Homo sapiens
ggggccattttgtta

SEQ ID NO: 1559108 - DNA, 15 bp, Homo sapiens
gggccattttgttag

SEQ ID NO: 1559109 - DNA, 15 bp, Homo sapiens
ggccattttgttagc

SEQ ID NO: 1559110 - DNA, 15 bp, Homo sapiens
gccattttgttagcc

SEQ ID NO: 1559111 - DNA, 15 bp, Homo sapiens
ccattttgttagcca

SEQ ID NO: 1559112 - DNA, 15 bp, Homo sapiens
cattttgttagccat

SEQ ID NO: 1559113 - DNA, 15 bp, Homo sapiens
attttgttagccatt

SEQ ID NO: 1559114 - DNA, 15 bp, Homo sapiens
ttttgttagccattg

SEQ ID NO: 1559115 - DNA, 15 bp, Homo sapiens
tttgttagccattgg

SEQ ID NO: 1559116 - DNA, 15 bp, Homo sapiens
ttgttagccattggt

SEQ ID NO: 1559117 - DNA, 15 bp, Homo sapiens
tgttagccattggtt

SEQ ID NO: 1559118 - DNA, 15 bp, Homo sapiens
gttagccattggttt

SEQ ID NO: 1559119 - DNA, 15 bp, Homo sapiens
ttagccattggtttg

SEQ ID NO: 1559120 - DNA, 15 bp, Homo sapiens
tagccattggtttgc

SEQ ID NO: 1559121 - DNA, 15 bp, Homo sapiens
agccattggtttgca

SEQ ID NO: 1559122 - DNA, 15 bp, Homo sapiens
gccattggtttgcat

SEQ ID NO: 1559123 - DNA, 15 bp, Homo sapiens
ccattggtttgcatg

SEQ ID NO: 1559124 - DNA, 15 bp, Homo sapiens
cattggtttgcatga

SEQ ID NO: 1559125 - DNA, 15 bp, Homo sapiens
attggtttgcatgat

SEQ ID NO: 1559126 - DNA, 15 bp, Homo sapiens
ttggtttgcatgatg

SEQ ID NO: 1559127 - DNA, 15 bp, Homo sapiens
tggtttgcatgatgg

SEQ ID NO: 1559128 - DNA, 15 bp, Homo sapiens
ggtttgcatgatggc

SEQ ID NO: 1559129 - DNA, 15 bp, Homo sapiens
gtttgcatgatggct

SEQ ID NO: 1559130 - DNA, 15 bp, Homo sapiens
tttgcatgatggctt

SEQ ID NO: 1559131 - DNA, 15 bp, Homo sapiens
ttgcatgatggcttt

SEQ ID NO: 1559132 - DNA, 15 bp, Homo sapiens
tgcatgatggctttc

SEQ ID NO: 1559133 - DNA, 15 bp, Homo sapiens
gcatgatggctttcg

SEQ ID NO: 1559134 - DNA, 15 bp, Homo sapiens
catgatggctttcgt

SEQ ID NO: 1559135 - DNA, 15 bp, Homo sapiens
atgatggctttcgtt

SEQ ID NO: 1559136 - DNA, 15 bp, Homo sapiens
tgatggctttcgttt

SEQ ID NO: 1559137 - DNA, 15 bp, Homo sapiens
gatggctttcgtttc

SEQ ID NO: 1559138 - DNA, 15 bp, Homo sapiens
atggctttcgtttcc

SEQ ID NO: 1559139 - DNA, 15 bp, Homo sapiens
tggctttcgtttccc

SEQ ID NO: 1559140 - DNA, 15 bp, Homo sapiens
ggctttcgtttccct

SEQ ID NO: 1559141 - DNA, 15 bp, Homo sapiens
gctttcgtttccctc

SEQ ID NO: 1559142 - DNA, 15 bp, Homo sapiens
ctttcgtttccctcc

SEQ ID NO: 1559143 - DNA, 15 bp, Homo sapiens
tttcgtttccctcct

SEQ ID NO: 1559144 - DNA, 15 bp, Homo sapiens
ttcgtttccctcctt

SEQ ID NO: 1559145 - DNA, 15 bp, Homo sapiens
tcgtttccctccttt

SEQ ID NO: 1559146 - DNA, 15 bp, Homo sapiens
cgtttccctcctttt

SEQ ID NO: 1559147 - DNA, 15 bp, Homo sapiens
gtttccctccttttc

SEQ ID NO: 1559148 - DNA, 15 bp, Homo sapiens
tttccctccttttcc

SEQ ID NO: 1559149 - DNA, 15 bp, Homo sapiens
ttccctccttttccc

SEQ ID NO: 1559150 - DNA, 15 bp, Homo sapiens
tccctccttttccca

SEQ ID NO: 1559151 - DNA, 15 bp, Homo sapiens
ccctccttttcccat

SEQ ID NO: 1559152 - DNA, 15 bp, Homo sapiens
cctccttttcccatg

SEQ ID NO: 1559153 - DNA, 15 bp, Homo sapiens
ctccttttcccatgg

SEQ ID NO: 1559154 - DNA, 15 bp, Homo sapiens
tccttttcccatgga

SEQ ID NO: 1559155 - DNA, 15 bp, Homo sapiens
ccttttcccatggaa

SEQ ID NO: 1559156 - DNA, 15 bp, Homo sapiens
cttttcccatggaag

SEQ ID NO: 1559157 - DNA, 15 bp, Homo sapiens
ttttcccatggaagg

SEQ ID NO: 1559158 - DNA, 15 bp, Homo sapiens
tttcccatggaaggt

SEQ ID NO: 1559159 - DNA, 15 bp, Homo sapiens
ttcccatggaaggtc

SEQ ID NO: 1559160 - DNA, 15 bp, Homo sapiens
tcccatggaaggtcc

SEQ ID NO: 1559161 - DNA, 15 bp, Homo sapiens
cccatggaaggtcca

SEQ ID NO: 1559162 - DNA, 15 bp, Homo sapiens
ccatggaaggtccag

SEQ ID NO: 1559163 - DNA, 15 bp, Homo sapiens
catggaaggtccagc

SEQ ID NO: 1559164 - DNA, 15 bp, Homo sapiens
atggaaggtccagct

SEQ ID NO: 1559165 - DNA, 15 bp, Homo sapiens
tggaaggtccagctg

SEQ ID NO: 1559166 - DNA, 15 bp, Homo sapiens
ggaaggtccagctgg

SEQ ID NO: 1559167 - DNA, 15 bp, Homo sapiens
gaaggtccagctgga

SEQ ID NO: 1559168 - DNA, 15 bp, Homo sapiens
aaggtccagctggaa

SEQ ID NO: 1559169 - DNA, 15 bp, Homo sapiens
aggtccagctggaat

SEQ ID NO: 1559170 - DNA, 15 bp, Homo sapiens
ggtccagctggaatt

SEQ ID NO: 1559171 - DNA, 15 bp, Homo sapiens
gtccagctggaattt

SEQ ID NO: 1559172 - DNA, 15 bp, Homo sapiens
tccagctggaatttc

SEQ ID NO: 1559173 - DNA, 15 bp, Homo sapiens
ccagctggaatttcg

SEQ ID NO: 1559174 - DNA, 15 bp, Homo sapiens
cagctggaatttcgg

SEQ ID NO: 1559175 - DNA, 15 bp, Homo sapiens
agctggaatttcgga

SEQ ID NO: 1559176 - DNA, 15 bp, Homo sapiens
gctggaatttcggaa

SEQ ID NO: 1559177 - DNA, 15 bp, Homo sapiens
ctggaatttcggaag

SEQ ID NO: 1559178 - DNA, 15 bp, Homo sapiens
tggaatttcggaaga

SEQ ID NO: 1559179 - DNA, 15 bp, Homo sapiens
ggaatttcggaagag

SEQ ID NO: 1559180 - DNA, 15 bp, Homo sapiens
gaatttcggaagagc

SEQ ID NO: 1559181 - DNA, 15 bp, Homo sapiens
aatttcggaagagct

SEQ ID NO: 1559182 - DNA, 15 bp, Homo sapiens
atttcggaagagctg

SEQ ID NO: 1559183 - DNA, 15 bp, Homo sapiens
tttcggaagagctgg

SEQ ID NO: 1559184 - DNA, 15 bp, Homo sapiens
ttcggaagagctggg

SEQ ID NO: 1559185 - DNA, 15 bp, Homo sapiens
tcggaagagctggga

SEQ ID NO: 1559186 - DNA, 15 bp, Homo sapiens
cggaagagctgggag

SEQ ID NO: 1559187 - DNA, 15 bp, Homo sapiens
ggaagagctgggagc

SEQ ID NO: 1559188 - DNA, 15 bp, Homo sapiens
gaagagctgggagcg

SEQ ID NO: 1559189 - DNA, 15 bp, Homo sapiens
aagagctgggagcgc

SEQ ID NO: 1559190 - DNA, 15 bp, Homo sapiens
agagctgggagcgct

SEQ ID NO: 1559191 - DNA, 15 bp, Homo sapiens
gagctgggagcgctg

SEQ ID NO: 1559192 - DNA, 15 bp, Homo sapiens
agctgggagcgctgg

SEQ ID NO: 1559193 - DNA, 15 bp, Homo sapiens
gctgggagcgctggc

SEQ ID NO: 1559194 - DNA, 15 bp, Homo sapiens
ctgggagcgctggcg

SEQ ID NO: 1559195 - DNA, 15 bp, Homo sapiens
tgggagcgctggcgg

SEQ ID NO: 1559196 - DNA, 15 bp, Homo sapiens
gggagcgctggcggc

SEQ ID NO: 1559197 - DNA, 15 bp, Homo sapiens
ggagcgctggcggct

SEQ ID NO: 1559198 - DNA, 15 bp, Homo sapiens
gagcgctggcggctt

SEQ ID NO: 1559199 - DNA, 15 bp, Homo sapiens
agcgctggcggcttg

SEQ ID NO: 1559200 - DNA, 15 bp, Homo sapiens
gcgctggcggcttga

SEQ ID NO: 1559201 - DNA, 15 bp, Homo sapiens
cgctggcggcttgag

SEQ ID NO: 1559202 - DNA, 15 bp, Homo sapiens
gctggcggcttgagc

SEQ ID NO: 1559203 - DNA, 15 bp, Homo sapiens
ctggcggcttgagca

SEQ ID NO: 1559204 - DNA, 15 bp, Homo sapiens
tggcggcttgagcac

SEQ ID NO: 1559205 - DNA, 15 bp, Homo sapiens
ggcggcttgagcact

SEQ ID NO: 1559206 - DNA, 15 bp, Homo sapiens
gcggcttgagcactt

SEQ ID NO: 1559207 - DNA, 15 bp, Homo sapiens
cggcttgagcacttg

SEQ ID NO: 1559208 - DNA, 15 bp, Homo sapiens
ggcttgagcacttgc

SEQ ID NO: 1559209 - DNA, 15 bp, Homo sapiens
gcttgagcacttgca

SEQ ID NO: 1559210 - DNA, 15 bp, Homo sapiens
cttgagcacttgcac

SEQ ID NO: 1559211 - DNA, 15 bp, Homo sapiens
ttgagcacttgcaca

SEQ ID NO: 1559212 - DNA, 15 bp, Homo sapiens
tgagcacttgcacat

SEQ ID NO: 1559213 - DNA, 15 bp, Homo sapiens
gagcacttgcacatc

SEQ ID NO: 1559214 - DNA, 15 bp, Homo sapiens
agcacttgcacatcc

SEQ ID NO: 1559215 - DNA, 15 bp, Homo sapiens
gcacttgcacatcca

SEQ ID NO: 1559216 - DNA, 15 bp, Homo sapiens
cacttgcacatccag

SEQ ID NO: 1559217 - DNA, 15 bp, Homo sapiens
acttgcacatccaga

SEQ ID NO: 1559218 - DNA, 15 bp, Homo sapiens
cttgcacatccagag

SEQ ID NO: 1559219 - DNA, 15 bp, Homo sapiens
ttgcacatccagagg

SEQ ID NO: 1559220 - DNA, 15 bp, Homo sapiens
tgcacatccagaggg

SEQ ID NO: 1559221 - DNA, 15 bp, Homo sapiens
gcacatccagaggga

SEQ ID NO: 1559222 - DNA, 15 bp, Homo sapiens
cacatccagagggac

SEQ ID NO: 1559223 - DNA, 15 bp, Homo sapiens
acatccagagggaca

SEQ ID NO: 1559224 - DNA, 15 bp, Homo sapiens
catccagagggacag

SEQ ID NO: 1559225 - DNA, 15 bp, Homo sapiens
atccagagggacagc

SEQ ID NO: 1559226 - DNA, 15 bp, Homo sapiens
tccagagggacagca

SEQ ID NO: 1559227 - DNA, 15 bp, Homo sapiens
ccagagggacagcag

SEQ ID NO: 1559228 - DNA, 15 bp, Homo sapiens
cagagggacagcagc

SEQ ID NO: 1559229 - DNA, 15 bp, Homo sapiens
agagggacagcagca

SEQ ID NO: 1559230 - DNA, 15 bp, Homo sapiens
gagggacagcagcat

SEQ ID NO: 1559231 - DNA, 15 bp, Homo sapiens
agggacagcagcatg

SEQ ID NO: 1559232 - DNA, 15 bp, Homo sapiens
gggacagcagcatga

SEQ ID NO: 1559233 - DNA, 15 bp, Homo sapiens
ggacagcagcatgaa

SEQ ID NO: 1559234 - DNA, 15 bp, Homo sapiens
gacagcagcatgaag

SEQ ID NO: 1559235 - DNA, 15 bp, Homo sapiens
acagcagcatgaagc

SEQ ID NO: 1559236 - DNA, 15 bp, Homo sapiens
cagcagcatgaagcc

SEQ ID NO: 1559237 - DNA, 15 bp, Homo sapiens
agcagcatgaagccc

SEQ ID NO: 1559238 - DNA, 15 bp, Homo sapiens
gcagcatgaagcccc

SEQ ID NO: 1559239 - DNA, 15 bp, Homo sapiens
cagcatgaagcccct

SEQ ID NO: 1559240 - DNA, 15 bp, Homo sapiens
agcatgaagcccctc

SEQ ID NO: 1559241 - DNA, 15 bp, Homo sapiens
gcatgaagcccctca

SEQ ID NO: 1559242 - DNA, 15 bp, Homo sapiens
catgaagcccctcaa

SEQ ID NO: 1559243 - DNA, 15 bp, Homo sapiens
atgaagcccctcaag

SEQ ID NO: 1559244 - DNA, 15 bp, Homo sapiens
tgaagcccctcaagt

SEQ ID NO: 1559245 - DNA, 15 bp, Homo sapiens
gaagcccctcaagtg

SEQ ID NO: 1559246 - DNA, 15 bp, Homo sapiens
aagcccctcaagtgt

SEQ ID NO: 1559247 - DNA, 15 bp, Homo sapiens
agcccctcaagtgtc

SEQ ID NO: 1559248 - DNA, 15 bp, Homo sapiens
gcccctcaagtgtcc

SEQ ID NO: 1559249 - DNA, 15 bp, Homo sapiens
cccctcaagtgtccc

SEQ ID NO: 1559250 - DNA, 15 bp, Homo sapiens
ccctcaagtgtccca

SEQ ID NO: 1559251 - DNA, 15 bp, Homo sapiens
cctcaagtgtcccac

SEQ ID NO: 1559252 - DNA, 15 bp, Homo sapiens
ctcaagtgtcccacc

SEQ ID NO: 1559253 - DNA, 15 bp, Homo sapiens
tcaagtgtcccacca

SEQ ID NO: 1559254 - DNA, 15 bp, Homo sapiens
caagtgtcccaccag

SEQ ID NO: 1559255 - DNA, 15 bp, Homo sapiens
aagtgtcccaccagc

SEQ ID NO: 1559256 - DNA, 15 bp, Homo sapiens
agtgtcccaccagca

SEQ ID NO: 1559257 - DNA, 15 bp, Homo sapiens
gtgtcccaccagcag

SEQ ID NO: 1559258 - DNA, 15 bp, Homo sapiens
tgtcccaccagcagc

SEQ ID NO: 1559259 - DNA, 15 bp, Homo sapiens
gtcccaccagcagcc

SEQ ID NO: 1559260 - DNA, 15 bp, Homo sapiens
tcccaccagcagcct

SEQ ID NO: 1559261 - DNA, 15 bp, Homo sapiens
cccaccagcagcctg

SEQ ID NO: 1559262 - DNA, 15 bp, Homo sapiens
ccaccagcagcctga

SEQ ID NO: 1559263 - DNA, 15 bp, Homo sapiens
caccagcagcctgag

SEQ ID NO: 1559264 - DNA, 15 bp, Homo sapiens
accagcagcctgagc

SEQ ID NO: 1559265 - DNA, 15 bp, Homo sapiens
ccagcagcctgagca

SEQ ID NO: 1559266 - DNA, 15 bp, Homo sapiens
cagcagcctgagcag

SEQ ID NO: 1559267 - DNA, 15 bp, Homo sapiens
agcagcctgagcagt

SEQ ID NO: 1559268 - DNA, 15 bp, Homo sapiens
gcagcctgagcagtg

SEQ ID NO: 1559269 - DNA, 15 bp, Homo sapiens
cagcctgagcagtgg

SEQ ID NO: 1559270 - DNA, 15 bp, Homo sapiens
agcctgagcagtgga

SEQ ID NO: 1559271 - DNA, 15 bp, Homo sapiens
gcctgagcagtggag

SEQ ID NO: 1559272 - DNA, 15 bp, Homo sapiens
cctgagcagtggagc

SEQ ID NO: 1559273 - DNA, 15 bp, Homo sapiens
ctgagcagtggagcc

SEQ ID NO: 1559274 - DNA, 15 bp, Homo sapiens
tgagcagtggagcca

SEQ ID NO: 1559275 - DNA, 15 bp, Homo sapiens
gagcagtggagccac

SEQ ID NO: 1559276 - DNA, 15 bp, Homo sapiens
agcagtggagccacg

SEQ ID NO: 1559277 - DNA, 15 bp, Homo sapiens
gcagtggagccacgg

SEQ ID NO: 1559278 - DNA, 15 bp, Homo sapiens
cagtggagccacggc

SEQ ID NO: 1559279 - DNA, 15 bp, Homo sapiens
agtggagccacggcg

SEQ ID NO: 1559280 - DNA, 15 bp, Homo sapiens
gtggagccacggcgg

SEQ ID NO: 1559281 - DNA, 15 bp, Homo sapiens
tggagccacggcggg

SEQ ID NO: 1559282 - DNA, 15 bp, Homo sapiens
ggagccacggcgggc

SEQ ID NO: 1559283 - DNA, 15 bp, Homo sapiens
gagccacggcgggca

SEQ ID NO: 1559284 - DNA, 15 bp, Homo sapiens
agccacggcgggcag

SEQ ID NO: 1559285 - DNA, 15 bp, Homo sapiens
gccacggcgggcagc

SEQ ID NO: 1559286 - DNA, 15 bp, Homo sapiens
ccacggcgggcagca

SEQ ID NO: 1559287 - DNA, 15 bp, Homo sapiens
cacggcgggcagcag

SEQ ID NO: 1559288 - DNA, 15 bp, Homo sapiens
acggcgggcagcagc

SEQ ID NO: 1559289 - DNA, 15 bp, Homo sapiens
cggcgggcagcagca

SEQ ID NO: 1559290 - DNA, 15 bp, Homo sapiens
ggcgggcagcagcat

SEQ ID NO: 1559291 - DNA, 15 bp, Homo sapiens
gcgggcagcagcatg

SEQ ID NO: 1559292 - DNA, 15 bp, Homo sapiens
cgggcagcagcatgt

SEQ ID NO: 1559293 - DNA, 15 bp, Homo sapiens
gggcagcagcatgta

SEQ ID NO: 1559294 - DNA, 15 bp, Homo sapiens
ggcagcagcatgtac

SEQ ID NO: 1559295 - DNA, 15 bp, Homo sapiens
gcagcagcatgtaca

SEQ ID NO: 1559296 - DNA, 15 bp, Homo sapiens
cagcagcatgtacac

SEQ ID NO: 1559297 - DNA, 15 bp, Homo sapiens
agcagcatgtacaca

SEQ ID NO: 1559298 - DNA, 15 bp, Homo sapiens
gcagcatgtacacag

SEQ ID NO: 1559299 - DNA, 15 bp, Homo sapiens
cagcatgtacacagc

SEQ ID NO: 1559300 - DNA, 15 bp, Homo sapiens
agcatgtacacagcc

SEQ ID NO: 1559301 - DNA, 15 bp, Homo sapiens
gcatgtacacagcca

SEQ ID NO: 1559302 - DNA, 15 bp, Homo sapiens
catgtacacagccac

SEQ ID NO: 1559303 - DNA, 15 bp, Homo sapiens
atgtacacagccact

SEQ ID NO: 1559304 - DNA, 15 bp, Homo sapiens
tgtacacagccactt

SEQ ID NO: 1559305 - DNA, 15 bp, Homo sapiens
gtacacagccacttg

SEQ ID NO: 1559306 - DNA, 15 bp, Homo sapiens
tacacagccacttgc

SEQ ID NO: 1559307 - DNA, 15 bp, Homo sapiens
acacagccacttgcc

SEQ ID NO: 1559308 - DNA, 15 bp, Homo sapiens
cacagccacttgcca

SEQ ID NO: 1559309 - DNA, 15 bp, Homo sapiens
acagccacttgccag

SEQ ID NO: 1559310 - DNA, 15 bp, Homo sapiens
cagccacttgccagg

SEQ ID NO: 1559311 - DNA, 15 bp, Homo sapiens
agccacttgccaggc

SEQ ID NO: 1559312 - DNA, 15 bp, Homo sapiens
gccacttgccaggcc

SEQ ID NO: 1559313 - DNA, 15 bp, Homo sapiens
ccacttgccaggcct

SEQ ID NO: 1559314 - DNA, 15 bp, Homo sapiens
cacttgccaggcctc

SEQ ID NO: 1559315 - DNA, 15 bp, Homo sapiens
acttgccaggcctcc

SEQ ID NO: 1559316 - DNA, 15 bp, Homo sapiens
cttgccaggcctcct

SEQ ID NO: 1559317 - DNA, 15 bp, Homo sapiens
ttgccaggcctcctg

SEQ ID NO: 1559318 - DNA, 15 bp, Homo sapiens
tgccaggcctcctgc

SEQ ID NO: 1559319 - DNA, 15 bp, Homo sapiens
gccaggcctcctgca

SEQ ID NO: 1559320 - DNA, 15 bp, Homo sapiens
ccaggcctcctgcag

SEQ ID NO: 1559321 - DNA, 15 bp, Homo sapiens
caggcctcctgcagc

SEQ ID NO: 1559322 - DNA, 15 bp, Homo sapiens
aggcctcctgcagct

SEQ ID NO: 1559323 - DNA, 15 bp, Homo sapiens
ggcctcctgcagctg

SEQ ID NO: 1559324 - DNA, 15 bp, Homo sapiens
gcctcctgcagctga

SEQ ID NO: 1559325 - DNA, 15 bp, Homo sapiens
cctcctgcagctgag

SEQ ID NO: 1559326 - DNA, 15 bp, Homo sapiens
ctcctgcagctgaga

SEQ ID NO: 1559327 - DNA, 15 bp, Homo sapiens
tcctgcagctgagac

SEQ ID NO: 1559328 - DNA, 15 bp, Homo sapiens
cctgcagctgagact

SEQ ID NO: 1559329 - DNA, 15 bp, Homo sapiens
ctgcagctgagactc

SEQ ID NO: 1559330 - DNA, 15 bp, Homo sapiens
tgcagctgagactcc

SEQ ID NO: 1559331 - DNA, 15 bp, Homo sapiens
gcagctgagactcca

SEQ ID NO: 1559332 - DNA, 15 bp, Homo sapiens
cagctgagactccag

SEQ ID NO: 1559333 - DNA, 15 bp, Homo sapiens
agctgagactccagc

SEQ ID NO: 1559334 - DNA, 15 bp, Homo sapiens
gctgagactccagcg

SEQ ID NO: 1559335 - DNA, 15 bp, Homo sapiens
ctgagactccagcgc

SEQ ID NO: 1559336 - DNA, 15 bp, Homo sapiens
tgagactccagcgcc

SEQ ID NO: 1559337 - DNA, 15 bp, Homo sapiens
gagactccagcgcct

SEQ ID NO: 1559338 - DNA, 15 bp, Homo sapiens
agactccagcgcctg

SEQ ID NO: 1559339 - DNA, 15 bp, Homo sapiens
gactccagcgcctgc

SEQ ID NO: 1559340 - DNA, 15 bp, Homo sapiens
actccagcgcctgcc

SEQ ID NO: 1559341 - DNA, 15 bp, Homo sapiens
ctccagcgcctgccc

SEQ ID NO: 1559342 - DNA, 15 bp, Homo sapiens
tccagcgcctgccct

SEQ ID NO: 1559343 - DNA, 15 bp, Homo sapiens
ccagcgcctgccctc

SEQ ID NO: 1559344 - DNA, 15 bp, Homo sapiens
cagcgcctgccctcc

SEQ ID NO: 1559345 - DNA, 15 bp, Homo sapiens
agcgcctgccctccc

SEQ ID NO: 1559346 - DNA, 15 bp, Homo sapiens
gcgcctgccctccct

SEQ ID NO: 1559347 - DNA, 15 bp, Homo sapiens
cgcctgccctccctg

SEQ ID NO: 1559348 - DNA, 15 bp, Homo sapiens
gcctgccctccctgg

SEQ ID NO: 1559349 - DNA, 15 bp, Homo sapiens
cctgccctccctggg

SEQ ID NO: 1559350 - DNA, 15 bp, Homo sapiens
tgccctccctggggt

SEQ ID NO: 1559351 - DNA, 15 bp, Homo sapiens
gccctccctggggtc

SEQ ID NO: 1559352 - DNA, 15 bp, Homo sapiens
ccctccctggggtcc

SEQ ID NO: 1559353 - DNA, 15 bp, Homo sapiens
cctccctggggtcct

SEQ ID NO: 1559354 - DNA, 15 bp, Homo sapiens
ctccctggggtcctt

SEQ ID NO: 1559355 - DNA, 15 bp, Homo sapiens
tccctggggtccttg

SEQ ID NO: 1559356 - DNA, 15 bp, Homo sapiens
ccctggggtccttgc

SEQ ID NO: 1559357 - DNA, 15 bp, Homo sapiens
cctggggtccttgct

SEQ ID NO: 1559358 - DNA, 15 bp, Homo sapiens
ctggggtccttgctg

SEQ ID NO: 1559359 - DNA, 15 bp, Homo sapiens
tggggtccttgctgc

SEQ ID NO: 1559360 - DNA, 15 bp, Homo sapiens
ggggtccttgctgca

SEQ ID NO: 1559361 - DNA, 15 bp, Homo sapiens
gggtccttgctgcag

SEQ ID NO: 1559362 - DNA, 15 bp, Homo sapiens
ggtccttgctgcagg

SEQ ID NO: 1559363 - DNA, 15 bp, Homo sapiens
gtccttgctgcaggc

SEQ ID NO: 1559364 - DNA, 15 bp, Homo sapiens
tccttgctgcaggcc

SEQ ID NO: 1559365 - DNA, 15 bp, Homo sapiens
ccttgctgcaggccg

SEQ ID NO: 1559366 - DNA, 15 bp, Homo sapiens
cttgctgcaggccgg

SEQ ID NO: 1559367 - DNA, 15 bp, Homo sapiens
ttgctgcaggccggg

SEQ ID NO: 1559368 - DNA, 15 bp, Homo sapiens
tgctgcaggccgggt

SEQ ID NO: 1559369 - DNA, 15 bp, Homo sapiens
gctgcaggccgggtg

SEQ ID NO: 1559370 - DNA, 15 bp, Homo sapiens
ctgcaggccgggtgg

SEQ ID NO: 1559371 - DNA, 15 bp, Homo sapiens
tgcaggccgggtggc

SEQ ID NO: 1559372 - DNA, 15 bp, Homo sapiens
gcaggccgggtggcc

SEQ ID NO: 1559373 - DNA, 15 bp, Homo sapiens
caggccgggtggcca

SEQ ID NO: 1559374 - DNA, 15 bp, Homo sapiens
aggccgggtggccaa

SEQ ID NO: 1559375 - DNA, 15 bp, Homo sapiens
ggccgggtggccaat

SEQ ID NO: 1559376 - DNA, 15 bp, Homo sapiens
gccgggtggccaatc

SEQ ID NO: 1559377 - DNA, 15 bp, Homo sapiens
ccgggtggccaatcc

SEQ ID NO: 1559378 - DNA, 15 bp, Homo sapiens
cgggtggccaatcca

SEQ ID NO: 1559379 - DNA, 15 bp, Homo sapiens
gggtggccaatccag

SEQ ID NO: 1559380 - DNA, 15 bp, Homo sapiens
ggtggccaatccagg

SEQ ID NO: 1559381 - DNA, 15 bp, Homo sapiens
gtggccaatccaggt

SEQ ID NO: 1559382 - DNA, 15 bp, Homo sapiens
tggccaatccaggtg

SEQ ID NO: 1559383 - DNA, 15 bp, Homo sapiens
ggccaatccaggtgg

SEQ ID NO: 1559384 - DNA, 15 bp, Homo sapiens
gccaatccaggtggg

SEQ ID NO: 1559385 - DNA, 15 bp, Homo sapiens
ccaatccaggtggga

SEQ ID NO: 1559386 - DNA, 15 bp, Homo sapiens
caatccaggtgggag

SEQ ID NO: 1559387 - DNA, 15 bp, Homo sapiens
aatccaggtgggaga

SEQ ID NO: 1559388 - DNA, 15 bp, Homo sapiens
atccaggtgggagag

SEQ ID NO: 1559389 - DNA, 15 bp, Homo sapiens
tccaggtgggagaga

SEQ ID NO: 1559390 - DNA, 15 bp, Homo sapiens
ccaggtgggagagac

SEQ ID NO: 1559391 - DNA, 15 bp, Homo sapiens
caggtgggagagaca

SEQ ID NO: 1559392 - DNA, 15 bp, Homo sapiens
aggtgggagagacac

SEQ ID NO: 1559393 - DNA, 15 bp, Homo sapiens
ggtgggagagacact

SEQ ID NO: 1559394 - DNA, 15 bp, Homo sapiens
gtgggagagacactc

SEQ ID NO: 1559395 - DNA, 15 bp, Homo sapiens
tgggagagacactcc

SEQ ID NO: 1559396 - DNA, 15 bp, Homo sapiens
gggagagacactccc

SEQ ID NO: 1559397 - DNA, 15 bp, Homo sapiens
ggagagacactccca

SEQ ID NO: 1559398 - DNA, 15 bp, Homo sapiens
gagagacactcccag

SEQ ID NO: 1559399 - DNA, 15 bp, Homo sapiens
agagacactcccagg

SEQ ID NO: 1559400 - DNA, 15 bp, Homo sapiens
gagacactcccaggg

SEQ ID NO: 1559401 - DNA, 15 bp, Homo sapiens
agacactcccaggga

SEQ ID NO: 1559402 - DNA, 15 bp, Homo sapiens
gacactcccagggac

SEQ ID NO: 1559403 - DNA, 15 bp, Homo sapiens
acactcccagggaca

SEQ ID NO: 1559404 - DNA, 15 bp, Homo sapiens
cactcccagggacaa

SEQ ID NO: 1559405 - DNA, 15 bp, Homo sapiens
actcccagggacaag

SEQ ID NO: 1559406 - DNA, 15 bp, Homo sapiens
ctcccagggacaagg

SEQ ID NO: 1559407 - DNA, 15 bp, Homo sapiens
tcccagggacaaggg

SEQ ID NO: 1559408 - DNA, 15 bp, Homo sapiens
cccagggacaaggga

SEQ ID NO: 1559409 - DNA, 15 bp, Homo sapiens
ccagggacaagggaa

SEQ ID NO: 1559410 - DNA, 15 bp, Homo sapiens
cagggacaagggaag

SEQ ID NO: 1559411 - DNA, 15 bp, Homo sapiens
agggacaagggaagg

SEQ ID NO: 1559412 - DNA, 15 bp, Homo sapiens
gggacaagggaagga

SEQ ID NO: 1559413 - DNA, 15 bp, Homo sapiens
ggacaagggaaggaa

SEQ ID NO: 1559414 - DNA, 15 bp, Homo sapiens
gacaagggaaggaag

SEQ ID NO: 1559415 - DNA, 15 bp, Homo sapiens
acaagggaaggaagg

SEQ ID NO: 1559416 - DNA, 15 bp, Homo sapiens
caagggaaggaaggg

SEQ ID NO: 1559417 - DNA, 15 bp, Homo sapiens
aagggaaggaaggga

SEQ ID NO: 1559418 - DNA, 15 bp, Homo sapiens
agggaaggaagggac

SEQ ID NO: 1559419 - DNA, 15 bp, Homo sapiens
gggaaggaagggaca

SEQ ID NO: 1559420 - DNA, 15 bp, Homo sapiens
ggaaggaagggacac

SEQ ID NO: 1559421 - DNA, 15 bp, Homo sapiens
gaaggaagggacaca

SEQ ID NO: 1559422 - DNA, 15 bp, Homo sapiens
aaggaagggacacac

SEQ ID NO: 1559423 - DNA, 15 bp, Homo sapiens
aggaagggacacaca

SEQ ID NO: 1559424 - DNA, 15 bp, Homo sapiens
ggaagggacacacac

SEQ ID NO: 1559425 - DNA, 15 bp, Homo sapiens
gaagggacacacaca

SEQ ID NO: 1559426 - DNA, 15 bp, Homo sapiens
aagggacacacacac

SEQ ID NO: 1559427 - DNA, 15 bp, Homo sapiens
agggacacacacaca

SEQ ID NO: 1559428 - DNA, 15 bp, Homo sapiens
gggacacacacacac

SEQ ID NO: 1559429 - DNA, 15 bp, Homo sapiens
cacacacacatacat

SEQ ID NO: 1559430 - DNA, 15 bp, Homo sapiens
acacacacatacatc

SEQ ID NO: 1559431 - DNA, 15 bp, Homo sapiens
cacacacatacatcc

SEQ ID NO: 1559432 - DNA, 15 bp, Homo sapiens
acacacatacatcct

SEQ ID NO: 1559433 - DNA, 15 bp, Homo sapiens
cacacatacatcctg

SEQ ID NO: 1559434 - DNA, 15 bp, Homo sapiens
acacatacatcctgc

SEQ ID NO: 1559435 - DNA, 15 bp, Homo sapiens
cacatacatcctgct

SEQ ID NO: 1559436 - DNA, 15 bp, Homo sapiens
acatacatcctgctt

SEQ ID NO: 1559437 - DNA, 15 bp, Homo sapiens
catacatcctgcttt

SEQ ID NO: 1559438 - DNA, 15 bp, Homo sapiens
atacatcctgctttc

SEQ ID NO: 1559439 - DNA, 15 bp, Homo sapiens
tacatcctgctttcc

SEQ ID NO: 1559440 - DNA, 15 bp, Homo sapiens
acatcctgctttccc

SEQ ID NO: 1559441 - DNA, 15 bp, Homo sapiens
catcctgctttccct

SEQ ID NO: 1559442 - DNA, 15 bp, Homo sapiens
atcctgctttccctc

SEQ ID NO: 1559443 - DNA, 15 bp, Homo sapiens
tcctgctttccctcc

SEQ ID NO: 1559444 - DNA, 15 bp, Homo sapiens
cctgctttccctccc

SEQ ID NO: 1559445 - DNA, 15 bp, Homo sapiens
ctgctttccctcccc

SEQ ID NO: 1559446 - DNA, 15 bp, Homo sapiens
tgctttccctcccca

SEQ ID NO: 1559447 - DNA, 15 bp, Homo sapiens
gctttccctccccaa

SEQ ID NO: 1559448 - DNA, 15 bp, Homo sapiens
ctttccctccccaaa

SEQ ID NO: 1559449 - DNA, 15 bp, Homo sapiens
tttccctccccaaac

SEQ ID NO: 1559450 - DNA, 15 bp, Homo sapiens
ttccctccccaaacc

SEQ ID NO: 1559451 - DNA, 15 bp, Homo sapiens
tccctccccaaaccc

SEQ ID NO: 1559452 - DNA, 15 bp, Homo sapiens
ccctccccaaaccca

SEQ ID NO: 1559453 - DNA, 15 bp, Homo sapiens
cctccccaaacccat

SEQ ID NO: 1559454 - DNA, 15 bp, Homo sapiens
ctccccaaacccatc

SEQ ID NO: 1559455 - DNA, 15 bp, Homo sapiens
tccccaaacccatca

SEQ ID NO: 1559456 - DNA, 15 bp, Homo sapiens
ccccaaacccatcag

SEQ ID NO: 1559457 - DNA, 15 bp, Homo sapiens
cccaaacccatcaga

SEQ ID NO: 1559458 - DNA, 15 bp, Homo sapiens
ccaaacccatcagac

SEQ ID NO: 1559459 - DNA, 15 bp, Homo sapiens
caaacccatcagaca

SEQ ID NO: 1559460 - DNA, 15 bp, Homo sapiens
aaacccatcagacag

SEQ ID NO: 1559461 - DNA, 15 bp, Homo sapiens
aacccatcagacagg

SEQ ID NO: 1559462 - DNA, 15 bp, Homo sapiens
acccatcagacaggt

SEQ ID NO: 1559463 - DNA, 15 bp, Homo sapiens
cccatcagacaggta

SEQ ID NO: 1559464 - DNA, 15 bp, Homo sapiens
ccatcagacaggtaa

SEQ ID NO: 1559465 - DNA, 15 bp, Homo sapiens
catcagacaggtaaa

SEQ ID NO: 1559466 - DNA, 15 bp, Homo sapiens
atcagacaggtaaat

SEQ ID NO: 1559467 - DNA, 15 bp, Homo sapiens
tcagacaggtaaatg

SEQ ID NO: 1559468 - DNA, 15 bp, Homo sapiens
cagacaggtaaatgg

SEQ ID NO: 1559469 - DNA, 15 bp, Homo sapiens
agacaggtaaatggg

SEQ ID NO: 1559470 - DNA, 15 bp, Homo sapiens
gacaggtaaatgggc

SEQ ID NO: 1559471 - DNA, 15 bp, Homo sapiens
acaggtaaatgggca

SEQ ID NO: 1559472 - DNA, 15 bp, Homo sapiens
caggtaaatgggcag

SEQ ID NO: 1559473 - DNA, 15 bp, Homo sapiens
aggtaaatgggcagt

SEQ ID NO: 1559474 - DNA, 15 bp, Homo sapiens
ggtaaatgggcagtg

SEQ ID NO: 1559475 - DNA, 15 bp, Homo sapiens
gtaaatgggcagtgc

SEQ ID NO: 1559476 - DNA, 15 bp, Homo sapiens
taaatgggcagtgcc

SEQ ID NO: 1559477 - DNA, 15 bp, Homo sapiens
aaatgggcagtgcct

SEQ ID NO: 1559478 - DNA, 15 bp, Homo sapiens
aatgggcagtgcctc

SEQ ID NO: 1559479 - DNA, 15 bp, Homo sapiens
atgggcagtgcctcc

SEQ ID NO: 1559480 - DNA, 15 bp, Homo sapiens
tgggcagtgcctcct

SEQ ID NO: 1559481 - DNA, 15 bp, Homo sapiens
gggcagtgcctcctg

SEQ ID NO: 1559482 - DNA, 15 bp, Homo sapiens
ggcagtgcctcctgg

SEQ ID NO: 1559483 - DNA, 15 bp, Homo sapiens
gcagtgcctcctggg

SEQ ID NO: 1559484 - DNA, 15 bp, Homo sapiens
cagtgcctcctggga

SEQ ID NO: 1559485 - DNA, 15 bp, Homo sapiens
agtgcctcctgggac

SEQ ID NO: 1559486 - DNA, 15 bp, Homo sapiens
gtgcctcctgggacc

SEQ ID NO: 1559487 - DNA, 15 bp, Homo sapiens
tgcctcctgggacca

SEQ ID NO: 1559488 - DNA, 15 bp, Homo sapiens
gcctcctgggaccat

SEQ ID NO: 1559489 - DNA, 15 bp, Homo sapiens
cctcctgggaccatg

SEQ ID NO: 1559490 - DNA, 15 bp, Homo sapiens
ctcctgggaccatgg

SEQ ID NO: 1559491 - DNA, 15 bp, Homo sapiens
tcctgggaccatgga

SEQ ID NO: 1559492 - DNA, 15 bp, Homo sapiens
cctgggaccatggac

SEQ ID NO: 1559493 - DNA, 15 bp, Homo sapiens
ctgggaccatggaca

SEQ ID NO: 1559494 - DNA, 15 bp, Homo sapiens
tgggaccatggacac

SEQ ID NO: 1559495 - DNA, 15 bp, Homo sapiens
gggaccatggacaca

SEQ ID NO: 1559496 - DNA, 15 bp, Homo sapiens
ggaccatggacacat

SEQ ID NO: 1559497 - DNA, 15 bp, Homo sapiens
gaccatggacacatt

SEQ ID NO: 1559498 - DNA, 15 bp, Homo sapiens
accatggacacattt

SEQ ID NO: 1559499 - DNA, 15 bp, Homo sapiens
ccatggacacatttt

SEQ ID NO: 1559500 - DNA, 15 bp, Homo sapiens
catggacacattttc

SEQ ID NO: 1559501 - DNA, 15 bp, Homo sapiens
atggacacattttct

SEQ ID NO: 1559502 - DNA, 15 bp, Homo sapiens
tggacacattttctc

SEQ ID NO: 1559503 - DNA, 15 bp, Homo sapiens
ggacacattttctcc

SEQ ID NO: 1559504 - DNA, 15 bp, Homo sapiens
gacacattttctcct

SEQ ID NO: 1559505 - DNA, 15 bp, Homo sapiens
acacattttctccta

SEQ ID NO: 1559506 - DNA, 15 bp, Homo sapiens
cacattttctcctag

SEQ ID NO: 1559507 - DNA, 15 bp, Homo sapiens
acattttctcctagg

SEQ ID NO: 1559508 - DNA, 15 bp, Homo sapiens
cattttctcctagga

SEQ ID NO: 1559509 - DNA, 15 bp, Homo sapiens
attttctcctaggag

SEQ ID NO: 1559510 - DNA, 15 bp, Homo sapiens
ttttctcctaggaga

SEQ ID NO: 1559511 - DNA, 15 bp, Homo sapiens
tttctcctaggagaa

SEQ ID NO: 1559512 - DNA, 15 bp, Homo sapiens
ttctcctaggagaag

SEQ ID NO: 1559513 - DNA, 15 bp, Homo sapiens
tctcctaggagaagc

SEQ ID NO: 1559514 - DNA, 15 bp, Homo sapiens
ctcctaggagaagca

SEQ ID NO: 1559515 - DNA, 15 bp, Homo sapiens
tcctaggagaagcag

SEQ ID NO: 1559516 - DNA, 15 bp, Homo sapiens
cctaggagaagcagc

SEQ ID NO: 1559517 - DNA, 15 bp, Homo sapiens
ctaggagaagcagcc

SEQ ID NO: 1559518 - DNA, 15 bp, Homo sapiens
taggagaagcagcct

SEQ ID NO: 1559519 - DNA, 15 bp, Homo sapiens
aggagaagcagcctc

SEQ ID NO: 1559520 - DNA, 15 bp, Homo sapiens
ggagaagcagcctcc

SEQ ID NO: 1559521 - DNA, 15 bp, Homo sapiens
gagaagcagcctcct

SEQ ID NO: 1559522 - DNA, 15 bp, Homo sapiens
agaagcagcctccta

SEQ ID NO: 1559523 - DNA, 15 bp, Homo sapiens
gaagcagcctcctaa

SEQ ID NO: 1559524 - DNA, 15 bp, Homo sapiens
aagcagcctcctaat

SEQ ID NO: 1559525 - DNA, 15 bp, Homo sapiens
agcagcctcctaatt

SEQ ID NO: 1559526 - DNA, 15 bp, Homo sapiens
gcagcctcctaattt

SEQ ID NO: 1559527 - DNA, 15 bp, Homo sapiens
cagcctcctaatttg

SEQ ID NO: 1559528 - DNA, 15 bp, Homo sapiens
agcctcctaatttga

SEQ ID NO: 1559529 - DNA, 15 bp, Homo sapiens
gcctcctaatttgat

SEQ ID NO: 1559530 - DNA, 15 bp, Homo sapiens
cctcctaatttgatc

SEQ ID NO: 1559531 - DNA, 15 bp, Homo sapiens
ctcctaatttgatca

SEQ ID NO: 1559532 - DNA, 15 bp, Homo sapiens
tcctaatttgatcac

SEQ ID NO: 1559533 - DNA, 15 bp, Homo sapiens
cctaatttgatcaca

SEQ ID NO: 1559534 - DNA, 15 bp, Homo sapiens
ctaatttgatcacag

SEQ ID NO: 1559535 - DNA, 15 bp, Homo sapiens
taatttgatcacagt

SEQ ID NO: 1559536 - DNA, 15 bp, Homo sapiens
aatttgatcacagtg

SEQ ID NO: 1559537 - DNA, 15 bp, Homo sapiens
atttgatcacagtgg

SEQ ID NO: 1559538 - DNA, 15 bp, Homo sapiens
tttgatcacagtggc

SEQ ID NO: 1559539 - DNA, 15 bp, Homo sapiens
ttgatcacagtggcg

SEQ ID NO: 1559540 - DNA, 15 bp, Homo sapiens
tgatcacagtggcga

SEQ ID NO: 1559541 - DNA, 15 bp, Homo sapiens
gatcacagtggcgag

SEQ ID NO: 1559542 - DNA, 15 bp, Homo sapiens
atcacagtggcgaga

SEQ ID NO: 1559543 - DNA, 15 bp, Homo sapiens
tcacagtggcgagag

SEQ ID NO: 1559544 - DNA, 15 bp, Homo sapiens
cacagtggcgagagg

SEQ ID NO: 1559545 - DNA, 15 bp, Homo sapiens
acagtggcgagagga

SEQ ID NO: 1559546 - DNA, 15 bp, Homo sapiens
cagtggcgagaggag

SEQ ID NO: 1559547 - DNA, 15 bp, Homo sapiens
agtggcgagaggaga

SEQ ID NO: 1559548 - DNA, 15 bp, Homo sapiens
gtggcgagaggagag

SEQ ID NO: 1559549 - DNA, 15 bp, Homo sapiens
tggcgagaggagagg

SEQ ID NO: 1559550 - DNA, 15 bp, Homo sapiens
ggcgagaggagagga

SEQ ID NO: 1559551 - DNA, 15 bp, Homo sapiens
gcgagaggagaggaa

SEQ ID NO: 1559552 - DNA, 15 bp, Homo sapiens
cgagaggagaggaaa

SEQ ID NO: 1559553 - DNA, 15 bp, Homo sapiens
gagaggagaggaaaa

SEQ ID NO: 1559554 - DNA, 15 bp, Homo sapiens
agaggagaggaaaaa

SEQ ID NO: 1559555 - DNA, 15 bp, Homo sapiens
gaggagaggaaaaac

SEQ ID NO: 1559556 - DNA, 15 bp, Homo sapiens
aggagaggaaaaacg

SEQ ID NO: 1559557 - DNA, 15 bp, Homo sapiens
ggagaggaaaaacga

SEQ ID NO: 1559558 - DNA, 15 bp, Homo sapiens
gagaggaaaaacgat

SEQ ID NO: 1559559 - DNA, 15 bp, Homo sapiens
agaggaaaaacgatc

SEQ ID NO: 1559560 - DNA, 15 bp, Homo sapiens
gaggaaaaacgatcg

SEQ ID NO: 1559561 - DNA, 15 bp, Homo sapiens
aggaaaaacgatcgc

SEQ ID NO: 1559562 - DNA, 15 bp, Homo sapiens
ggaaaaacgatcgct

SEQ ID NO: 1559563 - DNA, 15 bp, Homo sapiens
gaaaaacgatcgctg

SEQ ID NO: 1559564 - DNA, 15 bp, Homo sapiens
aaaaacgatcgctgt

SEQ ID NO: 1559565 - DNA, 15 bp, Homo sapiens
aaaacgatcgctgtg

SEQ ID NO: 1559566 - DNA, 15 bp, Homo sapiens
aaacgatcgctgtga

SEQ ID NO: 1559567 - DNA, 15 bp, Homo sapiens
aacgatcgctgtgaa

SEQ ID NO: 1559568 - DNA, 15 bp, Homo sapiens
acgatcgctgtgaaa

SEQ ID NO: 1559569 - DNA, 15 bp, Homo sapiens
cgatcgctgtgaaaa

SEQ ID NO: 1559570 - DNA, 15 bp, Homo sapiens
gatcgctgtgaaaat

SEQ ID NO: 1559571 - DNA, 15 bp, Homo sapiens
atcgctgtgaaaatg

SEQ ID NO: 1559572 - DNA, 15 bp, Homo sapiens
tcgctgtgaaaatga

SEQ ID NO: 1559573 - DNA, 15 bp, Homo sapiens
cgctgtgaaaatgag

SEQ ID NO: 1559574 - DNA, 15 bp, Homo sapiens
gctgtgaaaatgagg

SEQ ID NO: 1559575 - DNA, 15 bp, Homo sapiens
ctgtgaaaatgagga

SEQ ID NO: 1559576 - DNA, 15 bp, Homo sapiens
tgtgaaaatgaggag

SEQ ID NO: 1559577 - DNA, 15 bp, Homo sapiens
gtgaaaatgaggagg

SEQ ID NO: 1559578 - DNA, 15 bp, Homo sapiens
tgaaaatgaggagga

SEQ ID NO: 1559579 - DNA, 15 bp, Homo sapiens
gaaaatgaggaggat

SEQ ID NO: 1559580 - DNA, 15 bp, Homo sapiens
aaaatgaggaggatt

SEQ ID NO: 1559581 - DNA, 15 bp, Homo sapiens
aaatgaggaggattg

SEQ ID NO: 1559582 - DNA, 15 bp, Homo sapiens
aatgaggaggattgc

SEQ ID NO: 1559583 - DNA, 15 bp, Homo sapiens
atgaggaggattgct

SEQ ID NO: 1559584 - DNA, 15 bp, Homo sapiens
tgaggaggattgctt

SEQ ID NO: 1559585 - DNA, 15 bp, Homo sapiens
gaggaggattgcttc

SEQ ID NO: 1559586 - DNA, 15 bp, Homo sapiens
aggaggattgcttct

SEQ ID NO: 1559587 - DNA, 15 bp, Homo sapiens
ggaggattgcttctt

SEQ ID NO: 1559588 - DNA, 15 bp, Homo sapiens
gaggattgcttcttg

SEQ ID NO: 1559589 - DNA, 15 bp, Homo sapiens
aggattgcttcttgt

SEQ ID NO: 1559590 - DNA, 15 bp, Homo sapiens
ggattgcttcttgtg

SEQ ID NO: 1559591 - DNA, 15 bp, Homo sapiens
gattgcttcttgtga

SEQ ID NO: 1559592 - DNA, 15 bp, Homo sapiens
attgcttcttgtgaa

SEQ ID NO: 1559593 - DNA, 15 bp, Homo sapiens
ttgcttcttgtgaaa

SEQ ID NO: 1559594 - DNA, 15 bp, Homo sapiens
tgcttcttgtgaaac

SEQ ID NO: 1559595 - DNA, 15 bp, Homo sapiens
gcttcttgtgaaacc

SEQ ID NO: 1559596 - DNA, 15 bp, Homo sapiens
cttcttgtgaaacca

SEQ ID NO: 1559597 - DNA, 15 bp, Homo sapiens
ttcttgtgaaaccac

SEQ ID NO: 1559598 - DNA, 15 bp, Homo sapiens
tcttgtgaaaccaca

SEQ ID NO: 1559599 - DNA, 15 bp, Homo sapiens
cttgtgaaaccacag

SEQ ID NO: 1559600 - DNA, 15 bp, Homo sapiens
ttgtgaaaccacagg

SEQ ID NO: 1559601 - DNA, 15 bp, Homo sapiens
tgtgaaaccacaggc

SEQ ID NO: 1559602 - DNA, 15 bp, Homo sapiens
gtgaaaccacaggcc

SEQ ID NO: 1559603 - DNA, 15 bp, Homo sapiens
tgaaaccacaggccc

SEQ ID NO: 1559604 - DNA, 15 bp, Homo sapiens
gaaaccacaggccct

SEQ ID NO: 1559605 - DNA, 15 bp, Homo sapiens
aaaccacaggccctt

SEQ ID NO: 1559606 - DNA, 15 bp, Homo sapiens
aaccacaggcccttg

SEQ ID NO: 1559607 - DNA, 15 bp, Homo sapiens
accacaggcccttgg

SEQ ID NO: 1559608 - DNA, 15 bp, Homo sapiens
ccacaggcccttggg

SEQ ID NO: 1559609 - DNA, 15 bp, Homo sapiens
cacaggcccttgggg

SEQ ID NO: 1559610 - DNA, 15 bp, Homo sapiens
acaggcccttggggt

SEQ ID NO: 1559611 - DNA, 15 bp, Homo sapiens
caggcccttggggtt

SEQ ID NO: 1559612 - DNA, 15 bp, Homo sapiens
aggcccttggggttc

SEQ ID NO: 1559613 - DNA, 15 bp, Homo sapiens
ggcccttggggttcc

SEQ ID NO: 1559614 - DNA, 15 bp, Homo sapiens
gcccttggggttccc

SEQ ID NO: 1559615 - DNA, 15 bp, Homo sapiens
cccttggggttcccc

SEQ ID NO: 1559616 - DNA, 15 bp, Homo sapiens
ccttggggttccccc

SEQ ID NO: 1559617 - DNA, 15 bp, Homo sapiens
cttggggttccccca

SEQ ID NO: 1559618 - DNA, 15 bp, Homo sapiens
ttggggttcccccag

SEQ ID NO: 1559619 - DNA, 15 bp, Homo sapiens
tggggttcccccaga

SEQ ID NO: 1559620 - DNA, 15 bp, Homo sapiens
ggggttcccccagac

SEQ ID NO: 1559621 - DNA, 15 bp, Homo sapiens
gggttcccccagaca

SEQ ID NO: 1559622 - DNA, 15 bp, Homo sapiens
ggttcccccagacag

SEQ ID NO: 1559623 - DNA, 15 bp, Homo sapiens
gttcccccagacaga

SEQ ID NO: 1559624 - DNA, 15 bp, Homo sapiens
ttcccccagacagag

SEQ ID NO: 1559625 - DNA, 15 bp, Homo sapiens
tcccccagacagagc

SEQ ID NO: 1559626 - DNA, 15 bp, Homo sapiens
cccccagacagagcc

SEQ ID NO: 1559627 - DNA, 15 bp, Homo sapiens
ccccagacagagccg

SEQ ID NO: 1559628 - DNA, 15 bp, Homo sapiens
cccagacagagccgc

SEQ ID NO: 1559629 - DNA, 15 bp, Homo sapiens
ccagacagagccgca

SEQ ID NO: 1559630 - DNA, 15 bp, Homo sapiens
cagacagagccgcaa

SEQ ID NO: 1559631 - DNA, 15 bp, Homo sapiens
agacagagccgcaaa

SEQ ID NO: 1559632 - DNA, 15 bp, Homo sapiens
gacagagccgcaaat

SEQ ID NO: 1559633 - DNA, 15 bp, Homo sapiens
acagagccgcaaatc

SEQ ID NO: 1559634 - DNA, 15 bp, Homo sapiens
cagagccgcaaatca

SEQ ID NO: 1559635 - DNA, 15 bp, Homo sapiens
agagccgcaaatcaa

SEQ ID NO: 1559636 - DNA, 15 bp, Homo sapiens
gagccgcaaatcaac

SEQ ID NO: 1559637 - DNA, 15 bp, Homo sapiens
agccgcaaatcaacc

SEQ ID NO: 1559638 - DNA, 15 bp, Homo sapiens
gccgcaaatcaaccc

SEQ ID NO: 1559639 - DNA, 15 bp, Homo sapiens
ccgcaaatcaacccc

SEQ ID NO: 1559640 - DNA, 15 bp, Homo sapiens
cgcaaatcaacccca

SEQ ID NO: 1559641 - DNA, 15 bp, Homo sapiens
gcaaatcaaccccag

SEQ ID NO: 1559642 - DNA, 15 bp, Homo sapiens
caaatcaaccccaga

SEQ ID NO: 1559643 - DNA, 15 bp, Homo sapiens
aaatcaaccccagac

SEQ ID NO: 1559644 - DNA, 15 bp, Homo sapiens
aatcaaccccagact

SEQ ID NO: 1559645 - DNA, 15 bp, Homo sapiens
atcaaccccagactc

SEQ ID NO: 1559646 - DNA, 15 bp, Homo sapiens
tcaaccccagactca

SEQ ID NO: 1559647 - DNA, 15 bp, Homo sapiens
caaccccagactcaa

SEQ ID NO: 1559648 - DNA, 15 bp, Homo sapiens
aaccccagactcaaa

SEQ ID NO: 1559649 - DNA, 15 bp, Homo sapiens
accccagactcaaac

SEQ ID NO: 1559650 - DNA, 15 bp, Homo sapiens
ccccagactcaaact

SEQ ID NO: 1559651 - DNA, 15 bp, Homo sapiens
cccagactcaaactc

SEQ ID NO: 1559652 - DNA, 15 bp, Homo sapiens
ccagactcaaactca

SEQ ID NO: 1559653 - DNA, 15 bp, Homo sapiens
cagactcaaactcaa

SEQ ID NO: 1559654 - DNA, 15 bp, Homo sapiens
agactcaaactcaag

SEQ ID NO: 1559655 - DNA, 15 bp, Homo sapiens
gactcaaactcaagg

SEQ ID NO: 1559656 - DNA, 15 bp, Homo sapiens
actcaaactcaaggt

SEQ ID NO: 1559657 - DNA, 15 bp, Homo sapiens
ctcaaactcaaggtc

SEQ ID NO: 1559658 - DNA, 15 bp, Homo sapiens
tcaaactcaaggtca

SEQ ID NO: 1559659 - DNA, 15 bp, Homo sapiens
caaactcaaggtcaa

SEQ ID NO: 1559660 - DNA, 15 bp, Homo sapiens
aaactcaaggtcaac

SEQ ID NO: 1559661 - DNA, 15 bp, Homo sapiens
aactcaaggtcaacg

SEQ ID NO: 1559662 - DNA, 15 bp, Homo sapiens
actcaaggtcaacgg

SEQ ID NO: 1559663 - DNA, 15 bp, Homo sapiens
ctcaaggtcaacggc

SEQ ID NO: 1559664 - DNA, 15 bp, Homo sapiens
tcaaggtcaacggct

SEQ ID NO: 1559665 - DNA, 15 bp, Homo sapiens
caaggtcaacggctt

SEQ ID NO: 1559666 - DNA, 15 bp, Homo sapiens
aaggtcaacggctta

SEQ ID NO: 1559667 - DNA, 15 bp, Homo sapiens
aggtcaacggcttat

SEQ ID NO: 1559668 - DNA, 15 bp, Homo sapiens
ggtcaacggcttatt

SEQ ID NO: 1559669 - DNA, 15 bp, Homo sapiens
gtcaacggcttatta

SEQ ID NO: 1559670 - DNA, 15 bp, Homo sapiens
tcaacggcttattag

SEQ ID NO: 1559671 - DNA, 15 bp, Homo sapiens
caacggcttattagt

SEQ ID NO: 1559672 - DNA, 15 bp, Homo sapiens
aacggcttattagtg

SEQ ID NO: 1559673 - DNA, 15 bp, Homo sapiens
acggcttattagtga

SEQ ID NO: 1559674 - DNA, 15 bp, Homo sapiens
cggcttattagtgaa

SEQ ID NO: 1559675 - DNA, 15 bp, Homo sapiens
ggcttattagtgaaa

SEQ ID NO: 1559676 - DNA, 15 bp, Homo sapiens
gcttattagtgaaac

SEQ ID NO: 1559677 - DNA, 15 bp, Homo sapiens
cttattagtgaaact

SEQ ID NO: 1559678 - DNA, 15 bp, Homo sapiens
ttattagtgaaactg

SEQ ID NO: 1559679 - DNA, 15 bp, Homo sapiens
tattagtgaaactgg

SEQ ID NO: 1559680 - DNA, 15 bp, Homo sapiens
attagtgaaactggg

SEQ ID NO: 1559681 - DNA, 15 bp, Homo sapiens
ttagtgaaactgggg

SEQ ID NO: 1559682 - DNA, 15 bp, Homo sapiens
tagtgaaactggggc

SEQ ID NO: 1559683 - DNA, 15 bp, Homo sapiens
agtgaaactggggct

SEQ ID NO: 1559684 - DNA, 15 bp, Homo sapiens
gtgaaactggggctt

SEQ ID NO: 1559685 - DNA, 15 bp, Homo sapiens
tgaaactggggcttg

SEQ ID NO: 1559686 - DNA, 15 bp, Homo sapiens
gaaactggggcttgc

SEQ ID NO: 1559687 - DNA, 15 bp, Homo sapiens
aaactggggcttgca

SEQ ID NO: 1559688 - DNA, 15 bp, Homo sapiens
aactggggcttgcaa

SEQ ID NO: 1559689 - DNA, 15 bp, Homo sapiens
actggggcttgcaag

SEQ ID NO: 1559690 - DNA, 15 bp, Homo sapiens
ctggggcttgcaaga

SEQ ID NO: 1559691 - DNA, 15 bp, Homo sapiens
tggggcttgcaagag

SEQ ID NO: 1559692 - DNA, 15 bp, Homo sapiens
ggggcttgcaagagg

SEQ ID NO: 1559693 - DNA, 15 bp, Homo sapiens
gggcttgcaagagga

SEQ ID NO: 1559694 - DNA, 15 bp, Homo sapiens
ggcttgcaagaggag

SEQ ID NO: 1559695 - DNA, 15 bp, Homo sapiens
gcttgcaagaggagg

SEQ ID NO: 1559696 - DNA, 15 bp, Homo sapiens
cttgcaagaggaggt

SEQ ID NO: 1559697 - DNA, 15 bp, Homo sapiens
ttgcaagaggaggtg

SEQ ID NO: 1559698 - DNA, 15 bp, Homo sapiens
tgcaagaggaggtgg

SEQ ID NO: 1559699 - DNA, 15 bp, Homo sapiens
gcaagaggaggtggt

SEQ ID NO: 1559700 - DNA, 15 bp, Homo sapiens
caagaggaggtggtt

SEQ ID NO: 1559701 - DNA, 15 bp, Homo sapiens
aagaggaggtggttc

SEQ ID NO: 1559702 - DNA, 15 bp, Homo sapiens
agaggaggtggttct

SEQ ID NO: 1559703 - DNA, 15 bp, Homo sapiens
gaggaggtggttctg

SEQ ID NO: 1559704 - DNA, 15 bp, Homo sapiens
aggaggtggttctga

SEQ ID NO: 1559705 - DNA, 15 bp, Homo sapiens
ggaggtggttctgaa

SEQ ID NO: 1559706 - DNA, 15 bp, Homo sapiens
gaggtggttctgaaa

SEQ ID NO: 1559707 - DNA, 15 bp, Homo sapiens
aggtggttctgaaag

SEQ ID NO: 1559708 - DNA, 15 bp, Homo sapiens
ggtggttctgaaagt

SEQ ID NO: 1559709 - DNA, 15 bp, Homo sapiens
gtggttctgaaagtg

SEQ ID NO: 1559710 - DNA, 15 bp, Homo sapiens
tggttctgaaagtgg

SEQ ID NO: 1559711 - DNA, 15 bp, Homo sapiens
ggttctgaaagtggc

SEQ ID NO: 1559712 - DNA, 15 bp, Homo sapiens
gttctgaaagtggct

SEQ ID NO: 1559713 - DNA, 15 bp, Homo sapiens
ttctgaaagtggctc

SEQ ID NO: 1559714 - DNA, 15 bp, Homo sapiens
tctgaaagtggctct

SEQ ID NO: 1559715 - DNA, 15 bp, Homo sapiens
ctgaaagtggctctt

SEQ ID NO: 1559716 - DNA, 15 bp, Homo sapiens
tgaaagtggctcttc

SEQ ID NO: 1559717 - DNA, 15 bp, Homo sapiens
gaaagtggctcttct

SEQ ID NO: 1559718 - DNA, 15 bp, Homo sapiens
aaagtggctcttcta

SEQ ID NO: 1559719 - DNA, 15 bp, Homo sapiens
aagtggctcttctaa

SEQ ID NO: 1559720 - DNA, 15 bp, Homo sapiens
agtggctcttctaac

SEQ ID NO: 1559721 - DNA, 15 bp, Homo sapiens
gtggctcttctaacc

SEQ ID NO: 1559722 - DNA, 15 bp, Homo sapiens
tggctcttctaacct

SEQ ID NO: 1559723 - DNA, 15 bp, Homo sapiens
ggctcttctaacctc

SEQ ID NO: 1559724 - DNA, 15 bp, Homo sapiens
gctcttctaacctca

SEQ ID NO: 1559725 - DNA, 15 bp, Homo sapiens
ctcttctaacctcag

SEQ ID NO: 1559726 - DNA, 15 bp, Homo sapiens
tcttctaacctcagc

SEQ ID NO: 1559727 - DNA, 15 bp, Homo sapiens
cttctaacctcagcc

SEQ ID NO: 1559728 - DNA, 15 bp, Homo sapiens
ttctaacctcagcca

SEQ ID NO: 1559729 - DNA, 15 bp, Homo sapiens
tctaacctcagccaa

SEQ ID NO: 1559730 - DNA, 15 bp, Homo sapiens
ctaacctcagccaaa

SEQ ID NO: 1559731 - DNA, 15 bp, Homo sapiens
taacctcagccaaac

SEQ ID NO: 1559732 - DNA, 15 bp, Homo sapiens
aacctcagccaaaca

SEQ ID NO: 1559733 - DNA, 15 bp, Homo sapiens
acctcagccaaacac

SEQ ID NO: 1559734 - DNA, 15 bp, Homo sapiens
cctcagccaaacaca

SEQ ID NO: 1559735 - DNA, 15 bp, Homo sapiens
ctcagccaaacacag

SEQ ID NO: 1559736 - DNA, 15 bp, Homo sapiens
tcagccaaacacaga

SEQ ID NO: 1559737 - DNA, 15 bp, Homo sapiens
cagccaaacacagag

SEQ ID NO: 1559738 - DNA, 15 bp, Homo sapiens
agccaaacacagagc

SEQ ID NO: 1559739 - DNA, 15 bp, Homo sapiens
gccaaacacagagcg

SEQ ID NO: 1559740 - DNA, 15 bp, Homo sapiens
ccaaacacagagcgg

SEQ ID NO: 1559741 - DNA, 15 bp, Homo sapiens
caaacacagagcggg

SEQ ID NO: 1559742 - DNA, 15 bp, Homo sapiens
aaacacagagcggga

SEQ ID NO: 1559743 - DNA, 15 bp, Homo sapiens
aacacagagcgggag

SEQ ID NO: 1559744 - DNA, 15 bp, Homo sapiens
acacagagcgggagt

SEQ ID NO: 1559745 - DNA, 15 bp, Homo sapiens
cacagagcgggagtg

SEQ ID NO: 1559746 - DNA, 15 bp, Homo sapiens
acagagcgggagtga

SEQ ID NO: 1559747 - DNA, 15 bp, Homo sapiens
cagagcgggagtgac

SEQ ID NO: 1559748 - DNA, 15 bp, Homo sapiens
agagcgggagtgacg

SEQ ID NO: 1559749 - DNA, 15 bp, Homo sapiens
gagcgggagtgacgg

SEQ ID NO: 1559750 - DNA, 15 bp, Homo sapiens
agcgggagtgacggg

SEQ ID NO: 1559751 - DNA, 15 bp, Homo sapiens
gcgggagtgacggga

SEQ ID NO: 1559752 - DNA, 15 bp, Homo sapiens
cgggagtgacgggag

SEQ ID NO: 1559753 - DNA, 15 bp, Homo sapiens
gggagtgacgggagc

SEQ ID NO: 1559754 - DNA, 15 bp, Homo sapiens
ggagtgacgggagcc

SEQ ID NO: 1559755 - DNA, 15 bp, Homo sapiens
gagtgacgggagcct

SEQ ID NO: 1559756 - DNA, 15 bp, Homo sapiens
agtgacgggagcctc

SEQ ID NO: 1559757 - DNA, 15 bp, Homo sapiens
gtgacgggagcctcc

SEQ ID NO: 1559758 - DNA, 15 bp, Homo sapiens
tgacgggagcctcct

SEQ ID NO: 1559759 - DNA, 15 bp, Homo sapiens
gacgggagcctcctc

SEQ ID NO: 1559760 - DNA, 15 bp, Homo sapiens
acgggagcctcctct

SEQ ID NO: 1559761 - DNA, 15 bp, Homo sapiens
cgggagcctcctctg

SEQ ID NO: 1559762 - DNA, 15 bp, Homo sapiens
gggagcctcctctgc

SEQ ID NO: 1559763 - DNA, 15 bp, Homo sapiens
ggagcctcctctgct

SEQ ID NO: 1559764 - DNA, 15 bp, Homo sapiens
gagcctcctctgctt

SEQ ID NO: 1559765 - DNA, 15 bp, Homo sapiens
agcctcctctgcttg

SEQ ID NO: 1559766 - DNA, 15 bp, Homo sapiens
gcctcctctgcttgc

SEQ ID NO: 1559767 - DNA, 15 bp, Homo sapiens
cctcctctgcttgca

SEQ ID NO: 1559768 - DNA, 15 bp, Homo sapiens
ctcctctgcttgcat

SEQ ID NO: 1559769 - DNA, 15 bp, Homo sapiens
tcctctgcttgcatc

SEQ ID NO: 1559770 - DNA, 15 bp, Homo sapiens
cctctgcttgcatca

SEQ ID NO: 1559771 - DNA, 15 bp, Homo sapiens
ctctgcttgcatcac

SEQ ID NO: 1559772 - DNA, 15 bp, Homo sapiens
tctgcttgcatcact

SEQ ID NO: 1559773 - DNA, 15 bp, Homo sapiens
ctgcttgcatcactt

SEQ ID NO: 1559774 - DNA, 15 bp, Homo sapiens
tgcttgcatcacttg

SEQ ID NO: 1559775 - DNA, 15 bp, Homo sapiens
gcttgcatcacttgg

SEQ ID NO: 1559776 - DNA, 15 bp, Homo sapiens
cttgcatcacttggg

SEQ ID NO: 1559777 - DNA, 15 bp, Homo sapiens
ttgcatcacttgggg

SEQ ID NO: 1559778 - DNA, 15 bp, Homo sapiens
tgcatcacttggggt

SEQ ID NO: 1559779 - DNA, 15 bp, Homo sapiens
gcatcacttggggtc

SEQ ID NO: 1559780 - DNA, 15 bp, Homo sapiens
catcacttggggtca

SEQ ID NO: 1559781 - DNA, 15 bp, Homo sapiens
atcacttggggtcac

SEQ ID NO: 1559782 - DNA, 15 bp, Homo sapiens
tcacttggggtcacc

SEQ ID NO: 1559783 - DNA, 15 bp, Homo sapiens
cacttggggtcacca

SEQ ID NO: 1559784 - DNA, 15 bp, Homo sapiens
acttggggtcaccac

SEQ ID NO: 1559785 - DNA, 15 bp, Homo sapiens
cttggggtcaccacc

SEQ ID NO: 1559786 - DNA, 15 bp, Homo sapiens
ttggggtcaccaccc

SEQ ID NO: 1559787 - DNA, 15 bp, Homo sapiens
tggggtcaccaccct

SEQ ID NO: 1559788 - DNA, 15 bp, Homo sapiens
ggggtcaccaccctc

SEQ ID NO: 1559789 - DNA, 15 bp, Homo sapiens
gggtcaccaccctcc

SEQ ID NO: 1559790 - DNA, 15 bp, Homo sapiens
ggtcaccaccctccc

SEQ ID NO: 1559791 - DNA, 15 bp, Homo sapiens
gtcaccaccctcccc

SEQ ID NO: 1559792 - DNA, 15 bp, Homo sapiens
tcaccaccctcccct

SEQ ID NO: 1559793 - DNA, 15 bp, Homo sapiens
caccaccctcccctg

SEQ ID NO: 1559794 - DNA, 15 bp, Homo sapiens
accaccctcccctgt

SEQ ID NO: 1559795 - DNA, 15 bp, Homo sapiens
ccaccctcccctgtc

SEQ ID NO: 1559796 - DNA, 15 bp, Homo sapiens
caccctcccctgtct

SEQ ID NO: 1559797 - DNA, 15 bp, Homo sapiens
accctcccctgtctt

SEQ ID NO: 1559798 - DNA, 15 bp, Homo sapiens
ccctcccctgtcttc

SEQ ID NO: 1559799 - DNA, 15 bp, Homo sapiens
cctcccctgtcttct

SEQ ID NO: 1559800 - DNA, 15 bp, Homo sapiens
ctcccctgtcttctc

SEQ ID NO: 1559801 - DNA, 15 bp, Homo sapiens
tcccctgtcttctct

SEQ ID NO: 1559802 - DNA, 15 bp, Homo sapiens
cccctgtcttctctc

SEQ ID NO: 1559803 - DNA, 15 bp, Homo sapiens
ccctgtcttctctca

SEQ ID NO: 1559804 - DNA, 15 bp, Homo sapiens
cctgtcttctctcaa

SEQ ID NO: 1559805 - DNA, 15 bp, Homo sapiens
ctgtcttctctcaaa

SEQ ID NO: 1559806 - DNA, 15 bp, Homo sapiens
tgtcttctctcaaag

SEQ ID NO: 1559807 - DNA, 15 bp, Homo sapiens
gtcttctctcaaagg

SEQ ID NO: 1559808 - DNA, 15 bp, Homo sapiens
tcttctctcaaaggg

SEQ ID NO: 1559809 - DNA, 15 bp, Homo sapiens
cttctctcaaaggga

SEQ ID NO: 1559810 - DNA, 15 bp, Homo sapiens
ttctctcaaagggaa

SEQ ID NO: 1559811 - DNA, 15 bp, Homo sapiens
tctctcaaagggaag

SEQ ID NO: 1559812 - DNA, 15 bp, Homo sapiens
ctctcaaagggaagc

SEQ ID NO: 1559813 - DNA, 15 bp, Homo sapiens
tctcaaagggaagct

SEQ ID NO: 1559814 - DNA, 15 bp, Homo sapiens
ctcaaagggaagctg

SEQ ID NO: 1559815 - DNA, 15 bp, Homo sapiens
tcaaagggaagctgt

SEQ ID NO: 1559816 - DNA, 15 bp, Homo sapiens
caaagggaagctgtt

SEQ ID NO: 1559817 - DNA, 15 bp, Homo sapiens
aaagggaagctgttt

SEQ ID NO: 1559818 - DNA, 15 bp, Homo sapiens
aagggaagctgtttg

SEQ ID NO: 1559819 - DNA, 15 bp, Homo sapiens
agggaagctgtttgt

SEQ ID NO: 1559820 - DNA, 15 bp, Homo sapiens
gggaagctgtttgtg

SEQ ID NO: 1559821 - DNA, 15 bp, Homo sapiens
ggaagctgtttgtgt

SEQ ID NO: 1559822 - DNA, 15 bp, Homo sapiens
gaagctgtttgtgtg

SEQ ID NO: 1559823 - DNA, 15 bp, Homo sapiens
aagctgtttgtgtgt

SEQ ID NO: 1559824 - DNA, 15 bp, Homo sapiens
agctgtttgtgtgtc

SEQ ID NO: 1559825 - DNA, 15 bp, Homo sapiens
tgtttgtgtgtctgg

SEQ ID NO: 1559826 - DNA, 15 bp, Homo sapiens
gtttgtgtgtctggg

SEQ ID NO: 1559827 - DNA, 15 bp, Homo sapiens
tttgtgtgtctgggt

SEQ ID NO: 1559828 - DNA, 15 bp, Homo sapiens
ttgtgtgtctgggtt

SEQ ID NO: 1559829 - DNA, 15 bp, Homo sapiens
tgtgtgtctgggttg

SEQ ID NO: 1559830 - DNA, 15 bp, Homo sapiens
gtgtgtctgggttgc

SEQ ID NO: 1559831 - DNA, 15 bp, Homo sapiens
tgtgtctgggttgct

SEQ ID NO: 1559832 - DNA, 15 bp, Homo sapiens
gtgtctgggttgctt

SEQ ID NO: 1559833 - DNA, 15 bp, Homo sapiens
tgtctgggttgctta

SEQ ID NO: 1559834 - DNA, 15 bp, Homo sapiens
gtctgggttgcttat

SEQ ID NO: 1559835 - DNA, 15 bp, Homo sapiens
tctgggttgcttatt

SEQ ID NO: 1559836 - DNA, 15 bp, Homo sapiens
ctgggttgcttattt

SEQ ID NO: 1559837 - DNA, 15 bp, Homo sapiens
tgggttgcttatttc

SEQ ID NO: 1559838 - DNA, 15 bp, Homo sapiens
gggttgcttatttcc

SEQ ID NO: 1559839 - DNA, 15 bp, Homo sapiens
ggttgcttatttccc

SEQ ID NO: 1559840 - DNA, 15 bp, Homo sapiens
gttgcttatttccct

SEQ ID NO: 1559841 - DNA, 15 bp, Homo sapiens
ttgcttatttccctc

SEQ ID NO: 1559842 - DNA, 15 bp, Homo sapiens
tgcttatttccctca

SEQ ID NO: 1559843 - DNA, 15 bp, Homo sapiens
gcttatttccctcat

SEQ ID NO: 1559844 - DNA, 15 bp, Homo sapiens
cttatttccctcatc

SEQ ID NO: 1559845 - DNA, 15 bp, Homo sapiens
ttatttccctcatct

SEQ ID NO: 1559846 - DNA, 15 bp, Homo sapiens
tatttccctcatctt

SEQ ID NO: 1559847 - DNA, 15 bp, Homo sapiens
atttccctcatcttg

SEQ ID NO: 1559848 - DNA, 15 bp, Homo sapiens
tttccctcatcttgc

SEQ ID NO: 1559849 - DNA, 15 bp, Homo sapiens
ttccctcatcttgcc

SEQ ID NO: 1559850 - DNA, 15 bp, Homo sapiens
tccctcatcttgccc

SEQ ID NO: 1559851 - DNA, 15 bp, Homo sapiens
ccctcatcttgcccc

SEQ ID NO: 1559852 - DNA, 15 bp, Homo sapiens
cctcatcttgccccc

SEQ ID NO: 1559853 - DNA, 15 bp, Homo sapiens
ctcatcttgccccct

SEQ ID NO: 1559854 - DNA, 15 bp, Homo sapiens
tcatcttgccccctc

SEQ ID NO: 1559855 - DNA, 15 bp, Homo sapiens
catcttgccccctca

SEQ ID NO: 1559856 - DNA, 15 bp, Homo sapiens
atcttgccccctcat

SEQ ID NO: 1559857 - DNA, 15 bp, Homo sapiens
tcttgccccctcatc

SEQ ID NO: 1559858 - DNA, 15 bp, Homo sapiens
cttgccccctcatct

SEQ ID NO: 1559859 - DNA, 15 bp, Homo sapiens
ttgccccctcatctc

SEQ ID NO: 1559860 - DNA, 15 bp, Homo sapiens
tgccccctcatctca

SEQ ID NO: 1559861 - DNA, 15 bp, Homo sapiens
gccccctcatctcac

SEQ ID NO: 1559862 - DNA, 15 bp, Homo sapiens
ccccctcatctcact

SEQ ID NO: 1559863 - DNA, 15 bp, Homo sapiens
cccctcatctcactg

SEQ ID NO: 1559864 - DNA, 15 bp, Homo sapiens
ccctcatctcactgc

SEQ ID NO: 1559865 - DNA, 15 bp, Homo sapiens
cctcatctcactgcc

SEQ ID NO: 1559866 - DNA, 15 bp, Homo sapiens
ctcatctcactgccc

SEQ ID NO: 1559867 - DNA, 15 bp, Homo sapiens
tcatctcactgccca

SEQ ID NO: 1559868 - DNA, 15 bp, Homo sapiens
catctcactgcccag

SEQ ID NO: 1559869 - DNA, 15 bp, Homo sapiens
atctcactgcccagt

SEQ ID NO: 1559870 - DNA, 15 bp, Homo sapiens
tctcactgcccagtt

SEQ ID NO: 1559871 - DNA, 15 bp, Homo sapiens
ctcactgcccagttt

SEQ ID NO: 1559872 - DNA, 15 bp, Homo sapiens
tcactgcccagtttc

SEQ ID NO: 1559873 - DNA, 15 bp, Homo sapiens
cactgcccagtttct

SEQ ID NO: 1559874 - DNA, 15 bp, Homo sapiens
actgcccagtttctt

SEQ ID NO: 1559875 - DNA, 15 bp, Homo sapiens
ctgcccagtttcttt

SEQ ID NO: 1559876 - DNA, 15 bp, Homo sapiens
tgcccagtttctttt

SEQ ID NO: 1559877 - DNA, 15 bp, Homo sapiens
gcccagtttcttttt

SEQ ID NO: 1559878 - DNA, 15 bp, Homo sapiens
cccagtttctttttg

SEQ ID NO: 1559879 - DNA, 15 bp, Homo sapiens
ccagtttctttttga

SEQ ID NO: 1559880 - DNA, 15 bp, Homo sapiens
cagtttctttttgag

SEQ ID NO: 1559881 - DNA, 15 bp, Homo sapiens
agtttctttttgagg

SEQ ID NO: 1559882 - DNA, 15 bp, Homo sapiens
gtttctttttgaggg

SEQ ID NO: 1559883 - DNA, 15 bp, Homo sapiens
tttctttttgagggg

SEQ ID NO: 1559884 - DNA, 15 bp, Homo sapiens
ttctttttgaggggc

SEQ ID NO: 1559885 - DNA, 15 bp, Homo sapiens
tctttttgaggggct

SEQ ID NO: 1559886 - DNA, 15 bp, Homo sapiens
ctttttgaggggctt

SEQ ID NO: 1559887 - DNA, 15 bp, Homo sapiens
tttttgaggggcttt

SEQ ID NO: 1559888 - DNA, 15 bp, Homo sapiens
ttttgaggggctttg

SEQ ID NO: 1559889 - DNA, 15 bp, Homo sapiens
tttgaggggctttgt

SEQ ID NO: 1559890 - DNA, 15 bp, Homo sapiens
ttgaggggctttgtt

SEQ ID NO: 1559891 - DNA, 15 bp, Homo sapiens
tgaggggctttgttt

SEQ ID NO: 1559892 - DNA, 15 bp, Homo sapiens
gaggggctttgtttg

SEQ ID NO: 1559893 - DNA, 15 bp, Homo sapiens
aggggctttgtttgg

SEQ ID NO: 1559894 - DNA, 15 bp, Homo sapiens
ggggctttgtttggg

SEQ ID NO: 1559895 - DNA, 15 bp, Homo sapiens
gggctttgtttgggc

SEQ ID NO: 1559896 - DNA, 15 bp, Homo sapiens
ggctttgtttgggcc

SEQ ID NO: 1559897 - DNA, 15 bp, Homo sapiens
gctttgtttgggcca

SEQ ID NO: 1559898 - DNA, 15 bp, Homo sapiens
ctttgtttgggccac

SEQ ID NO: 1559899 - DNA, 15 bp, Homo sapiens
tttgtttgggccact

SEQ ID NO: 1559900 - DNA, 15 bp, Homo sapiens
ttgtttgggccactg

SEQ ID NO: 1559901 - DNA, 15 bp, Homo sapiens
tgtttgggccactgc

SEQ ID NO: 1559902 - DNA, 15 bp, Homo sapiens
gtttgggccactgcc

SEQ ID NO: 1559903 - DNA, 15 bp, Homo sapiens
tttgggccactgcca

SEQ ID NO: 1559904 - DNA, 15 bp, Homo sapiens
ttgggccactgccag

SEQ ID NO: 1559905 - DNA, 15 bp, Homo sapiens
tgggccactgccagc

SEQ ID NO: 1559906 - DNA, 15 bp, Homo sapiens
gggccactgccagca

SEQ ID NO: 1559907 - DNA, 15 bp, Homo sapiens
ggccactgccagcag

SEQ ID NO: 1559908 - DNA, 15 bp, Homo sapiens
gccactgccagcagc

SEQ ID NO: 1559909 - DNA, 15 bp, Homo sapiens
ccactgccagcagct

SEQ ID NO: 1559910 - DNA, 15 bp, Homo sapiens
cactgccagcagctg

SEQ ID NO: 1559911 - DNA, 15 bp, Homo sapiens
actgccagcagctgt

SEQ ID NO: 1559912 - DNA, 15 bp, Homo sapiens
ctgccagcagctgtt

SEQ ID NO: 1559913 - DNA, 15 bp, Homo sapiens
tgccagcagctgttt

SEQ ID NO: 1559914 - DNA, 15 bp, Homo sapiens
gccagcagctgtttc

SEQ ID NO: 1559915 - DNA, 15 bp, Homo sapiens
ccagcagctgtttct

SEQ ID NO: 1559916 - DNA, 15 bp, Homo sapiens
cagcagctgtttctg

SEQ ID NO: 1559917 - DNA, 15 bp, Homo sapiens
agcagctgtttctgg

SEQ ID NO: 1559918 - DNA, 15 bp, Homo sapiens
gcagctgtttctgga

SEQ ID NO: 1559919 - DNA, 15 bp, Homo sapiens
cagctgtttctggaa

SEQ ID NO: 1559920 - DNA, 15 bp, Homo sapiens
agctgtttctggaaa

SEQ ID NO: 1559921 - DNA, 15 bp, Homo sapiens
gctgtttctggaaat

SEQ ID NO: 1559922 - DNA, 15 bp, Homo sapiens
ctgtttctggaaatg

SEQ ID NO: 1559923 - DNA, 15 bp, Homo sapiens
tgtttctggaaatgg

SEQ ID NO: 1559924 - DNA, 15 bp, Homo sapiens
gtttctggaaatggc

SEQ ID NO: 1559925 - DNA, 15 bp, Homo sapiens
tttctggaaatggct

SEQ ID NO: 1559926 - DNA, 15 bp, Homo sapiens
ttctggaaatggctg

SEQ ID NO: 1559927 - DNA, 15 bp, Homo sapiens
tctggaaatggctgt

SEQ ID NO: 1559928 - DNA, 15 bp, Homo sapiens
ctggaaatggctgta

SEQ ID NO: 1559929 - DNA, 15 bp, Homo sapiens
tggaaatggctgtag

SEQ ID NO: 1559930 - DNA, 15 bp, Homo sapiens
ggaaatggctgtagg

SEQ ID NO: 1559931 - DNA, 15 bp, Homo sapiens
gaaatggctgtaggt

SEQ ID NO: 1559932 - DNA, 15 bp, Homo sapiens
aaatggctgtaggtg

SEQ ID NO: 1559933 - DNA, 15 bp, Homo sapiens
aatggctgtaggtgg

SEQ ID NO: 1559934 - DNA, 15 bp, Homo sapiens
atggctgtaggtggt

SEQ ID NO: 1559935 - DNA, 15 bp, Homo sapiens
gctgtaggtggtgtt

SEQ ID NO: 1559936 - DNA, 15 bp, Homo sapiens
ctgtaggtggtgttg

SEQ ID NO: 1559937 - DNA, 15 bp, Homo sapiens
tgtaggtggtgttga

SEQ ID NO: 1559938 - DNA, 15 bp, Homo sapiens
gtaggtggtgttgag

SEQ ID NO: 1559939 - DNA, 15 bp, Homo sapiens
taggtggtgttgaga

SEQ ID NO: 1559940 - DNA, 15 bp, Homo sapiens
aggtggtgttgagaa

SEQ ID NO: 1559941 - DNA, 15 bp, Homo sapiens
ggtggtgttgagaaa

SEQ ID NO: 1559942 - DNA, 15 bp, Homo sapiens
gtggtgttgagaaag

SEQ ID NO: 1559943 - DNA, 15 bp, Homo sapiens
tggtgttgagaaaga

SEQ ID NO: 1559944 - DNA, 15 bp, Homo sapiens
ggtgttgagaaagaa

SEQ ID NO: 1559945 - DNA, 15 bp, Homo sapiens
gtgttgagaaagaat

SEQ ID NO: 1559946 - DNA, 15 bp, Homo sapiens
tgttgagaaagaatg

SEQ ID NO: 1559947 - DNA, 15 bp, Homo sapiens
gttgagaaagaatga

SEQ ID NO: 1559948 - DNA, 15 bp, Homo sapiens
ttgagaaagaatgag

SEQ ID NO: 1559949 - DNA, 15 bp, Homo sapiens
tgagaaagaatgagc

SEQ ID NO: 1559950 - DNA, 15 bp, Homo sapiens
gagaaagaatgagca

SEQ ID NO: 1559951 - DNA, 15 bp, Homo sapiens
agaaagaatgagcat

SEQ ID NO: 1559952 - DNA, 15 bp, Homo sapiens
gaaagaatgagcatt

SEQ ID NO: 1559953 - DNA, 15 bp, Homo sapiens
aaagaatgagcattg

SEQ ID NO: 1559954 - DNA, 15 bp, Homo sapiens
aagaatgagcattga

SEQ ID NO: 1559955 - DNA, 15 bp, Homo sapiens
agaatgagcattgag

SEQ ID NO: 1559956 - DNA, 15 bp, Homo sapiens
gaatgagcattgaga

SEQ ID NO: 1559957 - DNA, 15 bp, Homo sapiens
aatgagcattgagac

SEQ ID NO: 1559958 - DNA, 15 bp, Homo sapiens
atgagcattgagacg

SEQ ID NO: 1559959 - DNA, 15 bp, Homo sapiens
tgagcattgagacgg

SEQ ID NO: 1559960 - DNA, 15 bp, Homo sapiens
gagcattgagacggt

SEQ ID NO: 1559961 - DNA, 15 bp, Homo sapiens
agcattgagacggtg

SEQ ID NO: 1559962 - DNA, 15 bp, Homo sapiens
gcattgagacggtgc

SEQ ID NO: 1559963 - DNA, 15 bp, Homo sapiens
cattgagacggtgct

SEQ ID NO: 1559964 - DNA, 15 bp, Homo sapiens
attgagacggtgctc

SEQ ID NO: 1559965 - DNA, 15 bp, Homo sapiens
ttgagacggtgctcg

SEQ ID NO: 1559966 - DNA, 15 bp, Homo sapiens
tgagacggtgctcgc

SEQ ID NO: 1559967 - DNA, 15 bp, Homo sapiens
gagacggtgctcgct

SEQ ID NO: 1559968 - DNA, 15 bp, Homo sapiens
agacggtgctcgctt

SEQ ID NO: 1559969 - DNA, 15 bp, Homo sapiens
gacggtgctcgcttc

SEQ ID NO: 1559970 - DNA, 15 bp, Homo sapiens
acggtgctcgcttct

SEQ ID NO: 1559971 - DNA, 15 bp, Homo sapiens
cggtgctcgcttctc

SEQ ID NO: 1559972 - DNA, 15 bp, Homo sapiens
ggtgctcgcttctcc

SEQ ID NO: 1559973 - DNA, 15 bp, Homo sapiens
gtgctcgcttctcct

SEQ ID NO: 1559974 - DNA, 15 bp, Homo sapiens
tgctcgcttctcctc

SEQ ID NO: 1559975 - DNA, 15 bp, Homo sapiens
gctcgcttctcctcc

SEQ ID NO: 1559976 - DNA, 15 bp, Homo sapiens
ctcgcttctcctcca

SEQ ID NO: 1559977 - DNA, 15 bp, Homo sapiens
tcgcttctcctccag

SEQ ID NO: 1559978 - DNA, 15 bp, Homo sapiens
cgcttctcctccagg

SEQ ID NO: 1559979 - DNA, 15 bp, Homo sapiens
gcttctcctccaggt

SEQ ID NO: 1559980 - DNA, 15 bp, Homo sapiens
cttctcctccaggta

SEQ ID NO: 1559981 - DNA, 15 bp, Homo sapiens
ttctcctccaggtat

SEQ ID NO: 1559982 - DNA, 15 bp, Homo sapiens
tctcctccaggtatt

SEQ ID NO: 1559983 - DNA, 15 bp, Homo sapiens
ctcctccaggtattt

SEQ ID NO: 1559984 - DNA, 15 bp, Homo sapiens
tcctccaggtatttg

SEQ ID NO: 1559985 - DNA, 15 bp, Homo sapiens
cctccaggtatttga

SEQ ID NO: 1559986 - DNA, 15 bp, Homo sapiens
ctccaggtatttgag

SEQ ID NO: 1559987 - DNA, 15 bp, Homo sapiens
tccaggtatttgagt

SEQ ID NO: 1559988 - DNA, 15 bp, Homo sapiens
ccaggtatttgagtt

SEQ ID NO: 1559989 - DNA, 15 bp, Homo sapiens
caggtatttgagttg

SEQ ID NO: 1559990 - DNA, 15 bp, Homo sapiens
aggtatttgagttgt

SEQ ID NO: 1559991 - DNA, 15 bp, Homo sapiens
ggtatttgagttgtt

SEQ ID NO: 1559992 - DNA, 15 bp, Homo sapiens
gtatttgagttgttt

SEQ ID NO: 1559993 - DNA, 15 bp, Homo sapiens
tatttgagttgtttt

SEQ ID NO: 1559994 - DNA, 15 bp, Homo sapiens
atttgagttgttttg

SEQ ID NO: 1559995 - DNA, 15 bp, Homo sapiens
tttgagttgttttgg

SEQ ID NO: 1559996 - DNA, 15 bp, Homo sapiens
ttgagttgttttggt

SEQ ID NO: 1559997 - DNA, 15 bp, Homo sapiens
tgagttgttttggtg

SEQ ID NO: 1559998 - DNA, 15 bp, Homo sapiens
gagttgttttggtgc

SEQ ID NO: 1559999 - DNA, 15 bp, Homo sapiens
agttgttttggtgcc

SEQ ID NO: 1560000 - DNA, 15 bp, Homo sapiens
gttgttttggtgcct

SEQ ID NO: 1560001 - DNA, 15 bp, Homo sapiens
ttgttttggtgcctg

SEQ ID NO: 1560002 - DNA, 15 bp, Homo sapiens
tgttttggtgcctgc

SEQ ID NO: 1560003 - DNA, 15 bp, Homo sapiens
gttttggtgcctgcc

SEQ ID NO: 1560004 - DNA, 15 bp, Homo sapiens
ttttggtgcctgcct

SEQ ID NO: 1560005 - DNA, 15 bp, Homo sapiens
tttggtgcctgcctc

SEQ ID NO: 1560006 - DNA, 15 bp, Homo sapiens
ttggtgcctgcctct

SEQ ID NO: 1560007 - DNA, 15 bp, Homo sapiens
tggtgcctgcctctg

SEQ ID NO: 1560008 - DNA, 15 bp, Homo sapiens
ggtgcctgcctctgc

SEQ ID NO: 1560009 - DNA, 15 bp, Homo sapiens
gtgcctgcctctgcc

SEQ ID NO: 1560010 - DNA, 15 bp, Homo sapiens
tgcctgcctctgcca

SEQ ID NO: 1560011 - DNA, 15 bp, Homo sapiens
gcctgcctctgccat

SEQ ID NO: 1560012 - DNA, 15 bp, Homo sapiens
cctgcctctgccatg

SEQ ID NO: 1560013 - DNA, 15 bp, Homo sapiens
ctgcctctgccatgc

SEQ ID NO: 1560014 - DNA, 15 bp, Homo sapiens
tgcctctgccatgcc

SEQ ID NO: 1560015 - DNA, 15 bp, Homo sapiens
gcctctgccatgccc

SEQ ID NO: 1560016 - DNA, 15 bp, Homo sapiens
cctctgccatgccca

SEQ ID NO: 1560017 - DNA, 15 bp, Homo sapiens
ctctgccatgcccag

SEQ ID NO: 1560018 - DNA, 15 bp, Homo sapiens
tctgccatgcccaga

SEQ ID NO: 1560019 - DNA, 15 bp, Homo sapiens
ctgccatgcccagag

SEQ ID NO: 1560020 - DNA, 15 bp, Homo sapiens
tgccatgcccagaga

SEQ ID NO: 1560021 - DNA, 15 bp, Homo sapiens
gccatgcccagagaa

SEQ ID NO: 1560022 - DNA, 15 bp, Homo sapiens
ccatgcccagagaat

SEQ ID NO: 1560023 - DNA, 15 bp, Homo sapiens
catgcccagagaatc

SEQ ID NO: 1560024 - DNA, 15 bp, Homo sapiens
atgcccagagaatca

SEQ ID NO: 1560025 - DNA, 15 bp, Homo sapiens
tgcccagagaatcag

SEQ ID NO: 1560026 - DNA, 15 bp, Homo sapiens
gcccagagaatcagg

SEQ ID NO: 1560027 - DNA, 15 bp, Homo sapiens
cccagagaatcaggg

SEQ ID NO: 1560028 - DNA, 15 bp, Homo sapiens
ccagagaatcagggc

SEQ ID NO: 1560029 - DNA, 15 bp, Homo sapiens
cagagaatcagggca

SEQ ID NO: 1560030 - DNA, 15 bp, Homo sapiens
agagaatcagggcag

SEQ ID NO: 1560031 - DNA, 15 bp, Homo sapiens
gagaatcagggcagg

SEQ ID NO: 1560032 - DNA, 15 bp, Homo sapiens
agaatcagggcaggc

SEQ ID NO: 1560033 - DNA, 15 bp, Homo sapiens
gaatcagggcaggct

SEQ ID NO: 1560034 - DNA, 15 bp, Homo sapiens
aatcagggcaggctt

SEQ ID NO: 1560035 - DNA, 15 bp, Homo sapiens
atcagggcaggcttg

SEQ ID NO: 1560036 - DNA, 15 bp, Homo sapiens
tcagggcaggcttgc

SEQ ID NO: 1560037 - DNA, 15 bp, Homo sapiens
cagggcaggcttgcc

SEQ ID NO: 1560038 - DNA, 15 bp, Homo sapiens
agggcaggcttgcca

SEQ ID NO: 1560039 - DNA, 15 bp, Homo sapiens
gggcaggcttgccac

SEQ ID NO: 1560040 - DNA, 15 bp, Homo sapiens
ggcaggcttgccacc

SEQ ID NO: 1560041 - DNA, 15 bp, Homo sapiens
gcaggcttgccaccg

SEQ ID NO: 1560042 - DNA, 15 bp, Homo sapiens
caggcttgccaccgg

SEQ ID NO: 1560043 - DNA, 15 bp, Homo sapiens
aggcttgccaccggg

SEQ ID NO: 1560044 - DNA, 15 bp, Homo sapiens
ggcttgccaccgggg

SEQ ID NO: 1560045 - DNA, 15 bp, Homo sapiens
gcttgccaccgggga

SEQ ID NO: 1560046 - DNA, 15 bp, Homo sapiens
cttgccaccggggaa

SEQ ID NO: 1560047 - DNA, 15 bp, Homo sapiens
ttgccaccggggaac

SEQ ID NO: 1560048 - DNA, 15 bp, Homo sapiens
tgccaccggggaacc

SEQ ID NO: 1560049 - DNA, 15 bp, Homo sapiens
gccaccggggaaccc

SEQ ID NO: 1560050 - DNA, 15 bp, Homo sapiens
ccaccggggaaccca

SEQ ID NO: 1560051 - DNA, 15 bp, Homo sapiens
caccggggaacccag

SEQ ID NO: 1560052 - DNA, 15 bp, Homo sapiens
accggggaacccagc

SEQ ID NO: 1560053 - DNA, 15 bp, Homo sapiens
ccggggaacccagcc

SEQ ID NO: 1560054 - DNA, 15 bp, Homo sapiens
cggggaacccagccc

SEQ ID NO: 1560055 - DNA, 15 bp, Homo sapiens
ggggaacccagccct

SEQ ID NO: 1560056 - DNA, 15 bp, Homo sapiens
gggaacccagccctg

SEQ ID NO: 1560057 - DNA, 15 bp, Homo sapiens
ggaacccagccctgg

SEQ ID NO: 1560058 - DNA, 15 bp, Homo sapiens
gaacccagccctggg

SEQ ID NO: 1560059 - DNA, 15 bp, Homo sapiens
aacccagccctgggg

SEQ ID NO: 1560060 - DNA, 15 bp, Homo sapiens
acccagccctggggt

SEQ ID NO: 1560061 - DNA, 15 bp, Homo sapiens
cccagccctggggta

SEQ ID NO: 1560062 - DNA, 15 bp, Homo sapiens
ccagccctggggtat

SEQ ID NO: 1560063 - DNA, 15 bp, Homo sapiens
cagccctggggtatg

SEQ ID NO: 1560064 - DNA, 15 bp, Homo sapiens
agccctggggtatga

SEQ ID NO: 1560065 - DNA, 15 bp, Homo sapiens
gccctggggtatgag

SEQ ID NO: 1560066 - DNA, 15 bp, Homo sapiens
ccctggggtatgagc

SEQ ID NO: 1560067 - DNA, 15 bp, Homo sapiens
cctggggtatgagct

SEQ ID NO: 1560068 - DNA, 15 bp, Homo sapiens
ctggggtatgagctg

SEQ ID NO: 1560069 - DNA, 15 bp, Homo sapiens
tggggtatgagctgc

SEQ ID NO: 1560070 - DNA, 15 bp, Homo sapiens
ggggtatgagctgcc

SEQ ID NO: 1560071 - DNA, 15 bp, Homo sapiens
gggtatgagctgcca

SEQ ID NO: 1560072 - DNA, 15 bp, Homo sapiens
ggtatgagctgccaa

SEQ ID NO: 1560073 - DNA, 15 bp, Homo sapiens
gtatgagctgccaag

SEQ ID NO: 1560074 - DNA, 15 bp, Homo sapiens
tatgagctgccaagt

SEQ ID NO: 1560075 - DNA, 15 bp, Homo sapiens
atgagctgccaagtc

SEQ ID NO: 1560076 - DNA, 15 bp, Homo sapiens
tgagctgccaagtct

SEQ ID NO: 1560077 - DNA, 15 bp, Homo sapiens
gagctgccaagtcta

SEQ ID NO: 1560078 - DNA, 15 bp, Homo sapiens
agctgccaagtctat

SEQ ID NO: 1560079 - DNA, 15 bp, Homo sapiens
gctgccaagtctatt

SEQ ID NO: 1560080 - DNA, 15 bp, Homo sapiens
ctgccaagtctattt

SEQ ID NO: 1560081 - DNA, 15 bp, Homo sapiens
tgccaagtctatttt

SEQ ID NO: 1560082 - DNA, 15 bp, Homo sapiens
gccaagtctatttta

SEQ ID NO: 1560083 - DNA, 15 bp, Homo sapiens
ccaagtctattttaa

SEQ ID NO: 1560084 - DNA, 15 bp, Homo sapiens
caagtctattttaaa

SEQ ID NO: 1560085 - DNA, 15 bp, Homo sapiens
aagtctattttaaag

SEQ ID NO: 1560086 - DNA, 15 bp, Homo sapiens
agtctattttaaaga

SEQ ID NO: 1560087 - DNA, 15 bp, Homo sapiens
gtctattttaaagac

SEQ ID NO: 1560088 - DNA, 15 bp, Homo sapiens
tctattttaaagacg

SEQ ID NO: 1560089 - DNA, 15 bp, Homo sapiens
ctattttaaagacgc

SEQ ID NO: 1560090 - DNA, 15 bp, Homo sapiens
tattttaaagacgct

SEQ ID NO: 1560091 - DNA, 15 bp, Homo sapiens
attttaaagacgctc

SEQ ID NO: 1560092 - DNA, 15 bp, Homo sapiens
ttttaaagacgctca

SEQ ID NO: 1560093 - DNA, 15 bp, Homo sapiens
tttaaagacgctcaa

SEQ ID NO: 1560094 - DNA, 15 bp, Homo sapiens
ttaaagacgctcaag

SEQ ID NO: 1560095 - DNA, 15 bp, Homo sapiens
taaagacgctcaaga

SEQ ID NO: 1560096 - DNA, 15 bp, Homo sapiens
aaagacgctcaagaa

SEQ ID NO: 1560097 - DNA, 15 bp, Homo sapiens
aagacgctcaagaat

SEQ ID NO: 1560098 - DNA, 15 bp, Homo sapiens
agacgctcaagaatc

SEQ ID NO: 1560099 - DNA, 15 bp, Homo sapiens
gacgctcaagaatcc

SEQ ID NO: 1560100 - DNA, 15 bp, Homo sapiens
acgctcaagaatcct

SEQ ID NO: 1560101 - DNA, 15 bp, Homo sapiens
cgctcaagaatcctc

SEQ ID NO: 1560102 - DNA, 15 bp, Homo sapiens
gctcaagaatcctct

SEQ ID NO: 1560103 - DNA, 15 bp, Homo sapiens
ctcaagaatcctctg

SEQ ID NO: 1560104 - DNA, 15 bp, Homo sapiens
tcaagaatcctctgg

SEQ ID NO: 1560105 - DNA, 15 bp, Homo sapiens
caagaatcctctggg

SEQ ID NO: 1560106 - DNA, 15 bp, Homo sapiens
aagaatcctctgggg

SEQ ID NO: 1560107 - DNA, 15 bp, Homo sapiens
agaatcctctggggt

SEQ ID NO: 1560108 - DNA, 15 bp, Homo sapiens
gaatcctctggggtt

SEQ ID NO: 1560109 - DNA, 15 bp, Homo sapiens
aatcctctggggttc

SEQ ID NO: 1560110 - DNA, 15 bp, Homo sapiens
atcctctggggttca

SEQ ID NO: 1560111 - DNA, 15 bp, Homo sapiens
tcctctggggttcat

SEQ ID NO: 1560112 - DNA, 15 bp, Homo sapiens
cctctggggttcatc

SEQ ID NO: 1560113 - DNA, 15 bp, Homo sapiens
ctctggggttcatct

SEQ ID NO: 1560114 - DNA, 15 bp, Homo sapiens
tctggggttcatcta

SEQ ID NO: 1560115 - DNA, 15 bp, Homo sapiens
ctggggttcatctag

SEQ ID NO: 1560116 - DNA, 15 bp, Homo sapiens
tggggttcatctagg

SEQ ID NO: 1560117 - DNA, 15 bp, Homo sapiens
ggggttcatctaggg

SEQ ID NO: 1560118 - DNA, 15 bp, Homo sapiens
gggttcatctaggga

SEQ ID NO: 1560119 - DNA, 15 bp, Homo sapiens
ggttcatctagggac

SEQ ID NO: 1560120 - DNA, 15 bp, Homo sapiens
gttcatctagggaca

SEQ ID NO: 1560121 - DNA, 15 bp, Homo sapiens
ttcatctagggacac

SEQ ID NO: 1560122 - DNA, 15 bp, Homo sapiens
ctggggtactattgc

SEQ ID NO: 1560123 - DNA, 15 bp, Homo sapiens
tggggtactattgct

SEQ ID NO: 1560124 - DNA, 15 bp, Homo sapiens
ggggtactattgctg

SEQ ID NO: 1560125 - DNA, 15 bp, Homo sapiens
gggtactattgctga

SEQ ID NO: 1560126 - DNA, 15 bp, Homo sapiens
ggtactattgctgac

SEQ ID NO: 1560127 - DNA, 15 bp, Homo sapiens
gtactattgctgacc

SEQ ID NO: 1560128 - DNA, 15 bp, Homo sapiens
tactattgctgacca

SEQ ID NO: 1560129 - DNA, 15 bp, Homo sapiens
actattgctgaccag

SEQ ID NO: 1560130 - DNA, 15 bp, Homo sapiens
ctattgctgaccagc

SEQ ID NO: 1560131 - DNA, 15 bp, Homo sapiens
tattgctgaccagca

SEQ ID NO: 1560132 - DNA, 15 bp, Homo sapiens
attgctgaccagcag

SEQ ID NO: 1560133 - DNA, 15 bp, Homo sapiens
ttgctgaccagcagg

SEQ ID NO: 1560134 - DNA, 15 bp, Homo sapiens
tgctgaccagcaggg

SEQ ID NO: 1560135 - DNA, 15 bp, Homo sapiens
gctgaccagcagggt

SEQ ID NO: 1560136 - DNA, 15 bp, Homo sapiens
ctgaccagcagggtg

SEQ ID NO: 1560137 - DNA, 15 bp, Homo sapiens
tgaccagcagggtgt

SEQ ID NO: 1560138 - DNA, 15 bp, Homo sapiens
gaccagcagggtgta

SEQ ID NO: 1560139 - DNA, 15 bp, Homo sapiens
accagcagggtgtag

SEQ ID NO: 1560140 - DNA, 15 bp, Homo sapiens
ccagcagggtgtagg

SEQ ID NO: 1560141 - DNA, 15 bp, Homo sapiens
cagcagggtgtaggc

SEQ ID NO: 1560142 - DNA, 15 bp, Homo sapiens
agcagggtgtaggcg

SEQ ID NO: 1560143 - DNA, 15 bp, Homo sapiens
gcagggtgtaggcgc

SEQ ID NO: 1560144 - DNA, 15 bp, Homo sapiens
cagggtgtaggcgct

SEQ ID NO: 1560145 - DNA, 15 bp, Homo sapiens
agggtgtaggcgctg

SEQ ID NO: 1560146 - DNA, 15 bp, Homo sapiens
gggtgtaggcgctgc

SEQ ID NO: 1560147 - DNA, 15 bp, Homo sapiens
ggtgtaggcgctgct

SEQ ID NO: 1560148 - DNA, 15 bp, Homo sapiens
gtgtaggcgctgctt

SEQ ID NO: 1560149 - DNA, 15 bp, Homo sapiens
tgtaggcgctgcttt

SEQ ID NO: 1560150 - DNA, 15 bp, Homo sapiens
gtaggcgctgctttt

SEQ ID NO: 1560151 - DNA, 15 bp, Homo sapiens
taggcgctgcttttg

SEQ ID NO: 1560152 - DNA, 15 bp, Homo sapiens
aggcgctgcttttgt

SEQ ID NO: 1560153 - DNA, 15 bp, Homo sapiens
ggcgctgcttttgtt

SEQ ID NO: 1560154 - DNA, 15 bp, Homo sapiens
gcgctgcttttgttt

SEQ ID NO: 1560155 - DNA, 15 bp, Homo sapiens
cgctgcttttgtttg

SEQ ID NO: 1560156 - DNA, 15 bp, Homo sapiens
gctgcttttgtttga

SEQ ID NO: 1560157 - DNA, 15 bp, Homo sapiens
ctgcttttgtttgag

SEQ ID NO: 1560158 - DNA, 15 bp, Homo sapiens
tgcttttgtttgagc

SEQ ID NO: 1560159 - DNA, 15 bp, Homo sapiens
gcttttgtttgagct

SEQ ID NO: 1560160 - DNA, 15 bp, Homo sapiens
cttttgtttgagctt

SEQ ID NO: 1560161 - DNA, 15 bp, Homo sapiens
ttttgtttgagcttt

SEQ ID NO: 1560162 - DNA, 15 bp, Homo sapiens
tttgtttgagctttg

SEQ ID NO: 1560163 - DNA, 15 bp, Homo sapiens
ttgtttgagctttgt

SEQ ID NO: 1560164 - DNA, 15 bp, Homo sapiens
tgtttgagctttgta

SEQ ID NO: 1560165 - DNA, 15 bp, Homo sapiens
gtttgagctttgtag

SEQ ID NO: 1560166 - DNA, 15 bp, Homo sapiens
tttgagctttgtagc

SEQ ID NO: 1560167 - DNA, 15 bp, Homo sapiens
ttgagctttgtagcc

SEQ ID NO: 1560168 - DNA, 15 bp, Homo sapiens
tgagctttgtagcca

SEQ ID NO: 1560169 - DNA, 15 bp, Homo sapiens
gagctttgtagccac

SEQ ID NO: 1560170 - DNA, 15 bp, Homo sapiens
agctttgtagccaca

SEQ ID NO: 1560171 - DNA, 15 bp, Homo sapiens
gctttgtagccacaa

SEQ ID NO: 1560172 - DNA, 15 bp, Homo sapiens
ctttgtagccacaag

SEQ ID NO: 1560173 - DNA, 15 bp, Homo sapiens
tttgtagccacaagg

SEQ ID NO: 1560174 - DNA, 15 bp, Homo sapiens
ttgtagccacaaggt

SEQ ID NO: 1560175 - DNA, 15 bp, Homo sapiens
tgtagccacaaggtc

SEQ ID NO: 1560176 - DNA, 15 bp, Homo sapiens
gtagccacaaggtct

SEQ ID NO: 1560177 - DNA, 15 bp, Homo sapiens
tagccacaaggtctg

SEQ ID NO: 1560178 - DNA, 15 bp, Homo sapiens
agccacaaggtctga

SEQ ID NO: 1560179 - DNA, 15 bp, Homo sapiens
gccacaaggtctgat

SEQ ID NO: 1560180 - DNA, 15 bp, Homo sapiens
ccacaaggtctgatg

SEQ ID NO: 1560181 - DNA, 15 bp, Homo sapiens
cacaaggtctgatgt

SEQ ID NO: 1560182 - DNA, 15 bp, Homo sapiens
acaaggtctgatgtc

SEQ ID NO: 1560183 - DNA, 15 bp, Homo sapiens
caaggtctgatgtct

SEQ ID NO: 1560184 - DNA, 15 bp, Homo sapiens
aaggtctgatgtctg

SEQ ID NO: 1560185 - DNA, 15 bp, Homo sapiens
aggtctgatgtctgt

SEQ ID NO: 1560186 - DNA, 15 bp, Homo sapiens
ggtctgatgtctgtt

SEQ ID NO: 1560187 - DNA, 15 bp, Homo sapiens
gtctgatgtctgttg

SEQ ID NO: 1560188 - DNA, 15 bp, Homo sapiens
tctgatgtctgttgt

SEQ ID NO: 1560189 - DNA, 15 bp, Homo sapiens
ctgatgtctgttgtg

SEQ ID NO: 1560190 - DNA, 15 bp, Homo sapiens
tgatgtctgttgtga

SEQ ID NO: 1560191 - DNA, 15 bp, Homo sapiens
gatgtctgttgtgaa

SEQ ID NO: 1560192 - DNA, 15 bp, Homo sapiens
atgtctgttgtgaac

SEQ ID NO: 1560193 - DNA, 15 bp, Homo sapiens
tgtctgttgtgaaca

SEQ ID NO: 1560194 - DNA, 15 bp, Homo sapiens
gtctgttgtgaacag

SEQ ID NO: 1560195 - DNA, 15 bp, Homo sapiens
tctgttgtgaacagc

SEQ ID NO: 1560196 - DNA, 15 bp, Homo sapiens
ctgttgtgaacagca

SEQ ID NO: 1560197 - DNA, 15 bp, Homo sapiens
tgttgtgaacagcag

SEQ ID NO: 1560198 - DNA, 15 bp, Homo sapiens
gttgtgaacagcagc

SEQ ID NO: 1560199 - DNA, 15 bp, Homo sapiens
ttgtgaacagcagct

SEQ ID NO: 1560200 - DNA, 15 bp, Homo sapiens
tgtgaacagcagctg

SEQ ID NO: 1560201 - DNA, 15 bp, Homo sapiens
gtgaacagcagctga

SEQ ID NO: 1560202 - DNA, 15 bp, Homo sapiens
tgaacagcagctgac

SEQ ID NO: 1560203 - DNA, 15 bp, Homo sapiens
gaacagcagctgact

SEQ ID NO: 1560204 - DNA, 15 bp, Homo sapiens
aacagcagctgactt

SEQ ID NO: 1560205 - DNA, 15 bp, Homo sapiens
acagcagctgacttc

SEQ ID NO: 1560206 - DNA, 15 bp, Homo sapiens
cagcagctgacttca

SEQ ID NO: 1560207 - DNA, 15 bp, Homo sapiens
agcagctgacttcag

SEQ ID NO: 1560208 - DNA, 15 bp, Homo sapiens
gcagctgacttcagc

SEQ ID NO: 1560209 - DNA, 15 bp, Homo sapiens
cagctgacttcagca

SEQ ID NO: 1560210 - DNA, 15 bp, Homo sapiens
agctgacttcagcac

SEQ ID NO: 1560211 - DNA, 15 bp, Homo sapiens
gctgacttcagcact

SEQ ID NO: 1560212 - DNA, 15 bp, Homo sapiens
ctgacttcagcactc

SEQ ID NO: 1560213 - DNA, 15 bp, Homo sapiens
tgacttcagcactct

SEQ ID NO: 1560214 - DNA, 15 bp, Homo sapiens
gacttcagcactctg

SEQ ID NO: 1560215 - DNA, 15 bp, Homo sapiens
acttcagcactctgg

SEQ ID NO: 1560216 - DNA, 15 bp, Homo sapiens
cttcagcactctggc

SEQ ID NO: 1560217 - DNA, 15 bp, Homo sapiens
ttcagcactctggcc

SEQ ID NO: 1560218 - DNA, 15 bp, Homo sapiens
tcagcactctggcca

SEQ ID NO: 1560219 - DNA, 15 bp, Homo sapiens
cagcactctggccag

SEQ ID NO: 1560220 - DNA, 15 bp, Homo sapiens
agcactctggccagc

SEQ ID NO: 1560221 - DNA, 15 bp, Homo sapiens
gcactctggccagct

SEQ ID NO: 1560222 - DNA, 15 bp, Homo sapiens
cactctggccagctt

SEQ ID NO: 1560223 - DNA, 15 bp, Homo sapiens
actctggccagcttc

SEQ ID NO: 1560224 - DNA, 15 bp, Homo sapiens
ctctggccagcttcc

SEQ ID NO: 1560225 - DNA, 15 bp, Homo sapiens
tctggccagcttcct

SEQ ID NO: 1560226 - DNA, 15 bp, Homo sapiens
ctggccagcttcctc

SEQ ID NO: 1560227 - DNA, 15 bp, Homo sapiens
tggccagcttcctca

SEQ ID NO: 1560228 - DNA, 15 bp, Homo sapiens
ggccagcttcctcaa

SEQ ID NO: 1560229 - DNA, 15 bp, Homo sapiens
gccagcttcctcaaa

SEQ ID NO: 1560230 - DNA, 15 bp, Homo sapiens
ccagcttcctcaaac

SEQ ID NO: 1560231 - DNA, 15 bp, Homo sapiens
cagcttcctcaaact

SEQ ID NO: 1560232 - DNA, 15 bp, Homo sapiens
agcttcctcaaactt

SEQ ID NO: 1560233 - DNA, 15 bp, Homo sapiens
gcttcctcaaacttg

SEQ ID NO: 1560234 - DNA, 15 bp, Homo sapiens
cttcctcaaacttgt

SEQ ID NO: 1560235 - DNA, 15 bp, Homo sapiens
ttcctcaaacttgtt

SEQ ID NO: 1560236 - DNA, 15 bp, Homo sapiens
tcctcaaacttgtta

SEQ ID NO: 1560237 - DNA, 15 bp, Homo sapiens
cctcaaacttgttag

SEQ ID NO: 1560238 - DNA, 15 bp, Homo sapiens
ctcaaacttgttagt

SEQ ID NO: 1560239 - DNA, 15 bp, Homo sapiens
tcaaacttgttagtg

SEQ ID NO: 1560240 - DNA, 15 bp, Homo sapiens
caaacttgttagtgg

SEQ ID NO: 1560241 - DNA, 15 bp, Homo sapiens
aaacttgttagtggc

SEQ ID NO: 1560242 - DNA, 15 bp, Homo sapiens
aacttgttagtggct

SEQ ID NO: 1560243 - DNA, 15 bp, Homo sapiens
acttgttagtggctt

SEQ ID NO: 1560244 - DNA, 15 bp, Homo sapiens
cttgttagtggcttg

SEQ ID NO: 1560245 - DNA, 15 bp, Homo sapiens
ttgttagtggcttgc

SEQ ID NO: 1560246 - DNA, 15 bp, Homo sapiens
tgttagtggcttgca

SEQ ID NO: 1560247 - DNA, 15 bp, Homo sapiens
gttagtggcttgcat

SEQ ID NO: 1560248 - DNA, 15 bp, Homo sapiens
ttagtggcttgcatt

SEQ ID NO: 1560249 - DNA, 15 bp, Homo sapiens
tagtggcttgcattt

SEQ ID NO: 1560250 - DNA, 15 bp, Homo sapiens
agtggcttgcatttt

SEQ ID NO: 1560251 - DNA, 15 bp, Homo sapiens
gtggcttgcattttg

SEQ ID NO: 1560252 - DNA, 15 bp, Homo sapiens
tggcttgcattttgt

SEQ ID NO: 1560253 - DNA, 15 bp, Homo sapiens
ggcttgcattttgtc

SEQ ID NO: 1560254 - DNA, 15 bp, Homo sapiens
gcttgcattttgtca

SEQ ID NO: 1560255 - DNA, 15 bp, Homo sapiens
cttgcattttgtcaa

SEQ ID NO: 1560256 - DNA, 15 bp, Homo sapiens
ttgcattttgtcaat

SEQ ID NO: 1560257 - DNA, 15 bp, Homo sapiens
tgcattttgtcaatt

SEQ ID NO: 1560258 - DNA, 15 bp, Homo sapiens
gcattttgtcaattt

SEQ ID NO: 1560259 - DNA, 15 bp, Homo sapiens
cattttgtcaatttt

SEQ ID NO: 1560260 - DNA, 15 bp, Homo sapiens
attttgtcaattttt

SEQ ID NO: 1560261 - DNA, 15 bp, Homo sapiens
tttgtcaatttttct

SEQ ID NO: 1560262 - DNA, 15 bp, Homo sapiens
ttgtcaatttttctt

SEQ ID NO: 1560263 - DNA, 15 bp, Homo sapiens
tgtcaatttttcttt

SEQ ID NO: 1560264 - DNA, 15 bp, Homo sapiens
gtcaatttttctttg

SEQ ID NO: 1560265 - DNA, 15 bp, Homo sapiens
tcaatttttctttgc

SEQ ID NO: 1560266 - DNA, 15 bp, Homo sapiens
caatttttctttgcc

SEQ ID NO: 1560267 - DNA, 15 bp, Homo sapiens
aatttttctttgcca

SEQ ID NO: 1560268 - DNA, 15 bp, Homo sapiens
atttttctttgccat

SEQ ID NO: 1560269 - DNA, 15 bp, Homo sapiens
tttttctttgccatt

SEQ ID NO: 1560270 - DNA, 15 bp, Homo sapiens
ttttctttgccattt

SEQ ID NO: 1560271 - DNA, 15 bp, Homo sapiens
tttctttgccatttc

SEQ ID NO: 1560272 - DNA, 15 bp, Homo sapiens
ttctttgccatttca

SEQ ID NO: 1560273 - DNA, 15 bp, Homo sapiens
tctttgccatttcag

SEQ ID NO: 1560274 - DNA, 15 bp, Homo sapiens
ctttgccatttcagt

SEQ ID NO: 1560275 - DNA, 15 bp, Homo sapiens
tttgccatttcagtc

SEQ ID NO: 1560276 - DNA, 15 bp, Homo sapiens
ttgccatttcagtct

SEQ ID NO: 1560277 - DNA, 15 bp, Homo sapiens
tgccatttcagtctt

SEQ ID NO: 1560278 - DNA, 15 bp, Homo sapiens
gccatttcagtcttt

SEQ ID NO: 1560279 - DNA, 15 bp, Homo sapiens
ccatttcagtctttc

SEQ ID NO: 1560280 - DNA, 15 bp, Homo sapiens
catttcagtctttca

SEQ ID NO: 1560281 - DNA, 15 bp, Homo sapiens
atttcagtctttcaa

SEQ ID NO: 1560282 - DNA, 15 bp, Homo sapiens
tttcagtctttcaag

SEQ ID NO: 1560283 - DNA, 15 bp, Homo sapiens
ttcagtctttcaagc

SEQ ID NO: 1560284 - DNA, 15 bp, Homo sapiens
tcagtctttcaagca

SEQ ID NO: 1560285 - DNA, 15 bp, Homo sapiens
cagtctttcaagcag

SEQ ID NO: 1560286 - DNA, 15 bp, Homo sapiens
agtctttcaagcagc

SEQ ID NO: 1560287 - DNA, 15 bp, Homo sapiens
gtctttcaagcagct

SEQ ID NO: 1560288 - DNA, 15 bp, Homo sapiens
tctttcaagcagctg

SEQ ID NO: 1560289 - DNA, 15 bp, Homo sapiens
ctttcaagcagctga

SEQ ID NO: 1560290 - DNA, 15 bp, Homo sapiens
tttcaagcagctgaa

SEQ ID NO: 1560291 - DNA, 15 bp, Homo sapiens
ttcaagcagctgaat

SEQ ID NO: 1560292 - DNA, 15 bp, Homo sapiens
tcaagcagctgaatc

SEQ ID NO: 1560293 - DNA, 15 bp, Homo sapiens
caagcagctgaatcg

SEQ ID NO: 1560294 - DNA, 15 bp, Homo sapiens
aagcagctgaatcgc

SEQ ID NO: 1560295 - DNA, 15 bp, Homo sapiens
agcagctgaatcgca

SEQ ID NO: 1560296 - DNA, 15 bp, Homo sapiens
gcagctgaatcgcag

SEQ ID NO: 1560297 - DNA, 15 bp, Homo sapiens
cagctgaatcgcaga

SEQ ID NO: 1560298 - DNA, 15 bp, Homo sapiens
agctgaatcgcagaa

SEQ ID NO: 1560299 - DNA, 15 bp, Homo sapiens
gctgaatcgcagaac

SEQ ID NO: 1560300 - DNA, 15 bp, Homo sapiens
ctgaatcgcagaact

SEQ ID NO: 1560301 - DNA, 15 bp, Homo sapiens
tgaatcgcagaactg

SEQ ID NO: 1560302 - DNA, 15 bp, Homo sapiens
gaatcgcagaactga

SEQ ID NO: 1560303 - DNA, 15 bp, Homo sapiens
aatcgcagaactgaa

SEQ ID NO: 1560304 - DNA, 15 bp, Homo sapiens
atcgcagaactgaaa

SEQ ID NO: 1560305 - DNA, 15 bp, Homo sapiens
tcgcagaactgaaac

SEQ ID NO: 1560306 - DNA, 15 bp, Homo sapiens
cgcagaactgaaaca

SEQ ID NO: 1560307 - DNA, 15 bp, Homo sapiens
gcagaactgaaacaa

SEQ ID NO: 1560308 - DNA, 15 bp, Homo sapiens
cagaactgaaacaaa

SEQ ID NO: 1560309 - DNA, 15 bp, Homo sapiens
agaactgaaacaaaa

SEQ ID NO: 1560310 - DNA, 15 bp, Homo sapiens
gaactgaaacaaaac

SEQ ID NO: 1560311 - DNA, 15 bp, Homo sapiens
aactgaaacaaaaca

SEQ ID NO: 1560312 - DNA, 15 bp, Homo sapiens
actgaaacaaaacac

SEQ ID NO: 1560313 - DNA, 15 bp, Homo sapiens
ctgaaacaaaacact

SEQ ID NO: 1560314 - DNA, 15 bp, Homo sapiens
tgaaacaaaacactt

SEQ ID NO: 1560315 - DNA, 15 bp, Homo sapiens
gaaacaaaacactta

SEQ ID NO: 1560316 - DNA, 15 bp, Homo sapiens
aaacaaaacacttat

SEQ ID NO: 1560317 - DNA, 15 bp, Homo sapiens
aacaaaacacttata

SEQ ID NO: 1560318 - DNA, 15 bp, Homo sapiens
acaaaacacttatat

SEQ ID NO: 1560319 - DNA, 15 bp, Homo sapiens
caaaacacttatatt

SEQ ID NO: 1560320 - DNA, 15 bp, Homo sapiens
aaaacacttatattg

SEQ ID NO: 1560321 - DNA, 15 bp, Homo sapiens
aaacacttatattgc

SEQ ID NO: 1560322 - DNA, 15 bp, Homo sapiens
aacacttatattgca

SEQ ID NO: 1560323 - DNA, 15 bp, Homo sapiens
acacttatattgcaa

SEQ ID NO: 1560324 - DNA, 15 bp, Homo sapiens
cacttatattgcaaa

SEQ ID NO: 1560325 - DNA, 15 bp, Homo sapiens
acttatattgcaaag

SEQ ID NO: 1560326 - DNA, 15 bp, Homo sapiens
cttatattgcaaagt

SEQ ID NO: 1560327 - DNA, 15 bp, Homo sapiens
ttatattgcaaagtt

SEQ ID NO: 1560328 - DNA, 15 bp, Homo sapiens
tatattgcaaagttc

SEQ ID NO: 1560329 - DNA, 15 bp, Homo sapiens
atattgcaaagttcc

SEQ ID NO: 1560330 - DNA, 15 bp, Homo sapiens
tattgcaaagttcct

SEQ ID NO: 1560331 - DNA, 15 bp, Homo sapiens
attgcaaagttcctt

SEQ ID NO: 1560332 - DNA, 15 bp, Homo sapiens
ttgcaaagttccttc

SEQ ID NO: 1560333 - DNA, 15 bp, Homo sapiens
tgcaaagttccttcc

SEQ ID NO: 1560334 - DNA, 15 bp, Homo sapiens
gcaaagttccttccc

SEQ ID NO: 1560335 - DNA, 15 bp, Homo sapiens
caaagttccttccct

SEQ ID NO: 1560336 - DNA, 15 bp, Homo sapiens
aaagttccttccctt

SEQ ID NO: 1560337 - DNA, 15 bp, Homo sapiens
aagttccttcccttt

SEQ ID NO: 1560338 - DNA, 15 bp, Homo sapiens
agttccttcccttta

SEQ ID NO: 1560339 - DNA, 15 bp, Homo sapiens
gttccttccctttaa

SEQ ID NO: 1560340 - DNA, 15 bp, Homo sapiens
ttccttccctttaaa

SEQ ID NO: 1560341 - DNA, 15 bp, Homo sapiens
tccttccctttaaaa

SEQ ID NO: 1560342 - DNA, 15 bp, Homo sapiens
ccttccctttaaaat

SEQ ID NO: 1560343 - DNA, 15 bp, Homo sapiens
cttccctttaaaatg

SEQ ID NO: 1560344 - DNA, 15 bp, Homo sapiens
ttccctttaaaatga

SEQ ID NO: 1560345 - DNA, 15 bp, Homo sapiens
tccctttaaaatgag

SEQ ID NO: 1560346 - DNA, 15 bp, Homo sapiens
ccctttaaaatgagc

SEQ ID NO: 1560347 - DNA, 15 bp, Homo sapiens
cctttaaaatgagct

SEQ ID NO: 1560348 - DNA, 15 bp, Homo sapiens
ctttaaaatgagctt

SEQ ID NO: 1560349 - DNA, 15 bp, Homo sapiens
tttaaaatgagcttc

SEQ ID NO: 1560350 - DNA, 15 bp, Homo sapiens
ttaaaatgagcttct

SEQ ID NO: 1560351 - DNA, 15 bp, Homo sapiens
taaaatgagcttctg

SEQ ID NO: 1560352 - DNA, 15 bp, Homo sapiens
aaaatgagcttctgg

SEQ ID NO: 1560353 - DNA, 15 bp, Homo sapiens
aaatgagcttctgga

SEQ ID NO: 1560354 - DNA, 15 bp, Homo sapiens
aatgagcttctggat

SEQ ID NO: 1560355 - DNA, 15 bp, Homo sapiens
atgagcttctggatt

SEQ ID NO: 1560356 - DNA, 15 bp, Homo sapiens
tgagcttctggattg

SEQ ID NO: 1560357 - DNA, 15 bp, Homo sapiens
gagcttctggattgc

SEQ ID NO: 1560358 - DNA, 15 bp, Homo sapiens
agcttctggattgca

SEQ ID NO: 1560359 - DNA, 15 bp, Homo sapiens
gcttctggattgcag

SEQ ID NO: 1560360 - DNA, 15 bp, Homo sapiens
cttctggattgcaga

SEQ ID NO: 1560361 - DNA, 15 bp, Homo sapiens
ttctggattgcagag

SEQ ID NO: 1560362 - DNA, 15 bp, Homo sapiens
tctggattgcagaga

SEQ ID NO: 1560363 - DNA, 15 bp, Homo sapiens
ctggattgcagagat

SEQ ID NO: 1560364 - DNA, 15 bp, Homo sapiens
tggattgcagagatg

SEQ ID NO: 1560365 - DNA, 15 bp, Homo sapiens
ggattgcagagatga

SEQ ID NO: 1560366 - DNA, 15 bp, Homo sapiens
gattgcagagatgat

SEQ ID NO: 1560367 - DNA, 15 bp, Homo sapiens
attgcagagatgatt

SEQ ID NO: 1560368 - DNA, 15 bp, Homo sapiens
ttgcagagatgattt

SEQ ID NO: 1560369 - DNA, 15 bp, Homo sapiens
tgcagagatgatttt

SEQ ID NO: 1560370 - DNA, 15 bp, Homo sapiens
gcagagatgattttt

SEQ ID NO: 1560371 - DNA, 15 bp, Homo sapiens
cagagatgatttttt

SEQ ID NO: 1560372 - DNA, 15 bp, Homo sapiens
agagatgatttttta

SEQ ID NO: 1560373 - DNA, 15 bp, Homo sapiens
gagatgattttttat

SEQ ID NO: 1560374 - DNA, 15 bp, Homo sapiens
agatgattttttatg

SEQ ID NO: 1560375 - DNA, 15 bp, Homo sapiens
gatgattttttatgg

SEQ ID NO: 1560376 - DNA, 15 bp, Homo sapiens
atgattttttatggt

SEQ ID NO: 1560377 - DNA, 15 bp, Homo sapiens
tgattttttatggtc

SEQ ID NO: 1560378 - DNA, 15 bp, Homo sapiens
gattttttatggtct

SEQ ID NO: 1560379 - DNA, 15 bp, Homo sapiens
attttttatggtctt

SEQ ID NO: 1560380 - DNA, 15 bp, Homo sapiens
ttttttatggtctta

SEQ ID NO: 1560381 - DNA, 15 bp, Homo sapiens
tttttatggtcttag

SEQ ID NO: 1560382 - DNA, 15 bp, Homo sapiens
ttttatggtcttagc

SEQ ID NO: 1560383 - DNA, 15 bp, Homo sapiens
tttatggtcttagcg

SEQ ID NO: 1560384 - DNA, 15 bp, Homo sapiens
ttatggtcttagcgt

SEQ ID NO: 1560385 - DNA, 15 bp, Homo sapiens
tatggtcttagcgtg

SEQ ID NO: 1560386 - DNA, 15 bp, Homo sapiens
atggtcttagcgtgc

SEQ ID NO: 1560387 - DNA, 15 bp, Homo sapiens
tggtcttagcgtgcc

SEQ ID NO: 1560388 - DNA, 15 bp, Homo sapiens
ggtcttagcgtgcct

SEQ ID NO: 1560389 - DNA, 15 bp, Homo sapiens
gtcttagcgtgcctc

SEQ ID NO: 1560390 - DNA, 15 bp, Homo sapiens
tcttagcgtgcctca

SEQ ID NO: 1560391 - DNA, 15 bp, Homo sapiens
cttagcgtgcctcat

SEQ ID NO: 1560392 - DNA, 15 bp, Homo sapiens
ttagcgtgcctcatg

SEQ ID NO: 1560393 - DNA, 15 bp, Homo sapiens
tagcgtgcctcatgc

SEQ ID NO: 1560394 - DNA, 15 bp, Homo sapiens
agcgtgcctcatgct

SEQ ID NO: 1560395 - DNA, 15 bp, Homo sapiens
gcgtgcctcatgctg

SEQ ID NO: 1560396 - DNA, 15 bp, Homo sapiens
cgtgcctcatgctgt

SEQ ID NO: 1560397 - DNA, 15 bp, Homo sapiens
gtgcctcatgctgta

SEQ ID NO: 1560398 - DNA, 15 bp, Homo sapiens
tgcctcatgctgtag

SEQ ID NO: 1560399 - DNA, 15 bp, Homo sapiens
gcctcatgctgtaga

SEQ ID NO: 1560400 - DNA, 15 bp, Homo sapiens
cctcatgctgtagac

SEQ ID NO: 1560401 - DNA, 15 bp, Homo sapiens
ctcatgctgtagacc

SEQ ID NO: 1560402 - DNA, 15 bp, Homo sapiens
tcatgctgtagacca

SEQ ID NO: 1560403 - DNA, 15 bp, Homo sapiens
catgctgtagaccac

SEQ ID NO: 1560404 - DNA, 15 bp, Homo sapiens
atgctgtagaccaca

SEQ ID NO: 1560405 - DNA, 15 bp, Homo sapiens
tgctgtagaccacat

SEQ ID NO: 1560406 - DNA, 15 bp, Homo sapiens
gctgtagaccacatc

SEQ ID NO: 1560407 - DNA, 15 bp, Homo sapiens
ctgtagaccacatcg

SEQ ID NO: 1560408 - DNA, 15 bp, Homo sapiens
tgtagaccacatcgt

SEQ ID NO: 1560409 - DNA, 15 bp, Homo sapiens
gtagaccacatcgtt

SEQ ID NO: 1560410 - DNA, 15 bp, Homo sapiens
tagaccacatcgttg

SEQ ID NO: 1560411 - DNA, 15 bp, Homo sapiens
agaccacatcgttgg

SEQ ID NO: 1560412 - DNA, 15 bp, Homo sapiens
gaccacatcgttgga

SEQ ID NO: 1560413 - DNA, 15 bp, Homo sapiens
accacatcgttggag

SEQ ID NO: 1560414 - DNA, 15 bp, Homo sapiens
ccacatcgttggagc

SEQ ID NO: 1560415 - DNA, 15 bp, Homo sapiens
cacatcgttggagct

SEQ ID NO: 1560416 - DNA, 15 bp, Homo sapiens
acatcgttggagctc

SEQ ID NO: 1560417 - DNA, 15 bp, Homo sapiens
catcgttggagctct

SEQ ID NO: 1560418 - DNA, 15 bp, Homo sapiens
atcgttggagctctg

SEQ ID NO: 1560419 - DNA, 15 bp, Homo sapiens
tcgttggagctctgg

SEQ ID NO: 1560420 - DNA, 15 bp, Homo sapiens
cgttggagctctggg

SEQ ID NO: 1560421 - DNA, 15 bp, Homo sapiens
gttggagctctggga

SEQ ID NO: 1560422 - DNA, 15 bp, Homo sapiens
ttggagctctgggag

SEQ ID NO: 1560423 - DNA, 15 bp, Homo sapiens
tggagctctgggaga

SEQ ID NO: 1560424 - DNA, 15 bp, Homo sapiens
ggagctctgggagag

SEQ ID NO: 1560425 - DNA, 15 bp, Homo sapiens
gagctctgggagagc

SEQ ID NO: 1560426 - DNA, 15 bp, Homo sapiens
agctctgggagagct

SEQ ID NO: 1560427 - DNA, 15 bp, Homo sapiens
gctctgggagagctc

SEQ ID NO: 1560428 - DNA, 15 bp, Homo sapiens
ctctgggagagctct

SEQ ID NO: 1560429 - DNA, 15 bp, Homo sapiens
tctgggagagctctg

SEQ ID NO: 1560430 - DNA, 15 bp, Homo sapiens
ctgggagagctctga

SEQ ID NO: 1560431 - DNA, 15 bp, Homo sapiens
tgggagagctctgag

SEQ ID NO: 1560432 - DNA, 15 bp, Homo sapiens
gggagagctctgagc

SEQ ID NO: 1560433 - DNA, 15 bp, Homo sapiens
ggagagctctgagca

SEQ ID NO: 1560434 - DNA, 15 bp, Homo sapiens
gagagctctgagcag

SEQ ID NO: 1560435 - DNA, 15 bp, Homo sapiens
agagctctgagcaga

SEQ ID NO: 1560436 - DNA, 15 bp, Homo sapiens
gagctctgagcagag

SEQ ID NO: 1560437 - DNA, 15 bp, Homo sapiens
agctctgagcagaga

SEQ ID NO: 1560438 - DNA, 15 bp, Homo sapiens
gctctgagcagagaa

SEQ ID NO: 1560439 - DNA, 15 bp, Homo sapiens
ctctgagcagagaaa

SEQ ID NO: 1560440 - DNA, 15 bp, Homo sapiens
tctgagcagagaaag

SEQ ID NO: 1560441 - DNA, 15 bp, Homo sapiens
ctgagcagagaaaga

SEQ ID NO: 1560442 - DNA, 15 bp, Homo sapiens
tgagcagagaaagac

SEQ ID NO: 1560443 - DNA, 15 bp, Homo sapiens
gagcagagaaagacc

SEQ ID NO: 1560444 - DNA, 15 bp, Homo sapiens
agcagagaaagacct

SEQ ID NO: 1560445 - DNA, 15 bp, Homo sapiens
gcagagaaagacctt

SEQ ID NO: 1560446 - DNA, 15 bp, Homo sapiens
cagagaaagaccttg

SEQ ID NO: 1560447 - DNA, 15 bp, Homo sapiens
agagaaagaccttgg

SEQ ID NO: 1560448 - DNA, 15 bp, Homo sapiens
gagaaagaccttggt

SEQ ID NO: 1560449 - DNA, 15 bp, Homo sapiens
agaaagaccttggtg

SEQ ID NO: 1560450 - DNA, 15 bp, Homo sapiens
gaaagaccttggtga

SEQ ID NO: 1560451 - DNA, 15 bp, Homo sapiens
aaagaccttggtgat

SEQ ID NO: 1560452 - DNA, 15 bp, Homo sapiens
aagaccttggtgatc

SEQ ID NO: 1560453 - DNA, 15 bp, Homo sapiens
agaccttggtgatcc

SEQ ID NO: 1560454 - DNA, 15 bp, Homo sapiens
gaccttggtgatccc

SEQ ID NO: 1560455 - DNA, 15 bp, Homo sapiens
accttggtgatcccc

SEQ ID NO: 1560456 - DNA, 15 bp, Homo sapiens
ccttggtgatccccc

SEQ ID NO: 1560457 - DNA, 15 bp, Homo sapiens
cttggtgatcccccc

SEQ ID NO: 1560458 - DNA, 15 bp, Homo sapiens
ttggtgatcccccct

SEQ ID NO: 1560459 - DNA, 15 bp, Homo sapiens
tggtgatcccccctg

SEQ ID NO: 1560460 - DNA, 15 bp, Homo sapiens
ggtgatcccccctgg

SEQ ID NO: 1560461 - DNA, 15 bp, Homo sapiens
gtgatcccccctggc

SEQ ID NO: 1560462 - DNA, 15 bp, Homo sapiens
tgatcccccctggcc

SEQ ID NO: 1560463 - DNA, 15 bp, Homo sapiens
gatcccccctggccc

SEQ ID NO: 1560464 - DNA, 15 bp, Homo sapiens
atcccccctggcccg

SEQ ID NO: 1560465 - DNA, 15 bp, Homo sapiens
tcccccctggcccga

SEQ ID NO: 1560466 - DNA, 15 bp, Homo sapiens
cccccctggcccgat

SEQ ID NO: 1560467 - DNA, 15 bp, Homo sapiens
ccccctggcccgatc

SEQ ID NO: 1560468 - DNA, 15 bp, Homo sapiens
cccctggcccgatct

SEQ ID NO: 1560469 - DNA, 15 bp, Homo sapiens
ccctggcccgatcta

SEQ ID NO: 1560470 - DNA, 15 bp, Homo sapiens
cctggcccgatctat

SEQ ID NO: 1560471 - DNA, 15 bp, Homo sapiens
ctggcccgatctata

SEQ ID NO: 1560472 - DNA, 15 bp, Homo sapiens
tggcccgatctatag

SEQ ID NO: 1560473 - DNA, 15 bp, Homo sapiens
ggcccgatctatagg

SEQ ID NO: 1560474 - DNA, 15 bp, Homo sapiens
gcccgatctatagga

SEQ ID NO: 1560475 - DNA, 15 bp, Homo sapiens
cccgatctataggat

SEQ ID NO: 1560476 - DNA, 15 bp, Homo sapiens
ccgatctataggatt

SEQ ID NO: 1560477 - DNA, 15 bp, Homo sapiens
cgatctataggattg

SEQ ID NO: 1560478 - DNA, 15 bp, Homo sapiens
gatctataggattga

SEQ ID NO: 1560479 - DNA, 15 bp, Homo sapiens
atctataggattgag

SEQ ID NO: 1560480 - DNA, 15 bp, Homo sapiens
tctataggattgagg

SEQ ID NO: 1560481 - DNA, 15 bp, Homo sapiens
ctataggattgagga

SEQ ID NO: 1560482 - DNA, 15 bp, Homo sapiens
tataggattgaggaa

SEQ ID NO: 1560483 - DNA, 15 bp, Homo sapiens
ataggattgaggaat

SEQ ID NO: 1560484 - DNA, 15 bp, Homo sapiens
taggattgaggaatg

SEQ ID NO: 1560485 - DNA, 15 bp, Homo sapiens
aggattgaggaatga

SEQ ID NO: 1560486 - DNA, 15 bp, Homo sapiens
ggattgaggaatgag

SEQ ID NO: 1560487 - DNA, 15 bp, Homo sapiens
gattgaggaatgagg

SEQ ID NO: 1560488 - DNA, 15 bp, Homo sapiens
attgaggaatgaggc

SEQ ID NO: 1560489 - DNA, 15 bp, Homo sapiens
ttgaggaatgaggct

SEQ ID NO: 1560490 - DNA, 15 bp, Homo sapiens
tgaggaatgaggctt

SEQ ID NO: 1560491 - DNA, 15 bp, Homo sapiens
gaggaatgaggcttg

SEQ ID NO: 1560492 - DNA, 15 bp, Homo sapiens
aggaatgaggcttgt

SEQ ID NO: 1560493 - DNA, 15 bp, Homo sapiens
ggaatgaggcttgta

SEQ ID NO: 1560494 - DNA, 15 bp, Homo sapiens
gaatgaggcttgtag

SEQ ID NO: 1560495 - DNA, 15 bp, Homo sapiens
aatgaggcttgtaga

SEQ ID NO: 1560496 - DNA, 15 bp, Homo sapiens
atgaggcttgtagag

SEQ ID NO: 1560497 - DNA, 15 bp, Homo sapiens
tgaggcttgtagagg

SEQ ID NO: 1560498 - DNA, 15 bp, Homo sapiens
gaggcttgtagaggt

SEQ ID NO: 1560499 - DNA, 15 bp, Homo sapiens
aggcttgtagaggtg

SEQ ID NO: 1560500 - DNA, 15 bp, Homo sapiens
ggcttgtagaggtgg

SEQ ID NO: 1560501 - DNA, 15 bp, Homo sapiens
gcttgtagaggtggc

SEQ ID NO: 1560502 - DNA, 15 bp, Homo sapiens
cttgtagaggtggct

SEQ ID NO: 1560503 - DNA, 15 bp, Homo sapiens
ttgtagaggtggctt

SEQ ID NO: 1560504 - DNA, 15 bp, Homo sapiens
tgtagaggtggcttg

SEQ ID NO: 1560505 - DNA, 15 bp, Homo sapiens
gtagaggtggcttgc

SEQ ID NO: 1560506 - DNA, 15 bp, Homo sapiens
tagaggtggcttgcc

SEQ ID NO: 1560507 - DNA, 15 bp, Homo sapiens
agaggtggcttgccc

SEQ ID NO: 1560508 - DNA, 15 bp, Homo sapiens
gaggtggcttgccca

SEQ ID NO: 1560509 - DNA, 15 bp, Homo sapiens
aggtggcttgcccaa

SEQ ID NO: 1560510 - DNA, 15 bp, Homo sapiens
ggtggcttgcccaag

SEQ ID NO: 1560511 - DNA, 15 bp, Homo sapiens
gtggcttgcccaagg

SEQ ID NO: 1560512 - DNA, 15 bp, Homo sapiens
tggcttgcccaaggt

SEQ ID NO: 1560513 - DNA, 15 bp, Homo sapiens
ggcttgcccaaggtc

SEQ ID NO: 1560514 - DNA, 15 bp, Homo sapiens
gcttgcccaaggtca

SEQ ID NO: 1560515 - DNA, 15 bp, Homo sapiens
cttgcccaaggtcac

SEQ ID NO: 1560516 - DNA, 15 bp, Homo sapiens
ttgcccaaggtcaca

SEQ ID NO: 1560517 - DNA, 15 bp, Homo sapiens
gcccaaggtcacaac

SEQ ID NO: 1560518 - DNA, 15 bp, Homo sapiens
cccaaggtcacaaca

SEQ ID NO: 1560519 - DNA, 15 bp, Homo sapiens
ccaaggtcacaacac

SEQ ID NO: 1560520 - DNA, 15 bp, Homo sapiens
caaggtcacaacact

SEQ ID NO: 1560521 - DNA, 15 bp, Homo sapiens
aaggtcacaacacta

SEQ ID NO: 1560522 - DNA, 15 bp, Homo sapiens
aggtcacaacactag

SEQ ID NO: 1560523 - DNA, 15 bp, Homo sapiens
ggtcacaacactaga

SEQ ID NO: 1560524 - DNA, 15 bp, Homo sapiens
gtcacaacactagag

SEQ ID NO: 1560525 - DNA, 15 bp, Homo sapiens
tcacaacactagagg

SEQ ID NO: 1560526 - DNA, 15 bp, Homo sapiens
cacaacactagaggg

SEQ ID NO: 1560527 - DNA, 15 bp, Homo sapiens
acaacactagagggt

SEQ ID NO: 1560528 - DNA, 15 bp, Homo sapiens
caacactagagggtg

SEQ ID NO: 1560529 - DNA, 15 bp, Homo sapiens
aacactagagggtgg

SEQ ID NO: 1560530 - DNA, 15 bp, Homo sapiens
acactagagggtggt

SEQ ID NO: 1560531 - DNA, 15 bp, Homo sapiens
cactagagggtggtt

SEQ ID NO: 1560532 - DNA, 15 bp, Homo sapiens
actagagggtggttg

SEQ ID NO: 1560533 - DNA, 15 bp, Homo sapiens
ctagagggtggttga

SEQ ID NO: 1560534 - DNA, 15 bp, Homo sapiens
tagagggtggttgag

SEQ ID NO: 1560535 - DNA, 15 bp, Homo sapiens
agagggtggttgagc

SEQ ID NO: 1560536 - DNA, 15 bp, Homo sapiens
gagggtggttgagct

SEQ ID NO: 1560537 - DNA, 15 bp, Homo sapiens
agggtggttgagctg

SEQ ID NO: 1560538 - DNA, 15 bp, Homo sapiens
gggtggttgagctgg

SEQ ID NO: 1560539 - DNA, 15 bp, Homo sapiens
ggtggttgagctggg

SEQ ID NO: 1560540 - DNA, 15 bp, Homo sapiens
gtggttgagctgggc

SEQ ID NO: 1560541 - DNA, 15 bp, Homo sapiens
tggttgagctgggcc

SEQ ID NO: 1560542 - DNA, 15 bp, Homo sapiens
ggttgagctgggcca

SEQ ID NO: 1560543 - DNA, 15 bp, Homo sapiens
gttgagctgggccag

SEQ ID NO: 1560544 - DNA, 15 bp, Homo sapiens
ttgagctgggccagg

SEQ ID NO: 1560545 - DNA, 15 bp, Homo sapiens
tgagctgggccagga

SEQ ID NO: 1560546 - DNA, 15 bp, Homo sapiens
gagctgggccaggac

SEQ ID NO: 1560547 - DNA, 15 bp, Homo sapiens
agctgggccaggacc

SEQ ID NO: 1560548 - DNA, 15 bp, Homo sapiens
gctgggccaggaccc

SEQ ID NO: 1560549 - DNA, 15 bp, Homo sapiens
ctgggccaggaccca

SEQ ID NO: 1560550 - DNA, 15 bp, Homo sapiens
tgggccaggacccag

SEQ ID NO: 1560551 - DNA, 15 bp, Homo sapiens
gggccaggacccaga

SEQ ID NO: 1560552 - DNA, 15 bp, Homo sapiens
ggccaggacccagac

SEQ ID NO: 1560553 - DNA, 15 bp, Homo sapiens
gccaggacccagaca

SEQ ID NO: 1560554 - DNA, 15 bp, Homo sapiens
ccaggacccagacaa

SEQ ID NO: 1560555 - DNA, 15 bp, Homo sapiens
caggacccagacaag

SEQ ID NO: 1560556 - DNA, 15 bp, Homo sapiens
aggacccagacaagc

SEQ ID NO: 1560557 - DNA, 15 bp, Homo sapiens
ggacccagacaagcc

SEQ ID NO: 1560558 - DNA, 15 bp, Homo sapiens
gacccagacaagccc

SEQ ID NO: 1560559 - DNA, 15 bp, Homo sapiens
acccagacaagccct

SEQ ID NO: 1560560 - DNA, 15 bp, Homo sapiens
cccagacaagccctt

SEQ ID NO: 1560561 - DNA, 15 bp, Homo sapiens
ccagacaagcccttt

SEQ ID NO: 1560562 - DNA, 15 bp, Homo sapiens
cagacaagccctttt

SEQ ID NO: 1560563 - DNA, 15 bp, Homo sapiens
agacaagcccttttc

SEQ ID NO: 1560564 - DNA, 15 bp, Homo sapiens
gacaagcccttttct

SEQ ID NO: 1560565 - DNA, 15 bp, Homo sapiens
acaagcccttttctc

SEQ ID NO: 1560566 - DNA, 15 bp, Homo sapiens
caagcccttttctct

SEQ ID NO: 1560567 - DNA, 15 bp, Homo sapiens
aagcccttttctctc

SEQ ID NO: 1560568 - DNA, 15 bp, Homo sapiens
agcccttttctctca

SEQ ID NO: 1560569 - DNA, 15 bp, Homo sapiens
gcccttttctctcag

SEQ ID NO: 1560570 - DNA, 15 bp, Homo sapiens
cccttttctctcagt

SEQ ID NO: 1560571 - DNA, 15 bp, Homo sapiens
ccttttctctcagtc

SEQ ID NO: 1560572 - DNA, 15 bp, Homo sapiens
cttttctctcagtct

SEQ ID NO: 1560573 - DNA, 15 bp, Homo sapiens
ttttctctcagtcta

SEQ ID NO: 1560574 - DNA, 15 bp, Homo sapiens
tttctctcagtctag

SEQ ID NO: 1560575 - DNA, 15 bp, Homo sapiens
ttctctcagtctagt

SEQ ID NO: 1560576 - DNA, 15 bp, Homo sapiens
tctctcagtctagtg

SEQ ID NO: 1560577 - DNA, 15 bp, Homo sapiens
ctctcagtctagtga

SEQ ID NO: 1560578 - DNA, 15 bp, Homo sapiens
tctcagtctagtgag

SEQ ID NO: 1560579 - DNA, 15 bp, Homo sapiens
ctcagtctagtgagg

SEQ ID NO: 1560580 - DNA, 15 bp, Homo sapiens
tcagtctagtgaggc

SEQ ID NO: 1560581 - DNA, 15 bp, Homo sapiens
cagtctagtgaggcc

SEQ ID NO: 1560582 - DNA, 15 bp, Homo sapiens
agtctagtgaggcct

SEQ ID NO: 1560583 - DNA, 15 bp, Homo sapiens
gtctagtgaggcctc

SEQ ID NO: 1560584 - DNA, 15 bp, Homo sapiens
tctagtgaggcctct

SEQ ID NO: 1560585 - DNA, 15 bp, Homo sapiens
ctagtgaggcctctg

SEQ ID NO: 1560586 - DNA, 15 bp, Homo sapiens
tagtgaggcctctgg

SEQ ID NO: 1560587 - DNA, 15 bp, Homo sapiens
agtgaggcctctggg

SEQ ID NO: 1560588 - DNA, 15 bp, Homo sapiens
gtgaggcctctggga

SEQ ID NO: 1560589 - DNA, 15 bp, Homo sapiens
tgaggcctctgggaa

SEQ ID NO: 1560590 - DNA, 15 bp, Homo sapiens
gaggcctctgggaag

SEQ ID NO: 1560591 - DNA, 15 bp, Homo sapiens
aggcctctgggaagg

SEQ ID NO: 1560592 - DNA, 15 bp, Homo sapiens
ggcctctgggaagga

SEQ ID NO: 1560593 - DNA, 15 bp, Homo sapiens
gcctctgggaaggat

SEQ ID NO: 1560594 - DNA, 15 bp, Homo sapiens
cctctgggaaggata

SEQ ID NO: 1560595 - DNA, 15 bp, Homo sapiens
ctctgggaaggatag

SEQ ID NO: 1560596 - DNA, 15 bp, Homo sapiens
tctgggaaggatagg

SEQ ID NO: 1560597 - DNA, 15 bp, Homo sapiens
ctgggaaggataggt

SEQ ID NO: 1560598 - DNA, 15 bp, Homo sapiens
tgggaaggataggtg

SEQ ID NO: 1560599 - DNA, 15 bp, Homo sapiens
gggaaggataggtga

SEQ ID NO: 1560600 - DNA, 15 bp, Homo sapiens
ggaaggataggtgaa

SEQ ID NO: 1560601 - DNA, 15 bp, Homo sapiens
gaaggataggtgaaa

SEQ ID NO: 1560602 - DNA, 15 bp, Homo sapiens
aaggataggtgaaaa

SEQ ID NO: 1560603 - DNA, 15 bp, Homo sapiens
aggataggtgaaaac

SEQ ID NO: 1560604 - DNA, 15 bp, Homo sapiens
ggataggtgaaaact

SEQ ID NO: 1560605 - DNA, 15 bp, Homo sapiens
gataggtgaaaacta

SEQ ID NO: 1560606 - DNA, 15 bp, Homo sapiens
ataggtgaaaactat

SEQ ID NO: 1560607 - DNA, 15 bp, Homo sapiens
taggtgaaaactata

SEQ ID NO: 1560608 - DNA, 15 bp, Homo sapiens
aggtgaaaactataa

SEQ ID NO: 1560609 - DNA, 15 bp, Homo sapiens
ggtgaaaactataaa

SEQ ID NO: 1560610 - DNA, 15 bp, Homo sapiens
gtgaaaactataaat

SEQ ID NO: 1560611 - DNA, 15 bp, Homo sapiens
tgaaaactataaata

SEQ ID NO: 1560612 - DNA, 15 bp, Homo sapiens
gaaaactataaatag

SEQ ID NO: 1560613 - DNA, 15 bp, Homo sapiens
aaaactataaatagc

SEQ ID NO: 1560614 - DNA, 15 bp, Homo sapiens
aaactataaatagct

SEQ ID NO: 1560615 - DNA, 15 bp, Homo sapiens
aactataaatagctg

SEQ ID NO: 1560616 - DNA, 15 bp, Homo sapiens
actataaatagctgt

SEQ ID NO: 1560617 - DNA, 15 bp, Homo sapiens
ctataaatagctgtt

SEQ ID NO: 1560618 - DNA, 15 bp, Homo sapiens
tataaatagctgttc

SEQ ID NO: 1560619 - DNA, 15 bp, Homo sapiens
ataaatagctgttca

SEQ ID NO: 1560620 - DNA, 15 bp, Homo sapiens
taaatagctgttcaa

SEQ ID NO: 1560621 - DNA, 15 bp, Homo sapiens
aaatagctgttcaag

SEQ ID NO: 1560622 - DNA, 15 bp, Homo sapiens
aatagctgttcaaga

SEQ ID NO: 1560623 - DNA, 15 bp, Homo sapiens
atagctgttcaagat

SEQ ID NO: 1560624 - DNA, 15 bp, Homo sapiens
tagctgttcaagata

SEQ ID NO: 1560625 - DNA, 15 bp, Homo sapiens
agctgttcaagatac

SEQ ID NO: 1560626 - DNA, 15 bp, Homo sapiens
gctgttcaagatact

SEQ ID NO: 1560627 - DNA, 15 bp, Homo sapiens
ctgttcaagatactc

SEQ ID NO: 1560628 - DNA, 15 bp, Homo sapiens
tgttcaagatactct

SEQ ID NO: 1560629 - DNA, 15 bp, Homo sapiens
gttcaagatactctg

SEQ ID NO: 1560630 - DNA, 15 bp, Homo sapiens
ttcaagatactctga

SEQ ID NO: 1560631 - DNA, 15 bp, Homo sapiens
tcaagatactctgag

SEQ ID NO: 1560632 - DNA, 15 bp, Homo sapiens
caagatactctgagt

SEQ ID NO: 1560633 - DNA, 15 bp, Homo sapiens
aagatactctgagta

SEQ ID NO: 1560634 - DNA, 15 bp, Homo sapiens
agatactctgagtaa

SEQ ID NO: 1560635 - DNA, 15 bp, Homo sapiens
gatactctgagtaaa

SEQ ID NO: 1560636 - DNA, 15 bp, Homo sapiens
atactctgagtaaaa

SEQ ID NO: 1560637 - DNA, 15 bp, Homo sapiens
tactctgagtaaaag

SEQ ID NO: 1560638 - DNA, 15 bp, Homo sapiens
actctgagtaaaagt

SEQ ID NO: 1560639 - DNA, 15 bp, Homo sapiens
ctctgagtaaaagtc

SEQ ID NO: 1560640 - DNA, 15 bp, Homo sapiens
tctgagtaaaagtca

SEQ ID NO: 1560641 - DNA, 15 bp, Homo sapiens
ctgagtaaaagtcag

SEQ ID NO: 1560642 - DNA, 15 bp, Homo sapiens
tgagtaaaagtcagt

SEQ ID NO: 1560643 - DNA, 15 bp, Homo sapiens
gagtaaaagtcagtg

SEQ ID NO: 1560644 - DNA, 15 bp, Homo sapiens
agtaaaagtcagtgg

SEQ ID NO: 1560645 - DNA, 15 bp, Homo sapiens
gtaaaagtcagtggt

SEQ ID NO: 1560646 - DNA, 15 bp, Homo sapiens
taaaagtcagtggtg

SEQ ID NO: 1560647 - DNA, 15 bp, Homo sapiens
aaaagtcagtggtgt

SEQ ID NO: 1560648 - DNA, 15 bp, Homo sapiens
aaagtcagtggtgtt

SEQ ID NO: 1560649 - DNA, 15 bp, Homo sapiens
aagtcagtggtgtta

SEQ ID NO: 1560650 - DNA, 15 bp, Homo sapiens
agtcagtggtgttat

SEQ ID NO: 1560651 - DNA, 15 bp, Homo sapiens
gtcagtggtgttatc

SEQ ID NO: 1560652 - DNA, 15 bp, Homo sapiens
tcagtggtgttatct

SEQ ID NO: 1560653 - DNA, 15 bp, Homo sapiens
cagtggtgttatctg

SEQ ID NO: 1560654 - DNA, 15 bp, Homo sapiens
agtggtgttatctgg

SEQ ID NO: 1560655 - DNA, 15 bp, Homo sapiens
gtggtgttatctgga

SEQ ID NO: 1560656 - DNA, 15 bp, Homo sapiens
tggtgttatctggaa

SEQ ID NO: 1560657 - DNA, 15 bp, Homo sapiens
ggtgttatctggaat

SEQ ID NO: 1560658 - DNA, 15 bp, Homo sapiens
gtgttatctggaatt

SEQ ID NO: 1560659 - DNA, 15 bp, Homo sapiens
tgttatctggaattt

SEQ ID NO: 1560660 - DNA, 15 bp, Homo sapiens
gttatctggaatttc

SEQ ID NO: 1560661 - DNA, 15 bp, Homo sapiens
ttatctggaatttct

SEQ ID NO: 1560662 - DNA, 15 bp, Homo sapiens
tatctggaatttcta

SEQ ID NO: 1560663 - DNA, 15 bp, Homo sapiens
atctggaatttctac

SEQ ID NO: 1560664 - DNA, 15 bp, Homo sapiens
tctggaatttctact

SEQ ID NO: 1560665 - DNA, 15 bp, Homo sapiens
ctggaatttctactg

SEQ ID NO: 1560666 - DNA, 15 bp, Homo sapiens
tggaatttctactga

SEQ ID NO: 1560667 - DNA, 15 bp, Homo sapiens
ggaatttctactgaa

SEQ ID NO: 1560668 - DNA, 15 bp, Homo sapiens
gaatttctactgaag

SEQ ID NO: 1560669 - DNA, 15 bp, Homo sapiens
aatttctactgaaga

SEQ ID NO: 1560670 - DNA, 15 bp, Homo sapiens
atttctactgaagag

SEQ ID NO: 1560671 - DNA, 15 bp, Homo sapiens
tttctactgaagagg

SEQ ID NO: 1560672 - DNA, 15 bp, Homo sapiens
ttctactgaagagga

SEQ ID NO: 1560673 - DNA, 15 bp, Homo sapiens
tctactgaagaggaa

SEQ ID NO: 1560674 - DNA, 15 bp, Homo sapiens
ctactgaagaggaaa

SEQ ID NO: 1560675 - DNA, 15 bp, Homo sapiens
tactgaagaggaaat

SEQ ID NO: 1560676 - DNA, 15 bp, Homo sapiens
actgaagaggaaata

SEQ ID NO: 1560677 - DNA, 15 bp, Homo sapiens
ctgaagaggaaatac

SEQ ID NO: 1560678 - DNA, 15 bp, Homo sapiens
tgaagaggaaataca

SEQ ID NO: 1560679 - DNA, 15 bp, Homo sapiens
gaagaggaaatacag

SEQ ID NO: 1560680 - DNA, 15 bp, Homo sapiens
aagaggaaatacagc

SEQ ID NO: 1560681 - DNA, 15 bp, Homo sapiens
agaggaaatacagca

SEQ ID NO: 1560682 - DNA, 15 bp, Homo sapiens
gaggaaatacagcag

SEQ ID NO: 1560683 - DNA, 15 bp, Homo sapiens
aggaaatacagcagc

SEQ ID NO: 1560684 - DNA, 15 bp, Homo sapiens
ggaaatacagcagca

SEQ ID NO: 1560685 - DNA, 15 bp, Homo sapiens
gaaatacagcagcaa

SEQ ID NO: 1560686 - DNA, 15 bp, Homo sapiens
aaatacagcagcaaa

SEQ ID NO: 1560687 - DNA, 15 bp, Homo sapiens
aatacagcagcaaag

SEQ ID NO: 1560688 - DNA, 15 bp, Homo sapiens
atacagcagcaaagg

SEQ ID NO: 1560689 - DNA, 15 bp, Homo sapiens
tacagcagcaaaggt

SEQ ID NO: 1560690 - DNA, 15 bp, Homo sapiens
acagcagcaaaggta

SEQ ID NO: 1560691 - DNA, 15 bp, Homo sapiens
cagcagcaaaggtag

SEQ ID NO: 1560692 - DNA, 15 bp, Homo sapiens
agcagcaaaggtaga

SEQ ID NO: 1560693 - DNA, 15 bp, Homo sapiens
gcagcaaaggtagac

SEQ ID NO: 1560694 - DNA, 15 bp, Homo sapiens
cagcaaaggtagact

SEQ ID NO: 1560695 - DNA, 15 bp, Homo sapiens
agcaaaggtagactc

SEQ ID NO: 1560696 - DNA, 15 bp, Homo sapiens
gcaaaggtagactca

SEQ ID NO: 1560697 - DNA, 15 bp, Homo sapiens
caaaggtagactcat

SEQ ID NO: 1560698 - DNA, 15 bp, Homo sapiens
aaaggtagactcatc

SEQ ID NO: 1560699 - DNA, 15 bp, Homo sapiens
aaggtagactcatca

SEQ ID NO: 1560700 - DNA, 15 bp, Homo sapiens
aggtagactcatcag

SEQ ID NO: 1560701 - DNA, 15 bp, Homo sapiens
ggtagactcatcaga

SEQ ID NO: 1560702 - DNA, 15 bp, Homo sapiens
gtagactcatcagat

SEQ ID NO: 1560703 - DNA, 15 bp, Homo sapiens
tagactcatcagatg

SEQ ID NO: 1560704 - DNA, 15 bp, Homo sapiens
agactcatcagatgg

SEQ ID NO: 1560705 - DNA, 15 bp, Homo sapiens
gactcatcagatggt

SEQ ID NO: 1560706 - DNA, 15 bp, Homo sapiens
actcatcagatggtg

SEQ ID NO: 1560707 - DNA, 15 bp, Homo sapiens
ctcatcagatggtga

SEQ ID NO: 1560708 - DNA, 15 bp, Homo sapiens
tcatcagatggtgaa

SEQ ID NO: 1560709 - DNA, 15 bp, Homo sapiens
catcagatggtgaaa

SEQ ID NO: 1560710 - DNA, 15 bp, Homo sapiens
atcagatggtgaaag

SEQ ID NO: 1560711 - DNA, 15 bp, Homo sapiens
tcagatggtgaaagt

SEQ ID NO: 1560712 - DNA, 15 bp, Homo sapiens
cagatggtgaaagtg

SEQ ID NO: 1560713 - DNA, 15 bp, Homo sapiens
agatggtgaaagtgt

SEQ ID NO: 1560714 - DNA, 15 bp, Homo sapiens
gatggtgaaagtgtc

SEQ ID NO: 1560715 - DNA, 15 bp, Homo sapiens
atggtgaaagtgtca

SEQ ID NO: 1560716 - DNA, 15 bp, Homo sapiens
tggtgaaagtgtcat

SEQ ID NO: 1560717 - DNA, 15 bp, Homo sapiens
ggtgaaagtgtcatc

SEQ ID NO: 1560718 - DNA, 15 bp, Homo sapiens
gtgaaagtgtcatct

SEQ ID NO: 1560719 - DNA, 15 bp, Homo sapiens
tgaaagtgtcatctc

SEQ ID NO: 1560720 - DNA, 15 bp, Homo sapiens
gaaagtgtcatctcc

SEQ ID NO: 1560721 - DNA, 15 bp, Homo sapiens
aaagtgtcatctcct

SEQ ID NO: 1560722 - DNA, 15 bp, Homo sapiens
aagtgtcatctcctt

SEQ ID NO: 1560723 - DNA, 15 bp, Homo sapiens
agtgtcatctccttt

SEQ ID NO: 1560724 - DNA, 15 bp, Homo sapiens
gtgtcatctcctttg

SEQ ID NO: 1560725 - DNA, 15 bp, Homo sapiens
tgtcatctcctttgt

SEQ ID NO: 1560726 - DNA, 15 bp, Homo sapiens
gtcatctcctttgta

SEQ ID NO: 1560727 - DNA, 15 bp, Homo sapiens
tcatctcctttgtaa

SEQ ID NO: 1560728 - DNA, 15 bp, Homo sapiens
catctcctttgtaat

SEQ ID NO: 1560729 - DNA, 15 bp, Homo sapiens
atctcctttgtaatt

SEQ ID NO: 1560730 - DNA, 15 bp, Homo sapiens
tctcctttgtaattt

SEQ ID NO: 1560731 - DNA, 15 bp, Homo sapiens
ctcctttgtaattta

SEQ ID NO: 1560732 - DNA, 15 bp, Homo sapiens
tcctttgtaatttat

SEQ ID NO: 1560733 - DNA, 15 bp, Homo sapiens
cctttgtaatttata

SEQ ID NO: 1560734 - DNA, 15 bp, Homo sapiens
ctttgtaatttatac

SEQ ID NO: 1560735 - DNA, 15 bp, Homo sapiens
tttgtaatttatact

SEQ ID NO: 1560736 - DNA, 15 bp, Homo sapiens
ttgtaatttatactg

SEQ ID NO: 1560737 - DNA, 15 bp, Homo sapiens
tgtaatttatactgg

SEQ ID NO: 1560738 - DNA, 15 bp, Homo sapiens
gtaatttatactggt

SEQ ID NO: 1560739 - DNA, 15 bp, Homo sapiens
taatttatactggtg

SEQ ID NO: 1560740 - DNA, 15 bp, Homo sapiens
aatttatactggtga

SEQ ID NO: 1560741 - DNA, 15 bp, Homo sapiens
atttatactggtgag

SEQ ID NO: 1560742 - DNA, 15 bp, Homo sapiens
tttatactggtgaga

SEQ ID NO: 1560743 - DNA, 15 bp, Homo sapiens
ttatactggtgagag

SEQ ID NO: 1560744 - DNA, 15 bp, Homo sapiens
tatactggtgagagg

SEQ ID NO: 1560745 - DNA, 15 bp, Homo sapiens
atactggtgagagga

SEQ ID NO: 1560746 - DNA, 15 bp, Homo sapiens
tactggtgagaggag

SEQ ID NO: 1560747 - DNA, 15 bp, Homo sapiens
actggtgagaggagg

SEQ ID NO: 1560748 - DNA, 15 bp, Homo sapiens
ctggtgagaggaggg

SEQ ID NO: 1560749 - DNA, 15 bp, Homo sapiens
tggtgagaggagggg

SEQ ID NO: 1560750 - DNA, 15 bp, Homo sapiens
ggtgagaggagggga

SEQ ID NO: 1560751 - DNA, 15 bp, Homo sapiens
gtgagaggaggggaa

SEQ ID NO: 1560752 - DNA, 15 bp, Homo sapiens
tgagaggaggggaag

SEQ ID NO: 1560753 - DNA, 15 bp, Homo sapiens
gagaggaggggaagg

SEQ ID NO: 1560754 - DNA, 15 bp, Homo sapiens
agaggaggggaagga

SEQ ID NO: 1560755 - DNA, 15 bp, Homo sapiens
gaggaggggaaggat

SEQ ID NO: 1560756 - DNA, 15 bp, Homo sapiens
aggaggggaaggatg

SEQ ID NO: 1560757 - DNA, 15 bp, Homo sapiens
ggaggggaaggatgt

SEQ ID NO: 1560758 - DNA, 15 bp, Homo sapiens
gaggggaaggatgtg

SEQ ID NO: 1560759 - DNA, 15 bp, Homo sapiens
aggggaaggatgtgc

SEQ ID NO: 1560760 - DNA, 15 bp, Homo sapiens
ggggaaggatgtgct

SEQ ID NO: 1560761 - DNA, 15 bp, Homo sapiens
gggaaggatgtgctt

SEQ ID NO: 1560762 - DNA, 15 bp, Homo sapiens
ggaaggatgtgcttt

SEQ ID NO: 1560763 - DNA, 15 bp, Homo sapiens
gaaggatgtgctttc

SEQ ID NO: 1560764 - DNA, 15 bp, Homo sapiens
aaggatgtgctttcc

SEQ ID NO: 1560765 - DNA, 15 bp, Homo sapiens
aggatgtgctttcct

SEQ ID NO: 1560766 - DNA, 15 bp, Homo sapiens
ggatgtgctttccta

SEQ ID NO: 1560767 - DNA, 15 bp, Homo sapiens
gatgtgctttcctat

SEQ ID NO: 1560768 - DNA, 15 bp, Homo sapiens
atgtgctttcctatt

SEQ ID NO: 1560769 - DNA, 15 bp, Homo sapiens
tgtgctttcctattt

SEQ ID NO: 1560770 - DNA, 15 bp, Homo sapiens
gtgctttcctatttt

SEQ ID NO: 1560771 - DNA, 15 bp, Homo sapiens
tgctttcctattttt

SEQ ID NO: 1560772 - DNA, 15 bp, Homo sapiens
gctttcctattttta

SEQ ID NO: 1560773 - DNA, 15 bp, Homo sapiens
ctttcctatttttac

SEQ ID NO: 1560774 - DNA, 15 bp, Homo sapiens
tttcctatttttaca

SEQ ID NO: 1560775 - DNA, 15 bp, Homo sapiens
ttcctatttttacac

SEQ ID NO: 1560776 - DNA, 15 bp, Homo sapiens
tcctatttttacact

SEQ ID NO: 1560777 - DNA, 15 bp, Homo sapiens
cctatttttacactg

SEQ ID NO: 1560778 - DNA, 15 bp, Homo sapiens
ctatttttacactgg

SEQ ID NO: 1560779 - DNA, 15 bp, Homo sapiens
tatttttacactggt

SEQ ID NO: 1560780 - DNA, 15 bp, Homo sapiens
atttttacactggta

SEQ ID NO: 1560781 - DNA, 15 bp, Homo sapiens
tttttacactggtac

SEQ ID NO: 1560782 - DNA, 15 bp, Homo sapiens
ttttacactggtact

SEQ ID NO: 1560783 - DNA, 15 bp, Homo sapiens
tttacactggtactt

SEQ ID NO: 1560784 - DNA, 15 bp, Homo sapiens
ttacactggtacttc

SEQ ID NO: 1560785 - DNA, 15 bp, Homo sapiens
tacactggtacttca

SEQ ID NO: 1560786 - DNA, 15 bp, Homo sapiens
acactggtacttcat

SEQ ID NO: 1560787 - DNA, 15 bp, Homo sapiens
cactggtacttcatt

SEQ ID NO: 1560788 - DNA, 15 bp, Homo sapiens
actggtacttcattc

SEQ ID NO: 1560789 - DNA, 15 bp, Homo sapiens
ctggtacttcattca

SEQ ID NO: 1560790 - DNA, 15 bp, Homo sapiens
tggtacttcattcat

SEQ ID NO: 1560791 - DNA, 15 bp, Homo sapiens
ggtacttcattcatc

SEQ ID NO: 1560792 - DNA, 15 bp, Homo sapiens
gtacttcattcatcc

SEQ ID NO: 1560793 - DNA, 15 bp, Homo sapiens
tacttcattcatcct

SEQ ID NO: 1560794 - DNA, 15 bp, Homo sapiens
acttcattcatcctt

SEQ ID NO: 1560795 - DNA, 15 bp, Homo sapiens
cttcattcatccttg

SEQ ID NO: 1560796 - DNA, 15 bp, Homo sapiens
ttcattcatccttgt

SEQ ID NO: 1560797 - DNA, 15 bp, Homo sapiens
tcattcatccttgtc

SEQ ID NO: 1560798 - DNA, 15 bp, Homo sapiens
cattcatccttgtct

SEQ ID NO: 1560799 - DNA, 15 bp, Homo sapiens
attcatccttgtctt

SEQ ID NO: 1560800 - DNA, 15 bp, Homo sapiens
ttcatccttgtctta

SEQ ID NO: 1560801 - DNA, 15 bp, Homo sapiens
tcatccttgtcttaa

SEQ ID NO: 1560802 - DNA, 15 bp, Homo sapiens
catccttgtcttaaa

SEQ ID NO: 1560803 - DNA, 15 bp, Homo sapiens
atccttgtcttaaac

SEQ ID NO: 1560804 - DNA, 15 bp, Homo sapiens
tccttgtcttaaact

SEQ ID NO: 1560805 - DNA, 15 bp, Homo sapiens
ccttgtcttaaactt

SEQ ID NO: 1560806 - DNA, 15 bp, Homo sapiens
cttgtcttaaactta

SEQ ID NO: 1560807 - DNA, 15 bp, Homo sapiens
ttgtcttaaacttaa

SEQ ID NO: 1560808 - DNA, 15 bp, Homo sapiens
tgtcttaaacttaag

SEQ ID NO: 1560809 - DNA, 15 bp, Homo sapiens
gtcttaaacttaaga

SEQ ID NO: 1560810 - DNA, 15 bp, Homo sapiens
tcttaaacttaagaa

SEQ ID NO: 1560811 - DNA, 15 bp, Homo sapiens
cttaaacttaagaaa

SEQ ID NO: 1560812 - DNA, 15 bp, Homo sapiens
ttaaacttaagaaat

SEQ ID NO: 1560813 - DNA, 15 bp, Homo sapiens
taaacttaagaaatg

SEQ ID NO: 1560814 - DNA, 15 bp, Homo sapiens
aaacttaagaaatga

SEQ ID NO: 1560815 - DNA, 15 bp, Homo sapiens
aacttaagaaatgaa

SEQ ID NO: 1560816 - DNA, 15 bp, Homo sapiens
acttaagaaatgaaa

SEQ ID NO: 1560817 - DNA, 15 bp, Homo sapiens
cttaagaaatgaaat

SEQ ID NO: 1560818 - DNA, 15 bp, Homo sapiens
ttaagaaatgaaatg

SEQ ID NO: 1560819 - DNA, 15 bp, Homo sapiens
taagaaatgaaatgc

SEQ ID NO: 1560820 - DNA, 15 bp, Homo sapiens
aagaaatgaaatgca

SEQ ID NO: 1560821 - DNA, 15 bp, Homo sapiens
agaaatgaaatgcat

SEQ ID NO: 1560822 - DNA, 15 bp, Homo sapiens
gaaatgaaatgcatc

SEQ ID NO: 1560823 - DNA, 15 bp, Homo sapiens
aaatgaaatgcatca

SEQ ID NO: 1560824 - DNA, 15 bp, Homo sapiens
aatgaaatgcatcag

SEQ ID NO: 1560825 - DNA, 15 bp, Homo sapiens
atgaaatgcatcagg

SEQ ID NO: 1560826 - DNA, 15 bp, Homo sapiens
tgaaatgcatcaggg

SEQ ID NO: 1560827 - DNA, 15 bp, Homo sapiens
gaaatgcatcagggc

SEQ ID NO: 1560828 - DNA, 15 bp, Homo sapiens
aaatgcatcagggca

SEQ ID NO: 1560829 - DNA, 15 bp, Homo sapiens
aatgcatcagggcac

SEQ ID NO: 1560830 - DNA, 15 bp, Homo sapiens
atgcatcagggcaca

SEQ ID NO: 1560831 - DNA, 15 bp, Homo sapiens
tgcatcagggcacac

SEQ ID NO: 1560832 - DNA, 15 bp, Homo sapiens
gcatcagggcacaca

SEQ ID NO: 1560833 - DNA, 15 bp, Homo sapiens
catcagggcacacat

SEQ ID NO: 1560834 - DNA, 15 bp, Homo sapiens
atcagggcacacata

SEQ ID NO: 1560835 - DNA, 15 bp, Homo sapiens
tcagggcacacatat

SEQ ID NO: 1560836 - DNA, 15 bp, Homo sapiens
cagggcacacatata

SEQ ID NO: 1560837 - DNA, 15 bp, Homo sapiens
agggcacacatatac

SEQ ID NO: 1560838 - DNA, 15 bp, Homo sapiens
gggcacacatataca

SEQ ID NO: 1560839 - DNA, 15 bp, Homo sapiens
ggcacacatatacat

SEQ ID NO: 1560840 - DNA, 15 bp, Homo sapiens
gcacacatatacata

SEQ ID NO: 1560841 - DNA, 15 bp, Homo sapiens
cacacatatacatag

SEQ ID NO: 1560842 - DNA, 15 bp, Homo sapiens
acacatatacataga

SEQ ID NO: 1560843 - DNA, 15 bp, Homo sapiens
cacatatacatagaa

SEQ ID NO: 1560844 - DNA, 15 bp, Homo sapiens
acatatacatagaaa

SEQ ID NO: 1560845 - DNA, 15 bp, Homo sapiens
catatacatagaaac

SEQ ID NO: 1560846 - DNA, 15 bp, Homo sapiens
atatacatagaaaca

SEQ ID NO: 1560847 - DNA, 15 bp, Homo sapiens
tatacatagaaacag

SEQ ID NO: 1560848 - DNA, 15 bp, Homo sapiens
atacatagaaacagc

SEQ ID NO: 1560849 - DNA, 15 bp, Homo sapiens
tacatagaaacagca

SEQ ID NO: 1560850 - DNA, 15 bp, Homo sapiens
acatagaaacagcac

SEQ ID NO: 1560851 - DNA, 15 bp, Homo sapiens
catagaaacagcaca

SEQ ID NO: 1560852 - DNA, 15 bp, Homo sapiens
atagaaacagcacat

SEQ ID NO: 1560853 - DNA, 15 bp, Homo sapiens
tagaaacagcacata

SEQ ID NO: 1560854 - DNA, 15 bp, Homo sapiens
agaaacagcacataa

SEQ ID NO: 1560855 - DNA, 15 bp, Homo sapiens
gaaacagcacataag

SEQ ID NO: 1560856 - DNA, 15 bp, Homo sapiens
aaacagcacataagc

SEQ ID NO: 1560857 - DNA, 15 bp, Homo sapiens
aacagcacataagcc

SEQ ID NO: 1560858 - DNA, 15 bp, Homo sapiens
acagcacataagcca

SEQ ID NO: 1560859 - DNA, 15 bp, Homo sapiens
cagcacataagccat

SEQ ID NO: 1560860 - DNA, 15 bp, Homo sapiens
agcacataagccatt

SEQ ID NO: 1560861 - DNA, 15 bp, Homo sapiens
gcacataagccattt

SEQ ID NO: 1560862 - DNA, 15 bp, Homo sapiens
cacataagccatttt

SEQ ID NO: 1560863 - DNA, 15 bp, Homo sapiens
acataagccattttg

SEQ ID NO: 1560864 - DNA, 15 bp, Homo sapiens
cataagccattttgg

SEQ ID NO: 1560865 - DNA, 15 bp, Homo sapiens
ataagccattttgga

SEQ ID NO: 1560866 - DNA, 15 bp, Homo sapiens
taagccattttggat

SEQ ID NO: 1560867 - DNA, 15 bp, Homo sapiens
aagccattttggatg

SEQ ID NO: 1560868 - DNA, 15 bp, Homo sapiens
agccattttggatgg

SEQ ID NO: 1560869 - DNA, 15 bp, Homo sapiens
gccattttggatggc

SEQ ID NO: 1560870 - DNA, 15 bp, Homo sapiens
ccattttggatggca

SEQ ID NO: 1560871 - DNA, 15 bp, Homo sapiens
cattttggatggcaa

SEQ ID NO: 1560872 - DNA, 15 bp, Homo sapiens
attttggatggcaat

SEQ ID NO: 1560873 - DNA, 15 bp, Homo sapiens
ttttggatggcaatt

SEQ ID NO: 1560874 - DNA, 15 bp, Homo sapiens
tttggatggcaattc

SEQ ID NO: 1560875 - DNA, 15 bp, Homo sapiens
ttggatggcaattcc

SEQ ID NO: 1560876 - DNA, 15 bp, Homo sapiens
tggatggcaattcca

SEQ ID NO: 1560877 - DNA, 15 bp, Homo sapiens
ggatggcaattccag

SEQ ID NO: 1560878 - DNA, 15 bp, Homo sapiens
gatggcaattccagc

SEQ ID NO: 1560879 - DNA, 15 bp, Homo sapiens
atggcaattccagca

SEQ ID NO: 1560880 - DNA, 15 bp, Homo sapiens
tggcaattccagcac

SEQ ID NO: 1560881 - DNA, 15 bp, Homo sapiens
ggcaattccagcact

SEQ ID NO: 1560882 - DNA, 15 bp, Homo sapiens
gcaattccagcactc

SEQ ID NO: 1560883 - DNA, 15 bp, Homo sapiens
caattccagcactct

SEQ ID NO: 1560884 - DNA, 15 bp, Homo sapiens
aattccagcactctt

SEQ ID NO: 1560885 - DNA, 15 bp, Homo sapiens
attccagcactcttt

SEQ ID NO: 1560886 - DNA, 15 bp, Homo sapiens
ttccagcactctttt

SEQ ID NO: 1560887 - DNA, 15 bp, Homo sapiens
tccagcactctttta

SEQ ID NO: 1560888 - DNA, 15 bp, Homo sapiens
ccagcactcttttaa

SEQ ID NO: 1560889 - DNA, 15 bp, Homo sapiens
cagcactcttttaat

SEQ ID NO: 1560890 - DNA, 15 bp, Homo sapiens
agcactcttttaatg

SEQ ID NO: 1560891 - DNA, 15 bp, Homo sapiens
gcactcttttaatgg

SEQ ID NO: 1560892 - DNA, 15 bp, Homo sapiens
cactcttttaatgga

SEQ ID NO: 1560893 - DNA, 15 bp, Homo sapiens
actcttttaatggat

SEQ ID NO: 1560894 - DNA, 15 bp, Homo sapiens
ctcttttaatggatt

SEQ ID NO: 1560895 - DNA, 15 bp, Homo sapiens
tcttttaatggattg

SEQ ID NO: 1560896 - DNA, 15 bp, Homo sapiens
cttttaatggattgg

SEQ ID NO: 1560897 - DNA, 15 bp, Homo sapiens
ttttaatggattggc

SEQ ID NO: 1560898 - DNA, 15 bp, Homo sapiens
tttaatggattggct

SEQ ID NO: 1560899 - DNA, 15 bp, Homo sapiens
ttaatggattggctt

SEQ ID NO: 1560900 - DNA, 15 bp, Homo sapiens
taatggattggctta

SEQ ID NO: 1560901 - DNA, 15 bp, Homo sapiens
aatggattggcttaa

SEQ ID NO: 1560902 - DNA, 15 bp, Homo sapiens
atggattggcttaat

SEQ ID NO: 1560903 - DNA, 15 bp, Homo sapiens
tggattggcttaatt

SEQ ID NO: 1560904 - DNA, 15 bp, Homo sapiens
ggattggcttaattt

SEQ ID NO: 1560905 - DNA, 15 bp, Homo sapiens
gattggcttaatttt

SEQ ID NO: 1560906 - DNA, 15 bp, Homo sapiens
attggcttaattttt

SEQ ID NO: 1560907 - DNA, 15 bp, Homo sapiens
ttggcttaatttttt

SEQ ID NO: 1560908 - DNA, 15 bp, Homo sapiens
tggcttaattttttt

SEQ ID NO: 1560909 - DNA, 15 bp, Homo sapiens
ggcttaatttttttt

SEQ ID NO: 1560910 - DNA, 15 bp, Homo sapiens
gcttaattttttttt

SEQ ID NO: 1560911 - DNA, 15 bp, Homo sapiens
cttaatttttttttc

SEQ ID NO: 1560912 - DNA, 15 bp, Homo sapiens
ttaatttttttttct

SEQ ID NO: 1560913 - DNA, 15 bp, Homo sapiens
taatttttttttctg

SEQ ID NO: 1560914 - DNA, 15 bp, Homo sapiens
aatttttttttctga

SEQ ID NO: 1560915 - DNA, 15 bp, Homo sapiens
atttttttttctgat

SEQ ID NO: 1560916 - DNA, 15 bp, Homo sapiens
tttttttttctgatg

SEQ ID NO: 1560917 - DNA, 15 bp, Homo sapiens
ttttttttctgatgc

SEQ ID NO: 1560918 - DNA, 15 bp, Homo sapiens
tttttttctgatgcc

SEQ ID NO: 1560919 - DNA, 15 bp, Homo sapiens
ttttttctgatgcct

SEQ ID NO: 1560920 - DNA, 15 bp, Homo sapiens
tttttctgatgcctc

SEQ ID NO: 1560921 - DNA, 15 bp, Homo sapiens
ttttctgatgcctct

SEQ ID NO: 1560922 - DNA, 15 bp, Homo sapiens
tttctgatgcctctc

SEQ ID NO: 1560923 - DNA, 15 bp, Homo sapiens
ttctgatgcctctct

SEQ ID NO: 1560924 - DNA, 15 bp, Homo sapiens
tctgatgcctctcta

SEQ ID NO: 1560925 - DNA, 15 bp, Homo sapiens
ctgatgcctctctat

SEQ ID NO: 1560926 - DNA, 15 bp, Homo sapiens
tgatgcctctctatg

SEQ ID NO: 1560927 - DNA, 15 bp, Homo sapiens
gatgcctctctatgt

SEQ ID NO: 1560928 - DNA, 15 bp, Homo sapiens
atgcctctctatgtg

SEQ ID NO: 1560929 - DNA, 15 bp, Homo sapiens
tgcctctctatgtgt

SEQ ID NO: 1560930 - DNA, 15 bp, Homo sapiens
gcctctctatgtgtt

SEQ ID NO: 1560931 - DNA, 15 bp, Homo sapiens
cctctctatgtgttt

SEQ ID NO: 1560932 - DNA, 15 bp, Homo sapiens
ctctctatgtgtttg

SEQ ID NO: 1560933 - DNA, 15 bp, Homo sapiens
tctctatgtgtttga

SEQ ID NO: 1560934 - DNA, 15 bp, Homo sapiens
ctctatgtgtttgaa

SEQ ID NO: 1560935 - DNA, 15 bp, Homo sapiens
tctatgtgtttgaaa

SEQ ID NO: 1560936 - DNA, 15 bp, Homo sapiens
ctatgtgtttgaaaa

SEQ ID NO: 1560937 - DNA, 15 bp, Homo sapiens
tatgtgtttgaaaag

SEQ ID NO: 1560938 - DNA, 15 bp, Homo sapiens
atgtgtttgaaaagt

SEQ ID NO: 1560939 - DNA, 15 bp, Homo sapiens
tgtgtttgaaaagtt

SEQ ID NO: 1560940 - DNA, 15 bp, Homo sapiens
gtgtttgaaaagttg

SEQ ID NO: 1560941 - DNA, 15 bp, Homo sapiens
tgtttgaaaagttgt

SEQ ID NO: 1560942 - DNA, 15 bp, Homo sapiens
gtttgaaaagttgta

SEQ ID NO: 1560943 - DNA, 15 bp, Homo sapiens
tttgaaaagttgtat

SEQ ID NO: 1560944 - DNA, 15 bp, Homo sapiens
ttgaaaagttgtatt

SEQ ID NO: 1560945 - DNA, 15 bp, Homo sapiens
tgaaaagttgtattg

SEQ ID NO: 1560946 - DNA, 15 bp, Homo sapiens
gaaaagttgtattga

SEQ ID NO: 1560947 - DNA, 15 bp, Homo sapiens
aaaagttgtattgat

SEQ ID NO: 1560948 - DNA, 15 bp, Homo sapiens
aaagttgtattgata

SEQ ID NO: 1560949 - DNA, 15 bp, Homo sapiens
aagttgtattgatag

SEQ ID NO: 1560950 - DNA, 15 bp, Homo sapiens
agttgtattgatagt

SEQ ID NO: 1560951 - DNA, 15 bp, Homo sapiens
gttgtattgatagtc

SEQ ID NO: 1560952 - DNA, 15 bp, Homo sapiens
ttgtattgatagtca

SEQ ID NO: 1560953 - DNA, 15 bp, Homo sapiens
tgtattgatagtcac

SEQ ID NO: 1560954 - DNA, 15 bp, Homo sapiens
gtattgatagtcaca

SEQ ID NO: 1560955 - DNA, 15 bp, Homo sapiens
tattgatagtcacac

SEQ ID NO: 1560956 - DNA, 15 bp, Homo sapiens
attgatagtcacaca

SEQ ID NO: 1560957 - DNA, 15 bp, Homo sapiens
ttgatagtcacacag

SEQ ID NO: 1560958 - DNA, 15 bp, Homo sapiens
tgatagtcacacaga

SEQ ID NO: 1560959 - DNA, 15 bp, Homo sapiens
gatagtcacacagag

SEQ ID NO: 1560960 - DNA, 15 bp, Homo sapiens
atagtcacacagagt

SEQ ID NO: 1560961 - DNA, 15 bp, Homo sapiens
tagtcacacagagtg

SEQ ID NO: 1560962 - DNA, 15 bp, Homo sapiens
agtcacacagagtgt

SEQ ID NO: 1560963 - DNA, 15 bp, Homo sapiens
gtcacacagagtgta

SEQ ID NO: 1560964 - DNA, 15 bp, Homo sapiens
tcacacagagtgtac

SEQ ID NO: 1560965 - DNA, 15 bp, Homo sapiens
cacacagagtgtact

SEQ ID NO: 1560966 - DNA, 15 bp, Homo sapiens
acacagagtgtacta

SEQ ID NO: 1560967 - DNA, 15 bp, Homo sapiens
cacagagtgtactaa

SEQ ID NO: 1560968 - DNA, 15 bp, Homo sapiens
acagagtgtactaaa

SEQ ID NO: 1560969 - DNA, 15 bp, Homo sapiens
cagagtgtactaaaa

SEQ ID NO: 1560970 - DNA, 15 bp, Homo sapiens
agagtgtactaaaat

SEQ ID NO: 1560971 - DNA, 15 bp, Homo sapiens
gagtgtactaaaata

SEQ ID NO: 1560972 - DNA, 15 bp, Homo sapiens
agtgtactaaaataa

SEQ ID NO: 1560973 - DNA, 15 bp, Homo sapiens
gtgtactaaaataac

SEQ ID NO: 1560974 - DNA, 15 bp, Homo sapiens
tgtactaaaataacc

SEQ ID NO: 1560975 - DNA, 15 bp, Homo sapiens
gtactaaaataacct

SEQ ID NO: 1560976 - DNA, 15 bp, Homo sapiens
tactaaaataaccta

SEQ ID NO: 1560977 - DNA, 15 bp, Homo sapiens
actaaaataacctaa

SEQ ID NO: 1560978 - DNA, 15 bp, Homo sapiens
ctaaaataacctaaa

SEQ ID NO: 1560979 - DNA, 15 bp, Homo sapiens
taaaataacctaaaa

SEQ ID NO: 1560980 - DNA, 15 bp, Homo sapiens
aaaataacctaaaag

SEQ ID NO: 1560981 - DNA, 15 bp, Homo sapiens
aaataacctaaaagg

SEQ ID NO: 1560982 - DNA, 15 bp, Homo sapiens
aataacctaaaaggt

SEQ ID NO: 1560983 - DNA, 15 bp, Homo sapiens
ataacctaaaaggtc

SEQ ID NO: 1560984 - DNA, 15 bp, Homo sapiens
taacctaaaaggtct

SEQ ID NO: 1560985 - DNA, 15 bp, Homo sapiens
aacctaaaaggtctt

SEQ ID NO: 1560986 - DNA, 15 bp, Homo sapiens
acctaaaaggtcttg

SEQ ID NO: 1560987 - DNA, 15 bp, Homo sapiens
cctaaaaggtcttga

SEQ ID NO: 1560988 - DNA, 15 bp, Homo sapiens
ctaaaaggtcttgaa

SEQ ID NO: 1560989 - DNA, 15 bp, Homo sapiens
taaaaggtcttgaac

SEQ ID NO: 1560990 - DNA, 15 bp, Homo sapiens
aaaaggtcttgaacc

SEQ ID NO: 1560991 - DNA, 15 bp, Homo sapiens
aaaggtcttgaacct

SEQ ID NO: 1560992 - DNA, 15 bp, Homo sapiens
aaggtcttgaacctc

SEQ ID NO: 1560993 - DNA, 15 bp, Homo sapiens
aggtcttgaacctcc

SEQ ID NO: 1560994 - DNA, 15 bp, Homo sapiens
ggtcttgaacctccc

SEQ ID NO: 1560995 - DNA, 15 bp, Homo sapiens
gtcttgaacctcccc

SEQ ID NO: 1560996 - DNA, 15 bp, Homo sapiens
tcttgaacctcccct

SEQ ID NO: 1560997 - DNA, 15 bp, Homo sapiens
cttgaacctcccctt

SEQ ID NO: 1560998 - DNA, 15 bp, Homo sapiens
ttgaacctccccttt

SEQ ID NO: 1560999 - DNA, 15 bp, Homo sapiens
tgaacctccccttta

SEQ ID NO: 1561000 - DNA, 15 bp, Homo sapiens
gaacctcccctttac

SEQ ID NO: 1561001 - DNA, 15 bp, Homo sapiens
aacctcccctttacc

SEQ ID NO: 1561002 - DNA, 15 bp, Homo sapiens
acctcccctttacct

SEQ ID NO: 1561003 - DNA, 15 bp, Homo sapiens
cctcccctttacctc

SEQ ID NO: 1561004 - DNA, 15 bp, Homo sapiens
ctcccctttacctct

SEQ ID NO: 1561005 - DNA, 15 bp, Homo sapiens
tcccctttacctctt

SEQ ID NO: 1561006 - DNA, 15 bp, Homo sapiens
cccctttacctcttt

SEQ ID NO: 1561007 - DNA, 15 bp, Homo sapiens
ccctttacctcttta

SEQ ID NO: 1561008 - DNA, 15 bp, Homo sapiens
cctttacctctttag

SEQ ID NO: 1561009 - DNA, 15 bp, Homo sapiens
ctttacctctttaga

SEQ ID NO: 1561010 - DNA, 15 bp, Homo sapiens
tttacctctttagaa

SEQ ID NO: 1561011 - DNA, 15 bp, Homo sapiens
ttacctctttagaac

SEQ ID NO: 1561012 - DNA, 15 bp, Homo sapiens
tacctctttagaacc

SEQ ID NO: 1561013 - DNA, 15 bp, Homo sapiens
acctctttagaacct

SEQ ID NO: 1561014 - DNA, 15 bp, Homo sapiens
cctctttagaacctc

SEQ ID NO: 1561015 - DNA, 15 bp, Homo sapiens
ctctttagaacctct

SEQ ID NO: 1561016 - DNA, 15 bp, Homo sapiens
tctttagaacctctg

SEQ ID NO: 1561017 - DNA, 15 bp, Homo sapiens
ctttagaacctctga

SEQ ID NO: 1561018 - DNA, 15 bp, Homo sapiens
tttagaacctctgaa

SEQ ID NO: 1561019 - DNA, 15 bp, Homo sapiens
ttagaacctctgaat

SEQ ID NO: 1561020 - DNA, 15 bp, Homo sapiens
tagaacctctgaatt

SEQ ID NO: 1561021 - DNA, 15 bp, Homo sapiens
agaacctctgaattt

SEQ ID NO: 1561022 - DNA, 15 bp, Homo sapiens
gaacctctgaatttg

SEQ ID NO: 1561023 - DNA, 15 bp, Homo sapiens
aacctctgaatttgg

SEQ ID NO: 1561024 - DNA, 15 bp, Homo sapiens
acctctgaatttgga

SEQ ID NO: 1561025 - DNA, 15 bp, Homo sapiens
cctctgaatttggag

SEQ ID NO: 1561026 - DNA, 15 bp, Homo sapiens
ctctgaatttggaga

SEQ ID NO: 1561027 - DNA, 15 bp, Homo sapiens
tctgaatttggagac

SEQ ID NO: 1561028 - DNA, 15 bp, Homo sapiens
ctgaatttggagaca

SEQ ID NO: 1561029 - DNA, 15 bp, Homo sapiens
tgaatttggagacag

SEQ ID NO: 1561030 - DNA, 15 bp, Homo sapiens
gaatttggagacagc

SEQ ID NO: 1561031 - DNA, 15 bp, Homo sapiens
aatttggagacagct

SEQ ID NO: 1561032 - DNA, 15 bp, Homo sapiens
atttggagacagcta

SEQ ID NO: 1561033 - DNA, 15 bp, Homo sapiens
tttggagacagctag

SEQ ID NO: 1561034 - DNA, 15 bp, Homo sapiens
ttggagacagctagc

SEQ ID NO: 1561035 - DNA, 15 bp, Homo sapiens
tggagacagctagca

SEQ ID NO: 1561036 - DNA, 15 bp, Homo sapiens
ggagacagctagcaa

SEQ ID NO: 1561037 - DNA, 15 bp, Homo sapiens
gagacagctagcaaa

SEQ ID NO: 1561038 - DNA, 15 bp, Homo sapiens
agacagctagcaaac

SEQ ID NO: 1561039 - DNA, 15 bp, Homo sapiens
gacagctagcaaacg

SEQ ID NO: 1561040 - DNA, 15 bp, Homo sapiens
acagctagcaaacgg

SEQ ID NO: 1561041 - DNA, 15 bp, Homo sapiens
cagctagcaaacggc

SEQ ID NO: 1561042 - DNA, 15 bp, Homo sapiens
agctagcaaacggca

SEQ ID NO: 1561043 - DNA, 15 bp, Homo sapiens
gctagcaaacggcaa

SEQ ID NO: 1561044 - DNA, 15 bp, Homo sapiens
ctagcaaacggcaac

SEQ ID NO: 1561045 - DNA, 15 bp, Homo sapiens
tagcaaacggcaact

SEQ ID NO: 1561046 - DNA, 15 bp, Homo sapiens
agcaaacggcaactg

SEQ ID NO: 1561047 - DNA, 15 bp, Homo sapiens
gcaaacggcaactgt

SEQ ID NO: 1561048 - DNA, 15 bp, Homo sapiens
caaacggcaactgta

SEQ ID NO: 1561049 - DNA, 15 bp, Homo sapiens
aaacggcaactgtag

SEQ ID NO: 1561050 - DNA, 15 bp, Homo sapiens
aacggcaactgtagc

SEQ ID NO: 1561051 - DNA, 15 bp, Homo sapiens
acggcaactgtagcc

SEQ ID NO: 1561052 - DNA, 15 bp, Homo sapiens
cggcaactgtagcct

SEQ ID NO: 1561053 - DNA, 15 bp, Homo sapiens
ggcaactgtagccta

SEQ ID NO: 1561054 - DNA, 15 bp, Homo sapiens
gcaactgtagcctag

SEQ ID NO: 1561055 - DNA, 15 bp, Homo sapiens
caactgtagcctagc

SEQ ID NO: 1561056 - DNA, 15 bp, Homo sapiens
aactgtagcctagca

SEQ ID NO: 1561057 - DNA, 15 bp, Homo sapiens
actgtagcctagcaa

SEQ ID NO: 1561058 - DNA, 15 bp, Homo sapiens
ctgtagcctagcaaa

SEQ ID NO: 1561059 - DNA, 15 bp, Homo sapiens
tgtagcctagcaaag

SEQ ID NO: 1561060 - DNA, 15 bp, Homo sapiens
gtagcctagcaaaga

SEQ ID NO: 1561061 - DNA, 15 bp, Homo sapiens
tagcctagcaaagat

SEQ ID NO: 1561062 - DNA, 15 bp, Homo sapiens
agcctagcaaagatg

SEQ ID NO: 1561063 - DNA, 15 bp, Homo sapiens
gcctagcaaagatgg

SEQ ID NO: 1561064 - DNA, 15 bp, Homo sapiens
cctagcaaagatggc

SEQ ID NO: 1561065 - DNA, 15 bp, Homo sapiens
ctagcaaagatggca

SEQ ID NO: 1561066 - DNA, 15 bp, Homo sapiens
tagcaaagatggcac

SEQ ID NO: 1561067 - DNA, 15 bp, Homo sapiens
agcaaagatggcaca

SEQ ID NO: 1561068 - DNA, 15 bp, Homo sapiens
gcaaagatggcacag

SEQ ID NO: 1561069 - DNA, 15 bp, Homo sapiens
caaagatggcacagc

SEQ ID NO: 1561070 - DNA, 15 bp, Homo sapiens
aaagatggcacagca

SEQ ID NO: 1561071 - DNA, 15 bp, Homo sapiens
aagatggcacagcac

SEQ ID NO: 1561072 - DNA, 15 bp, Homo sapiens
agatggcacagcacc

SEQ ID NO: 1561073 - DNA, 15 bp, Homo sapiens
gatggcacagcacca

SEQ ID NO: 1561074 - DNA, 15 bp, Homo sapiens
atggcacagcaccac

SEQ ID NO: 1561075 - DNA, 15 bp, Homo sapiens
tggcacagcaccaca

SEQ ID NO: 1561076 - DNA, 15 bp, Homo sapiens
ggcacagcaccacaa

SEQ ID NO: 1561077 - DNA, 15 bp, Homo sapiens
gcacagcaccacaaa

SEQ ID NO: 1561078 - DNA, 15 bp, Homo sapiens
cacagcaccacaaag

SEQ ID NO: 1561079 - DNA, 15 bp, Homo sapiens
acagcaccacaaagg

SEQ ID NO: 1561080 - DNA, 15 bp, Homo sapiens
cagcaccacaaaggg

SEQ ID NO: 1561081 - DNA, 15 bp, Homo sapiens
agcaccacaaagggc

SEQ ID NO: 1561082 - DNA, 15 bp, Homo sapiens
gcaccacaaagggca

SEQ ID NO: 1561083 - DNA, 15 bp, Homo sapiens
caccacaaagggcaa

SEQ ID NO: 1561084 - DNA, 15 bp, Homo sapiens
accacaaagggcaaa

SEQ ID NO: 1561085 - DNA, 15 bp, Homo sapiens
ccacaaagggcaaat

SEQ ID NO: 1561086 - DNA, 15 bp, Homo sapiens
cacaaagggcaaatg

SEQ ID NO: 1561087 - DNA, 15 bp, Homo sapiens
acaaagggcaaatgg

SEQ ID NO: 1561088 - DNA, 15 bp, Homo sapiens
caaagggcaaatgga

SEQ ID NO: 1561089 - DNA, 15 bp, Homo sapiens
aaagggcaaatggag

SEQ ID NO: 1561090 - DNA, 15 bp, Homo sapiens
aagggcaaatggagt

SEQ ID NO: 1561091 - DNA, 15 bp, Homo sapiens
agggcaaatggagtc

SEQ ID NO: 1561092 - DNA, 15 bp, Homo sapiens
gggcaaatggagtca

SEQ ID NO: 1561093 - DNA, 15 bp, Homo sapiens
ggcaaatggagtcaa

SEQ ID NO: 1561094 - DNA, 15 bp, Homo sapiens
gcaaatggagtcaac

SEQ ID NO: 1561095 - DNA, 15 bp, Homo sapiens
caaatggagtcaact

SEQ ID NO: 1561096 - DNA, 15 bp, Homo sapiens
aaatggagtcaactc

SEQ ID NO: 1561097 - DNA, 15 bp, Homo sapiens
aatggagtcaactcc

SEQ ID NO: 1561098 - DNA, 15 bp, Homo sapiens
atggagtcaactccc

SEQ ID NO: 1561099 - DNA, 15 bp, Homo sapiens
tggagtcaactccct

SEQ ID NO: 1561100 - DNA, 15 bp, Homo sapiens
ggagtcaactccctt

SEQ ID NO: 1561101 - DNA, 15 bp, Homo sapiens
gagtcaactcccttc

SEQ ID NO: 1561102 - DNA, 15 bp, Homo sapiens
agtcaactcccttcc

SEQ ID NO: 1561103 - DNA, 15 bp, Homo sapiens
gtcaactcccttcca

SEQ ID NO: 1561104 - DNA, 15 bp, Homo sapiens
tcaactcccttccat

SEQ ID NO: 1561105 - DNA, 15 bp, Homo sapiens
caactcccttccatg

SEQ ID NO: 1561106 - DNA, 15 bp, Homo sapiens
aactcccttccatgc

SEQ ID NO: 1561107 - DNA, 15 bp, Homo sapiens
actcccttccatgct

SEQ ID NO: 1561108 - DNA, 15 bp, Homo sapiens
ctcccttccatgctc

SEQ ID NO: 1561109 - DNA, 15 bp, Homo sapiens
tcccttccatgctct

SEQ ID NO: 1561110 - DNA, 15 bp, Homo sapiens
cccttccatgctctg

SEQ ID NO: 1561111 - DNA, 15 bp, Homo sapiens
ccttccatgctctga

SEQ ID NO: 1561112 - DNA, 15 bp, Homo sapiens
cttccatgctctgaa

SEQ ID NO: 1561113 - DNA, 15 bp, Homo sapiens
ttccatgctctgaag

SEQ ID NO: 1561114 - DNA, 15 bp, Homo sapiens
tccatgctctgaagg

SEQ ID NO: 1561115 - DNA, 15 bp, Homo sapiens
ccatgctctgaaggt

SEQ ID NO: 1561116 - DNA, 15 bp, Homo sapiens
catgctctgaaggtc

SEQ ID NO: 1561117 - DNA, 15 bp, Homo sapiens
atgctctgaaggtct

SEQ ID NO: 1561118 - DNA, 15 bp, Homo sapiens
tgctctgaaggtctt

SEQ ID NO: 1561119 - DNA, 15 bp, Homo sapiens
gctctgaaggtcttg

SEQ ID NO: 1561120 - DNA, 15 bp, Homo sapiens
ctctgaaggtcttgg

SEQ ID NO: 1561121 - DNA, 15 bp, Homo sapiens
tctgaaggtcttggc

SEQ ID NO: 1561122 - DNA, 15 bp, Homo sapiens
ctgaaggtcttggcc

SEQ ID NO: 1561123 - DNA, 15 bp, Homo sapiens
tgaaggtcttggcca

SEQ ID NO: 1561124 - DNA, 15 bp, Homo sapiens
gaaggtcttggccac

SEQ ID NO: 1561125 - DNA, 15 bp, Homo sapiens
aaggtcttggccact

SEQ ID NO: 1561126 - DNA, 15 bp, Homo sapiens
aggtcttggccactc

SEQ ID NO: 1561127 - DNA, 15 bp, Homo sapiens
ggtcttggccactct

SEQ ID NO: 1561128 - DNA, 15 bp, Homo sapiens
gtcttggccactctc

SEQ ID NO: 1561129 - DNA, 15 bp, Homo sapiens
tcttggccactctca

SEQ ID NO: 1561130 - DNA, 15 bp, Homo sapiens
cttggccactctcat

SEQ ID NO: 1561131 - DNA, 15 bp, Homo sapiens
ttggccactctcatc

SEQ ID NO: 1561132 - DNA, 15 bp, Homo sapiens
tggccactctcatca

SEQ ID NO: 1561133 - DNA, 15 bp, Homo sapiens
ggccactctcatcag

SEQ ID NO: 1561134 - DNA, 15 bp, Homo sapiens
gccactctcatcagg

SEQ ID NO: 1561135 - DNA, 15 bp, Homo sapiens
ccactctcatcaggg

SEQ ID NO: 1561136 - DNA, 15 bp, Homo sapiens
cactctcatcagggt

SEQ ID NO: 1561137 - DNA, 15 bp, Homo sapiens
actctcatcagggtt

SEQ ID NO: 1561138 - DNA, 15 bp, Homo sapiens
ctctcatcagggttg

SEQ ID NO: 1561139 - DNA, 15 bp, Homo sapiens
tctcatcagggttgg

SEQ ID NO: 1561140 - DNA, 15 bp, Homo sapiens
ctcatcagggttggc

SEQ ID NO: 1561141 - DNA, 15 bp, Homo sapiens
tcatcagggttggct

SEQ ID NO: 1561142 - DNA, 15 bp, Homo sapiens
catcagggttggctg

SEQ ID NO: 1561143 - DNA, 15 bp, Homo sapiens
atcagggttggctgt

SEQ ID NO: 1561144 - DNA, 15 bp, Homo sapiens
tcagggttggctgtg

SEQ ID NO: 1561145 - DNA, 15 bp, Homo sapiens
cagggttggctgtgt

SEQ ID NO: 1561146 - DNA, 15 bp, Homo sapiens
agggttggctgtgta

SEQ ID NO: 1561147 - DNA, 15 bp, Homo sapiens
gggttggctgtgtac

SEQ ID NO: 1561148 - DNA, 15 bp, Homo sapiens
ggttggctgtgtact

SEQ ID NO: 1561149 - DNA, 15 bp, Homo sapiens
gttggctgtgtacta

SEQ ID NO: 1561150 - DNA, 15 bp, Homo sapiens
ttggctgtgtactat

SEQ ID NO: 1561151 - DNA, 15 bp, Homo sapiens
tggctgtgtactatc

SEQ ID NO: 1561152 - DNA, 15 bp, Homo sapiens
ggctgtgtactatcc

SEQ ID NO: 1561153 - DNA, 15 bp, Homo sapiens
gctgtgtactatcca

SEQ ID NO: 1561154 - DNA, 15 bp, Homo sapiens
ctgtgtactatccag

SEQ ID NO: 1561155 - DNA, 15 bp, Homo sapiens
tgtgtactatccagc

SEQ ID NO: 1561156 - DNA, 15 bp, Homo sapiens
gtgtactatccagca

SEQ ID NO: 1561157 - DNA, 15 bp, Homo sapiens
tgtactatccagcag

SEQ ID NO: 1561158 - DNA, 15 bp, Homo sapiens
gtactatccagcagc

SEQ ID NO: 1561159 - DNA, 15 bp, Homo sapiens
tactatccagcagct

SEQ ID NO: 1561160 - DNA, 15 bp, Homo sapiens
actatccagcagctc

SEQ ID NO: 1561161 - DNA, 15 bp, Homo sapiens
ctatccagcagctca

SEQ ID NO: 1561162 - DNA, 15 bp, Homo sapiens
tatccagcagctcac

SEQ ID NO: 1561163 - DNA, 15 bp, Homo sapiens
atccagcagctcaca

SEQ ID NO: 1561164 - DNA, 15 bp, Homo sapiens
tccagcagctcacag

SEQ ID NO: 1561165 - DNA, 15 bp, Homo sapiens
ccagcagctcacagt

SEQ ID NO: 1561166 - DNA, 15 bp, Homo sapiens
cagcagctcacagtc

SEQ ID NO: 1561167 - DNA, 15 bp, Homo sapiens
agcagctcacagtca

SEQ ID NO: 1561168 - DNA, 15 bp, Homo sapiens
gcagctcacagtcag

SEQ ID NO: 1561169 - DNA, 15 bp, Homo sapiens
cagctcacagtcagg

SEQ ID NO: 1561170 - DNA, 15 bp, Homo sapiens
agctcacagtcagga

SEQ ID NO: 1561171 - DNA, 15 bp, Homo sapiens
gctcacagtcaggag

SEQ ID NO: 1561172 - DNA, 15 bp, Homo sapiens
ctcacagtcaggaga

SEQ ID NO: 1561173 - DNA, 15 bp, Homo sapiens
tcacagtcaggagac

SEQ ID NO: 1561174 - DNA, 15 bp, Homo sapiens
cacagtcaggagacc

SEQ ID NO: 1561175 - DNA, 15 bp, Homo sapiens
acagtcaggagacct

SEQ ID NO: 1561176 - DNA, 15 bp, Homo sapiens
cagtcaggagacctc

SEQ ID NO: 1561177 - DNA, 15 bp, Homo sapiens
agtcaggagacctcc

SEQ ID NO: 1561178 - DNA, 15 bp, Homo sapiens
gtcaggagacctccc

SEQ ID NO: 1561179 - DNA, 15 bp, Homo sapiens
tcaggagacctcccc

SEQ ID NO: 1561180 - DNA, 15 bp, Homo sapiens
caggagacctcccct

SEQ ID NO: 1561181 - DNA, 15 bp, Homo sapiens
aggagacctcccctc

SEQ ID NO: 1561182 - DNA, 15 bp, Homo sapiens
ggagacctcccctcc

SEQ ID NO: 1561183 - DNA, 15 bp, Homo sapiens
gagacctcccctcct

SEQ ID NO: 1561184 - DNA, 15 bp, Homo sapiens
agacctcccctcctc

SEQ ID NO: 1561185 - DNA, 15 bp, Homo sapiens
gacctcccctcctca

SEQ ID NO: 1561186 - DNA, 15 bp, Homo sapiens
acctcccctcctcag

SEQ ID NO: 1561187 - DNA, 15 bp, Homo sapiens
cctcccctcctcagt

SEQ ID NO: 1561188 - DNA, 15 bp, Homo sapiens
ctcccctcctcagtc

SEQ ID NO: 1561189 - DNA, 15 bp, Homo sapiens
tcccctcctcagtcc

SEQ ID NO: 1561190 - DNA, 15 bp, Homo sapiens
cccctcctcagtccc

SEQ ID NO: 1561191 - DNA, 15 bp, Homo sapiens
ccctcctcagtccct

SEQ ID NO: 1561192 - DNA, 15 bp, Homo sapiens
cctcctcagtccctc

SEQ ID NO: 1561193 - DNA, 15 bp, Homo sapiens
ctcctcagtccctcc

SEQ ID NO: 1561194 - DNA, 15 bp, Homo sapiens
tcctcagtccctccc

SEQ ID NO: 1561195 - DNA, 15 bp, Homo sapiens
cctcagtccctccca

SEQ ID NO: 1561196 - DNA, 15 bp, Homo sapiens
ctcagtccctcccat

SEQ ID NO: 1561197 - DNA, 15 bp, Homo sapiens
tcagtccctcccatt

SEQ ID NO: 1561198 - DNA, 15 bp, Homo sapiens
cagtccctcccattt

SEQ ID NO: 1561199 - DNA, 15 bp, Homo sapiens
agtccctcccatttc

SEQ ID NO: 1561200 - DNA, 15 bp, Homo sapiens
gtccctcccatttct

SEQ ID NO: 1561201 - DNA, 15 bp, Homo sapiens
tccctcccatttctt

SEQ ID NO: 1561202 - DNA, 15 bp, Homo sapiens
ccctcccatttcttt

SEQ ID NO: 1561203 - DNA, 15 bp, Homo sapiens
cctcccatttctttc

SEQ ID NO: 1561204 - DNA, 15 bp, Homo sapiens
ctcccatttctttct

SEQ ID NO: 1561205 - DNA, 15 bp, Homo sapiens
tcccatttctttctt

SEQ ID NO: 1561206 - DNA, 15 bp, Homo sapiens
cccatttctttcttc

SEQ ID NO: 1561207 - DNA, 15 bp, Homo sapiens
ccatttctttcttcc

SEQ ID NO: 1561208 - DNA, 15 bp, Homo sapiens
catttctttcttccg

SEQ ID NO: 1561209 - DNA, 15 bp, Homo sapiens
atttctttcttccgc

SEQ ID NO: 1561210 - DNA, 15 bp, Homo sapiens
tttctttcttccgca

SEQ ID NO: 1561211 - DNA, 15 bp, Homo sapiens
ttctttcttccgcaa

SEQ ID NO: 1561212 - DNA, 15 bp, Homo sapiens
tctttcttccgcaag

SEQ ID NO: 1561213 - DNA, 15 bp, Homo sapiens
ctttcttccgcaagg

SEQ ID NO: 1561214 - DNA, 15 bp, Homo sapiens
tttcttccgcaagga

SEQ ID NO: 1561215 - DNA, 15 bp, Homo sapiens
ttcttccgcaaggaa

SEQ ID NO: 1561216 - DNA, 15 bp, Homo sapiens
tcttccgcaaggaaa

SEQ ID NO: 1561217 - DNA, 15 bp, Homo sapiens
cttccgcaaggaaag

SEQ ID NO: 1561218 - DNA, 15 bp, Homo sapiens
ttccgcaaggaaaga

SEQ ID NO: 1561219 - DNA, 15 bp, Homo sapiens
tccgcaaggaaagaa

SEQ ID NO: 1561220 - DNA, 15 bp, Homo sapiens
ccgcaaggaaagaac

SEQ ID NO: 1561221 - DNA, 15 bp, Homo sapiens
cgcaaggaaagaaca

SEQ ID NO: 1561222 - DNA, 15 bp, Homo sapiens
gcaaggaaagaacat

SEQ ID NO: 1561223 - DNA, 15 bp, Homo sapiens
caaggaaagaacatt

SEQ ID NO: 1561224 - DNA, 15 bp, Homo sapiens
aaggaaagaacattg

SEQ ID NO: 1561225 - DNA, 15 bp, Homo sapiens
aggaaagaacattgc

SEQ ID NO: 1561226 - DNA, 15 bp, Homo sapiens
ggaaagaacattgca

SEQ ID NO: 1561227 - DNA, 15 bp, Homo sapiens
gaaagaacattgcat

SEQ ID NO: 1561228 - DNA, 15 bp, Homo sapiens
aaagaacattgcatg

SEQ ID NO: 1561229 - DNA, 15 bp, Homo sapiens
aagaacattgcatgt

SEQ ID NO: 1561230 - DNA, 15 bp, Homo sapiens
agaacattgcatgtg

SEQ ID NO: 1561231 - DNA, 15 bp, Homo sapiens
gaacattgcatgtgg

SEQ ID NO: 1561232 - DNA, 15 bp, Homo sapiens
aacattgcatgtggg

SEQ ID NO: 1561233 - DNA, 15 bp, Homo sapiens
acattgcatgtgggc

SEQ ID NO: 1561234 - DNA, 15 bp, Homo sapiens
cattgcatgtgggcg

SEQ ID NO: 1561235 - DNA, 15 bp, Homo sapiens
attgcatgtgggcgt

SEQ ID NO: 1561236 - DNA, 15 bp, Homo sapiens
ttgcatgtgggcgtg

SEQ ID NO: 1561237 - DNA, 15 bp, Homo sapiens
tgcatgtgggcgtgt

SEQ ID NO: 1561238 - DNA, 15 bp, Homo sapiens
gcatgtgggcgtgtg

SEQ ID NO: 1561239 - DNA, 15 bp, Homo sapiens
catgtgggcgtgtgt

SEQ ID NO: 1561240 - DNA, 15 bp, Homo sapiens
atgtgggcgtgtgtg

SEQ ID NO: 1561241 - DNA, 15 bp, Homo sapiens
tgtgggcgtgtgtgt

SEQ ID NO: 1561242 - DNA, 15 bp, Homo sapiens
gtgggcgtgtgtgtg

SEQ ID NO: 1561243 - DNA, 15 bp, Homo sapiens
tgggcgtgtgtgtgt

SEQ ID NO: 1561244 - DNA, 15 bp, Homo sapiens
gggcgtgtgtgtgtg

SEQ ID NO: 1561245 - DNA, 15 bp, Homo sapiens
ggcgtgtgtgtgtgt

SEQ ID NO: 1561246 - DNA, 15 bp, Homo sapiens
gcgtgtgtgtgtgta

SEQ ID NO: 1561247 - DNA, 15 bp, Homo sapiens
cgtgtgtgtgtgtat

SEQ ID NO: 1561248 - DNA, 15 bp, Homo sapiens
gtgtgtgtgtatgtg

SEQ ID NO: 1561249 - DNA, 15 bp, Homo sapiens
tgtgtgtgtatgtgt

SEQ ID NO: 1561250 - DNA, 15 bp, Homo sapiens
gtgtgtgtatgtgtg

SEQ ID NO: 1561251 - DNA, 15 bp, Homo sapiens
tgtgtgtatgtgtgt

SEQ ID NO: 1561252 - DNA, 15 bp, Homo sapiens
gtgtgtatgtgtgtg

SEQ ID NO: 1561253 - DNA, 15 bp, Homo sapiens
tgtgtatgtgtgtgc

SEQ ID NO: 1561254 - DNA, 15 bp, Homo sapiens
gtgtatgtgtgtgca

SEQ ID NO: 1561255 - DNA, 15 bp, Homo sapiens
tgtatgtgtgtgcat

SEQ ID NO: 1561256 - DNA, 15 bp, Homo sapiens
gtatgtgtgtgcatg

SEQ ID NO: 1561257 - DNA, 15 bp, Homo sapiens
gtgtgtgcatgtgtg

SEQ ID NO: 1561258 - DNA, 15 bp, Homo sapiens
tgtgtgcatgtgtgt

SEQ ID NO: 1561259 - DNA, 15 bp, Homo sapiens
gtgtgcatgtgtgtg

SEQ ID NO: 1561260 - DNA, 15 bp, Homo sapiens
tgcatgtgtgtgtgc

SEQ ID NO: 1561261 - DNA, 15 bp, Homo sapiens
catgtgtgtgtgcat

SEQ ID NO: 1561262 - DNA, 15 bp, Homo sapiens
atgtgtgtgtgcatg

SEQ ID NO: 1561263 - DNA, 15 bp, Homo sapiens
tgtgtgtgtgcatgt

SEQ ID NO: 1561264 - DNA, 15 bp, Homo sapiens
gtgtgtgtgcatgtt

SEQ ID NO: 1561265 - DNA, 15 bp, Homo sapiens
tgtgtgtgcatgttt

SEQ ID NO: 1561266 - DNA, 15 bp, Homo sapiens
gtgtgtgcatgtttc

SEQ ID NO: 1561267 - DNA, 15 bp, Homo sapiens
tgtgtgcatgtttct

SEQ ID NO: 1561268 - DNA, 15 bp, Homo sapiens
gtgtgcatgtttctt

SEQ ID NO: 1561269 - DNA, 15 bp, Homo sapiens
tgtgcatgtttcttc

SEQ ID NO: 1561270 - DNA, 15 bp, Homo sapiens
gtgcatgtttcttct

SEQ ID NO: 1561271 - DNA, 15 bp, Homo sapiens
tgcatgtttcttctg

SEQ ID NO: 1561272 - DNA, 15 bp, Homo sapiens
gcatgtttcttctgt

SEQ ID NO: 1561273 - DNA, 15 bp, Homo sapiens
catgtttcttctgtg

SEQ ID NO: 1561274 - DNA, 15 bp, Homo sapiens
atgtttcttctgtgc

SEQ ID NO: 1561275 - DNA, 15 bp, Homo sapiens
tgtttcttctgtgca

SEQ ID NO: 1561276 - DNA, 15 bp, Homo sapiens
gtttcttctgtgcat

SEQ ID NO: 1561277 - DNA, 15 bp, Homo sapiens
tttcttctgtgcata

SEQ ID NO: 1561278 - DNA, 15 bp, Homo sapiens
ttcttctgtgcatag

SEQ ID NO: 1561279 - DNA, 15 bp, Homo sapiens
tcttctgtgcatagc

SEQ ID NO: 1561280 - DNA, 15 bp, Homo sapiens
cttctgtgcatagca

SEQ ID NO: 1561281 - DNA, 15 bp, Homo sapiens
ttctgtgcatagcag

SEQ ID NO: 1561282 - DNA, 15 bp, Homo sapiens
tctgtgcatagcagc

SEQ ID NO: 1561283 - DNA, 15 bp, Homo sapiens
ctgtgcatagcagca

SEQ ID NO: 1561284 - DNA, 15 bp, Homo sapiens
tgtgcatagcagcat

SEQ ID NO: 1561285 - DNA, 15 bp, Homo sapiens
gtgcatagcagcata

SEQ ID NO: 1561286 - DNA, 15 bp, Homo sapiens
tgcatagcagcataa

SEQ ID NO: 1561287 - DNA, 15 bp, Homo sapiens
gcatagcagcataaa

SEQ ID NO: 1561288 - DNA, 15 bp, Homo sapiens
catagcagcataaag

SEQ ID NO: 1561289 - DNA, 15 bp, Homo sapiens
atagcagcataaagt

SEQ ID NO: 1561290 - DNA, 15 bp, Homo sapiens
tagcagcataaagtt

SEQ ID NO: 1561291 - DNA, 15 bp, Homo sapiens
agcagcataaagtta

SEQ ID NO: 1561292 - DNA, 15 bp, Homo sapiens
gcagcataaagttag

SEQ ID NO: 1561293 - DNA, 15 bp, Homo sapiens
cagcataaagttagg

SEQ ID NO: 1561294 - DNA, 15 bp, Homo sapiens
agcataaagttagga

SEQ ID NO: 1561295 - DNA, 15 bp, Homo sapiens
gcataaagttaggag

SEQ ID NO: 1561296 - DNA, 15 bp, Homo sapiens
cataaagttaggaga

SEQ ID NO: 1561297 - DNA, 15 bp, Homo sapiens
ataaagttaggagat

SEQ ID NO: 1561298 - DNA, 15 bp, Homo sapiens
taaagttaggagatg

SEQ ID NO: 1561299 - DNA, 15 bp, Homo sapiens
aaagttaggagatga

SEQ ID NO: 1561300 - DNA, 15 bp, Homo sapiens
aagttaggagatgat

SEQ ID NO: 1561301 - DNA, 15 bp, Homo sapiens
agttaggagatgatg

SEQ ID NO: 1561302 - DNA, 15 bp, Homo sapiens
gttaggagatgatga

SEQ ID NO: 1561303 - DNA, 15 bp, Homo sapiens
ttaggagatgatgac

SEQ ID NO: 1561304 - DNA, 15 bp, Homo sapiens
taggagatgatgact

SEQ ID NO: 1561305 - DNA, 15 bp, Homo sapiens
aggagatgatgactc

SEQ ID NO: 1561306 - DNA, 15 bp, Homo sapiens
ggagatgatgactcc

SEQ ID NO: 1561307 - DNA, 15 bp, Homo sapiens
gagatgatgactcca

SEQ ID NO: 1561308 - DNA, 15 bp, Homo sapiens
agatgatgactccag

SEQ ID NO: 1561309 - DNA, 15 bp, Homo sapiens
gatgatgactccaga

SEQ ID NO: 1561310 - DNA, 15 bp, Homo sapiens
atgatgactccagaa

SEQ ID NO: 1561311 - DNA, 15 bp, Homo sapiens
tgatgactccagaat

SEQ ID NO: 1561312 - DNA, 15 bp, Homo sapiens
gatgactccagaatc

SEQ ID NO: 1561313 - DNA, 15 bp, Homo sapiens
atgactccagaatca

SEQ ID NO: 1561314 - DNA, 15 bp, Homo sapiens
tgactccagaatcat

SEQ ID NO: 1561315 - DNA, 15 bp, Homo sapiens
gactccagaatcatc

SEQ ID NO: 1561316 - DNA, 15 bp, Homo sapiens
actccagaatcatca

SEQ ID NO: 1561317 - DNA, 15 bp, Homo sapiens
ctccagaatcatcac

SEQ ID NO: 1561318 - DNA, 15 bp, Homo sapiens
tccagaatcatcaca

SEQ ID NO: 1561319 - DNA, 15 bp, Homo sapiens
ccagaatcatcacac

SEQ ID NO: 1561320 - DNA, 15 bp, Homo sapiens
cagaatcatcacacc

SEQ ID NO: 1561321 - DNA, 15 bp, Homo sapiens
agaatcatcacaccc

SEQ ID NO: 1561322 - DNA, 15 bp, Homo sapiens
gaatcatcacacccg

SEQ ID NO: 1561323 - DNA, 15 bp, Homo sapiens
aatcatcacacccgc

SEQ ID NO: 1561324 - DNA, 15 bp, Homo sapiens
atcatcacacccgct

SEQ ID NO: 1561325 - DNA, 15 bp, Homo sapiens
tcatcacacccgctg

SEQ ID NO: 1561326 - DNA, 15 bp, Homo sapiens
catcacacccgctgt

SEQ ID NO: 1561327 - DNA, 15 bp, Homo sapiens
atcacacccgctgtg

SEQ ID NO: 1561328 - DNA, 15 bp, Homo sapiens
tcacacccgctgtgc

SEQ ID NO: 1561329 - DNA, 15 bp, Homo sapiens
cacacccgctgtgca

SEQ ID NO: 1561330 - DNA, 15 bp, Homo sapiens
acacccgctgtgcag

SEQ ID NO: 1561331 - DNA, 15 bp, Homo sapiens
cacccgctgtgcagg

SEQ ID NO: 1561332 - DNA, 15 bp, Homo sapiens
acccgctgtgcaggt

SEQ ID NO: 1561333 - DNA, 15 bp, Homo sapiens
cccgctgtgcaggtc

SEQ ID NO: 1561334 - DNA, 15 bp, Homo sapiens
ccgctgtgcaggtca

SEQ ID NO: 1561335 - DNA, 15 bp, Homo sapiens
cgctgtgcaggtcat

SEQ ID NO: 1561336 - DNA, 15 bp, Homo sapiens
gctgtgcaggtcata

SEQ ID NO: 1561337 - DNA, 15 bp, Homo sapiens
ctgtgcaggtcatag

SEQ ID NO: 1561338 - DNA, 15 bp, Homo sapiens
tgtgcaggtcatagg

SEQ ID NO: 1561339 - DNA, 15 bp, Homo sapiens
gtgcaggtcatagga

SEQ ID NO: 1561340 - DNA, 15 bp, Homo sapiens
tgcaggtcataggac

SEQ ID NO: 1561341 - DNA, 15 bp, Homo sapiens
gcaggtcataggacc

SEQ ID NO: 1561342 - DNA, 15 bp, Homo sapiens
caggtcataggaccg

SEQ ID NO: 1561343 - DNA, 15 bp, Homo sapiens
aggtcataggaccgc

SEQ ID NO: 1561344 - DNA, 15 bp, Homo sapiens
ggtcataggaccgca

SEQ ID NO: 1561345 - DNA, 15 bp, Homo sapiens
gtcataggaccgcac

SEQ ID NO: 1561346 - DNA, 15 bp, Homo sapiens
tcataggaccgcaca

SEQ ID NO: 1561347 - DNA, 15 bp, Homo sapiens
cataggaccgcacac

SEQ ID NO: 1561348 - DNA, 15 bp, Homo sapiens
ataggaccgcacacc

SEQ ID NO: 1561349 - DNA, 15 bp, Homo sapiens
taggaccgcacaccc

SEQ ID NO: 1561350 - DNA, 15 bp, Homo sapiens
aggaccgcacacccg

SEQ ID NO: 1561351 - DNA, 15 bp, Homo sapiens
ggaccgcacacccga

SEQ ID NO: 1561352 - DNA, 15 bp, Homo sapiens
gaccgcacacccgag

SEQ ID NO: 1561353 - DNA, 15 bp, Homo sapiens
accgcacacccgagg

SEQ ID NO: 1561354 - DNA, 15 bp, Homo sapiens
ccgcacacccgaggc

SEQ ID NO: 1561355 - DNA, 15 bp, Homo sapiens
cgcacacccgaggct

SEQ ID NO: 1561356 - DNA, 15 bp, Homo sapiens
gcacacccgaggctg

SEQ ID NO: 1561357 - DNA, 15 bp, Homo sapiens
cacacccgaggctgg

SEQ ID NO: 1561358 - DNA, 15 bp, Homo sapiens
acacccgaggctggg

SEQ ID NO: 1561359 - DNA, 15 bp, Homo sapiens
cacccgaggctggga

SEQ ID NO: 1561360 - DNA, 15 bp, Homo sapiens
acccgaggctgggag

SEQ ID NO: 1561361 - DNA, 15 bp, Homo sapiens
cccgaggctgggagt

SEQ ID NO: 1561362 - DNA, 15 bp, Homo sapiens
ccgaggctgggagtc

SEQ ID NO: 1561363 - DNA, 15 bp, Homo sapiens
cgaggctgggagtct

SEQ ID NO: 1561364 - DNA, 15 bp, Homo sapiens
gaggctgggagtcta

SEQ ID NO: 1561365 - DNA, 15 bp, Homo sapiens
aggctgggagtctaa

SEQ ID NO: 1561366 - DNA, 15 bp, Homo sapiens
ggctgggagtctaag

SEQ ID NO: 1561367 - DNA, 15 bp, Homo sapiens
gctgggagtctaagt

SEQ ID NO: 1561368 - DNA, 15 bp, Homo sapiens
ctgggagtctaagtg

SEQ ID NO: 1561369 - DNA, 15 bp, Homo sapiens
tgggagtctaagtgg

SEQ ID NO: 1561370 - DNA, 15 bp, Homo sapiens
gggagtctaagtggt

SEQ ID NO: 1561371 - DNA, 15 bp, Homo sapiens
ggagtctaagtggta

SEQ ID NO: 1561372 - DNA, 15 bp, Homo sapiens
gagtctaagtggtag

SEQ ID NO: 1561373 - DNA, 15 bp, Homo sapiens
agtctaagtggtaga

SEQ ID NO: 1561374 - DNA, 15 bp, Homo sapiens
gtctaagtggtagat

SEQ ID NO: 1561375 - DNA, 15 bp, Homo sapiens
tctaagtggtagatg

SEQ ID NO: 1561376 - DNA, 15 bp, Homo sapiens
ctaagtggtagatgc

SEQ ID NO: 1561377 - DNA, 15 bp, Homo sapiens
taagtggtagatgct

SEQ ID NO: 1561378 - DNA, 15 bp, Homo sapiens
aagtggtagatgctt

SEQ ID NO: 1561379 - DNA, 15 bp, Homo sapiens
agtggtagatgcttc

SEQ ID NO: 1561380 - DNA, 15 bp, Homo sapiens
gtggtagatgcttcc

SEQ ID NO: 1561381 - DNA, 15 bp, Homo sapiens
tggtagatgcttcct

SEQ ID NO: 1561382 - DNA, 15 bp, Homo sapiens
ggtagatgcttcctc

SEQ ID NO: 1561383 - DNA, 15 bp, Homo sapiens
gtagatgcttcctct

SEQ ID NO: 1561384 - DNA, 15 bp, Homo sapiens
tagatgcttcctctc

SEQ ID NO: 1561385 - DNA, 15 bp, Homo sapiens
agatgcttcctctcc

SEQ ID NO: 1561386 - DNA, 15 bp, Homo sapiens
gatgcttcctctcca

SEQ ID NO: 1561387 - DNA, 15 bp, Homo sapiens
atgcttcctctccat

SEQ ID NO: 1561388 - DNA, 15 bp, Homo sapiens
tgcttcctctccatg

SEQ ID NO: 1561389 - DNA, 15 bp, Homo sapiens
gcttcctctccatgc

SEQ ID NO: 1561390 - DNA, 15 bp, Homo sapiens
cttcctctccatgcg

SEQ ID NO: 1561391 - DNA, 15 bp, Homo sapiens
ttcctctccatgcgc

SEQ ID NO: 1561392 - DNA, 15 bp, Homo sapiens
tcctctccatgcgca

SEQ ID NO: 1561393 - DNA, 15 bp, Homo sapiens
cctctccatgcgcag

SEQ ID NO: 1561394 - DNA, 15 bp, Homo sapiens
ctctccatgcgcaga

SEQ ID NO: 1561395 - DNA, 15 bp, Homo sapiens
tctccatgcgcagac

SEQ ID NO: 1561396 - DNA, 15 bp, Homo sapiens
ctccatgcgcagaca

SEQ ID NO: 1561397 - DNA, 15 bp, Homo sapiens
tccatgcgcagacag

SEQ ID NO: 1561398 - DNA, 15 bp, Homo sapiens
ccatgcgcagacagg

SEQ ID NO: 1561399 - DNA, 15 bp, Homo sapiens
catgcgcagacaggg

SEQ ID NO: 1561400 - DNA, 15 bp, Homo sapiens
atgcgcagacagggc

SEQ ID NO: 1561401 - DNA, 15 bp, Homo sapiens
tgcgcagacagggct

SEQ ID NO: 1561402 - DNA, 15 bp, Homo sapiens
gcgcagacagggctc

SEQ ID NO: 1561403 - DNA, 15 bp, Homo sapiens
cgcagacagggctcc

SEQ ID NO: 1561404 - DNA, 15 bp, Homo sapiens
gcagacagggctccc

SEQ ID NO: 1561405 - DNA, 15 bp, Homo sapiens
cagacagggctccca

SEQ ID NO: 1561406 - DNA, 15 bp, Homo sapiens
agacagggctcccat

SEQ ID NO: 1561407 - DNA, 15 bp, Homo sapiens
gacagggctcccatt

SEQ ID NO: 1561408 - DNA, 15 bp, Homo sapiens
acagggctcccatta

SEQ ID NO: 1561409 - DNA, 15 bp, Homo sapiens
cagggctcccattat

SEQ ID NO: 1561410 - DNA, 15 bp, Homo sapiens
agggctcccattatt

SEQ ID NO: 1561411 - DNA, 15 bp, Homo sapiens
gggctcccattattt

SEQ ID NO: 1561412 - DNA, 15 bp, Homo sapiens
ggctcccattatttg

SEQ ID NO: 1561413 - DNA, 15 bp, Homo sapiens
gctcccattatttgc

SEQ ID NO: 1561414 - DNA, 15 bp, Homo sapiens
ctcccattatttgct

SEQ ID NO: 1561415 - DNA, 15 bp, Homo sapiens
tcccattatttgcta

SEQ ID NO: 1561416 - DNA, 15 bp, Homo sapiens
cccattatttgctaa

SEQ ID NO: 1561417 - DNA, 15 bp, Homo sapiens
ccattatttgctaat

SEQ ID NO: 1561418 - DNA, 15 bp, Homo sapiens
cattatttgctaatg

SEQ ID NO: 1561419 - DNA, 15 bp, Homo sapiens
attatttgctaatgc

SEQ ID NO: 1561420 - DNA, 15 bp, Homo sapiens
ttatttgctaatgcc

SEQ ID NO: 1561421 - DNA, 15 bp, Homo sapiens
tatttgctaatgcct

SEQ ID NO: 1561422 - DNA, 15 bp, Homo sapiens
atttgctaatgcctg

SEQ ID NO: 1561423 - DNA, 15 bp, Homo sapiens
tttgctaatgcctgc

SEQ ID NO: 1561424 - DNA, 15 bp, Homo sapiens
ttgctaatgcctgcg

SEQ ID NO: 1561425 - DNA, 15 bp, Homo sapiens
tgctaatgcctgcga

SEQ ID NO: 1561426 - DNA, 15 bp, Homo sapiens
gctaatgcctgcgac

SEQ ID NO: 1561427 - DNA, 15 bp, Homo sapiens
ctaatgcctgcgacg

SEQ ID NO: 1561428 - DNA, 15 bp, Homo sapiens
taatgcctgcgacgt

SEQ ID NO: 1561429 - DNA, 15 bp, Homo sapiens
aatgcctgcgacgtg

SEQ ID NO: 1561430 - DNA, 15 bp, Homo sapiens
atgcctgcgacgtgc

SEQ ID NO: 1561431 - DNA, 15 bp, Homo sapiens
tgcctgcgacgtgct

SEQ ID NO: 1561432 - DNA, 15 bp, Homo sapiens
gcctgcgacgtgctc

SEQ ID NO: 1561433 - DNA, 15 bp, Homo sapiens
cctgcgacgtgctca

SEQ ID NO: 1561434 - DNA, 15 bp, Homo sapiens
ctgcgacgtgctcag

SEQ ID NO: 1561435 - DNA, 15 bp, Homo sapiens
tgcgacgtgctcagg

SEQ ID NO: 1561436 - DNA, 15 bp, Homo sapiens
gcgacgtgctcaggg

SEQ ID NO: 1561437 - DNA, 15 bp, Homo sapiens
cgacgtgctcaggga

SEQ ID NO: 1561438 - DNA, 15 bp, Homo sapiens
gacgtgctcagggaa

SEQ ID NO: 1561439 - DNA, 15 bp, Homo sapiens
acgtgctcagggaag

SEQ ID NO: 1561440 - DNA, 15 bp, Homo sapiens
cgtgctcagggaagg

SEQ ID NO: 1561441 - DNA, 15 bp, Homo sapiens
gtgctcagggaaggc

SEQ ID NO: 1561442 - DNA, 15 bp, Homo sapiens
tgctcagggaaggca

SEQ ID NO: 1561443 - DNA, 15 bp, Homo sapiens
gctcagggaaggcaa

SEQ ID NO: 1561444 - DNA, 15 bp, Homo sapiens
ctcagggaaggcaaa

SEQ ID NO: 1561445 - DNA, 15 bp, Homo sapiens
tcagggaaggcaaaa

SEQ ID NO: 1561446 - DNA, 15 bp, Homo sapiens
cagggaaggcaaaat

SEQ ID NO: 1561447 - DNA, 15 bp, Homo sapiens
agggaaggcaaaatc

SEQ ID NO: 1561448 - DNA, 15 bp, Homo sapiens
gggaaggcaaaatct

SEQ ID NO: 1561449 - DNA, 15 bp, Homo sapiens
ggaaggcaaaatcta

SEQ ID NO: 1561450 - DNA, 15 bp, Homo sapiens
gaaggcaaaatctat

SEQ ID NO: 1561451 - DNA, 15 bp, Homo sapiens
aaggcaaaatctatt

SEQ ID NO: 1561452 - DNA, 15 bp, Homo sapiens
aggcaaaatctattc

SEQ ID NO: 1561453 - DNA, 15 bp, Homo sapiens
ggcaaaatctattcc

SEQ ID NO: 1561454 - DNA, 15 bp, Homo sapiens
gcaaaatctattcca

SEQ ID NO: 1561455 - DNA, 15 bp, Homo sapiens
caaaatctattccaa

SEQ ID NO: 1561456 - DNA, 15 bp, Homo sapiens
aaaatctattccaaa

SEQ ID NO: 1561457 - DNA, 15 bp, Homo sapiens
aaatctattccaaag

SEQ ID NO: 1561458 - DNA, 15 bp, Homo sapiens
aatctattccaaagg

SEQ ID NO: 1561459 - DNA, 15 bp, Homo sapiens
atctattccaaaggt

SEQ ID NO: 1561460 - DNA, 15 bp, Homo sapiens
tctattccaaaggtt

SEQ ID NO: 1561461 - DNA, 15 bp, Homo sapiens
ctattccaaaggttt

SEQ ID NO: 1561462 - DNA, 15 bp, Homo sapiens
tattccaaaggttta

SEQ ID NO: 1561463 - DNA, 15 bp, Homo sapiens
attccaaaggtttat

SEQ ID NO: 1561464 - DNA, 15 bp, Homo sapiens
ttccaaaggtttatt

SEQ ID NO: 1561465 - DNA, 15 bp, Homo sapiens
tccaaaggtttattt

SEQ ID NO: 1561466 - DNA, 15 bp, Homo sapiens
ccaaaggtttatttt

SEQ ID NO: 1561467 - DNA, 15 bp, Homo sapiens
caaaggtttattttc

SEQ ID NO: 1561468 - DNA, 15 bp, Homo sapiens
aaaggtttattttcc

SEQ ID NO: 1561469 - DNA, 15 bp, Homo sapiens
aaggtttattttccc

SEQ ID NO: 1561470 - DNA, 15 bp, Homo sapiens
aggtttattttccct

SEQ ID NO: 1561471 - DNA, 15 bp, Homo sapiens
ggtttattttccctc

SEQ ID NO: 1561472 - DNA, 15 bp, Homo sapiens
gtttattttccctct

SEQ ID NO: 1561473 - DNA, 15 bp, Homo sapiens
tttattttccctctg

SEQ ID NO: 1561474 - DNA, 15 bp, Homo sapiens
ttattttccctctgt

SEQ ID NO: 1561475 - DNA, 15 bp, Homo sapiens
tattttccctctgtt

SEQ ID NO: 1561476 - DNA, 15 bp, Homo sapiens
attttccctctgttg

SEQ ID NO: 1561477 - DNA, 15 bp, Homo sapiens
ttttccctctgttga

SEQ ID NO: 1561478 - DNA, 15 bp, Homo sapiens
tttccctctgttgaa

SEQ ID NO: 1561479 - DNA, 15 bp, Homo sapiens
ttccctctgttgaat

SEQ ID NO: 1561480 - DNA, 15 bp, Homo sapiens
tccctctgttgaatt

SEQ ID NO: 1561481 - DNA, 15 bp, Homo sapiens
ccctctgttgaattg

SEQ ID NO: 1561482 - DNA, 15 bp, Homo sapiens
cctctgttgaattga

SEQ ID NO: 1561483 - DNA, 15 bp, Homo sapiens
ctctgttgaattgat

SEQ ID NO: 1561484 - DNA, 15 bp, Homo sapiens
tctgttgaattgatt

SEQ ID NO: 1561485 - DNA, 15 bp, Homo sapiens
ctgttgaattgattc

SEQ ID NO: 1561486 - DNA, 15 bp, Homo sapiens
tgttgaattgattct

SEQ ID NO: 1561487 - DNA, 15 bp, Homo sapiens
gttgaattgattcta

SEQ ID NO: 1561488 - DNA, 15 bp, Homo sapiens
ttgaattgattctaa

SEQ ID NO: 1561489 - DNA, 15 bp, Homo sapiens
tgaattgattctaat

SEQ ID NO: 1561490 - DNA, 15 bp, Homo sapiens
gaattgattctaatc

SEQ ID NO: 1561491 - DNA, 15 bp, Homo sapiens
aattgattctaatct

SEQ ID NO: 1561492 - DNA, 15 bp, Homo sapiens
attgattctaatcta

SEQ ID NO: 1561493 - DNA, 15 bp, Homo sapiens
ttgattctaatctac

SEQ ID NO: 1561494 - DNA, 15 bp, Homo sapiens
tgattctaatctaca

SEQ ID NO: 1561495 - DNA, 15 bp, Homo sapiens
gattctaatctacag

SEQ ID NO: 1561496 - DNA, 15 bp, Homo sapiens
attctaatctacagt

SEQ ID NO: 1561497 - DNA, 15 bp, Homo sapiens
ttctaatctacagtg

SEQ ID NO: 1561498 - DNA, 15 bp, Homo sapiens
tctaatctacagtgc

SEQ ID NO: 1561499 - DNA, 15 bp, Homo sapiens
ctaatctacagtgct

SEQ ID NO: 1561500 - DNA, 15 bp, Homo sapiens
taatctacagtgctt

SEQ ID NO: 1561501 - DNA, 15 bp, Homo sapiens
aatctacagtgctta

SEQ ID NO: 1561502 - DNA, 15 bp, Homo sapiens
atctacagtgcttac

SEQ ID NO: 1561503 - DNA, 15 bp, Homo sapiens
tctacagtgcttacc

SEQ ID NO: 1561504 - DNA, 15 bp, Homo sapiens
ctacagtgcttaccc

SEQ ID NO: 1561505 - DNA, 15 bp, Homo sapiens
tacagtgcttaccct

SEQ ID NO: 1561506 - DNA, 15 bp, Homo sapiens
acagtgcttaccctg

SEQ ID NO: 1561507 - DNA, 15 bp, Homo sapiens
cagtgcttaccctgc

SEQ ID NO: 1561508 - DNA, 15 bp, Homo sapiens
agtgcttaccctgct

SEQ ID NO: 1561509 - DNA, 15 bp, Homo sapiens
gtgcttaccctgctt

SEQ ID NO: 1561510 - DNA, 15 bp, Homo sapiens
tgcttaccctgcttt

SEQ ID NO: 1561511 - DNA, 15 bp, Homo sapiens
gcttaccctgctttt

SEQ ID NO: 1561512 - DNA, 15 bp, Homo sapiens
cttaccctgcttttg

SEQ ID NO: 1561513 - DNA, 15 bp, Homo sapiens
ttaccctgcttttgg

SEQ ID NO: 1561514 - DNA, 15 bp, Homo sapiens
taccctgcttttggc

SEQ ID NO: 1561515 - DNA, 15 bp, Homo sapiens
accctgcttttggct

SEQ ID NO: 1561516 - DNA, 15 bp, Homo sapiens
ccctgcttttggctc

SEQ ID NO: 1561517 - DNA, 15 bp, Homo sapiens
cctgcttttggctcc

SEQ ID NO: 1561518 - DNA, 15 bp, Homo sapiens
ctgcttttggctcct

SEQ ID NO: 1561519 - DNA, 15 bp, Homo sapiens
tgcttttggctccta

SEQ ID NO: 1561520 - DNA, 15 bp, Homo sapiens
gcttttggctcctac

SEQ ID NO: 1561521 - DNA, 15 bp, Homo sapiens
cttttggctcctacg

SEQ ID NO: 1561522 - DNA, 15 bp, Homo sapiens
ttttggctcctacga

SEQ ID NO: 1561523 - DNA, 15 bp, Homo sapiens
tttggctcctacgag

SEQ ID NO: 1561524 - DNA, 15 bp, Homo sapiens
ttggctcctacgagg

SEQ ID NO: 1561525 - DNA, 15 bp, Homo sapiens
tggctcctacgaggc

SEQ ID NO: 1561526 - DNA, 15 bp, Homo sapiens
ggctcctacgaggca

SEQ ID NO: 1561527 - DNA, 15 bp, Homo sapiens
gctcctacgaggcaa

SEQ ID NO: 1561528 - DNA, 15 bp, Homo sapiens
ctcctacgaggcaaa

SEQ ID NO: 1561529 - DNA, 15 bp, Homo sapiens
tcctacgaggcaaac

SEQ ID NO: 1561530 - DNA, 15 bp, Homo sapiens
cctacgaggcaaact

SEQ ID NO: 1561531 - DNA, 15 bp, Homo sapiens
ctacgaggcaaacta

SEQ ID NO: 1561532 - DNA, 15 bp, Homo sapiens
tacgaggcaaactat

SEQ ID NO: 1561533 - DNA, 15 bp, Homo sapiens
acgaggcaaactata

SEQ ID NO: 1561534 - DNA, 15 bp, Homo sapiens
cgaggcaaactataa

SEQ ID NO: 1561535 - DNA, 15 bp, Homo sapiens
gaggcaaactataaa

SEQ ID NO: 1561536 - DNA, 15 bp, Homo sapiens
aggcaaactataaaa

SEQ ID NO: 1561537 - DNA, 15 bp, Homo sapiens
ggcaaactataaaaa

SEQ ID NO: 1561538 - DNA, 15 bp, Homo sapiens
gcaaactataaaaat

SEQ ID NO: 1561539 - DNA, 15 bp, Homo sapiens
caaactataaaaatt

SEQ ID NO: 1561540 - DNA, 15 bp, Homo sapiens
aaactataaaaattc

SEQ ID NO: 1561541 - DNA, 15 bp, Homo sapiens
aactataaaaattct

SEQ ID NO: 1561542 - DNA, 15 bp, Homo sapiens
actataaaaattctc

SEQ ID NO: 1561543 - DNA, 15 bp, Homo sapiens
ctataaaaattctca

SEQ ID NO: 1561544 - DNA, 15 bp, Homo sapiens
tataaaaattctcaa

SEQ ID NO: 1561545 - DNA, 15 bp, Homo sapiens
ataaaaattctcaaa

SEQ ID NO: 1561546 - DNA, 15 bp, Homo sapiens
taaaaattctcaaat

SEQ ID NO: 1561547 - DNA, 15 bp, Homo sapiens
aaaaattctcaaata

SEQ ID NO: 1561548 - DNA, 15 bp, Homo sapiens
aaaattctcaaataa

SEQ ID NO: 1561549 - DNA, 15 bp, Homo sapiens
aaattctcaaataaa

SEQ ID NO: 1561550 - DNA, 15 bp, Homo sapiens
aattctcaaataaaa

SEQ ID NO: 1561551 - DNA, 15 bp, Homo sapiens
attctcaaataaaat

SEQ ID NO: 1561552 - DNA, 15 bp, Homo sapiens
ttctcaaataaaata

SEQ ID NO: 1561553 - DNA, 15 bp, Homo sapiens
tctcaaataaaatac

SEQ ID NO: 1561554 - DNA, 15 bp, Homo sapiens
ctcaaataaaataca

SEQ ID NO: 1561555 - DNA, 15 bp, Homo sapiens
tcaaataaaatacag

SEQ ID NO: 1561556 - DNA, 15 bp, Homo sapiens
caaataaaatacaga

SEQ ID NO: 1561557 - DNA, 15 bp, Homo sapiens
aaataaaatacagag

SEQ ID NO: 1561558 - DNA, 15 bp, Homo sapiens
aataaaatacagagg

SEQ ID NO: 1561559 - DNA, 15 bp, Homo sapiens
ataaaatacagaggc

SEQ ID NO: 1561560 - DNA, 15 bp, Homo sapiens
taaaatacagaggct

SEQ ID NO: 1561561 - DNA, 15 bp, Homo sapiens
aaaatacagaggctt

SEQ ID NO: 1561562 - DNA, 15 bp, Homo sapiens
aaatacagaggctta

SEQ ID NO: 1561563 - DNA, 15 bp, Homo sapiens
aatacagaggcttac

SEQ ID NO: 1561564 - DNA, 15 bp, Homo sapiens
atacagaggcttact

SEQ ID NO: 1561565 - DNA, 15 bp, Homo sapiens
tacagaggcttactc

SEQ ID NO: 1561566 - DNA, 15 bp, Homo sapiens
acagaggcttactct

SEQ ID NO: 1561567 - DNA, 15 bp, Homo sapiens
cagaggcttactctg

SEQ ID NO: 1561568 - DNA, 15 bp, Homo sapiens
agaggcttactctgc

SEQ ID NO: 1561569 - DNA, 15 bp, Homo sapiens
gaggcttactctgca

SEQ ID NO: 1561570 - DNA, 15 bp, Homo sapiens
aggcttactctgcaa

SEQ ID NO: 1561571 - DNA, 15 bp, Homo sapiens
ggcttactctgcaaa

SEQ ID NO: 1561572 - DNA, 15 bp, Homo sapiens
gcttactctgcaaag

SEQ ID NO: 1561573 - DNA, 15 bp, Homo sapiens
cttactctgcaaaga

SEQ ID NO: 1561574 - DNA, 15 bp, Homo sapiens
ttactctgcaaagac

SEQ ID NO: 1561575 - DNA, 15 bp, Homo sapiens
tactctgcaaagaca

SEQ ID NO: 1561576 - DNA, 15 bp, Homo sapiens
actctgcaaagacac

SEQ ID NO: 1561577 - DNA, 15 bp, Homo sapiens
ctctgcaaagacacc

SEQ ID NO: 1561578 - DNA, 15 bp, Homo sapiens
tctgcaaagacacct

SEQ ID NO: 1561579 - DNA, 15 bp, Homo sapiens
ctgcaaagacacctg

SEQ ID NO: 1561580 - DNA, 15 bp, Homo sapiens
tgcaaagacacctgt

SEQ ID NO: 1561581 - DNA, 15 bp, Homo sapiens
gcaaagacacctgtg

SEQ ID NO: 1561582 - DNA, 15 bp, Homo sapiens
caaagacacctgtgt

SEQ ID NO: 1561583 - DNA, 15 bp, Homo sapiens
aaagacacctgtgtg

SEQ ID NO: 1561584 - DNA, 15 bp, Homo sapiens
aagacacctgtgtga

SEQ ID NO: 1561585 - DNA, 15 bp, Homo sapiens
agacacctgtgtgaa

SEQ ID NO: 1561586 - DNA, 15 bp, Homo sapiens
gacacctgtgtgaat

SEQ ID NO: 1561587 - DNA, 15 bp, Homo sapiens
acacctgtgtgaatg

SEQ ID NO: 1561588 - DNA, 15 bp, Homo sapiens
cacctgtgtgaatga

SEQ ID NO: 1561589 - DNA, 15 bp, Homo sapiens
acctgtgtgaatgac

SEQ ID NO: 1561590 - DNA, 15 bp, Homo sapiens
cctgtgtgaatgacg

SEQ ID NO: 1561591 - DNA, 15 bp, Homo sapiens
ctgtgtgaatgacgt

SEQ ID NO: 1561592 - DNA, 15 bp, Homo sapiens
tgtgtgaatgacgtg

SEQ ID NO: 1561593 - DNA, 15 bp, Homo sapiens
gtgtgaatgacgtgc

SEQ ID NO: 1561594 - DNA, 15 bp, Homo sapiens
tgtgaatgacgtgct

SEQ ID NO: 1561595 - DNA, 15 bp, Homo sapiens
gtgaatgacgtgcta

SEQ ID NO: 1561596 - DNA, 15 bp, Homo sapiens
tgaatgacgtgctaa

SEQ ID NO: 1561597 - DNA, 15 bp, Homo sapiens
gaatgacgtgctaaa

SEQ ID NO: 1561598 - DNA, 15 bp, Homo sapiens
aatgacgtgctaaac

SEQ ID NO: 1561599 - DNA, 15 bp, Homo sapiens
atgacgtgctaaaca

SEQ ID NO: 1561600 - DNA, 15 bp, Homo sapiens
tgacgtgctaaacat

SEQ ID NO: 1561601 - DNA, 15 bp, Homo sapiens
gacgtgctaaacatt

SEQ ID NO: 1561602 - DNA, 15 bp, Homo sapiens
acgtgctaaacattc

SEQ ID NO: 1561603 - DNA, 15 bp, Homo sapiens
cgtgctaaacattca

SEQ ID NO: 1561604 - DNA, 15 bp, Homo sapiens
gtgctaaacattcag

SEQ ID NO: 1561605 - DNA, 15 bp, Homo sapiens
tgctaaacattcagc

SEQ ID NO: 1561606 - DNA, 15 bp, Homo sapiens
gctaaacattcagca

SEQ ID NO: 1561607 - DNA, 15 bp, Homo sapiens
ctaaacattcagcag

SEQ ID NO: 1561608 - DNA, 15 bp, Homo sapiens
taaacattcagcaga

SEQ ID NO: 1561609 - DNA, 15 bp, Homo sapiens
aaacattcagcagaa

SEQ ID NO: 1561610 - DNA, 15 bp, Homo sapiens
aacattcagcagaaa

SEQ ID NO: 1561611 - DNA, 15 bp, Homo sapiens
acattcagcagaaac

SEQ ID NO: 1561612 - DNA, 15 bp, Homo sapiens
cattcagcagaaacc

SEQ ID NO: 1561613 - DNA, 15 bp, Homo sapiens
attcagcagaaacca

SEQ ID NO: 1561614 - DNA, 15 bp, Homo sapiens
ttcagcagaaaccaa

SEQ ID NO: 1561615 - DNA, 15 bp, Homo sapiens
tcagcagaaaccaaa

SEQ ID NO: 1561616 - DNA, 15 bp, Homo sapiens
cagcagaaaccaaat

SEQ ID NO: 1561617 - DNA, 15 bp, Homo sapiens
agcagaaaccaaatt

SEQ ID NO: 1561618 - DNA, 15 bp, Homo sapiens
gcagaaaccaaatta

SEQ ID NO: 1561619 - DNA, 15 bp, Homo sapiens
cagaaaccaaattag

SEQ ID NO: 1561620 - DNA, 15 bp, Homo sapiens
agaaaccaaattagg

SEQ ID NO: 1561621 - DNA, 15 bp, Homo sapiens
gaaaccaaattagga

SEQ ID NO: 1561622 - DNA, 15 bp, Homo sapiens
aaaccaaattaggat

SEQ ID NO: 1561623 - DNA, 15 bp, Homo sapiens
aaccaaattaggatc

SEQ ID NO: 1561624 - DNA, 15 bp, Homo sapiens
accaaattaggatca

SEQ ID NO: 1561625 - DNA, 15 bp, Homo sapiens
ccaaattaggatcaa

SEQ ID NO: 1561626 - DNA, 15 bp, Homo sapiens
caaattaggatcaac

SEQ ID NO: 1561627 - DNA, 15 bp, Homo sapiens
aaattaggatcaact

SEQ ID NO: 1561628 - DNA, 15 bp, Homo sapiens
aattaggatcaactc

SEQ ID NO: 1561629 - DNA, 15 bp, Homo sapiens
attaggatcaactct

SEQ ID NO: 1561630 - DNA, 15 bp, Homo sapiens
ttaggatcaactctt

SEQ ID NO: 1561631 - DNA, 15 bp, Homo sapiens
taggatcaactctta

SEQ ID NO: 1561632 - DNA, 15 bp, Homo sapiens
aggatcaactcttaa

SEQ ID NO: 1561633 - DNA, 15 bp, Homo sapiens
ggatcaactcttaac

SEQ ID NO: 1561634 - DNA, 15 bp, Homo sapiens
gatcaactcttaaca

SEQ ID NO: 1561635 - DNA, 15 bp, Homo sapiens
atcaactcttaacat

SEQ ID NO: 1561636 - DNA, 15 bp, Homo sapiens
tcaactcttaacatt

SEQ ID NO: 1561637 - DNA, 15 bp, Homo sapiens
caactcttaacattt

SEQ ID NO: 1561638 - DNA, 15 bp, Homo sapiens
aactcttaacatttt

SEQ ID NO: 1561639 - DNA, 15 bp, Homo sapiens
actcttaacattttt

SEQ ID NO: 1561640 - DNA, 15 bp, Homo sapiens
ctcttaacatttttt

SEQ ID NO: 1561641 - DNA, 15 bp, Homo sapiens
tcttaacattttttc

SEQ ID NO: 1561642 - DNA, 15 bp, Homo sapiens
cttaacattttttcc

SEQ ID NO: 1561643 - DNA, 15 bp, Homo sapiens
ttaacattttttccc

SEQ ID NO: 1561644 - DNA, 15 bp, Homo sapiens
taacattttttccct

SEQ ID NO: 1561645 - DNA, 15 bp, Homo sapiens
aacattttttccctc

SEQ ID NO: 1561646 - DNA, 15 bp, Homo sapiens
acattttttccctct

SEQ ID NO: 1561647 - DNA, 15 bp, Homo sapiens
cattttttccctctt

SEQ ID NO: 1561648 - DNA, 15 bp, Homo sapiens
attttttccctcttt

SEQ ID NO: 1561649 - DNA, 15 bp, Homo sapiens
ttttttccctctttt

SEQ ID NO: 1561650 - DNA, 15 bp, Homo sapiens
tttttccctcttttg

SEQ ID NO: 1561651 - DNA, 15 bp, Homo sapiens
ttttccctcttttgt

SEQ ID NO: 1561652 - DNA, 15 bp, Homo sapiens
tttccctcttttgtg

SEQ ID NO: 1561653 - DNA, 15 bp, Homo sapiens
ttccctcttttgtgg

SEQ ID NO: 1561654 - DNA, 15 bp, Homo sapiens
tccctcttttgtggc

SEQ ID NO: 1561655 - DNA, 15 bp, Homo sapiens
ccctcttttgtggct

SEQ ID NO: 1561656 - DNA, 15 bp, Homo sapiens
cctcttttgtggctg

SEQ ID NO: 1561657 - DNA, 15 bp, Homo sapiens
ctcttttgtggctgg

SEQ ID NO: 1561658 - DNA, 15 bp, Homo sapiens
tcttttgtggctgga

SEQ ID NO: 1561659 - DNA, 15 bp, Homo sapiens
cttttgtggctggaa

SEQ ID NO: 1561660 - DNA, 15 bp, Homo sapiens
ttttgtggctggaat

SEQ ID NO: 1561661 - DNA, 15 bp, Homo sapiens
tttgtggctggaatg

SEQ ID NO: 1561662 - DNA, 15 bp, Homo sapiens
ttgtggctggaatga

SEQ ID NO: 1561663 - DNA, 15 bp, Homo sapiens
tgtggctggaatgag

SEQ ID NO: 1561664 - DNA, 15 bp, Homo sapiens
gtggctggaatgagt

SEQ ID NO: 1561665 - DNA, 15 bp, Homo sapiens
tggctggaatgagtt

SEQ ID NO: 1561666 - DNA, 15 bp, Homo sapiens
ggctggaatgagttc

SEQ ID NO: 1561667 - DNA, 15 bp, Homo sapiens
gctggaatgagttcc

SEQ ID NO: 1561668 - DNA, 15 bp, Homo sapiens
ctggaatgagttccc

SEQ ID NO: 1561669 - DNA, 15 bp, Homo sapiens
tggaatgagttcccc

SEQ ID NO: 1561670 - DNA, 15 bp, Homo sapiens
ggaatgagttcccct

SEQ ID NO: 1561671 - DNA, 15 bp, Homo sapiens
gaatgagttcccctg

SEQ ID NO: 1561672 - DNA, 15 bp, Homo sapiens
aatgagttcccctgg

SEQ ID NO: 1561673 - DNA, 15 bp, Homo sapiens
atgagttcccctggg

SEQ ID NO: 1561674 - DNA, 15 bp, Homo sapiens
tgagttcccctggga

SEQ ID NO: 1561675 - DNA, 15 bp, Homo sapiens
gagttcccctgggaa

SEQ ID NO: 1561676 - DNA, 15 bp, Homo sapiens
agttcccctgggaaa

SEQ ID NO: 1561677 - DNA, 15 bp, Homo sapiens
gttcccctgggaaag

SEQ ID NO: 1561678 - DNA, 15 bp, Homo sapiens
ttcccctgggaaaga

SEQ ID NO: 1561679 - DNA, 15 bp, Homo sapiens
tcccctgggaaagaa

SEQ ID NO: 1561680 - DNA, 15 bp, Homo sapiens
cccctgggaaagaaa

SEQ ID NO: 1561681 - DNA, 15 bp, Homo sapiens
ccctgggaaagaaaa

SEQ ID NO: 1561682 - DNA, 15 bp, Homo sapiens
cctgggaaagaaaat

SEQ ID NO: 1561683 - DNA, 15 bp, Homo sapiens
ctgggaaagaaaatc

SEQ ID NO: 1561684 - DNA, 15 bp, Homo sapiens
tgggaaagaaaatcg

SEQ ID NO: 1561685 - DNA, 15 bp, Homo sapiens
gggaaagaaaatcgc

SEQ ID NO: 1561686 - DNA, 15 bp, Homo sapiens
ggaaagaaaatcgcc

SEQ ID NO: 1561687 - DNA, 15 bp, Homo sapiens
gaaagaaaatcgccc

SEQ ID NO: 1561688 - DNA, 15 bp, Homo sapiens
aaagaaaatcgccca

SEQ ID NO: 1561689 - DNA, 15 bp, Homo sapiens
aagaaaatcgcccaa

SEQ ID NO: 1561690 - DNA, 15 bp, Homo sapiens
agaaaatcgcccaag

SEQ ID NO: 1561691 - DNA, 15 bp, Homo sapiens
gaaaatcgcccaagt

SEQ ID NO: 1561692 - DNA, 15 bp, Homo sapiens
aaaatcgcccaagtg

SEQ ID NO: 1561693 - DNA, 15 bp, Homo sapiens
aaatcgcccaagtga

SEQ ID NO: 1561694 - DNA, 15 bp, Homo sapiens
aatcgcccaagtgag

SEQ ID NO: 1561695 - DNA, 15 bp, Homo sapiens
atcgcccaagtgaga

SEQ ID NO: 1561696 - DNA, 15 bp, Homo sapiens
tcgcccaagtgagaa

SEQ ID NO: 1561697 - DNA, 15 bp, Homo sapiens
cgcccaagtgagaaa

SEQ ID NO: 1561698 - DNA, 15 bp, Homo sapiens
gcccaagtgagaaac

SEQ ID NO: 1561699 - DNA, 15 bp, Homo sapiens
cccaagtgagaaact

SEQ ID NO: 1561700 - DNA, 15 bp, Homo sapiens
ccaagtgagaaactt

SEQ ID NO: 1561701 - DNA, 15 bp, Homo sapiens
caagtgagaaactta

SEQ ID NO: 1561702 - DNA, 15 bp, Homo sapiens
aagtgagaaacttat

SEQ ID NO: 1561703 - DNA, 15 bp, Homo sapiens
agtgagaaacttatg

SEQ ID NO: 1561704 - DNA, 15 bp, Homo sapiens
gtgagaaacttatgc

SEQ ID NO: 1561705 - DNA, 15 bp, Homo sapiens
tgagaaacttatgcc

SEQ ID NO: 1561706 - DNA, 15 bp, Homo sapiens
gagaaacttatgcca

SEQ ID NO: 1561707 - DNA, 15 bp, Homo sapiens
agaaacttatgccaa

SEQ ID NO: 1561708 - DNA, 15 bp, Homo sapiens
gaaacttatgccaac

SEQ ID NO: 1561709 - DNA, 15 bp, Homo sapiens
aaacttatgccaacc

SEQ ID NO: 1561710 - DNA, 15 bp, Homo sapiens
aacttatgccaacca

SEQ ID NO: 1561711 - DNA, 15 bp, Homo sapiens
acttatgccaaccac

SEQ ID NO: 1561712 - DNA, 15 bp, Homo sapiens
cttatgccaaccaca

SEQ ID NO: 1561713 - DNA, 15 bp, Homo sapiens
ttatgccaaccacat

SEQ ID NO: 1561714 - DNA, 15 bp, Homo sapiens
tatgccaaccacatt

SEQ ID NO: 1561715 - DNA, 15 bp, Homo sapiens
atgccaaccacattc

SEQ ID NO: 1561716 - DNA, 15 bp, Homo sapiens
tgccaaccacattcc

SEQ ID NO: 1561717 - DNA, 15 bp, Homo sapiens
gccaaccacattccc

SEQ ID NO: 1561718 - DNA, 15 bp, Homo sapiens
ccaaccacattccca

SEQ ID NO: 1561719 - DNA, 15 bp, Homo sapiens
caaccacattcccat

SEQ ID NO: 1561720 - DNA, 15 bp, Homo sapiens
aaccacattcccatg

SEQ ID NO: 1561721 - DNA, 15 bp, Homo sapiens
accacattcccatgc

SEQ ID NO: 1561722 - DNA, 15 bp, Homo sapiens
ccacattcccatgcc

SEQ ID NO: 1561723 - DNA, 15 bp, Homo sapiens
cacattcccatgccc

SEQ ID NO: 1561724 - DNA, 15 bp, Homo sapiens
acattcccatgcccc

SEQ ID NO: 1561725 - DNA, 15 bp, Homo sapiens
cattcccatgcccct

SEQ ID NO: 1561726 - DNA, 15 bp, Homo sapiens
attcccatgccccta

SEQ ID NO: 1561727 - DNA, 15 bp, Homo sapiens
ttcccatgcccctac

SEQ ID NO: 1561728 - DNA, 15 bp, Homo sapiens
tcccatgcccctaca

SEQ ID NO: 1561729 - DNA, 15 bp, Homo sapiens
cccatgcccctacag

SEQ ID NO: 1561730 - DNA, 15 bp, Homo sapiens
ccatgcccctacagt

SEQ ID NO: 1561731 - DNA, 15 bp, Homo sapiens
catgcccctacagtt

SEQ ID NO: 1561732 - DNA, 15 bp, Homo sapiens
atgcccctacagtta

SEQ ID NO: 1561733 - DNA, 15 bp, Homo sapiens
tgcccctacagttac

SEQ ID NO: 1561734 - DNA, 15 bp, Homo sapiens
gcccctacagttacc

SEQ ID NO: 1561735 - DNA, 15 bp, Homo sapiens
cccctacagttacct

SEQ ID NO: 1561736 - DNA, 15 bp, Homo sapiens
ccctacagttacctg

SEQ ID NO: 1561737 - DNA, 15 bp, Homo sapiens
cctacagttacctgc

SEQ ID NO: 1561738 - DNA, 15 bp, Homo sapiens
ctacagttacctgct

SEQ ID NO: 1561739 - DNA, 15 bp, Homo sapiens
tacagttacctgctg

SEQ ID NO: 1561740 - DNA, 15 bp, Homo sapiens
acagttacctgctgg

SEQ ID NO: 1561741 - DNA, 15 bp, Homo sapiens
cagttacctgctggc

SEQ ID NO: 1561742 - DNA, 15 bp, Homo sapiens
agttacctgctggcc

SEQ ID NO: 1561743 - DNA, 15 bp, Homo sapiens
gttacctgctggccc

SEQ ID NO: 1561744 - DNA, 15 bp, Homo sapiens
ttacctgctggccca

SEQ ID NO: 1561745 - DNA, 15 bp, Homo sapiens
tacctgctggcccag

SEQ ID NO: 1561746 - DNA, 15 bp, Homo sapiens
acctgctggcccaga

SEQ ID NO: 1561747 - DNA, 15 bp, Homo sapiens
cctgctggcccagat

SEQ ID NO: 1561748 - DNA, 15 bp, Homo sapiens
ctgctggcccagatc

SEQ ID NO: 1561749 - DNA, 15 bp, Homo sapiens
tgctggcccagatca

SEQ ID NO: 1561750 - DNA, 15 bp, Homo sapiens
gctggcccagatcag

SEQ ID NO: 1561751 - DNA, 15 bp, Homo sapiens
ctggcccagatcagc

SEQ ID NO: 1561752 - DNA, 15 bp, Homo sapiens
tggcccagatcagct

SEQ ID NO: 1561753 - DNA, 15 bp, Homo sapiens
ggcccagatcagctc

SEQ ID NO: 1561754 - DNA, 15 bp, Homo sapiens
gcccagatcagctct

SEQ ID NO: 1561755 - DNA, 15 bp, Homo sapiens
cccagatcagctctc

SEQ ID NO: 1561756 - DNA, 15 bp, Homo sapiens
ccagatcagctctct

SEQ ID NO: 1561757 - DNA, 15 bp, Homo sapiens
cagatcagctctctg

SEQ ID NO: 1561758 - DNA, 15 bp, Homo sapiens
agatcagctctctgg

SEQ ID NO: 1561759 - DNA, 15 bp, Homo sapiens
gatcagctctctggg

SEQ ID NO: 1561760 - DNA, 15 bp, Homo sapiens
atcagctctctgggt

SEQ ID NO: 1561761 - DNA, 15 bp, Homo sapiens
tcagctctctgggtc

SEQ ID NO: 1561762 - DNA, 15 bp, Homo sapiens
cagctctctgggtct

SEQ ID NO: 1561763 - DNA, 15 bp, Homo sapiens
agctctctgggtctg

SEQ ID NO: 1561764 - DNA, 15 bp, Homo sapiens
gctctctgggtctgc

SEQ ID NO: 1561765 - DNA, 15 bp, Homo sapiens
ctctctgggtctgca

SEQ ID NO: 1561766 - DNA, 15 bp, Homo sapiens
tctctgggtctgcag

SEQ ID NO: 1561767 - DNA, 15 bp, Homo sapiens
ctctgggtctgcaga

SEQ ID NO: 1561768 - DNA, 15 bp, Homo sapiens
tctgggtctgcagag

SEQ ID NO: 1561769 - DNA, 15 bp, Homo sapiens
ctgggtctgcagagg

SEQ ID NO: 1561770 - DNA, 15 bp, Homo sapiens
tgggtctgcagaggg

SEQ ID NO: 1561771 - DNA, 15 bp, Homo sapiens
gggtctgcagagggc

SEQ ID NO: 1561772 - DNA, 15 bp, Homo sapiens
ggtctgcagagggcc

SEQ ID NO: 1561773 - DNA, 15 bp, Homo sapiens
gtctgcagagggccg

SEQ ID NO: 1561774 - DNA, 15 bp, Homo sapiens
tctgcagagggccga

SEQ ID NO: 1561775 - DNA, 15 bp, Homo sapiens
ctgcagagggccgag

SEQ ID NO: 1561776 - DNA, 15 bp, Homo sapiens
tgcagagggccgaga

SEQ ID NO: 1561777 - DNA, 15 bp, Homo sapiens
gcagagggccgagac

SEQ ID NO: 1561778 - DNA, 15 bp, Homo sapiens
cagagggccgagaca

SEQ ID NO: 1561779 - DNA, 15 bp, Homo sapiens
agagggccgagacag

SEQ ID NO: 1561780 - DNA, 15 bp, Homo sapiens
gagggccgagacagg

SEQ ID NO: 1561781 - DNA, 15 bp, Homo sapiens
agggccgagacagga

SEQ ID NO: 1561782 - DNA, 15 bp, Homo sapiens
gggccgagacaggaa

SEQ ID NO: 1561783 - DNA, 15 bp, Homo sapiens
ggccgagacaggaag

SEQ ID NO: 1561784 - DNA, 15 bp, Homo sapiens
gccgagacaggaagc

SEQ ID NO: 1561785 - DNA, 15 bp, Homo sapiens
ccgagacaggaagca

SEQ ID NO: 1561786 - DNA, 15 bp, Homo sapiens
cgagacaggaagcat

SEQ ID NO: 1561787 - DNA, 15 bp, Homo sapiens
gagacaggaagcatt

SEQ ID NO: 1561788 - DNA, 15 bp, Homo sapiens
agacaggaagcatta

SEQ ID NO: 1561789 - DNA, 15 bp, Homo sapiens
gacaggaagcattat

SEQ ID NO: 1561790 - DNA, 15 bp, Homo sapiens
acaggaagcattatt

SEQ ID NO: 1561791 - DNA, 15 bp, Homo sapiens
caggaagcattatta

SEQ ID NO: 1561792 - DNA, 15 bp, Homo sapiens
aggaagcattattaa

SEQ ID NO: 1561793 - DNA, 15 bp, Homo sapiens
ggaagcattattaag

SEQ ID NO: 1561794 - DNA, 15 bp, Homo sapiens
gaagcattattaagc

SEQ ID NO: 1561795 - DNA, 15 bp, Homo sapiens
aagcattattaagca

SEQ ID NO: 1561796 - DNA, 15 bp, Homo sapiens
agcattattaagcag

SEQ ID NO: 1561797 - DNA, 15 bp, Homo sapiens
gcattattaagcagt

SEQ ID NO: 1561798 - DNA, 15 bp, Homo sapiens
cattattaagcagta

SEQ ID NO: 1561799 - DNA, 15 bp, Homo sapiens
attattaagcagtat

SEQ ID NO: 1561800 - DNA, 15 bp, Homo sapiens
ttattaagcagtata

SEQ ID NO: 1561801 - DNA, 15 bp, Homo sapiens
tattaagcagtataa

SEQ ID NO: 1561802 - DNA, 15 bp, Homo sapiens
attaagcagtataat

SEQ ID NO: 1561803 - DNA, 15 bp, Homo sapiens
ttaagcagtataatt

SEQ ID NO: 1561804 - DNA, 15 bp, Homo sapiens
taagcagtataattt

SEQ ID NO: 1561805 - DNA, 15 bp, Homo sapiens
aagcagtataatttc

SEQ ID NO: 1561806 - DNA, 15 bp, Homo sapiens
agcagtataatttca

SEQ ID NO: 1561807 - DNA, 15 bp, Homo sapiens
gcagtataatttcaa

SEQ ID NO: 1561808 - DNA, 15 bp, Homo sapiens
cagtataatttcaaa

SEQ ID NO: 1561809 - DNA, 15 bp, Homo sapiens
agtataatttcaaac

SEQ ID NO: 1561810 - DNA, 15 bp, Homo sapiens
gtataatttcaaaca

SEQ ID NO: 1561811 - DNA, 15 bp, Homo sapiens
tataatttcaaacac

SEQ ID NO: 1561812 - DNA, 15 bp, Homo sapiens
ataatttcaaacact

SEQ ID NO: 1561813 - DNA, 15 bp, Homo sapiens
taatttcaaacactt

SEQ ID NO: 1561814 - DNA, 15 bp, Homo sapiens
aatttcaaacacttt

SEQ ID NO: 1561815 - DNA, 15 bp, Homo sapiens
atttcaaacacttta

SEQ ID NO: 1561816 - DNA, 15 bp, Homo sapiens
tttcaaacactttac

SEQ ID NO: 1561817 - DNA, 15 bp, Homo sapiens
ttcaaacactttact

SEQ ID NO: 1561818 - DNA, 15 bp, Homo sapiens
tcaaacactttactt

SEQ ID NO: 1561819 - DNA, 15 bp, Homo sapiens
caaacactttactta

SEQ ID NO: 1561820 - DNA, 15 bp, Homo sapiens
aaacactttacttag

SEQ ID NO: 1561821 - DNA, 15 bp, Homo sapiens
aacactttacttagt

SEQ ID NO: 1561822 - DNA, 15 bp, Homo sapiens
acactttacttagtg

SEQ ID NO: 1561823 - DNA, 15 bp, Homo sapiens
cactttacttagtgc

SEQ ID NO: 1561824 - DNA, 15 bp, Homo sapiens
actttacttagtgcc

SEQ ID NO: 1561825 - DNA, 15 bp, Homo sapiens
ctttacttagtgcca

SEQ ID NO: 1561826 - DNA, 15 bp, Homo sapiens
tttacttagtgccac

SEQ ID NO: 1561827 - DNA, 15 bp, Homo sapiens
ttacttagtgccaca

SEQ ID NO: 1561828 - DNA, 15 bp, Homo sapiens
tacttagtgccacag

SEQ ID NO: 1561829 - DNA, 15 bp, Homo sapiens
acttagtgccacagt

SEQ ID NO: 1561830 - DNA, 15 bp, Homo sapiens
cttagtgccacagtg

SEQ ID NO: 1561831 - DNA, 15 bp, Homo sapiens
ttagtgccacagtgt

SEQ ID NO: 1561832 - DNA, 15 bp, Homo sapiens
tagtgccacagtgtg

SEQ ID NO: 1561833 - DNA, 15 bp, Homo sapiens
agtgccacagtgtgt

SEQ ID NO: 1561834 - DNA, 15 bp, Homo sapiens
gtgccacagtgtgtc

SEQ ID NO: 1561835 - DNA, 15 bp, Homo sapiens
tgccacagtgtgtct

SEQ ID NO: 1561836 - DNA, 15 bp, Homo sapiens
gccacagtgtgtctg

SEQ ID NO: 1561837 - DNA, 15 bp, Homo sapiens
ccacagtgtgtctgc

SEQ ID NO: 1561838 - DNA, 15 bp, Homo sapiens
cacagtgtgtctgca

SEQ ID NO: 1561839 - DNA, 15 bp, Homo sapiens
acagtgtgtctgcag

SEQ ID NO: 1561840 - DNA, 15 bp, Homo sapiens
cagtgtgtctgcagt

SEQ ID NO: 1561841 - DNA, 15 bp, Homo sapiens
agtgtgtctgcagta

SEQ ID NO: 1561842 - DNA, 15 bp, Homo sapiens
gtgtgtctgcagtat

SEQ ID NO: 1561843 - DNA, 15 bp, Homo sapiens
tgtgtctgcagtatc

SEQ ID NO: 1561844 - DNA, 15 bp, Homo sapiens
gtgtctgcagtatct

SEQ ID NO: 1561845 - DNA, 15 bp, Homo sapiens
tgtctgcagtatcta

SEQ ID NO: 1561846 - DNA, 15 bp, Homo sapiens
gtctgcagtatctat

SEQ ID NO: 1561847 - DNA, 15 bp, Homo sapiens
tctgcagtatctata

SEQ ID NO: 1561848 - DNA, 15 bp, Homo sapiens
ctgcagtatctataa

SEQ ID NO: 1561849 - DNA, 15 bp, Homo sapiens
tgcagtatctataag

SEQ ID NO: 1561850 - DNA, 15 bp, Homo sapiens
gcagtatctataagt

SEQ ID NO: 1561851 - DNA, 15 bp, Homo sapiens
cagtatctataagta

SEQ ID NO: 1561852 - DNA, 15 bp, Homo sapiens
agtatctataagtac

SEQ ID NO: 1561853 - DNA, 15 bp, Homo sapiens
gtatctataagtact

SEQ ID NO: 1561854 - DNA, 15 bp, Homo sapiens
tatctataagtactt

SEQ ID NO: 1561855 - DNA, 15 bp, Homo sapiens
atctataagtacttc

SEQ ID NO: 1561856 - DNA, 15 bp, Homo sapiens
tctataagtacttcc

SEQ ID NO: 1561857 - DNA, 15 bp, Homo sapiens
ctataagtacttccg

SEQ ID NO: 1561858 - DNA, 15 bp, Homo sapiens
tataagtacttccgc

SEQ ID NO: 1561859 - DNA, 15 bp, Homo sapiens
ataagtacttccgct

SEQ ID NO: 1561860 - DNA, 15 bp, Homo sapiens
taagtacttccgctc

SEQ ID NO: 1561861 - DNA, 15 bp, Homo sapiens
aagtacttccgctct

SEQ ID NO: 1561862 - DNA, 15 bp, Homo sapiens
agtacttccgctctg

SEQ ID NO: 1561863 - DNA, 15 bp, Homo sapiens
gtacttccgctctgt

SEQ ID NO: 1561864 - DNA, 15 bp, Homo sapiens
tacttccgctctgtc

SEQ ID NO: 1561865 - DNA, 15 bp, Homo sapiens
acttccgctctgtca

SEQ ID NO: 1561866 - DNA, 15 bp, Homo sapiens
cttccgctctgtcaa

SEQ ID NO: 1561867 - DNA, 15 bp, Homo sapiens
ttccgctctgtcaag

SEQ ID NO: 1561868 - DNA, 15 bp, Homo sapiens
tccgctctgtcaagg

SEQ ID NO: 1561869 - DNA, 15 bp, Homo sapiens
ccgctctgtcaagga

SEQ ID NO: 1561870 - DNA, 15 bp, Homo sapiens
cgctctgtcaaggaa

SEQ ID NO: 1561871 - DNA, 15 bp, Homo sapiens
gctctgtcaaggaat

SEQ ID NO: 1561872 - DNA, 15 bp, Homo sapiens
ctctgtcaaggaata

SEQ ID NO: 1561873 - DNA, 15 bp, Homo sapiens
tctgtcaaggaatac

SEQ ID NO: 1561874 - DNA, 15 bp, Homo sapiens
ctgtcaaggaataca

SEQ ID NO: 1561875 - DNA, 15 bp, Homo sapiens
tgtcaaggaatacag

SEQ ID NO: 1561876 - DNA, 15 bp, Homo sapiens
gtcaaggaatacaga

SEQ ID NO: 1561877 - DNA, 15 bp, Homo sapiens
tcaaggaatacagac

SEQ ID NO: 1561878 - DNA, 15 bp, Homo sapiens
caaggaatacagact

SEQ ID NO: 1561879 - DNA, 15 bp, Homo sapiens
aaggaatacagactg

SEQ ID NO: 1561880 - DNA, 15 bp, Homo sapiens
aggaatacagactgg

SEQ ID NO: 1561881 - DNA, 15 bp, Homo sapiens
ggaatacagactggc

SEQ ID NO: 1561882 - DNA, 15 bp, Homo sapiens
gaatacagactggca

SEQ ID NO: 1561883 - DNA, 15 bp, Homo sapiens
aatacagactggcag

SEQ ID NO: 1561884 - DNA, 15 bp, Homo sapiens
atacagactggcagg

SEQ ID NO: 1561885 - DNA, 15 bp, Homo sapiens
tacagactggcagga

SEQ ID NO: 1561886 - DNA, 15 bp, Homo sapiens
acagactggcaggaa

SEQ ID NO: 1561887 - DNA, 15 bp, Homo sapiens
cagactggcaggaag

SEQ ID NO: 1561888 - DNA, 15 bp, Homo sapiens
agactggcaggaagc

SEQ ID NO: 1561889 - DNA, 15 bp, Homo sapiens
gactggcaggaagca

SEQ ID NO: 1561890 - DNA, 15 bp, Homo sapiens
actggcaggaagcag

SEQ ID NO: 1561891 - DNA, 15 bp, Homo sapiens
ctggcaggaagcaga

SEQ ID NO: 1561892 - DNA, 15 bp, Homo sapiens
tggcaggaagcagat

SEQ ID NO: 1561893 - DNA, 15 bp, Homo sapiens
ggcaggaagcagata

SEQ ID NO: 1561894 - DNA, 15 bp, Homo sapiens
gcaggaagcagataa

SEQ ID NO: 1561895 - DNA, 15 bp, Homo sapiens
caggaagcagataag

SEQ ID NO: 1561896 - DNA, 15 bp, Homo sapiens
aggaagcagataagc

SEQ ID NO: 1561897 - DNA, 15 bp, Homo sapiens
ggaagcagataagca

SEQ ID NO: 1561898 - DNA, 15 bp, Homo sapiens
gaagcagataagcat

SEQ ID NO: 1561899 - DNA, 15 bp, Homo sapiens
aagcagataagcata

SEQ ID NO: 1561900 - DNA, 15 bp, Homo sapiens
agcagataagcataa

SEQ ID NO: 1561901 - DNA, 15 bp, Homo sapiens
gcagataagcataat

SEQ ID NO: 1561902 - DNA, 15 bp, Homo sapiens
cagataagcataatt

SEQ ID NO: 1561903 - DNA, 15 bp, Homo sapiens
agataagcataattg

SEQ ID NO: 1561904 - DNA, 15 bp, Homo sapiens
gataagcataattgt

SEQ ID NO: 1561905 - DNA, 15 bp, Homo sapiens
ataagcataattgtt

SEQ ID NO: 1561906 - DNA, 15 bp, Homo sapiens
taagcataattgttt

SEQ ID NO: 1561907 - DNA, 15 bp, Homo sapiens
aagcataattgtttt

SEQ ID NO: 1561908 - DNA, 15 bp, Homo sapiens
agcataattgttttc

SEQ ID NO: 1561909 - DNA, 15 bp, Homo sapiens
gcataattgttttcc

SEQ ID NO: 1561910 - DNA, 15 bp, Homo sapiens
cataattgttttcca

SEQ ID NO: 1561911 - DNA, 15 bp, Homo sapiens
ataattgttttccaa

SEQ ID NO: 1561912 - DNA, 15 bp, Homo sapiens
taattgttttccaat

SEQ ID NO: 1561913 - DNA, 15 bp, Homo sapiens
aattgttttccaata

SEQ ID NO: 1561914 - DNA, 15 bp, Homo sapiens
attgttttccaataa

SEQ ID NO: 1561915 - DNA, 15 bp, Homo sapiens
ttgttttccaataac

SEQ ID NO: 1561916 - DNA, 15 bp, Homo sapiens
tgttttccaataact

SEQ ID NO: 1561917 - DNA, 15 bp, Homo sapiens
gttttccaataactc

SEQ ID NO: 1561918 - DNA, 15 bp, Homo sapiens
ttttccaataactcc

SEQ ID NO: 1561919 - DNA, 15 bp, Homo sapiens
tttccaataactccc

SEQ ID NO: 1561920 - DNA, 15 bp, Homo sapiens
ttccaataactcccc

SEQ ID NO: 1561921 - DNA, 15 bp, Homo sapiens
tccaataactcccca

SEQ ID NO: 1561922 - DNA, 15 bp, Homo sapiens
ccaataactccccaa

SEQ ID NO: 1561923 - DNA, 15 bp, Homo sapiens
caataactccccaag

SEQ ID NO: 1561924 - DNA, 15 bp, Homo sapiens
aataactccccaagt

SEQ ID NO: 1561925 - DNA, 15 bp, Homo sapiens
ataactccccaagtc

SEQ ID NO: 1561926 - DNA, 15 bp, Homo sapiens
taactccccaagtct

SEQ ID NO: 1561927 - DNA, 15 bp, Homo sapiens
aactccccaagtctc

SEQ ID NO: 1561928 - DNA, 15 bp, Homo sapiens
actccccaagtctct

SEQ ID NO: 1561929 - DNA, 15 bp, Homo sapiens
ctccccaagtctctt

SEQ ID NO: 1561930 - DNA, 15 bp, Homo sapiens
tccccaagtctcttg

SEQ ID NO: 1561931 - DNA, 15 bp, Homo sapiens
ccccaagtctcttgg

SEQ ID NO: 1561932 - DNA, 15 bp, Homo sapiens
cccaagtctcttgga

SEQ ID NO: 1561933 - DNA, 15 bp, Homo sapiens
ccaagtctcttggaa

SEQ ID NO: 1561934 - DNA, 15 bp, Homo sapiens
caagtctcttggaat

SEQ ID NO: 1561935 - DNA, 15 bp, Homo sapiens
aagtctcttggaata

SEQ ID NO: 1561936 - DNA, 15 bp, Homo sapiens
agtctcttggaatat

SEQ ID NO: 1561937 - DNA, 15 bp, Homo sapiens
gtctcttggaatata

SEQ ID NO: 1561938 - DNA, 15 bp, Homo sapiens
tctcttggaatatat

SEQ ID NO: 1561939 - DNA, 15 bp, Homo sapiens
ctcttggaatatata

SEQ ID NO: 1561940 - DNA, 15 bp, Homo sapiens
tcttggaatatatat

SEQ ID NO: 1561941 - DNA, 15 bp, Homo sapiens
cttggaatatatatg

SEQ ID NO: 1561942 - DNA, 15 bp, Homo sapiens
ttggaatatatatgt

SEQ ID NO: 1561943 - DNA, 15 bp, Homo sapiens
tggaatatatatgta

SEQ ID NO: 1561944 - DNA, 15 bp, Homo sapiens
ggaatatatatgtat

SEQ ID NO: 1561945 - DNA, 15 bp, Homo sapiens
gaatatatatgtatc

SEQ ID NO: 1561946 - DNA, 15 bp, Homo sapiens
aatatatatgtatct

SEQ ID NO: 1561947 - DNA, 15 bp, Homo sapiens
atatatatgtatctg

SEQ ID NO: 1561948 - DNA, 15 bp, Homo sapiens
tatatatgtatctga

SEQ ID NO: 1561949 - DNA, 15 bp, Homo sapiens
atatatgtatctgaa

SEQ ID NO: 1561950 - DNA, 15 bp, Homo sapiens
tatatgtatctgaat

SEQ ID NO: 1561951 - DNA, 15 bp, Homo sapiens
atatgtatctgaatc

SEQ ID NO: 1561952 - DNA, 15 bp, Homo sapiens
tatgtatctgaatct

SEQ ID NO: 1561953 - DNA, 15 bp, Homo sapiens
atgtatctgaatctc

SEQ ID NO: 1561954 - DNA, 15 bp, Homo sapiens
tgtatctgaatctct

SEQ ID NO: 1561955 - DNA, 15 bp, Homo sapiens
gtatctgaatctctc

SEQ ID NO: 1561956 - DNA, 15 bp, Homo sapiens
tatctgaatctctca

SEQ ID NO: 1561957 - DNA, 15 bp, Homo sapiens
atctgaatctctcag

SEQ ID NO: 1561958 - DNA, 15 bp, Homo sapiens
tctgaatctctcaga

SEQ ID NO: 1561959 - DNA, 15 bp, Homo sapiens
ctgaatctctcagag

SEQ ID NO: 1561960 - DNA, 15 bp, Homo sapiens
tgaatctctcagagg

SEQ ID NO: 1561961 - DNA, 15 bp, Homo sapiens
gaatctctcagagga

SEQ ID NO: 1561962 - DNA, 15 bp, Homo sapiens
aatctctcagaggag

SEQ ID NO: 1561963 - DNA, 15 bp, Homo sapiens
atctctcagaggaga

SEQ ID NO: 1561964 - DNA, 15 bp, Homo sapiens
tctctcagaggagag

SEQ ID NO: 1561965 - DNA, 15 bp, Homo sapiens
ctctcagaggagaga

SEQ ID NO: 1561966 - DNA, 15 bp, Homo sapiens
tctcagaggagagag

SEQ ID NO: 1561967 - DNA, 15 bp, Homo sapiens
ctcagaggagagagt

SEQ ID NO: 1561968 - DNA, 15 bp, Homo sapiens
tcagaggagagagtt

SEQ ID NO: 1561969 - DNA, 15 bp, Homo sapiens
cagaggagagagttt

SEQ ID NO: 1561970 - DNA, 15 bp, Homo sapiens
agaggagagagtttt

SEQ ID NO: 1561971 - DNA, 15 bp, Homo sapiens
gaggagagagttttc

SEQ ID NO: 1561972 - DNA, 15 bp, Homo sapiens
aggagagagttttct

SEQ ID NO: 1561973 - DNA, 15 bp, Homo sapiens
ggagagagttttctc

SEQ ID NO: 1561974 - DNA, 15 bp, Homo sapiens
gagagagttttctct

SEQ ID NO: 1561975 - DNA, 15 bp, Homo sapiens
agagagttttctctc

SEQ ID NO: 1561976 - DNA, 15 bp, Homo sapiens
gagagttttctctct

SEQ ID NO: 1561977 - DNA, 15 bp, Homo sapiens
agagttttctctctt

SEQ ID NO: 1561978 - DNA, 15 bp, Homo sapiens
gagttttctctcttc

SEQ ID NO: 1561979 - DNA, 15 bp, Homo sapiens
agttttctctcttct

SEQ ID NO: 1561980 - DNA, 15 bp, Homo sapiens
gttttctctcttctt

SEQ ID NO: 1561981 - DNA, 15 bp, Homo sapiens
ttttctctcttcttt

SEQ ID NO: 1561982 - DNA, 15 bp, Homo sapiens
tttctctcttctttg

SEQ ID NO: 1561983 - DNA, 15 bp, Homo sapiens
ttctctcttctttgg

SEQ ID NO: 1561984 - DNA, 15 bp, Homo sapiens
tctctcttctttggc

SEQ ID NO: 1561985 - DNA, 15 bp, Homo sapiens
ctctcttctttggcc

SEQ ID NO: 1561986 - DNA, 15 bp, Homo sapiens
tctcttctttggcca

SEQ ID NO: 1561987 - DNA, 15 bp, Homo sapiens
ctcttctttggccat

SEQ ID NO: 1561988 - DNA, 15 bp, Homo sapiens
tcttctttggccatt

SEQ ID NO: 1561989 - DNA, 15 bp, Homo sapiens
cttctttggccattt

SEQ ID NO: 1561990 - DNA, 15 bp, Homo sapiens
ttctttggccatttt

SEQ ID NO: 1561991 - DNA, 15 bp, Homo sapiens
tctttggccatttta

SEQ ID NO: 1561992 - DNA, 15 bp, Homo sapiens
ctttggccattttag

SEQ ID NO: 1561993 - DNA, 15 bp, Homo sapiens
tttggccattttagc

SEQ ID NO: 1561994 - DNA, 15 bp, Homo sapiens
ttggccattttagcc

SEQ ID NO: 1561995 - DNA, 15 bp, Homo sapiens
tggccattttagcct

SEQ ID NO: 1561996 - DNA, 15 bp, Homo sapiens
ggccattttagccta

SEQ ID NO: 1561997 - DNA, 15 bp, Homo sapiens
gccattttagcctat

SEQ ID NO: 1561998 - DNA, 15 bp, Homo sapiens
ccattttagcctatt

SEQ ID NO: 1561999 - DNA, 15 bp, Homo sapiens
cattttagcctattt

SEQ ID NO: 1562000 - DNA, 15 bp, Homo sapiens
attttagcctatttt

SEQ ID NO: 1562001 - DNA, 15 bp, Homo sapiens
ttttagcctattttc

SEQ ID NO: 1562002 - DNA, 15 bp, Homo sapiens
tttagcctattttcc

SEQ ID NO: 1562003 - DNA, 15 bp, Homo sapiens
ttagcctattttcca

SEQ ID NO: 1562004 - DNA, 15 bp, Homo sapiens
tagcctattttccag

SEQ ID NO: 1562005 - DNA, 15 bp, Homo sapiens
agcctattttccagg

SEQ ID NO: 1562006 - DNA, 15 bp, Homo sapiens
gcctattttccagga

SEQ ID NO: 1562007 - DNA, 15 bp, Homo sapiens
cctattttccaggac

SEQ ID NO: 1562008 - DNA, 15 bp, Homo sapiens
ctattttccaggacc

SEQ ID NO: 1562009 - DNA, 15 bp, Homo sapiens
tcttcatctttaaaa

SEQ ID NO: 1562010 - DNA, 15 bp, Homo sapiens
cttcatctttaaaat

SEQ ID NO: 1562011 - DNA, 15 bp, Homo sapiens
ttcatctttaaaatg

SEQ ID NO: 1562012 - DNA, 15 bp, Homo sapiens
tcatctttaaaatgg

SEQ ID NO: 1562013 - DNA, 15 bp, Homo sapiens
catctttaaaatgga

SEQ ID NO: 1562014 - DNA, 15 bp, Homo sapiens
atctttaaaatggaa

SEQ ID NO: 1562015 - DNA, 15 bp, Homo sapiens
tctttaaaatggaaa

SEQ ID NO: 1562016 - DNA, 15 bp, Homo sapiens
ctttaaaatggaaaa

SEQ ID NO: 1562017 - DNA, 15 bp, Homo sapiens
tttaaaatggaaaac

SEQ ID NO: 1562018 - DNA, 15 bp, Homo sapiens
ttaaaatggaaaact

SEQ ID NO: 1562019 - DNA, 15 bp, Homo sapiens
taaaatggaaaactg

SEQ ID NO: 1562020 - DNA, 15 bp, Homo sapiens
aaaatggaaaactgg

SEQ ID NO: 1562021 - DNA, 15 bp, Homo sapiens
aaatggaaaactggg

SEQ ID NO: 1562022 - DNA, 15 bp, Homo sapiens
aatggaaaactgggt

SEQ ID NO: 1562023 - DNA, 15 bp, Homo sapiens
atggaaaactgggtg

SEQ ID NO: 1562024 - DNA, 15 bp, Homo sapiens
tggaaaactgggtgt

SEQ ID NO: 1562025 - DNA, 15 bp, Homo sapiens
ggaaaactgggtgtg

SEQ ID NO: 1562026 - DNA, 15 bp, Homo sapiens
gaaaactgggtgtgg

SEQ ID NO: 1562027 - DNA, 15 bp, Homo sapiens
aaaactgggtgtggt

SEQ ID NO: 1562028 - DNA, 15 bp, Homo sapiens
aaactgggtgtggtg

SEQ ID NO: 1562029 - DNA, 15 bp, Homo sapiens
aactgggtgtggtgg

SEQ ID NO: 1562030 - DNA, 15 bp, Homo sapiens
actgggtgtggtggc

SEQ ID NO: 1562031 - DNA, 15 bp, Homo sapiens
cagcactttgggagc

SEQ ID NO: 1562032 - DNA, 15 bp, Homo sapiens
agcactttgggagcc

SEQ ID NO: 1562033 - DNA, 15 bp, Homo sapiens
gcactttgggagccc

SEQ ID NO: 1562034 - DNA, 15 bp, Homo sapiens
cactttgggagccca

SEQ ID NO: 1562035 - DNA, 15 bp, Homo sapiens
actttgggagcccaa

SEQ ID NO: 1562036 - DNA, 15 bp, Homo sapiens
ctttgggagcccaac

SEQ ID NO: 1562037 - DNA, 15 bp, Homo sapiens
tttgggagcccaacg

SEQ ID NO: 1562038 - DNA, 15 bp, Homo sapiens
ttgggagcccaacgt

SEQ ID NO: 1562039 - DNA, 15 bp, Homo sapiens
tgggagcccaacgtg

SEQ ID NO: 1562040 - DNA, 15 bp, Homo sapiens
gggagcccaacgtgg

SEQ ID NO: 1562041 - DNA, 15 bp, Homo sapiens
ggagcccaacgtggg

SEQ ID NO: 1562042 - DNA, 15 bp, Homo sapiens
gagcccaacgtgggc

SEQ ID NO: 1562043 - DNA, 15 bp, Homo sapiens
agcccaacgtgggca

SEQ ID NO: 1562044 - DNA, 15 bp, Homo sapiens
gcccaacgtgggcag

SEQ ID NO: 1562045 - DNA, 15 bp, Homo sapiens
cccaacgtgggcaga

SEQ ID NO: 1562046 - DNA, 15 bp, Homo sapiens
ccaacgtgggcagat

SEQ ID NO: 1562047 - DNA, 15 bp, Homo sapiens
caacgtgggcagatc

SEQ ID NO: 1562048 - DNA, 15 bp, Homo sapiens
aacgtgggcagatca

SEQ ID NO: 1562049 - DNA, 15 bp, Homo sapiens
acgtgggcagatcac

SEQ ID NO: 1562050 - DNA, 15 bp, Homo sapiens
cgtgggcagatcacc

SEQ ID NO: 1562051 - DNA, 15 bp, Homo sapiens
cagatcacctgaggc

SEQ ID NO: 1562052 - DNA, 15 bp, Homo sapiens
agatcacctgaggcc

SEQ ID NO: 1562053 - DNA, 15 bp, Homo sapiens
gatcacctgaggcca

SEQ ID NO: 1562054 - DNA, 15 bp, Homo sapiens
atcacctgaggccag

SEQ ID NO: 1562055 - DNA, 15 bp, Homo sapiens
tcacctgaggccagg

SEQ ID NO: 1562056 - DNA, 15 bp, Homo sapiens
cacctgaggccagga

SEQ ID NO: 1562057 - DNA, 15 bp, Homo sapiens
ctctactaaaaatgc

SEQ ID NO: 1562058 - DNA, 15 bp, Homo sapiens
tctactaaaaatgca

SEQ ID NO: 1562059 - DNA, 15 bp, Homo sapiens
ctactaaaaatgcaa

SEQ ID NO: 1562060 - DNA, 15 bp, Homo sapiens
ctaaaaatgcaaaaa

SEQ ID NO: 1562061 - DNA, 15 bp, Homo sapiens
taaaaatgcaaaaat

SEQ ID NO: 1562062 - DNA, 15 bp, Homo sapiens
aaaaatgcaaaaatt

SEQ ID NO: 1562063 - DNA, 15 bp, Homo sapiens
aaaatgcaaaaatta

SEQ ID NO: 1562064 - DNA, 15 bp, Homo sapiens
aaatgcaaaaattag

SEQ ID NO: 1562065 - DNA, 15 bp, Homo sapiens
aatgcaaaaattagc

SEQ ID NO: 1562066 - DNA, 15 bp, Homo sapiens
atgcaaaaattagct

SEQ ID NO: 1562067 - DNA, 15 bp, Homo sapiens
tgcaaaaattagctg

SEQ ID NO: 1562068 - DNA, 15 bp, Homo sapiens
gcaaaaattagctgg

SEQ ID NO: 1562069 - DNA, 15 bp, Homo sapiens
ggcgtggtggtgcac

SEQ ID NO: 1562070 - DNA, 15 bp, Homo sapiens
gcgtggtggtgcaca

SEQ ID NO: 1562071 - DNA, 15 bp, Homo sapiens
cgtggtggtgcacac

SEQ ID NO: 1562072 - DNA, 15 bp, Homo sapiens
ggtggtgcacacctg

SEQ ID NO: 1562073 - DNA, 15 bp, Homo sapiens
gaggcacaagaatcg

SEQ ID NO: 1562074 - DNA, 15 bp, Homo sapiens
aggcacaagaatcgc

SEQ ID NO: 1562075 - DNA, 15 bp, Homo sapiens
ggcacaagaatcgct

SEQ ID NO: 1562076 - DNA, 15 bp, Homo sapiens
gcacaagaatcgctt

SEQ ID NO: 1562077 - DNA, 15 bp, Homo sapiens
cacaagaatcgcttg

SEQ ID NO: 1562078 - DNA, 15 bp, Homo sapiens
acaagaatcgcttga

SEQ ID NO: 1562079 - DNA, 15 bp, Homo sapiens
caagaatcgcttgaa

SEQ ID NO: 1562080 - DNA, 15 bp, Homo sapiens
aagaatcgcttgaac

SEQ ID NO: 1562081 - DNA, 15 bp, Homo sapiens
gaacctgagaggcag

SEQ ID NO: 1562082 - DNA, 15 bp, Homo sapiens
aacctgagaggcaga

SEQ ID NO: 1562083 - DNA, 15 bp, Homo sapiens
acctgagaggcagag

SEQ ID NO: 1562084 - DNA, 15 bp, Homo sapiens
cctgagaggcagagg

SEQ ID NO: 1562085 - DNA, 15 bp, Homo sapiens
ctgagaggcagaggg

SEQ ID NO: 1562086 - DNA, 15 bp, Homo sapiens
tgagaggcagagggt

SEQ ID NO: 1562087 - DNA, 15 bp, Homo sapiens
gagaggcagagggtg

SEQ ID NO: 1562088 - DNA, 15 bp, Homo sapiens
agaggcagagggtgc

SEQ ID NO: 1562089 - DNA, 15 bp, Homo sapiens
gaggcagagggtgca

SEQ ID NO: 1562090 - DNA, 15 bp, Homo sapiens
aggcagagggtgcag

SEQ ID NO: 1562091 - DNA, 15 bp, Homo sapiens
ggcagagggtgcagt

SEQ ID NO: 1562092 - DNA, 15 bp, Homo sapiens
gcagagggtgcagtg

SEQ ID NO: 1562093 - DNA, 15 bp, Homo sapiens
cagagggtgcagtga

SEQ ID NO: 1562094 - DNA, 15 bp, Homo sapiens
agagggtgcagtgag

SEQ ID NO: 1562095 - DNA, 15 bp, Homo sapiens
gagggtgcagtgagc

SEQ ID NO: 1562096 - DNA, 15 bp, Homo sapiens
agggtgcagtgagct

SEQ ID NO: 1562097 - DNA, 15 bp, Homo sapiens
gggtgcagtgagctg

SEQ ID NO: 1562098 - DNA, 15 bp, Homo sapiens
ggtgcagtgagctga

SEQ ID NO: 1562099 - DNA, 15 bp, Homo sapiens
gtgcagtgagctgaa

SEQ ID NO: 1562100 - DNA, 15 bp, Homo sapiens
gcagtgagctgaaat

SEQ ID NO: 1562101 - DNA, 15 bp, Homo sapiens
cagtgagctgaaatc

SEQ ID NO: 1562102 - DNA, 15 bp, Homo sapiens
agtgagctgaaatca

SEQ ID NO: 1562103 - DNA, 15 bp, Homo sapiens
gtgagctgaaatcac

SEQ ID NO: 1562104 - DNA, 15 bp, Homo sapiens
tgagctgaaatcaca

SEQ ID NO: 1562105 - DNA, 15 bp, Homo sapiens
gagctgaaatcacac

SEQ ID NO: 1562106 - DNA, 15 bp, Homo sapiens
agctgaaatcacacc

SEQ ID NO: 1562107 - DNA, 15 bp, Homo sapiens
gctgaaatcacacca

SEQ ID NO: 1562108 - DNA, 15 bp, Homo sapiens
ctgaaatcacaccac

SEQ ID NO: 1562109 - DNA, 15 bp, Homo sapiens
tgaaatcacaccact

SEQ ID NO: 1562110 - DNA, 15 bp, Homo sapiens
gaaatcacaccactg

SEQ ID NO: 1562111 - DNA, 15 bp, Homo sapiens
aaatcacaccactgc

SEQ ID NO: 1562112 - DNA, 15 bp, Homo sapiens
aatcacaccactgca

SEQ ID NO: 1562113 - DNA, 15 bp, Homo sapiens
actccaacctgggca

SEQ ID NO: 1562114 - DNA, 15 bp, Homo sapiens
ctccaacctgggcaa

SEQ ID NO: 1562115 - DNA, 15 bp, Homo sapiens
gggcaacagagcgat

SEQ ID NO: 1562116 - DNA, 15 bp, Homo sapiens
ggcaacagagcgatt

SEQ ID NO: 1562117 - DNA, 15 bp, Homo sapiens
gcaacagagcgattc

SEQ ID NO: 1562118 - DNA, 15 bp, Homo sapiens
caacagagcgattct

SEQ ID NO: 1562119 - DNA, 15 bp, Homo sapiens
aacagagcgattctc

SEQ ID NO: 1562120 - DNA, 15 bp, Homo sapiens
acagagcgattctct

SEQ ID NO: 1562121 - DNA, 15 bp, Homo sapiens
cagagcgattctctg

SEQ ID NO: 1562122 - DNA, 15 bp, Homo sapiens
agagcgattctctgt

SEQ ID NO: 1562123 - DNA, 15 bp, Homo sapiens
gagcgattctctgtc

SEQ ID NO: 1562124 - DNA, 15 bp, Homo sapiens
agcgattctctgtct

SEQ ID NO: 1562125 - DNA, 15 bp, Homo sapiens
gcgattctctgtctc

SEQ ID NO: 1562126 - DNA, 15 bp, Homo sapiens
cgattctctgtctca

SEQ ID NO: 1562127 - DNA, 15 bp, Homo sapiens
gattctctgtctcaa

SEQ ID NO: 1562128 - DNA, 15 bp, Homo sapiens
attctctgtctcaaa

SEQ ID NO: 1562129 - DNA, 15 bp, Homo sapiens
ttctctgtctcaaaa

SEQ ID NO: 1562130 - DNA, 15 bp, Homo sapiens
tctctgtctcaaaaa

SEQ ID NO: 1562131 - DNA, 15 bp, Homo sapiens
aaataaataaataac

SEQ ID NO: 1562132 - DNA, 15 bp, Homo sapiens
aataaataaataacc

SEQ ID NO: 1562133 - DNA, 15 bp, Homo sapiens
ataaataaataacca

SEQ ID NO: 1562134 - DNA, 15 bp, Homo sapiens
taaataaataaccaa

SEQ ID NO: 1562135 - DNA, 15 bp, Homo sapiens
aaataaataaccaaa

SEQ ID NO: 1562136 - DNA, 15 bp, Homo sapiens
aataaataaccaaat

SEQ ID NO: 1562137 - DNA, 15 bp, Homo sapiens
ataaataaccaaatt

SEQ ID NO: 1562138 - DNA, 15 bp, Homo sapiens
taaataaccaaatta

SEQ ID NO: 1562139 - DNA, 15 bp, Homo sapiens
aaataaccaaattaa

SEQ ID NO: 1562140 - DNA, 15 bp, Homo sapiens
aataaccaaattaaa

SEQ ID NO: 1562141 - DNA, 15 bp, Homo sapiens
ataaccaaattaaaa

SEQ ID NO: 1562142 - DNA, 15 bp, Homo sapiens
taaccaaattaaaat

SEQ ID NO: 1562143 - DNA, 15 bp, Homo sapiens
aaccaaattaaaata

SEQ ID NO: 1562144 - DNA, 15 bp, Homo sapiens
accaaattaaaataa

SEQ ID NO: 1562145 - DNA, 15 bp, Homo sapiens
tggaaaatgaatttc

SEQ ID NO: 1562146 - DNA, 15 bp, Homo sapiens
ggaaaatgaatttct

SEQ ID NO: 1562147 - DNA, 15 bp, Homo sapiens
gaaaatgaatttctt

SEQ ID NO: 1562148 - DNA, 15 bp, Homo sapiens
aaaatgaatttcttt

SEQ ID NO: 1562149 - DNA, 15 bp, Homo sapiens
aaatgaatttctttg

SEQ ID NO: 1562150 - DNA, 15 bp, Homo sapiens
aatgaatttctttgt

SEQ ID NO: 1562151 - DNA, 15 bp, Homo sapiens
atgaatttctttgtg

SEQ ID NO: 1562152 - DNA, 15 bp, Homo sapiens
tgaatttctttgtgt

SEQ ID NO: 1562153 - DNA, 15 bp, Homo sapiens
gaatttctttgtgtt

SEQ ID NO: 1562154 - DNA, 15 bp, Homo sapiens
aatttctttgtgttg

SEQ ID NO: 1562155 - DNA, 15 bp, Homo sapiens
atttctttgtgttga

SEQ ID NO: 1562156 - DNA, 15 bp, Homo sapiens
tttctttgtgttgaa

SEQ ID NO: 1562157 - DNA, 15 bp, Homo sapiens
ttctttgtgttgaat

SEQ ID NO: 1562158 - DNA, 15 bp, Homo sapiens
tctttgtgttgaata

SEQ ID NO: 1562159 - DNA, 15 bp, Homo sapiens
ctttgtgttgaataa

SEQ ID NO: 1562160 - DNA, 15 bp, Homo sapiens
tttgtgttgaataag

SEQ ID NO: 1562161 - DNA, 15 bp, Homo sapiens
ttgtgttgaataagt

SEQ ID NO: 1562162 - DNA, 15 bp, Homo sapiens
tgtgttgaataagtg

SEQ ID NO: 1562163 - DNA, 15 bp, Homo sapiens
gtgttgaataagtgc

SEQ ID NO: 1562164 - DNA, 15 bp, Homo sapiens
tgttgaataagtgca

SEQ ID NO: 1562165 - DNA, 15 bp, Homo sapiens
gttgaataagtgcaa

SEQ ID NO: 1562166 - DNA, 15 bp, Homo sapiens
ttgaataagtgcaat

SEQ ID NO: 1562167 - DNA, 15 bp, Homo sapiens
tgaataagtgcaatt

SEQ ID NO: 1562168 - DNA, 15 bp, Homo sapiens
gaataagtgcaattt

SEQ ID NO: 1562169 - DNA, 15 bp, Homo sapiens
aataagtgcaatttg

SEQ ID NO: 1562170 - DNA, 15 bp, Homo sapiens
ataagtgcaatttgc

SEQ ID NO: 1562171 - DNA, 15 bp, Homo sapiens
taagtgcaatttgct

SEQ ID NO: 1562172 - DNA, 15 bp, Homo sapiens
aagtgcaatttgctg

SEQ ID NO: 1562173 - DNA, 15 bp, Homo sapiens
agtgcaatttgctgg

SEQ ID NO: 1562174 - DNA, 15 bp, Homo sapiens
gtgcaatttgctggt

SEQ ID NO: 1562175 - DNA, 15 bp, Homo sapiens
tgcaatttgctggtc

SEQ ID NO: 1562176 - DNA, 15 bp, Homo sapiens
gcaatttgctggtca

SEQ ID NO: 1562177 - DNA, 15 bp, Homo sapiens
caatttgctggtcaa

SEQ ID NO: 1562178 - DNA, 15 bp, Homo sapiens
aatttgctggtcaaa

SEQ ID NO: 1562179 - DNA, 15 bp, Homo sapiens
atttgctggtcaaaa

SEQ ID NO: 1562180 - DNA, 15 bp, Homo sapiens
tttgctggtcaaaat

SEQ ID NO: 1562181 - DNA, 15 bp, Homo sapiens
ttgctggtcaaaatt

SEQ ID NO: 1562182 - DNA, 15 bp, Homo sapiens
tgctggtcaaaattc

SEQ ID NO: 1562183 - DNA, 15 bp, Homo sapiens
gctggtcaaaattca

SEQ ID NO: 1562184 - DNA, 15 bp, Homo sapiens
ctggtcaaaattcat

SEQ ID NO: 1562185 - DNA, 15 bp, Homo sapiens
tggtcaaaattcatt

SEQ ID NO: 1562186 - DNA, 15 bp, Homo sapiens
ggtcaaaattcattc

SEQ ID NO: 1562187 - DNA, 15 bp, Homo sapiens
gtcaaaattcattca

SEQ ID NO: 1562188 - DNA, 15 bp, Homo sapiens
tcaaaattcattcaa

SEQ ID NO: 1562189 - DNA, 15 bp, Homo sapiens
caaaattcattcaaa

SEQ ID NO: 1562190 - DNA, 15 bp, Homo sapiens
aaaattcattcaaac

SEQ ID NO: 1562191 - DNA, 15 bp, Homo sapiens
aaattcattcaaaca

SEQ ID NO: 1562192 - DNA, 15 bp, Homo sapiens
aattcattcaaacat

SEQ ID NO: 1562193 - DNA, 15 bp, Homo sapiens
attcattcaaacata

SEQ ID NO: 1562194 - DNA, 15 bp, Homo sapiens
ttcattcaaacatag

SEQ ID NO: 1562195 - DNA, 15 bp, Homo sapiens
tcattcaaacatagg

SEQ ID NO: 1562196 - DNA, 15 bp, Homo sapiens
cattcaaacatagga

SEQ ID NO: 1562197 - DNA, 15 bp, Homo sapiens
attcaaacataggag

SEQ ID NO: 1562198 - DNA, 15 bp, Homo sapiens
ttcaaacataggagt

SEQ ID NO: 1562199 - DNA, 15 bp, Homo sapiens
tcaaacataggagtg

SEQ ID NO: 1562200 - DNA, 15 bp, Homo sapiens
caaacataggagtga

SEQ ID NO: 1562201 - DNA, 15 bp, Homo sapiens
aaacataggagtgag

SEQ ID NO: 1562202 - DNA, 15 bp, Homo sapiens
aacataggagtgaga

SEQ ID NO: 1562203 - DNA, 15 bp, Homo sapiens
acataggagtgagag

SEQ ID NO: 1562204 - DNA, 15 bp, Homo sapiens
cataggagtgagaga

SEQ ID NO: 1562205 - DNA, 15 bp, Homo sapiens
ataggagtgagagag

SEQ ID NO: 1562206 - DNA, 15 bp, Homo sapiens
taggagtgagagagg

SEQ ID NO: 1562207 - DNA, 15 bp, Homo sapiens
aggagtgagagagga

SEQ ID NO: 1562208 - DNA, 15 bp, Homo sapiens
ggagtgagagaggag

SEQ ID NO: 1562209 - DNA, 15 bp, Homo sapiens
gagtgagagaggagg

SEQ ID NO: 1562210 - DNA, 15 bp, Homo sapiens
agtgagagaggagga

SEQ ID NO: 1562211 - DNA, 15 bp, Homo sapiens
gtgagagaggaggaa

SEQ ID NO: 1562212 - DNA, 15 bp, Homo sapiens
tgagagaggaggaag

SEQ ID NO: 1562213 - DNA, 15 bp, Homo sapiens
gagagaggaggaagt

SEQ ID NO: 1562214 - DNA, 15 bp, Homo sapiens
agagaggaggaagtg

SEQ ID NO: 1562215 - DNA, 15 bp, Homo sapiens
gagaggaggaagtga

SEQ ID NO: 1562216 - DNA, 15 bp, Homo sapiens
agaggaggaagtgac

SEQ ID NO: 1562217 - DNA, 15 bp, Homo sapiens
gaggaggaagtgact

SEQ ID NO: 1562218 - DNA, 15 bp, Homo sapiens
aggaggaagtgactg

SEQ ID NO: 1562219 - DNA, 15 bp, Homo sapiens
ggaggaagtgactgt

SEQ ID NO: 1562220 - DNA, 15 bp, Homo sapiens
gaggaagtgactgtt

SEQ ID NO: 1562221 - DNA, 15 bp, Homo sapiens
aggaagtgactgttt

SEQ ID NO: 1562222 - DNA, 15 bp, Homo sapiens
ggaagtgactgttta

SEQ ID NO: 1562223 - DNA, 15 bp, Homo sapiens
gaagtgactgtttat

SEQ ID NO: 1562224 - DNA, 15 bp, Homo sapiens
aagtgactgtttatt

SEQ ID NO: 1562225 - DNA, 15 bp, Homo sapiens
agtgactgtttattg

SEQ ID NO: 1562226 - DNA, 15 bp, Homo sapiens
gtgactgtttattga

SEQ ID NO: 1562227 - DNA, 15 bp, Homo sapiens
tgactgtttattgag

SEQ ID NO: 1562228 - DNA, 15 bp, Homo sapiens
gactgtttattgagg

SEQ ID NO: 1562229 - DNA, 15 bp, Homo sapiens
actgtttattgagga

SEQ ID NO: 1562230 - DNA, 15 bp, Homo sapiens
ctgtttattgaggaa

SEQ ID NO: 1562231 - DNA, 15 bp, Homo sapiens
gtttattgaggaact

SEQ ID NO: 1562232 - DNA, 15 bp, Homo sapiens
tttattgaggaactg

SEQ ID NO: 1562233 - DNA, 15 bp, Homo sapiens
ttattgaggaactgt

SEQ ID NO: 1562234 - DNA, 15 bp, Homo sapiens
tattgaggaactgtg

SEQ ID NO: 1562235 - DNA, 15 bp, Homo sapiens
attgaggaactgtga

SEQ ID NO: 1562236 - DNA, 15 bp, Homo sapiens
ttgaggaactgtgat

SEQ ID NO: 1562237 - DNA, 15 bp, Homo sapiens
tgaggaactgtgatg

SEQ ID NO: 1562238 - DNA, 15 bp, Homo sapiens
gaggaactgtgatgt

SEQ ID NO: 1562239 - DNA, 15 bp, Homo sapiens
aggaactgtgatgtg

SEQ ID NO: 1562240 - DNA, 15 bp, Homo sapiens
ggaactgtgatgtgc

SEQ ID NO: 1562241 - DNA, 15 bp, Homo sapiens
gaactgtgatgtgcc

SEQ ID NO: 1562242 - DNA, 15 bp, Homo sapiens
aactgtgatgtgcca

SEQ ID NO: 1562243 - DNA, 15 bp, Homo sapiens
actgtgatgtgccag

SEQ ID NO: 1562244 - DNA, 15 bp, Homo sapiens
ctgtgatgtgccagg

SEQ ID NO: 1562245 - DNA, 15 bp, Homo sapiens
tgtgatgtgccaggc

SEQ ID NO: 1562246 - DNA, 15 bp, Homo sapiens
gtgatgtgccaggca

SEQ ID NO: 1562247 - DNA, 15 bp, Homo sapiens
tgatgtgccaggcac

SEQ ID NO: 1562248 - DNA, 15 bp, Homo sapiens
gatgtgccaggcact

SEQ ID NO: 1562249 - DNA, 15 bp, Homo sapiens
atgtgccaggcactc

SEQ ID NO: 1562250 - DNA, 15 bp, Homo sapiens
tgtgccaggcactcc

SEQ ID NO: 1562251 - DNA, 15 bp, Homo sapiens
gtgccaggcactcca

SEQ ID NO: 1562252 - DNA, 15 bp, Homo sapiens
tgccaggcactccac

SEQ ID NO: 1562253 - DNA, 15 bp, Homo sapiens
gccaggcactccaca

SEQ ID NO: 1562254 - DNA, 15 bp, Homo sapiens
ccaggcactccacaa

SEQ ID NO: 1562255 - DNA, 15 bp, Homo sapiens
caggcactccacaag

SEQ ID NO: 1562256 - DNA, 15 bp, Homo sapiens
aggcactccacaaga

SEQ ID NO: 1562257 - DNA, 15 bp, Homo sapiens
ggcactccacaagat

SEQ ID NO: 1562258 - DNA, 15 bp, Homo sapiens
gcactccacaagatg

SEQ ID NO: 1562259 - DNA, 15 bp, Homo sapiens
cactccacaagatgt

SEQ ID NO: 1562260 - DNA, 15 bp, Homo sapiens
actccacaagatgtt

SEQ ID NO: 1562261 - DNA, 15 bp, Homo sapiens
ctccacaagatgttt

SEQ ID NO: 1562262 - DNA, 15 bp, Homo sapiens
tccacaagatgtttt

SEQ ID NO: 1562263 - DNA, 15 bp, Homo sapiens
ccacaagatgttttg

SEQ ID NO: 1562264 - DNA, 15 bp, Homo sapiens
cacaagatgttttgc

SEQ ID NO: 1562265 - DNA, 15 bp, Homo sapiens
acaagatgttttgct

SEQ ID NO: 1562266 - DNA, 15 bp, Homo sapiens
caagatgttttgctc

SEQ ID NO: 1562267 - DNA, 15 bp, Homo sapiens
aagatgttttgctca

SEQ ID NO: 1562268 - DNA, 15 bp, Homo sapiens
agatgttttgctcat

SEQ ID NO: 1562269 - DNA, 15 bp, Homo sapiens
gatgttttgctcatt

SEQ ID NO: 1562270 - DNA, 15 bp, Homo sapiens
atgttttgctcattc

SEQ ID NO: 1562271 - DNA, 15 bp, Homo sapiens
tgttttgctcattca

SEQ ID NO: 1562272 - DNA, 15 bp, Homo sapiens
gttttgctcattcag

SEQ ID NO: 1562273 - DNA, 15 bp, Homo sapiens
ttttgctcattcagg

SEQ ID NO: 1562274 - DNA, 15 bp, Homo sapiens
tttgctcattcaggc

SEQ ID NO: 1562275 - DNA, 15 bp, Homo sapiens
ttgctcattcaggcc

SEQ ID NO: 1562276 - DNA, 15 bp, Homo sapiens
tgctcattcaggcct

SEQ ID NO: 1562277 - DNA, 15 bp, Homo sapiens
gctcattcaggcctc

SEQ ID NO: 1562278 - DNA, 15 bp, Homo sapiens
ctcattcaggcctcc

SEQ ID NO: 1562279 - DNA, 15 bp, Homo sapiens
tcattcaggcctcct

SEQ ID NO: 1562280 - DNA, 15 bp, Homo sapiens
cattcaggcctcctg

SEQ ID NO: 1562281 - DNA, 15 bp, Homo sapiens
attcaggcctcctga

SEQ ID NO: 1562282 - DNA, 15 bp, Homo sapiens
ttcaggcctcctgag

SEQ ID NO: 1562283 - DNA, 15 bp, Homo sapiens
tcaggcctcctgagc

SEQ ID NO: 1562284 - DNA, 15 bp, Homo sapiens
caggcctcctgagca

SEQ ID NO: 1562285 - DNA, 15 bp, Homo sapiens
aggcctcctgagcac

SEQ ID NO: 1562286 - DNA, 15 bp, Homo sapiens
ggcctcctgagcacc

SEQ ID NO: 1562287 - DNA, 15 bp, Homo sapiens
gcctcctgagcaccc

SEQ ID NO: 1562288 - DNA, 15 bp, Homo sapiens
cctcctgagcaccct

SEQ ID NO: 1562289 - DNA, 15 bp, Homo sapiens
ctcctgagcaccctg

SEQ ID NO: 1562290 - DNA, 15 bp, Homo sapiens
tcctgagcaccctgg

SEQ ID NO: 1562291 - DNA, 15 bp, Homo sapiens
cctgagcaccctggg

SEQ ID NO: 1562292 - DNA, 15 bp, Homo sapiens
ctgagcaccctggga

SEQ ID NO: 1562293 - DNA, 15 bp, Homo sapiens
tgagcaccctgggag

SEQ ID NO: 1562294 - DNA, 15 bp, Homo sapiens
gagcaccctgggaga

SEQ ID NO: 1562295 - DNA, 15 bp, Homo sapiens
agcaccctgggagac

SEQ ID NO: 1562296 - DNA, 15 bp, Homo sapiens
gcaccctgggagaca

SEQ ID NO: 1562297 - DNA, 15 bp, Homo sapiens
caccctgggagacag

SEQ ID NO: 1562298 - DNA, 15 bp, Homo sapiens
accctgggagacagg

SEQ ID NO: 1562299 - DNA, 15 bp, Homo sapiens
ccctgggagacaggc

SEQ ID NO: 1562300 - DNA, 15 bp, Homo sapiens
cctgggagacaggca

SEQ ID NO: 1562301 - DNA, 15 bp, Homo sapiens
ctgggagacaggcat

SEQ ID NO: 1562302 - DNA, 15 bp, Homo sapiens
tgggagacaggcatt

SEQ ID NO: 1562303 - DNA, 15 bp, Homo sapiens
gggagacaggcattc

SEQ ID NO: 1562304 - DNA, 15 bp, Homo sapiens
ggagacaggcattcc

SEQ ID NO: 1562305 - DNA, 15 bp, Homo sapiens
gagacaggcattcca

SEQ ID NO: 1562306 - DNA, 15 bp, Homo sapiens
agacaggcattccaa

SEQ ID NO: 1562307 - DNA, 15 bp, Homo sapiens
gacaggcattccaat

SEQ ID NO: 1562308 - DNA, 15 bp, Homo sapiens
acaggcattccaatg

SEQ ID NO: 1562309 - DNA, 15 bp, Homo sapiens
caggcattccaatga

SEQ ID NO: 1562310 - DNA, 15 bp, Homo sapiens
aggcattccaatgag

SEQ ID NO: 1562311 - DNA, 15 bp, Homo sapiens
ggcattccaatgagc

SEQ ID NO: 1562312 - DNA, 15 bp, Homo sapiens
gcattccaatgagcc

SEQ ID NO: 1562313 - DNA, 15 bp, Homo sapiens
cattccaatgagccc

SEQ ID NO: 1562314 - DNA, 15 bp, Homo sapiens
attccaatgagccca

SEQ ID NO: 1562315 - DNA, 15 bp, Homo sapiens
ttccaatgagcccat

SEQ ID NO: 1562316 - DNA, 15 bp, Homo sapiens
tccaatgagcccatt

SEQ ID NO: 1562317 - DNA, 15 bp, Homo sapiens
ccaatgagcccattt

SEQ ID NO: 1562318 - DNA, 15 bp, Homo sapiens
caatgagcccatttc

SEQ ID NO: 1562319 - DNA, 15 bp, Homo sapiens
aatgagcccatttca

SEQ ID NO: 1562320 - DNA, 15 bp, Homo sapiens
atgagcccatttcac

SEQ ID NO: 1562321 - DNA, 15 bp, Homo sapiens
tgagcccatttcaca

SEQ ID NO: 1562322 - DNA, 15 bp, Homo sapiens
gagcccatttcacag

SEQ ID NO: 1562323 - DNA, 15 bp, Homo sapiens
agcccatttcacaga

SEQ ID NO: 1562324 - DNA, 15 bp, Homo sapiens
gcccatttcacagat

SEQ ID NO: 1562325 - DNA, 15 bp, Homo sapiens
cccatttcacagatg

SEQ ID NO: 1562326 - DNA, 15 bp, Homo sapiens
ccatttcacagatga

SEQ ID NO: 1562327 - DNA, 15 bp, Homo sapiens
catttcacagatgaa

SEQ ID NO: 1562328 - DNA, 15 bp, Homo sapiens
atttcacagatgaag

SEQ ID NO: 1562329 - DNA, 15 bp, Homo sapiens
tttcacagatgaagg

SEQ ID NO: 1562330 - DNA, 15 bp, Homo sapiens
ttcacagatgaaggc

SEQ ID NO: 1562331 - DNA, 15 bp, Homo sapiens
tcacagatgaaggca

SEQ ID NO: 1562332 - DNA, 15 bp, Homo sapiens
cacagatgaaggcat

SEQ ID NO: 1562333 - DNA, 15 bp, Homo sapiens
acagatgaaggcatt

SEQ ID NO: 1562334 - DNA, 15 bp, Homo sapiens
cagatgaaggcattt

SEQ ID NO: 1562335 - DNA, 15 bp, Homo sapiens
agatgaaggcattta

SEQ ID NO: 1562336 - DNA, 15 bp, Homo sapiens
gatgaaggcatttag

SEQ ID NO: 1562337 - DNA, 15 bp, Homo sapiens
atgaaggcatttagg

SEQ ID NO: 1562338 - DNA, 15 bp, Homo sapiens
tgaaggcatttaggg

SEQ ID NO: 1562339 - DNA, 15 bp, Homo sapiens
gaaggcatttagggt

SEQ ID NO: 1562340 - DNA, 15 bp, Homo sapiens
aaggcatttagggtc

SEQ ID NO: 1562341 - DNA, 15 bp, Homo sapiens
aggcatttagggtca

SEQ ID NO: 1562342 - DNA, 15 bp, Homo sapiens
ggcatttagggtcaa

SEQ ID NO: 1562343 - DNA, 15 bp, Homo sapiens
gcatttagggtcaaa

SEQ ID NO: 1562344 - DNA, 15 bp, Homo sapiens
catttagggtcaaaa

SEQ ID NO: 1562345 - DNA, 15 bp, Homo sapiens
atttagggtcaaaac

SEQ ID NO: 1562346 - DNA, 15 bp, Homo sapiens
tttagggtcaaaaca

SEQ ID NO: 1562347 - DNA, 15 bp, Homo sapiens
ttagggtcaaaacaa

SEQ ID NO: 1562348 - DNA, 15 bp, Homo sapiens
tagggtcaaaacaat

SEQ ID NO: 1562349 - DNA, 15 bp, Homo sapiens
agggtcaaaacaata

SEQ ID NO: 1562350 - DNA, 15 bp, Homo sapiens
gggtcaaaacaataa

SEQ ID NO: 1562351 - DNA, 15 bp, Homo sapiens
ggtcaaaacaataag

SEQ ID NO: 1562352 - DNA, 15 bp, Homo sapiens
gtcaaaacaataagc

SEQ ID NO: 1562353 - DNA, 15 bp, Homo sapiens
tcaaaacaataagcc

SEQ ID NO: 1562354 - DNA, 15 bp, Homo sapiens
caaaacaataagcca

SEQ ID NO: 1562355 - DNA, 15 bp, Homo sapiens
aaaacaataagccaa

SEQ ID NO: 1562356 - DNA, 15 bp, Homo sapiens
aaacaataagccaaa

SEQ ID NO: 1562357 - DNA, 15 bp, Homo sapiens
aacaataagccaaag

SEQ ID NO: 1562358 - DNA, 15 bp, Homo sapiens
acaataagccaaagt

SEQ ID NO: 1562359 - DNA, 15 bp, Homo sapiens
caataagccaaagtc

SEQ ID NO: 1562360 - DNA, 15 bp, Homo sapiens
aataagccaaagtca

SEQ ID NO: 1562361 - DNA, 15 bp, Homo sapiens
ataagccaaagtcac

SEQ ID NO: 1562362 - DNA, 15 bp, Homo sapiens
taagccaaagtcacc

SEQ ID NO: 1562363 - DNA, 15 bp, Homo sapiens
aagccaaagtcaccc

SEQ ID NO: 1562364 - DNA, 15 bp, Homo sapiens
agccaaagtcaccca

SEQ ID NO: 1562365 - DNA, 15 bp, Homo sapiens
gccaaagtcacccag

SEQ ID NO: 1562366 - DNA, 15 bp, Homo sapiens
ccaaagtcacccagc

SEQ ID NO: 1562367 - DNA, 15 bp, Homo sapiens
caaagtcacccagct

SEQ ID NO: 1562368 - DNA, 15 bp, Homo sapiens
aaagtcacccagctg

SEQ ID NO: 1562369 - DNA, 15 bp, Homo sapiens
aagtcacccagctgg

SEQ ID NO: 1562370 - DNA, 15 bp, Homo sapiens
agtcacccagctggc

SEQ ID NO: 1562371 - DNA, 15 bp, Homo sapiens
gtcacccagctggca

SEQ ID NO: 1562372 - DNA, 15 bp, Homo sapiens
tcacccagctggcag

SEQ ID NO: 1562373 - DNA, 15 bp, Homo sapiens
cacccagctggcagg

SEQ ID NO: 1562374 - DNA, 15 bp, Homo sapiens
acccagctggcagga

SEQ ID NO: 1562375 - DNA, 15 bp, Homo sapiens
cccagctggcaggag

SEQ ID NO: 1562376 - DNA, 15 bp, Homo sapiens
ccagctggcaggagg

SEQ ID NO: 1562377 - DNA, 15 bp, Homo sapiens
cagctggcaggaggc

SEQ ID NO: 1562378 - DNA, 15 bp, Homo sapiens
agctggcaggaggcc

SEQ ID NO: 1562379 - DNA, 15 bp, Homo sapiens
gctggcaggaggcca

SEQ ID NO: 1562380 - DNA, 15 bp, Homo sapiens
ctggcaggaggccac

SEQ ID NO: 1562381 - DNA, 15 bp, Homo sapiens
tggcaggaggccacg

SEQ ID NO: 1562382 - DNA, 15 bp, Homo sapiens
ggcaggaggccacgc

SEQ ID NO: 1562383 - DNA, 15 bp, Homo sapiens
gcaggaggccacgct

SEQ ID NO: 1562384 - DNA, 15 bp, Homo sapiens
caggaggccacgctg

SEQ ID NO: 1562385 - DNA, 15 bp, Homo sapiens
aggaggccacgctgg

SEQ ID NO: 1562386 - DNA, 15 bp, Homo sapiens
ggaggccacgctgga

SEQ ID NO: 1562387 - DNA, 15 bp, Homo sapiens
gaggccacgctggaa

SEQ ID NO: 1562388 - DNA, 15 bp, Homo sapiens
aggccacgctggaat

SEQ ID NO: 1562389 - DNA, 15 bp, Homo sapiens
ggccacgctggaatc

SEQ ID NO: 1562390 - DNA, 15 bp, Homo sapiens
gccacgctggaatcc

SEQ ID NO: 1562391 - DNA, 15 bp, Homo sapiens
ccacgctggaatcca

SEQ ID NO: 1562392 - DNA, 15 bp, Homo sapiens
cacgctggaatccaa

SEQ ID NO: 1562393 - DNA, 15 bp, Homo sapiens
acgctggaatccaag

SEQ ID NO: 1562394 - DNA, 15 bp, Homo sapiens
cgctggaatccaagc

SEQ ID NO: 1562395 - DNA, 15 bp, Homo sapiens
gctggaatccaagct

SEQ ID NO: 1562396 - DNA, 15 bp, Homo sapiens
ctggaatccaagctc

SEQ ID NO: 1562397 - DNA, 15 bp, Homo sapiens
tggaatccaagctca

SEQ ID NO: 1562398 - DNA, 15 bp, Homo sapiens
ggaatccaagctcag

SEQ ID NO: 1562399 - DNA, 15 bp, Homo sapiens
gaatccaagctcagc

SEQ ID NO: 1562400 - DNA, 15 bp, Homo sapiens
aatccaagctcagca

SEQ ID NO: 1562401 - DNA, 15 bp, Homo sapiens
atccaagctcagcag

SEQ ID NO: 1562402 - DNA, 15 bp, Homo sapiens
tccaagctcagcaga

SEQ ID NO: 1562403 - DNA, 15 bp, Homo sapiens
ccaagctcagcagac

SEQ ID NO: 1562404 - DNA, 15 bp, Homo sapiens
caagctcagcagaca

SEQ ID NO: 1562405 - DNA, 15 bp, Homo sapiens
aagctcagcagacag

SEQ ID NO: 1562406 - DNA, 15 bp, Homo sapiens
agctcagcagacagt

SEQ ID NO: 1562407 - DNA, 15 bp, Homo sapiens
gctcagcagacagtg

SEQ ID NO: 1562408 - DNA, 15 bp, Homo sapiens
ctcagcagacagtga

SEQ ID NO: 1562409 - DNA, 15 bp, Homo sapiens
tcagcagacagtgaa

SEQ ID NO: 1562410 - DNA, 15 bp, Homo sapiens
cagcagacagtgaag

SEQ ID NO: 1562411 - DNA, 15 bp, Homo sapiens
agcagacagtgaaga

SEQ ID NO: 1562412 - DNA, 15 bp, Homo sapiens
gcagacagtgaagag

SEQ ID NO: 1562413 - DNA, 15 bp, Homo sapiens
cagacagtgaagagg

SEQ ID NO: 1562414 - DNA, 15 bp, Homo sapiens
agacagtgaagaggc

SEQ ID NO: 1562415 - DNA, 15 bp, Homo sapiens
gacagtgaagaggcc

SEQ ID NO: 1562416 - DNA, 15 bp, Homo sapiens
acagtgaagaggccc

SEQ ID NO: 1562417 - DNA, 15 bp, Homo sapiens
cagtgaagaggcccg

SEQ ID NO: 1562418 - DNA, 15 bp, Homo sapiens
agtgaagaggcccgt

SEQ ID NO: 1562419 - DNA, 15 bp, Homo sapiens
gtgaagaggcccgtt

SEQ ID NO: 1562420 - DNA, 15 bp, Homo sapiens
tgaagaggcccgttt

SEQ ID NO: 1562421 - DNA, 15 bp, Homo sapiens
gaagaggcccgtttg

SEQ ID NO: 1562422 - DNA, 15 bp, Homo sapiens
aagaggcccgtttgc

SEQ ID NO: 1562423 - DNA, 15 bp, Homo sapiens
agaggcccgtttgct

SEQ ID NO: 1562424 - DNA, 15 bp, Homo sapiens
gaggcccgtttgctc

SEQ ID NO: 1562425 - DNA, 15 bp, Homo sapiens
aggcccgtttgctct

SEQ ID NO: 1562426 - DNA, 15 bp, Homo sapiens
ggcccgtttgctctg

SEQ ID NO: 1562427 - DNA, 15 bp, Homo sapiens
gcccgtttgctctgc

SEQ ID NO: 1562428 - DNA, 15 bp, Homo sapiens
cccgtttgctctgct

SEQ ID NO: 1562429 - DNA, 15 bp, Homo sapiens
ccgtttgctctgctc

SEQ ID NO: 1562430 - DNA, 15 bp, Homo sapiens
cgtttgctctgctcc

SEQ ID NO: 1562431 - DNA, 15 bp, Homo sapiens
gtttgctctgctccc

SEQ ID NO: 1562432 - DNA, 15 bp, Homo sapiens
tttgctctgctccca

SEQ ID NO: 1562433 - DNA, 15 bp, Homo sapiens
ttgctctgctcccag

SEQ ID NO: 1562434 - DNA, 15 bp, Homo sapiens
tgctctgctcccagc

SEQ ID NO: 1562435 - DNA, 15 bp, Homo sapiens
gctctgctcccagcc

SEQ ID NO: 1562436 - DNA, 15 bp, Homo sapiens
ctctgctcccagcct

SEQ ID NO: 1562437 - DNA, 15 bp, Homo sapiens
tctgctcccagcctg

SEQ ID NO: 1562438 - DNA, 15 bp, Homo sapiens
ctgctcccagcctgt

SEQ ID NO: 1562439 - DNA, 15 bp, Homo sapiens
tgctcccagcctgtc

SEQ ID NO: 1562440 - DNA, 15 bp, Homo sapiens
gctcccagcctgtct

SEQ ID NO: 1562441 - DNA, 15 bp, Homo sapiens
ctcccagcctgtctg

SEQ ID NO: 1562442 - DNA, 15 bp, Homo sapiens
tcccagcctgtctgc

SEQ ID NO: 1562443 - DNA, 15 bp, Homo sapiens
cccagcctgtctgct

SEQ ID NO: 1562444 - DNA, 15 bp, Homo sapiens
ccagcctgtctgcta

SEQ ID NO: 1562445 - DNA, 15 bp, Homo sapiens
cagcctgtctgctag

SEQ ID NO: 1562446 - DNA, 15 bp, Homo sapiens
agcctgtctgctagg

SEQ ID NO: 1562447 - DNA, 15 bp, Homo sapiens
gcctgtctgctaggc

SEQ ID NO: 1562448 - DNA, 15 bp, Homo sapiens
cctgtctgctaggct

SEQ ID NO: 1562449 - DNA, 15 bp, Homo sapiens
ctgtctgctaggctt

SEQ ID NO: 1562450 - DNA, 15 bp, Homo sapiens
tgtctgctaggcttg

SEQ ID NO: 1562451 - DNA, 15 bp, Homo sapiens
gtctgctaggcttgc

SEQ ID NO: 1562452 - DNA, 15 bp, Homo sapiens
tctgctaggcttgca

SEQ ID NO: 1562453 - DNA, 15 bp, Homo sapiens
ctgctaggcttgcag

SEQ ID NO: 1562454 - DNA, 15 bp, Homo sapiens
tgctaggcttgcaga

SEQ ID NO: 1562455 - DNA, 15 bp, Homo sapiens
gctaggcttgcagaa

SEQ ID NO: 1562456 - DNA, 15 bp, Homo sapiens
ctaggcttgcagaaa

SEQ ID NO: 1562457 - DNA, 15 bp, Homo sapiens
taggcttgcagaaaa

SEQ ID NO: 1562458 - DNA, 15 bp, Homo sapiens
aggcttgcagaaaag

SEQ ID NO: 1562459 - DNA, 15 bp, Homo sapiens
ggcttgcagaaaagc

SEQ ID NO: 1562460 - DNA, 15 bp, Homo sapiens
gcttgcagaaaagca

SEQ ID NO: 1562461 - DNA, 15 bp, Homo sapiens
cttgcagaaaagcac

SEQ ID NO: 1562462 - DNA, 15 bp, Homo sapiens
ttgcagaaaagcact

SEQ ID NO: 1562463 - DNA, 15 bp, Homo sapiens
tgcagaaaagcactg

SEQ ID NO: 1562464 - DNA, 15 bp, Homo sapiens
gcagaaaagcactga

SEQ ID NO: 1562465 - DNA, 15 bp, Homo sapiens
cagaaaagcactgac

SEQ ID NO: 1562466 - DNA, 15 bp, Homo sapiens
agaaaagcactgact

SEQ ID NO: 1562467 - DNA, 15 bp, Homo sapiens
gaaaagcactgactc

SEQ ID NO: 1562468 - DNA, 15 bp, Homo sapiens
aaaagcactgactct

SEQ ID NO: 1562469 - DNA, 15 bp, Homo sapiens
aaagcactgactctt

SEQ ID NO: 1562470 - DNA, 15 bp, Homo sapiens
aagcactgactcttg

SEQ ID NO: 1562471 - DNA, 15 bp, Homo sapiens
agcactgactcttgt

SEQ ID NO: 1562472 - DNA, 15 bp, Homo sapiens
gcactgactcttgtc

SEQ ID NO: 1562473 - DNA, 15 bp, Homo sapiens
cactgactcttgtcc

SEQ ID NO: 1562474 - DNA, 15 bp, Homo sapiens
actgactcttgtcct

SEQ ID NO: 1562475 - DNA, 15 bp, Homo sapiens
ctgactcttgtcctc

SEQ ID NO: 1562476 - DNA, 15 bp, Homo sapiens
tgactcttgtcctct

SEQ ID NO: 1562477 - DNA, 15 bp, Homo sapiens
gactcttgtcctctg

SEQ ID NO: 1562478 - DNA, 15 bp, Homo sapiens
actcttgtcctctgg

SEQ ID NO: 1562479 - DNA, 15 bp, Homo sapiens
ctcttgtcctctggc

SEQ ID NO: 1562480 - DNA, 15 bp, Homo sapiens
tcttgtcctctggca

SEQ ID NO: 1562481 - DNA, 15 bp, Homo sapiens
cttgtcctctggcac

SEQ ID NO: 1562482 - DNA, 15 bp, Homo sapiens
ttgtcctctggcacc

SEQ ID NO: 1562483 - DNA, 15 bp, Homo sapiens
tgtcctctggcacct

SEQ ID NO: 1562484 - DNA, 15 bp, Homo sapiens
gtcctctggcacctg

SEQ ID NO: 1562485 - DNA, 15 bp, Homo sapiens
tcctctggcacctgc

SEQ ID NO: 1562486 - DNA, 15 bp, Homo sapiens
cctctggcacctgcc

SEQ ID NO: 1562487 - DNA, 15 bp, Homo sapiens
ctctggcacctgcca

SEQ ID NO: 1562488 - DNA, 15 bp, Homo sapiens
tctggcacctgccac

SEQ ID NO: 1562489 - DNA, 15 bp, Homo sapiens
ctggcacctgccacc

SEQ ID NO: 1562490 - DNA, 15 bp, Homo sapiens
tggcacctgccacct

SEQ ID NO: 1562491 - DNA, 15 bp, Homo sapiens
ggcacctgccacctg

SEQ ID NO: 1562492 - DNA, 15 bp, Homo sapiens
gcacctgccacctgc

SEQ ID NO: 1562493 - DNA, 15 bp, Homo sapiens
cacctgccacctgcc

SEQ ID NO: 1562494 - DNA, 15 bp, Homo sapiens
acctgccacctgcct

SEQ ID NO: 1562495 - DNA, 15 bp, Homo sapiens
cctgccacctgcctg

SEQ ID NO: 1562496 - DNA, 15 bp, Homo sapiens
ctgccacctgcctgt

SEQ ID NO: 1562497 - DNA, 15 bp, Homo sapiens
tgccacctgcctgtc

SEQ ID NO: 1562498 - DNA, 15 bp, Homo sapiens
gccacctgcctgtct

SEQ ID NO: 1562499 - DNA, 15 bp, Homo sapiens
ccacctgcctgtctg

SEQ ID NO: 1562500 - DNA, 15 bp, Homo sapiens
cacctgcctgtctgg

SEQ ID NO: 1562501 - DNA, 15 bp, Homo sapiens
acctgcctgtctggg

SEQ ID NO: 1562502 - DNA, 15 bp, Homo sapiens
cctgcctgtctgggg

SEQ ID NO: 1562503 - DNA, 15 bp, Homo sapiens
ctgcctgtctggggt

SEQ ID NO: 1562504 - DNA, 15 bp, Homo sapiens
tgcctgtctggggtg

SEQ ID NO: 1562505 - DNA, 15 bp, Homo sapiens
gcctgtctggggtgg

SEQ ID NO: 1562506 - DNA, 15 bp, Homo sapiens
cctgtctggggtggg

SEQ ID NO: 1562507 - DNA, 15 bp, Homo sapiens
ctgtctggggtggga

SEQ ID NO: 1562508 - DNA, 15 bp, Homo sapiens
tgtctggggtgggaa

SEQ ID NO: 1562509 - DNA, 15 bp, Homo sapiens
gtctggggtgggaaa

SEQ ID NO: 1562510 - DNA, 15 bp, Homo sapiens
tctggggtgggaaag

SEQ ID NO: 1562511 - DNA, 15 bp, Homo sapiens
ctggggtgggaaagg

SEQ ID NO: 1562512 - DNA, 15 bp, Homo sapiens
tggggtgggaaaggc

SEQ ID NO: 1562513 - DNA, 15 bp, Homo sapiens
ggggtgggaaaggcg

SEQ ID NO: 1562514 - DNA, 15 bp, Homo sapiens
gggtgggaaaggcga

SEQ ID NO: 1562515 - DNA, 15 bp, Homo sapiens
ggtgggaaaggcgag

SEQ ID NO: 1562516 - DNA, 15 bp, Homo sapiens
gtgggaaaggcgaga

SEQ ID NO: 1562517 - DNA, 15 bp, Homo sapiens
tgggaaaggcgagag

SEQ ID NO: 1562518 - DNA, 15 bp, Homo sapiens
gggaaaggcgagagg

SEQ ID NO: 1562519 - DNA, 15 bp, Homo sapiens
ggaaaggcgagagga

SEQ ID NO: 1562520 - DNA, 15 bp, Homo sapiens
gaaaggcgagaggac

SEQ ID NO: 1562521 - DNA, 15 bp, Homo sapiens
aaaggcgagaggaca

SEQ ID NO: 1562522 - DNA, 15 bp, Homo sapiens
aaggcgagaggacaa

SEQ ID NO: 1562523 - DNA, 15 bp, Homo sapiens
aggcgagaggacaag

SEQ ID NO: 1562524 - DNA, 15 bp, Homo sapiens
ggcgagaggacaagg

SEQ ID NO: 1562525 - DNA, 15 bp, Homo sapiens
gcgagaggacaaggg

SEQ ID NO: 1562526 - DNA, 15 bp, Homo sapiens
cgagaggacaagggt

SEQ ID NO: 1562527 - DNA, 15 bp, Homo sapiens
gagaggacaagggtg

SEQ ID NO: 1562528 - DNA, 15 bp, Homo sapiens
agaggacaagggtgc

SEQ ID NO: 1562529 - DNA, 15 bp, Homo sapiens
gaggacaagggtgct

SEQ ID NO: 1562530 - DNA, 15 bp, Homo sapiens
aggacaagggtgctg

SEQ ID NO: 1562531 - DNA, 15 bp, Homo sapiens
ggacaagggtgctgc

SEQ ID NO: 1562532 - DNA, 15 bp, Homo sapiens
gacaagggtgctgct

SEQ ID NO: 1562533 - DNA, 15 bp, Homo sapiens
acaagggtgctgctt

SEQ ID NO: 1562534 - DNA, 15 bp, Homo sapiens
caagggtgctgcttt

SEQ ID NO: 1562535 - DNA, 15 bp, Homo sapiens
aagggtgctgctttt

SEQ ID NO: 1562536 - DNA, 15 bp, Homo sapiens
agggtgctgcttttt

SEQ ID NO: 1562537 - DNA, 15 bp, Homo sapiens
gggtgctgctttttg

SEQ ID NO: 1562538 - DNA, 15 bp, Homo sapiens
ggtgctgctttttgt

SEQ ID NO: 1562539 - DNA, 15 bp, Homo sapiens
gtgctgctttttgtt

SEQ ID NO: 1562540 - DNA, 15 bp, Homo sapiens
tgctgctttttgtta

SEQ ID NO: 1562541 - DNA, 15 bp, Homo sapiens
gctgctttttgttat

SEQ ID NO: 1562542 - DNA, 15 bp, Homo sapiens
ctgctttttgttata

SEQ ID NO: 1562543 - DNA, 15 bp, Homo sapiens
tgctttttgttataa

SEQ ID NO: 1562544 - DNA, 15 bp, Homo sapiens
gctttttgttataat

SEQ ID NO: 1562545 - DNA, 15 bp, Homo sapiens
ctttttgttataatt

SEQ ID NO: 1562546 - DNA, 15 bp, Homo sapiens
tttttgttataattt

SEQ ID NO: 1562547 - DNA, 15 bp, Homo sapiens
ttttgttataatttg

SEQ ID NO: 1562548 - DNA, 15 bp, Homo sapiens
tttgttataatttga

SEQ ID NO: 1562549 - DNA, 15 bp, Homo sapiens
ttgttataatttgat

SEQ ID NO: 1562550 - DNA, 15 bp, Homo sapiens
tgttataatttgatt

SEQ ID NO: 1562551 - DNA, 15 bp, Homo sapiens
gttataatttgatta

SEQ ID NO: 1562552 - DNA, 15 bp, Homo sapiens
ttataatttgattaa

SEQ ID NO: 1562553 - DNA, 15 bp, Homo sapiens
tataatttgattaaa

SEQ ID NO: 1562554 - DNA, 15 bp, Homo sapiens
ataatttgattaaaa

SEQ ID NO: 1562555 - DNA, 15 bp, Homo sapiens
taatttgattaaaat

SEQ ID NO: 1562556 - DNA, 15 bp, Homo sapiens
aatttgattaaaatg

SEQ ID NO: 1562557 - DNA, 15 bp, Homo sapiens
atttgattaaaatgc

SEQ ID NO: 1562558 - DNA, 15 bp, Homo sapiens
tttgattaaaatgca

SEQ ID NO: 1562559 - DNA, 15 bp, Homo sapiens
ttgattaaaatgcat

SEQ ID NO: 1562560 - DNA, 15 bp, Homo sapiens
tgattaaaatgcatt

SEQ ID NO: 1562561 - DNA, 15 bp, Homo sapiens
gattaaaatgcattt

SEQ ID NO: 1562562 - DNA, 15 bp, Homo sapiens
attaaaatgcatttg

SEQ ID NO: 1562563 - DNA, 15 bp, Homo sapiens
ttaaaatgcatttgt

SEQ ID NO: 1562564 - DNA, 15 bp, Homo sapiens
taaaatgcatttgtg

SEQ ID NO: 1562565 - DNA, 15 bp, Homo sapiens
aaaatgcatttgtgg

SEQ ID NO: 1562566 - DNA, 15 bp, Homo sapiens
aaatgcatttgtggc

SEQ ID NO: 1562567 - DNA, 15 bp, Homo sapiens
aatgcatttgtggcc

SEQ ID NO: 1562568 - DNA, 15 bp, Homo sapiens
atgcatttgtggccg

SEQ ID NO: 1562569 - DNA, 15 bp, Homo sapiens
tgcatttgtggccgg

SEQ ID NO: 1562570 - DNA, 15 bp, Homo sapiens
gcatttgtggccggg

SEQ ID NO: 1562571 - DNA, 15 bp, Homo sapiens
catttgtggccgggc

SEQ ID NO: 1562572 - DNA, 15 bp, Homo sapiens
atttgtggccgggcg

SEQ ID NO: 1562573 - DNA, 15 bp, Homo sapiens
tttgtggccgggcgc

SEQ ID NO: 1562574 - DNA, 15 bp, Homo sapiens
ttgtggccgggcgcg

SEQ ID NO: 1562575 - DNA, 15 bp, Homo sapiens
tgtggccgggcgcgg

SEQ ID NO: 1562576 - DNA, 15 bp, Homo sapiens
gtggccgggcgcggt

SEQ ID NO: 1562577 - DNA, 15 bp, Homo sapiens
tggctcatgcctgtg

SEQ ID NO: 1562578 - DNA, 15 bp, Homo sapiens
ggctcatgcctgtga

SEQ ID NO: 1562579 - DNA, 15 bp, Homo sapiens
gctcatgcctgtgat

SEQ ID NO: 1562580 - DNA, 15 bp, Homo sapiens
ctcatgcctgtgatc

SEQ ID NO: 1562581 - DNA, 15 bp, Homo sapiens
tcatgcctgtgatcc

SEQ ID NO: 1562582 - DNA, 15 bp, Homo sapiens
catgcctgtgatccc

SEQ ID NO: 1562583 - DNA, 15 bp, Homo sapiens
atgcctgtgatccca

SEQ ID NO: 1562584 - DNA, 15 bp, Homo sapiens
tgcctgtgatcccag

SEQ ID NO: 1562585 - DNA, 15 bp, Homo sapiens
gcctgtgatcccagc

SEQ ID NO: 1562586 - DNA, 15 bp, Homo sapiens
gaggcaggcggatcg

SEQ ID NO: 1562587 - DNA, 15 bp, Homo sapiens
aggcaggcggatcgc

SEQ ID NO: 1562588 - DNA, 15 bp, Homo sapiens
ggcaggcggatcgct

SEQ ID NO: 1562589 - DNA, 15 bp, Homo sapiens
gcaggcggatcgctt

SEQ ID NO: 1562590 - DNA, 15 bp, Homo sapiens
caggcggatcgcttg

SEQ ID NO: 1562591 - DNA, 15 bp, Homo sapiens
aggcggatcgcttga

SEQ ID NO: 1562592 - DNA, 15 bp, Homo sapiens
ggcggatcgcttgag

SEQ ID NO: 1562593 - DNA, 15 bp, Homo sapiens
gcggatcgcttgagc

SEQ ID NO: 1562594 - DNA, 15 bp, Homo sapiens
cggatcgcttgagct

SEQ ID NO: 1562595 - DNA, 15 bp, Homo sapiens
ggatcgcttgagctc

SEQ ID NO: 1562596 - DNA, 15 bp, Homo sapiens
gatcgcttgagctca

SEQ ID NO: 1562597 - DNA, 15 bp, Homo sapiens
atcgcttgagctcaa

SEQ ID NO: 1562598 - DNA, 15 bp, Homo sapiens
tcgcttgagctcaag

SEQ ID NO: 1562599 - DNA, 15 bp, Homo sapiens
cgcttgagctcaaga

SEQ ID NO: 1562600 - DNA, 15 bp, Homo sapiens
ttgagctcaagagtt

SEQ ID NO: 1562601 - DNA, 15 bp, Homo sapiens
tgagctcaagagttt

SEQ ID NO: 1562602 - DNA, 15 bp, Homo sapiens
gagctcaagagtttg

SEQ ID NO: 1562603 - DNA, 15 bp, Homo sapiens
agctcaagagtttga

SEQ ID NO: 1562604 - DNA, 15 bp, Homo sapiens
gctcaagagtttgag

SEQ ID NO: 1562605 - DNA, 15 bp, Homo sapiens
ctcaagagtttgaga

SEQ ID NO: 1562606 - DNA, 15 bp, Homo sapiens
tcaagagtttgagac

SEQ ID NO: 1562607 - DNA, 15 bp, Homo sapiens
caagagtttgagacc

SEQ ID NO: 1562608 - DNA, 15 bp, Homo sapiens
aagagtttgagacct

SEQ ID NO: 1562609 - DNA, 15 bp, Homo sapiens
agagtttgagacctg

SEQ ID NO: 1562610 - DNA, 15 bp, Homo sapiens
gagtttgagacctgc

SEQ ID NO: 1562611 - DNA, 15 bp, Homo sapiens
agtttgagacctgcc

SEQ ID NO: 1562612 - DNA, 15 bp, Homo sapiens
gtttgagacctgcct

SEQ ID NO: 1562613 - DNA, 15 bp, Homo sapiens
tttgagacctgcctg

SEQ ID NO: 1562614 - DNA, 15 bp, Homo sapiens
ttgagacctgcctgg

SEQ ID NO: 1562615 - DNA, 15 bp, Homo sapiens
tgagacctgcctggg

SEQ ID NO: 1562616 - DNA, 15 bp, Homo sapiens
gagacctgcctgggc

SEQ ID NO: 1562617 - DNA, 15 bp, Homo sapiens
agacctgcctgggca

SEQ ID NO: 1562618 - DNA, 15 bp, Homo sapiens
gacctgcctgggcaa

SEQ ID NO: 1562619 - DNA, 15 bp, Homo sapiens
acctgcctgggcaac

SEQ ID NO: 1562620 - DNA, 15 bp, Homo sapiens
cctgcctgggcaaca

SEQ ID NO: 1562621 - DNA, 15 bp, Homo sapiens
ctgcctgggcaacat

SEQ ID NO: 1562622 - DNA, 15 bp, Homo sapiens
tgcctgggcaacata

SEQ ID NO: 1562623 - DNA, 15 bp, Homo sapiens
gggcaacatagtgaa

SEQ ID NO: 1562624 - DNA, 15 bp, Homo sapiens
ggcaacatagtgaaa

SEQ ID NO: 1562625 - DNA, 15 bp, Homo sapiens
gcaacatagtgaaac

SEQ ID NO: 1562626 - DNA, 15 bp, Homo sapiens
aaccctgtctctacc

SEQ ID NO: 1562627 - DNA, 15 bp, Homo sapiens
aaaaatacaaaaaag

SEQ ID NO: 1562628 - DNA, 15 bp, Homo sapiens
aaaatacaaaaaagt

SEQ ID NO: 1562629 - DNA, 15 bp, Homo sapiens
aaatacaaaaaagta

SEQ ID NO: 1562630 - DNA, 15 bp, Homo sapiens
aatacaaaaaagtag

SEQ ID NO: 1562631 - DNA, 15 bp, Homo sapiens
atacaaaaaagtagc

SEQ ID NO: 1562632 - DNA, 15 bp, Homo sapiens
tacaaaaaagtagcc

SEQ ID NO: 1562633 - DNA, 15 bp, Homo sapiens
acaaaaaagtagcca

SEQ ID NO: 1562634 - DNA, 15 bp, Homo sapiens
caaaaaagtagccag

SEQ ID NO: 1562635 - DNA, 15 bp, Homo sapiens
aaaaaagtagccagg

SEQ ID NO: 1562636 - DNA, 15 bp, Homo sapiens
agtagccaggcgtgt

SEQ ID NO: 1562637 - DNA, 15 bp, Homo sapiens
gtagccaggcgtgtt

SEQ ID NO: 1562638 - DNA, 15 bp, Homo sapiens
tagccaggcgtgttg

SEQ ID NO: 1562639 - DNA, 15 bp, Homo sapiens
agccaggcgtgttgg

SEQ ID NO: 1562640 - DNA, 15 bp, Homo sapiens
gccaggcgtgttggt

SEQ ID NO: 1562641 - DNA, 15 bp, Homo sapiens
ccaggcgtgttggtg

SEQ ID NO: 1562642 - DNA, 15 bp, Homo sapiens
caggcgtgttggtgt

SEQ ID NO: 1562643 - DNA, 15 bp, Homo sapiens
aggcgtgttggtgtg

SEQ ID NO: 1562644 - DNA, 15 bp, Homo sapiens
ggcgtgttggtgtgt

SEQ ID NO: 1562645 - DNA, 15 bp, Homo sapiens
gcgtgttggtgtgta

SEQ ID NO: 1562646 - DNA, 15 bp, Homo sapiens
cgtgttggtgtgtac

SEQ ID NO: 1562647 - DNA, 15 bp, Homo sapiens
gtgttggtgtgtacc

SEQ ID NO: 1562648 - DNA, 15 bp, Homo sapiens
tgttggtgtgtacct

SEQ ID NO: 1562649 - DNA, 15 bp, Homo sapiens
gttggtgtgtacctg

SEQ ID NO: 1562650 - DNA, 15 bp, Homo sapiens
ttggtgtgtacctgt

SEQ ID NO: 1562651 - DNA, 15 bp, Homo sapiens
tggtgtgtacctgtg

SEQ ID NO: 1562652 - DNA, 15 bp, Homo sapiens
ggtgtgtacctgtgg

SEQ ID NO: 1562653 - DNA, 15 bp, Homo sapiens
gtgtgtacctgtggt

SEQ ID NO: 1562654 - DNA, 15 bp, Homo sapiens
tgtgtacctgtggtc

SEQ ID NO: 1562655 - DNA, 15 bp, Homo sapiens
gtgtacctgtggtcc

SEQ ID NO: 1562656 - DNA, 15 bp, Homo sapiens
tgtacctgtggtccc

SEQ ID NO: 1562657 - DNA, 15 bp, Homo sapiens
gtacctgtggtccca

SEQ ID NO: 1562658 - DNA, 15 bp, Homo sapiens
tacctgtggtcccag

SEQ ID NO: 1562659 - DNA, 15 bp, Homo sapiens
acctgtggtcccagc

SEQ ID NO: 1562660 - DNA, 15 bp, Homo sapiens
tggtcccagctactt

SEQ ID NO: 1562661 - DNA, 15 bp, Homo sapiens
ggtcccagctactta

SEQ ID NO: 1562662 - DNA, 15 bp, Homo sapiens
ccagctacttaggaa

SEQ ID NO: 1562663 - DNA, 15 bp, Homo sapiens
cagctacttaggaag

SEQ ID NO: 1562664 - DNA, 15 bp, Homo sapiens
agctacttaggaagc

SEQ ID NO: 1562665 - DNA, 15 bp, Homo sapiens
gctacttaggaagct

SEQ ID NO: 1562666 - DNA, 15 bp, Homo sapiens
ctacttaggaagctg

SEQ ID NO: 1562667 - DNA, 15 bp, Homo sapiens
tacttaggaagctga

SEQ ID NO: 1562668 - DNA, 15 bp, Homo sapiens
acttaggaagctgag

SEQ ID NO: 1562669 - DNA, 15 bp, Homo sapiens
cttaggaagctgagg

SEQ ID NO: 1562670 - DNA, 15 bp, Homo sapiens
ttaggaagctgaggc

SEQ ID NO: 1562671 - DNA, 15 bp, Homo sapiens
taggaagctgaggca

SEQ ID NO: 1562672 - DNA, 15 bp, Homo sapiens
aggaagctgaggcag

SEQ ID NO: 1562673 - DNA, 15 bp, Homo sapiens
gaagctgaggcaggg

SEQ ID NO: 1562674 - DNA, 15 bp, Homo sapiens
aagctgaggcagggg

SEQ ID NO: 1562675 - DNA, 15 bp, Homo sapiens
agctgaggcaggggg

SEQ ID NO: 1562676 - DNA, 15 bp, Homo sapiens
gctgaggcaggggga

SEQ ID NO: 1562677 - DNA, 15 bp, Homo sapiens
ctgaggcagggggat

SEQ ID NO: 1562678 - DNA, 15 bp, Homo sapiens
tgaggcagggggatc

SEQ ID NO: 1562679 - DNA, 15 bp, Homo sapiens
gaggcagggggatcg

SEQ ID NO: 1562680 - DNA, 15 bp, Homo sapiens
aggcagggggatcgc

SEQ ID NO: 1562681 - DNA, 15 bp, Homo sapiens
ggcagggggatcgct

SEQ ID NO: 1562682 - DNA, 15 bp, Homo sapiens
gcagggggatcgctt

SEQ ID NO: 1562683 - DNA, 15 bp, Homo sapiens
cagggggatcgcttg

SEQ ID NO: 1562684 - DNA, 15 bp, Homo sapiens
agggggatcgcttga

SEQ ID NO: 1562685 - DNA, 15 bp, Homo sapiens
gggggatcgcttgaa

SEQ ID NO: 1562686 - DNA, 15 bp, Homo sapiens
ggggatcgcttgaac

SEQ ID NO: 1562687 - DNA, 15 bp, Homo sapiens
gggatcgcttgaacc

SEQ ID NO: 1562688 - DNA, 15 bp, Homo sapiens
tcgcttgaacctgga

SEQ ID NO: 1562689 - DNA, 15 bp, Homo sapiens
cgcttgaacctggaa

SEQ ID NO: 1562690 - DNA, 15 bp, Homo sapiens
ttgaacctggaaggt

SEQ ID NO: 1562691 - DNA, 15 bp, Homo sapiens
tgaacctggaaggtg

SEQ ID NO: 1562692 - DNA, 15 bp, Homo sapiens
gaacctggaaggtgg

SEQ ID NO: 1562693 - DNA, 15 bp, Homo sapiens
aacctggaaggtgga

SEQ ID NO: 1562694 - DNA, 15 bp, Homo sapiens
acctggaaggtggag

SEQ ID NO: 1562695 - DNA, 15 bp, Homo sapiens
cctggaaggtggagg

SEQ ID NO: 1562696 - DNA, 15 bp, Homo sapiens
ctggaaggtggaggt

SEQ ID NO: 1562697 - DNA, 15 bp, Homo sapiens
tggaaggtggaggtt

SEQ ID NO: 1562698 - DNA, 15 bp, Homo sapiens
ggaaggtggaggttg

SEQ ID NO: 1562699 - DNA, 15 bp, Homo sapiens
gaaggtggaggttgc

SEQ ID NO: 1562700 - DNA, 15 bp, Homo sapiens
tccagcctgggtgag

SEQ ID NO: 1562701 - DNA, 15 bp, Homo sapiens
ccagcctgggtgagc

SEQ ID NO: 1562702 - DNA, 15 bp, Homo sapiens
cagcctgggtgagcg

SEQ ID NO: 1562703 - DNA, 15 bp, Homo sapiens
agcctgggtgagcga

SEQ ID NO: 1562704 - DNA, 15 bp, Homo sapiens
gcctgggtgagcgag

SEQ ID NO: 1562705 - DNA, 15 bp, Homo sapiens
cctgggtgagcgaga

SEQ ID NO: 1562706 - DNA, 15 bp, Homo sapiens
ctgggtgagcgagac

SEQ ID NO: 1562707 - DNA, 15 bp, Homo sapiens
tgggtgagcgagacc

SEQ ID NO: 1562708 - DNA, 15 bp, Homo sapiens
gggtgagcgagaccg

SEQ ID NO: 1562709 - DNA, 15 bp, Homo sapiens
ggtgagcgagaccgt

SEQ ID NO: 1562710 - DNA, 15 bp, Homo sapiens
gtgagcgagaccgtg

SEQ ID NO: 1562711 - DNA, 15 bp, Homo sapiens
tgagcgagaccgtgt

SEQ ID NO: 1562712 - DNA, 15 bp, Homo sapiens
gagcgagaccgtgtc

SEQ ID NO: 1562713 - DNA, 15 bp, Homo sapiens
agcgagaccgtgtct

SEQ ID NO: 1562714 - DNA, 15 bp, Homo sapiens
gcgagaccgtgtctc

SEQ ID NO: 1562715 - DNA, 15 bp, Homo sapiens
cgagaccgtgtctca

SEQ ID NO: 1562716 - DNA, 15 bp, Homo sapiens
gagaccgtgtctcaa

SEQ ID NO: 1562717 - DNA, 15 bp, Homo sapiens
agaccgtgtctcaaa

SEQ ID NO: 1562718 - DNA, 15 bp, Homo sapiens
gaccgtgtctcaaaa

SEQ ID NO: 1562719 - DNA, 15 bp, Homo sapiens
accgtgtctcaaaaa

SEQ ID NO: 1562720 - DNA, 15 bp, Homo sapiens
ccgtgtctcaaaaaa

SEQ ID NO: 1562721 - DNA, 15 bp, Homo sapiens
cgtgtctcaaaaaaa

SEQ ID NO: 1562722 - DNA, 15 bp, Homo sapiens
gtgtctcaaaaaaaa

SEQ ID NO: 1562723 - DNA, 15 bp, Homo sapiens
aaaaaaaagtatttg

SEQ ID NO: 1562724 - DNA, 15 bp, Homo sapiens
aaaaaaagtatttgc

SEQ ID NO: 1562725 - DNA, 15 bp, Homo sapiens
aaaaaagtatttgca

SEQ ID NO: 1562726 - DNA, 15 bp, Homo sapiens
aaaaagtatttgcat

SEQ ID NO: 1562727 - DNA, 15 bp, Homo sapiens
aaaagtatttgcata

SEQ ID NO: 1562728 - DNA, 15 bp, Homo sapiens
aaagtatttgcatat

SEQ ID NO: 1562729 - DNA, 15 bp, Homo sapiens
aagtatttgcatatg

SEQ ID NO: 1562730 - DNA, 15 bp, Homo sapiens
agtatttgcatatga

SEQ ID NO: 1562731 - DNA, 15 bp, Homo sapiens
gtatttgcatatgac

SEQ ID NO: 1562732 - DNA, 15 bp, Homo sapiens
tatttgcatatgaca

SEQ ID NO: 1562733 - DNA, 15 bp, Homo sapiens
atttgcatatgacac

SEQ ID NO: 1562734 - DNA, 15 bp, Homo sapiens
tttgcatatgacact

SEQ ID NO: 1562735 - DNA, 15 bp, Homo sapiens
ttgcatatgacactt

SEQ ID NO: 1562736 - DNA, 15 bp, Homo sapiens
tgcatatgacacttt

SEQ ID NO: 1562737 - DNA, 15 bp, Homo sapiens
gcatatgacactttg

SEQ ID NO: 1562738 - DNA, 15 bp, Homo sapiens
catatgacactttgt

SEQ ID NO: 1562739 - DNA, 15 bp, Homo sapiens
atatgacactttgtt

SEQ ID NO: 1562740 - DNA, 15 bp, Homo sapiens
tatgacactttgtta

SEQ ID NO: 1562741 - DNA, 15 bp, Homo sapiens
atgacactttgttaa

SEQ ID NO: 1562742 - DNA, 15 bp, Homo sapiens
tgacactttgttaaa

SEQ ID NO: 1562743 - DNA, 15 bp, Homo sapiens
gacactttgttaaaa

SEQ ID NO: 1562744 - DNA, 15 bp, Homo sapiens
acactttgttaaaac

SEQ ID NO: 1562745 - DNA, 15 bp, Homo sapiens
cactttgttaaaaca

SEQ ID NO: 1562746 - DNA, 15 bp, Homo sapiens
actttgttaaaacag

SEQ ID NO: 1562747 - DNA, 15 bp, Homo sapiens
ctttgttaaaacagt

SEQ ID NO: 1562748 - DNA, 15 bp, Homo sapiens
tttgttaaaacagtg

SEQ ID NO: 1562749 - DNA, 15 bp, Homo sapiens
ttgttaaaacagtgc

SEQ ID NO: 1562750 - DNA, 15 bp, Homo sapiens
tgttaaaacagtgcc

SEQ ID NO: 1562751 - DNA, 15 bp, Homo sapiens
gttaaaacagtgcca

SEQ ID NO: 1562752 - DNA, 15 bp, Homo sapiens
ttaaaacagtgccat

SEQ ID NO: 1562753 - DNA, 15 bp, Homo sapiens
taaaacagtgccatg

SEQ ID NO: 1562754 - DNA, 15 bp, Homo sapiens
aaaacagtgccatgg

SEQ ID NO: 1562755 - DNA, 15 bp, Homo sapiens
aaacagtgccatggc

SEQ ID NO: 1562756 - DNA, 15 bp, Homo sapiens
aacagtgccatggct

SEQ ID NO: 1562757 - DNA, 15 bp, Homo sapiens
acagtgccatggctc

SEQ ID NO: 1562758 - DNA, 15 bp, Homo sapiens
cagtgccatggctca

SEQ ID NO: 1562759 - DNA, 15 bp, Homo sapiens
agtgccatggctcac

SEQ ID NO: 1562760 - DNA, 15 bp, Homo sapiens
gtgccatggctcacg

SEQ ID NO: 1562761 - DNA, 15 bp, Homo sapiens
tgccatggctcacgc

SEQ ID NO: 1562762 - DNA, 15 bp, Homo sapiens
gccatggctcacgct

SEQ ID NO: 1562763 - DNA, 15 bp, Homo sapiens
ccatggctcacgctt

SEQ ID NO: 1562764 - DNA, 15 bp, Homo sapiens
catggctcacgcttg

SEQ ID NO: 1562765 - DNA, 15 bp, Homo sapiens
atggctcacgcttgt

SEQ ID NO: 1562766 - DNA, 15 bp, Homo sapiens
cacgcttgtaatccc

SEQ ID NO: 1562767 - DNA, 15 bp, Homo sapiens
acgcttgtaatccca

SEQ ID NO: 1562768 - DNA, 15 bp, Homo sapiens
cgcttgtaatcccag

SEQ ID NO: 1562769 - DNA, 15 bp, Homo sapiens
ttgtaatcccagcat

SEQ ID NO: 1562770 - DNA, 15 bp, Homo sapiens
aatcccagcatttta

SEQ ID NO: 1562771 - DNA, 15 bp, Homo sapiens
atcccagcattttag

SEQ ID NO: 1562772 - DNA, 15 bp, Homo sapiens
tcccagcattttagg

SEQ ID NO: 1562773 - DNA, 15 bp, Homo sapiens
cccagcattttagga

SEQ ID NO: 1562774 - DNA, 15 bp, Homo sapiens
ccagcattttaggag

SEQ ID NO: 1562775 - DNA, 15 bp, Homo sapiens
cagcattttaggagg

SEQ ID NO: 1562776 - DNA, 15 bp, Homo sapiens
agcattttaggagga

SEQ ID NO: 1562777 - DNA, 15 bp, Homo sapiens
gcattttaggaggat

SEQ ID NO: 1562778 - DNA, 15 bp, Homo sapiens
cattttaggaggatc

SEQ ID NO: 1562779 - DNA, 15 bp, Homo sapiens
attttaggaggatca

SEQ ID NO: 1562780 - DNA, 15 bp, Homo sapiens
ttttaggaggatcac

SEQ ID NO: 1562781 - DNA, 15 bp, Homo sapiens
tttaggaggatcact

SEQ ID NO: 1562782 - DNA, 15 bp, Homo sapiens
ttaggaggatcactt

SEQ ID NO: 1562783 - DNA, 15 bp, Homo sapiens
taggaggatcacttg

SEQ ID NO: 1562784 - DNA, 15 bp, Homo sapiens
gttcgagaccagctt

SEQ ID NO: 1562785 - DNA, 15 bp, Homo sapiens
ttcgagaccagcttg

SEQ ID NO: 1562786 - DNA, 15 bp, Homo sapiens
tcgagaccagcttgg

SEQ ID NO: 1562787 - DNA, 15 bp, Homo sapiens
cgagaccagcttggg

SEQ ID NO: 1562788 - DNA, 15 bp, Homo sapiens
gagaccagcttgggc

SEQ ID NO: 1562789 - DNA, 15 bp, Homo sapiens
accagcttgggcaat

SEQ ID NO: 1562790 - DNA, 15 bp, Homo sapiens
ccagcttgggcaata

SEQ ID NO: 1562791 - DNA, 15 bp, Homo sapiens
cagcttgggcaatac

SEQ ID NO: 1562792 - DNA, 15 bp, Homo sapiens
agcttgggcaataca

SEQ ID NO: 1562793 - DNA, 15 bp, Homo sapiens
gcttgggcaatacaa

SEQ ID NO: 1562794 - DNA, 15 bp, Homo sapiens
cttgggcaatacaac

SEQ ID NO: 1562795 - DNA, 15 bp, Homo sapiens
ttgggcaatacaacc

SEQ ID NO: 1562796 - DNA, 15 bp, Homo sapiens
tgggcaatacaacca

SEQ ID NO: 1562797 - DNA, 15 bp, Homo sapiens
gggcaatacaaccag

SEQ ID NO: 1562798 - DNA, 15 bp, Homo sapiens
ggcaatacaaccaga

SEQ ID NO: 1562799 - DNA, 15 bp, Homo sapiens
gcaatacaaccagac

SEQ ID NO: 1562800 - DNA, 15 bp, Homo sapiens
caatacaaccagacc

SEQ ID NO: 1562801 - DNA, 15 bp, Homo sapiens
aatacaaccagaccc

SEQ ID NO: 1562802 - DNA, 15 bp, Homo sapiens
atacaaccagacccc

SEQ ID NO: 1562803 - DNA, 15 bp, Homo sapiens
tacaaccagacccca

SEQ ID NO: 1562804 - DNA, 15 bp, Homo sapiens
acaaccagaccccat

SEQ ID NO: 1562805 - DNA, 15 bp, Homo sapiens
caaccagaccccatc

SEQ ID NO: 1562806 - DNA, 15 bp, Homo sapiens
aaccagaccccatct

SEQ ID NO: 1562807 - DNA, 15 bp, Homo sapiens
accagaccccatctc

SEQ ID NO: 1562808 - DNA, 15 bp, Homo sapiens
ccagaccccatctct

SEQ ID NO: 1562809 - DNA, 15 bp, Homo sapiens
cagaccccatctcta

SEQ ID NO: 1562810 - DNA, 15 bp, Homo sapiens
atctctaccaaaaaa

SEQ ID NO: 1562811 - DNA, 15 bp, Homo sapiens
tctctaccaaaaaat

SEQ ID NO: 1562812 - DNA, 15 bp, Homo sapiens
ctctaccaaaaaata

SEQ ID NO: 1562813 - DNA, 15 bp, Homo sapiens
tctaccaaaaaataa

SEQ ID NO: 1562814 - DNA, 15 bp, Homo sapiens
ctaccaaaaaataaa

SEQ ID NO: 1562815 - DNA, 15 bp, Homo sapiens
accaaaaaataaaat

SEQ ID NO: 1562816 - DNA, 15 bp, Homo sapiens
ccaaaaaataaaata

SEQ ID NO: 1562817 - DNA, 15 bp, Homo sapiens
caaaaaataaaataa

SEQ ID NO: 1562818 - DNA, 15 bp, Homo sapiens
aataaaataaaatta

SEQ ID NO: 1562819 - DNA, 15 bp, Homo sapiens
ataaaataaaattag

SEQ ID NO: 1562820 - DNA, 15 bp, Homo sapiens
aaaataaaattagtc

SEQ ID NO: 1562821 - DNA, 15 bp, Homo sapiens
aaataaaattagtcg

SEQ ID NO: 1562822 - DNA, 15 bp, Homo sapiens
aataaaattagtcgg

SEQ ID NO: 1562823 - DNA, 15 bp, Homo sapiens
ataaaattagtcgga

SEQ ID NO: 1562824 - DNA, 15 bp, Homo sapiens
taaaattagtcggac

SEQ ID NO: 1562825 - DNA, 15 bp, Homo sapiens
aaaattagtcggaca

SEQ ID NO: 1562826 - DNA, 15 bp, Homo sapiens
aaattagtcggacac

SEQ ID NO: 1562827 - DNA, 15 bp, Homo sapiens
aattagtcggacacg

SEQ ID NO: 1562828 - DNA, 15 bp, Homo sapiens
attagtcggacacgg

SEQ ID NO: 1562829 - DNA, 15 bp, Homo sapiens
ttagtcggacacggt

SEQ ID NO: 1562830 - DNA, 15 bp, Homo sapiens
tagtcggacacggtg

SEQ ID NO: 1562831 - DNA, 15 bp, Homo sapiens
agtcggacacggtgg

SEQ ID NO: 1562832 - DNA, 15 bp, Homo sapiens
gtcggacacggtggt

SEQ ID NO: 1562833 - DNA, 15 bp, Homo sapiens
tcggacacggtggtg

SEQ ID NO: 1562834 - DNA, 15 bp, Homo sapiens
cggacacggtggtgt

SEQ ID NO: 1562835 - DNA, 15 bp, Homo sapiens
ggacacggtggtgtg

SEQ ID NO: 1562836 - DNA, 15 bp, Homo sapiens
gacacggtggtgtgc

SEQ ID NO: 1562837 - DNA, 15 bp, Homo sapiens
acacggtggtgtgca

SEQ ID NO: 1562838 - DNA, 15 bp, Homo sapiens
cacggtggtgtgcac

SEQ ID NO: 1562839 - DNA, 15 bp, Homo sapiens
acggtggtgtgcacc

SEQ ID NO: 1562840 - DNA, 15 bp, Homo sapiens
cggtggtgtgcacct

SEQ ID NO: 1562841 - DNA, 15 bp, Homo sapiens
tgtgcacctgtagtc

SEQ ID NO: 1562842 - DNA, 15 bp, Homo sapiens
gtgcacctgtagtcc

SEQ ID NO: 1562843 - DNA, 15 bp, Homo sapiens
cccagctactctggg

SEQ ID NO: 1562844 - DNA, 15 bp, Homo sapiens
ccagctactctgggg

SEQ ID NO: 1562845 - DNA, 15 bp, Homo sapiens
cagctactctgggga

SEQ ID NO: 1562846 - DNA, 15 bp, Homo sapiens
agctactctggggac

SEQ ID NO: 1562847 - DNA, 15 bp, Homo sapiens
gctactctggggact

SEQ ID NO: 1562848 - DNA, 15 bp, Homo sapiens
ctactctggggactt

SEQ ID NO: 1562849 - DNA, 15 bp, Homo sapiens
tactctggggactta

SEQ ID NO: 1562850 - DNA, 15 bp, Homo sapiens
actctggggacttaa

SEQ ID NO: 1562851 - DNA, 15 bp, Homo sapiens
ctctggggacttaag

SEQ ID NO: 1562852 - DNA, 15 bp, Homo sapiens
tctggggacttaagt

SEQ ID NO: 1562853 - DNA, 15 bp, Homo sapiens
ctggggacttaagtg

SEQ ID NO: 1562854 - DNA, 15 bp, Homo sapiens
tggggacttaagtgg

SEQ ID NO: 1562855 - DNA, 15 bp, Homo sapiens
ggggacttaagtggg

SEQ ID NO: 1562856 - DNA, 15 bp, Homo sapiens
gggacttaagtggga

SEQ ID NO: 1562857 - DNA, 15 bp, Homo sapiens
ggacttaagtgggag

SEQ ID NO: 1562858 - DNA, 15 bp, Homo sapiens
gacttaagtgggagg

SEQ ID NO: 1562859 - DNA, 15 bp, Homo sapiens
acttaagtgggagga

SEQ ID NO: 1562860 - DNA, 15 bp, Homo sapiens
cttaagtgggaggat

SEQ ID NO: 1562861 - DNA, 15 bp, Homo sapiens
ttaagtgggaggatc

SEQ ID NO: 1562862 - DNA, 15 bp, Homo sapiens
taagtgggaggatca

SEQ ID NO: 1562863 - DNA, 15 bp, Homo sapiens
aagtgggaggatcaa

SEQ ID NO: 1562864 - DNA, 15 bp, Homo sapiens
agtgggaggatcaat

SEQ ID NO: 1562865 - DNA, 15 bp, Homo sapiens
gtgggaggatcaatt

SEQ ID NO: 1562866 - DNA, 15 bp, Homo sapiens
tgggaggatcaattg

SEQ ID NO: 1562867 - DNA, 15 bp, Homo sapiens
gggaggatcaattga

SEQ ID NO: 1562868 - DNA, 15 bp, Homo sapiens
ggaggatcaattgag

SEQ ID NO: 1562869 - DNA, 15 bp, Homo sapiens
gaggatcaattgagc

SEQ ID NO: 1562870 - DNA, 15 bp, Homo sapiens
aggatcaattgagct

SEQ ID NO: 1562871 - DNA, 15 bp, Homo sapiens
ggatcaattgagctc

SEQ ID NO: 1562872 - DNA, 15 bp, Homo sapiens
gatcaattgagctca

SEQ ID NO: 1562873 - DNA, 15 bp, Homo sapiens
atcaattgagctcag

SEQ ID NO: 1562874 - DNA, 15 bp, Homo sapiens
tcaattgagctcagg

SEQ ID NO: 1562875 - DNA, 15 bp, Homo sapiens
caattgagctcagga

SEQ ID NO: 1562876 - DNA, 15 bp, Homo sapiens
aattgagctcaggag

SEQ ID NO: 1562877 - DNA, 15 bp, Homo sapiens
attgagctcaggagt

SEQ ID NO: 1562878 - DNA, 15 bp, Homo sapiens
ttgagctcaggagtt

SEQ ID NO: 1562879 - DNA, 15 bp, Homo sapiens
gagctcaggagttca

SEQ ID NO: 1562880 - DNA, 15 bp, Homo sapiens
tcaggagttcaaggc

SEQ ID NO: 1562881 - DNA, 15 bp, Homo sapiens
tgagccatgatcata

SEQ ID NO: 1562882 - DNA, 15 bp, Homo sapiens
gagccatgatcatac

SEQ ID NO: 1562883 - DNA, 15 bp, Homo sapiens
agccatgatcatacc

SEQ ID NO: 1562884 - DNA, 15 bp, Homo sapiens
gccatgatcatacca

SEQ ID NO: 1562885 - DNA, 15 bp, Homo sapiens
ccatgatcataccac

SEQ ID NO: 1562886 - DNA, 15 bp, Homo sapiens
catgatcataccact

SEQ ID NO: 1562887 - DNA, 15 bp, Homo sapiens
atgatcataccactg

SEQ ID NO: 1562888 - DNA, 15 bp, Homo sapiens
tgatcataccactgt

SEQ ID NO: 1562889 - DNA, 15 bp, Homo sapiens
gatcataccactgta

SEQ ID NO: 1562890 - DNA, 15 bp, Homo sapiens
atcataccactgtac

SEQ ID NO: 1562891 - DNA, 15 bp, Homo sapiens
tcataccactgtact

SEQ ID NO: 1562892 - DNA, 15 bp, Homo sapiens
cataccactgtactc

SEQ ID NO: 1562893 - DNA, 15 bp, Homo sapiens
ataccactgtactcc

SEQ ID NO: 1562894 - DNA, 15 bp, Homo sapiens
ctgtactccagctta

SEQ ID NO: 1562895 - DNA, 15 bp, Homo sapiens
tgtactccagcttag

SEQ ID NO: 1562896 - DNA, 15 bp, Homo sapiens
gtactccagcttagg

SEQ ID NO: 1562897 - DNA, 15 bp, Homo sapiens
tactccagcttaggt

SEQ ID NO: 1562898 - DNA, 15 bp, Homo sapiens
actccagcttaggtg

SEQ ID NO: 1562899 - DNA, 15 bp, Homo sapiens
ctccagcttaggtga

SEQ ID NO: 1562900 - DNA, 15 bp, Homo sapiens
tccagcttaggtgac

SEQ ID NO: 1562901 - DNA, 15 bp, Homo sapiens
ccagcttaggtgaca

SEQ ID NO: 1562902 - DNA, 15 bp, Homo sapiens
cagcttaggtgacag

SEQ ID NO: 1562903 - DNA, 15 bp, Homo sapiens
agcttaggtgacaga

SEQ ID NO: 1562904 - DNA, 15 bp, Homo sapiens
gcttaggtgacagag

SEQ ID NO: 1562905 - DNA, 15 bp, Homo sapiens
cttaggtgacagagt

SEQ ID NO: 1562906 - DNA, 15 bp, Homo sapiens
ttaggtgacagagta

SEQ ID NO: 1562907 - DNA, 15 bp, Homo sapiens
taggtgacagagtaa

SEQ ID NO: 1562908 - DNA, 15 bp, Homo sapiens
aggtgacagagtaag

SEQ ID NO: 1562909 - DNA, 15 bp, Homo sapiens
ggtgacagagtaaga

SEQ ID NO: 1562910 - DNA, 15 bp, Homo sapiens
gtgacagagtaagac

SEQ ID NO: 1562911 - DNA, 15 bp, Homo sapiens
tgacagagtaagacc

SEQ ID NO: 1562912 - DNA, 15 bp, Homo sapiens
gacagagtaagaccc

SEQ ID NO: 1562913 - DNA, 15 bp, Homo sapiens
acagagtaagaccct

SEQ ID NO: 1562914 - DNA, 15 bp, Homo sapiens
cagagtaagaccctg

SEQ ID NO: 1562915 - DNA, 15 bp, Homo sapiens
agagtaagaccctgt

SEQ ID NO: 1562916 - DNA, 15 bp, Homo sapiens
gagtaagaccctgtg

SEQ ID NO: 1562917 - DNA, 15 bp, Homo sapiens
agtaagaccctgtgt

SEQ ID NO: 1562918 - DNA, 15 bp, Homo sapiens
gtaagaccctgtgtc

SEQ ID NO: 1562919 - DNA, 15 bp, Homo sapiens
taagaccctgtgtct

SEQ ID NO: 1562920 - DNA, 15 bp, Homo sapiens
aagaccctgtgtcta

SEQ ID NO: 1562921 - DNA, 15 bp, Homo sapiens
agaccctgtgtctaa

SEQ ID NO: 1562922 - DNA, 15 bp, Homo sapiens
gaccctgtgtctaaa

SEQ ID NO: 1562923 - DNA, 15 bp, Homo sapiens
accctgtgtctaaaa

SEQ ID NO: 1562924 - DNA, 15 bp, Homo sapiens
ccctgtgtctaaaaa

SEQ ID NO: 1562925 - DNA, 15 bp, Homo sapiens
cctgtgtctaaaaag

SEQ ID NO: 1562926 - DNA, 15 bp, Homo sapiens
ctgtgtctaaaaagc

SEQ ID NO: 1562927 - DNA, 15 bp, Homo sapiens
tgtgtctaaaaagca

SEQ ID NO: 1562928 - DNA, 15 bp, Homo sapiens
gtgtctaaaaagcaa

SEQ ID NO: 1562929 - DNA, 15 bp, Homo sapiens
tgtctaaaaagcaaa

SEQ ID NO: 1562930 - DNA, 15 bp, Homo sapiens
gtctaaaaagcaaac

SEQ ID NO: 1562931 - DNA, 15 bp, Homo sapiens
tctaaaaagcaaaca

SEQ ID NO: 1562932 - DNA, 15 bp, Homo sapiens
ctaaaaagcaaacaa

SEQ ID NO: 1562933 - DNA, 15 bp, Homo sapiens
taaaaagcaaacaaa

SEQ ID NO: 1562934 - DNA, 15 bp, Homo sapiens
aaaaagcaaacaaac

SEQ ID NO: 1562935 - DNA, 15 bp, Homo sapiens
aaagcaaacaaacaa

SEQ ID NO: 1562936 - DNA, 15 bp, Homo sapiens
aagcaaacaaacaaa

SEQ ID NO: 1562937 - DNA, 15 bp, Homo sapiens
agcaaacaaacaaaa

SEQ ID NO: 1562938 - DNA, 15 bp, Homo sapiens
gcaaacaaacaaaaa

SEQ ID NO: 1562939 - DNA, 15 bp, Homo sapiens
aacaaacaaaaaaca

SEQ ID NO: 1562940 - DNA, 15 bp, Homo sapiens
acaaacaaaaaacaa

SEQ ID NO: 1562941 - DNA, 15 bp, Homo sapiens
caaacaaaaaacaaa

SEQ ID NO: 1562942 - DNA, 15 bp, Homo sapiens
acaaaaaacaaacag

SEQ ID NO: 1562943 - DNA, 15 bp, Homo sapiens
caaaaaacaaacagt

SEQ ID NO: 1562944 - DNA, 15 bp, Homo sapiens
aaaaaacaaacagtt

SEQ ID NO: 1562945 - DNA, 15 bp, Homo sapiens
aaaaacaaacagtta

SEQ ID NO: 1562946 - DNA, 15 bp, Homo sapiens
aaaacaaacagttat

SEQ ID NO: 1562947 - DNA, 15 bp, Homo sapiens
aaacaaacagttatt

SEQ ID NO: 1562948 - DNA, 15 bp, Homo sapiens
aacaaacagttattg

SEQ ID NO: 1562949 - DNA, 15 bp, Homo sapiens
acaaacagttattga

SEQ ID NO: 1562950 - DNA, 15 bp, Homo sapiens
caaacagttattgag

SEQ ID NO: 1562951 - DNA, 15 bp, Homo sapiens
aaacagttattgagt

SEQ ID NO: 1562952 - DNA, 15 bp, Homo sapiens
aacagttattgagtg

SEQ ID NO: 1562953 - DNA, 15 bp, Homo sapiens
acagttattgagtga

SEQ ID NO: 1562954 - DNA, 15 bp, Homo sapiens
cagttattgagtgaa

SEQ ID NO: 1562955 - DNA, 15 bp, Homo sapiens
agttattgagtgaaa

SEQ ID NO: 1562956 - DNA, 15 bp, Homo sapiens
gttattgagtgaaaa

SEQ ID NO: 1562957 - DNA, 15 bp, Homo sapiens
ttattgagtgaaaaa

SEQ ID NO: 1562958 - DNA, 15 bp, Homo sapiens
tattgagtgaaaaac

SEQ ID NO: 1562959 - DNA, 15 bp, Homo sapiens
attgagtgaaaaaca

SEQ ID NO: 1562960 - DNA, 15 bp, Homo sapiens
ttgagtgaaaaacaa

SEQ ID NO: 1562961 - DNA, 15 bp, Homo sapiens
tgagtgaaaaacaaa

SEQ ID NO: 1562962 - DNA, 15 bp, Homo sapiens
gagtgaaaaacaaaa

SEQ ID NO: 1562963 - DNA, 15 bp, Homo sapiens
agtgaaaaacaaaac

SEQ ID NO: 1562964 - DNA, 15 bp, Homo sapiens
gtgaaaaacaaaaca

SEQ ID NO: 1562965 - DNA, 15 bp, Homo sapiens
tgaaaaacaaaacag

SEQ ID NO: 1562966 - DNA, 15 bp, Homo sapiens
gaaaaacaaaacaga

SEQ ID NO: 1562967 - DNA, 15 bp, Homo sapiens
aaaaacaaaacagag

SEQ ID NO: 1562968 - DNA, 15 bp, Homo sapiens
aaaacaaaacagaga

SEQ ID NO: 1562969 - DNA, 15 bp, Homo sapiens
aaacaaaacagagaa

SEQ ID NO: 1562970 - DNA, 15 bp, Homo sapiens
aacaaaacagagaag

SEQ ID NO: 1562971 - DNA, 15 bp, Homo sapiens
acaaaacagagaagt

SEQ ID NO: 1562972 - DNA, 15 bp, Homo sapiens
caaaacagagaagtg

SEQ ID NO: 1562973 - DNA, 15 bp, Homo sapiens
aaaacagagaagtgg

SEQ ID NO: 1562974 - DNA, 15 bp, Homo sapiens
aaacagagaagtggc

SEQ ID NO: 1562975 - DNA, 15 bp, Homo sapiens
aacagagaagtggct

SEQ ID NO: 1562976 - DNA, 15 bp, Homo sapiens
acagagaagtggctt

SEQ ID NO: 1562977 - DNA, 15 bp, Homo sapiens
cagagaagtggctta

SEQ ID NO: 1562978 - DNA, 15 bp, Homo sapiens
agagaagtggcttat

SEQ ID NO: 1562979 - DNA, 15 bp, Homo sapiens
gagaagtggcttatc

SEQ ID NO: 1562980 - DNA, 15 bp, Homo sapiens
agaagtggcttatcc

SEQ ID NO: 1562981 - DNA, 15 bp, Homo sapiens
gaagtggcttatcca

SEQ ID NO: 1562982 - DNA, 15 bp, Homo sapiens
aagtggcttatccac

SEQ ID NO: 1562983 - DNA, 15 bp, Homo sapiens
agtggcttatccact

SEQ ID NO: 1562984 - DNA, 15 bp, Homo sapiens
gtggcttatccactg

SEQ ID NO: 1562985 - DNA, 15 bp, Homo sapiens
tggcttatccactgt

SEQ ID NO: 1562986 - DNA, 15 bp, Homo sapiens
ggcttatccactgtc

SEQ ID NO: 1562987 - DNA, 15 bp, Homo sapiens
gcttatccactgtca

SEQ ID NO: 1562988 - DNA, 15 bp, Homo sapiens
cttatccactgtcac

SEQ ID NO: 1562989 - DNA, 15 bp, Homo sapiens
ttatccactgtcact

SEQ ID NO: 1562990 - DNA, 15 bp, Homo sapiens
tatccactgtcactg

SEQ ID NO: 1562991 - DNA, 15 bp, Homo sapiens
atccactgtcactgg

SEQ ID NO: 1562992 - DNA, 15 bp, Homo sapiens
tccactgtcactggg

SEQ ID NO: 1562993 - DNA, 15 bp, Homo sapiens
ccactgtcactgggc

SEQ ID NO: 1562994 - DNA, 15 bp, Homo sapiens
cactgtcactgggca

SEQ ID NO: 1562995 - DNA, 15 bp, Homo sapiens
actgtcactgggcaa

SEQ ID NO: 1562996 - DNA, 15 bp, Homo sapiens
ctgtcactgggcaag

SEQ ID NO: 1562997 - DNA, 15 bp, Homo sapiens
tgtcactgggcaagt

SEQ ID NO: 1562998 - DNA, 15 bp, Homo sapiens
gtcactgggcaagtt

SEQ ID NO: 1562999 - DNA, 15 bp, Homo sapiens
tcactgggcaagttc

SEQ ID NO: 1563000 - DNA, 15 bp, Homo sapiens
cactgggcaagttca

SEQ ID NO: 1563001 - DNA, 15 bp, Homo sapiens
actgggcaagttcac

SEQ ID NO: 1563002 - DNA, 15 bp, Homo sapiens
ctgggcaagttcacg

SEQ ID NO: 1563003 - DNA, 15 bp, Homo sapiens
tgggcaagttcacgg

SEQ ID NO: 1563004 - DNA, 15 bp, Homo sapiens
gggcaagttcacggc

SEQ ID NO: 1563005 - DNA, 15 bp, Homo sapiens
ggcaagttcacggct

SEQ ID NO: 1563006 - DNA, 15 bp, Homo sapiens
gcaagttcacggctt

SEQ ID NO: 1563007 - DNA, 15 bp, Homo sapiens
caagttcacggctta

SEQ ID NO: 1563008 - DNA, 15 bp, Homo sapiens
aagttcacggcttat

SEQ ID NO: 1563009 - DNA, 15 bp, Homo sapiens
agttcacggcttatg

SEQ ID NO: 1563010 - DNA, 15 bp, Homo sapiens
gttcacggcttatgc

SEQ ID NO: 1563011 - DNA, 15 bp, Homo sapiens
ttcacggcttatgct

SEQ ID NO: 1563012 - DNA, 15 bp, Homo sapiens
tcacggcttatgctg

SEQ ID NO: 1563013 - DNA, 15 bp, Homo sapiens
cacggcttatgctgg

SEQ ID NO: 1563014 - DNA, 15 bp, Homo sapiens
acggcttatgctggg

SEQ ID NO: 1563015 - DNA, 15 bp, Homo sapiens
cggcttatgctggga

SEQ ID NO: 1563016 - DNA, 15 bp, Homo sapiens
ggcttatgctgggat

SEQ ID NO: 1563017 - DNA, 15 bp, Homo sapiens
gcttatgctgggatg

SEQ ID NO: 1563018 - DNA, 15 bp, Homo sapiens
cttatgctgggatgg

SEQ ID NO: 1563019 - DNA, 15 bp, Homo sapiens
ttatgctgggatggg

SEQ ID NO: 1563020 - DNA, 15 bp, Homo sapiens
tatgctgggatggga

SEQ ID NO: 1563021 - DNA, 15 bp, Homo sapiens
atgctgggatgggaa

SEQ ID NO: 1563022 - DNA, 15 bp, Homo sapiens
tgctgggatgggaac

SEQ ID NO: 1563023 - DNA, 15 bp, Homo sapiens
gctgggatgggaaca

SEQ ID NO: 1563024 - DNA, 15 bp, Homo sapiens
ctgggatgggaacat

SEQ ID NO: 1563025 - DNA, 15 bp, Homo sapiens
tgggatgggaacatg

SEQ ID NO: 1563026 - DNA, 15 bp, Homo sapiens
gggatgggaacatgg

SEQ ID NO: 1563027 - DNA, 15 bp, Homo sapiens
ggatgggaacatggg

SEQ ID NO: 1563028 - DNA, 15 bp, Homo sapiens
gatgggaacatgggt

SEQ ID NO: 1563029 - DNA, 15 bp, Homo sapiens
atgggaacatgggtc

SEQ ID NO: 1563030 - DNA, 15 bp, Homo sapiens
tgggaacatgggtct

SEQ ID NO: 1563031 - DNA, 15 bp, Homo sapiens
gggaacatgggtctc

SEQ ID NO: 1563032 - DNA, 15 bp, Homo sapiens
ggaacatgggtctcc

SEQ ID NO: 1563033 - DNA, 15 bp, Homo sapiens
gaacatgggtctcct

SEQ ID NO: 1563034 - DNA, 15 bp, Homo sapiens
aacatgggtctcctg

SEQ ID NO: 1563035 - DNA, 15 bp, Homo sapiens
acatgggtctcctga

SEQ ID NO: 1563036 - DNA, 15 bp, Homo sapiens
catgggtctcctgac

SEQ ID NO: 1563037 - DNA, 15 bp, Homo sapiens
atgggtctcctgact

SEQ ID NO: 1563038 - DNA, 15 bp, Homo sapiens
tgggtctcctgactg

SEQ ID NO: 1563039 - DNA, 15 bp, Homo sapiens
gggtctcctgactgt

SEQ ID NO: 1563040 - DNA, 15 bp, Homo sapiens
gtctcctgactgtgg

SEQ ID NO: 1563041 - DNA, 15 bp, Homo sapiens
tctcctgactgtggt

SEQ ID NO: 1563042 - DNA, 15 bp, Homo sapiens
ctcctgactgtggtc

SEQ ID NO: 1563043 - DNA, 15 bp, Homo sapiens
tcctgactgtggtca

SEQ ID NO: 1563044 - DNA, 15 bp, Homo sapiens
cctgactgtggtcag

SEQ ID NO: 1563045 - DNA, 15 bp, Homo sapiens
ctgactgtggtcagt

SEQ ID NO: 1563046 - DNA, 15 bp, Homo sapiens
tgactgtggtcagta

SEQ ID NO: 1563047 - DNA, 15 bp, Homo sapiens
gactgtggtcagtac

SEQ ID NO: 1563048 - DNA, 15 bp, Homo sapiens
actgtggtcagtact

SEQ ID NO: 1563049 - DNA, 15 bp, Homo sapiens
ctgtggtcagtactt

SEQ ID NO: 1563050 - DNA, 15 bp, Homo sapiens
tgtggtcagtacttc

SEQ ID NO: 1563051 - DNA, 15 bp, Homo sapiens
gtggtcagtacttct

SEQ ID NO: 1563052 - DNA, 15 bp, Homo sapiens
tggtcagtacttctg

SEQ ID NO: 1563053 - DNA, 15 bp, Homo sapiens
ggtcagtacttctgt

SEQ ID NO: 1563054 - DNA, 15 bp, Homo sapiens
gtcagtacttctgtt

SEQ ID NO: 1563055 - DNA, 15 bp, Homo sapiens
tcagtacttctgttc

SEQ ID NO: 1563056 - DNA, 15 bp, Homo sapiens
cagtacttctgttcc

SEQ ID NO: 1563057 - DNA, 15 bp, Homo sapiens
agtacttctgttccc

SEQ ID NO: 1563058 - DNA, 15 bp, Homo sapiens
gtacttctgttccca

SEQ ID NO: 1563059 - DNA, 15 bp, Homo sapiens
tacttctgttcccaa

SEQ ID NO: 1563060 - DNA, 15 bp, Homo sapiens
acttctgttcccaaa

SEQ ID NO: 1563061 - DNA, 15 bp, Homo sapiens
cttctgttcccaaat

SEQ ID NO: 1563062 - DNA, 15 bp, Homo sapiens
ttctgttcccaaata

SEQ ID NO: 1563063 - DNA, 15 bp, Homo sapiens
tctgttcccaaatac

SEQ ID NO: 1563064 - DNA, 15 bp, Homo sapiens
ctgttcccaaatacc

SEQ ID NO: 1563065 - DNA, 15 bp, Homo sapiens
tgttcccaaataccc

SEQ ID NO: 1563066 - DNA, 15 bp, Homo sapiens
gttcccaaataccct

SEQ ID NO: 1563067 - DNA, 15 bp, Homo sapiens
ttcccaaataccctg

SEQ ID NO: 1563068 - DNA, 15 bp, Homo sapiens
tcccaaataccctgc

SEQ ID NO: 1563069 - DNA, 15 bp, Homo sapiens
cccaaataccctgcc

SEQ ID NO: 1563070 - DNA, 15 bp, Homo sapiens
ccaaataccctgcca

SEQ ID NO: 1563071 - DNA, 15 bp, Homo sapiens
caaataccctgccac

SEQ ID NO: 1563072 - DNA, 15 bp, Homo sapiens
aaataccctgccaca

SEQ ID NO: 1563073 - DNA, 15 bp, Homo sapiens
aataccctgccacag

SEQ ID NO: 1563074 - DNA, 15 bp, Homo sapiens
ataccctgccacagc

SEQ ID NO: 1563075 - DNA, 15 bp, Homo sapiens
taccctgccacagcc

SEQ ID NO: 1563076 - DNA, 15 bp, Homo sapiens
accctgccacagcct

SEQ ID NO: 1563077 - DNA, 15 bp, Homo sapiens
ccctgccacagcctc

SEQ ID NO: 1563078 - DNA, 15 bp, Homo sapiens
cctgccacagcctct

SEQ ID NO: 1563079 - DNA, 15 bp, Homo sapiens
ctgccacagcctcta

SEQ ID NO: 1563080 - DNA, 15 bp, Homo sapiens
tgccacagcctctag

SEQ ID NO: 1563081 - DNA, 15 bp, Homo sapiens
gccacagcctctagc

SEQ ID NO: 1563082 - DNA, 15 bp, Homo sapiens
ccacagcctctagcc

SEQ ID NO: 1563083 - DNA, 15 bp, Homo sapiens
cacagcctctagcct

SEQ ID NO: 1563084 - DNA, 15 bp, Homo sapiens
acagcctctagcctg

SEQ ID NO: 1563085 - DNA, 15 bp, Homo sapiens
cagcctctagcctgg

SEQ ID NO: 1563086 - DNA, 15 bp, Homo sapiens
agcctctagcctggg

SEQ ID NO: 1563087 - DNA, 15 bp, Homo sapiens
gcctctagcctgggc

SEQ ID NO: 1563088 - DNA, 15 bp, Homo sapiens
cctctagcctgggca

SEQ ID NO: 1563089 - DNA, 15 bp, Homo sapiens
ctctagcctgggcac

SEQ ID NO: 1563090 - DNA, 15 bp, Homo sapiens
tctagcctgggcact

SEQ ID NO: 1563091 - DNA, 15 bp, Homo sapiens
ctagcctgggcactg

SEQ ID NO: 1563092 - DNA, 15 bp, Homo sapiens
tagcctgggcactgg

SEQ ID NO: 1563093 - DNA, 15 bp, Homo sapiens
agcctgggcactggg

SEQ ID NO: 1563094 - DNA, 15 bp, Homo sapiens
gcctgggcactgggc

SEQ ID NO: 1563095 - DNA, 15 bp, Homo sapiens
cctgggcactgggct

SEQ ID NO: 1563096 - DNA, 15 bp, Homo sapiens
ctgggcactgggctg

SEQ ID NO: 1563097 - DNA, 15 bp, Homo sapiens
tgggcactgggctgt

SEQ ID NO: 1563098 - DNA, 15 bp, Homo sapiens
gggcactgggctgtt

SEQ ID NO: 1563099 - DNA, 15 bp, Homo sapiens
ggcactgggctgttc

SEQ ID NO: 1563100 - DNA, 15 bp, Homo sapiens
gcactgggctgttcc

SEQ ID NO: 1563101 - DNA, 15 bp, Homo sapiens
cactgggctgttcct

SEQ ID NO: 1563102 - DNA, 15 bp, Homo sapiens
actgggctgttcctg

SEQ ID NO: 1563103 - DNA, 15 bp, Homo sapiens
ctgggctgttcctgc

SEQ ID NO: 1563104 - DNA, 15 bp, Homo sapiens
tgggctgttcctgct

SEQ ID NO: 1563105 - DNA, 15 bp, Homo sapiens
gggctgttcctgctt

SEQ ID NO: 1563106 - DNA, 15 bp, Homo sapiens
ggctgttcctgcttc

SEQ ID NO: 1563107 - DNA, 15 bp, Homo sapiens
gctgttcctgcttct

SEQ ID NO: 1563108 - DNA, 15 bp, Homo sapiens
ctgttcctgcttctc

SEQ ID NO: 1563109 - DNA, 15 bp, Homo sapiens
tgttcctgcttctcc

SEQ ID NO: 1563110 - DNA, 15 bp, Homo sapiens
gttcctgcttctcct

SEQ ID NO: 1563111 - DNA, 15 bp, Homo sapiens
ttcctgcttctcctc

SEQ ID NO: 1563112 - DNA, 15 bp, Homo sapiens
tcctgcttctcctcc

SEQ ID NO: 1563113 - DNA, 15 bp, Homo sapiens
cctgcttctcctccc

SEQ ID NO: 1563114 - DNA, 15 bp, Homo sapiens
ctgcttctcctccct

SEQ ID NO: 1563115 - DNA, 15 bp, Homo sapiens
tgcttctcctccctc

SEQ ID NO: 1563116 - DNA, 15 bp, Homo sapiens
gcttctcctccctca

SEQ ID NO: 1563117 - DNA, 15 bp, Homo sapiens
cttctcctccctcat

SEQ ID NO: 1563118 - DNA, 15 bp, Homo sapiens
ttctcctccctcatt

SEQ ID NO: 1563119 - DNA, 15 bp, Homo sapiens
tctcctccctcatta

SEQ ID NO: 1563120 - DNA, 15 bp, Homo sapiens
ctcctccctcattac

SEQ ID NO: 1563121 - DNA, 15 bp, Homo sapiens
tcctccctcattacc

SEQ ID NO: 1563122 - DNA, 15 bp, Homo sapiens
cctccctcattaccc

SEQ ID NO: 1563123 - DNA, 15 bp, Homo sapiens
ctccctcattacccc

SEQ ID NO: 1563124 - DNA, 15 bp, Homo sapiens
tccctcattaccccc

SEQ ID NO: 1563125 - DNA, 15 bp, Homo sapiens
ccctcattacccccc

SEQ ID NO: 1563126 - DNA, 15 bp, Homo sapiens
cctcattaccccccc

SEQ ID NO: 1563127 - DNA, 15 bp, Homo sapiens
ctcattaccccccca

SEQ ID NO: 1563128 - DNA, 15 bp, Homo sapiens
tcattacccccccat

SEQ ID NO: 1563129 - DNA, 15 bp, Homo sapiens
cattacccccccata

SEQ ID NO: 1563130 - DNA, 15 bp, Homo sapiens
attacccccccatag

SEQ ID NO: 1563131 - DNA, 15 bp, Homo sapiens
ttacccccccatagc

SEQ ID NO: 1563132 - DNA, 15 bp, Homo sapiens
tacccccccatagcc

SEQ ID NO: 1563133 - DNA, 15 bp, Homo sapiens
acccccccatagccc

SEQ ID NO: 1563134 - DNA, 15 bp, Homo sapiens
cccccccatagccca

SEQ ID NO: 1563135 - DNA, 15 bp, Homo sapiens
ccccccatagcccag

SEQ ID NO: 1563136 - DNA, 15 bp, Homo sapiens
cccccatagcccagt

SEQ ID NO: 1563137 - DNA, 15 bp, Homo sapiens
ccccatagcccagta

SEQ ID NO: 1563138 - DNA, 15 bp, Homo sapiens
cccatagcccagtaa

SEQ ID NO: 1563139 - DNA, 15 bp, Homo sapiens
ccatagcccagtaac

SEQ ID NO: 1563140 - DNA, 15 bp, Homo sapiens
catagcccagtaacc

SEQ ID NO: 1563141 - DNA, 15 bp, Homo sapiens
atagcccagtaaccc

SEQ ID NO: 1563142 - DNA, 15 bp, Homo sapiens
tagcccagtaacccc

SEQ ID NO: 1563143 - DNA, 15 bp, Homo sapiens
agcccagtaaccccc

SEQ ID NO: 1563144 - DNA, 15 bp, Homo sapiens
gcccagtaacccccc

SEQ ID NO: 1563145 - DNA, 15 bp, Homo sapiens
cccagtaacccccca

SEQ ID NO: 1563146 - DNA, 15 bp, Homo sapiens
ccagtaaccccccac

SEQ ID NO: 1563147 - DNA, 15 bp, Homo sapiens
cagtaaccccccacc

SEQ ID NO: 1563148 - DNA, 15 bp, Homo sapiens
agtaaccccccaccc

SEQ ID NO: 1563149 - DNA, 15 bp, Homo sapiens
gtaaccccccacccc

SEQ ID NO: 1563150 - DNA, 15 bp, Homo sapiens
taaccccccacccct

SEQ ID NO: 1563151 - DNA, 15 bp, Homo sapiens
aaccccccaccccta

SEQ ID NO: 1563152 - DNA, 15 bp, Homo sapiens
accccccacccctag

SEQ ID NO: 1563153 - DNA, 15 bp, Homo sapiens
ccccccacccctagc

SEQ ID NO: 1563154 - DNA, 15 bp, Homo sapiens
cccccacccctagct

SEQ ID NO: 1563155 - DNA, 15 bp, Homo sapiens
ccccacccctagctc

SEQ ID NO: 1563156 - DNA, 15 bp, Homo sapiens
cccacccctagctct

SEQ ID NO: 1563157 - DNA, 15 bp, Homo sapiens
ccacccctagctctg

SEQ ID NO: 1563158 - DNA, 15 bp, Homo sapiens
cacccctagctctgg

SEQ ID NO: 1563159 - DNA, 15 bp, Homo sapiens
acccctagctctggt

SEQ ID NO: 1563160 - DNA, 15 bp, Homo sapiens
cccctagctctggtt

SEQ ID NO: 1563161 - DNA, 15 bp, Homo sapiens
ccctagctctggttt

SEQ ID NO: 1563162 - DNA, 15 bp, Homo sapiens
cctagctctggtttc

SEQ ID NO: 1563163 - DNA, 15 bp, Homo sapiens
ctagctctggtttcc

SEQ ID NO: 1563164 - DNA, 15 bp, Homo sapiens
tagctctggtttccc

SEQ ID NO: 1563165 - DNA, 15 bp, Homo sapiens
agctctggtttccct

SEQ ID NO: 1563166 - DNA, 15 bp, Homo sapiens
gctctggtttccctt

SEQ ID NO: 1563167 - DNA, 15 bp, Homo sapiens
ctctggtttcccttt

SEQ ID NO: 1563168 - DNA, 15 bp, Homo sapiens
tctggtttccctttc

SEQ ID NO: 1563169 - DNA, 15 bp, Homo sapiens
ctggtttccctttct

SEQ ID NO: 1563170 - DNA, 15 bp, Homo sapiens
tggtttccctttctg

SEQ ID NO: 1563171 - DNA, 15 bp, Homo sapiens
ggtttccctttctgc

SEQ ID NO: 1563172 - DNA, 15 bp, Homo sapiens
gtttccctttctgcc

SEQ ID NO: 1563173 - DNA, 15 bp, Homo sapiens
tttccctttctgcct

SEQ ID NO: 1563174 - DNA, 15 bp, Homo sapiens
ttccctttctgccta

SEQ ID NO: 1563175 - DNA, 15 bp, Homo sapiens
tccctttctgcctaa

SEQ ID NO: 1563176 - DNA, 15 bp, Homo sapiens
ccctttctgcctaaa

SEQ ID NO: 1563177 - DNA, 15 bp, Homo sapiens
cctttctgcctaaag

SEQ ID NO: 1563178 - DNA, 15 bp, Homo sapiens
ctttctgcctaaagg

SEQ ID NO: 1563179 - DNA, 15 bp, Homo sapiens
tttctgcctaaaggg

SEQ ID NO: 1563180 - DNA, 15 bp, Homo sapiens
ttctgcctaaaggga

SEQ ID NO: 1563181 - DNA, 15 bp, Homo sapiens
tctgcctaaagggag

SEQ ID NO: 1563182 - DNA, 15 bp, Homo sapiens
ctgcctaaagggaga

SEQ ID NO: 1563183 - DNA, 15 bp, Homo sapiens
tgcctaaagggagac

SEQ ID NO: 1563184 - DNA, 15 bp, Homo sapiens
gcctaaagggagacg

SEQ ID NO: 1563185 - DNA, 15 bp, Homo sapiens
cctaaagggagacgc

SEQ ID NO: 1563186 - DNA, 15 bp, Homo sapiens
ctaaagggagacgct

SEQ ID NO: 1563187 - DNA, 15 bp, Homo sapiens
taaagggagacgctc

SEQ ID NO: 1563188 - DNA, 15 bp, Homo sapiens
aaagggagacgctct

SEQ ID NO: 1563189 - DNA, 15 bp, Homo sapiens
aagggagacgctctg

SEQ ID NO: 1563190 - DNA, 15 bp, Homo sapiens
agggagacgctctgt

SEQ ID NO: 1563191 - DNA, 15 bp, Homo sapiens
gggagacgctctgtc

SEQ ID NO: 1563192 - DNA, 15 bp, Homo sapiens
ggagacgctctgtcc

SEQ ID NO: 1563193 - DNA, 15 bp, Homo sapiens
gagacgctctgtcct

SEQ ID NO: 1563194 - DNA, 15 bp, Homo sapiens
agacgctctgtcctg

SEQ ID NO: 1563195 - DNA, 15 bp, Homo sapiens
gacgctctgtcctga

SEQ ID NO: 1563196 - DNA, 15 bp, Homo sapiens
acgctctgtcctgat

SEQ ID NO: 1563197 - DNA, 15 bp, Homo sapiens
cgctctgtcctgata

SEQ ID NO: 1563198 - DNA, 15 bp, Homo sapiens
gctctgtcctgatat

SEQ ID NO: 1563199 - DNA, 15 bp, Homo sapiens
ctctgtcctgatatg

SEQ ID NO: 1563200 - DNA, 15 bp, Homo sapiens
tctgtcctgatatgg

SEQ ID NO: 1563201 - DNA, 15 bp, Homo sapiens
ctgtcctgatatgga

SEQ ID NO: 1563202 - DNA, 15 bp, Homo sapiens
tgtcctgatatggag

SEQ ID NO: 1563203 - DNA, 15 bp, Homo sapiens
gtcctgatatggagc

SEQ ID NO: 1563204 - DNA, 15 bp, Homo sapiens
tcctgatatggagca

SEQ ID NO: 1563205 - DNA, 15 bp, Homo sapiens
cctgatatggagcat

SEQ ID NO: 1563206 - DNA, 15 bp, Homo sapiens
ctgatatggagcatt

SEQ ID NO: 1563207 - DNA, 15 bp, Homo sapiens
tgatatggagcattc

SEQ ID NO: 1563208 - DNA, 15 bp, Homo sapiens
gatatggagcattcc

SEQ ID NO: 1563209 - DNA, 15 bp, Homo sapiens
atatggagcattccc

SEQ ID NO: 1563210 - DNA, 15 bp, Homo sapiens
tatggagcattcccc

SEQ ID NO: 1563211 - DNA, 15 bp, Homo sapiens
atggagcattccccc

SEQ ID NO: 1563212 - DNA, 15 bp, Homo sapiens
tggagcattcccccc

SEQ ID NO: 1563213 - DNA, 15 bp, Homo sapiens
ggagcattcccccca

SEQ ID NO: 1563214 - DNA, 15 bp, Homo sapiens
gagcattccccccag

SEQ ID NO: 1563215 - DNA, 15 bp, Homo sapiens
agcattccccccagg

SEQ ID NO: 1563216 - DNA, 15 bp, Homo sapiens
gcattccccccagga

SEQ ID NO: 1563217 - DNA, 15 bp, Homo sapiens
cattccccccaggac

SEQ ID NO: 1563218 - DNA, 15 bp, Homo sapiens
attccccccaggacc

SEQ ID NO: 1563219 - DNA, 15 bp, Homo sapiens
ttccccccaggaccc

SEQ ID NO: 1563220 - DNA, 15 bp, Homo sapiens
tccccccaggacccc

SEQ ID NO: 1563221 - DNA, 15 bp, Homo sapiens
ccccccaggaccccc

SEQ ID NO: 1563222 - DNA, 15 bp, Homo sapiens
cccccaggaccccca

SEQ ID NO: 1563223 - DNA, 15 bp, Homo sapiens
ccccaggacccccag

SEQ ID NO: 1563224 - DNA, 15 bp, Homo sapiens
cccaggacccccagc

SEQ ID NO: 1563225 - DNA, 15 bp, Homo sapiens
ccaggacccccagcc

SEQ ID NO: 1563226 - DNA, 15 bp, Homo sapiens
caggacccccagccc

SEQ ID NO: 1563227 - DNA, 15 bp, Homo sapiens
aggacccccagccct

SEQ ID NO: 1563228 - DNA, 15 bp, Homo sapiens
ggacccccagcccta

SEQ ID NO: 1563229 - DNA, 15 bp, Homo sapiens
gacccccagccctac

SEQ ID NO: 1563230 - DNA, 15 bp, Homo sapiens
acccccagccctacc

SEQ ID NO: 1563231 - DNA, 15 bp, Homo sapiens
ccccagccctaccac

SEQ ID NO: 1563232 - DNA, 15 bp, Homo sapiens
cccagccctaccact

SEQ ID NO: 1563233 - DNA, 15 bp, Homo sapiens
ccagccctaccactc

SEQ ID NO: 1563234 - DNA, 15 bp, Homo sapiens
cagccctaccactca

SEQ ID NO: 1563235 - DNA, 15 bp, Homo sapiens
agccctaccactcat

SEQ ID NO: 1563236 - DNA, 15 bp, Homo sapiens
gccctaccactcatg

SEQ ID NO: 1563237 - DNA, 15 bp, Homo sapiens
ccctaccactcatga

SEQ ID NO: 1563238 - DNA, 15 bp, Homo sapiens
cctaccactcatgag

SEQ ID NO: 1563239 - DNA, 15 bp, Homo sapiens
ctaccactcatgagt

SEQ ID NO: 1563240 - DNA, 15 bp, Homo sapiens
taccactcatgagtt

SEQ ID NO: 1563241 - DNA, 15 bp, Homo sapiens
accactcatgagttg

SEQ ID NO: 1563242 - DNA, 15 bp, Homo sapiens
ccactcatgagttgg

SEQ ID NO: 1563243 - DNA, 15 bp, Homo sapiens
cactcatgagttgga

SEQ ID NO: 1563244 - DNA, 15 bp, Homo sapiens
actcatgagttggaa

SEQ ID NO: 1563245 - DNA, 15 bp, Homo sapiens
ctcatgagttggaat

SEQ ID NO: 1563246 - DNA, 15 bp, Homo sapiens
tcatgagttggaata

SEQ ID NO: 1563247 - DNA, 15 bp, Homo sapiens
catgagttggaatag

SEQ ID NO: 1563248 - DNA, 15 bp, Homo sapiens
atgagttggaatagt

SEQ ID NO: 1563249 - DNA, 15 bp, Homo sapiens
tgagttggaatagtt

SEQ ID NO: 1563250 - DNA, 15 bp, Homo sapiens
gagttggaatagttc

SEQ ID NO: 1563251 - DNA, 15 bp, Homo sapiens
agttggaatagttcc

SEQ ID NO: 1563252 - DNA, 15 bp, Homo sapiens
gttggaatagttccg

SEQ ID NO: 1563253 - DNA, 15 bp, Homo sapiens
ttggaatagttccga

SEQ ID NO: 1563254 - DNA, 15 bp, Homo sapiens
tggaatagttccgaa

SEQ ID NO: 1563255 - DNA, 15 bp, Homo sapiens
ggaatagttccgaaa

SEQ ID NO: 1563256 - DNA, 15 bp, Homo sapiens
gaatagttccgaaag

SEQ ID NO: 1563257 - DNA, 15 bp, Homo sapiens
aatagttccgaaagg

SEQ ID NO: 1563258 - DNA, 15 bp, Homo sapiens
atagttccgaaagga

SEQ ID NO: 1563259 - DNA, 15 bp, Homo sapiens
tagttccgaaaggac

SEQ ID NO: 1563260 - DNA, 15 bp, Homo sapiens
agttccgaaaggaca

SEQ ID NO: 1563261 - DNA, 15 bp, Homo sapiens
gttccgaaaggacat

SEQ ID NO: 1563262 - DNA, 15 bp, Homo sapiens
ttccgaaaggacata

SEQ ID NO: 1563263 - DNA, 15 bp, Homo sapiens
tccgaaaggacatag

SEQ ID NO: 1563264 - DNA, 15 bp, Homo sapiens
ccgaaaggacatagc

SEQ ID NO: 1563265 - DNA, 15 bp, Homo sapiens
cgaaaggacatagcc

SEQ ID NO: 1563266 - DNA, 15 bp, Homo sapiens
gaaaggacatagcct

SEQ ID NO: 1563267 - DNA, 15 bp, Homo sapiens
aaaggacatagcctg

SEQ ID NO: 1563268 - DNA, 15 bp, Homo sapiens
aaggacatagcctgt

SEQ ID NO: 1563269 - DNA, 15 bp, Homo sapiens
aggacatagcctgtc

SEQ ID NO: 1563270 - DNA, 15 bp, Homo sapiens
ggacatagcctgtct

SEQ ID NO: 1563271 - DNA, 15 bp, Homo sapiens
gacatagcctgtctg

SEQ ID NO: 1563272 - DNA, 15 bp, Homo sapiens
acatagcctgtctgc

SEQ ID NO: 1563273 - DNA, 15 bp, Homo sapiens
catagcctgtctgct

SEQ ID NO: 1563274 - DNA, 15 bp, Homo sapiens
atagcctgtctgctc

SEQ ID NO: 1563275 - DNA, 15 bp, Homo sapiens
tagcctgtctgctcc

SEQ ID NO: 1563276 - DNA, 15 bp, Homo sapiens
agcctgtctgctcct

SEQ ID NO: 1563277 - DNA, 15 bp, Homo sapiens
gcctgtctgctcctg

SEQ ID NO: 1563278 - DNA, 15 bp, Homo sapiens
cctgtctgctcctgc

SEQ ID NO: 1563279 - DNA, 15 bp, Homo sapiens
ctgtctgctcctgct

SEQ ID NO: 1563280 - DNA, 15 bp, Homo sapiens
tgtctgctcctgcta

SEQ ID NO: 1563281 - DNA, 15 bp, Homo sapiens
gtctgctcctgctat

SEQ ID NO: 1563282 - DNA, 15 bp, Homo sapiens
tctgctcctgctatc

SEQ ID NO: 1563283 - DNA, 15 bp, Homo sapiens
ctgctcctgctatct

SEQ ID NO: 1563284 - DNA, 15 bp, Homo sapiens
tgctcctgctatctc

SEQ ID NO: 1563285 - DNA, 15 bp, Homo sapiens
gctcctgctatctct

SEQ ID NO: 1563286 - DNA, 15 bp, Homo sapiens
ctcctgctatctctg

SEQ ID NO: 1563287 - DNA, 15 bp, Homo sapiens
tcctgctatctctgc

SEQ ID NO: 1563288 - DNA, 15 bp, Homo sapiens
cctgctatctctgcc

SEQ ID NO: 1563289 - DNA, 15 bp, Homo sapiens
ctgctatctctgcct

SEQ ID NO: 1563290 - DNA, 15 bp, Homo sapiens
tgctatctctgcctg

SEQ ID NO: 1563291 - DNA, 15 bp, Homo sapiens
gctatctctgcctgc

SEQ ID NO: 1563292 - DNA, 15 bp, Homo sapiens
ctatctctgcctgcc

SEQ ID NO: 1563293 - DNA, 15 bp, Homo sapiens
tatctctgcctgccg

SEQ ID NO: 1563294 - DNA, 15 bp, Homo sapiens
atctctgcctgccgt

SEQ ID NO: 1563295 - DNA, 15 bp, Homo sapiens
tctctgcctgccgtg

SEQ ID NO: 1563296 - DNA, 15 bp, Homo sapiens
ctctgcctgccgtgt

SEQ ID NO: 1563297 - DNA, 15 bp, Homo sapiens
tctgcctgccgtgtg

SEQ ID NO: 1563298 - DNA, 15 bp, Homo sapiens
ctgcctgccgtgtgg

SEQ ID NO: 1563299 - DNA, 15 bp, Homo sapiens
tgcctgccgtgtggg

SEQ ID NO: 1563300 - DNA, 15 bp, Homo sapiens
gcctgccgtgtgggg

SEQ ID NO: 1563301 - DNA, 15 bp, Homo sapiens
cctgccgtgtgggga

SEQ ID NO: 1563302 - DNA, 15 bp, Homo sapiens
ctgccgtgtggggag

SEQ ID NO: 1563303 - DNA, 15 bp, Homo sapiens
tgccgtgtggggagc

SEQ ID NO: 1563304 - DNA, 15 bp, Homo sapiens
gccgtgtggggagct

SEQ ID NO: 1563305 - DNA, 15 bp, Homo sapiens
ccgtgtggggagctg

SEQ ID NO: 1563306 - DNA, 15 bp, Homo sapiens
cgtgtggggagctgg

SEQ ID NO: 1563307 - DNA, 15 bp, Homo sapiens
gtgtggggagctggt

SEQ ID NO: 1563308 - DNA, 15 bp, Homo sapiens
tgtggggagctggtc

SEQ ID NO: 1563309 - DNA, 15 bp, Homo sapiens
gtggggagctggtcc

SEQ ID NO: 1563310 - DNA, 15 bp, Homo sapiens
tggggagctggtcca

SEQ ID NO: 1563311 - DNA, 15 bp, Homo sapiens
ggggagctggtccag

SEQ ID NO: 1563312 - DNA, 15 bp, Homo sapiens
gggagctggtccaga

SEQ ID NO: 1563313 - DNA, 15 bp, Homo sapiens
ggagctggtccagaa

SEQ ID NO: 1563314 - DNA, 15 bp, Homo sapiens
gagctggtccagaat

SEQ ID NO: 1563315 - DNA, 15 bp, Homo sapiens
agctggtccagaatg

SEQ ID NO: 1563316 - DNA, 15 bp, Homo sapiens
gctggtccagaatga

SEQ ID NO: 1563317 - DNA, 15 bp, Homo sapiens
ctggtccagaatgat

SEQ ID NO: 1563318 - DNA, 15 bp, Homo sapiens
tggtccagaatgatg

SEQ ID NO: 1563319 - DNA, 15 bp, Homo sapiens
ggtccagaatgatgg

SEQ ID NO: 1563320 - DNA, 15 bp, Homo sapiens
gtccagaatgatgga

SEQ ID NO: 1563321 - DNA, 15 bp, Homo sapiens
tccagaatgatggag

SEQ ID NO: 1563322 - DNA, 15 bp, Homo sapiens
ccagaatgatggagc

SEQ ID NO: 1563323 - DNA, 15 bp, Homo sapiens
cagaatgatggagcc

SEQ ID NO: 1563324 - DNA, 15 bp, Homo sapiens
agaatgatggagccc

SEQ ID NO: 1563325 - DNA, 15 bp, Homo sapiens
gaatgatggagcccc

SEQ ID NO: 1563326 - DNA, 15 bp, Homo sapiens
aatgatggagcccct

SEQ ID NO: 1563327 - DNA, 15 bp, Homo sapiens
atgatggagcccctg

SEQ ID NO: 1563328 - DNA, 15 bp, Homo sapiens
tgatggagcccctgg

SEQ ID NO: 1563329 - DNA, 15 bp, Homo sapiens
gatggagcccctggg

SEQ ID NO: 1563330 - DNA, 15 bp, Homo sapiens
atggagcccctgggg

SEQ ID NO: 1563331 - DNA, 15 bp, Homo sapiens
tggagcccctgggga

SEQ ID NO: 1563332 - DNA, 15 bp, Homo sapiens
ggagcccctggggag

SEQ ID NO: 1563333 - DNA, 15 bp, Homo sapiens
gagcccctggggagc

SEQ ID NO: 1563334 - DNA, 15 bp, Homo sapiens
agcccctggggagca

SEQ ID NO: 1563335 - DNA, 15 bp, Homo sapiens
gcccctggggagcaa

SEQ ID NO: 1563336 - DNA, 15 bp, Homo sapiens
cccctggggagcaag

SEQ ID NO: 1563337 - DNA, 15 bp, Homo sapiens
ccctggggagcaagg

SEQ ID NO: 1563338 - DNA, 15 bp, Homo sapiens
cctggggagcaaggg

SEQ ID NO: 1563339 - DNA, 15 bp, Homo sapiens
ctggggagcaagggg

SEQ ID NO: 1563340 - DNA, 15 bp, Homo sapiens
tggggagcaaggggt

SEQ ID NO: 1563341 - DNA, 15 bp, Homo sapiens
ggggagcaaggggtc

SEQ ID NO: 1563342 - DNA, 15 bp, Homo sapiens
gggagcaaggggtcg

SEQ ID NO: 1563343 - DNA, 15 bp, Homo sapiens
ggagcaaggggtcgt

SEQ ID NO: 1563344 - DNA, 15 bp, Homo sapiens
gagcaaggggtcgtg

SEQ ID NO: 1563345 - DNA, 15 bp, Homo sapiens
agcaaggggtcgtgt

SEQ ID NO: 1563346 - DNA, 15 bp, Homo sapiens
gcaaggggtcgtgtc

SEQ ID NO: 1563347 - DNA, 15 bp, Homo sapiens
caaggggtcgtgtcc

SEQ ID NO: 1563348 - DNA, 15 bp, Homo sapiens
aaggggtcgtgtcca

SEQ ID NO: 1563349 - DNA, 15 bp, Homo sapiens
aggggtcgtgtccag

SEQ ID NO: 1563350 - DNA, 15 bp, Homo sapiens
ggggtcgtgtccagc

SEQ ID NO: 1563351 - DNA, 15 bp, Homo sapiens
gggtcgtgtccagct

SEQ ID NO: 1563352 - DNA, 15 bp, Homo sapiens
ggtcgtgtccagctt

SEQ ID NO: 1563353 - DNA, 15 bp, Homo sapiens
gtcgtgtccagcttg

SEQ ID NO: 1563354 - DNA, 15 bp, Homo sapiens
tcgtgtccagcttgg

SEQ ID NO: 1563355 - DNA, 15 bp, Homo sapiens
cgtgtccagcttggg

SEQ ID NO: 1563356 - DNA, 15 bp, Homo sapiens
gtgtccagcttggga

SEQ ID NO: 1563357 - DNA, 15 bp, Homo sapiens
tgtccagcttgggag

SEQ ID NO: 1563358 - DNA, 15 bp, Homo sapiens
gtccagcttgggagg

SEQ ID NO: 1563359 - DNA, 15 bp, Homo sapiens
tccagcttgggaggg

SEQ ID NO: 1563360 - DNA, 15 bp, Homo sapiens
ccagcttgggagggc

SEQ ID NO: 1563361 - DNA, 15 bp, Homo sapiens
cagcttgggagggct

SEQ ID NO: 1563362 - DNA, 15 bp, Homo sapiens
agcttgggagggctt

SEQ ID NO: 1563363 - DNA, 15 bp, Homo sapiens
gcttgggagggcttc

SEQ ID NO: 1563364 - DNA, 15 bp, Homo sapiens
cttgggagggcttct

SEQ ID NO: 1563365 - DNA, 15 bp, Homo sapiens
ttgggagggcttctg

SEQ ID NO: 1563366 - DNA, 15 bp, Homo sapiens
tgggagggcttctgg

SEQ ID NO: 1563367 - DNA, 15 bp, Homo sapiens
gggagggcttctgga

SEQ ID NO: 1563368 - DNA, 15 bp, Homo sapiens
ggagggcttctggag

SEQ ID NO: 1563369 - DNA, 15 bp, Homo sapiens
gagggcttctggaga

SEQ ID NO: 1563370 - DNA, 15 bp, Homo sapiens
agggcttctggagac

SEQ ID NO: 1563371 - DNA, 15 bp, Homo sapiens
gggcttctggagacc

SEQ ID NO: 1563372 - DNA, 15 bp, Homo sapiens
ggcttctggagacct

SEQ ID NO: 1563373 - DNA, 15 bp, Homo sapiens
gcttctggagacctg

SEQ ID NO: 1563374 - DNA, 15 bp, Homo sapiens
cttctggagacctgg

SEQ ID NO: 1563375 - DNA, 15 bp, Homo sapiens
ttctggagacctggc

SEQ ID NO: 1563376 - DNA, 15 bp, Homo sapiens
tctggagacctggcc

SEQ ID NO: 1563377 - DNA, 15 bp, Homo sapiens
ctggagacctggccc

SEQ ID NO: 1563378 - DNA, 15 bp, Homo sapiens
tggagacctggcccg

SEQ ID NO: 1563379 - DNA, 15 bp, Homo sapiens
ggagacctggcccga

SEQ ID NO: 1563380 - DNA, 15 bp, Homo sapiens
gagacctggcccgag

SEQ ID NO: 1563381 - DNA, 15 bp, Homo sapiens
agacctggcccgagt

SEQ ID NO: 1563382 - DNA, 15 bp, Homo sapiens
gacctggcccgagtc

SEQ ID NO: 1563383 - DNA, 15 bp, Homo sapiens
acctggcccgagtcc

SEQ ID NO: 1563384 - DNA, 15 bp, Homo sapiens
cctggcccgagtccc

SEQ ID NO: 1563385 - DNA, 15 bp, Homo sapiens
ctggcccgagtccca

SEQ ID NO: 1563386 - DNA, 15 bp, Homo sapiens
tggcccgagtcccag

SEQ ID NO: 1563387 - DNA, 15 bp, Homo sapiens
ggcccgagtcccaga

SEQ ID NO: 1563388 - DNA, 15 bp, Homo sapiens
gcccgagtcccagat

SEQ ID NO: 1563389 - DNA, 15 bp, Homo sapiens
cccgagtcccagatc

SEQ ID NO: 1563390 - DNA, 15 bp, Homo sapiens
ccgagtcccagatcc

SEQ ID NO: 1563391 - DNA, 15 bp, Homo sapiens
cgagtcccagatcct

SEQ ID NO: 1563392 - DNA, 15 bp, Homo sapiens
gagtcccagatcctt

SEQ ID NO: 1563393 - DNA, 15 bp, Homo sapiens
agtcccagatccttc

SEQ ID NO: 1563394 - DNA, 15 bp, Homo sapiens
gtcccagatccttct

SEQ ID NO: 1563395 - DNA, 15 bp, Homo sapiens
tcccagatccttctt

SEQ ID NO: 1563396 - DNA, 15 bp, Homo sapiens
cccagatccttcttg

SEQ ID NO: 1563397 - DNA, 15 bp, Homo sapiens
ccagatccttcttga

SEQ ID NO: 1563398 - DNA, 15 bp, Homo sapiens
cagatccttcttgaa

SEQ ID NO: 1563399 - DNA, 15 bp, Homo sapiens
agatccttcttgaac

SEQ ID NO: 1563400 - DNA, 15 bp, Homo sapiens
gatccttcttgaact

SEQ ID NO: 1563401 - DNA, 15 bp, Homo sapiens
atccttcttgaacta

SEQ ID NO: 1563402 - DNA, 15 bp, Homo sapiens
tccttcttgaactag

SEQ ID NO: 1563403 - DNA, 15 bp, Homo sapiens
ccttcttgaactaga

SEQ ID NO: 1563404 - DNA, 15 bp, Homo sapiens
cttcttgaactagaa

SEQ ID NO: 1563405 - DNA, 15 bp, Homo sapiens
ttcttgaactagaaa

SEQ ID NO: 1563406 - DNA, 15 bp, Homo sapiens
tcttgaactagaaaa

SEQ ID NO: 1563407 - DNA, 15 bp, Homo sapiens
cttgaactagaaaaa

SEQ ID NO: 1563408 - DNA, 15 bp, Homo sapiens
ttgaactagaaaaat

SEQ ID NO: 1563409 - DNA, 15 bp, Homo sapiens
tgaactagaaaaatg

SEQ ID NO: 1563410 - DNA, 15 bp, Homo sapiens
gaactagaaaaatgc

SEQ ID NO: 1563411 - DNA, 15 bp, Homo sapiens
aactagaaaaatgcc

SEQ ID NO: 1563412 - DNA, 15 bp, Homo sapiens
actagaaaaatgcct

SEQ ID NO: 1563413 - DNA, 15 bp, Homo sapiens
ctagaaaaatgcctg

SEQ ID NO: 1563414 - DNA, 15 bp, Homo sapiens
tagaaaaatgcctgc

SEQ ID NO: 1563415 - DNA, 15 bp, Homo sapiens
agaaaaatgcctgct

SEQ ID NO: 1563416 - DNA, 15 bp, Homo sapiens
gaaaaatgcctgctg

SEQ ID NO: 1563417 - DNA, 15 bp, Homo sapiens
aaaaatgcctgctgt

SEQ ID NO: 1563418 - DNA, 15 bp, Homo sapiens
aaaatgcctgctgtt

SEQ ID NO: 1563419 - DNA, 15 bp, Homo sapiens
aaatgcctgctgttt

SEQ ID NO: 1563420 - DNA, 15 bp, Homo sapiens
aatgcctgctgtttt

SEQ ID NO: 1563421 - DNA, 15 bp, Homo sapiens
atgcctgctgttttt

SEQ ID NO: 1563422 - DNA, 15 bp, Homo sapiens
tgcctgctgttttta

SEQ ID NO: 1563423 - DNA, 15 bp, Homo sapiens
gcctgctgtttttag

SEQ ID NO: 1563424 - DNA, 15 bp, Homo sapiens
cctgctgtttttagt

SEQ ID NO: 1563425 - DNA, 15 bp, Homo sapiens
ctgctgtttttagtg

SEQ ID NO: 1563426 - DNA, 15 bp, Homo sapiens
tgctgtttttagtgc

SEQ ID NO: 1563427 - DNA, 15 bp, Homo sapiens
gctgtttttagtgca

SEQ ID NO: 1563428 - DNA, 15 bp, Homo sapiens
ctgtttttagtgcat

SEQ ID NO: 1563429 - DNA, 15 bp, Homo sapiens
tgtttttagtgcatt

SEQ ID NO: 1563430 - DNA, 15 bp, Homo sapiens
gtttttagtgcattc

SEQ ID NO: 1563431 - DNA, 15 bp, Homo sapiens
tttttagtgcattct

SEQ ID NO: 1563432 - DNA, 15 bp, Homo sapiens
ttttagtgcattctc

SEQ ID NO: 1563433 - DNA, 15 bp, Homo sapiens
tttagtgcattctca

SEQ ID NO: 1563434 - DNA, 15 bp, Homo sapiens
ttagtgcattctcag

SEQ ID NO: 1563435 - DNA, 15 bp, Homo sapiens
tagtgcattctcagt

SEQ ID NO: 1563436 - DNA, 15 bp, Homo sapiens
agtgcattctcagtt

SEQ ID NO: 1563437 - DNA, 15 bp, Homo sapiens
gtgcattctcagttg

SEQ ID NO: 1563438 - DNA, 15 bp, Homo sapiens
tgcattctcagttga

SEQ ID NO: 1563439 - DNA, 15 bp, Homo sapiens
gcattctcagttgac

SEQ ID NO: 1563440 - DNA, 15 bp, Homo sapiens
cattctcagttgaca

SEQ ID NO: 1563441 - DNA, 15 bp, Homo sapiens
attctcagttgacaa

SEQ ID NO: 1563442 - DNA, 15 bp, Homo sapiens
ttctcagttgacaaa

SEQ ID NO: 1563443 - DNA, 15 bp, Homo sapiens
tctcagttgacaaag

SEQ ID NO: 1563444 - DNA, 15 bp, Homo sapiens
ctcagttgacaaagc

SEQ ID NO: 1563445 - DNA, 15 bp, Homo sapiens
tcagttgacaaagca

SEQ ID NO: 1563446 - DNA, 15 bp, Homo sapiens
cagttgacaaagcat

SEQ ID NO: 1563447 - DNA, 15 bp, Homo sapiens
agttgacaaagcatt

SEQ ID NO: 1563448 - DNA, 15 bp, Homo sapiens
gttgacaaagcattt

SEQ ID NO: 1563449 - DNA, 15 bp, Homo sapiens
ttgacaaagcatttt

SEQ ID NO: 1563450 - DNA, 15 bp, Homo sapiens
tgacaaagcattttc

SEQ ID NO: 1563451 - DNA, 15 bp, Homo sapiens
gacaaagcattttct

SEQ ID NO: 1563452 - DNA, 15 bp, Homo sapiens
acaaagcattttctt

SEQ ID NO: 1563453 - DNA, 15 bp, Homo sapiens
caaagcattttctta

SEQ ID NO: 1563454 - DNA, 15 bp, Homo sapiens
aaagcattttcttac

SEQ ID NO: 1563455 - DNA, 15 bp, Homo sapiens
aagcattttcttacc

SEQ ID NO: 1563456 - DNA, 15 bp, Homo sapiens
agcattttcttacct

SEQ ID NO: 1563457 - DNA, 15 bp, Homo sapiens
gcattttcttacctc

SEQ ID NO: 1563458 - DNA, 15 bp, Homo sapiens
cattttcttacctct

SEQ ID NO: 1563459 - DNA, 15 bp, Homo sapiens
attttcttacctcta

SEQ ID NO: 1563460 - DNA, 15 bp, Homo sapiens
ttttcttacctctaa

SEQ ID NO: 1563461 - DNA, 15 bp, Homo sapiens
tttcttacctctaat

SEQ ID NO: 1563462 - DNA, 15 bp, Homo sapiens
ttcttacctctaatc

SEQ ID NO: 1563463 - DNA, 15 bp, Homo sapiens
tcttacctctaatcc

SEQ ID NO: 1563464 - DNA, 15 bp, Homo sapiens
cttacctctaatccc

SEQ ID NO: 1563465 - DNA, 15 bp, Homo sapiens
ttacctctaatccca

SEQ ID NO: 1563466 - DNA, 15 bp, Homo sapiens
tacctctaatcccat

SEQ ID NO: 1563467 - DNA, 15 bp, Homo sapiens
acctctaatcccatt

SEQ ID NO: 1563468 - DNA, 15 bp, Homo sapiens
cctctaatcccattg

SEQ ID NO: 1563469 - DNA, 15 bp, Homo sapiens
ctctaatcccattgg

SEQ ID NO: 1563470 - DNA, 15 bp, Homo sapiens
tctaatcccattgga

SEQ ID NO: 1563471 - DNA, 15 bp, Homo sapiens
ctaatcccattggat

SEQ ID NO: 1563472 - DNA, 15 bp, Homo sapiens
taatcccattggatc

SEQ ID NO: 1563473 - DNA, 15 bp, Homo sapiens
aatcccattggatct

SEQ ID NO: 1563474 - DNA, 15 bp, Homo sapiens
atcccattggatctt

SEQ ID NO: 1563475 - DNA, 15 bp, Homo sapiens
tcccattggatcttt

SEQ ID NO: 1563476 - DNA, 15 bp, Homo sapiens
cccattggatcttta

SEQ ID NO: 1563477 - DNA, 15 bp, Homo sapiens
ccattggatctttat

SEQ ID NO: 1563478 - DNA, 15 bp, Homo sapiens
cattggatctttata

SEQ ID NO: 1563479 - DNA, 15 bp, Homo sapiens
attggatctttataa

SEQ ID NO: 1563480 - DNA, 15 bp, Homo sapiens
ttggatctttataat

SEQ ID NO: 1563481 - DNA, 15 bp, Homo sapiens
tggatctttataatg

SEQ ID NO: 1563482 - DNA, 15 bp, Homo sapiens
ggatctttataatga

SEQ ID NO: 1563483 - DNA, 15 bp, Homo sapiens
gatctttataatgaa

SEQ ID NO: 1563484 - DNA, 15 bp, Homo sapiens
atctttataatgaag

SEQ ID NO: 1563485 - DNA, 15 bp, Homo sapiens
tctttataatgaaga

SEQ ID NO: 1563486 - DNA, 15 bp, Homo sapiens
ctttataatgaagaa

SEQ ID NO: 1563487 - DNA, 15 bp, Homo sapiens
tttataatgaagaag

SEQ ID NO: 1563488 - DNA, 15 bp, Homo sapiens
ttataatgaagaagg

SEQ ID NO: 1563489 - DNA, 15 bp, Homo sapiens
tataatgaagaagga

SEQ ID NO: 1563490 - DNA, 15 bp, Homo sapiens
ataatgaagaaggaa

SEQ ID NO: 1563491 - DNA, 15 bp, Homo sapiens
taatgaagaaggaat

SEQ ID NO: 1563492 - DNA, 15 bp, Homo sapiens
aatgaagaaggaatt

SEQ ID NO: 1563493 - DNA, 15 bp, Homo sapiens
atgaagaaggaattc

SEQ ID NO: 1563494 - DNA, 15 bp, Homo sapiens
tgaagaaggaattcc

SEQ ID NO: 1563495 - DNA, 15 bp, Homo sapiens
gaagaaggaattccc

SEQ ID NO: 1563496 - DNA, 15 bp, Homo sapiens
aagaaggaattccct

SEQ ID NO: 1563497 - DNA, 15 bp, Homo sapiens
agaaggaattccctg

SEQ ID NO: 1563498 - DNA, 15 bp, Homo sapiens
gaaggaattccctgt

SEQ ID NO: 1563499 - DNA, 15 bp, Homo sapiens
aaggaattccctgtc

SEQ ID NO: 1563500 - DNA, 15 bp, Homo sapiens
aggaattccctgtca

SEQ ID NO: 1563501 - DNA, 15 bp, Homo sapiens
ggaattccctgtcaa

SEQ ID NO: 1563502 - DNA, 15 bp, Homo sapiens
gaattccctgtcaat

SEQ ID NO: 1563503 - DNA, 15 bp, Homo sapiens
aattccctgtcaatc

SEQ ID NO: 1563504 - DNA, 15 bp, Homo sapiens
attccctgtcaatct

SEQ ID NO: 1563505 - DNA, 15 bp, Homo sapiens
ttccctgtcaatctg

SEQ ID NO: 1563506 - DNA, 15 bp, Homo sapiens
tccctgtcaatctgc

SEQ ID NO: 1563507 - DNA, 15 bp, Homo sapiens
ccctgtcaatctgca

SEQ ID NO: 1563508 - DNA, 15 bp, Homo sapiens
cctgtcaatctgcat

SEQ ID NO: 1563509 - DNA, 15 bp, Homo sapiens
ctgtcaatctgcatt

SEQ ID NO: 1563510 - DNA, 15 bp, Homo sapiens
tgtcaatctgcattg

SEQ ID NO: 1563511 - DNA, 15 bp, Homo sapiens
gtcaatctgcattgt

SEQ ID NO: 1563512 - DNA, 15 bp, Homo sapiens
tcaatctgcattgta

SEQ ID NO: 1563513 - DNA, 15 bp, Homo sapiens
caatctgcattgtat

SEQ ID NO: 1563514 - DNA, 15 bp, Homo sapiens
aatctgcattgtatt

SEQ ID NO: 1563515 - DNA, 15 bp, Homo sapiens
atctgcattgtattt

SEQ ID NO: 1563516 - DNA, 15 bp, Homo sapiens
tctgcattgtatttt

SEQ ID NO: 1563517 - DNA, 15 bp, Homo sapiens
ctgcattgtatttta

SEQ ID NO: 1563518 - DNA, 15 bp, Homo sapiens
tgcattgtattttat

SEQ ID NO: 1563519 - DNA, 15 bp, Homo sapiens
gcattgtattttatt

SEQ ID NO: 1563520 - DNA, 15 bp, Homo sapiens
ttgtattttatttaa

SEQ ID NO: 1563521 - DNA, 15 bp, Homo sapiens
tgtattttatttaat

SEQ ID NO: 1563522 - DNA, 15 bp, Homo sapiens
gtattttatttaatt

SEQ ID NO: 1563523 - DNA, 15 bp, Homo sapiens
tattttatttaatta

SEQ ID NO: 1563524 - DNA, 15 bp, Homo sapiens
attttatttaattaa

SEQ ID NO: 1563525 - DNA, 15 bp, Homo sapiens
ttttatttaattaat

SEQ ID NO: 1563526 - DNA, 15 bp, Homo sapiens
tttatttaattaatt

SEQ ID NO: 1563527 - DNA, 15 bp, Homo sapiens
ttatttaattaattt

SEQ ID NO: 1563528 - DNA, 15 bp, Homo sapiens
tatttaattaattta

SEQ ID NO: 1563529 - DNA, 15 bp, Homo sapiens
atttaattaatttat

SEQ ID NO: 1563530 - DNA, 15 bp, Homo sapiens
tttaattaatttatt

SEQ ID NO: 1563531 - DNA, 15 bp, Homo sapiens
ttaattaatttattt

SEQ ID NO: 1563532 - DNA, 15 bp, Homo sapiens
taattaatttattta

SEQ ID NO: 1563533 - DNA, 15 bp, Homo sapiens
aattaatttatttat

SEQ ID NO: 1563534 - DNA, 15 bp, Homo sapiens
attaatttatttatt

SEQ ID NO: 1563535 - DNA, 15 bp, Homo sapiens
ttaatttatttattg

SEQ ID NO: 1563536 - DNA, 15 bp, Homo sapiens
taatttatttattgg

SEQ ID NO: 1563537 - DNA, 15 bp, Homo sapiens
aatttatttattggt

SEQ ID NO: 1563538 - DNA, 15 bp, Homo sapiens
atttatttattggtt

SEQ ID NO: 1563539 - DNA, 15 bp, Homo sapiens
tttatttattggttt

SEQ ID NO: 1563540 - DNA, 15 bp, Homo sapiens
ttatttattggtttt

SEQ ID NO: 1563541 - DNA, 15 bp, Homo sapiens
tatttattggttttg

SEQ ID NO: 1563542 - DNA, 15 bp, Homo sapiens
atttattggttttga

SEQ ID NO: 1563543 - DNA, 15 bp, Homo sapiens
tttattggttttgag

SEQ ID NO: 1563544 - DNA, 15 bp, Homo sapiens
ttattggttttgaga

SEQ ID NO: 1563545 - DNA, 15 bp, Homo sapiens
tattggttttgagac

SEQ ID NO: 1563546 - DNA, 15 bp, Homo sapiens
attggttttgagaca

SEQ ID NO: 1563547 - DNA, 15 bp, Homo sapiens
ttggttttgagacag

SEQ ID NO: 1563548 - DNA, 15 bp, Homo sapiens
tggttttgagacaga

SEQ ID NO: 1563549 - DNA, 15 bp, Homo sapiens
ggttttgagacagag

SEQ ID NO: 1563550 - DNA, 15 bp, Homo sapiens
gcggtggcatgatct

SEQ ID NO: 1563551 - DNA, 15 bp, Homo sapiens
cggtggcatgatctc

SEQ ID NO: 1563552 - DNA, 15 bp, Homo sapiens
ggtggcatgatctcg

SEQ ID NO: 1563553 - DNA, 15 bp, Homo sapiens
gtggcatgatctcgc

SEQ ID NO: 1563554 - DNA, 15 bp, Homo sapiens
tggcatgatctcgcc

SEQ ID NO: 1563555 - DNA, 15 bp, Homo sapiens
ggcatgatctcgcct

SEQ ID NO: 1563556 - DNA, 15 bp, Homo sapiens
gcatgatctcgcctc

SEQ ID NO: 1563557 - DNA, 15 bp, Homo sapiens
catgatctcgcctca

SEQ ID NO: 1563558 - DNA, 15 bp, Homo sapiens
atgatctcgcctcac

SEQ ID NO: 1563559 - DNA, 15 bp, Homo sapiens
tgatctcgcctcact

SEQ ID NO: 1563560 - DNA, 15 bp, Homo sapiens
gatctcgcctcactg

SEQ ID NO: 1563561 - DNA, 15 bp, Homo sapiens
atctcgcctcactgc

SEQ ID NO: 1563562 - DNA, 15 bp, Homo sapiens
tctcgcctcactgca

SEQ ID NO: 1563563 - DNA, 15 bp, Homo sapiens
ctcgcctcactgcaa

SEQ ID NO: 1563564 - DNA, 15 bp, Homo sapiens
tcgcctcactgcaac

SEQ ID NO: 1563565 - DNA, 15 bp, Homo sapiens
cgcctcactgcaacc

SEQ ID NO: 1563566 - DNA, 15 bp, Homo sapiens
gcctcactgcaacct

SEQ ID NO: 1563567 - DNA, 15 bp, Homo sapiens
cctcactgcaacctc

SEQ ID NO: 1563568 - DNA, 15 bp, Homo sapiens
cctccgcctcctggt

SEQ ID NO: 1563569 - DNA, 15 bp, Homo sapiens
ctccgcctcctggtt

SEQ ID NO: 1563570 - DNA, 15 bp, Homo sapiens
tccgcctcctggttc

SEQ ID NO: 1563571 - DNA, 15 bp, Homo sapiens
ccgcctcctggttca

SEQ ID NO: 1563572 - DNA, 15 bp, Homo sapiens
cgcctcctggttcaa

SEQ ID NO: 1563573 - DNA, 15 bp, Homo sapiens
gcctcctggttcaag

SEQ ID NO: 1563574 - DNA, 15 bp, Homo sapiens
cctcctggttcaagc

SEQ ID NO: 1563575 - DNA, 15 bp, Homo sapiens
ctcctggttcaagca

SEQ ID NO: 1563576 - DNA, 15 bp, Homo sapiens
tcctggttcaagcaa

SEQ ID NO: 1563577 - DNA, 15 bp, Homo sapiens
gttcaagcaattcta

SEQ ID NO: 1563578 - DNA, 15 bp, Homo sapiens
ttcaagcaattctag

SEQ ID NO: 1563579 - DNA, 15 bp, Homo sapiens
tcaagcaattctagt

SEQ ID NO: 1563580 - DNA, 15 bp, Homo sapiens
caagcaattctagtg

SEQ ID NO: 1563581 - DNA, 15 bp, Homo sapiens
aagcaattctagtgc

SEQ ID NO: 1563582 - DNA, 15 bp, Homo sapiens
agcaattctagtgcc

SEQ ID NO: 1563583 - DNA, 15 bp, Homo sapiens
gcaattctagtgcct

SEQ ID NO: 1563584 - DNA, 15 bp, Homo sapiens
caattctagtgcctc

SEQ ID NO: 1563585 - DNA, 15 bp, Homo sapiens
aattctagtgcctca

SEQ ID NO: 1563586 - DNA, 15 bp, Homo sapiens
attctagtgcctcag

SEQ ID NO: 1563587 - DNA, 15 bp, Homo sapiens
ttctagtgcctcagc

SEQ ID NO: 1563588 - DNA, 15 bp, Homo sapiens
tctagtgcctcagcc

SEQ ID NO: 1563589 - DNA, 15 bp, Homo sapiens
ctagtgcctcagcct

SEQ ID NO: 1563590 - DNA, 15 bp, Homo sapiens
tagtgcctcagcctc

SEQ ID NO: 1563591 - DNA, 15 bp, Homo sapiens
agtgcctcagcctct

SEQ ID NO: 1563592 - DNA, 15 bp, Homo sapiens
gtgcctcagcctctc

SEQ ID NO: 1563593 - DNA, 15 bp, Homo sapiens
gctgggattataggg

SEQ ID NO: 1563594 - DNA, 15 bp, Homo sapiens
ctgggattatagggg

SEQ ID NO: 1563595 - DNA, 15 bp, Homo sapiens
tgggattataggggt

SEQ ID NO: 1563596 - DNA, 15 bp, Homo sapiens
gggattataggggtg

SEQ ID NO: 1563597 - DNA, 15 bp, Homo sapiens
ggattataggggtgt

SEQ ID NO: 1563598 - DNA, 15 bp, Homo sapiens
gattataggggtgtg

SEQ ID NO: 1563599 - DNA, 15 bp, Homo sapiens
attataggggtgtgc

SEQ ID NO: 1563600 - DNA, 15 bp, Homo sapiens
ttataggggtgtgcc

SEQ ID NO: 1563601 - DNA, 15 bp, Homo sapiens
tataggggtgtgcca

SEQ ID NO: 1563602 - DNA, 15 bp, Homo sapiens
ataggggtgtgccac

SEQ ID NO: 1563603 - DNA, 15 bp, Homo sapiens
taggggtgtgccacc

SEQ ID NO: 1563604 - DNA, 15 bp, Homo sapiens
aggggtgtgccacca

SEQ ID NO: 1563605 - DNA, 15 bp, Homo sapiens
ggggtgtgccaccac

SEQ ID NO: 1563606 - DNA, 15 bp, Homo sapiens
gggtgtgccaccaca

SEQ ID NO: 1563607 - DNA, 15 bp, Homo sapiens
ggtgtgccaccacac

SEQ ID NO: 1563608 - DNA, 15 bp, Homo sapiens
tttttttaaaaaatt

SEQ ID NO: 1563609 - DNA, 15 bp, Homo sapiens
ttttttaaaaaattt

SEQ ID NO: 1563610 - DNA, 15 bp, Homo sapiens
tttttaaaaaattta

SEQ ID NO: 1563611 - DNA, 15 bp, Homo sapiens
ttttaaaaaatttac

SEQ ID NO: 1563612 - DNA, 15 bp, Homo sapiens
tttaaaaaatttact

SEQ ID NO: 1563613 - DNA, 15 bp, Homo sapiens
ttaaaaaatttactt

SEQ ID NO: 1563614 - DNA, 15 bp, Homo sapiens
taaaaaatttactta

SEQ ID NO: 1563615 - DNA, 15 bp, Homo sapiens
aaaaaatttacttat

SEQ ID NO: 1563616 - DNA, 15 bp, Homo sapiens
aaaaatttacttatt

SEQ ID NO: 1563617 - DNA, 15 bp, Homo sapiens
aaaatttacttattt

SEQ ID NO: 1563618 - DNA, 15 bp, Homo sapiens
aaatttacttattta

SEQ ID NO: 1563619 - DNA, 15 bp, Homo sapiens
aatttacttatttat

SEQ ID NO: 1563620 - DNA, 15 bp, Homo sapiens
tacttatttattttg

SEQ ID NO: 1563621 - DNA, 15 bp, Homo sapiens
acttatttattttga

SEQ ID NO: 1563622 - DNA, 15 bp, Homo sapiens
cttatttattttgag

SEQ ID NO: 1563623 - DNA, 15 bp, Homo sapiens
ttatttattttgaga

SEQ ID NO: 1563624 - DNA, 15 bp, Homo sapiens
tatttattttgagac

SEQ ID NO: 1563625 - DNA, 15 bp, Homo sapiens
atttattttgagacg

SEQ ID NO: 1563626 - DNA, 15 bp, Homo sapiens
tttattttgagacgg

SEQ ID NO: 1563627 - DNA, 15 bp, Homo sapiens
ttattttgagacgga

SEQ ID NO: 1563628 - DNA, 15 bp, Homo sapiens
tattttgagacggaa

SEQ ID NO: 1563629 - DNA, 15 bp, Homo sapiens
attttgagacggaat

SEQ ID NO: 1563630 - DNA, 15 bp, Homo sapiens
ttttgagacggaatc

SEQ ID NO: 1563631 - DNA, 15 bp, Homo sapiens
tttgagacggaatct

SEQ ID NO: 1563632 - DNA, 15 bp, Homo sapiens
ttgagacggaatctt

SEQ ID NO: 1563633 - DNA, 15 bp, Homo sapiens
tgagacggaatcttg

SEQ ID NO: 1563634 - DNA, 15 bp, Homo sapiens
gagacggaatcttgc

SEQ ID NO: 1563635 - DNA, 15 bp, Homo sapiens
agacggaatcttgct

SEQ ID NO: 1563636 - DNA, 15 bp, Homo sapiens
gacggaatcttgctc

SEQ ID NO: 1563637 - DNA, 15 bp, Homo sapiens
acggaatcttgctct

SEQ ID NO: 1563638 - DNA, 15 bp, Homo sapiens
cggaatcttgctctg

SEQ ID NO: 1563639 - DNA, 15 bp, Homo sapiens
ggaatcttgctctgt

SEQ ID NO: 1563640 - DNA, 15 bp, Homo sapiens
gaatcttgctctgtc

SEQ ID NO: 1563641 - DNA, 15 bp, Homo sapiens
aatcttgctctgtcg

SEQ ID NO: 1563642 - DNA, 15 bp, Homo sapiens
atcttgctctgtcgc

SEQ ID NO: 1563643 - DNA, 15 bp, Homo sapiens
gctctgtcgcccaga

SEQ ID NO: 1563644 - DNA, 15 bp, Homo sapiens
ctctgtcgcccagac

SEQ ID NO: 1563645 - DNA, 15 bp, Homo sapiens
tctgtcgcccagact

SEQ ID NO: 1563646 - DNA, 15 bp, Homo sapiens
ctgtcgcccagacta

SEQ ID NO: 1563647 - DNA, 15 bp, Homo sapiens
tgtcgcccagactag

SEQ ID NO: 1563648 - DNA, 15 bp, Homo sapiens
gtcgcccagactaga

SEQ ID NO: 1563649 - DNA, 15 bp, Homo sapiens
tcgcccagactagag

SEQ ID NO: 1563650 - DNA, 15 bp, Homo sapiens
cgcccagactagagt

SEQ ID NO: 1563651 - DNA, 15 bp, Homo sapiens
gcccagactagagtg

SEQ ID NO: 1563652 - DNA, 15 bp, Homo sapiens
cccagactagagtgc

SEQ ID NO: 1563653 - DNA, 15 bp, Homo sapiens
ccagactagagtgca

SEQ ID NO: 1563654 - DNA, 15 bp, Homo sapiens
cagactagagtgcag

SEQ ID NO: 1563655 - DNA, 15 bp, Homo sapiens
agactagagtgcagt

SEQ ID NO: 1563656 - DNA, 15 bp, Homo sapiens
gactagagtgcagtg

SEQ ID NO: 1563657 - DNA, 15 bp, Homo sapiens
actagagtgcagtgg

SEQ ID NO: 1563658 - DNA, 15 bp, Homo sapiens
agtggcgtgatctca

SEQ ID NO: 1563659 - DNA, 15 bp, Homo sapiens
gtggcgtgatctcag

SEQ ID NO: 1563660 - DNA, 15 bp, Homo sapiens
tggcgtgatctcagc

SEQ ID NO: 1563661 - DNA, 15 bp, Homo sapiens
ggcgtgatctcagct

SEQ ID NO: 1563662 - DNA, 15 bp, Homo sapiens
gcgtgatctcagctc

SEQ ID NO: 1563663 - DNA, 15 bp, Homo sapiens
cgtgatctcagctca

SEQ ID NO: 1563664 - DNA, 15 bp, Homo sapiens
atctcagctcactgt

SEQ ID NO: 1563665 - DNA, 15 bp, Homo sapiens
tctcagctcactgta

SEQ ID NO: 1563666 - DNA, 15 bp, Homo sapiens
ctcagctcactgtaa

SEQ ID NO: 1563667 - DNA, 15 bp, Homo sapiens
tcagctcactgtaac

SEQ ID NO: 1563668 - DNA, 15 bp, Homo sapiens
cagctcactgtaacc

SEQ ID NO: 1563669 - DNA, 15 bp, Homo sapiens
agctcactgtaacct

SEQ ID NO: 1563670 - DNA, 15 bp, Homo sapiens
tcactgtaacctcca

SEQ ID NO: 1563671 - DNA, 15 bp, Homo sapiens
cactgtaacctccat

SEQ ID NO: 1563672 - DNA, 15 bp, Homo sapiens
actgtaacctccatc

SEQ ID NO: 1563673 - DNA, 15 bp, Homo sapiens
ctgtaacctccatct

SEQ ID NO: 1563674 - DNA, 15 bp, Homo sapiens
tgtaacctccatctc

SEQ ID NO: 1563675 - DNA, 15 bp, Homo sapiens
gtaacctccatctcc

SEQ ID NO: 1563676 - DNA, 15 bp, Homo sapiens
taacctccatctcct

SEQ ID NO: 1563677 - DNA, 15 bp, Homo sapiens
tctcctgggttcaac

SEQ ID NO: 1563678 - DNA, 15 bp, Homo sapiens
tgggttcaactgatt

SEQ ID NO: 1563679 - DNA, 15 bp, Homo sapiens
gggttcaactgattc

SEQ ID NO: 1563680 - DNA, 15 bp, Homo sapiens
ggttcaactgattct

SEQ ID NO: 1563681 - DNA, 15 bp, Homo sapiens
gttcaactgattctc

SEQ ID NO: 1563682 - DNA, 15 bp, Homo sapiens
ttcaactgattctct

SEQ ID NO: 1563683 - DNA, 15 bp, Homo sapiens
tcaactgattctctc

SEQ ID NO: 1563684 - DNA, 15 bp, Homo sapiens
caactgattctctca

SEQ ID NO: 1563685 - DNA, 15 bp, Homo sapiens
aactgattctctcac

SEQ ID NO: 1563686 - DNA, 15 bp, Homo sapiens
actgattctctcacc

SEQ ID NO: 1563687 - DNA, 15 bp, Homo sapiens
ctgattctctcacct

SEQ ID NO: 1563688 - DNA, 15 bp, Homo sapiens
tgattctctcacctc

SEQ ID NO: 1563689 - DNA, 15 bp, Homo sapiens
gattctctcacctca

SEQ ID NO: 1563690 - DNA, 15 bp, Homo sapiens
attctctcacctcag

SEQ ID NO: 1563691 - DNA, 15 bp, Homo sapiens
ttctctcacctcagc

SEQ ID NO: 1563692 - DNA, 15 bp, Homo sapiens
tctctcacctcagct

SEQ ID NO: 1563693 - DNA, 15 bp, Homo sapiens
ctctcacctcagctt

SEQ ID NO: 1563694 - DNA, 15 bp, Homo sapiens
tctcacctcagcttc

SEQ ID NO: 1563695 - DNA, 15 bp, Homo sapiens
ctcacctcagcttcc

SEQ ID NO: 1563696 - DNA, 15 bp, Homo sapiens
tcacctcagcttccc

SEQ ID NO: 1563697 - DNA, 15 bp, Homo sapiens
cacctcagcttcccg

SEQ ID NO: 1563698 - DNA, 15 bp, Homo sapiens
acctcagcttcccga

SEQ ID NO: 1563699 - DNA, 15 bp, Homo sapiens
ctcagcttcccgagt

SEQ ID NO: 1563700 - DNA, 15 bp, Homo sapiens
tcagcttcccgagta

SEQ ID NO: 1563701 - DNA, 15 bp, Homo sapiens
cagcttcccgagtag

SEQ ID NO: 1563702 - DNA, 15 bp, Homo sapiens
agcttcccgagtagc

SEQ ID NO: 1563703 - DNA, 15 bp, Homo sapiens
gcttcccgagtagct

SEQ ID NO: 1563704 - DNA, 15 bp, Homo sapiens
cttcccgagtagctg

SEQ ID NO: 1563705 - DNA, 15 bp, Homo sapiens
ttcccgagtagctgg

SEQ ID NO: 1563706 - DNA, 15 bp, Homo sapiens
tgttagccaggctgc

SEQ ID NO: 1563707 - DNA, 15 bp, Homo sapiens
gttagccaggctgct

SEQ ID NO: 1563708 - DNA, 15 bp, Homo sapiens
ttagccaggctgcta

SEQ ID NO: 1563709 - DNA, 15 bp, Homo sapiens
tagccaggctgctat

SEQ ID NO: 1563710 - DNA, 15 bp, Homo sapiens
agccaggctgctatc

SEQ ID NO: 1563711 - DNA, 15 bp, Homo sapiens
gccaggctgctatcg

SEQ ID NO: 1563712 - DNA, 15 bp, Homo sapiens
ccaggctgctatcga

SEQ ID NO: 1563713 - DNA, 15 bp, Homo sapiens
caggctgctatcgaa

SEQ ID NO: 1563714 - DNA, 15 bp, Homo sapiens
aggctgctatcgaac

SEQ ID NO: 1563715 - DNA, 15 bp, Homo sapiens
ggctgctatcgaact

SEQ ID NO: 1563716 - DNA, 15 bp, Homo sapiens
gctgctatcgaactc

SEQ ID NO: 1563717 - DNA, 15 bp, Homo sapiens
ctgctatcgaactcc

SEQ ID NO: 1563718 - DNA, 15 bp, Homo sapiens
tgctatcgaactcct

SEQ ID NO: 1563719 - DNA, 15 bp, Homo sapiens
gctatcgaactcctg

SEQ ID NO: 1563720 - DNA, 15 bp, Homo sapiens
ctatcgaactcctga

SEQ ID NO: 1563721 - DNA, 15 bp, Homo sapiens
tatcgaactcctgac

SEQ ID NO: 1563722 - DNA, 15 bp, Homo sapiens
atcgaactcctgacc

SEQ ID NO: 1563723 - DNA, 15 bp, Homo sapiens
gacctcaaatgatct

SEQ ID NO: 1563724 - DNA, 15 bp, Homo sapiens
acctcaaatgatctg

SEQ ID NO: 1563725 - DNA, 15 bp, Homo sapiens
cctcaaatgatctgg

SEQ ID NO: 1563726 - DNA, 15 bp, Homo sapiens
ctcaaatgatctggc

SEQ ID NO: 1563727 - DNA, 15 bp, Homo sapiens
tcaaatgatctggct

SEQ ID NO: 1563728 - DNA, 15 bp, Homo sapiens
caaatgatctggctg

SEQ ID NO: 1563729 - DNA, 15 bp, Homo sapiens
aaatgatctggctgc

SEQ ID NO: 1563730 - DNA, 15 bp, Homo sapiens
aatgatctggctgcc

SEQ ID NO: 1563731 - DNA, 15 bp, Homo sapiens
atgatctggctgcct

SEQ ID NO: 1563732 - DNA, 15 bp, Homo sapiens
tgatctggctgcctc

SEQ ID NO: 1563733 - DNA, 15 bp, Homo sapiens
gatctggctgcctca

SEQ ID NO: 1563734 - DNA, 15 bp, Homo sapiens
atctggctgcctcag

SEQ ID NO: 1563735 - DNA, 15 bp, Homo sapiens
tctggctgcctcagc

SEQ ID NO: 1563736 - DNA, 15 bp, Homo sapiens
ctggctgcctcagcc

SEQ ID NO: 1563737 - DNA, 15 bp, Homo sapiens
tggctgcctcagccc

SEQ ID NO: 1563738 - DNA, 15 bp, Homo sapiens
ggctgcctcagcccc

SEQ ID NO: 1563739 - DNA, 15 bp, Homo sapiens
gctgcctcagccccc

SEQ ID NO: 1563740 - DNA, 15 bp, Homo sapiens
tgcctcagcccccct

SEQ ID NO: 1563741 - DNA, 15 bp, Homo sapiens
gcctcagcccccctg

SEQ ID NO: 1563742 - DNA, 15 bp, Homo sapiens
cctcagcccccctgc

SEQ ID NO: 1563743 - DNA, 15 bp, Homo sapiens
ctcagcccccctgca

SEQ ID NO: 1563744 - DNA, 15 bp, Homo sapiens
tcagcccccctgcat

SEQ ID NO: 1563745 - DNA, 15 bp, Homo sapiens
cagcccccctgcatt

SEQ ID NO: 1563746 - DNA, 15 bp, Homo sapiens
agcccccctgcattg

SEQ ID NO: 1563747 - DNA, 15 bp, Homo sapiens
gcccccctgcattgc

SEQ ID NO: 1563748 - DNA, 15 bp, Homo sapiens
cccccctgcattgca

SEQ ID NO: 1563749 - DNA, 15 bp, Homo sapiens
ccccctgcattgcat

SEQ ID NO: 1563750 - DNA, 15 bp, Homo sapiens
cccctgcattgcatt

SEQ ID NO: 1563751 - DNA, 15 bp, Homo sapiens
ccctgcattgcattt

SEQ ID NO: 1563752 - DNA, 15 bp, Homo sapiens
cctgcattgcatttt

SEQ ID NO: 1563753 - DNA, 15 bp, Homo sapiens
ctgcattgcatttta

SEQ ID NO: 1563754 - DNA, 15 bp, Homo sapiens
tgcattgcattttaa

SEQ ID NO: 1563755 - DNA, 15 bp, Homo sapiens
gcattgcattttaaa

SEQ ID NO: 1563756 - DNA, 15 bp, Homo sapiens
cattgcattttaaat

SEQ ID NO: 1563757 - DNA, 15 bp, Homo sapiens
attgcattttaaatc

SEQ ID NO: 1563758 - DNA, 15 bp, Homo sapiens
ttgcattttaaatct

SEQ ID NO: 1563759 - DNA, 15 bp, Homo sapiens
tgcattttaaatctg

SEQ ID NO: 1563760 - DNA, 15 bp, Homo sapiens
gcattttaaatctga

SEQ ID NO: 1563761 - DNA, 15 bp, Homo sapiens
cattttaaatctgag

SEQ ID NO: 1563762 - DNA, 15 bp, Homo sapiens
attttaaatctgaga

SEQ ID NO: 1563763 - DNA, 15 bp, Homo sapiens
ttttaaatctgagag

SEQ ID NO: 1563764 - DNA, 15 bp, Homo sapiens
tttaaatctgagaga

SEQ ID NO: 1563765 - DNA, 15 bp, Homo sapiens
ttaaatctgagagac

SEQ ID NO: 1563766 - DNA, 15 bp, Homo sapiens
taaatctgagagaca

SEQ ID NO: 1563767 - DNA, 15 bp, Homo sapiens
aaatctgagagacag

SEQ ID NO: 1563768 - DNA, 15 bp, Homo sapiens
aatctgagagacaga

SEQ ID NO: 1563769 - DNA, 15 bp, Homo sapiens
atctgagagacagag

SEQ ID NO: 1563770 - DNA, 15 bp, Homo sapiens
tctgagagacagagg

SEQ ID NO: 1563771 - DNA, 15 bp, Homo sapiens
ctgagagacagaggc

SEQ ID NO: 1563772 - DNA, 15 bp, Homo sapiens
tgagagacagaggct

SEQ ID NO: 1563773 - DNA, 15 bp, Homo sapiens
gagagacagaggctg

SEQ ID NO: 1563774 - DNA, 15 bp, Homo sapiens
agagacagaggctga

SEQ ID NO: 1563775 - DNA, 15 bp, Homo sapiens
gagacagaggctgag

SEQ ID NO: 1563776 - DNA, 15 bp, Homo sapiens
agacagaggctgaga

SEQ ID NO: 1563777 - DNA, 15 bp, Homo sapiens
gacagaggctgagag

SEQ ID NO: 1563778 - DNA, 15 bp, Homo sapiens
acagaggctgagagt

SEQ ID NO: 1563779 - DNA, 15 bp, Homo sapiens
cagaggctgagagtg

SEQ ID NO: 1563780 - DNA, 15 bp, Homo sapiens
agaggctgagagtgg

SEQ ID NO: 1563781 - DNA, 15 bp, Homo sapiens
gaggctgagagtggc

SEQ ID NO: 1563782 - DNA, 15 bp, Homo sapiens
aggctgagagtggcc

SEQ ID NO: 1563783 - DNA, 15 bp, Homo sapiens
ggctgagagtggcct

SEQ ID NO: 1563784 - DNA, 15 bp, Homo sapiens
gctgagagtggcctg

SEQ ID NO: 1563785 - DNA, 15 bp, Homo sapiens
ctgagagtggcctgt

SEQ ID NO: 1563786 - DNA, 15 bp, Homo sapiens
tgagagtggcctgtg

SEQ ID NO: 1563787 - DNA, 15 bp, Homo sapiens
gagagtggcctgtgt

SEQ ID NO: 1563788 - DNA, 15 bp, Homo sapiens
agagtggcctgtgtc

SEQ ID NO: 1563789 - DNA, 15 bp, Homo sapiens
gagtggcctgtgtct

SEQ ID NO: 1563790 - DNA, 15 bp, Homo sapiens
agtggcctgtgtcta

SEQ ID NO: 1563791 - DNA, 15 bp, Homo sapiens
gtggcctgtgtctag

SEQ ID NO: 1563792 - DNA, 15 bp, Homo sapiens
tggcctgtgtctagc

SEQ ID NO: 1563793 - DNA, 15 bp, Homo sapiens
ggcctgtgtctagca

SEQ ID NO: 1563794 - DNA, 15 bp, Homo sapiens
gcctgtgtctagcac

SEQ ID NO: 1563795 - DNA, 15 bp, Homo sapiens
cctgtgtctagcacc

SEQ ID NO: 1563796 - DNA, 15 bp, Homo sapiens
ctgtgtctagcacca

SEQ ID NO: 1563797 - DNA, 15 bp, Homo sapiens
tgtgtctagcaccag

SEQ ID NO: 1563798 - DNA, 15 bp, Homo sapiens
gtgtctagcaccagg

SEQ ID NO: 1563799 - DNA, 15 bp, Homo sapiens
tgtctagcaccagga

SEQ ID NO: 1563800 - DNA, 15 bp, Homo sapiens
gtctagcaccaggac

SEQ ID NO: 1563801 - DNA, 15 bp, Homo sapiens
tctagcaccaggaca

SEQ ID NO: 1563802 - DNA, 15 bp, Homo sapiens
ctagcaccaggacag

SEQ ID NO: 1563803 - DNA, 15 bp, Homo sapiens
tagcaccaggacagg

SEQ ID NO: 1563804 - DNA, 15 bp, Homo sapiens
agcaccaggacaggc

SEQ ID NO: 1563805 - DNA, 15 bp, Homo sapiens
gcaccaggacaggct

SEQ ID NO: 1563806 - DNA, 15 bp, Homo sapiens
caccaggacaggcta

SEQ ID NO: 1563807 - DNA, 15 bp, Homo sapiens
accaggacaggctac

SEQ ID NO: 1563808 - DNA, 15 bp, Homo sapiens
ccaggacaggctaca

SEQ ID NO: 1563809 - DNA, 15 bp, Homo sapiens
caggacaggctacac

SEQ ID NO: 1563810 - DNA, 15 bp, Homo sapiens
aggacaggctacaca

SEQ ID NO: 1563811 - DNA, 15 bp, Homo sapiens
ggacaggctacacag

SEQ ID NO: 1563812 - DNA, 15 bp, Homo sapiens
gacaggctacacagt

SEQ ID NO: 1563813 - DNA, 15 bp, Homo sapiens
acaggctacacagtt

SEQ ID NO: 1563814 - DNA, 15 bp, Homo sapiens
caggctacacagttt

SEQ ID NO: 1563815 - DNA, 15 bp, Homo sapiens
aggctacacagtttg

SEQ ID NO: 1563816 - DNA, 15 bp, Homo sapiens
ggctacacagtttgg

SEQ ID NO: 1563817 - DNA, 15 bp, Homo sapiens
gctacacagtttgga

SEQ ID NO: 1563818 - DNA, 15 bp, Homo sapiens
ctacacagtttggag

SEQ ID NO: 1563819 - DNA, 15 bp, Homo sapiens
tacacagtttggagg

SEQ ID NO: 1563820 - DNA, 15 bp, Homo sapiens
acacagtttggaggt

SEQ ID NO: 1563821 - DNA, 15 bp, Homo sapiens
cacagtttggaggtc

SEQ ID NO: 1563822 - DNA, 15 bp, Homo sapiens
acagtttggaggtcc

SEQ ID NO: 1563823 - DNA, 15 bp, Homo sapiens
cagtttggaggtcca

SEQ ID NO: 1563824 - DNA, 15 bp, Homo sapiens
agtttggaggtccag

SEQ ID NO: 1563825 - DNA, 15 bp, Homo sapiens
gtttggaggtccagt

SEQ ID NO: 1563826 - DNA, 15 bp, Homo sapiens
tttggaggtccagtg

SEQ ID NO: 1563827 - DNA, 15 bp, Homo sapiens
ttggaggtccagtgc

SEQ ID NO: 1563828 - DNA, 15 bp, Homo sapiens
tggaggtccagtgca

SEQ ID NO: 1563829 - DNA, 15 bp, Homo sapiens
ggaggtccagtgcaa

SEQ ID NO: 1563830 - DNA, 15 bp, Homo sapiens
gaggtccagtgcaaa

SEQ ID NO: 1563831 - DNA, 15 bp, Homo sapiens
aggtccagtgcaaat

SEQ ID NO: 1563832 - DNA, 15 bp, Homo sapiens
ggtccagtgcaaatg

SEQ ID NO: 1563833 - DNA, 15 bp, Homo sapiens
gtccagtgcaaatga

SEQ ID NO: 1563834 - DNA, 15 bp, Homo sapiens
tccagtgcaaatgaa

SEQ ID NO: 1563835 - DNA, 15 bp, Homo sapiens
ccagtgcaaatgaaa

SEQ ID NO: 1563836 - DNA, 15 bp, Homo sapiens
cagtgcaaatgaaaa

SEQ ID NO: 1563837 - DNA, 15 bp, Homo sapiens
agtgcaaatgaaaat

SEQ ID NO: 1563838 - DNA, 15 bp, Homo sapiens
gtgcaaatgaaaatg

SEQ ID NO: 1563839 - DNA, 15 bp, Homo sapiens
tgcaaatgaaaatgt

SEQ ID NO: 1563840 - DNA, 15 bp, Homo sapiens
gcaaatgaaaatgtg

SEQ ID NO: 1563841 - DNA, 15 bp, Homo sapiens
caaatgaaaatgtgg

SEQ ID NO: 1563842 - DNA, 15 bp, Homo sapiens
aaatgaaaatgtggg

SEQ ID NO: 1563843 - DNA, 15 bp, Homo sapiens
aatgaaaatgtgggt

SEQ ID NO: 1563844 - DNA, 15 bp, Homo sapiens
atgaaaatgtgggtc

SEQ ID NO: 1563845 - DNA, 15 bp, Homo sapiens
tgaaaatgtgggtct

SEQ ID NO: 1563846 - DNA, 15 bp, Homo sapiens
gaaaatgtgggtctc

SEQ ID NO: 1563847 - DNA, 15 bp, Homo sapiens
aaaatgtgggtctcc

SEQ ID NO: 1563848 - DNA, 15 bp, Homo sapiens
aaatgtgggtctcct

SEQ ID NO: 1563849 - DNA, 15 bp, Homo sapiens
aatgtgggtctcctt

SEQ ID NO: 1563850 - DNA, 15 bp, Homo sapiens
atgtgggtctccttg

SEQ ID NO: 1563851 - DNA, 15 bp, Homo sapiens
tgtgggtctccttgt

SEQ ID NO: 1563852 - DNA, 15 bp, Homo sapiens
gtgggtctccttgtt

SEQ ID NO: 1563853 - DNA, 15 bp, Homo sapiens
tgggtctccttgttc

SEQ ID NO: 1563854 - DNA, 15 bp, Homo sapiens
gggtctccttgttca

SEQ ID NO: 1563855 - DNA, 15 bp, Homo sapiens
ggtctccttgttcaa

SEQ ID NO: 1563856 - DNA, 15 bp, Homo sapiens
gtctccttgttcaaa

SEQ ID NO: 1563857 - DNA, 15 bp, Homo sapiens
tctccttgttcaaaa

SEQ ID NO: 1563858 - DNA, 15 bp, Homo sapiens
ctccttgttcaaaag

SEQ ID NO: 1563859 - DNA, 15 bp, Homo sapiens
tccttgttcaaaagt

SEQ ID NO: 1563860 - DNA, 15 bp, Homo sapiens
ccttgttcaaaagta

SEQ ID NO: 1563861 - DNA, 15 bp, Homo sapiens
cttgttcaaaagtat

SEQ ID NO: 1563862 - DNA, 15 bp, Homo sapiens
ttgttcaaaagtatt

SEQ ID NO: 1563863 - DNA, 15 bp, Homo sapiens
tgttcaaaagtatta

SEQ ID NO: 1563864 - DNA, 15 bp, Homo sapiens
gttcaaaagtattag

SEQ ID NO: 1563865 - DNA, 15 bp, Homo sapiens
ttcaaaagtattagg

SEQ ID NO: 1563866 - DNA, 15 bp, Homo sapiens
tcaaaagtattagga

SEQ ID NO: 1563867 - DNA, 15 bp, Homo sapiens
caaaagtattaggac

SEQ ID NO: 1563868 - DNA, 15 bp, Homo sapiens
aaaagtattaggact

SEQ ID NO: 1563869 - DNA, 15 bp, Homo sapiens
aaagtattaggactc

SEQ ID NO: 1563870 - DNA, 15 bp, Homo sapiens
aagtattaggactct

SEQ ID NO: 1563871 - DNA, 15 bp, Homo sapiens
agtattaggactctg

SEQ ID NO: 1563872 - DNA, 15 bp, Homo sapiens
gtattaggactctgg

SEQ ID NO: 1563873 - DNA, 15 bp, Homo sapiens
tattaggactctggc

SEQ ID NO: 1563874 - DNA, 15 bp, Homo sapiens
attaggactctggcc

SEQ ID NO: 1563875 - DNA, 15 bp, Homo sapiens
ttaggactctggcca

SEQ ID NO: 1563876 - DNA, 15 bp, Homo sapiens
taggactctggccag

SEQ ID NO: 1563877 - DNA, 15 bp, Homo sapiens
aggactctggccagg

SEQ ID NO: 1563878 - DNA, 15 bp, Homo sapiens
ggactctggccaggt

SEQ ID NO: 1563879 - DNA, 15 bp, Homo sapiens
gactctggccaggtg

SEQ ID NO: 1563880 - DNA, 15 bp, Homo sapiens
actctggccaggtgc

SEQ ID NO: 1563881 - DNA, 15 bp, Homo sapiens
ctctggccaggtgcg

SEQ ID NO: 1563882 - DNA, 15 bp, Homo sapiens
tctggccaggtgcga

SEQ ID NO: 1563883 - DNA, 15 bp, Homo sapiens
ctggccaggtgcgat

SEQ ID NO: 1563884 - DNA, 15 bp, Homo sapiens
tggccaggtgcgatg

SEQ ID NO: 1563885 - DNA, 15 bp, Homo sapiens
ggccaggtgcgatgg

SEQ ID NO: 1563886 - DNA, 15 bp, Homo sapiens
gccaggtgcgatggc

SEQ ID NO: 1563887 - DNA, 15 bp, Homo sapiens
ccaggtgcgatggct

SEQ ID NO: 1563888 - DNA, 15 bp, Homo sapiens
caggtgcgatggctc

SEQ ID NO: 1563889 - DNA, 15 bp, Homo sapiens
aggtgcgatggctca

SEQ ID NO: 1563890 - DNA, 15 bp, Homo sapiens
ggtgcgatggctcac

SEQ ID NO: 1563891 - DNA, 15 bp, Homo sapiens
gtgcgatggctcacg

SEQ ID NO: 1563892 - DNA, 15 bp, Homo sapiens
tgcgatggctcacgc

SEQ ID NO: 1563893 - DNA, 15 bp, Homo sapiens
gcgatggctcacgcc

SEQ ID NO: 1563894 - DNA, 15 bp, Homo sapiens
cgatggctcacgcct

SEQ ID NO: 1563895 - DNA, 15 bp, Homo sapiens
gatggctcacgcctg

SEQ ID NO: 1563896 - DNA, 15 bp, Homo sapiens
atggctcacgcctgt

SEQ ID NO: 1563897 - DNA, 15 bp, Homo sapiens
gaggctgaggcggat

SEQ ID NO: 1563898 - DNA, 15 bp, Homo sapiens
aggctgaggcggatg

SEQ ID NO: 1563899 - DNA, 15 bp, Homo sapiens
ggctgaggcggatgg

SEQ ID NO: 1563900 - DNA, 15 bp, Homo sapiens
gctgaggcggatgga

SEQ ID NO: 1563901 - DNA, 15 bp, Homo sapiens
ctgaggcggatggat

SEQ ID NO: 1563902 - DNA, 15 bp, Homo sapiens
tgaggcggatggatc

SEQ ID NO: 1563903 - DNA, 15 bp, Homo sapiens
gaggcggatggatca

SEQ ID NO: 1563904 - DNA, 15 bp, Homo sapiens
aggcggatggatcac

SEQ ID NO: 1563905 - DNA, 15 bp, Homo sapiens
ggcggatggatcacc

SEQ ID NO: 1563906 - DNA, 15 bp, Homo sapiens
gcggatggatcacct

SEQ ID NO: 1563907 - DNA, 15 bp, Homo sapiens
cggatggatcacctg

SEQ ID NO: 1563908 - DNA, 15 bp, Homo sapiens
gatggatcacctgag

SEQ ID NO: 1563909 - DNA, 15 bp, Homo sapiens
atggatcacctgaga

SEQ ID NO: 1563910 - DNA, 15 bp, Homo sapiens
tggatcacctgagat

SEQ ID NO: 1563911 - DNA, 15 bp, Homo sapiens
ggatcacctgagatc

SEQ ID NO: 1563912 - DNA, 15 bp, Homo sapiens
gatcacctgagatca

SEQ ID NO: 1563913 - DNA, 15 bp, Homo sapiens
atcacctgagatcag

SEQ ID NO: 1563914 - DNA, 15 bp, Homo sapiens
tgagatcaggagttt

SEQ ID NO: 1563915 - DNA, 15 bp, Homo sapiens
gagatcaggagtttg

SEQ ID NO: 1563916 - DNA, 15 bp, Homo sapiens
agatcaggagtttga

SEQ ID NO: 1563917 - DNA, 15 bp, Homo sapiens
gatcaggagtttgag

SEQ ID NO: 1563918 - DNA, 15 bp, Homo sapiens
atcaggagtttgaga

SEQ ID NO: 1563919 - DNA, 15 bp, Homo sapiens
ccaatgtggtgaaag

SEQ ID NO: 1563920 - DNA, 15 bp, Homo sapiens
caatgtggtgaaagc

SEQ ID NO: 1563921 - DNA, 15 bp, Homo sapiens
aatgtggtgaaagcc

SEQ ID NO: 1563922 - DNA, 15 bp, Homo sapiens
atgtggtgaaagccc

SEQ ID NO: 1563923 - DNA, 15 bp, Homo sapiens
tgtggtgaaagcccg

SEQ ID NO: 1563924 - DNA, 15 bp, Homo sapiens
gtggtgaaagcccgt

SEQ ID NO: 1563925 - DNA, 15 bp, Homo sapiens
gggcatggtggcaga

SEQ ID NO: 1563926 - DNA, 15 bp, Homo sapiens
ggcatggtggcagat

SEQ ID NO: 1563927 - DNA, 15 bp, Homo sapiens
gcatggtggcagatg

SEQ ID NO: 1563928 - DNA, 15 bp, Homo sapiens
catggtggcagatgc

SEQ ID NO: 1563929 - DNA, 15 bp, Homo sapiens
atggtggcagatgcc

SEQ ID NO: 1563930 - DNA, 15 bp, Homo sapiens
tggtggcagatgcct

SEQ ID NO: 1563931 - DNA, 15 bp, Homo sapiens
ggtggcagatgcctg

SEQ ID NO: 1563932 - DNA, 15 bp, Homo sapiens
gtggcagatgcctgt

SEQ ID NO: 1563933 - DNA, 15 bp, Homo sapiens
tggcagatgcctgta

SEQ ID NO: 1563934 - DNA, 15 bp, Homo sapiens
ggcagatgcctgtaa

SEQ ID NO: 1563935 - DNA, 15 bp, Homo sapiens
gcagatgcctgtaat

SEQ ID NO: 1563936 - DNA, 15 bp, Homo sapiens
cagatgcctgtaatc

SEQ ID NO: 1563937 - DNA, 15 bp, Homo sapiens
agatgcctgtaatct

SEQ ID NO: 1563938 - DNA, 15 bp, Homo sapiens
gatgcctgtaatctc

SEQ ID NO: 1563939 - DNA, 15 bp, Homo sapiens
aatctcagctactca

SEQ ID NO: 1563940 - DNA, 15 bp, Homo sapiens
atctcagctactcag

SEQ ID NO: 1563941 - DNA, 15 bp, Homo sapiens
gaagcacttgaaccc

SEQ ID NO: 1563942 - DNA, 15 bp, Homo sapiens
aagcacttgaaccca

SEQ ID NO: 1563943 - DNA, 15 bp, Homo sapiens
agcacttgaacccag

SEQ ID NO: 1563944 - DNA, 15 bp, Homo sapiens
gcacttgaacccagg

SEQ ID NO: 1563945 - DNA, 15 bp, Homo sapiens
agtgaaccgagatca

SEQ ID NO: 1563946 - DNA, 15 bp, Homo sapiens
tgaaccgagatcacg

SEQ ID NO: 1563947 - DNA, 15 bp, Homo sapiens
gaaccgagatcacgc

SEQ ID NO: 1563948 - DNA, 15 bp, Homo sapiens
aaccgagatcacgcc

SEQ ID NO: 1563949 - DNA, 15 bp, Homo sapiens
accgagatcacgcca

SEQ ID NO: 1563950 - DNA, 15 bp, Homo sapiens
agcctgggtgacata

SEQ ID NO: 1563951 - DNA, 15 bp, Homo sapiens
gcctgggtgacatat

SEQ ID NO: 1563952 - DNA, 15 bp, Homo sapiens
cctgggtgacatata

SEQ ID NO: 1563953 - DNA, 15 bp, Homo sapiens
ctgggtgacatataa

SEQ ID NO: 1563954 - DNA, 15 bp, Homo sapiens
tgggtgacatataag

SEQ ID NO: 1563955 - DNA, 15 bp, Homo sapiens
gggtgacatataagg

SEQ ID NO: 1563956 - DNA, 15 bp, Homo sapiens
ggtgacatataaggt

SEQ ID NO: 1563957 - DNA, 15 bp, Homo sapiens
gtgacatataaggtc

SEQ ID NO: 1563958 - DNA, 15 bp, Homo sapiens
tgacatataaggtcc

SEQ ID NO: 1563959 - DNA, 15 bp, Homo sapiens
gacatataaggtcca

SEQ ID NO: 1563960 - DNA, 15 bp, Homo sapiens
acatataaggtccag

SEQ ID NO: 1563961 - DNA, 15 bp, Homo sapiens
catataaggtccagc

SEQ ID NO: 1563962 - DNA, 15 bp, Homo sapiens
atataaggtccagcc

SEQ ID NO: 1563963 - DNA, 15 bp, Homo sapiens
tataaggtccagccc

SEQ ID NO: 1563964 - DNA, 15 bp, Homo sapiens
ataaggtccagccct

SEQ ID NO: 1563965 - DNA, 15 bp, Homo sapiens
taaggtccagcccta

SEQ ID NO: 1563966 - DNA, 15 bp, Homo sapiens
aaggtccagccctac

SEQ ID NO: 1563967 - DNA, 15 bp, Homo sapiens
aggtccagccctacg

SEQ ID NO: 1563968 - DNA, 15 bp, Homo sapiens
ggtccagccctacgg

SEQ ID NO: 1563969 - DNA, 15 bp, Homo sapiens
gtccagccctacggg

SEQ ID NO: 1563970 - DNA, 15 bp, Homo sapiens
tccagccctacgggg

SEQ ID NO: 1563971 - DNA, 15 bp, Homo sapiens
ccagccctacggggc

SEQ ID NO: 1563972 - DNA, 15 bp, Homo sapiens
cagccctacggggct

SEQ ID NO: 1563973 - DNA, 15 bp, Homo sapiens
agccctacggggctt

SEQ ID NO: 1563974 - DNA, 15 bp, Homo sapiens
gccctacggggctta

SEQ ID NO: 1563975 - DNA, 15 bp, Homo sapiens
ccctacggggcttag

SEQ ID NO: 1563976 - DNA, 15 bp, Homo sapiens
cctacggggcttagc

SEQ ID NO: 1563977 - DNA, 15 bp, Homo sapiens
ctacggggcttagca

SEQ ID NO: 1563978 - DNA, 15 bp, Homo sapiens
tacggggcttagcag

SEQ ID NO: 1563979 - DNA, 15 bp, Homo sapiens
acggggcttagcagg

SEQ ID NO: 1563980 - DNA, 15 bp, Homo sapiens
cggggcttagcaggt

SEQ ID NO: 1563981 - DNA, 15 bp, Homo sapiens
ggggcttagcaggtg

SEQ ID NO: 1563982 - DNA, 15 bp, Homo sapiens
gggcttagcaggtgt

SEQ ID NO: 1563983 - DNA, 15 bp, Homo sapiens
ggcttagcaggtgtt

SEQ ID NO: 1563984 - DNA, 15 bp, Homo sapiens
gcttagcaggtgttc

SEQ ID NO: 1563985 - DNA, 15 bp, Homo sapiens
cttagcaggtgttct

SEQ ID NO: 1563986 - DNA, 15 bp, Homo sapiens
ttagcaggtgttctc

SEQ ID NO: 1563987 - DNA, 15 bp, Homo sapiens
tagcaggtgttctcc

SEQ ID NO: 1563988 - DNA, 15 bp, Homo sapiens
agcaggtgttctccc

SEQ ID NO: 1563989 - DNA, 15 bp, Homo sapiens
gcaggtgttctcccc

SEQ ID NO: 1563990 - DNA, 15 bp, Homo sapiens
caggtgttctccccg

SEQ ID NO: 1563991 - DNA, 15 bp, Homo sapiens
aggtgttctccccgt

SEQ ID NO: 1563992 - DNA, 15 bp, Homo sapiens
ggtgttctccccgtg

SEQ ID NO: 1563993 - DNA, 15 bp, Homo sapiens
gtgttctccccgtgt

SEQ ID NO: 1563994 - DNA, 15 bp, Homo sapiens
tgttctccccgtgtg

SEQ ID NO: 1563995 - DNA, 15 bp, Homo sapiens
gttctccccgtgtgc

SEQ ID NO: 1563996 - DNA, 15 bp, Homo sapiens
ttctccccgtgtgcg

SEQ ID NO: 1563997 - DNA, 15 bp, Homo sapiens
tctccccgtgtgcgg

SEQ ID NO: 1563998 - DNA, 15 bp, Homo sapiens
ctccccgtgtgcgga

SEQ ID NO: 1563999 - DNA, 15 bp, Homo sapiens
tccccgtgtgcggag

SEQ ID NO: 1564000 - DNA, 15 bp, Homo sapiens
ccccgtgtgcggaga

SEQ ID NO: 1564001 - DNA, 15 bp, Homo sapiens
cccgtgtgcggagat

SEQ ID NO: 1564002 - DNA, 15 bp, Homo sapiens
ccgtgtgcggagatg

SEQ ID NO: 1564003 - DNA, 15 bp, Homo sapiens
cgtgtgcggagatga

SEQ ID NO: 1564004 - DNA, 15 bp, Homo sapiens
gtgtgcggagatgag

SEQ ID NO: 1564005 - DNA, 15 bp, Homo sapiens
tgtgcggagatgaga

SEQ ID NO: 1564006 - DNA, 15 bp, Homo sapiens
gtgcggagatgagag

SEQ ID NO: 1564007 - DNA, 15 bp, Homo sapiens
tgcggagatgagaga

SEQ ID NO: 1564008 - DNA, 15 bp, Homo sapiens
gcggagatgagagat

SEQ ID NO: 1564009 - DNA, 15 bp, Homo sapiens
cggagatgagagatc

SEQ ID NO: 1564010 - DNA, 15 bp, Homo sapiens
ggagatgagagatca

SEQ ID NO: 1564011 - DNA, 15 bp, Homo sapiens
gagatgagagatcat

SEQ ID NO: 1564012 - DNA, 15 bp, Homo sapiens
agatgagagatcata

SEQ ID NO: 1564013 - DNA, 15 bp, Homo sapiens
gatgagagatcataa

SEQ ID NO: 1564014 - DNA, 15 bp, Homo sapiens
atgagagatcataag

SEQ ID NO: 1564015 - DNA, 15 bp, Homo sapiens
tgagagatcataaga

SEQ ID NO: 1564016 - DNA, 15 bp, Homo sapiens
gagagatcataagaa

SEQ ID NO: 1564017 - DNA, 15 bp, Homo sapiens
agagatcataagaaa

SEQ ID NO: 1564018 - DNA, 15 bp, Homo sapiens
gagatcataagaaat

SEQ ID NO: 1564019 - DNA, 15 bp, Homo sapiens
agatcataagaaata

SEQ ID NO: 1564020 - DNA, 15 bp, Homo sapiens
gatcataagaaataa

SEQ ID NO: 1564021 - DNA, 15 bp, Homo sapiens
atcataagaaataaa

SEQ ID NO: 1564022 - DNA, 15 bp, Homo sapiens
tcataagaaataaag

SEQ ID NO: 1564023 - DNA, 15 bp, Homo sapiens
cataagaaataaaga

SEQ ID NO: 1564024 - DNA, 15 bp, Homo sapiens
ataagaaataaagac

SEQ ID NO: 1564025 - DNA, 15 bp, Homo sapiens
taagaaataaagaca

SEQ ID NO: 1564026 - DNA, 15 bp, Homo sapiens
aagaaataaagacac

SEQ ID NO: 1564027 - DNA, 15 bp, Homo sapiens
agaaataaagacaca

SEQ ID NO: 1564028 - DNA, 15 bp, Homo sapiens
gaaataaagacacaa

SEQ ID NO: 1564029 - DNA, 15 bp, Homo sapiens
aaataaagacacaag

SEQ ID NO: 1564030 - DNA, 15 bp, Homo sapiens
aataaagacacaaga

SEQ ID NO: 1564031 - DNA, 15 bp, Homo sapiens
ataaagacacaagac

SEQ ID NO: 1564032 - DNA, 15 bp, Homo sapiens
taaagacacaagaca

SEQ ID NO: 1564033 - DNA, 15 bp, Homo sapiens
aaagacacaagacaa

SEQ ID NO: 1564034 - DNA, 15 bp, Homo sapiens
aagacacaagacaaa

SEQ ID NO: 1564035 - DNA, 15 bp, Homo sapiens
agacacaagacaaag

SEQ ID NO: 1564036 - DNA, 15 bp, Homo sapiens
gacacaagacaaaga

SEQ ID NO: 1564037 - DNA, 15 bp, Homo sapiens
acacaagacaaagag

SEQ ID NO: 1564038 - DNA, 15 bp, Homo sapiens
cacaagacaaagaga

SEQ ID NO: 1564039 - DNA, 15 bp, Homo sapiens
acaagacaaagagat

SEQ ID NO: 1564040 - DNA, 15 bp, Homo sapiens
caagacaaagagata

SEQ ID NO: 1564041 - DNA, 15 bp, Homo sapiens
aagacaaagagataa

SEQ ID NO: 1564042 - DNA, 15 bp, Homo sapiens
agacaaagagataaa

SEQ ID NO: 1564043 - DNA, 15 bp, Homo sapiens
gacaaagagataaag

SEQ ID NO: 1564044 - DNA, 15 bp, Homo sapiens
acaaagagataaaga

SEQ ID NO: 1564045 - DNA, 15 bp, Homo sapiens
caaagagataaagag

SEQ ID NO: 1564046 - DNA, 15 bp, Homo sapiens
aaagagataaagaga

SEQ ID NO: 1564047 - DNA, 15 bp, Homo sapiens
aagagataaagagaa

SEQ ID NO: 1564048 - DNA, 15 bp, Homo sapiens
agagataaagagaaa

SEQ ID NO: 1564049 - DNA, 15 bp, Homo sapiens
gagataaagagaaaa

SEQ ID NO: 1564050 - DNA, 15 bp, Homo sapiens
agataaagagaaaac

SEQ ID NO: 1564051 - DNA, 15 bp, Homo sapiens
gataaagagaaaaca

SEQ ID NO: 1564052 - DNA, 15 bp, Homo sapiens
ataaagagaaaacag

SEQ ID NO: 1564053 - DNA, 15 bp, Homo sapiens
taaagagaaaacagc

SEQ ID NO: 1564054 - DNA, 15 bp, Homo sapiens
aaagagaaaacagct

SEQ ID NO: 1564055 - DNA, 15 bp, Homo sapiens
aagagaaaacagctg

SEQ ID NO: 1564056 - DNA, 15 bp, Homo sapiens
agagaaaacagctgg

SEQ ID NO: 1564057 - DNA, 15 bp, Homo sapiens
gagaaaacagctgga

SEQ ID NO: 1564058 - DNA, 15 bp, Homo sapiens
agaaaacagctggac

SEQ ID NO: 1564059 - DNA, 15 bp, Homo sapiens
gaaaacagctggacc

SEQ ID NO: 1564060 - DNA, 15 bp, Homo sapiens
aaaacagctggaccc

SEQ ID NO: 1564061 - DNA, 15 bp, Homo sapiens
aaacagctggaccct

SEQ ID NO: 1564062 - DNA, 15 bp, Homo sapiens
aacagctggaccctg

SEQ ID NO: 1564063 - DNA, 15 bp, Homo sapiens
acagctggaccctgg

SEQ ID NO: 1564064 - DNA, 15 bp, Homo sapiens
cagctggaccctggg

SEQ ID NO: 1564065 - DNA, 15 bp, Homo sapiens
agctggaccctgggg

SEQ ID NO: 1564066 - DNA, 15 bp, Homo sapiens
gctggaccctgggga

SEQ ID NO: 1564067 - DNA, 15 bp, Homo sapiens
ctggaccctggggac

SEQ ID NO: 1564068 - DNA, 15 bp, Homo sapiens
tggaccctggggacc

SEQ ID NO: 1564069 - DNA, 15 bp, Homo sapiens
ggaccctggggacca

SEQ ID NO: 1564070 - DNA, 15 bp, Homo sapiens
gaccctggggaccac

SEQ ID NO: 1564071 - DNA, 15 bp, Homo sapiens
accctggggaccact

SEQ ID NO: 1564072 - DNA, 15 bp, Homo sapiens
ccctggggaccacta

SEQ ID NO: 1564073 - DNA, 15 bp, Homo sapiens
cctggggaccactac

SEQ ID NO: 1564074 - DNA, 15 bp, Homo sapiens
ctggggaccactacc

SEQ ID NO: 1564075 - DNA, 15 bp, Homo sapiens
tggggaccactacca

SEQ ID NO: 1564076 - DNA, 15 bp, Homo sapiens
ggggaccactaccac

SEQ ID NO: 1564077 - DNA, 15 bp, Homo sapiens
gggaccactaccacc

SEQ ID NO: 1564078 - DNA, 15 bp, Homo sapiens
ggaccactaccacca

SEQ ID NO: 1564079 - DNA, 15 bp, Homo sapiens
gaccactaccaccaa

SEQ ID NO: 1564080 - DNA, 15 bp, Homo sapiens
accactaccaccaag

SEQ ID NO: 1564081 - DNA, 15 bp, Homo sapiens
ccactaccaccaaga

SEQ ID NO: 1564082 - DNA, 15 bp, Homo sapiens
cactaccaccaagac

SEQ ID NO: 1564083 - DNA, 15 bp, Homo sapiens
actaccaccaagacg

SEQ ID NO: 1564084 - DNA, 15 bp, Homo sapiens
ctaccaccaagacgc

SEQ ID NO: 1564085 - DNA, 15 bp, Homo sapiens
taccaccaagacgcg

SEQ ID NO: 1564086 - DNA, 15 bp, Homo sapiens
accaccaagacgcgg

SEQ ID NO: 1564087 - DNA, 15 bp, Homo sapiens
ccaccaagacgcgga

SEQ ID NO: 1564088 - DNA, 15 bp, Homo sapiens
caccaagacgcggag

SEQ ID NO: 1564089 - DNA, 15 bp, Homo sapiens
accaagacgcggaga

SEQ ID NO: 1564090 - DNA, 15 bp, Homo sapiens
ccaagacgcggagac

SEQ ID NO: 1564091 - DNA, 15 bp, Homo sapiens
caagacgcggagacc

SEQ ID NO: 1564092 - DNA, 15 bp, Homo sapiens
aagacgcggagaccg

SEQ ID NO: 1564093 - DNA, 15 bp, Homo sapiens
agacgcggagaccgg

SEQ ID NO: 1564094 - DNA, 15 bp, Homo sapiens
gacgcggagaccggt

SEQ ID NO: 1564095 - DNA, 15 bp, Homo sapiens
acgcggagaccggta

SEQ ID NO: 1564096 - DNA, 15 bp, Homo sapiens
cgcggagaccggtag

SEQ ID NO: 1564097 - DNA, 15 bp, Homo sapiens
gcggagaccggtagt

SEQ ID NO: 1564098 - DNA, 15 bp, Homo sapiens
cggagaccggtagtg

SEQ ID NO: 1564099 - DNA, 15 bp, Homo sapiens
ggagaccggtagtgg

SEQ ID NO: 1564100 - DNA, 15 bp, Homo sapiens
gagaccggtagtggc

SEQ ID NO: 1564101 - DNA, 15 bp, Homo sapiens
agaccggtagtggcc

SEQ ID NO: 1564102 - DNA, 15 bp, Homo sapiens
gaccggtagtggccc

SEQ ID NO: 1564103 - DNA, 15 bp, Homo sapiens
accggtagtggcccc

SEQ ID NO: 1564104 - DNA, 15 bp, Homo sapiens
ccggtagtggccccg

SEQ ID NO: 1564105 - DNA, 15 bp, Homo sapiens
cggtagtggccccga

SEQ ID NO: 1564106 - DNA, 15 bp, Homo sapiens
ggtagtggccccgaa

SEQ ID NO: 1564107 - DNA, 15 bp, Homo sapiens
gtagtggccccgaat

SEQ ID NO: 1564108 - DNA, 15 bp, Homo sapiens
tagtggccccgaatg

SEQ ID NO: 1564109 - DNA, 15 bp, Homo sapiens
agtggccccgaatgg

SEQ ID NO: 1564110 - DNA, 15 bp, Homo sapiens
gtggccccgaatggc

SEQ ID NO: 1564111 - DNA, 15 bp, Homo sapiens
tggccccgaatggct

SEQ ID NO: 1564112 - DNA, 15 bp, Homo sapiens
ggccccgaatggctg

SEQ ID NO: 1564113 - DNA, 15 bp, Homo sapiens
gccccgaatggctgg

SEQ ID NO: 1564114 - DNA, 15 bp, Homo sapiens
ccccgaatggctggg

SEQ ID NO: 1564115 - DNA, 15 bp, Homo sapiens
cccgaatggctgggg

SEQ ID NO: 1564116 - DNA, 15 bp, Homo sapiens
ccgaatggctggggg

SEQ ID NO: 1564117 - DNA, 15 bp, Homo sapiens
cgaatggctgggggc

SEQ ID NO: 1564118 - DNA, 15 bp, Homo sapiens
gaatggctgggggca

SEQ ID NO: 1564119 - DNA, 15 bp, Homo sapiens
aatggctgggggcac

SEQ ID NO: 1564120 - DNA, 15 bp, Homo sapiens
atggctgggggcact

SEQ ID NO: 1564121 - DNA, 15 bp, Homo sapiens
tggctgggggcactg

SEQ ID NO: 1564122 - DNA, 15 bp, Homo sapiens
ggctgggggcactga

SEQ ID NO: 1564123 - DNA, 15 bp, Homo sapiens
gctgggggcactgac

SEQ ID NO: 1564124 - DNA, 15 bp, Homo sapiens
ctgggggcactgaca

SEQ ID NO: 1564125 - DNA, 15 bp, Homo sapiens
tgggggcactgacat

SEQ ID NO: 1564126 - DNA, 15 bp, Homo sapiens
gggggcactgacatc

SEQ ID NO: 1564127 - DNA, 15 bp, Homo sapiens
ggggcactgacatct

SEQ ID NO: 1564128 - DNA, 15 bp, Homo sapiens
gggcactgacatcta

SEQ ID NO: 1564129 - DNA, 15 bp, Homo sapiens
ggcactgacatctat

SEQ ID NO: 1564130 - DNA, 15 bp, Homo sapiens
gcactgacatctatt

SEQ ID NO: 1564131 - DNA, 15 bp, Homo sapiens
cactgacatctattg

SEQ ID NO: 1564132 - DNA, 15 bp, Homo sapiens
actgacatctattgc

SEQ ID NO: 1564133 - DNA, 15 bp, Homo sapiens
ctgacatctattgca

SEQ ID NO: 1564134 - DNA, 15 bp, Homo sapiens
tgacatctattgcat

SEQ ID NO: 1564135 - DNA, 15 bp, Homo sapiens
gacatctattgcata

SEQ ID NO: 1564136 - DNA, 15 bp, Homo sapiens
acatctattgcatac

SEQ ID NO: 1564137 - DNA, 15 bp, Homo sapiens
catctattgcataca

SEQ ID NO: 1564138 - DNA, 15 bp, Homo sapiens
atctattgcatacaa

SEQ ID NO: 1564139 - DNA, 15 bp, Homo sapiens
tctattgcatacaag

SEQ ID NO: 1564140 - DNA, 15 bp, Homo sapiens
ctattgcatacaaga

SEQ ID NO: 1564141 - DNA, 15 bp, Homo sapiens
tattgcatacaagac

SEQ ID NO: 1564142 - DNA, 15 bp, Homo sapiens
attgcatacaagaca

SEQ ID NO: 1564143 - DNA, 15 bp, Homo sapiens
ttgcatacaagacaa

SEQ ID NO: 1564144 - DNA, 15 bp, Homo sapiens
tgcatacaagacaag

SEQ ID NO: 1564145 - DNA, 15 bp, Homo sapiens
gcatacaagacaagg

SEQ ID NO: 1564146 - DNA, 15 bp, Homo sapiens
catacaagacaaggg

SEQ ID NO: 1564147 - DNA, 15 bp, Homo sapiens
atacaagacaagggg

SEQ ID NO: 1564148 - DNA, 15 bp, Homo sapiens
tacaagacaaggggg

SEQ ID NO: 1564149 - DNA, 15 bp, Homo sapiens
acaagacaagggggg

SEQ ID NO: 1564150 - DNA, 15 bp, Homo sapiens
caagacaaggggggc

SEQ ID NO: 1564151 - DNA, 15 bp, Homo sapiens
aagacaaggggggca

SEQ ID NO: 1564152 - DNA, 15 bp, Homo sapiens
agacaaggggggcag

SEQ ID NO: 1564153 - DNA, 15 bp, Homo sapiens
gacaaggggggcagg

SEQ ID NO: 1564154 - DNA, 15 bp, Homo sapiens
acaaggggggcaggg

SEQ ID NO: 1564155 - DNA, 15 bp, Homo sapiens
caaggggggcagggt

SEQ ID NO: 1564156 - DNA, 15 bp, Homo sapiens
aaggggggcagggta

SEQ ID NO: 1564157 - DNA, 15 bp, Homo sapiens
aggggggcagggtaa

SEQ ID NO: 1564158 - DNA, 15 bp, Homo sapiens
ggggggcagggtaag

SEQ ID NO: 1564159 - DNA, 15 bp, Homo sapiens
gggggcagggtaagg

SEQ ID NO: 1564160 - DNA, 15 bp, Homo sapiens
ggggcagggtaagga

SEQ ID NO: 1564161 - DNA, 15 bp, Homo sapiens
gggcagggtaaggag

SEQ ID NO: 1564162 - DNA, 15 bp, Homo sapiens
ggcagggtaaggagg

SEQ ID NO: 1564163 - DNA, 15 bp, Homo sapiens
gcagggtaaggaggg

SEQ ID NO: 1564164 - DNA, 15 bp, Homo sapiens
cagggtaaggagggt

SEQ ID NO: 1564165 - DNA, 15 bp, Homo sapiens
agggtaaggagggtg

SEQ ID NO: 1564166 - DNA, 15 bp, Homo sapiens
gggtaaggagggtga

SEQ ID NO: 1564167 - DNA, 15 bp, Homo sapiens
ggtaaggagggtgag

SEQ ID NO: 1564168 - DNA, 15 bp, Homo sapiens
gtaaggagggtgagt

SEQ ID NO: 1564169 - DNA, 15 bp, Homo sapiens
taaggagggtgagtc

SEQ ID NO: 1564170 - DNA, 15 bp, Homo sapiens
aaggagggtgagtcg

SEQ ID NO: 1564171 - DNA, 15 bp, Homo sapiens
aggagggtgagtcgt

SEQ ID NO: 1564172 - DNA, 15 bp, Homo sapiens
ggagggtgagtcgtc

SEQ ID NO: 1564173 - DNA, 15 bp, Homo sapiens
gagggtgagtcgtcc

SEQ ID NO: 1564174 - DNA, 15 bp, Homo sapiens
agggtgagtcgtcca

SEQ ID NO: 1564175 - DNA, 15 bp, Homo sapiens
gggtgagtcgtccaa

SEQ ID NO: 1564176 - DNA, 15 bp, Homo sapiens
ggtgagtcgtccaag

SEQ ID NO: 1564177 - DNA, 15 bp, Homo sapiens
gtgagtcgtccaagc

SEQ ID NO: 1564178 - DNA, 15 bp, Homo sapiens
tgagtcgtccaagcg

SEQ ID NO: 1564179 - DNA, 15 bp, Homo sapiens
gagtcgtccaagcga

SEQ ID NO: 1564180 - DNA, 15 bp, Homo sapiens
agtcgtccaagcgat

SEQ ID NO: 1564181 - DNA, 15 bp, Homo sapiens
gtcgtccaagcgatt

SEQ ID NO: 1564182 - DNA, 15 bp, Homo sapiens
tcgtccaagcgattg

SEQ ID NO: 1564183 - DNA, 15 bp, Homo sapiens
cgtccaagcgattga

SEQ ID NO: 1564184 - DNA, 15 bp, Homo sapiens
gtccaagcgattgat

SEQ ID NO: 1564185 - DNA, 15 bp, Homo sapiens
tccaagcgattgata

SEQ ID NO: 1564186 - DNA, 15 bp, Homo sapiens
ccaagcgattgataa

SEQ ID NO: 1564187 - DNA, 15 bp, Homo sapiens
caagcgattgataag

SEQ ID NO: 1564188 - DNA, 15 bp, Homo sapiens
aagcgattgataagg

SEQ ID NO: 1564189 - DNA, 15 bp, Homo sapiens
agcgattgataaggt

SEQ ID NO: 1564190 - DNA, 15 bp, Homo sapiens
gcgattgataaggtc

SEQ ID NO: 1564191 - DNA, 15 bp, Homo sapiens
cgattgataaggtca

SEQ ID NO: 1564192 - DNA, 15 bp, Homo sapiens
gattgataaggtcaa

SEQ ID NO: 1564193 - DNA, 15 bp, Homo sapiens
attgataaggtcaag

SEQ ID NO: 1564194 - DNA, 15 bp, Homo sapiens
ttgataaggtcaagc

SEQ ID NO: 1564195 - DNA, 15 bp, Homo sapiens
tgataaggtcaagca

SEQ ID NO: 1564196 - DNA, 15 bp, Homo sapiens
gataaggtcaagcaa

SEQ ID NO: 1564197 - DNA, 15 bp, Homo sapiens
ataaggtcaagcaag

SEQ ID NO: 1564198 - DNA, 15 bp, Homo sapiens
taaggtcaagcaagt

SEQ ID NO: 1564199 - DNA, 15 bp, Homo sapiens
aaggtcaagcaagtc

SEQ ID NO: 1564200 - DNA, 15 bp, Homo sapiens
aggtcaagcaagtca

SEQ ID NO: 1564201 - DNA, 15 bp, Homo sapiens
ggtcaagcaagtcaa

SEQ ID NO: 1564202 - DNA, 15 bp, Homo sapiens
gtcaagcaagtcaag

SEQ ID NO: 1564203 - DNA, 15 bp, Homo sapiens
tcaagcaagtcaagt

SEQ ID NO: 1564204 - DNA, 15 bp, Homo sapiens
caagcaagtcaagtg

SEQ ID NO: 1564205 - DNA, 15 bp, Homo sapiens
aagcaagtcaagtga

SEQ ID NO: 1564206 - DNA, 15 bp, Homo sapiens
agcaagtcaagtgat

SEQ ID NO: 1564207 - DNA, 15 bp, Homo sapiens
gcaagtcaagtgatc

SEQ ID NO: 1564208 - DNA, 15 bp, Homo sapiens
caagtcaagtgatca

SEQ ID NO: 1564209 - DNA, 15 bp, Homo sapiens
aagtcaagtgatcat

SEQ ID NO: 1564210 - DNA, 15 bp, Homo sapiens
agtcaagtgatcatg

SEQ ID NO: 1564211 - DNA, 15 bp, Homo sapiens
gtcaagtgatcatgg

SEQ ID NO: 1564212 - DNA, 15 bp, Homo sapiens
tcaagtgatcatggg

SEQ ID NO: 1564213 - DNA, 15 bp, Homo sapiens
caagtgatcatggga

SEQ ID NO: 1564214 - DNA, 15 bp, Homo sapiens
aagtgatcatgggat

SEQ ID NO: 1564215 - DNA, 15 bp, Homo sapiens
agtgatcatgggata

SEQ ID NO: 1564216 - DNA, 15 bp, Homo sapiens
gtgatcatgggatag

SEQ ID NO: 1564217 - DNA, 15 bp, Homo sapiens
tgatcatgggatagg

SEQ ID NO: 1564218 - DNA, 15 bp, Homo sapiens
gatcatgggataggg

SEQ ID NO: 1564219 - DNA, 15 bp, Homo sapiens
atcatgggatagggg

SEQ ID NO: 1564220 - DNA, 15 bp, Homo sapiens
tcatgggataggggg

SEQ ID NO: 1564221 - DNA, 15 bp, Homo sapiens
catgggatagggggc

SEQ ID NO: 1564222 - DNA, 15 bp, Homo sapiens
atgggatagggggcc

SEQ ID NO: 1564223 - DNA, 15 bp, Homo sapiens
tgggatagggggccc

SEQ ID NO: 1564224 - DNA, 15 bp, Homo sapiens
gggatagggggccct

SEQ ID NO: 1564225 - DNA, 15 bp, Homo sapiens
ggatagggggccctt

SEQ ID NO: 1564226 - DNA, 15 bp, Homo sapiens
gatagggggcccttc

SEQ ID NO: 1564227 - DNA, 15 bp, Homo sapiens
atagggggcccttcc

SEQ ID NO: 1564228 - DNA, 15 bp, Homo sapiens
tagggggcccttccc

SEQ ID NO: 1564229 - DNA, 15 bp, Homo sapiens
agggggcccttccct

SEQ ID NO: 1564230 - DNA, 15 bp, Homo sapiens
gggggcccttccctt

SEQ ID NO: 1564231 - DNA, 15 bp, Homo sapiens
ggggcccttcccttt

SEQ ID NO: 1564232 - DNA, 15 bp, Homo sapiens
gggcccttccctttt

SEQ ID NO: 1564233 - DNA, 15 bp, Homo sapiens
ggcccttccctttta

SEQ ID NO: 1564234 - DNA, 15 bp, Homo sapiens
gcccttcccttttag

SEQ ID NO: 1564235 - DNA, 15 bp, Homo sapiens
cccttcccttttagg

SEQ ID NO: 1564236 - DNA, 15 bp, Homo sapiens
ccttcccttttaggt

SEQ ID NO: 1564237 - DNA, 15 bp, Homo sapiens
cttcccttttaggta

SEQ ID NO: 1564238 - DNA, 15 bp, Homo sapiens
ttcccttttaggtag

SEQ ID NO: 1564239 - DNA, 15 bp, Homo sapiens
tcccttttaggtagc

SEQ ID NO: 1564240 - DNA, 15 bp, Homo sapiens
cccttttaggtagcc

SEQ ID NO: 1564241 - DNA, 15 bp, Homo sapiens
ccttttaggtagcca

SEQ ID NO: 1564242 - DNA, 15 bp, Homo sapiens
cttttaggtagccaa

SEQ ID NO: 1564243 - DNA, 15 bp, Homo sapiens
ttttaggtagccaaa

SEQ ID NO: 1564244 - DNA, 15 bp, Homo sapiens
tttaggtagccaaag

SEQ ID NO: 1564245 - DNA, 15 bp, Homo sapiens
ttaggtagccaaagc

SEQ ID NO: 1564246 - DNA, 15 bp, Homo sapiens
taggtagccaaagca

SEQ ID NO: 1564247 - DNA, 15 bp, Homo sapiens
aggtagccaaagcag

SEQ ID NO: 1564248 - DNA, 15 bp, Homo sapiens
ggtagccaaagcaga

SEQ ID NO: 1564249 - DNA, 15 bp, Homo sapiens
gtagccaaagcagag

SEQ ID NO: 1564250 - DNA, 15 bp, Homo sapiens
tagccaaagcagaga

SEQ ID NO: 1564251 - DNA, 15 bp, Homo sapiens
agccaaagcagagag

SEQ ID NO: 1564252 - DNA, 15 bp, Homo sapiens
gccaaagcagagagg

SEQ ID NO: 1564253 - DNA, 15 bp, Homo sapiens
ccaaagcagagaggg

SEQ ID NO: 1564254 - DNA, 15 bp, Homo sapiens
caaagcagagaggga

SEQ ID NO: 1564255 - DNA, 15 bp, Homo sapiens
aaagcagagagggaa

SEQ ID NO: 1564256 - DNA, 15 bp, Homo sapiens
aagcagagagggaag

SEQ ID NO: 1564257 - DNA, 15 bp, Homo sapiens
agcagagagggaagg

SEQ ID NO: 1564258 - DNA, 15 bp, Homo sapiens
gcagagagggaaggc

SEQ ID NO: 1564259 - DNA, 15 bp, Homo sapiens
cagagagggaaggca

SEQ ID NO: 1564260 - DNA, 15 bp, Homo sapiens
agagagggaaggcag

SEQ ID NO: 1564261 - DNA, 15 bp, Homo sapiens
gagagggaaggcagc

SEQ ID NO: 1564262 - DNA, 15 bp, Homo sapiens
agagggaaggcagca

SEQ ID NO: 1564263 - DNA, 15 bp, Homo sapiens
gagggaaggcagcat

SEQ ID NO: 1564264 - DNA, 15 bp, Homo sapiens
agggaaggcagcata

SEQ ID NO: 1564265 - DNA, 15 bp, Homo sapiens
gggaaggcagcatat

SEQ ID NO: 1564266 - DNA, 15 bp, Homo sapiens
ggaaggcagcatatg

SEQ ID NO: 1564267 - DNA, 15 bp, Homo sapiens
gaaggcagcatatgt

SEQ ID NO: 1564268 - DNA, 15 bp, Homo sapiens
aaggcagcatatgtc

SEQ ID NO: 1564269 - DNA, 15 bp, Homo sapiens
aggcagcatatgtca

SEQ ID NO: 1564270 - DNA, 15 bp, Homo sapiens
ggcagcatatgtcag

SEQ ID NO: 1564271 - DNA, 15 bp, Homo sapiens
gcagcatatgtcagc

SEQ ID NO: 1564272 - DNA, 15 bp, Homo sapiens
cagcatatgtcagcg

SEQ ID NO: 1564273 - DNA, 15 bp, Homo sapiens
agcatatgtcagcgt

SEQ ID NO: 1564274 - DNA, 15 bp, Homo sapiens
gcatatgtcagcgtt

SEQ ID NO: 1564275 - DNA, 15 bp, Homo sapiens
catatgtcagcgttt

SEQ ID NO: 1564276 - DNA, 15 bp, Homo sapiens
atatgtcagcgtttt

SEQ ID NO: 1564277 - DNA, 15 bp, Homo sapiens
tatgtcagcgttttc

SEQ ID NO: 1564278 - DNA, 15 bp, Homo sapiens
atgtcagcgttttct

SEQ ID NO: 1564279 - DNA, 15 bp, Homo sapiens
tgtcagcgttttctt

SEQ ID NO: 1564280 - DNA, 15 bp, Homo sapiens
gtcagcgttttcttc

SEQ ID NO: 1564281 - DNA, 15 bp, Homo sapiens
tcagcgttttcttct

SEQ ID NO: 1564282 - DNA, 15 bp, Homo sapiens
cagcgttttcttcta

SEQ ID NO: 1564283 - DNA, 15 bp, Homo sapiens
agcgttttcttctat

SEQ ID NO: 1564284 - DNA, 15 bp, Homo sapiens
gcgttttcttctatg

SEQ ID NO: 1564285 - DNA, 15 bp, Homo sapiens
cgttttcttctatgc

SEQ ID NO: 1564286 - DNA, 15 bp, Homo sapiens
gttttcttctatgca

SEQ ID NO: 1564287 - DNA, 15 bp, Homo sapiens
ttttcttctatgcat

SEQ ID NO: 1564288 - DNA, 15 bp, Homo sapiens
tttcttctatgcatg

SEQ ID NO: 1564289 - DNA, 15 bp, Homo sapiens
ttcttctatgcatgt

SEQ ID NO: 1564290 - DNA, 15 bp, Homo sapiens
tcttctatgcatgta

SEQ ID NO: 1564291 - DNA, 15 bp, Homo sapiens
cttctatgcatgtat

SEQ ID NO: 1564292 - DNA, 15 bp, Homo sapiens
ttctatgcatgtatc

SEQ ID NO: 1564293 - DNA, 15 bp, Homo sapiens
tctatgcatgtatca

SEQ ID NO: 1564294 - DNA, 15 bp, Homo sapiens
ctatgcatgtatcaa

SEQ ID NO: 1564295 - DNA, 15 bp, Homo sapiens
tatgcatgtatcaaa

SEQ ID NO: 1564296 - DNA, 15 bp, Homo sapiens
atgcatgtatcaaaa

SEQ ID NO: 1564297 - DNA, 15 bp, Homo sapiens
tgcatgtatcaaaaa

SEQ ID NO: 1564298 - DNA, 15 bp, Homo sapiens
gcatgtatcaaaaag

SEQ ID NO: 1564299 - DNA, 15 bp, Homo sapiens
catgtatcaaaaaga

SEQ ID NO: 1564300 - DNA, 15 bp, Homo sapiens
atgtatcaaaaagat

SEQ ID NO: 1564301 - DNA, 15 bp, Homo sapiens
tgtatcaaaaagatc

SEQ ID NO: 1564302 - DNA, 15 bp, Homo sapiens
gtatcaaaaagatca

SEQ ID NO: 1564303 - DNA, 15 bp, Homo sapiens
tatcaaaaagatcaa

SEQ ID NO: 1564304 - DNA, 15 bp, Homo sapiens
atcaaaaagatcaaa

SEQ ID NO: 1564305 - DNA, 15 bp, Homo sapiens
tcaaaaagatcaaag

SEQ ID NO: 1564306 - DNA, 15 bp, Homo sapiens
caaaaagatcaaaga

SEQ ID NO: 1564307 - DNA, 15 bp, Homo sapiens
aaaaagatcaaagac

SEQ ID NO: 1564308 - DNA, 15 bp, Homo sapiens
aaaagatcaaagact

SEQ ID NO: 1564309 - DNA, 15 bp, Homo sapiens
aaagatcaaagactt

SEQ ID NO: 1564310 - DNA, 15 bp, Homo sapiens
aagatcaaagacttt

SEQ ID NO: 1564311 - DNA, 15 bp, Homo sapiens
agatcaaagacttta

SEQ ID NO: 1564312 - DNA, 15 bp, Homo sapiens
gatcaaagactttaa

SEQ ID NO: 1564313 - DNA, 15 bp, Homo sapiens
atcaaagactttaag

SEQ ID NO: 1564314 - DNA, 15 bp, Homo sapiens
tcaaagactttaagg

SEQ ID NO: 1564315 - DNA, 15 bp, Homo sapiens
caaagactttaaggc

SEQ ID NO: 1564316 - DNA, 15 bp, Homo sapiens
aaagactttaaggct

SEQ ID NO: 1564317 - DNA, 15 bp, Homo sapiens
aagactttaaggctt

SEQ ID NO: 1564318 - DNA, 15 bp, Homo sapiens
agactttaaggcttt

SEQ ID NO: 1564319 - DNA, 15 bp, Homo sapiens
gactttaaggctttc

SEQ ID NO: 1564320 - DNA, 15 bp, Homo sapiens
actttaaggctttca

SEQ ID NO: 1564321 - DNA, 15 bp, Homo sapiens
ctttaaggctttcac

SEQ ID NO: 1564322 - DNA, 15 bp, Homo sapiens
tttaaggctttcact

SEQ ID NO: 1564323 - DNA, 15 bp, Homo sapiens
ttaaggctttcacta

SEQ ID NO: 1564324 - DNA, 15 bp, Homo sapiens
taaggctttcactat

SEQ ID NO: 1564325 - DNA, 15 bp, Homo sapiens
aaggctttcactatt

SEQ ID NO: 1564326 - DNA, 15 bp, Homo sapiens
aggctttcactattt

SEQ ID NO: 1564327 - DNA, 15 bp, Homo sapiens
ggctttcactatttc

SEQ ID NO: 1564328 - DNA, 15 bp, Homo sapiens
gctttcactatttct

SEQ ID NO: 1564329 - DNA, 15 bp, Homo sapiens
ctttcactatttctt

SEQ ID NO: 1564330 - DNA, 15 bp, Homo sapiens
tttcactatttcttc

SEQ ID NO: 1564331 - DNA, 15 bp, Homo sapiens
ttcactatttcttct

SEQ ID NO: 1564332 - DNA, 15 bp, Homo sapiens
tcactatttcttcta

SEQ ID NO: 1564333 - DNA, 15 bp, Homo sapiens
cactatttcttctac

SEQ ID NO: 1564334 - DNA, 15 bp, Homo sapiens
actatttcttctacc

SEQ ID NO: 1564335 - DNA, 15 bp, Homo sapiens
ctatttcttctacca

SEQ ID NO: 1564336 - DNA, 15 bp, Homo sapiens
tatttcttctaccac

SEQ ID NO: 1564337 - DNA, 15 bp, Homo sapiens
atttcttctaccact

SEQ ID NO: 1564338 - DNA, 15 bp, Homo sapiens
tttcttctaccacta

SEQ ID NO: 1564339 - DNA, 15 bp, Homo sapiens
ttcttctaccactat

SEQ ID NO: 1564340 - DNA, 15 bp, Homo sapiens
tcttctaccactatc

SEQ ID NO: 1564341 - DNA, 15 bp, Homo sapiens
cttctaccactatct

SEQ ID NO: 1564342 - DNA, 15 bp, Homo sapiens
ttctaccactatcta

SEQ ID NO: 1564343 - DNA, 15 bp, Homo sapiens
tctaccactatctac

SEQ ID NO: 1564344 - DNA, 15 bp, Homo sapiens
ctaccactatctact

SEQ ID NO: 1564345 - DNA, 15 bp, Homo sapiens
taccactatctacta

SEQ ID NO: 1564346 - DNA, 15 bp, Homo sapiens
accactatctactac

SEQ ID NO: 1564347 - DNA, 15 bp, Homo sapiens
ccactatctactacg

SEQ ID NO: 1564348 - DNA, 15 bp, Homo sapiens
cactatctactacga

SEQ ID NO: 1564349 - DNA, 15 bp, Homo sapiens
actatctactacgaa

SEQ ID NO: 1564350 - DNA, 15 bp, Homo sapiens
ctatctactacgaac

SEQ ID NO: 1564351 - DNA, 15 bp, Homo sapiens
tatctactacgaact

SEQ ID NO: 1564352 - DNA, 15 bp, Homo sapiens
atctactacgaactt

SEQ ID NO: 1564353 - DNA, 15 bp, Homo sapiens
tctactacgaacttc

SEQ ID NO: 1564354 - DNA, 15 bp, Homo sapiens
ctactacgaacttca

SEQ ID NO: 1564355 - DNA, 15 bp, Homo sapiens
tactacgaacttcaa

SEQ ID NO: 1564356 - DNA, 15 bp, Homo sapiens
actacgaacttcaaa

SEQ ID NO: 1564357 - DNA, 15 bp, Homo sapiens
ctacgaacttcaaag

SEQ ID NO: 1564358 - DNA, 15 bp, Homo sapiens
tacgaacttcaaaga

SEQ ID NO: 1564359 - DNA, 15 bp, Homo sapiens
acgaacttcaaagag

SEQ ID NO: 1564360 - DNA, 15 bp, Homo sapiens
cgaacttcaaagagg

SEQ ID NO: 1564361 - DNA, 15 bp, Homo sapiens
gaacttcaaagagga

SEQ ID NO: 1564362 - DNA, 15 bp, Homo sapiens
aacttcaaagaggaa

SEQ ID NO: 1564363 - DNA, 15 bp, Homo sapiens
acttcaaagaggaat

SEQ ID NO: 1564364 - DNA, 15 bp, Homo sapiens
cttcaaagaggaatc

SEQ ID NO: 1564365 - DNA, 15 bp, Homo sapiens
ttcaaagaggaatcc

SEQ ID NO: 1564366 - DNA, 15 bp, Homo sapiens
tcaaagaggaatcca

SEQ ID NO: 1564367 - DNA, 15 bp, Homo sapiens
caaagaggaatccag

SEQ ID NO: 1564368 - DNA, 15 bp, Homo sapiens
aaagaggaatccagg

SEQ ID NO: 1564369 - DNA, 15 bp, Homo sapiens
aagaggaatccagga

SEQ ID NO: 1564370 - DNA, 15 bp, Homo sapiens
agaggaatccaggag

SEQ ID NO: 1564371 - DNA, 15 bp, Homo sapiens
gaggaatccaggagt

SEQ ID NO: 1564372 - DNA, 15 bp, Homo sapiens
aggaatccaggagta

SEQ ID NO: 1564373 - DNA, 15 bp, Homo sapiens
ggaatccaggagtat

SEQ ID NO: 1564374 - DNA, 15 bp, Homo sapiens
gaatccaggagtatg

SEQ ID NO: 1564375 - DNA, 15 bp, Homo sapiens
aatccaggagtatgg

SEQ ID NO: 1564376 - DNA, 15 bp, Homo sapiens
atccaggagtatggg

SEQ ID NO: 1564377 - DNA, 15 bp, Homo sapiens
tccaggagtatggga

SEQ ID NO: 1564378 - DNA, 15 bp, Homo sapiens
ccaggagtatgggag

SEQ ID NO: 1564379 - DNA, 15 bp, Homo sapiens
caggagtatgggagg

SEQ ID NO: 1564380 - DNA, 15 bp, Homo sapiens
aggagtatgggagga

SEQ ID NO: 1564381 - DNA, 15 bp, Homo sapiens
ggagtatgggaggaa

SEQ ID NO: 1564382 - DNA, 15 bp, Homo sapiens
gagtatgggaggaac

SEQ ID NO: 1564383 - DNA, 15 bp, Homo sapiens
agtatgggaggaaca

SEQ ID NO: 1564384 - DNA, 15 bp, Homo sapiens
gtatgggaggaacat

SEQ ID NO: 1564385 - DNA, 15 bp, Homo sapiens
tatgggaggaacatg

SEQ ID NO: 1564386 - DNA, 15 bp, Homo sapiens
atgggaggaacatga

SEQ ID NO: 1564387 - DNA, 15 bp, Homo sapiens
tgggaggaacatgaa

SEQ ID NO: 1564388 - DNA, 15 bp, Homo sapiens
gggaggaacatgaaa

SEQ ID NO: 1564389 - DNA, 15 bp, Homo sapiens
ggaggaacatgaaag

SEQ ID NO: 1564390 - DNA, 15 bp, Homo sapiens
gaggaacatgaaagt

SEQ ID NO: 1564391 - DNA, 15 bp, Homo sapiens
aggaacatgaaagtg

SEQ ID NO: 1564392 - DNA, 15 bp, Homo sapiens
ggaacatgaaagtgg

SEQ ID NO: 1564393 - DNA, 15 bp, Homo sapiens
gaacatgaaagtgga

SEQ ID NO: 1564394 - DNA, 15 bp, Homo sapiens
aacatgaaagtggac

SEQ ID NO: 1564395 - DNA, 15 bp, Homo sapiens
acatgaaagtggaca

SEQ ID NO: 1564396 - DNA, 15 bp, Homo sapiens
catgaaagtggacaa

SEQ ID NO: 1564397 - DNA, 15 bp, Homo sapiens
atgaaagtggacaag

SEQ ID NO: 1564398 - DNA, 15 bp, Homo sapiens
tgaaagtggacaagg

SEQ ID NO: 1564399 - DNA, 15 bp, Homo sapiens
gaaagtggacaagga

SEQ ID NO: 1564400 - DNA, 15 bp, Homo sapiens
aaagtggacaaggag

SEQ ID NO: 1564401 - DNA, 15 bp, Homo sapiens
aagtggacaaggagc

SEQ ID NO: 1564402 - DNA, 15 bp, Homo sapiens
agtggacaaggagcg

SEQ ID NO: 1564403 - DNA, 15 bp, Homo sapiens
gtggacaaggagcgt

SEQ ID NO: 1564404 - DNA, 15 bp, Homo sapiens
tggacaaggagcgtg

SEQ ID NO: 1564405 - DNA, 15 bp, Homo sapiens
ggacaaggagcgtga

SEQ ID NO: 1564406 - DNA, 15 bp, Homo sapiens
gacaaggagcgtgac

SEQ ID NO: 1564407 - DNA, 15 bp, Homo sapiens
acaaggagcgtgacc

SEQ ID NO: 1564408 - DNA, 15 bp, Homo sapiens
caaggagcgtgacca

SEQ ID NO: 1564409 - DNA, 15 bp, Homo sapiens
aaggagcgtgaccac

SEQ ID NO: 1564410 - DNA, 15 bp, Homo sapiens
aggagcgtgaccact

SEQ ID NO: 1564411 - DNA, 15 bp, Homo sapiens
ggagcgtgaccactg

SEQ ID NO: 1564412 - DNA, 15 bp, Homo sapiens
gagcgtgaccactga

SEQ ID NO: 1564413 - DNA, 15 bp, Homo sapiens
agcgtgaccactgaa

SEQ ID NO: 1564414 - DNA, 15 bp, Homo sapiens
gcgtgaccactgaag

SEQ ID NO: 1564415 - DNA, 15 bp, Homo sapiens
cgtgaccactgaagc

SEQ ID NO: 1564416 - DNA, 15 bp, Homo sapiens
gtgaccactgaagca

SEQ ID NO: 1564417 - DNA, 15 bp, Homo sapiens
tgaccactgaagcac

SEQ ID NO: 1564418 - DNA, 15 bp, Homo sapiens
gaccactgaagcaca

SEQ ID NO: 1564419 - DNA, 15 bp, Homo sapiens
accactgaagcacag

SEQ ID NO: 1564420 - DNA, 15 bp, Homo sapiens
ccactgaagcacagc

SEQ ID NO: 1564421 - DNA, 15 bp, Homo sapiens
cactgaagcacagca

SEQ ID NO: 1564422 - DNA, 15 bp, Homo sapiens
actgaagcacagcac

SEQ ID NO: 1564423 - DNA, 15 bp, Homo sapiens
ctgaagcacagcacc

SEQ ID NO: 1564424 - DNA, 15 bp, Homo sapiens
tgaagcacagcacca

SEQ ID NO: 1564425 - DNA, 15 bp, Homo sapiens
gaagcacagcaccac

SEQ ID NO: 1564426 - DNA, 15 bp, Homo sapiens
aagcacagcaccaca

SEQ ID NO: 1564427 - DNA, 15 bp, Homo sapiens
agcacagcaccacag

SEQ ID NO: 1564428 - DNA, 15 bp, Homo sapiens
gcacagcaccacaga

SEQ ID NO: 1564429 - DNA, 15 bp, Homo sapiens
cacagcaccacagaa

SEQ ID NO: 1564430 - DNA, 15 bp, Homo sapiens
acagcaccacagaaa

SEQ ID NO: 1564431 - DNA, 15 bp, Homo sapiens
cagcaccacagaaag

SEQ ID NO: 1564432 - DNA, 15 bp, Homo sapiens
agcaccacagaaagg

SEQ ID NO: 1564433 - DNA, 15 bp, Homo sapiens
gcaccacagaaaggg

SEQ ID NO: 1564434 - DNA, 15 bp, Homo sapiens
caccacagaaagggg

SEQ ID NO: 1564435 - DNA, 15 bp, Homo sapiens
accacagaaaggggt

SEQ ID NO: 1564436 - DNA, 15 bp, Homo sapiens
ccacagaaaggggtt

SEQ ID NO: 1564437 - DNA, 15 bp, Homo sapiens
cacagaaaggggttt

SEQ ID NO: 1564438 - DNA, 15 bp, Homo sapiens
acagaaaggggttta

SEQ ID NO: 1564439 - DNA, 15 bp, Homo sapiens
cagaaaggggtttag

SEQ ID NO: 1564440 - DNA, 15 bp, Homo sapiens
agaaaggggtttagg

SEQ ID NO: 1564441 - DNA, 15 bp, Homo sapiens
gaaaggggtttaggc

SEQ ID NO: 1564442 - DNA, 15 bp, Homo sapiens
aaaggggtttaggcc

SEQ ID NO: 1564443 - DNA, 15 bp, Homo sapiens
aaggggtttaggcct

SEQ ID NO: 1564444 - DNA, 15 bp, Homo sapiens
aggggtttaggcctt

SEQ ID NO: 1564445 - DNA, 15 bp, Homo sapiens
ggggtttaggccttg

SEQ ID NO: 1564446 - DNA, 15 bp, Homo sapiens
gggtttaggccttgg

SEQ ID NO: 1564447 - DNA, 15 bp, Homo sapiens
ggtttaggccttggg

SEQ ID NO: 1564448 - DNA, 15 bp, Homo sapiens
gtttaggccttggga

SEQ ID NO: 1564449 - DNA, 15 bp, Homo sapiens
tttaggccttgggat

SEQ ID NO: 1564450 - DNA, 15 bp, Homo sapiens
ttaggccttgggatg

SEQ ID NO: 1564451 - DNA, 15 bp, Homo sapiens
taggccttgggatga

SEQ ID NO: 1564452 - DNA, 15 bp, Homo sapiens
aggccttgggatgac

SEQ ID NO: 1564453 - DNA, 15 bp, Homo sapiens
ggccttgggatgact

SEQ ID NO: 1564454 - DNA, 15 bp, Homo sapiens
gccttgggatgactg

SEQ ID NO: 1564455 - DNA, 15 bp, Homo sapiens
ccttgggatgactgc

SEQ ID NO: 1564456 - DNA, 15 bp, Homo sapiens
cttgggatgactgcg

SEQ ID NO: 1564457 - DNA, 15 bp, Homo sapiens
ttgggatgactgcgg

SEQ ID NO: 1564458 - DNA, 15 bp, Homo sapiens
tgggatgactgcggg

SEQ ID NO: 1564459 - DNA, 15 bp, Homo sapiens
gggatgactgcgggc

SEQ ID NO: 1564460 - DNA, 15 bp, Homo sapiens
ggatgactgcgggca

SEQ ID NO: 1564461 - DNA, 15 bp, Homo sapiens
gatgactgcgggcag

SEQ ID NO: 1564462 - DNA, 15 bp, Homo sapiens
atgactgcgggcagg

SEQ ID NO: 1564463 - DNA, 15 bp, Homo sapiens
tgactgcgggcaggc

SEQ ID NO: 1564464 - DNA, 15 bp, Homo sapiens
gactgcgggcaggcc

SEQ ID NO: 1564465 - DNA, 15 bp, Homo sapiens
actgcgggcaggcct

SEQ ID NO: 1564466 - DNA, 15 bp, Homo sapiens
ctgcgggcaggcctg

SEQ ID NO: 1564467 - DNA, 15 bp, Homo sapiens
tgcgggcaggcctgg

SEQ ID NO: 1564468 - DNA, 15 bp, Homo sapiens
gcgggcaggcctgga

SEQ ID NO: 1564469 - DNA, 15 bp, Homo sapiens
cgggcaggcctggat

SEQ ID NO: 1564470 - DNA, 15 bp, Homo sapiens
gggcaggcctggata

SEQ ID NO: 1564471 - DNA, 15 bp, Homo sapiens
ggcaggcctggataa

SEQ ID NO: 1564472 - DNA, 15 bp, Homo sapiens
gcaggcctggataat

SEQ ID NO: 1564473 - DNA, 15 bp, Homo sapiens
caggcctggataata

SEQ ID NO: 1564474 - DNA, 15 bp, Homo sapiens
aggcctggataatat

SEQ ID NO: 1564475 - DNA, 15 bp, Homo sapiens
ggcctggataatatc

SEQ ID NO: 1564476 - DNA, 15 bp, Homo sapiens
gcctggataatatcc

SEQ ID NO: 1564477 - DNA, 15 bp, Homo sapiens
cctggataatatcca

SEQ ID NO: 1564478 - DNA, 15 bp, Homo sapiens
ctggataatatccag

SEQ ID NO: 1564479 - DNA, 15 bp, Homo sapiens
tggataatatccagc

SEQ ID NO: 1564480 - DNA, 15 bp, Homo sapiens
ggataatatccagcc

SEQ ID NO: 1564481 - DNA, 15 bp, Homo sapiens
gataatatccagcct

SEQ ID NO: 1564482 - DNA, 15 bp, Homo sapiens
ataatatccagcctc

SEQ ID NO: 1564483 - DNA, 15 bp, Homo sapiens
taatatccagcctcc

SEQ ID NO: 1564484 - DNA, 15 bp, Homo sapiens
aatatccagcctccc

SEQ ID NO: 1564485 - DNA, 15 bp, Homo sapiens
atatccagcctccca

SEQ ID NO: 1564486 - DNA, 15 bp, Homo sapiens
tatccagcctcccac

SEQ ID NO: 1564487 - DNA, 15 bp, Homo sapiens
atccagcctcccaca

SEQ ID NO: 1564488 - DNA, 15 bp, Homo sapiens
tccagcctcccacaa

SEQ ID NO: 1564489 - DNA, 15 bp, Homo sapiens
ccagcctcccacaag

SEQ ID NO: 1564490 - DNA, 15 bp, Homo sapiens
cagcctcccacaaga

SEQ ID NO: 1564491 - DNA, 15 bp, Homo sapiens
agcctcccacaagaa

SEQ ID NO: 1564492 - DNA, 15 bp, Homo sapiens
gcctcccacaagaag

SEQ ID NO: 1564493 - DNA, 15 bp, Homo sapiens
cctcccacaagaagc

SEQ ID NO: 1564494 - DNA, 15 bp, Homo sapiens
ctcccacaagaagct

SEQ ID NO: 1564495 - DNA, 15 bp, Homo sapiens
tcccacaagaagctg

SEQ ID NO: 1564496 - DNA, 15 bp, Homo sapiens
cccacaagaagctgg

SEQ ID NO: 1564497 - DNA, 15 bp, Homo sapiens
ccacaagaagctggc

SEQ ID NO: 1564498 - DNA, 15 bp, Homo sapiens
cacaagaagctggcg

SEQ ID NO: 1564499 - DNA, 15 bp, Homo sapiens
acaagaagctggcgg

SEQ ID NO: 1564500 - DNA, 15 bp, Homo sapiens
caagaagctggcgga

SEQ ID NO: 1564501 - DNA, 15 bp, Homo sapiens
aagaagctggcggag

SEQ ID NO: 1564502 - DNA, 15 bp, Homo sapiens
agaagctggcggagc

SEQ ID NO: 1564503 - DNA, 15 bp, Homo sapiens
gaagctggcggagca

SEQ ID NO: 1564504 - DNA, 15 bp, Homo sapiens
aagctggcggagcag

SEQ ID NO: 1564505 - DNA, 15 bp, Homo sapiens
agctggcggagcaga

SEQ ID NO: 1564506 - DNA, 15 bp, Homo sapiens
gctggcggagcagag

SEQ ID NO: 1564507 - DNA, 15 bp, Homo sapiens
ctggcggagcagagt

SEQ ID NO: 1564508 - DNA, 15 bp, Homo sapiens
tggcggagcagagtg

SEQ ID NO: 1564509 - DNA, 15 bp, Homo sapiens
ggcggagcagagtgt

SEQ ID NO: 1564510 - DNA, 15 bp, Homo sapiens
gcggagcagagtgtt

SEQ ID NO: 1564511 - DNA, 15 bp, Homo sapiens
cggagcagagtgttt

SEQ ID NO: 1564512 - DNA, 15 bp, Homo sapiens
ggagcagagtgtttc

SEQ ID NO: 1564513 - DNA, 15 bp, Homo sapiens
gagcagagtgtttcc

SEQ ID NO: 1564514 - DNA, 15 bp, Homo sapiens
agcagagtgtttcct

SEQ ID NO: 1564515 - DNA, 15 bp, Homo sapiens
gcagagtgtttcctg

SEQ ID NO: 1564516 - DNA, 15 bp, Homo sapiens
cagagtgtttcctga

SEQ ID NO: 1564517 - DNA, 15 bp, Homo sapiens
agagtgtttcctgac

SEQ ID NO: 1564518 - DNA, 15 bp, Homo sapiens
gagtgtttcctgact

SEQ ID NO: 1564519 - DNA, 15 bp, Homo sapiens
agtgtttcctgactc

SEQ ID NO: 1564520 - DNA, 15 bp, Homo sapiens
gtgtttcctgactcc

SEQ ID NO: 1564521 - DNA, 15 bp, Homo sapiens
tgtttcctgactcct

SEQ ID NO: 1564522 - DNA, 15 bp, Homo sapiens
gtttcctgactcctc

SEQ ID NO: 1564523 - DNA, 15 bp, Homo sapiens
tttcctgactcctcg

SEQ ID NO: 1564524 - DNA, 15 bp, Homo sapiens
ttcctgactcctcga

SEQ ID NO: 1564525 - DNA, 15 bp, Homo sapiens
tcctgactcctcgaa

SEQ ID NO: 1564526 - DNA, 15 bp, Homo sapiens
cctgactcctcgaag

SEQ ID NO: 1564527 - DNA, 15 bp, Homo sapiens
ctgactcctcgaagg

SEQ ID NO: 1564528 - DNA, 15 bp, Homo sapiens
tgactcctcgaagga

SEQ ID NO: 1564529 - DNA, 15 bp, Homo sapiens
gactcctcgaaggaa

SEQ ID NO: 1564530 - DNA, 15 bp, Homo sapiens
actcctcgaaggaaa

SEQ ID NO: 1564531 - DNA, 15 bp, Homo sapiens
ctcctcgaaggaaag

SEQ ID NO: 1564532 - DNA, 15 bp, Homo sapiens
tcctcgaaggaaagg

SEQ ID NO: 1564533 - DNA, 15 bp, Homo sapiens
cctcgaaggaaagga

SEQ ID NO: 1564534 - DNA, 15 bp, Homo sapiens
ctcgaaggaaaggag

SEQ ID NO: 1564535 - DNA, 15 bp, Homo sapiens
tcgaaggaaaggaga

SEQ ID NO: 1564536 - DNA, 15 bp, Homo sapiens
cgaaggaaaggagac

SEQ ID NO: 1564537 - DNA, 15 bp, Homo sapiens
gaaggaaaggagact

SEQ ID NO: 1564538 - DNA, 15 bp, Homo sapiens
aaggaaaggagactc

SEQ ID NO: 1564539 - DNA, 15 bp, Homo sapiens
aggaaaggagactcc

SEQ ID NO: 1564540 - DNA, 15 bp, Homo sapiens
ggaaaggagactccc

SEQ ID NO: 1564541 - DNA, 15 bp, Homo sapiens
gaaaggagactccct

SEQ ID NO: 1564542 - DNA, 15 bp, Homo sapiens
aaaggagactccctt

SEQ ID NO: 1564543 - DNA, 15 bp, Homo sapiens
aaggagactcccttt

SEQ ID NO: 1564544 - DNA, 15 bp, Homo sapiens
aggagactccctttc

SEQ ID NO: 1564545 - DNA, 15 bp, Homo sapiens
ggagactccctttct

SEQ ID NO: 1564546 - DNA, 15 bp, Homo sapiens
gagactccctttctt

SEQ ID NO: 1564547 - DNA, 15 bp, Homo sapiens
agactccctttcttg

SEQ ID NO: 1564548 - DNA, 15 bp, Homo sapiens
gactccctttcttgg

SEQ ID NO: 1564549 - DNA, 15 bp, Homo sapiens
actccctttcttggt

SEQ ID NO: 1564550 - DNA, 15 bp, Homo sapiens
ctccctttcttggtc

SEQ ID NO: 1564551 - DNA, 15 bp, Homo sapiens
tccctttcttggtct

SEQ ID NO: 1564552 - DNA, 15 bp, Homo sapiens
ccctttcttggtctg

SEQ ID NO: 1564553 - DNA, 15 bp, Homo sapiens
cctttcttggtctgc

SEQ ID NO: 1564554 - DNA, 15 bp, Homo sapiens
ctttcttggtctgct

SEQ ID NO: 1564555 - DNA, 15 bp, Homo sapiens
tttcttggtctgcta

SEQ ID NO: 1564556 - DNA, 15 bp, Homo sapiens
ttcttggtctgctaa

SEQ ID NO: 1564557 - DNA, 15 bp, Homo sapiens
tcttggtctgctaag

SEQ ID NO: 1564558 - DNA, 15 bp, Homo sapiens
cttggtctgctaagt

SEQ ID NO: 1564559 - DNA, 15 bp, Homo sapiens
ttggtctgctaagta

SEQ ID NO: 1564560 - DNA, 15 bp, Homo sapiens
tggtctgctaagtag

SEQ ID NO: 1564561 - DNA, 15 bp, Homo sapiens
ggtctgctaagtagc

SEQ ID NO: 1564562 - DNA, 15 bp, Homo sapiens
gtctgctaagtagcg

SEQ ID NO: 1564563 - DNA, 15 bp, Homo sapiens
tctgctaagtagcgg

SEQ ID NO: 1564564 - DNA, 15 bp, Homo sapiens
ctgctaagtagcggg

SEQ ID NO: 1564565 - DNA, 15 bp, Homo sapiens
tgctaagtagcgggt

SEQ ID NO: 1564566 - DNA, 15 bp, Homo sapiens
gctaagtagcgggtg

SEQ ID NO: 1564567 - DNA, 15 bp, Homo sapiens
ctaagtagcgggtgc

SEQ ID NO: 1564568 - DNA, 15 bp, Homo sapiens
taagtagcgggtgcc

SEQ ID NO: 1564569 - DNA, 15 bp, Homo sapiens
aagtagcgggtgcct

SEQ ID NO: 1564570 - DNA, 15 bp, Homo sapiens
agtagcgggtgcctt

SEQ ID NO: 1564571 - DNA, 15 bp, Homo sapiens
gtagcgggtgccttc

SEQ ID NO: 1564572 - DNA, 15 bp, Homo sapiens
tagcgggtgccttcc

SEQ ID NO: 1564573 - DNA, 15 bp, Homo sapiens
agcgggtgccttccc

SEQ ID NO: 1564574 - DNA, 15 bp, Homo sapiens
gcgggtgccttccca

SEQ ID NO: 1564575 - DNA, 15 bp, Homo sapiens
cgggtgccttcccag

SEQ ID NO: 1564576 - DNA, 15 bp, Homo sapiens
gggtgccttcccagg

SEQ ID NO: 1564577 - DNA, 15 bp, Homo sapiens
ggtgccttcccaggc

SEQ ID NO: 1564578 - DNA, 15 bp, Homo sapiens
gtgccttcccaggca

SEQ ID NO: 1564579 - DNA, 15 bp, Homo sapiens
tgccttcccaggcac

SEQ ID NO: 1564580 - DNA, 15 bp, Homo sapiens
gccttcccaggcact

SEQ ID NO: 1564581 - DNA, 15 bp, Homo sapiens
ccttcccaggcactg

SEQ ID NO: 1564582 - DNA, 15 bp, Homo sapiens
cttcccaggcactgg

SEQ ID NO: 1564583 - DNA, 15 bp, Homo sapiens
ttcccaggcactggc

SEQ ID NO: 1564584 - DNA, 15 bp, Homo sapiens
tcccaggcactggcg

SEQ ID NO: 1564585 - DNA, 15 bp, Homo sapiens
cccaggcactggcgt

SEQ ID NO: 1564586 - DNA, 15 bp, Homo sapiens
ccaggcactggcgtt

SEQ ID NO: 1564587 - DNA, 15 bp, Homo sapiens
caggcactggcgtta

SEQ ID NO: 1564588 - DNA, 15 bp, Homo sapiens
aggcactggcgttac

SEQ ID NO: 1564589 - DNA, 15 bp, Homo sapiens
ggcactggcgttacc

SEQ ID NO: 1564590 - DNA, 15 bp, Homo sapiens
gcactggcgttaccg

SEQ ID NO: 1564591 - DNA, 15 bp, Homo sapiens
cactggcgttaccgc

SEQ ID NO: 1564592 - DNA, 15 bp, Homo sapiens
actggcgttaccgct

SEQ ID NO: 1564593 - DNA, 15 bp, Homo sapiens
ctggcgttaccgctt

SEQ ID NO: 1564594 - DNA, 15 bp, Homo sapiens
tggcgttaccgcttg

SEQ ID NO: 1564595 - DNA, 15 bp, Homo sapiens
ggcgttaccgcttga

SEQ ID NO: 1564596 - DNA, 15 bp, Homo sapiens
gcgttaccgcttgac

SEQ ID NO: 1564597 - DNA, 15 bp, Homo sapiens
cgttaccgcttgacc

SEQ ID NO: 1564598 - DNA, 15 bp, Homo sapiens
gttaccgcttgacca

SEQ ID NO: 1564599 - DNA, 15 bp, Homo sapiens
ttaccgcttgaccaa

SEQ ID NO: 1564600 - DNA, 15 bp, Homo sapiens
taccgcttgaccaag

SEQ ID NO: 1564601 - DNA, 15 bp, Homo sapiens
accgcttgaccaagg

SEQ ID NO: 1564602 - DNA, 15 bp, Homo sapiens
ccgcttgaccaagga

SEQ ID NO: 1564603 - DNA, 15 bp, Homo sapiens
cgcttgaccaaggag

SEQ ID NO: 1564604 - DNA, 15 bp, Homo sapiens
gcttgaccaaggagc

SEQ ID NO: 1564605 - DNA, 15 bp, Homo sapiens
cttgaccaaggagcc

SEQ ID NO: 1564606 - DNA, 15 bp, Homo sapiens
ttgaccaaggagccc

SEQ ID NO: 1564607 - DNA, 15 bp, Homo sapiens
tgaccaaggagccct

SEQ ID NO: 1564608 - DNA, 15 bp, Homo sapiens
gaccaaggagccctc

SEQ ID NO: 1564609 - DNA, 15 bp, Homo sapiens
accaaggagccctca

SEQ ID NO: 1564610 - DNA, 15 bp, Homo sapiens
ccaaggagccctcaa

SEQ ID NO: 1564611 - DNA, 15 bp, Homo sapiens
caaggagccctcaag

SEQ ID NO: 1564612 - DNA, 15 bp, Homo sapiens
aaggagccctcaagc

SEQ ID NO: 1564613 - DNA, 15 bp, Homo sapiens
aggagccctcaagcg

SEQ ID NO: 1564614 - DNA, 15 bp, Homo sapiens
ggagccctcaagcgg

SEQ ID NO: 1564615 - DNA, 15 bp, Homo sapiens
gagccctcaagcggc

SEQ ID NO: 1564616 - DNA, 15 bp, Homo sapiens
agccctcaagcggcc

SEQ ID NO: 1564617 - DNA, 15 bp, Homo sapiens
gccctcaagcggccc

SEQ ID NO: 1564618 - DNA, 15 bp, Homo sapiens
ccctcaagcggccct

SEQ ID NO: 1564619 - DNA, 15 bp, Homo sapiens
cctcaagcggccctt

SEQ ID NO: 1564620 - DNA, 15 bp, Homo sapiens
ctcaagcggccctta

SEQ ID NO: 1564621 - DNA, 15 bp, Homo sapiens
tcaagcggcccttat

SEQ ID NO: 1564622 - DNA, 15 bp, Homo sapiens
caagcggcccttatg

SEQ ID NO: 1564623 - DNA, 15 bp, Homo sapiens
aagcggcccttatga

SEQ ID NO: 1564624 - DNA, 15 bp, Homo sapiens
agcggcccttatgag

SEQ ID NO: 1564625 - DNA, 15 bp, Homo sapiens
gcggcccttatgagg

SEQ ID NO: 1564626 - DNA, 15 bp, Homo sapiens
cggcccttatgaggg

SEQ ID NO: 1564627 - DNA, 15 bp, Homo sapiens
ggcccttatgagggc

SEQ ID NO: 1564628 - DNA, 15 bp, Homo sapiens
gcccttatgagggcg

SEQ ID NO: 1564629 - DNA, 15 bp, Homo sapiens
cccttatgagggcgt

SEQ ID NO: 1564630 - DNA, 15 bp, Homo sapiens
ccttatgagggcgtg

SEQ ID NO: 1564631 - DNA, 15 bp, Homo sapiens
cttatgagggcgtga

SEQ ID NO: 1564632 - DNA, 15 bp, Homo sapiens
ttatgagggcgtgac

SEQ ID NO: 1564633 - DNA, 15 bp, Homo sapiens
tatgagggcgtgaca

SEQ ID NO: 1564634 - DNA, 15 bp, Homo sapiens
atgagggcgtgacag

SEQ ID NO: 1564635 - DNA, 15 bp, Homo sapiens
tgagggcgtgacaga

SEQ ID NO: 1564636 - DNA, 15 bp, Homo sapiens
gagggcgtgacagag

SEQ ID NO: 1564637 - DNA, 15 bp, Homo sapiens
agggcgtgacagagg

SEQ ID NO: 1564638 - DNA, 15 bp, Homo sapiens
gggcgtgacagaggg

SEQ ID NO: 1564639 - DNA, 15 bp, Homo sapiens
ggcgtgacagagggc

SEQ ID NO: 1564640 - DNA, 15 bp, Homo sapiens
gcgtgacagagggct

SEQ ID NO: 1564641 - DNA, 15 bp, Homo sapiens
cgtgacagagggctc

SEQ ID NO: 1564642 - DNA, 15 bp, Homo sapiens
gtgacagagggctca

SEQ ID NO: 1564643 - DNA, 15 bp, Homo sapiens
tgacagagggctcac

SEQ ID NO: 1564644 - DNA, 15 bp, Homo sapiens
gacagagggctcacc

SEQ ID NO: 1564645 - DNA, 15 bp, Homo sapiens
acagagggctcacct

SEQ ID NO: 1564646 - DNA, 15 bp, Homo sapiens
cagagggctcacctc

SEQ ID NO: 1564647 - DNA, 15 bp, Homo sapiens
agagggctcacctct

SEQ ID NO: 1564648 - DNA, 15 bp, Homo sapiens
gagggctcacctctt

SEQ ID NO: 1564649 - DNA, 15 bp, Homo sapiens
agggctcacctcttg

SEQ ID NO: 1564650 - DNA, 15 bp, Homo sapiens
gggctcacctcttgc

SEQ ID NO: 1564651 - DNA, 15 bp, Homo sapiens
ggctcacctcttgcc

SEQ ID NO: 1564652 - DNA, 15 bp, Homo sapiens
gctcacctcttgcct

SEQ ID NO: 1564653 - DNA, 15 bp, Homo sapiens
ctcacctcttgcctt

SEQ ID NO: 1564654 - DNA, 15 bp, Homo sapiens
tcacctcttgccttc

SEQ ID NO: 1564655 - DNA, 15 bp, Homo sapiens
cacctcttgccttct

SEQ ID NO: 1564656 - DNA, 15 bp, Homo sapiens
acctcttgccttctt

SEQ ID NO: 1564657 - DNA, 15 bp, Homo sapiens
cctcttgccttcttg

SEQ ID NO: 1564658 - DNA, 15 bp, Homo sapiens
ctcttgccttcttgg

SEQ ID NO: 1564659 - DNA, 15 bp, Homo sapiens
tcttgccttcttggt

SEQ ID NO: 1564660 - DNA, 15 bp, Homo sapiens
cttgccttcttggtc

SEQ ID NO: 1564661 - DNA, 15 bp, Homo sapiens
ttgccttcttggtca

SEQ ID NO: 1564662 - DNA, 15 bp, Homo sapiens
tgccttcttggtcac

SEQ ID NO: 1564663 - DNA, 15 bp, Homo sapiens
gccttcttggtcact

SEQ ID NO: 1564664 - DNA, 15 bp, Homo sapiens
ccttcttggtcactt

SEQ ID NO: 1564665 - DNA, 15 bp, Homo sapiens
cttcttggtcacttc

SEQ ID NO: 1564666 - DNA, 15 bp, Homo sapiens
ttcttggtcacttct

SEQ ID NO: 1564667 - DNA, 15 bp, Homo sapiens
tcttggtcacttctc

SEQ ID NO: 1564668 - DNA, 15 bp, Homo sapiens
cttggtcacttctca

SEQ ID NO: 1564669 - DNA, 15 bp, Homo sapiens
ttggtcacttctcat

SEQ ID NO: 1564670 - DNA, 15 bp, Homo sapiens
tggtcacttctcata

SEQ ID NO: 1564671 - DNA, 15 bp, Homo sapiens
ggtcacttctcataa

SEQ ID NO: 1564672 - DNA, 15 bp, Homo sapiens
gtcacttctcataat

SEQ ID NO: 1564673 - DNA, 15 bp, Homo sapiens
tcacttctcataatg

SEQ ID NO: 1564674 - DNA, 15 bp, Homo sapiens
cacttctcataatgt

SEQ ID NO: 1564675 - DNA, 15 bp, Homo sapiens
acttctcataatgtc

SEQ ID NO: 1564676 - DNA, 15 bp, Homo sapiens
cttctcataatgtcc

SEQ ID NO: 1564677 - DNA, 15 bp, Homo sapiens
ttctcataatgtccc

SEQ ID NO: 1564678 - DNA, 15 bp, Homo sapiens
tctcataatgtccct

SEQ ID NO: 1564679 - DNA, 15 bp, Homo sapiens
ctcataatgtccctt

SEQ ID NO: 1564680 - DNA, 15 bp, Homo sapiens
tcataatgtcccttc

SEQ ID NO: 1564681 - DNA, 15 bp, Homo sapiens
cataatgtcccttca

SEQ ID NO: 1564682 - DNA, 15 bp, Homo sapiens
ataatgtcccttcag

SEQ ID NO: 1564683 - DNA, 15 bp, Homo sapiens
taatgtcccttcagc

SEQ ID NO: 1564684 - DNA, 15 bp, Homo sapiens
aatgtcccttcagca

SEQ ID NO: 1564685 - DNA, 15 bp, Homo sapiens
atgtcccttcagcac

SEQ ID NO: 1564686 - DNA, 15 bp, Homo sapiens
tgtcccttcagcacc

SEQ ID NO: 1564687 - DNA, 15 bp, Homo sapiens
gtcccttcagcacct

SEQ ID NO: 1564688 - DNA, 15 bp, Homo sapiens
tcccttcagcacctg

SEQ ID NO: 1564689 - DNA, 15 bp, Homo sapiens
cccttcagcacctga

SEQ ID NO: 1564690 - DNA, 15 bp, Homo sapiens
ccttcagcacctgac

SEQ ID NO: 1564691 - DNA, 15 bp, Homo sapiens
cttcagcacctgacc

SEQ ID NO: 1564692 - DNA, 15 bp, Homo sapiens
ttcagcacctgaccc

SEQ ID NO: 1564693 - DNA, 15 bp, Homo sapiens
tcagcacctgaccct

SEQ ID NO: 1564694 - DNA, 15 bp, Homo sapiens
cagcacctgacccta

SEQ ID NO: 1564695 - DNA, 15 bp, Homo sapiens
agcacctgaccctat

SEQ ID NO: 1564696 - DNA, 15 bp, Homo sapiens
gcacctgaccctata

SEQ ID NO: 1564697 - DNA, 15 bp, Homo sapiens
cacctgaccctatac

SEQ ID NO: 1564698 - DNA, 15 bp, Homo sapiens
acctgaccctatacc

SEQ ID NO: 1564699 - DNA, 15 bp, Homo sapiens
cctgaccctataccc

SEQ ID NO: 1564700 - DNA, 15 bp, Homo sapiens
ctgaccctataccct

SEQ ID NO: 1564701 - DNA, 15 bp, Homo sapiens
tgaccctataccctc

SEQ ID NO: 1564702 - DNA, 15 bp, Homo sapiens
gaccctataccctcc

SEQ ID NO: 1564703 - DNA, 15 bp, Homo sapiens
accctataccctccg

SEQ ID NO: 1564704 - DNA, 15 bp, Homo sapiens
ccctataccctccgg

SEQ ID NO: 1564705 - DNA, 15 bp, Homo sapiens
cctataccctccggt

SEQ ID NO: 1564706 - DNA, 15 bp, Homo sapiens
ctataccctccggtt

SEQ ID NO: 1564707 - DNA, 15 bp, Homo sapiens
tataccctccggtta

SEQ ID NO: 1564708 - DNA, 15 bp, Homo sapiens
ataccctccggttat

SEQ ID NO: 1564709 - DNA, 15 bp, Homo sapiens
taccctccggttatt

SEQ ID NO: 1564710 - DNA, 15 bp, Homo sapiens
accctccggttattc

SEQ ID NO: 1564711 - DNA, 15 bp, Homo sapiens
ccctccggttattcc

SEQ ID NO: 1564712 - DNA, 15 bp, Homo sapiens
cctccggttattcct

SEQ ID NO: 1564713 - DNA, 15 bp, Homo sapiens
ctccggttattcctt

SEQ ID NO: 1564714 - DNA, 15 bp, Homo sapiens
tccggttattccttg

SEQ ID NO: 1564715 - DNA, 15 bp, Homo sapiens
ccggttattccttgg

SEQ ID NO: 1564716 - DNA, 15 bp, Homo sapiens
cggttattccttggt

SEQ ID NO: 1564717 - DNA, 15 bp, Homo sapiens
ggttattccttggtt

SEQ ID NO: 1564718 - DNA, 15 bp, Homo sapiens
gttattccttggtta

SEQ ID NO: 1564719 - DNA, 15 bp, Homo sapiens
ttattccttggttat

SEQ ID NO: 1564720 - DNA, 15 bp, Homo sapiens
tattccttggttata

SEQ ID NO: 1564721 - DNA, 15 bp, Homo sapiens
attccttggttatat

SEQ ID NO: 1564722 - DNA, 15 bp, Homo sapiens
ttccttggttatatt

SEQ ID NO: 1564723 - DNA, 15 bp, Homo sapiens
tccttggttatatta

SEQ ID NO: 1564724 - DNA, 15 bp, Homo sapiens
ccttggttatattag

SEQ ID NO: 1564725 - DNA, 15 bp, Homo sapiens
cttggttatattagt

SEQ ID NO: 1564726 - DNA, 15 bp, Homo sapiens
ttggttatattagta

SEQ ID NO: 1564727 - DNA, 15 bp, Homo sapiens
tggttatattagtaa

SEQ ID NO: 1564728 - DNA, 15 bp, Homo sapiens
ggttatattagtaat

SEQ ID NO: 1564729 - DNA, 15 bp, Homo sapiens
gttatattagtaata

SEQ ID NO: 1564730 - DNA, 15 bp, Homo sapiens
ttatattagtaatac

SEQ ID NO: 1564731 - DNA, 15 bp, Homo sapiens
tatattagtaataca

SEQ ID NO: 1564732 - DNA, 15 bp, Homo sapiens
atattagtaatacaa

SEQ ID NO: 1564733 - DNA, 15 bp, Homo sapiens
tattagtaatacaac

SEQ ID NO: 1564734 - DNA, 15 bp, Homo sapiens
attagtaatacaaca

SEQ ID NO: 1564735 - DNA, 15 bp, Homo sapiens
ttagtaatacaacaa

SEQ ID NO: 1564736 - DNA, 15 bp, Homo sapiens
tagtaatacaacaaa

SEQ ID NO: 1564737 - DNA, 15 bp, Homo sapiens
agtaatacaacaaag

SEQ ID NO: 1564738 - DNA, 15 bp, Homo sapiens
gtaatacaacaaaga

SEQ ID NO: 1564739 - DNA, 15 bp, Homo sapiens
taatacaacaaagag

SEQ ID NO: 1564740 - DNA, 15 bp, Homo sapiens
aatacaacaaagagt

SEQ ID NO: 1564741 - DNA, 15 bp, Homo sapiens
atacaacaaagagtc

SEQ ID NO: 1564742 - DNA, 15 bp, Homo sapiens
tacaacaaagagtca

SEQ ID NO: 1564743 - DNA, 15 bp, Homo sapiens
acaacaaagagtcat

SEQ ID NO: 1564744 - DNA, 15 bp, Homo sapiens
caacaaagagtcata

SEQ ID NO: 1564745 - DNA, 15 bp, Homo sapiens
aacaaagagtcatat

SEQ ID NO: 1564746 - DNA, 15 bp, Homo sapiens
acaaagagtcatatt

SEQ ID NO: 1564747 - DNA, 15 bp, Homo sapiens
caaagagtcatatta

SEQ ID NO: 1564748 - DNA, 15 bp, Homo sapiens
aaagagtcatattaa

SEQ ID NO: 1564749 - DNA, 15 bp, Homo sapiens
aagagtcatattaaa

SEQ ID NO: 1564750 - DNA, 15 bp, Homo sapiens
agagtcatattaaag

SEQ ID NO: 1564751 - DNA, 15 bp, Homo sapiens
gagtcatattaaagg

SEQ ID NO: 1564752 - DNA, 15 bp, Homo sapiens
agtcatattaaaggc

SEQ ID NO: 1564753 - DNA, 15 bp, Homo sapiens
gtcatattaaaggct

SEQ ID NO: 1564754 - DNA, 15 bp, Homo sapiens
tcatattaaaggcta

SEQ ID NO: 1564755 - DNA, 15 bp, Homo sapiens
catattaaaggctaa

SEQ ID NO: 1564756 - DNA, 15 bp, Homo sapiens
atattaaaggctaat

SEQ ID NO: 1564757 - DNA, 15 bp, Homo sapiens
tattaaaggctaata

SEQ ID NO: 1564758 - DNA, 15 bp, Homo sapiens
attaaaggctaataa

SEQ ID NO: 1564759 - DNA, 15 bp, Homo sapiens
ttaaaggctaataat

SEQ ID NO: 1564760 - DNA, 15 bp, Homo sapiens
taaaggctaataatt

SEQ ID NO: 1564761 - DNA, 15 bp, Homo sapiens
aaaggctaataatta

SEQ ID NO: 1564762 - DNA, 15 bp, Homo sapiens
aaggctaataattaa

SEQ ID NO: 1564763 - DNA, 15 bp, Homo sapiens
aggctaataattaat

SEQ ID NO: 1564764 - DNA, 15 bp, Homo sapiens
ggctaataattaata

SEQ ID NO: 1564765 - DNA, 15 bp, Homo sapiens
gctaataattaataa

SEQ ID NO: 1564766 - DNA, 15 bp, Homo sapiens
ctaataattaataat

SEQ ID NO: 1564767 - DNA, 15 bp, Homo sapiens
taataattaataatg

SEQ ID NO: 1564768 - DNA, 15 bp, Homo sapiens
aataattaataatgt

SEQ ID NO: 1564769 - DNA, 15 bp, Homo sapiens
ataattaataatgtc

SEQ ID NO: 1564770 - DNA, 15 bp, Homo sapiens
taattaataatgtct

SEQ ID NO: 1564771 - DNA, 15 bp, Homo sapiens
aattaataatgtcta

SEQ ID NO: 1564772 - DNA, 15 bp, Homo sapiens
attaataatgtctat

SEQ ID NO: 1564773 - DNA, 15 bp, Homo sapiens
ttaataatgtctata

SEQ ID NO: 1564774 - DNA, 15 bp, Homo sapiens
taataatgtctatac

SEQ ID NO: 1564775 - DNA, 15 bp, Homo sapiens
aataatgtctatact

SEQ ID NO: 1564776 - DNA, 15 bp, Homo sapiens
ataatgtctatacta

SEQ ID NO: 1564777 - DNA, 15 bp, Homo sapiens
taatgtctatactaa

SEQ ID NO: 1564778 - DNA, 15 bp, Homo sapiens
aatgtctatactaat

SEQ ID NO: 1564779 - DNA, 15 bp, Homo sapiens
atgtctatactaatg

SEQ ID NO: 1564780 - DNA, 15 bp, Homo sapiens
tgtctatactaatga

SEQ ID NO: 1564781 - DNA, 15 bp, Homo sapiens
gtctatactaatgat

SEQ ID NO: 1564782 - DNA, 15 bp, Homo sapiens
tctatactaatgatt

SEQ ID NO: 1564783 - DNA, 15 bp, Homo sapiens
ctatactaatgattg

SEQ ID NO: 1564784 - DNA, 15 bp, Homo sapiens
tatactaatgattga

SEQ ID NO: 1564785 - DNA, 15 bp, Homo sapiens
atactaatgattgat

SEQ ID NO: 1564786 - DNA, 15 bp, Homo sapiens
tactaatgattgata

SEQ ID NO: 1564787 - DNA, 15 bp, Homo sapiens
actaatgattgataa

SEQ ID NO: 1564788 - DNA, 15 bp, Homo sapiens
ctaatgattgataat

SEQ ID NO: 1564789 - DNA, 15 bp, Homo sapiens
taatgattgataatg

SEQ ID NO: 1564790 - DNA, 15 bp, Homo sapiens
aatgattgataatgc

SEQ ID NO: 1564791 - DNA, 15 bp, Homo sapiens
atgattgataatgcc

SEQ ID NO: 1564792 - DNA, 15 bp, Homo sapiens
tgattgataatgccc

SEQ ID NO: 1564793 - DNA, 15 bp, Homo sapiens
gattgataatgccca

SEQ ID NO: 1564794 - DNA, 15 bp, Homo sapiens
attgataatgcccat

SEQ ID NO: 1564795 - DNA, 15 bp, Homo sapiens
ttgataatgcccatg

SEQ ID NO: 1564796 - DNA, 15 bp, Homo sapiens
tgataatgcccatga

SEQ ID NO: 1564797 - DNA, 15 bp, Homo sapiens
gataatgcccatgac

SEQ ID NO: 1564798 - DNA, 15 bp, Homo sapiens
ataatgcccatgacc

SEQ ID NO: 1564799 - DNA, 15 bp, Homo sapiens
taatgcccatgacca

SEQ ID NO: 1564800 - DNA, 15 bp, Homo sapiens
aatgcccatgaccat

SEQ ID NO: 1564801 - DNA, 15 bp, Homo sapiens
atgcccatgaccatc

SEQ ID NO: 1564802 - DNA, 15 bp, Homo sapiens
tgcccatgaccatct

SEQ ID NO: 1564803 - DNA, 15 bp, Homo sapiens
gcccatgaccatctc

SEQ ID NO: 1564804 - DNA, 15 bp, Homo sapiens
cccatgaccatctct

SEQ ID NO: 1564805 - DNA, 15 bp, Homo sapiens
ccatgaccatctcta

SEQ ID NO: 1564806 - DNA, 15 bp, Homo sapiens
catgaccatctctat

SEQ ID NO: 1564807 - DNA, 15 bp, Homo sapiens
atgaccatctctata

SEQ ID NO: 1564808 - DNA, 15 bp, Homo sapiens
tgaccatctctatat

SEQ ID NO: 1564809 - DNA, 15 bp, Homo sapiens
gaccatctctatatc

SEQ ID NO: 1564810 - DNA, 15 bp, Homo sapiens
accatctctatatct

SEQ ID NO: 1564811 - DNA, 15 bp, Homo sapiens
ccatctctatatcta

SEQ ID NO: 1564812 - DNA, 15 bp, Homo sapiens
catctctatatctaa

SEQ ID NO: 1564813 - DNA, 15 bp, Homo sapiens
atctctatatctaat

SEQ ID NO: 1564814 - DNA, 15 bp, Homo sapiens
tctctatatctaatt

SEQ ID NO: 1564815 - DNA, 15 bp, Homo sapiens
ctctatatctaattt

SEQ ID NO: 1564816 - DNA, 15 bp, Homo sapiens
tctatatctaatttg

SEQ ID NO: 1564817 - DNA, 15 bp, Homo sapiens
ctatatctaatttgt

SEQ ID NO: 1564818 - DNA, 15 bp, Homo sapiens
tatatctaatttgta

SEQ ID NO: 1564819 - DNA, 15 bp, Homo sapiens
atatctaatttgtat

SEQ ID NO: 1564820 - DNA, 15 bp, Homo sapiens
tatctaatttgtatt

SEQ ID NO: 1564821 - DNA, 15 bp, Homo sapiens
atctaatttgtatta

SEQ ID NO: 1564822 - DNA, 15 bp, Homo sapiens
tctaatttgtattat

SEQ ID NO: 1564823 - DNA, 15 bp, Homo sapiens
ctaatttgtattata

SEQ ID NO: 1564824 - DNA, 15 bp, Homo sapiens
taatttgtattataa

SEQ ID NO: 1564825 - DNA, 15 bp, Homo sapiens
aatttgtattataac

SEQ ID NO: 1564826 - DNA, 15 bp, Homo sapiens
atttgtattataact

SEQ ID NO: 1564827 - DNA, 15 bp, Homo sapiens
tttgtattataacta

SEQ ID NO: 1564828 - DNA, 15 bp, Homo sapiens
ttgtattataactat

SEQ ID NO: 1564829 - DNA, 15 bp, Homo sapiens
tgtattataactatt

SEQ ID NO: 1564830 - DNA, 15 bp, Homo sapiens
gtattataactattc

SEQ ID NO: 1564831 - DNA, 15 bp, Homo sapiens
tattataactattct

SEQ ID NO: 1564832 - DNA, 15 bp, Homo sapiens
attataactattctc

SEQ ID NO: 1564833 - DNA, 15 bp, Homo sapiens
ttataactattctca

SEQ ID NO: 1564834 - DNA, 15 bp, Homo sapiens
tataactattctcat

SEQ ID NO: 1564835 - DNA, 15 bp, Homo sapiens
ataactattctcatt

SEQ ID NO: 1564836 - DNA, 15 bp, Homo sapiens
taactattctcattc

SEQ ID NO: 1564837 - DNA, 15 bp, Homo sapiens
aactattctcattct

SEQ ID NO: 1564838 - DNA, 15 bp, Homo sapiens
actattctcattcta

SEQ ID NO: 1564839 - DNA, 15 bp, Homo sapiens
ctattctcattctaa

SEQ ID NO: 1564840 - DNA, 15 bp, Homo sapiens
tattctcattctaac

SEQ ID NO: 1564841 - DNA, 15 bp, Homo sapiens
attctcattctaact

SEQ ID NO: 1564842 - DNA, 15 bp, Homo sapiens
ttctcattctaacta

SEQ ID NO: 1564843 - DNA, 15 bp, Homo sapiens
tctcattctaactat

SEQ ID NO: 1564844 - DNA, 15 bp, Homo sapiens
ctcattctaactatt

SEQ ID NO: 1564845 - DNA, 15 bp, Homo sapiens
tcattctaactattt

SEQ ID NO: 1564846 - DNA, 15 bp, Homo sapiens
cattctaactatttt

SEQ ID NO: 1564847 - DNA, 15 bp, Homo sapiens
attctaactattttc

SEQ ID NO: 1564848 - DNA, 15 bp, Homo sapiens
ttctaactattttct

SEQ ID NO: 1564849 - DNA, 15 bp, Homo sapiens
tctaactattttctt

SEQ ID NO: 1564850 - DNA, 15 bp, Homo sapiens
ctaactattttcttt

SEQ ID NO: 1564851 - DNA, 15 bp, Homo sapiens
taactattttcttta

SEQ ID NO: 1564852 - DNA, 15 bp, Homo sapiens
aactattttctttat

SEQ ID NO: 1564853 - DNA, 15 bp, Homo sapiens
actattttctttatt

SEQ ID NO: 1564854 - DNA, 15 bp, Homo sapiens
ctattttctttatta

SEQ ID NO: 1564855 - DNA, 15 bp, Homo sapiens
tattttctttattat

SEQ ID NO: 1564856 - DNA, 15 bp, Homo sapiens
attttctttattata

SEQ ID NO: 1564857 - DNA, 15 bp, Homo sapiens
ttttctttattatac

SEQ ID NO: 1564858 - DNA, 15 bp, Homo sapiens
tttctttattatact

SEQ ID NO: 1564859 - DNA, 15 bp, Homo sapiens
ttctttattatactg

SEQ ID NO: 1564860 - DNA, 15 bp, Homo sapiens
tctttattatactga

SEQ ID NO: 1564861 - DNA, 15 bp, Homo sapiens
ctttattatactgaa

SEQ ID NO: 1564862 - DNA, 15 bp, Homo sapiens
tttattatactgaaa

SEQ ID NO: 1564863 - DNA, 15 bp, Homo sapiens
ttattatactgaaac

SEQ ID NO: 1564864 - DNA, 15 bp, Homo sapiens
tattatactgaaaca

SEQ ID NO: 1564865 - DNA, 15 bp, Homo sapiens
attatactgaaacag

SEQ ID NO: 1564866 - DNA, 15 bp, Homo sapiens
ttatactgaaacagt

SEQ ID NO: 1564867 - DNA, 15 bp, Homo sapiens
tatactgaaacagtc

SEQ ID NO: 1564868 - DNA, 15 bp, Homo sapiens
atactgaaacagtct

SEQ ID NO: 1564869 - DNA, 15 bp, Homo sapiens
tactgaaacagtctg

SEQ ID NO: 1564870 - DNA, 15 bp, Homo sapiens
actgaaacagtctgt

SEQ ID NO: 1564871 - DNA, 15 bp, Homo sapiens
ctgaaacagtctgtg

SEQ ID NO: 1564872 - DNA, 15 bp, Homo sapiens
tgaaacagtctgtgc

SEQ ID NO: 1564873 - DNA, 15 bp, Homo sapiens
gaaacagtctgtgcc

SEQ ID NO: 1564874 - DNA, 15 bp, Homo sapiens
aaacagtctgtgcct

SEQ ID NO: 1564875 - DNA, 15 bp, Homo sapiens
aacagtctgtgcctt

SEQ ID NO: 1564876 - DNA, 15 bp, Homo sapiens
acagtctgtgccttc

SEQ ID NO: 1564877 - DNA, 15 bp, Homo sapiens
cagtctgtgccttca

SEQ ID NO: 1564878 - DNA, 15 bp, Homo sapiens
agtctgtgccttcaa

SEQ ID NO: 1564879 - DNA, 15 bp, Homo sapiens
gtctgtgccttcaat

SEQ ID NO: 1564880 - DNA, 15 bp, Homo sapiens
tctgtgccttcaatc

SEQ ID NO: 1564881 - DNA, 15 bp, Homo sapiens
ctgtgccttcaatct

SEQ ID NO: 1564882 - DNA, 15 bp, Homo sapiens
tgtgccttcaatctc

SEQ ID NO: 1564883 - DNA, 15 bp, Homo sapiens
gtgccttcaatctct

SEQ ID NO: 1564884 - DNA, 15 bp, Homo sapiens
tgccttcaatctctt

SEQ ID NO: 1564885 - DNA, 15 bp, Homo sapiens
gccttcaatctcttg

SEQ ID NO: 1564886 - DNA, 15 bp, Homo sapiens
ccttcaatctcttgc

SEQ ID NO: 1564887 - DNA, 15 bp, Homo sapiens
cttcaatctcttgcc

SEQ ID NO: 1564888 - DNA, 15 bp, Homo sapiens
ttcaatctcttgcct

SEQ ID NO: 1564889 - DNA, 15 bp, Homo sapiens
tcaatctcttgcctc

SEQ ID NO: 1564890 - DNA, 15 bp, Homo sapiens
caatctcttgcctcg

SEQ ID NO: 1564891 - DNA, 15 bp, Homo sapiens
aatctcttgcctcgg

SEQ ID NO: 1564892 - DNA, 15 bp, Homo sapiens
atctcttgcctcggc

SEQ ID NO: 1564893 - DNA, 15 bp, Homo sapiens
tctcttgcctcggca

SEQ ID NO: 1564894 - DNA, 15 bp, Homo sapiens
ctcttgcctcggcac

SEQ ID NO: 1564895 - DNA, 15 bp, Homo sapiens
tcttgcctcggcacc

SEQ ID NO: 1564896 - DNA, 15 bp, Homo sapiens
cttgcctcggcacct

SEQ ID NO: 1564897 - DNA, 15 bp, Homo sapiens
ttgcctcggcacctg

SEQ ID NO: 1564898 - DNA, 15 bp, Homo sapiens
tgcctcggcacctgg

SEQ ID NO: 1564899 - DNA, 15 bp, Homo sapiens
gcctcggcacctggg

SEQ ID NO: 1564900 - DNA, 15 bp, Homo sapiens
cctcggcacctgggt

SEQ ID NO: 1564901 - DNA, 15 bp, Homo sapiens
ctcggcacctgggta

SEQ ID NO: 1564902 - DNA, 15 bp, Homo sapiens
tcggcacctgggtaa

SEQ ID NO: 1564903 - DNA, 15 bp, Homo sapiens
cggcacctgggtaat

SEQ ID NO: 1564904 - DNA, 15 bp, Homo sapiens
ggcacctgggtaatc

SEQ ID NO: 1564905 - DNA, 15 bp, Homo sapiens
gcacctgggtaatcc

SEQ ID NO: 1564906 - DNA, 15 bp, Homo sapiens
cacctgggtaatcct

SEQ ID NO: 1564907 - DNA, 15 bp, Homo sapiens
acctgggtaatcctc

SEQ ID NO: 1564908 - DNA, 15 bp, Homo sapiens
cctgggtaatcctcc

SEQ ID NO: 1564909 - DNA, 15 bp, Homo sapiens
ctgggtaatcctccg

SEQ ID NO: 1564910 - DNA, 15 bp, Homo sapiens
tgggtaatcctccgc

SEQ ID NO: 1564911 - DNA, 15 bp, Homo sapiens
gggtaatcctccgcc

SEQ ID NO: 1564912 - DNA, 15 bp, Homo sapiens
ggtaatcctccgccc

SEQ ID NO: 1564913 - DNA, 15 bp, Homo sapiens
gtaatcctccgccca

SEQ ID NO: 1564914 - DNA, 15 bp, Homo sapiens
taatcctccgcccac

SEQ ID NO: 1564915 - DNA, 15 bp, Homo sapiens
aatcctccgcccaca

SEQ ID NO: 1564916 - DNA, 15 bp, Homo sapiens
atcctccgcccacag

SEQ ID NO: 1564917 - DNA, 15 bp, Homo sapiens
tcctccgcccacagt

SEQ ID NO: 1564918 - DNA, 15 bp, Homo sapiens
cctccgcccacagtg

SEQ ID NO: 1564919 - DNA, 15 bp, Homo sapiens
ctccgcccacagtga

SEQ ID NO: 1564920 - DNA, 15 bp, Homo sapiens
tccgcccacagtgac

SEQ ID NO: 1564921 - DNA, 15 bp, Homo sapiens
ccgcccacagtgaca

SEQ ID NO: 1564922 - DNA, 15 bp, Homo sapiens
cgcccacagtgacaa

SEQ ID NO: 1564923 - DNA, 15 bp, Homo sapiens
gcccacagtgacaag

SEQ ID NO: 1564924 - DNA, 15 bp, Homo sapiens
cccacagtgacaaga

SEQ ID NO: 1564925 - DNA, 15 bp, Homo sapiens
ccacagtgacaagag

SEQ ID NO: 1564926 - DNA, 15 bp, Homo sapiens
cacagtgacaagagt

SEQ ID NO: 1564927 - DNA, 15 bp, Homo sapiens
acagtgacaagagtg

SEQ ID NO: 1564928 - DNA, 15 bp, Homo sapiens
cagtgacaagagtga

SEQ ID NO: 1564929 - DNA, 15 bp, Homo sapiens
agtgacaagagtgaa

SEQ ID NO: 1564930 - DNA, 15 bp, Homo sapiens
gtgacaagagtgaaa

SEQ ID NO: 1564931 - DNA, 15 bp, Homo sapiens
tgacaagagtgaaac

SEQ ID NO: 1564932 - DNA, 15 bp, Homo sapiens
gacaagagtgaaact

SEQ ID NO: 1564933 - DNA, 15 bp, Homo sapiens
caagagtgaaactct

SEQ ID NO: 1564934 - DNA, 15 bp, Homo sapiens
aagagtgaaactctg

SEQ ID NO: 1564935 - DNA, 15 bp, Homo sapiens
gtgaaactctgtctt

SEQ ID NO: 1564936 - DNA, 15 bp, Homo sapiens
tgaaactctgtctta

SEQ ID NO: 1564937 - DNA, 15 bp, Homo sapiens
gaaactctgtcttaa

SEQ ID NO: 1564938 - DNA, 15 bp, Homo sapiens
aaactctgtcttaaa

SEQ ID NO: 1564939 - DNA, 15 bp, Homo sapiens
aactctgtcttaaaa

SEQ ID NO: 1564940 - DNA, 15 bp, Homo sapiens
aaaaaaattaagaat

SEQ ID NO: 1564941 - DNA, 15 bp, Homo sapiens
aaaaaattaagaatt

SEQ ID NO: 1564942 - DNA, 15 bp, Homo sapiens
aaaaattaagaattt

SEQ ID NO: 1564943 - DNA, 15 bp, Homo sapiens
aaaattaagaatttc

SEQ ID NO: 1564944 - DNA, 15 bp, Homo sapiens
aaattaagaatttca

SEQ ID NO: 1564945 - DNA, 15 bp, Homo sapiens
aattaagaatttcaa

SEQ ID NO: 1564946 - DNA, 15 bp, Homo sapiens
attaagaatttcaag

SEQ ID NO: 1564947 - DNA, 15 bp, Homo sapiens
ttaagaatttcaaga

SEQ ID NO: 1564948 - DNA, 15 bp, Homo sapiens
taagaatttcaagat

SEQ ID NO: 1564949 - DNA, 15 bp, Homo sapiens
aagaatttcaagata

SEQ ID NO: 1564950 - DNA, 15 bp, Homo sapiens
agaatttcaagatag

SEQ ID NO: 1564951 - DNA, 15 bp, Homo sapiens
gaatttcaagatagg

SEQ ID NO: 1564952 - DNA, 15 bp, Homo sapiens
aatttcaagatagga

SEQ ID NO: 1564953 - DNA, 15 bp, Homo sapiens
atttcaagataggac

SEQ ID NO: 1564954 - DNA, 15 bp, Homo sapiens
tttcaagataggaca

SEQ ID NO: 1564955 - DNA, 15 bp, Homo sapiens
ttcaagataggacag

SEQ ID NO: 1564956 - DNA, 15 bp, Homo sapiens
tcaagataggacagc

SEQ ID NO: 1564957 - DNA, 15 bp, Homo sapiens
caagataggacagca

SEQ ID NO: 1564958 - DNA, 15 bp, Homo sapiens
aagataggacagcag

SEQ ID NO: 1564959 - DNA, 15 bp, Homo sapiens
agataggacagcaga

SEQ ID NO: 1564960 - DNA, 15 bp, Homo sapiens
gataggacagcagag

SEQ ID NO: 1564961 - DNA, 15 bp, Homo sapiens
ataggacagcagagc

SEQ ID NO: 1564962 - DNA, 15 bp, Homo sapiens
taggacagcagagct

SEQ ID NO: 1564963 - DNA, 15 bp, Homo sapiens
aggacagcagagctt

SEQ ID NO: 1564964 - DNA, 15 bp, Homo sapiens
ggacagcagagcttt

SEQ ID NO: 1564965 - DNA, 15 bp, Homo sapiens
gacagcagagcttta

SEQ ID NO: 1564966 - DNA, 15 bp, Homo sapiens
acagcagagctttaa

SEQ ID NO: 1564967 - DNA, 15 bp, Homo sapiens
cagcagagctttaaa

SEQ ID NO: 1564968 - DNA, 15 bp, Homo sapiens
agcagagctttaaat

SEQ ID NO: 1564969 - DNA, 15 bp, Homo sapiens
gcagagctttaaatt

SEQ ID NO: 1564970 - DNA, 15 bp, Homo sapiens
cagagctttaaattt

SEQ ID NO: 1564971 - DNA, 15 bp, Homo sapiens
agagctttaaatttt

SEQ ID NO: 1564972 - DNA, 15 bp, Homo sapiens
gagctttaaattttt

SEQ ID NO: 1564973 - DNA, 15 bp, Homo sapiens
agctttaaatttttt

SEQ ID NO: 1564974 - DNA, 15 bp, Homo sapiens
gctttaaattttttt

SEQ ID NO: 1564975 - DNA, 15 bp, Homo sapiens
ctttaaatttttttt

SEQ ID NO: 1564976 - DNA, 15 bp, Homo sapiens
tttaaattttttttt

SEQ ID NO: 1564977 - DNA, 15 bp, Homo sapiens
aattttttttttttc

SEQ ID NO: 1564978 - DNA, 15 bp, Homo sapiens
attttttttttttcc

SEQ ID NO: 1564979 - DNA, 15 bp, Homo sapiens
ttttttttttcctag

SEQ ID NO: 1564980 - DNA, 15 bp, Homo sapiens
tttttttttcctaga

SEQ ID NO: 1564981 - DNA, 15 bp, Homo sapiens
ttttttttcctagag

SEQ ID NO: 1564982 - DNA, 15 bp, Homo sapiens
tttttttcctagagg

SEQ ID NO: 1564983 - DNA, 15 bp, Homo sapiens
ttttttcctagaggc

SEQ ID NO: 1564984 - DNA, 15 bp, Homo sapiens
tttttcctagaggca

SEQ ID NO: 1564985 - DNA, 15 bp, Homo sapiens
ttttcctagaggcag

SEQ ID NO: 1564986 - DNA, 15 bp, Homo sapiens
tttcctagaggcaga

SEQ ID NO: 1564987 - DNA, 15 bp, Homo sapiens
ttcctagaggcagag

SEQ ID NO: 1564988 - DNA, 15 bp, Homo sapiens
tcctagaggcagagt

SEQ ID NO: 1564989 - DNA, 15 bp, Homo sapiens
cctagaggcagagtc

SEQ ID NO: 1564990 - DNA, 15 bp, Homo sapiens
ctagaggcagagtct

SEQ ID NO: 1564991 - DNA, 15 bp, Homo sapiens
tagaggcagagtctt

SEQ ID NO: 1564992 - DNA, 15 bp, Homo sapiens
agaggcagagtcttg

SEQ ID NO: 1564993 - DNA, 15 bp, Homo sapiens
gaggcagagtcttgc

SEQ ID NO: 1564994 - DNA, 15 bp, Homo sapiens
aggcagagtcttgct

SEQ ID NO: 1564995 - DNA, 15 bp, Homo sapiens
ggcagagtcttgctc

SEQ ID NO: 1564996 - DNA, 15 bp, Homo sapiens
gcagagtcttgctct

SEQ ID NO: 1564997 - DNA, 15 bp, Homo sapiens
cagagtcttgctctc

SEQ ID NO: 1564998 - DNA, 15 bp, Homo sapiens
agagtcttgctctct

SEQ ID NO: 1564999 - DNA, 15 bp, Homo sapiens
agtcttgctctcttg

SEQ ID NO: 1565000 - DNA, 15 bp, Homo sapiens
gtcttgctctcttgc

SEQ ID NO: 1565001 - DNA, 15 bp, Homo sapiens
tcttgctctcttgcc

SEQ ID NO: 1565002 - DNA, 15 bp, Homo sapiens
cttgctctcttgccc

SEQ ID NO: 1565003 - DNA, 15 bp, Homo sapiens
ttgctctcttgccca

SEQ ID NO: 1565004 - DNA, 15 bp, Homo sapiens
tgctctcttgcccag

SEQ ID NO: 1565005 - DNA, 15 bp, Homo sapiens
gctctcttgcccagg

SEQ ID NO: 1565006 - DNA, 15 bp, Homo sapiens
ctctcttgcccaggc

SEQ ID NO: 1565007 - DNA, 15 bp, Homo sapiens
tctcttgcccaggct

SEQ ID NO: 1565008 - DNA, 15 bp, Homo sapiens
ctcttgcccaggctg

SEQ ID NO: 1565009 - DNA, 15 bp, Homo sapiens
cttgcccaggctggg

SEQ ID NO: 1565010 - DNA, 15 bp, Homo sapiens
ttgcccaggctgggg

SEQ ID NO: 1565011 - DNA, 15 bp, Homo sapiens
tgcccaggctggggt

SEQ ID NO: 1565012 - DNA, 15 bp, Homo sapiens
gcccaggctggggtg

SEQ ID NO: 1565013 - DNA, 15 bp, Homo sapiens
cccaggctggggtgc

SEQ ID NO: 1565014 - DNA, 15 bp, Homo sapiens
caggctggggtgcat

SEQ ID NO: 1565015 - DNA, 15 bp, Homo sapiens
aggctggggtgcatt

SEQ ID NO: 1565016 - DNA, 15 bp, Homo sapiens
ggctggggtgcattg

SEQ ID NO: 1565017 - DNA, 15 bp, Homo sapiens
gctggggtgcattgt

SEQ ID NO: 1565018 - DNA, 15 bp, Homo sapiens
ctggggtgcattgtt

SEQ ID NO: 1565019 - DNA, 15 bp, Homo sapiens
tggggtgcattgttg

SEQ ID NO: 1565020 - DNA, 15 bp, Homo sapiens
ggggtgcattgttgc

SEQ ID NO: 1565021 - DNA, 15 bp, Homo sapiens
gggtgcattgttgca

SEQ ID NO: 1565022 - DNA, 15 bp, Homo sapiens
ggtgcattgttgcaa

SEQ ID NO: 1565023 - DNA, 15 bp, Homo sapiens
gtgcattgttgcaat

SEQ ID NO: 1565024 - DNA, 15 bp, Homo sapiens
tgcattgttgcaatc

SEQ ID NO: 1565025 - DNA, 15 bp, Homo sapiens
gcattgttgcaatca

SEQ ID NO: 1565026 - DNA, 15 bp, Homo sapiens
cattgttgcaatcac

SEQ ID NO: 1565027 - DNA, 15 bp, Homo sapiens
attgttgcaatcaca

SEQ ID NO: 1565028 - DNA, 15 bp, Homo sapiens
ttgttgcaatcacat

SEQ ID NO: 1565029 - DNA, 15 bp, Homo sapiens
tgttgcaatcacata

SEQ ID NO: 1565030 - DNA, 15 bp, Homo sapiens
gttgcaatcacatat

SEQ ID NO: 1565031 - DNA, 15 bp, Homo sapiens
ttgcaatcacatatc

SEQ ID NO: 1565032 - DNA, 15 bp, Homo sapiens
tgcaatcacatatca

SEQ ID NO: 1565033 - DNA, 15 bp, Homo sapiens
gcaatcacatatcac

SEQ ID NO: 1565034 - DNA, 15 bp, Homo sapiens
caatcacatatcact

SEQ ID NO: 1565035 - DNA, 15 bp, Homo sapiens
aatcacatatcactg

SEQ ID NO: 1565036 - DNA, 15 bp, Homo sapiens
atcacatatcactgc

SEQ ID NO: 1565037 - DNA, 15 bp, Homo sapiens
tcacatatcactgca

SEQ ID NO: 1565038 - DNA, 15 bp, Homo sapiens
cacatatcactgcag

SEQ ID NO: 1565039 - DNA, 15 bp, Homo sapiens
acatatcactgcagc

SEQ ID NO: 1565040 - DNA, 15 bp, Homo sapiens
catatcactgcagcc

SEQ ID NO: 1565041 - DNA, 15 bp, Homo sapiens
atatcactgcagcct

SEQ ID NO: 1565042 - DNA, 15 bp, Homo sapiens
tatcactgcagcctt

SEQ ID NO: 1565043 - DNA, 15 bp, Homo sapiens
atcactgcagccttg

SEQ ID NO: 1565044 - DNA, 15 bp, Homo sapiens
cactgcagccttgag

SEQ ID NO: 1565045 - DNA, 15 bp, Homo sapiens
actgcagccttgagc

SEQ ID NO: 1565046 - DNA, 15 bp, Homo sapiens
ctgcagccttgagct

SEQ ID NO: 1565047 - DNA, 15 bp, Homo sapiens
tgcagccttgagctc

SEQ ID NO: 1565048 - DNA, 15 bp, Homo sapiens
gcagccttgagctcc

SEQ ID NO: 1565049 - DNA, 15 bp, Homo sapiens
cagccttgagctccc

SEQ ID NO: 1565050 - DNA, 15 bp, Homo sapiens
agccttgagctcccg

SEQ ID NO: 1565051 - DNA, 15 bp, Homo sapiens
gccttgagctcccgg

SEQ ID NO: 1565052 - DNA, 15 bp, Homo sapiens
ccttgagctcccggg

SEQ ID NO: 1565053 - DNA, 15 bp, Homo sapiens
cttgagctcccgggc

SEQ ID NO: 1565054 - DNA, 15 bp, Homo sapiens
ttgagctcccgggct

SEQ ID NO: 1565055 - DNA, 15 bp, Homo sapiens
tgagctcccgggctc

SEQ ID NO: 1565056 - DNA, 15 bp, Homo sapiens
gagctcccgggctca

SEQ ID NO: 1565057 - DNA, 15 bp, Homo sapiens
agctcccgggctcaa

SEQ ID NO: 1565058 - DNA, 15 bp, Homo sapiens
gctcccgggctcaag

SEQ ID NO: 1565059 - DNA, 15 bp, Homo sapiens
ctcccgggctcaagt

SEQ ID NO: 1565060 - DNA, 15 bp, Homo sapiens
tcccgggctcaagtg

SEQ ID NO: 1565061 - DNA, 15 bp, Homo sapiens
cccgggctcaagtgg

SEQ ID NO: 1565062 - DNA, 15 bp, Homo sapiens
ccgggctcaagtggt

SEQ ID NO: 1565063 - DNA, 15 bp, Homo sapiens
cgggctcaagtggtc

SEQ ID NO: 1565064 - DNA, 15 bp, Homo sapiens
gggctcaagtggtca

SEQ ID NO: 1565065 - DNA, 15 bp, Homo sapiens
ggctcaagtggtcat

SEQ ID NO: 1565066 - DNA, 15 bp, Homo sapiens
gctcaagtggtcatc

SEQ ID NO: 1565067 - DNA, 15 bp, Homo sapiens
ctcaagtggtcatcc

SEQ ID NO: 1565068 - DNA, 15 bp, Homo sapiens
tcaagtggtcatcct

SEQ ID NO: 1565069 - DNA, 15 bp, Homo sapiens
caagtggtcatcctg

SEQ ID NO: 1565070 - DNA, 15 bp, Homo sapiens
aagtggtcatcctgc

SEQ ID NO: 1565071 - DNA, 15 bp, Homo sapiens
agtggtcatcctgct

SEQ ID NO: 1565072 - DNA, 15 bp, Homo sapiens
gtggtcatcctgctt

SEQ ID NO: 1565073 - DNA, 15 bp, Homo sapiens
tggtcatcctgcttt

SEQ ID NO: 1565074 - DNA, 15 bp, Homo sapiens
ggtcatcctgctttg

SEQ ID NO: 1565075 - DNA, 15 bp, Homo sapiens
gtcatcctgctttgg

SEQ ID NO: 1565076 - DNA, 15 bp, Homo sapiens
tcatcctgctttggc

SEQ ID NO: 1565077 - DNA, 15 bp, Homo sapiens
catcctgctttggcc

SEQ ID NO: 1565078 - DNA, 15 bp, Homo sapiens
atcctgctttggcct

SEQ ID NO: 1565079 - DNA, 15 bp, Homo sapiens
tcctgctttggcctc

SEQ ID NO: 1565080 - DNA, 15 bp, Homo sapiens
cactgcacccggcct

SEQ ID NO: 1565081 - DNA, 15 bp, Homo sapiens
actgcacccggcctg

SEQ ID NO: 1565082 - DNA, 15 bp, Homo sapiens
ctgcacccggcctgt

SEQ ID NO: 1565083 - DNA, 15 bp, Homo sapiens
tgcacccggcctgta

SEQ ID NO: 1565084 - DNA, 15 bp, Homo sapiens
gcacccggcctgtag

SEQ ID NO: 1565085 - DNA, 15 bp, Homo sapiens
cacccggcctgtaga

SEQ ID NO: 1565086 - DNA, 15 bp, Homo sapiens
acccggcctgtagag

SEQ ID NO: 1565087 - DNA, 15 bp, Homo sapiens
cccggcctgtagagc

SEQ ID NO: 1565088 - DNA, 15 bp, Homo sapiens
ccggcctgtagagct

SEQ ID NO: 1565089 - DNA, 15 bp, Homo sapiens
cggcctgtagagctt

SEQ ID NO: 1565090 - DNA, 15 bp, Homo sapiens
ggcctgtagagcttt

SEQ ID NO: 1565091 - DNA, 15 bp, Homo sapiens
gcctgtagagcttta

SEQ ID NO: 1565092 - DNA, 15 bp, Homo sapiens
cctgtagagctttaa

SEQ ID NO: 1565093 - DNA, 15 bp, Homo sapiens
ctgtagagctttaaa

SEQ ID NO: 1565094 - DNA, 15 bp, Homo sapiens
tgtagagctttaaac

SEQ ID NO: 1565095 - DNA, 15 bp, Homo sapiens
gtagagctttaaaca

SEQ ID NO: 1565096 - DNA, 15 bp, Homo sapiens
tagagctttaaacaa

SEQ ID NO: 1565097 - DNA, 15 bp, Homo sapiens
agagctttaaacaaa

SEQ ID NO: 1565098 - DNA, 15 bp, Homo sapiens
gagctttaaacaaag

SEQ ID NO: 1565099 - DNA, 15 bp, Homo sapiens
agctttaaacaaagc

SEQ ID NO: 1565100 - DNA, 15 bp, Homo sapiens
gctttaaacaaagca

SEQ ID NO: 1565101 - DNA, 15 bp, Homo sapiens
ctttaaacaaagcac

SEQ ID NO: 1565102 - DNA, 15 bp, Homo sapiens
tttaaacaaagcaca

SEQ ID NO: 1565103 - DNA, 15 bp, Homo sapiens
ttaaacaaagcacag

SEQ ID NO: 1565104 - DNA, 15 bp, Homo sapiens
taaacaaagcacagg

SEQ ID NO: 1565105 - DNA, 15 bp, Homo sapiens
aaacaaagcacaggc

SEQ ID NO: 1565106 - DNA, 15 bp, Homo sapiens
aacaaagcacaggct

SEQ ID NO: 1565107 - DNA, 15 bp, Homo sapiens
acaaagcacaggctg

SEQ ID NO: 1565108 - DNA, 15 bp, Homo sapiens
caaagcacaggctgc

SEQ ID NO: 1565109 - DNA, 15 bp, Homo sapiens
aaagcacaggctgct

SEQ ID NO: 1565110 - DNA, 15 bp, Homo sapiens
aagcacaggctgctt

SEQ ID NO: 1565111 - DNA, 15 bp, Homo sapiens
agcacaggctgcttc

SEQ ID NO: 1565112 - DNA, 15 bp, Homo sapiens
gcacaggctgcttct

SEQ ID NO: 1565113 - DNA, 15 bp, Homo sapiens
cacaggctgcttctg

SEQ ID NO: 1565114 - DNA, 15 bp, Homo sapiens
acaggctgcttctga

SEQ ID NO: 1565115 - DNA, 15 bp, Homo sapiens
caggctgcttctgag

SEQ ID NO: 1565116 - DNA, 15 bp, Homo sapiens
aggctgcttctgagc

SEQ ID NO: 1565117 - DNA, 15 bp, Homo sapiens
ggctgcttctgagca

SEQ ID NO: 1565118 - DNA, 15 bp, Homo sapiens
gctgcttctgagcac

SEQ ID NO: 1565119 - DNA, 15 bp, Homo sapiens
ctgcttctgagcaca

SEQ ID NO: 1565120 - DNA, 15 bp, Homo sapiens
tgcttctgagcacag

SEQ ID NO: 1565121 - DNA, 15 bp, Homo sapiens
gcttctgagcacagg

SEQ ID NO: 1565122 - DNA, 15 bp, Homo sapiens
cttctgagcacaggg

SEQ ID NO: 1565123 - DNA, 15 bp, Homo sapiens
ttctgagcacagggc

SEQ ID NO: 1565124 - DNA, 15 bp, Homo sapiens
tctgagcacagggcc

SEQ ID NO: 1565125 - DNA, 15 bp, Homo sapiens
ctgagcacagggccc

SEQ ID NO: 1565126 - DNA, 15 bp, Homo sapiens
tgagcacagggccct

SEQ ID NO: 1565127 - DNA, 15 bp, Homo sapiens
gagcacagggccctc

SEQ ID NO: 1565128 - DNA, 15 bp, Homo sapiens
agcacagggccctcg

SEQ ID NO: 1565129 - DNA, 15 bp, Homo sapiens
gcacagggccctcgt

SEQ ID NO: 1565130 - DNA, 15 bp, Homo sapiens
cacagggccctcgtc

SEQ ID NO: 1565131 - DNA, 15 bp, Homo sapiens
acagggccctcgtca

SEQ ID NO: 1565132 - DNA, 15 bp, Homo sapiens
cagggccctcgtcac

SEQ ID NO: 1565133 - DNA, 15 bp, Homo sapiens
agggccctcgtcaca

SEQ ID NO: 1565134 - DNA, 15 bp, Homo sapiens
gggccctcgtcacat

SEQ ID NO: 1565135 - DNA, 15 bp, Homo sapiens
ggccctcgtcacatg

SEQ ID NO: 1565136 - DNA, 15 bp, Homo sapiens
gccctcgtcacatgg

SEQ ID NO: 1565137 - DNA, 15 bp, Homo sapiens
ccctcgtcacatggc

SEQ ID NO: 1565138 - DNA, 15 bp, Homo sapiens
cctcgtcacatggct

SEQ ID NO: 1565139 - DNA, 15 bp, Homo sapiens
ctcgtcacatggcta

SEQ ID NO: 1565140 - DNA, 15 bp, Homo sapiens
tcgtcacatggctat

SEQ ID NO: 1565141 - DNA, 15 bp, Homo sapiens
cgtcacatggctatg

SEQ ID NO: 1565142 - DNA, 15 bp, Homo sapiens
gtcacatggctatga

SEQ ID NO: 1565143 - DNA, 15 bp, Homo sapiens
tcacatggctatgaa

SEQ ID NO: 1565144 - DNA, 15 bp, Homo sapiens
cacatggctatgaag

SEQ ID NO: 1565145 - DNA, 15 bp, Homo sapiens
acatggctatgaagc

SEQ ID NO: 1565146 - DNA, 15 bp, Homo sapiens
catggctatgaagcc

SEQ ID NO: 1565147 - DNA, 15 bp, Homo sapiens
atggctatgaagcca

SEQ ID NO: 1565148 - DNA, 15 bp, Homo sapiens
tggctatgaagccag

SEQ ID NO: 1565149 - DNA, 15 bp, Homo sapiens
ggctatgaagccagc

SEQ ID NO: 1565150 - DNA, 15 bp, Homo sapiens
gctatgaagccagcc

SEQ ID NO: 1565151 - DNA, 15 bp, Homo sapiens
ctatgaagccagccc

SEQ ID NO: 1565152 - DNA, 15 bp, Homo sapiens
tatgaagccagccct

SEQ ID NO: 1565153 - DNA, 15 bp, Homo sapiens
atgaagccagccctg

SEQ ID NO: 1565154 - DNA, 15 bp, Homo sapiens
tgaagccagccctgc

SEQ ID NO: 1565155 - DNA, 15 bp, Homo sapiens
gaagccagccctgcc

SEQ ID NO: 1565156 - DNA, 15 bp, Homo sapiens
aagccagccctgcct

SEQ ID NO: 1565157 - DNA, 15 bp, Homo sapiens
agccagccctgcctg

SEQ ID NO: 1565158 - DNA, 15 bp, Homo sapiens
gccagccctgcctgg

SEQ ID NO: 1565159 - DNA, 15 bp, Homo sapiens
ccagccctgcctgga

SEQ ID NO: 1565160 - DNA, 15 bp, Homo sapiens
cagccctgcctggac

SEQ ID NO: 1565161 - DNA, 15 bp, Homo sapiens
agccctgcctggacc

SEQ ID NO: 1565162 - DNA, 15 bp, Homo sapiens
gccctgcctggaccc

SEQ ID NO: 1565163 - DNA, 15 bp, Homo sapiens
ccctgcctggaccca

SEQ ID NO: 1565164 - DNA, 15 bp, Homo sapiens
cctgcctggacccag

SEQ ID NO: 1565165 - DNA, 15 bp, Homo sapiens
ctgcctggacccaga

SEQ ID NO: 1565166 - DNA, 15 bp, Homo sapiens
tgcctggacccagaa

SEQ ID NO: 1565167 - DNA, 15 bp, Homo sapiens
gcctggacccagaac

SEQ ID NO: 1565168 - DNA, 15 bp, Homo sapiens
cctggacccagaacc

SEQ ID NO: 1565169 - DNA, 15 bp, Homo sapiens
ctggacccagaaccc

SEQ ID NO: 1565170 - DNA, 15 bp, Homo sapiens
tggacccagaaccct

SEQ ID NO: 1565171 - DNA, 15 bp, Homo sapiens
ggacccagaaccctg

SEQ ID NO: 1565172 - DNA, 15 bp, Homo sapiens
gacccagaaccctgg

SEQ ID NO: 1565173 - DNA, 15 bp, Homo sapiens
acccagaaccctggt

SEQ ID NO: 1565174 - DNA, 15 bp, Homo sapiens
cccagaaccctggtg

SEQ ID NO: 1565175 - DNA, 15 bp, Homo sapiens
ccagaaccctggtgt

SEQ ID NO: 1565176 - DNA, 15 bp, Homo sapiens
cagaaccctggtgtg

SEQ ID NO: 1565177 - DNA, 15 bp, Homo sapiens
agaaccctggtgtgg

SEQ ID NO: 1565178 - DNA, 15 bp, Homo sapiens
gaaccctggtgtggg

SEQ ID NO: 1565179 - DNA, 15 bp, Homo sapiens
aaccctggtgtgggc

SEQ ID NO: 1565180 - DNA, 15 bp, Homo sapiens
accctggtgtgggca

SEQ ID NO: 1565181 - DNA, 15 bp, Homo sapiens
ccctggtgtgggcac

SEQ ID NO: 1565182 - DNA, 15 bp, Homo sapiens
cctggtgtgggcact

SEQ ID NO: 1565183 - DNA, 15 bp, Homo sapiens
ctggtgtgggcactt

SEQ ID NO: 1565184 - DNA, 15 bp, Homo sapiens
tggtgtgggcacttt

SEQ ID NO: 1565185 - DNA, 15 bp, Homo sapiens
ggtgtgggcacttta

SEQ ID NO: 1565186 - DNA, 15 bp, Homo sapiens
gtgtgggcactttat

SEQ ID NO: 1565187 - DNA, 15 bp, Homo sapiens
tgtgggcactttata

SEQ ID NO: 1565188 - DNA, 15 bp, Homo sapiens
gtgggcactttatag

SEQ ID NO: 1565189 - DNA, 15 bp, Homo sapiens
tgggcactttatagc

SEQ ID NO: 1565190 - DNA, 15 bp, Homo sapiens
gggcactttatagct

SEQ ID NO: 1565191 - DNA, 15 bp, Homo sapiens
ggcactttatagctt

SEQ ID NO: 1565192 - DNA, 15 bp, Homo sapiens
gcactttatagctta

SEQ ID NO: 1565193 - DNA, 15 bp, Homo sapiens
cactttatagcttat

SEQ ID NO: 1565194 - DNA, 15 bp, Homo sapiens
actttatagcttata

SEQ ID NO: 1565195 - DNA, 15 bp, Homo sapiens
ctttatagcttataa

SEQ ID NO: 1565196 - DNA, 15 bp, Homo sapiens
tttatagcttataag

SEQ ID NO: 1565197 - DNA, 15 bp, Homo sapiens
ttatagcttataagc

SEQ ID NO: 1565198 - DNA, 15 bp, Homo sapiens
tatagcttataagcc

SEQ ID NO: 1565199 - DNA, 15 bp, Homo sapiens
atagcttataagccc

SEQ ID NO: 1565200 - DNA, 15 bp, Homo sapiens
tagcttataagccct

SEQ ID NO: 1565201 - DNA, 15 bp, Homo sapiens
agcttataagccctc

SEQ ID NO: 1565202 - DNA, 15 bp, Homo sapiens
gcttataagccctcc

SEQ ID NO: 1565203 - DNA, 15 bp, Homo sapiens
cttataagccctcca

SEQ ID NO: 1565204 - DNA, 15 bp, Homo sapiens
ttataagccctccag

SEQ ID NO: 1565205 - DNA, 15 bp, Homo sapiens
tataagccctccagt

SEQ ID NO: 1565206 - DNA, 15 bp, Homo sapiens
ataagccctccagtc

SEQ ID NO: 1565207 - DNA, 15 bp, Homo sapiens
taagccctccagtca

SEQ ID NO: 1565208 - DNA, 15 bp, Homo sapiens
aagccctccagtcaa

SEQ ID NO: 1565209 - DNA, 15 bp, Homo sapiens
agccctccagtcaag

SEQ ID NO: 1565210 - DNA, 15 bp, Homo sapiens
gccctccagtcaaga

SEQ ID NO: 1565211 - DNA, 15 bp, Homo sapiens
ccctccagtcaagag

SEQ ID NO: 1565212 - DNA, 15 bp, Homo sapiens
cctccagtcaagagg

SEQ ID NO: 1565213 - DNA, 15 bp, Homo sapiens
ctccagtcaagaggc

SEQ ID NO: 1565214 - DNA, 15 bp, Homo sapiens
tccagtcaagaggcc

SEQ ID NO: 1565215 - DNA, 15 bp, Homo sapiens
ccagtcaagaggcct

SEQ ID NO: 1565216 - DNA, 15 bp, Homo sapiens
cagtcaagaggcctc

SEQ ID NO: 1565217 - DNA, 15 bp, Homo sapiens
agtcaagaggcctca

SEQ ID NO: 1565218 - DNA, 15 bp, Homo sapiens
gtcaagaggcctcag

SEQ ID NO: 1565219 - DNA, 15 bp, Homo sapiens
tcaagaggcctcagc

SEQ ID NO: 1565220 - DNA, 15 bp, Homo sapiens
caagaggcctcagcc

SEQ ID NO: 1565221 - DNA, 15 bp, Homo sapiens
aagaggcctcagcct

SEQ ID NO: 1565222 - DNA, 15 bp, Homo sapiens
agaggcctcagcctg

SEQ ID NO: 1565223 - DNA, 15 bp, Homo sapiens
gaggcctcagcctga

SEQ ID NO: 1565224 - DNA, 15 bp, Homo sapiens
aggcctcagcctgag

SEQ ID NO: 1565225 - DNA, 15 bp, Homo sapiens
ggcctcagcctgagc

SEQ ID NO: 1565226 - DNA, 15 bp, Homo sapiens
gcctcagcctgagcc

SEQ ID NO: 1565227 - DNA, 15 bp, Homo sapiens
cctcagcctgagcct

SEQ ID NO: 1565228 - DNA, 15 bp, Homo sapiens
ctcagcctgagcctc

SEQ ID NO: 1565229 - DNA, 15 bp, Homo sapiens
tcagcctgagcctcc

SEQ ID NO: 1565230 - DNA, 15 bp, Homo sapiens
cagcctgagcctccc

SEQ ID NO: 1565231 - DNA, 15 bp, Homo sapiens
agcctgagcctccct

SEQ ID NO: 1565232 - DNA, 15 bp, Homo sapiens
gcctgagcctccctg

SEQ ID NO: 1565233 - DNA, 15 bp, Homo sapiens
cctgagcctccctga

SEQ ID NO: 1565234 - DNA, 15 bp, Homo sapiens
ctgagcctccctgag

SEQ ID NO: 1565235 - DNA, 15 bp, Homo sapiens
tgagcctccctgagc

SEQ ID NO: 1565236 - DNA, 15 bp, Homo sapiens
gagcctccctgagcc

SEQ ID NO: 1565237 - DNA, 15 bp, Homo sapiens
agcctccctgagcct

SEQ ID NO: 1565238 - DNA, 15 bp, Homo sapiens
gcctccctgagcctc

SEQ ID NO: 1565239 - DNA, 15 bp, Homo sapiens
cctccctgagcctca

SEQ ID NO: 1565240 - DNA, 15 bp, Homo sapiens
ctccctgagcctcag

SEQ ID NO: 1565241 - DNA, 15 bp, Homo sapiens
tccctgagcctcagt

SEQ ID NO: 1565242 - DNA, 15 bp, Homo sapiens
ccctgagcctcagtt

SEQ ID NO: 1565243 - DNA, 15 bp, Homo sapiens
cctgagcctcagttt

SEQ ID NO: 1565244 - DNA, 15 bp, Homo sapiens
gcctcagtttcctct

SEQ ID NO: 1565245 - DNA, 15 bp, Homo sapiens
cctcagtttcctctc

SEQ ID NO: 1565246 - DNA, 15 bp, Homo sapiens
ctcagtttcctctcc

SEQ ID NO: 1565247 - DNA, 15 bp, Homo sapiens
tcagtttcctctcct

SEQ ID NO: 1565248 - DNA, 15 bp, Homo sapiens
cagtttcctctcctg

SEQ ID NO: 1565249 - DNA, 15 bp, Homo sapiens
agtttcctctcctgt

SEQ ID NO: 1565250 - DNA, 15 bp, Homo sapiens
gtttcctctcctgta

SEQ ID NO: 1565251 - DNA, 15 bp, Homo sapiens
tttcctctcctgtaa

SEQ ID NO: 1565252 - DNA, 15 bp, Homo sapiens
ttcctctcctgtaat

SEQ ID NO: 1565253 - DNA, 15 bp, Homo sapiens
tcctctcctgtaatc

SEQ ID NO: 1565254 - DNA, 15 bp, Homo sapiens
cctctcctgtaatct

SEQ ID NO: 1565255 - DNA, 15 bp, Homo sapiens
ctctcctgtaatctg

SEQ ID NO: 1565256 - DNA, 15 bp, Homo sapiens
tctcctgtaatctgt

SEQ ID NO: 1565257 - DNA, 15 bp, Homo sapiens
ctcctgtaatctgtg

SEQ ID NO: 1565258 - DNA, 15 bp, Homo sapiens
tcctgtaatctgtga

SEQ ID NO: 1565259 - DNA, 15 bp, Homo sapiens
cctgtaatctgtgaa

SEQ ID NO: 1565260 - DNA, 15 bp, Homo sapiens
ctgtaatctgtgaaa

SEQ ID NO: 1565261 - DNA, 15 bp, Homo sapiens
tgtaatctgtgaaag

SEQ ID NO: 1565262 - DNA, 15 bp, Homo sapiens
gtaatctgtgaaagc

SEQ ID NO: 1565263 - DNA, 15 bp, Homo sapiens
taatctgtgaaagca

SEQ ID NO: 1565264 - DNA, 15 bp, Homo sapiens
aatctgtgaaagcac

SEQ ID NO: 1565265 - DNA, 15 bp, Homo sapiens
atctgtgaaagcact

SEQ ID NO: 1565266 - DNA, 15 bp, Homo sapiens
tctgtgaaagcactg

SEQ ID NO: 1565267 - DNA, 15 bp, Homo sapiens
ctgtgaaagcactga

SEQ ID NO: 1565268 - DNA, 15 bp, Homo sapiens
tgtgaaagcactgag

SEQ ID NO: 1565269 - DNA, 15 bp, Homo sapiens
gtgaaagcactgagc

SEQ ID NO: 1565270 - DNA, 15 bp, Homo sapiens
tgaaagcactgagca

SEQ ID NO: 1565271 - DNA, 15 bp, Homo sapiens
gaaagcactgagcac

SEQ ID NO: 1565272 - DNA, 15 bp, Homo sapiens
aaagcactgagcact

SEQ ID NO: 1565273 - DNA, 15 bp, Homo sapiens
aagcactgagcacta

SEQ ID NO: 1565274 - DNA, 15 bp, Homo sapiens
agcactgagcactaa

SEQ ID NO: 1565275 - DNA, 15 bp, Homo sapiens
gcactgagcactaat

SEQ ID NO: 1565276 - DNA, 15 bp, Homo sapiens
cactgagcactaatc

SEQ ID NO: 1565277 - DNA, 15 bp, Homo sapiens
actgagcactaatct

SEQ ID NO: 1565278 - DNA, 15 bp, Homo sapiens
ctgagcactaatctc

SEQ ID NO: 1565279 - DNA, 15 bp, Homo sapiens
tgagcactaatctcc

SEQ ID NO: 1565280 - DNA, 15 bp, Homo sapiens
gagcactaatctccc

SEQ ID NO: 1565281 - DNA, 15 bp, Homo sapiens
agcactaatctccct

SEQ ID NO: 1565282 - DNA, 15 bp, Homo sapiens
gcactaatctccctt

SEQ ID NO: 1565283 - DNA, 15 bp, Homo sapiens
cactaatctcccttc

SEQ ID NO: 1565284 - DNA, 15 bp, Homo sapiens
actaatctcccttcc

SEQ ID NO: 1565285 - DNA, 15 bp, Homo sapiens
ctaatctcccttccg

SEQ ID NO: 1565286 - DNA, 15 bp, Homo sapiens
taatctcccttccgg

SEQ ID NO: 1565287 - DNA, 15 bp, Homo sapiens
aatctcccttccggg

SEQ ID NO: 1565288 - DNA, 15 bp, Homo sapiens
atctcccttccgggc

SEQ ID NO: 1565289 - DNA, 15 bp, Homo sapiens
tctcccttccgggct

SEQ ID NO: 1565290 - DNA, 15 bp, Homo sapiens
ctcccttccgggcta

SEQ ID NO: 1565291 - DNA, 15 bp, Homo sapiens
tcccttccgggctag

SEQ ID NO: 1565292 - DNA, 15 bp, Homo sapiens
cccttccgggctagc

SEQ ID NO: 1565293 - DNA, 15 bp, Homo sapiens
ccttccgggctagct

SEQ ID NO: 1565294 - DNA, 15 bp, Homo sapiens
cttccgggctagctt

SEQ ID NO: 1565295 - DNA, 15 bp, Homo sapiens
ttccgggctagcttt

SEQ ID NO: 1565296 - DNA, 15 bp, Homo sapiens
tccgggctagctttc

SEQ ID NO: 1565297 - DNA, 15 bp, Homo sapiens
ccgggctagctttct

SEQ ID NO: 1565298 - DNA, 15 bp, Homo sapiens
cgggctagctttctg

SEQ ID NO: 1565299 - DNA, 15 bp, Homo sapiens
gggctagctttctgc

SEQ ID NO: 1565300 - DNA, 15 bp, Homo sapiens
ggctagctttctgca

SEQ ID NO: 1565301 - DNA, 15 bp, Homo sapiens
gctagctttctgcaa

SEQ ID NO: 1565302 - DNA, 15 bp, Homo sapiens
ctagctttctgcaat

SEQ ID NO: 1565303 - DNA, 15 bp, Homo sapiens
tagctttctgcaata

SEQ ID NO: 1565304 - DNA, 15 bp, Homo sapiens
agctttctgcaatag

SEQ ID NO: 1565305 - DNA, 15 bp, Homo sapiens
gctttctgcaatagc

SEQ ID NO: 1565306 - DNA, 15 bp, Homo sapiens
ctttctgcaatagct

SEQ ID NO: 1565307 - DNA, 15 bp, Homo sapiens
tttctgcaatagctt

SEQ ID NO: 1565308 - DNA, 15 bp, Homo sapiens
ttctgcaatagctta

SEQ ID NO: 1565309 - DNA, 15 bp, Homo sapiens
tctgcaatagcttaa

SEQ ID NO: 1565310 - DNA, 15 bp, Homo sapiens
ctgcaatagcttaaa

SEQ ID NO: 1565311 - DNA, 15 bp, Homo sapiens
tgcaatagcttaaag

SEQ ID NO: 1565312 - DNA, 15 bp, Homo sapiens
gcaatagcttaaagc

SEQ ID NO: 1565313 - DNA, 15 bp, Homo sapiens
caatagcttaaagct

SEQ ID NO: 1565314 - DNA, 15 bp, Homo sapiens
aatagcttaaagctc

SEQ ID NO: 1565315 - DNA, 15 bp, Homo sapiens
atagcttaaagctcc

SEQ ID NO: 1565316 - DNA, 15 bp, Homo sapiens
tagcttaaagctccc

SEQ ID NO: 1565317 - DNA, 15 bp, Homo sapiens
agcttaaagctccca

SEQ ID NO: 1565318 - DNA, 15 bp, Homo sapiens
gcttaaagctcccat

SEQ ID NO: 1565319 - DNA, 15 bp, Homo sapiens
cttaaagctcccatc

SEQ ID NO: 1565320 - DNA, 15 bp, Homo sapiens
ttaaagctcccatcc

SEQ ID NO: 1565321 - DNA, 15 bp, Homo sapiens
taaagctcccatccc

SEQ ID NO: 1565322 - DNA, 15 bp, Homo sapiens
aaagctcccatccca

SEQ ID NO: 1565323 - DNA, 15 bp, Homo sapiens
aagctcccatcccaa

SEQ ID NO: 1565324 - DNA, 15 bp, Homo sapiens
agctcccatcccaag

SEQ ID NO: 1565325 - DNA, 15 bp, Homo sapiens
gctcccatcccaaga

SEQ ID NO: 1565326 - DNA, 15 bp, Homo sapiens
ctcccatcccaagat

SEQ ID NO: 1565327 - DNA, 15 bp, Homo sapiens
tcccatcccaagatc

SEQ ID NO: 1565328 - DNA, 15 bp, Homo sapiens
cccatcccaagatct

SEQ ID NO: 1565329 - DNA, 15 bp, Homo sapiens
ccatcccaagatctc

SEQ ID NO: 1565330 - DNA, 15 bp, Homo sapiens
catcccaagatctct

SEQ ID NO: 1565331 - DNA, 15 bp, Homo sapiens
atcccaagatctctc

SEQ ID NO: 1565332 - DNA, 15 bp, Homo sapiens
tcccaagatctctcc

SEQ ID NO: 1565333 - DNA, 15 bp, Homo sapiens
cccaagatctctcca

SEQ ID NO: 1565334 - DNA, 15 bp, Homo sapiens
ccaagatctctccaa

SEQ ID NO: 1565335 - DNA, 15 bp, Homo sapiens
caagatctctccaag

SEQ ID NO: 1565336 - DNA, 15 bp, Homo sapiens
aagatctctccaaga

SEQ ID NO: 1565337 - DNA, 15 bp, Homo sapiens
agatctctccaagaa

SEQ ID NO: 1565338 - DNA, 15 bp, Homo sapiens
gatctctccaagaat

SEQ ID NO: 1565339 - DNA, 15 bp, Homo sapiens
atctctccaagaatc

SEQ ID NO: 1565340 - DNA, 15 bp, Homo sapiens
tctctccaagaatcc

SEQ ID NO: 1565341 - DNA, 15 bp, Homo sapiens
ctctccaagaatcct

SEQ ID NO: 1565342 - DNA, 15 bp, Homo sapiens
tctccaagaatcctc

SEQ ID NO: 1565343 - DNA, 15 bp, Homo sapiens
ctccaagaatcctct

SEQ ID NO: 1565344 - DNA, 15 bp, Homo sapiens
tccaagaatcctctt

SEQ ID NO: 1565345 - DNA, 15 bp, Homo sapiens
ccaagaatcctctta

SEQ ID NO: 1565346 - DNA, 15 bp, Homo sapiens
caagaatcctcttac

SEQ ID NO: 1565347 - DNA, 15 bp, Homo sapiens
aagaatcctcttacc

SEQ ID NO: 1565348 - DNA, 15 bp, Homo sapiens
agaatcctcttacca

SEQ ID NO: 1565349 - DNA, 15 bp, Homo sapiens
gaatcctcttaccaa

SEQ ID NO: 1565350 - DNA, 15 bp, Homo sapiens
aatcctcttaccaag

SEQ ID NO: 1565351 - DNA, 15 bp, Homo sapiens
atcctcttaccaagt

SEQ ID NO: 1565352 - DNA, 15 bp, Homo sapiens
tcctcttaccaagtc

SEQ ID NO: 1565353 - DNA, 15 bp, Homo sapiens
cctcttaccaagtcc

SEQ ID NO: 1565354 - DNA, 15 bp, Homo sapiens
ctcttaccaagtccc

SEQ ID NO: 1565355 - DNA, 15 bp, Homo sapiens
tcttaccaagtccct

SEQ ID NO: 1565356 - DNA, 15 bp, Homo sapiens
cttaccaagtccctg

SEQ ID NO: 1565357 - DNA, 15 bp, Homo sapiens
ttaccaagtccctgc

SEQ ID NO: 1565358 - DNA, 15 bp, Homo sapiens
taccaagtccctgct

SEQ ID NO: 1565359 - DNA, 15 bp, Homo sapiens
accaagtccctgctc

SEQ ID NO: 1565360 - DNA, 15 bp, Homo sapiens
ccaagtccctgctcc

SEQ ID NO: 1565361 - DNA, 15 bp, Homo sapiens
caagtccctgctccc

SEQ ID NO: 1565362 - DNA, 15 bp, Homo sapiens
aagtccctgctccca

SEQ ID NO: 1565363 - DNA, 15 bp, Homo sapiens
agtccctgctcccag

SEQ ID NO: 1565364 - DNA, 15 bp, Homo sapiens
gtccctgctcccagc

SEQ ID NO: 1565365 - DNA, 15 bp, Homo sapiens
tccctgctcccagcc

SEQ ID NO: 1565366 - DNA, 15 bp, Homo sapiens
ccctgctcccagcct

SEQ ID NO: 1565367 - DNA, 15 bp, Homo sapiens
cctgctcccagcctg

SEQ ID NO: 1565368 - DNA, 15 bp, Homo sapiens
ctgctcccagcctgg

SEQ ID NO: 1565369 - DNA, 15 bp, Homo sapiens
tgctcccagcctggc

SEQ ID NO: 1565370 - DNA, 15 bp, Homo sapiens
gctcccagcctggct

SEQ ID NO: 1565371 - DNA, 15 bp, Homo sapiens
ctcccagcctggctc

SEQ ID NO: 1565372 - DNA, 15 bp, Homo sapiens
tcccagcctggctcc

SEQ ID NO: 1565373 - DNA, 15 bp, Homo sapiens
cccagcctggctccc

SEQ ID NO: 1565374 - DNA, 15 bp, Homo sapiens
ccagcctggctccct

SEQ ID NO: 1565375 - DNA, 15 bp, Homo sapiens
cagcctggctccctg

SEQ ID NO: 1565376 - DNA, 15 bp, Homo sapiens
agcctggctccctgg

SEQ ID NO: 1565377 - DNA, 15 bp, Homo sapiens
gcctggctccctggt

SEQ ID NO: 1565378 - DNA, 15 bp, Homo sapiens
cctggctccctggtc

SEQ ID NO: 1565379 - DNA, 15 bp, Homo sapiens
ctggctccctggtcc

SEQ ID NO: 1565380 - DNA, 15 bp, Homo sapiens
tggctccctggtccc

SEQ ID NO: 1565381 - DNA, 15 bp, Homo sapiens
ggctccctggtcccc

SEQ ID NO: 1565382 - DNA, 15 bp, Homo sapiens
gctccctggtcccca

SEQ ID NO: 1565383 - DNA, 15 bp, Homo sapiens
ctccctggtccccat

SEQ ID NO: 1565384 - DNA, 15 bp, Homo sapiens
tccctggtccccatc

SEQ ID NO: 1565385 - DNA, 15 bp, Homo sapiens
ccctggtccccatcc

SEQ ID NO: 1565386 - DNA, 15 bp, Homo sapiens
cctggtccccatccc

SEQ ID NO: 1565387 - DNA, 15 bp, Homo sapiens
ctggtccccatccct

SEQ ID NO: 1565388 - DNA, 15 bp, Homo sapiens
tggtccccatccctc

SEQ ID NO: 1565389 - DNA, 15 bp, Homo sapiens
ggtccccatccctct

SEQ ID NO: 1565390 - DNA, 15 bp, Homo sapiens
gtccccatccctctc

SEQ ID NO: 1565391 - DNA, 15 bp, Homo sapiens
tccccatccctctcc

SEQ ID NO: 1565392 - DNA, 15 bp, Homo sapiens
ccccatccctctccc

SEQ ID NO: 1565393 - DNA, 15 bp, Homo sapiens
cccatccctctcccc

SEQ ID NO: 1565394 - DNA, 15 bp, Homo sapiens
ccatccctctcccct

SEQ ID NO: 1565395 - DNA, 15 bp, Homo sapiens
catccctctcccctc

SEQ ID NO: 1565396 - DNA, 15 bp, Homo sapiens
atccctctcccctct

SEQ ID NO: 1565397 - DNA, 15 bp, Homo sapiens
tccctctcccctctc

SEQ ID NO: 1565398 - DNA, 15 bp, Homo sapiens
ccctctcccctctca

SEQ ID NO: 1565399 - DNA, 15 bp, Homo sapiens
cctctcccctctcac

SEQ ID NO: 1565400 - DNA, 15 bp, Homo sapiens
ctctcccctctcaca

SEQ ID NO: 1565401 - DNA, 15 bp, Homo sapiens
tctcccctctcacac

SEQ ID NO: 1565402 - DNA, 15 bp, Homo sapiens
ctcccctctcacacc

SEQ ID NO: 1565403 - DNA, 15 bp, Homo sapiens
tcccctctcacaccc

SEQ ID NO: 1565404 - DNA, 15 bp, Homo sapiens
cccctctcacaccct

SEQ ID NO: 1565405 - DNA, 15 bp, Homo sapiens
ccctctcacaccctt

SEQ ID NO: 1565406 - DNA, 15 bp, Homo sapiens
cctctcacacccttt

SEQ ID NO: 1565407 - DNA, 15 bp, Homo sapiens
ctctcacaccctttc

SEQ ID NO: 1565408 - DNA, 15 bp, Homo sapiens
tctcacaccctttca

SEQ ID NO: 1565409 - DNA, 15 bp, Homo sapiens
ctcacaccctttcaa

SEQ ID NO: 1565410 - DNA, 15 bp, Homo sapiens
tcacaccctttcaaa

SEQ ID NO: 1565411 - DNA, 15 bp, Homo sapiens
cacaccctttcaaag

SEQ ID NO: 1565412 - DNA, 15 bp, Homo sapiens
acaccctttcaaagc

SEQ ID NO: 1565413 - DNA, 15 bp, Homo sapiens
caccctttcaaagcc

SEQ ID NO: 1565414 - DNA, 15 bp, Homo sapiens
accctttcaaagccc

SEQ ID NO: 1565415 - DNA, 15 bp, Homo sapiens
ccctttcaaagccca

SEQ ID NO: 1565416 - DNA, 15 bp, Homo sapiens
cctttcaaagcccag

SEQ ID NO: 1565417 - DNA, 15 bp, Homo sapiens
ctttcaaagcccaga

SEQ ID NO: 1565418 - DNA, 15 bp, Homo sapiens
tttcaaagcccagaa

SEQ ID NO: 1565419 - DNA, 15 bp, Homo sapiens
ttcaaagcccagaaa

SEQ ID NO: 1565420 - DNA, 15 bp, Homo sapiens
tcaaagcccagaaag

SEQ ID NO: 1565421 - DNA, 15 bp, Homo sapiens
caaagcccagaaagg

SEQ ID NO: 1565422 - DNA, 15 bp, Homo sapiens
aaagcccagaaagga

SEQ ID NO: 1565423 - DNA, 15 bp, Homo sapiens
aagcccagaaaggac

SEQ ID NO: 1565424 - DNA, 15 bp, Homo sapiens
agcccagaaaggaca

SEQ ID NO: 1565425 - DNA, 15 bp, Homo sapiens
gcccagaaaggacag

SEQ ID NO: 1565426 - DNA, 15 bp, Homo sapiens
cccagaaaggacagg

SEQ ID NO: 1565427 - DNA, 15 bp, Homo sapiens
ccagaaaggacaggt

SEQ ID NO: 1565428 - DNA, 15 bp, Homo sapiens
cagaaaggacaggtg

SEQ ID NO: 1565429 - DNA, 15 bp, Homo sapiens
agaaaggacaggtga

SEQ ID NO: 1565430 - DNA, 15 bp, Homo sapiens
gaaaggacaggtgac

SEQ ID NO: 1565431 - DNA, 15 bp, Homo sapiens
aaaggacaggtgacc

SEQ ID NO: 1565432 - DNA, 15 bp, Homo sapiens
aaggacaggtgaccg

SEQ ID NO: 1565433 - DNA, 15 bp, Homo sapiens
aggacaggtgaccga

SEQ ID NO: 1565434 - DNA, 15 bp, Homo sapiens
ggacaggtgaccgag

SEQ ID NO: 1565435 - DNA, 15 bp, Homo sapiens
gacaggtgaccgagt

SEQ ID NO: 1565436 - DNA, 15 bp, Homo sapiens
acaggtgaccgagtg

SEQ ID NO: 1565437 - DNA, 15 bp, Homo sapiens
caggtgaccgagtga

SEQ ID NO: 1565438 - DNA, 15 bp, Homo sapiens
aggtgaccgagtgac

SEQ ID NO: 1565439 - DNA, 15 bp, Homo sapiens
ggtgaccgagtgact

SEQ ID NO: 1565440 - DNA, 15 bp, Homo sapiens
gtgaccgagtgactg

SEQ ID NO: 1565441 - DNA, 15 bp, Homo sapiens
tgaccgagtgactgt

SEQ ID NO: 1565442 - DNA, 15 bp, Homo sapiens
gaccgagtgactgtc

SEQ ID NO: 1565443 - DNA, 15 bp, Homo sapiens
accgagtgactgtct

SEQ ID NO: 1565444 - DNA, 15 bp, Homo sapiens
ccgagtgactgtctc

SEQ ID NO: 1565445 - DNA, 15 bp, Homo sapiens
cgagtgactgtctct

SEQ ID NO: 1565446 - DNA, 15 bp, Homo sapiens
gagtgactgtctctg

SEQ ID NO: 1565447 - DNA, 15 bp, Homo sapiens
agtgactgtctctgg

SEQ ID NO: 1565448 - DNA, 15 bp, Homo sapiens
gtgactgtctctggg

SEQ ID NO: 1565449 - DNA, 15 bp, Homo sapiens
tgactgtctctgggc

SEQ ID NO: 1565450 - DNA, 15 bp, Homo sapiens
gactgtctctgggct

SEQ ID NO: 1565451 - DNA, 15 bp, Homo sapiens
actgtctctgggctc

SEQ ID NO: 1565452 - DNA, 15 bp, Homo sapiens
ctgtctctgggctca

SEQ ID NO: 1565453 - DNA, 15 bp, Homo sapiens
tgtctctgggctcat

SEQ ID NO: 1565454 - DNA, 15 bp, Homo sapiens
gtctctgggctcata

SEQ ID NO: 1565455 - DNA, 15 bp, Homo sapiens
tctctgggctcatac

SEQ ID NO: 1565456 - DNA, 15 bp, Homo sapiens
ctctgggctcataca

SEQ ID NO: 1565457 - DNA, 15 bp, Homo sapiens
tctgggctcatacag

SEQ ID NO: 1565458 - DNA, 15 bp, Homo sapiens
ctgggctcatacagt

SEQ ID NO: 1565459 - DNA, 15 bp, Homo sapiens
tgggctcatacagtg

SEQ ID NO: 1565460 - DNA, 15 bp, Homo sapiens
gggctcatacagtgg

SEQ ID NO: 1565461 - DNA, 15 bp, Homo sapiens
ggctcatacagtggg

SEQ ID NO: 1565462 - DNA, 15 bp, Homo sapiens
gctcatacagtgggg

SEQ ID NO: 1565463 - DNA, 15 bp, Homo sapiens
ctcatacagtggggt

SEQ ID NO: 1565464 - DNA, 15 bp, Homo sapiens
tcatacagtggggtg

SEQ ID NO: 1565465 - DNA, 15 bp, Homo sapiens
catacagtggggtgg

SEQ ID NO: 1565466 - DNA, 15 bp, Homo sapiens
atacagtggggtggt

SEQ ID NO: 1565467 - DNA, 15 bp, Homo sapiens
tacagtggggtggtc

SEQ ID NO: 1565468 - DNA, 15 bp, Homo sapiens
acagtggggtggtct

SEQ ID NO: 1565469 - DNA, 15 bp, Homo sapiens
cagtggggtggtctc

SEQ ID NO: 1565470 - DNA, 15 bp, Homo sapiens
agtggggtggtctcc

SEQ ID NO: 1565471 - DNA, 15 bp, Homo sapiens
gtggggtggtctcct

SEQ ID NO: 1565472 - DNA, 15 bp, Homo sapiens
tggggtggtctcctg

SEQ ID NO: 1565473 - DNA, 15 bp, Homo sapiens
ggggtggtctcctgt

SEQ ID NO: 1565474 - DNA, 15 bp, Homo sapiens
gggtggtctcctgtg

SEQ ID NO: 1565475 - DNA, 15 bp, Homo sapiens
ggtggtctcctgtga

SEQ ID NO: 1565476 - DNA, 15 bp, Homo sapiens
gtggtctcctgtgac

SEQ ID NO: 1565477 - DNA, 15 bp, Homo sapiens
tggtctcctgtgaca

SEQ ID NO: 1565478 - DNA, 15 bp, Homo sapiens
ggtctcctgtgacag

SEQ ID NO: 1565479 - DNA, 15 bp, Homo sapiens
gtctcctgtgacagg

SEQ ID NO: 1565480 - DNA, 15 bp, Homo sapiens
tctcctgtgacaggc

SEQ ID NO: 1565481 - DNA, 15 bp, Homo sapiens
ctcctgtgacaggct

SEQ ID NO: 1565482 - DNA, 15 bp, Homo sapiens
tcctgtgacaggcta

SEQ ID NO: 1565483 - DNA, 15 bp, Homo sapiens
cctgtgacaggctag

SEQ ID NO: 1565484 - DNA, 15 bp, Homo sapiens
ctgtgacaggctagg

SEQ ID NO: 1565485 - DNA, 15 bp, Homo sapiens
tgtgacaggctaggg

SEQ ID NO: 1565486 - DNA, 15 bp, Homo sapiens
gtgacaggctagggc

SEQ ID NO: 1565487 - DNA, 15 bp, Homo sapiens
tgacaggctagggct

SEQ ID NO: 1565488 - DNA, 15 bp, Homo sapiens
gacaggctagggctt

SEQ ID NO: 1565489 - DNA, 15 bp, Homo sapiens
acaggctagggcttc

SEQ ID NO: 1565490 - DNA, 15 bp, Homo sapiens
caggctagggcttca

SEQ ID NO: 1565491 - DNA, 15 bp, Homo sapiens
aggctagggcttcag

SEQ ID NO: 1565492 - DNA, 15 bp, Homo sapiens
ggctagggcttcagg

SEQ ID NO: 1565493 - DNA, 15 bp, Homo sapiens
gctagggcttcaggg

SEQ ID NO: 1565494 - DNA, 15 bp, Homo sapiens
ctagggcttcagggt

SEQ ID NO: 1565495 - DNA, 15 bp, Homo sapiens
tagggcttcagggta

SEQ ID NO: 1565496 - DNA, 15 bp, Homo sapiens
agggcttcagggtat

SEQ ID NO: 1565497 - DNA, 15 bp, Homo sapiens
gggcttcagggtatg

SEQ ID NO: 1565498 - DNA, 15 bp, Homo sapiens
ggcttcagggtatgg

SEQ ID NO: 1565499 - DNA, 15 bp, Homo sapiens
gcttcagggtatggc

SEQ ID NO: 1565500 - DNA, 15 bp, Homo sapiens
cttcagggtatggct

SEQ ID NO: 1565501 - DNA, 15 bp, Homo sapiens
ttcagggtatggctt

SEQ ID NO: 1565502 - DNA, 15 bp, Homo sapiens
tcagggtatggctta

SEQ ID NO: 1565503 - DNA, 15 bp, Homo sapiens
cagggtatggcttag

SEQ ID NO: 1565504 - DNA, 15 bp, Homo sapiens
agggtatggcttagc

SEQ ID NO: 1565505 - DNA, 15 bp, Homo sapiens
gggtatggcttagcc

SEQ ID NO: 1565506 - DNA, 15 bp, Homo sapiens
ggtatggcttagcct

SEQ ID NO: 1565507 - DNA, 15 bp, Homo sapiens
gtatggcttagccta

SEQ ID NO: 1565508 - DNA, 15 bp, Homo sapiens
tatggcttagcctat

SEQ ID NO: 1565509 - DNA, 15 bp, Homo sapiens
atggcttagcctatc

SEQ ID NO: 1565510 - DNA, 15 bp, Homo sapiens
tggcttagcctatcc

SEQ ID NO: 1565511 - DNA, 15 bp, Homo sapiens
ggcttagcctatccc

SEQ ID NO: 1565512 - DNA, 15 bp, Homo sapiens
gcttagcctatccct

SEQ ID NO: 1565513 - DNA, 15 bp, Homo sapiens
cttagcctatccctc

SEQ ID NO: 1565514 - DNA, 15 bp, Homo sapiens
ttagcctatccctca

SEQ ID NO: 1565515 - DNA, 15 bp, Homo sapiens
tagcctatccctcac

SEQ ID NO: 1565516 - DNA, 15 bp, Homo sapiens
agcctatccctcaca

SEQ ID NO: 1565517 - DNA, 15 bp, Homo sapiens
gcctatccctcacac

SEQ ID NO: 1565518 - DNA, 15 bp, Homo sapiens
cctatccctcacact

SEQ ID NO: 1565519 - DNA, 15 bp, Homo sapiens
ctatccctcacactt

SEQ ID NO: 1565520 - DNA, 15 bp, Homo sapiens
tatccctcacacttc

SEQ ID NO: 1565521 - DNA, 15 bp, Homo sapiens
atccctcacacttcc

SEQ ID NO: 1565522 - DNA, 15 bp, Homo sapiens
tccctcacacttcct

SEQ ID NO: 1565523 - DNA, 15 bp, Homo sapiens
ccctcacacttcctt

SEQ ID NO: 1565524 - DNA, 15 bp, Homo sapiens
cctcacacttccttg

SEQ ID NO: 1565525 - DNA, 15 bp, Homo sapiens
ctcacacttccttgg

SEQ ID NO: 1565526 - DNA, 15 bp, Homo sapiens
tcacacttccttggg

SEQ ID NO: 1565527 - DNA, 15 bp, Homo sapiens
cacacttccttgggg

SEQ ID NO: 1565528 - DNA, 15 bp, Homo sapiens
acacttccttggggc

SEQ ID NO: 1565529 - DNA, 15 bp, Homo sapiens
cacttccttggggcc

SEQ ID NO: 1565530 - DNA, 15 bp, Homo sapiens
acttccttggggcct

SEQ ID NO: 1565531 - DNA, 15 bp, Homo sapiens
cttccttggggcctc

SEQ ID NO: 1565532 - DNA, 15 bp, Homo sapiens
ttccttggggcctct

SEQ ID NO: 1565533 - DNA, 15 bp, Homo sapiens
tccttggggcctctt

SEQ ID NO: 1565534 - DNA, 15 bp, Homo sapiens
ccttggggcctcttg

SEQ ID NO: 1565535 - DNA, 15 bp, Homo sapiens
cttggggcctcttgg

SEQ ID NO: 1565536 - DNA, 15 bp, Homo sapiens
ttggggcctcttggg

SEQ ID NO: 1565537 - DNA, 15 bp, Homo sapiens
tggggcctcttgggg

SEQ ID NO: 1565538 - DNA, 15 bp, Homo sapiens
ggggcctcttggggc

SEQ ID NO: 1565539 - DNA, 15 bp, Homo sapiens
gggcctcttggggca

SEQ ID NO: 1565540 - DNA, 15 bp, Homo sapiens
ggcctcttggggcag

SEQ ID NO: 1565541 - DNA, 15 bp, Homo sapiens
gcctcttggggcaga

SEQ ID NO: 1565542 - DNA, 15 bp, Homo sapiens
cctcttggggcagac

SEQ ID NO: 1565543 - DNA, 15 bp, Homo sapiens
ctcttggggcagaca

SEQ ID NO: 1565544 - DNA, 15 bp, Homo sapiens
tcttggggcagacag

SEQ ID NO: 1565545 - DNA, 15 bp, Homo sapiens
cttggggcagacagc

SEQ ID NO: 1565546 - DNA, 15 bp, Homo sapiens
ttggggcagacagcc

SEQ ID NO: 1565547 - DNA, 15 bp, Homo sapiens
tggggcagacagccc

SEQ ID NO: 1565548 - DNA, 15 bp, Homo sapiens
ggggcagacagccca

SEQ ID NO: 1565549 - DNA, 15 bp, Homo sapiens
gggcagacagcccag

SEQ ID NO: 1565550 - DNA, 15 bp, Homo sapiens
ggcagacagcccagg

SEQ ID NO: 1565551 - DNA, 15 bp, Homo sapiens
gcagacagcccaggc

SEQ ID NO: 1565552 - DNA, 15 bp, Homo sapiens
cagacagcccaggcg

SEQ ID NO: 1565553 - DNA, 15 bp, Homo sapiens
agacagcccaggcgg

SEQ ID NO: 1565554 - DNA, 15 bp, Homo sapiens
gacagcccaggcggg

SEQ ID NO: 1565555 - DNA, 15 bp, Homo sapiens
acagcccaggcgggg

SEQ ID NO: 1565556 - DNA, 15 bp, Homo sapiens
cagcccaggcggggc

SEQ ID NO: 1565557 - DNA, 15 bp, Homo sapiens
agcccaggcggggcc

SEQ ID NO: 1565558 - DNA, 15 bp, Homo sapiens
gcccaggcggggccc

SEQ ID NO: 1565559 - DNA, 15 bp, Homo sapiens
cccaggcggggccca

SEQ ID NO: 1565560 - DNA, 15 bp, Homo sapiens
ccaggcggggcccag

SEQ ID NO: 1565561 - DNA, 15 bp, Homo sapiens
caggcggggcccagc

SEQ ID NO: 1565562 - DNA, 15 bp, Homo sapiens
aggcggggcccagca

SEQ ID NO: 1565563 - DNA, 15 bp, Homo sapiens
ggcggggcccagcag

SEQ ID NO: 1565564 - DNA, 15 bp, Homo sapiens
gcggggcccagcagg

SEQ ID NO: 1565565 - DNA, 15 bp, Homo sapiens
cggggcccagcaggc

SEQ ID NO: 1565566 - DNA, 15 bp, Homo sapiens
ggggcccagcaggca

SEQ ID NO: 1565567 - DNA, 15 bp, Homo sapiens
gggcccagcaggcac

SEQ ID NO: 1565568 - DNA, 15 bp, Homo sapiens
ggcccagcaggcaca

SEQ ID NO: 1565569 - DNA, 15 bp, Homo sapiens
gcccagcaggcacac

SEQ ID NO: 1565570 - DNA, 15 bp, Homo sapiens
cccagcaggcacact

SEQ ID NO: 1565571 - DNA, 15 bp, Homo sapiens
ccagcaggcacacta

SEQ ID NO: 1565572 - DNA, 15 bp, Homo sapiens
cagcaggcacactag

SEQ ID NO: 1565573 - DNA, 15 bp, Homo sapiens
agcaggcacactagt

SEQ ID NO: 1565574 - DNA, 15 bp, Homo sapiens
gcaggcacactagtc

SEQ ID NO: 1565575 - DNA, 15 bp, Homo sapiens
caggcacactagtca

SEQ ID NO: 1565576 - DNA, 15 bp, Homo sapiens
aggcacactagtcag

SEQ ID NO: 1565577 - DNA, 15 bp, Homo sapiens
ggcacactagtcagg

SEQ ID NO: 1565578 - DNA, 15 bp, Homo sapiens
gcacactagtcaggt

SEQ ID NO: 1565579 - DNA, 15 bp, Homo sapiens
cacactagtcaggtg

SEQ ID NO: 1565580 - DNA, 15 bp, Homo sapiens
acactagtcaggtgc

SEQ ID NO: 1565581 - DNA, 15 bp, Homo sapiens
cactagtcaggtgcc

SEQ ID NO: 1565582 - DNA, 15 bp, Homo sapiens
actagtcaggtgcct

SEQ ID NO: 1565583 - DNA, 15 bp, Homo sapiens
ctagtcaggtgcctg

SEQ ID NO: 1565584 - DNA, 15 bp, Homo sapiens
tagtcaggtgcctga

SEQ ID NO: 1565585 - DNA, 15 bp, Homo sapiens
agtcaggtgcctgat

SEQ ID NO: 1565586 - DNA, 15 bp, Homo sapiens
gtcaggtgcctgatg

SEQ ID NO: 1565587 - DNA, 15 bp, Homo sapiens
tcaggtgcctgatga

SEQ ID NO: 1565588 - DNA, 15 bp, Homo sapiens
caggtgcctgatgat

SEQ ID NO: 1565589 - DNA, 15 bp, Homo sapiens
aggtgcctgatgatg

SEQ ID NO: 1565590 - DNA, 15 bp, Homo sapiens
ggtgcctgatgatga

SEQ ID NO: 1565591 - DNA, 15 bp, Homo sapiens
gtgcctgatgatgag

SEQ ID NO: 1565592 - DNA, 15 bp, Homo sapiens
tgcctgatgatgagg

SEQ ID NO: 1565593 - DNA, 15 bp, Homo sapiens
gcctgatgatgaggg

SEQ ID NO: 1565594 - DNA, 15 bp, Homo sapiens
cctgatgatgagggc

SEQ ID NO: 1565595 - DNA, 15 bp, Homo sapiens
ctgatgatgagggca

SEQ ID NO: 1565596 - DNA, 15 bp, Homo sapiens
tgatgatgagggcag

SEQ ID NO: 1565597 - DNA, 15 bp, Homo sapiens
gatgatgagggcagg

SEQ ID NO: 1565598 - DNA, 15 bp, Homo sapiens
atgatgagggcaggc

SEQ ID NO: 1565599 - DNA, 15 bp, Homo sapiens
tgatgagggcaggcg

SEQ ID NO: 1565600 - DNA, 15 bp, Homo sapiens
gatgagggcaggcgc

SEQ ID NO: 1565601 - DNA, 15 bp, Homo sapiens
atgagggcaggcgcc

SEQ ID NO: 1565602 - DNA, 15 bp, Homo sapiens
tgagggcaggcgcct

SEQ ID NO: 1565603 - DNA, 15 bp, Homo sapiens
gagggcaggcgcctg

SEQ ID NO: 1565604 - DNA, 15 bp, Homo sapiens
agggcaggcgcctgg

SEQ ID NO: 1565605 - DNA, 15 bp, Homo sapiens
gggcaggcgcctgga

SEQ ID NO: 1565606 - DNA, 15 bp, Homo sapiens
ggcaggcgcctggaa

SEQ ID NO: 1565607 - DNA, 15 bp, Homo sapiens
gcaggcgcctggaac

SEQ ID NO: 1565608 - DNA, 15 bp, Homo sapiens
caggcgcctggaact

SEQ ID NO: 1565609 - DNA, 15 bp, Homo sapiens
aggcgcctggaactg

SEQ ID NO: 1565610 - DNA, 15 bp, Homo sapiens
ggcgcctggaactgg

SEQ ID NO: 1565611 - DNA, 15 bp, Homo sapiens
gcgcctggaactggg

SEQ ID NO: 1565612 - DNA, 15 bp, Homo sapiens
cgcctggaactgggt

SEQ ID NO: 1565613 - DNA, 15 bp, Homo sapiens
gcctggaactgggtc

SEQ ID NO: 1565614 - DNA, 15 bp, Homo sapiens
cctggaactgggtca

SEQ ID NO: 1565615 - DNA, 15 bp, Homo sapiens
ctggaactgggtcaa

SEQ ID NO: 1565616 - DNA, 15 bp, Homo sapiens
tggaactgggtcaac

SEQ ID NO: 1565617 - DNA, 15 bp, Homo sapiens
ggaactgggtcaaca

SEQ ID NO: 1565618 - DNA, 15 bp, Homo sapiens
gaactgggtcaacaa

SEQ ID NO: 1565619 - DNA, 15 bp, Homo sapiens
aactgggtcaacaat

SEQ ID NO: 1565620 - DNA, 15 bp, Homo sapiens
actgggtcaacaatc

SEQ ID NO: 1565621 - DNA, 15 bp, Homo sapiens
ctgggtcaacaatcg

SEQ ID NO: 1565622 - DNA, 15 bp, Homo sapiens
tgggtcaacaatcgc

SEQ ID NO: 1565623 - DNA, 15 bp, Homo sapiens
gggtcaacaatcgct

SEQ ID NO: 1565624 - DNA, 15 bp, Homo sapiens
ggtcaacaatcgctc

SEQ ID NO: 1565625 - DNA, 15 bp, Homo sapiens
gtcaacaatcgctca

SEQ ID NO: 1565626 - DNA, 15 bp, Homo sapiens
tcaacaatcgctcac

SEQ ID NO: 1565627 - DNA, 15 bp, Homo sapiens
caacaatcgctcaca

SEQ ID NO: 1565628 - DNA, 15 bp, Homo sapiens
aacaatcgctcacac

SEQ ID NO: 1565629 - DNA, 15 bp, Homo sapiens
acaatcgctcacacg

SEQ ID NO: 1565630 - DNA, 15 bp, Homo sapiens
caatcgctcacacgg

SEQ ID NO: 1565631 - DNA, 15 bp, Homo sapiens
aatcgctcacacgga

SEQ ID NO: 1565632 - DNA, 15 bp, Homo sapiens
atcgctcacacggag

SEQ ID NO: 1565633 - DNA, 15 bp, Homo sapiens
tcgctcacacggagg

SEQ ID NO: 1565634 - DNA, 15 bp, Homo sapiens
cgctcacacggaggt

SEQ ID NO: 1565635 - DNA, 15 bp, Homo sapiens
gctcacacggaggtg

SEQ ID NO: 1565636 - DNA, 15 bp, Homo sapiens
ctcacacggaggtga

SEQ ID NO: 1565637 - DNA, 15 bp, Homo sapiens
tcacacggaggtgac

SEQ ID NO: 1565638 - DNA, 15 bp, Homo sapiens
cacacggaggtgact

SEQ ID NO: 1565639 - DNA, 15 bp, Homo sapiens
acacggaggtgactc

SEQ ID NO: 1565640 - DNA, 15 bp, Homo sapiens
cacggaggtgactca

SEQ ID NO: 1565641 - DNA, 15 bp, Homo sapiens
acggaggtgactcaa

SEQ ID NO: 1565642 - DNA, 15 bp, Homo sapiens
cggaggtgactcaag

SEQ ID NO: 1565643 - DNA, 15 bp, Homo sapiens
ggaggtgactcaagc

SEQ ID NO: 1565644 - DNA, 15 bp, Homo sapiens
gaggtgactcaagca

SEQ ID NO: 1565645 - DNA, 15 bp, Homo sapiens
aggtgactcaagcag

SEQ ID NO: 1565646 - DNA, 15 bp, Homo sapiens
ggtgactcaagcagc

SEQ ID NO: 1565647 - DNA, 15 bp, Homo sapiens
gtgactcaagcagca

SEQ ID NO: 1565648 - DNA, 15 bp, Homo sapiens
tgactcaagcagcaa

SEQ ID NO: 1565649 - DNA, 15 bp, Homo sapiens
gactcaagcagcaag

SEQ ID NO: 1565650 - DNA, 15 bp, Homo sapiens
actcaagcagcaagg

SEQ ID NO: 1565651 - DNA, 15 bp, Homo sapiens
ctcaagcagcaaggg

SEQ ID NO: 1565652 - DNA, 15 bp, Homo sapiens
tcaagcagcaagggg

SEQ ID NO: 1565653 - DNA, 15 bp, Homo sapiens
caagcagcaagggga

SEQ ID NO: 1565654 - DNA, 15 bp, Homo sapiens
aagcagcaaggggaa

SEQ ID NO: 1565655 - DNA, 15 bp, Homo sapiens
agcagcaaggggaaa

SEQ ID NO: 1565656 - DNA, 15 bp, Homo sapiens
gcagcaaggggaaaa

SEQ ID NO: 1565657 - DNA, 15 bp, Homo sapiens
cagcaaggggaaaaa

SEQ ID NO: 1565658 - DNA, 15 bp, Homo sapiens
agcaaggggaaaaag

SEQ ID NO: 1565659 - DNA, 15 bp, Homo sapiens
gcaaggggaaaaaga

SEQ ID NO: 1565660 - DNA, 15 bp, Homo sapiens
caaggggaaaaagag

SEQ ID NO: 1565661 - DNA, 15 bp, Homo sapiens
aaggggaaaaagagg

SEQ ID NO: 1565662 - DNA, 15 bp, Homo sapiens
aggggaaaaagaggt

SEQ ID NO: 1565663 - DNA, 15 bp, Homo sapiens
ggggaaaaagaggtg

SEQ ID NO: 1565664 - DNA, 15 bp, Homo sapiens
gggaaaaagaggtgg

SEQ ID NO: 1565665 - DNA, 15 bp, Homo sapiens
ggaaaaagaggtggg

SEQ ID NO: 1565666 - DNA, 15 bp, Homo sapiens
gaaaaagaggtgggg

SEQ ID NO: 1565667 - DNA, 15 bp, Homo sapiens
aaaaagaggtggggg

SEQ ID NO: 1565668 - DNA, 15 bp, Homo sapiens
aaaagaggtgggggt

SEQ ID NO: 1565669 - DNA, 15 bp, Homo sapiens
aaagaggtgggggtg

SEQ ID NO: 1565670 - DNA, 15 bp, Homo sapiens
aagaggtgggggtgg

SEQ ID NO: 1565671 - DNA, 15 bp, Homo sapiens
agaggtgggggtggg

SEQ ID NO: 1565672 - DNA, 15 bp, Homo sapiens
gaggtgggggtgggg

SEQ ID NO: 1565673 - DNA, 15 bp, Homo sapiens
aggtgggggtgggga

SEQ ID NO: 1565674 - DNA, 15 bp, Homo sapiens
ggtgggggtggggag

SEQ ID NO: 1565675 - DNA, 15 bp, Homo sapiens
gtgggggtggggagg

SEQ ID NO: 1565676 - DNA, 15 bp, Homo sapiens
tgggggtggggaggt

SEQ ID NO: 1565677 - DNA, 15 bp, Homo sapiens
gggggtggggaggtg

SEQ ID NO: 1565678 - DNA, 15 bp, Homo sapiens
ggggtggggaggtgg

SEQ ID NO: 1565679 - DNA, 15 bp, Homo sapiens
gggtggggaggtggc

SEQ ID NO: 1565680 - DNA, 15 bp, Homo sapiens
ggtggggaggtggct

SEQ ID NO: 1565681 - DNA, 15 bp, Homo sapiens
gtggggaggtggctg

SEQ ID NO: 1565682 - DNA, 15 bp, Homo sapiens
tggggaggtggctgt

SEQ ID NO: 1565683 - DNA, 15 bp, Homo sapiens
ggggaggtggctgtt

SEQ ID NO: 1565684 - DNA, 15 bp, Homo sapiens
gggaggtggctgttt

SEQ ID NO: 1565685 - DNA, 15 bp, Homo sapiens
ggaggtggctgtttc

SEQ ID NO: 1565686 - DNA, 15 bp, Homo sapiens
gaggtggctgtttct

SEQ ID NO: 1565687 - DNA, 15 bp, Homo sapiens
aggtggctgtttctg

SEQ ID NO: 1565688 - DNA, 15 bp, Homo sapiens
ggtggctgtttctgt

SEQ ID NO: 1565689 - DNA, 15 bp, Homo sapiens
gtggctgtttctgtg

SEQ ID NO: 1565690 - DNA, 15 bp, Homo sapiens
tggctgtttctgtgc

SEQ ID NO: 1565691 - DNA, 15 bp, Homo sapiens
ggctgtttctgtgcc

SEQ ID NO: 1565692 - DNA, 15 bp, Homo sapiens
gctgtttctgtgccc

SEQ ID NO: 1565693 - DNA, 15 bp, Homo sapiens
ctgtttctgtgccct

SEQ ID NO: 1565694 - DNA, 15 bp, Homo sapiens
tgtttctgtgccctc

SEQ ID NO: 1565695 - DNA, 15 bp, Homo sapiens
gtttctgtgccctca

SEQ ID NO: 1565696 - DNA, 15 bp, Homo sapiens
tttctgtgccctcac

SEQ ID NO: 1565697 - DNA, 15 bp, Homo sapiens
ttctgtgccctcact

SEQ ID NO: 1565698 - DNA, 15 bp, Homo sapiens
tctgtgccctcactt

SEQ ID NO: 1565699 - DNA, 15 bp, Homo sapiens
ctgtgccctcacttg

SEQ ID NO: 1565700 - DNA, 15 bp, Homo sapiens
tgtgccctcacttga

SEQ ID NO: 1565701 - DNA, 15 bp, Homo sapiens
gtgccctcacttgag

SEQ ID NO: 1565702 - DNA, 15 bp, Homo sapiens
tgccctcacttgagc

SEQ ID NO: 1565703 - DNA, 15 bp, Homo sapiens
gccctcacttgagcc

SEQ ID NO: 1565704 - DNA, 15 bp, Homo sapiens
ccctcacttgagcct

SEQ ID NO: 1565705 - DNA, 15 bp, Homo sapiens
cctcacttgagcctc

SEQ ID NO: 1565706 - DNA, 15 bp, Homo sapiens
ctcacttgagcctca

SEQ ID NO: 1565707 - DNA, 15 bp, Homo sapiens
tcacttgagcctcag

SEQ ID NO: 1565708 - DNA, 15 bp, Homo sapiens
cacttgagcctcagc

SEQ ID NO: 1565709 - DNA, 15 bp, Homo sapiens
acttgagcctcagct

SEQ ID NO: 1565710 - DNA, 15 bp, Homo sapiens
cttgagcctcagctt

SEQ ID NO: 1565711 - DNA, 15 bp, Homo sapiens
ttgagcctcagcttt

SEQ ID NO: 1565712 - DNA, 15 bp, Homo sapiens
tgagcctcagctttt

SEQ ID NO: 1565713 - DNA, 15 bp, Homo sapiens
gagcctcagctttta

SEQ ID NO: 1565714 - DNA, 15 bp, Homo sapiens
agcctcagcttttag

SEQ ID NO: 1565715 - DNA, 15 bp, Homo sapiens
gcctcagcttttagg

SEQ ID NO: 1565716 - DNA, 15 bp, Homo sapiens
cctcagcttttaggg

SEQ ID NO: 1565717 - DNA, 15 bp, Homo sapiens
ctcagcttttagggt

SEQ ID NO: 1565718 - DNA, 15 bp, Homo sapiens
tcagcttttagggtt

SEQ ID NO: 1565719 - DNA, 15 bp, Homo sapiens
cagcttttagggttg

SEQ ID NO: 1565720 - DNA, 15 bp, Homo sapiens
agcttttagggttgc

SEQ ID NO: 1565721 - DNA, 15 bp, Homo sapiens
gcttttagggttgcc

SEQ ID NO: 1565722 - DNA, 15 bp, Homo sapiens
cttttagggttgcca

SEQ ID NO: 1565723 - DNA, 15 bp, Homo sapiens
ttttagggttgccag

SEQ ID NO: 1565724 - DNA, 15 bp, Homo sapiens
tttagggttgccaga

SEQ ID NO: 1565725 - DNA, 15 bp, Homo sapiens
ttagggttgccagat

SEQ ID NO: 1565726 - DNA, 15 bp, Homo sapiens
tagggttgccagatt

SEQ ID NO: 1565727 - DNA, 15 bp, Homo sapiens
agggttgccagattt

SEQ ID NO: 1565728 - DNA, 15 bp, Homo sapiens
gggttgccagattta

SEQ ID NO: 1565729 - DNA, 15 bp, Homo sapiens
ggttgccagatttat

SEQ ID NO: 1565730 - DNA, 15 bp, Homo sapiens
gttgccagatttatt

SEQ ID NO: 1565731 - DNA, 15 bp, Homo sapiens
ttgccagatttattt

SEQ ID NO: 1565732 - DNA, 15 bp, Homo sapiens
tgccagatttatttt

SEQ ID NO: 1565733 - DNA, 15 bp, Homo sapiens
gccagatttattttt

SEQ ID NO: 1565734 - DNA, 15 bp, Homo sapiens
ccagatttattttta

SEQ ID NO: 1565735 - DNA, 15 bp, Homo sapiens
cagatttatttttat

SEQ ID NO: 1565736 - DNA, 15 bp, Homo sapiens
agatttatttttatt

SEQ ID NO: 1565737 - DNA, 15 bp, Homo sapiens
gatttatttttattt

SEQ ID NO: 1565738 - DNA, 15 bp, Homo sapiens
ttatttttatttttg

SEQ ID NO: 1565739 - DNA, 15 bp, Homo sapiens
tatttttatttttga

SEQ ID NO: 1565740 - DNA, 15 bp, Homo sapiens
atttttatttttgag

SEQ ID NO: 1565741 - DNA, 15 bp, Homo sapiens
tttttatttttgaga

SEQ ID NO: 1565742 - DNA, 15 bp, Homo sapiens
ttttatttttgagag

SEQ ID NO: 1565743 - DNA, 15 bp, Homo sapiens
tttatttttgagagt

SEQ ID NO: 1565744 - DNA, 15 bp, Homo sapiens
ttatttttgagagtc

SEQ ID NO: 1565745 - DNA, 15 bp, Homo sapiens
tatttttgagagtct

SEQ ID NO: 1565746 - DNA, 15 bp, Homo sapiens
atttttgagagtctc

SEQ ID NO: 1565747 - DNA, 15 bp, Homo sapiens
tttttgagagtctca

SEQ ID NO: 1565748 - DNA, 15 bp, Homo sapiens
ttttgagagtctcac

SEQ ID NO: 1565749 - DNA, 15 bp, Homo sapiens
tttgagagtctcact

SEQ ID NO: 1565750 - DNA, 15 bp, Homo sapiens
ttgagagtctcactc

SEQ ID NO: 1565751 - DNA, 15 bp, Homo sapiens
tgagagtctcactct

SEQ ID NO: 1565752 - DNA, 15 bp, Homo sapiens
gagagtctcactctg

SEQ ID NO: 1565753 - DNA, 15 bp, Homo sapiens
agctgggattacaga

SEQ ID NO: 1565754 - DNA, 15 bp, Homo sapiens
ggattacagatgtgc

SEQ ID NO: 1565755 - DNA, 15 bp, Homo sapiens
gattacagatgtgca

SEQ ID NO: 1565756 - DNA, 15 bp, Homo sapiens
attacagatgtgcac

SEQ ID NO: 1565757 - DNA, 15 bp, Homo sapiens
ttacagatgtgcacc

SEQ ID NO: 1565758 - DNA, 15 bp, Homo sapiens
tacagatgtgcacca

SEQ ID NO: 1565759 - DNA, 15 bp, Homo sapiens
acagatgtgcaccac

SEQ ID NO: 1565760 - DNA, 15 bp, Homo sapiens
cagatgtgcaccacc

SEQ ID NO: 1565761 - DNA, 15 bp, Homo sapiens
agatgtgcaccacca

SEQ ID NO: 1565762 - DNA, 15 bp, Homo sapiens
gatgtgcaccaccac

SEQ ID NO: 1565763 - DNA, 15 bp, Homo sapiens
atgtgcaccaccacc

SEQ ID NO: 1565764 - DNA, 15 bp, Homo sapiens
tgtgcaccaccaccc

SEQ ID NO: 1565765 - DNA, 15 bp, Homo sapiens
gtgcaccaccacccc

SEQ ID NO: 1565766 - DNA, 15 bp, Homo sapiens
tgcaccaccacccct

SEQ ID NO: 1565767 - DNA, 15 bp, Homo sapiens
gcaccaccacccctg

SEQ ID NO: 1565768 - DNA, 15 bp, Homo sapiens
caccaccacccctgg

SEQ ID NO: 1565769 - DNA, 15 bp, Homo sapiens
accatgttggccagt

SEQ ID NO: 1565770 - DNA, 15 bp, Homo sapiens
ccatgttggccagtc

SEQ ID NO: 1565771 - DNA, 15 bp, Homo sapiens
catgttggccagtct

SEQ ID NO: 1565772 - DNA, 15 bp, Homo sapiens
atgttggccagtctg

SEQ ID NO: 1565773 - DNA, 15 bp, Homo sapiens
tgttggccagtctgg

SEQ ID NO: 1565774 - DNA, 15 bp, Homo sapiens
gttggccagtctggt

SEQ ID NO: 1565775 - DNA, 15 bp, Homo sapiens
ttggccagtctggtt

SEQ ID NO: 1565776 - DNA, 15 bp, Homo sapiens
tggccagtctggttt

SEQ ID NO: 1565777 - DNA, 15 bp, Homo sapiens
ggccagtctggtttt

SEQ ID NO: 1565778 - DNA, 15 bp, Homo sapiens
gccagtctggttttg

SEQ ID NO: 1565779 - DNA, 15 bp, Homo sapiens
ccagtctggttttga

SEQ ID NO: 1565780 - DNA, 15 bp, Homo sapiens
cagtctggttttgaa

SEQ ID NO: 1565781 - DNA, 15 bp, Homo sapiens
agtctggttttgaac

SEQ ID NO: 1565782 - DNA, 15 bp, Homo sapiens
gtctggttttgaact

SEQ ID NO: 1565783 - DNA, 15 bp, Homo sapiens
tctggttttgaactc

SEQ ID NO: 1565784 - DNA, 15 bp, Homo sapiens
ggttttgaactccta

SEQ ID NO: 1565785 - DNA, 15 bp, Homo sapiens
gttttgaactcctaa

SEQ ID NO: 1565786 - DNA, 15 bp, Homo sapiens
ttttgaactcctaac

SEQ ID NO: 1565787 - DNA, 15 bp, Homo sapiens
tttgaactcctaacc

SEQ ID NO: 1565788 - DNA, 15 bp, Homo sapiens
gaactcctaacctca

SEQ ID NO: 1565789 - DNA, 15 bp, Homo sapiens
aacctcaggtgatcc

SEQ ID NO: 1565790 - DNA, 15 bp, Homo sapiens
tataggcgtgagcca

SEQ ID NO: 1565791 - DNA, 15 bp, Homo sapiens
ataggcgtgagccac

SEQ ID NO: 1565792 - DNA, 15 bp, Homo sapiens
gcgtgagccaccatt

SEQ ID NO: 1565793 - DNA, 15 bp, Homo sapiens
cgtgagccaccattc

SEQ ID NO: 1565794 - DNA, 15 bp, Homo sapiens
gtgagccaccattcc

SEQ ID NO: 1565795 - DNA, 15 bp, Homo sapiens
tgagccaccattcct

SEQ ID NO: 1565796 - DNA, 15 bp, Homo sapiens
gagccaccattcctg

SEQ ID NO: 1565797 - DNA, 15 bp, Homo sapiens
agccaccattcctgg

SEQ ID NO: 1565798 - DNA, 15 bp, Homo sapiens
gccaccattcctggc

SEQ ID NO: 1565799 - DNA, 15 bp, Homo sapiens
ccaccattcctggca

SEQ ID NO: 1565800 - DNA, 15 bp, Homo sapiens
caccattcctggcag

SEQ ID NO: 1565801 - DNA, 15 bp, Homo sapiens
accattcctggcagc

SEQ ID NO: 1565802 - DNA, 15 bp, Homo sapiens
ccattcctggcagcc

SEQ ID NO: 1565803 - DNA, 15 bp, Homo sapiens
cattcctggcagcct

SEQ ID NO: 1565804 - DNA, 15 bp, Homo sapiens
attcctggcagcctg

SEQ ID NO: 1565805 - DNA, 15 bp, Homo sapiens
ttcctggcagcctga

SEQ ID NO: 1565806 - DNA, 15 bp, Homo sapiens
tcctggcagcctgaa

SEQ ID NO: 1565807 - DNA, 15 bp, Homo sapiens
cctggcagcctgaaa

SEQ ID NO: 1565808 - DNA, 15 bp, Homo sapiens
ctggcagcctgaaaa

SEQ ID NO: 1565809 - DNA, 15 bp, Homo sapiens
tggcagcctgaaaat

SEQ ID NO: 1565810 - DNA, 15 bp, Homo sapiens
ggcagcctgaaaatt

SEQ ID NO: 1565811 - DNA, 15 bp, Homo sapiens
gcagcctgaaaattt

SEQ ID NO: 1565812 - DNA, 15 bp, Homo sapiens
cagcctgaaaatttt

SEQ ID NO: 1565813 - DNA, 15 bp, Homo sapiens
agcctgaaaattttt

SEQ ID NO: 1565814 - DNA, 15 bp, Homo sapiens
gcctgaaaatttttt

SEQ ID NO: 1565815 - DNA, 15 bp, Homo sapiens
cctgaaaatttttta

SEQ ID NO: 1565816 - DNA, 15 bp, Homo sapiens
ctgaaaattttttaa

SEQ ID NO: 1565817 - DNA, 15 bp, Homo sapiens
tgaaaattttttaat

SEQ ID NO: 1565818 - DNA, 15 bp, Homo sapiens
gaaaattttttaatt

SEQ ID NO: 1565819 - DNA, 15 bp, Homo sapiens
aaaattttttaattt

SEQ ID NO: 1565820 - DNA, 15 bp, Homo sapiens
aaattttttaatttt

SEQ ID NO: 1565821 - DNA, 15 bp, Homo sapiens
aattttttaattttt

SEQ ID NO: 1565822 - DNA, 15 bp, Homo sapiens
ttaatttttttttaa

SEQ ID NO: 1565823 - DNA, 15 bp, Homo sapiens
taatttttttttaat

SEQ ID NO: 1565824 - DNA, 15 bp, Homo sapiens
aatttttttttaatt

SEQ ID NO: 1565825 - DNA, 15 bp, Homo sapiens
atttttttttaattt

SEQ ID NO: 1565826 - DNA, 15 bp, Homo sapiens
tttttttaatttttt

SEQ ID NO: 1565827 - DNA, 15 bp, Homo sapiens
ttttttttttttagt

SEQ ID NO: 1565828 - DNA, 15 bp, Homo sapiens
tttttttttttagtg

SEQ ID NO: 1565829 - DNA, 15 bp, Homo sapiens
ttttttttttagtga

SEQ ID NO: 1565830 - DNA, 15 bp, Homo sapiens
tttttttttagtgat

SEQ ID NO: 1565831 - DNA, 15 bp, Homo sapiens
ttttttttagtgatg

SEQ ID NO: 1565832 - DNA, 15 bp, Homo sapiens
tttttttagtgatgg

SEQ ID NO: 1565833 - DNA, 15 bp, Homo sapiens
ttttttagtgatggg

SEQ ID NO: 1565834 - DNA, 15 bp, Homo sapiens
tttttagtgatgggg

SEQ ID NO: 1565835 - DNA, 15 bp, Homo sapiens
ttttagtgatggggt

SEQ ID NO: 1565836 - DNA, 15 bp, Homo sapiens
tttagtgatggggtc

SEQ ID NO: 1565837 - DNA, 15 bp, Homo sapiens
ttagtgatggggtct

SEQ ID NO: 1565838 - DNA, 15 bp, Homo sapiens
tagtgatggggtctc

SEQ ID NO: 1565839 - DNA, 15 bp, Homo sapiens
agtgatggggtctcc

SEQ ID NO: 1565840 - DNA, 15 bp, Homo sapiens
gtgatggggtctcca

SEQ ID NO: 1565841 - DNA, 15 bp, Homo sapiens
tgatggggtctccat

SEQ ID NO: 1565842 - DNA, 15 bp, Homo sapiens
gatggggtctccata

SEQ ID NO: 1565843 - DNA, 15 bp, Homo sapiens
atggggtctccatat

SEQ ID NO: 1565844 - DNA, 15 bp, Homo sapiens
tggggtctccatatg

SEQ ID NO: 1565845 - DNA, 15 bp, Homo sapiens
ggggtctccatatgt

SEQ ID NO: 1565846 - DNA, 15 bp, Homo sapiens
gggtctccatatgtt

SEQ ID NO: 1565847 - DNA, 15 bp, Homo sapiens
ggtctccatatgttg

SEQ ID NO: 1565848 - DNA, 15 bp, Homo sapiens
gtctccatatgttgc

SEQ ID NO: 1565849 - DNA, 15 bp, Homo sapiens
tctccatatgttgcc

SEQ ID NO: 1565850 - DNA, 15 bp, Homo sapiens
ctccatatgttgccc

SEQ ID NO: 1565851 - DNA, 15 bp, Homo sapiens
tccatatgttgccca

SEQ ID NO: 1565852 - DNA, 15 bp, Homo sapiens
ccatatgttgcccag

SEQ ID NO: 1565853 - DNA, 15 bp, Homo sapiens
catatgttgcccagg

SEQ ID NO: 1565854 - DNA, 15 bp, Homo sapiens
atatgttgcccaggc

SEQ ID NO: 1565855 - DNA, 15 bp, Homo sapiens
tctcaaactcctagg

SEQ ID NO: 1565856 - DNA, 15 bp, Homo sapiens
ctcaaactcctaggc

SEQ ID NO: 1565857 - DNA, 15 bp, Homo sapiens
tcaaactcctaggct

SEQ ID NO: 1565858 - DNA, 15 bp, Homo sapiens
caaactcctaggctc

SEQ ID NO: 1565859 - DNA, 15 bp, Homo sapiens
ctcctaggctcaagt

SEQ ID NO: 1565860 - DNA, 15 bp, Homo sapiens
tcctaggctcaagtg

SEQ ID NO: 1565861 - DNA, 15 bp, Homo sapiens
cctaggctcaagtga

SEQ ID NO: 1565862 - DNA, 15 bp, Homo sapiens
ctaggctcaagtgat

SEQ ID NO: 1565863 - DNA, 15 bp, Homo sapiens
taggctcaagtgatc

SEQ ID NO: 1565864 - DNA, 15 bp, Homo sapiens
gctcaagtgatcctt

SEQ ID NO: 1565865 - DNA, 15 bp, Homo sapiens
ctcaagtgatccttt

SEQ ID NO: 1565866 - DNA, 15 bp, Homo sapiens
tcaagtgatcctttc

SEQ ID NO: 1565867 - DNA, 15 bp, Homo sapiens
caagtgatcctttca

SEQ ID NO: 1565868 - DNA, 15 bp, Homo sapiens
aagtgatcctttcac

SEQ ID NO: 1565869 - DNA, 15 bp, Homo sapiens
agtgatcctttcacc

SEQ ID NO: 1565870 - DNA, 15 bp, Homo sapiens
gtgatcctttcacct

SEQ ID NO: 1565871 - DNA, 15 bp, Homo sapiens
tgatcctttcacctt

SEQ ID NO: 1565872 - DNA, 15 bp, Homo sapiens
gatcctttcaccttg

SEQ ID NO: 1565873 - DNA, 15 bp, Homo sapiens
atcctttcaccttgg

SEQ ID NO: 1565874 - DNA, 15 bp, Homo sapiens
tcctttcaccttggc

SEQ ID NO: 1565875 - DNA, 15 bp, Homo sapiens
cctttcaccttggcc

SEQ ID NO: 1565876 - DNA, 15 bp, Homo sapiens
ctttcaccttggcct

SEQ ID NO: 1565877 - DNA, 15 bp, Homo sapiens
tttcaccttggcctt

SEQ ID NO: 1565878 - DNA, 15 bp, Homo sapiens
ttcaccttggccttg

SEQ ID NO: 1565879 - DNA, 15 bp, Homo sapiens
tcaccttggccttgg

SEQ ID NO: 1565880 - DNA, 15 bp, Homo sapiens
caccttggccttggc

SEQ ID NO: 1565881 - DNA, 15 bp, Homo sapiens
accttggccttggcc

SEQ ID NO: 1565882 - DNA, 15 bp, Homo sapiens
ccttggccttggcct

SEQ ID NO: 1565883 - DNA, 15 bp, Homo sapiens
cttggccttggcctc

SEQ ID NO: 1565884 - DNA, 15 bp, Homo sapiens
ttggccttggcctcc

SEQ ID NO: 1565885 - DNA, 15 bp, Homo sapiens
tggccttggcctcct

SEQ ID NO: 1565886 - DNA, 15 bp, Homo sapiens
ggccttggcctccta

SEQ ID NO: 1565887 - DNA, 15 bp, Homo sapiens
gccttggcctcctaa

SEQ ID NO: 1565888 - DNA, 15 bp, Homo sapiens
ccttggcctcctaaa

SEQ ID NO: 1565889 - DNA, 15 bp, Homo sapiens
cttggcctcctaaag

SEQ ID NO: 1565890 - DNA, 15 bp, Homo sapiens
ttggcctcctaaagt

SEQ ID NO: 1565891 - DNA, 15 bp, Homo sapiens
tggcctcctaaagtg

SEQ ID NO: 1565892 - DNA, 15 bp, Homo sapiens
gattacaggcgtgac

SEQ ID NO: 1565893 - DNA, 15 bp, Homo sapiens
attacaggcgtgacc

SEQ ID NO: 1565894 - DNA, 15 bp, Homo sapiens
ttacaggcgtgaccc

SEQ ID NO: 1565895 - DNA, 15 bp, Homo sapiens
tacaggcgtgaccca

SEQ ID NO: 1565896 - DNA, 15 bp, Homo sapiens
acaggcgtgacccac

SEQ ID NO: 1565897 - DNA, 15 bp, Homo sapiens
caggcgtgacccact

SEQ ID NO: 1565898 - DNA, 15 bp, Homo sapiens
aggcgtgacccactg

SEQ ID NO: 1565899 - DNA, 15 bp, Homo sapiens
ggcgtgacccactgt

SEQ ID NO: 1565900 - DNA, 15 bp, Homo sapiens
gcgtgacccactgtg

SEQ ID NO: 1565901 - DNA, 15 bp, Homo sapiens
cgtgacccactgtgc

SEQ ID NO: 1565902 - DNA, 15 bp, Homo sapiens
gtgacccactgtgcc

SEQ ID NO: 1565903 - DNA, 15 bp, Homo sapiens
tgacccactgtgcct

SEQ ID NO: 1565904 - DNA, 15 bp, Homo sapiens
gacccactgtgcctg

SEQ ID NO: 1565905 - DNA, 15 bp, Homo sapiens
acccactgtgcctgc

SEQ ID NO: 1565906 - DNA, 15 bp, Homo sapiens
cccactgtgcctgcc

SEQ ID NO: 1565907 - DNA, 15 bp, Homo sapiens
ccactgtgcctgcct

SEQ ID NO: 1565908 - DNA, 15 bp, Homo sapiens
cactgtgcctgcctg

SEQ ID NO: 1565909 - DNA, 15 bp, Homo sapiens
actgtgcctgcctgc

SEQ ID NO: 1565910 - DNA, 15 bp, Homo sapiens
ctgtgcctgcctgct

SEQ ID NO: 1565911 - DNA, 15 bp, Homo sapiens
tgtgcctgcctgctg

SEQ ID NO: 1565912 - DNA, 15 bp, Homo sapiens
gtgcctgcctgctgg

SEQ ID NO: 1565913 - DNA, 15 bp, Homo sapiens
tgcctgcctgctggt

SEQ ID NO: 1565914 - DNA, 15 bp, Homo sapiens
gcctgcctgctggta

SEQ ID NO: 1565915 - DNA, 15 bp, Homo sapiens
cctgcctgctggtat

SEQ ID NO: 1565916 - DNA, 15 bp, Homo sapiens
ctgcctgctggtatg

SEQ ID NO: 1565917 - DNA, 15 bp, Homo sapiens
tgcctgctggtatgt

SEQ ID NO: 1565918 - DNA, 15 bp, Homo sapiens
gcctgctggtatgta

SEQ ID NO: 1565919 - DNA, 15 bp, Homo sapiens
cctgctggtatgtaa

SEQ ID NO: 1565920 - DNA, 15 bp, Homo sapiens
ctgctggtatgtaac

SEQ ID NO: 1565921 - DNA, 15 bp, Homo sapiens
tgctggtatgtaact

SEQ ID NO: 1565922 - DNA, 15 bp, Homo sapiens
gctggtatgtaactt

SEQ ID NO: 1565923 - DNA, 15 bp, Homo sapiens
ctggtatgtaacttg

SEQ ID NO: 1565924 - DNA, 15 bp, Homo sapiens
tggtatgtaacttgt

SEQ ID NO: 1565925 - DNA, 15 bp, Homo sapiens
ggtatgtaacttgtt

SEQ ID NO: 1565926 - DNA, 15 bp, Homo sapiens
gtatgtaacttgttg

SEQ ID NO: 1565927 - DNA, 15 bp, Homo sapiens
tatgtaacttgttgt

SEQ ID NO: 1565928 - DNA, 15 bp, Homo sapiens
atgtaacttgttgtt

SEQ ID NO: 1565929 - DNA, 15 bp, Homo sapiens
tgtaacttgttgttt

SEQ ID NO: 1565930 - DNA, 15 bp, Homo sapiens
gtaacttgttgtttt

SEQ ID NO: 1565931 - DNA, 15 bp, Homo sapiens
taacttgttgttttt

SEQ ID NO: 1565932 - DNA, 15 bp, Homo sapiens
aacttgttgtttttt

SEQ ID NO: 1565933 - DNA, 15 bp, Homo sapiens
acttgttgttttttt

SEQ ID NO: 1565934 - DNA, 15 bp, Homo sapiens
cttgttgtttttttt

SEQ ID NO: 1565935 - DNA, 15 bp, Homo sapiens
ttgttgttttttttt

SEQ ID NO: 1565936 - DNA, 15 bp, Homo sapiens
tgttgtttttttttt

SEQ ID NO: 1565937 - DNA, 15 bp, Homo sapiens
gttgttttttttttt

SEQ ID NO: 1565938 - DNA, 15 bp, Homo sapiens
gacaaagtctcactt

SEQ ID NO: 1565939 - DNA, 15 bp, Homo sapiens
acaaagtctcacttg

SEQ ID NO: 1565940 - DNA, 15 bp, Homo sapiens
caaagtctcacttgc

SEQ ID NO: 1565941 - DNA, 15 bp, Homo sapiens
aaagtctcacttgcc

SEQ ID NO: 1565942 - DNA, 15 bp, Homo sapiens
aagtctcacttgccc

SEQ ID NO: 1565943 - DNA, 15 bp, Homo sapiens
agtctcacttgccct

SEQ ID NO: 1565944 - DNA, 15 bp, Homo sapiens
gtctcacttgccctg

SEQ ID NO: 1565945 - DNA, 15 bp, Homo sapiens
tctcacttgccctgg

SEQ ID NO: 1565946 - DNA, 15 bp, Homo sapiens
ctcacttgccctggc

SEQ ID NO: 1565947 - DNA, 15 bp, Homo sapiens
tcacttgccctggct

SEQ ID NO: 1565948 - DNA, 15 bp, Homo sapiens
cacttgccctggctc

SEQ ID NO: 1565949 - DNA, 15 bp, Homo sapiens
acttgccctggctca

SEQ ID NO: 1565950 - DNA, 15 bp, Homo sapiens
cttgccctggctcaa

SEQ ID NO: 1565951 - DNA, 15 bp, Homo sapiens
ttgccctggctcaag

SEQ ID NO: 1565952 - DNA, 15 bp, Homo sapiens
tgccctggctcaagt

SEQ ID NO: 1565953 - DNA, 15 bp, Homo sapiens
gccctggctcaagtg

SEQ ID NO: 1565954 - DNA, 15 bp, Homo sapiens
ccctggctcaagtgc

SEQ ID NO: 1565955 - DNA, 15 bp, Homo sapiens
cctggctcaagtgca

SEQ ID NO: 1565956 - DNA, 15 bp, Homo sapiens
ctggctcaagtgcag

SEQ ID NO: 1565957 - DNA, 15 bp, Homo sapiens
tggctcaagtgcagt

SEQ ID NO: 1565958 - DNA, 15 bp, Homo sapiens
ctcaagtgcagtggt

SEQ ID NO: 1565959 - DNA, 15 bp, Homo sapiens
tcaagtgcagtggtg

SEQ ID NO: 1565960 - DNA, 15 bp, Homo sapiens
caagtgcagtggtgc

SEQ ID NO: 1565961 - DNA, 15 bp, Homo sapiens
aagtgcagtggtgcc

SEQ ID NO: 1565962 - DNA, 15 bp, Homo sapiens
ttggctcactgcagt

SEQ ID NO: 1565963 - DNA, 15 bp, Homo sapiens
ctcactgcagtctcc

SEQ ID NO: 1565964 - DNA, 15 bp, Homo sapiens
tcactgcagtctccg

SEQ ID NO: 1565965 - DNA, 15 bp, Homo sapiens
cactgcagtctccgc

SEQ ID NO: 1565966 - DNA, 15 bp, Homo sapiens
actgcagtctccgcc

SEQ ID NO: 1565967 - DNA, 15 bp, Homo sapiens
ctgcagtctccgcct

SEQ ID NO: 1565968 - DNA, 15 bp, Homo sapiens
tgcagtctccgcctc

SEQ ID NO: 1565969 - DNA, 15 bp, Homo sapiens
gcagtctccgcctcc

SEQ ID NO: 1565970 - DNA, 15 bp, Homo sapiens
cagtctccgcctccc

SEQ ID NO: 1565971 - DNA, 15 bp, Homo sapiens
agtctccgcctccca

SEQ ID NO: 1565972 - DNA, 15 bp, Homo sapiens
gtctccgcctcccag

SEQ ID NO: 1565973 - DNA, 15 bp, Homo sapiens
tctccgcctcccagg

SEQ ID NO: 1565974 - DNA, 15 bp, Homo sapiens
caagtgattctcctc

SEQ ID NO: 1565975 - DNA, 15 bp, Homo sapiens
aagtgattctcctcc

SEQ ID NO: 1565976 - DNA, 15 bp, Homo sapiens
agtgattctcctccc

SEQ ID NO: 1565977 - DNA, 15 bp, Homo sapiens
gtgattctcctccct

SEQ ID NO: 1565978 - DNA, 15 bp, Homo sapiens
tgattctcctccctc

SEQ ID NO: 1565979 - DNA, 15 bp, Homo sapiens
gattctcctccctca

SEQ ID NO: 1565980 - DNA, 15 bp, Homo sapiens
attctcctccctcag

SEQ ID NO: 1565981 - DNA, 15 bp, Homo sapiens
ttctcctccctcagc

SEQ ID NO: 1565982 - DNA, 15 bp, Homo sapiens
tctcctccctcagcc

SEQ ID NO: 1565983 - DNA, 15 bp, Homo sapiens
ctcctccctcagcct

SEQ ID NO: 1565984 - DNA, 15 bp, Homo sapiens
tcctccctcagcctc

SEQ ID NO: 1565985 - DNA, 15 bp, Homo sapiens
cctccctcagcctcc

SEQ ID NO: 1565986 - DNA, 15 bp, Homo sapiens
ctccctcagcctcct

SEQ ID NO: 1565987 - DNA, 15 bp, Homo sapiens
tccctcagcctcctg

SEQ ID NO: 1565988 - DNA, 15 bp, Homo sapiens
ccctcagcctcctga

SEQ ID NO: 1565989 - DNA, 15 bp, Homo sapiens
agggtttcaccatgc

SEQ ID NO: 1565990 - DNA, 15 bp, Homo sapiens
tgaactcctaacctt

SEQ ID NO: 1565991 - DNA, 15 bp, Homo sapiens
gaactcctaaccttg

SEQ ID NO: 1565992 - DNA, 15 bp, Homo sapiens
aactcctaaccttga

SEQ ID NO: 1565993 - DNA, 15 bp, Homo sapiens
actcctaaccttgag

SEQ ID NO: 1565994 - DNA, 15 bp, Homo sapiens
ctcctaaccttgagt

SEQ ID NO: 1565995 - DNA, 15 bp, Homo sapiens
tcctaaccttgagtg

SEQ ID NO: 1565996 - DNA, 15 bp, Homo sapiens
cctaaccttgagtga

SEQ ID NO: 1565997 - DNA, 15 bp, Homo sapiens
ctaaccttgagtgat

SEQ ID NO: 1565998 - DNA, 15 bp, Homo sapiens
taaccttgagtgatc

SEQ ID NO: 1565999 - DNA, 15 bp, Homo sapiens
aaccttgagtgatct

SEQ ID NO: 1566000 - DNA, 15 bp, Homo sapiens
accttgagtgatcta

SEQ ID NO: 1566001 - DNA, 15 bp, Homo sapiens
ccttgagtgatctac

SEQ ID NO: 1566002 - DNA, 15 bp, Homo sapiens
cttgagtgatctacc

SEQ ID NO: 1566003 - DNA, 15 bp, Homo sapiens
ttgagtgatctaccc

SEQ ID NO: 1566004 - DNA, 15 bp, Homo sapiens
tgagtgatctaccca

SEQ ID NO: 1566005 - DNA, 15 bp, Homo sapiens
gagtgatctacccac

SEQ ID NO: 1566006 - DNA, 15 bp, Homo sapiens
agtgatctacccacc

SEQ ID NO: 1566007 - DNA, 15 bp, Homo sapiens
gtgatctacccacct

SEQ ID NO: 1566008 - DNA, 15 bp, Homo sapiens
tgatctacccacctc

SEQ ID NO: 1566009 - DNA, 15 bp, Homo sapiens
gatctacccacctct

SEQ ID NO: 1566010 - DNA, 15 bp, Homo sapiens
atctacccacctctg

SEQ ID NO: 1566011 - DNA, 15 bp, Homo sapiens
tctacccacctctgc

SEQ ID NO: 1566012 - DNA, 15 bp, Homo sapiens
ctacccacctctgcc

SEQ ID NO: 1566013 - DNA, 15 bp, Homo sapiens
tacccacctctgcct

SEQ ID NO: 1566014 - DNA, 15 bp, Homo sapiens
acccacctctgcctc

SEQ ID NO: 1566015 - DNA, 15 bp, Homo sapiens
cccacctctgcctcc

SEQ ID NO: 1566016 - DNA, 15 bp, Homo sapiens
cacctctgcctccca

SEQ ID NO: 1566017 - DNA, 15 bp, Homo sapiens
acctctgcctcccaa

SEQ ID NO: 1566018 - DNA, 15 bp, Homo sapiens
cctctgcctcccaaa

SEQ ID NO: 1566019 - DNA, 15 bp, Homo sapiens
tctgcctcccaaagt

SEQ ID NO: 1566020 - DNA, 15 bp, Homo sapiens
ctgcctcccaaagtg

SEQ ID NO: 1566021 - DNA, 15 bp, Homo sapiens
tgcctcccaaagtgc

SEQ ID NO: 1566022 - DNA, 15 bp, Homo sapiens
agtgctggattacag

SEQ ID NO: 1566023 - DNA, 15 bp, Homo sapiens
gtgctggattacagg

SEQ ID NO: 1566024 - DNA, 15 bp, Homo sapiens
tgctggattacaggc

SEQ ID NO: 1566025 - DNA, 15 bp, Homo sapiens
gctggattacaggcc

SEQ ID NO: 1566026 - DNA, 15 bp, Homo sapiens
ctggattacaggcca

SEQ ID NO: 1566027 - DNA, 15 bp, Homo sapiens
tggattacaggccaa

SEQ ID NO: 1566028 - DNA, 15 bp, Homo sapiens
ggattacaggccaat

SEQ ID NO: 1566029 - DNA, 15 bp, Homo sapiens
gattacaggccaata

SEQ ID NO: 1566030 - DNA, 15 bp, Homo sapiens
attacaggccaatag

SEQ ID NO: 1566031 - DNA, 15 bp, Homo sapiens
ttacaggccaatagg

SEQ ID NO: 1566032 - DNA, 15 bp, Homo sapiens
tacaggccaataggc

SEQ ID NO: 1566033 - DNA, 15 bp, Homo sapiens
acaggccaataggcc

SEQ ID NO: 1566034 - DNA, 15 bp, Homo sapiens
caggccaataggcct

SEQ ID NO: 1566035 - DNA, 15 bp, Homo sapiens
aggccaataggcctg

SEQ ID NO: 1566036 - DNA, 15 bp, Homo sapiens
ggccaataggcctgg

SEQ ID NO: 1566037 - DNA, 15 bp, Homo sapiens
gccaataggcctggc

SEQ ID NO: 1566038 - DNA, 15 bp, Homo sapiens
ccaataggcctggcc

SEQ ID NO: 1566039 - DNA, 15 bp, Homo sapiens
caataggcctggccc

SEQ ID NO: 1566040 - DNA, 15 bp, Homo sapiens
aataggcctggcccc

SEQ ID NO: 1566041 - DNA, 15 bp, Homo sapiens
ataggcctggccccc

SEQ ID NO: 1566042 - DNA, 15 bp, Homo sapiens
taggcctggccccct

SEQ ID NO: 1566043 - DNA, 15 bp, Homo sapiens
aggcctggccccctg

SEQ ID NO: 1566044 - DNA, 15 bp, Homo sapiens
ggcctggccccctgt

SEQ ID NO: 1566045 - DNA, 15 bp, Homo sapiens
gcctggccccctgta

SEQ ID NO: 1566046 - DNA, 15 bp, Homo sapiens
cctggccccctgtaa

SEQ ID NO: 1566047 - DNA, 15 bp, Homo sapiens
ctggccccctgtaac

SEQ ID NO: 1566048 - DNA, 15 bp, Homo sapiens
tggccccctgtaact

SEQ ID NO: 1566049 - DNA, 15 bp, Homo sapiens
ggccccctgtaactt

SEQ ID NO: 1566050 - DNA, 15 bp, Homo sapiens
gccccctgtaacttt

SEQ ID NO: 1566051 - DNA, 15 bp, Homo sapiens
ccccctgtaactttt

SEQ ID NO: 1566052 - DNA, 15 bp, Homo sapiens
cccctgtaacttttt

SEQ ID NO: 1566053 - DNA, 15 bp, Homo sapiens
ccctgtaactttttt

SEQ ID NO: 1566054 - DNA, 15 bp, Homo sapiens
cctgtaacttttttt

SEQ ID NO: 1566055 - DNA, 15 bp, Homo sapiens
ctgtaactttttttt

SEQ ID NO: 1566056 - DNA, 15 bp, Homo sapiens
tgtaacttttttttt

SEQ ID NO: 1566057 - DNA, 15 bp, Homo sapiens
gtaactttttttttt

SEQ ID NO: 1566058 - DNA, 15 bp, Homo sapiens
taacttttttttttt

SEQ ID NO: 1566059 - DNA, 15 bp, Homo sapiens
tttttttaatttttg

SEQ ID NO: 1566060 - DNA, 15 bp, Homo sapiens
ttttttaatttttga

SEQ ID NO: 1566061 - DNA, 15 bp, Homo sapiens
tttttaatttttgag

SEQ ID NO: 1566062 - DNA, 15 bp, Homo sapiens
ttttaatttttgaga

SEQ ID NO: 1566063 - DNA, 15 bp, Homo sapiens
tttaatttttgagac

SEQ ID NO: 1566064 - DNA, 15 bp, Homo sapiens
ttaatttttgagaca

SEQ ID NO: 1566065 - DNA, 15 bp, Homo sapiens
taatttttgagacag

SEQ ID NO: 1566066 - DNA, 15 bp, Homo sapiens
aatttttgagacaga

SEQ ID NO: 1566067 - DNA, 15 bp, Homo sapiens
cagtggtgccatctc

SEQ ID NO: 1566068 - DNA, 15 bp, Homo sapiens
agtggtgccatctcg

SEQ ID NO: 1566069 - DNA, 15 bp, Homo sapiens
gtggtgccatctcgg

SEQ ID NO: 1566070 - DNA, 15 bp, Homo sapiens
tggtgccatctcggc

SEQ ID NO: 1566071 - DNA, 15 bp, Homo sapiens
ggtgccatctcggct

SEQ ID NO: 1566072 - DNA, 15 bp, Homo sapiens
gtgccatctcggctc

SEQ ID NO: 1566073 - DNA, 15 bp, Homo sapiens
tgccatctcggctca

SEQ ID NO: 1566074 - DNA, 15 bp, Homo sapiens
aagctccgcctccct

SEQ ID NO: 1566075 - DNA, 15 bp, Homo sapiens
agctccgcctccctg

SEQ ID NO: 1566076 - DNA, 15 bp, Homo sapiens
gctccgcctccctgg

SEQ ID NO: 1566077 - DNA, 15 bp, Homo sapiens
ctccgcctccctggt

SEQ ID NO: 1566078 - DNA, 15 bp, Homo sapiens
tccgcctccctggtt

SEQ ID NO: 1566079 - DNA, 15 bp, Homo sapiens
ccgcctccctggttc

SEQ ID NO: 1566080 - DNA, 15 bp, Homo sapiens
cgcctccctggttca

SEQ ID NO: 1566081 - DNA, 15 bp, Homo sapiens
gcctccctggttcac

SEQ ID NO: 1566082 - DNA, 15 bp, Homo sapiens
cctccctggttcacg

SEQ ID NO: 1566083 - DNA, 15 bp, Homo sapiens
ctccctggttcacgc

SEQ ID NO: 1566084 - DNA, 15 bp, Homo sapiens
tccctggttcacgcc

SEQ ID NO: 1566085 - DNA, 15 bp, Homo sapiens
ccctggttcacgcca

SEQ ID NO: 1566086 - DNA, 15 bp, Homo sapiens
cctggttcacgccat

SEQ ID NO: 1566087 - DNA, 15 bp, Homo sapiens
ctggttcacgccatt

SEQ ID NO: 1566088 - DNA, 15 bp, Homo sapiens
tggttcacgccattc

SEQ ID NO: 1566089 - DNA, 15 bp, Homo sapiens
actacaggcgcctac

SEQ ID NO: 1566090 - DNA, 15 bp, Homo sapiens
ctacaggcgcctacc

SEQ ID NO: 1566091 - DNA, 15 bp, Homo sapiens
tacaggcgcctacca

SEQ ID NO: 1566092 - DNA, 15 bp, Homo sapiens
acaggcgcctaccac

SEQ ID NO: 1566093 - DNA, 15 bp, Homo sapiens
caggcgcctaccacc

SEQ ID NO: 1566094 - DNA, 15 bp, Homo sapiens
aggcgcctaccacca

SEQ ID NO: 1566095 - DNA, 15 bp, Homo sapiens
ggcgcctaccaccac

SEQ ID NO: 1566096 - DNA, 15 bp, Homo sapiens
gcgcctaccaccacg

SEQ ID NO: 1566097 - DNA, 15 bp, Homo sapiens
cgcctaccaccacgc

SEQ ID NO: 1566098 - DNA, 15 bp, Homo sapiens
gcctaccaccacgcc

SEQ ID NO: 1566099 - DNA, 15 bp, Homo sapiens
cctaccaccacgcct

SEQ ID NO: 1566100 - DNA, 15 bp, Homo sapiens
ctaccaccacgcctg

SEQ ID NO: 1566101 - DNA, 15 bp, Homo sapiens
taccaccacgcctgg

SEQ ID NO: 1566102 - DNA, 15 bp, Homo sapiens
tggctaattttttgg

SEQ ID NO: 1566103 - DNA, 15 bp, Homo sapiens
ggctaattttttgga

SEQ ID NO: 1566104 - DNA, 15 bp, Homo sapiens
gctaattttttggat

SEQ ID NO: 1566105 - DNA, 15 bp, Homo sapiens
ctaattttttggatt

SEQ ID NO: 1566106 - DNA, 15 bp, Homo sapiens
taattttttggattt

SEQ ID NO: 1566107 - DNA, 15 bp, Homo sapiens
aattttttggatttt

SEQ ID NO: 1566108 - DNA, 15 bp, Homo sapiens
attttttggattttt

SEQ ID NO: 1566109 - DNA, 15 bp, Homo sapiens
ttttttggattttta

SEQ ID NO: 1566110 - DNA, 15 bp, Homo sapiens
tttttggatttttag

SEQ ID NO: 1566111 - DNA, 15 bp, Homo sapiens
ttttggatttttagt

SEQ ID NO: 1566112 - DNA, 15 bp, Homo sapiens
tttggatttttagta

SEQ ID NO: 1566113 - DNA, 15 bp, Homo sapiens
ttggatttttagtag

SEQ ID NO: 1566114 - DNA, 15 bp, Homo sapiens
tggatttttagtaga

SEQ ID NO: 1566115 - DNA, 15 bp, Homo sapiens
ggatttttagtagag

SEQ ID NO: 1566116 - DNA, 15 bp, Homo sapiens
gatttttagtagaga

SEQ ID NO: 1566117 - DNA, 15 bp, Homo sapiens
gatggagtttcaccg

SEQ ID NO: 1566118 - DNA, 15 bp, Homo sapiens
atggagtttcaccgt

SEQ ID NO: 1566119 - DNA, 15 bp, Homo sapiens
tggagtttcaccgtg

SEQ ID NO: 1566120 - DNA, 15 bp, Homo sapiens
gccaggatggtctcc

SEQ ID NO: 1566121 - DNA, 15 bp, Homo sapiens
ccaggatggtctcca

SEQ ID NO: 1566122 - DNA, 15 bp, Homo sapiens
caggatggtctccat

SEQ ID NO: 1566123 - DNA, 15 bp, Homo sapiens
aggatggtctccatt

SEQ ID NO: 1566124 - DNA, 15 bp, Homo sapiens
ggatggtctccattt

SEQ ID NO: 1566125 - DNA, 15 bp, Homo sapiens
gatggtctccatttc

SEQ ID NO: 1566126 - DNA, 15 bp, Homo sapiens
atggtctccatttcc

SEQ ID NO: 1566127 - DNA, 15 bp, Homo sapiens
tggtctccatttcct

SEQ ID NO: 1566128 - DNA, 15 bp, Homo sapiens
ggtctccatttcctg

SEQ ID NO: 1566129 - DNA, 15 bp, Homo sapiens
gtctccatttcctga

SEQ ID NO: 1566130 - DNA, 15 bp, Homo sapiens
tctccatttcctgac

SEQ ID NO: 1566131 - DNA, 15 bp, Homo sapiens
ctccatttcctgacc

SEQ ID NO: 1566132 - DNA, 15 bp, Homo sapiens
tccatttcctgacct

SEQ ID NO: 1566133 - DNA, 15 bp, Homo sapiens
ccatttcctgacctt

SEQ ID NO: 1566134 - DNA, 15 bp, Homo sapiens
catttcctgaccttg

SEQ ID NO: 1566135 - DNA, 15 bp, Homo sapiens
atttcctgaccttgt

SEQ ID NO: 1566136 - DNA, 15 bp, Homo sapiens
tttcctgaccttgtg

SEQ ID NO: 1566137 - DNA, 15 bp, Homo sapiens
ttcctgaccttgtga

SEQ ID NO: 1566138 - DNA, 15 bp, Homo sapiens
gagccaccacgcccg

SEQ ID NO: 1566139 - DNA, 15 bp, Homo sapiens
agccaccacgcccgg

SEQ ID NO: 1566140 - DNA, 15 bp, Homo sapiens
ccaccacgcccggcc

SEQ ID NO: 1566141 - DNA, 15 bp, Homo sapiens
caccacgcccggccc

SEQ ID NO: 1566142 - DNA, 15 bp, Homo sapiens
accacgcccggcccc

SEQ ID NO: 1566143 - DNA, 15 bp, Homo sapiens
ccacgcccggcccct

SEQ ID NO: 1566144 - DNA, 15 bp, Homo sapiens
cacgcccggcccctg

SEQ ID NO: 1566145 - DNA, 15 bp, Homo sapiens
acgcccggcccctgt

SEQ ID NO: 1566146 - DNA, 15 bp, Homo sapiens
cgcccggcccctgta

SEQ ID NO: 1566147 - DNA, 15 bp, Homo sapiens
gcccggcccctgtaa

SEQ ID NO: 1566148 - DNA, 15 bp, Homo sapiens
cccggcccctgtaac

SEQ ID NO: 1566149 - DNA, 15 bp, Homo sapiens
ccggcccctgtaact

SEQ ID NO: 1566150 - DNA, 15 bp, Homo sapiens
cggcccctgtaactt

SEQ ID NO: 1566151 - DNA, 15 bp, Homo sapiens
ggcccctgtaacttc

SEQ ID NO: 1566152 - DNA, 15 bp, Homo sapiens
gcccctgtaacttct

SEQ ID NO: 1566153 - DNA, 15 bp, Homo sapiens
cccctgtaacttctt

SEQ ID NO: 1566154 - DNA, 15 bp, Homo sapiens
ccctgtaacttctta

SEQ ID NO: 1566155 - DNA, 15 bp, Homo sapiens
cctgtaacttcttaa

SEQ ID NO: 1566156 - DNA, 15 bp, Homo sapiens
ctgtaacttcttaag

SEQ ID NO: 1566157 - DNA, 15 bp, Homo sapiens
tgtaacttcttaagc

SEQ ID NO: 1566158 - DNA, 15 bp, Homo sapiens
gtaacttcttaagcg

SEQ ID NO: 1566159 - DNA, 15 bp, Homo sapiens
taacttcttaagcga

SEQ ID NO: 1566160 - DNA, 15 bp, Homo sapiens
aacttcttaagcgaa

SEQ ID NO: 1566161 - DNA, 15 bp, Homo sapiens
acttcttaagcgaag

SEQ ID NO: 1566162 - DNA, 15 bp, Homo sapiens
cttcttaagcgaagg

SEQ ID NO: 1566163 - DNA, 15 bp, Homo sapiens
ttcttaagcgaagga

SEQ ID NO: 1566164 - DNA, 15 bp, Homo sapiens
tcttaagcgaaggaa

SEQ ID NO: 1566165 - DNA, 15 bp, Homo sapiens
cttaagcgaaggaaa

SEQ ID NO: 1566166 - DNA, 15 bp, Homo sapiens
ttaagcgaaggaaaa

SEQ ID NO: 1566167 - DNA, 15 bp, Homo sapiens
taagcgaaggaaaat

SEQ ID NO: 1566168 - DNA, 15 bp, Homo sapiens
aagcgaaggaaaata

SEQ ID NO: 1566169 - DNA, 15 bp, Homo sapiens
agcgaaggaaaataa

SEQ ID NO: 1566170 - DNA, 15 bp, Homo sapiens
gcgaaggaaaataaa

SEQ ID NO: 1566171 - DNA, 15 bp, Homo sapiens
cgaaggaaaataaaa

SEQ ID NO: 1566172 - DNA, 15 bp, Homo sapiens
gaaggaaaataaaaa

SEQ ID NO: 1566173 - DNA, 15 bp, Homo sapiens
aaggaaaataaaaaa

SEQ ID NO: 1566174 - DNA, 15 bp, Homo sapiens
aggaaaataaaaaaa

SEQ ID NO: 1566175 - DNA, 15 bp, Homo sapiens
ggaaaataaaaaaaa

SEQ ID NO: 1566176 - DNA, 15 bp, Homo sapiens
gaaaataaaaaaaaa

SEQ ID NO: 1566177 - DNA, 15 bp, Homo sapiens
aaaaaaaaaagcaga

SEQ ID NO: 1566178 - DNA, 15 bp, Homo sapiens
aaaaaaaaagcagaa

SEQ ID NO: 1566179 - DNA, 15 bp, Homo sapiens
aaaaaaaagcagaag

SEQ ID NO: 1566180 - DNA, 15 bp, Homo sapiens
aaaaaaagcagaagc

SEQ ID NO: 1566181 - DNA, 15 bp, Homo sapiens
aaaaaagcagaagcc

SEQ ID NO: 1566182 - DNA, 15 bp, Homo sapiens
aaaaagcagaagcca

SEQ ID NO: 1566183 - DNA, 15 bp, Homo sapiens
aaaagcagaagccac

SEQ ID NO: 1566184 - DNA, 15 bp, Homo sapiens
aaagcagaagccaca

SEQ ID NO: 1566185 - DNA, 15 bp, Homo sapiens
aagcagaagccacaa

SEQ ID NO: 1566186 - DNA, 15 bp, Homo sapiens
agcagaagccacaaa

SEQ ID NO: 1566187 - DNA, 15 bp, Homo sapiens
gcagaagccacaaag

SEQ ID NO: 1566188 - DNA, 15 bp, Homo sapiens
cagaagccacaaagg

SEQ ID NO: 1566189 - DNA, 15 bp, Homo sapiens
agaagccacaaagga

SEQ ID NO: 1566190 - DNA, 15 bp, Homo sapiens
gaagccacaaaggaa

SEQ ID NO: 1566191 - DNA, 15 bp, Homo sapiens
aagccacaaaggaaa

SEQ ID NO: 1566192 - DNA, 15 bp, Homo sapiens
agccacaaaggaaaa

SEQ ID NO: 1566193 - DNA, 15 bp, Homo sapiens
gccacaaaggaaaag

SEQ ID NO: 1566194 - DNA, 15 bp, Homo sapiens
ccacaaaggaaaaga

SEQ ID NO: 1566195 - DNA, 15 bp, Homo sapiens
cacaaaggaaaagat

SEQ ID NO: 1566196 - DNA, 15 bp, Homo sapiens
acaaaggaaaagatt

SEQ ID NO: 1566197 - DNA, 15 bp, Homo sapiens
caaaggaaaagattg

SEQ ID NO: 1566198 - DNA, 15 bp, Homo sapiens
aaaggaaaagattga

SEQ ID NO: 1566199 - DNA, 15 bp, Homo sapiens
aaggaaaagattgac

SEQ ID NO: 1566200 - DNA, 15 bp, Homo sapiens
aggaaaagattgacc

SEQ ID NO: 1566201 - DNA, 15 bp, Homo sapiens
ggaaaagattgacca

SEQ ID NO: 1566202 - DNA, 15 bp, Homo sapiens
gaaaagattgaccaa

SEQ ID NO: 1566203 - DNA, 15 bp, Homo sapiens
aaaagattgaccaat

SEQ ID NO: 1566204 - DNA, 15 bp, Homo sapiens
aaagattgaccaata

SEQ ID NO: 1566205 - DNA, 15 bp, Homo sapiens
aagattgaccaatat

SEQ ID NO: 1566206 - DNA, 15 bp, Homo sapiens
agattgaccaatata

SEQ ID NO: 1566207 - DNA, 15 bp, Homo sapiens
gattgaccaatatat

SEQ ID NO: 1566208 - DNA, 15 bp, Homo sapiens
attgaccaatatatt

SEQ ID NO: 1566209 - DNA, 15 bp, Homo sapiens
ttgaccaatatattt

SEQ ID NO: 1566210 - DNA, 15 bp, Homo sapiens
tgaccaatatatttc

SEQ ID NO: 1566211 - DNA, 15 bp, Homo sapiens
gaccaatatatttca

SEQ ID NO: 1566212 - DNA, 15 bp, Homo sapiens
accaatatatttcag

SEQ ID NO: 1566213 - DNA, 15 bp, Homo sapiens
ccaatatatttcaga

SEQ ID NO: 1566214 - DNA, 15 bp, Homo sapiens
caatatatttcagat

SEQ ID NO: 1566215 - DNA, 15 bp, Homo sapiens
aatatatttcagatg

SEQ ID NO: 1566216 - DNA, 15 bp, Homo sapiens
atatatttcagatga

SEQ ID NO: 1566217 - DNA, 15 bp, Homo sapiens
tatatttcagatgac

SEQ ID NO: 1566218 - DNA, 15 bp, Homo sapiens
atatttcagatgaca

SEQ ID NO: 1566219 - DNA, 15 bp, Homo sapiens
tatttcagatgacat

SEQ ID NO: 1566220 - DNA, 15 bp, Homo sapiens
atttcagatgacata

SEQ ID NO: 1566221 - DNA, 15 bp, Homo sapiens
tttcagatgacataa

SEQ ID NO: 1566222 - DNA, 15 bp, Homo sapiens
ttcagatgacataac

SEQ ID NO: 1566223 - DNA, 15 bp, Homo sapiens
tcagatgacataaca

SEQ ID NO: 1566224 - DNA, 15 bp, Homo sapiens
cagatgacataacaa

SEQ ID NO: 1566225 - DNA, 15 bp, Homo sapiens
agatgacataacaac

SEQ ID NO: 1566226 - DNA, 15 bp, Homo sapiens
gatgacataacaaca

SEQ ID NO: 1566227 - DNA, 15 bp, Homo sapiens
atgacataacaacaa

SEQ ID NO: 1566228 - DNA, 15 bp, Homo sapiens
tgacataacaacaac

SEQ ID NO: 1566229 - DNA, 15 bp, Homo sapiens
gacataacaacaaca

SEQ ID NO: 1566230 - DNA, 15 bp, Homo sapiens
acataacaacaacac

SEQ ID NO: 1566231 - DNA, 15 bp, Homo sapiens
cataacaacaacaca

SEQ ID NO: 1566232 - DNA, 15 bp, Homo sapiens
ataacaacaacacaa

SEQ ID NO: 1566233 - DNA, 15 bp, Homo sapiens
taacaacaacacaaa

SEQ ID NO: 1566234 - DNA, 15 bp, Homo sapiens
aacaacaacacaaaa

SEQ ID NO: 1566235 - DNA, 15 bp, Homo sapiens
acaacaacacaaaag

SEQ ID NO: 1566236 - DNA, 15 bp, Homo sapiens
caacaacacaaaaga

SEQ ID NO: 1566237 - DNA, 15 bp, Homo sapiens
aacaacacaaaagac

SEQ ID NO: 1566238 - DNA, 15 bp, Homo sapiens
acaacacaaaagaca

SEQ ID NO: 1566239 - DNA, 15 bp, Homo sapiens
caacacaaaagacaa

SEQ ID NO: 1566240 - DNA, 15 bp, Homo sapiens
aacacaaaagacaaa

SEQ ID NO: 1566241 - DNA, 15 bp, Homo sapiens
acacaaaagacaaat

SEQ ID NO: 1566242 - DNA, 15 bp, Homo sapiens
cacaaaagacaaatg

SEQ ID NO: 1566243 - DNA, 15 bp, Homo sapiens
acaaaagacaaatga

SEQ ID NO: 1566244 - DNA, 15 bp, Homo sapiens
caaaagacaaatgac

SEQ ID NO: 1566245 - DNA, 15 bp, Homo sapiens
aaaagacaaatgaca

SEQ ID NO: 1566246 - DNA, 15 bp, Homo sapiens
aaagacaaatgacag

SEQ ID NO: 1566247 - DNA, 15 bp, Homo sapiens
aagacaaatgacaga

SEQ ID NO: 1566248 - DNA, 15 bp, Homo sapiens
agacaaatgacagat

SEQ ID NO: 1566249 - DNA, 15 bp, Homo sapiens
gacaaatgacagatt

SEQ ID NO: 1566250 - DNA, 15 bp, Homo sapiens
acaaatgacagattg

SEQ ID NO: 1566251 - DNA, 15 bp, Homo sapiens
caaatgacagattgg

SEQ ID NO: 1566252 - DNA, 15 bp, Homo sapiens
aaatgacagattggg

SEQ ID NO: 1566253 - DNA, 15 bp, Homo sapiens
aatgacagattggga

SEQ ID NO: 1566254 - DNA, 15 bp, Homo sapiens
atgacagattgggag

SEQ ID NO: 1566255 - DNA, 15 bp, Homo sapiens
tgacagattgggagg

SEQ ID NO: 1566256 - DNA, 15 bp, Homo sapiens
gacagattgggagga

SEQ ID NO: 1566257 - DNA, 15 bp, Homo sapiens
acagattgggaggaa

SEQ ID NO: 1566258 - DNA, 15 bp, Homo sapiens
cagattgggaggaag

SEQ ID NO: 1566259 - DNA, 15 bp, Homo sapiens
agattgggaggaagc

SEQ ID NO: 1566260 - DNA, 15 bp, Homo sapiens
gattgggaggaagca

SEQ ID NO: 1566261 - DNA, 15 bp, Homo sapiens
attgggaggaagcat

SEQ ID NO: 1566262 - DNA, 15 bp, Homo sapiens
ttgggaggaagcatc

SEQ ID NO: 1566263 - DNA, 15 bp, Homo sapiens
tgggaggaagcatct

SEQ ID NO: 1566264 - DNA, 15 bp, Homo sapiens
gggaggaagcatctg

SEQ ID NO: 1566265 - DNA, 15 bp, Homo sapiens
ggaggaagcatctga

SEQ ID NO: 1566266 - DNA, 15 bp, Homo sapiens
gaggaagcatctgaa

SEQ ID NO: 1566267 - DNA, 15 bp, Homo sapiens
aggaagcatctgaaa

SEQ ID NO: 1566268 - DNA, 15 bp, Homo sapiens
ggaagcatctgaaac

SEQ ID NO: 1566269 - DNA, 15 bp, Homo sapiens
gaagcatctgaaaca

SEQ ID NO: 1566270 - DNA, 15 bp, Homo sapiens
aagcatctgaaacat

SEQ ID NO: 1566271 - DNA, 15 bp, Homo sapiens
agcatctgaaacata

SEQ ID NO: 1566272 - DNA, 15 bp, Homo sapiens
gcatctgaaacatac

SEQ ID NO: 1566273 - DNA, 15 bp, Homo sapiens
catctgaaacataca

SEQ ID NO: 1566274 - DNA, 15 bp, Homo sapiens
atctgaaacatacaa

SEQ ID NO: 1566275 - DNA, 15 bp, Homo sapiens
tctgaaacatacaaa

SEQ ID NO: 1566276 - DNA, 15 bp, Homo sapiens
ctgaaacatacaaaa

SEQ ID NO: 1566277 - DNA, 15 bp, Homo sapiens
tgaaacatacaaaat

SEQ ID NO: 1566278 - DNA, 15 bp, Homo sapiens
gaaacatacaaaata

SEQ ID NO: 1566279 - DNA, 15 bp, Homo sapiens
aaacatacaaaatac

SEQ ID NO: 1566280 - DNA, 15 bp, Homo sapiens
aacatacaaaatacc

SEQ ID NO: 1566281 - DNA, 15 bp, Homo sapiens
acatacaaaataccc

SEQ ID NO: 1566282 - DNA, 15 bp, Homo sapiens
catacaaaataccca

SEQ ID NO: 1566283 - DNA, 15 bp, Homo sapiens
atacaaaatacccag

SEQ ID NO: 1566284 - DNA, 15 bp, Homo sapiens
tacaaaatacccaga

SEQ ID NO: 1566285 - DNA, 15 bp, Homo sapiens
acaaaatacccagaa

SEQ ID NO: 1566286 - DNA, 15 bp, Homo sapiens
caaaatacccagaat

SEQ ID NO: 1566287 - DNA, 15 bp, Homo sapiens
aatacccagaatata

SEQ ID NO: 1566288 - DNA, 15 bp, Homo sapiens
atacccagaatatat

SEQ ID NO: 1566289 - DNA, 15 bp, Homo sapiens
tacccagaatatata

SEQ ID NO: 1566290 - DNA, 15 bp, Homo sapiens
acccagaatatataa

SEQ ID NO: 1566291 - DNA, 15 bp, Homo sapiens
cccagaatatataaa

SEQ ID NO: 1566292 - DNA, 15 bp, Homo sapiens
ccagaatatataaac

SEQ ID NO: 1566293 - DNA, 15 bp, Homo sapiens
cagaatatataaaca

SEQ ID NO: 1566294 - DNA, 15 bp, Homo sapiens
agaatatataaacag

SEQ ID NO: 1566295 - DNA, 15 bp, Homo sapiens
gaatatataaacagc

SEQ ID NO: 1566296 - DNA, 15 bp, Homo sapiens
aatatataaacagct

SEQ ID NO: 1566297 - DNA, 15 bp, Homo sapiens
atatataaacagctc

SEQ ID NO: 1566298 - DNA, 15 bp, Homo sapiens
tatataaacagctcc

SEQ ID NO: 1566299 - DNA, 15 bp, Homo sapiens
atataaacagctcct

SEQ ID NO: 1566300 - DNA, 15 bp, Homo sapiens
tataaacagctccta

SEQ ID NO: 1566301 - DNA, 15 bp, Homo sapiens
ataaacagctcctac

SEQ ID NO: 1566302 - DNA, 15 bp, Homo sapiens
taaacagctcctaca

SEQ ID NO: 1566303 - DNA, 15 bp, Homo sapiens
aaacagctcctacag

SEQ ID NO: 1566304 - DNA, 15 bp, Homo sapiens
aacagctcctacagt

SEQ ID NO: 1566305 - DNA, 15 bp, Homo sapiens
acagctcctacagtt

SEQ ID NO: 1566306 - DNA, 15 bp, Homo sapiens
cagctcctacagttc

SEQ ID NO: 1566307 - DNA, 15 bp, Homo sapiens
agctcctacagttca

SEQ ID NO: 1566308 - DNA, 15 bp, Homo sapiens
gctcctacagttcaa

SEQ ID NO: 1566309 - DNA, 15 bp, Homo sapiens
ctcctacagttcaac

SEQ ID NO: 1566310 - DNA, 15 bp, Homo sapiens
tcctacagttcaaca

SEQ ID NO: 1566311 - DNA, 15 bp, Homo sapiens
cctacagttcaacaa

SEQ ID NO: 1566312 - DNA, 15 bp, Homo sapiens
ctacagttcaacaag

SEQ ID NO: 1566313 - DNA, 15 bp, Homo sapiens
tacagttcaacaaga

SEQ ID NO: 1566314 - DNA, 15 bp, Homo sapiens
acagttcaacaagaa

SEQ ID NO: 1566315 - DNA, 15 bp, Homo sapiens
cagttcaacaagaaa

SEQ ID NO: 1566316 - DNA, 15 bp, Homo sapiens
agttcaacaagaaag

SEQ ID NO: 1566317 - DNA, 15 bp, Homo sapiens
gttcaacaagaaaga

SEQ ID NO: 1566318 - DNA, 15 bp, Homo sapiens
ttcaacaagaaagaa

SEQ ID NO: 1566319 - DNA, 15 bp, Homo sapiens
tcaacaagaaagaaa

SEQ ID NO: 1566320 - DNA, 15 bp, Homo sapiens
caacaagaaagaaaa

SEQ ID NO: 1566321 - DNA, 15 bp, Homo sapiens
aacaagaaagaaaat

SEQ ID NO: 1566322 - DNA, 15 bp, Homo sapiens
acaagaaagaaaata

SEQ ID NO: 1566323 - DNA, 15 bp, Homo sapiens
caagaaagaaaatac

SEQ ID NO: 1566324 - DNA, 15 bp, Homo sapiens
aagaaagaaaatact

SEQ ID NO: 1566325 - DNA, 15 bp, Homo sapiens
agaaagaaaatactg

SEQ ID NO: 1566326 - DNA, 15 bp, Homo sapiens
gaaagaaaatactgc

SEQ ID NO: 1566327 - DNA, 15 bp, Homo sapiens
aaagaaaatactgca

SEQ ID NO: 1566328 - DNA, 15 bp, Homo sapiens
aagaaaatactgcaa

SEQ ID NO: 1566329 - DNA, 15 bp, Homo sapiens
agaaaatactgcaaa

SEQ ID NO: 1566330 - DNA, 15 bp, Homo sapiens
gaaaatactgcaaaa

SEQ ID NO: 1566331 - DNA, 15 bp, Homo sapiens
aaaatactgcaaaaa

SEQ ID NO: 1566332 - DNA, 15 bp, Homo sapiens
aaatactgcaaaaac

SEQ ID NO: 1566333 - DNA, 15 bp, Homo sapiens
aatactgcaaaaaca

SEQ ID NO: 1566334 - DNA, 15 bp, Homo sapiens
atactgcaaaaacaa

SEQ ID NO: 1566335 - DNA, 15 bp, Homo sapiens
tactgcaaaaacaat

SEQ ID NO: 1566336 - DNA, 15 bp, Homo sapiens
actgcaaaaacaatc

SEQ ID NO: 1566337 - DNA, 15 bp, Homo sapiens
ctgcaaaaacaatca

SEQ ID NO: 1566338 - DNA, 15 bp, Homo sapiens
tgcaaaaacaatcag

SEQ ID NO: 1566339 - DNA, 15 bp, Homo sapiens
gcaaaaacaatcagc

SEQ ID NO: 1566340 - DNA, 15 bp, Homo sapiens
caaaaacaatcagca

SEQ ID NO: 1566341 - DNA, 15 bp, Homo sapiens
aaaaacaatcagcaa

SEQ ID NO: 1566342 - DNA, 15 bp, Homo sapiens
aaaacaatcagcaaa

SEQ ID NO: 1566343 - DNA, 15 bp, Homo sapiens
aaacaatcagcaaat

SEQ ID NO: 1566344 - DNA, 15 bp, Homo sapiens
aacaatcagcaaata

SEQ ID NO: 1566345 - DNA, 15 bp, Homo sapiens
acaatcagcaaataa

SEQ ID NO: 1566346 - DNA, 15 bp, Homo sapiens
caatcagcaaataat

SEQ ID NO: 1566347 - DNA, 15 bp, Homo sapiens
aatcagcaaataata

SEQ ID NO: 1566348 - DNA, 15 bp, Homo sapiens
atcagcaaataatac

SEQ ID NO: 1566349 - DNA, 15 bp, Homo sapiens
tcagcaaataatact

SEQ ID NO: 1566350 - DNA, 15 bp, Homo sapiens
cagcaaataatactg

SEQ ID NO: 1566351 - DNA, 15 bp, Homo sapiens
agcaaataatactgt

SEQ ID NO: 1566352 - DNA, 15 bp, Homo sapiens
gcaaataatactgtg

SEQ ID NO: 1566353 - DNA, 15 bp, Homo sapiens
caaataatactgtga

SEQ ID NO: 1566354 - DNA, 15 bp, Homo sapiens
aaataatactgtgat

SEQ ID NO: 1566355 - DNA, 15 bp, Homo sapiens
aataatactgtgatg

SEQ ID NO: 1566356 - DNA, 15 bp, Homo sapiens
ataatactgtgatgg

SEQ ID NO: 1566357 - DNA, 15 bp, Homo sapiens
taatactgtgatggt

SEQ ID NO: 1566358 - DNA, 15 bp, Homo sapiens
aatactgtgatggta

SEQ ID NO: 1566359 - DNA, 15 bp, Homo sapiens
atactgtgatggtag

SEQ ID NO: 1566360 - DNA, 15 bp, Homo sapiens
tactgtgatggtaga

SEQ ID NO: 1566361 - DNA, 15 bp, Homo sapiens
actgtgatggtagaa

SEQ ID NO: 1566362 - DNA, 15 bp, Homo sapiens
ctgtgatggtagaac

SEQ ID NO: 1566363 - DNA, 15 bp, Homo sapiens
tgtgatggtagaaca

SEQ ID NO: 1566364 - DNA, 15 bp, Homo sapiens
gtgatggtagaacaa

SEQ ID NO: 1566365 - DNA, 15 bp, Homo sapiens
tgatggtagaacaat

SEQ ID NO: 1566366 - DNA, 15 bp, Homo sapiens
gatggtagaacaatg

SEQ ID NO: 1566367 - DNA, 15 bp, Homo sapiens
atggtagaacaatgt

SEQ ID NO: 1566368 - DNA, 15 bp, Homo sapiens
tggtagaacaatgta

SEQ ID NO: 1566369 - DNA, 15 bp, Homo sapiens
ggtagaacaatgtat

SEQ ID NO: 1566370 - DNA, 15 bp, Homo sapiens
gtagaacaatgtatc

SEQ ID NO: 1566371 - DNA, 15 bp, Homo sapiens
tagaacaatgtatct

SEQ ID NO: 1566372 - DNA, 15 bp, Homo sapiens
agaacaatgtatcta

SEQ ID NO: 1566373 - DNA, 15 bp, Homo sapiens
gaacaatgtatctac

SEQ ID NO: 1566374 - DNA, 15 bp, Homo sapiens
aacaatgtatctact

SEQ ID NO: 1566375 - DNA, 15 bp, Homo sapiens
acaatgtatctactt

SEQ ID NO: 1566376 - DNA, 15 bp, Homo sapiens
caatgtatctacttg

SEQ ID NO: 1566377 - DNA, 15 bp, Homo sapiens
aatgtatctacttgg

SEQ ID NO: 1566378 - DNA, 15 bp, Homo sapiens
atgtatctacttgga

SEQ ID NO: 1566379 - DNA, 15 bp, Homo sapiens
tgtatctacttggat

SEQ ID NO: 1566380 - DNA, 15 bp, Homo sapiens
gtatctacttggatg

SEQ ID NO: 1566381 - DNA, 15 bp, Homo sapiens
tatctacttggatgg

SEQ ID NO: 1566382 - DNA, 15 bp, Homo sapiens
atctacttggatggt

SEQ ID NO: 1566383 - DNA, 15 bp, Homo sapiens
tctacttggatggtg

SEQ ID NO: 1566384 - DNA, 15 bp, Homo sapiens
ctacttggatggtgc

SEQ ID NO: 1566385 - DNA, 15 bp, Homo sapiens
tacttggatggtgct

SEQ ID NO: 1566386 - DNA, 15 bp, Homo sapiens
acttggatggtgctc

SEQ ID NO: 1566387 - DNA, 15 bp, Homo sapiens
cttggatggtgctcc

SEQ ID NO: 1566388 - DNA, 15 bp, Homo sapiens
ttggatggtgctcct

SEQ ID NO: 1566389 - DNA, 15 bp, Homo sapiens
tggatggtgctcctg

SEQ ID NO: 1566390 - DNA, 15 bp, Homo sapiens
ggatggtgctcctgg

SEQ ID NO: 1566391 - DNA, 15 bp, Homo sapiens
gatggtgctcctgga

SEQ ID NO: 1566392 - DNA, 15 bp, Homo sapiens
atggtgctcctggat

SEQ ID NO: 1566393 - DNA, 15 bp, Homo sapiens
tggtgctcctggatt

SEQ ID NO: 1566394 - DNA, 15 bp, Homo sapiens
ggtgctcctggatta

SEQ ID NO: 1566395 - DNA, 15 bp, Homo sapiens
gtgctcctggattag

SEQ ID NO: 1566396 - DNA, 15 bp, Homo sapiens
tgctcctggattaga

SEQ ID NO: 1566397 - DNA, 15 bp, Homo sapiens
gctcctggattagat

SEQ ID NO: 1566398 - DNA, 15 bp, Homo sapiens
ctcctggattagatt

SEQ ID NO: 1566399 - DNA, 15 bp, Homo sapiens
tcctggattagatta

SEQ ID NO: 1566400 - DNA, 15 bp, Homo sapiens
cctggattagattaa

SEQ ID NO: 1566401 - DNA, 15 bp, Homo sapiens
ctggattagattaac

SEQ ID NO: 1566402 - DNA, 15 bp, Homo sapiens
tggattagattaaca

SEQ ID NO: 1566403 - DNA, 15 bp, Homo sapiens
ggattagattaacat

SEQ ID NO: 1566404 - DNA, 15 bp, Homo sapiens
gattagattaacatt

SEQ ID NO: 1566405 - DNA, 15 bp, Homo sapiens
attagattaacattt

SEQ ID NO: 1566406 - DNA, 15 bp, Homo sapiens
ttagattaacattta

SEQ ID NO: 1566407 - DNA, 15 bp, Homo sapiens
tagattaacatttaa

SEQ ID NO: 1566408 - DNA, 15 bp, Homo sapiens
agattaacatttaaa

SEQ ID NO: 1566409 - DNA, 15 bp, Homo sapiens
gattaacatttaaat

SEQ ID NO: 1566410 - DNA, 15 bp, Homo sapiens
attaacatttaaatc

SEQ ID NO: 1566411 - DNA, 15 bp, Homo sapiens
ttaacatttaaatca

SEQ ID NO: 1566412 - DNA, 15 bp, Homo sapiens
taacatttaaatcag

SEQ ID NO: 1566413 - DNA, 15 bp, Homo sapiens
aacatttaaatcagt

SEQ ID NO: 1566414 - DNA, 15 bp, Homo sapiens
acatttaaatcagtg

SEQ ID NO: 1566415 - DNA, 15 bp, Homo sapiens
catttaaatcagtga

SEQ ID NO: 1566416 - DNA, 15 bp, Homo sapiens
atttaaatcagtgaa

SEQ ID NO: 1566417 - DNA, 15 bp, Homo sapiens
tttaaatcagtgaac

SEQ ID NO: 1566418 - DNA, 15 bp, Homo sapiens
ttaaatcagtgaact

SEQ ID NO: 1566419 - DNA, 15 bp, Homo sapiens
taaatcagtgaactt

SEQ ID NO: 1566420 - DNA, 15 bp, Homo sapiens
aaatcagtgaacttt

SEQ ID NO: 1566421 - DNA, 15 bp, Homo sapiens
aatcagtgaactttg

SEQ ID NO: 1566422 - DNA, 15 bp, Homo sapiens
atcagtgaactttgg

SEQ ID NO: 1566423 - DNA, 15 bp, Homo sapiens
tcagtgaactttggt

SEQ ID NO: 1566424 - DNA, 15 bp, Homo sapiens
cagtgaactttggtt

SEQ ID NO: 1566425 - DNA, 15 bp, Homo sapiens
agtgaactttggtta

SEQ ID NO: 1566426 - DNA, 15 bp, Homo sapiens
gtgaactttggttaa

SEQ ID NO: 1566427 - DNA, 15 bp, Homo sapiens
tgaactttggttaaa

SEQ ID NO: 1566428 - DNA, 15 bp, Homo sapiens
gaactttggttaaag

SEQ ID NO: 1566429 - DNA, 15 bp, Homo sapiens
aactttggttaaagc

SEQ ID NO: 1566430 - DNA, 15 bp, Homo sapiens
actttggttaaagca

SEQ ID NO: 1566431 - DNA, 15 bp, Homo sapiens
ctttggttaaagcaa

SEQ ID NO: 1566432 - DNA, 15 bp, Homo sapiens
tttggttaaagcaaa

SEQ ID NO: 1566433 - DNA, 15 bp, Homo sapiens
ttggttaaagcaaat

SEQ ID NO: 1566434 - DNA, 15 bp, Homo sapiens
tggttaaagcaaatt

SEQ ID NO: 1566435 - DNA, 15 bp, Homo sapiens
ggttaaagcaaattg

SEQ ID NO: 1566436 - DNA, 15 bp, Homo sapiens
gttaaagcaaattgc

SEQ ID NO: 1566437 - DNA, 15 bp, Homo sapiens
ttaaagcaaattgct

SEQ ID NO: 1566438 - DNA, 15 bp, Homo sapiens
taaagcaaattgctc

SEQ ID NO: 1566439 - DNA, 15 bp, Homo sapiens
aaagcaaattgctct

SEQ ID NO: 1566440 - DNA, 15 bp, Homo sapiens
aagcaaattgctctc

SEQ ID NO: 1566441 - DNA, 15 bp, Homo sapiens
agcaaattgctctcc

SEQ ID NO: 1566442 - DNA, 15 bp, Homo sapiens
gcaaattgctctcca

SEQ ID NO: 1566443 - DNA, 15 bp, Homo sapiens
caaattgctctccat

SEQ ID NO: 1566444 - DNA, 15 bp, Homo sapiens
aaattgctctccatt

SEQ ID NO: 1566445 - DNA, 15 bp, Homo sapiens
aattgctctccattg

SEQ ID NO: 1566446 - DNA, 15 bp, Homo sapiens
attgctctccattgt

SEQ ID NO: 1566447 - DNA, 15 bp, Homo sapiens
ttgctctccattgta

SEQ ID NO: 1566448 - DNA, 15 bp, Homo sapiens
tgctctccattgtag

SEQ ID NO: 1566449 - DNA, 15 bp, Homo sapiens
gctctccattgtagg

SEQ ID NO: 1566450 - DNA, 15 bp, Homo sapiens
ctctccattgtaggg

SEQ ID NO: 1566451 - DNA, 15 bp, Homo sapiens
tctccattgtaggga

SEQ ID NO: 1566452 - DNA, 15 bp, Homo sapiens
ctccattgtagggag

SEQ ID NO: 1566453 - DNA, 15 bp, Homo sapiens
tccattgtagggaga

SEQ ID NO: 1566454 - DNA, 15 bp, Homo sapiens
ccattgtagggagac

SEQ ID NO: 1566455 - DNA, 15 bp, Homo sapiens
cattgtagggagacc

SEQ ID NO: 1566456 - DNA, 15 bp, Homo sapiens
attgtagggagaccc

SEQ ID NO: 1566457 - DNA, 15 bp, Homo sapiens
ttgtagggagacccc

SEQ ID NO: 1566458 - DNA, 15 bp, Homo sapiens
tgtagggagaccccc

SEQ ID NO: 1566459 - DNA, 15 bp, Homo sapiens
gtagggagaccccct

SEQ ID NO: 1566460 - DNA, 15 bp, Homo sapiens
tagggagaccccctg

SEQ ID NO: 1566461 - DNA, 15 bp, Homo sapiens
agggagaccccctga

SEQ ID NO: 1566462 - DNA, 15 bp, Homo sapiens
gggagaccccctgaa

SEQ ID NO: 1566463 - DNA, 15 bp, Homo sapiens
ggagaccccctgaaa

SEQ ID NO: 1566464 - DNA, 15 bp, Homo sapiens
gagaccccctgaaac

SEQ ID NO: 1566465 - DNA, 15 bp, Homo sapiens
agaccccctgaaact

SEQ ID NO: 1566466 - DNA, 15 bp, Homo sapiens
gaccccctgaaacta

SEQ ID NO: 1566467 - DNA, 15 bp, Homo sapiens
accccctgaaactat

SEQ ID NO: 1566468 - DNA, 15 bp, Homo sapiens
ccccctgaaactatt

SEQ ID NO: 1566469 - DNA, 15 bp, Homo sapiens
cccctgaaactattg

SEQ ID NO: 1566470 - DNA, 15 bp, Homo sapiens
ccctgaaactattgc

SEQ ID NO: 1566471 - DNA, 15 bp, Homo sapiens
cctgaaactattgct

SEQ ID NO: 1566472 - DNA, 15 bp, Homo sapiens
ctgaaactattgcta

SEQ ID NO: 1566473 - DNA, 15 bp, Homo sapiens
tgaaactattgctac

SEQ ID NO: 1566474 - DNA, 15 bp, Homo sapiens
gaaactattgctacg

SEQ ID NO: 1566475 - DNA, 15 bp, Homo sapiens
aaactattgctacgg

SEQ ID NO: 1566476 - DNA, 15 bp, Homo sapiens
aactattgctacgga

SEQ ID NO: 1566477 - DNA, 15 bp, Homo sapiens
actattgctacggaa

SEQ ID NO: 1566478 - DNA, 15 bp, Homo sapiens
ctattgctacggaat

SEQ ID NO: 1566479 - DNA, 15 bp, Homo sapiens
tattgctacggaata

SEQ ID NO: 1566480 - DNA, 15 bp, Homo sapiens
attgctacggaataa

SEQ ID NO: 1566481 - DNA, 15 bp, Homo sapiens
ttgctacggaataaa

SEQ ID NO: 1566482 - DNA, 15 bp, Homo sapiens
tgctacggaataaaa

SEQ ID NO: 1566483 - DNA, 15 bp, Homo sapiens
gctacggaataaaag

SEQ ID NO: 1566484 - DNA, 15 bp, Homo sapiens
ctacggaataaaaga

SEQ ID NO: 1566485 - DNA, 15 bp, Homo sapiens
tacggaataaaagat

SEQ ID NO: 1566486 - DNA, 15 bp, Homo sapiens
acggaataaaagatg

SEQ ID NO: 1566487 - DNA, 15 bp, Homo sapiens
cggaataaaagatga

SEQ ID NO: 1566488 - DNA, 15 bp, Homo sapiens
ggaataaaagatgaa

SEQ ID NO: 1566489 - DNA, 15 bp, Homo sapiens
gaataaaagatgaaa

SEQ ID NO: 1566490 - DNA, 15 bp, Homo sapiens
ataaaagatgaaatg

SEQ ID NO: 1566491 - DNA, 15 bp, Homo sapiens
taaaagatgaaatgc

SEQ ID NO: 1566492 - DNA, 15 bp, Homo sapiens
aaaagatgaaatgct

SEQ ID NO: 1566493 - DNA, 15 bp, Homo sapiens
aaagatgaaatgctc

SEQ ID NO: 1566494 - DNA, 15 bp, Homo sapiens
aagatgaaatgctcc

SEQ ID NO: 1566495 - DNA, 15 bp, Homo sapiens
agatgaaatgctcct

SEQ ID NO: 1566496 - DNA, 15 bp, Homo sapiens
gatgaaatgctcctg

SEQ ID NO: 1566497 - DNA, 15 bp, Homo sapiens
atgaaatgctcctga

SEQ ID NO: 1566498 - DNA, 15 bp, Homo sapiens
tgaaatgctcctgat

SEQ ID NO: 1566499 - DNA, 15 bp, Homo sapiens
gaaatgctcctgatt

SEQ ID NO: 1566500 - DNA, 15 bp, Homo sapiens
aaatgctcctgatta

SEQ ID NO: 1566501 - DNA, 15 bp, Homo sapiens
aatgctcctgattat

SEQ ID NO: 1566502 - DNA, 15 bp, Homo sapiens
atgctcctgattatt

SEQ ID NO: 1566503 - DNA, 15 bp, Homo sapiens
tgctcctgattattg

SEQ ID NO: 1566504 - DNA, 15 bp, Homo sapiens
gctcctgattattgt

SEQ ID NO: 1566505 - DNA, 15 bp, Homo sapiens
ctcctgattattgta

SEQ ID NO: 1566506 - DNA, 15 bp, Homo sapiens
tcctgattattgtaa

SEQ ID NO: 1566507 - DNA, 15 bp, Homo sapiens
cctgattattgtaaa

SEQ ID NO: 1566508 - DNA, 15 bp, Homo sapiens
ctgattattgtaaat

SEQ ID NO: 1566509 - DNA, 15 bp, Homo sapiens
tgattattgtaaata

SEQ ID NO: 1566510 - DNA, 15 bp, Homo sapiens
gattattgtaaatac

SEQ ID NO: 1566511 - DNA, 15 bp, Homo sapiens
attattgtaaatacg

SEQ ID NO: 1566512 - DNA, 15 bp, Homo sapiens
ttattgtaaatacga

SEQ ID NO: 1566513 - DNA, 15 bp, Homo sapiens
tattgtaaatacgaa

SEQ ID NO: 1566514 - DNA, 15 bp, Homo sapiens
attgtaaatacgaaa

SEQ ID NO: 1566515 - DNA, 15 bp, Homo sapiens
ttgtaaatacgaaat

SEQ ID NO: 1566516 - DNA, 15 bp, Homo sapiens
tgtaaatacgaaatt

SEQ ID NO: 1566517 - DNA, 15 bp, Homo sapiens
gtaaatacgaaattg

SEQ ID NO: 1566518 - DNA, 15 bp, Homo sapiens
taaatacgaaattgc

SEQ ID NO: 1566519 - DNA, 15 bp, Homo sapiens
aaatacgaaattgca

SEQ ID NO: 1566520 - DNA, 15 bp, Homo sapiens
aatacgaaattgcat

SEQ ID NO: 1566521 - DNA, 15 bp, Homo sapiens
atacgaaattgcatg

SEQ ID NO: 1566522 - DNA, 15 bp, Homo sapiens
tacgaaattgcatgc

SEQ ID NO: 1566523 - DNA, 15 bp, Homo sapiens
acgaaattgcatgca

SEQ ID NO: 1566524 - DNA, 15 bp, Homo sapiens
cgaaattgcatgcag

SEQ ID NO: 1566525 - DNA, 15 bp, Homo sapiens
gaaattgcatgcagg

SEQ ID NO: 1566526 - DNA, 15 bp, Homo sapiens
aaattgcatgcagga

SEQ ID NO: 1566527 - DNA, 15 bp, Homo sapiens
aattgcatgcaggat

SEQ ID NO: 1566528 - DNA, 15 bp, Homo sapiens
attgcatgcaggatt

SEQ ID NO: 1566529 - DNA, 15 bp, Homo sapiens
ttgcatgcaggattg

SEQ ID NO: 1566530 - DNA, 15 bp, Homo sapiens
tgcatgcaggattgt

SEQ ID NO: 1566531 - DNA, 15 bp, Homo sapiens
gcatgcaggattgtg

SEQ ID NO: 1566532 - DNA, 15 bp, Homo sapiens
catgcaggattgtgt

SEQ ID NO: 1566533 - DNA, 15 bp, Homo sapiens
atgcaggattgtgta

SEQ ID NO: 1566534 - DNA, 15 bp, Homo sapiens
tgcaggattgtgtaa

SEQ ID NO: 1566535 - DNA, 15 bp, Homo sapiens
gcaggattgtgtaaa

SEQ ID NO: 1566536 - DNA, 15 bp, Homo sapiens
caggattgtgtaaag

SEQ ID NO: 1566537 - DNA, 15 bp, Homo sapiens
aggattgtgtaaaga

SEQ ID NO: 1566538 - DNA, 15 bp, Homo sapiens
ggattgtgtaaagac

SEQ ID NO: 1566539 - DNA, 15 bp, Homo sapiens
gattgtgtaaagaca

SEQ ID NO: 1566540 - DNA, 15 bp, Homo sapiens
attgtgtaaagacaa

SEQ ID NO: 1566541 - DNA, 15 bp, Homo sapiens
ttgtgtaaagacaat

SEQ ID NO: 1566542 - DNA, 15 bp, Homo sapiens
tgtgtaaagacaatg

SEQ ID NO: 1566543 - DNA, 15 bp, Homo sapiens
gtgtaaagacaatgc

SEQ ID NO: 1566544 - DNA, 15 bp, Homo sapiens
tgtaaagacaatgcc

SEQ ID NO: 1566545 - DNA, 15 bp, Homo sapiens
gtaaagacaatgcca

SEQ ID NO: 1566546 - DNA, 15 bp, Homo sapiens
taaagacaatgccag

SEQ ID NO: 1566547 - DNA, 15 bp, Homo sapiens
aaagacaatgccagg

SEQ ID NO: 1566548 - DNA, 15 bp, Homo sapiens
aagacaatgccaggt

SEQ ID NO: 1566549 - DNA, 15 bp, Homo sapiens
agacaatgccaggtt

SEQ ID NO: 1566550 - DNA, 15 bp, Homo sapiens
gacaatgccaggttg

SEQ ID NO: 1566551 - DNA, 15 bp, Homo sapiens
acaatgccaggttgg

SEQ ID NO: 1566552 - DNA, 15 bp, Homo sapiens
caatgccaggttgga

SEQ ID NO: 1566553 - DNA, 15 bp, Homo sapiens
aatgccaggttggac

SEQ ID NO: 1566554 - DNA, 15 bp, Homo sapiens
atgccaggttggact

SEQ ID NO: 1566555 - DNA, 15 bp, Homo sapiens
tgccaggttggactg

SEQ ID NO: 1566556 - DNA, 15 bp, Homo sapiens
gccaggttggactgc

SEQ ID NO: 1566557 - DNA, 15 bp, Homo sapiens
ccaggttggactgcc

SEQ ID NO: 1566558 - DNA, 15 bp, Homo sapiens
caggttggactgcca

SEQ ID NO: 1566559 - DNA, 15 bp, Homo sapiens
aggttggactgccag

SEQ ID NO: 1566560 - DNA, 15 bp, Homo sapiens
ggttggactgccagt

SEQ ID NO: 1566561 - DNA, 15 bp, Homo sapiens
gttggactgccagta

SEQ ID NO: 1566562 - DNA, 15 bp, Homo sapiens
ttggactgccagtat

SEQ ID NO: 1566563 - DNA, 15 bp, Homo sapiens
tggactgccagtata

SEQ ID NO: 1566564 - DNA, 15 bp, Homo sapiens
ggactgccagtataa

SEQ ID NO: 1566565 - DNA, 15 bp, Homo sapiens
gactgccagtataag

SEQ ID NO: 1566566 - DNA, 15 bp, Homo sapiens
actgccagtataagc

SEQ ID NO: 1566567 - DNA, 15 bp, Homo sapiens
ctgccagtataagcc

SEQ ID NO: 1566568 - DNA, 15 bp, Homo sapiens
tgccagtataagcca

SEQ ID NO: 1566569 - DNA, 15 bp, Homo sapiens
gccagtataagccaa

SEQ ID NO: 1566570 - DNA, 15 bp, Homo sapiens
ccagtataagccaac

SEQ ID NO: 1566571 - DNA, 15 bp, Homo sapiens
cagtataagccaaca

SEQ ID NO: 1566572 - DNA, 15 bp, Homo sapiens
agtataagccaacag

SEQ ID NO: 1566573 - DNA, 15 bp, Homo sapiens
gtataagccaacagc

SEQ ID NO: 1566574 - DNA, 15 bp, Homo sapiens
tataagccaacagct

SEQ ID NO: 1566575 - DNA, 15 bp, Homo sapiens
ataagccaacagctc

SEQ ID NO: 1566576 - DNA, 15 bp, Homo sapiens
taagccaacagctcg

SEQ ID NO: 1566577 - DNA, 15 bp, Homo sapiens
aagccaacagctcgt

SEQ ID NO: 1566578 - DNA, 15 bp, Homo sapiens
agccaacagctcgtg

SEQ ID NO: 1566579 - DNA, 15 bp, Homo sapiens
gccaacagctcgtga

SEQ ID NO: 1566580 - DNA, 15 bp, Homo sapiens
ccaacagctcgtgat

SEQ ID NO: 1566581 - DNA, 15 bp, Homo sapiens
caacagctcgtgatg

SEQ ID NO: 1566582 - DNA, 15 bp, Homo sapiens
aacagctcgtgatgt

SEQ ID NO: 1566583 - DNA, 15 bp, Homo sapiens
acagctcgtgatgtg

SEQ ID NO: 1566584 - DNA, 15 bp, Homo sapiens
cagctcgtgatgtgc

SEQ ID NO: 1566585 - DNA, 15 bp, Homo sapiens
agctcgtgatgtgct

SEQ ID NO: 1566586 - DNA, 15 bp, Homo sapiens
gctcgtgatgtgctt

SEQ ID NO: 1566587 - DNA, 15 bp, Homo sapiens
ctcgtgatgtgcttc

SEQ ID NO: 1566588 - DNA, 15 bp, Homo sapiens
tcgtgatgtgcttcc

SEQ ID NO: 1566589 - DNA, 15 bp, Homo sapiens
cgtgatgtgcttccc

SEQ ID NO: 1566590 - DNA, 15 bp, Homo sapiens
gtgatgtgcttcccc

SEQ ID NO: 1566591 - DNA, 15 bp, Homo sapiens
tgatgtgcttccccc

SEQ ID NO: 1566592 - DNA, 15 bp, Homo sapiens
gatgtgcttccccct

SEQ ID NO: 1566593 - DNA, 15 bp, Homo sapiens
atgtgcttccccctg

SEQ ID NO: 1566594 - DNA, 15 bp, Homo sapiens
tgtgcttccccctga

SEQ ID NO: 1566595 - DNA, 15 bp, Homo sapiens
gtgcttccccctgaa

SEQ ID NO: 1566596 - DNA, 15 bp, Homo sapiens
tgcttccccctgaag

SEQ ID NO: 1566597 - DNA, 15 bp, Homo sapiens
gcttccccctgaaga

SEQ ID NO: 1566598 - DNA, 15 bp, Homo sapiens
cttccccctgaagag

SEQ ID NO: 1566599 - DNA, 15 bp, Homo sapiens
ttccccctgaagaga

SEQ ID NO: 1566600 - DNA, 15 bp, Homo sapiens
tccccctgaagagag

SEQ ID NO: 1566601 - DNA, 15 bp, Homo sapiens
ccccctgaagagagc

SEQ ID NO: 1566602 - DNA, 15 bp, Homo sapiens
cccctgaagagagcc

SEQ ID NO: 1566603 - DNA, 15 bp, Homo sapiens
ccctgaagagagcct

SEQ ID NO: 1566604 - DNA, 15 bp, Homo sapiens
cctgaagagagccta

SEQ ID NO: 1566605 - DNA, 15 bp, Homo sapiens
ctgaagagagcctat

SEQ ID NO: 1566606 - DNA, 15 bp, Homo sapiens
tgaagagagcctatg

SEQ ID NO: 1566607 - DNA, 15 bp, Homo sapiens
gaagagagcctatga

SEQ ID NO: 1566608 - DNA, 15 bp, Homo sapiens
aagagagcctatgaa

SEQ ID NO: 1566609 - DNA, 15 bp, Homo sapiens
agagagcctatgaac

SEQ ID NO: 1566610 - DNA, 15 bp, Homo sapiens
gagagcctatgaaca

SEQ ID NO: 1566611 - DNA, 15 bp, Homo sapiens
agagcctatgaacag

SEQ ID NO: 1566612 - DNA, 15 bp, Homo sapiens
gagcctatgaacaga

SEQ ID NO: 1566613 - DNA, 15 bp, Homo sapiens
agcctatgaacagac

SEQ ID NO: 1566614 - DNA, 15 bp, Homo sapiens
gcctatgaacagacg

SEQ ID NO: 1566615 - DNA, 15 bp, Homo sapiens
cctatgaacagacgt

SEQ ID NO: 1566616 - DNA, 15 bp, Homo sapiens
ctatgaacagacgtg

SEQ ID NO: 1566617 - DNA, 15 bp, Homo sapiens
tatgaacagacgtgc

SEQ ID NO: 1566618 - DNA, 15 bp, Homo sapiens
atgaacagacgtgca

SEQ ID NO: 1566619 - DNA, 15 bp, Homo sapiens
tgaacagacgtgcag

SEQ ID NO: 1566620 - DNA, 15 bp, Homo sapiens
gaacagacgtgcagt

SEQ ID NO: 1566621 - DNA, 15 bp, Homo sapiens
aacagacgtgcagtc

SEQ ID NO: 1566622 - DNA, 15 bp, Homo sapiens
acagacgtgcagtca

SEQ ID NO: 1566623 - DNA, 15 bp, Homo sapiens
cagacgtgcagtcag

SEQ ID NO: 1566624 - DNA, 15 bp, Homo sapiens
agacgtgcagtcagg

SEQ ID NO: 1566625 - DNA, 15 bp, Homo sapiens
gacgtgcagtcaggg

SEQ ID NO: 1566626 - DNA, 15 bp, Homo sapiens
acgtgcagtcaggga

SEQ ID NO: 1566627 - DNA, 15 bp, Homo sapiens
cgtgcagtcagggag

SEQ ID NO: 1566628 - DNA, 15 bp, Homo sapiens
gtgcagtcagggagg

SEQ ID NO: 1566629 - DNA, 15 bp, Homo sapiens
tgcagtcagggaggt

SEQ ID NO: 1566630 - DNA, 15 bp, Homo sapiens
gcagtcagggaggtt

SEQ ID NO: 1566631 - DNA, 15 bp, Homo sapiens
cagtcagggaggttt

SEQ ID NO: 1566632 - DNA, 15 bp, Homo sapiens
agtcagggaggtttc

SEQ ID NO: 1566633 - DNA, 15 bp, Homo sapiens
gtcagggaggtttca

SEQ ID NO: 1566634 - DNA, 15 bp, Homo sapiens
tcagggaggtttcac

SEQ ID NO: 1566635 - DNA, 15 bp, Homo sapiens
cagggaggtttcaca

SEQ ID NO: 1566636 - DNA, 15 bp, Homo sapiens
agggaggtttcacat

SEQ ID NO: 1566637 - DNA, 15 bp, Homo sapiens
gggaggtttcacatc

SEQ ID NO: 1566638 - DNA, 15 bp, Homo sapiens
ggaggtttcacatca

SEQ ID NO: 1566639 - DNA, 15 bp, Homo sapiens
gaggtttcacatcac

SEQ ID NO: 1566640 - DNA, 15 bp, Homo sapiens
aggtttcacatcacc

SEQ ID NO: 1566641 - DNA, 15 bp, Homo sapiens
ggtttcacatcacca

SEQ ID NO: 1566642 - DNA, 15 bp, Homo sapiens
gtttcacatcaccaa

SEQ ID NO: 1566643 - DNA, 15 bp, Homo sapiens
tttcacatcaccaat

SEQ ID NO: 1566644 - DNA, 15 bp, Homo sapiens
ttcacatcaccaata

SEQ ID NO: 1566645 - DNA, 15 bp, Homo sapiens
tcacatcaccaatat

SEQ ID NO: 1566646 - DNA, 15 bp, Homo sapiens
cacatcaccaatatt

SEQ ID NO: 1566647 - DNA, 15 bp, Homo sapiens
acatcaccaatattc

SEQ ID NO: 1566648 - DNA, 15 bp, Homo sapiens
catcaccaatattcc

SEQ ID NO: 1566649 - DNA, 15 bp, Homo sapiens
atcaccaatattcct

SEQ ID NO: 1566650 - DNA, 15 bp, Homo sapiens
tcaccaatattccta

SEQ ID NO: 1566651 - DNA, 15 bp, Homo sapiens
caccaatattcctat

SEQ ID NO: 1566652 - DNA, 15 bp, Homo sapiens
accaatattcctatc

SEQ ID NO: 1566653 - DNA, 15 bp, Homo sapiens
ccaatattcctatcc

SEQ ID NO: 1566654 - DNA, 15 bp, Homo sapiens
caatattcctatccc

SEQ ID NO: 1566655 - DNA, 15 bp, Homo sapiens
aatattcctatccca

SEQ ID NO: 1566656 - DNA, 15 bp, Homo sapiens
atattcctatcccag

SEQ ID NO: 1566657 - DNA, 15 bp, Homo sapiens
tattcctatcccaga

SEQ ID NO: 1566658 - DNA, 15 bp, Homo sapiens
attcctatcccagaa

SEQ ID NO: 1566659 - DNA, 15 bp, Homo sapiens
ttcctatcccagaaa

SEQ ID NO: 1566660 - DNA, 15 bp, Homo sapiens
tcctatcccagaaaa

SEQ ID NO: 1566661 - DNA, 15 bp, Homo sapiens
cctatcccagaaaag

SEQ ID NO: 1566662 - DNA, 15 bp, Homo sapiens
ctatcccagaaaagc

SEQ ID NO: 1566663 - DNA, 15 bp, Homo sapiens
tatcccagaaaagca

SEQ ID NO: 1566664 - DNA, 15 bp, Homo sapiens
atcccagaaaagcag

SEQ ID NO: 1566665 - DNA, 15 bp, Homo sapiens
tcccagaaaagcaga

SEQ ID NO: 1566666 - DNA, 15 bp, Homo sapiens
cccagaaaagcagat

SEQ ID NO: 1566667 - DNA, 15 bp, Homo sapiens
ccagaaaagcagatg

SEQ ID NO: 1566668 - DNA, 15 bp, Homo sapiens
cagaaaagcagatgt

SEQ ID NO: 1566669 - DNA, 15 bp, Homo sapiens
agaaaagcagatgtt

SEQ ID NO: 1566670 - DNA, 15 bp, Homo sapiens
gaaaagcagatgttc

SEQ ID NO: 1566671 - DNA, 15 bp, Homo sapiens
aaaagcagatgttca

SEQ ID NO: 1566672 - DNA, 15 bp, Homo sapiens
aaagcagatgttcat

SEQ ID NO: 1566673 - DNA, 15 bp, Homo sapiens
aagcagatgttcata

SEQ ID NO: 1566674 - DNA, 15 bp, Homo sapiens
agcagatgttcatag

SEQ ID NO: 1566675 - DNA, 15 bp, Homo sapiens
gcagatgttcatagc

SEQ ID NO: 1566676 - DNA, 15 bp, Homo sapiens
cagatgttcatagcc

SEQ ID NO: 1566677 - DNA, 15 bp, Homo sapiens
agatgttcatagccc

SEQ ID NO: 1566678 - DNA, 15 bp, Homo sapiens
gatgttcatagccct

SEQ ID NO: 1566679 - DNA, 15 bp, Homo sapiens
atgttcatagccctg

SEQ ID NO: 1566680 - DNA, 15 bp, Homo sapiens
tgttcatagccctgg

SEQ ID NO: 1566681 - DNA, 15 bp, Homo sapiens
gttcatagccctggg

SEQ ID NO: 1566682 - DNA, 15 bp, Homo sapiens
ttcatagccctggga

SEQ ID NO: 1566683 - DNA, 15 bp, Homo sapiens
tcatagccctgggaa

SEQ ID NO: 1566684 - DNA, 15 bp, Homo sapiens
catagccctgggaat

SEQ ID NO: 1566685 - DNA, 15 bp, Homo sapiens
atagccctgggaatg

SEQ ID NO: 1566686 - DNA, 15 bp, Homo sapiens
tagccctgggaatgg

SEQ ID NO: 1566687 - DNA, 15 bp, Homo sapiens
agccctgggaatgga

SEQ ID NO: 1566688 - DNA, 15 bp, Homo sapiens
gccctgggaatggaa

SEQ ID NO: 1566689 - DNA, 15 bp, Homo sapiens
ccctgggaatggaat

SEQ ID NO: 1566690 - DNA, 15 bp, Homo sapiens
cctgggaatggaatg

SEQ ID NO: 1566691 - DNA, 15 bp, Homo sapiens
ctgggaatggaatgt

SEQ ID NO: 1566692 - DNA, 15 bp, Homo sapiens
tgggaatggaatgtg

SEQ ID NO: 1566693 - DNA, 15 bp, Homo sapiens
gggaatggaatgtga

SEQ ID NO: 1566694 - DNA, 15 bp, Homo sapiens
ggaatggaatgtgac

SEQ ID NO: 1566695 - DNA, 15 bp, Homo sapiens
gaatggaatgtgacc

SEQ ID NO: 1566696 - DNA, 15 bp, Homo sapiens
aatggaatgtgaccc

SEQ ID NO: 1566697 - DNA, 15 bp, Homo sapiens
atggaatgtgaccct

SEQ ID NO: 1566698 - DNA, 15 bp, Homo sapiens
tggaatgtgaccctt

SEQ ID NO: 1566699 - DNA, 15 bp, Homo sapiens
ggaatgtgacccttg

SEQ ID NO: 1566700 - DNA, 15 bp, Homo sapiens
gaatgtgacccttgt

SEQ ID NO: 1566701 - DNA, 15 bp, Homo sapiens
aatgtgacccttgtg

SEQ ID NO: 1566702 - DNA, 15 bp, Homo sapiens
atgtgacccttgtgg

SEQ ID NO: 1566703 - DNA, 15 bp, Homo sapiens
tgtgacccttgtgga

SEQ ID NO: 1566704 - DNA, 15 bp, Homo sapiens
gtgacccttgtggag

SEQ ID NO: 1566705 - DNA, 15 bp, Homo sapiens
tgacccttgtggagg

SEQ ID NO: 1566706 - DNA, 15 bp, Homo sapiens
gacccttgtggaggg

SEQ ID NO: 1566707 - DNA, 15 bp, Homo sapiens
acccttgtggagggc

SEQ ID NO: 1566708 - DNA, 15 bp, Homo sapiens
cccttgtggagggcc

SEQ ID NO: 1566709 - DNA, 15 bp, Homo sapiens
ccttgtggagggcct

SEQ ID NO: 1566710 - DNA, 15 bp, Homo sapiens
cttgtggagggccta

SEQ ID NO: 1566711 - DNA, 15 bp, Homo sapiens
ttgtggagggcctat

SEQ ID NO: 1566712 - DNA, 15 bp, Homo sapiens
tgtggagggcctata

SEQ ID NO: 1566713 - DNA, 15 bp, Homo sapiens
gtggagggcctataa

SEQ ID NO: 1566714 - DNA, 15 bp, Homo sapiens
tggagggcctataaa

SEQ ID NO: 1566715 - DNA, 15 bp, Homo sapiens
ggagggcctataaat

SEQ ID NO: 1566716 - DNA, 15 bp, Homo sapiens
gagggcctataaatg

SEQ ID NO: 1566717 - DNA, 15 bp, Homo sapiens
agggcctataaatgg

SEQ ID NO: 1566718 - DNA, 15 bp, Homo sapiens
gggcctataaatgga

SEQ ID NO: 1566719 - DNA, 15 bp, Homo sapiens
ggcctataaatggac

SEQ ID NO: 1566720 - DNA, 15 bp, Homo sapiens
gcctataaatggacg

SEQ ID NO: 1566721 - DNA, 15 bp, Homo sapiens
cctataaatggacgc

SEQ ID NO: 1566722 - DNA, 15 bp, Homo sapiens
ctataaatggacgca

SEQ ID NO: 1566723 - DNA, 15 bp, Homo sapiens
tataaatggacgcat

SEQ ID NO: 1566724 - DNA, 15 bp, Homo sapiens
ataaatggacgcatg

SEQ ID NO: 1566725 - DNA, 15 bp, Homo sapiens
taaatggacgcatga

SEQ ID NO: 1566726 - DNA, 15 bp, Homo sapiens
aaatggacgcatgag

SEQ ID NO: 1566727 - DNA, 15 bp, Homo sapiens
aatggacgcatgagc

SEQ ID NO: 1566728 - DNA, 15 bp, Homo sapiens
atggacgcatgagcg

SEQ ID NO: 1566729 - DNA, 15 bp, Homo sapiens
tggacgcatgagcgg

SEQ ID NO: 1566730 - DNA, 15 bp, Homo sapiens
ggacgcatgagcggc

SEQ ID NO: 1566731 - DNA, 15 bp, Homo sapiens
gacgcatgagcggca

SEQ ID NO: 1566732 - DNA, 15 bp, Homo sapiens
acgcatgagcggcac

SEQ ID NO: 1566733 - DNA, 15 bp, Homo sapiens
cgcatgagcggcacc

SEQ ID NO: 1566734 - DNA, 15 bp, Homo sapiens
gcatgagcggcacct

SEQ ID NO: 1566735 - DNA, 15 bp, Homo sapiens
catgagcggcacctg

SEQ ID NO: 1566736 - DNA, 15 bp, Homo sapiens
atgagcggcacctgt

SEQ ID NO: 1566737 - DNA, 15 bp, Homo sapiens
tgagcggcacctgtt

SEQ ID NO: 1566738 - DNA, 15 bp, Homo sapiens
gagcggcacctgttc

SEQ ID NO: 1566739 - DNA, 15 bp, Homo sapiens
agcggcacctgttca

SEQ ID NO: 1566740 - DNA, 15 bp, Homo sapiens
gcggcacctgttcat

SEQ ID NO: 1566741 - DNA, 15 bp, Homo sapiens
cggcacctgttcata

SEQ ID NO: 1566742 - DNA, 15 bp, Homo sapiens
ggcacctgttcatat

SEQ ID NO: 1566743 - DNA, 15 bp, Homo sapiens
gcacctgttcatatg

SEQ ID NO: 1566744 - DNA, 15 bp, Homo sapiens
cacctgttcatatgg

SEQ ID NO: 1566745 - DNA, 15 bp, Homo sapiens
acctgttcatatgga

SEQ ID NO: 1566746 - DNA, 15 bp, Homo sapiens
cctgttcatatggat

SEQ ID NO: 1566747 - DNA, 15 bp, Homo sapiens
ctgttcatatggata

SEQ ID NO: 1566748 - DNA, 15 bp, Homo sapiens
tgttcatatggataa

SEQ ID NO: 1566749 - DNA, 15 bp, Homo sapiens
gttcatatggataag

SEQ ID NO: 1566750 - DNA, 15 bp, Homo sapiens
ttcatatggataaga

SEQ ID NO: 1566751 - DNA, 15 bp, Homo sapiens
tcatatggataagat

SEQ ID NO: 1566752 - DNA, 15 bp, Homo sapiens
catatggataagata

SEQ ID NO: 1566753 - DNA, 15 bp, Homo sapiens
atatggataagatag

SEQ ID NO: 1566754 - DNA, 15 bp, Homo sapiens
tatggataagatagg

SEQ ID NO: 1566755 - DNA, 15 bp, Homo sapiens
atggataagataggg

SEQ ID NO: 1566756 - DNA, 15 bp, Homo sapiens
tggataagatagggc

SEQ ID NO: 1566757 - DNA, 15 bp, Homo sapiens
ggataagatagggct

SEQ ID NO: 1566758 - DNA, 15 bp, Homo sapiens
gataagatagggcta

SEQ ID NO: 1566759 - DNA, 15 bp, Homo sapiens
ataagatagggctat

SEQ ID NO: 1566760 - DNA, 15 bp, Homo sapiens
taagatagggctata

SEQ ID NO: 1566761 - DNA, 15 bp, Homo sapiens
aagatagggctataa

SEQ ID NO: 1566762 - DNA, 15 bp, Homo sapiens
agatagggctataaa

SEQ ID NO: 1566763 - DNA, 15 bp, Homo sapiens
gatagggctataaat

SEQ ID NO: 1566764 - DNA, 15 bp, Homo sapiens
atagggctataaatg

SEQ ID NO: 1566765 - DNA, 15 bp, Homo sapiens
tagggctataaatgc

SEQ ID NO: 1566766 - DNA, 15 bp, Homo sapiens
agggctataaatgcc

SEQ ID NO: 1566767 - DNA, 15 bp, Homo sapiens
gggctataaatgccc

SEQ ID NO: 1566768 - DNA, 15 bp, Homo sapiens
ggctataaatgccct

SEQ ID NO: 1566769 - DNA, 15 bp, Homo sapiens
gctataaatgccctc

SEQ ID NO: 1566770 - DNA, 15 bp, Homo sapiens
ctataaatgccctca

SEQ ID NO: 1566771 - DNA, 15 bp, Homo sapiens
tataaatgccctcat

SEQ ID NO: 1566772 - DNA, 15 bp, Homo sapiens
ataaatgccctcatc

SEQ ID NO: 1566773 - DNA, 15 bp, Homo sapiens
taaatgccctcatct

SEQ ID NO: 1566774 - DNA, 15 bp, Homo sapiens
aaatgccctcatctt

SEQ ID NO: 1566775 - DNA, 15 bp, Homo sapiens
aatgccctcatcttg

SEQ ID NO: 1566776 - DNA, 15 bp, Homo sapiens
atgccctcatcttgc

SEQ ID NO: 1566777 - DNA, 15 bp, Homo sapiens
tgccctcatcttgcc

SEQ ID NO: 1566778 - DNA, 15 bp, Homo sapiens
gccctcatcttgcca

SEQ ID NO: 1566779 - DNA, 15 bp, Homo sapiens
ccctcatcttgccat

SEQ ID NO: 1566780 - DNA, 15 bp, Homo sapiens
cctcatcttgccatg

SEQ ID NO: 1566781 - DNA, 15 bp, Homo sapiens
ctcatcttgccatgg

SEQ ID NO: 1566782 - DNA, 15 bp, Homo sapiens
tcatcttgccatggc

SEQ ID NO: 1566783 - DNA, 15 bp, Homo sapiens
catcttgccatggct

SEQ ID NO: 1566784 - DNA, 15 bp, Homo sapiens
atcttgccatggctc

SEQ ID NO: 1566785 - DNA, 15 bp, Homo sapiens
tcttgccatggctct

SEQ ID NO: 1566786 - DNA, 15 bp, Homo sapiens
cttgccatggctctt

SEQ ID NO: 1566787 - DNA, 15 bp, Homo sapiens
ttgccatggctcttc

SEQ ID NO: 1566788 - DNA, 15 bp, Homo sapiens
tgccatggctcttct

SEQ ID NO: 1566789 - DNA, 15 bp, Homo sapiens
gccatggctcttcta

SEQ ID NO: 1566790 - DNA, 15 bp, Homo sapiens
ccatggctcttctag

SEQ ID NO: 1566791 - DNA, 15 bp, Homo sapiens
catggctcttctagg

SEQ ID NO: 1566792 - DNA, 15 bp, Homo sapiens
atggctcttctaggc

SEQ ID NO: 1566793 - DNA, 15 bp, Homo sapiens
tggctcttctaggcc

SEQ ID NO: 1566794 - DNA, 15 bp, Homo sapiens
ggctcttctaggcct

SEQ ID NO: 1566795 - DNA, 15 bp, Homo sapiens
gctcttctaggcctc

SEQ ID NO: 1566796 - DNA, 15 bp, Homo sapiens
ctcttctaggcctct

SEQ ID NO: 1566797 - DNA, 15 bp, Homo sapiens
tcttctaggcctctt

SEQ ID NO: 1566798 - DNA, 15 bp, Homo sapiens
cttctaggcctcttt

SEQ ID NO: 1566799 - DNA, 15 bp, Homo sapiens
ttctaggcctcttta

SEQ ID NO: 1566800 - DNA, 15 bp, Homo sapiens
tctaggcctctttaa

SEQ ID NO: 1566801 - DNA, 15 bp, Homo sapiens
ctaggcctctttaag

SEQ ID NO: 1566802 - DNA, 15 bp, Homo sapiens
taggcctctttaagg

SEQ ID NO: 1566803 - DNA, 15 bp, Homo sapiens
aggcctctttaaggt

SEQ ID NO: 1566804 - DNA, 15 bp, Homo sapiens
ggcctctttaaggtt

SEQ ID NO: 1566805 - DNA, 15 bp, Homo sapiens
gcctctttaaggtta

SEQ ID NO: 1566806 - DNA, 15 bp, Homo sapiens
cctctttaaggttaa

SEQ ID NO: 1566807 - DNA, 15 bp, Homo sapiens
ctctttaaggttaag

SEQ ID NO: 1566808 - DNA, 15 bp, Homo sapiens
tctttaaggttaagg

SEQ ID NO: 1566809 - DNA, 15 bp, Homo sapiens
ctttaaggttaaggc

SEQ ID NO: 1566810 - DNA, 15 bp, Homo sapiens
tttaaggttaaggca

SEQ ID NO: 1566811 - DNA, 15 bp, Homo sapiens
ttaaggttaaggcat

SEQ ID NO: 1566812 - DNA, 15 bp, Homo sapiens
taaggttaaggcata

SEQ ID NO: 1566813 - DNA, 15 bp, Homo sapiens
aaggttaaggcatac

SEQ ID NO: 1566814 - DNA, 15 bp, Homo sapiens
aggttaaggcatact

SEQ ID NO: 1566815 - DNA, 15 bp, Homo sapiens
ggttaaggcatactc

SEQ ID NO: 1566816 - DNA, 15 bp, Homo sapiens
gttaaggcatactcc

SEQ ID NO: 1566817 - DNA, 15 bp, Homo sapiens
ttaaggcatactccc

SEQ ID NO: 1566818 - DNA, 15 bp, Homo sapiens
taaggcatactccct

SEQ ID NO: 1566819 - DNA, 15 bp, Homo sapiens
aaggcatactccctt

SEQ ID NO: 1566820 - DNA, 15 bp, Homo sapiens
aggcatactcccttc

SEQ ID NO: 1566821 - DNA, 15 bp, Homo sapiens
ggcatactcccttct

SEQ ID NO: 1566822 - DNA, 15 bp, Homo sapiens
gcatactcccttctg

SEQ ID NO: 1566823 - DNA, 15 bp, Homo sapiens
catactcccttctga

SEQ ID NO: 1566824 - DNA, 15 bp, Homo sapiens
atactcccttctgat

SEQ ID NO: 1566825 - DNA, 15 bp, Homo sapiens
tactcccttctgata

SEQ ID NO: 1566826 - DNA, 15 bp, Homo sapiens
actcccttctgataa

SEQ ID NO: 1566827 - DNA, 15 bp, Homo sapiens
ctcccttctgataat

SEQ ID NO: 1566828 - DNA, 15 bp, Homo sapiens
tcccttctgataatt

SEQ ID NO: 1566829 - DNA, 15 bp, Homo sapiens
cccttctgataattt

SEQ ID NO: 1566830 - DNA, 15 bp, Homo sapiens
ccttctgataatttc

SEQ ID NO: 1566831 - DNA, 15 bp, Homo sapiens
cttctgataatttct

SEQ ID NO: 1566832 - DNA, 15 bp, Homo sapiens
ttctgataatttctg

SEQ ID NO: 1566833 - DNA, 15 bp, Homo sapiens
tctgataatttctgg

SEQ ID NO: 1566834 - DNA, 15 bp, Homo sapiens
ctgataatttctggt

SEQ ID NO: 1566835 - DNA, 15 bp, Homo sapiens
tgataatttctggtc

SEQ ID NO: 1566836 - DNA, 15 bp, Homo sapiens
gataatttctggtct

SEQ ID NO: 1566837 - DNA, 15 bp, Homo sapiens
ataatttctggtcta

SEQ ID NO: 1566838 - DNA, 15 bp, Homo sapiens
taatttctggtctaa

SEQ ID NO: 1566839 - DNA, 15 bp, Homo sapiens
aatttctggtctaac

SEQ ID NO: 1566840 - DNA, 15 bp, Homo sapiens
atttctggtctaact

SEQ ID NO: 1566841 - DNA, 15 bp, Homo sapiens
tttctggtctaactg

SEQ ID NO: 1566842 - DNA, 15 bp, Homo sapiens
ttctggtctaactgg

SEQ ID NO: 1566843 - DNA, 15 bp, Homo sapiens
tctggtctaactggt

SEQ ID NO: 1566844 - DNA, 15 bp, Homo sapiens
ctggtctaactggtt

SEQ ID NO: 1566845 - DNA, 15 bp, Homo sapiens
tggtctaactggtta

SEQ ID NO: 1566846 - DNA, 15 bp, Homo sapiens
ggtctaactggttat

SEQ ID NO: 1566847 - DNA, 15 bp, Homo sapiens
gtctaactggttatc

SEQ ID NO: 1566848 - DNA, 15 bp, Homo sapiens
tctaactggttatct

SEQ ID NO: 1566849 - DNA, 15 bp, Homo sapiens
ctaactggttatcta

SEQ ID NO: 1566850 - DNA, 15 bp, Homo sapiens
taactggttatctag

SEQ ID NO: 1566851 - DNA, 15 bp, Homo sapiens
aactggttatctagc

SEQ ID NO: 1566852 - DNA, 15 bp, Homo sapiens
actggttatctagct

SEQ ID NO: 1566853 - DNA, 15 bp, Homo sapiens
ctggttatctagctt

SEQ ID NO: 1566854 - DNA, 15 bp, Homo sapiens
tggttatctagcttc

SEQ ID NO: 1566855 - DNA, 15 bp, Homo sapiens
ggttatctagcttca

SEQ ID NO: 1566856 - DNA, 15 bp, Homo sapiens
gttatctagcttcac

SEQ ID NO: 1566857 - DNA, 15 bp, Homo sapiens
ttatctagcttcacg

SEQ ID NO: 1566858 - DNA, 15 bp, Homo sapiens
tatctagcttcacgt

SEQ ID NO: 1566859 - DNA, 15 bp, Homo sapiens
atctagcttcacgtc

SEQ ID NO: 1566860 - DNA, 15 bp, Homo sapiens
tctagcttcacgtcc

SEQ ID NO: 1566861 - DNA, 15 bp, Homo sapiens
ctagcttcacgtcct

SEQ ID NO: 1566862 - DNA, 15 bp, Homo sapiens
tagcttcacgtcctg

SEQ ID NO: 1566863 - DNA, 15 bp, Homo sapiens
agcttcacgtcctgt

SEQ ID NO: 1566864 - DNA, 15 bp, Homo sapiens
gcttcacgtcctgtt

SEQ ID NO: 1566865 - DNA, 15 bp, Homo sapiens
cttcacgtcctgttt

SEQ ID NO: 1566866 - DNA, 15 bp, Homo sapiens
ttcacgtcctgtttc

SEQ ID NO: 1566867 - DNA, 15 bp, Homo sapiens
tcacgtcctgtttct

SEQ ID NO: 1566868 - DNA, 15 bp, Homo sapiens
cacgtcctgtttcta

SEQ ID NO: 1566869 - DNA, 15 bp, Homo sapiens
acgtcctgtttctat

SEQ ID NO: 1566870 - DNA, 15 bp, Homo sapiens
cgtcctgtttctatg

SEQ ID NO: 1566871 - DNA, 15 bp, Homo sapiens
gtcctgtttctatgg

SEQ ID NO: 1566872 - DNA, 15 bp, Homo sapiens
tcctgtttctatgga

SEQ ID NO: 1566873 - DNA, 15 bp, Homo sapiens
cctgtttctatggat

SEQ ID NO: 1566874 - DNA, 15 bp, Homo sapiens
ctgtttctatggatt

SEQ ID NO: 1566875 - DNA, 15 bp, Homo sapiens
tgtttctatggattg

SEQ ID NO: 1566876 - DNA, 15 bp, Homo sapiens
gtttctatggattgt

SEQ ID NO: 1566877 - DNA, 15 bp, Homo sapiens
tttctatggattgtt

SEQ ID NO: 1566878 - DNA, 15 bp, Homo sapiens
ttctatggattgttt

SEQ ID NO: 1566879 - DNA, 15 bp, Homo sapiens
tctatggattgtttg

SEQ ID NO: 1566880 - DNA, 15 bp, Homo sapiens
ctatggattgtttgt

SEQ ID NO: 1566881 - DNA, 15 bp, Homo sapiens
tatggattgtttgta

SEQ ID NO: 1566882 - DNA, 15 bp, Homo sapiens
atggattgtttgtaa

SEQ ID NO: 1566883 - DNA, 15 bp, Homo sapiens
ggattgtttgtaacc

SEQ ID NO: 1566884 - DNA, 15 bp, Homo sapiens
gattgtttgtaacca

SEQ ID NO: 1566885 - DNA, 15 bp, Homo sapiens
attgtttgtaaccag

SEQ ID NO: 1566886 - DNA, 15 bp, Homo sapiens
ttgtttgtaaccagc

SEQ ID NO: 1566887 - DNA, 15 bp, Homo sapiens
tgtttgtaaccagct

SEQ ID NO: 1566888 - DNA, 15 bp, Homo sapiens
gtttgtaaccagctt

SEQ ID NO: 1566889 - DNA, 15 bp, Homo sapiens
tttgtaaccagcttt

SEQ ID NO: 1566890 - DNA, 15 bp, Homo sapiens
ttgtaaccagctttt

SEQ ID NO: 1566891 - DNA, 15 bp, Homo sapiens
tgtaaccagcttttg

SEQ ID NO: 1566892 - DNA, 15 bp, Homo sapiens
gtaaccagcttttgc

SEQ ID NO: 1566893 - DNA, 15 bp, Homo sapiens
taaccagcttttgct

SEQ ID NO: 1566894 - DNA, 15 bp, Homo sapiens
aaccagcttttgctg

SEQ ID NO: 1566895 - DNA, 15 bp, Homo sapiens
accagcttttgctgc

SEQ ID NO: 1566896 - DNA, 15 bp, Homo sapiens
ccagcttttgctgca

SEQ ID NO: 1566897 - DNA, 15 bp, Homo sapiens
cagcttttgctgcaa

SEQ ID NO: 1566898 - DNA, 15 bp, Homo sapiens
agcttttgctgcaac

SEQ ID NO: 1566899 - DNA, 15 bp, Homo sapiens
gcttttgctgcaact

SEQ ID NO: 1566900 - DNA, 15 bp, Homo sapiens
cttttgctgcaactc

SEQ ID NO: 1566901 - DNA, 15 bp, Homo sapiens
ttttgctgcaactct

SEQ ID NO: 1566902 - DNA, 15 bp, Homo sapiens
tttgctgcaactctt

SEQ ID NO: 1566903 - DNA, 15 bp, Homo sapiens
ttgctgcaactctta

SEQ ID NO: 1566904 - DNA, 15 bp, Homo sapiens
tgctgcaactcttac

SEQ ID NO: 1566905 - DNA, 15 bp, Homo sapiens
gctgcaactcttact

SEQ ID NO: 1566906 - DNA, 15 bp, Homo sapiens
ctgcaactcttactg

SEQ ID NO: 1566907 - DNA, 15 bp, Homo sapiens
tgcaactcttactgc

SEQ ID NO: 1566908 - DNA, 15 bp, Homo sapiens
gcaactcttactgct

SEQ ID NO: 1566909 - DNA, 15 bp, Homo sapiens
caactcttactgctg

SEQ ID NO: 1566910 - DNA, 15 bp, Homo sapiens
aactcttactgctga

SEQ ID NO: 1566911 - DNA, 15 bp, Homo sapiens
actcttactgctgat

SEQ ID NO: 1566912 - DNA, 15 bp, Homo sapiens
ctcttactgctgatt

SEQ ID NO: 1566913 - DNA, 15 bp, Homo sapiens
tcttactgctgatta

SEQ ID NO: 1566914 - DNA, 15 bp, Homo sapiens
cttactgctgattaa

SEQ ID NO: 1566915 - DNA, 15 bp, Homo sapiens
ttactgctgattaat

SEQ ID NO: 1566916 - DNA, 15 bp, Homo sapiens
tactgctgattaata

SEQ ID NO: 1566917 - DNA, 15 bp, Homo sapiens
actgctgattaatat

SEQ ID NO: 1566918 - DNA, 15 bp, Homo sapiens
ctgctgattaatatc

SEQ ID NO: 1566919 - DNA, 15 bp, Homo sapiens
tgctgattaatatct

SEQ ID NO: 1566920 - DNA, 15 bp, Homo sapiens
gctgattaatatctt

SEQ ID NO: 1566921 - DNA, 15 bp, Homo sapiens
ctgattaatatcttg

SEQ ID NO: 1566922 - DNA, 15 bp, Homo sapiens
tgattaatatcttgc

SEQ ID NO: 1566923 - DNA, 15 bp, Homo sapiens
gattaatatcttgct

SEQ ID NO: 1566924 - DNA, 15 bp, Homo sapiens
attaatatcttgcta

SEQ ID NO: 1566925 - DNA, 15 bp, Homo sapiens
ttaatatcttgctaa

SEQ ID NO: 1566926 - DNA, 15 bp, Homo sapiens
taatatcttgctaat

SEQ ID NO: 1566927 - DNA, 15 bp, Homo sapiens
aatatcttgctaatc

SEQ ID NO: 1566928 - DNA, 15 bp, Homo sapiens
atatcttgctaatca

SEQ ID NO: 1566929 - DNA, 15 bp, Homo sapiens
tatcttgctaatcat

SEQ ID NO: 1566930 - DNA, 15 bp, Homo sapiens
atcttgctaatcata

SEQ ID NO: 1566931 - DNA, 15 bp, Homo sapiens
tcttgctaatcatag

SEQ ID NO: 1566932 - DNA, 15 bp, Homo sapiens
cttgctaatcatagg

SEQ ID NO: 1566933 - DNA, 15 bp, Homo sapiens
ttgctaatcataggt

SEQ ID NO: 1566934 - DNA, 15 bp, Homo sapiens
tgctaatcataggtt

SEQ ID NO: 1566935 - DNA, 15 bp, Homo sapiens
gctaatcataggtta

SEQ ID NO: 1566936 - DNA, 15 bp, Homo sapiens
ctaatcataggttat

SEQ ID NO: 1566937 - DNA, 15 bp, Homo sapiens
taatcataggttatg

SEQ ID NO: 1566938 - DNA, 15 bp, Homo sapiens
aatcataggttatgg

SEQ ID NO: 1566939 - DNA, 15 bp, Homo sapiens
atcataggttatgga

SEQ ID NO: 1566940 - DNA, 15 bp, Homo sapiens
tcataggttatggaa

SEQ ID NO: 1566941 - DNA, 15 bp, Homo sapiens
cataggttatggaaa

SEQ ID NO: 1566942 - DNA, 15 bp, Homo sapiens
ataggttatggaaag

SEQ ID NO: 1566943 - DNA, 15 bp, Homo sapiens
taggttatggaaaga

SEQ ID NO: 1566944 - DNA, 15 bp, Homo sapiens
aggttatggaaagac

SEQ ID NO: 1566945 - DNA, 15 bp, Homo sapiens
ggttatggaaagact

SEQ ID NO: 1566946 - DNA, 15 bp, Homo sapiens
gttatggaaagactg

SEQ ID NO: 1566947 - DNA, 15 bp, Homo sapiens
ttatggaaagactgt

SEQ ID NO: 1566948 - DNA, 15 bp, Homo sapiens
tatggaaagactgtg

SEQ ID NO: 1566949 - DNA, 15 bp, Homo sapiens
atggaaagactgtgt

SEQ ID NO: 1566950 - DNA, 15 bp, Homo sapiens
tggaaagactgtgtt

SEQ ID NO: 1566951 - DNA, 15 bp, Homo sapiens
ggaaagactgtgttt

SEQ ID NO: 1566952 - DNA, 15 bp, Homo sapiens
gaaagactgtgtttc

SEQ ID NO: 1566953 - DNA, 15 bp, Homo sapiens
aaagactgtgtttct

SEQ ID NO: 1566954 - DNA, 15 bp, Homo sapiens
aagactgtgtttctg

SEQ ID NO: 1566955 - DNA, 15 bp, Homo sapiens
agactgtgtttctgt

SEQ ID NO: 1566956 - DNA, 15 bp, Homo sapiens
gactgtgtttctgtt

SEQ ID NO: 1566957 - DNA, 15 bp, Homo sapiens
actgtgtttctgttt

SEQ ID NO: 1566958 - DNA, 15 bp, Homo sapiens
ctgtgtttctgtttt

SEQ ID NO: 1566959 - DNA, 15 bp, Homo sapiens
tgtgtttctgtttta

SEQ ID NO: 1566960 - DNA, 15 bp, Homo sapiens
gtgtttctgttttaa

SEQ ID NO: 1566961 - DNA, 15 bp, Homo sapiens
tgtttctgttttaag

SEQ ID NO: 1566962 - DNA, 15 bp, Homo sapiens
gtttctgttttaagg

SEQ ID NO: 1566963 - DNA, 15 bp, Homo sapiens
tttctgttttaaggc

SEQ ID NO: 1566964 - DNA, 15 bp, Homo sapiens
ttctgttttaaggct

SEQ ID NO: 1566965 - DNA, 15 bp, Homo sapiens
tctgttttaaggctc

SEQ ID NO: 1566966 - DNA, 15 bp, Homo sapiens
ctgttttaaggctct

SEQ ID NO: 1566967 - DNA, 15 bp, Homo sapiens
tgttttaaggctctg

SEQ ID NO: 1566968 - DNA, 15 bp, Homo sapiens
gttttaaggctctgt

SEQ ID NO: 1566969 - DNA, 15 bp, Homo sapiens
ttttaaggctctgtt

SEQ ID NO: 1566970 - DNA, 15 bp, Homo sapiens
tttaaggctctgtta

SEQ ID NO: 1566971 - DNA, 15 bp, Homo sapiens
ttaaggctctgttag

SEQ ID NO: 1566972 - DNA, 15 bp, Homo sapiens
taaggctctgttaga

SEQ ID NO: 1566973 - DNA, 15 bp, Homo sapiens
aaggctctgttagaa

SEQ ID NO: 1566974 - DNA, 15 bp, Homo sapiens
aggctctgttagaaa

SEQ ID NO: 1566975 - DNA, 15 bp, Homo sapiens
ggctctgttagaaat

SEQ ID NO: 1566976 - DNA, 15 bp, Homo sapiens
gctctgttagaaatt

SEQ ID NO: 1566977 - DNA, 15 bp, Homo sapiens
ctctgttagaaatta

SEQ ID NO: 1566978 - DNA, 15 bp, Homo sapiens
tctgttagaaattac

SEQ ID NO: 1566979 - DNA, 15 bp, Homo sapiens
ctgttagaaattact

SEQ ID NO: 1566980 - DNA, 15 bp, Homo sapiens
tgttagaaattactg

SEQ ID NO: 1566981 - DNA, 15 bp, Homo sapiens
gttagaaattactga

SEQ ID NO: 1566982 - DNA, 15 bp, Homo sapiens
ttagaaattactgat

SEQ ID NO: 1566983 - DNA, 15 bp, Homo sapiens
tagaaattactgatg

SEQ ID NO: 1566984 - DNA, 15 bp, Homo sapiens
agaaattactgatgc

SEQ ID NO: 1566985 - DNA, 15 bp, Homo sapiens
gaaattactgatgca

SEQ ID NO: 1566986 - DNA, 15 bp, Homo sapiens
aaattactgatgcac

SEQ ID NO: 1566987 - DNA, 15 bp, Homo sapiens
aattactgatgcaca

SEQ ID NO: 1566988 - DNA, 15 bp, Homo sapiens
attactgatgcacac

SEQ ID NO: 1566989 - DNA, 15 bp, Homo sapiens
ttactgatgcacaca

SEQ ID NO: 1566990 - DNA, 15 bp, Homo sapiens
tactgatgcacacac

SEQ ID NO: 1566991 - DNA, 15 bp, Homo sapiens
actgatgcacacact

SEQ ID NO: 1566992 - DNA, 15 bp, Homo sapiens
ctgatgcacacacta

SEQ ID NO: 1566993 - DNA, 15 bp, Homo sapiens
tgatgcacacactat

SEQ ID NO: 1566994 - DNA, 15 bp, Homo sapiens
gatgcacacactata

SEQ ID NO: 1566995 - DNA, 15 bp, Homo sapiens
atgcacacactatat

SEQ ID NO: 1566996 - DNA, 15 bp, Homo sapiens
tgcacacactatatt

SEQ ID NO: 1566997 - DNA, 15 bp, Homo sapiens
gcacacactatattg

SEQ ID NO: 1566998 - DNA, 15 bp, Homo sapiens
cacacactatattgt

SEQ ID NO: 1566999 - DNA, 15 bp, Homo sapiens
acacactatattgta

SEQ ID NO: 1567000 - DNA, 15 bp, Homo sapiens
cacactatattgtaa

SEQ ID NO: 1567001 - DNA, 15 bp, Homo sapiens
acactatattgtaaa

SEQ ID NO: 1567002 - DNA, 15 bp, Homo sapiens
cactatattgtaaat

SEQ ID NO: 1567003 - DNA, 15 bp, Homo sapiens
actatattgtaaatt

SEQ ID NO: 1567004 - DNA, 15 bp, Homo sapiens
ctatattgtaaattc

SEQ ID NO: 1567005 - DNA, 15 bp, Homo sapiens
tatattgtaaattct

SEQ ID NO: 1567006 - DNA, 15 bp, Homo sapiens
atattgtaaattctt

SEQ ID NO: 1567007 - DNA, 15 bp, Homo sapiens
tattgtaaattctta

SEQ ID NO: 1567008 - DNA, 15 bp, Homo sapiens
attgtaaattcttat

SEQ ID NO: 1567009 - DNA, 15 bp, Homo sapiens
ttgtaaattcttatc

SEQ ID NO: 1567010 - DNA, 15 bp, Homo sapiens
tgtaaattcttatct

SEQ ID NO: 1567011 - DNA, 15 bp, Homo sapiens
gtaaattcttatctc

SEQ ID NO: 1567012 - DNA, 15 bp, Homo sapiens
taaattcttatctct

SEQ ID NO: 1567013 - DNA, 15 bp, Homo sapiens
aaattcttatctctg

SEQ ID NO: 1567014 - DNA, 15 bp, Homo sapiens
aattcttatctctgt

SEQ ID NO: 1567015 - DNA, 15 bp, Homo sapiens
attcttatctctgta

SEQ ID NO: 1567016 - DNA, 15 bp, Homo sapiens
ttcttatctctgtat

SEQ ID NO: 1567017 - DNA, 15 bp, Homo sapiens
tcttatctctgtata

SEQ ID NO: 1567018 - DNA, 15 bp, Homo sapiens
cttatctctgtatac

SEQ ID NO: 1567019 - DNA, 15 bp, Homo sapiens
ttatctctgtatact

SEQ ID NO: 1567020 - DNA, 15 bp, Homo sapiens
tatctctgtatactg

SEQ ID NO: 1567021 - DNA, 15 bp, Homo sapiens
atctctgtatactgt

SEQ ID NO: 1567022 - DNA, 15 bp, Homo sapiens
tctctgtatactgta

SEQ ID NO: 1567023 - DNA, 15 bp, Homo sapiens
ctctgtatactgtac

SEQ ID NO: 1567024 - DNA, 15 bp, Homo sapiens
tctgtatactgtact

SEQ ID NO: 1567025 - DNA, 15 bp, Homo sapiens
ctgtatactgtactt

SEQ ID NO: 1567026 - DNA, 15 bp, Homo sapiens
tgtatactgtacttc

SEQ ID NO: 1567027 - DNA, 15 bp, Homo sapiens
gtatactgtacttct

SEQ ID NO: 1567028 - DNA, 15 bp, Homo sapiens
tatactgtacttctg

SEQ ID NO: 1567029 - DNA, 15 bp, Homo sapiens
atactgtacttctgc

SEQ ID NO: 1567030 - DNA, 15 bp, Homo sapiens
tactgtacttctgca

SEQ ID NO: 1567031 - DNA, 15 bp, Homo sapiens
actgtacttctgcat

SEQ ID NO: 1567032 - DNA, 15 bp, Homo sapiens
ctgtacttctgcata

SEQ ID NO: 1567033 - DNA, 15 bp, Homo sapiens
tgtacttctgcatac

SEQ ID NO: 1567034 - DNA, 15 bp, Homo sapiens
gtacttctgcataca

SEQ ID NO: 1567035 - DNA, 15 bp, Homo sapiens
tacttctgcatacag

SEQ ID NO: 1567036 - DNA, 15 bp, Homo sapiens
acttctgcatacaga

SEQ ID NO: 1567037 - DNA, 15 bp, Homo sapiens
cttctgcatacagat

SEQ ID NO: 1567038 - DNA, 15 bp, Homo sapiens
ttctgcatacagatg

SEQ ID NO: 1567039 - DNA, 15 bp, Homo sapiens
tctgcatacagatgt

SEQ ID NO: 1567040 - DNA, 15 bp, Homo sapiens
ctgcatacagatgtt

SEQ ID NO: 1567041 - DNA, 15 bp, Homo sapiens
tgcatacagatgtta

SEQ ID NO: 1567042 - DNA, 15 bp, Homo sapiens
gcatacagatgttat

SEQ ID NO: 1567043 - DNA, 15 bp, Homo sapiens
catacagatgttatg

SEQ ID NO: 1567044 - DNA, 15 bp, Homo sapiens
atacagatgttatgt

SEQ ID NO: 1567045 - DNA, 15 bp, Homo sapiens
tacagatgttatgtt

SEQ ID NO: 1567046 - DNA, 15 bp, Homo sapiens
acagatgttatgtta

SEQ ID NO: 1567047 - DNA, 15 bp, Homo sapiens
cagatgttatgttaa

SEQ ID NO: 1567048 - DNA, 15 bp, Homo sapiens
agatgttatgttaaa

SEQ ID NO: 1567049 - DNA, 15 bp, Homo sapiens
gatgttatgttaaag

SEQ ID NO: 1567050 - DNA, 15 bp, Homo sapiens
atgttatgttaaaga

SEQ ID NO: 1567051 - DNA, 15 bp, Homo sapiens
tgttatgttaaagaa

SEQ ID NO: 1567052 - DNA, 15 bp, Homo sapiens
gttatgttaaagaat

SEQ ID NO: 1567053 - DNA, 15 bp, Homo sapiens
ttatgttaaagaatt

SEQ ID NO: 1567054 - DNA, 15 bp, Homo sapiens
tatgttaaagaatta

SEQ ID NO: 1567055 - DNA, 15 bp, Homo sapiens
atgttaaagaattac

SEQ ID NO: 1567056 - DNA, 15 bp, Homo sapiens
tgttaaagaattact

SEQ ID NO: 1567057 - DNA, 15 bp, Homo sapiens
gttaaagaattactt

SEQ ID NO: 1567058 - DNA, 15 bp, Homo sapiens
ttaaagaattacttc

SEQ ID NO: 1567059 - DNA, 15 bp, Homo sapiens
taaagaattacttca

SEQ ID NO: 1567060 - DNA, 15 bp, Homo sapiens
aaagaattacttcat

SEQ ID NO: 1567061 - DNA, 15 bp, Homo sapiens
aagaattacttcatc

SEQ ID NO: 1567062 - DNA, 15 bp, Homo sapiens
agaattacttcatcc

SEQ ID NO: 1567063 - DNA, 15 bp, Homo sapiens
gaattacttcatccc

SEQ ID NO: 1567064 - DNA, 15 bp, Homo sapiens
aattacttcatcccc

SEQ ID NO: 1567065 - DNA, 15 bp, Homo sapiens
attacttcatcccca

SEQ ID NO: 1567066 - DNA, 15 bp, Homo sapiens
ttacttcatccccat

SEQ ID NO: 1567067 - DNA, 15 bp, Homo sapiens
tacttcatccccatg

SEQ ID NO: 1567068 - DNA, 15 bp, Homo sapiens
acttcatccccatgt

SEQ ID NO: 1567069 - DNA, 15 bp, Homo sapiens
cttcatccccatgtg

SEQ ID NO: 1567070 - DNA, 15 bp, Homo sapiens
ttcatccccatgtga

SEQ ID NO: 1567071 - DNA, 15 bp, Homo sapiens
tcatccccatgtgac

SEQ ID NO: 1567072 - DNA, 15 bp, Homo sapiens
catccccatgtgacc

SEQ ID NO: 1567073 - DNA, 15 bp, Homo sapiens
atccccatgtgacca

SEQ ID NO: 1567074 - DNA, 15 bp, Homo sapiens
tccccatgtgaccat

SEQ ID NO: 1567075 - DNA, 15 bp, Homo sapiens
ccccatgtgaccatc

SEQ ID NO: 1567076 - DNA, 15 bp, Homo sapiens
cccatgtgaccatct

SEQ ID NO: 1567077 - DNA, 15 bp, Homo sapiens
ccatgtgaccatctc

SEQ ID NO: 1567078 - DNA, 15 bp, Homo sapiens
catgtgaccatctca

SEQ ID NO: 1567079 - DNA, 15 bp, Homo sapiens
atgtgaccatctcac

SEQ ID NO: 1567080 - DNA, 15 bp, Homo sapiens
tgtgaccatctcacc

SEQ ID NO: 1567081 - DNA, 15 bp, Homo sapiens
gtgaccatctcacct

SEQ ID NO: 1567082 - DNA, 15 bp, Homo sapiens
tgaccatctcacctc

SEQ ID NO: 1567083 - DNA, 15 bp, Homo sapiens
gaccatctcacctca

SEQ ID NO: 1567084 - DNA, 15 bp, Homo sapiens
accatctcacctcat

SEQ ID NO: 1567085 - DNA, 15 bp, Homo sapiens
ccatctcacctcata

SEQ ID NO: 1567086 - DNA, 15 bp, Homo sapiens
catctcacctcataa

SEQ ID NO: 1567087 - DNA, 15 bp, Homo sapiens
atctcacctcataat

SEQ ID NO: 1567088 - DNA, 15 bp, Homo sapiens
tctcacctcataatc

SEQ ID NO: 1567089 - DNA, 15 bp, Homo sapiens
ctcacctcataatca

SEQ ID NO: 1567090 - DNA, 15 bp, Homo sapiens
tcacctcataatcaa

SEQ ID NO: 1567091 - DNA, 15 bp, Homo sapiens
cacctcataatcaaa

SEQ ID NO: 1567092 - DNA, 15 bp, Homo sapiens
acctcataatcaaac

SEQ ID NO: 1567093 - DNA, 15 bp, Homo sapiens
cctcataatcaaacg

SEQ ID NO: 1567094 - DNA, 15 bp, Homo sapiens
ctcataatcaaacga

SEQ ID NO: 1567095 - DNA, 15 bp, Homo sapiens
tcataatcaaacgac

SEQ ID NO: 1567096 - DNA, 15 bp, Homo sapiens
cataatcaaacgacc

SEQ ID NO: 1567097 - DNA, 15 bp, Homo sapiens
ataatcaaacgaccc

SEQ ID NO: 1567098 - DNA, 15 bp, Homo sapiens
taatcaaacgaccct

SEQ ID NO: 1567099 - DNA, 15 bp, Homo sapiens
aatcaaacgacccta

SEQ ID NO: 1567100 - DNA, 15 bp, Homo sapiens
atcaaacgaccctaa

SEQ ID NO: 1567101 - DNA, 15 bp, Homo sapiens
tcaaacgaccctaaa

SEQ ID NO: 1567102 - DNA, 15 bp, Homo sapiens
caaacgaccctaaat

SEQ ID NO: 1567103 - DNA, 15 bp, Homo sapiens
aaacgaccctaaatc

SEQ ID NO: 1567104 - DNA, 15 bp, Homo sapiens
aacgaccctaaatcc

SEQ ID NO: 1567105 - DNA, 15 bp, Homo sapiens
acgaccctaaatccc

SEQ ID NO: 1567106 - DNA, 15 bp, Homo sapiens
cgaccctaaatccct

SEQ ID NO: 1567107 - DNA, 15 bp, Homo sapiens
gaccctaaatccctc

SEQ ID NO: 1567108 - DNA, 15 bp, Homo sapiens
accctaaatccctca

SEQ ID NO: 1567109 - DNA, 15 bp, Homo sapiens
ccctaaatccctcac

SEQ ID NO: 1567110 - DNA, 15 bp, Homo sapiens
cctaaatccctcact

SEQ ID NO: 1567111 - DNA, 15 bp, Homo sapiens
ctaaatccctcacta

SEQ ID NO: 1567112 - DNA, 15 bp, Homo sapiens
taaatccctcactaa

SEQ ID NO: 1567113 - DNA, 15 bp, Homo sapiens
aaatccctcactaac

SEQ ID NO: 1567114 - DNA, 15 bp, Homo sapiens
aatccctcactaacc

SEQ ID NO: 1567115 - DNA, 15 bp, Homo sapiens
atccctcactaacct

SEQ ID NO: 1567116 - DNA, 15 bp, Homo sapiens
tccctcactaaccta

SEQ ID NO: 1567117 - DNA, 15 bp, Homo sapiens
ccctcactaacctac

SEQ ID NO: 1567118 - DNA, 15 bp, Homo sapiens
cctcactaacctacc

SEQ ID NO: 1567119 - DNA, 15 bp, Homo sapiens
ctcactaacctaccc

SEQ ID NO: 1567120 - DNA, 15 bp, Homo sapiens
tcactaacctaccct

SEQ ID NO: 1567121 - DNA, 15 bp, Homo sapiens
cactaacctaccctc

SEQ ID NO: 1567122 - DNA, 15 bp, Homo sapiens
actaacctaccctcg

SEQ ID NO: 1567123 - DNA, 15 bp, Homo sapiens
ctaacctaccctcgc

SEQ ID NO: 1567124 - DNA, 15 bp, Homo sapiens
taacctaccctcgcc

SEQ ID NO: 1567125 - DNA, 15 bp, Homo sapiens
aacctaccctcgccc

SEQ ID NO: 1567126 - DNA, 15 bp, Homo sapiens
acctaccctcgccct

SEQ ID NO: 1567127 - DNA, 15 bp, Homo sapiens
cctaccctcgccctc

SEQ ID NO: 1567128 - DNA, 15 bp, Homo sapiens
ctaccctcgccctca

SEQ ID NO: 1567129 - DNA, 15 bp, Homo sapiens
taccctcgccctcac

SEQ ID NO: 1567130 - DNA, 15 bp, Homo sapiens
accctcgccctcact

SEQ ID NO: 1567131 - DNA, 15 bp, Homo sapiens
ccctcgccctcacta

SEQ ID NO: 1567132 - DNA, 15 bp, Homo sapiens
cctcgccctcactaa

SEQ ID NO: 1567133 - DNA, 15 bp, Homo sapiens
ctcgccctcactaaa

SEQ ID NO: 1567134 - DNA, 15 bp, Homo sapiens
tcgccctcactaaac

SEQ ID NO: 1567135 - DNA, 15 bp, Homo sapiens
cgccctcactaaact

SEQ ID NO: 1567136 - DNA, 15 bp, Homo sapiens
gccctcactaaactt

SEQ ID NO: 1567137 - DNA, 15 bp, Homo sapiens
ccctcactaaactta

SEQ ID NO: 1567138 - DNA, 15 bp, Homo sapiens
cctcactaaacttaa

SEQ ID NO: 1567139 - DNA, 15 bp, Homo sapiens
ctcactaaacttaat

SEQ ID NO: 1567140 - DNA, 15 bp, Homo sapiens
tcactaaacttaata

SEQ ID NO: 1567141 - DNA, 15 bp, Homo sapiens
cactaaacttaataa

SEQ ID NO: 1567142 - DNA, 15 bp, Homo sapiens
actaaacttaataat

SEQ ID NO: 1567143 - DNA, 15 bp, Homo sapiens
ctaaacttaataata

SEQ ID NO: 1567144 - DNA, 15 bp, Homo sapiens
taaacttaataataa

SEQ ID NO: 1567145 - DNA, 15 bp, Homo sapiens
aaacttaataataaa

SEQ ID NO: 1567146 - DNA, 15 bp, Homo sapiens
aacttaataataaat

SEQ ID NO: 1567147 - DNA, 15 bp, Homo sapiens
acttaataataaatg

SEQ ID NO: 1567148 - DNA, 15 bp, Homo sapiens
cttaataataaatgc

SEQ ID NO: 1567149 - DNA, 15 bp, Homo sapiens
ttaataataaatgct

SEQ ID NO: 1567150 - DNA, 15 bp, Homo sapiens
taataataaatgctg

SEQ ID NO: 1567151 - DNA, 15 bp, Homo sapiens
aataataaatgctgg

SEQ ID NO: 1567152 - DNA, 15 bp, Homo sapiens
ataataaatgctggt

SEQ ID NO: 1567153 - DNA, 15 bp, Homo sapiens
taataaatgctggta

SEQ ID NO: 1567154 - DNA, 15 bp, Homo sapiens
aataaatgctggtat

SEQ ID NO: 1567155 - DNA, 15 bp, Homo sapiens
ataaatgctggtata

SEQ ID NO: 1567156 - DNA, 15 bp, Homo sapiens
taaatgctggtatat

SEQ ID NO: 1567157 - DNA, 15 bp, Homo sapiens
aaatgctggtatatc

SEQ ID NO: 1567158 - DNA, 15 bp, Homo sapiens
aatgctggtatatcc

SEQ ID NO: 1567159 - DNA, 15 bp, Homo sapiens
atgctggtatatcca

SEQ ID NO: 1567160 - DNA, 15 bp, Homo sapiens
tgctggtatatccag

SEQ ID NO: 1567161 - DNA, 15 bp, Homo sapiens
gctggtatatccagt

SEQ ID NO: 1567162 - DNA, 15 bp, Homo sapiens
ctggtatatccagtg

SEQ ID NO: 1567163 - DNA, 15 bp, Homo sapiens
tggtatatccagtgc

SEQ ID NO: 1567164 - DNA, 15 bp, Homo sapiens
ggtatatccagtgca

SEQ ID NO: 1567165 - DNA, 15 bp, Homo sapiens
gtatatccagtgcat

SEQ ID NO: 1567166 - DNA, 15 bp, Homo sapiens
tatatccagtgcatt

SEQ ID NO: 1567167 - DNA, 15 bp, Homo sapiens
atatccagtgcattg

SEQ ID NO: 1567168 - DNA, 15 bp, Homo sapiens
tatccagtgcattgg

SEQ ID NO: 1567169 - DNA, 15 bp, Homo sapiens
atccagtgcattggc

SEQ ID NO: 1567170 - DNA, 15 bp, Homo sapiens
tccagtgcattggca

SEQ ID NO: 1567171 - DNA, 15 bp, Homo sapiens
ccagtgcattggcag

SEQ ID NO: 1567172 - DNA, 15 bp, Homo sapiens
cagtgcattggcagc

SEQ ID NO: 1567173 - DNA, 15 bp, Homo sapiens
agtgcattggcagca

SEQ ID NO: 1567174 - DNA, 15 bp, Homo sapiens
gtgcattggcagcat

SEQ ID NO: 1567175 - DNA, 15 bp, Homo sapiens
tgcattggcagcatc

SEQ ID NO: 1567176 - DNA, 15 bp, Homo sapiens
gcattggcagcatcg

SEQ ID NO: 1567177 - DNA, 15 bp, Homo sapiens
cattggcagcatcgc

SEQ ID NO: 1567178 - DNA, 15 bp, Homo sapiens
attggcagcatcgca

SEQ ID NO: 1567179 - DNA, 15 bp, Homo sapiens
ttggcagcatcgcag

SEQ ID NO: 1567180 - DNA, 15 bp, Homo sapiens
tggcagcatcgcagg

SEQ ID NO: 1567181 - DNA, 15 bp, Homo sapiens
ggcagcatcgcagga

SEQ ID NO: 1567182 - DNA, 15 bp, Homo sapiens
gcagcatcgcaggac

SEQ ID NO: 1567183 - DNA, 15 bp, Homo sapiens
cagcatcgcaggacc

SEQ ID NO: 1567184 - DNA, 15 bp, Homo sapiens
agcatcgcaggacca

SEQ ID NO: 1567185 - DNA, 15 bp, Homo sapiens
gcatcgcaggaccag

SEQ ID NO: 1567186 - DNA, 15 bp, Homo sapiens
catcgcaggaccaga

SEQ ID NO: 1567187 - DNA, 15 bp, Homo sapiens
atcgcaggaccagaa

SEQ ID NO: 1567188 - DNA, 15 bp, Homo sapiens
tcgcaggaccagaag

SEQ ID NO: 1567189 - DNA, 15 bp, Homo sapiens
cgcaggaccagaagg

SEQ ID NO: 1567190 - DNA, 15 bp, Homo sapiens
gcaggaccagaaggc

SEQ ID NO: 1567191 - DNA, 15 bp, Homo sapiens
caggaccagaaggcg

SEQ ID NO: 1567192 - DNA, 15 bp, Homo sapiens
aggaccagaaggcgg

SEQ ID NO: 1567193 - DNA, 15 bp, Homo sapiens
ggaccagaaggcggt

SEQ ID NO: 1567194 - DNA, 15 bp, Homo sapiens
gaccagaaggcggtg

SEQ ID NO: 1567195 - DNA, 15 bp, Homo sapiens
accagaaggcggtga

SEQ ID NO: 1567196 - DNA, 15 bp, Homo sapiens
ccagaaggcggtgac

SEQ ID NO: 1567197 - DNA, 15 bp, Homo sapiens
cagaaggcggtgacc

SEQ ID NO: 1567198 - DNA, 15 bp, Homo sapiens
agaaggcggtgaccc

SEQ ID NO: 1567199 - DNA, 15 bp, Homo sapiens
gaaggcggtgacccc

SEQ ID NO: 1567200 - DNA, 15 bp, Homo sapiens
aaggcggtgaccccc

SEQ ID NO: 1567201 - DNA, 15 bp, Homo sapiens
aggcggtgaccccct

SEQ ID NO: 1567202 - DNA, 15 bp, Homo sapiens
ggcggtgaccccctt

SEQ ID NO: 1567203 - DNA, 15 bp, Homo sapiens
gcggtgacccccttg

SEQ ID NO: 1567204 - DNA, 15 bp, Homo sapiens
cggtgacccccttgg

SEQ ID NO: 1567205 - DNA, 15 bp, Homo sapiens
ggtgacccccttgga

SEQ ID NO: 1567206 - DNA, 15 bp, Homo sapiens
gtgacccccttggac

SEQ ID NO: 1567207 - DNA, 15 bp, Homo sapiens
tgacccccttggacc

SEQ ID NO: 1567208 - DNA, 15 bp, Homo sapiens
gacccccttggaccc

SEQ ID NO: 1567209 - DNA, 15 bp, Homo sapiens
acccccttggaccca

SEQ ID NO: 1567210 - DNA, 15 bp, Homo sapiens
cccccttggacccag

SEQ ID NO: 1567211 - DNA, 15 bp, Homo sapiens
ccccttggacccagc

SEQ ID NO: 1567212 - DNA, 15 bp, Homo sapiens
cccttggacccagct

SEQ ID NO: 1567213 - DNA, 15 bp, Homo sapiens
ccttggacccagctt

SEQ ID NO: 1567214 - DNA, 15 bp, Homo sapiens
cttggacccagcttt

SEQ ID NO: 1567215 - DNA, 15 bp, Homo sapiens
ttggacccagctttc

SEQ ID NO: 1567216 - DNA, 15 bp, Homo sapiens
tggacccagctttca

SEQ ID NO: 1567217 - DNA, 15 bp, Homo sapiens
ggacccagctttcac

SEQ ID NO: 1567218 - DNA, 15 bp, Homo sapiens
gacccagctttcact

SEQ ID NO: 1567219 - DNA, 15 bp, Homo sapiens
acccagctttcacta

SEQ ID NO: 1567220 - DNA, 15 bp, Homo sapiens
cccagctttcactat

SEQ ID NO: 1567221 - DNA, 15 bp, Homo sapiens
ccagctttcactatc

SEQ ID NO: 1567222 - DNA, 15 bp, Homo sapiens
cagctttcactatct

SEQ ID NO: 1567223 - DNA, 15 bp, Homo sapiens
agctttcactatctt

SEQ ID NO: 1567224 - DNA, 15 bp, Homo sapiens
gctttcactatcttg

SEQ ID NO: 1567225 - DNA, 15 bp, Homo sapiens
ctttcactatcttgt

SEQ ID NO: 1567226 - DNA, 15 bp, Homo sapiens
tttcactatcttgtg

SEQ ID NO: 1567227 - DNA, 15 bp, Homo sapiens
ttcactatcttgtgt

SEQ ID NO: 1567228 - DNA, 15 bp, Homo sapiens
tcactatcttgtgtg

SEQ ID NO: 1567229 - DNA, 15 bp, Homo sapiens
cactatcttgtgtgt

SEQ ID NO: 1567230 - DNA, 15 bp, Homo sapiens
actatcttgtgtgtg

SEQ ID NO: 1567231 - DNA, 15 bp, Homo sapiens
ctatcttgtgtgtgt

SEQ ID NO: 1567232 - DNA, 15 bp, Homo sapiens
tatcttgtgtgtgtc

SEQ ID NO: 1567233 - DNA, 15 bp, Homo sapiens
atcttgtgtgtgtct

SEQ ID NO: 1567234 - DNA, 15 bp, Homo sapiens
tcttgtgtgtgtcta

SEQ ID NO: 1567235 - DNA, 15 bp, Homo sapiens
cttgtgtgtgtctat

SEQ ID NO: 1567236 - DNA, 15 bp, Homo sapiens
ttgtgtgtgtctatt

SEQ ID NO: 1567237 - DNA, 15 bp, Homo sapiens
tgtgtgtgtctatta

SEQ ID NO: 1567238 - DNA, 15 bp, Homo sapiens
gtgtgtgtctattat

SEQ ID NO: 1567239 - DNA, 15 bp, Homo sapiens
tgtgtgtctattatt

SEQ ID NO: 1567240 - DNA, 15 bp, Homo sapiens
gtgtgtctattattt

SEQ ID NO: 1567241 - DNA, 15 bp, Homo sapiens
tgtgtctattatttc

SEQ ID NO: 1567242 - DNA, 15 bp, Homo sapiens
gtgtctattatttcc

SEQ ID NO: 1567243 - DNA, 15 bp, Homo sapiens
tgtctattatttccc

SEQ ID NO: 1567244 - DNA, 15 bp, Homo sapiens
gtctattatttcccg

SEQ ID NO: 1567245 - DNA, 15 bp, Homo sapiens
tctattatttcccga

SEQ ID NO: 1567246 - DNA, 15 bp, Homo sapiens
ctattatttcccgac

SEQ ID NO: 1567247 - DNA, 15 bp, Homo sapiens
tattatttcccgacc

SEQ ID NO: 1567248 - DNA, 15 bp, Homo sapiens
attatttcccgacct

SEQ ID NO: 1567249 - DNA, 15 bp, Homo sapiens
ttatttcccgacctg

SEQ ID NO: 1567250 - DNA, 15 bp, Homo sapiens
tatttcccgacctgc

SEQ ID NO: 1567251 - DNA, 15 bp, Homo sapiens
atttcccgacctgcc

SEQ ID NO: 1567252 - DNA, 15 bp, Homo sapiens
tttcccgacctgccg

SEQ ID NO: 1567253 - DNA, 15 bp, Homo sapiens
ttcccgacctgccga

SEQ ID NO: 1567254 - DNA, 15 bp, Homo sapiens
tcccgacctgccgat

SEQ ID NO: 1567255 - DNA, 15 bp, Homo sapiens
cccgacctgccgatc

SEQ ID NO: 1567256 - DNA, 15 bp, Homo sapiens
ccgacctgccgatcc

SEQ ID NO: 1567257 - DNA, 15 bp, Homo sapiens
cgacctgccgatcca

SEQ ID NO: 1567258 - DNA, 15 bp, Homo sapiens
gacctgccgatccac

SEQ ID NO: 1567259 - DNA, 15 bp, Homo sapiens
acctgccgatccacc

SEQ ID NO: 1567260 - DNA, 15 bp, Homo sapiens
cctgccgatccacct

SEQ ID NO: 1567261 - DNA, 15 bp, Homo sapiens
ctgccgatccacctg

SEQ ID NO: 1567262 - DNA, 15 bp, Homo sapiens
tgccgatccacctgg

SEQ ID NO: 1567263 - DNA, 15 bp, Homo sapiens
gccgatccacctggg

SEQ ID NO: 1567264 - DNA, 15 bp, Homo sapiens
ccgatccacctgggg

SEQ ID NO: 1567265 - DNA, 15 bp, Homo sapiens
cgatccacctgggga

SEQ ID NO: 1567266 - DNA, 15 bp, Homo sapiens
gatccacctggggac

SEQ ID NO: 1567267 - DNA, 15 bp, Homo sapiens
atccacctggggaca

SEQ ID NO: 1567268 - DNA, 15 bp, Homo sapiens
tccacctggggacaa

SEQ ID NO: 1567269 - DNA, 15 bp, Homo sapiens
ccacctggggacaaa

SEQ ID NO: 1567270 - DNA, 15 bp, Homo sapiens
cacctggggacaaag

SEQ ID NO: 1567271 - DNA, 15 bp, Homo sapiens
acctggggacaaaga

SEQ ID NO: 1567272 - DNA, 15 bp, Homo sapiens
cctggggacaaagag

SEQ ID NO: 1567273 - DNA, 15 bp, Homo sapiens
ctggggacaaagaga

SEQ ID NO: 1567274 - DNA, 15 bp, Homo sapiens
tggggacaaagagag

SEQ ID NO: 1567275 - DNA, 15 bp, Homo sapiens
ggggacaaagagaga

SEQ ID NO: 1567276 - DNA, 15 bp, Homo sapiens
gggacaaagagagag

SEQ ID NO: 1567277 - DNA, 15 bp, Homo sapiens
ggacaaagagagagc

SEQ ID NO: 1567278 - DNA, 15 bp, Homo sapiens
gacaaagagagagcc

SEQ ID NO: 1567279 - DNA, 15 bp, Homo sapiens
acaaagagagagccc

SEQ ID NO: 1567280 - DNA, 15 bp, Homo sapiens
caaagagagagcccc

SEQ ID NO: 1567281 - DNA, 15 bp, Homo sapiens
aaagagagagcccca

SEQ ID NO: 1567282 - DNA, 15 bp, Homo sapiens
aagagagagccccat

SEQ ID NO: 1567283 - DNA, 15 bp, Homo sapiens
agagagagccccatt

SEQ ID NO: 1567284 - DNA, 15 bp, Homo sapiens
gagagagccccattg

SEQ ID NO: 1567285 - DNA, 15 bp, Homo sapiens
agagagccccattgc

SEQ ID NO: 1567286 - DNA, 15 bp, Homo sapiens
gagagccccattgcc

SEQ ID NO: 1567287 - DNA, 15 bp, Homo sapiens
agagccccattgcct

SEQ ID NO: 1567288 - DNA, 15 bp, Homo sapiens
gagccccattgcctt

SEQ ID NO: 1567289 - DNA, 15 bp, Homo sapiens
agccccattgccttg

SEQ ID NO: 1567290 - DNA, 15 bp, Homo sapiens
gccccattgccttgt

SEQ ID NO: 1567291 - DNA, 15 bp, Homo sapiens
ccccattgccttgtg

SEQ ID NO: 1567292 - DNA, 15 bp, Homo sapiens
cccattgccttgtgg

SEQ ID NO: 1567293 - DNA, 15 bp, Homo sapiens
ccattgccttgtggg

SEQ ID NO: 1567294 - DNA, 15 bp, Homo sapiens
cattgccttgtgggc

SEQ ID NO: 1567295 - DNA, 15 bp, Homo sapiens
attgccttgtgggct

SEQ ID NO: 1567296 - DNA, 15 bp, Homo sapiens
ttgccttgtgggctg

SEQ ID NO: 1567297 - DNA, 15 bp, Homo sapiens
tgccttgtgggctgc

SEQ ID NO: 1567298 - DNA, 15 bp, Homo sapiens
gccttgtgggctgct

SEQ ID NO: 1567299 - DNA, 15 bp, Homo sapiens
ccttgtgggctgctg

SEQ ID NO: 1567300 - DNA, 15 bp, Homo sapiens
cttgtgggctgctgg

SEQ ID NO: 1567301 - DNA, 15 bp, Homo sapiens
ttgtgggctgctggc

SEQ ID NO: 1567302 - DNA, 15 bp, Homo sapiens
tgtgggctgctggcc

SEQ ID NO: 1567303 - DNA, 15 bp, Homo sapiens
gtgggctgctggcca

SEQ ID NO: 1567304 - DNA, 15 bp, Homo sapiens
tgggctgctggccag

SEQ ID NO: 1567305 - DNA, 15 bp, Homo sapiens
gggctgctggccaga

SEQ ID NO: 1567306 - DNA, 15 bp, Homo sapiens
ggctgctggccagat

SEQ ID NO: 1567307 - DNA, 15 bp, Homo sapiens
gctgctggccagatc

SEQ ID NO: 1567308 - DNA, 15 bp, Homo sapiens
ctgctggccagatcc

SEQ ID NO: 1567309 - DNA, 15 bp, Homo sapiens
tgctggccagatccc

SEQ ID NO: 1567310 - DNA, 15 bp, Homo sapiens
gctggccagatcccg

SEQ ID NO: 1567311 - DNA, 15 bp, Homo sapiens
ctggccagatcccgc

SEQ ID NO: 1567312 - DNA, 15 bp, Homo sapiens
tggccagatcccgcg

SEQ ID NO: 1567313 - DNA, 15 bp, Homo sapiens
ggccagatcccgcga

SEQ ID NO: 1567314 - DNA, 15 bp, Homo sapiens
gccagatcccgcgat

SEQ ID NO: 1567315 - DNA, 15 bp, Homo sapiens
ccagatcccgcgata

SEQ ID NO: 1567316 - DNA, 15 bp, Homo sapiens
cagatcccgcgatac

SEQ ID NO: 1567317 - DNA, 15 bp, Homo sapiens
agatcccgcgatact

SEQ ID NO: 1567318 - DNA, 15 bp, Homo sapiens
gatcccgcgatactc

SEQ ID NO: 1567319 - DNA, 15 bp, Homo sapiens
atcccgcgatactcc

SEQ ID NO: 1567320 - DNA, 15 bp, Homo sapiens
tcccgcgatactcca

SEQ ID NO: 1567321 - DNA, 15 bp, Homo sapiens
cccgcgatactccat

SEQ ID NO: 1567322 - DNA, 15 bp, Homo sapiens
ccgcgatactccata

SEQ ID NO: 1567323 - DNA, 15 bp, Homo sapiens
cgcgatactccataa

SEQ ID NO: 1567324 - DNA, 15 bp, Homo sapiens
gcgatactccataat

SEQ ID NO: 1567325 - DNA, 15 bp, Homo sapiens
cgatactccataatg

SEQ ID NO: 1567326 - DNA, 15 bp, Homo sapiens
gatactccataatgt

SEQ ID NO: 1567327 - DNA, 15 bp, Homo sapiens
atactccataatgtg

SEQ ID NO: 1567328 - DNA, 15 bp, Homo sapiens
tactccataatgtgg

SEQ ID NO: 1567329 - DNA, 15 bp, Homo sapiens
actccataatgtgga

SEQ ID NO: 1567330 - DNA, 15 bp, Homo sapiens
ctccataatgtggat

SEQ ID NO: 1567331 - DNA, 15 bp, Homo sapiens
tccataatgtggatg

SEQ ID NO: 1567332 - DNA, 15 bp, Homo sapiens
ccataatgtggatgg

SEQ ID NO: 1567333 - DNA, 15 bp, Homo sapiens
cataatgtggatgga

SEQ ID NO: 1567334 - DNA, 15 bp, Homo sapiens
ataatgtggatggac

SEQ ID NO: 1567335 - DNA, 15 bp, Homo sapiens
taatgtggatggacc

SEQ ID NO: 1567336 - DNA, 15 bp, Homo sapiens
aatgtggatggacct

SEQ ID NO: 1567337 - DNA, 15 bp, Homo sapiens
atgtggatggacctg

SEQ ID NO: 1567338 - DNA, 15 bp, Homo sapiens
tgtggatggacctga

SEQ ID NO: 1567339 - DNA, 15 bp, Homo sapiens
gtggatggacctgaa

SEQ ID NO: 1567340 - DNA, 15 bp, Homo sapiens
tggatggacctgaat

SEQ ID NO: 1567341 - DNA, 15 bp, Homo sapiens
ggatggacctgaata

SEQ ID NO: 1567342 - DNA, 15 bp, Homo sapiens
gatggacctgaataa

SEQ ID NO: 1567343 - DNA, 15 bp, Homo sapiens
atggacctgaataaa

SEQ ID NO: 1567344 - DNA, 15 bp, Homo sapiens
tggacctgaataaaa

SEQ ID NO: 1567345 - DNA, 15 bp, Homo sapiens
ggacctgaataaaac

SEQ ID NO: 1567346 - DNA, 15 bp, Homo sapiens
gacctgaataaaaca

SEQ ID NO: 1567347 - DNA, 15 bp, Homo sapiens
acctgaataaaacag

SEQ ID NO: 1567348 - DNA, 15 bp, Homo sapiens
cctgaataaaacaga

SEQ ID NO: 1567349 - DNA, 15 bp, Homo sapiens
ctgaataaaacagaa

SEQ ID NO: 1567350 - DNA, 15 bp, Homo sapiens
tgaataaaacagaaa

SEQ ID NO: 1567351 - DNA, 15 bp, Homo sapiens
gaataaaacagaaag

SEQ ID NO: 1567352 - DNA, 15 bp, Homo sapiens
aataaaacagaaaga

SEQ ID NO: 1567353 - DNA, 15 bp, Homo sapiens
ataaaacagaaagac

SEQ ID NO: 1567354 - DNA, 15 bp, Homo sapiens
taaaacagaaagacg

SEQ ID NO: 1567355 - DNA, 15 bp, Homo sapiens
aaaacagaaagacgg

SEQ ID NO: 1567356 - DNA, 15 bp, Homo sapiens
aaacagaaagacggg

SEQ ID NO: 1567357 - DNA, 15 bp, Homo sapiens
aacagaaagacgggc

SEQ ID NO: 1567358 - DNA, 15 bp, Homo sapiens
acagaaagacgggcc

SEQ ID NO: 1567359 - DNA, 15 bp, Homo sapiens
cagaaagacgggcct

SEQ ID NO: 1567360 - DNA, 15 bp, Homo sapiens
agaaagacgggcctc

SEQ ID NO: 1567361 - DNA, 15 bp, Homo sapiens
gaaagacgggcctcg

SEQ ID NO: 1567362 - DNA, 15 bp, Homo sapiens
aaagacgggcctcgc

SEQ ID NO: 1567363 - DNA, 15 bp, Homo sapiens
aagacgggcctcgcc

SEQ ID NO: 1567364 - DNA, 15 bp, Homo sapiens
agacgggcctcgccg

SEQ ID NO: 1567365 - DNA, 15 bp, Homo sapiens
gacgggcctcgccga

SEQ ID NO: 1567366 - DNA, 15 bp, Homo sapiens
acgggcctcgccgaa

SEQ ID NO: 1567367 - DNA, 15 bp, Homo sapiens
cgggcctcgccgaac

SEQ ID NO: 1567368 - DNA, 15 bp, Homo sapiens
gggcctcgccgaact

SEQ ID NO: 1567369 - DNA, 15 bp, Homo sapiens
ggcctcgccgaacta

SEQ ID NO: 1567370 - DNA, 15 bp, Homo sapiens
gcctcgccgaactag

SEQ ID NO: 1567371 - DNA, 15 bp, Homo sapiens
cctcgccgaactaga

SEQ ID NO: 1567372 - DNA, 15 bp, Homo sapiens
ctcgccgaactagag

SEQ ID NO: 1567373 - DNA, 15 bp, Homo sapiens
tcgccgaactagagg

SEQ ID NO: 1567374 - DNA, 15 bp, Homo sapiens
cgccgaactagaggg

SEQ ID NO: 1567375 - DNA, 15 bp, Homo sapiens
gccgaactagaggga

SEQ ID NO: 1567376 - DNA, 15 bp, Homo sapiens
ccgaactagagggaa

SEQ ID NO: 1567377 - DNA, 15 bp, Homo sapiens
cgaactagagggaat

SEQ ID NO: 1567378 - DNA, 15 bp, Homo sapiens
gaactagagggaatt

SEQ ID NO: 1567379 - DNA, 15 bp, Homo sapiens
aactagagggaattc

SEQ ID NO: 1567380 - DNA, 15 bp, Homo sapiens
actagagggaattct

SEQ ID NO: 1567381 - DNA, 15 bp, Homo sapiens
ctagagggaattctc

SEQ ID NO: 1567382 - DNA, 15 bp, Homo sapiens
tagagggaattctcc

SEQ ID NO: 1567383 - DNA, 15 bp, Homo sapiens
agagggaattctcct

SEQ ID NO: 1567384 - DNA, 15 bp, Homo sapiens
gagggaattctcctg

SEQ ID NO: 1567385 - DNA, 15 bp, Homo sapiens
agggaattctcctgc

SEQ ID NO: 1567386 - DNA, 15 bp, Homo sapiens
gggaattctcctgca

SEQ ID NO: 1567387 - DNA, 15 bp, Homo sapiens
ggaattctcctgcag

SEQ ID NO: 1567388 - DNA, 15 bp, Homo sapiens
gaattctcctgcagg

SEQ ID NO: 1567389 - DNA, 15 bp, Homo sapiens
aattctcctgcaggc

SEQ ID NO: 1567390 - DNA, 15 bp, Homo sapiens
attctcctgcaggct

SEQ ID NO: 1567391 - DNA, 15 bp, Homo sapiens
ttctcctgcaggcta

SEQ ID NO: 1567392 - DNA, 15 bp, Homo sapiens
tctcctgcaggctac

SEQ ID NO: 1567393 - DNA, 15 bp, Homo sapiens
ctcctgcaggctacc

SEQ ID NO: 1567394 - DNA, 15 bp, Homo sapiens
tcctgcaggctaccc

SEQ ID NO: 1567395 - DNA, 15 bp, Homo sapiens
cctgcaggctaccct

SEQ ID NO: 1567396 - DNA, 15 bp, Homo sapiens
ctgcaggctaccctc

SEQ ID NO: 1567397 - DNA, 15 bp, Homo sapiens
tgcaggctaccctca

SEQ ID NO: 1567398 - DNA, 15 bp, Homo sapiens
gcaggctaccctcag

SEQ ID NO: 1567399 - DNA, 15 bp, Homo sapiens
caggctaccctcaga

SEQ ID NO: 1567400 - DNA, 15 bp, Homo sapiens
aggctaccctcagac

SEQ ID NO: 1567401 - DNA, 15 bp, Homo sapiens
ggctaccctcagact

SEQ ID NO: 1567402 - DNA, 15 bp, Homo sapiens
gctaccctcagactt

SEQ ID NO: 1567403 - DNA, 15 bp, Homo sapiens
ctaccctcagactta

SEQ ID NO: 1567404 - DNA, 15 bp, Homo sapiens
taccctcagacttaa

SEQ ID NO: 1567405 - DNA, 15 bp, Homo sapiens
accctcagacttaac

SEQ ID NO: 1567406 - DNA, 15 bp, Homo sapiens
ccctcagacttaacc

SEQ ID NO: 1567407 - DNA, 15 bp, Homo sapiens
cctcagacttaacca

SEQ ID NO: 1567408 - DNA, 15 bp, Homo sapiens
ctcagacttaaccat

SEQ ID NO: 1567409 - DNA, 15 bp, Homo sapiens
tcagacttaaccatc

SEQ ID NO: 1567410 - DNA, 15 bp, Homo sapiens
cagacttaaccatca

SEQ ID NO: 1567411 - DNA, 15 bp, Homo sapiens
agacttaaccatcag

SEQ ID NO: 1567412 - DNA, 15 bp, Homo sapiens
gacttaaccatcagc

SEQ ID NO: 1567413 - DNA, 15 bp, Homo sapiens
acttaaccatcagct

SEQ ID NO: 1567414 - DNA, 15 bp, Homo sapiens
cttaaccatcagctc

SEQ ID NO: 1567415 - DNA, 15 bp, Homo sapiens
ttaaccatcagctct

SEQ ID NO: 1567416 - DNA, 15 bp, Homo sapiens
taaccatcagctctc

SEQ ID NO: 1567417 - DNA, 15 bp, Homo sapiens
aaccatcagctctcc

SEQ ID NO: 1567418 - DNA, 15 bp, Homo sapiens
accatcagctctcct

SEQ ID NO: 1567419 - DNA, 15 bp, Homo sapiens
ccatcagctctcctg

SEQ ID NO: 1567420 - DNA, 15 bp, Homo sapiens
catcagctctcctgg

SEQ ID NO: 1567421 - DNA, 15 bp, Homo sapiens
atcagctctcctggg

SEQ ID NO: 1567422 - DNA, 15 bp, Homo sapiens
tcagctctcctgggt

SEQ ID NO: 1567423 - DNA, 15 bp, Homo sapiens
cagctctcctgggtc

SEQ ID NO: 1567424 - DNA, 15 bp, Homo sapiens
agctctcctgggtcg

SEQ ID NO: 1567425 - DNA, 15 bp, Homo sapiens
gctctcctgggtcgc

SEQ ID NO: 1567426 - DNA, 15 bp, Homo sapiens
ctctcctgggtcgcc

SEQ ID NO: 1567427 - DNA, 15 bp, Homo sapiens
tctcctgggtcgcca

SEQ ID NO: 1567428 - DNA, 15 bp, Homo sapiens
ctcctgggtcgccag

SEQ ID NO: 1567429 - DNA, 15 bp, Homo sapiens
tcctgggtcgccagc

SEQ ID NO: 1567430 - DNA, 15 bp, Homo sapiens
cctgggtcgccagcc

SEQ ID NO: 1567431 - DNA, 15 bp, Homo sapiens
ctgggtcgccagccc

SEQ ID NO: 1567432 - DNA, 15 bp, Homo sapiens
tgggtcgccagccca

SEQ ID NO: 1567433 - DNA, 15 bp, Homo sapiens
gggtcgccagcccac

SEQ ID NO: 1567434 - DNA, 15 bp, Homo sapiens
ggtcgccagcccacc

SEQ ID NO: 1567435 - DNA, 15 bp, Homo sapiens
gtcgccagcccacca

SEQ ID NO: 1567436 - DNA, 15 bp, Homo sapiens
tcgccagcccaccag

SEQ ID NO: 1567437 - DNA, 15 bp, Homo sapiens
cgccagcccaccagc

SEQ ID NO: 1567438 - DNA, 15 bp, Homo sapiens
gccagcccaccagct

SEQ ID NO: 1567439 - DNA, 15 bp, Homo sapiens
ccagcccaccagctc

SEQ ID NO: 1567440 - DNA, 15 bp, Homo sapiens
cagcccaccagctca

SEQ ID NO: 1567441 - DNA, 15 bp, Homo sapiens
agcccaccagctcac

SEQ ID NO: 1567442 - DNA, 15 bp, Homo sapiens
gcccaccagctcaca

SEQ ID NO: 1567443 - DNA, 15 bp, Homo sapiens
cccaccagctcacac

SEQ ID NO: 1567444 - DNA, 15 bp, Homo sapiens
ccaccagctcacact

SEQ ID NO: 1567445 - DNA, 15 bp, Homo sapiens
caccagctcacacta

SEQ ID NO: 1567446 - DNA, 15 bp, Homo sapiens
accagctcacactaa

SEQ ID NO: 1567447 - DNA, 15 bp, Homo sapiens
ccagctcacactaaa

SEQ ID NO: 1567448 - DNA, 15 bp, Homo sapiens
cagctcacactaaag

SEQ ID NO: 1567449 - DNA, 15 bp, Homo sapiens
agctcacactaaagg

SEQ ID NO: 1567450 - DNA, 15 bp, Homo sapiens
gctcacactaaaggc

SEQ ID NO: 1567451 - DNA, 15 bp, Homo sapiens
ctcacactaaaggct

SEQ ID NO: 1567452 - DNA, 15 bp, Homo sapiens
tcacactaaaggctt

SEQ ID NO: 1567453 - DNA, 15 bp, Homo sapiens
cacactaaaggctta

SEQ ID NO: 1567454 - DNA, 15 bp, Homo sapiens
acactaaaggcttag

SEQ ID NO: 1567455 - DNA, 15 bp, Homo sapiens
cactaaaggcttagg

SEQ ID NO: 1567456 - DNA, 15 bp, Homo sapiens
actaaaggcttagga

SEQ ID NO: 1567457 - DNA, 15 bp, Homo sapiens
ctaaaggcttaggat

SEQ ID NO: 1567458 - DNA, 15 bp, Homo sapiens
taaaggcttaggatg

SEQ ID NO: 1567459 - DNA, 15 bp, Homo sapiens
aaaggcttaggatgg

SEQ ID NO: 1567460 - DNA, 15 bp, Homo sapiens
aaggcttaggatggt

SEQ ID NO: 1567461 - DNA, 15 bp, Homo sapiens
aggcttaggatggtt

SEQ ID NO: 1567462 - DNA, 15 bp, Homo sapiens
ggcttaggatggtta

SEQ ID NO: 1567463 - DNA, 15 bp, Homo sapiens
gcttaggatggttat

SEQ ID NO: 1567464 - DNA, 15 bp, Homo sapiens
cttaggatggttatg

SEQ ID NO: 1567465 - DNA, 15 bp, Homo sapiens
ttaggatggttatga

SEQ ID NO: 1567466 - DNA, 15 bp, Homo sapiens
taggatggttatgat

SEQ ID NO: 1567467 - DNA, 15 bp, Homo sapiens
aggatggttatgata

SEQ ID NO: 1567468 - DNA, 15 bp, Homo sapiens
ggatggttatgataa

SEQ ID NO: 1567469 - DNA, 15 bp, Homo sapiens
gatggttatgataag

SEQ ID NO: 1567470 - DNA, 15 bp, Homo sapiens
atggttatgataaga

SEQ ID NO: 1567471 - DNA, 15 bp, Homo sapiens
tggttatgataagaa

SEQ ID NO: 1567472 - DNA, 15 bp, Homo sapiens
ggttatgataagaaa

SEQ ID NO: 1567473 - DNA, 15 bp, Homo sapiens
gttatgataagaaag

SEQ ID NO: 1567474 - DNA, 15 bp, Homo sapiens
ttatgataagaaaga

SEQ ID NO: 1567475 - DNA, 15 bp, Homo sapiens
tatgataagaaagac

SEQ ID NO: 1567476 - DNA, 15 bp, Homo sapiens
atgataagaaagaca

SEQ ID NO: 1567477 - DNA, 15 bp, Homo sapiens
tgataagaaagacag

SEQ ID NO: 1567478 - DNA, 15 bp, Homo sapiens
gataagaaagacaga

SEQ ID NO: 1567479 - DNA, 15 bp, Homo sapiens
ataagaaagacagat

SEQ ID NO: 1567480 - DNA, 15 bp, Homo sapiens
taagaaagacagatg

SEQ ID NO: 1567481 - DNA, 15 bp, Homo sapiens
aagaaagacagatga

SEQ ID NO: 1567482 - DNA, 15 bp, Homo sapiens
agaaagacagatgat

SEQ ID NO: 1567483 - DNA, 15 bp, Homo sapiens
gaaagacagatgata

SEQ ID NO: 1567484 - DNA, 15 bp, Homo sapiens
aaagacagatgataa

SEQ ID NO: 1567485 - DNA, 15 bp, Homo sapiens
aagacagatgataac

SEQ ID NO: 1567486 - DNA, 15 bp, Homo sapiens
agacagatgataaca

SEQ ID NO: 1567487 - DNA, 15 bp, Homo sapiens
gacagatgataacag

SEQ ID NO: 1567488 - DNA, 15 bp, Homo sapiens
acagatgataacaga

SEQ ID NO: 1567489 - DNA, 15 bp, Homo sapiens
cagatgataacagaa

SEQ ID NO: 1567490 - DNA, 15 bp, Homo sapiens
agatgataacagaag

SEQ ID NO: 1567491 - DNA, 15 bp, Homo sapiens
gatgataacagaagt

SEQ ID NO: 1567492 - DNA, 15 bp, Homo sapiens
atgataacagaagtt

SEQ ID NO: 1567493 - DNA, 15 bp, Homo sapiens
tgataacagaagtta

SEQ ID NO: 1567494 - DNA, 15 bp, Homo sapiens
gataacagaagttaa

SEQ ID NO: 1567495 - DNA, 15 bp, Homo sapiens
ataacagaagttaac

SEQ ID NO: 1567496 - DNA, 15 bp, Homo sapiens
taacagaagttaacc

SEQ ID NO: 1567497 - DNA, 15 bp, Homo sapiens
aacagaagttaacca

SEQ ID NO: 1567498 - DNA, 15 bp, Homo sapiens
acagaagttaaccat

SEQ ID NO: 1567499 - DNA, 15 bp, Homo sapiens
cagaagttaaccatg

SEQ ID NO: 1567500 - DNA, 15 bp, Homo sapiens
agaagttaaccatgg

SEQ ID NO: 1567501 - DNA, 15 bp, Homo sapiens
gaagttaaccatgga

SEQ ID NO: 1567502 - DNA, 15 bp, Homo sapiens
aagttaaccatggat

SEQ ID NO: 1567503 - DNA, 15 bp, Homo sapiens
agttaaccatggatg

SEQ ID NO: 1567504 - DNA, 15 bp, Homo sapiens
gttaaccatggatga

SEQ ID NO: 1567505 - DNA, 15 bp, Homo sapiens
ttaaccatggatgag

SEQ ID NO: 1567506 - DNA, 15 bp, Homo sapiens
taaccatggatgagg

SEQ ID NO: 1567507 - DNA, 15 bp, Homo sapiens
aaccatggatgaggc

SEQ ID NO: 1567508 - DNA, 15 bp, Homo sapiens
accatggatgaggct

SEQ ID NO: 1567509 - DNA, 15 bp, Homo sapiens
ccatggatgaggcta

SEQ ID NO: 1567510 - DNA, 15 bp, Homo sapiens
catggatgaggctaa

SEQ ID NO: 1567511 - DNA, 15 bp, Homo sapiens
atggatgaggctaaa

SEQ ID NO: 1567512 - DNA, 15 bp, Homo sapiens
tggatgaggctaaag

SEQ ID NO: 1567513 - DNA, 15 bp, Homo sapiens
ggatgaggctaaaga

SEQ ID NO: 1567514 - DNA, 15 bp, Homo sapiens
gatgaggctaaagag

SEQ ID NO: 1567515 - DNA, 15 bp, Homo sapiens
atgaggctaaagaga

SEQ ID NO: 1567516 - DNA, 15 bp, Homo sapiens
tgaggctaaagagaa

SEQ ID NO: 1567517 - DNA, 15 bp, Homo sapiens
gaggctaaagagaaa

SEQ ID NO: 1567518 - DNA, 15 bp, Homo sapiens
aggctaaagagaaat

SEQ ID NO: 1567519 - DNA, 15 bp, Homo sapiens
ggctaaagagaaatt

SEQ ID NO: 1567520 - DNA, 15 bp, Homo sapiens
gctaaagagaaattg

SEQ ID NO: 1567521 - DNA, 15 bp, Homo sapiens
ctaaagagaaattga

SEQ ID NO: 1567522 - DNA, 15 bp, Homo sapiens
taaagagaaattgaa

SEQ ID NO: 1567523 - DNA, 15 bp, Homo sapiens
aaagagaaattgaaa

SEQ ID NO: 1567524 - DNA, 15 bp, Homo sapiens
aagagaaattgaaac

SEQ ID NO: 1567525 - DNA, 15 bp, Homo sapiens
agagaaattgaaacc

SEQ ID NO: 1567526 - DNA, 15 bp, Homo sapiens
gagaaattgaaaccc

SEQ ID NO: 1567527 - DNA, 15 bp, Homo sapiens
agaaattgaaaccct

SEQ ID NO: 1567528 - DNA, 15 bp, Homo sapiens
gaaattgaaaccctc

SEQ ID NO: 1567529 - DNA, 15 bp, Homo sapiens
aaattgaaaccctca

SEQ ID NO: 1567530 - DNA, 15 bp, Homo sapiens
aattgaaaccctcat

SEQ ID NO: 1567531 - DNA, 15 bp, Homo sapiens
attgaaaccctcata

SEQ ID NO: 1567532 - DNA, 15 bp, Homo sapiens
ttgaaaccctcatac

SEQ ID NO: 1567533 - DNA, 15 bp, Homo sapiens
tgaaaccctcataca

SEQ ID NO: 1567534 - DNA, 15 bp, Homo sapiens
gaaaccctcatacat

SEQ ID NO: 1567535 - DNA, 15 bp, Homo sapiens
aaaccctcatacatc

SEQ ID NO: 1567536 - DNA, 15 bp, Homo sapiens
aaccctcatacatcg

SEQ ID NO: 1567537 - DNA, 15 bp, Homo sapiens
accctcatacatcgc

SEQ ID NO: 1567538 - DNA, 15 bp, Homo sapiens
ccctcatacatcgct

SEQ ID NO: 1567539 - DNA, 15 bp, Homo sapiens
cctcatacatcgctg

SEQ ID NO: 1567540 - DNA, 15 bp, Homo sapiens
ctcatacatcgctgg

SEQ ID NO: 1567541 - DNA, 15 bp, Homo sapiens
tcatacatcgctggt

SEQ ID NO: 1567542 - DNA, 15 bp, Homo sapiens
catacatcgctggtg

SEQ ID NO: 1567543 - DNA, 15 bp, Homo sapiens
atacatcgctggtgg

SEQ ID NO: 1567544 - DNA, 15 bp, Homo sapiens
tacatcgctggtggg

SEQ ID NO: 1567545 - DNA, 15 bp, Homo sapiens
acatcgctggtggga

SEQ ID NO: 1567546 - DNA, 15 bp, Homo sapiens
catcgctggtgggaa

SEQ ID NO: 1567547 - DNA, 15 bp, Homo sapiens
atcgctggtgggaat

SEQ ID NO: 1567548 - DNA, 15 bp, Homo sapiens
tcgctggtgggaatg

SEQ ID NO: 1567549 - DNA, 15 bp, Homo sapiens
cgctggtgggaatgt

SEQ ID NO: 1567550 - DNA, 15 bp, Homo sapiens
gctggtgggaatgta

SEQ ID NO: 1567551 - DNA, 15 bp, Homo sapiens
ctggtgggaatgtaa

SEQ ID NO: 1567552 - DNA, 15 bp, Homo sapiens
tggtgggaatgtaaa

SEQ ID NO: 1567553 - DNA, 15 bp, Homo sapiens
ggtgggaatgtaaaa

SEQ ID NO: 1567554 - DNA, 15 bp, Homo sapiens
gtgggaatgtaaaat

SEQ ID NO: 1567555 - DNA, 15 bp, Homo sapiens
tgggaatgtaaaata

SEQ ID NO: 1567556 - DNA, 15 bp, Homo sapiens
gggaatgtaaaatag

SEQ ID NO: 1567557 - DNA, 15 bp, Homo sapiens
ggaatgtaaaatagt

SEQ ID NO: 1567558 - DNA, 15 bp, Homo sapiens
gaatgtaaaatagtg

SEQ ID NO: 1567559 - DNA, 15 bp, Homo sapiens
aatgtaaaatagtgc

SEQ ID NO: 1567560 - DNA, 15 bp, Homo sapiens
atgtaaaatagtgca

SEQ ID NO: 1567561 - DNA, 15 bp, Homo sapiens
tgtaaaatagtgcag

SEQ ID NO: 1567562 - DNA, 15 bp, Homo sapiens
gtaaaatagtgcagc

SEQ ID NO: 1567563 - DNA, 15 bp, Homo sapiens
taaaatagtgcagct

SEQ ID NO: 1567564 - DNA, 15 bp, Homo sapiens
aaaatagtgcagctg

SEQ ID NO: 1567565 - DNA, 15 bp, Homo sapiens
aaatagtgcagctgc

SEQ ID NO: 1567566 - DNA, 15 bp, Homo sapiens
aatagtgcagctgct

SEQ ID NO: 1567567 - DNA, 15 bp, Homo sapiens
atagtgcagctgctt

SEQ ID NO: 1567568 - DNA, 15 bp, Homo sapiens
tagtgcagctgcttt

SEQ ID NO: 1567569 - DNA, 15 bp, Homo sapiens
agtgcagctgctttg

SEQ ID NO: 1567570 - DNA, 15 bp, Homo sapiens
gtgcagctgctttgg

SEQ ID NO: 1567571 - DNA, 15 bp, Homo sapiens
tgcagctgctttgga

SEQ ID NO: 1567572 - DNA, 15 bp, Homo sapiens
gcagctgctttggaa

SEQ ID NO: 1567573 - DNA, 15 bp, Homo sapiens
cagctgctttggaaa

SEQ ID NO: 1567574 - DNA, 15 bp, Homo sapiens
agctgctttggaaaa

SEQ ID NO: 1567575 - DNA, 15 bp, Homo sapiens
gctgctttggaaaac

SEQ ID NO: 1567576 - DNA, 15 bp, Homo sapiens
ctgctttggaaaaca

SEQ ID NO: 1567577 - DNA, 15 bp, Homo sapiens
tgctttggaaaacag

SEQ ID NO: 1567578 - DNA, 15 bp, Homo sapiens
gctttggaaaacagg

SEQ ID NO: 1567579 - DNA, 15 bp, Homo sapiens
ctttggaaaacaggc

SEQ ID NO: 1567580 - DNA, 15 bp, Homo sapiens
tttggaaaacaggct

SEQ ID NO: 1567581 - DNA, 15 bp, Homo sapiens
ttggaaaacaggctg

SEQ ID NO: 1567582 - DNA, 15 bp, Homo sapiens
tggaaaacaggctgg

SEQ ID NO: 1567583 - DNA, 15 bp, Homo sapiens
ggaaaacaggctggt

SEQ ID NO: 1567584 - DNA, 15 bp, Homo sapiens
gaaaacaggctggta

SEQ ID NO: 1567585 - DNA, 15 bp, Homo sapiens
aaaacaggctggtag

SEQ ID NO: 1567586 - DNA, 15 bp, Homo sapiens
aaacaggctggtagt

SEQ ID NO: 1567587 - DNA, 15 bp, Homo sapiens
aacaggctggtagtt

SEQ ID NO: 1567588 - DNA, 15 bp, Homo sapiens
acaggctggtagtta

SEQ ID NO: 1567589 - DNA, 15 bp, Homo sapiens
caggctggtagttac

SEQ ID NO: 1567590 - DNA, 15 bp, Homo sapiens
aggctggtagttaca

SEQ ID NO: 1567591 - DNA, 15 bp, Homo sapiens
ggctggtagttacac

SEQ ID NO: 1567592 - DNA, 15 bp, Homo sapiens
gctggtagttacaca

SEQ ID NO: 1567593 - DNA, 15 bp, Homo sapiens
ctggtagttacacaa

SEQ ID NO: 1567594 - DNA, 15 bp, Homo sapiens
tggtagttacacaaa

SEQ ID NO: 1567595 - DNA, 15 bp, Homo sapiens
ggtagttacacaaaa

SEQ ID NO: 1567596 - DNA, 15 bp, Homo sapiens
gtagttacacaaaag

SEQ ID NO: 1567597 - DNA, 15 bp, Homo sapiens
tagttacacaaaagg

SEQ ID NO: 1567598 - DNA, 15 bp, Homo sapiens
agttacacaaaaggc

SEQ ID NO: 1567599 - DNA, 15 bp, Homo sapiens
gttacacaaaaggct

SEQ ID NO: 1567600 - DNA, 15 bp, Homo sapiens
ttacacaaaaggcta

SEQ ID NO: 1567601 - DNA, 15 bp, Homo sapiens
tacacaaaaggctaa

SEQ ID NO: 1567602 - DNA, 15 bp, Homo sapiens
acacaaaaggctaaa

SEQ ID NO: 1567603 - DNA, 15 bp, Homo sapiens
cacaaaaggctaaac

SEQ ID NO: 1567604 - DNA, 15 bp, Homo sapiens
acaaaaggctaaaca

SEQ ID NO: 1567605 - DNA, 15 bp, Homo sapiens
caaaaggctaaacag

SEQ ID NO: 1567606 - DNA, 15 bp, Homo sapiens
aaaaggctaaacaga

SEQ ID NO: 1567607 - DNA, 15 bp, Homo sapiens
aaaggctaaacagaa

SEQ ID NO: 1567608 - DNA, 15 bp, Homo sapiens
aaggctaaacagaat

SEQ ID NO: 1567609 - DNA, 15 bp, Homo sapiens
aggctaaacagaatt

SEQ ID NO: 1567610 - DNA, 15 bp, Homo sapiens
ggctaaacagaatta

SEQ ID NO: 1567611 - DNA, 15 bp, Homo sapiens
gctaaacagaattat

SEQ ID NO: 1567612 - DNA, 15 bp, Homo sapiens
ctaaacagaattatt

SEQ ID NO: 1567613 - DNA, 15 bp, Homo sapiens
taaacagaattatta

SEQ ID NO: 1567614 - DNA, 15 bp, Homo sapiens
aaacagaattattat

SEQ ID NO: 1567615 - DNA, 15 bp, Homo sapiens
aacagaattattatg

SEQ ID NO: 1567616 - DNA, 15 bp, Homo sapiens
acagaattattatgt

SEQ ID NO: 1567617 - DNA, 15 bp, Homo sapiens
cagaattattatgta

SEQ ID NO: 1567618 - DNA, 15 bp, Homo sapiens
agaattattatgtaa

SEQ ID NO: 1567619 - DNA, 15 bp, Homo sapiens
gaattattatgtaat

SEQ ID NO: 1567620 - DNA, 15 bp, Homo sapiens
aattattatgtaatc

SEQ ID NO: 1567621 - DNA, 15 bp, Homo sapiens
attattatgtaatcc

SEQ ID NO: 1567622 - DNA, 15 bp, Homo sapiens
ttattatgtaatcca

SEQ ID NO: 1567623 - DNA, 15 bp, Homo sapiens
tattatgtaatccac

SEQ ID NO: 1567624 - DNA, 15 bp, Homo sapiens
attatgtaatccact

SEQ ID NO: 1567625 - DNA, 15 bp, Homo sapiens
ttatgtaatccacta

SEQ ID NO: 1567626 - DNA, 15 bp, Homo sapiens
tatgtaatccactaa

SEQ ID NO: 1567627 - DNA, 15 bp, Homo sapiens
atgtaatccactaat

SEQ ID NO: 1567628 - DNA, 15 bp, Homo sapiens
tgtaatccactaatt

SEQ ID NO: 1567629 - DNA, 15 bp, Homo sapiens
gtaatccactaattc

SEQ ID NO: 1567630 - DNA, 15 bp, Homo sapiens
taatccactaattct

SEQ ID NO: 1567631 - DNA, 15 bp, Homo sapiens
aatccactaattcta

SEQ ID NO: 1567632 - DNA, 15 bp, Homo sapiens
atccactaattctac

SEQ ID NO: 1567633 - DNA, 15 bp, Homo sapiens
tccactaattctact

SEQ ID NO: 1567634 - DNA, 15 bp, Homo sapiens
ccactaattctactc

SEQ ID NO: 1567635 - DNA, 15 bp, Homo sapiens
cactaattctactcc

SEQ ID NO: 1567636 - DNA, 15 bp, Homo sapiens
actaattctactcct

SEQ ID NO: 1567637 - DNA, 15 bp, Homo sapiens
ctaattctactccta

SEQ ID NO: 1567638 - DNA, 15 bp, Homo sapiens
taattctactcctag

SEQ ID NO: 1567639 - DNA, 15 bp, Homo sapiens
aattctactcctagg

SEQ ID NO: 1567640 - DNA, 15 bp, Homo sapiens
attctactcctaggt

SEQ ID NO: 1567641 - DNA, 15 bp, Homo sapiens
ttctactcctaggta

SEQ ID NO: 1567642 - DNA, 15 bp, Homo sapiens
tctactcctaggtat

SEQ ID NO: 1567643 - DNA, 15 bp, Homo sapiens
ctactcctaggtata

SEQ ID NO: 1567644 - DNA, 15 bp, Homo sapiens
tactcctaggtatat

SEQ ID NO: 1567645 - DNA, 15 bp, Homo sapiens
actcctaggtatata

SEQ ID NO: 1567646 - DNA, 15 bp, Homo sapiens
ctcctaggtatatac

SEQ ID NO: 1567647 - DNA, 15 bp, Homo sapiens
tcctaggtatatacc

SEQ ID NO: 1567648 - DNA, 15 bp, Homo sapiens
cctaggtatataccc

SEQ ID NO: 1567649 - DNA, 15 bp, Homo sapiens
ctaggtatataccca

SEQ ID NO: 1567650 - DNA, 15 bp, Homo sapiens
taggtatatacccaa

SEQ ID NO: 1567651 - DNA, 15 bp, Homo sapiens
aggtatatacccaag

SEQ ID NO: 1567652 - DNA, 15 bp, Homo sapiens
ggtatatacccaaga

SEQ ID NO: 1567653 - DNA, 15 bp, Homo sapiens
gtatatacccaagag

SEQ ID NO: 1567654 - DNA, 15 bp, Homo sapiens
tatacccaagagaaa

SEQ ID NO: 1567655 - DNA, 15 bp, Homo sapiens
agaaatgaaaacatg

SEQ ID NO: 1567656 - DNA, 15 bp, Homo sapiens
gaaatgaaaacatgt

SEQ ID NO: 1567657 - DNA, 15 bp, Homo sapiens
aaatgaaaacatgtc

SEQ ID NO: 1567658 - DNA, 15 bp, Homo sapiens
aatgaaaacatgtcc

SEQ ID NO: 1567659 - DNA, 15 bp, Homo sapiens
atgaaaacatgtcca

SEQ ID NO: 1567660 - DNA, 15 bp, Homo sapiens
tgaaaacatgtccac

SEQ ID NO: 1567661 - DNA, 15 bp, Homo sapiens
gaaaacatgtccaca

SEQ ID NO: 1567662 - DNA, 15 bp, Homo sapiens
aaaacatgtccacac

SEQ ID NO: 1567663 - DNA, 15 bp, Homo sapiens
aaacatgtccacaca

SEQ ID NO: 1567664 - DNA, 15 bp, Homo sapiens
aacatgtccacacaa

SEQ ID NO: 1567665 - DNA, 15 bp, Homo sapiens
acatgtccacacaaa

SEQ ID NO: 1567666 - DNA, 15 bp, Homo sapiens
catgtccacacaaaa

SEQ ID NO: 1567667 - DNA, 15 bp, Homo sapiens
gtccacacaaaaact

SEQ ID NO: 1567668 - DNA, 15 bp, Homo sapiens
tccacacaaaaactt

SEQ ID NO: 1567669 - DNA, 15 bp, Homo sapiens
ccacacaaaaacttg

SEQ ID NO: 1567670 - DNA, 15 bp, Homo sapiens
cacacaaaaacttgt

SEQ ID NO: 1567671 - DNA, 15 bp, Homo sapiens
acacaaaaacttgta

SEQ ID NO: 1567672 - DNA, 15 bp, Homo sapiens
cacaaaaacttgtat

SEQ ID NO: 1567673 - DNA, 15 bp, Homo sapiens
acaaaaacttgtatg

SEQ ID NO: 1567674 - DNA, 15 bp, Homo sapiens
caaaaacttgtatgg

SEQ ID NO: 1567675 - DNA, 15 bp, Homo sapiens
aaaaacttgtatggg

SEQ ID NO: 1567676 - DNA, 15 bp, Homo sapiens
aaaacttgtatgggc

SEQ ID NO: 1567677 - DNA, 15 bp, Homo sapiens
aaacttgtatgggcc

SEQ ID NO: 1567678 - DNA, 15 bp, Homo sapiens
aacttgtatgggccg

SEQ ID NO: 1567679 - DNA, 15 bp, Homo sapiens
acttgtatgggccgg

SEQ ID NO: 1567680 - DNA, 15 bp, Homo sapiens
cttgtatgggccggg

SEQ ID NO: 1567681 - DNA, 15 bp, Homo sapiens
ttgtatgggccgggc

SEQ ID NO: 1567682 - DNA, 15 bp, Homo sapiens
tgtatgggccgggcg

SEQ ID NO: 1567683 - DNA, 15 bp, Homo sapiens
gtatgggccgggcgt

SEQ ID NO: 1567684 - DNA, 15 bp, Homo sapiens
tatgggccgggcgtg

SEQ ID NO: 1567685 - DNA, 15 bp, Homo sapiens
atgggccgggcgtgg

SEQ ID NO: 1567686 - DNA, 15 bp, Homo sapiens
gcgtggtggctcact

SEQ ID NO: 1567687 - DNA, 15 bp, Homo sapiens
cgtggtggctcactc

SEQ ID NO: 1567688 - DNA, 15 bp, Homo sapiens
gtggtggctcactcc

SEQ ID NO: 1567689 - DNA, 15 bp, Homo sapiens
tggtggctcactcct

SEQ ID NO: 1567690 - DNA, 15 bp, Homo sapiens
cctgtaatcccagcc

SEQ ID NO: 1567691 - DNA, 15 bp, Homo sapiens
ctgtaatcccagccc

SEQ ID NO: 1567692 - DNA, 15 bp, Homo sapiens
tgtaatcccagccct

SEQ ID NO: 1567693 - DNA, 15 bp, Homo sapiens
agccctttgggaggc

SEQ ID NO: 1567694 - DNA, 15 bp, Homo sapiens
gccctttgggaggct

SEQ ID NO: 1567695 - DNA, 15 bp, Homo sapiens
ccctttgggaggctg

SEQ ID NO: 1567696 - DNA, 15 bp, Homo sapiens
cctttgggaggctga

SEQ ID NO: 1567697 - DNA, 15 bp, Homo sapiens
gaagtgggaggatcc

SEQ ID NO: 1567698 - DNA, 15 bp, Homo sapiens
aagtgggaggatccc

SEQ ID NO: 1567699 - DNA, 15 bp, Homo sapiens
agtgggaggatccct

SEQ ID NO: 1567700 - DNA, 15 bp, Homo sapiens
gtgggaggatccctg

SEQ ID NO: 1567701 - DNA, 15 bp, Homo sapiens
tgggaggatccctgg

SEQ ID NO: 1567702 - DNA, 15 bp, Homo sapiens
gggaggatccctgga

SEQ ID NO: 1567703 - DNA, 15 bp, Homo sapiens
ggaggatccctggag

SEQ ID NO: 1567704 - DNA, 15 bp, Homo sapiens
gaggatccctggagt

SEQ ID NO: 1567705 - DNA, 15 bp, Homo sapiens
aggatccctggagtt

SEQ ID NO: 1567706 - DNA, 15 bp, Homo sapiens
ggatccctggagttc

SEQ ID NO: 1567707 - DNA, 15 bp, Homo sapiens
gatccctggagttca

SEQ ID NO: 1567708 - DNA, 15 bp, Homo sapiens
atccctggagttcag

SEQ ID NO: 1567709 - DNA, 15 bp, Homo sapiens
tccctggagttcagg

SEQ ID NO: 1567710 - DNA, 15 bp, Homo sapiens
ccctggagttcagga

SEQ ID NO: 1567711 - DNA, 15 bp, Homo sapiens
cctggagttcaggag

SEQ ID NO: 1567712 - DNA, 15 bp, Homo sapiens
ctggagttcaggagt

SEQ ID NO: 1567713 - DNA, 15 bp, Homo sapiens
tggagttcaggagtt

SEQ ID NO: 1567714 - DNA, 15 bp, Homo sapiens
ggagttcaggagttt

SEQ ID NO: 1567715 - DNA, 15 bp, Homo sapiens
agtttgagactagct

SEQ ID NO: 1567716 - DNA, 15 bp, Homo sapiens
gtttgagactagctg

SEQ ID NO: 1567717 - DNA, 15 bp, Homo sapiens
tttgagactagctga

SEQ ID NO: 1567718 - DNA, 15 bp, Homo sapiens
ttgagactagctgac

SEQ ID NO: 1567719 - DNA, 15 bp, Homo sapiens
tgagactagctgacc

SEQ ID NO: 1567720 - DNA, 15 bp, Homo sapiens
gagactagctgacca

SEQ ID NO: 1567721 - DNA, 15 bp, Homo sapiens
agactagctgaccaa

SEQ ID NO: 1567722 - DNA, 15 bp, Homo sapiens
gactagctgaccaac

SEQ ID NO: 1567723 - DNA, 15 bp, Homo sapiens
actagctgaccaaca

SEQ ID NO: 1567724 - DNA, 15 bp, Homo sapiens
ctagctgaccaacat

SEQ ID NO: 1567725 - DNA, 15 bp, Homo sapiens
tagctgaccaacatg

SEQ ID NO: 1567726 - DNA, 15 bp, Homo sapiens
agctgaccaacatgg

SEQ ID NO: 1567727 - DNA, 15 bp, Homo sapiens
gctgaccaacatggc

SEQ ID NO: 1567728 - DNA, 15 bp, Homo sapiens
ctgaccaacatggca

SEQ ID NO: 1567729 - DNA, 15 bp, Homo sapiens
tgaccaacatggcaa

SEQ ID NO: 1567730 - DNA, 15 bp, Homo sapiens
gaccaacatggcaag

SEQ ID NO: 1567731 - DNA, 15 bp, Homo sapiens
accaacatggcaaga

SEQ ID NO: 1567732 - DNA, 15 bp, Homo sapiens
ccaacatggcaagac

SEQ ID NO: 1567733 - DNA, 15 bp, Homo sapiens
caacatggcaagacc

SEQ ID NO: 1567734 - DNA, 15 bp, Homo sapiens
aacatggcaagaccc

SEQ ID NO: 1567735 - DNA, 15 bp, Homo sapiens
acatggcaagaccct

SEQ ID NO: 1567736 - DNA, 15 bp, Homo sapiens
catggcaagaccctg

SEQ ID NO: 1567737 - DNA, 15 bp, Homo sapiens
atggcaagaccctgt

SEQ ID NO: 1567738 - DNA, 15 bp, Homo sapiens
tggcaagaccctgtc

SEQ ID NO: 1567739 - DNA, 15 bp, Homo sapiens
ggcaagaccctgtct

SEQ ID NO: 1567740 - DNA, 15 bp, Homo sapiens
tgtctctacaaaaac

SEQ ID NO: 1567741 - DNA, 15 bp, Homo sapiens
gtctctacaaaaacc

SEQ ID NO: 1567742 - DNA, 15 bp, Homo sapiens
tctctacaaaaacca

SEQ ID NO: 1567743 - DNA, 15 bp, Homo sapiens
ctctacaaaaaccac

SEQ ID NO: 1567744 - DNA, 15 bp, Homo sapiens
tctacaaaaaccaca

SEQ ID NO: 1567745 - DNA, 15 bp, Homo sapiens
ctacaaaaaccacac

SEQ ID NO: 1567746 - DNA, 15 bp, Homo sapiens
tacaaaaaccacaca

SEQ ID NO: 1567747 - DNA, 15 bp, Homo sapiens
acaaaaaccacacaa

SEQ ID NO: 1567748 - DNA, 15 bp, Homo sapiens
caaaaaccacacaaa

SEQ ID NO: 1567749 - DNA, 15 bp, Homo sapiens
aaaaaccacacaaaa

SEQ ID NO: 1567750 - DNA, 15 bp, Homo sapiens
aaaaccacacaaaaa

SEQ ID NO: 1567751 - DNA, 15 bp, Homo sapiens
aaaccacacaaaaat

SEQ ID NO: 1567752 - DNA, 15 bp, Homo sapiens
aaccacacaaaaatt

SEQ ID NO: 1567753 - DNA, 15 bp, Homo sapiens
accacacaaaaatta

SEQ ID NO: 1567754 - DNA, 15 bp, Homo sapiens
ccacacaaaaattag

SEQ ID NO: 1567755 - DNA, 15 bp, Homo sapiens
cacacaaaaattagc

SEQ ID NO: 1567756 - DNA, 15 bp, Homo sapiens
caaaaattagctgga

SEQ ID NO: 1567757 - DNA, 15 bp, Homo sapiens
aaaaattagctggac

SEQ ID NO: 1567758 - DNA, 15 bp, Homo sapiens
aaaattagctggaca

SEQ ID NO: 1567759 - DNA, 15 bp, Homo sapiens
aaattagctggacat

SEQ ID NO: 1567760 - DNA, 15 bp, Homo sapiens
aattagctggacatg

SEQ ID NO: 1567761 - DNA, 15 bp, Homo sapiens
attagctggacatgg

SEQ ID NO: 1567762 - DNA, 15 bp, Homo sapiens
ttagctggacatggt

SEQ ID NO: 1567763 - DNA, 15 bp, Homo sapiens
tagctggacatggtg

SEQ ID NO: 1567764 - DNA, 15 bp, Homo sapiens
agctggacatggtga

SEQ ID NO: 1567765 - DNA, 15 bp, Homo sapiens
gctggacatggtgat

SEQ ID NO: 1567766 - DNA, 15 bp, Homo sapiens
ctggacatggtgata

SEQ ID NO: 1567767 - DNA, 15 bp, Homo sapiens
tggacatggtgataa

SEQ ID NO: 1567768 - DNA, 15 bp, Homo sapiens
ggacatggtgataag

SEQ ID NO: 1567769 - DNA, 15 bp, Homo sapiens
gacatggtgataagc

SEQ ID NO: 1567770 - DNA, 15 bp, Homo sapiens
acatggtgataagca

SEQ ID NO: 1567771 - DNA, 15 bp, Homo sapiens
catggtgataagcac

SEQ ID NO: 1567772 - DNA, 15 bp, Homo sapiens
atggtgataagcacc

SEQ ID NO: 1567773 - DNA, 15 bp, Homo sapiens
tggtgataagcacct

SEQ ID NO: 1567774 - DNA, 15 bp, Homo sapiens
ggtgataagcacctg

SEQ ID NO: 1567775 - DNA, 15 bp, Homo sapiens
gtgataagcacctgt

SEQ ID NO: 1567776 - DNA, 15 bp, Homo sapiens
tgataagcacctgta

SEQ ID NO: 1567777 - DNA, 15 bp, Homo sapiens
gataagcacctgtag

SEQ ID NO: 1567778 - DNA, 15 bp, Homo sapiens
ataagcacctgtagt

SEQ ID NO: 1567779 - DNA, 15 bp, Homo sapiens
taagcacctgtagtc

SEQ ID NO: 1567780 - DNA, 15 bp, Homo sapiens
aagcacctgtagtcc

SEQ ID NO: 1567781 - DNA, 15 bp, Homo sapiens
agcacctgtagtccc

SEQ ID NO: 1567782 - DNA, 15 bp, Homo sapiens
gctacttgggaggcg

SEQ ID NO: 1567783 - DNA, 15 bp, Homo sapiens
ctacttgggaggcgg

SEQ ID NO: 1567784 - DNA, 15 bp, Homo sapiens
tacttgggaggcgga

SEQ ID NO: 1567785 - DNA, 15 bp, Homo sapiens
acttgggaggcggag

SEQ ID NO: 1567786 - DNA, 15 bp, Homo sapiens
cttgggaggcggagg

SEQ ID NO: 1567787 - DNA, 15 bp, Homo sapiens
ttgggaggcggaggt

SEQ ID NO: 1567788 - DNA, 15 bp, Homo sapiens
tgggaggcggaggtg

SEQ ID NO: 1567789 - DNA, 15 bp, Homo sapiens
gggaggcggaggtgg

SEQ ID NO: 1567790 - DNA, 15 bp, Homo sapiens
ggaggcggaggtggg

SEQ ID NO: 1567791 - DNA, 15 bp, Homo sapiens
gaggcggaggtggga

SEQ ID NO: 1567792 - DNA, 15 bp, Homo sapiens
aggcggaggtgggag

SEQ ID NO: 1567793 - DNA, 15 bp, Homo sapiens
ggcggaggtgggagg

SEQ ID NO: 1567794 - DNA, 15 bp, Homo sapiens
gcggaggtgggagga

SEQ ID NO: 1567795 - DNA, 15 bp, Homo sapiens
cggaggtgggaggat

SEQ ID NO: 1567796 - DNA, 15 bp, Homo sapiens
ggaggtgggaggatt

SEQ ID NO: 1567797 - DNA, 15 bp, Homo sapiens
gaggtgggaggatta

SEQ ID NO: 1567798 - DNA, 15 bp, Homo sapiens
cttgagcccaggagg

SEQ ID NO: 1567799 - DNA, 15 bp, Homo sapiens
ttgagcccaggaggc

SEQ ID NO: 1567800 - DNA, 15 bp, Homo sapiens
tgagcccaggaggca

SEQ ID NO: 1567801 - DNA, 15 bp, Homo sapiens
gagcccaggaggcag

SEQ ID NO: 1567802 - DNA, 15 bp, Homo sapiens
agcccaggaggcaga

SEQ ID NO: 1567803 - DNA, 15 bp, Homo sapiens
gcccaggaggcagag

SEQ ID NO: 1567804 - DNA, 15 bp, Homo sapiens
cagtgagcagagatg

SEQ ID NO: 1567805 - DNA, 15 bp, Homo sapiens
agtgagcagagatga

SEQ ID NO: 1567806 - DNA, 15 bp, Homo sapiens
gtgagcagagatgac

SEQ ID NO: 1567807 - DNA, 15 bp, Homo sapiens
tgagcagagatgaca

SEQ ID NO: 1567808 - DNA, 15 bp, Homo sapiens
gagcagagatgacac

SEQ ID NO: 1567809 - DNA, 15 bp, Homo sapiens
agcagagatgacacc

SEQ ID NO: 1567810 - DNA, 15 bp, Homo sapiens
gcagagatgacacca

SEQ ID NO: 1567811 - DNA, 15 bp, Homo sapiens
cagagatgacaccac

SEQ ID NO: 1567812 - DNA, 15 bp, Homo sapiens
agagatgacaccact

SEQ ID NO: 1567813 - DNA, 15 bp, Homo sapiens
gagatgacaccactg

SEQ ID NO: 1567814 - DNA, 15 bp, Homo sapiens
agatgacaccactgc

SEQ ID NO: 1567815 - DNA, 15 bp, Homo sapiens
actccaacctgggta

SEQ ID NO: 1567816 - DNA, 15 bp, Homo sapiens
ctccaacctgggtaa

SEQ ID NO: 1567817 - DNA, 15 bp, Homo sapiens
tccaacctgggtaac

SEQ ID NO: 1567818 - DNA, 15 bp, Homo sapiens
ccaacctgggtaaca

SEQ ID NO: 1567819 - DNA, 15 bp, Homo sapiens
caacctgggtaacag

SEQ ID NO: 1567820 - DNA, 15 bp, Homo sapiens
aacctgggtaacaga

SEQ ID NO: 1567821 - DNA, 15 bp, Homo sapiens
acctgggtaacagag

SEQ ID NO: 1567822 - DNA, 15 bp, Homo sapiens
cctgggtaacagagc

SEQ ID NO: 1567823 - DNA, 15 bp, Homo sapiens
ctgggtaacagagca

SEQ ID NO: 1567824 - DNA, 15 bp, Homo sapiens
tgggtaacagagcaa

SEQ ID NO: 1567825 - DNA, 15 bp, Homo sapiens
gggtaacagagcaat

SEQ ID NO: 1567826 - DNA, 15 bp, Homo sapiens
ggtaacagagcaata

SEQ ID NO: 1567827 - DNA, 15 bp, Homo sapiens
gtaacagagcaatac

SEQ ID NO: 1567828 - DNA, 15 bp, Homo sapiens
taacagagcaatacc

SEQ ID NO: 1567829 - DNA, 15 bp, Homo sapiens
aacagagcaataccc

SEQ ID NO: 1567830 - DNA, 15 bp, Homo sapiens
acagagcaataccct

SEQ ID NO: 1567831 - DNA, 15 bp, Homo sapiens
cagagcaataccctg

SEQ ID NO: 1567832 - DNA, 15 bp, Homo sapiens
agagcaataccctgt

SEQ ID NO: 1567833 - DNA, 15 bp, Homo sapiens
gagcaataccctgtc

SEQ ID NO: 1567834 - DNA, 15 bp, Homo sapiens
agcaataccctgtct

SEQ ID NO: 1567835 - DNA, 15 bp, Homo sapiens
gcaataccctgtctc

SEQ ID NO: 1567836 - DNA, 15 bp, Homo sapiens
caataccctgtctca

SEQ ID NO: 1567837 - DNA, 15 bp, Homo sapiens
aataccctgtctcaa

SEQ ID NO: 1567838 - DNA, 15 bp, Homo sapiens
aaaaaaaaaaaatgc

SEQ ID NO: 1567839 - DNA, 15 bp, Homo sapiens
aaaaaaatgctgggg

SEQ ID NO: 1567840 - DNA, 15 bp, Homo sapiens
aaaaaatgctggggg

SEQ ID NO: 1567841 - DNA, 15 bp, Homo sapiens
aaaaatgctgggggg

SEQ ID NO: 1567842 - DNA, 15 bp, Homo sapiens
aaaatgctgggggga

SEQ ID NO: 1567843 - DNA, 15 bp, Homo sapiens
aaatgctggggggat

SEQ ID NO: 1567844 - DNA, 15 bp, Homo sapiens
aatgctggggggatg

SEQ ID NO: 1567845 - DNA, 15 bp, Homo sapiens
atgctggggggatga

SEQ ID NO: 1567846 - DNA, 15 bp, Homo sapiens
tgctggggggatgat

SEQ ID NO: 1567847 - DNA, 15 bp, Homo sapiens
gctggggggatgatg

SEQ ID NO: 1567848 - DNA, 15 bp, Homo sapiens
ctggggggatgatga

SEQ ID NO: 1567849 - DNA, 15 bp, Homo sapiens
tggggggatgatgaa

SEQ ID NO: 1567850 - DNA, 15 bp, Homo sapiens
ggggggatgatgaag

SEQ ID NO: 1567851 - DNA, 15 bp, Homo sapiens
gggggatgatgaaga

SEQ ID NO: 1567852 - DNA, 15 bp, Homo sapiens
ggggatgatgaagat

SEQ ID NO: 1567853 - DNA, 15 bp, Homo sapiens
gggatgatgaagata

SEQ ID NO: 1567854 - DNA, 15 bp, Homo sapiens
ggatgatgaagatag

SEQ ID NO: 1567855 - DNA, 15 bp, Homo sapiens
gatgatgaagatagg

SEQ ID NO: 1567856 - DNA, 15 bp, Homo sapiens
atgatgaagataggc

SEQ ID NO: 1567857 - DNA, 15 bp, Homo sapiens
tgatgaagataggca

SEQ ID NO: 1567858 - DNA, 15 bp, Homo sapiens
gatgaagataggcac

SEQ ID NO: 1567859 - DNA, 15 bp, Homo sapiens
atgaagataggcaca

SEQ ID NO: 1567860 - DNA, 15 bp, Homo sapiens
tgaagataggcacag

SEQ ID NO: 1567861 - DNA, 15 bp, Homo sapiens
gaagataggcacagt

SEQ ID NO: 1567862 - DNA, 15 bp, Homo sapiens
aagataggcacagtg

SEQ ID NO: 1567863 - DNA, 15 bp, Homo sapiens
agataggcacagtgg

SEQ ID NO: 1567864 - DNA, 15 bp, Homo sapiens
gataggcacagtggc

SEQ ID NO: 1567865 - DNA, 15 bp, Homo sapiens
ataggcacagtggct

SEQ ID NO: 1567866 - DNA, 15 bp, Homo sapiens
taggcacagtggctc

SEQ ID NO: 1567867 - DNA, 15 bp, Homo sapiens
tcaagcctgtaatct

SEQ ID NO: 1567868 - DNA, 15 bp, Homo sapiens
caagcctgtaatctg

SEQ ID NO: 1567869 - DNA, 15 bp, Homo sapiens
aagcctgtaatctgt

SEQ ID NO: 1567870 - DNA, 15 bp, Homo sapiens
agcctgtaatctgta

SEQ ID NO: 1567871 - DNA, 15 bp, Homo sapiens
gcctgtaatctgtaa

SEQ ID NO: 1567872 - DNA, 15 bp, Homo sapiens
cctgtaatctgtaat

SEQ ID NO: 1567873 - DNA, 15 bp, Homo sapiens
ctgtaatctgtaatc

SEQ ID NO: 1567874 - DNA, 15 bp, Homo sapiens
tgtaatctgtaatct

SEQ ID NO: 1567875 - DNA, 15 bp, Homo sapiens
gtaatctgtaatctc

SEQ ID NO: 1567876 - DNA, 15 bp, Homo sapiens
taatctgtaatctca

SEQ ID NO: 1567877 - DNA, 15 bp, Homo sapiens
aatctgtaatctcag

SEQ ID NO: 1567878 - DNA, 15 bp, Homo sapiens
ctgtaatctcagcat

SEQ ID NO: 1567879 - DNA, 15 bp, Homo sapiens
tgtaatctcagcatt

SEQ ID NO: 1567880 - DNA, 15 bp, Homo sapiens
gtaatctcagcattt

SEQ ID NO: 1567881 - DNA, 15 bp, Homo sapiens
taatctcagcatttt

SEQ ID NO: 1567882 - DNA, 15 bp, Homo sapiens
aatctcagcattttg

SEQ ID NO: 1567883 - DNA, 15 bp, Homo sapiens
atctcagcattttgg

SEQ ID NO: 1567884 - DNA, 15 bp, Homo sapiens
tctcagcattttggg

SEQ ID NO: 1567885 - DNA, 15 bp, Homo sapiens
ctcagcattttggga

SEQ ID NO: 1567886 - DNA, 15 bp, Homo sapiens
tcagcattttgggag

SEQ ID NO: 1567887 - DNA, 15 bp, Homo sapiens
aggctgaggcagcag

SEQ ID NO: 1567888 - DNA, 15 bp, Homo sapiens
ggctgaggcagcagg

SEQ ID NO: 1567889 - DNA, 15 bp, Homo sapiens
gctgaggcagcagga

SEQ ID NO: 1567890 - DNA, 15 bp, Homo sapiens
ctgaggcagcaggat

SEQ ID NO: 1567891 - DNA, 15 bp, Homo sapiens
tgaggcagcaggatc

SEQ ID NO: 1567892 - DNA, 15 bp, Homo sapiens
gaggcagcaggatca

SEQ ID NO: 1567893 - DNA, 15 bp, Homo sapiens
aggcagcaggatcac

SEQ ID NO: 1567894 - DNA, 15 bp, Homo sapiens
ggcagcaggatcact

SEQ ID NO: 1567895 - DNA, 15 bp, Homo sapiens
gcagcaggatcactt

SEQ ID NO: 1567896 - DNA, 15 bp, Homo sapiens
cagcaggatcacttg

SEQ ID NO: 1567897 - DNA, 15 bp, Homo sapiens
agcaggatcacttga

SEQ ID NO: 1567898 - DNA, 15 bp, Homo sapiens
gcaggatcacttgag

SEQ ID NO: 1567899 - DNA, 15 bp, Homo sapiens
caggatcacttgagg

SEQ ID NO: 1567900 - DNA, 15 bp, Homo sapiens
cttgaggccaggagc

SEQ ID NO: 1567901 - DNA, 15 bp, Homo sapiens
ttgaggccaggagct

SEQ ID NO: 1567902 - DNA, 15 bp, Homo sapiens
tgaggccaggagctt

SEQ ID NO: 1567903 - DNA, 15 bp, Homo sapiens
gaggccaggagcttg

SEQ ID NO: 1567904 - DNA, 15 bp, Homo sapiens
aggccaggagcttga

SEQ ID NO: 1567905 - DNA, 15 bp, Homo sapiens
ggccaggagcttgag

SEQ ID NO: 1567906 - DNA, 15 bp, Homo sapiens
gccaggagcttgaga

SEQ ID NO: 1567907 - DNA, 15 bp, Homo sapiens
ccaggagcttgagac

SEQ ID NO: 1567908 - DNA, 15 bp, Homo sapiens
caggagcttgagacc

SEQ ID NO: 1567909 - DNA, 15 bp, Homo sapiens
aggagcttgagacca

SEQ ID NO: 1567910 - DNA, 15 bp, Homo sapiens
ggagcttgagaccag

SEQ ID NO: 1567911 - DNA, 15 bp, Homo sapiens
gagcttgagaccaga

SEQ ID NO: 1567912 - DNA, 15 bp, Homo sapiens
agcttgagaccagac

SEQ ID NO: 1567913 - DNA, 15 bp, Homo sapiens
gcttgagaccagact

SEQ ID NO: 1567914 - DNA, 15 bp, Homo sapiens
cttgagaccagacta

SEQ ID NO: 1567915 - DNA, 15 bp, Homo sapiens
ttgagaccagactag

SEQ ID NO: 1567916 - DNA, 15 bp, Homo sapiens
tgagaccagactagg

SEQ ID NO: 1567917 - DNA, 15 bp, Homo sapiens
gagaccagactaggc

SEQ ID NO: 1567918 - DNA, 15 bp, Homo sapiens
agaccagactaggca

SEQ ID NO: 1567919 - DNA, 15 bp, Homo sapiens
gaccagactaggcaa

SEQ ID NO: 1567920 - DNA, 15 bp, Homo sapiens
accagactaggcaac

SEQ ID NO: 1567921 - DNA, 15 bp, Homo sapiens
ccagactaggcaaca

SEQ ID NO: 1567922 - DNA, 15 bp, Homo sapiens
cagactaggcaacat

SEQ ID NO: 1567923 - DNA, 15 bp, Homo sapiens
agactaggcaacata

SEQ ID NO: 1567924 - DNA, 15 bp, Homo sapiens
gactaggcaacatat

SEQ ID NO: 1567925 - DNA, 15 bp, Homo sapiens
actaggcaacatatt

SEQ ID NO: 1567926 - DNA, 15 bp, Homo sapiens
ctaggcaacatatta

SEQ ID NO: 1567927 - DNA, 15 bp, Homo sapiens
taggcaacatattaa

SEQ ID NO: 1567928 - DNA, 15 bp, Homo sapiens
aggcaacatattaag

SEQ ID NO: 1567929 - DNA, 15 bp, Homo sapiens
ggcaacatattaaga

SEQ ID NO: 1567930 - DNA, 15 bp, Homo sapiens
gcaacatattaagac

SEQ ID NO: 1567931 - DNA, 15 bp, Homo sapiens
caacatattaagaca

SEQ ID NO: 1567932 - DNA, 15 bp, Homo sapiens
aacatattaagacaa

SEQ ID NO: 1567933 - DNA, 15 bp, Homo sapiens
acatattaagacaaa

SEQ ID NO: 1567934 - DNA, 15 bp, Homo sapiens
catattaagacaaaa

SEQ ID NO: 1567935 - DNA, 15 bp, Homo sapiens
atattaagacaaaaa

SEQ ID NO: 1567936 - DNA, 15 bp, Homo sapiens
tattaagacaaaaaa

SEQ ID NO: 1567937 - DNA, 15 bp, Homo sapiens
attaagacaaaaaaa

SEQ ID NO: 1567938 - DNA, 15 bp, Homo sapiens
ttaagacaaaaaaat

SEQ ID NO: 1567939 - DNA, 15 bp, Homo sapiens
taagacaaaaaaata

SEQ ID NO: 1567940 - DNA, 15 bp, Homo sapiens
aagacaaaaaaatac

SEQ ID NO: 1567941 - DNA, 15 bp, Homo sapiens
agacaaaaaaataca

SEQ ID NO: 1567942 - DNA, 15 bp, Homo sapiens
gacaaaaaaatacaa

SEQ ID NO: 1567943 - DNA, 15 bp, Homo sapiens
aaaaaaatacaaaat

SEQ ID NO: 1567944 - DNA, 15 bp, Homo sapiens
aaaaaatacaaaata

SEQ ID NO: 1567945 - DNA, 15 bp, Homo sapiens
aaaatacaaaatata

SEQ ID NO: 1567946 - DNA, 15 bp, Homo sapiens
aaatacaaaatatag

SEQ ID NO: 1567947 - DNA, 15 bp, Homo sapiens
aatacaaaatatagc

SEQ ID NO: 1567948 - DNA, 15 bp, Homo sapiens
atacaaaatatagct

SEQ ID NO: 1567949 - DNA, 15 bp, Homo sapiens
tacaaaatatagctg

SEQ ID NO: 1567950 - DNA, 15 bp, Homo sapiens
acaaaatatagctgg

SEQ ID NO: 1567951 - DNA, 15 bp, Homo sapiens
caaaatatagctggg

SEQ ID NO: 1567952 - DNA, 15 bp, Homo sapiens
aaaatatagctggga

SEQ ID NO: 1567953 - DNA, 15 bp, Homo sapiens
aaatatagctgggag

SEQ ID NO: 1567954 - DNA, 15 bp, Homo sapiens
aatatagctgggagt

SEQ ID NO: 1567955 - DNA, 15 bp, Homo sapiens
atatagctgggagtg

SEQ ID NO: 1567956 - DNA, 15 bp, Homo sapiens
tatagctgggagtgg

SEQ ID NO: 1567957 - DNA, 15 bp, Homo sapiens
atagctgggagtggt

SEQ ID NO: 1567958 - DNA, 15 bp, Homo sapiens
ctgggagtggtggca

SEQ ID NO: 1567959 - DNA, 15 bp, Homo sapiens
tgggagtggtggcat

SEQ ID NO: 1567960 - DNA, 15 bp, Homo sapiens
gggagtggtggcatg

SEQ ID NO: 1567961 - DNA, 15 bp, Homo sapiens
ggagtggtggcatgt

SEQ ID NO: 1567962 - DNA, 15 bp, Homo sapiens
gagtggtggcatgtg

SEQ ID NO: 1567963 - DNA, 15 bp, Homo sapiens
agtggtggcatgtgt

SEQ ID NO: 1567964 - DNA, 15 bp, Homo sapiens
gtggtggcatgtgtc

SEQ ID NO: 1567965 - DNA, 15 bp, Homo sapiens
tggtggcatgtgtct

SEQ ID NO: 1567966 - DNA, 15 bp, Homo sapiens
ggtggcatgtgtctg

SEQ ID NO: 1567967 - DNA, 15 bp, Homo sapiens
gtggcatgtgtctgt

SEQ ID NO: 1567968 - DNA, 15 bp, Homo sapiens
tggcatgtgtctgta

SEQ ID NO: 1567969 - DNA, 15 bp, Homo sapiens
ggcatgtgtctgtat

SEQ ID NO: 1567970 - DNA, 15 bp, Homo sapiens
gcatgtgtctgtatt

SEQ ID NO: 1567971 - DNA, 15 bp, Homo sapiens
catgtgtctgtattc

SEQ ID NO: 1567972 - DNA, 15 bp, Homo sapiens
atgtgtctgtattcc

SEQ ID NO: 1567973 - DNA, 15 bp, Homo sapiens
tgtgtctgtattccc

SEQ ID NO: 1567974 - DNA, 15 bp, Homo sapiens
gtgtctgtattccca

SEQ ID NO: 1567975 - DNA, 15 bp, Homo sapiens
tgtctgtattcccag

SEQ ID NO: 1567976 - DNA, 15 bp, Homo sapiens
gtctgtattcccagc

SEQ ID NO: 1567977 - DNA, 15 bp, Homo sapiens
tctgtattcccagct

SEQ ID NO: 1567978 - DNA, 15 bp, Homo sapiens
ctgtattcccagcta

SEQ ID NO: 1567979 - DNA, 15 bp, Homo sapiens
tgtattcccagctac

SEQ ID NO: 1567980 - DNA, 15 bp, Homo sapiens
gtattcccagctact

SEQ ID NO: 1567981 - DNA, 15 bp, Homo sapiens
gctgaggtgggaggg

SEQ ID NO: 1567982 - DNA, 15 bp, Homo sapiens
ctgaggtgggagggt

SEQ ID NO: 1567983 - DNA, 15 bp, Homo sapiens
tgaggtgggagggtc

SEQ ID NO: 1567984 - DNA, 15 bp, Homo sapiens
gaggtgggagggtct

SEQ ID NO: 1567985 - DNA, 15 bp, Homo sapiens
aggtgggagggtctg

SEQ ID NO: 1567986 - DNA, 15 bp, Homo sapiens
ggtgggagggtctga

SEQ ID NO: 1567987 - DNA, 15 bp, Homo sapiens
gtgggagggtctgag

SEQ ID NO: 1567988 - DNA, 15 bp, Homo sapiens
tgggagggtctgagg

SEQ ID NO: 1567989 - DNA, 15 bp, Homo sapiens
gggagggtctgaggc

SEQ ID NO: 1567990 - DNA, 15 bp, Homo sapiens
ggagggtctgaggct

SEQ ID NO: 1567991 - DNA, 15 bp, Homo sapiens
gagggtctgaggctg

SEQ ID NO: 1567992 - DNA, 15 bp, Homo sapiens
agggtctgaggctgc

SEQ ID NO: 1567993 - DNA, 15 bp, Homo sapiens
gggtctgaggctgca

SEQ ID NO: 1567994 - DNA, 15 bp, Homo sapiens
ggtctgaggctgcag

SEQ ID NO: 1567995 - DNA, 15 bp, Homo sapiens
tctgaggctgcagta

SEQ ID NO: 1567996 - DNA, 15 bp, Homo sapiens
ctgaggctgcagtac

SEQ ID NO: 1567997 - DNA, 15 bp, Homo sapiens
tgaggctgcagtaca

SEQ ID NO: 1567998 - DNA, 15 bp, Homo sapiens
gaggctgcagtacaa

SEQ ID NO: 1567999 - DNA, 15 bp, Homo sapiens
aggctgcagtacaag

SEQ ID NO: 1568000 - DNA, 15 bp, Homo sapiens
ggctgcagtacaagg

SEQ ID NO: 1568001 - DNA, 15 bp, Homo sapiens
gctgcagtacaaggt

SEQ ID NO: 1568002 - DNA, 15 bp, Homo sapiens
ctgcagtacaaggtg

SEQ ID NO: 1568003 - DNA, 15 bp, Homo sapiens
tgcagtacaaggtgg

SEQ ID NO: 1568004 - DNA, 15 bp, Homo sapiens
gcagtacaaggtggc

SEQ ID NO: 1568005 - DNA, 15 bp, Homo sapiens
cagtacaaggtggca

SEQ ID NO: 1568006 - DNA, 15 bp, Homo sapiens
agtacaaggtggcac

SEQ ID NO: 1568007 - DNA, 15 bp, Homo sapiens
gtacaaggtggcacc

SEQ ID NO: 1568008 - DNA, 15 bp, Homo sapiens
tacaaggtggcacca

SEQ ID NO: 1568009 - DNA, 15 bp, Homo sapiens
acaaggtggcaccac

SEQ ID NO: 1568010 - DNA, 15 bp, Homo sapiens
caaggtggcaccact

SEQ ID NO: 1568011 - DNA, 15 bp, Homo sapiens
aaggtggcaccactg

SEQ ID NO: 1568012 - DNA, 15 bp, Homo sapiens
aggtggcaccactgt

SEQ ID NO: 1568013 - DNA, 15 bp, Homo sapiens
ggtggcaccactgta

SEQ ID NO: 1568014 - DNA, 15 bp, Homo sapiens
gtggcaccactgtaa

SEQ ID NO: 1568015 - DNA, 15 bp, Homo sapiens
tggcaccactgtaat

SEQ ID NO: 1568016 - DNA, 15 bp, Homo sapiens
ggcaccactgtaatc

SEQ ID NO: 1568017 - DNA, 15 bp, Homo sapiens
gcaccactgtaatcc

SEQ ID NO: 1568018 - DNA, 15 bp, Homo sapiens
caccactgtaatcca

SEQ ID NO: 1568019 - DNA, 15 bp, Homo sapiens
accactgtaatccag

SEQ ID NO: 1568020 - DNA, 15 bp, Homo sapiens
ccactgtaatccagc

SEQ ID NO: 1568021 - DNA, 15 bp, Homo sapiens
cactgtaatccagct

SEQ ID NO: 1568022 - DNA, 15 bp, Homo sapiens
actgtaatccagctt

SEQ ID NO: 1568023 - DNA, 15 bp, Homo sapiens
ctgtaatccagcttg

SEQ ID NO: 1568024 - DNA, 15 bp, Homo sapiens
tgtaatccagcttgg

SEQ ID NO: 1568025 - DNA, 15 bp, Homo sapiens
gtaatccagcttggg

SEQ ID NO: 1568026 - DNA, 15 bp, Homo sapiens
taatccagcttgggc

SEQ ID NO: 1568027 - DNA, 15 bp, Homo sapiens
aatccagcttgggcg

SEQ ID NO: 1568028 - DNA, 15 bp, Homo sapiens
atccagcttgggcgg

SEQ ID NO: 1568029 - DNA, 15 bp, Homo sapiens
tccagcttgggcggc

SEQ ID NO: 1568030 - DNA, 15 bp, Homo sapiens
ccagcttgggcggca

SEQ ID NO: 1568031 - DNA, 15 bp, Homo sapiens
cagcttgggcggcag

SEQ ID NO: 1568032 - DNA, 15 bp, Homo sapiens
agcttgggcggcaga

SEQ ID NO: 1568033 - DNA, 15 bp, Homo sapiens
gcttgggcggcagag

SEQ ID NO: 1568034 - DNA, 15 bp, Homo sapiens
cttgggcggcagagg

SEQ ID NO: 1568035 - DNA, 15 bp, Homo sapiens
ttgggcggcagagga

SEQ ID NO: 1568036 - DNA, 15 bp, Homo sapiens
tgggcggcagaggaa

SEQ ID NO: 1568037 - DNA, 15 bp, Homo sapiens
gggcggcagaggaag

SEQ ID NO: 1568038 - DNA, 15 bp, Homo sapiens
ggcggcagaggaagg

SEQ ID NO: 1568039 - DNA, 15 bp, Homo sapiens
gcggcagaggaaggc

SEQ ID NO: 1568040 - DNA, 15 bp, Homo sapiens
cggcagaggaaggct

SEQ ID NO: 1568041 - DNA, 15 bp, Homo sapiens
ggcagaggaaggctc

SEQ ID NO: 1568042 - DNA, 15 bp, Homo sapiens
gcagaggaaggctct

SEQ ID NO: 1568043 - DNA, 15 bp, Homo sapiens
cagaggaaggctctg

SEQ ID NO: 1568044 - DNA, 15 bp, Homo sapiens
agaggaaggctctgt

SEQ ID NO: 1568045 - DNA, 15 bp, Homo sapiens
gaggaaggctctgtc

SEQ ID NO: 1568046 - DNA, 15 bp, Homo sapiens
aggaaggctctgtct

SEQ ID NO: 1568047 - DNA, 15 bp, Homo sapiens
ggaaggctctgtctc

SEQ ID NO: 1568048 - DNA, 15 bp, Homo sapiens
gaaggctctgtctca

SEQ ID NO: 1568049 - DNA, 15 bp, Homo sapiens
gtctcaaaaacaaag

SEQ ID NO: 1568050 - DNA, 15 bp, Homo sapiens
tctcaaaaacaaaga

SEQ ID NO: 1568051 - DNA, 15 bp, Homo sapiens
ctcaaaaacaaagaa

SEQ ID NO: 1568052 - DNA, 15 bp, Homo sapiens
tcaaaaacaaagaaa

SEQ ID NO: 1568053 - DNA, 15 bp, Homo sapiens
caaaaacaaagaaac

SEQ ID NO: 1568054 - DNA, 15 bp, Homo sapiens
aaaaacaaagaaaca

SEQ ID NO: 1568055 - DNA, 15 bp, Homo sapiens
aaaacaaagaaacaa

SEQ ID NO: 1568056 - DNA, 15 bp, Homo sapiens
acaaagaaacaaaca

SEQ ID NO: 1568057 - DNA, 15 bp, Homo sapiens
caaagaaacaaacaa

SEQ ID NO: 1568058 - DNA, 15 bp, Homo sapiens
aaagaaacaaacaaa

SEQ ID NO: 1568059 - DNA, 15 bp, Homo sapiens
aagaaacaaacaaaa

SEQ ID NO: 1568060 - DNA, 15 bp, Homo sapiens
agaaacaaacaaaaa

SEQ ID NO: 1568061 - DNA, 15 bp, Homo sapiens
gaaacaaacaaaaat

SEQ ID NO: 1568062 - DNA, 15 bp, Homo sapiens
aaacaaacaaaaatg

SEQ ID NO: 1568063 - DNA, 15 bp, Homo sapiens
aacaaacaaaaatgg

SEQ ID NO: 1568064 - DNA, 15 bp, Homo sapiens
acaaacaaaaatggg

SEQ ID NO: 1568065 - DNA, 15 bp, Homo sapiens
caaacaaaaatgggc

SEQ ID NO: 1568066 - DNA, 15 bp, Homo sapiens
aaacaaaaatgggcc

SEQ ID NO: 1568067 - DNA, 15 bp, Homo sapiens
aacaaaaatgggcca

SEQ ID NO: 1568068 - DNA, 15 bp, Homo sapiens
acaaaaatgggccac

SEQ ID NO: 1568069 - DNA, 15 bp, Homo sapiens
caaaaatgggccacg

SEQ ID NO: 1568070 - DNA, 15 bp, Homo sapiens
aaaaatgggccacgc

SEQ ID NO: 1568071 - DNA, 15 bp, Homo sapiens
aaaatgggccacgcg

SEQ ID NO: 1568072 - DNA, 15 bp, Homo sapiens
aaatgggccacgcgt

SEQ ID NO: 1568073 - DNA, 15 bp, Homo sapiens
aatgggccacgcgtg

SEQ ID NO: 1568074 - DNA, 15 bp, Homo sapiens
atgggccacgcgtgg

SEQ ID NO: 1568075 - DNA, 15 bp, Homo sapiens
tgggccacgcgtggt

SEQ ID NO: 1568076 - DNA, 15 bp, Homo sapiens
gggccacgcgtggtg

SEQ ID NO: 1568077 - DNA, 15 bp, Homo sapiens
ggccacgcgtggtgg

SEQ ID NO: 1568078 - DNA, 15 bp, Homo sapiens
gccacgcgtggtggc

SEQ ID NO: 1568079 - DNA, 15 bp, Homo sapiens
ccacgcgtggtggct

SEQ ID NO: 1568080 - DNA, 15 bp, Homo sapiens
cacgcgtggtggctc

SEQ ID NO: 1568081 - DNA, 15 bp, Homo sapiens
ggggctggagccagc

SEQ ID NO: 1568082 - DNA, 15 bp, Homo sapiens
gggctggagccagct

SEQ ID NO: 1568083 - DNA, 15 bp, Homo sapiens
ggctggagccagctt

SEQ ID NO: 1568084 - DNA, 15 bp, Homo sapiens
gctggagccagcttg

SEQ ID NO: 1568085 - DNA, 15 bp, Homo sapiens
ctggagccagcttgg

SEQ ID NO: 1568086 - DNA, 15 bp, Homo sapiens
tggagccagcttggc

SEQ ID NO: 1568087 - DNA, 15 bp, Homo sapiens
ggagccagcttggct

SEQ ID NO: 1568088 - DNA, 15 bp, Homo sapiens
gagccagcttggctg

SEQ ID NO: 1568089 - DNA, 15 bp, Homo sapiens
agccagcttggctgt

SEQ ID NO: 1568090 - DNA, 15 bp, Homo sapiens
gccagcttggctgtg

SEQ ID NO: 1568091 - DNA, 15 bp, Homo sapiens
ccagcttggctgtgt

SEQ ID NO: 1568092 - DNA, 15 bp, Homo sapiens
cagcttggctgtgtg

SEQ ID NO: 1568093 - DNA, 15 bp, Homo sapiens
agcttggctgtgtgc

SEQ ID NO: 1568094 - DNA, 15 bp, Homo sapiens
gcttggctgtgtgcc

SEQ ID NO: 1568095 - DNA, 15 bp, Homo sapiens
cttggctgtgtgccc

SEQ ID NO: 1568096 - DNA, 15 bp, Homo sapiens
ttggctgtgtgcccc

SEQ ID NO: 1568097 - DNA, 15 bp, Homo sapiens
tggctgtgtgccccc

SEQ ID NO: 1568098 - DNA, 15 bp, Homo sapiens
ggctgtgtgccccca

SEQ ID NO: 1568099 - DNA, 15 bp, Homo sapiens
ctgtgtgcccccagc

SEQ ID NO: 1568100 - DNA, 15 bp, Homo sapiens
tgtgtgcccccagcc

SEQ ID NO: 1568101 - DNA, 15 bp, Homo sapiens
gtgtgcccccagcca

SEQ ID NO: 1568102 - DNA, 15 bp, Homo sapiens
tgtgcccccagccac

SEQ ID NO: 1568103 - DNA, 15 bp, Homo sapiens
gtgcccccagccacc

SEQ ID NO: 1568104 - DNA, 15 bp, Homo sapiens
tgcccccagccacct

SEQ ID NO: 1568105 - DNA, 15 bp, Homo sapiens
gcccccagccacctg

SEQ ID NO: 1568106 - DNA, 15 bp, Homo sapiens
cccccagccacctgg

SEQ ID NO: 1568107 - DNA, 15 bp, Homo sapiens
ccccagccacctggc

SEQ ID NO: 1568108 - DNA, 15 bp, Homo sapiens
cccagccacctggcc

SEQ ID NO: 1568109 - DNA, 15 bp, Homo sapiens
ccagccacctggccc

SEQ ID NO: 1568110 - DNA, 15 bp, Homo sapiens
cagccacctggccct

SEQ ID NO: 1568111 - DNA, 15 bp, Homo sapiens
agccacctggccctg

SEQ ID NO: 1568112 - DNA, 15 bp, Homo sapiens
gccacctggccctga

SEQ ID NO: 1568113 - DNA, 15 bp, Homo sapiens
ccacctggccctgac

SEQ ID NO: 1568114 - DNA, 15 bp, Homo sapiens
cacctggccctgaca

SEQ ID NO: 1568115 - DNA, 15 bp, Homo sapiens
acctggccctgacac

SEQ ID NO: 1568116 - DNA, 15 bp, Homo sapiens
cctggccctgacacg

SEQ ID NO: 1568117 - DNA, 15 bp, Homo sapiens
ctggccctgacacgc

SEQ ID NO: 1568118 - DNA, 15 bp, Homo sapiens
tggccctgacacgca

SEQ ID NO: 1568119 - DNA, 15 bp, Homo sapiens
ggccctgacacgcac

SEQ ID NO: 1568120 - DNA, 15 bp, Homo sapiens
gccctgacacgcacc

SEQ ID NO: 1568121 - DNA, 15 bp, Homo sapiens
ccctgacacgcacct

SEQ ID NO: 1568122 - DNA, 15 bp, Homo sapiens
cctgacacgcacctt

SEQ ID NO: 1568123 - DNA, 15 bp, Homo sapiens
ctgacacgcacctta

SEQ ID NO: 1568124 - DNA, 15 bp, Homo sapiens
tgacacgcaccttac

SEQ ID NO: 1568125 - DNA, 15 bp, Homo sapiens
gacacgcaccttaca

SEQ ID NO: 1568126 - DNA, 15 bp, Homo sapiens
acacgcaccttacag

SEQ ID NO: 1568127 - DNA, 15 bp, Homo sapiens
cacgcaccttacagg

SEQ ID NO: 1568128 - DNA, 15 bp, Homo sapiens
acgcaccttacaggg

SEQ ID NO: 1568129 - DNA, 15 bp, Homo sapiens
cgcaccttacagggg

SEQ ID NO: 1568130 - DNA, 15 bp, Homo sapiens
gcaccttacaggggc

SEQ ID NO: 1568131 - DNA, 15 bp, Homo sapiens
caccttacaggggct

SEQ ID NO: 1568132 - DNA, 15 bp, Homo sapiens
accttacaggggctc

SEQ ID NO: 1568133 - DNA, 15 bp, Homo sapiens
ccttacaggggctct

SEQ ID NO: 1568134 - DNA, 15 bp, Homo sapiens
cttacaggggctctg

SEQ ID NO: 1568135 - DNA, 15 bp, Homo sapiens
ttacaggggctctgt

SEQ ID NO: 1568136 - DNA, 15 bp, Homo sapiens
tacaggggctctgtg

SEQ ID NO: 1568137 - DNA, 15 bp, Homo sapiens
acaggggctctgtgg

SEQ ID NO: 1568138 - DNA, 15 bp, Homo sapiens
caggggctctgtggc

SEQ ID NO: 1568139 - DNA, 15 bp, Homo sapiens
aggggctctgtggca

SEQ ID NO: 1568140 - DNA, 15 bp, Homo sapiens
ggggctctgtggcat

SEQ ID NO: 1568141 - DNA, 15 bp, Homo sapiens
gggctctgtggcatg

SEQ ID NO: 1568142 - DNA, 15 bp, Homo sapiens
ggctctgtggcatgg

SEQ ID NO: 1568143 - DNA, 15 bp, Homo sapiens
gctctgtggcatggg

SEQ ID NO: 1568144 - DNA, 15 bp, Homo sapiens
ctctgtggcatgggg

SEQ ID NO: 1568145 - DNA, 15 bp, Homo sapiens
tctgtggcatggggc

SEQ ID NO: 1568146 - DNA, 15 bp, Homo sapiens
ctgtggcatggggct

SEQ ID NO: 1568147 - DNA, 15 bp, Homo sapiens
tgtggcatggggctg

SEQ ID NO: 1568148 - DNA, 15 bp, Homo sapiens
gtggcatggggctgg

SEQ ID NO: 1568149 - DNA, 15 bp, Homo sapiens
tggcatggggctggc

SEQ ID NO: 1568150 - DNA, 15 bp, Homo sapiens
ggcatggggctggct

SEQ ID NO: 1568151 - DNA, 15 bp, Homo sapiens
gcatggggctggctg

SEQ ID NO: 1568152 - DNA, 15 bp, Homo sapiens
catggggctggctgg

SEQ ID NO: 1568153 - DNA, 15 bp, Homo sapiens
atggggctggctggc

SEQ ID NO: 1568154 - DNA, 15 bp, Homo sapiens
tggggctggctggct

SEQ ID NO: 1568155 - DNA, 15 bp, Homo sapiens
ggggctggctggctg

SEQ ID NO: 1568156 - DNA, 15 bp, Homo sapiens
gggctggctggctgc

SEQ ID NO: 1568157 - DNA, 15 bp, Homo sapiens
ggctggctggctgct

SEQ ID NO: 1568158 - DNA, 15 bp, Homo sapiens
gctggctggctgctt

SEQ ID NO: 1568159 - DNA, 15 bp, Homo sapiens
ctggctggctgcttg

SEQ ID NO: 1568160 - DNA, 15 bp, Homo sapiens
tggctggctgcttgc

SEQ ID NO: 1568161 - DNA, 15 bp, Homo sapiens
ggctggctgcttgct

SEQ ID NO: 1568162 - DNA, 15 bp, Homo sapiens
gctggctgcttgctg

SEQ ID NO: 1568163 - DNA, 15 bp, Homo sapiens
ctggctgcttgctgg

SEQ ID NO: 1568164 - DNA, 15 bp, Homo sapiens
tggctgcttgctggg

SEQ ID NO: 1568165 - DNA, 15 bp, Homo sapiens
ggctgcttgctggga

SEQ ID NO: 1568166 - DNA, 15 bp, Homo sapiens
gctgcttgctgggag

SEQ ID NO: 1568167 - DNA, 15 bp, Homo sapiens
ctgcttgctgggagc

SEQ ID NO: 1568168 - DNA, 15 bp, Homo sapiens
tgcttgctgggagcc

SEQ ID NO: 1568169 - DNA, 15 bp, Homo sapiens
gcttgctgggagcct

SEQ ID NO: 1568170 - DNA, 15 bp, Homo sapiens
cttgctgggagcctg

SEQ ID NO: 1568171 - DNA, 15 bp, Homo sapiens
ttgctgggagcctgg

SEQ ID NO: 1568172 - DNA, 15 bp, Homo sapiens
tgctgggagcctggc

SEQ ID NO: 1568173 - DNA, 15 bp, Homo sapiens
gctgggagcctggct

SEQ ID NO: 1568174 - DNA, 15 bp, Homo sapiens
ctgggagcctggctg

SEQ ID NO: 1568175 - DNA, 15 bp, Homo sapiens
tgggagcctggctga

SEQ ID NO: 1568176 - DNA, 15 bp, Homo sapiens
gggagcctggctgat

SEQ ID NO: 1568177 - DNA, 15 bp, Homo sapiens
ggagcctggctgatg

SEQ ID NO: 1568178 - DNA, 15 bp, Homo sapiens
gagcctggctgatgc

SEQ ID NO: 1568179 - DNA, 15 bp, Homo sapiens
agcctggctgatgca

SEQ ID NO: 1568180 - DNA, 15 bp, Homo sapiens
gcctggctgatgcag

SEQ ID NO: 1568181 - DNA, 15 bp, Homo sapiens
cctggctgatgcagg

SEQ ID NO: 1568182 - DNA, 15 bp, Homo sapiens
ctggctgatgcaggg

SEQ ID NO: 1568183 - DNA, 15 bp, Homo sapiens
tggctgatgcagggt

SEQ ID NO: 1568184 - DNA, 15 bp, Homo sapiens
ggctgatgcagggtt

SEQ ID NO: 1568185 - DNA, 15 bp, Homo sapiens
gctgatgcagggttc

SEQ ID NO: 1568186 - DNA, 15 bp, Homo sapiens
ctgatgcagggttca

SEQ ID NO: 1568187 - DNA, 15 bp, Homo sapiens
tgatgcagggttcat

SEQ ID NO: 1568188 - DNA, 15 bp, Homo sapiens
gatgcagggttcatg

SEQ ID NO: 1568189 - DNA, 15 bp, Homo sapiens
atgcagggttcatgc

SEQ ID NO: 1568190 - DNA, 15 bp, Homo sapiens
tgcagggttcatgct

SEQ ID NO: 1568191 - DNA, 15 bp, Homo sapiens
gcagggttcatgcta

SEQ ID NO: 1568192 - DNA, 15 bp, Homo sapiens
cagggttcatgctac

SEQ ID NO: 1568193 - DNA, 15 bp, Homo sapiens
agggttcatgctacc

SEQ ID NO: 1568194 - DNA, 15 bp, Homo sapiens
gggttcatgctaccc

SEQ ID NO: 1568195 - DNA, 15 bp, Homo sapiens
ggttcatgctacccc

SEQ ID NO: 1568196 - DNA, 15 bp, Homo sapiens
gttcatgctaccccc

SEQ ID NO: 1568197 - DNA, 15 bp, Homo sapiens
ttcatgctaccccct

SEQ ID NO: 1568198 - DNA, 15 bp, Homo sapiens
tcatgctacccccta

SEQ ID NO: 1568199 - DNA, 15 bp, Homo sapiens
catgctaccccctag

SEQ ID NO: 1568200 - DNA, 15 bp, Homo sapiens
atgctaccccctagt

SEQ ID NO: 1568201 - DNA, 15 bp, Homo sapiens
tgctaccccctagtg

SEQ ID NO: 1568202 - DNA, 15 bp, Homo sapiens
gctaccccctagtgg

SEQ ID NO: 1568203 - DNA, 15 bp, Homo sapiens
ctaccccctagtggg

SEQ ID NO: 1568204 - DNA, 15 bp, Homo sapiens
taccccctagtgggg

SEQ ID NO: 1568205 - DNA, 15 bp, Homo sapiens
accccctagtggggg

SEQ ID NO: 1568206 - DNA, 15 bp, Homo sapiens
ccccctagtggggga

SEQ ID NO: 1568207 - DNA, 15 bp, Homo sapiens
cccctagtgggggat

SEQ ID NO: 1568208 - DNA, 15 bp, Homo sapiens
ccctagtgggggatt

SEQ ID NO: 1568209 - DNA, 15 bp, Homo sapiens
cctagtgggggattg

SEQ ID NO: 1568210 - DNA, 15 bp, Homo sapiens
ctagtgggggattgg

SEQ ID NO: 1568211 - DNA, 15 bp, Homo sapiens
tagtgggggattggg

SEQ ID NO: 1568212 - DNA, 15 bp, Homo sapiens
agtgggggattgggg

SEQ ID NO: 1568213 - DNA, 15 bp, Homo sapiens
gtgggggattggggc

SEQ ID NO: 1568214 - DNA, 15 bp, Homo sapiens
tgggggattggggca

SEQ ID NO: 1568215 - DNA, 15 bp, Homo sapiens
gggggattggggcag

SEQ ID NO: 1568216 - DNA, 15 bp, Homo sapiens
ggggattggggcagt

SEQ ID NO: 1568217 - DNA, 15 bp, Homo sapiens
gggattggggcagtg

SEQ ID NO: 1568218 - DNA, 15 bp, Homo sapiens
ggattggggcagtgc

SEQ ID NO: 1568219 - DNA, 15 bp, Homo sapiens
gattggggcagtgcc

SEQ ID NO: 1568220 - DNA, 15 bp, Homo sapiens
attggggcagtgcca

SEQ ID NO: 1568221 - DNA, 15 bp, Homo sapiens
ttggggcagtgccag

SEQ ID NO: 1568222 - DNA, 15 bp, Homo sapiens
tggggcagtgccagc

SEQ ID NO: 1568223 - DNA, 15 bp, Homo sapiens
ggggcagtgccagcc

SEQ ID NO: 1568224 - DNA, 15 bp, Homo sapiens
gggcagtgccagcca

SEQ ID NO: 1568225 - DNA, 15 bp, Homo sapiens
ggcagtgccagccat

SEQ ID NO: 1568226 - DNA, 15 bp, Homo sapiens
gcagtgccagccatc

SEQ ID NO: 1568227 - DNA, 15 bp, Homo sapiens
cagtgccagccatca

SEQ ID NO: 1568228 - DNA, 15 bp, Homo sapiens
agtgccagccatcag

SEQ ID NO: 1568229 - DNA, 15 bp, Homo sapiens
gtgccagccatcagc

SEQ ID NO: 1568230 - DNA, 15 bp, Homo sapiens
tgccagccatcagcc

SEQ ID NO: 1568231 - DNA, 15 bp, Homo sapiens
gccagccatcagcct

SEQ ID NO: 1568232 - DNA, 15 bp, Homo sapiens
ccagccatcagcctg

SEQ ID NO: 1568233 - DNA, 15 bp, Homo sapiens
cagccatcagcctgg

SEQ ID NO: 1568234 - DNA, 15 bp, Homo sapiens
agccatcagcctggc

SEQ ID NO: 1568235 - DNA, 15 bp, Homo sapiens
gccatcagcctggct

SEQ ID NO: 1568236 - DNA, 15 bp, Homo sapiens
ccatcagcctggctg

SEQ ID NO: 1568237 - DNA, 15 bp, Homo sapiens
catcagcctggctgc

SEQ ID NO: 1568238 - DNA, 15 bp, Homo sapiens
atcagcctggctgct

SEQ ID NO: 1568239 - DNA, 15 bp, Homo sapiens
tcagcctggctgctc

SEQ ID NO: 1568240 - DNA, 15 bp, Homo sapiens
cagcctggctgctcc

SEQ ID NO: 1568241 - DNA, 15 bp, Homo sapiens
agcctggctgctccc

SEQ ID NO: 1568242 - DNA, 15 bp, Homo sapiens
gcctggctgctccct

SEQ ID NO: 1568243 - DNA, 15 bp, Homo sapiens
cctggctgctccctg

SEQ ID NO: 1568244 - DNA, 15 bp, Homo sapiens
ctggctgctccctgt

SEQ ID NO: 1568245 - DNA, 15 bp, Homo sapiens
tggctgctccctgtg

SEQ ID NO: 1568246 - DNA, 15 bp, Homo sapiens
ggctgctccctgtgt

SEQ ID NO: 1568247 - DNA, 15 bp, Homo sapiens
gctgctccctgtgtg

SEQ ID NO: 1568248 - DNA, 15 bp, Homo sapiens
ctgctccctgtgtgc

SEQ ID NO: 1568249 - DNA, 15 bp, Homo sapiens
tgctccctgtgtgct

SEQ ID NO: 1568250 - DNA, 15 bp, Homo sapiens
gctccctgtgtgcta

SEQ ID NO: 1568251 - DNA, 15 bp, Homo sapiens
ctccctgtgtgctac

SEQ ID NO: 1568252 - DNA, 15 bp, Homo sapiens
tccctgtgtgctact

SEQ ID NO: 1568253 - DNA, 15 bp, Homo sapiens
ccctgtgtgctactg

SEQ ID NO: 1568254 - DNA, 15 bp, Homo sapiens
cctgtgtgctactga

SEQ ID NO: 1568255 - DNA, 15 bp, Homo sapiens
ctgtgtgctactgag

SEQ ID NO: 1568256 - DNA, 15 bp, Homo sapiens
tgtgtgctactgagc

SEQ ID NO: 1568257 - DNA, 15 bp, Homo sapiens
gtgtgctactgagcc

SEQ ID NO: 1568258 - DNA, 15 bp, Homo sapiens
tgtgctactgagcct

SEQ ID NO: 1568259 - DNA, 15 bp, Homo sapiens
gtgctactgagcctg

SEQ ID NO: 1568260 - DNA, 15 bp, Homo sapiens
tgctactgagcctgg

SEQ ID NO: 1568261 - DNA, 15 bp, Homo sapiens
gctactgagcctgga

SEQ ID NO: 1568262 - DNA, 15 bp, Homo sapiens
ctactgagcctggaa

SEQ ID NO: 1568263 - DNA, 15 bp, Homo sapiens
tactgagcctggaag

SEQ ID NO: 1568264 - DNA, 15 bp, Homo sapiens
actgagcctggaagt

SEQ ID NO: 1568265 - DNA, 15 bp, Homo sapiens
ctgagcctggaagtg

SEQ ID NO: 1568266 - DNA, 15 bp, Homo sapiens
tgagcctggaagtga

SEQ ID NO: 1568267 - DNA, 15 bp, Homo sapiens
gagcctggaagtgac

SEQ ID NO: 1568268 - DNA, 15 bp, Homo sapiens
agcctggaagtgaca

SEQ ID NO: 1568269 - DNA, 15 bp, Homo sapiens
gcctggaagtgacaa

SEQ ID NO: 1568270 - DNA, 15 bp, Homo sapiens
cctggaagtgacaaa

SEQ ID NO: 1568271 - DNA, 15 bp, Homo sapiens
ctggaagtgacaaag

SEQ ID NO: 1568272 - DNA, 15 bp, Homo sapiens
tggaagtgacaaaga

SEQ ID NO: 1568273 - DNA, 15 bp, Homo sapiens
ggaagtgacaaagac

SEQ ID NO: 1568274 - DNA, 15 bp, Homo sapiens
gaagtgacaaagacc

SEQ ID NO: 1568275 - DNA, 15 bp, Homo sapiens
aagtgacaaagaccc

SEQ ID NO: 1568276 - DNA, 15 bp, Homo sapiens
agtgacaaagaccca

SEQ ID NO: 1568277 - DNA, 15 bp, Homo sapiens
gtgacaaagacccac

SEQ ID NO: 1568278 - DNA, 15 bp, Homo sapiens
tgacaaagacccacc

SEQ ID NO: 1568279 - DNA, 15 bp, Homo sapiens
gacaaagacccaccc

SEQ ID NO: 1568280 - DNA, 15 bp, Homo sapiens
acaaagacccacccc

SEQ ID NO: 1568281 - DNA, 15 bp, Homo sapiens
caaagacccacccct

SEQ ID NO: 1568282 - DNA, 15 bp, Homo sapiens
aaagacccacccctg

SEQ ID NO: 1568283 - DNA, 15 bp, Homo sapiens
aagacccacccctgt

SEQ ID NO: 1568284 - DNA, 15 bp, Homo sapiens
agacccacccctgtc

SEQ ID NO: 1568285 - DNA, 15 bp, Homo sapiens
gacccacccctgtcc

SEQ ID NO: 1568286 - DNA, 15 bp, Homo sapiens
acccacccctgtccc

SEQ ID NO: 1568287 - DNA, 15 bp, Homo sapiens
cccacccctgtcccc

SEQ ID NO: 1568288 - DNA, 15 bp, Homo sapiens
ccacccctgtcccca

SEQ ID NO: 1568289 - DNA, 15 bp, Homo sapiens
cacccctgtccccac

SEQ ID NO: 1568290 - DNA, 15 bp, Homo sapiens
acccctgtccccact

SEQ ID NO: 1568291 - DNA, 15 bp, Homo sapiens
cccctgtccccactc

SEQ ID NO: 1568292 - DNA, 15 bp, Homo sapiens
ccctgtccccactca

SEQ ID NO: 1568293 - DNA, 15 bp, Homo sapiens
cctgtccccactcag

SEQ ID NO: 1568294 - DNA, 15 bp, Homo sapiens
ctgtccccactcagg

SEQ ID NO: 1568295 - DNA, 15 bp, Homo sapiens
tgtccccactcaggc

SEQ ID NO: 1568296 - DNA, 15 bp, Homo sapiens
gtccccactcaggcc

SEQ ID NO: 1568297 - DNA, 15 bp, Homo sapiens
tccccactcaggcca

SEQ ID NO: 1568298 - DNA, 15 bp, Homo sapiens
ccccactcaggccac

SEQ ID NO: 1568299 - DNA, 15 bp, Homo sapiens
cccactcaggccacc

SEQ ID NO: 1568300 - DNA, 15 bp, Homo sapiens
ccactcaggccacct

SEQ ID NO: 1568301 - DNA, 15 bp, Homo sapiens
cactcaggccacctg

SEQ ID NO: 1568302 - DNA, 15 bp, Homo sapiens
actcaggccacctgc

SEQ ID NO: 1568303 - DNA, 15 bp, Homo sapiens
ctcaggccacctgct

SEQ ID NO: 1568304 - DNA, 15 bp, Homo sapiens
tcaggccacctgctg

SEQ ID NO: 1568305 - DNA, 15 bp, Homo sapiens
caggccacctgctgc

SEQ ID NO: 1568306 - DNA, 15 bp, Homo sapiens
aggccacctgctgct

SEQ ID NO: 1568307 - DNA, 15 bp, Homo sapiens
ggccacctgctgctc

SEQ ID NO: 1568308 - DNA, 15 bp, Homo sapiens
gccacctgctgctcc

SEQ ID NO: 1568309 - DNA, 15 bp, Homo sapiens
ccacctgctgctccg

SEQ ID NO: 1568310 - DNA, 15 bp, Homo sapiens
cacctgctgctccga

SEQ ID NO: 1568311 - DNA, 15 bp, Homo sapiens
acctgctgctccgat

SEQ ID NO: 1568312 - DNA, 15 bp, Homo sapiens
cctgctgctccgatc

SEQ ID NO: 1568313 - DNA, 15 bp, Homo sapiens
ctgctgctccgatca

SEQ ID NO: 1568314 - DNA, 15 bp, Homo sapiens
tgctgctccgatcac

SEQ ID NO: 1568315 - DNA, 15 bp, Homo sapiens
gctgctccgatcacc

SEQ ID NO: 1568316 - DNA, 15 bp, Homo sapiens
ctgctccgatcacct

SEQ ID NO: 1568317 - DNA, 15 bp, Homo sapiens
tgctccgatcacctg

SEQ ID NO: 1568318 - DNA, 15 bp, Homo sapiens
gctccgatcacctgc

SEQ ID NO: 1568319 - DNA, 15 bp, Homo sapiens
ctccgatcacctgca

SEQ ID NO: 1568320 - DNA, 15 bp, Homo sapiens
tccgatcacctgcac

SEQ ID NO: 1568321 - DNA, 15 bp, Homo sapiens
ccgatcacctgcact

SEQ ID NO: 1568322 - DNA, 15 bp, Homo sapiens
cgatcacctgcactg

SEQ ID NO: 1568323 - DNA, 15 bp, Homo sapiens
gatcacctgcactgc

SEQ ID NO: 1568324 - DNA, 15 bp, Homo sapiens
atcacctgcactgct

SEQ ID NO: 1568325 - DNA, 15 bp, Homo sapiens
tcacctgcactgctg

SEQ ID NO: 1568326 - DNA, 15 bp, Homo sapiens
cacctgcactgctgc

SEQ ID NO: 1568327 - DNA, 15 bp, Homo sapiens
acctgcactgctgcc

SEQ ID NO: 1568328 - DNA, 15 bp, Homo sapiens
cctgcactgctgccc

SEQ ID NO: 1568329 - DNA, 15 bp, Homo sapiens
ctgcactgctgcccc

SEQ ID NO: 1568330 - DNA, 15 bp, Homo sapiens
tgcactgctgccccc

SEQ ID NO: 1568331 - DNA, 15 bp, Homo sapiens
gcactgctgccccca

SEQ ID NO: 1568332 - DNA, 15 bp, Homo sapiens
cactgctgcccccaa

SEQ ID NO: 1568333 - DNA, 15 bp, Homo sapiens
actgctgcccccaag

SEQ ID NO: 1568334 - DNA, 15 bp, Homo sapiens
ctgctgcccccaaga

SEQ ID NO: 1568335 - DNA, 15 bp, Homo sapiens
tgctgcccccaagac

SEQ ID NO: 1568336 - DNA, 15 bp, Homo sapiens
gctgcccccaagaca

SEQ ID NO: 1568337 - DNA, 15 bp, Homo sapiens
ctgcccccaagacac

SEQ ID NO: 1568338 - DNA, 15 bp, Homo sapiens
tgcccccaagacact

SEQ ID NO: 1568339 - DNA, 15 bp, Homo sapiens
gcccccaagacactg

SEQ ID NO: 1568340 - DNA, 15 bp, Homo sapiens
cccccaagacactgt

SEQ ID NO: 1568341 - DNA, 15 bp, Homo sapiens
ccccaagacactgtg

SEQ ID NO: 1568342 - DNA, 15 bp, Homo sapiens
cccaagacactgtgt

SEQ ID NO: 1568343 - DNA, 15 bp, Homo sapiens
ccaagacactgtgtg

SEQ ID NO: 1568344 - DNA, 15 bp, Homo sapiens
caagacactgtgtgt

SEQ ID NO: 1568345 - DNA, 15 bp, Homo sapiens
aagacactgtgtgtg

SEQ ID NO: 1568346 - DNA, 15 bp, Homo sapiens
agacactgtgtgtga

SEQ ID NO: 1568347 - DNA, 15 bp, Homo sapiens
acactgtgtgtgacc

SEQ ID NO: 1568348 - DNA, 15 bp, Homo sapiens
cactgtgtgtgacct

SEQ ID NO: 1568349 - DNA, 15 bp, Homo sapiens
actgtgtgtgacctg

SEQ ID NO: 1568350 - DNA, 15 bp, Homo sapiens
ctgtgtgtgacctga

SEQ ID NO: 1568351 - DNA, 15 bp, Homo sapiens
tgtgtgtgacctgat

SEQ ID NO: 1568352 - DNA, 15 bp, Homo sapiens
gtgtgtgacctgatc

SEQ ID NO: 1568353 - DNA, 15 bp, Homo sapiens
tgtgtgacctgatcc

SEQ ID NO: 1568354 - DNA, 15 bp, Homo sapiens
gtgtgacctgatcca

SEQ ID NO: 1568355 - DNA, 15 bp, Homo sapiens
tgtgacctgatccag

SEQ ID NO: 1568356 - DNA, 15 bp, Homo sapiens
gtgacctgatccaga

SEQ ID NO: 1568357 - DNA, 15 bp, Homo sapiens
tgacctgatccagag

SEQ ID NO: 1568358 - DNA, 15 bp, Homo sapiens
gacctgatccagagt

SEQ ID NO: 1568359 - DNA, 15 bp, Homo sapiens
cctgatccagagtaa

SEQ ID NO: 1568360 - DNA, 15 bp, Homo sapiens
ctgatccagagtaag

SEQ ID NO: 1568361 - DNA, 15 bp, Homo sapiens
tgatccagagtaagt

SEQ ID NO: 1568362 - DNA, 15 bp, Homo sapiens
gatccagagtaagtg

SEQ ID NO: 1568363 - DNA, 15 bp, Homo sapiens
atccagagtaagtgc

SEQ ID NO: 1568364 - DNA, 15 bp, Homo sapiens
tccagagtaagtgcc

SEQ ID NO: 1568365 - DNA, 15 bp, Homo sapiens
ccagagtaagtgcct

SEQ ID NO: 1568366 - DNA, 15 bp, Homo sapiens
cagagtaagtgcctc

SEQ ID NO: 1568367 - DNA, 15 bp, Homo sapiens
agagtaagtgcctct

SEQ ID NO: 1568368 - DNA, 15 bp, Homo sapiens
gagtaagtgcctctc

SEQ ID NO: 1568369 - DNA, 15 bp, Homo sapiens
agtaagtgcctctcc

SEQ ID NO: 1568370 - DNA, 15 bp, Homo sapiens
gtaagtgcctctcca

SEQ ID NO: 1568371 - DNA, 15 bp, Homo sapiens
taagtgcctctccaa

SEQ ID NO: 1568372 - DNA, 15 bp, Homo sapiens
aagtgcctctccaag

SEQ ID NO: 1568373 - DNA, 15 bp, Homo sapiens
agtgcctctccaagg

SEQ ID NO: 1568374 - DNA, 15 bp, Homo sapiens
gtgcctctccaagga

SEQ ID NO: 1568375 - DNA, 15 bp, Homo sapiens
tgcctctccaaggag

SEQ ID NO: 1568376 - DNA, 15 bp, Homo sapiens
gcctctccaaggaga

SEQ ID NO: 1568377 - DNA, 15 bp, Homo sapiens
cctctccaaggagaa

SEQ ID NO: 1568378 - DNA, 15 bp, Homo sapiens
ctctccaaggagaac

SEQ ID NO: 1568379 - DNA, 15 bp, Homo sapiens
tctccaaggagaacg

SEQ ID NO: 1568380 - DNA, 15 bp, Homo sapiens
ctccaaggagaacgc

SEQ ID NO: 1568381 - DNA, 15 bp, Homo sapiens
tccaaggagaacgct

SEQ ID NO: 1568382 - DNA, 15 bp, Homo sapiens
ccaaggagaacgcta

SEQ ID NO: 1568383 - DNA, 15 bp, Homo sapiens
caaggagaacgctac

SEQ ID NO: 1568384 - DNA, 15 bp, Homo sapiens
aaggagaacgctacc

SEQ ID NO: 1568385 - DNA, 15 bp, Homo sapiens
aggagaacgctacca

SEQ ID NO: 1568386 - DNA, 15 bp, Homo sapiens
ggagaacgctaccac

SEQ ID NO: 1568387 - DNA, 15 bp, Homo sapiens
gagaacgctaccacg

SEQ ID NO: 1568388 - DNA, 15 bp, Homo sapiens
agaacgctaccacgg

SEQ ID NO: 1568389 - DNA, 15 bp, Homo sapiens
gaacgctaccacgga

SEQ ID NO: 1568390 - DNA, 15 bp, Homo sapiens
aacgctaccacggac

SEQ ID NO: 1568391 - DNA, 15 bp, Homo sapiens
acgctaccacggacc

SEQ ID NO: 1568392 - DNA, 15 bp, Homo sapiens
cgctaccacggacct

SEQ ID NO: 1568393 - DNA, 15 bp, Homo sapiens
gctaccacggacctc

SEQ ID NO: 1568394 - DNA, 15 bp, Homo sapiens
ctaccacggacctcc

SEQ ID NO: 1568395 - DNA, 15 bp, Homo sapiens
taccacggacctcct

SEQ ID NO: 1568396 - DNA, 15 bp, Homo sapiens
accacggacctcctc

SEQ ID NO: 1568397 - DNA, 15 bp, Homo sapiens
ccacggacctcctca

SEQ ID NO: 1568398 - DNA, 15 bp, Homo sapiens
cacggacctcctcac

SEQ ID NO: 1568399 - DNA, 15 bp, Homo sapiens
acggacctcctcact

SEQ ID NO: 1568400 - DNA, 15 bp, Homo sapiens
cggacctcctcacta

SEQ ID NO: 1568401 - DNA, 15 bp, Homo sapiens
ggacctcctcactaa

SEQ ID NO: 1568402 - DNA, 15 bp, Homo sapiens
gacctcctcactaag

SEQ ID NO: 1568403 - DNA, 15 bp, Homo sapiens
acctcctcactaagc

SEQ ID NO: 1568404 - DNA, 15 bp, Homo sapiens
cctcctcactaagct

SEQ ID NO: 1568405 - DNA, 15 bp, Homo sapiens
ctcctcactaagctg

SEQ ID NO: 1568406 - DNA, 15 bp, Homo sapiens
tcctcactaagctgc

SEQ ID NO: 1568407 - DNA, 15 bp, Homo sapiens
cctcactaagctgcc

SEQ ID NO: 1568408 - DNA, 15 bp, Homo sapiens
ctcactaagctgcct

SEQ ID NO: 1568409 - DNA, 15 bp, Homo sapiens
tcactaagctgcctg

SEQ ID NO: 1568410 - DNA, 15 bp, Homo sapiens
cactaagctgcctgc

SEQ ID NO: 1568411 - DNA, 15 bp, Homo sapiens
actaagctgcctgcg

SEQ ID NO: 1568412 - DNA, 15 bp, Homo sapiens
ctaagctgcctgcgc

SEQ ID NO: 1568413 - DNA, 15 bp, Homo sapiens
taagctgcctgcgca

SEQ ID NO: 1568414 - DNA, 15 bp, Homo sapiens
aagctgcctgcgcac

SEQ ID NO: 1568415 - DNA, 15 bp, Homo sapiens
agctgcctgcgcaca

SEQ ID NO: 1568416 - DNA, 15 bp, Homo sapiens
gctgcctgcgcacac

SEQ ID NO: 1568417 - DNA, 15 bp, Homo sapiens
ctgcctgcgcacaca

SEQ ID NO: 1568418 - DNA, 15 bp, Homo sapiens
tgcctgcgcacacag

SEQ ID NO: 1568419 - DNA, 15 bp, Homo sapiens
gcctgcgcacacagg

SEQ ID NO: 1568420 - DNA, 15 bp, Homo sapiens
cctgcgcacacaggt

SEQ ID NO: 1568421 - DNA, 15 bp, Homo sapiens
ctgcgcacacaggta

SEQ ID NO: 1568422 - DNA, 15 bp, Homo sapiens
tgcgcacacaggtac

SEQ ID NO: 1568423 - DNA, 15 bp, Homo sapiens
gcgcacacaggtacc

SEQ ID NO: 1568424 - DNA, 15 bp, Homo sapiens
cgcacacaggtacca

SEQ ID NO: 1568425 - DNA, 15 bp, Homo sapiens
gcacacaggtaccag

SEQ ID NO: 1568426 - DNA, 15 bp, Homo sapiens
cacacaggtaccaga

SEQ ID NO: 1568427 - DNA, 15 bp, Homo sapiens
acacaggtaccagag

SEQ ID NO: 1568428 - DNA, 15 bp, Homo sapiens
cacaggtaccagagg

SEQ ID NO: 1568429 - DNA, 15 bp, Homo sapiens
acaggtaccagaggc

SEQ ID NO: 1568430 - DNA, 15 bp, Homo sapiens
caggtaccagaggca

SEQ ID NO: 1568431 - DNA, 15 bp, Homo sapiens
aggtaccagaggcag

SEQ ID NO: 1568432 - DNA, 15 bp, Homo sapiens
ggtaccagaggcagg

SEQ ID NO: 1568433 - DNA, 15 bp, Homo sapiens
gtaccagaggcaggg

SEQ ID NO: 1568434 - DNA, 15 bp, Homo sapiens
taccagaggcagggt

SEQ ID NO: 1568435 - DNA, 15 bp, Homo sapiens
accagaggcagggtg

SEQ ID NO: 1568436 - DNA, 15 bp, Homo sapiens
ccagaggcagggtgc

SEQ ID NO: 1568437 - DNA, 15 bp, Homo sapiens
cagaggcagggtgca

SEQ ID NO: 1568438 - DNA, 15 bp, Homo sapiens
agaggcagggtgcag

SEQ ID NO: 1568439 - DNA, 15 bp, Homo sapiens
gaggcagggtgcaga

SEQ ID NO: 1568440 - DNA, 15 bp, Homo sapiens
aggcagggtgcagat

SEQ ID NO: 1568441 - DNA, 15 bp, Homo sapiens
ggcagggtgcagata

SEQ ID NO: 1568442 - DNA, 15 bp, Homo sapiens
gcagggtgcagatac

SEQ ID NO: 1568443 - DNA, 15 bp, Homo sapiens
cagggtgcagataca

SEQ ID NO: 1568444 - DNA, 15 bp, Homo sapiens
agggtgcagatacag

SEQ ID NO: 1568445 - DNA, 15 bp, Homo sapiens
gggtgcagatacagg

SEQ ID NO: 1568446 - DNA, 15 bp, Homo sapiens
ggtgcagatacaggg

SEQ ID NO: 1568447 - DNA, 15 bp, Homo sapiens
gtgcagatacagggg

SEQ ID NO: 1568448 - DNA, 15 bp, Homo sapiens
tgcagatacaggggt

SEQ ID NO: 1568449 - DNA, 15 bp, Homo sapiens
gcagatacaggggtg

SEQ ID NO: 1568450 - DNA, 15 bp, Homo sapiens
cagatacaggggtgg

SEQ ID NO: 1568451 - DNA, 15 bp, Homo sapiens
cttttacccaggtac

SEQ ID NO: 1568452 - DNA, 15 bp, Homo sapiens
ttttacccaggtacc

SEQ ID NO: 1568453 - DNA, 15 bp, Homo sapiens
tttacccaggtaccc

SEQ ID NO: 1568454 - DNA, 15 bp, Homo sapiens
ttacccaggtaccca

SEQ ID NO: 1568455 - DNA, 15 bp, Homo sapiens
tacccaggtacccag

SEQ ID NO: 1568456 - DNA, 15 bp, Homo sapiens
acccaggtacccagg

SEQ ID NO: 1568457 - DNA, 15 bp, Homo sapiens
cccaggtacccaggg

SEQ ID NO: 1568458 - DNA, 15 bp, Homo sapiens
ccaggtacccagggg

SEQ ID NO: 1568459 - DNA, 15 bp, Homo sapiens
caggtacccaggggt

SEQ ID NO: 1568460 - DNA, 15 bp, Homo sapiens
aggtacccaggggtg

SEQ ID NO: 1568461 - DNA, 15 bp, Homo sapiens
ggtacccaggggtgg

SEQ ID NO: 1568462 - DNA, 15 bp, Homo sapiens
gtacccaggggtggc

SEQ ID NO: 1568463 - DNA, 15 bp, Homo sapiens
tacccaggggtggcg

SEQ ID NO: 1568464 - DNA, 15 bp, Homo sapiens
acccaggggtggcgg

SEQ ID NO: 1568465 - DNA, 15 bp, Homo sapiens
cccaggggtggcggg

SEQ ID NO: 1568466 - DNA, 15 bp, Homo sapiens
ccaggggtggcgggt

SEQ ID NO: 1568467 - DNA, 15 bp, Homo sapiens
caggggtggcgggtg

SEQ ID NO: 1568468 - DNA, 15 bp, Homo sapiens
aggggtggcgggtgg

SEQ ID NO: 1568469 - DNA, 15 bp, Homo sapiens
ggggtggcgggtggg

SEQ ID NO: 1568470 - DNA, 15 bp, Homo sapiens
gggtggcgggtgggt

SEQ ID NO: 1568471 - DNA, 15 bp, Homo sapiens
ggtggcgggtgggtg

SEQ ID NO: 1568472 - DNA, 15 bp, Homo sapiens
gtggcgggtgggtgg

SEQ ID NO: 1568473 - DNA, 15 bp, Homo sapiens
tggcgggtgggtggg

SEQ ID NO: 1568474 - DNA, 15 bp, Homo sapiens
ggcgggtgggtgggc

SEQ ID NO: 1568475 - DNA, 15 bp, Homo sapiens
gcgggtgggtgggct

SEQ ID NO: 1568476 - DNA, 15 bp, Homo sapiens
cgggtgggtgggctg

SEQ ID NO: 1568477 - DNA, 15 bp, Homo sapiens
gggtgggtgggctga

SEQ ID NO: 1568478 - DNA, 15 bp, Homo sapiens
ggtgggtgggctgag

SEQ ID NO: 1568479 - DNA, 15 bp, Homo sapiens
gtgggtgggctgagc

SEQ ID NO: 1568480 - DNA, 15 bp, Homo sapiens
tgggtgggctgagca

SEQ ID NO: 1568481 - DNA, 15 bp, Homo sapiens
gggtgggctgagcac

SEQ ID NO: 1568482 - DNA, 15 bp, Homo sapiens
ggtgggctgagcaca

SEQ ID NO: 1568483 - DNA, 15 bp, Homo sapiens
gtgggctgagcacag

SEQ ID NO: 1568484 - DNA, 15 bp, Homo sapiens
tgggctgagcacagt

SEQ ID NO: 1568485 - DNA, 15 bp, Homo sapiens
gggctgagcacagtg

SEQ ID NO: 1568486 - DNA, 15 bp, Homo sapiens
ggctgagcacagtgt

SEQ ID NO: 1568487 - DNA, 15 bp, Homo sapiens
gctgagcacagtgtg

SEQ ID NO: 1568488 - DNA, 15 bp, Homo sapiens
ctgagcacagtgtgg

SEQ ID NO: 1568489 - DNA, 15 bp, Homo sapiens
tgagcacagtgtggc

SEQ ID NO: 1568490 - DNA, 15 bp, Homo sapiens
gagcacagtgtggca

SEQ ID NO: 1568491 - DNA, 15 bp, Homo sapiens
agcacagtgtggcag

SEQ ID NO: 1568492 - DNA, 15 bp, Homo sapiens
gcacagtgtggcagg

SEQ ID NO: 1568493 - DNA, 15 bp, Homo sapiens
cacagtgtggcaggc

SEQ ID NO: 1568494 - DNA, 15 bp, Homo sapiens
acagtgtggcaggca

SEQ ID NO: 1568495 - DNA, 15 bp, Homo sapiens
cagtgtggcaggcag

SEQ ID NO: 1568496 - DNA, 15 bp, Homo sapiens
agtgtggcaggcagc

SEQ ID NO: 1568497 - DNA, 15 bp, Homo sapiens
gtgtggcaggcagcc

SEQ ID NO: 1568498 - DNA, 15 bp, Homo sapiens
tgtggcaggcagccg

SEQ ID NO: 1568499 - DNA, 15 bp, Homo sapiens
gtggcaggcagccgg

SEQ ID NO: 1568500 - DNA, 15 bp, Homo sapiens
tggcaggcagccggg

SEQ ID NO: 1568501 - DNA, 15 bp, Homo sapiens
ggcaggcagccgggc

SEQ ID NO: 1568502 - DNA, 15 bp, Homo sapiens
gcaggcagccgggcc

SEQ ID NO: 1568503 - DNA, 15 bp, Homo sapiens
caggcagccgggccc

SEQ ID NO: 1568504 - DNA, 15 bp, Homo sapiens
aggcagccgggcccc

SEQ ID NO: 1568505 - DNA, 15 bp, Homo sapiens
ggcagccgggcccca

SEQ ID NO: 1568506 - DNA, 15 bp, Homo sapiens
gcagccgggccccag

SEQ ID NO: 1568507 - DNA, 15 bp, Homo sapiens
cagccgggccccagt

SEQ ID NO: 1568508 - DNA, 15 bp, Homo sapiens
agccgggccccagtg

SEQ ID NO: 1568509 - DNA, 15 bp, Homo sapiens
gccgggccccagtgc

SEQ ID NO: 1568510 - DNA, 15 bp, Homo sapiens
ccgggccccagtgcc

SEQ ID NO: 1568511 - DNA, 15 bp, Homo sapiens
cgggccccagtgccc

SEQ ID NO: 1568512 - DNA, 15 bp, Homo sapiens
gggccccagtgccca

SEQ ID NO: 1568513 - DNA, 15 bp, Homo sapiens
ggccccagtgcccac

SEQ ID NO: 1568514 - DNA, 15 bp, Homo sapiens
gccccagtgcccacc

SEQ ID NO: 1568515 - DNA, 15 bp, Homo sapiens
ccccagtgcccacct

SEQ ID NO: 1568516 - DNA, 15 bp, Homo sapiens
cccagtgcccacctg

SEQ ID NO: 1568517 - DNA, 15 bp, Homo sapiens
ccagtgcccacctgc

SEQ ID NO: 1568518 - DNA, 15 bp, Homo sapiens
cagtgcccacctgcc

SEQ ID NO: 1568519 - DNA, 15 bp, Homo sapiens
agtgcccacctgccc

SEQ ID NO: 1568520 - DNA, 15 bp, Homo sapiens
gtgcccacctgccct

SEQ ID NO: 1568521 - DNA, 15 bp, Homo sapiens
tgcccacctgccctt

SEQ ID NO: 1568522 - DNA, 15 bp, Homo sapiens
gcccacctgcccttc

SEQ ID NO: 1568523 - DNA, 15 bp, Homo sapiens
cccacctgcccttct

SEQ ID NO: 1568524 - DNA, 15 bp, Homo sapiens
ccacctgcccttctt

SEQ ID NO: 1568525 - DNA, 15 bp, Homo sapiens
cacctgcccttcttc

SEQ ID NO: 1568526 - DNA, 15 bp, Homo sapiens
acctgcccttcttca

SEQ ID NO: 1568527 - DNA, 15 bp, Homo sapiens
cctgcccttcttcat

SEQ ID NO: 1568528 - DNA, 15 bp, Homo sapiens
ctgcccttcttcatc

SEQ ID NO: 1568529 - DNA, 15 bp, Homo sapiens
tgcccttcttcatct

SEQ ID NO: 1568530 - DNA, 15 bp, Homo sapiens
gcccttcttcatctg

SEQ ID NO: 1568531 - DNA, 15 bp, Homo sapiens
cccttcttcatctgc

SEQ ID NO: 1568532 - DNA, 15 bp, Homo sapiens
ccttcttcatctgcc

SEQ ID NO: 1568533 - DNA, 15 bp, Homo sapiens
cttcttcatctgccc

SEQ ID NO: 1568534 - DNA, 15 bp, Homo sapiens
ttcttcatctgccct

SEQ ID NO: 1568535 - DNA, 15 bp, Homo sapiens
tcttcatctgcccta

SEQ ID NO: 1568536 - DNA, 15 bp, Homo sapiens
cttcatctgccctag

SEQ ID NO: 1568537 - DNA, 15 bp, Homo sapiens
ttcatctgccctagg

SEQ ID NO: 1568538 - DNA, 15 bp, Homo sapiens
tcatctgccctaggc

SEQ ID NO: 1568539 - DNA, 15 bp, Homo sapiens
catctgccctaggct

SEQ ID NO: 1568540 - DNA, 15 bp, Homo sapiens
atctgccctaggctg

SEQ ID NO: 1568541 - DNA, 15 bp, Homo sapiens
tctgccctaggctgt

SEQ ID NO: 1568542 - DNA, 15 bp, Homo sapiens
ctgccctaggctgtg

SEQ ID NO: 1568543 - DNA, 15 bp, Homo sapiens
tgccctaggctgtgt

SEQ ID NO: 1568544 - DNA, 15 bp, Homo sapiens
gccctaggctgtgtg

SEQ ID NO: 1568545 - DNA, 15 bp, Homo sapiens
ccctaggctgtgtgc

SEQ ID NO: 1568546 - DNA, 15 bp, Homo sapiens
cctaggctgtgtgct

SEQ ID NO: 1568547 - DNA, 15 bp, Homo sapiens
ctaggctgtgtgctg

SEQ ID NO: 1568548 - DNA, 15 bp, Homo sapiens
taggctgtgtgctgt

SEQ ID NO: 1568549 - DNA, 15 bp, Homo sapiens
aggctgtgtgctgtg

SEQ ID NO: 1568550 - DNA, 15 bp, Homo sapiens
ggctgtgtgctgtga

SEQ ID NO: 1568551 - DNA, 15 bp, Homo sapiens
gctgtgtgctgtgag

SEQ ID NO: 1568552 - DNA, 15 bp, Homo sapiens
ctgtgtgctgtgagg

SEQ ID NO: 1568553 - DNA, 15 bp, Homo sapiens
tgtgtgctgtgagga

SEQ ID NO: 1568554 - DNA, 15 bp, Homo sapiens
gtgtgctgtgaggac

SEQ ID NO: 1568555 - DNA, 15 bp, Homo sapiens
tgtgctgtgaggacc

SEQ ID NO: 1568556 - DNA, 15 bp, Homo sapiens
gtgctgtgaggacca

SEQ ID NO: 1568557 - DNA, 15 bp, Homo sapiens
tgctgtgaggaccac

SEQ ID NO: 1568558 - DNA, 15 bp, Homo sapiens
gctgtgaggaccaca

SEQ ID NO: 1568559 - DNA, 15 bp, Homo sapiens
ctgtgaggaccacat

SEQ ID NO: 1568560 - DNA, 15 bp, Homo sapiens
tgtgaggaccacata

SEQ ID NO: 1568561 - DNA, 15 bp, Homo sapiens
gtgaggaccacatac

SEQ ID NO: 1568562 - DNA, 15 bp, Homo sapiens
tgaggaccacataca

SEQ ID NO: 1568563 - DNA, 15 bp, Homo sapiens
gaggaccacatacac

SEQ ID NO: 1568564 - DNA, 15 bp, Homo sapiens
aggaccacatacact

SEQ ID NO: 1568565 - DNA, 15 bp, Homo sapiens
ggaccacatacactg

SEQ ID NO: 1568566 - DNA, 15 bp, Homo sapiens
gaccacatacactgc

SEQ ID NO: 1568567 - DNA, 15 bp, Homo sapiens
accacatacactgct

SEQ ID NO: 1568568 - DNA, 15 bp, Homo sapiens
ccacatacactgctg

SEQ ID NO: 1568569 - DNA, 15 bp, Homo sapiens
cacatacactgctgt

SEQ ID NO: 1568570 - DNA, 15 bp, Homo sapiens
acatacactgctgtc

SEQ ID NO: 1568571 - DNA, 15 bp, Homo sapiens
catacactgctgtcc

SEQ ID NO: 1568572 - DNA, 15 bp, Homo sapiens
atacactgctgtccc

SEQ ID NO: 1568573 - DNA, 15 bp, Homo sapiens
tacactgctgtcccg

SEQ ID NO: 1568574 - DNA, 15 bp, Homo sapiens
acactgctgtcccgc

SEQ ID NO: 1568575 - DNA, 15 bp, Homo sapiens
cactgctgtcccgcg

SEQ ID NO: 1568576 - DNA, 15 bp, Homo sapiens
actgctgtcccgcgg

SEQ ID NO: 1568577 - DNA, 15 bp, Homo sapiens
ctgctgtcccgcggg

SEQ ID NO: 1568578 - DNA, 15 bp, Homo sapiens
tgctgtcccgcgggg

SEQ ID NO: 1568579 - DNA, 15 bp, Homo sapiens
gctgtcccgcggggt

SEQ ID NO: 1568580 - DNA, 15 bp, Homo sapiens
ctgtcccgcggggtt

SEQ ID NO: 1568581 - DNA, 15 bp, Homo sapiens
tgtcccgcggggttt

SEQ ID NO: 1568582 - DNA, 15 bp, Homo sapiens
gtcccgcggggttta

SEQ ID NO: 1568583 - DNA, 15 bp, Homo sapiens
tcccgcggggtttac

SEQ ID NO: 1568584 - DNA, 15 bp, Homo sapiens
cccgcggggtttacg

SEQ ID NO: 1568585 - DNA, 15 bp, Homo sapiens
ccgcggggtttacgt

SEQ ID NO: 1568586 - DNA, 15 bp, Homo sapiens
cgcggggtttacgtg

SEQ ID NO: 1568587 - DNA, 15 bp, Homo sapiens
gcggggtttacgtgt

SEQ ID NO: 1568588 - DNA, 15 bp, Homo sapiens
cggggtttacgtgtg

SEQ ID NO: 1568589 - DNA, 15 bp, Homo sapiens
ggggtttacgtgtga

SEQ ID NO: 1568590 - DNA, 15 bp, Homo sapiens
gggtttacgtgtgac

SEQ ID NO: 1568591 - DNA, 15 bp, Homo sapiens
ggtttacgtgtgaca

SEQ ID NO: 1568592 - DNA, 15 bp, Homo sapiens
gtttacgtgtgacac

SEQ ID NO: 1568593 - DNA, 15 bp, Homo sapiens
ttacgtgtgacacgc

SEQ ID NO: 1568594 - DNA, 15 bp, Homo sapiens
tacgtgtgacacgca

SEQ ID NO: 1568595 - DNA, 15 bp, Homo sapiens
acgtgtgacacgcag

SEQ ID NO: 1568596 - DNA, 15 bp, Homo sapiens
cgtgtgacacgcaga

SEQ ID NO: 1568597 - DNA, 15 bp, Homo sapiens
gtgtgacacgcagaa

SEQ ID NO: 1568598 - DNA, 15 bp, Homo sapiens
tgtgacacgcagaag

SEQ ID NO: 1568599 - DNA, 15 bp, Homo sapiens
gtgacacgcagaagg

SEQ ID NO: 1568600 - DNA, 15 bp, Homo sapiens
tgacacgcagaaggg

SEQ ID NO: 1568601 - DNA, 15 bp, Homo sapiens
gacacgcagaagggt

SEQ ID NO: 1568602 - DNA, 15 bp, Homo sapiens
acacgcagaagggta

SEQ ID NO: 1568603 - DNA, 15 bp, Homo sapiens
cacgcagaagggtac

SEQ ID NO: 1568604 - DNA, 15 bp, Homo sapiens
acgcagaagggtacc

SEQ ID NO: 1568605 - DNA, 15 bp, Homo sapiens
cgcagaagggtacct

SEQ ID NO: 1568606 - DNA, 15 bp, Homo sapiens
gcagaagggtacctg

SEQ ID NO: 1568607 - DNA, 15 bp, Homo sapiens
cagaagggtacctgt

SEQ ID NO: 1568608 - DNA, 15 bp, Homo sapiens
agaagggtacctgtg

SEQ ID NO: 1568609 - DNA, 15 bp, Homo sapiens
gaagggtacctgtga

SEQ ID NO: 1568610 - DNA, 15 bp, Homo sapiens
aagggtacctgtgaa

SEQ ID NO: 1568611 - DNA, 15 bp, Homo sapiens
agggtacctgtgaac

SEQ ID NO: 1568612 - DNA, 15 bp, Homo sapiens
gggtacctgtgaaca

SEQ ID NO: 1568613 - DNA, 15 bp, Homo sapiens
ggtacctgtgaacag

SEQ ID NO: 1568614 - DNA, 15 bp, Homo sapiens
gtacctgtgaacagg

SEQ ID NO: 1568615 - DNA, 15 bp, Homo sapiens
tacctgtgaacaggg

SEQ ID NO: 1568616 - DNA, 15 bp, Homo sapiens
acctgtgaacagggg

SEQ ID NO: 1568617 - DNA, 15 bp, Homo sapiens
cctgtgaacaggggc

SEQ ID NO: 1568618 - DNA, 15 bp, Homo sapiens
ctgtgaacaggggcc

SEQ ID NO: 1568619 - DNA, 15 bp, Homo sapiens
tgtgaacaggggccc

SEQ ID NO: 1568620 - DNA, 15 bp, Homo sapiens
gtgaacaggggcccc

SEQ ID NO: 1568621 - DNA, 15 bp, Homo sapiens
tgaacaggggcccca

SEQ ID NO: 1568622 - DNA, 15 bp, Homo sapiens
gaacaggggccccac

SEQ ID NO: 1568623 - DNA, 15 bp, Homo sapiens
aacaggggccccacc

SEQ ID NO: 1568624 - DNA, 15 bp, Homo sapiens
acaggggccccacca

SEQ ID NO: 1568625 - DNA, 15 bp, Homo sapiens
caggggccccaccag

SEQ ID NO: 1568626 - DNA, 15 bp, Homo sapiens
aggggccccaccagg

SEQ ID NO: 1568627 - DNA, 15 bp, Homo sapiens
ggggccccaccaggt

SEQ ID NO: 1568628 - DNA, 15 bp, Homo sapiens
gggccccaccaggtg

SEQ ID NO: 1568629 - DNA, 15 bp, Homo sapiens
ggccccaccaggtgc

SEQ ID NO: 1568630 - DNA, 15 bp, Homo sapiens
gccccaccaggtgcc

SEQ ID NO: 1568631 - DNA, 15 bp, Homo sapiens
cccaccaggtgccct

SEQ ID NO: 1568632 - DNA, 15 bp, Homo sapiens
ccaccaggtgccctg

SEQ ID NO: 1568633 - DNA, 15 bp, Homo sapiens
caccaggtgccctgg

SEQ ID NO: 1568634 - DNA, 15 bp, Homo sapiens
accaggtgccctgga

SEQ ID NO: 1568635 - DNA, 15 bp, Homo sapiens
ccaggtgccctggat

SEQ ID NO: 1568636 - DNA, 15 bp, Homo sapiens
caggtgccctggatg

SEQ ID NO: 1568637 - DNA, 15 bp, Homo sapiens
aggtgccctggatgg

SEQ ID NO: 1568638 - DNA, 15 bp, Homo sapiens
ggtgccctggatgga

SEQ ID NO: 1568639 - DNA, 15 bp, Homo sapiens
gtgccctggatggag

SEQ ID NO: 1568640 - DNA, 15 bp, Homo sapiens
tgccctggatggaga

SEQ ID NO: 1568641 - DNA, 15 bp, Homo sapiens
gccctggatggagaa

SEQ ID NO: 1568642 - DNA, 15 bp, Homo sapiens
ccctggatggagaag

SEQ ID NO: 1568643 - DNA, 15 bp, Homo sapiens
cctggatggagaagg

SEQ ID NO: 1568644 - DNA, 15 bp, Homo sapiens
ctggatggagaaggc

SEQ ID NO: 1568645 - DNA, 15 bp, Homo sapiens
tggatggagaaggcc

SEQ ID NO: 1568646 - DNA, 15 bp, Homo sapiens
gatggagaaggcccc

SEQ ID NO: 1568647 - DNA, 15 bp, Homo sapiens
atggagaaggcccca

SEQ ID NO: 1568648 - DNA, 15 bp, Homo sapiens
tggagaaggccccag

SEQ ID NO: 1568649 - DNA, 15 bp, Homo sapiens
ggagaaggccccagc

SEQ ID NO: 1568650 - DNA, 15 bp, Homo sapiens
gagaaggccccagct

SEQ ID NO: 1568651 - DNA, 15 bp, Homo sapiens
agaaggccccagctc

SEQ ID NO: 1568652 - DNA, 15 bp, Homo sapiens
gaaggccccagctca

SEQ ID NO: 1568653 - DNA, 15 bp, Homo sapiens
aaggccccagctcac

SEQ ID NO: 1568654 - DNA, 15 bp, Homo sapiens
aggccccagctcacc

SEQ ID NO: 1568655 - DNA, 15 bp, Homo sapiens
ggccccagctcacct

SEQ ID NO: 1568656 - DNA, 15 bp, Homo sapiens
gccccagctcacctc

SEQ ID NO: 1568657 - DNA, 15 bp, Homo sapiens
ccccagctcacctca

SEQ ID NO: 1568658 - DNA, 15 bp, Homo sapiens
cccagctcacctcag

SEQ ID NO: 1568659 - DNA, 15 bp, Homo sapiens
ccagctcacctcagc

SEQ ID NO: 1568660 - DNA, 15 bp, Homo sapiens
cagctcacctcagcc

SEQ ID NO: 1568661 - DNA, 15 bp, Homo sapiens
gctcacctcagcctg

SEQ ID NO: 1568662 - DNA, 15 bp, Homo sapiens
ctcacctcagcctgc

SEQ ID NO: 1568663 - DNA, 15 bp, Homo sapiens
tcacctcagcctgcc

SEQ ID NO: 1568664 - DNA, 15 bp, Homo sapiens
cacctcagcctgcca

SEQ ID NO: 1568665 - DNA, 15 bp, Homo sapiens
acctcagcctgccag

SEQ ID NO: 1568666 - DNA, 15 bp, Homo sapiens
cctcagcctgccaga

SEQ ID NO: 1568667 - DNA, 15 bp, Homo sapiens
ctcagcctgccagac

SEQ ID NO: 1568668 - DNA, 15 bp, Homo sapiens
tcagcctgccagacc

SEQ ID NO: 1568669 - DNA, 15 bp, Homo sapiens
cagcctgccagaccc

SEQ ID NO: 1568670 - DNA, 15 bp, Homo sapiens
agcctgccagaccca

SEQ ID NO: 1568671 - DNA, 15 bp, Homo sapiens
gcctgccagacccac

SEQ ID NO: 1568672 - DNA, 15 bp, Homo sapiens
cctgccagacccaca

SEQ ID NO: 1568673 - DNA, 15 bp, Homo sapiens
ctgccagacccacaa

SEQ ID NO: 1568674 - DNA, 15 bp, Homo sapiens
tgccagacccacaag

SEQ ID NO: 1568675 - DNA, 15 bp, Homo sapiens
gccagacccacaagc

SEQ ID NO: 1568676 - DNA, 15 bp, Homo sapiens
ccagacccacaagcc

SEQ ID NO: 1568677 - DNA, 15 bp, Homo sapiens
cagacccacaagcct

SEQ ID NO: 1568678 - DNA, 15 bp, Homo sapiens
agacccacaagcctt

SEQ ID NO: 1568679 - DNA, 15 bp, Homo sapiens
gacccacaagccttg

SEQ ID NO: 1568680 - DNA, 15 bp, Homo sapiens
acccacaagccttga

SEQ ID NO: 1568681 - DNA, 15 bp, Homo sapiens
cccacaagccttgaa

SEQ ID NO: 1568682 - DNA, 15 bp, Homo sapiens
ccacaagccttgaag

SEQ ID NO: 1568683 - DNA, 15 bp, Homo sapiens
cacaagccttgaaga

SEQ ID NO: 1568684 - DNA, 15 bp, Homo sapiens
acaagccttgaagag

SEQ ID NO: 1568685 - DNA, 15 bp, Homo sapiens
caagccttgaagaga

SEQ ID NO: 1568686 - DNA, 15 bp, Homo sapiens
aagccttgaagagag

SEQ ID NO: 1568687 - DNA, 15 bp, Homo sapiens
agccttgaagagaga

SEQ ID NO: 1568688 - DNA, 15 bp, Homo sapiens
gccttgaagagagat

SEQ ID NO: 1568689 - DNA, 15 bp, Homo sapiens
ccttgaagagagatg

SEQ ID NO: 1568690 - DNA, 15 bp, Homo sapiens
cttgaagagagatgt

SEQ ID NO: 1568691 - DNA, 15 bp, Homo sapiens
ttgaagagagatgtc

SEQ ID NO: 1568692 - DNA, 15 bp, Homo sapiens
tgaagagagatgtcc

SEQ ID NO: 1568693 - DNA, 15 bp, Homo sapiens
gaagagagatgtccc

SEQ ID NO: 1568694 - DNA, 15 bp, Homo sapiens
aagagagatgtcccc

SEQ ID NO: 1568695 - DNA, 15 bp, Homo sapiens
agagagatgtcccct

SEQ ID NO: 1568696 - DNA, 15 bp, Homo sapiens
gagagatgtcccctg

SEQ ID NO: 1568697 - DNA, 15 bp, Homo sapiens
agagatgtcccctgt

SEQ ID NO: 1568698 - DNA, 15 bp, Homo sapiens
gagatgtcccctgtg

SEQ ID NO: 1568699 - DNA, 15 bp, Homo sapiens
agatgtcccctgtga

SEQ ID NO: 1568700 - DNA, 15 bp, Homo sapiens
gatgtcccctgtgat

SEQ ID NO: 1568701 - DNA, 15 bp, Homo sapiens
atgtcccctgtgata

SEQ ID NO: 1568702 - DNA, 15 bp, Homo sapiens
tgtcccctgtgataa

SEQ ID NO: 1568703 - DNA, 15 bp, Homo sapiens
gtcccctgtgataat

SEQ ID NO: 1568704 - DNA, 15 bp, Homo sapiens
tcccctgtgataatg

SEQ ID NO: 1568705 - DNA, 15 bp, Homo sapiens
cccctgtgataatgt

SEQ ID NO: 1568706 - DNA, 15 bp, Homo sapiens
ccctgtgataatgtc

SEQ ID NO: 1568707 - DNA, 15 bp, Homo sapiens
cctgtgataatgtca

SEQ ID NO: 1568708 - DNA, 15 bp, Homo sapiens
ctgtgataatgtcag

SEQ ID NO: 1568709 - DNA, 15 bp, Homo sapiens
tgtgataatgtcagc

SEQ ID NO: 1568710 - DNA, 15 bp, Homo sapiens
gtgataatgtcagca

SEQ ID NO: 1568711 - DNA, 15 bp, Homo sapiens
tgataatgtcagcag

SEQ ID NO: 1568712 - DNA, 15 bp, Homo sapiens
gataatgtcagcagc

SEQ ID NO: 1568713 - DNA, 15 bp, Homo sapiens
ataatgtcagcagct

SEQ ID NO: 1568714 - DNA, 15 bp, Homo sapiens
taatgtcagcagctg

SEQ ID NO: 1568715 - DNA, 15 bp, Homo sapiens
aatgtcagcagctgt

SEQ ID NO: 1568716 - DNA, 15 bp, Homo sapiens
atgtcagcagctgtc

SEQ ID NO: 1568717 - DNA, 15 bp, Homo sapiens
tgtcagcagctgtcc

SEQ ID NO: 1568718 - DNA, 15 bp, Homo sapiens
gtcagcagctgtccc

SEQ ID NO: 1568719 - DNA, 15 bp, Homo sapiens
tcagcagctgtccct

SEQ ID NO: 1568720 - DNA, 15 bp, Homo sapiens
cagcagctgtccctc

SEQ ID NO: 1568721 - DNA, 15 bp, Homo sapiens
agcagctgtccctcc

SEQ ID NO: 1568722 - DNA, 15 bp, Homo sapiens
gcagctgtccctcct

SEQ ID NO: 1568723 - DNA, 15 bp, Homo sapiens
cagctgtccctcctc

SEQ ID NO: 1568724 - DNA, 15 bp, Homo sapiens
agctgtccctcctcc

SEQ ID NO: 1568725 - DNA, 15 bp, Homo sapiens
gctgtccctcctccg

SEQ ID NO: 1568726 - DNA, 15 bp, Homo sapiens
ctgtccctcctccga

SEQ ID NO: 1568727 - DNA, 15 bp, Homo sapiens
tgtccctcctccgat

SEQ ID NO: 1568728 - DNA, 15 bp, Homo sapiens
gtccctcctccgata

SEQ ID NO: 1568729 - DNA, 15 bp, Homo sapiens
tccctcctccgatac

SEQ ID NO: 1568730 - DNA, 15 bp, Homo sapiens
ccctcctccgatacc

SEQ ID NO: 1568731 - DNA, 15 bp, Homo sapiens
cctcctccgatacct

SEQ ID NO: 1568732 - DNA, 15 bp, Homo sapiens
ctcctccgatacctg

SEQ ID NO: 1568733 - DNA, 15 bp, Homo sapiens
tcctccgatacctgc

SEQ ID NO: 1568734 - DNA, 15 bp, Homo sapiens
cctccgatacctgct

SEQ ID NO: 1568735 - DNA, 15 bp, Homo sapiens
ctccgatacctgctg

SEQ ID NO: 1568736 - DNA, 15 bp, Homo sapiens
tccgatacctgctgc

SEQ ID NO: 1568737 - DNA, 15 bp, Homo sapiens
ccgatacctgctgcc

SEQ ID NO: 1568738 - DNA, 15 bp, Homo sapiens
cgatacctgctgcca

SEQ ID NO: 1568739 - DNA, 15 bp, Homo sapiens
gatacctgctgccaa

SEQ ID NO: 1568740 - DNA, 15 bp, Homo sapiens
atacctgctgccaac

SEQ ID NO: 1568741 - DNA, 15 bp, Homo sapiens
tacctgctgccaact

SEQ ID NO: 1568742 - DNA, 15 bp, Homo sapiens
cctgctgccaactca

SEQ ID NO: 1568743 - DNA, 15 bp, Homo sapiens
ctgctgccaactcac

SEQ ID NO: 1568744 - DNA, 15 bp, Homo sapiens
tgctgccaactcacg

SEQ ID NO: 1568745 - DNA, 15 bp, Homo sapiens
gctgccaactcacgt

SEQ ID NO: 1568746 - DNA, 15 bp, Homo sapiens
ctgccaactcacgtc

SEQ ID NO: 1568747 - DNA, 15 bp, Homo sapiens
tgccaactcacgtct

SEQ ID NO: 1568748 - DNA, 15 bp, Homo sapiens
gccaactcacgtctg

SEQ ID NO: 1568749 - DNA, 15 bp, Homo sapiens
ccaactcacgtctgg

SEQ ID NO: 1568750 - DNA, 15 bp, Homo sapiens
caactcacgtctggg

SEQ ID NO: 1568751 - DNA, 15 bp, Homo sapiens
aactcacgtctgggg

SEQ ID NO: 1568752 - DNA, 15 bp, Homo sapiens
actcacgtctgggga

SEQ ID NO: 1568753 - DNA, 15 bp, Homo sapiens
ctcacgtctggggag

SEQ ID NO: 1568754 - DNA, 15 bp, Homo sapiens
tcacgtctggggagt

SEQ ID NO: 1568755 - DNA, 15 bp, Homo sapiens
cacgtctggggagtg

SEQ ID NO: 1568756 - DNA, 15 bp, Homo sapiens
acgtctggggagtgg

SEQ ID NO: 1568757 - DNA, 15 bp, Homo sapiens
cgtctggggagtggg

SEQ ID NO: 1568758 - DNA, 15 bp, Homo sapiens
gtctggggagtgggg

SEQ ID NO: 1568759 - DNA, 15 bp, Homo sapiens
tctggggagtggggc

SEQ ID NO: 1568760 - DNA, 15 bp, Homo sapiens
ctggggagtggggct

SEQ ID NO: 1568761 - DNA, 15 bp, Homo sapiens
tggggagtggggctg

SEQ ID NO: 1568762 - DNA, 15 bp, Homo sapiens
ggggagtggggctgc

SEQ ID NO: 1568763 - DNA, 15 bp, Homo sapiens
gggagtggggctgct

SEQ ID NO: 1568764 - DNA, 15 bp, Homo sapiens
ggagtggggctgctg

SEQ ID NO: 1568765 - DNA, 15 bp, Homo sapiens
gagtggggctgctgt

SEQ ID NO: 1568766 - DNA, 15 bp, Homo sapiens
agtggggctgctgtc

SEQ ID NO: 1568767 - DNA, 15 bp, Homo sapiens
gtggggctgctgtcc

SEQ ID NO: 1568768 - DNA, 15 bp, Homo sapiens
tggggctgctgtcca

SEQ ID NO: 1568769 - DNA, 15 bp, Homo sapiens
ggggctgctgtccaa

SEQ ID NO: 1568770 - DNA, 15 bp, Homo sapiens
gggctgctgtccaat

SEQ ID NO: 1568771 - DNA, 15 bp, Homo sapiens
ggctgctgtccaatc

SEQ ID NO: 1568772 - DNA, 15 bp, Homo sapiens
gctgctgtccaatcc

SEQ ID NO: 1568773 - DNA, 15 bp, Homo sapiens
ctgctgtccaatccc

SEQ ID NO: 1568774 - DNA, 15 bp, Homo sapiens
tgctgtccaatccca

SEQ ID NO: 1568775 - DNA, 15 bp, Homo sapiens
gctgtccaatcccag

SEQ ID NO: 1568776 - DNA, 15 bp, Homo sapiens
ctgtccaatcccaga

SEQ ID NO: 1568777 - DNA, 15 bp, Homo sapiens
tgtccaatcccagag

SEQ ID NO: 1568778 - DNA, 15 bp, Homo sapiens
gtccaatcccagagg

SEQ ID NO: 1568779 - DNA, 15 bp, Homo sapiens
tccaatcccagaggt

SEQ ID NO: 1568780 - DNA, 15 bp, Homo sapiens
ccaatcccagaggta

SEQ ID NO: 1568781 - DNA, 15 bp, Homo sapiens
caatcccagaggtat

SEQ ID NO: 1568782 - DNA, 15 bp, Homo sapiens
aatcccagaggtata

SEQ ID NO: 1568783 - DNA, 15 bp, Homo sapiens
atcccagaggtatat

SEQ ID NO: 1568784 - DNA, 15 bp, Homo sapiens
tcccagaggtatatg

SEQ ID NO: 1568785 - DNA, 15 bp, Homo sapiens
cccagaggtatatgg

SEQ ID NO: 1568786 - DNA, 15 bp, Homo sapiens
ccagaggtatatggg

SEQ ID NO: 1568787 - DNA, 15 bp, Homo sapiens
cagaggtatatggga

SEQ ID NO: 1568788 - DNA, 15 bp, Homo sapiens
agaggtatatgggag

SEQ ID NO: 1568789 - DNA, 15 bp, Homo sapiens
gaggtatatgggagg

SEQ ID NO: 1568790 - DNA, 15 bp, Homo sapiens
aggtatatgggaggg

SEQ ID NO: 1568791 - DNA, 15 bp, Homo sapiens
ggtatatgggagggg

SEQ ID NO: 1568792 - DNA, 15 bp, Homo sapiens
gtatatgggagggga

SEQ ID NO: 1568793 - DNA, 15 bp, Homo sapiens
tatatgggaggggac

SEQ ID NO: 1568794 - DNA, 15 bp, Homo sapiens
atatgggaggggaca

SEQ ID NO: 1568795 - DNA, 15 bp, Homo sapiens
tatgggaggggacag

SEQ ID NO: 1568796 - DNA, 15 bp, Homo sapiens
atgggaggggacagc

SEQ ID NO: 1568797 - DNA, 15 bp, Homo sapiens
tgggaggggacagca

SEQ ID NO: 1568798 - DNA, 15 bp, Homo sapiens
gggaggggacagcat

SEQ ID NO: 1568799 - DNA, 15 bp, Homo sapiens
ggaggggacagcatc

SEQ ID NO: 1568800 - DNA, 15 bp, Homo sapiens
gaggggacagcatct

SEQ ID NO: 1568801 - DNA, 15 bp, Homo sapiens
aggggacagcatctt

SEQ ID NO: 1568802 - DNA, 15 bp, Homo sapiens
ggggacagcatcttg

SEQ ID NO: 1568803 - DNA, 15 bp, Homo sapiens
gggacagcatcttgg

SEQ ID NO: 1568804 - DNA, 15 bp, Homo sapiens
ggacagcatcttggc

SEQ ID NO: 1568805 - DNA, 15 bp, Homo sapiens
gacagcatcttggcc

SEQ ID NO: 1568806 - DNA, 15 bp, Homo sapiens
acagcatcttggcct

SEQ ID NO: 1568807 - DNA, 15 bp, Homo sapiens
cagcatcttggcctg

SEQ ID NO: 1568808 - DNA, 15 bp, Homo sapiens
agcatcttggcctgg

SEQ ID NO: 1568809 - DNA, 15 bp, Homo sapiens
gcatcttggcctggg

SEQ ID NO: 1568810 - DNA, 15 bp, Homo sapiens
catcttggcctgggc

SEQ ID NO: 1568811 - DNA, 15 bp, Homo sapiens
atcttggcctgggca

SEQ ID NO: 1568812 - DNA, 15 bp, Homo sapiens
tcttggcctgggcag

SEQ ID NO: 1568813 - DNA, 15 bp, Homo sapiens
cttggcctgggcagg

SEQ ID NO: 1568814 - DNA, 15 bp, Homo sapiens
ttggcctgggcaggt

SEQ ID NO: 1568815 - DNA, 15 bp, Homo sapiens
tggcctgggcaggtg

SEQ ID NO: 1568816 - DNA, 15 bp, Homo sapiens
ggcctgggcaggtgg

SEQ ID NO: 1568817 - DNA, 15 bp, Homo sapiens
gcctgggcaggtggg

SEQ ID NO: 1568818 - DNA, 15 bp, Homo sapiens
cctgggcaggtgggt

SEQ ID NO: 1568819 - DNA, 15 bp, Homo sapiens
ctgggcaggtgggtg

SEQ ID NO: 1568820 - DNA, 15 bp, Homo sapiens
tgggcaggtgggtgg

SEQ ID NO: 1568821 - DNA, 15 bp, Homo sapiens
gggcaggtgggtggc

SEQ ID NO: 1568822 - DNA, 15 bp, Homo sapiens
ggcaggtgggtggcc

SEQ ID NO: 1568823 - DNA, 15 bp, Homo sapiens
gcaggtgggtggcca

SEQ ID NO: 1568824 - DNA, 15 bp, Homo sapiens
caggtgggtggccaa

SEQ ID NO: 1568825 - DNA, 15 bp, Homo sapiens
aggtgggtggccaag

SEQ ID NO: 1568826 - DNA, 15 bp, Homo sapiens
ggtgggtggccaagc

SEQ ID NO: 1568827 - DNA, 15 bp, Homo sapiens
gtgggtggccaagct

SEQ ID NO: 1568828 - DNA, 15 bp, Homo sapiens
tgggtggccaagctc

SEQ ID NO: 1568829 - DNA, 15 bp, Homo sapiens
gggtggccaagctcc

SEQ ID NO: 1568830 - DNA, 15 bp, Homo sapiens
ggtggccaagctcct

SEQ ID NO: 1568831 - DNA, 15 bp, Homo sapiens
gtggccaagctccta

SEQ ID NO: 1568832 - DNA, 15 bp, Homo sapiens
tggccaagctcctat

SEQ ID NO: 1568833 - DNA, 15 bp, Homo sapiens
ggccaagctcctatt

SEQ ID NO: 1568834 - DNA, 15 bp, Homo sapiens
gccaagctcctattg

SEQ ID NO: 1568835 - DNA, 15 bp, Homo sapiens
ccaagctcctattgc

SEQ ID NO: 1568836 - DNA, 15 bp, Homo sapiens
caagctcctattgct

SEQ ID NO: 1568837 - DNA, 15 bp, Homo sapiens
aagctcctattgctt

SEQ ID NO: 1568838 - DNA, 15 bp, Homo sapiens
agctcctattgcttt

SEQ ID NO: 1568839 - DNA, 15 bp, Homo sapiens
gctcctattgctttc

SEQ ID NO: 1568840 - DNA, 15 bp, Homo sapiens
ctcctattgctttct

SEQ ID NO: 1568841 - DNA, 15 bp, Homo sapiens
tcctattgctttctg

SEQ ID NO: 1568842 - DNA, 15 bp, Homo sapiens
cctattgctttctgc

SEQ ID NO: 1568843 - DNA, 15 bp, Homo sapiens
ctattgctttctgcc

SEQ ID NO: 1568844 - DNA, 15 bp, Homo sapiens
tattgctttctgccc

SEQ ID NO: 1568845 - DNA, 15 bp, Homo sapiens
attgctttctgccct

SEQ ID NO: 1568846 - DNA, 15 bp, Homo sapiens
ttgctttctgccctc

SEQ ID NO: 1568847 - DNA, 15 bp, Homo sapiens
tgctttctgccctcc

SEQ ID NO: 1568848 - DNA, 15 bp, Homo sapiens
gctttctgccctccg

SEQ ID NO: 1568849 - DNA, 15 bp, Homo sapiens
ctttctgccctccgc

SEQ ID NO: 1568850 - DNA, 15 bp, Homo sapiens
tttctgccctccgca

SEQ ID NO: 1568851 - DNA, 15 bp, Homo sapiens
ttctgccctccgcat

SEQ ID NO: 1568852 - DNA, 15 bp, Homo sapiens
tctgccctccgcata

SEQ ID NO: 1568853 - DNA, 15 bp, Homo sapiens
ctgccctccgcatag

SEQ ID NO: 1568854 - DNA, 15 bp, Homo sapiens
tgccctccgcatagc

SEQ ID NO: 1568855 - DNA, 15 bp, Homo sapiens
gccctccgcatagcc

SEQ ID NO: 1568856 - DNA, 15 bp, Homo sapiens
ccctccgcatagccc

SEQ ID NO: 1568857 - DNA, 15 bp, Homo sapiens
cctccgcatagccca

SEQ ID NO: 1568858 - DNA, 15 bp, Homo sapiens
ctccgcatagcccat

SEQ ID NO: 1568859 - DNA, 15 bp, Homo sapiens
tccgcatagcccata

SEQ ID NO: 1568860 - DNA, 15 bp, Homo sapiens
ccgcatagcccatag

SEQ ID NO: 1568861 - DNA, 15 bp, Homo sapiens
cgcatagcccatagg

SEQ ID NO: 1568862 - DNA, 15 bp, Homo sapiens
gcatagcccataggt

SEQ ID NO: 1568863 - DNA, 15 bp, Homo sapiens
catagcccataggtg

SEQ ID NO: 1568864 - DNA, 15 bp, Homo sapiens
atagcccataggtga

SEQ ID NO: 1568865 - DNA, 15 bp, Homo sapiens
tagcccataggtgat

SEQ ID NO: 1568866 - DNA, 15 bp, Homo sapiens
agcccataggtgata

SEQ ID NO: 1568867 - DNA, 15 bp, Homo sapiens
gcccataggtgatac

SEQ ID NO: 1568868 - DNA, 15 bp, Homo sapiens
cccataggtgatacc

SEQ ID NO: 1568869 - DNA, 15 bp, Homo sapiens
ccataggtgataccc

SEQ ID NO: 1568870 - DNA, 15 bp, Homo sapiens
cataggtgataccca

SEQ ID NO: 1568871 - DNA, 15 bp, Homo sapiens
ataggtgatacccag

SEQ ID NO: 1568872 - DNA, 15 bp, Homo sapiens
taggtgatacccagc

SEQ ID NO: 1568873 - DNA, 15 bp, Homo sapiens
aggtgatacccagct

SEQ ID NO: 1568874 - DNA, 15 bp, Homo sapiens
ggtgatacccagctc

SEQ ID NO: 1568875 - DNA, 15 bp, Homo sapiens
gtgatacccagctct

SEQ ID NO: 1568876 - DNA, 15 bp, Homo sapiens
tgatacccagctctg

SEQ ID NO: 1568877 - DNA, 15 bp, Homo sapiens
gatacccagctctga

SEQ ID NO: 1568878 - DNA, 15 bp, Homo sapiens
atacccagctctgac

SEQ ID NO: 1568879 - DNA, 15 bp, Homo sapiens
tacccagctctgaca

SEQ ID NO: 1568880 - DNA, 15 bp, Homo sapiens
acccagctctgacag

SEQ ID NO: 1568881 - DNA, 15 bp, Homo sapiens
cccagctctgacaga

SEQ ID NO: 1568882 - DNA, 15 bp, Homo sapiens
ccagctctgacagat

SEQ ID NO: 1568883 - DNA, 15 bp, Homo sapiens
cagctctgacagatt

SEQ ID NO: 1568884 - DNA, 15 bp, Homo sapiens
agctctgacagattc

SEQ ID NO: 1568885 - DNA, 15 bp, Homo sapiens
gctctgacagattcg

SEQ ID NO: 1568886 - DNA, 15 bp, Homo sapiens
ctctgacagattcgt

SEQ ID NO: 1568887 - DNA, 15 bp, Homo sapiens
tctgacagattcgtc

SEQ ID NO: 1568888 - DNA, 15 bp, Homo sapiens
ctgacagattcgtcc

SEQ ID NO: 1568889 - DNA, 15 bp, Homo sapiens
tgacagattcgtccc

SEQ ID NO: 1568890 - DNA, 15 bp, Homo sapiens
gacagattcgtcccc

SEQ ID NO: 1568891 - DNA, 15 bp, Homo sapiens
acagattcgtcccca

SEQ ID NO: 1568892 - DNA, 15 bp, Homo sapiens
cagattcgtccccag

SEQ ID NO: 1568893 - DNA, 15 bp, Homo sapiens
agattcgtccccagc

SEQ ID NO: 1568894 - DNA, 15 bp, Homo sapiens
gattcgtccccagct

SEQ ID NO: 1568895 - DNA, 15 bp, Homo sapiens
attcgtccccagctg

SEQ ID NO: 1568896 - DNA, 15 bp, Homo sapiens
ttcgtccccagctgg

SEQ ID NO: 1568897 - DNA, 15 bp, Homo sapiens
tcgtccccagctgga

SEQ ID NO: 1568898 - DNA, 15 bp, Homo sapiens
cgtccccagctggag

SEQ ID NO: 1568899 - DNA, 15 bp, Homo sapiens
gtccccagctggagg

SEQ ID NO: 1568900 - DNA, 15 bp, Homo sapiens
tccccagctggaggt

SEQ ID NO: 1568901 - DNA, 15 bp, Homo sapiens
ccccagctggaggtg

SEQ ID NO: 1568902 - DNA, 15 bp, Homo sapiens
cccagctggaggtgc

SEQ ID NO: 1568903 - DNA, 15 bp, Homo sapiens
ccagctggaggtgct

SEQ ID NO: 1568904 - DNA, 15 bp, Homo sapiens
cagctggaggtgctg

SEQ ID NO: 1568905 - DNA, 15 bp, Homo sapiens
agctggaggtgctgt

SEQ ID NO: 1568906 - DNA, 15 bp, Homo sapiens
gctggaggtgctgta

SEQ ID NO: 1568907 - DNA, 15 bp, Homo sapiens
ctggaggtgctgtaa

SEQ ID NO: 1568908 - DNA, 15 bp, Homo sapiens
tggaggtgctgtaag

SEQ ID NO: 1568909 - DNA, 15 bp, Homo sapiens
ggaggtgctgtaagc

SEQ ID NO: 1568910 - DNA, 15 bp, Homo sapiens
gaggtgctgtaagca

SEQ ID NO: 1568911 - DNA, 15 bp, Homo sapiens
aggtgctgtaagcag

SEQ ID NO: 1568912 - DNA, 15 bp, Homo sapiens
ggtgctgtaagcagg

SEQ ID NO: 1568913 - DNA, 15 bp, Homo sapiens
gtgctgtaagcagga

SEQ ID NO: 1568914 - DNA, 15 bp, Homo sapiens
tgctgtaagcaggag

SEQ ID NO: 1568915 - DNA, 15 bp, Homo sapiens
gctgtaagcaggaga

SEQ ID NO: 1568916 - DNA, 15 bp, Homo sapiens
ctgtaagcaggagag

SEQ ID NO: 1568917 - DNA, 15 bp, Homo sapiens
tgtaagcaggagagg

SEQ ID NO: 1568918 - DNA, 15 bp, Homo sapiens
gtaagcaggagaggc

SEQ ID NO: 1568919 - DNA, 15 bp, Homo sapiens
taagcaggagaggcg

SEQ ID NO: 1568920 - DNA, 15 bp, Homo sapiens
aagcaggagaggcgg

SEQ ID NO: 1568921 - DNA, 15 bp, Homo sapiens
agcaggagaggcggg

SEQ ID NO: 1568922 - DNA, 15 bp, Homo sapiens
gcaggagaggcgggc

SEQ ID NO: 1568923 - DNA, 15 bp, Homo sapiens
caggagaggcgggct

SEQ ID NO: 1568924 - DNA, 15 bp, Homo sapiens
aggagaggcgggctg

SEQ ID NO: 1568925 - DNA, 15 bp, Homo sapiens
ggagaggcgggctgg

SEQ ID NO: 1568926 - DNA, 15 bp, Homo sapiens
gagaggcgggctgga

SEQ ID NO: 1568927 - DNA, 15 bp, Homo sapiens
agaggcgggctggag

SEQ ID NO: 1568928 - DNA, 15 bp, Homo sapiens
gaggcgggctggagt

SEQ ID NO: 1568929 - DNA, 15 bp, Homo sapiens
aggcgggctggagta

SEQ ID NO: 1568930 - DNA, 15 bp, Homo sapiens
ggcgggctggagtag

SEQ ID NO: 1568931 - DNA, 15 bp, Homo sapiens
gcgggctggagtagg

SEQ ID NO: 1568932 - DNA, 15 bp, Homo sapiens
cgggctggagtaggt

SEQ ID NO: 1568933 - DNA, 15 bp, Homo sapiens
gggctggagtaggta

SEQ ID NO: 1568934 - DNA, 15 bp, Homo sapiens
ggctggagtaggtag

SEQ ID NO: 1568935 - DNA, 15 bp, Homo sapiens
gctggagtaggtagg

SEQ ID NO: 1568936 - DNA, 15 bp, Homo sapiens
ctggagtaggtaggg

SEQ ID NO: 1568937 - DNA, 15 bp, Homo sapiens
tggagtaggtagggg

SEQ ID NO: 1568938 - DNA, 15 bp, Homo sapiens
ggagtaggtaggggc

SEQ ID NO: 1568939 - DNA, 15 bp, Homo sapiens
gagtaggtaggggct

SEQ ID NO: 1568940 - DNA, 15 bp, Homo sapiens
agtaggtaggggctc

SEQ ID NO: 1568941 - DNA, 15 bp, Homo sapiens
gtaggtaggggctcg

SEQ ID NO: 1568942 - DNA, 15 bp, Homo sapiens
taggtaggggctcgg

SEQ ID NO: 1568943 - DNA, 15 bp, Homo sapiens
aggtaggggctcggc

SEQ ID NO: 1568944 - DNA, 15 bp, Homo sapiens
ggtaggggctcggca

SEQ ID NO: 1568945 - DNA, 15 bp, Homo sapiens
gtaggggctcggcac

SEQ ID NO: 1568946 - DNA, 15 bp, Homo sapiens
taggggctcggcact

SEQ ID NO: 1568947 - DNA, 15 bp, Homo sapiens
aggggctcggcactg

SEQ ID NO: 1568948 - DNA, 15 bp, Homo sapiens
ggggctcggcactgc

SEQ ID NO: 1568949 - DNA, 15 bp, Homo sapiens
gggctcggcactgcg

SEQ ID NO: 1568950 - DNA, 15 bp, Homo sapiens
ggctcggcactgcgc

SEQ ID NO: 1568951 - DNA, 15 bp, Homo sapiens
gctcggcactgcgcc

SEQ ID NO: 1568952 - DNA, 15 bp, Homo sapiens
ctcggcactgcgccc

SEQ ID NO: 1568953 - DNA, 15 bp, Homo sapiens
tcggcactgcgcccc

SEQ ID NO: 1568954 - DNA, 15 bp, Homo sapiens
cggcactgcgcccca

SEQ ID NO: 1568955 - DNA, 15 bp, Homo sapiens
ggcactgcgccccac

SEQ ID NO: 1568956 - DNA, 15 bp, Homo sapiens
gcactgcgccccaca

SEQ ID NO: 1568957 - DNA, 15 bp, Homo sapiens
cactgcgccccacat

SEQ ID NO: 1568958 - DNA, 15 bp, Homo sapiens
actgcgccccacata

SEQ ID NO: 1568959 - DNA, 15 bp, Homo sapiens
ctgcgccccacatag

SEQ ID NO: 1568960 - DNA, 15 bp, Homo sapiens
tgcgccccacatagt

SEQ ID NO: 1568961 - DNA, 15 bp, Homo sapiens
gcgccccacatagtg

SEQ ID NO: 1568962 - DNA, 15 bp, Homo sapiens
cgccccacatagtgg

SEQ ID NO: 1568963 - DNA, 15 bp, Homo sapiens
gccccacatagtggc

SEQ ID NO: 1568964 - DNA, 15 bp, Homo sapiens
ccccacatagtggct

SEQ ID NO: 1568965 - DNA, 15 bp, Homo sapiens
cccacatagtggcta

SEQ ID NO: 1568966 - DNA, 15 bp, Homo sapiens
ccacatagtggctac

SEQ ID NO: 1568967 - DNA, 15 bp, Homo sapiens
cacatagtggctacc

SEQ ID NO: 1568968 - DNA, 15 bp, Homo sapiens
acatagtggctacct

SEQ ID NO: 1568969 - DNA, 15 bp, Homo sapiens
catagtggctaccta

SEQ ID NO: 1568970 - DNA, 15 bp, Homo sapiens
atagtggctacctac

SEQ ID NO: 1568971 - DNA, 15 bp, Homo sapiens
tagtggctacctaca

SEQ ID NO: 1568972 - DNA, 15 bp, Homo sapiens
agtggctacctacaa

SEQ ID NO: 1568973 - DNA, 15 bp, Homo sapiens
gtggctacctacaac

SEQ ID NO: 1568974 - DNA, 15 bp, Homo sapiens
tggctacctacaacg

SEQ ID NO: 1568975 - DNA, 15 bp, Homo sapiens
ggctacctacaacgc

SEQ ID NO: 1568976 - DNA, 15 bp, Homo sapiens
gctacctacaacgcc

SEQ ID NO: 1568977 - DNA, 15 bp, Homo sapiens
ctacctacaacgccc

SEQ ID NO: 1568978 - DNA, 15 bp, Homo sapiens
tacctacaacgccct

SEQ ID NO: 1568979 - DNA, 15 bp, Homo sapiens
acctacaacgccctt

SEQ ID NO: 1568980 - DNA, 15 bp, Homo sapiens
cctacaacgcccttt

SEQ ID NO: 1568981 - DNA, 15 bp, Homo sapiens
ctacaacgccctttc

SEQ ID NO: 1568982 - DNA, 15 bp, Homo sapiens
tacaacgccctttcc

SEQ ID NO: 1568983 - DNA, 15 bp, Homo sapiens
acaacgccctttcct

SEQ ID NO: 1568984 - DNA, 15 bp, Homo sapiens
caacgccctttcctg

SEQ ID NO: 1568985 - DNA, 15 bp, Homo sapiens
aacgccctttcctgc

SEQ ID NO: 1568986 - DNA, 15 bp, Homo sapiens
acgccctttcctgcc

SEQ ID NO: 1568987 - DNA, 15 bp, Homo sapiens
cgccctttcctgccc

SEQ ID NO: 1568988 - DNA, 15 bp, Homo sapiens
gccctttcctgccca

SEQ ID NO: 1568989 - DNA, 15 bp, Homo sapiens
ccctttcctgcccac

SEQ ID NO: 1568990 - DNA, 15 bp, Homo sapiens
cctttcctgcccacc

SEQ ID NO: 1568991 - DNA, 15 bp, Homo sapiens
ctttcctgcccaccc

SEQ ID NO: 1568992 - DNA, 15 bp, Homo sapiens
tttcctgcccacccc

SEQ ID NO: 1568993 - DNA, 15 bp, Homo sapiens
ttcctgcccaccccc

SEQ ID NO: 1568994 - DNA, 15 bp, Homo sapiens
tcctgcccacccccc

SEQ ID NO: 1568995 - DNA, 15 bp, Homo sapiens
cctgcccacccccca

SEQ ID NO: 1568996 - DNA, 15 bp, Homo sapiens
ctgcccaccccccag

SEQ ID NO: 1568997 - DNA, 15 bp, Homo sapiens
tgcccaccccccagg

SEQ ID NO: 1568998 - DNA, 15 bp, Homo sapiens
gcccaccccccaggc

SEQ ID NO: 1568999 - DNA, 15 bp, Homo sapiens
cccaccccccaggct

SEQ ID NO: 1569000 - DNA, 15 bp, Homo sapiens
ccaccccccaggctg

SEQ ID NO: 1569001 - DNA, 15 bp, Homo sapiens
caccccccaggctgt

SEQ ID NO: 1569002 - DNA, 15 bp, Homo sapiens
accccccaggctgtc

SEQ ID NO: 1569003 - DNA, 15 bp, Homo sapiens
ccccccaggctgtct

SEQ ID NO: 1569004 - DNA, 15 bp, Homo sapiens
cccccaggctgtctg

SEQ ID NO: 1569005 - DNA, 15 bp, Homo sapiens
ccccaggctgtctgc

SEQ ID NO: 1569006 - DNA, 15 bp, Homo sapiens
cccaggctgtctgct

SEQ ID NO: 1569007 - DNA, 15 bp, Homo sapiens
ccaggctgtctgctg

SEQ ID NO: 1569008 - DNA, 15 bp, Homo sapiens
caggctgtctgctgc

SEQ ID NO: 1569009 - DNA, 15 bp, Homo sapiens
aggctgtctgctgct

SEQ ID NO: 1569010 - DNA, 15 bp, Homo sapiens
ggctgtctgctgctc

SEQ ID NO: 1569011 - DNA, 15 bp, Homo sapiens
gctgtctgctgctcg

SEQ ID NO: 1569012 - DNA, 15 bp, Homo sapiens
ctgtctgctgctcgg

SEQ ID NO: 1569013 - DNA, 15 bp, Homo sapiens
tgtctgctgctcgga

SEQ ID NO: 1569014 - DNA, 15 bp, Homo sapiens
gtctgctgctcggac

SEQ ID NO: 1569015 - DNA, 15 bp, Homo sapiens
tctgctgctcggacc

SEQ ID NO: 1569016 - DNA, 15 bp, Homo sapiens
ctgctgctcggacca

SEQ ID NO: 1569017 - DNA, 15 bp, Homo sapiens
tgctgctcggaccac

SEQ ID NO: 1569018 - DNA, 15 bp, Homo sapiens
gctgctcggaccacc

SEQ ID NO: 1569019 - DNA, 15 bp, Homo sapiens
ctgctcggaccacca

SEQ ID NO: 1569020 - DNA, 15 bp, Homo sapiens
tgctcggaccaccag

SEQ ID NO: 1569021 - DNA, 15 bp, Homo sapiens
gctcggaccaccagc

SEQ ID NO: 1569022 - DNA, 15 bp, Homo sapiens
ctcggaccaccagca

SEQ ID NO: 1569023 - DNA, 15 bp, Homo sapiens
tcggaccaccagcac

SEQ ID NO: 1569024 - DNA, 15 bp, Homo sapiens
cggaccaccagcact

SEQ ID NO: 1569025 - DNA, 15 bp, Homo sapiens
ggaccaccagcactg

SEQ ID NO: 1569026 - DNA, 15 bp, Homo sapiens
gaccaccagcactgc

SEQ ID NO: 1569027 - DNA, 15 bp, Homo sapiens
accaccagcactgct

SEQ ID NO: 1569028 - DNA, 15 bp, Homo sapiens
ccaccagcactgctg

SEQ ID NO: 1569029 - DNA, 15 bp, Homo sapiens
caccagcactgctgc

SEQ ID NO: 1569030 - DNA, 15 bp, Homo sapiens
accagcactgctgcc

SEQ ID NO: 1569031 - DNA, 15 bp, Homo sapiens
ccagcactgctgccc

SEQ ID NO: 1569032 - DNA, 15 bp, Homo sapiens
cagcactgctgcccc

SEQ ID NO: 1569033 - DNA, 15 bp, Homo sapiens
agcactgctgccccc

SEQ ID NO: 1569034 - DNA, 15 bp, Homo sapiens
cactgctgcccccag

SEQ ID NO: 1569035 - DNA, 15 bp, Homo sapiens
actgctgcccccagg

SEQ ID NO: 1569036 - DNA, 15 bp, Homo sapiens
ctgctgcccccaggg

SEQ ID NO: 1569037 - DNA, 15 bp, Homo sapiens
tgctgcccccagggc

SEQ ID NO: 1569038 - DNA, 15 bp, Homo sapiens
gctgcccccagggct

SEQ ID NO: 1569039 - DNA, 15 bp, Homo sapiens
ctgcccccagggcta

SEQ ID NO: 1569040 - DNA, 15 bp, Homo sapiens
tgcccccagggctac

SEQ ID NO: 1569041 - DNA, 15 bp, Homo sapiens
gcccccagggctaca

SEQ ID NO: 1569042 - DNA, 15 bp, Homo sapiens
cccccagggctacac

SEQ ID NO: 1569043 - DNA, 15 bp, Homo sapiens
ccccagggctacacg

SEQ ID NO: 1569044 - DNA, 15 bp, Homo sapiens
cccagggctacacgt

SEQ ID NO: 1569045 - DNA, 15 bp, Homo sapiens
ccagggctacacgtg

SEQ ID NO: 1569046 - DNA, 15 bp, Homo sapiens
cagggctacacgtgt

SEQ ID NO: 1569047 - DNA, 15 bp, Homo sapiens
agggctacacgtgtg

SEQ ID NO: 1569048 - DNA, 15 bp, Homo sapiens
gggctacacgtgtgt

SEQ ID NO: 1569049 - DNA, 15 bp, Homo sapiens
ggctacacgtgtgta

SEQ ID NO: 1569050 - DNA, 15 bp, Homo sapiens
gctacacgtgtgtag

SEQ ID NO: 1569051 - DNA, 15 bp, Homo sapiens
ctacacgtgtgtagc

SEQ ID NO: 1569052 - DNA, 15 bp, Homo sapiens
tacacgtgtgtagct

SEQ ID NO: 1569053 - DNA, 15 bp, Homo sapiens
acacgtgtgtagctg

SEQ ID NO: 1569054 - DNA, 15 bp, Homo sapiens
cacgtgtgtagctga

SEQ ID NO: 1569055 - DNA, 15 bp, Homo sapiens
acgtgtgtagctgag

SEQ ID NO: 1569056 - DNA, 15 bp, Homo sapiens
gtgtgtagctgaggg

SEQ ID NO: 1569057 - DNA, 15 bp, Homo sapiens
tgtgtagctgagggg

SEQ ID NO: 1569058 - DNA, 15 bp, Homo sapiens
gtgtagctgaggggc

SEQ ID NO: 1569059 - DNA, 15 bp, Homo sapiens
tgtagctgaggggca

SEQ ID NO: 1569060 - DNA, 15 bp, Homo sapiens
gtagctgaggggcag

SEQ ID NO: 1569061 - DNA, 15 bp, Homo sapiens
tagctgaggggcagt

SEQ ID NO: 1569062 - DNA, 15 bp, Homo sapiens
agctgaggggcagtg

SEQ ID NO: 1569063 - DNA, 15 bp, Homo sapiens
gctgaggggcagtgt

SEQ ID NO: 1569064 - DNA, 15 bp, Homo sapiens
ctgaggggcagtgtc

SEQ ID NO: 1569065 - DNA, 15 bp, Homo sapiens
tgaggggcagtgtca

SEQ ID NO: 1569066 - DNA, 15 bp, Homo sapiens
gaggggcagtgtcag

SEQ ID NO: 1569067 - DNA, 15 bp, Homo sapiens
aggggcagtgtcagc

SEQ ID NO: 1569068 - DNA, 15 bp, Homo sapiens
ggggcagtgtcagcg

SEQ ID NO: 1569069 - DNA, 15 bp, Homo sapiens
gggcagtgtcagcga

SEQ ID NO: 1569070 - DNA, 15 bp, Homo sapiens
ggcagtgtcagcgag

SEQ ID NO: 1569071 - DNA, 15 bp, Homo sapiens
gcagtgtcagcgagg

SEQ ID NO: 1569072 - DNA, 15 bp, Homo sapiens
cagtgtcagcgagga

SEQ ID NO: 1569073 - DNA, 15 bp, Homo sapiens
agtgtcagcgaggaa

SEQ ID NO: 1569074 - DNA, 15 bp, Homo sapiens
gtgtcagcgaggaag

SEQ ID NO: 1569075 - DNA, 15 bp, Homo sapiens
tgtcagcgaggaagc

SEQ ID NO: 1569076 - DNA, 15 bp, Homo sapiens
gtcagcgaggaagcg

SEQ ID NO: 1569077 - DNA, 15 bp, Homo sapiens
tcagcgaggaagcga

SEQ ID NO: 1569078 - DNA, 15 bp, Homo sapiens
cagcgaggaagcgag

SEQ ID NO: 1569079 - DNA, 15 bp, Homo sapiens
agcgaggaagcgaga

SEQ ID NO: 1569080 - DNA, 15 bp, Homo sapiens
gcgaggaagcgagat

SEQ ID NO: 1569081 - DNA, 15 bp, Homo sapiens
cgaggaagcgagatc

SEQ ID NO: 1569082 - DNA, 15 bp, Homo sapiens
gaggaagcgagatcg

SEQ ID NO: 1569083 - DNA, 15 bp, Homo sapiens
aggaagcgagatcgt

SEQ ID NO: 1569084 - DNA, 15 bp, Homo sapiens
ggaagcgagatcgtg

SEQ ID NO: 1569085 - DNA, 15 bp, Homo sapiens
gaagcgagatcgtgg

SEQ ID NO: 1569086 - DNA, 15 bp, Homo sapiens
aagcgagatcgtggc

SEQ ID NO: 1569087 - DNA, 15 bp, Homo sapiens
agcgagatcgtggct

SEQ ID NO: 1569088 - DNA, 15 bp, Homo sapiens
gcgagatcgtggctg

SEQ ID NO: 1569089 - DNA, 15 bp, Homo sapiens
cgagatcgtggctgg

SEQ ID NO: 1569090 - DNA, 15 bp, Homo sapiens
gagatcgtggctgga

SEQ ID NO: 1569091 - DNA, 15 bp, Homo sapiens
agatcgtggctggac

SEQ ID NO: 1569092 - DNA, 15 bp, Homo sapiens
gatcgtggctggact

SEQ ID NO: 1569093 - DNA, 15 bp, Homo sapiens
atcgtggctggactg

SEQ ID NO: 1569094 - DNA, 15 bp, Homo sapiens
tcgtggctggactgg

SEQ ID NO: 1569095 - DNA, 15 bp, Homo sapiens
cgtggctggactgga

SEQ ID NO: 1569096 - DNA, 15 bp, Homo sapiens
gtggctggactggag

SEQ ID NO: 1569097 - DNA, 15 bp, Homo sapiens
tggctggactggaga

SEQ ID NO: 1569098 - DNA, 15 bp, Homo sapiens
ggctggactggagaa

SEQ ID NO: 1569099 - DNA, 15 bp, Homo sapiens
gctggactggagaag

SEQ ID NO: 1569100 - DNA, 15 bp, Homo sapiens
ctggactggagaaga

SEQ ID NO: 1569101 - DNA, 15 bp, Homo sapiens
tggactggagaagat

SEQ ID NO: 1569102 - DNA, 15 bp, Homo sapiens
ggactggagaagatg

SEQ ID NO: 1569103 - DNA, 15 bp, Homo sapiens
gactggagaagatgc

SEQ ID NO: 1569104 - DNA, 15 bp, Homo sapiens
actggagaagatgcc

SEQ ID NO: 1569105 - DNA, 15 bp, Homo sapiens
ctggagaagatgcct

SEQ ID NO: 1569106 - DNA, 15 bp, Homo sapiens
tggagaagatgcctg

SEQ ID NO: 1569107 - DNA, 15 bp, Homo sapiens
ggagaagatgcctgc

SEQ ID NO: 1569108 - DNA, 15 bp, Homo sapiens
gagaagatgcctgcc

SEQ ID NO: 1569109 - DNA, 15 bp, Homo sapiens
agaagatgcctgccc

SEQ ID NO: 1569110 - DNA, 15 bp, Homo sapiens
gaagatgcctgcccg

SEQ ID NO: 1569111 - DNA, 15 bp, Homo sapiens
aagatgcctgcccgc

SEQ ID NO: 1569112 - DNA, 15 bp, Homo sapiens
agatgcctgcccgcc

SEQ ID NO: 1569113 - DNA, 15 bp, Homo sapiens
gatgcctgcccgccg

SEQ ID NO: 1569114 - DNA, 15 bp, Homo sapiens
atgcctgcccgccgg

SEQ ID NO: 1569115 - DNA, 15 bp, Homo sapiens
tgcctgcccgccggg

SEQ ID NO: 1569116 - DNA, 15 bp, Homo sapiens
gcctgcccgccgggc

SEQ ID NO: 1569117 - DNA, 15 bp, Homo sapiens
cctgcccgccgggct

SEQ ID NO: 1569118 - DNA, 15 bp, Homo sapiens
ctgcccgccgggctt

SEQ ID NO: 1569119 - DNA, 15 bp, Homo sapiens
tgcccgccgggcttc

SEQ ID NO: 1569120 - DNA, 15 bp, Homo sapiens
gcccgccgggcttcc

SEQ ID NO: 1569121 - DNA, 15 bp, Homo sapiens
cccgccgggcttcct

SEQ ID NO: 1569122 - DNA, 15 bp, Homo sapiens
ccgccgggcttcctt

SEQ ID NO: 1569123 - DNA, 15 bp, Homo sapiens
cgccgggcttcctta

SEQ ID NO: 1569124 - DNA, 15 bp, Homo sapiens
gccgggcttccttat

SEQ ID NO: 1569125 - DNA, 15 bp, Homo sapiens
ccgggcttccttatc

SEQ ID NO: 1569126 - DNA, 15 bp, Homo sapiens
cgggcttccttatcc

SEQ ID NO: 1569127 - DNA, 15 bp, Homo sapiens
gggcttccttatccc

SEQ ID NO: 1569128 - DNA, 15 bp, Homo sapiens
ggcttccttatccca

SEQ ID NO: 1569129 - DNA, 15 bp, Homo sapiens
gcttccttatcccac

SEQ ID NO: 1569130 - DNA, 15 bp, Homo sapiens
cttccttatcccacc

SEQ ID NO: 1569131 - DNA, 15 bp, Homo sapiens
ttccttatcccaccc

SEQ ID NO: 1569132 - DNA, 15 bp, Homo sapiens
tccttatcccacccc

SEQ ID NO: 1569133 - DNA, 15 bp, Homo sapiens
ccttatcccacccca

SEQ ID NO: 1569134 - DNA, 15 bp, Homo sapiens
cttatcccaccccag

SEQ ID NO: 1569135 - DNA, 15 bp, Homo sapiens
ttatcccaccccaga

SEQ ID NO: 1569136 - DNA, 15 bp, Homo sapiens
tatcccaccccagag

SEQ ID NO: 1569137 - DNA, 15 bp, Homo sapiens
atcccaccccagaga

SEQ ID NO: 1569138 - DNA, 15 bp, Homo sapiens
tcccaccccagagac

SEQ ID NO: 1569139 - DNA, 15 bp, Homo sapiens
cccaccccagagaca

SEQ ID NO: 1569140 - DNA, 15 bp, Homo sapiens
ccaccccagagacat

SEQ ID NO: 1569141 - DNA, 15 bp, Homo sapiens
caccccagagacatc

SEQ ID NO: 1569142 - DNA, 15 bp, Homo sapiens
accccagagacatcg

SEQ ID NO: 1569143 - DNA, 15 bp, Homo sapiens
ccccagagacatcgg

SEQ ID NO: 1569144 - DNA, 15 bp, Homo sapiens
cccagagacatcggc

SEQ ID NO: 1569145 - DNA, 15 bp, Homo sapiens
ccagagacatcggct

SEQ ID NO: 1569146 - DNA, 15 bp, Homo sapiens
cagagacatcggctg

SEQ ID NO: 1569147 - DNA, 15 bp, Homo sapiens
agagacatcggctgt

SEQ ID NO: 1569148 - DNA, 15 bp, Homo sapiens
gagacatcggctgtg

SEQ ID NO: 1569149 - DNA, 15 bp, Homo sapiens
agacatcggctgtga

SEQ ID NO: 1569150 - DNA, 15 bp, Homo sapiens
gacatcggctgtgac

SEQ ID NO: 1569151 - DNA, 15 bp, Homo sapiens
acatcggctgtgacc

SEQ ID NO: 1569152 - DNA, 15 bp, Homo sapiens
catcggctgtgacca

SEQ ID NO: 1569153 - DNA, 15 bp, Homo sapiens
atcggctgtgaccag

SEQ ID NO: 1569154 - DNA, 15 bp, Homo sapiens
tcggctgtgaccagc

SEQ ID NO: 1569155 - DNA, 15 bp, Homo sapiens
cggctgtgaccagca

SEQ ID NO: 1569156 - DNA, 15 bp, Homo sapiens
ggctgtgaccagcac

SEQ ID NO: 1569157 - DNA, 15 bp, Homo sapiens
gctgtgaccagcaca

SEQ ID NO: 1569158 - DNA, 15 bp, Homo sapiens
ctgtgaccagcacac

SEQ ID NO: 1569159 - DNA, 15 bp, Homo sapiens
tgtgaccagcacacc

SEQ ID NO: 1569160 - DNA, 15 bp, Homo sapiens
gtgaccagcacacca

SEQ ID NO: 1569161 - DNA, 15 bp, Homo sapiens
tgaccagcacaccag

SEQ ID NO: 1569162 - DNA, 15 bp, Homo sapiens
gaccagcacaccagc

SEQ ID NO: 1569163 - DNA, 15 bp, Homo sapiens
accagcacaccagct

SEQ ID NO: 1569164 - DNA, 15 bp, Homo sapiens
ccagcacaccagctg

SEQ ID NO: 1569165 - DNA, 15 bp, Homo sapiens
cagcacaccagctgc

SEQ ID NO: 1569166 - DNA, 15 bp, Homo sapiens
agcacaccagctgcc

SEQ ID NO: 1569167 - DNA, 15 bp, Homo sapiens
gcacaccagctgccc

SEQ ID NO: 1569168 - DNA, 15 bp, Homo sapiens
cacaccagctgcccg

SEQ ID NO: 1569169 - DNA, 15 bp, Homo sapiens
acaccagctgcccgg

SEQ ID NO: 1569170 - DNA, 15 bp, Homo sapiens
caccagctgcccggt

SEQ ID NO: 1569171 - DNA, 15 bp, Homo sapiens
accagctgcccggtg

SEQ ID NO: 1569172 - DNA, 15 bp, Homo sapiens
ccagctgcccggtgg

SEQ ID NO: 1569173 - DNA, 15 bp, Homo sapiens
cagctgcccggtggg

SEQ ID NO: 1569174 - DNA, 15 bp, Homo sapiens
agctgcccggtgggg

SEQ ID NO: 1569175 - DNA, 15 bp, Homo sapiens
gctgcccggtggggc

SEQ ID NO: 1569176 - DNA, 15 bp, Homo sapiens
ctgcccggtggggca

SEQ ID NO: 1569177 - DNA, 15 bp, Homo sapiens
tgcccggtggggcag

SEQ ID NO: 1569178 - DNA, 15 bp, Homo sapiens
gcccggtggggcaga

SEQ ID NO: 1569179 - DNA, 15 bp, Homo sapiens
cccggtggggcagac

SEQ ID NO: 1569180 - DNA, 15 bp, Homo sapiens
ccggtggggcagacc

SEQ ID NO: 1569181 - DNA, 15 bp, Homo sapiens
cggtggggcagacct

SEQ ID NO: 1569182 - DNA, 15 bp, Homo sapiens
ggtggggcagacctg

SEQ ID NO: 1569183 - DNA, 15 bp, Homo sapiens
gtggggcagacctgc

SEQ ID NO: 1569184 - DNA, 15 bp, Homo sapiens
tggggcagacctgct

SEQ ID NO: 1569185 - DNA, 15 bp, Homo sapiens
ggggcagacctgctg

SEQ ID NO: 1569186 - DNA, 15 bp, Homo sapiens
gggcagacctgctgc

SEQ ID NO: 1569187 - DNA, 15 bp, Homo sapiens
ggcagacctgctgcc

SEQ ID NO: 1569188 - DNA, 15 bp, Homo sapiens
gcagacctgctgccc

SEQ ID NO: 1569189 - DNA, 15 bp, Homo sapiens
cagacctgctgcccg

SEQ ID NO: 1569190 - DNA, 15 bp, Homo sapiens
agacctgctgcccga

SEQ ID NO: 1569191 - DNA, 15 bp, Homo sapiens
gacctgctgcccgag

SEQ ID NO: 1569192 - DNA, 15 bp, Homo sapiens
acctgctgcccgagc

SEQ ID NO: 1569193 - DNA, 15 bp, Homo sapiens
cctgctgcccgagcc

SEQ ID NO: 1569194 - DNA, 15 bp, Homo sapiens
ctgctgcccgagcct

SEQ ID NO: 1569195 - DNA, 15 bp, Homo sapiens
tgctgcccgagcctg

SEQ ID NO: 1569196 - DNA, 15 bp, Homo sapiens
gctgcccgagcctgg

SEQ ID NO: 1569197 - DNA, 15 bp, Homo sapiens
ctgcccgagcctggg

SEQ ID NO: 1569198 - DNA, 15 bp, Homo sapiens
tgcccgagcctgggt

SEQ ID NO: 1569199 - DNA, 15 bp, Homo sapiens
gcccgagcctgggtg

SEQ ID NO: 1569200 - DNA, 15 bp, Homo sapiens
cccgagcctgggtgg

SEQ ID NO: 1569201 - DNA, 15 bp, Homo sapiens
ccgagcctgggtggg

SEQ ID NO: 1569202 - DNA, 15 bp, Homo sapiens
cgagcctgggtggga

SEQ ID NO: 1569203 - DNA, 15 bp, Homo sapiens
gagcctgggtgggag

SEQ ID NO: 1569204 - DNA, 15 bp, Homo sapiens
agcctgggtgggagc

SEQ ID NO: 1569205 - DNA, 15 bp, Homo sapiens
gcctgggtgggagct

SEQ ID NO: 1569206 - DNA, 15 bp, Homo sapiens
cctgggtgggagctg

SEQ ID NO: 1569207 - DNA, 15 bp, Homo sapiens
ctgggtgggagctgg

SEQ ID NO: 1569208 - DNA, 15 bp, Homo sapiens
tgggtgggagctggg

SEQ ID NO: 1569209 - DNA, 15 bp, Homo sapiens
gggtgggagctgggc

SEQ ID NO: 1569210 - DNA, 15 bp, Homo sapiens
ggtgggagctgggcc

SEQ ID NO: 1569211 - DNA, 15 bp, Homo sapiens
gtgggagctgggcct

SEQ ID NO: 1569212 - DNA, 15 bp, Homo sapiens
tgggagctgggcctg

SEQ ID NO: 1569213 - DNA, 15 bp, Homo sapiens
gggagctgggcctgc

SEQ ID NO: 1569214 - DNA, 15 bp, Homo sapiens
ggagctgggcctgct

SEQ ID NO: 1569215 - DNA, 15 bp, Homo sapiens
gagctgggcctgctg

SEQ ID NO: 1569216 - DNA, 15 bp, Homo sapiens
agctgggcctgctgc

SEQ ID NO: 1569217 - DNA, 15 bp, Homo sapiens
gctgggcctgctgcc

SEQ ID NO: 1569218 - DNA, 15 bp, Homo sapiens
ctgggcctgctgcca

SEQ ID NO: 1569219 - DNA, 15 bp, Homo sapiens
tgggcctgctgccag

SEQ ID NO: 1569220 - DNA, 15 bp, Homo sapiens
gggcctgctgccagt

SEQ ID NO: 1569221 - DNA, 15 bp, Homo sapiens
ggcctgctgccagtt

SEQ ID NO: 1569222 - DNA, 15 bp, Homo sapiens
gcctgctgccagttg

SEQ ID NO: 1569223 - DNA, 15 bp, Homo sapiens
cctgctgccagttgc

SEQ ID NO: 1569224 - DNA, 15 bp, Homo sapiens
ctgctgccagttgcc

SEQ ID NO: 1569225 - DNA, 15 bp, Homo sapiens
tgctgccagttgccc

SEQ ID NO: 1569226 - DNA, 15 bp, Homo sapiens
gctgccagttgcccc

SEQ ID NO: 1569227 - DNA, 15 bp, Homo sapiens
ctgccagttgcccca

SEQ ID NO: 1569228 - DNA, 15 bp, Homo sapiens
tgccagttgccccat

SEQ ID NO: 1569229 - DNA, 15 bp, Homo sapiens
gccagttgccccatg

SEQ ID NO: 1569230 - DNA, 15 bp, Homo sapiens
ccagttgccccatgt

SEQ ID NO: 1569231 - DNA, 15 bp, Homo sapiens
cagttgccccatgtg

SEQ ID NO: 1569232 - DNA, 15 bp, Homo sapiens
agttgccccatgtga

SEQ ID NO: 1569233 - DNA, 15 bp, Homo sapiens
gttgccccatgtgag

SEQ ID NO: 1569234 - DNA, 15 bp, Homo sapiens
ttgccccatgtgagt

SEQ ID NO: 1569235 - DNA, 15 bp, Homo sapiens
tgccccatgtgagtg

SEQ ID NO: 1569236 - DNA, 15 bp, Homo sapiens
gccccatgtgagtgc

SEQ ID NO: 1569237 - DNA, 15 bp, Homo sapiens
ccccatgtgagtgcc

SEQ ID NO: 1569238 - DNA, 15 bp, Homo sapiens
cccatgtgagtgcct

SEQ ID NO: 1569239 - DNA, 15 bp, Homo sapiens
ccatgtgagtgcctc

SEQ ID NO: 1569240 - DNA, 15 bp, Homo sapiens
catgtgagtgcctcc

SEQ ID NO: 1569241 - DNA, 15 bp, Homo sapiens
atgtgagtgcctccc

SEQ ID NO: 1569242 - DNA, 15 bp, Homo sapiens
tgtgagtgcctccct

SEQ ID NO: 1569243 - DNA, 15 bp, Homo sapiens
gtgagtgcctccctg

SEQ ID NO: 1569244 - DNA, 15 bp, Homo sapiens
tgagtgcctccctgc

SEQ ID NO: 1569245 - DNA, 15 bp, Homo sapiens
gagtgcctccctgcc

SEQ ID NO: 1569246 - DNA, 15 bp, Homo sapiens
agtgcctccctgcct

SEQ ID NO: 1569247 - DNA, 15 bp, Homo sapiens
gtgcctccctgcctg

SEQ ID NO: 1569248 - DNA, 15 bp, Homo sapiens
tgcctccctgcctgc

SEQ ID NO: 1569249 - DNA, 15 bp, Homo sapiens
gcctccctgcctgcc

SEQ ID NO: 1569250 - DNA, 15 bp, Homo sapiens
ctccctgcctgcccc

SEQ ID NO: 1569251 - DNA, 15 bp, Homo sapiens
tccctgcctgcccct

SEQ ID NO: 1569252 - DNA, 15 bp, Homo sapiens
ccctgcctgcccctg

SEQ ID NO: 1569253 - DNA, 15 bp, Homo sapiens
cctgcctgcccctgg

SEQ ID NO: 1569254 - DNA, 15 bp, Homo sapiens
ctgcctgcccctgga

SEQ ID NO: 1569255 - DNA, 15 bp, Homo sapiens
tgcctgcccctggat

SEQ ID NO: 1569256 - DNA, 15 bp, Homo sapiens
gcctgcccctggata

SEQ ID NO: 1569257 - DNA, 15 bp, Homo sapiens
cctgcccctggatag

SEQ ID NO: 1569258 - DNA, 15 bp, Homo sapiens
ctgcccctggatagg

SEQ ID NO: 1569259 - DNA, 15 bp, Homo sapiens
tgcccctggataggg

SEQ ID NO: 1569260 - DNA, 15 bp, Homo sapiens
gcccctggatagggg

SEQ ID NO: 1569261 - DNA, 15 bp, Homo sapiens
cccctggatagggga

SEQ ID NO: 1569262 - DNA, 15 bp, Homo sapiens
ccctggataggggag

SEQ ID NO: 1569263 - DNA, 15 bp, Homo sapiens
cctggataggggagc

SEQ ID NO: 1569264 - DNA, 15 bp, Homo sapiens
ctggataggggagct

SEQ ID NO: 1569265 - DNA, 15 bp, Homo sapiens
tggataggggagcta

SEQ ID NO: 1569266 - DNA, 15 bp, Homo sapiens
ggataggggagctaa

SEQ ID NO: 1569267 - DNA, 15 bp, Homo sapiens
gataggggagctaag

SEQ ID NO: 1569268 - DNA, 15 bp, Homo sapiens
ataggggagctaagc

SEQ ID NO: 1569269 - DNA, 15 bp, Homo sapiens
taggggagctaagcc

SEQ ID NO: 1569270 - DNA, 15 bp, Homo sapiens
aggggagctaagccc

SEQ ID NO: 1569271 - DNA, 15 bp, Homo sapiens
ggggagctaagccca

SEQ ID NO: 1569272 - DNA, 15 bp, Homo sapiens
gggagctaagcccag

SEQ ID NO: 1569273 - DNA, 15 bp, Homo sapiens
ggagctaagcccagt

SEQ ID NO: 1569274 - DNA, 15 bp, Homo sapiens
gagctaagcccagtg

SEQ ID NO: 1569275 - DNA, 15 bp, Homo sapiens
agctaagcccagtga

SEQ ID NO: 1569276 - DNA, 15 bp, Homo sapiens
gctaagcccagtgag

SEQ ID NO: 1569277 - DNA, 15 bp, Homo sapiens
ctaagcccagtgagg

SEQ ID NO: 1569278 - DNA, 15 bp, Homo sapiens
taagcccagtgaggg

SEQ ID NO: 1569279 - DNA, 15 bp, Homo sapiens
aagcccagtgagggg

SEQ ID NO: 1569280 - DNA, 15 bp, Homo sapiens
agcccagtgagggga

SEQ ID NO: 1569281 - DNA, 15 bp, Homo sapiens
gcccagtgaggggac

SEQ ID NO: 1569282 - DNA, 15 bp, Homo sapiens
cccagtgaggggaca

SEQ ID NO: 1569283 - DNA, 15 bp, Homo sapiens
ccagtgaggggacag

SEQ ID NO: 1569284 - DNA, 15 bp, Homo sapiens
cagtgaggggacagg

SEQ ID NO: 1569285 - DNA, 15 bp, Homo sapiens
agtgaggggacagga

SEQ ID NO: 1569286 - DNA, 15 bp, Homo sapiens
gtgaggggacaggaa

SEQ ID NO: 1569287 - DNA, 15 bp, Homo sapiens
tgaggggacaggaac

SEQ ID NO: 1569288 - DNA, 15 bp, Homo sapiens
gaggggacaggaaca

SEQ ID NO: 1569289 - DNA, 15 bp, Homo sapiens
aggggacaggaacat

SEQ ID NO: 1569290 - DNA, 15 bp, Homo sapiens
ggggacaggaacata

SEQ ID NO: 1569291 - DNA, 15 bp, Homo sapiens
gggacaggaacataa

SEQ ID NO: 1569292 - DNA, 15 bp, Homo sapiens
ggacaggaacataat

SEQ ID NO: 1569293 - DNA, 15 bp, Homo sapiens
gacaggaacataatg

SEQ ID NO: 1569294 - DNA, 15 bp, Homo sapiens
acaggaacataatgc

SEQ ID NO: 1569295 - DNA, 15 bp, Homo sapiens
caggaacataatgcc

SEQ ID NO: 1569296 - DNA, 15 bp, Homo sapiens
aggaacataatgcca

SEQ ID NO: 1569297 - DNA, 15 bp, Homo sapiens
ggaacataatgccat

SEQ ID NO: 1569298 - DNA, 15 bp, Homo sapiens
gaacataatgccatt

SEQ ID NO: 1569299 - DNA, 15 bp, Homo sapiens
aacataatgccattc

SEQ ID NO: 1569300 - DNA, 15 bp, Homo sapiens
acataatgccattct

SEQ ID NO: 1569301 - DNA, 15 bp, Homo sapiens
cataatgccattctg

SEQ ID NO: 1569302 - DNA, 15 bp, Homo sapiens
ataatgccattctgt

SEQ ID NO: 1569303 - DNA, 15 bp, Homo sapiens
taatgccattctgtg

SEQ ID NO: 1569304 - DNA, 15 bp, Homo sapiens
aatgccattctgtgc

SEQ ID NO: 1569305 - DNA, 15 bp, Homo sapiens
atgccattctgtgct

SEQ ID NO: 1569306 - DNA, 15 bp, Homo sapiens
tgccattctgtgctc

SEQ ID NO: 1569307 - DNA, 15 bp, Homo sapiens
gccattctgtgctcc

SEQ ID NO: 1569308 - DNA, 15 bp, Homo sapiens
ccattctgtgctccc

SEQ ID NO: 1569309 - DNA, 15 bp, Homo sapiens
cattctgtgctccct

SEQ ID NO: 1569310 - DNA, 15 bp, Homo sapiens
attctgtgctccctt

SEQ ID NO: 1569311 - DNA, 15 bp, Homo sapiens
ttctgtgctcccttc

SEQ ID NO: 1569312 - DNA, 15 bp, Homo sapiens
tctgtgctcccttcc

SEQ ID NO: 1569313 - DNA, 15 bp, Homo sapiens
ctgtgctcccttccc

SEQ ID NO: 1569314 - DNA, 15 bp, Homo sapiens
tgtgctcccttcccc

SEQ ID NO: 1569315 - DNA, 15 bp, Homo sapiens
gtgctcccttccccg

SEQ ID NO: 1569316 - DNA, 15 bp, Homo sapiens
tgctcccttccccgc

SEQ ID NO: 1569317 - DNA, 15 bp, Homo sapiens
gctcccttccccgcc

SEQ ID NO: 1569318 - DNA, 15 bp, Homo sapiens
ctcccttccccgcca

SEQ ID NO: 1569319 - DNA, 15 bp, Homo sapiens
tcccttccccgccag

SEQ ID NO: 1569320 - DNA, 15 bp, Homo sapiens
cccttccccgccagg

SEQ ID NO: 1569321 - DNA, 15 bp, Homo sapiens
ccttccccgccaggc

SEQ ID NO: 1569322 - DNA, 15 bp, Homo sapiens
cttccccgccaggct

SEQ ID NO: 1569323 - DNA, 15 bp, Homo sapiens
ttccccgccaggctg

SEQ ID NO: 1569324 - DNA, 15 bp, Homo sapiens
tccccgccaggctgt

SEQ ID NO: 1569325 - DNA, 15 bp, Homo sapiens
ccccgccaggctgtg

SEQ ID NO: 1569326 - DNA, 15 bp, Homo sapiens
cccgccaggctgtgt

SEQ ID NO: 1569327 - DNA, 15 bp, Homo sapiens
ccgccaggctgtgtg

SEQ ID NO: 1569328 - DNA, 15 bp, Homo sapiens
cgccaggctgtgtgc

SEQ ID NO: 1569329 - DNA, 15 bp, Homo sapiens
gccaggctgtgtgct

SEQ ID NO: 1569330 - DNA, 15 bp, Homo sapiens
ccaggctgtgtgctg

SEQ ID NO: 1569331 - DNA, 15 bp, Homo sapiens
caggctgtgtgctgc

SEQ ID NO: 1569332 - DNA, 15 bp, Homo sapiens
aggctgtgtgctgcg

SEQ ID NO: 1569333 - DNA, 15 bp, Homo sapiens
ggctgtgtgctgcga

SEQ ID NO: 1569334 - DNA, 15 bp, Homo sapiens
gctgtgtgctgcgag

SEQ ID NO: 1569335 - DNA, 15 bp, Homo sapiens
ctgtgtgctgcgagg

SEQ ID NO: 1569336 - DNA, 15 bp, Homo sapiens
tgtgtgctgcgagga

SEQ ID NO: 1569337 - DNA, 15 bp, Homo sapiens
gtgtgctgcgaggat

SEQ ID NO: 1569338 - DNA, 15 bp, Homo sapiens
tgtgctgcgaggatc

SEQ ID NO: 1569339 - DNA, 15 bp, Homo sapiens
gtgctgcgaggatcg

SEQ ID NO: 1569340 - DNA, 15 bp, Homo sapiens
tgctgcgaggatcgc

SEQ ID NO: 1569341 - DNA, 15 bp, Homo sapiens
gctgcgaggatcgcc

SEQ ID NO: 1569342 - DNA, 15 bp, Homo sapiens
ctgcgaggatcgcca

SEQ ID NO: 1569343 - DNA, 15 bp, Homo sapiens
tgcgaggatcgccag

SEQ ID NO: 1569344 - DNA, 15 bp, Homo sapiens
gcgaggatcgccagc

SEQ ID NO: 1569345 - DNA, 15 bp, Homo sapiens
cgaggatcgccagca

SEQ ID NO: 1569346 - DNA, 15 bp, Homo sapiens
gaggatcgccagcac

SEQ ID NO: 1569347 - DNA, 15 bp, Homo sapiens
aggatcgccagcact

SEQ ID NO: 1569348 - DNA, 15 bp, Homo sapiens
ggatcgccagcactg

SEQ ID NO: 1569349 - DNA, 15 bp, Homo sapiens
gatcgccagcactgc

SEQ ID NO: 1569350 - DNA, 15 bp, Homo sapiens
atcgccagcactgct

SEQ ID NO: 1569351 - DNA, 15 bp, Homo sapiens
tcgccagcactgctg

SEQ ID NO: 1569352 - DNA, 15 bp, Homo sapiens
cgccagcactgctgc

SEQ ID NO: 1569353 - DNA, 15 bp, Homo sapiens
gccagcactgctgcc

SEQ ID NO: 1569354 - DNA, 15 bp, Homo sapiens
cagcactgctgcccg

SEQ ID NO: 1569355 - DNA, 15 bp, Homo sapiens
agcactgctgcccgg

SEQ ID NO: 1569356 - DNA, 15 bp, Homo sapiens
gcactgctgcccggc

SEQ ID NO: 1569357 - DNA, 15 bp, Homo sapiens
cactgctgcccggct

SEQ ID NO: 1569358 - DNA, 15 bp, Homo sapiens
actgctgcccggctg

SEQ ID NO: 1569359 - DNA, 15 bp, Homo sapiens
ctgctgcccggctgg

SEQ ID NO: 1569360 - DNA, 15 bp, Homo sapiens
tgctgcccggctggc

SEQ ID NO: 1569361 - DNA, 15 bp, Homo sapiens
gctgcccggctggct

SEQ ID NO: 1569362 - DNA, 15 bp, Homo sapiens
ctgcccggctggcta

SEQ ID NO: 1569363 - DNA, 15 bp, Homo sapiens
tgcccggctggctac

SEQ ID NO: 1569364 - DNA, 15 bp, Homo sapiens
gcccggctggctaca

SEQ ID NO: 1569365 - DNA, 15 bp, Homo sapiens
cccggctggctacac

SEQ ID NO: 1569366 - DNA, 15 bp, Homo sapiens
ccggctggctacacc

SEQ ID NO: 1569367 - DNA, 15 bp, Homo sapiens
cggctggctacacct

SEQ ID NO: 1569368 - DNA, 15 bp, Homo sapiens
ggctggctacacctg

SEQ ID NO: 1569369 - DNA, 15 bp, Homo sapiens
gctggctacacctgc

SEQ ID NO: 1569370 - DNA, 15 bp, Homo sapiens
ctggctacacctgca

SEQ ID NO: 1569371 - DNA, 15 bp, Homo sapiens
tggctacacctgcaa

SEQ ID NO: 1569372 - DNA, 15 bp, Homo sapiens
ggctacacctgcaac

SEQ ID NO: 1569373 - DNA, 15 bp, Homo sapiens
gctacacctgcaacg

SEQ ID NO: 1569374 - DNA, 15 bp, Homo sapiens
ctacacctgcaacgt

SEQ ID NO: 1569375 - DNA, 15 bp, Homo sapiens
tacacctgcaacgtg

SEQ ID NO: 1569376 - DNA, 15 bp, Homo sapiens
acacctgcaacgtga

SEQ ID NO: 1569377 - DNA, 15 bp, Homo sapiens
cacctgcaacgtgaa

SEQ ID NO: 1569378 - DNA, 15 bp, Homo sapiens
acctgcaacgtgaag

SEQ ID NO: 1569379 - DNA, 15 bp, Homo sapiens
cctgcaacgtgaagg

SEQ ID NO: 1569380 - DNA, 15 bp, Homo sapiens
ctgcaacgtgaaggc

SEQ ID NO: 1569381 - DNA, 15 bp, Homo sapiens
tgcaacgtgaaggct

SEQ ID NO: 1569382 - DNA, 15 bp, Homo sapiens
gcaacgtgaaggctc

SEQ ID NO: 1569383 - DNA, 15 bp, Homo sapiens
caacgtgaaggctcg

SEQ ID NO: 1569384 - DNA, 15 bp, Homo sapiens
aacgtgaaggctcga

SEQ ID NO: 1569385 - DNA, 15 bp, Homo sapiens
acgtgaaggctcgat

SEQ ID NO: 1569386 - DNA, 15 bp, Homo sapiens
cgtgaaggctcgatc

SEQ ID NO: 1569387 - DNA, 15 bp, Homo sapiens
gtgaaggctcgatcc

SEQ ID NO: 1569388 - DNA, 15 bp, Homo sapiens
tgaaggctcgatcct

SEQ ID NO: 1569389 - DNA, 15 bp, Homo sapiens
gaaggctcgatcctg

SEQ ID NO: 1569390 - DNA, 15 bp, Homo sapiens
aaggctcgatcctgc

SEQ ID NO: 1569391 - DNA, 15 bp, Homo sapiens
aggctcgatcctgcg

SEQ ID NO: 1569392 - DNA, 15 bp, Homo sapiens
ggctcgatcctgcga

SEQ ID NO: 1569393 - DNA, 15 bp, Homo sapiens
gctcgatcctgcgag

SEQ ID NO: 1569394 - DNA, 15 bp, Homo sapiens
ctcgatcctgcgaga

SEQ ID NO: 1569395 - DNA, 15 bp, Homo sapiens
tcgatcctgcgagaa

SEQ ID NO: 1569396 - DNA, 15 bp, Homo sapiens
cgatcctgcgagaag

SEQ ID NO: 1569397 - DNA, 15 bp, Homo sapiens
gatcctgcgagaagg

SEQ ID NO: 1569398 - DNA, 15 bp, Homo sapiens
atcctgcgagaagga

SEQ ID NO: 1569399 - DNA, 15 bp, Homo sapiens
tcctgcgagaaggaa

SEQ ID NO: 1569400 - DNA, 15 bp, Homo sapiens
cctgcgagaaggaag

SEQ ID NO: 1569401 - DNA, 15 bp, Homo sapiens
ctgcgagaaggaagt

SEQ ID NO: 1569402 - DNA, 15 bp, Homo sapiens
tgcgagaaggaagtg

SEQ ID NO: 1569403 - DNA, 15 bp, Homo sapiens
gcgagaaggaagtgg

SEQ ID NO: 1569404 - DNA, 15 bp, Homo sapiens
cgagaaggaagtggt

SEQ ID NO: 1569405 - DNA, 15 bp, Homo sapiens
gagaaggaagtggtc

SEQ ID NO: 1569406 - DNA, 15 bp, Homo sapiens
agaaggaagtggtct

SEQ ID NO: 1569407 - DNA, 15 bp, Homo sapiens
gaaggaagtggtctc

SEQ ID NO: 1569408 - DNA, 15 bp, Homo sapiens
aaggaagtggtctct

SEQ ID NO: 1569409 - DNA, 15 bp, Homo sapiens
aggaagtggtctctg

SEQ ID NO: 1569410 - DNA, 15 bp, Homo sapiens
ggaagtggtctctgc

SEQ ID NO: 1569411 - DNA, 15 bp, Homo sapiens
gaagtggtctctgcc

SEQ ID NO: 1569412 - DNA, 15 bp, Homo sapiens
aagtggtctctgccc

SEQ ID NO: 1569413 - DNA, 15 bp, Homo sapiens
agtggtctctgccca

SEQ ID NO: 1569414 - DNA, 15 bp, Homo sapiens
gtggtctctgcccag

SEQ ID NO: 1569415 - DNA, 15 bp, Homo sapiens
tggtctctgcccagc

SEQ ID NO: 1569416 - DNA, 15 bp, Homo sapiens
ggtctctgcccagcc

SEQ ID NO: 1569417 - DNA, 15 bp, Homo sapiens
gtctctgcccagcct

SEQ ID NO: 1569418 - DNA, 15 bp, Homo sapiens
tctctgcccagcctg

SEQ ID NO: 1569419 - DNA, 15 bp, Homo sapiens
ctctgcccagcctgc

SEQ ID NO: 1569420 - DNA, 15 bp, Homo sapiens
tctgcccagcctgcc

SEQ ID NO: 1569421 - DNA, 15 bp, Homo sapiens
ctgcccagcctgcca

SEQ ID NO: 1569422 - DNA, 15 bp, Homo sapiens
tgcccagcctgccac

SEQ ID NO: 1569423 - DNA, 15 bp, Homo sapiens
gcccagcctgccacc

SEQ ID NO: 1569424 - DNA, 15 bp, Homo sapiens
cccagcctgccacct

SEQ ID NO: 1569425 - DNA, 15 bp, Homo sapiens
ccagcctgccacctt

SEQ ID NO: 1569426 - DNA, 15 bp, Homo sapiens
cagcctgccaccttc

SEQ ID NO: 1569427 - DNA, 15 bp, Homo sapiens
agcctgccaccttcc

SEQ ID NO: 1569428 - DNA, 15 bp, Homo sapiens
gcctgccaccttcct

SEQ ID NO: 1569429 - DNA, 15 bp, Homo sapiens
cctgccaccttcctg

SEQ ID NO: 1569430 - DNA, 15 bp, Homo sapiens
ctgccaccttcctgg

SEQ ID NO: 1569431 - DNA, 15 bp, Homo sapiens
tgccaccttcctggc

SEQ ID NO: 1569432 - DNA, 15 bp, Homo sapiens
gccaccttcctggcc

SEQ ID NO: 1569433 - DNA, 15 bp, Homo sapiens
ccaccttcctggccc

SEQ ID NO: 1569434 - DNA, 15 bp, Homo sapiens
caccttcctggcccg

SEQ ID NO: 1569435 - DNA, 15 bp, Homo sapiens
accttcctggcccgt

SEQ ID NO: 1569436 - DNA, 15 bp, Homo sapiens
ccttcctggcccgta

SEQ ID NO: 1569437 - DNA, 15 bp, Homo sapiens
cttcctggcccgtag

SEQ ID NO: 1569438 - DNA, 15 bp, Homo sapiens
ttcctggcccgtagc

SEQ ID NO: 1569439 - DNA, 15 bp, Homo sapiens
tcctggcccgtagcc

SEQ ID NO: 1569440 - DNA, 15 bp, Homo sapiens
cctggcccgtagccc

SEQ ID NO: 1569441 - DNA, 15 bp, Homo sapiens
ctggcccgtagccct

SEQ ID NO: 1569442 - DNA, 15 bp, Homo sapiens
tggcccgtagccctc

SEQ ID NO: 1569443 - DNA, 15 bp, Homo sapiens
ggcccgtagccctca

SEQ ID NO: 1569444 - DNA, 15 bp, Homo sapiens
gcccgtagccctcac

SEQ ID NO: 1569445 - DNA, 15 bp, Homo sapiens
cccgtagccctcacg

SEQ ID NO: 1569446 - DNA, 15 bp, Homo sapiens
ccgtagccctcacgt

SEQ ID NO: 1569447 - DNA, 15 bp, Homo sapiens
cgtagccctcacgtg

SEQ ID NO: 1569448 - DNA, 15 bp, Homo sapiens
gtagccctcacgtgg

SEQ ID NO: 1569449 - DNA, 15 bp, Homo sapiens
tagccctcacgtggg

SEQ ID NO: 1569450 - DNA, 15 bp, Homo sapiens
agccctcacgtgggt

SEQ ID NO: 1569451 - DNA, 15 bp, Homo sapiens
gccctcacgtgggtg

SEQ ID NO: 1569452 - DNA, 15 bp, Homo sapiens
ccctcacgtgggtgt

SEQ ID NO: 1569453 - DNA, 15 bp, Homo sapiens
cctcacgtgggtgtg

SEQ ID NO: 1569454 - DNA, 15 bp, Homo sapiens
ctcacgtgggtgtga

SEQ ID NO: 1569455 - DNA, 15 bp, Homo sapiens
tcacgtgggtgtgaa

SEQ ID NO: 1569456 - DNA, 15 bp, Homo sapiens
cacgtgggtgtgaag

SEQ ID NO: 1569457 - DNA, 15 bp, Homo sapiens
acgtgggtgtgaagg

SEQ ID NO: 1569458 - DNA, 15 bp, Homo sapiens
cgtgggtgtgaagga

SEQ ID NO: 1569459 - DNA, 15 bp, Homo sapiens
gtgggtgtgaaggac

SEQ ID NO: 1569460 - DNA, 15 bp, Homo sapiens
tgggtgtgaaggacg

SEQ ID NO: 1569461 - DNA, 15 bp, Homo sapiens
gggtgtgaaggacgt

SEQ ID NO: 1569462 - DNA, 15 bp, Homo sapiens
ggtgtgaaggacgtg

SEQ ID NO: 1569463 - DNA, 15 bp, Homo sapiens
gtgtgaaggacgtgg

SEQ ID NO: 1569464 - DNA, 15 bp, Homo sapiens
tgtgaaggacgtgga

SEQ ID NO: 1569465 - DNA, 15 bp, Homo sapiens
gtgaaggacgtggag

SEQ ID NO: 1569466 - DNA, 15 bp, Homo sapiens
tgaaggacgtggagt

SEQ ID NO: 1569467 - DNA, 15 bp, Homo sapiens
gaaggacgtggagtg

SEQ ID NO: 1569468 - DNA, 15 bp, Homo sapiens
aaggacgtggagtgt

SEQ ID NO: 1569469 - DNA, 15 bp, Homo sapiens
aggacgtggagtgtg

SEQ ID NO: 1569470 - DNA, 15 bp, Homo sapiens
ggacgtggagtgtgg

SEQ ID NO: 1569471 - DNA, 15 bp, Homo sapiens
gacgtggagtgtggg

SEQ ID NO: 1569472 - DNA, 15 bp, Homo sapiens
acgtggagtgtgggg

SEQ ID NO: 1569473 - DNA, 15 bp, Homo sapiens
cgtggagtgtgggga

SEQ ID NO: 1569474 - DNA, 15 bp, Homo sapiens
gtggagtgtggggaa

SEQ ID NO: 1569475 - DNA, 15 bp, Homo sapiens
tggagtgtggggaag

SEQ ID NO: 1569476 - DNA, 15 bp, Homo sapiens
ggagtgtggggaagg

SEQ ID NO: 1569477 - DNA, 15 bp, Homo sapiens
gagtgtggggaagga

SEQ ID NO: 1569478 - DNA, 15 bp, Homo sapiens
agtgtggggaaggac

SEQ ID NO: 1569479 - DNA, 15 bp, Homo sapiens
gtgtggggaaggaca

SEQ ID NO: 1569480 - DNA, 15 bp, Homo sapiens
tgtggggaaggacac

SEQ ID NO: 1569481 - DNA, 15 bp, Homo sapiens
gtggggaaggacact

SEQ ID NO: 1569482 - DNA, 15 bp, Homo sapiens
tggggaaggacactt

SEQ ID NO: 1569483 - DNA, 15 bp, Homo sapiens
ggggaaggacacttc

SEQ ID NO: 1569484 - DNA, 15 bp, Homo sapiens
gggaaggacacttct

SEQ ID NO: 1569485 - DNA, 15 bp, Homo sapiens
ggaaggacacttctg

SEQ ID NO: 1569486 - DNA, 15 bp, Homo sapiens
gaaggacacttctgc

SEQ ID NO: 1569487 - DNA, 15 bp, Homo sapiens
aaggacacttctgcc

SEQ ID NO: 1569488 - DNA, 15 bp, Homo sapiens
aggacacttctgcca

SEQ ID NO: 1569489 - DNA, 15 bp, Homo sapiens
ggacacttctgccat

SEQ ID NO: 1569490 - DNA, 15 bp, Homo sapiens
gacacttctgccatg

SEQ ID NO: 1569491 - DNA, 15 bp, Homo sapiens
acacttctgccatga

SEQ ID NO: 1569492 - DNA, 15 bp, Homo sapiens
cacttctgccatgat

SEQ ID NO: 1569493 - DNA, 15 bp, Homo sapiens
acttctgccatgata

SEQ ID NO: 1569494 - DNA, 15 bp, Homo sapiens
cttctgccatgataa

SEQ ID NO: 1569495 - DNA, 15 bp, Homo sapiens
ttctgccatgataac

SEQ ID NO: 1569496 - DNA, 15 bp, Homo sapiens
tctgccatgataacc

SEQ ID NO: 1569497 - DNA, 15 bp, Homo sapiens
ctgccatgataacca

SEQ ID NO: 1569498 - DNA, 15 bp, Homo sapiens
tgccatgataaccag

SEQ ID NO: 1569499 - DNA, 15 bp, Homo sapiens
gccatgataaccaga

SEQ ID NO: 1569500 - DNA, 15 bp, Homo sapiens
ccatgataaccagac

SEQ ID NO: 1569501 - DNA, 15 bp, Homo sapiens
catgataaccagacc

SEQ ID NO: 1569502 - DNA, 15 bp, Homo sapiens
atgataaccagacct

SEQ ID NO: 1569503 - DNA, 15 bp, Homo sapiens
tgataaccagacctg

SEQ ID NO: 1569504 - DNA, 15 bp, Homo sapiens
gataaccagacctgc

SEQ ID NO: 1569505 - DNA, 15 bp, Homo sapiens
ataaccagacctgct

SEQ ID NO: 1569506 - DNA, 15 bp, Homo sapiens
taaccagacctgctg

SEQ ID NO: 1569507 - DNA, 15 bp, Homo sapiens
aaccagacctgctgc

SEQ ID NO: 1569508 - DNA, 15 bp, Homo sapiens
accagacctgctgcc

SEQ ID NO: 1569509 - DNA, 15 bp, Homo sapiens
ccagacctgctgccg

SEQ ID NO: 1569510 - DNA, 15 bp, Homo sapiens
cagacctgctgccga

SEQ ID NO: 1569511 - DNA, 15 bp, Homo sapiens
agacctgctgccgag

SEQ ID NO: 1569512 - DNA, 15 bp, Homo sapiens
gacctgctgccgaga

SEQ ID NO: 1569513 - DNA, 15 bp, Homo sapiens
acctgctgccgagac

SEQ ID NO: 1569514 - DNA, 15 bp, Homo sapiens
cctgctgccgagaca

SEQ ID NO: 1569515 - DNA, 15 bp, Homo sapiens
ctgctgccgagacaa

SEQ ID NO: 1569516 - DNA, 15 bp, Homo sapiens
tgctgccgagacaac

SEQ ID NO: 1569517 - DNA, 15 bp, Homo sapiens
gctgccgagacaacc

SEQ ID NO: 1569518 - DNA, 15 bp, Homo sapiens
ctgccgagacaaccg

SEQ ID NO: 1569519 - DNA, 15 bp, Homo sapiens
tgccgagacaaccga

SEQ ID NO: 1569520 - DNA, 15 bp, Homo sapiens
gccgagacaaccgac

SEQ ID NO: 1569521 - DNA, 15 bp, Homo sapiens
ccgagacaaccgaca

SEQ ID NO: 1569522 - DNA, 15 bp, Homo sapiens
cgagacaaccgacag

SEQ ID NO: 1569523 - DNA, 15 bp, Homo sapiens
gagacaaccgacagg

SEQ ID NO: 1569524 - DNA, 15 bp, Homo sapiens
agacaaccgacaggg

SEQ ID NO: 1569525 - DNA, 15 bp, Homo sapiens
gacaaccgacagggc

SEQ ID NO: 1569526 - DNA, 15 bp, Homo sapiens
acaaccgacagggct

SEQ ID NO: 1569527 - DNA, 15 bp, Homo sapiens
caaccgacagggctg

SEQ ID NO: 1569528 - DNA, 15 bp, Homo sapiens
aaccgacagggctgg

SEQ ID NO: 1569529 - DNA, 15 bp, Homo sapiens
accgacagggctggg

SEQ ID NO: 1569530 - DNA, 15 bp, Homo sapiens
ccgacagggctgggc

SEQ ID NO: 1569531 - DNA, 15 bp, Homo sapiens
cgacagggctgggcc

SEQ ID NO: 1569532 - DNA, 15 bp, Homo sapiens
gacagggctgggcct

SEQ ID NO: 1569533 - DNA, 15 bp, Homo sapiens
acagggctgggcctg

SEQ ID NO: 1569534 - DNA, 15 bp, Homo sapiens
cagggctgggcctgc

SEQ ID NO: 1569535 - DNA, 15 bp, Homo sapiens
agggctgggcctgct

SEQ ID NO: 1569536 - DNA, 15 bp, Homo sapiens
gggctgggcctgctg

SEQ ID NO: 1569537 - DNA, 15 bp, Homo sapiens
ggctgggcctgctgt

SEQ ID NO: 1569538 - DNA, 15 bp, Homo sapiens
gctgggcctgctgtc

SEQ ID NO: 1569539 - DNA, 15 bp, Homo sapiens
ctgggcctgctgtcc

SEQ ID NO: 1569540 - DNA, 15 bp, Homo sapiens
tgggcctgctgtccc

SEQ ID NO: 1569541 - DNA, 15 bp, Homo sapiens
gggcctgctgtccct

SEQ ID NO: 1569542 - DNA, 15 bp, Homo sapiens
ggcctgctgtcccta

SEQ ID NO: 1569543 - DNA, 15 bp, Homo sapiens
gcctgctgtccctac

SEQ ID NO: 1569544 - DNA, 15 bp, Homo sapiens
cctgctgtccctacc

SEQ ID NO: 1569545 - DNA, 15 bp, Homo sapiens
ctgctgtccctaccg

SEQ ID NO: 1569546 - DNA, 15 bp, Homo sapiens
tgctgtccctaccgc

SEQ ID NO: 1569547 - DNA, 15 bp, Homo sapiens
gctgtccctaccgcc

SEQ ID NO: 1569548 - DNA, 15 bp, Homo sapiens
ctgtccctaccgcca

SEQ ID NO: 1569549 - DNA, 15 bp, Homo sapiens
tgtccctaccgccag

SEQ ID NO: 1569550 - DNA, 15 bp, Homo sapiens
gtccctaccgccagg

SEQ ID NO: 1569551 - DNA, 15 bp, Homo sapiens
tccctaccgccaggt

SEQ ID NO: 1569552 - DNA, 15 bp, Homo sapiens
ccctaccgccaggtc

SEQ ID NO: 1569553 - DNA, 15 bp, Homo sapiens
cctaccgccaggtca

SEQ ID NO: 1569554 - DNA, 15 bp, Homo sapiens
ctaccgccaggtcag

SEQ ID NO: 1569555 - DNA, 15 bp, Homo sapiens
taccgccaggtcagt

SEQ ID NO: 1569556 - DNA, 15 bp, Homo sapiens
accgccaggtcagtg

SEQ ID NO: 1569557 - DNA, 15 bp, Homo sapiens
ccgccaggtcagtgc

SEQ ID NO: 1569558 - DNA, 15 bp, Homo sapiens
cgccaggtcagtgcc

SEQ ID NO: 1569559 - DNA, 15 bp, Homo sapiens
gccaggtcagtgcca

SEQ ID NO: 1569560 - DNA, 15 bp, Homo sapiens
ccaggtcagtgccaa

SEQ ID NO: 1569561 - DNA, 15 bp, Homo sapiens
caggtcagtgccaac

SEQ ID NO: 1569562 - DNA, 15 bp, Homo sapiens
aggtcagtgccaacc

SEQ ID NO: 1569563 - DNA, 15 bp, Homo sapiens
ggtcagtgccaaccc

SEQ ID NO: 1569564 - DNA, 15 bp, Homo sapiens
gtcagtgccaacccc

SEQ ID NO: 1569565 - DNA, 15 bp, Homo sapiens
tcagtgccaaccccc

SEQ ID NO: 1569566 - DNA, 15 bp, Homo sapiens
cagtgccaaccccca

SEQ ID NO: 1569567 - DNA, 15 bp, Homo sapiens
agtgccaacccccat

SEQ ID NO: 1569568 - DNA, 15 bp, Homo sapiens
gtgccaacccccatc

SEQ ID NO: 1569569 - DNA, 15 bp, Homo sapiens
tgccaacccccatcc

SEQ ID NO: 1569570 - DNA, 15 bp, Homo sapiens
gccaacccccatcct

SEQ ID NO: 1569571 - DNA, 15 bp, Homo sapiens
ccaacccccatcctg

SEQ ID NO: 1569572 - DNA, 15 bp, Homo sapiens
caacccccatcctgg

SEQ ID NO: 1569573 - DNA, 15 bp, Homo sapiens
aacccccatcctggg

SEQ ID NO: 1569574 - DNA, 15 bp, Homo sapiens
acccccatcctgggg

SEQ ID NO: 1569575 - DNA, 15 bp, Homo sapiens
cccccatcctggggc

SEQ ID NO: 1569576 - DNA, 15 bp, Homo sapiens
ccccatcctggggct

SEQ ID NO: 1569577 - DNA, 15 bp, Homo sapiens
cccatcctggggctg

SEQ ID NO: 1569578 - DNA, 15 bp, Homo sapiens
ccatcctggggctgg

SEQ ID NO: 1569579 - DNA, 15 bp, Homo sapiens
catcctggggctggg

SEQ ID NO: 1569580 - DNA, 15 bp, Homo sapiens
atcctggggctgggt

SEQ ID NO: 1569581 - DNA, 15 bp, Homo sapiens
tcctggggctgggta

SEQ ID NO: 1569582 - DNA, 15 bp, Homo sapiens
cctggggctgggtat

SEQ ID NO: 1569583 - DNA, 15 bp, Homo sapiens
ctggggctgggtatg

SEQ ID NO: 1569584 - DNA, 15 bp, Homo sapiens
tggggctgggtatgg

SEQ ID NO: 1569585 - DNA, 15 bp, Homo sapiens
ggggctgggtatggc

SEQ ID NO: 1569586 - DNA, 15 bp, Homo sapiens
gggctgggtatggcc

SEQ ID NO: 1569587 - DNA, 15 bp, Homo sapiens
ggctgggtatggcca

SEQ ID NO: 1569588 - DNA, 15 bp, Homo sapiens
gctgggtatggccag

SEQ ID NO: 1569589 - DNA, 15 bp, Homo sapiens
ctgggtatggccagg

SEQ ID NO: 1569590 - DNA, 15 bp, Homo sapiens
tgggtatggccaggg

SEQ ID NO: 1569591 - DNA, 15 bp, Homo sapiens
gggtatggccaggga

SEQ ID NO: 1569592 - DNA, 15 bp, Homo sapiens
ggtatggccagggac

SEQ ID NO: 1569593 - DNA, 15 bp, Homo sapiens
gtatggccagggacc

SEQ ID NO: 1569594 - DNA, 15 bp, Homo sapiens
tatggccagggacca

SEQ ID NO: 1569595 - DNA, 15 bp, Homo sapiens
atggccagggaccag

SEQ ID NO: 1569596 - DNA, 15 bp, Homo sapiens
tggccagggaccagg

SEQ ID NO: 1569597 - DNA, 15 bp, Homo sapiens
ggccagggaccaggt

SEQ ID NO: 1569598 - DNA, 15 bp, Homo sapiens
gccagggaccaggtc

SEQ ID NO: 1569599 - DNA, 15 bp, Homo sapiens
ccagggaccaggtcc

SEQ ID NO: 1569600 - DNA, 15 bp, Homo sapiens
cagggaccaggtccc

SEQ ID NO: 1569601 - DNA, 15 bp, Homo sapiens
agggaccaggtccca

SEQ ID NO: 1569602 - DNA, 15 bp, Homo sapiens
gggaccaggtcccac

SEQ ID NO: 1569603 - DNA, 15 bp, Homo sapiens
ggaccaggtcccacc

SEQ ID NO: 1569604 - DNA, 15 bp, Homo sapiens
gaccaggtcccacct

SEQ ID NO: 1569605 - DNA, 15 bp, Homo sapiens
accaggtcccacctc

SEQ ID NO: 1569606 - DNA, 15 bp, Homo sapiens
ccaggtcccacctcg

SEQ ID NO: 1569607 - DNA, 15 bp, Homo sapiens
caggtcccacctcgt

SEQ ID NO: 1569608 - DNA, 15 bp, Homo sapiens
aggtcccacctcgtc

SEQ ID NO: 1569609 - DNA, 15 bp, Homo sapiens
ggtcccacctcgtcc

SEQ ID NO: 1569610 - DNA, 15 bp, Homo sapiens
gtcccacctcgtcca

SEQ ID NO: 1569611 - DNA, 15 bp, Homo sapiens
tcccacctcgtccaa

SEQ ID NO: 1569612 - DNA, 15 bp, Homo sapiens
cccacctcgtccaac

SEQ ID NO: 1569613 - DNA, 15 bp, Homo sapiens
ccacctcgtccaacc

SEQ ID NO: 1569614 - DNA, 15 bp, Homo sapiens
cacctcgtccaaccc

SEQ ID NO: 1569615 - DNA, 15 bp, Homo sapiens
acctcgtccaaccct

SEQ ID NO: 1569616 - DNA, 15 bp, Homo sapiens
cctcgtccaaccctc

SEQ ID NO: 1569617 - DNA, 15 bp, Homo sapiens
ctcgtccaaccctct

SEQ ID NO: 1569618 - DNA, 15 bp, Homo sapiens
tcgtccaaccctctc

SEQ ID NO: 1569619 - DNA, 15 bp, Homo sapiens
cgtccaaccctctcg

SEQ ID NO: 1569620 - DNA, 15 bp, Homo sapiens
gtccaaccctctcgc

SEQ ID NO: 1569621 - DNA, 15 bp, Homo sapiens
tccaaccctctcgcc

SEQ ID NO: 1569622 - DNA, 15 bp, Homo sapiens
ccaaccctctcgccc

SEQ ID NO: 1569623 - DNA, 15 bp, Homo sapiens
caaccctctcgcccc

SEQ ID NO: 1569624 - DNA, 15 bp, Homo sapiens
aaccctctcgccccc

SEQ ID NO: 1569625 - DNA, 15 bp, Homo sapiens
accctctcgcccccc

SEQ ID NO: 1569626 - DNA, 15 bp, Homo sapiens
ccctctcgcccccct

SEQ ID NO: 1569627 - DNA, 15 bp, Homo sapiens
cctctcgcccccctc

SEQ ID NO: 1569628 - DNA, 15 bp, Homo sapiens
ctctcgcccccctct

SEQ ID NO: 1569629 - DNA, 15 bp, Homo sapiens
tctcgcccccctctg

SEQ ID NO: 1569630 - DNA, 15 bp, Homo sapiens
ctcgcccccctctga

SEQ ID NO: 1569631 - DNA, 15 bp, Homo sapiens
tcgcccccctctgac

SEQ ID NO: 1569632 - DNA, 15 bp, Homo sapiens
cgcccccctctgacc

SEQ ID NO: 1569633 - DNA, 15 bp, Homo sapiens
gcccccctctgacca

SEQ ID NO: 1569634 - DNA, 15 bp, Homo sapiens
cccccctctgaccat

SEQ ID NO: 1569635 - DNA, 15 bp, Homo sapiens
ccccctctgaccatc

SEQ ID NO: 1569636 - DNA, 15 bp, Homo sapiens
cccctctgaccatcc

SEQ ID NO: 1569637 - DNA, 15 bp, Homo sapiens
ccctctgaccatcca

SEQ ID NO: 1569638 - DNA, 15 bp, Homo sapiens
cctctgaccatccag

SEQ ID NO: 1569639 - DNA, 15 bp, Homo sapiens
ctctgaccatccagg

SEQ ID NO: 1569640 - DNA, 15 bp, Homo sapiens
tctgaccatccaggg

SEQ ID NO: 1569641 - DNA, 15 bp, Homo sapiens
ctgaccatccagggc

SEQ ID NO: 1569642 - DNA, 15 bp, Homo sapiens
tgaccatccagggcg

SEQ ID NO: 1569643 - DNA, 15 bp, Homo sapiens
gaccatccagggcgt

SEQ ID NO: 1569644 - DNA, 15 bp, Homo sapiens
accatccagggcgtc

SEQ ID NO: 1569645 - DNA, 15 bp, Homo sapiens
ccatccagggcgtct

SEQ ID NO: 1569646 - DNA, 15 bp, Homo sapiens
catccagggcgtctg

SEQ ID NO: 1569647 - DNA, 15 bp, Homo sapiens
atccagggcgtctgt

SEQ ID NO: 1569648 - DNA, 15 bp, Homo sapiens
tccagggcgtctgtt

SEQ ID NO: 1569649 - DNA, 15 bp, Homo sapiens
ccagggcgtctgttg

SEQ ID NO: 1569650 - DNA, 15 bp, Homo sapiens
cagggcgtctgttgt

SEQ ID NO: 1569651 - DNA, 15 bp, Homo sapiens
agggcgtctgttgtg

SEQ ID NO: 1569652 - DNA, 15 bp, Homo sapiens
gggcgtctgttgtgc

SEQ ID NO: 1569653 - DNA, 15 bp, Homo sapiens
ggcgtctgttgtgct

SEQ ID NO: 1569654 - DNA, 15 bp, Homo sapiens
gcgtctgttgtgctg

SEQ ID NO: 1569655 - DNA, 15 bp, Homo sapiens
cgtctgttgtgctga

SEQ ID NO: 1569656 - DNA, 15 bp, Homo sapiens
gtctgttgtgctgat

SEQ ID NO: 1569657 - DNA, 15 bp, Homo sapiens
tctgttgtgctgatc

SEQ ID NO: 1569658 - DNA, 15 bp, Homo sapiens
ctgttgtgctgatcg

SEQ ID NO: 1569659 - DNA, 15 bp, Homo sapiens
tgttgtgctgatcgg

SEQ ID NO: 1569660 - DNA, 15 bp, Homo sapiens
gttgtgctgatcggc

SEQ ID NO: 1569661 - DNA, 15 bp, Homo sapiens
ttgtgctgatcggcg

SEQ ID NO: 1569662 - DNA, 15 bp, Homo sapiens
tgtgctgatcggcgc

SEQ ID NO: 1569663 - DNA, 15 bp, Homo sapiens
gtgctgatcggcgcc

SEQ ID NO: 1569664 - DNA, 15 bp, Homo sapiens
tgctgatcggcgcca

SEQ ID NO: 1569665 - DNA, 15 bp, Homo sapiens
gctgatcggcgccac

SEQ ID NO: 1569666 - DNA, 15 bp, Homo sapiens
ctgatcggcgccact

SEQ ID NO: 1569667 - DNA, 15 bp, Homo sapiens
tgatcggcgccactg

SEQ ID NO: 1569668 - DNA, 15 bp, Homo sapiens
gatcggcgccactgc

SEQ ID NO: 1569669 - DNA, 15 bp, Homo sapiens
atcggcgccactgct

SEQ ID NO: 1569670 - DNA, 15 bp, Homo sapiens
tcggcgccactgctg

SEQ ID NO: 1569671 - DNA, 15 bp, Homo sapiens
cggcgccactgctgt

SEQ ID NO: 1569672 - DNA, 15 bp, Homo sapiens
ggcgccactgctgtc

SEQ ID NO: 1569673 - DNA, 15 bp, Homo sapiens
gcgccactgctgtcc

SEQ ID NO: 1569674 - DNA, 15 bp, Homo sapiens
cgccactgctgtcct

SEQ ID NO: 1569675 - DNA, 15 bp, Homo sapiens
gccactgctgtcctg

SEQ ID NO: 1569676 - DNA, 15 bp, Homo sapiens
ccactgctgtcctgc

SEQ ID NO: 1569677 - DNA, 15 bp, Homo sapiens
cactgctgtcctgct

SEQ ID NO: 1569678 - DNA, 15 bp, Homo sapiens
actgctgtcctgctg

SEQ ID NO: 1569679 - DNA, 15 bp, Homo sapiens
ctgctgtcctgctgg

SEQ ID NO: 1569680 - DNA, 15 bp, Homo sapiens
tgctgtcctgctggc

SEQ ID NO: 1569681 - DNA, 15 bp, Homo sapiens
gctgtcctgctggct

SEQ ID NO: 1569682 - DNA, 15 bp, Homo sapiens
ctgtcctgctggctt

SEQ ID NO: 1569683 - DNA, 15 bp, Homo sapiens
tgtcctgctggcttc

SEQ ID NO: 1569684 - DNA, 15 bp, Homo sapiens
gtcctgctggcttcc

SEQ ID NO: 1569685 - DNA, 15 bp, Homo sapiens
tcctgctggcttccg

SEQ ID NO: 1569686 - DNA, 15 bp, Homo sapiens
cctgctggcttccgc

SEQ ID NO: 1569687 - DNA, 15 bp, Homo sapiens
ctgctggcttccgct

SEQ ID NO: 1569688 - DNA, 15 bp, Homo sapiens
tgctggcttccgctg

SEQ ID NO: 1569689 - DNA, 15 bp, Homo sapiens
gctggcttccgctgc

SEQ ID NO: 1569690 - DNA, 15 bp, Homo sapiens
ctggcttccgctgcg

SEQ ID NO: 1569691 - DNA, 15 bp, Homo sapiens
tggcttccgctgcgc

SEQ ID NO: 1569692 - DNA, 15 bp, Homo sapiens
ggcttccgctgcgca

SEQ ID NO: 1569693 - DNA, 15 bp, Homo sapiens
gcttccgctgcgcag

SEQ ID NO: 1569694 - DNA, 15 bp, Homo sapiens
cttccgctgcgcagc

SEQ ID NO: 1569695 - DNA, 15 bp, Homo sapiens
ttccgctgcgcagcc

SEQ ID NO: 1569696 - DNA, 15 bp, Homo sapiens
tccgctgcgcagcca

SEQ ID NO: 1569697 - DNA, 15 bp, Homo sapiens
ccgctgcgcagccag

SEQ ID NO: 1569698 - DNA, 15 bp, Homo sapiens
cgctgcgcagccagg

SEQ ID NO: 1569699 - DNA, 15 bp, Homo sapiens
gctgcgcagccaggg

SEQ ID NO: 1569700 - DNA, 15 bp, Homo sapiens
ctgcgcagccagggg

SEQ ID NO: 1569701 - DNA, 15 bp, Homo sapiens
tgcgcagccaggggt

SEQ ID NO: 1569702 - DNA, 15 bp, Homo sapiens
gcgcagccaggggta

SEQ ID NO: 1569703 - DNA, 15 bp, Homo sapiens
cgcagccaggggtac

SEQ ID NO: 1569704 - DNA, 15 bp, Homo sapiens
gcagccaggggtacc

SEQ ID NO: 1569705 - DNA, 15 bp, Homo sapiens
cagccaggggtacca

SEQ ID NO: 1569706 - DNA, 15 bp, Homo sapiens
agccaggggtaccaa

SEQ ID NO: 1569707 - DNA, 15 bp, Homo sapiens
gccaggggtaccaag

SEQ ID NO: 1569708 - DNA, 15 bp, Homo sapiens
ccaggggtaccaagt

SEQ ID NO: 1569709 - DNA, 15 bp, Homo sapiens
caggggtaccaagtg

SEQ ID NO: 1569710 - DNA, 15 bp, Homo sapiens
aggggtaccaagtgt

SEQ ID NO: 1569711 - DNA, 15 bp, Homo sapiens
ggggtaccaagtgtt

SEQ ID NO: 1569712 - DNA, 15 bp, Homo sapiens
gggtaccaagtgttt

SEQ ID NO: 1569713 - DNA, 15 bp, Homo sapiens
ggtaccaagtgtttg

SEQ ID NO: 1569714 - DNA, 15 bp, Homo sapiens
gtaccaagtgtttgc

SEQ ID NO: 1569715 - DNA, 15 bp, Homo sapiens
taccaagtgtttgcg

SEQ ID NO: 1569716 - DNA, 15 bp, Homo sapiens
accaagtgtttgcgc

SEQ ID NO: 1569717 - DNA, 15 bp, Homo sapiens
ccaagtgtttgcgca

SEQ ID NO: 1569718 - DNA, 15 bp, Homo sapiens
caagtgtttgcgcag

SEQ ID NO: 1569719 - DNA, 15 bp, Homo sapiens
aagtgtttgcgcagg

SEQ ID NO: 1569720 - DNA, 15 bp, Homo sapiens
agtgtttgcgcaggg

SEQ ID NO: 1569721 - DNA, 15 bp, Homo sapiens
gtgtttgcgcaggga

SEQ ID NO: 1569722 - DNA, 15 bp, Homo sapiens
tgtttgcgcagggag

SEQ ID NO: 1569723 - DNA, 15 bp, Homo sapiens
gtttgcgcagggagg

SEQ ID NO: 1569724 - DNA, 15 bp, Homo sapiens
tttgcgcagggaggc

SEQ ID NO: 1569725 - DNA, 15 bp, Homo sapiens
ttgcgcagggaggcc

SEQ ID NO: 1569726 - DNA, 15 bp, Homo sapiens
tgcgcagggaggccc

SEQ ID NO: 1569727 - DNA, 15 bp, Homo sapiens
gcgcagggaggcccc

SEQ ID NO: 1569728 - DNA, 15 bp, Homo sapiens
cgcagggaggccccg

SEQ ID NO: 1569729 - DNA, 15 bp, Homo sapiens
gcagggaggccccgc

SEQ ID NO: 1569730 - DNA, 15 bp, Homo sapiens
cagggaggccccgcg

SEQ ID NO: 1569731 - DNA, 15 bp, Homo sapiens
agggaggccccgcgc

SEQ ID NO: 1569732 - DNA, 15 bp, Homo sapiens
gggaggccccgcgct

SEQ ID NO: 1569733 - DNA, 15 bp, Homo sapiens
ggaggccccgcgctg

SEQ ID NO: 1569734 - DNA, 15 bp, Homo sapiens
gaggccccgcgctgg

SEQ ID NO: 1569735 - DNA, 15 bp, Homo sapiens
aggccccgcgctggg

SEQ ID NO: 1569736 - DNA, 15 bp, Homo sapiens
ggccccgcgctggga

SEQ ID NO: 1569737 - DNA, 15 bp, Homo sapiens
gccccgcgctgggac

SEQ ID NO: 1569738 - DNA, 15 bp, Homo sapiens
ccccgcgctgggacg

SEQ ID NO: 1569739 - DNA, 15 bp, Homo sapiens
cccgcgctgggacgc

SEQ ID NO: 1569740 - DNA, 15 bp, Homo sapiens
ccgcgctgggacgcc

SEQ ID NO: 1569741 - DNA, 15 bp, Homo sapiens
cgcgctgggacgccc

SEQ ID NO: 1569742 - DNA, 15 bp, Homo sapiens
gcgctgggacgcccc

SEQ ID NO: 1569743 - DNA, 15 bp, Homo sapiens
cgctgggacgcccct

SEQ ID NO: 1569744 - DNA, 15 bp, Homo sapiens
gctgggacgcccctt

SEQ ID NO: 1569745 - DNA, 15 bp, Homo sapiens
ctgggacgccccttt

SEQ ID NO: 1569746 - DNA, 15 bp, Homo sapiens
tgggacgcccctttg

SEQ ID NO: 1569747 - DNA, 15 bp, Homo sapiens
gggacgcccctttga

SEQ ID NO: 1569748 - DNA, 15 bp, Homo sapiens
ggacgcccctttgag

SEQ ID NO: 1569749 - DNA, 15 bp, Homo sapiens
gacgcccctttgagg

SEQ ID NO: 1569750 - DNA, 15 bp, Homo sapiens
acgcccctttgaggg

SEQ ID NO: 1569751 - DNA, 15 bp, Homo sapiens
cgcccctttgaggga

SEQ ID NO: 1569752 - DNA, 15 bp, Homo sapiens
gcccctttgagggac

SEQ ID NO: 1569753 - DNA, 15 bp, Homo sapiens
cccctttgagggacc

SEQ ID NO: 1569754 - DNA, 15 bp, Homo sapiens
ccctttgagggaccc

SEQ ID NO: 1569755 - DNA, 15 bp, Homo sapiens
cctttgagggaccca

SEQ ID NO: 1569756 - DNA, 15 bp, Homo sapiens
ctttgagggacccag

SEQ ID NO: 1569757 - DNA, 15 bp, Homo sapiens
tttgagggacccagc

SEQ ID NO: 1569758 - DNA, 15 bp, Homo sapiens
ttgagggacccagcc

SEQ ID NO: 1569759 - DNA, 15 bp, Homo sapiens
tgagggacccagcct

SEQ ID NO: 1569760 - DNA, 15 bp, Homo sapiens
gagggacccagcctt

SEQ ID NO: 1569761 - DNA, 15 bp, Homo sapiens
agggacccagccttg

SEQ ID NO: 1569762 - DNA, 15 bp, Homo sapiens
gggacccagccttga

SEQ ID NO: 1569763 - DNA, 15 bp, Homo sapiens
ggacccagccttgag

SEQ ID NO: 1569764 - DNA, 15 bp, Homo sapiens
cccagccttgagaca

SEQ ID NO: 1569765 - DNA, 15 bp, Homo sapiens
ccagccttgagacag

SEQ ID NO: 1569766 - DNA, 15 bp, Homo sapiens
cagccttgagacagc

SEQ ID NO: 1569767 - DNA, 15 bp, Homo sapiens
agccttgagacagct

SEQ ID NO: 1569768 - DNA, 15 bp, Homo sapiens
gccttgagacagctg

SEQ ID NO: 1569769 - DNA, 15 bp, Homo sapiens
ccttgagacagctgc

SEQ ID NO: 1569770 - DNA, 15 bp, Homo sapiens
cttgagacagctgct

SEQ ID NO: 1569771 - DNA, 15 bp, Homo sapiens
ttgagacagctgctg

SEQ ID NO: 1569772 - DNA, 15 bp, Homo sapiens
tgagacagctgctgt

SEQ ID NO: 1569773 - DNA, 15 bp, Homo sapiens
gagacagctgctgtg

SEQ ID NO: 1569774 - DNA, 15 bp, Homo sapiens
agacagctgctgtga

SEQ ID NO: 1569775 - DNA, 15 bp, Homo sapiens
gacagctgctgtgag

SEQ ID NO: 1569776 - DNA, 15 bp, Homo sapiens
acagctgctgtgagg

SEQ ID NO: 1569777 - DNA, 15 bp, Homo sapiens
cagctgctgtgaggg

SEQ ID NO: 1569778 - DNA, 15 bp, Homo sapiens
agctgctgtgaggga

SEQ ID NO: 1569779 - DNA, 15 bp, Homo sapiens
gctgctgtgagggac

SEQ ID NO: 1569780 - DNA, 15 bp, Homo sapiens
ctgctgtgagggaca

SEQ ID NO: 1569781 - DNA, 15 bp, Homo sapiens
tgctgtgagggacag

SEQ ID NO: 1569782 - DNA, 15 bp, Homo sapiens
gctgtgagggacagt

SEQ ID NO: 1569783 - DNA, 15 bp, Homo sapiens
ctgtgagggacagta

SEQ ID NO: 1569784 - DNA, 15 bp, Homo sapiens
tgtgagggacagtac

SEQ ID NO: 1569785 - DNA, 15 bp, Homo sapiens
gtgagggacagtact

SEQ ID NO: 1569786 - DNA, 15 bp, Homo sapiens
tgagggacagtactg

SEQ ID NO: 1569787 - DNA, 15 bp, Homo sapiens
gagggacagtactga

SEQ ID NO: 1569788 - DNA, 15 bp, Homo sapiens
agggacagtactgaa

SEQ ID NO: 1569789 - DNA, 15 bp, Homo sapiens
gggacagtactgaag

SEQ ID NO: 1569790 - DNA, 15 bp, Homo sapiens
ggacagtactgaaga

SEQ ID NO: 1569791 - DNA, 15 bp, Homo sapiens
gacagtactgaagac

SEQ ID NO: 1569792 - DNA, 15 bp, Homo sapiens
acagtactgaagact

SEQ ID NO: 1569793 - DNA, 15 bp, Homo sapiens
cagtactgaagactc

SEQ ID NO: 1569794 - DNA, 15 bp, Homo sapiens
agtactgaagactct

SEQ ID NO: 1569795 - DNA, 15 bp, Homo sapiens
gtactgaagactctg

SEQ ID NO: 1569796 - DNA, 15 bp, Homo sapiens
tactgaagactctgc

SEQ ID NO: 1569797 - DNA, 15 bp, Homo sapiens
actgaagactctgca

SEQ ID NO: 1569798 - DNA, 15 bp, Homo sapiens
ctgaagactctgcag

SEQ ID NO: 1569799 - DNA, 15 bp, Homo sapiens
tgaagactctgcagc

SEQ ID NO: 1569800 - DNA, 15 bp, Homo sapiens
gaagactctgcagcc

SEQ ID NO: 1569801 - DNA, 15 bp, Homo sapiens
aagactctgcagccc

SEQ ID NO: 1569802 - DNA, 15 bp, Homo sapiens
agactctgcagccct

SEQ ID NO: 1569803 - DNA, 15 bp, Homo sapiens
gactctgcagccctc

SEQ ID NO: 1569804 - DNA, 15 bp, Homo sapiens
actctgcagccctcg

SEQ ID NO: 1569805 - DNA, 15 bp, Homo sapiens
ctctgcagccctcgg

SEQ ID NO: 1569806 - DNA, 15 bp, Homo sapiens
tctgcagccctcggg

SEQ ID NO: 1569807 - DNA, 15 bp, Homo sapiens
ctgcagccctcggga

SEQ ID NO: 1569808 - DNA, 15 bp, Homo sapiens
tgcagccctcgggac

SEQ ID NO: 1569809 - DNA, 15 bp, Homo sapiens
gcagccctcgggacc

SEQ ID NO: 1569810 - DNA, 15 bp, Homo sapiens
cagccctcgggaccc

SEQ ID NO: 1569811 - DNA, 15 bp, Homo sapiens
agccctcgggacccc

SEQ ID NO: 1569812 - DNA, 15 bp, Homo sapiens
gccctcgggacccca

SEQ ID NO: 1569813 - DNA, 15 bp, Homo sapiens
ccctcgggaccccac

SEQ ID NO: 1569814 - DNA, 15 bp, Homo sapiens
cctcgggaccccact

SEQ ID NO: 1569815 - DNA, 15 bp, Homo sapiens
ctcgggaccccactc

SEQ ID NO: 1569816 - DNA, 15 bp, Homo sapiens
tcgggaccccactcg

SEQ ID NO: 1569817 - DNA, 15 bp, Homo sapiens
cgggaccccactcgg

SEQ ID NO: 1569818 - DNA, 15 bp, Homo sapiens
gggaccccactcgga

SEQ ID NO: 1569819 - DNA, 15 bp, Homo sapiens
ggaccccactcggag

SEQ ID NO: 1569820 - DNA, 15 bp, Homo sapiens
gaccccactcggagg

SEQ ID NO: 1569821 - DNA, 15 bp, Homo sapiens
accccactcggaggg

SEQ ID NO: 1569822 - DNA, 15 bp, Homo sapiens
ccccactcggagggt

SEQ ID NO: 1569823 - DNA, 15 bp, Homo sapiens
cccactcggagggtg

SEQ ID NO: 1569824 - DNA, 15 bp, Homo sapiens
ccactcggagggtgc

SEQ ID NO: 1569825 - DNA, 15 bp, Homo sapiens
cactcggagggtgcc

SEQ ID NO: 1569826 - DNA, 15 bp, Homo sapiens
actcggagggtgccc

SEQ ID NO: 1569827 - DNA, 15 bp, Homo sapiens
ctcggagggtgccct

SEQ ID NO: 1569828 - DNA, 15 bp, Homo sapiens
tcggagggtgccctc

SEQ ID NO: 1569829 - DNA, 15 bp, Homo sapiens
cggagggtgccctct

SEQ ID NO: 1569830 - DNA, 15 bp, Homo sapiens
ggagggtgccctctg

SEQ ID NO: 1569831 - DNA, 15 bp, Homo sapiens
gagggtgccctctgc

SEQ ID NO: 1569832 - DNA, 15 bp, Homo sapiens
agggtgccctctgct

SEQ ID NO: 1569833 - DNA, 15 bp, Homo sapiens
gggtgccctctgctc

SEQ ID NO: 1569834 - DNA, 15 bp, Homo sapiens
ggtgccctctgctca

SEQ ID NO: 1569835 - DNA, 15 bp, Homo sapiens
gtgccctctgctcag

SEQ ID NO: 1569836 - DNA, 15 bp, Homo sapiens
tgccctctgctcagg

SEQ ID NO: 1569837 - DNA, 15 bp, Homo sapiens
gccctctgctcaggc

SEQ ID NO: 1569838 - DNA, 15 bp, Homo sapiens
ccctctgctcaggcc

SEQ ID NO: 1569839 - DNA, 15 bp, Homo sapiens
cctctgctcaggcct

SEQ ID NO: 1569840 - DNA, 15 bp, Homo sapiens
ctctgctcaggcctc

SEQ ID NO: 1569841 - DNA, 15 bp, Homo sapiens
tctgctcaggcctcc

SEQ ID NO: 1569842 - DNA, 15 bp, Homo sapiens
ctgctcaggcctccc

SEQ ID NO: 1569843 - DNA, 15 bp, Homo sapiens
tgctcaggcctccct

SEQ ID NO: 1569844 - DNA, 15 bp, Homo sapiens
gctcaggcctcccta

SEQ ID NO: 1569845 - DNA, 15 bp, Homo sapiens
ctcaggcctccctag

SEQ ID NO: 1569846 - DNA, 15 bp, Homo sapiens
tcaggcctccctagc

SEQ ID NO: 1569847 - DNA, 15 bp, Homo sapiens
caggcctccctagca

SEQ ID NO: 1569848 - DNA, 15 bp, Homo sapiens
aggcctccctagcac

SEQ ID NO: 1569849 - DNA, 15 bp, Homo sapiens
ggcctccctagcacc

SEQ ID NO: 1569850 - DNA, 15 bp, Homo sapiens
gcctccctagcacct

SEQ ID NO: 1569851 - DNA, 15 bp, Homo sapiens
cctccctagcacctc

SEQ ID NO: 1569852 - DNA, 15 bp, Homo sapiens
ctccctagcacctcc

SEQ ID NO: 1569853 - DNA, 15 bp, Homo sapiens
tccctagcacctccc

SEQ ID NO: 1569854 - DNA, 15 bp, Homo sapiens
ccctagcacctcccc

SEQ ID NO: 1569855 - DNA, 15 bp, Homo sapiens
cctagcacctccccc

SEQ ID NO: 1569856 - DNA, 15 bp, Homo sapiens
ctagcacctccccct

SEQ ID NO: 1569857 - DNA, 15 bp, Homo sapiens
tagcacctcccccta

SEQ ID NO: 1569858 - DNA, 15 bp, Homo sapiens
agcacctccccctaa

SEQ ID NO: 1569859 - DNA, 15 bp, Homo sapiens
gcacctccccctaac

SEQ ID NO: 1569860 - DNA, 15 bp, Homo sapiens
cacctccccctaacc

SEQ ID NO: 1569861 - DNA, 15 bp, Homo sapiens
acctccccctaacca

SEQ ID NO: 1569862 - DNA, 15 bp, Homo sapiens
cctccccctaaccaa

SEQ ID NO: 1569863 - DNA, 15 bp, Homo sapiens
ctccccctaaccaaa

SEQ ID NO: 1569864 - DNA, 15 bp, Homo sapiens
tccccctaaccaaat

SEQ ID NO: 1569865 - DNA, 15 bp, Homo sapiens
ccccctaaccaaatt

SEQ ID NO: 1569866 - DNA, 15 bp, Homo sapiens
cccctaaccaaattc

SEQ ID NO: 1569867 - DNA, 15 bp, Homo sapiens
ccctaaccaaattct

SEQ ID NO: 1569868 - DNA, 15 bp, Homo sapiens
cctaaccaaattctc

SEQ ID NO: 1569869 - DNA, 15 bp, Homo sapiens
taaccaaattctccc

SEQ ID NO: 1569870 - DNA, 15 bp, Homo sapiens
aaccaaattctccct

SEQ ID NO: 1569871 - DNA, 15 bp, Homo sapiens
accaaattctccctg

SEQ ID NO: 1569872 - DNA, 15 bp, Homo sapiens
ccaaattctccctgg

SEQ ID NO: 1569873 - DNA, 15 bp, Homo sapiens
caaattctccctgga

SEQ ID NO: 1569874 - DNA, 15 bp, Homo sapiens
aaattctccctggac

SEQ ID NO: 1569875 - DNA, 15 bp, Homo sapiens
attctccctggaccc

SEQ ID NO: 1569876 - DNA, 15 bp, Homo sapiens
ttctccctggacccc

SEQ ID NO: 1569877 - DNA, 15 bp, Homo sapiens
tctccctggacccca

SEQ ID NO: 1569878 - DNA, 15 bp, Homo sapiens
ctccctggaccccat

SEQ ID NO: 1569879 - DNA, 15 bp, Homo sapiens
tccctggaccccatt

SEQ ID NO: 1569880 - DNA, 15 bp, Homo sapiens
ccctggaccccattc

SEQ ID NO: 1569881 - DNA, 15 bp, Homo sapiens
cctggaccccattct

SEQ ID NO: 1569882 - DNA, 15 bp, Homo sapiens
ctggaccccattctg

SEQ ID NO: 1569883 - DNA, 15 bp, Homo sapiens
tggaccccattctga

SEQ ID NO: 1569884 - DNA, 15 bp, Homo sapiens
ggaccccattctgag

SEQ ID NO: 1569885 - DNA, 15 bp, Homo sapiens
gaccccattctgagc

SEQ ID NO: 1569886 - DNA, 15 bp, Homo sapiens
accccattctgagct

SEQ ID NO: 1569887 - DNA, 15 bp, Homo sapiens
ccccattctgagctc

SEQ ID NO: 1569888 - DNA, 15 bp, Homo sapiens
cccattctgagctcc

SEQ ID NO: 1569889 - DNA, 15 bp, Homo sapiens
ccattctgagctccc

SEQ ID NO: 1569890 - DNA, 15 bp, Homo sapiens
cattctgagctcccc

SEQ ID NO: 1569891 - DNA, 15 bp, Homo sapiens
attctgagctcccca

SEQ ID NO: 1569892 - DNA, 15 bp, Homo sapiens
ttctgagctccccat

SEQ ID NO: 1569893 - DNA, 15 bp, Homo sapiens
tctgagctccccatc

SEQ ID NO: 1569894 - DNA, 15 bp, Homo sapiens
ctgagctccccatca

SEQ ID NO: 1569895 - DNA, 15 bp, Homo sapiens
tgagctccccatcac

SEQ ID NO: 1569896 - DNA, 15 bp, Homo sapiens
gagctccccatcacc

SEQ ID NO: 1569897 - DNA, 15 bp, Homo sapiens
agctccccatcacca

SEQ ID NO: 1569898 - DNA, 15 bp, Homo sapiens
gctccccatcaccat

SEQ ID NO: 1569899 - DNA, 15 bp, Homo sapiens
ctccccatcaccatg

SEQ ID NO: 1569900 - DNA, 15 bp, Homo sapiens
tccccatcaccatgg

SEQ ID NO: 1569901 - DNA, 15 bp, Homo sapiens
ccccatcaccatggg

SEQ ID NO: 1569902 - DNA, 15 bp, Homo sapiens
cccatcaccatggga

SEQ ID NO: 1569903 - DNA, 15 bp, Homo sapiens
ccatcaccatgggag

SEQ ID NO: 1569904 - DNA, 15 bp, Homo sapiens
catcaccatgggagg

SEQ ID NO: 1569905 - DNA, 15 bp, Homo sapiens
atcaccatgggaggt

SEQ ID NO: 1569906 - DNA, 15 bp, Homo sapiens
tcaccatgggaggtg

SEQ ID NO: 1569907 - DNA, 15 bp, Homo sapiens
caccatgggaggtgg

SEQ ID NO: 1569908 - DNA, 15 bp, Homo sapiens
accatgggaggtggg

SEQ ID NO: 1569909 - DNA, 15 bp, Homo sapiens
ccatgggaggtgggg

SEQ ID NO: 1569910 - DNA, 15 bp, Homo sapiens
catgggaggtggggc

SEQ ID NO: 1569911 - DNA, 15 bp, Homo sapiens
atgggaggtggggcc

SEQ ID NO: 1569912 - DNA, 15 bp, Homo sapiens
tgggaggtggggcct

SEQ ID NO: 1569913 - DNA, 15 bp, Homo sapiens
gggaggtggggcctc

SEQ ID NO: 1569914 - DNA, 15 bp, Homo sapiens
ggaggtggggcctca

SEQ ID NO: 1569915 - DNA, 15 bp, Homo sapiens
gaggtggggcctcaa

SEQ ID NO: 1569916 - DNA, 15 bp, Homo sapiens
aggtggggcctcaat

SEQ ID NO: 1569917 - DNA, 15 bp, Homo sapiens
ggtggggcctcaatc

SEQ ID NO: 1569918 - DNA, 15 bp, Homo sapiens
gtggggcctcaatct

SEQ ID NO: 1569919 - DNA, 15 bp, Homo sapiens
tggggcctcaatcta

SEQ ID NO: 1569920 - DNA, 15 bp, Homo sapiens
ggggcctcaatctaa

SEQ ID NO: 1569921 - DNA, 15 bp, Homo sapiens
gggcctcaatctaag

SEQ ID NO: 1569922 - DNA, 15 bp, Homo sapiens
ggcctcaatctaagg

SEQ ID NO: 1569923 - DNA, 15 bp, Homo sapiens
gcctcaatctaaggc

SEQ ID NO: 1569924 - DNA, 15 bp, Homo sapiens
cctcaatctaaggcc

SEQ ID NO: 1569925 - DNA, 15 bp, Homo sapiens
ctcaatctaaggcct

SEQ ID NO: 1569926 - DNA, 15 bp, Homo sapiens
tcaatctaaggcctt

SEQ ID NO: 1569927 - DNA, 15 bp, Homo sapiens
caatctaaggccttc

SEQ ID NO: 1569928 - DNA, 15 bp, Homo sapiens
aatctaaggccttcc

SEQ ID NO: 1569929 - DNA, 15 bp, Homo sapiens
atctaaggccttccc

SEQ ID NO: 1569930 - DNA, 15 bp, Homo sapiens
tctaaggccttccct

SEQ ID NO: 1569931 - DNA, 15 bp, Homo sapiens
ctaaggccttccctg

SEQ ID NO: 1569932 - DNA, 15 bp, Homo sapiens
taaggccttccctgt

SEQ ID NO: 1569933 - DNA, 15 bp, Homo sapiens
aaggccttccctgtc

SEQ ID NO: 1569934 - DNA, 15 bp, Homo sapiens
aggccttccctgtca

SEQ ID NO: 1569935 - DNA, 15 bp, Homo sapiens
ggccttccctgtcag

SEQ ID NO: 1569936 - DNA, 15 bp, Homo sapiens
gccttccctgtcaga

SEQ ID NO: 1569937 - DNA, 15 bp, Homo sapiens
ccttccctgtcagaa

SEQ ID NO: 1569938 - DNA, 15 bp, Homo sapiens
cttccctgtcagaag

SEQ ID NO: 1569939 - DNA, 15 bp, Homo sapiens
ttccctgtcagaagg

SEQ ID NO: 1569940 - DNA, 15 bp, Homo sapiens
tccctgtcagaaggg

SEQ ID NO: 1569941 - DNA, 15 bp, Homo sapiens
ccctgtcagaagggg

SEQ ID NO: 1569942 - DNA, 15 bp, Homo sapiens
cctgtcagaaggggg

SEQ ID NO: 1569943 - DNA, 15 bp, Homo sapiens
ctgtcagaagggggt

SEQ ID NO: 1569944 - DNA, 15 bp, Homo sapiens
tgtcagaagggggtt

SEQ ID NO: 1569945 - DNA, 15 bp, Homo sapiens
gtcagaagggggttg

SEQ ID NO: 1569946 - DNA, 15 bp, Homo sapiens
tcagaagggggttgt

SEQ ID NO: 1569947 - DNA, 15 bp, Homo sapiens
cagaagggggttgtg

SEQ ID NO: 1569948 - DNA, 15 bp, Homo sapiens
agaagggggttgtgg

SEQ ID NO: 1569949 - DNA, 15 bp, Homo sapiens
gaagggggttgtggc

SEQ ID NO: 1569950 - DNA, 15 bp, Homo sapiens
aagggggttgtggca

SEQ ID NO: 1569951 - DNA, 15 bp, Homo sapiens
agggggttgtggcaa

SEQ ID NO: 1569952 - DNA, 15 bp, Homo sapiens
gggggttgtggcaaa

SEQ ID NO: 1569953 - DNA, 15 bp, Homo sapiens
ggggttgtggcaaaa

SEQ ID NO: 1569954 - DNA, 15 bp, Homo sapiens
gggttgtggcaaaag

SEQ ID NO: 1569955 - DNA, 15 bp, Homo sapiens
ggttgtggcaaaagc

SEQ ID NO: 1569956 - DNA, 15 bp, Homo sapiens
gttgtggcaaaagcc

SEQ ID NO: 1569957 - DNA, 15 bp, Homo sapiens
ttgtggcaaaagcca

SEQ ID NO: 1569958 - DNA, 15 bp, Homo sapiens
tgtggcaaaagccac

SEQ ID NO: 1569959 - DNA, 15 bp, Homo sapiens
gtggcaaaagccaca

SEQ ID NO: 1569960 - DNA, 15 bp, Homo sapiens
tggcaaaagccacat

SEQ ID NO: 1569961 - DNA, 15 bp, Homo sapiens
ggcaaaagccacatt

SEQ ID NO: 1569962 - DNA, 15 bp, Homo sapiens
gcaaaagccacatta

SEQ ID NO: 1569963 - DNA, 15 bp, Homo sapiens
caaaagccacattac

SEQ ID NO: 1569964 - DNA, 15 bp, Homo sapiens
aaaagccacattaca

SEQ ID NO: 1569965 - DNA, 15 bp, Homo sapiens
aaagccacattacaa

SEQ ID NO: 1569966 - DNA, 15 bp, Homo sapiens
aagccacattacaag

SEQ ID NO: 1569967 - DNA, 15 bp, Homo sapiens
agccacattacaagc

SEQ ID NO: 1569968 - DNA, 15 bp, Homo sapiens
gccacattacaagct

SEQ ID NO: 1569969 - DNA, 15 bp, Homo sapiens
ccacattacaagctg

SEQ ID NO: 1569970 - DNA, 15 bp, Homo sapiens
cacattacaagctgc

SEQ ID NO: 1569971 - DNA, 15 bp, Homo sapiens
acattacaagctgcc

SEQ ID NO: 1569972 - DNA, 15 bp, Homo sapiens
cattacaagctgcca

SEQ ID NO: 1569973 - DNA, 15 bp, Homo sapiens
attacaagctgccat

SEQ ID NO: 1569974 - DNA, 15 bp, Homo sapiens
ttacaagctgccatc

SEQ ID NO: 1569975 - DNA, 15 bp, Homo sapiens
tacaagctgccatcc

SEQ ID NO: 1569976 - DNA, 15 bp, Homo sapiens
acaagctgccatccc

SEQ ID NO: 1569977 - DNA, 15 bp, Homo sapiens
caagctgccatcccc

SEQ ID NO: 1569978 - DNA, 15 bp, Homo sapiens
aagctgccatcccct

SEQ ID NO: 1569979 - DNA, 15 bp, Homo sapiens
agctgccatcccctc

SEQ ID NO: 1569980 - DNA, 15 bp, Homo sapiens
gctgccatcccctcc

SEQ ID NO: 1569981 - DNA, 15 bp, Homo sapiens
ctgccatcccctccc

SEQ ID NO: 1569982 - DNA, 15 bp, Homo sapiens
tgccatcccctcccc

SEQ ID NO: 1569983 - DNA, 15 bp, Homo sapiens
gccatcccctccccg

SEQ ID NO: 1569984 - DNA, 15 bp, Homo sapiens
ccatcccctccccgt

SEQ ID NO: 1569985 - DNA, 15 bp, Homo sapiens
catcccctccccgtt

SEQ ID NO: 1569986 - DNA, 15 bp, Homo sapiens
atcccctccccgttt

SEQ ID NO: 1569987 - DNA, 15 bp, Homo sapiens
tcccctccccgtttc

SEQ ID NO: 1569988 - DNA, 15 bp, Homo sapiens
cccctccccgtttca

SEQ ID NO: 1569989 - DNA, 15 bp, Homo sapiens
ccctccccgtttcag

SEQ ID NO: 1569990 - DNA, 15 bp, Homo sapiens
cctccccgtttcagt

SEQ ID NO: 1569991 - DNA, 15 bp, Homo sapiens
ctccccgtttcagtg

SEQ ID NO: 1569992 - DNA, 15 bp, Homo sapiens
tccccgtttcagtgg

SEQ ID NO: 1569993 - DNA, 15 bp, Homo sapiens
ccccgtttcagtgga

SEQ ID NO: 1569994 - DNA, 15 bp, Homo sapiens
cccgtttcagtggac

SEQ ID NO: 1569995 - DNA, 15 bp, Homo sapiens
ccgtttcagtggacc

SEQ ID NO: 1569996 - DNA, 15 bp, Homo sapiens
cgtttcagtggaccc

SEQ ID NO: 1569997 - DNA, 15 bp, Homo sapiens
gtttcagtggaccct

SEQ ID NO: 1569998 - DNA, 15 bp, Homo sapiens
tttcagtggaccctg

SEQ ID NO: 1569999 - DNA, 15 bp, Homo sapiens
ttcagtggaccctgt

SEQ ID NO: 1570000 - DNA, 15 bp, Homo sapiens
tcagtggaccctgtg

SEQ ID NO: 1570001 - DNA, 15 bp, Homo sapiens
cagtggaccctgtgg

SEQ ID NO: 1570002 - DNA, 15 bp, Homo sapiens
agtggaccctgtggc

SEQ ID NO: 1570003 - DNA, 15 bp, Homo sapiens
gtggaccctgtggcc

SEQ ID NO: 1570004 - DNA, 15 bp, Homo sapiens
tggaccctgtggcca

SEQ ID NO: 1570005 - DNA, 15 bp, Homo sapiens
ggaccctgtggccag

SEQ ID NO: 1570006 - DNA, 15 bp, Homo sapiens
gaccctgtggccagg

SEQ ID NO: 1570007 - DNA, 15 bp, Homo sapiens
accctgtggccaggt

SEQ ID NO: 1570008 - DNA, 15 bp, Homo sapiens
ccctgtggccaggtg

SEQ ID NO: 1570009 - DNA, 15 bp, Homo sapiens
cctgtggccaggtgc

SEQ ID NO: 1570010 - DNA, 15 bp, Homo sapiens
ctgtggccaggtgct

SEQ ID NO: 1570011 - DNA, 15 bp, Homo sapiens
tgtggccaggtgctt

SEQ ID NO: 1570012 - DNA, 15 bp, Homo sapiens
gtggccaggtgcttt

SEQ ID NO: 1570013 - DNA, 15 bp, Homo sapiens
tggccaggtgctttt

SEQ ID NO: 1570014 - DNA, 15 bp, Homo sapiens
ggccaggtgcttttc

SEQ ID NO: 1570015 - DNA, 15 bp, Homo sapiens
gccaggtgcttttcc

SEQ ID NO: 1570016 - DNA, 15 bp, Homo sapiens
ccaggtgcttttccc

SEQ ID NO: 1570017 - DNA, 15 bp, Homo sapiens
caggtgcttttccct

SEQ ID NO: 1570018 - DNA, 15 bp, Homo sapiens
aggtgcttttcccta

SEQ ID NO: 1570019 - DNA, 15 bp, Homo sapiens
ggtgcttttccctat

SEQ ID NO: 1570020 - DNA, 15 bp, Homo sapiens
gtgcttttccctatc

SEQ ID NO: 1570021 - DNA, 15 bp, Homo sapiens
tgcttttccctatcc

SEQ ID NO: 1570022 - DNA, 15 bp, Homo sapiens
gcttttccctatcca

SEQ ID NO: 1570023 - DNA, 15 bp, Homo sapiens
cttttccctatccac

SEQ ID NO: 1570024 - DNA, 15 bp, Homo sapiens
ttttccctatccaca

SEQ ID NO: 1570025 - DNA, 15 bp, Homo sapiens
tttccctatccacag

SEQ ID NO: 1570026 - DNA, 15 bp, Homo sapiens
ttccctatccacagg

SEQ ID NO: 1570027 - DNA, 15 bp, Homo sapiens
tccctatccacaggg

SEQ ID NO: 1570028 - DNA, 15 bp, Homo sapiens
ccctatccacagggg

SEQ ID NO: 1570029 - DNA, 15 bp, Homo sapiens
cctatccacaggggt

SEQ ID NO: 1570030 - DNA, 15 bp, Homo sapiens
ctatccacaggggtg

SEQ ID NO: 1570031 - DNA, 15 bp, Homo sapiens
tatccacaggggtgt

SEQ ID NO: 1570032 - DNA, 15 bp, Homo sapiens
atccacaggggtgtt

SEQ ID NO: 1570033 - DNA, 15 bp, Homo sapiens
tccacaggggtgttt

SEQ ID NO: 1570034 - DNA, 15 bp, Homo sapiens
ccacaggggtgtttg

SEQ ID NO: 1570035 - DNA, 15 bp, Homo sapiens
cacaggggtgtttgt

SEQ ID NO: 1570036 - DNA, 15 bp, Homo sapiens
acaggggtgtttgtg

SEQ ID NO: 1570037 - DNA, 15 bp, Homo sapiens
caggggtgtttgtgt

SEQ ID NO: 1570038 - DNA, 15 bp, Homo sapiens
aggggtgtttgtgtg

SEQ ID NO: 1570039 - DNA, 15 bp, Homo sapiens
ggggtgtttgtgtgt

SEQ ID NO: 1570040 - DNA, 15 bp, Homo sapiens
gggtgtttgtgtgtg

SEQ ID NO: 1570041 - DNA, 15 bp, Homo sapiens
ggtgtttgtgtgtgt

SEQ ID NO: 1570042 - DNA, 15 bp, Homo sapiens
tgtttgtgtgtgtgc

SEQ ID NO: 1570043 - DNA, 15 bp, Homo sapiens
gtttgtgtgtgtgcg

SEQ ID NO: 1570044 - DNA, 15 bp, Homo sapiens
tttgtgtgtgtgcgc

SEQ ID NO: 1570045 - DNA, 15 bp, Homo sapiens
ttgtgtgtgtgcgcg

SEQ ID NO: 1570046 - DNA, 15 bp, Homo sapiens
tgtgtgtgtgcgcgt

SEQ ID NO: 1570047 - DNA, 15 bp, Homo sapiens
gtgtgtgtgcgcgtg

SEQ ID NO: 1570048 - DNA, 15 bp, Homo sapiens
gtgcgcgtgtgcgtt

SEQ ID NO: 1570049 - DNA, 15 bp, Homo sapiens
tgcgcgtgtgcgttt

SEQ ID NO: 1570050 - DNA, 15 bp, Homo sapiens
gcgcgtgtgcgtttc

SEQ ID NO: 1570051 - DNA, 15 bp, Homo sapiens
cgcgtgtgcgtttca

SEQ ID NO: 1570052 - DNA, 15 bp, Homo sapiens
gcgtgtgcgtttcaa

SEQ ID NO: 1570053 - DNA, 15 bp, Homo sapiens
cgtgtgcgtttcaat

SEQ ID NO: 1570054 - DNA, 15 bp, Homo sapiens
gtgtgcgtttcaata

SEQ ID NO: 1570055 - DNA, 15 bp, Homo sapiens
tgtgcgtttcaataa

SEQ ID NO: 1570056 - DNA, 15 bp, Homo sapiens
gtgcgtttcaataaa

SEQ ID NO: 1570057 - DNA, 15 bp, Homo sapiens
tgcgtttcaataaag

SEQ ID NO: 1570058 - DNA, 15 bp, Homo sapiens
gcgtttcaataaagt

SEQ ID NO: 1570059 - DNA, 15 bp, Homo sapiens
cgtttcaataaagtt

SEQ ID NO: 1570060 - DNA, 15 bp, Homo sapiens
gtttcaataaagttt

SEQ ID NO: 1570061 - DNA, 15 bp, Homo sapiens
tttcaataaagtttg

SEQ ID NO: 1570062 - DNA, 15 bp, Homo sapiens
ttcaataaagtttgt

SEQ ID NO: 1570063 - DNA, 15 bp, Homo sapiens
tcaataaagtttgta

SEQ ID NO: 1570064 - DNA, 15 bp, Homo sapiens
caataaagtttgtac

SEQ ID NO: 1570065 - DNA, 15 bp, Homo sapiens
aataaagtttgtaca

SEQ ID NO: 1570066 - DNA, 15 bp, Homo sapiens
ataaagtttgtacac

SEQ ID NO: 1570067 - DNA, 15 bp, Homo sapiens
taaagtttgtacact

SEQ ID NO: 1570068 - DNA, 15 bp, Homo sapiens
aaagtttgtacactt

SEQ ID NO: 1570069 - DNA, 15 bp, Homo sapiens
aagtttgtacacttt

SEQ ID NO: 1570070 - DNA, 15 bp, Homo sapiens
agtttgtacactttc

SEQ ID NO: 1570071 - DNA, 15 bp, Homo sapiens
gtttgtacactttct

SEQ ID NO: 1570072 - DNA, 15 bp, Homo sapiens
tttgtacactttctt

SEQ ID NO: 1570073 - DNA, 15 bp, Homo sapiens
ttgtacactttctta

SEQ ID NO: 1570074 - DNA, 15 bp, Homo sapiens
tgtacactttcttaa

SEQ ID NO: 1570075 - DNA, 15 bp, Homo sapiens
gtacactttcttaac

SEQ ID NO: 1570076 - DNA, 15 bp, Homo sapiens
tacactttcttaaca

SEQ ID NO: 1570077 - DNA, 15 bp, Homo sapiens
acactttcttaacag

SEQ ID NO: 1570078 - DNA, 15 bp, Homo sapiens
cactttcttaacagt

SEQ ID NO: 1570079 - DNA, 15 bp, Homo sapiens
actttcttaacagtg

SEQ ID NO: 1570080 - DNA, 15 bp, Homo sapiens
ctttcttaacagtgt

SEQ ID NO: 1570081 - DNA, 15 bp, Homo sapiens
tttcttaacagtgtc

SEQ ID NO: 1570082 - DNA, 15 bp, Homo sapiens
ttcttaacagtgtct

SEQ ID NO: 1570083 - DNA, 15 bp, Homo sapiens
tcttaacagtgtctg

SEQ ID NO: 1570084 - DNA, 15 bp, Homo sapiens
cttaacagtgtctga

SEQ ID NO: 1570085 - DNA, 15 bp, Homo sapiens
ttaacagtgtctgat

SEQ ID NO: 1570086 - DNA, 15 bp, Homo sapiens
taacagtgtctgatt

SEQ ID NO: 1570087 - DNA, 15 bp, Homo sapiens
aacagtgtctgattt

SEQ ID NO: 1570088 - DNA, 15 bp, Homo sapiens
acagtgtctgatttg

SEQ ID NO: 1570089 - DNA, 15 bp, Homo sapiens
cagtgtctgatttgc

SEQ ID NO: 1570090 - DNA, 15 bp, Homo sapiens
agtgtctgatttgcc

SEQ ID NO: 1570091 - DNA, 15 bp, Homo sapiens
gtgtctgatttgccg

SEQ ID NO: 1570092 - DNA, 15 bp, Homo sapiens
tgtctgatttgccgc

SEQ ID NO: 1570093 - DNA, 15 bp, Homo sapiens
gtctgatttgccgcc

SEQ ID NO: 1570094 - DNA, 15 bp, Homo sapiens
tctgatttgccgccc

SEQ ID NO: 1570095 - DNA, 15 bp, Homo sapiens
ctgatttgccgccct

SEQ ID NO: 1570096 - DNA, 15 bp, Homo sapiens
tgatttgccgccctg

SEQ ID NO: 1570097 - DNA, 15 bp, Homo sapiens
gatttgccgccctgc

SEQ ID NO: 1570098 - DNA, 15 bp, Homo sapiens
atttgccgccctgcc

SEQ ID NO: 1570099 - DNA, 15 bp, Homo sapiens
tttgccgccctgcct

SEQ ID NO: 1570100 - DNA, 15 bp, Homo sapiens
ttgccgccctgcctg

SEQ ID NO: 1570101 - DNA, 15 bp, Homo sapiens
tgccgccctgcctgc

SEQ ID NO: 1570102 - DNA, 15 bp, Homo sapiens
gccgccctgcctgcc

SEQ ID NO: 1570103 - DNA, 15 bp, Homo sapiens
ccgccctgcctgccc

SEQ ID NO: 1570104 - DNA, 15 bp, Homo sapiens
cgccctgcctgccct

SEQ ID NO: 1570105 - DNA, 15 bp, Homo sapiens
gccctgcctgccctc

SEQ ID NO: 1570106 - DNA, 15 bp, Homo sapiens
ccctgcctgccctcc

SEQ ID NO: 1570107 - DNA, 15 bp, Homo sapiens
cctgcctgccctccc

SEQ ID NO: 1570108 - DNA, 15 bp, Homo sapiens
ctgcctgccctcccc

SEQ ID NO: 1570109 - DNA, 15 bp, Homo sapiens
tgcctgccctcccca

SEQ ID NO: 1570110 - DNA, 15 bp, Homo sapiens
gcctgccctccccag

SEQ ID NO: 1570111 - DNA, 15 bp, Homo sapiens
cctgccctccccagg

SEQ ID NO: 1570112 - DNA, 15 bp, Homo sapiens
ctgccctccccaggg

SEQ ID NO: 1570113 - DNA, 15 bp, Homo sapiens
tgccctccccagggc

SEQ ID NO: 1570114 - DNA, 15 bp, Homo sapiens
gccctccccagggcc

SEQ ID NO: 1570115 - DNA, 15 bp, Homo sapiens
ccctccccagggccc

SEQ ID NO: 1570116 - DNA, 15 bp, Homo sapiens
cctccccagggcccc

SEQ ID NO: 1570117 - DNA, 15 bp, Homo sapiens
ctccccagggcccca

SEQ ID NO: 1570118 - DNA, 15 bp, Homo sapiens
ccccagggccccaga

SEQ ID NO: 1570119 - DNA, 15 bp, Homo sapiens
cccagggccccagaa

SEQ ID NO: 1570120 - DNA, 15 bp, Homo sapiens
ccagggccccagaac

SEQ ID NO: 1570121 - DNA, 15 bp, Homo sapiens
cagggccccagaaca

SEQ ID NO: 1570122 - DNA, 15 bp, Homo sapiens
agggccccagaacag

SEQ ID NO: 1570123 - DNA, 15 bp, Homo sapiens
gggccccagaacagg

SEQ ID NO: 1570124 - DNA, 15 bp, Homo sapiens
ggccccagaacaggg

SEQ ID NO: 1570125 - DNA, 15 bp, Homo sapiens
gccccagaacagggg

SEQ ID NO: 1570126 - DNA, 15 bp, Homo sapiens
ccccagaacaggggt

SEQ ID NO: 1570127 - DNA, 15 bp, Homo sapiens
cccagaacaggggtt

SEQ ID NO: 1570128 - DNA, 15 bp, Homo sapiens
ccagaacaggggttc

SEQ ID NO: 1570129 - DNA, 15 bp, Homo sapiens
cagaacaggggttca

SEQ ID NO: 1570130 - DNA, 15 bp, Homo sapiens
agaacaggggttcac

SEQ ID NO: 1570131 - DNA, 15 bp, Homo sapiens
gaacaggggttcacg

SEQ ID NO: 1570132 - DNA, 15 bp, Homo sapiens
aacaggggttcacgt

SEQ ID NO: 1570133 - DNA, 15 bp, Homo sapiens
acaggggttcacgtc

SEQ ID NO: 1570134 - DNA, 15 bp, Homo sapiens
caggggttcacgtcc

SEQ ID NO: 1570135 - DNA, 15 bp, Homo sapiens
aggggttcacgtcca

SEQ ID NO: 1570136 - DNA, 15 bp, Homo sapiens
ggggttcacgtccac

SEQ ID NO: 1570137 - DNA, 15 bp, Homo sapiens
gggttcacgtccact

SEQ ID NO: 1570138 - DNA, 15 bp, Homo sapiens
ggttcacgtccactg

SEQ ID NO: 1570139 - DNA, 15 bp, Homo sapiens
gttcacgtccactgc

SEQ ID NO: 1570140 - DNA, 15 bp, Homo sapiens
ttcacgtccactgcc

SEQ ID NO: 1570141 - DNA, 15 bp, Homo sapiens
tcacgtccactgcca

SEQ ID NO: 1570142 - DNA, 15 bp, Homo sapiens
cacgtccactgccaa

SEQ ID NO: 1570143 - DNA, 15 bp, Homo sapiens
acgtccactgccaac

SEQ ID NO: 1570144 - DNA, 15 bp, Homo sapiens
cgtccactgccaaca

SEQ ID NO: 1570145 - DNA, 15 bp, Homo sapiens
gtccactgccaacac

SEQ ID NO: 1570146 - DNA, 15 bp, Homo sapiens
tccactgccaacact

SEQ ID NO: 1570147 - DNA, 15 bp, Homo sapiens
ccactgccaacactc

SEQ ID NO: 1570148 - DNA, 15 bp, Homo sapiens
cactgccaacactcc

SEQ ID NO: 1570149 - DNA, 15 bp, Homo sapiens
actgccaacactccc

SEQ ID NO: 1570150 - DNA, 15 bp, Homo sapiens
ctgccaacactcccc

SEQ ID NO: 1570151 - DNA, 15 bp, Homo sapiens
tgccaacactcccct

SEQ ID NO: 1570152 - DNA, 15 bp, Homo sapiens
gccaacactcccctc

SEQ ID NO: 1570153 - DNA, 15 bp, Homo sapiens
ccaacactcccctcc

SEQ ID NO: 1570154 - DNA, 15 bp, Homo sapiens
caacactcccctccc

SEQ ID NO: 1570155 - DNA, 15 bp, Homo sapiens
aacactcccctcccc

SEQ ID NO: 1570156 - DNA, 15 bp, Homo sapiens
acactcccctcccct

SEQ ID NO: 1570157 - DNA, 15 bp, Homo sapiens
cactcccctccccta

SEQ ID NO: 1570158 - DNA, 15 bp, Homo sapiens
actcccctcccctac

SEQ ID NO: 1570159 - DNA, 15 bp, Homo sapiens
ggcgcgcaccctggg

SEQ ID NO: 1570160 - DNA, 15 bp, Homo sapiens
gcgcgcaccctgggt

SEQ ID NO: 1570161 - DNA, 15 bp, Homo sapiens
cgcgcaccctgggtg

SEQ ID NO: 1570162 - DNA, 15 bp, Homo sapiens
gcgcaccctgggtgc

SEQ ID NO: 1570163 - DNA, 15 bp, Homo sapiens
cgcaccctgggtgcg

SEQ ID NO: 1570164 - DNA, 15 bp, Homo sapiens
gcaccctgggtgcgg

SEQ ID NO: 1570165 - DNA, 15 bp, Homo sapiens
caccctgggtgcggg

SEQ ID NO: 1570166 - DNA, 15 bp, Homo sapiens
accctgggtgcgggc

SEQ ID NO: 1570167 - DNA, 15 bp, Homo sapiens
ccctgggtgcgggcc

SEQ ID NO: 1570168 - DNA, 15 bp, Homo sapiens
cctgggtgcgggccc

SEQ ID NO: 1570169 - DNA, 15 bp, Homo sapiens
ctgggtgcgggcccg

SEQ ID NO: 1570170 - DNA, 15 bp, Homo sapiens
tgggtgcgggcccgc

SEQ ID NO: 1570171 - DNA, 15 bp, Homo sapiens
gggtgcgggcccgcg

SEQ ID NO: 1570172 - DNA, 15 bp, Homo sapiens
ggtgcgggcccgcgc

SEQ ID NO: 1570173 - DNA, 15 bp, Homo sapiens
gtgcgggcccgcgcg

SEQ ID NO: 1570174 - DNA, 15 bp, Homo sapiens
tgcgggcccgcgcgg

SEQ ID NO: 1570175 - DNA, 15 bp, Homo sapiens
gcgggcccgcgcggg

SEQ ID NO: 1570176 - DNA, 15 bp, Homo sapiens
cgggcccgcgcggga

SEQ ID NO: 1570177 - DNA, 15 bp, Homo sapiens
gggcccgcgcgggag

SEQ ID NO: 1570178 - DNA, 15 bp, Homo sapiens
ggcccgcgcgggagg

SEQ ID NO: 1570179 - DNA, 15 bp, Homo sapiens
gcccgcgcgggaggg

SEQ ID NO: 1570180 - DNA, 15 bp, Homo sapiens
cccgcgcgggagggg

SEQ ID NO: 1570181 - DNA, 15 bp, Homo sapiens
ccgcgcgggaggggc

SEQ ID NO: 1570182 - DNA, 15 bp, Homo sapiens
cgcgcgggaggggcg

SEQ ID NO: 1570183 - DNA, 15 bp, Homo sapiens
gcgcgggaggggcgg

SEQ ID NO: 1570184 - DNA, 15 bp, Homo sapiens
cgcgggaggggcggt

SEQ ID NO: 1570185 - DNA, 15 bp, Homo sapiens
gcgggaggggcggtg

SEQ ID NO: 1570186 - DNA, 15 bp, Homo sapiens
cgggaggggcggtgc

SEQ ID NO: 1570187 - DNA, 15 bp, Homo sapiens
gggaggggcggtgcc

SEQ ID NO: 1570188 - DNA, 15 bp, Homo sapiens
ggaggggcggtgcca

SEQ ID NO: 1570189 - DNA, 15 bp, Homo sapiens
gaggggcggtgccag

SEQ ID NO: 1570190 - DNA, 15 bp, Homo sapiens
aggggcggtgccagg

SEQ ID NO: 1570191 - DNA, 15 bp, Homo sapiens
ggggcggtgccaggc

SEQ ID NO: 1570192 - DNA, 15 bp, Homo sapiens
gggcggtgccaggcc

SEQ ID NO: 1570193 - DNA, 15 bp, Homo sapiens
ggcggtgccaggccc

SEQ ID NO: 1570194 - DNA, 15 bp, Homo sapiens
gcggtgccaggccct

SEQ ID NO: 1570195 - DNA, 15 bp, Homo sapiens
cggtgccaggccctg

SEQ ID NO: 1570196 - DNA, 15 bp, Homo sapiens
ggtgccaggccctgc

SEQ ID NO: 1570197 - DNA, 15 bp, Homo sapiens
gtgccaggccctgcg

SEQ ID NO: 1570198 - DNA, 15 bp, Homo sapiens
tgccaggccctgcgc

SEQ ID NO: 1570199 - DNA, 15 bp, Homo sapiens
gccaggccctgcgcg

SEQ ID NO: 1570200 - DNA, 15 bp, Homo sapiens
ccaggccctgcgcgg

SEQ ID NO: 1570201 - DNA, 15 bp, Homo sapiens
caggccctgcgcggg

SEQ ID NO: 1570202 - DNA, 15 bp, Homo sapiens
aggccctgcgcgggc

SEQ ID NO: 1570203 - DNA, 15 bp, Homo sapiens
ggccctgcgcgggcg

SEQ ID NO: 1570204 - DNA, 15 bp, Homo sapiens
gccctgcgcgggcgc

SEQ ID NO: 1570205 - DNA, 15 bp, Homo sapiens
ccctgcgcgggcgct

SEQ ID NO: 1570206 - DNA, 15 bp, Homo sapiens
cctgcgcgggcgcta

SEQ ID NO: 1570207 - DNA, 15 bp, Homo sapiens
ctgcgcgggcgctac

SEQ ID NO: 1570208 - DNA, 15 bp, Homo sapiens
tgcgcgggcgctact

SEQ ID NO: 1570209 - DNA, 15 bp, Homo sapiens
gcgcgggcgctactt

SEQ ID NO: 1570210 - DNA, 15 bp, Homo sapiens
cgcgggcgctacttg

SEQ ID NO: 1570211 - DNA, 15 bp, Homo sapiens
gcgggcgctacttga

SEQ ID NO: 1570212 - DNA, 15 bp, Homo sapiens
cgggcgctacttgac

SEQ ID NO: 1570213 - DNA, 15 bp, Homo sapiens
gggcgctacttgacg

SEQ ID NO: 1570214 - DNA, 15 bp, Homo sapiens
ggcgctacttgacgt

SEQ ID NO: 1570215 - DNA, 15 bp, Homo sapiens
gcgctacttgacgtt

SEQ ID NO: 1570216 - DNA, 15 bp, Homo sapiens
cgctacttgacgttg

SEQ ID NO: 1570217 - DNA, 15 bp, Homo sapiens
gctacttgacgttga

SEQ ID NO: 1570218 - DNA, 15 bp, Homo sapiens
ctacttgacgttgaa

SEQ ID NO: 1570219 - DNA, 15 bp, Homo sapiens
tacttgacgttgaac

SEQ ID NO: 1570220 - DNA, 15 bp, Homo sapiens
acttgacgttgaaca

SEQ ID NO: 1570221 - DNA, 15 bp, Homo sapiens
cttgacgttgaacac

SEQ ID NO: 1570222 - DNA, 15 bp, Homo sapiens
ttgacgttgaacacc

SEQ ID NO: 1570223 - DNA, 15 bp, Homo sapiens
tgacgttgaacacca

SEQ ID NO: 1570224 - DNA, 15 bp, Homo sapiens
gacgttgaacaccat

SEQ ID NO: 1570225 - DNA, 15 bp, Homo sapiens
acgttgaacaccatc

SEQ ID NO: 1570226 - DNA, 15 bp, Homo sapiens
cgttgaacaccatca

SEQ ID NO: 1570227 - DNA, 15 bp, Homo sapiens
gttgaacaccatcag

SEQ ID NO: 1570228 - DNA, 15 bp, Homo sapiens
ttgaacaccatcagc

SEQ ID NO: 1570229 - DNA, 15 bp, Homo sapiens
tgaacaccatcagcg

SEQ ID NO: 1570230 - DNA, 15 bp, Homo sapiens
gaacaccatcagcgg

SEQ ID NO: 1570231 - DNA, 15 bp, Homo sapiens
aacaccatcagcggc

SEQ ID NO: 1570232 - DNA, 15 bp, Homo sapiens
acaccatcagcggcc

SEQ ID NO: 1570233 - DNA, 15 bp, Homo sapiens
caccatcagcggccg

SEQ ID NO: 1570234 - DNA, 15 bp, Homo sapiens
accatcagcggccgc

SEQ ID NO: 1570235 - DNA, 15 bp, Homo sapiens
ccatcagcggccgct

SEQ ID NO: 1570236 - DNA, 15 bp, Homo sapiens
catcagcggccgctc

SEQ ID NO: 1570237 - DNA, 15 bp, Homo sapiens
atcagcggccgctcc

SEQ ID NO: 1570238 - DNA, 15 bp, Homo sapiens
tcagcggccgctcct

SEQ ID NO: 1570239 - DNA, 15 bp, Homo sapiens
cagcggccgctcctc

SEQ ID NO: 1570240 - DNA, 15 bp, Homo sapiens
agcggccgctcctcc

SEQ ID NO: 1570241 - DNA, 15 bp, Homo sapiens
gcggccgctcctccc

SEQ ID NO: 1570242 - DNA, 15 bp, Homo sapiens
cggccgctcctcccg

SEQ ID NO: 1570243 - DNA, 15 bp, Homo sapiens
ggccgctcctcccgc

SEQ ID NO: 1570244 - DNA, 15 bp, Homo sapiens
gccgctcctcccgcc

SEQ ID NO: 1570245 - DNA, 15 bp, Homo sapiens
ccgctcctcccgccg

SEQ ID NO: 1570246 - DNA, 15 bp, Homo sapiens
cgctcctcccgccgc

SEQ ID NO: 1570247 - DNA, 15 bp, Homo sapiens
gctcctcccgccgct

SEQ ID NO: 1570248 - DNA, 15 bp, Homo sapiens
ctcctcccgccgctg

SEQ ID NO: 1570249 - DNA, 15 bp, Homo sapiens
tcctcccgccgctgc

SEQ ID NO: 1570250 - DNA, 15 bp, Homo sapiens
cctcccgccgctgcc

SEQ ID NO: 1570251 - DNA, 15 bp, Homo sapiens
ctcccgccgctgcca

SEQ ID NO: 1570252 - DNA, 15 bp, Homo sapiens
tcccgccgctgccac

SEQ ID NO: 1570253 - DNA, 15 bp, Homo sapiens
cccgccgctgccacg

SEQ ID NO: 1570254 - DNA, 15 bp, Homo sapiens
ccgccgctgccacgg

SEQ ID NO: 1570255 - DNA, 15 bp, Homo sapiens
cgccgctgccacggg

SEQ ID NO: 1570256 - DNA, 15 bp, Homo sapiens
gccgctgccacgggc

SEQ ID NO: 1570257 - DNA, 15 bp, Homo sapiens
ccgctgccacgggct

SEQ ID NO: 1570258 - DNA, 15 bp, Homo sapiens
cgctgccacgggctc

SEQ ID NO: 1570259 - DNA, 15 bp, Homo sapiens
gctgccacgggctct

SEQ ID NO: 1570260 - DNA, 15 bp, Homo sapiens
ctgccacgggctctt

SEQ ID NO: 1570261 - DNA, 15 bp, Homo sapiens
tgccacgggctcttc

SEQ ID NO: 1570262 - DNA, 15 bp, Homo sapiens
gccacgggctcttct

SEQ ID NO: 1570263 - DNA, 15 bp, Homo sapiens
ccacgggctcttctt

SEQ ID NO: 1570264 - DNA, 15 bp, Homo sapiens
cacgggctcttcttg

SEQ ID NO: 1570265 - DNA, 15 bp, Homo sapiens
acgggctcttcttgt

SEQ ID NO: 1570266 - DNA, 15 bp, Homo sapiens
cgggctcttcttgtc

SEQ ID NO: 1570267 - DNA, 15 bp, Homo sapiens
gggctcttcttgtct

SEQ ID NO: 1570268 - DNA, 15 bp, Homo sapiens
ggctcttcttgtctc

SEQ ID NO: 1570269 - DNA, 15 bp, Homo sapiens
gctcttcttgtctcc

SEQ ID NO: 1570270 - DNA, 15 bp, Homo sapiens
ctcttcttgtctccc

SEQ ID NO: 1570271 - DNA, 15 bp, Homo sapiens
tcttcttgtctcccg

SEQ ID NO: 1570272 - DNA, 15 bp, Homo sapiens
cttcttgtctcccgc

SEQ ID NO: 1570273 - DNA, 15 bp, Homo sapiens
ttcttgtctcccgcc

SEQ ID NO: 1570274 - DNA, 15 bp, Homo sapiens
tcttgtctcccgcct

SEQ ID NO: 1570275 - DNA, 15 bp, Homo sapiens
cttgtctcccgcctc

SEQ ID NO: 1570276 - DNA, 15 bp, Homo sapiens
ttgtctcccgcctcg

SEQ ID NO: 1570277 - DNA, 15 bp, Homo sapiens
tgtctcccgcctcgt

SEQ ID NO: 1570278 - DNA, 15 bp, Homo sapiens
gtctcccgcctcgtc

SEQ ID NO: 1570279 - DNA, 15 bp, Homo sapiens
tctcccgcctcgtcg

SEQ ID NO: 1570280 - DNA, 15 bp, Homo sapiens
ctcccgcctcgtcgc

SEQ ID NO: 1570281 - DNA, 15 bp, Homo sapiens
tcccgcctcgtcgcc

SEQ ID NO: 1570282 - DNA, 15 bp, Homo sapiens
cccgcctcgtcgccc

SEQ ID NO: 1570283 - DNA, 15 bp, Homo sapiens
ccgcctcgtcgccca

SEQ ID NO: 1570284 - DNA, 15 bp, Homo sapiens
cgcctcgtcgcccac

SEQ ID NO: 1570285 - DNA, 15 bp, Homo sapiens
gcctcgtcgcccacc

SEQ ID NO: 1570286 - DNA, 15 bp, Homo sapiens
cctcgtcgcccacct

SEQ ID NO: 1570287 - DNA, 15 bp, Homo sapiens
ctcgtcgcccacctc

SEQ ID NO: 1570288 - DNA, 15 bp, Homo sapiens
tcgtcgcccacctcc

SEQ ID NO: 1570289 - DNA, 15 bp, Homo sapiens
cgtcgcccacctccg

SEQ ID NO: 1570290 - DNA, 15 bp, Homo sapiens
gtcgcccacctccgc

SEQ ID NO: 1570291 - DNA, 15 bp, Homo sapiens
tcgcccacctccgcc

SEQ ID NO: 1570292 - DNA, 15 bp, Homo sapiens
cgcccacctccgccc

SEQ ID NO: 1570293 - DNA, 15 bp, Homo sapiens
gcccacctccgcccc

SEQ ID NO: 1570294 - DNA, 15 bp, Homo sapiens
cccacctccgccccc

SEQ ID NO: 1570295 - DNA, 15 bp, Homo sapiens
ccacctccgccccca

SEQ ID NO: 1570296 - DNA, 15 bp, Homo sapiens
cacctccgcccccag

SEQ ID NO: 1570297 - DNA, 15 bp, Homo sapiens
acctccgcccccagc

SEQ ID NO: 1570298 - DNA, 15 bp, Homo sapiens
cctccgcccccagct

SEQ ID NO: 1570299 - DNA, 15 bp, Homo sapiens
ctccgcccccagctc

SEQ ID NO: 1570300 - DNA, 15 bp, Homo sapiens
tccgcccccagctcg

SEQ ID NO: 1570301 - DNA, 15 bp, Homo sapiens
ccgcccccagctcgt

SEQ ID NO: 1570302 - DNA, 15 bp, Homo sapiens
cgcccccagctcgtc

SEQ ID NO: 1570303 - DNA, 15 bp, Homo sapiens
gcccccagctcgtcc

SEQ ID NO: 1570304 - DNA, 15 bp, Homo sapiens
cccccagctcgtcct

SEQ ID NO: 1570305 - DNA, 15 bp, Homo sapiens
ccccagctcgtcctc

SEQ ID NO: 1570306 - DNA, 15 bp, Homo sapiens
cccagctcgtcctcc

SEQ ID NO: 1570307 - DNA, 15 bp, Homo sapiens
ccagctcgtcctccg

SEQ ID NO: 1570308 - DNA, 15 bp, Homo sapiens
cagctcgtcctccgg

SEQ ID NO: 1570309 - DNA, 15 bp, Homo sapiens
agctcgtcctccggg

SEQ ID NO: 1570310 - DNA, 15 bp, Homo sapiens
gctcgtcctccgggc

SEQ ID NO: 1570311 - DNA, 15 bp, Homo sapiens
ctcgtcctccgggct

SEQ ID NO: 1570312 - DNA, 15 bp, Homo sapiens
tcgtcctccgggctg

SEQ ID NO: 1570313 - DNA, 15 bp, Homo sapiens
cgtcctccgggctgg

SEQ ID NO: 1570314 - DNA, 15 bp, Homo sapiens
gtcctccgggctggt

SEQ ID NO: 1570315 - DNA, 15 bp, Homo sapiens
tcctccgggctggtg

SEQ ID NO: 1570316 - DNA, 15 bp, Homo sapiens
cctccgggctggtga

SEQ ID NO: 1570317 - DNA, 15 bp, Homo sapiens
ctccgggctggtgag

SEQ ID NO: 1570318 - DNA, 15 bp, Homo sapiens
tccgggctggtgagc

SEQ ID NO: 1570319 - DNA, 15 bp, Homo sapiens
ccgggctggtgagcg

SEQ ID NO: 1570320 - DNA, 15 bp, Homo sapiens
cgggctggtgagcga

SEQ ID NO: 1570321 - DNA, 15 bp, Homo sapiens
gggctggtgagcgag

SEQ ID NO: 1570322 - DNA, 15 bp, Homo sapiens
ggctggtgagcgagt

SEQ ID NO: 1570323 - DNA, 15 bp, Homo sapiens
gctggtgagcgagtc

SEQ ID NO: 1570324 - DNA, 15 bp, Homo sapiens
ctggtgagcgagtcg

SEQ ID NO: 1570325 - DNA, 15 bp, Homo sapiens
tggtgagcgagtcgc

SEQ ID NO: 1570326 - DNA, 15 bp, Homo sapiens
ggtgagcgagtcgcg

SEQ ID NO: 1570327 - DNA, 15 bp, Homo sapiens
gtgagcgagtcgcgc

SEQ ID NO: 1570328 - DNA, 15 bp, Homo sapiens
tgagcgagtcgcgcc

SEQ ID NO: 1570329 - DNA, 15 bp, Homo sapiens
gagcgagtcgcgccg

SEQ ID NO: 1570330 - DNA, 15 bp, Homo sapiens
agcgagtcgcgccgc

SEQ ID NO: 1570331 - DNA, 15 bp, Homo sapiens
gcgagtcgcgccgca

SEQ ID NO: 1570332 - DNA, 15 bp, Homo sapiens
cgagtcgcgccgcag

SEQ ID NO: 1570333 - DNA, 15 bp, Homo sapiens
gagtcgcgccgcagc

SEQ ID NO: 1570334 - DNA, 15 bp, Homo sapiens
agtcgcgccgcagct

SEQ ID NO: 1570335 - DNA, 15 bp, Homo sapiens
gtcgcgccgcagctc

SEQ ID NO: 1570336 - DNA, 15 bp, Homo sapiens
tcgcgccgcagctcg

SEQ ID NO: 1570337 - DNA, 15 bp, Homo sapiens
cgcgccgcagctcgc

SEQ ID NO: 1570338 - DNA, 15 bp, Homo sapiens
gcgccgcagctcgct

SEQ ID NO: 1570339 - DNA, 15 bp, Homo sapiens
cgccgcagctcgctg

SEQ ID NO: 1570340 - DNA, 15 bp, Homo sapiens
gccgcagctcgctgg

SEQ ID NO: 1570341 - DNA, 15 bp, Homo sapiens
ccgcagctcgctggc

SEQ ID NO: 1570342 - DNA, 15 bp, Homo sapiens
cgcagctcgctggcg

SEQ ID NO: 1570343 - DNA, 15 bp, Homo sapiens
gcagctcgctggcgc

SEQ ID NO: 1570344 - DNA, 15 bp, Homo sapiens
cagctcgctggcgct

SEQ ID NO: 1570345 - DNA, 15 bp, Homo sapiens
agctcgctggcgctg

SEQ ID NO: 1570346 - DNA, 15 bp, Homo sapiens
gctcgctggcgctgc

SEQ ID NO: 1570347 - DNA, 15 bp, Homo sapiens
ctcgctggcgctgct

SEQ ID NO: 1570348 - DNA, 15 bp, Homo sapiens
tcgctggcgctgctg

SEQ ID NO: 1570349 - DNA, 15 bp, Homo sapiens
cgctggcgctgctgc

SEQ ID NO: 1570350 - DNA, 15 bp, Homo sapiens
gctggcgctgctgcg

SEQ ID NO: 1570351 - DNA, 15 bp, Homo sapiens
ctggcgctgctgcgg

SEQ ID NO: 1570352 - DNA, 15 bp, Homo sapiens
tggcgctgctgcggg

SEQ ID NO: 1570353 - DNA, 15 bp, Homo sapiens
ggcgctgctgcggga

SEQ ID NO: 1570354 - DNA, 15 bp, Homo sapiens
gcgctgctgcgggag

SEQ ID NO: 1570355 - DNA, 15 bp, Homo sapiens
cgctgctgcgggagc

SEQ ID NO: 1570356 - DNA, 15 bp, Homo sapiens
gctgctgcgggagct

SEQ ID NO: 1570357 - DNA, 15 bp, Homo sapiens
ctgctgcgggagctg

SEQ ID NO: 1570358 - DNA, 15 bp, Homo sapiens
tgctgcgggagctgt

SEQ ID NO: 1570359 - DNA, 15 bp, Homo sapiens
gctgcgggagctgtc

SEQ ID NO: 1570360 - DNA, 15 bp, Homo sapiens
ctgcgggagctgtcc

SEQ ID NO: 1570361 - DNA, 15 bp, Homo sapiens
tgcgggagctgtccc

SEQ ID NO: 1570362 - DNA, 15 bp, Homo sapiens
gcgggagctgtcccc

SEQ ID NO: 1570363 - DNA, 15 bp, Homo sapiens
cgggagctgtccccg

SEQ ID NO: 1570364 - DNA, 15 bp, Homo sapiens
gggagctgtccccgc

SEQ ID NO: 1570365 - DNA, 15 bp, Homo sapiens
ggagctgtccccgcg

SEQ ID NO: 1570366 - DNA, 15 bp, Homo sapiens
gagctgtccccgcgg

SEQ ID NO: 1570367 - DNA, 15 bp, Homo sapiens
agctgtccccgcggc

SEQ ID NO: 1570368 - DNA, 15 bp, Homo sapiens
gctgtccccgcggct

SEQ ID NO: 1570369 - DNA, 15 bp, Homo sapiens
ctgtccccgcggctg

SEQ ID NO: 1570370 - DNA, 15 bp, Homo sapiens
tgtccccgcggctgc

SEQ ID NO: 1570371 - DNA, 15 bp, Homo sapiens
gtccccgcggctgcg

SEQ ID NO: 1570372 - DNA, 15 bp, Homo sapiens
tccccgcggctgcgg

SEQ ID NO: 1570373 - DNA, 15 bp, Homo sapiens
ccccgcggctgcggc

SEQ ID NO: 1570374 - DNA, 15 bp, Homo sapiens
cccgcggctgcggcc

SEQ ID NO: 1570375 - DNA, 15 bp, Homo sapiens
ccgcggctgcggccc

SEQ ID NO: 1570376 - DNA, 15 bp, Homo sapiens
cgcggctgcggcccc

SEQ ID NO: 1570377 - DNA, 15 bp, Homo sapiens
gcggctgcggccccg

SEQ ID NO: 1570378 - DNA, 15 bp, Homo sapiens
cggctgcggccccgc

SEQ ID NO: 1570379 - DNA, 15 bp, Homo sapiens
ggctgcggccccgcc

SEQ ID NO: 1570380 - DNA, 15 bp, Homo sapiens
gctgcggccccgccc

SEQ ID NO: 1570381 - DNA, 15 bp, Homo sapiens
ctgcggccccgcccc

SEQ ID NO: 1570382 - DNA, 15 bp, Homo sapiens
tgcggccccgccccc

SEQ ID NO: 1570383 - DNA, 15 bp, Homo sapiens
gcggccccgcccccg

SEQ ID NO: 1570384 - DNA, 15 bp, Homo sapiens
cggccccgcccccgg

SEQ ID NO: 1570385 - DNA, 15 bp, Homo sapiens
ggccccgcccccggg

SEQ ID NO: 1570386 - DNA, 15 bp, Homo sapiens
gccccgcccccgggg

SEQ ID NO: 1570387 - DNA, 15 bp, Homo sapiens
ccccgcccccggggt

SEQ ID NO: 1570388 - DNA, 15 bp, Homo sapiens
cccgcccccggggta

SEQ ID NO: 1570389 - DNA, 15 bp, Homo sapiens
ccgcccccggggtac

SEQ ID NO: 1570390 - DNA, 15 bp, Homo sapiens
cgcccccggggtacc

SEQ ID NO: 1570391 - DNA, 15 bp, Homo sapiens
gcccccggggtaccg

SEQ ID NO: 1570392 - DNA, 15 bp, Homo sapiens
cccccggggtaccgt

SEQ ID NO: 1570393 - DNA, 15 bp, Homo sapiens
ccccggggtaccgtg

SEQ ID NO: 1570394 - DNA, 15 bp, Homo sapiens
cccggggtaccgtgg

SEQ ID NO: 1570395 - DNA, 15 bp, Homo sapiens
ccggggtaccgtggc

SEQ ID NO: 1570396 - DNA, 15 bp, Homo sapiens
cggggtaccgtggcc

SEQ ID NO: 1570397 - DNA, 15 bp, Homo sapiens
ggggtaccgtggccg

SEQ ID NO: 1570398 - DNA, 15 bp, Homo sapiens
gggtaccgtggccgc

SEQ ID NO: 1570399 - DNA, 15 bp, Homo sapiens
ggtaccgtggccgcc

SEQ ID NO: 1570400 - DNA, 15 bp, Homo sapiens
gtaccgtggccgccc

SEQ ID NO: 1570401 - DNA, 15 bp, Homo sapiens
taccgtggccgcccg

SEQ ID NO: 1570402 - DNA, 15 bp, Homo sapiens
accgtggccgcccgg

SEQ ID NO: 1570403 - DNA, 15 bp, Homo sapiens
ccgtggccgcccggc

SEQ ID NO: 1570404 - DNA, 15 bp, Homo sapiens
cgtggccgcccggcc

SEQ ID NO: 1570405 - DNA, 15 bp, Homo sapiens
gtggccgcccggccc

SEQ ID NO: 1570406 - DNA, 15 bp, Homo sapiens
tggccgcccggccct

SEQ ID NO: 1570407 - DNA, 15 bp, Homo sapiens
ggccgcccggccctc

SEQ ID NO: 1570408 - DNA, 15 bp, Homo sapiens
gccgcccggccctcg

SEQ ID NO: 1570409 - DNA, 15 bp, Homo sapiens
ccgcccggccctcgg

SEQ ID NO: 1570410 - DNA, 15 bp, Homo sapiens
cgcccggccctcggg

SEQ ID NO: 1570411 - DNA, 15 bp, Homo sapiens
gcccggccctcgggc

SEQ ID NO: 1570412 - DNA, 15 bp, Homo sapiens
cccggccctcgggcg

SEQ ID NO: 1570413 - DNA, 15 bp, Homo sapiens
ccggccctcgggcgc

SEQ ID NO: 1570414 - DNA, 15 bp, Homo sapiens
cggccctcgggcgcc

SEQ ID NO: 1570415 - DNA, 15 bp, Homo sapiens
ggccctcgggcgccg

SEQ ID NO: 1570416 - DNA, 15 bp, Homo sapiens
gccctcgggcgccgc

SEQ ID NO: 1570417 - DNA, 15 bp, Homo sapiens
ccctcgggcgccgcc

SEQ ID NO: 1570418 - DNA, 15 bp, Homo sapiens
cctcgggcgccgcca

SEQ ID NO: 1570419 - DNA, 15 bp, Homo sapiens
ctcgggcgccgccac

SEQ ID NO: 1570420 - DNA, 15 bp, Homo sapiens
tcgggcgccgccacc

SEQ ID NO: 1570421 - DNA, 15 bp, Homo sapiens
cgggcgccgccacct

SEQ ID NO: 1570422 - DNA, 15 bp, Homo sapiens
gggcgccgccacctc

SEQ ID NO: 1570423 - DNA, 15 bp, Homo sapiens
ggcgccgccacctcg

SEQ ID NO: 1570424 - DNA, 15 bp, Homo sapiens
gcgccgccacctcgt

SEQ ID NO: 1570425 - DNA, 15 bp, Homo sapiens
cgccgccacctcgtc

SEQ ID NO: 1570426 - DNA, 15 bp, Homo sapiens
gccgccacctcgtcc

SEQ ID NO: 1570427 - DNA, 15 bp, Homo sapiens
ccgccacctcgtcca

SEQ ID NO: 1570428 - DNA, 15 bp, Homo sapiens
cgccacctcgtccag

SEQ ID NO: 1570429 - DNA, 15 bp, Homo sapiens
gccacctcgtccagc

SEQ ID NO: 1570430 - DNA, 15 bp, Homo sapiens
ccacctcgtccagca

SEQ ID NO: 1570431 - DNA, 15 bp, Homo sapiens
cacctcgtccagcag

SEQ ID NO: 1570432 - DNA, 15 bp, Homo sapiens
acctcgtccagcagc

SEQ ID NO: 1570433 - DNA, 15 bp, Homo sapiens
cctcgtccagcagcg

SEQ ID NO: 1570434 - DNA, 15 bp, Homo sapiens
ctcgtccagcagcgg

SEQ ID NO: 1570435 - DNA, 15 bp, Homo sapiens
tcgtccagcagcggc

SEQ ID NO: 1570436 - DNA, 15 bp, Homo sapiens
cgtccagcagcggcg

SEQ ID NO: 1570437 - DNA, 15 bp, Homo sapiens
gtccagcagcggcgt

SEQ ID NO: 1570438 - DNA, 15 bp, Homo sapiens
tccagcagcggcgtc

SEQ ID NO: 1570439 - DNA, 15 bp, Homo sapiens
ccagcagcggcgtca

SEQ ID NO: 1570440 - DNA, 15 bp, Homo sapiens
cagcagcggcgtcag

SEQ ID NO: 1570441 - DNA, 15 bp, Homo sapiens
agcagcggcgtcagc

SEQ ID NO: 1570442 - DNA, 15 bp, Homo sapiens
gcagcggcgtcagcg

SEQ ID NO: 1570443 - DNA, 15 bp, Homo sapiens
cagcggcgtcagcga

SEQ ID NO: 1570444 - DNA, 15 bp, Homo sapiens
agcggcgtcagcgag

SEQ ID NO: 1570445 - DNA, 15 bp, Homo sapiens
gcggcgtcagcgagt

SEQ ID NO: 1570446 - DNA, 15 bp, Homo sapiens
cggcgtcagcgagtt

SEQ ID NO: 1570447 - DNA, 15 bp, Homo sapiens
ggcgtcagcgagttg

SEQ ID NO: 1570448 - DNA, 15 bp, Homo sapiens
gcgtcagcgagttgt

SEQ ID NO: 1570449 - DNA, 15 bp, Homo sapiens
cgtcagcgagttgtc

SEQ ID NO: 1570450 - DNA, 15 bp, Homo sapiens
gtcagcgagttgtcc

SEQ ID NO: 1570451 - DNA, 15 bp, Homo sapiens
tcagcgagttgtcct

SEQ ID NO: 1570452 - DNA, 15 bp, Homo sapiens
cagcgagttgtcctc

SEQ ID NO: 1570453 - DNA, 15 bp, Homo sapiens
agcgagttgtcctcc

SEQ ID NO: 1570454 - DNA, 15 bp, Homo sapiens
gcgagttgtcctccg

SEQ ID NO: 1570455 - DNA, 15 bp, Homo sapiens
cgagttgtcctccgg

SEQ ID NO: 1570456 - DNA, 15 bp, Homo sapiens
gagttgtcctccgga

SEQ ID NO: 1570457 - DNA, 15 bp, Homo sapiens
agttgtcctccggag

SEQ ID NO: 1570458 - DNA, 15 bp, Homo sapiens
gttgtcctccggaga

SEQ ID NO: 1570459 - DNA, 15 bp, Homo sapiens
ttgtcctccggagag

SEQ ID NO: 1570460 - DNA, 15 bp, Homo sapiens
tgtcctccggagagc

SEQ ID NO: 1570461 - DNA, 15 bp, Homo sapiens
gtcctccggagagca

SEQ ID NO: 1570462 - DNA, 15 bp, Homo sapiens
tcctccggagagcag

SEQ ID NO: 1570463 - DNA, 15 bp, Homo sapiens
cctccggagagcaga

SEQ ID NO: 1570464 - DNA, 15 bp, Homo sapiens
ctccggagagcagag

SEQ ID NO: 1570465 - DNA, 15 bp, Homo sapiens
tccggagagcagagg

SEQ ID NO: 1570466 - DNA, 15 bp, Homo sapiens
ccggagagcagaggc

SEQ ID NO: 1570467 - DNA, 15 bp, Homo sapiens
cggagagcagaggcc

SEQ ID NO: 1570468 - DNA, 15 bp, Homo sapiens
ggagagcagaggccc

SEQ ID NO: 1570469 - DNA, 15 bp, Homo sapiens
gagagcagaggcccg

SEQ ID NO: 1570470 - DNA, 15 bp, Homo sapiens
agagcagaggcccgt

SEQ ID NO: 1570471 - DNA, 15 bp, Homo sapiens
gagcagaggcccgtg

SEQ ID NO: 1570472 - DNA, 15 bp, Homo sapiens
agcagaggcccgtgc

SEQ ID NO: 1570473 - DNA, 15 bp, Homo sapiens
gcagaggcccgtgcg

SEQ ID NO: 1570474 - DNA, 15 bp, Homo sapiens
cagaggcccgtgcgg

SEQ ID NO: 1570475 - DNA, 15 bp, Homo sapiens
agaggcccgtgcggc

SEQ ID NO: 1570476 - DNA, 15 bp, Homo sapiens
gaggcccgtgcggct

SEQ ID NO: 1570477 - DNA, 15 bp, Homo sapiens
aggcccgtgcggctc

SEQ ID NO: 1570478 - DNA, 15 bp, Homo sapiens
ggcccgtgcggctct

SEQ ID NO: 1570479 - DNA, 15 bp, Homo sapiens
gcccgtgcggctctc

SEQ ID NO: 1570480 - DNA, 15 bp, Homo sapiens
cccgtgcggctctcg

SEQ ID NO: 1570481 - DNA, 15 bp, Homo sapiens
ccgtgcggctctcgc

SEQ ID NO: 1570482 - DNA, 15 bp, Homo sapiens
cgtgcggctctcgct

SEQ ID NO: 1570483 - DNA, 15 bp, Homo sapiens
gtgcggctctcgctg

SEQ ID NO: 1570484 - DNA, 15 bp, Homo sapiens
tgcggctctcgctgc

SEQ ID NO: 1570485 - DNA, 15 bp, Homo sapiens
gcggctctcgctgct

SEQ ID NO: 1570486 - DNA, 15 bp, Homo sapiens
cggctctcgctgctg

SEQ ID NO: 1570487 - DNA, 15 bp, Homo sapiens
ggctctcgctgctgc

SEQ ID NO: 1570488 - DNA, 15 bp, Homo sapiens
gctctcgctgctgct

SEQ ID NO: 1570489 - DNA, 15 bp, Homo sapiens
ctctcgctgctgctg

SEQ ID NO: 1570490 - DNA, 15 bp, Homo sapiens
tctcgctgctgctgg

SEQ ID NO: 1570491 - DNA, 15 bp, Homo sapiens
ctcgctgctgctggg

SEQ ID NO: 1570492 - DNA, 15 bp, Homo sapiens
tcgctgctgctgggc

SEQ ID NO: 1570493 - DNA, 15 bp, Homo sapiens
cgctgctgctgggct

SEQ ID NO: 1570494 - DNA, 15 bp, Homo sapiens
gctgctgctgggctc

SEQ ID NO: 1570495 - DNA, 15 bp, Homo sapiens
ctgctgctgggctcc

SEQ ID NO: 1570496 - DNA, 15 bp, Homo sapiens
tgctgctgggctccg

SEQ ID NO: 1570497 - DNA, 15 bp, Homo sapiens
gctgctgggctccgt

SEQ ID NO: 1570498 - DNA, 15 bp, Homo sapiens
ctgctgggctccgtg

SEQ ID NO: 1570499 - DNA, 15 bp, Homo sapiens
tgctgggctccgtgt

SEQ ID NO: 1570500 - DNA, 15 bp, Homo sapiens
gctgggctccgtgtc

SEQ ID NO: 1570501 - DNA, 15 bp, Homo sapiens
ctgggctccgtgtcc

SEQ ID NO: 1570502 - DNA, 15 bp, Homo sapiens
tgggctccgtgtcct

SEQ ID NO: 1570503 - DNA, 15 bp, Homo sapiens
gggctccgtgtcctc

SEQ ID NO: 1570504 - DNA, 15 bp, Homo sapiens
ggctccgtgtcctcg

SEQ ID NO: 1570505 - DNA, 15 bp, Homo sapiens
gctccgtgtcctcgc

SEQ ID NO: 1570506 - DNA, 15 bp, Homo sapiens
ctccgtgtcctcgct

SEQ ID NO: 1570507 - DNA, 15 bp, Homo sapiens
tccgtgtcctcgctg

SEQ ID NO: 1570508 - DNA, 15 bp, Homo sapiens
ccgtgtcctcgctga

SEQ ID NO: 1570509 - DNA, 15 bp, Homo sapiens
cgtgtcctcgctgag

SEQ ID NO: 1570510 - DNA, 15 bp, Homo sapiens
gtgtcctcgctgagc

SEQ ID NO: 1570511 - DNA, 15 bp, Homo sapiens
tgtcctcgctgagcg

SEQ ID NO: 1570512 - DNA, 15 bp, Homo sapiens
gtcctcgctgagcgc

SEQ ID NO: 1570513 - DNA, 15 bp, Homo sapiens
tcctcgctgagcgcc

SEQ ID NO: 1570514 - DNA, 15 bp, Homo sapiens
cctcgctgagcgcca

SEQ ID NO: 1570515 - DNA, 15 bp, Homo sapiens
ctcgctgagcgccag

SEQ ID NO: 1570516 - DNA, 15 bp, Homo sapiens
tcgctgagcgccagg

SEQ ID NO: 1570517 - DNA, 15 bp, Homo sapiens
cgctgagcgccaggc

SEQ ID NO: 1570518 - DNA, 15 bp, Homo sapiens
gctgagcgccaggcg

SEQ ID NO: 1570519 - DNA, 15 bp, Homo sapiens
ctgagcgccaggcgc

SEQ ID NO: 1570520 - DNA, 15 bp, Homo sapiens
tgagcgccaggcgcg

SEQ ID NO: 1570521 - DNA, 15 bp, Homo sapiens
gagcgccaggcgcgg

SEQ ID NO: 1570522 - DNA, 15 bp, Homo sapiens
agcgccaggcgcggg

SEQ ID NO: 1570523 - DNA, 15 bp, Homo sapiens
gcgccaggcgcgggg

SEQ ID NO: 1570524 - DNA, 15 bp, Homo sapiens
cgccaggcgcggggg

SEQ ID NO: 1570525 - DNA, 15 bp, Homo sapiens
gccaggcgcgggggc

SEQ ID NO: 1570526 - DNA, 15 bp, Homo sapiens
ccaggcgcgggggcg

SEQ ID NO: 1570527 - DNA, 15 bp, Homo sapiens
caggcgcgggggcgc

SEQ ID NO: 1570528 - DNA, 15 bp, Homo sapiens
aggcgcgggggcgcg

SEQ ID NO: 1570529 - DNA, 15 bp, Homo sapiens
ggcgcgggggcgcgg

SEQ ID NO: 1570530 - DNA, 15 bp, Homo sapiens
gcgcgggggcgcggg

SEQ ID NO: 1570531 - DNA, 15 bp, Homo sapiens
cgcgggggcgcgggc

SEQ ID NO: 1570532 - DNA, 15 bp, Homo sapiens
gcgggggcgcgggcg

SEQ ID NO: 1570533 - DNA, 15 bp, Homo sapiens
cgggggcgcgggcgg

SEQ ID NO: 1570534 - DNA, 15 bp, Homo sapiens
gggggcgcgggcggc

SEQ ID NO: 1570535 - DNA, 15 bp, Homo sapiens
ggggcgcgggcggcg

SEQ ID NO: 1570536 - DNA, 15 bp, Homo sapiens
gggcgcgggcggcgg

SEQ ID NO: 1570537 - DNA, 15 bp, Homo sapiens
ggcgcgggcggcggc

SEQ ID NO: 1570538 - DNA, 15 bp, Homo sapiens
gcgggcggcggcggc

SEQ ID NO: 1570539 - DNA, 15 bp, Homo sapiens
cgggcggcggcggcg

SEQ ID NO: 1570540 - DNA, 15 bp, Homo sapiens
gggcggcggcggcgg

SEQ ID NO: 1570541 - DNA, 15 bp, Homo sapiens
gcggcggcggcgcgg

SEQ ID NO: 1570542 - DNA, 15 bp, Homo sapiens
cggcggcggcgcggc

SEQ ID NO: 1570543 - DNA, 15 bp, Homo sapiens
ggcggcggcgcggca

SEQ ID NO: 1570544 - DNA, 15 bp, Homo sapiens
gcggcggcgcggcag

SEQ ID NO: 1570545 - DNA, 15 bp, Homo sapiens
cggcggcgcggcagg

SEQ ID NO: 1570546 - DNA, 15 bp, Homo sapiens
ggcggcgcggcaggc

SEQ ID NO: 1570547 - DNA, 15 bp, Homo sapiens
gcggcgcggcaggcg

SEQ ID NO: 1570548 - DNA, 15 bp, Homo sapiens
cggcgcggcaggcgg

SEQ ID NO: 1570549 - DNA, 15 bp, Homo sapiens
ggcgcggcaggcggg

SEQ ID NO: 1570550 - DNA, 15 bp, Homo sapiens
gcgcggcaggcgggg

SEQ ID NO: 1570551 - DNA, 15 bp, Homo sapiens
cgcggcaggcggggc

SEQ ID NO: 1570552 - DNA, 15 bp, Homo sapiens
gcggcaggcggggcg

SEQ ID NO: 1570553 - DNA, 15 bp, Homo sapiens
cggcaggcggggcgc

SEQ ID NO: 1570554 - DNA, 15 bp, Homo sapiens
ggcaggcggggcgcg

SEQ ID NO: 1570555 - DNA, 15 bp, Homo sapiens
gcaggcggggcgcgc

SEQ ID NO: 1570556 - DNA, 15 bp, Homo sapiens
caggcggggcgcgct

SEQ ID NO: 1570557 - DNA, 15 bp, Homo sapiens
aggcggggcgcgctc

SEQ ID NO: 1570558 - DNA, 15 bp, Homo sapiens
ggcggggcgcgctcc

SEQ ID NO: 1570559 - DNA, 15 bp, Homo sapiens
gcggggcgcgctccc

SEQ ID NO: 1570560 - DNA, 15 bp, Homo sapiens
cggggcgcgctcccg

SEQ ID NO: 1570561 - DNA, 15 bp, Homo sapiens
ggggcgcgctcccgc

SEQ ID NO: 1570562 - DNA, 15 bp, Homo sapiens
gggcgcgctcccgct

SEQ ID NO: 1570563 - DNA, 15 bp, Homo sapiens
ggcgcgctcccgctc

SEQ ID NO: 1570564 - DNA, 15 bp, Homo sapiens
gcgcgctcccgctcc

SEQ ID NO: 1570565 - DNA, 15 bp, Homo sapiens
cgcgctcccgctcct

SEQ ID NO: 1570566 - DNA, 15 bp, Homo sapiens
gcgctcccgctcctc

SEQ ID NO: 1570567 - DNA, 15 bp, Homo sapiens
cgctcccgctcctcc

SEQ ID NO: 1570568 - DNA, 15 bp, Homo sapiens
gctcccgctcctccc

SEQ ID NO: 1570569 - DNA, 15 bp, Homo sapiens
ctcccgctcctccct

SEQ ID NO: 1570570 - DNA, 15 bp, Homo sapiens
tcccgctcctccctc

SEQ ID NO: 1570571 - DNA, 15 bp, Homo sapiens
cccgctcctccctcg

SEQ ID NO: 1570572 - DNA, 15 bp, Homo sapiens
ccgctcctccctcgc

SEQ ID NO: 1570573 - DNA, 15 bp, Homo sapiens
cgctcctccctcgcg

SEQ ID NO: 1570574 - DNA, 15 bp, Homo sapiens
gctcctccctcgcgg

SEQ ID NO: 1570575 - DNA, 15 bp, Homo sapiens
ctcctccctcgcggg

SEQ ID NO: 1570576 - DNA, 15 bp, Homo sapiens
tcctccctcgcgggc

SEQ ID NO: 1570577 - DNA, 15 bp, Homo sapiens
cctccctcgcgggcc

SEQ ID NO: 1570578 - DNA, 15 bp, Homo sapiens
ctccctcgcgggccg

SEQ ID NO: 1570579 - DNA, 15 bp, Homo sapiens
tccctcgcgggccgg

SEQ ID NO: 1570580 - DNA, 15 bp, Homo sapiens
ccctcgcgggccggc

SEQ ID NO: 1570581 - DNA, 15 bp, Homo sapiens
cctcgcgggccggcg

SEQ ID NO: 1570582 - DNA, 15 bp, Homo sapiens
ctcgcgggccggcgg

SEQ ID NO: 1570583 - DNA, 15 bp, Homo sapiens
tcgcgggccggcggc

SEQ ID NO: 1570584 - DNA, 15 bp, Homo sapiens
cgcgggccggcggcg

SEQ ID NO: 1570585 - DNA, 15 bp, Homo sapiens
gcgggccggcggcgc

SEQ ID NO: 1570586 - DNA, 15 bp, Homo sapiens
cgggccggcggcgcg

SEQ ID NO: 1570587 - DNA, 15 bp, Homo sapiens
gggccggcggcgcgc

SEQ ID NO: 1570588 - DNA, 15 bp, Homo sapiens
ggccggcggcgcgcg

SEQ ID NO: 1570589 - DNA, 15 bp, Homo sapiens
gccggcggcgcgcgg

SEQ ID NO: 1570590 - DNA, 15 bp, Homo sapiens
ccggcggcgcgcggg

SEQ ID NO: 1570591 - DNA, 15 bp, Homo sapiens
cggcggcgcgcgggc

SEQ ID NO: 1570592 - DNA, 15 bp, Homo sapiens
ggcggcgcgcgggcc

SEQ ID NO: 1570593 - DNA, 15 bp, Homo sapiens
gcggcgcgcgggccg

SEQ ID NO: 1570594 - DNA, 15 bp, Homo sapiens
cggcgcgcgggccgc

SEQ ID NO: 1570595 - DNA, 15 bp, Homo sapiens
ggcgcgcgggccgcg

SEQ ID NO: 1570596 - DNA, 15 bp, Homo sapiens
gcgcgcgggccgcgc

SEQ ID NO: 1570597 - DNA, 15 bp, Homo sapiens
cgcgcgggccgcgcc

SEQ ID NO: 1570598 - DNA, 15 bp, Homo sapiens
gcgcgggccgcgcct

SEQ ID NO: 1570599 - DNA, 15 bp, Homo sapiens
cgcgggccgcgcctc

SEQ ID NO: 1570600 - DNA, 15 bp, Homo sapiens
gcgggccgcgcctcg

SEQ ID NO: 1570601 - DNA, 15 bp, Homo sapiens
cgggccgcgcctcgt

SEQ ID NO: 1570602 - DNA, 15 bp, Homo sapiens
gggccgcgcctcgtg

SEQ ID NO: 1570603 - DNA, 15 bp, Homo sapiens
ggccgcgcctcgtgg

SEQ ID NO: 1570604 - DNA, 15 bp, Homo sapiens
gccgcgcctcgtgga

SEQ ID NO: 1570605 - DNA, 15 bp, Homo sapiens
ccgcgcctcgtggac

SEQ ID NO: 1570606 - DNA, 15 bp, Homo sapiens
cgcgcctcgtggaca

SEQ ID NO: 1570607 - DNA, 15 bp, Homo sapiens
gcgcctcgtggacat

SEQ ID NO: 1570608 - DNA, 15 bp, Homo sapiens
cgcctcgtggacatc

SEQ ID NO: 1570609 - DNA, 15 bp, Homo sapiens
gcctcgtggacatct

SEQ ID NO: 1570610 - DNA, 15 bp, Homo sapiens
cctcgtggacatcta

SEQ ID NO: 1570611 - DNA, 15 bp, Homo sapiens
ctcgtggacatctac

SEQ ID NO: 1570612 - DNA, 15 bp, Homo sapiens
tcgtggacatctacg

SEQ ID NO: 1570613 - DNA, 15 bp, Homo sapiens
cgtggacatctacgc

SEQ ID NO: 1570614 - DNA, 15 bp, Homo sapiens
gtggacatctacgcc

SEQ ID NO: 1570615 - DNA, 15 bp, Homo sapiens
tggacatctacgccc

SEQ ID NO: 1570616 - DNA, 15 bp, Homo sapiens
ggacatctacgcccg

SEQ ID NO: 1570617 - DNA, 15 bp, Homo sapiens
gacatctacgcccga

SEQ ID NO: 1570618 - DNA, 15 bp, Homo sapiens
acatctacgcccgag

SEQ ID NO: 1570619 - DNA, 15 bp, Homo sapiens
catctacgcccgagt

SEQ ID NO: 1570620 - DNA, 15 bp, Homo sapiens
atctacgcccgagtc

SEQ ID NO: 1570621 - DNA, 15 bp, Homo sapiens
tctacgcccgagtcc

SEQ ID NO: 1570622 - DNA, 15 bp, Homo sapiens
ctacgcccgagtcca

SEQ ID NO: 1570623 - DNA, 15 bp, Homo sapiens
tacgcccgagtccag

SEQ ID NO: 1570624 - DNA, 15 bp, Homo sapiens
acgcccgagtccagg

SEQ ID NO: 1570625 - DNA, 15 bp, Homo sapiens
cgcccgagtccaggc

SEQ ID NO: 1570626 - DNA, 15 bp, Homo sapiens
gcccgagtccaggct

SEQ ID NO: 1570627 - DNA, 15 bp, Homo sapiens
cccgagtccaggctg

SEQ ID NO: 1570628 - DNA, 15 bp, Homo sapiens
ccgagtccaggctgg

SEQ ID NO: 1570629 - DNA, 15 bp, Homo sapiens
cgagtccaggctggc

SEQ ID NO: 1570630 - DNA, 15 bp, Homo sapiens
gagtccaggctggcg

SEQ ID NO: 1570631 - DNA, 15 bp, Homo sapiens
agtccaggctggcgt

SEQ ID NO: 1570632 - DNA, 15 bp, Homo sapiens
gtccaggctggcgtc

SEQ ID NO: 1570633 - DNA, 15 bp, Homo sapiens
tccaggctggcgtcg

SEQ ID NO: 1570634 - DNA, 15 bp, Homo sapiens
ccaggctggcgtcgg

SEQ ID NO: 1570635 - DNA, 15 bp, Homo sapiens
caggctggcgtcggt

SEQ ID NO: 1570636 - DNA, 15 bp, Homo sapiens
aggctggcgtcggtg

SEQ ID NO: 1570637 - DNA, 15 bp, Homo sapiens
ggctggcgtcggtgc

SEQ ID NO: 1570638 - DNA, 15 bp, Homo sapiens
gctggcgtcggtgct

SEQ ID NO: 1570639 - DNA, 15 bp, Homo sapiens
ctggcgtcggtgctg

SEQ ID NO: 1570640 - DNA, 15 bp, Homo sapiens
tggcgtcggtgctgc

SEQ ID NO: 1570641 - DNA, 15 bp, Homo sapiens
ggcgtcggtgctgcg

SEQ ID NO: 1570642 - DNA, 15 bp, Homo sapiens
gcgtcggtgctgcgt

SEQ ID NO: 1570643 - DNA, 15 bp, Homo sapiens
cgtcggtgctgcgtg

SEQ ID NO: 1570644 - DNA, 15 bp, Homo sapiens
gtcggtgctgcgtgc

SEQ ID NO: 1570645 - DNA, 15 bp, Homo sapiens
tcggtgctgcgtgcc

SEQ ID NO: 1570646 - DNA, 15 bp, Homo sapiens
cggtgctgcgtgccc

SEQ ID NO: 1570647 - DNA, 15 bp, Homo sapiens
ggtgctgcgtgcccc

SEQ ID NO: 1570648 - DNA, 15 bp, Homo sapiens
gtgctgcgtgccccg

SEQ ID NO: 1570649 - DNA, 15 bp, Homo sapiens
tgctgcgtgccccgc

SEQ ID NO: 1570650 - DNA, 15 bp, Homo sapiens
gctgcgtgccccgcc

SEQ ID NO: 1570651 - DNA, 15 bp, Homo sapiens
ctgcgtgccccgccg

SEQ ID NO: 1570652 - DNA, 15 bp, Homo sapiens
tgcgtgccccgccgc

SEQ ID NO: 1570653 - DNA, 15 bp, Homo sapiens
gcgtgccccgccgcc

SEQ ID NO: 1570654 - DNA, 15 bp, Homo sapiens
cgtgccccgccgccc

SEQ ID NO: 1570655 - DNA, 15 bp, Homo sapiens
gtgccccgccgcccg

SEQ ID NO: 1570656 - DNA, 15 bp, Homo sapiens
tgccccgccgcccgc

SEQ ID NO: 1570657 - DNA, 15 bp, Homo sapiens
gccccgccgcccgcc

SEQ ID NO: 1570658 - DNA, 15 bp, Homo sapiens
ccccgccgcccgcct

SEQ ID NO: 1570659 - DNA, 15 bp, Homo sapiens
cccgccgcccgcctg

SEQ ID NO: 1570660 - DNA, 15 bp, Homo sapiens
ccgccgcccgcctgc

SEQ ID NO: 1570661 - DNA, 15 bp, Homo sapiens
cgccgcccgcctgca

SEQ ID NO: 1570662 - DNA, 15 bp, Homo sapiens
gccgcccgcctgcag

SEQ ID NO: 1570663 - DNA, 15 bp, Homo sapiens
ccgcccgcctgcagg

SEQ ID NO: 1570664 - DNA, 15 bp, Homo sapiens
cgcccgcctgcaggt

SEQ ID NO: 1570665 - DNA, 15 bp, Homo sapiens
gcccgcctgcaggtc

SEQ ID NO: 1570666 - DNA, 15 bp, Homo sapiens
cccgcctgcaggtcg

SEQ ID NO: 1570667 - DNA, 15 bp, Homo sapiens
ccgcctgcaggtcga

SEQ ID NO: 1570668 - DNA, 15 bp, Homo sapiens
cgcctgcaggtcgat

SEQ ID NO: 1570669 - DNA, 15 bp, Homo sapiens
gcctgcaggtcgatg

SEQ ID NO: 1570670 - DNA, 15 bp, Homo sapiens
cctgcaggtcgatgt

SEQ ID NO: 1570671 - DNA, 15 bp, Homo sapiens
ctgcaggtcgatgta

SEQ ID NO: 1570672 - DNA, 15 bp, Homo sapiens
tgcaggtcgatgtaa

SEQ ID NO: 1570673 - DNA, 15 bp, Homo sapiens
gcaggtcgatgtaag

SEQ ID NO: 1570674 - DNA, 15 bp, Homo sapiens
caggtcgatgtaaga

SEQ ID NO: 1570675 - DNA, 15 bp, Homo sapiens
aggtcgatgtaagag

SEQ ID NO: 1570676 - DNA, 15 bp, Homo sapiens
ggtcgatgtaagagt

SEQ ID NO: 1570677 - DNA, 15 bp, Homo sapiens
gtcgatgtaagagtg

SEQ ID NO: 1570678 - DNA, 15 bp, Homo sapiens
tcgatgtaagagtgg

SEQ ID NO: 1570679 - DNA, 15 bp, Homo sapiens
cgatgtaagagtggc

SEQ ID NO: 1570680 - DNA, 15 bp, Homo sapiens
gatgtaagagtggcg

SEQ ID NO: 1570681 - DNA, 15 bp, Homo sapiens
atgtaagagtggcgc

SEQ ID NO: 1570682 - DNA, 15 bp, Homo sapiens
tgtaagagtggcgca

SEQ ID NO: 1570683 - DNA, 15 bp, Homo sapiens
gtaagagtggcgcac

SEQ ID NO: 1570684 - DNA, 15 bp, Homo sapiens
taagagtggcgcact

SEQ ID NO: 1570685 - DNA, 15 bp, Homo sapiens
aagagtggcgcactt

SEQ ID NO: 1570686 - DNA, 15 bp, Homo sapiens
agagtggcgcacttg

SEQ ID NO: 1570687 - DNA, 15 bp, Homo sapiens
gagtggcgcacttgc

SEQ ID NO: 1570688 - DNA, 15 bp, Homo sapiens
agtggcgcacttgcg

SEQ ID NO: 1570689 - DNA, 15 bp, Homo sapiens
gtggcgcacttgcga

SEQ ID NO: 1570690 - DNA, 15 bp, Homo sapiens
tggcgcacttgcgag

SEQ ID NO: 1570691 - DNA, 15 bp, Homo sapiens
ggcgcacttgcgagt

SEQ ID NO: 1570692 - DNA, 15 bp, Homo sapiens
gcgcacttgcgagtt

SEQ ID NO: 1570693 - DNA, 15 bp, Homo sapiens
cgcacttgcgagttg

SEQ ID NO: 1570694 - DNA, 15 bp, Homo sapiens
gcacttgcgagttgg

SEQ ID NO: 1570695 - DNA, 15 bp, Homo sapiens
cacttgcgagttgga

SEQ ID NO: 1570696 - DNA, 15 bp, Homo sapiens
acttgcgagttggag

SEQ ID NO: 1570697 - DNA, 15 bp, Homo sapiens
cttgcgagttggagc

SEQ ID NO: 1570698 - DNA, 15 bp, Homo sapiens
ttgcgagttggagcg

SEQ ID NO: 1570699 - DNA, 15 bp, Homo sapiens
tgcgagttggagcgc

SEQ ID NO: 1570700 - DNA, 15 bp, Homo sapiens
gcgagttggagcgcc

SEQ ID NO: 1570701 - DNA, 15 bp, Homo sapiens
cgagttggagcgccc

SEQ ID NO: 1570702 - DNA, 15 bp, Homo sapiens
gagttggagcgcccg

SEQ ID NO: 1570703 - DNA, 15 bp, Homo sapiens
agttggagcgcccgt

SEQ ID NO: 1570704 - DNA, 15 bp, Homo sapiens
gttggagcgcccgtc

SEQ ID NO: 1570705 - DNA, 15 bp, Homo sapiens
ttggagcgcccgtcg

SEQ ID NO: 1570706 - DNA, 15 bp, Homo sapiens
tggagcgcccgtcga

SEQ ID NO: 1570707 - DNA, 15 bp, Homo sapiens
ggagcgcccgtcgag

SEQ ID NO: 1570708 - DNA, 15 bp, Homo sapiens
gagcgcccgtcgagg

SEQ ID NO: 1570709 - DNA, 15 bp, Homo sapiens
agcgcccgtcgaggg

SEQ ID NO: 1570710 - DNA, 15 bp, Homo sapiens
gcgcccgtcgaggga

SEQ ID NO: 1570711 - DNA, 15 bp, Homo sapiens
cgcccgtcgagggac

SEQ ID NO: 1570712 - DNA, 15 bp, Homo sapiens
gcccgtcgagggaca

SEQ ID NO: 1570713 - DNA, 15 bp, Homo sapiens
cccgtcgagggacac

SEQ ID NO: 1570714 - DNA, 15 bp, Homo sapiens
ccgtcgagggacacg

SEQ ID NO: 1570715 - DNA, 15 bp, Homo sapiens
cgtcgagggacacga

SEQ ID NO: 1570716 - DNA, 15 bp, Homo sapiens
gtcgagggacacgaa

SEQ ID NO: 1570717 - DNA, 15 bp, Homo sapiens
tcgagggacacgaac

SEQ ID NO: 1570718 - DNA, 15 bp, Homo sapiens
cgagggacacgaacc

SEQ ID NO: 1570719 - DNA, 15 bp, Homo sapiens
gagggacacgaacca

SEQ ID NO: 1570720 - DNA, 15 bp, Homo sapiens
agggacacgaaccag

SEQ ID NO: 1570721 - DNA, 15 bp, Homo sapiens
gggacacgaaccagg

SEQ ID NO: 1570722 - DNA, 15 bp, Homo sapiens
ggacacgaaccaggc

SEQ ID NO: 1570723 - DNA, 15 bp, Homo sapiens
gacacgaaccaggcg

SEQ ID NO: 1570724 - DNA, 15 bp, Homo sapiens
acacgaaccaggcgc

SEQ ID NO: 1570725 - DNA, 15 bp, Homo sapiens
cacgaaccaggcgcg

SEQ ID NO: 1570726 - DNA, 15 bp, Homo sapiens
acgaaccaggcgcgc

SEQ ID NO: 1570727 - DNA, 15 bp, Homo sapiens
cgaaccaggcgcgcg

SEQ ID NO: 1570728 - DNA, 15 bp, Homo sapiens
gaaccaggcgcgcgg

SEQ ID NO: 1570729 - DNA, 15 bp, Homo sapiens
aaccaggcgcgcggg

SEQ ID NO: 1570730 - DNA, 15 bp, Homo sapiens
accaggcgcgcgggt

SEQ ID NO: 1570731 - DNA, 15 bp, Homo sapiens
ccaggcgcgcgggtg

SEQ ID NO: 1570732 - DNA, 15 bp, Homo sapiens
caggcgcgcgggtgc

SEQ ID NO: 1570733 - DNA, 15 bp, Homo sapiens
aggcgcgcgggtgcg

SEQ ID NO: 1570734 - DNA, 15 bp, Homo sapiens
ggcgcgcgggtgcgg

SEQ ID NO: 1570735 - DNA, 15 bp, Homo sapiens
gcgcgcgggtgcggc

SEQ ID NO: 1570736 - DNA, 15 bp, Homo sapiens
cgcgcgggtgcggct

SEQ ID NO: 1570737 - DNA, 15 bp, Homo sapiens
gcgcgggtgcggctt

SEQ ID NO: 1570738 - DNA, 15 bp, Homo sapiens
cgcgggtgcggcttc

SEQ ID NO: 1570739 - DNA, 15 bp, Homo sapiens
gcgggtgcggcttca

SEQ ID NO: 1570740 - DNA, 15 bp, Homo sapiens
cgggtgcggcttcac

SEQ ID NO: 1570741 - DNA, 15 bp, Homo sapiens
gggtgcggcttcacg

SEQ ID NO: 1570742 - DNA, 15 bp, Homo sapiens
ggtgcggcttcacgc

SEQ ID NO: 1570743 - DNA, 15 bp, Homo sapiens
gtgcggcttcacgcc

SEQ ID NO: 1570744 - DNA, 15 bp, Homo sapiens
tgcggcttcacgccc

SEQ ID NO: 1570745 - DNA, 15 bp, Homo sapiens
gcggcttcacgccca

SEQ ID NO: 1570746 - DNA, 15 bp, Homo sapiens
cggcttcacgcccag

SEQ ID NO: 1570747 - DNA, 15 bp, Homo sapiens
ggcttcacgcccagt

SEQ ID NO: 1570748 - DNA, 15 bp, Homo sapiens
gcttcacgcccagtt

SEQ ID NO: 1570749 - DNA, 15 bp, Homo sapiens
cttcacgcccagttc

SEQ ID NO: 1570750 - DNA, 15 bp, Homo sapiens
ttcacgcccagttcc

SEQ ID NO: 1570751 - DNA, 15 bp, Homo sapiens
tcacgcccagttcca

SEQ ID NO: 1570752 - DNA, 15 bp, Homo sapiens
cacgcccagttccag

SEQ ID NO: 1570753 - DNA, 15 bp, Homo sapiens
acgcccagttccagc

SEQ ID NO: 1570754 - DNA, 15 bp, Homo sapiens
cgcccagttccagca

SEQ ID NO: 1570755 - DNA, 15 bp, Homo sapiens
gcccagttccagcag

SEQ ID NO: 1570756 - DNA, 15 bp, Homo sapiens
cccagttccagcagc

SEQ ID NO: 1570757 - DNA, 15 bp, Homo sapiens
ccagttccagcagct

SEQ ID NO: 1570758 - DNA, 15 bp, Homo sapiens
cagttccagcagctt

SEQ ID NO: 1570759 - DNA, 15 bp, Homo sapiens
agttccagcagcttc

SEQ ID NO: 1570760 - DNA, 15 bp, Homo sapiens
gttccagcagcttct

SEQ ID NO: 1570761 - DNA, 15 bp, Homo sapiens
ttccagcagcttctt

SEQ ID NO: 1570762 - DNA, 15 bp, Homo sapiens
tccagcagcttcttc

SEQ ID NO: 1570763 - DNA, 15 bp, Homo sapiens
ccagcagcttcttct

SEQ ID NO: 1570764 - DNA, 15 bp, Homo sapiens
cagcagcttcttctc

SEQ ID NO: 1570765 - DNA, 15 bp, Homo sapiens
agcagcttcttctcg

SEQ ID NO: 1570766 - DNA, 15 bp, Homo sapiens
gcagcttcttctcgg

SEQ ID NO: 1570767 - DNA, 15 bp, Homo sapiens
cagcttcttctcggt

SEQ ID NO: 1570768 - DNA, 15 bp, Homo sapiens
agcttcttctcggtc

SEQ ID NO: 1570769 - DNA, 15 bp, Homo sapiens
gcttcttctcggtca

SEQ ID NO: 1570770 - DNA, 15 bp, Homo sapiens
cttcttctcggtcag

SEQ ID NO: 1570771 - DNA, 15 bp, Homo sapiens
ttcttctcggtcagg

SEQ ID NO: 1570772 - DNA, 15 bp, Homo sapiens
tcttctcggtcaggg

SEQ ID NO: 1570773 - DNA, 15 bp, Homo sapiens
cttctcggtcagggc

SEQ ID NO: 1570774 - DNA, 15 bp, Homo sapiens
ttctcggtcagggcc

SEQ ID NO: 1570775 - DNA, 15 bp, Homo sapiens
tctcggtcagggcct

SEQ ID NO: 1570776 - DNA, 15 bp, Homo sapiens
ctcggtcagggcctg

SEQ ID NO: 1570777 - DNA, 15 bp, Homo sapiens
tcggtcagggcctgc

SEQ ID NO: 1570778 - DNA, 15 bp, Homo sapiens
cggtcagggcctgca

SEQ ID NO: 1570779 - DNA, 15 bp, Homo sapiens
ggtcagggcctgcag

SEQ ID NO: 1570780 - DNA, 15 bp, Homo sapiens
gtcagggcctgcagc

SEQ ID NO: 1570781 - DNA, 15 bp, Homo sapiens
tcagggcctgcagct

SEQ ID NO: 1570782 - DNA, 15 bp, Homo sapiens
cagggcctgcagctc

SEQ ID NO: 1570783 - DNA, 15 bp, Homo sapiens
agggcctgcagctcc

SEQ ID NO: 1570784 - DNA, 15 bp, Homo sapiens
gggcctgcagctccc

SEQ ID NO: 1570785 - DNA, 15 bp, Homo sapiens
ggcctgcagctcccc

SEQ ID NO: 1570786 - DNA, 15 bp, Homo sapiens
gcctgcagctccccg

SEQ ID NO: 1570787 - DNA, 15 bp, Homo sapiens
cctgcagctccccgt

SEQ ID NO: 1570788 - DNA, 15 bp, Homo sapiens
ctgcagctccccgtt

SEQ ID NO: 1570789 - DNA, 15 bp, Homo sapiens
tgcagctccccgttg

SEQ ID NO: 1570790 - DNA, 15 bp, Homo sapiens
gcagctccccgttga

SEQ ID NO: 1570791 - DNA, 15 bp, Homo sapiens
cagctccccgttgag

SEQ ID NO: 1570792 - DNA, 15 bp, Homo sapiens
agctccccgttgagc

SEQ ID NO: 1570793 - DNA, 15 bp, Homo sapiens
gctccccgttgagct

SEQ ID NO: 1570794 - DNA, 15 bp, Homo sapiens
ctccccgttgagctg

SEQ ID NO: 1570795 - DNA, 15 bp, Homo sapiens
tccccgttgagctgc

SEQ ID NO: 1570796 - DNA, 15 bp, Homo sapiens
ccccgttgagctgcg

SEQ ID NO: 1570797 - DNA, 15 bp, Homo sapiens
cccgttgagctgcgc

SEQ ID NO: 1570798 - DNA, 15 bp, Homo sapiens
ccgttgagctgcgcc

SEQ ID NO: 1570799 - DNA, 15 bp, Homo sapiens
cgttgagctgcgcca

SEQ ID NO: 1570800 - DNA, 15 bp, Homo sapiens
gttgagctgcgccat

SEQ ID NO: 1570801 - DNA, 15 bp, Homo sapiens
ttgagctgcgccatg

SEQ ID NO: 1570802 - DNA, 15 bp, Homo sapiens
tgagctgcgccatgg

SEQ ID NO: 1570803 - DNA, 15 bp, Homo sapiens
gagctgcgccatggt

SEQ ID NO: 1570804 - DNA, 15 bp, Homo sapiens
agctgcgccatggtg

SEQ ID NO: 1570805 - DNA, 15 bp, Homo sapiens
gctgcgccatggtgg

SEQ ID NO: 1570806 - DNA, 15 bp, Homo sapiens
ctgcgccatggtgga

SEQ ID NO: 1570807 - DNA, 15 bp, Homo sapiens
tgcgccatggtggac

SEQ ID NO: 1570808 - DNA, 15 bp, Homo sapiens
gcgccatggtggact

SEQ ID NO: 1570809 - DNA, 15 bp, Homo sapiens
cgccatggtggactc

SEQ ID NO: 1570810 - DNA, 15 bp, Homo sapiens
gccatggtggactcg

SEQ ID NO: 1570811 - DNA, 15 bp, Homo sapiens
ccatggtggactcgt

SEQ ID NO: 1570812 - DNA, 15 bp, Homo sapiens
catggtggactcgtt

SEQ ID NO: 1570813 - DNA, 15 bp, Homo sapiens
atggtggactcgttg

SEQ ID NO: 1570814 - DNA, 15 bp, Homo sapiens
tggtggactcgttga

SEQ ID NO: 1570815 - DNA, 15 bp, Homo sapiens
ggtggactcgttgaa

SEQ ID NO: 1570816 - DNA, 15 bp, Homo sapiens
gtggactcgttgaat

SEQ ID NO: 1570817 - DNA, 15 bp, Homo sapiens
tggactcgttgaata

SEQ ID NO: 1570818 - DNA, 15 bp, Homo sapiens
ggactcgttgaatag

SEQ ID NO: 1570819 - DNA, 15 bp, Homo sapiens
gactcgttgaatagc

SEQ ID NO: 1570820 - DNA, 15 bp, Homo sapiens
actcgttgaatagca

SEQ ID NO: 1570821 - DNA, 15 bp, Homo sapiens
ctcgttgaatagcac

SEQ ID NO: 1570822 - DNA, 15 bp, Homo sapiens
tcgttgaatagcaca

SEQ ID NO: 1570823 - DNA, 15 bp, Homo sapiens
cgttgaatagcacag

SEQ ID NO: 1570824 - DNA, 15 bp, Homo sapiens
gttgaatagcacagg

SEQ ID NO: 1570825 - DNA, 15 bp, Homo sapiens
ttgaatagcacaggg

SEQ ID NO: 1570826 - DNA, 15 bp, Homo sapiens
tgaatagcacaggga

SEQ ID NO: 1570827 - DNA, 15 bp, Homo sapiens
gaatagcacagggat

SEQ ID NO: 1570828 - DNA, 15 bp, Homo sapiens
aatagcacagggatg

SEQ ID NO: 1570829 - DNA, 15 bp, Homo sapiens
atagcacagggatgg

SEQ ID NO: 1570830 - DNA, 15 bp, Homo sapiens
tagcacagggatggt

SEQ ID NO: 1570831 - DNA, 15 bp, Homo sapiens
agcacagggatggtg

SEQ ID NO: 1570832 - DNA, 15 bp, Homo sapiens
gcacagggatggtga

SEQ ID NO: 1570833 - DNA, 15 bp, Homo sapiens
cacagggatggtgac

SEQ ID NO: 1570834 - DNA, 15 bp, Homo sapiens
acagggatggtgact

SEQ ID NO: 1570835 - DNA, 15 bp, Homo sapiens
cagggatggtgactg

SEQ ID NO: 1570836 - DNA, 15 bp, Homo sapiens
agggatggtgactga

SEQ ID NO: 1570837 - DNA, 15 bp, Homo sapiens
gggatggtgactgag

SEQ ID NO: 1570838 - DNA, 15 bp, Homo sapiens
ggatggtgactgagc

SEQ ID NO: 1570839 - DNA, 15 bp, Homo sapiens
gatggtgactgagcc

SEQ ID NO: 1570840 - DNA, 15 bp, Homo sapiens
atggtgactgagcca

SEQ ID NO: 1570841 - DNA, 15 bp, Homo sapiens
tggtgactgagccac

SEQ ID NO: 1570842 - DNA, 15 bp, Homo sapiens
ggtgactgagccact

SEQ ID NO: 1570843 - DNA, 15 bp, Homo sapiens
gtgactgagccactg

SEQ ID NO: 1570844 - DNA, 15 bp, Homo sapiens
tgactgagccactga

SEQ ID NO: 1570845 - DNA, 15 bp, Homo sapiens
gactgagccactgac

SEQ ID NO: 1570846 - DNA, 15 bp, Homo sapiens
actgagccactgacg

SEQ ID NO: 1570847 - DNA, 15 bp, Homo sapiens
ctgagccactgacgg

SEQ ID NO: 1570848 - DNA, 15 bp, Homo sapiens
tgagccactgacggg

SEQ ID NO: 1570849 - DNA, 15 bp, Homo sapiens
gagccactgacgggc

SEQ ID NO: 1570850 - DNA, 15 bp, Homo sapiens
agccactgacgggcg

SEQ ID NO: 1570851 - DNA, 15 bp, Homo sapiens
gccactgacgggcgc

SEQ ID NO: 1570852 - DNA, 15 bp, Homo sapiens
ccactgacgggcgcc

SEQ ID NO: 1570853 - DNA, 15 bp, Homo sapiens
cactgacgggcgccg

SEQ ID NO: 1570854 - DNA, 15 bp, Homo sapiens
actgacgggcgccgc

SEQ ID NO: 1570855 - DNA, 15 bp, Homo sapiens
ctgacgggcgccgcg

SEQ ID NO: 1570856 - DNA, 15 bp, Homo sapiens
tgacgggcgccgcgc

SEQ ID NO: 1570857 - DNA, 15 bp, Homo sapiens
gacgggcgccgcgcg

SEQ ID NO: 1570858 - DNA, 15 bp, Homo sapiens
acgggcgccgcgcgc

SEQ ID NO: 1570859 - DNA, 15 bp, Homo sapiens
cgggcgccgcgcgcc

SEQ ID NO: 1570860 - DNA, 15 bp, Homo sapiens
gggcgccgcgcgccc

SEQ ID NO: 1570861 - DNA, 15 bp, Homo sapiens
ggcgccgcgcgcccg

SEQ ID NO: 1570862 - DNA, 15 bp, Homo sapiens
gcgccgcgcgcccgg

SEQ ID NO: 1570863 - DNA, 15 bp, Homo sapiens
cgccgcgcgcccggc

SEQ ID NO: 1570864 - DNA, 15 bp, Homo sapiens
gccgcgcgcccggcc

SEQ ID NO: 1570865 - DNA, 15 bp, Homo sapiens
ccgcgcgcccggccc

SEQ ID NO: 1570866 - DNA, 15 bp, Homo sapiens
cgcgcgcccggcccc

SEQ ID NO: 1570867 - DNA, 15 bp, Homo sapiens
gcgcgcccggccccc

SEQ ID NO: 1570868 - DNA, 15 bp, Homo sapiens
cgcgcccggcccccc

SEQ ID NO: 1570869 - DNA, 15 bp, Homo sapiens
gcgcccggcccccca

SEQ ID NO: 1570870 - DNA, 15 bp, Homo sapiens
cgcccggccccccag

SEQ ID NO: 1570871 - DNA, 15 bp, Homo sapiens
gcccggccccccagc

SEQ ID NO: 1570872 - DNA, 15 bp, Homo sapiens
cccggccccccagcc

SEQ ID NO: 1570873 - DNA, 15 bp, Homo sapiens
ccggccccccagccc

SEQ ID NO: 1570874 - DNA, 15 bp, Homo sapiens
cggccccccagccct

SEQ ID NO: 1570875 - DNA, 15 bp, Homo sapiens
ggccccccagccctc

SEQ ID NO: 1570876 - DNA, 15 bp, Homo sapiens
gccccccagccctcg

SEQ ID NO: 1570877 - DNA, 15 bp, Homo sapiens
ccccccagccctcgc

SEQ ID NO: 1570878 - DNA, 15 bp, Homo sapiens
cccccagccctcgcc

SEQ ID NO: 1570879 - DNA, 15 bp, Homo sapiens
ccccagccctcgccg

SEQ ID NO: 1570880 - DNA, 15 bp, Homo sapiens
cccagccctcgccgc

SEQ ID NO: 1570881 - DNA, 15 bp, Homo sapiens
ccagccctcgccgcc

SEQ ID NO: 1570882 - DNA, 15 bp, Homo sapiens
cagccctcgccgccg

SEQ ID NO: 1570883 - DNA, 15 bp, Homo sapiens
agccctcgccgccgc

SEQ ID NO: 1570884 - DNA, 15 bp, Homo sapiens
ccctcgccgccgccc

SEQ ID NO: 1570885 - DNA, 15 bp, Homo sapiens
cctcgccgccgcccc

SEQ ID NO: 1570886 - DNA, 15 bp, Homo sapiens
ctcgccgccgccccc

SEQ ID NO: 1570887 - DNA, 15 bp, Homo sapiens
tcgccgccgcccccg

SEQ ID NO: 1570888 - DNA, 15 bp, Homo sapiens
cgccgccgcccccgc

SEQ ID NO: 1570889 - DNA, 15 bp, Homo sapiens
gccgccgcccccgcc

SEQ ID NO: 1570890 - DNA, 15 bp, Homo sapiens
ccgccgcccccgccg

SEQ ID NO: 1570891 - DNA, 15 bp, Homo sapiens
cgccgcccccgccgc

SEQ ID NO: 1570892 - DNA, 15 bp, Homo sapiens
gccgcccccgccgcc

SEQ ID NO: 1570893 - DNA, 15 bp, Homo sapiens
ccgcccccgccgccc

SEQ ID NO: 1570894 - DNA, 15 bp, Homo sapiens
cgcccccgccgccct

SEQ ID NO: 1570895 - DNA, 15 bp, Homo sapiens
gcccccgccgccctc

SEQ ID NO: 1570896 - DNA, 15 bp, Homo sapiens
cccccgccgccctcg

SEQ ID NO: 1570897 - DNA, 15 bp, Homo sapiens
ccccgccgccctcgc

SEQ ID NO: 1570898 - DNA, 15 bp, Homo sapiens
cccgccgccctcgcc

SEQ ID NO: 1570899 - DNA, 15 bp, Homo sapiens
ccgccgccctcgccc

SEQ ID NO: 1570900 - DNA, 15 bp, Homo sapiens
cgccgccctcgcccc

SEQ ID NO: 1570901 - DNA, 15 bp, Homo sapiens
gccgccctcgccccc

SEQ ID NO: 1570902 - DNA, 15 bp, Homo sapiens
ccgccctcgcccccc

SEQ ID NO: 1570903 - DNA, 15 bp, Homo sapiens
cgccctcgccccccg

SEQ ID NO: 1570904 - DNA, 15 bp, Homo sapiens
gccctcgccccccgg

SEQ ID NO: 1570905 - DNA, 15 bp, Homo sapiens
ccctcgccccccggg

SEQ ID NO: 1570906 - DNA, 15 bp, Homo sapiens
cctcgccccccgggc

SEQ ID NO: 1570907 - DNA, 15 bp, Homo sapiens
ctcgccccccgggcc

SEQ ID NO: 1570908 - DNA, 15 bp, Homo sapiens
tcgccccccgggccc

SEQ ID NO: 1570909 - DNA, 15 bp, Homo sapiens
cgccccccgggcccg

SEQ ID NO: 1570910 - DNA, 15 bp, Homo sapiens
gccccccgggcccga

SEQ ID NO: 1570911 - DNA, 15 bp, Homo sapiens
ccccccgggcccgag

SEQ ID NO: 1570912 - DNA, 15 bp, Homo sapiens
cccccgggcccgagt

SEQ ID NO: 1570913 - DNA, 15 bp, Homo sapiens
ccccgggcccgagtg

SEQ ID NO: 1570914 - DNA, 15 bp, Homo sapiens
cccgggcccgagtgg

SEQ ID NO: 1570915 - DNA, 15 bp, Homo sapiens
ccgggcccgagtggc

SEQ ID NO: 1570916 - DNA, 15 bp, Homo sapiens
cgggcccgagtggcc

SEQ ID NO: 1570917 - DNA, 15 bp, Homo sapiens
gggcccgagtggccc

SEQ ID NO: 1570918 - DNA, 15 bp, Homo sapiens
ggcccgagtggcccg

SEQ ID NO: 1570919 - DNA, 15 bp, Homo sapiens
gcccgagtggcccgg

SEQ ID NO: 1570920 - DNA, 15 bp, Homo sapiens
cccgagtggcccggc

SEQ ID NO: 1570921 - DNA, 15 bp, Homo sapiens
ccgagtggcccggca

SEQ ID NO: 1570922 - DNA, 15 bp, Homo sapiens
cgagtggcccggcat

SEQ ID NO: 1570923 - DNA, 15 bp, Homo sapiens
gagtggcccggcatc

SEQ ID NO: 1570924 - DNA, 15 bp, Homo sapiens
agtggcccggcatct

SEQ ID NO: 1570925 - DNA, 15 bp, Homo sapiens
gtggcccggcatctg

SEQ ID NO: 1570926 - DNA, 15 bp, Homo sapiens
tggcccggcatctgc

SEQ ID NO: 1570927 - DNA, 15 bp, Homo sapiens
ggcccggcatctgcg

SEQ ID NO: 1570928 - DNA, 15 bp, Homo sapiens
gcccggcatctgcgg

SEQ ID NO: 1570929 - DNA, 15 bp, Homo sapiens
cccggcatctgcggg

SEQ ID NO: 1570930 - DNA, 15 bp, Homo sapiens
ccggcatctgcgggc

SEQ ID NO: 1570931 - DNA, 15 bp, Homo sapiens
cggcatctgcgggcg

SEQ ID NO: 1570932 - DNA, 15 bp, Homo sapiens
ggcatctgcgggcgc

SEQ ID NO: 1570933 - DNA, 15 bp, Homo sapiens
gcatctgcgggcgct

SEQ ID NO: 1570934 - DNA, 15 bp, Homo sapiens
catctgcgggcgctg

SEQ ID NO: 1570935 - DNA, 15 bp, Homo sapiens
atctgcgggcgctgg

SEQ ID NO: 1570936 - DNA, 15 bp, Homo sapiens
tctgcgggcgctggg

SEQ ID NO: 1570937 - DNA, 15 bp, Homo sapiens
ctgcgggcgctgggg

SEQ ID NO: 1570938 - DNA, 15 bp, Homo sapiens
tgcgggcgctggggg

SEQ ID NO: 1570939 - DNA, 15 bp, Homo sapiens
gcgggcgctgggggt

SEQ ID NO: 1570940 - DNA, 15 bp, Homo sapiens
cgggcgctgggggtc

SEQ ID NO: 1570941 - DNA, 15 bp, Homo sapiens
gggcgctgggggtcg

SEQ ID NO: 1570942 - DNA, 15 bp, Homo sapiens
ggcgctgggggtcgg

SEQ ID NO: 1570943 - DNA, 15 bp, Homo sapiens
gcgctgggggtcggg

SEQ ID NO: 1570944 - DNA, 15 bp, Homo sapiens
cgctgggggtcgggc

SEQ ID NO: 1570945 - DNA, 15 bp, Homo sapiens
gctgggggtcgggct

SEQ ID NO: 1570946 - DNA, 15 bp, Homo sapiens
ctgggggtcgggctg

SEQ ID NO: 1570947 - DNA, 15 bp, Homo sapiens
tgggggtcgggctgg

SEQ ID NO: 1570948 - DNA, 15 bp, Homo sapiens
gggggtcgggctggg

SEQ ID NO: 1570949 - DNA, 15 bp, Homo sapiens
ggggtcgggctgggg

SEQ ID NO: 1570950 - DNA, 15 bp, Homo sapiens
gggtcgggctgggga

SEQ ID NO: 1570951 - DNA, 15 bp, Homo sapiens
ggtcgggctggggaa

SEQ ID NO: 1570952 - DNA, 15 bp, Homo sapiens
gtcgggctggggaaa

SEQ ID NO: 1570953 - DNA, 15 bp, Homo sapiens
tcgggctggggaaaa

SEQ ID NO: 1570954 - DNA, 15 bp, Homo sapiens
cgggctggggaaaag

SEQ ID NO: 1570955 - DNA, 15 bp, Homo sapiens
gggctggggaaaagc

SEQ ID NO: 1570956 - DNA, 15 bp, Homo sapiens
ggctggggaaaagcg

SEQ ID NO: 1570957 - DNA, 15 bp, Homo sapiens
gctggggaaaagcgc

SEQ ID NO: 1570958 - DNA, 15 bp, Homo sapiens
ctggggaaaagcgcg

SEQ ID NO: 1570959 - DNA, 15 bp, Homo sapiens
tggggaaaagcgcgc

SEQ ID NO: 1570960 - DNA, 15 bp, Homo sapiens
ggggaaaagcgcgcg

SEQ ID NO: 1570961 - DNA, 15 bp, Homo sapiens
gggaaaagcgcgcgc

SEQ ID NO: 1570962 - DNA, 15 bp, Homo sapiens
ggaaaagcgcgcgcc

SEQ ID NO: 1570963 - DNA, 15 bp, Homo sapiens
gaaaagcgcgcgccg

SEQ ID NO: 1570964 - DNA, 15 bp, Homo sapiens
aaaagcgcgcgccgg

SEQ ID NO: 1570965 - DNA, 15 bp, Homo sapiens
aaagcgcgcgccggg

SEQ ID NO: 1570966 - DNA, 15 bp, Homo sapiens
aagcgcgcgccgggc

SEQ ID NO: 1570967 - DNA, 15 bp, Homo sapiens
agcgcgcgccgggcc

SEQ ID NO: 1570968 - DNA, 15 bp, Homo sapiens
gcgcgcgccgggccg

SEQ ID NO: 1570969 - DNA, 15 bp, Homo sapiens
cgcgcgccgggccgg

SEQ ID NO: 1570970 - DNA, 15 bp, Homo sapiens
gcgcgccgggccggg

SEQ ID NO: 1570971 - DNA, 15 bp, Homo sapiens
cgcgccgggccgggt

SEQ ID NO: 1570972 - DNA, 15 bp, Homo sapiens
gcgccgggccgggtg

SEQ ID NO: 1570973 - DNA, 15 bp, Homo sapiens
cgccgggccgggtgc

SEQ ID NO: 1570974 - DNA, 15 bp, Homo sapiens
gccgggccgggtgcc

SEQ ID NO: 1570975 - DNA, 15 bp, Homo sapiens
ccgggccgggtgccg

SEQ ID NO: 1570976 - DNA, 15 bp, Homo sapiens
cgggccgggtgccgt

SEQ ID NO: 1570977 - DNA, 15 bp, Homo sapiens
gggccgggtgccgtg

SEQ ID NO: 1570978 - DNA, 15 bp, Homo sapiens
ggccgggtgccgtgc

SEQ ID NO: 1570979 - DNA, 15 bp, Homo sapiens
gccgggtgccgtgcc

SEQ ID NO: 1570980 - DNA, 15 bp, Homo sapiens
ccgggtgccgtgccc

SEQ ID NO: 1570981 - DNA, 15 bp, Homo sapiens
cgggtgccgtgccct

SEQ ID NO: 1570982 - DNA, 15 bp, Homo sapiens
gggtgccgtgccctc

SEQ ID NO: 1570983 - DNA, 15 bp, Homo sapiens
ggtgccgtgccctcc

SEQ ID NO: 1570984 - DNA, 15 bp, Homo sapiens
gtgccgtgccctccg

SEQ ID NO: 1570985 - DNA, 15 bp, Homo sapiens
tgccgtgccctccgg

SEQ ID NO: 1570986 - DNA, 15 bp, Homo sapiens
gccgtgccctccggc

SEQ ID NO: 1570987 - DNA, 15 bp, Homo sapiens
ccgtgccctccggcg

SEQ ID NO: 1570988 - DNA, 15 bp, Homo sapiens
cgtgccctccggcgg

SEQ ID NO: 1570989 - DNA, 15 bp, Homo sapiens
gtgccctccggcggg

SEQ ID NO: 1570990 - DNA, 15 bp, Homo sapiens
tgccctccggcgggg

SEQ ID NO: 1570991 - DNA, 15 bp, Homo sapiens
gccctccggcggggc

SEQ ID NO: 1570992 - DNA, 15 bp, Homo sapiens
ccctccggcggggcc

SEQ ID NO: 1570993 - DNA, 15 bp, Homo sapiens
cctccggcggggccg

SEQ ID NO: 1570994 - DNA, 15 bp, Homo sapiens
ctccggcggggccgg

SEQ ID NO: 1570995 - DNA, 15 bp, Homo sapiens
tccggcggggccggc

SEQ ID NO: 1570996 - DNA, 15 bp, Homo sapiens
ccggcggggccggct

SEQ ID NO: 1570997 - DNA, 15 bp, Homo sapiens
cggcggggccggctc

SEQ ID NO: 1570998 - DNA, 15 bp, Homo sapiens
ggcggggccggctcg

SEQ ID NO: 1570999 - DNA, 15 bp, Homo sapiens
gcggggccggctcgt

SEQ ID NO: 1571000 - DNA, 15 bp, Homo sapiens
cggggccggctcgtc

SEQ ID NO: 1571001 - DNA, 15 bp, Homo sapiens
ggggccggctcgtcg

SEQ ID NO: 1571002 - DNA, 15 bp, Homo sapiens
gggccggctcgtcgc

SEQ ID NO: 1571003 - DNA, 15 bp, Homo sapiens
ggccggctcgtcgcc

SEQ ID NO: 1571004 - DNA, 15 bp, Homo sapiens
gccggctcgtcgccc

SEQ ID NO: 1571005 - DNA, 15 bp, Homo sapiens
ccggctcgtcgccca

SEQ ID NO: 1571006 - DNA, 15 bp, Homo sapiens
cggctcgtcgcccac

SEQ ID NO: 1571007 - DNA, 15 bp, Homo sapiens
ggctcgtcgcccacg

SEQ ID NO: 1571008 - DNA, 15 bp, Homo sapiens
gctcgtcgcccacgc

SEQ ID NO: 1571009 - DNA, 15 bp, Homo sapiens
ctcgtcgcccacgcc

SEQ ID NO: 1571010 - DNA, 15 bp, Homo sapiens
tcgtcgcccacgccg

SEQ ID NO: 1571011 - DNA, 15 bp, Homo sapiens
cgtcgcccacgccgg

SEQ ID NO: 1571012 - DNA, 15 bp, Homo sapiens
gtcgcccacgccggc

SEQ ID NO: 1571013 - DNA, 15 bp, Homo sapiens
tcgcccacgccggcg

SEQ ID NO: 1571014 - DNA, 15 bp, Homo sapiens
cgcccacgccggcgg

SEQ ID NO: 1571015 - DNA, 15 bp, Homo sapiens
gcccacgccggcggc

SEQ ID NO: 1571016 - DNA, 15 bp, Homo sapiens
cccacgccggcggcg

SEQ ID NO: 1571017 - DNA, 15 bp, Homo sapiens
ccacgccggcggcgc

SEQ ID NO: 1571018 - DNA, 15 bp, Homo sapiens
cacgccggcggcgcc

SEQ ID NO: 1571019 - DNA, 15 bp, Homo sapiens
acgccggcggcgccc

SEQ ID NO: 1571020 - DNA, 15 bp, Homo sapiens
cgccggcggcgcccg

SEQ ID NO: 1571021 - DNA, 15 bp, Homo sapiens
gccggcggcgcccgc

SEQ ID NO: 1571022 - DNA, 15 bp, Homo sapiens
ccggcggcgcccgcc

SEQ ID NO: 1571023 - DNA, 15 bp, Homo sapiens
cggcggcgcccgcct

SEQ ID NO: 1571024 - DNA, 15 bp, Homo sapiens
ggcggcgcccgcctc

SEQ ID NO: 1571025 - DNA, 15 bp, Homo sapiens
gcggcgcccgcctcg

SEQ ID NO: 1571026 - DNA, 15 bp, Homo sapiens
cggcgcccgcctcgc

SEQ ID NO: 1571027 - DNA, 15 bp, Homo sapiens
ggcgcccgcctcgcc

SEQ ID NO: 1571028 - DNA, 15 bp, Homo sapiens
gcgcccgcctcgccg

SEQ ID NO: 1571029 - DNA, 15 bp, Homo sapiens
cgcccgcctcgccgc

SEQ ID NO: 1571030 - DNA, 15 bp, Homo sapiens
gcccgcctcgccgcc

SEQ ID NO: 1571031 - DNA, 15 bp, Homo sapiens
cccgcctcgccgccg

SEQ ID NO: 1571032 - DNA, 15 bp, Homo sapiens
ccgcctcgccgccga

SEQ ID NO: 1571033 - DNA, 15 bp, Homo sapiens
cgcctcgccgccgag

SEQ ID NO: 1571034 - DNA, 15 bp, Homo sapiens
gcctcgccgccgagg

SEQ ID NO: 1571035 - DNA, 15 bp, Homo sapiens
cctcgccgccgaggc

SEQ ID NO: 1571036 - DNA, 15 bp, Homo sapiens
ctcgccgccgaggcg

SEQ ID NO: 1571037 - DNA, 15 bp, Homo sapiens
tcgccgccgaggcgc

SEQ ID NO: 1571038 - DNA, 15 bp, Homo sapiens
cgccgccgaggcgca

SEQ ID NO: 1571039 - DNA, 15 bp, Homo sapiens
gccgccgaggcgcac

SEQ ID NO: 1571040 - DNA, 15 bp, Homo sapiens
ccgccgaggcgcacg

SEQ ID NO: 1571041 - DNA, 15 bp, Homo sapiens
cgccgaggcgcacgt

SEQ ID NO: 1571042 - DNA, 15 bp, Homo sapiens
gccgaggcgcacgta

SEQ ID NO: 1571043 - DNA, 15 bp, Homo sapiens
ccgaggcgcacgtag

SEQ ID NO: 1571044 - DNA, 15 bp, Homo sapiens
cgaggcgcacgtagt

SEQ ID NO: 1571045 - DNA, 15 bp, Homo sapiens
gaggcgcacgtagtg

SEQ ID NO: 1571046 - DNA, 15 bp, Homo sapiens
aggcgcacgtagtgc

SEQ ID NO: 1571047 - DNA, 15 bp, Homo sapiens
ggcgcacgtagtgcg

SEQ ID NO: 1571048 - DNA, 15 bp, Homo sapiens
gcgcacgtagtgcgc

SEQ ID NO: 1571049 - DNA, 15 bp, Homo sapiens
cgcacgtagtgcgcg

SEQ ID NO: 1571050 - DNA, 15 bp, Homo sapiens
gcacgtagtgcgcgg

SEQ ID NO: 1571051 - DNA, 15 bp, Homo sapiens
cacgtagtgcgcggg

SEQ ID NO: 1571052 - DNA, 15 bp, Homo sapiens
acgtagtgcgcgggg

SEQ ID NO: 1571053 - DNA, 15 bp, Homo sapiens
cgtagtgcgcgggga

SEQ ID NO: 1571054 - DNA, 15 bp, Homo sapiens
gtagtgcgcggggat

SEQ ID NO: 1571055 - DNA, 15 bp, Homo sapiens
tagtgcgcggggatc

SEQ ID NO: 1571056 - DNA, 15 bp, Homo sapiens
agtgcgcggggatca

SEQ ID NO: 1571057 - DNA, 15 bp, Homo sapiens
gtgcgcggggatcac

SEQ ID NO: 1571058 - DNA, 15 bp, Homo sapiens
tgcgcggggatcacc

SEQ ID NO: 1571059 - DNA, 15 bp, Homo sapiens
gcgcggggatcacca

SEQ ID NO: 1571060 - DNA, 15 bp, Homo sapiens
cgcggggatcaccag

SEQ ID NO: 1571061 - DNA, 15 bp, Homo sapiens
gcggggatcaccagg

SEQ ID NO: 1571062 - DNA, 15 bp, Homo sapiens
cggggatcaccaggg

SEQ ID NO: 1571063 - DNA, 15 bp, Homo sapiens
ggggatcaccagggt

SEQ ID NO: 1571064 - DNA, 15 bp, Homo sapiens
gggatcaccagggtg

SEQ ID NO: 1571065 - DNA, 15 bp, Homo sapiens
ggatcaccagggtgg

SEQ ID NO: 1571066 - DNA, 15 bp, Homo sapiens
gatcaccagggtggg

SEQ ID NO: 1571067 - DNA, 15 bp, Homo sapiens
atcaccagggtgggc

SEQ ID NO: 1571068 - DNA, 15 bp, Homo sapiens
tcaccagggtgggca

SEQ ID NO: 1571069 - DNA, 15 bp, Homo sapiens
caccagggtgggcat

SEQ ID NO: 1571070 - DNA, 15 bp, Homo sapiens
accagggtgggcatg

SEQ ID NO: 1571071 - DNA, 15 bp, Homo sapiens
ccagggtgggcatga

SEQ ID NO: 1571072 - DNA, 15 bp, Homo sapiens
cagggtgggcatgac

SEQ ID NO: 1571073 - DNA, 15 bp, Homo sapiens
agggtgggcatgacg

SEQ ID NO: 1571074 - DNA, 15 bp, Homo sapiens
gggtgggcatgacgt

SEQ ID NO: 1571075 - DNA, 15 bp, Homo sapiens
ggtgggcatgacgtt

SEQ ID NO: 1571076 - DNA, 15 bp, Homo sapiens
gtgggcatgacgttg

SEQ ID NO: 1571077 - DNA, 15 bp, Homo sapiens
tgggcatgacgttgc

SEQ ID NO: 1571078 - DNA, 15 bp, Homo sapiens
gggcatgacgttgcg

SEQ ID NO: 1571079 - DNA, 15 bp, Homo sapiens
ggcatgacgttgcgg

SEQ ID NO: 1571080 - DNA, 15 bp, Homo sapiens
gcatgacgttgcggt

SEQ ID NO: 1571081 - DNA, 15 bp, Homo sapiens
catgacgttgcggta

SEQ ID NO: 1571082 - DNA, 15 bp, Homo sapiens
atgacgttgcggtag

SEQ ID NO: 1571083 - DNA, 15 bp, Homo sapiens
tgacgttgcggtaga

SEQ ID NO: 1571084 - DNA, 15 bp, Homo sapiens
gacgttgcggtagac

SEQ ID NO: 1571085 - DNA, 15 bp, Homo sapiens
acgttgcggtagacg

SEQ ID NO: 1571086 - DNA, 15 bp, Homo sapiens
cgttgcggtagacgt

SEQ ID NO: 1571087 - DNA, 15 bp, Homo sapiens
gttgcggtagacgtt

SEQ ID NO: 1571088 - DNA, 15 bp, Homo sapiens
ttgcggtagacgttg

SEQ ID NO: 1571089 - DNA, 15 bp, Homo sapiens
tgcggtagacgttgt

SEQ ID NO: 1571090 - DNA, 15 bp, Homo sapiens
gcggtagacgttgtc

SEQ ID NO: 1571091 - DNA, 15 bp, Homo sapiens
cggtagacgttgtcc

SEQ ID NO: 1571092 - DNA, 15 bp, Homo sapiens
ggtagacgttgtcct

SEQ ID NO: 1571093 - DNA, 15 bp, Homo sapiens
gtagacgttgtcctt

SEQ ID NO: 1571094 - DNA, 15 bp, Homo sapiens
tagacgttgtccttg

SEQ ID NO: 1571095 - DNA, 15 bp, Homo sapiens
agacgttgtccttga

SEQ ID NO: 1571096 - DNA, 15 bp, Homo sapiens
gacgttgtccttgag

SEQ ID NO: 1571097 - DNA, 15 bp, Homo sapiens
acgttgtccttgagg

SEQ ID NO: 1571098 - DNA, 15 bp, Homo sapiens
cgttgtccttgaggt

SEQ ID NO: 1571099 - DNA, 15 bp, Homo sapiens
gttgtccttgaggtg

SEQ ID NO: 1571100 - DNA, 15 bp, Homo sapiens
ttgtccttgaggtgg

SEQ ID NO: 1571101 - DNA, 15 bp, Homo sapiens
tgtccttgaggtggt

SEQ ID NO: 1571102 - DNA, 15 bp, Homo sapiens
gtccttgaggtggtc

SEQ ID NO: 1571103 - DNA, 15 bp, Homo sapiens
tccttgaggtggtcg

SEQ ID NO: 1571104 - DNA, 15 bp, Homo sapiens
ccttgaggtggtcga

SEQ ID NO: 1571105 - DNA, 15 bp, Homo sapiens
cttgaggtggtcgat

SEQ ID NO: 1571106 - DNA, 15 bp, Homo sapiens
ttgaggtggtcgatg

SEQ ID NO: 1571107 - DNA, 15 bp, Homo sapiens
tgaggtggtcgatgg

SEQ ID NO: 1571108 - DNA, 15 bp, Homo sapiens
gaggtggtcgatgga

SEQ ID NO: 1571109 - DNA, 15 bp, Homo sapiens
aggtggtcgatggag

SEQ ID NO: 1571110 - DNA, 15 bp, Homo sapiens
ggtggtcgatggagc

SEQ ID NO: 1571111 - DNA, 15 bp, Homo sapiens
gtggtcgatggagcc

SEQ ID NO: 1571112 - DNA, 15 bp, Homo sapiens
tggtcgatggagccg

SEQ ID NO: 1571113 - DNA, 15 bp, Homo sapiens
ggtcgatggagccgc

SEQ ID NO: 1571114 - DNA, 15 bp, Homo sapiens
gtcgatggagccgca

SEQ ID NO: 1571115 - DNA, 15 bp, Homo sapiens
tcgatggagccgcag

SEQ ID NO: 1571116 - DNA, 15 bp, Homo sapiens
cgatggagccgcaga

SEQ ID NO: 1571117 - DNA, 15 bp, Homo sapiens
gatggagccgcagaa

SEQ ID NO: 1571118 - DNA, 15 bp, Homo sapiens
atggagccgcagaag

SEQ ID NO: 1571119 - DNA, 15 bp, Homo sapiens
tggagccgcagaaga

SEQ ID NO: 1571120 - DNA, 15 bp, Homo sapiens
ggagccgcagaagat

SEQ ID NO: 1571121 - DNA, 15 bp, Homo sapiens
gagccgcagaagatg

SEQ ID NO: 1571122 - DNA, 15 bp, Homo sapiens
agccgcagaagatga

SEQ ID NO: 1571123 - DNA, 15 bp, Homo sapiens
gccgcagaagatgag

SEQ ID NO: 1571124 - DNA, 15 bp, Homo sapiens
ccgcagaagatgagc

SEQ ID NO: 1571125 - DNA, 15 bp, Homo sapiens
cgcagaagatgagct

SEQ ID NO: 1571126 - DNA, 15 bp, Homo sapiens
gcagaagatgagctg

SEQ ID NO: 1571127 - DNA, 15 bp, Homo sapiens
cagaagatgagctgc

SEQ ID NO: 1571128 - DNA, 15 bp, Homo sapiens
agaagatgagctgcc

SEQ ID NO: 1571129 - DNA, 15 bp, Homo sapiens
gaagatgagctgccc

SEQ ID NO: 1571130 - DNA, 15 bp, Homo sapiens
aagatgagctgcccc

SEQ ID NO: 1571131 - DNA, 15 bp, Homo sapiens
agatgagctgccccg

SEQ ID NO: 1571132 - DNA, 15 bp, Homo sapiens
gatgagctgccccgc

SEQ ID NO: 1571133 - DNA, 15 bp, Homo sapiens
atgagctgccccgcc

SEQ ID NO: 1571134 - DNA, 15 bp, Homo sapiens
tgagctgccccgcct

SEQ ID NO: 1571135 - DNA, 15 bp, Homo sapiens
gagctgccccgcctg

SEQ ID NO: 1571136 - DNA, 15 bp, Homo sapiens
agctgccccgcctgg

SEQ ID NO: 1571137 - DNA, 15 bp, Homo sapiens
gctgccccgcctggc

SEQ ID NO: 1571138 - DNA, 15 bp, Homo sapiens
ctgccccgcctggcc

SEQ ID NO: 1571139 - DNA, 15 bp, Homo sapiens
tgccccgcctggccc

SEQ ID NO: 1571140 - DNA, 15 bp, Homo sapiens
gccccgcctggccca

SEQ ID NO: 1571141 - DNA, 15 bp, Homo sapiens
ccccgcctggcccag

SEQ ID NO: 1571142 - DNA, 15 bp, Homo sapiens
cccgcctggcccagc

SEQ ID NO: 1571143 - DNA, 15 bp, Homo sapiens
ccgcctggcccagcg

SEQ ID NO: 1571144 - DNA, 15 bp, Homo sapiens
cgcctggcccagcga

SEQ ID NO: 1571145 - DNA, 15 bp, Homo sapiens
gcctggcccagcgac

SEQ ID NO: 1571146 - DNA, 15 bp, Homo sapiens
cctggcccagcgacg

SEQ ID NO: 1571147 - DNA, 15 bp, Homo sapiens
ctggcccagcgacgg

SEQ ID NO: 1571148 - DNA, 15 bp, Homo sapiens
tggcccagcgacggc

SEQ ID NO: 1571149 - DNA, 15 bp, Homo sapiens
ggcccagcgacggcg

SEQ ID NO: 1571150 - DNA, 15 bp, Homo sapiens
gcccagcgacggcgg

SEQ ID NO: 1571151 - DNA, 15 bp, Homo sapiens
cccagcgacggcggc

SEQ ID NO: 1571152 - DNA, 15 bp, Homo sapiens
ccagcgacggcggcc

SEQ ID NO: 1571153 - DNA, 15 bp, Homo sapiens
cagcgacggcggccg

SEQ ID NO: 1571154 - DNA, 15 bp, Homo sapiens
agcgacggcggccgc

SEQ ID NO: 1571155 - DNA, 15 bp, Homo sapiens
gcgacggcggccgcg

SEQ ID NO: 1571156 - DNA, 15 bp, Homo sapiens
cgacggcggccgcgc

SEQ ID NO: 1571157 - DNA, 15 bp, Homo sapiens
gacggcggccgcgcc

SEQ ID NO: 1571158 - DNA, 15 bp, Homo sapiens
acggcggccgcgcca

SEQ ID NO: 1571159 - DNA, 15 bp, Homo sapiens
cggcggccgcgccag

SEQ ID NO: 1571160 - DNA, 15 bp, Homo sapiens
ggcggccgcgccagc

SEQ ID NO: 1571161 - DNA, 15 bp, Homo sapiens
gcggccgcgccagct

SEQ ID NO: 1571162 - DNA, 15 bp, Homo sapiens
cggccgcgccagctg

SEQ ID NO: 1571163 - DNA, 15 bp, Homo sapiens
ggccgcgccagctgg

SEQ ID NO: 1571164 - DNA, 15 bp, Homo sapiens
gccgcgccagctggt

SEQ ID NO: 1571165 - DNA, 15 bp, Homo sapiens
ccgcgccagctggtc

SEQ ID NO: 1571166 - DNA, 15 bp, Homo sapiens
cgcgccagctggtcc

SEQ ID NO: 1571167 - DNA, 15 bp, Homo sapiens
gcgccagctggtcca

SEQ ID NO: 1571168 - DNA, 15 bp, Homo sapiens
cgccagctggtccac

SEQ ID NO: 1571169 - DNA, 15 bp, Homo sapiens
gccagctggtccacc

SEQ ID NO: 1571170 - DNA, 15 bp, Homo sapiens
ccagctggtccaccg

SEQ ID NO: 1571171 - DNA, 15 bp, Homo sapiens
cagctggtccaccga

SEQ ID NO: 1571172 - DNA, 15 bp, Homo sapiens
agctggtccaccgac

SEQ ID NO: 1571173 - DNA, 15 bp, Homo sapiens
gctggtccaccgact

SEQ ID NO: 1571174 - DNA, 15 bp, Homo sapiens
ctggtccaccgactg

SEQ ID NO: 1571175 - DNA, 15 bp, Homo sapiens
tggtccaccgactgc

SEQ ID NO: 1571176 - DNA, 15 bp, Homo sapiens
ggtccaccgactgcg

SEQ ID NO: 1571177 - DNA, 15 bp, Homo sapiens
gtccaccgactgcga

SEQ ID NO: 1571178 - DNA, 15 bp, Homo sapiens
tccaccgactgcgac

SEQ ID NO: 1571179 - DNA, 15 bp, Homo sapiens
caccgactgcgacag

SEQ ID NO: 1571180 - DNA, 15 bp, Homo sapiens
accgactgcgacagc

SEQ ID NO: 1571181 - DNA, 15 bp, Homo sapiens
ccgactgcgacagca

SEQ ID NO: 1571182 - DNA, 15 bp, Homo sapiens
cgactgcgacagcag

SEQ ID NO: 1571183 - DNA, 15 bp, Homo sapiens
gactgcgacagcagg

SEQ ID NO: 1571184 - DNA, 15 bp, Homo sapiens
actgcgacagcagga

SEQ ID NO: 1571185 - DNA, 15 bp, Homo sapiens
ctgcgacagcaggaa

SEQ ID NO: 1571186 - DNA, 15 bp, Homo sapiens
tgcgacagcaggaag

SEQ ID NO: 1571187 - DNA, 15 bp, Homo sapiens
gcgacagcaggaagt

SEQ ID NO: 1571188 - DNA, 15 bp, Homo sapiens
cgacagcaggaagtc

SEQ ID NO: 1571189 - DNA, 15 bp, Homo sapiens
gacagcaggaagtcg

SEQ ID NO: 1571190 - DNA, 15 bp, Homo sapiens
acagcaggaagtcgg

SEQ ID NO: 1571191 - DNA, 15 bp, Homo sapiens
cagcaggaagtcggg

SEQ ID NO: 1571192 - DNA, 15 bp, Homo sapiens
agcaggaagtcgggg

SEQ ID NO: 1571193 - DNA, 15 bp, Homo sapiens
gcaggaagtcggggg

SEQ ID NO: 1571194 - DNA, 15 bp, Homo sapiens
caggaagtcgggggt

SEQ ID NO: 1571195 - DNA, 15 bp, Homo sapiens
aggaagtcgggggtc

SEQ ID NO: 1571196 - DNA, 15 bp, Homo sapiens
ggaagtcgggggtct

SEQ ID NO: 1571197 - DNA, 15 bp, Homo sapiens
gaagtcgggggtctt

SEQ ID NO: 1571198 - DNA, 15 bp, Homo sapiens
aagtcgggggtcttg

SEQ ID NO: 1571199 - DNA, 15 bp, Homo sapiens
agtcgggggtcttgc

SEQ ID NO: 1571200 - DNA, 15 bp, Homo sapiens
gtcgggggtcttgcc

SEQ ID NO: 1571201 - DNA, 15 bp, Homo sapiens
tcgggggtcttgccc

SEQ ID NO: 1571202 - DNA, 15 bp, Homo sapiens
cgggggtcttgccct

SEQ ID NO: 1571203 - DNA, 15 bp, Homo sapiens
gggggtcttgccctc

SEQ ID NO: 1571204 - DNA, 15 bp, Homo sapiens
ggggtcttgccctcg

SEQ ID NO: 1571205 - DNA, 15 bp, Homo sapiens
gggtcttgccctcgg

SEQ ID NO: 1571206 - DNA, 15 bp, Homo sapiens
ggtcttgccctcggc

SEQ ID NO: 1571207 - DNA, 15 bp, Homo sapiens
gtcttgccctcggcc

SEQ ID NO: 1571208 - DNA, 15 bp, Homo sapiens
tcttgccctcggccg

SEQ ID NO: 1571209 - DNA, 15 bp, Homo sapiens
cttgccctcggccgc

SEQ ID NO: 1571210 - DNA, 15 bp, Homo sapiens
ttgccctcggccgcc

SEQ ID NO: 1571211 - DNA, 15 bp, Homo sapiens
tgccctcggccgccc

SEQ ID NO: 1571212 - DNA, 15 bp, Homo sapiens
gccctcggccgcccc

SEQ ID NO: 1571213 - DNA, 15 bp, Homo sapiens
ccctcggccgccccc

SEQ ID NO: 1571214 - DNA, 15 bp, Homo sapiens
cctcggccgccccct

SEQ ID NO: 1571215 - DNA, 15 bp, Homo sapiens
ctcggccgccccctt

SEQ ID NO: 1571216 - DNA, 15 bp, Homo sapiens
tcggccgcccccttg

SEQ ID NO: 1571217 - DNA, 15 bp, Homo sapiens
cggccgcccccttgt

SEQ ID NO: 1571218 - DNA, 15 bp, Homo sapiens
ggccgcccccttgtg

SEQ ID NO: 1571219 - DNA, 15 bp, Homo sapiens
gccgcccccttgtgg

SEQ ID NO: 1571220 - DNA, 15 bp, Homo sapiens
ccgcccccttgtggc

SEQ ID NO: 1571221 - DNA, 15 bp, Homo sapiens
cgcccccttgtggcc

SEQ ID NO: 1571222 - DNA, 15 bp, Homo sapiens
gcccccttgtggccc

SEQ ID NO: 1571223 - DNA, 15 bp, Homo sapiens
cccccttgtggccca

SEQ ID NO: 1571224 - DNA, 15 bp, Homo sapiens
ccccttgtggcccag

SEQ ID NO: 1571225 - DNA, 15 bp, Homo sapiens
cccttgtggcccagg

SEQ ID NO: 1571226 - DNA, 15 bp, Homo sapiens
ccttgtggcccaggt

SEQ ID NO: 1571227 - DNA, 15 bp, Homo sapiens
cttgtggcccaggta

SEQ ID NO: 1571228 - DNA, 15 bp, Homo sapiens
ttgtggcccaggtag

SEQ ID NO: 1571229 - DNA, 15 bp, Homo sapiens
tgtggcccaggtagt

SEQ ID NO: 1571230 - DNA, 15 bp, Homo sapiens
gtggcccaggtagtg

SEQ ID NO: 1571231 - DNA, 15 bp, Homo sapiens
tggcccaggtagtgg

SEQ ID NO: 1571232 - DNA, 15 bp, Homo sapiens
ggcccaggtagtggt

SEQ ID NO: 1571233 - DNA, 15 bp, Homo sapiens
gcccaggtagtggtc

SEQ ID NO: 1571234 - DNA, 15 bp, Homo sapiens
cccaggtagtggtcg

SEQ ID NO: 1571235 - DNA, 15 bp, Homo sapiens
ccaggtagtggtcga

SEQ ID NO: 1571236 - DNA, 15 bp, Homo sapiens
caggtagtggtcgaa

SEQ ID NO: 1571237 - DNA, 15 bp, Homo sapiens
aggtagtggtcgaag

SEQ ID NO: 1571238 - DNA, 15 bp, Homo sapiens
ggtagtggtcgaagg

SEQ ID NO: 1571239 - DNA, 15 bp, Homo sapiens
gtagtggtcgaaggg

SEQ ID NO: 1571240 - DNA, 15 bp, Homo sapiens
tagtggtcgaagggc

SEQ ID NO: 1571241 - DNA, 15 bp, Homo sapiens
agtggtcgaagggcg

SEQ ID NO: 1571242 - DNA, 15 bp, Homo sapiens
gtggtcgaagggcgg

SEQ ID NO: 1571243 - DNA, 15 bp, Homo sapiens
tggtcgaagggcggc

SEQ ID NO: 1571244 - DNA, 15 bp, Homo sapiens
ggtcgaagggcggcg

SEQ ID NO: 1571245 - DNA, 15 bp, Homo sapiens
gtcgaagggcggcgg

SEQ ID NO: 1571246 - DNA, 15 bp, Homo sapiens
tcgaagggcggcggc

SEQ ID NO: 1571247 - DNA, 15 bp, Homo sapiens
cgaagggcggcggcg

SEQ ID NO: 1571248 - DNA, 15 bp, Homo sapiens
gaagggcggcggcgg

SEQ ID NO: 1571249 - DNA, 15 bp, Homo sapiens
aagggcggcggcggc

SEQ ID NO: 1571250 - DNA, 15 bp, Homo sapiens
agggcggcggcggcg

SEQ ID NO: 1571251 - DNA, 15 bp, Homo sapiens
gggcggcggcggcga

SEQ ID NO: 1571252 - DNA, 15 bp, Homo sapiens
ggcggcggcggcgag

SEQ ID NO: 1571253 - DNA, 15 bp, Homo sapiens
gcggcggcggcgagg

SEQ ID NO: 1571254 - DNA, 15 bp, Homo sapiens
cggcggcggcgaggg

SEQ ID NO: 1571255 - DNA, 15 bp, Homo sapiens
gcggcggcgagggcg

SEQ ID NO: 1571256 - DNA, 15 bp, Homo sapiens
cggcggcgagggcgg

SEQ ID NO: 1571257 - DNA, 15 bp, Homo sapiens
ggcggcgagggcggc

SEQ ID NO: 1571258 - DNA, 15 bp, Homo sapiens
gcggcgagggcggct

SEQ ID NO: 1571259 - DNA, 15 bp, Homo sapiens
cggcgagggcggctc

SEQ ID NO: 1571260 - DNA, 15 bp, Homo sapiens
ggcgagggcggctcg

SEQ ID NO: 1571261 - DNA, 15 bp, Homo sapiens
gcgagggcggctcgt

SEQ ID NO: 1571262 - DNA, 15 bp, Homo sapiens
cgagggcggctcgtg

SEQ ID NO: 1571263 - DNA, 15 bp, Homo sapiens
gagggcggctcgtgc

SEQ ID NO: 1571264 - DNA, 15 bp, Homo sapiens
agggcggctcgtgca

SEQ ID NO: 1571265 - DNA, 15 bp, Homo sapiens
gggcggctcgtgcag

SEQ ID NO: 1571266 - DNA, 15 bp, Homo sapiens
ggcggctcgtgcagg

SEQ ID NO: 1571267 - DNA, 15 bp, Homo sapiens
gcggctcgtgcagga

SEQ ID NO: 1571268 - DNA, 15 bp, Homo sapiens
cggctcgtgcaggaa

SEQ ID NO: 1571269 - DNA, 15 bp, Homo sapiens
ggctcgtgcaggaag

SEQ ID NO: 1571270 - DNA, 15 bp, Homo sapiens
gctcgtgcaggaagg

SEQ ID NO: 1571271 - DNA, 15 bp, Homo sapiens
ctcgtgcaggaaggc

SEQ ID NO: 1571272 - DNA, 15 bp, Homo sapiens
tcgtgcaggaaggcc

SEQ ID NO: 1571273 - DNA, 15 bp, Homo sapiens
cgtgcaggaaggccg

SEQ ID NO: 1571274 - DNA, 15 bp, Homo sapiens
gtgcaggaaggccgc

SEQ ID NO: 1571275 - DNA, 15 bp, Homo sapiens
tgcaggaaggccgca

SEQ ID NO: 1571276 - DNA, 15 bp, Homo sapiens
gcaggaaggccgcag

SEQ ID NO: 1571277 - DNA, 15 bp, Homo sapiens
caggaaggccgcagc

SEQ ID NO: 1571278 - DNA, 15 bp, Homo sapiens
aggaaggccgcagcc

SEQ ID NO: 1571279 - DNA, 15 bp, Homo sapiens
ggaaggccgcagccc

SEQ ID NO: 1571280 - DNA, 15 bp, Homo sapiens
gaaggccgcagcccc

SEQ ID NO: 1571281 - DNA, 15 bp, Homo sapiens
aaggccgcagccccc

SEQ ID NO: 1571282 - DNA, 15 bp, Homo sapiens
aggccgcagcccccg

SEQ ID NO: 1571283 - DNA, 15 bp, Homo sapiens
ggccgcagcccccga

SEQ ID NO: 1571284 - DNA, 15 bp, Homo sapiens
gccgcagcccccgag

SEQ ID NO: 1571285 - DNA, 15 bp, Homo sapiens
ccgcagcccccgagg

SEQ ID NO: 1571286 - DNA, 15 bp, Homo sapiens
cgcagcccccgaggg

SEQ ID NO: 1571287 - DNA, 15 bp, Homo sapiens
gcagcccccgagggc

SEQ ID NO: 1571288 - DNA, 15 bp, Homo sapiens
cagcccccgagggcc

SEQ ID NO: 1571289 - DNA, 15 bp, Homo sapiens
agcccccgagggccc

SEQ ID NO: 1571290 - DNA, 15 bp, Homo sapiens
gcccccgagggcccc

SEQ ID NO: 1571291 - DNA, 15 bp, Homo sapiens
cccccgagggccccc

SEQ ID NO: 1571292 - DNA, 15 bp, Homo sapiens
ccccgagggcccccg

SEQ ID NO: 1571293 - DNA, 15 bp, Homo sapiens
cccgagggcccccgc

SEQ ID NO: 1571294 - DNA, 15 bp, Homo sapiens
ccgagggcccccgcc

SEQ ID NO: 1571295 - DNA, 15 bp, Homo sapiens
cgagggcccccgccg

SEQ ID NO: 1571296 - DNA, 15 bp, Homo sapiens
gagggcccccgccgg

SEQ ID NO: 1571297 - DNA, 15 bp, Homo sapiens
agggcccccgccggt

SEQ ID NO: 1571298 - DNA, 15 bp, Homo sapiens
gggcccccgccggtg

SEQ ID NO: 1571299 - DNA, 15 bp, Homo sapiens
ggcccccgccggtgc

SEQ ID NO: 1571300 - DNA, 15 bp, Homo sapiens
gcccccgccggtgct

SEQ ID NO: 1571301 - DNA, 15 bp, Homo sapiens
cccccgccggtgctc

SEQ ID NO: 1571302 - DNA, 15 bp, Homo sapiens
ccccgccggtgctcc

SEQ ID NO: 1571303 - DNA, 15 bp, Homo sapiens
cccgccggtgctcct

SEQ ID NO: 1571304 - DNA, 15 bp, Homo sapiens
ccgccggtgctcctc

SEQ ID NO: 1571305 - DNA, 15 bp, Homo sapiens
cgccggtgctcctct

SEQ ID NO: 1571306 - DNA, 15 bp, Homo sapiens
gccggtgctcctcta

SEQ ID NO: 1571307 - DNA, 15 bp, Homo sapiens
ccggtgctcctctag

SEQ ID NO: 1571308 - DNA, 15 bp, Homo sapiens
cggtgctcctctagg

SEQ ID NO: 1571309 - DNA, 15 bp, Homo sapiens
ggtgctcctctaggc

SEQ ID NO: 1571310 - DNA, 15 bp, Homo sapiens
gtgctcctctaggcc

SEQ ID NO: 1571311 - DNA, 15 bp, Homo sapiens
tgctcctctaggccg

SEQ ID NO: 1571312 - DNA, 15 bp, Homo sapiens
gctcctctaggccgg

SEQ ID NO: 1571313 - DNA, 15 bp, Homo sapiens
ctcctctaggccggg

SEQ ID NO: 1571314 - DNA, 15 bp, Homo sapiens
tcctctaggccgggc

SEQ ID NO: 1571315 - DNA, 15 bp, Homo sapiens
cctctaggccgggct

SEQ ID NO: 1571316 - DNA, 15 bp, Homo sapiens
ctctaggccgggctc

SEQ ID NO: 1571317 - DNA, 15 bp, Homo sapiens
tctaggccgggctcc

SEQ ID NO: 1571318 - DNA, 15 bp, Homo sapiens
ctaggccgggctcca

SEQ ID NO: 1571319 - DNA, 15 bp, Homo sapiens
taggccgggctccag

SEQ ID NO: 1571320 - DNA, 15 bp, Homo sapiens
aggccgggctccagc

SEQ ID NO: 1571321 - DNA, 15 bp, Homo sapiens
ggccgggctccagcc

SEQ ID NO: 1571322 - DNA, 15 bp, Homo sapiens
gccgggctccagccc

SEQ ID NO: 1571323 - DNA, 15 bp, Homo sapiens
ccgggctccagcccg

SEQ ID NO: 1571324 - DNA, 15 bp, Homo sapiens
cgggctccagcccgc

SEQ ID NO: 1571325 - DNA, 15 bp, Homo sapiens
gggctccagcccgcc

SEQ ID NO: 1571326 - DNA, 15 bp, Homo sapiens
ggctccagcccgccg

SEQ ID NO: 1571327 - DNA, 15 bp, Homo sapiens
gctccagcccgccgg

SEQ ID NO: 1571328 - DNA, 15 bp, Homo sapiens
ctccagcccgccggg

SEQ ID NO: 1571329 - DNA, 15 bp, Homo sapiens
tccagcccgccgggg

SEQ ID NO: 1571330 - DNA, 15 bp, Homo sapiens
ccagcccgccggggc

SEQ ID NO: 1571331 - DNA, 15 bp, Homo sapiens
cagcccgccggggcc

SEQ ID NO: 1571332 - DNA, 15 bp, Homo sapiens
agcccgccggggccc

SEQ ID NO: 1571333 - DNA, 15 bp, Homo sapiens
gcccgccggggccct

SEQ ID NO: 1571334 - DNA, 15 bp, Homo sapiens
cccgccggggccctc

SEQ ID NO: 1571335 - DNA, 15 bp, Homo sapiens
ccgccggggccctcg

SEQ ID NO: 1571336 - DNA, 15 bp, Homo sapiens
cgccggggccctcgg

SEQ ID NO: 1571337 - DNA, 15 bp, Homo sapiens
gccggggccctcggc

SEQ ID NO: 1571338 - DNA, 15 bp, Homo sapiens
ccggggccctcggcc

SEQ ID NO: 1571339 - DNA, 15 bp, Homo sapiens
cggggccctcggccg

SEQ ID NO: 1571340 - DNA, 15 bp, Homo sapiens
ggggccctcggccga

SEQ ID NO: 1571341 - DNA, 15 bp, Homo sapiens
gggccctcggccgag

SEQ ID NO: 1571342 - DNA, 15 bp, Homo sapiens
ggccctcggccgagc

SEQ ID NO: 1571343 - DNA, 15 bp, Homo sapiens
gccctcggccgagcg

SEQ ID NO: 1571344 - DNA, 15 bp, Homo sapiens
ccctcggccgagcga

SEQ ID NO: 1571345 - DNA, 15 bp, Homo sapiens
cctcggccgagcgag

SEQ ID NO: 1571346 - DNA, 15 bp, Homo sapiens
ctcggccgagcgagc

SEQ ID NO: 1571347 - DNA, 15 bp, Homo sapiens
tcggccgagcgagcg

SEQ ID NO: 1571348 - DNA, 15 bp, Homo sapiens
cggccgagcgagcgc

SEQ ID NO: 1571349 - DNA, 15 bp, Homo sapiens
ggccgagcgagcgcc

SEQ ID NO: 1571350 - DNA, 15 bp, Homo sapiens
gccgagcgagcgccc

SEQ ID NO: 1571351 - DNA, 15 bp, Homo sapiens
ccgagcgagcgccct

SEQ ID NO: 1571352 - DNA, 15 bp, Homo sapiens
cgagcgagcgccctt

SEQ ID NO: 1571353 - DNA, 15 bp, Homo sapiens
gagcgagcgcccttg

SEQ ID NO: 1571354 - DNA, 15 bp, Homo sapiens
agcgagcgcccttga

SEQ ID NO: 1571355 - DNA, 15 bp, Homo sapiens
gcgagcgcccttgag

SEQ ID NO: 1571356 - DNA, 15 bp, Homo sapiens
cgagcgcccttgagc

SEQ ID NO: 1571357 - DNA, 15 bp, Homo sapiens
gagcgcccttgagcc

SEQ ID NO: 1571358 - DNA, 15 bp, Homo sapiens
agcgcccttgagccc

SEQ ID NO: 1571359 - DNA, 15 bp, Homo sapiens
gcgcccttgagcccg

SEQ ID NO: 1571360 - DNA, 15 bp, Homo sapiens
cgcccttgagcccgg

SEQ ID NO: 1571361 - DNA, 15 bp, Homo sapiens
gcccttgagcccggc

SEQ ID NO: 1571362 - DNA, 15 bp, Homo sapiens
cccttgagcccggcg

SEQ ID NO: 1571363 - DNA, 15 bp, Homo sapiens
ccttgagcccggcgc

SEQ ID NO: 1571364 - DNA, 15 bp, Homo sapiens
cttgagcccggcgct

SEQ ID NO: 1571365 - DNA, 15 bp, Homo sapiens
ttgagcccggcgctc

SEQ ID NO: 1571366 - DNA, 15 bp, Homo sapiens
tgagcccggcgctct

SEQ ID NO: 1571367 - DNA, 15 bp, Homo sapiens
gagcccggcgctctc

SEQ ID NO: 1571368 - DNA, 15 bp, Homo sapiens
agcccggcgctctcg

SEQ ID NO: 1571369 - DNA, 15 bp, Homo sapiens
gcccggcgctctcgc

SEQ ID NO: 1571370 - DNA, 15 bp, Homo sapiens
cccggcgctctcgcc

SEQ ID NO: 1571371 - DNA, 15 bp, Homo sapiens
ccggcgctctcgccc

SEQ ID NO: 1571372 - DNA, 15 bp, Homo sapiens
cggcgctctcgcccc

SEQ ID NO: 1571373 - DNA, 15 bp, Homo sapiens
ggcgctctcgccccc

SEQ ID NO: 1571374 - DNA, 15 bp, Homo sapiens
gcgctctcgcccccg

SEQ ID NO: 1571375 - DNA, 15 bp, Homo sapiens
cgctctcgcccccgc

SEQ ID NO: 1571376 - DNA, 15 bp, Homo sapiens
gctctcgcccccgcg

SEQ ID NO: 1571377 - DNA, 15 bp, Homo sapiens
ctctcgcccccgcgg

SEQ ID NO: 1571378 - DNA, 15 bp, Homo sapiens
tctcgcccccgcggg

SEQ ID NO: 1571379 - DNA, 15 bp, Homo sapiens
ctcgcccccgcgggc

SEQ ID NO: 1571380 - DNA, 15 bp, Homo sapiens
tcgcccccgcgggca

SEQ ID NO: 1571381 - DNA, 15 bp, Homo sapiens
cgcccccgcgggcac

SEQ ID NO: 1571382 - DNA, 15 bp, Homo sapiens
gcccccgcgggcacc

SEQ ID NO: 1571383 - DNA, 15 bp, Homo sapiens
cccccgcgggcaccc

SEQ ID NO: 1571384 - DNA, 15 bp, Homo sapiens
ccccgcgggcacccg

SEQ ID NO: 1571385 - DNA, 15 bp, Homo sapiens
cccgcgggcacccga

SEQ ID NO: 1571386 - DNA, 15 bp, Homo sapiens
ccgcgggcacccgaa

SEQ ID NO: 1571387 - DNA, 15 bp, Homo sapiens
cgcgggcacccgaag

SEQ ID NO: 1571388 - DNA, 15 bp, Homo sapiens
gcgggcacccgaagg

SEQ ID NO: 1571389 - DNA, 15 bp, Homo sapiens
cgggcacccgaaggc

SEQ ID NO: 1571390 - DNA, 15 bp, Homo sapiens
gggcacccgaaggct

SEQ ID NO: 1571391 - DNA, 15 bp, Homo sapiens
ggcacccgaaggctc

SEQ ID NO: 1571392 - DNA, 15 bp, Homo sapiens
gcacccgaaggctcg

SEQ ID NO: 1571393 - DNA, 15 bp, Homo sapiens
cacccgaaggctcgg

SEQ ID NO: 1571394 - DNA, 15 bp, Homo sapiens
acccgaaggctcggc

SEQ ID NO: 1571395 - DNA, 15 bp, Homo sapiens
cccgaaggctcggcg

SEQ ID NO: 1571396 - DNA, 15 bp, Homo sapiens
ccgaaggctcggcgg

SEQ ID NO: 1571397 - DNA, 15 bp, Homo sapiens
cgaaggctcggcggc

SEQ ID NO: 1571398 - DNA, 15 bp, Homo sapiens
gaaggctcggcggcc

SEQ ID NO: 1571399 - DNA, 15 bp, Homo sapiens
aaggctcggcggccg

SEQ ID NO: 1571400 - DNA, 15 bp, Homo sapiens
aggctcggcggccgg

SEQ ID NO: 1571401 - DNA, 15 bp, Homo sapiens
ggctcggcggccggg

SEQ ID NO: 1571402 - DNA, 15 bp, Homo sapiens
gctcggcggccgggc

SEQ ID NO: 1571403 - DNA, 15 bp, Homo sapiens
ctcggcggccgggcg

SEQ ID NO: 1571404 - DNA, 15 bp, Homo sapiens
tcggcggccgggcgg

SEQ ID NO: 1571405 - DNA, 15 bp, Homo sapiens
cggcggccgggcggc

SEQ ID NO: 1571406 - DNA, 15 bp, Homo sapiens
ggcggccgggcggct

SEQ ID NO: 1571407 - DNA, 15 bp, Homo sapiens
gcggccgggcggctg

SEQ ID NO: 1571408 - DNA, 15 bp, Homo sapiens
cggccgggcggctgg

SEQ ID NO: 1571409 - DNA, 15 bp, Homo sapiens
ggccgggcggctggc

SEQ ID NO: 1571410 - DNA, 15 bp, Homo sapiens
gccgggcggctggca

SEQ ID NO: 1571411 - DNA, 15 bp, Homo sapiens
ccgggcggctggcag

SEQ ID NO: 1571412 - DNA, 15 bp, Homo sapiens
cgggcggctggcaga

SEQ ID NO: 1571413 - DNA, 15 bp, Homo sapiens
gggcggctggcagag

SEQ ID NO: 1571414 - DNA, 15 bp, Homo sapiens
ggcggctggcagagc

SEQ ID NO: 1571415 - DNA, 15 bp, Homo sapiens
gcggctggcagagcg

SEQ ID NO: 1571416 - DNA, 15 bp, Homo sapiens
cggctggcagagcgc

SEQ ID NO: 1571417 - DNA, 15 bp, Homo sapiens
ggctggcagagcgcg

SEQ ID NO: 1571418 - DNA, 15 bp, Homo sapiens
gctggcagagcgcgg

SEQ ID NO: 1571419 - DNA, 15 bp, Homo sapiens
ctggcagagcgcggc

SEQ ID NO: 1571420 - DNA, 15 bp, Homo sapiens
tggcagagcgcggct

SEQ ID NO: 1571421 - DNA, 15 bp, Homo sapiens
ggcagagcgcggctt

SEQ ID NO: 1571422 - DNA, 15 bp, Homo sapiens
gcagagcgcggcttg

SEQ ID NO: 1571423 - DNA, 15 bp, Homo sapiens
cagagcgcggcttgg

SEQ ID NO: 1571424 - DNA, 15 bp, Homo sapiens
agagcgcggcttggt

SEQ ID NO: 1571425 - DNA, 15 bp, Homo sapiens
gagcgcggcttggtg

SEQ ID NO: 1571426 - DNA, 15 bp, Homo sapiens
agcgcggcttggtgc

SEQ ID NO: 1571427 - DNA, 15 bp, Homo sapiens
gcgcggcttggtgcg

SEQ ID NO: 1571428 - DNA, 15 bp, Homo sapiens
cgcggcttggtgcgg

SEQ ID NO: 1571429 - DNA, 15 bp, Homo sapiens
gcggcttggtgcgga

SEQ ID NO: 1571430 - DNA, 15 bp, Homo sapiens
cggcttggtgcggaa

SEQ ID NO: 1571431 - DNA, 15 bp, Homo sapiens
ggcttggtgcggaag

SEQ ID NO: 1571432 - DNA, 15 bp, Homo sapiens
gcttggtgcggaaga

SEQ ID NO: 1571433 - DNA, 15 bp, Homo sapiens
cttggtgcggaagaa

SEQ ID NO: 1571434 - DNA, 15 bp, Homo sapiens
ttggtgcggaagaag

SEQ ID NO: 1571435 - DNA, 15 bp, Homo sapiens
tggtgcggaagaagt

SEQ ID NO: 1571436 - DNA, 15 bp, Homo sapiens
ggtgcggaagaagtc

SEQ ID NO: 1571437 - DNA, 15 bp, Homo sapiens
gtgcggaagaagtca

SEQ ID NO: 1571438 - DNA, 15 bp, Homo sapiens
tgcggaagaagtcat

SEQ ID NO: 1571439 - DNA, 15 bp, Homo sapiens
gcggaagaagtcatc

SEQ ID NO: 1571440 - DNA, 15 bp, Homo sapiens
cggaagaagtcatcc

SEQ ID NO: 1571441 - DNA, 15 bp, Homo sapiens
ggaagaagtcatccc

SEQ ID NO: 1571442 - DNA, 15 bp, Homo sapiens
gaagaagtcatcccg

SEQ ID NO: 1571443 - DNA, 15 bp, Homo sapiens
aagaagtcatcccgg

SEQ ID NO: 1571444 - DNA, 15 bp, Homo sapiens
agaagtcatcccggg

SEQ ID NO: 1571445 - DNA, 15 bp, Homo sapiens
gaagtcatcccggga

SEQ ID NO: 1571446 - DNA, 15 bp, Homo sapiens
aagtcatcccgggag

SEQ ID NO: 1571447 - DNA, 15 bp, Homo sapiens
agtcatcccgggagg

SEQ ID NO: 1571448 - DNA, 15 bp, Homo sapiens
gtcatcccgggagga

SEQ ID NO: 1571449 - DNA, 15 bp, Homo sapiens
tcatcccgggaggag

SEQ ID NO: 1571450 - DNA, 15 bp, Homo sapiens
catcccgggaggagg

SEQ ID NO: 1571451 - DNA, 15 bp, Homo sapiens
atcccgggaggaggc

SEQ ID NO: 1571452 - DNA, 15 bp, Homo sapiens
tcccgggaggaggcc

SEQ ID NO: 1571453 - DNA, 15 bp, Homo sapiens
cccgggaggaggcca

SEQ ID NO: 1571454 - DNA, 15 bp, Homo sapiens
ccgggaggaggccaa

SEQ ID NO: 1571455 - DNA, 15 bp, Homo sapiens
cgggaggaggccaag

SEQ ID NO: 1571456 - DNA, 15 bp, Homo sapiens
gggaggaggccaagt

SEQ ID NO: 1571457 - DNA, 15 bp, Homo sapiens
ggaggaggccaagtc

SEQ ID NO: 1571458 - DNA, 15 bp, Homo sapiens
gaggaggccaagtcc

SEQ ID NO: 1571459 - DNA, 15 bp, Homo sapiens
aggaggccaagtccc

SEQ ID NO: 1571460 - DNA, 15 bp, Homo sapiens
ggaggccaagtcccg

SEQ ID NO: 1571461 - DNA, 15 bp, Homo sapiens
gaggccaagtcccgg

SEQ ID NO: 1571462 - DNA, 15 bp, Homo sapiens
aggccaagtcccggg

SEQ ID NO: 1571463 - DNA, 15 bp, Homo sapiens
ggccaagtcccggga

SEQ ID NO: 1571464 - DNA, 15 bp, Homo sapiens
gccaagtcccgggag

SEQ ID NO: 1571465 - DNA, 15 bp, Homo sapiens
ccaagtcccgggagc

SEQ ID NO: 1571466 - DNA, 15 bp, Homo sapiens
caagtcccgggagct

SEQ ID NO: 1571467 - DNA, 15 bp, Homo sapiens
aagtcccgggagctg

SEQ ID NO: 1571468 - DNA, 15 bp, Homo sapiens
agtcccgggagctgg

SEQ ID NO: 1571469 - DNA, 15 bp, Homo sapiens
gtcccgggagctgga

SEQ ID NO: 1571470 - DNA, 15 bp, Homo sapiens
tcccgggagctggag

SEQ ID NO: 1571471 - DNA, 15 bp, Homo sapiens
cccgggagctggaga

SEQ ID NO: 1571472 - DNA, 15 bp, Homo sapiens
ccgggagctggagaa

SEQ ID NO: 1571473 - DNA, 15 bp, Homo sapiens
cgggagctggagaag

SEQ ID NO: 1571474 - DNA, 15 bp, Homo sapiens
gggagctggagaagg

SEQ ID NO: 1571475 - DNA, 15 bp, Homo sapiens
ggagctggagaaggc

SEQ ID NO: 1571476 - DNA, 15 bp, Homo sapiens
gagctggagaaggcc

SEQ ID NO: 1571477 - DNA, 15 bp, Homo sapiens
agctggagaaggccg

SEQ ID NO: 1571478 - DNA, 15 bp, Homo sapiens
gctggagaaggccga

SEQ ID NO: 1571479 - DNA, 15 bp, Homo sapiens
ctggagaaggccgag

SEQ ID NO: 1571480 - DNA, 15 bp, Homo sapiens
tggagaaggccgagt

SEQ ID NO: 1571481 - DNA, 15 bp, Homo sapiens
ggagaaggccgagtg

SEQ ID NO: 1571482 - DNA, 15 bp, Homo sapiens
gagaaggccgagtgg

SEQ ID NO: 1571483 - DNA, 15 bp, Homo sapiens
agaaggccgagtgga

SEQ ID NO: 1571484 - DNA, 15 bp, Homo sapiens
gaaggccgagtggag

SEQ ID NO: 1571485 - DNA, 15 bp, Homo sapiens
aaggccgagtggagg

SEQ ID NO: 1571486 - DNA, 15 bp, Homo sapiens
aggccgagtggaggg

SEQ ID NO: 1571487 - DNA, 15 bp, Homo sapiens
ggccgagtggagggg

SEQ ID NO: 1571488 - DNA, 15 bp, Homo sapiens
gccgagtggaggggg

SEQ ID NO: 1571489 - DNA, 15 bp, Homo sapiens
ccgagtggagggggc

SEQ ID NO: 1571490 - DNA, 15 bp, Homo sapiens
cgagtggagggggcc

SEQ ID NO: 1571491 - DNA, 15 bp, Homo sapiens
gagtggagggggcct

SEQ ID NO: 1571492 - DNA, 15 bp, Homo sapiens
agtggagggggcctg

SEQ ID NO: 1571493 - DNA, 15 bp, Homo sapiens
gtggagggggcctgg

SEQ ID NO: 1571494 - DNA, 15 bp, Homo sapiens
tggagggggcctgga

SEQ ID NO: 1571495 - DNA, 15 bp, Homo sapiens
ggagggggcctggag

SEQ ID NO: 1571496 - DNA, 15 bp, Homo sapiens
gagggggcctggagg

SEQ ID NO: 1571497 - DNA, 15 bp, Homo sapiens
agggggcctggaggc

SEQ ID NO: 1571498 - DNA, 15 bp, Homo sapiens
gggggcctggaggcg

SEQ ID NO: 1571499 - DNA, 15 bp, Homo sapiens
ggggcctggaggcgg

SEQ ID NO: 1571500 - DNA, 15 bp, Homo sapiens
gggcctggaggcgga

SEQ ID NO: 1571501 - DNA, 15 bp, Homo sapiens
ggcctggaggcggag

SEQ ID NO: 1571502 - DNA, 15 bp, Homo sapiens
gcctggaggcggagc

SEQ ID NO: 1571503 - DNA, 15 bp, Homo sapiens
cctggaggcggagcc

SEQ ID NO: 1571504 - DNA, 15 bp, Homo sapiens
ctggaggcggagcct

SEQ ID NO: 1571505 - DNA, 15 bp, Homo sapiens
tggaggcggagcctc

SEQ ID NO: 1571506 - DNA, 15 bp, Homo sapiens
ggaggcggagcctcg

SEQ ID NO: 1571507 - DNA, 15 bp, Homo sapiens
gaggcggagcctcgg

SEQ ID NO: 1571508 - DNA, 15 bp, Homo sapiens
aggcggagcctcggg

SEQ ID NO: 1571509 - DNA, 15 bp, Homo sapiens
ggcggagcctcgggg

SEQ ID NO: 1571510 - DNA, 15 bp, Homo sapiens
gcggagcctcggggt

SEQ ID NO: 1571511 - DNA, 15 bp, Homo sapiens
cggagcctcggggtc

SEQ ID NO: 1571512 - DNA, 15 bp, Homo sapiens
ggagcctcggggtcc

SEQ ID NO: 1571513 - DNA, 15 bp, Homo sapiens
gagcctcggggtccc

SEQ ID NO: 1571514 - DNA, 15 bp, Homo sapiens
agcctcggggtcccc

SEQ ID NO: 1571515 - DNA, 15 bp, Homo sapiens
gcctcggggtccccc

SEQ ID NO: 1571516 - DNA, 15 bp, Homo sapiens
cctcggggtcccccg

SEQ ID NO: 1571517 - DNA, 15 bp, Homo sapiens
ctcggggtcccccga

SEQ ID NO: 1571518 - DNA, 15 bp, Homo sapiens
tcggggtcccccgac

SEQ ID NO: 1571519 - DNA, 15 bp, Homo sapiens
cggggtcccccgacg

SEQ ID NO: 1571520 - DNA, 15 bp, Homo sapiens
ggggtcccccgacgg

SEQ ID NO: 1571521 - DNA, 15 bp, Homo sapiens
gggtcccccgacggg

SEQ ID NO: 1571522 - DNA, 15 bp, Homo sapiens
ggtcccccgacgggg

SEQ ID NO: 1571523 - DNA, 15 bp, Homo sapiens
gtcccccgacggggc

SEQ ID NO: 1571524 - DNA, 15 bp, Homo sapiens
tcccccgacggggcg

SEQ ID NO: 1571525 - DNA, 15 bp, Homo sapiens
cccccgacggggcgg

SEQ ID NO: 1571526 - DNA, 15 bp, Homo sapiens
ccccgacggggcggg

SEQ ID NO: 1571527 - DNA, 15 bp, Homo sapiens
cccgacggggcgggt

SEQ ID NO: 1571528 - DNA, 15 bp, Homo sapiens
ccgacggggcgggtt

SEQ ID NO: 1571529 - DNA, 15 bp, Homo sapiens
cgacggggcgggttc

SEQ ID NO: 1571530 - DNA, 15 bp, Homo sapiens
gacggggcgggttcc

SEQ ID NO: 1571531 - DNA, 15 bp, Homo sapiens
acggggcgggttcca

SEQ ID NO: 1571532 - DNA, 15 bp, Homo sapiens
cggggcgggttccag

SEQ ID NO: 1571533 - DNA, 15 bp, Homo sapiens
ggggcgggttccagg

SEQ ID NO: 1571534 - DNA, 15 bp, Homo sapiens
gggcgggttccaggg

SEQ ID NO: 1571535 - DNA, 15 bp, Homo sapiens
ggcgggttccagggg

SEQ ID NO: 1571536 - DNA, 15 bp, Homo sapiens
gcgggttccaggggt

SEQ ID NO: 1571537 - DNA, 15 bp, Homo sapiens
cgggttccaggggtc

SEQ ID NO: 1571538 - DNA, 15 bp, Homo sapiens
gggttccaggggtcc

SEQ ID NO: 1571539 - DNA, 15 bp, Homo sapiens
ggttccaggggtccc

SEQ ID NO: 1571540 - DNA, 15 bp, Homo sapiens
gttccaggggtcccc

SEQ ID NO: 1571541 - DNA, 15 bp, Homo sapiens
ttccaggggtccccc

SEQ ID NO: 1571542 - DNA, 15 bp, Homo sapiens
tccaggggtccccca

SEQ ID NO: 1571543 - DNA, 15 bp, Homo sapiens
ccaggggtcccccac

SEQ ID NO: 1571544 - DNA, 15 bp, Homo sapiens
caggggtcccccaca

SEQ ID NO: 1571545 - DNA, 15 bp, Homo sapiens
aggggtcccccacag

SEQ ID NO: 1571546 - DNA, 15 bp, Homo sapiens
ggggtcccccacaga

SEQ ID NO: 1571547 - DNA, 15 bp, Homo sapiens
gggtcccccacagat

SEQ ID NO: 1571548 - DNA, 15 bp, Homo sapiens
ggtcccccacagatg

SEQ ID NO: 1571549 - DNA, 15 bp, Homo sapiens
gtcccccacagatga

SEQ ID NO: 1571550 - DNA, 15 bp, Homo sapiens
tcccccacagatgag

SEQ ID NO: 1571551 - DNA, 15 bp, Homo sapiens
cccccacagatgagg

SEQ ID NO: 1571552 - DNA, 15 bp, Homo sapiens
ccccacagatgaggt

SEQ ID NO: 1571553 - DNA, 15 bp, Homo sapiens
cccacagatgaggtg

SEQ ID NO: 1571554 - DNA, 15 bp, Homo sapiens
ccacagatgaggtgg

SEQ ID NO: 1571555 - DNA, 15 bp, Homo sapiens
cacagatgaggtgga

SEQ ID NO: 1571556 - DNA, 15 bp, Homo sapiens
acagatgaggtggag

SEQ ID NO: 1571557 - DNA, 15 bp, Homo sapiens
cagatgaggtggagc

SEQ ID NO: 1571558 - DNA, 15 bp, Homo sapiens
agatgaggtggagct

SEQ ID NO: 1571559 - DNA, 15 bp, Homo sapiens
gatgaggtggagctg

SEQ ID NO: 1571560 - DNA, 15 bp, Homo sapiens
atgaggtggagctgg

SEQ ID NO: 1571561 - DNA, 15 bp, Homo sapiens
tgaggtggagctggg

SEQ ID NO: 1571562 - DNA, 15 bp, Homo sapiens
gaggtggagctggga

SEQ ID NO: 1571563 - DNA, 15 bp, Homo sapiens
aggtggagctgggac

SEQ ID NO: 1571564 - DNA, 15 bp, Homo sapiens
ggtggagctgggaca

SEQ ID NO: 1571565 - DNA, 15 bp, Homo sapiens
gtggagctgggacat

SEQ ID NO: 1571566 - DNA, 15 bp, Homo sapiens
tggagctgggacatc

SEQ ID NO: 1571567 - DNA, 15 bp, Homo sapiens
ggagctgggacatcg

SEQ ID NO: 1571568 - DNA, 15 bp, Homo sapiens
gagctgggacatcga

SEQ ID NO: 1571569 - DNA, 15 bp, Homo sapiens
agctgggacatcgag

SEQ ID NO: 1571570 - DNA, 15 bp, Homo sapiens
gctgggacatcgagg

SEQ ID NO: 1571571 - DNA, 15 bp, Homo sapiens
ctgggacatcgaggt

SEQ ID NO: 1571572 - DNA, 15 bp, Homo sapiens
tgggacatcgaggtg

SEQ ID NO: 1571573 - DNA, 15 bp, Homo sapiens
gggacatcgaggtgg

SEQ ID NO: 1571574 - DNA, 15 bp, Homo sapiens
ggacatcgaggtggc

SEQ ID NO: 1571575 - DNA, 15 bp, Homo sapiens
gacatcgaggtggcc

SEQ ID NO: 1571576 - DNA, 15 bp, Homo sapiens
acatcgaggtggcct

SEQ ID NO: 1571577 - DNA, 15 bp, Homo sapiens
catcgaggtggcctg

SEQ ID NO: 1571578 - DNA, 15 bp, Homo sapiens
atcgaggtggcctgg

SEQ ID NO: 1571579 - DNA, 15 bp, Homo sapiens
tcgaggtggcctggt

SEQ ID NO: 1571580 - DNA, 15 bp, Homo sapiens
cgaggtggcctggtc

SEQ ID NO: 1571581 - DNA, 15 bp, Homo sapiens
gaggtggcctggtct

SEQ ID NO: 1571582 - DNA, 15 bp, Homo sapiens
aggtggcctggtctc

SEQ ID NO: 1571583 - DNA, 15 bp, Homo sapiens
ggtggcctggtctcg

SEQ ID NO: 1571584 - DNA, 15 bp, Homo sapiens
gtggcctggtctcgt

SEQ ID NO: 1571585 - DNA, 15 bp, Homo sapiens
tggcctggtctcgtt

SEQ ID NO: 1571586 - DNA, 15 bp, Homo sapiens
ggcctggtctcgttt

SEQ ID NO: 1571587 - DNA, 15 bp, Homo sapiens
gcctggtctcgtttg

SEQ ID NO: 1571588 - DNA, 15 bp, Homo sapiens
cctggtctcgtttgt

SEQ ID NO: 1571589 - DNA, 15 bp, Homo sapiens
ctggtctcgtttgtt

SEQ ID NO: 1571590 - DNA, 15 bp, Homo sapiens
tggtctcgtttgtta

SEQ ID NO: 1571591 - DNA, 15 bp, Homo sapiens
ggtctcgtttgttac

SEQ ID NO: 1571592 - DNA, 15 bp, Homo sapiens
gtctcgtttgttacc

SEQ ID NO: 1571593 - DNA, 15 bp, Homo sapiens
tctcgtttgttaccg

SEQ ID NO: 1571594 - DNA, 15 bp, Homo sapiens
ctcgtttgttaccgt

SEQ ID NO: 1571595 - DNA, 15 bp, Homo sapiens
tcgtttgttaccgtc

SEQ ID NO: 1571596 - DNA, 15 bp, Homo sapiens
cgtttgttaccgtca

SEQ ID NO: 1571597 - DNA, 15 bp, Homo sapiens
gtttgttaccgtcag

SEQ ID NO: 1571598 - DNA, 15 bp, Homo sapiens
tttgttaccgtcaga

SEQ ID NO: 1571599 - DNA, 15 bp, Homo sapiens
ttgttaccgtcagag

SEQ ID NO: 1571600 - DNA, 15 bp, Homo sapiens
tgttaccgtcagagg

SEQ ID NO: 1571601 - DNA, 15 bp, Homo sapiens
gttaccgtcagaggg

SEQ ID NO: 1571602 - DNA, 15 bp, Homo sapiens
ttaccgtcagagggc

SEQ ID NO: 1571603 - DNA, 15 bp, Homo sapiens
taccgtcagagggcc

SEQ ID NO: 1571604 - DNA, 15 bp, Homo sapiens
accgtcagagggccc

SEQ ID NO: 1571605 - DNA, 15 bp, Homo sapiens
ccgtcagagggcccc

SEQ ID NO: 1571606 - DNA, 15 bp, Homo sapiens
cgtcagagggccccg

SEQ ID NO: 1571607 - DNA, 15 bp, Homo sapiens
gtcagagggccccga

SEQ ID NO: 1571608 - DNA, 15 bp, Homo sapiens
tcagagggccccgag

SEQ ID NO: 1571609 - DNA, 15 bp, Homo sapiens
cagagggccccgaga

SEQ ID NO: 1571610 - DNA, 15 bp, Homo sapiens
agagggccccgagag

SEQ ID NO: 1571611 - DNA, 15 bp, Homo sapiens
gagggccccgagagc

SEQ ID NO: 1571612 - DNA, 15 bp, Homo sapiens
agggccccgagagct

SEQ ID NO: 1571613 - DNA, 15 bp, Homo sapiens
gggccccgagagctg

SEQ ID NO: 1571614 - DNA, 15 bp, Homo sapiens
ggccccgagagctgc

SEQ ID NO: 1571615 - DNA, 15 bp, Homo sapiens
gccccgagagctgca

SEQ ID NO: 1571616 - DNA, 15 bp, Homo sapiens
ccccgagagctgcag

SEQ ID NO: 1571617 - DNA, 15 bp, Homo sapiens
cccgagagctgcagc

SEQ ID NO: 1571618 - DNA, 15 bp, Homo sapiens
ccgagagctgcagct

SEQ ID NO: 1571619 - DNA, 15 bp, Homo sapiens
cgagagctgcagctt

SEQ ID NO: 1571620 - DNA, 15 bp, Homo sapiens
gagagctgcagcttg

SEQ ID NO: 1571621 - DNA, 15 bp, Homo sapiens
agagctgcagcttgc

SEQ ID NO: 1571622 - DNA, 15 bp, Homo sapiens
gagctgcagcttgcg

SEQ ID NO: 1571623 - DNA, 15 bp, Homo sapiens
agctgcagcttgcgg

SEQ ID NO: 1571624 - DNA, 15 bp, Homo sapiens
gctgcagcttgcggt

SEQ ID NO: 1571625 - DNA, 15 bp, Homo sapiens
ctgcagcttgcggtg

SEQ ID NO: 1571626 - DNA, 15 bp, Homo sapiens
tgcagcttgcggtgc

SEQ ID NO: 1571627 - DNA, 15 bp, Homo sapiens
gcagcttgcggtgct

SEQ ID NO: 1571628 - DNA, 15 bp, Homo sapiens
cagcttgcggtgctg

SEQ ID NO: 1571629 - DNA, 15 bp, Homo sapiens
agcttgcggtgctgt

SEQ ID NO: 1571630 - DNA, 15 bp, Homo sapiens
gcttgcggtgctgtt

SEQ ID NO: 1571631 - DNA, 15 bp, Homo sapiens
cttgcggtgctgttg

SEQ ID NO: 1571632 - DNA, 15 bp, Homo sapiens
ttgcggtgctgttgc

SEQ ID NO: 1571633 - DNA, 15 bp, Homo sapiens
tgcggtgctgttgcc

SEQ ID NO: 1571634 - DNA, 15 bp, Homo sapiens
gcggtgctgttgcct

SEQ ID NO: 1571635 - DNA, 15 bp, Homo sapiens
cggtgctgttgcctc

SEQ ID NO: 1571636 - DNA, 15 bp, Homo sapiens
ggtgctgttgcctcg

SEQ ID NO: 1571637 - DNA, 15 bp, Homo sapiens
gtgctgttgcctcgg

SEQ ID NO: 1571638 - DNA, 15 bp, Homo sapiens
tgctgttgcctcggc

SEQ ID NO: 1571639 - DNA, 15 bp, Homo sapiens
gctgttgcctcggct

SEQ ID NO: 1571640 - DNA, 15 bp, Homo sapiens
ctgttgcctcggctt

SEQ ID NO: 1571641 - DNA, 15 bp, Homo sapiens
tgttgcctcggcttc

SEQ ID NO: 1571642 - DNA, 15 bp, Homo sapiens
gttgcctcggcttca

SEQ ID NO: 1571643 - DNA, 15 bp, Homo sapiens
ttgcctcggcttcag

SEQ ID NO: 1571644 - DNA, 15 bp, Homo sapiens
tgcctcggcttcagg

SEQ ID NO: 1571645 - DNA, 15 bp, Homo sapiens
gcctcggcttcaggc

SEQ ID NO: 1571646 - DNA, 15 bp, Homo sapiens
cctcggcttcaggca

SEQ ID NO: 1571647 - DNA, 15 bp, Homo sapiens
ctcggcttcaggcag

SEQ ID NO: 1571648 - DNA, 15 bp, Homo sapiens
tcggcttcaggcagc

SEQ ID NO: 1571649 - DNA, 15 bp, Homo sapiens
cggcttcaggcagcg

SEQ ID NO: 1571650 - DNA, 15 bp, Homo sapiens
ggcttcaggcagcgc

SEQ ID NO: 1571651 - DNA, 15 bp, Homo sapiens
gcttcaggcagcgcc

SEQ ID NO: 1571652 - DNA, 15 bp, Homo sapiens
cttcaggcagcgcct

SEQ ID NO: 1571653 - DNA, 15 bp, Homo sapiens
ttcaggcagcgcctc

SEQ ID NO: 1571654 - DNA, 15 bp, Homo sapiens
tcaggcagcgcctcc

SEQ ID NO: 1571655 - DNA, 15 bp, Homo sapiens
caggcagcgcctcct

SEQ ID NO: 1571656 - DNA, 15 bp, Homo sapiens
aggcagcgcctcctg

SEQ ID NO: 1571657 - DNA, 15 bp, Homo sapiens
ggcagcgcctcctgg

SEQ ID NO: 1571658 - DNA, 15 bp, Homo sapiens
gcagcgcctcctgga

SEQ ID NO: 1571659 - DNA, 15 bp, Homo sapiens
cagcgcctcctggaa

SEQ ID NO: 1571660 - DNA, 15 bp, Homo sapiens
agcgcctcctggaag

SEQ ID NO: 1571661 - DNA, 15 bp, Homo sapiens
gcgcctcctggaagg

SEQ ID NO: 1571662 - DNA, 15 bp, Homo sapiens
cgcctcctggaaggg

SEQ ID NO: 1571663 - DNA, 15 bp, Homo sapiens
gcctcctggaaggga

SEQ ID NO: 1571664 - DNA, 15 bp, Homo sapiens
cctcctggaagggag

SEQ ID NO: 1571665 - DNA, 15 bp, Homo sapiens
ctcctggaagggagg

SEQ ID NO: 1571666 - DNA, 15 bp, Homo sapiens
tcctggaagggaggg

SEQ ID NO: 1571667 - DNA, 15 bp, Homo sapiens
cctggaagggaggga

SEQ ID NO: 1571668 - DNA, 15 bp, Homo sapiens
ctggaagggagggag

SEQ ID NO: 1571669 - DNA, 15 bp, Homo sapiens
tggaagggagggagc

SEQ ID NO: 1571670 - DNA, 15 bp, Homo sapiens
ggaagggagggagca

SEQ ID NO: 1571671 - DNA, 15 bp, Homo sapiens
gaagggagggagcag

SEQ ID NO: 1571672 - DNA, 15 bp, Homo sapiens
aagggagggagcaga

SEQ ID NO: 1571673 - DNA, 15 bp, Homo sapiens
agggagggagcagaa

SEQ ID NO: 1571674 - DNA, 15 bp, Homo sapiens
gggagggagcagaag

SEQ ID NO: 1571675 - DNA, 15 bp, Homo sapiens
ggagggagcagaagg

SEQ ID NO: 1571676 - DNA, 15 bp, Homo sapiens
gagggagcagaaggg

SEQ ID NO: 1571677 - DNA, 15 bp, Homo sapiens
agggagcagaagggg

SEQ ID NO: 1571678 - DNA, 15 bp, Homo sapiens
gggagcagaaggggc

SEQ ID NO: 1571679 - DNA, 15 bp, Homo sapiens
ggagcagaaggggcc

SEQ ID NO: 1571680 - DNA, 15 bp, Homo sapiens
gagcagaaggggccg

SEQ ID NO: 1571681 - DNA, 15 bp, Homo sapiens
agcagaaggggccgc

SEQ ID NO: 1571682 - DNA, 15 bp, Homo sapiens
gcagaaggggccgct

SEQ ID NO: 1571683 - DNA, 15 bp, Homo sapiens
cagaaggggccgctc

SEQ ID NO: 1571684 - DNA, 15 bp, Homo sapiens
agaaggggccgctca

SEQ ID NO: 1571685 - DNA, 15 bp, Homo sapiens
gaaggggccgctcag

SEQ ID NO: 1571686 - DNA, 15 bp, Homo sapiens
aaggggccgctcagg

SEQ ID NO: 1571687 - DNA, 15 bp, Homo sapiens
aggggccgctcagga

SEQ ID NO: 1571688 - DNA, 15 bp, Homo sapiens
ggggccgctcaggaa

SEQ ID NO: 1571689 - DNA, 15 bp, Homo sapiens
gggccgctcaggaaa

SEQ ID NO: 1571690 - DNA, 15 bp, Homo sapiens
ggccgctcaggaaag

SEQ ID NO: 1571691 - DNA, 15 bp, Homo sapiens
gccgctcaggaaagg

SEQ ID NO: 1571692 - DNA, 15 bp, Homo sapiens
ccgctcaggaaaggg

SEQ ID NO: 1571693 - DNA, 15 bp, Homo sapiens
cgctcaggaaagggt

SEQ ID NO: 1571694 - DNA, 15 bp, Homo sapiens
gctcaggaaagggtg

SEQ ID NO: 1571695 - DNA, 15 bp, Homo sapiens
ctcaggaaagggtga

SEQ ID NO: 1571696 - DNA, 15 bp, Homo sapiens
tcaggaaagggtgag

SEQ ID NO: 1571697 - DNA, 15 bp, Homo sapiens
caggaaagggtgagg

SEQ ID NO: 1571698 - DNA, 15 bp, Homo sapiens
aggaaagggtgaggg

SEQ ID NO: 1571699 - DNA, 15 bp, Homo sapiens
ggaaagggtgagggc

SEQ ID NO: 1571700 - DNA, 15 bp, Homo sapiens
gaaagggtgagggcc

SEQ ID NO: 1571701 - DNA, 15 bp, Homo sapiens
aaagggtgagggcca

SEQ ID NO: 1571702 - DNA, 15 bp, Homo sapiens
aagggtgagggccaa

SEQ ID NO: 1571703 - DNA, 15 bp, Homo sapiens
agggtgagggccaaa

SEQ ID NO: 1571704 - DNA, 15 bp, Homo sapiens
gggtgagggccaaag

SEQ ID NO: 1571705 - DNA, 15 bp, Homo sapiens
ggtgagggccaaagt

SEQ ID NO: 1571706 - DNA, 15 bp, Homo sapiens
gtgagggccaaagta

SEQ ID NO: 1571707 - DNA, 15 bp, Homo sapiens
tgagggccaaagtag

SEQ ID NO: 1571708 - DNA, 15 bp, Homo sapiens
gagggccaaagtagg

SEQ ID NO: 1571709 - DNA, 15 bp, Homo sapiens
agggccaaagtaggc

SEQ ID NO: 1571710 - DNA, 15 bp, Homo sapiens
gggccaaagtaggcc

SEQ ID NO: 1571711 - DNA, 15 bp, Homo sapiens
ggccaaagtaggccc

SEQ ID NO: 1571712 - DNA, 15 bp, Homo sapiens
gccaaagtaggcccc

SEQ ID NO: 1571713 - DNA, 15 bp, Homo sapiens
ccaaagtaggccccg

SEQ ID NO: 1571714 - DNA, 15 bp, Homo sapiens
caaagtaggccccga

SEQ ID NO: 1571715 - DNA, 15 bp, Homo sapiens
aaagtaggccccgaa

SEQ ID NO: 1571716 - DNA, 15 bp, Homo sapiens
aagtaggccccgaac

SEQ ID NO: 1571717 - DNA, 15 bp, Homo sapiens
agtaggccccgaacc

SEQ ID NO: 1571718 - DNA, 15 bp, Homo sapiens
gtaggccccgaaccc

SEQ ID NO: 1571719 - DNA, 15 bp, Homo sapiens
taggccccgaacccc

SEQ ID NO: 1571720 - DNA, 15 bp, Homo sapiens
aggccccgaaccccc

SEQ ID NO: 1571721 - DNA, 15 bp, Homo sapiens
ggccccgaaccccct

SEQ ID NO: 1571722 - DNA, 15 bp, Homo sapiens
gccccgaaccccctt

SEQ ID NO: 1571723 - DNA, 15 bp, Homo sapiens
ccccgaaccccctta

SEQ ID NO: 1571724 - DNA, 15 bp, Homo sapiens
cccgaacccccttag

SEQ ID NO: 1571725 - DNA, 15 bp, Homo sapiens
ccgaacccccttaga

SEQ ID NO: 1571726 - DNA, 15 bp, Homo sapiens
cgaacccccttagat

SEQ ID NO: 1571727 - DNA, 15 bp, Homo sapiens
gaacccccttagatg

SEQ ID NO: 1571728 - DNA, 15 bp, Homo sapiens
aacccccttagatgc

SEQ ID NO: 1571729 - DNA, 15 bp, Homo sapiens
acccccttagatgca

SEQ ID NO: 1571730 - DNA, 15 bp, Homo sapiens
cccccttagatgcaa

SEQ ID NO: 1571731 - DNA, 15 bp, Homo sapiens
ccccttagatgcaag

SEQ ID NO: 1571732 - DNA, 15 bp, Homo sapiens
cccttagatgcaaga

SEQ ID NO: 1571733 - DNA, 15 bp, Homo sapiens
ccttagatgcaagac

SEQ ID NO: 1571734 - DNA, 15 bp, Homo sapiens
cttagatgcaagaca

SEQ ID NO: 1571735 - DNA, 15 bp, Homo sapiens
ttagatgcaagacaa

SEQ ID NO: 1571736 - DNA, 15 bp, Homo sapiens
tagatgcaagacaag

SEQ ID NO: 1571737 - DNA, 15 bp, Homo sapiens
agatgcaagacaaga

SEQ ID NO: 1571738 - DNA, 15 bp, Homo sapiens
gatgcaagacaagag

SEQ ID NO: 1571739 - DNA, 15 bp, Homo sapiens
atgcaagacaagaga

SEQ ID NO: 1571740 - DNA, 15 bp, Homo sapiens
tgcaagacaagagac

SEQ ID NO: 1571741 - DNA, 15 bp, Homo sapiens
gcaagacaagagacg

SEQ ID NO: 1571742 - DNA, 15 bp, Homo sapiens
caagacaagagacga

SEQ ID NO: 1571743 - DNA, 15 bp, Homo sapiens
aagacaagagacgaa

SEQ ID NO: 1571744 - DNA, 15 bp, Homo sapiens
agacaagagacgaat

SEQ ID NO: 1571745 - DNA, 15 bp, Homo sapiens
gacaagagacgaata

SEQ ID NO: 1571746 - DNA, 15 bp, Homo sapiens
acaagagacgaatat

SEQ ID NO: 1571747 - DNA, 15 bp, Homo sapiens
caagagacgaatata

SEQ ID NO: 1571748 - DNA, 15 bp, Homo sapiens
aagagacgaatatag

SEQ ID NO: 1571749 - DNA, 15 bp, Homo sapiens
agagacgaatatagt

SEQ ID NO: 1571750 - DNA, 15 bp, Homo sapiens
gagacgaatatagtg

SEQ ID NO: 1571751 - DNA, 15 bp, Homo sapiens
agacgaatatagtgg

SEQ ID NO: 1571752 - DNA, 15 bp, Homo sapiens
gacgaatatagtgga

SEQ ID NO: 1571753 - DNA, 15 bp, Homo sapiens
acgaatatagtggaa

SEQ ID NO: 1571754 - DNA, 15 bp, Homo sapiens
cgaatatagtggaag

SEQ ID NO: 1571755 - DNA, 15 bp, Homo sapiens
gaatatagtggaaga

SEQ ID NO: 1571756 - DNA, 15 bp, Homo sapiens
aatatagtggaagag

SEQ ID NO: 1571757 - DNA, 15 bp, Homo sapiens
atatagtggaagagg

SEQ ID NO: 1571758 - DNA, 15 bp, Homo sapiens
tatagtggaagaggt

SEQ ID NO: 1571759 - DNA, 15 bp, Homo sapiens
atagtggaagaggtg

SEQ ID NO: 1571760 - DNA, 15 bp, Homo sapiens
tagtggaagaggtgg

SEQ ID NO: 1571761 - DNA, 15 bp, Homo sapiens
agtggaagaggtggg

SEQ ID NO: 1571762 - DNA, 15 bp, Homo sapiens
gtggaagaggtgggg

SEQ ID NO: 1571763 - DNA, 15 bp, Homo sapiens
tggaagaggtgggga

SEQ ID NO: 1571764 - DNA, 15 bp, Homo sapiens
ggaagaggtggggag

SEQ ID NO: 1571765 - DNA, 15 bp, Homo sapiens
gaagaggtggggaga

SEQ ID NO: 1571766 - DNA, 15 bp, Homo sapiens
aagaggtggggagaa

SEQ ID NO: 1571767 - DNA, 15 bp, Homo sapiens
agaggtggggagaat

SEQ ID NO: 1571768 - DNA, 15 bp, Homo sapiens
gaggtggggagaatg

SEQ ID NO: 1571769 - DNA, 15 bp, Homo sapiens
aggtggggagaatgc

SEQ ID NO: 1571770 - DNA, 15 bp, Homo sapiens
ggtggggagaatgcc

SEQ ID NO: 1571771 - DNA, 15 bp, Homo sapiens
gtggggagaatgcct

SEQ ID NO: 1571772 - DNA, 15 bp, Homo sapiens
tggggagaatgcctg

SEQ ID NO: 1571773 - DNA, 15 bp, Homo sapiens
ggggagaatgcctgg

SEQ ID NO: 1571774 - DNA, 15 bp, Homo sapiens
gggagaatgcctggg

SEQ ID NO: 1571775 - DNA, 15 bp, Homo sapiens
ggagaatgcctgggg

SEQ ID NO: 1571776 - DNA, 15 bp, Homo sapiens
gagaatgcctggggc

SEQ ID NO: 1571777 - DNA, 15 bp, Homo sapiens
agaatgcctggggcg

SEQ ID NO: 1571778 - DNA, 15 bp, Homo sapiens
gaatgcctggggcgc

SEQ ID NO: 1571779 - DNA, 15 bp, Homo sapiens
aatgcctggggcgct

SEQ ID NO: 1571780 - DNA, 15 bp, Homo sapiens
atgcctggggcgctc

SEQ ID NO: 1571781 - DNA, 15 bp, Homo sapiens
tgcctggggcgctca

SEQ ID NO: 1571782 - DNA, 15 bp, Homo sapiens
gcctggggcgctcag

SEQ ID NO: 1571783 - DNA, 15 bp, Homo sapiens
cctggggcgctcagg

SEQ ID NO: 1571784 - DNA, 15 bp, Homo sapiens
ctggggcgctcagga

SEQ ID NO: 1571785 - DNA, 15 bp, Homo sapiens
tggggcgctcaggag

SEQ ID NO: 1571786 - DNA, 15 bp, Homo sapiens
ggggcgctcaggaga

SEQ ID NO: 1571787 - DNA, 15 bp, Homo sapiens
gggcgctcaggagag

SEQ ID NO: 1571788 - DNA, 15 bp, Homo sapiens
ggcgctcaggagaga

SEQ ID NO: 1571789 - DNA, 15 bp, Homo sapiens
gcgctcaggagagat

SEQ ID NO: 1571790 - DNA, 15 bp, Homo sapiens
cgctcaggagagatg

SEQ ID NO: 1571791 - DNA, 15 bp, Homo sapiens
gctcaggagagatgg

SEQ ID NO: 1571792 - DNA, 15 bp, Homo sapiens
ctcaggagagatggc

SEQ ID NO: 1571793 - DNA, 15 bp, Homo sapiens
tcaggagagatggcg

SEQ ID NO: 1571794 - DNA, 15 bp, Homo sapiens
caggagagatggcgg

SEQ ID NO: 1571795 - DNA, 15 bp, Homo sapiens
aggagagatggcggg

SEQ ID NO: 1571796 - DNA, 15 bp, Homo sapiens
ggagagatggcgggg

SEQ ID NO: 1571797 - DNA, 15 bp, Homo sapiens
gagagatggcgggga

SEQ ID NO: 1571798 - DNA, 15 bp, Homo sapiens
agagatggcggggag

SEQ ID NO: 1571799 - DNA, 15 bp, Homo sapiens
gagatggcggggagc

SEQ ID NO: 1571800 - DNA, 15 bp, Homo sapiens
agatggcggggagcc

SEQ ID NO: 1571801 - DNA, 15 bp, Homo sapiens
gatggcggggagccg

SEQ ID NO: 1571802 - DNA, 15 bp, Homo sapiens
atggcggggagccgc

SEQ ID NO: 1571803 - DNA, 15 bp, Homo sapiens
tggcggggagccgcc

SEQ ID NO: 1571804 - DNA, 15 bp, Homo sapiens
ggcggggagccgccg

SEQ ID NO: 1571805 - DNA, 15 bp, Homo sapiens
gcggggagccgccgt

SEQ ID NO: 1571806 - DNA, 15 bp, Homo sapiens
cggggagccgccgtg

SEQ ID NO: 1571807 - DNA, 15 bp, Homo sapiens
ggggagccgccgtgt

SEQ ID NO: 1571808 - DNA, 15 bp, Homo sapiens
gggagccgccgtgtc

SEQ ID NO: 1571809 - DNA, 15 bp, Homo sapiens
ggagccgccgtgtcc

SEQ ID NO: 1571810 - DNA, 15 bp, Homo sapiens
gagccgccgtgtccg

SEQ ID NO: 1571811 - DNA, 15 bp, Homo sapiens
agccgccgtgtccgt

SEQ ID NO: 1571812 - DNA, 15 bp, Homo sapiens
gccgccgtgtccgtt

SEQ ID NO: 1571813 - DNA, 15 bp, Homo sapiens
ccgccgtgtccgttt

SEQ ID NO: 1571814 - DNA, 15 bp, Homo sapiens
cgccgtgtccgtttg

SEQ ID NO: 1571815 - DNA, 15 bp, Homo sapiens
gccgtgtccgtttgg

SEQ ID NO: 1571816 - DNA, 15 bp, Homo sapiens
ccgtgtccgtttggc

SEQ ID NO: 1571817 - DNA, 15 bp, Homo sapiens
cgtgtccgtttggcg

SEQ ID NO: 1571818 - DNA, 15 bp, Homo sapiens
gtgtccgtttggcga

SEQ ID NO: 1571819 - DNA, 15 bp, Homo sapiens
tgtccgtttggcgat

SEQ ID NO: 1571820 - DNA, 15 bp, Homo sapiens
gtccgtttggcgatc

SEQ ID NO: 1571821 - DNA, 15 bp, Homo sapiens
tccgtttggcgatcc

SEQ ID NO: 1571822 - DNA, 15 bp, Homo sapiens
ccgtttggcgatccc

SEQ ID NO: 1571823 - DNA, 15 bp, Homo sapiens
cgtttggcgatcccc

SEQ ID NO: 1571824 - DNA, 15 bp, Homo sapiens
gtttggcgatcccct

SEQ ID NO: 1571825 - DNA, 15 bp, Homo sapiens
tttggcgatcccctc

SEQ ID NO: 1571826 - DNA, 15 bp, Homo sapiens
ttggcgatcccctca

SEQ ID NO: 1571827 - DNA, 15 bp, Homo sapiens
tggcgatcccctcag

SEQ ID NO: 1571828 - DNA, 15 bp, Homo sapiens
ggcgatcccctcagg

SEQ ID NO: 1571829 - DNA, 15 bp, Homo sapiens
gcgatcccctcaggg

SEQ ID NO: 1571830 - DNA, 15 bp, Homo sapiens
cgatcccctcagggt

SEQ ID NO: 1571831 - DNA, 15 bp, Homo sapiens
gatcccctcagggtc

SEQ ID NO: 1571832 - DNA, 15 bp, Homo sapiens
atcccctcagggtca

SEQ ID NO: 1571833 - DNA, 15 bp, Homo sapiens
tcccctcagggtcaa

SEQ ID NO: 1571834 - DNA, 15 bp, Homo sapiens
cccctcagggtcaac

SEQ ID NO: 1571835 - DNA, 15 bp, Homo sapiens
ccctcagggtcaact

SEQ ID NO: 1571836 - DNA, 15 bp, Homo sapiens
cctcagggtcaactc

SEQ ID NO: 1571837 - DNA, 15 bp, Homo sapiens
ctcagggtcaactct

SEQ ID NO: 1571838 - DNA, 15 bp, Homo sapiens
tcagggtcaactctg

SEQ ID NO: 1571839 - DNA, 15 bp, Homo sapiens
cagggtcaactctgc

SEQ ID NO: 1571840 - DNA, 15 bp, Homo sapiens
agggtcaactctgca

SEQ ID NO: 1571841 - DNA, 15 bp, Homo sapiens
gggtcaactctgcac

SEQ ID NO: 1571842 - DNA, 15 bp, Homo sapiens
ggtcaactctgcact

SEQ ID NO: 1571843 - DNA, 15 bp, Homo sapiens
gtcaactctgcactc

SEQ ID NO: 1571844 - DNA, 15 bp, Homo sapiens
tcaactctgcactcc

SEQ ID NO: 1571845 - DNA, 15 bp, Homo sapiens
caactctgcactcct

SEQ ID NO: 1571846 - DNA, 15 bp, Homo sapiens
aactctgcactcctc

SEQ ID NO: 1571847 - DNA, 15 bp, Homo sapiens
actctgcactcctct

SEQ ID NO: 1571848 - DNA, 15 bp, Homo sapiens
ctctgcactcctctg

SEQ ID NO: 1571849 - DNA, 15 bp, Homo sapiens
tctgcactcctctgc

SEQ ID NO: 1571850 - DNA, 15 bp, Homo sapiens
ctgcactcctctgca

SEQ ID NO: 1571851 - DNA, 15 bp, Homo sapiens
tgcactcctctgcat

SEQ ID NO: 1571852 - DNA, 15 bp, Homo sapiens
gcactcctctgcatg

SEQ ID NO: 1571853 - DNA, 15 bp, Homo sapiens
cactcctctgcatgt

SEQ ID NO: 1571854 - DNA, 15 bp, Homo sapiens
actcctctgcatgta

SEQ ID NO: 1571855 - DNA, 15 bp, Homo sapiens
ctcctctgcatgtag

SEQ ID NO: 1571856 - DNA, 15 bp, Homo sapiens
tcctctgcatgtagg

SEQ ID NO: 1571857 - DNA, 15 bp, Homo sapiens
cctctgcatgtagga

SEQ ID NO: 1571858 - DNA, 15 bp, Homo sapiens
ctctgcatgtaggat

SEQ ID NO: 1571859 - DNA, 15 bp, Homo sapiens
tctgcatgtaggatg

SEQ ID NO: 1571860 - DNA, 15 bp, Homo sapiens
ctgcatgtaggatgt

SEQ ID NO: 1571861 - DNA, 15 bp, Homo sapiens
tgcatgtaggatgtg

SEQ ID NO: 1571862 - DNA, 15 bp, Homo sapiens
gcatgtaggatgtgc

SEQ ID NO: 1571863 - DNA, 15 bp, Homo sapiens
catgtaggatgtgct

SEQ ID NO: 1571864 - DNA, 15 bp, Homo sapiens
atgtaggatgtgctg

SEQ ID NO: 1571865 - DNA, 15 bp, Homo sapiens
tgtaggatgtgctgc

SEQ ID NO: 1571866 - DNA, 15 bp, Homo sapiens
gtaggatgtgctgcg

SEQ ID NO: 1571867 - DNA, 15 bp, Homo sapiens
taggatgtgctgcga

SEQ ID NO: 1571868 - DNA, 15 bp, Homo sapiens
aggatgtgctgcgag

SEQ ID NO: 1571869 - DNA, 15 bp, Homo sapiens
ggatgtgctgcgaga

SEQ ID NO: 1571870 - DNA, 15 bp, Homo sapiens
gatgtgctgcgagaa

SEQ ID NO: 1571871 - DNA, 15 bp, Homo sapiens
atgtgctgcgagaac

SEQ ID NO: 1571872 - DNA, 15 bp, Homo sapiens
tgtgctgcgagaacc

SEQ ID NO: 1571873 - DNA, 15 bp, Homo sapiens
gtgctgcgagaacca

SEQ ID NO: 1571874 - DNA, 15 bp, Homo sapiens
tgctgcgagaaccag

SEQ ID NO: 1571875 - DNA, 15 bp, Homo sapiens
gctgcgagaaccagg

SEQ ID NO: 1571876 - DNA, 15 bp, Homo sapiens
ctgcgagaaccaggg

SEQ ID NO: 1571877 - DNA, 15 bp, Homo sapiens
tgcgagaaccaggga

SEQ ID NO: 1571878 - DNA, 15 bp, Homo sapiens
gcgagaaccagggat

SEQ ID NO: 1571879 - DNA, 15 bp, Homo sapiens
cgagaaccagggatg

SEQ ID NO: 1571880 - DNA, 15 bp, Homo sapiens
gagaaccagggatga

SEQ ID NO: 1571881 - DNA, 15 bp, Homo sapiens
agaaccagggatgag

SEQ ID NO: 1571882 - DNA, 15 bp, Homo sapiens
gaaccagggatgagc

SEQ ID NO: 1571883 - DNA, 15 bp, Homo sapiens
aaccagggatgagca

SEQ ID NO: 1571884 - DNA, 15 bp, Homo sapiens
accagggatgagcat

SEQ ID NO: 1571885 - DNA, 15 bp, Homo sapiens
ccagggatgagcatc

SEQ ID NO: 1571886 - DNA, 15 bp, Homo sapiens
cagggatgagcatct

SEQ ID NO: 1571887 - DNA, 15 bp, Homo sapiens
agggatgagcatcta

SEQ ID NO: 1571888 - DNA, 15 bp, Homo sapiens
gggatgagcatctaa

SEQ ID NO: 1571889 - DNA, 15 bp, Homo sapiens
ggatgagcatctaag

SEQ ID NO: 1571890 - DNA, 15 bp, Homo sapiens
gatgagcatctaagc

SEQ ID NO: 1571891 - DNA, 15 bp, Homo sapiens
atgagcatctaagct

SEQ ID NO: 1571892 - DNA, 15 bp, Homo sapiens
tgagcatctaagctg

SEQ ID NO: 1571893 - DNA, 15 bp, Homo sapiens
gagcatctaagctgt

SEQ ID NO: 1571894 - DNA, 15 bp, Homo sapiens
agcatctaagctgtc

SEQ ID NO: 1571895 - DNA, 15 bp, Homo sapiens
gcatctaagctgtct

SEQ ID NO: 1571896 - DNA, 15 bp, Homo sapiens
catctaagctgtcta

SEQ ID NO: 1571897 - DNA, 15 bp, Homo sapiens
atctaagctgtctat

SEQ ID NO: 1571898 - DNA, 15 bp, Homo sapiens
tctaagctgtctatg

SEQ ID NO: 1571899 - DNA, 15 bp, Homo sapiens
ctaagctgtctatgg

SEQ ID NO: 1571900 - DNA, 15 bp, Homo sapiens
taagctgtctatggg

SEQ ID NO: 1571901 - DNA, 15 bp, Homo sapiens
aagctgtctatgggt

SEQ ID NO: 1571902 - DNA, 15 bp, Homo sapiens
agctgtctatgggtg

SEQ ID NO: 1571903 - DNA, 15 bp, Homo sapiens
gctgtctatgggtgt

SEQ ID NO: 1571904 - DNA, 15 bp, Homo sapiens
ctgtctatgggtgtg

SEQ ID NO: 1571905 - DNA, 15 bp, Homo sapiens
tgtctatgggtgtgt

SEQ ID NO: 1571906 - DNA, 15 bp, Homo sapiens
gtctatgggtgtgtc

SEQ ID NO: 1571907 - DNA, 15 bp, Homo sapiens
tctatgggtgtgtcc

SEQ ID NO: 1571908 - DNA, 15 bp, Homo sapiens
ctatgggtgtgtccg

SEQ ID NO: 1571909 - DNA, 15 bp, Homo sapiens
tatgggtgtgtccgg

SEQ ID NO: 1571910 - DNA, 15 bp, Homo sapiens
atgggtgtgtccggc

SEQ ID NO: 1571911 - DNA, 15 bp, Homo sapiens
tgggtgtgtccggcc

SEQ ID NO: 1571912 - DNA, 15 bp, Homo sapiens
gggtgtgtccggcct

SEQ ID NO: 1571913 - DNA, 15 bp, Homo sapiens
ggtgtgtccggcctg

SEQ ID NO: 1571914 - DNA, 15 bp, Homo sapiens
gtgtgtccggcctgg

SEQ ID NO: 1571915 - DNA, 15 bp, Homo sapiens
tgtgtccggcctgga

SEQ ID NO: 1571916 - DNA, 15 bp, Homo sapiens
gtgtccggcctggag

SEQ ID NO: 1571917 - DNA, 15 bp, Homo sapiens
tgtccggcctggagt

SEQ ID NO: 1571918 - DNA, 15 bp, Homo sapiens
gtccggcctggagtc

SEQ ID NO: 1571919 - DNA, 15 bp, Homo sapiens
tccggcctggagtcc

SEQ ID NO: 1571920 - DNA, 15 bp, Homo sapiens
ccggcctggagtcct

SEQ ID NO: 1571921 - DNA, 15 bp, Homo sapiens
cggcctggagtcctc

SEQ ID NO: 1571922 - DNA, 15 bp, Homo sapiens
ggcctggagtcctct

SEQ ID NO: 1571923 - DNA, 15 bp, Homo sapiens
gcctggagtcctctg

SEQ ID NO: 1571924 - DNA, 15 bp, Homo sapiens
cctggagtcctctgg

SEQ ID NO: 1571925 - DNA, 15 bp, Homo sapiens
ctggagtcctctggg

SEQ ID NO: 1571926 - DNA, 15 bp, Homo sapiens
tggagtcctctggga

SEQ ID NO: 1571927 - DNA, 15 bp, Homo sapiens
ggagtcctctgggag

SEQ ID NO: 1571928 - DNA, 15 bp, Homo sapiens
gagtcctctgggaga

SEQ ID NO: 1571929 - DNA, 15 bp, Homo sapiens
agtcctctgggagag

SEQ ID NO: 1571930 - DNA, 15 bp, Homo sapiens
gtcctctgggagaga

SEQ ID NO: 1571931 - DNA, 15 bp, Homo sapiens
tcctctgggagagag

SEQ ID NO: 1571932 - DNA, 15 bp, Homo sapiens
cctctgggagagaga

SEQ ID NO: 1571933 - DNA, 15 bp, Homo sapiens
ctctgggagagagag

SEQ ID NO: 1571934 - DNA, 15 bp, Homo sapiens
tctgggagagagagc

SEQ ID NO: 1571935 - DNA, 15 bp, Homo sapiens
ctgggagagagagct

SEQ ID NO: 1571936 - DNA, 15 bp, Homo sapiens
tgggagagagagctg

SEQ ID NO: 1571937 - DNA, 15 bp, Homo sapiens
gggagagagagctgg

SEQ ID NO: 1571938 - DNA, 15 bp, Homo sapiens
ggagagagagctggg

SEQ ID NO: 1571939 - DNA, 15 bp, Homo sapiens
gagagagagctgggc

SEQ ID NO: 1571940 - DNA, 15 bp, Homo sapiens
agagagagctgggct

SEQ ID NO: 1571941 - DNA, 15 bp, Homo sapiens
gagagagctgggctg

SEQ ID NO: 1571942 - DNA, 15 bp, Homo sapiens
agagagctgggctgg

SEQ ID NO: 1571943 - DNA, 15 bp, Homo sapiens
gagagctgggctggt

SEQ ID NO: 1571944 - DNA, 15 bp, Homo sapiens
agagctgggctggta

SEQ ID NO: 1571945 - DNA, 15 bp, Homo sapiens
gagctgggctggtag

SEQ ID NO: 1571946 - DNA, 15 bp, Homo sapiens
agctgggctggtagg

SEQ ID NO: 1571947 - DNA, 15 bp, Homo sapiens
gctgggctggtaggg

SEQ ID NO: 1571948 - DNA, 15 bp, Homo sapiens
ctgggctggtagggg

SEQ ID NO: 1571949 - DNA, 15 bp, Homo sapiens
tgggctggtaggggc

SEQ ID NO: 1571950 - DNA, 15 bp, Homo sapiens
gggctggtaggggca

SEQ ID NO: 1571951 - DNA, 15 bp, Homo sapiens
ggctggtaggggcag

SEQ ID NO: 1571952 - DNA, 15 bp, Homo sapiens
gctggtaggggcagt

SEQ ID NO: 1571953 - DNA, 15 bp, Homo sapiens
ctggtaggggcagtg

SEQ ID NO: 1571954 - DNA, 15 bp, Homo sapiens
tggtaggggcagtgg

SEQ ID NO: 1571955 - DNA, 15 bp, Homo sapiens
ggtaggggcagtggc

SEQ ID NO: 1571956 - DNA, 15 bp, Homo sapiens
gtaggggcagtggca

SEQ ID NO: 1571957 - DNA, 15 bp, Homo sapiens
taggggcagtggcag

SEQ ID NO: 1571958 - DNA, 15 bp, Homo sapiens
aggggcagtggcaga

SEQ ID NO: 1571959 - DNA, 15 bp, Homo sapiens
ggggcagtggcagat

SEQ ID NO: 1571960 - DNA, 15 bp, Homo sapiens
gggcagtggcagatc

SEQ ID NO: 1571961 - DNA, 15 bp, Homo sapiens
ggcagtggcagatct

SEQ ID NO: 1571962 - DNA, 15 bp, Homo sapiens
gcagtggcagatctc

SEQ ID NO: 1571963 - DNA, 15 bp, Homo sapiens
cagtggcagatctct

SEQ ID NO: 1571964 - DNA, 15 bp, Homo sapiens
agtggcagatctctc

SEQ ID NO: 1571965 - DNA, 15 bp, Homo sapiens
gtggcagatctctct

SEQ ID NO: 1571966 - DNA, 15 bp, Homo sapiens
tggcagatctctctg

SEQ ID NO: 1571967 - DNA, 15 bp, Homo sapiens
ggcagatctctctgg

SEQ ID NO: 1571968 - DNA, 15 bp, Homo sapiens
gcagatctctctgga

SEQ ID NO: 1571969 - DNA, 15 bp, Homo sapiens
cagatctctctggag

SEQ ID NO: 1571970 - DNA, 15 bp, Homo sapiens
agatctctctggagg

SEQ ID NO: 1571971 - DNA, 15 bp, Homo sapiens
gatctctctggaggg

SEQ ID NO: 1571972 - DNA, 15 bp, Homo sapiens
atctctctggagggg

SEQ ID NO: 1571973 - DNA, 15 bp, Homo sapiens
tctctctggaggggc

SEQ ID NO: 1571974 - DNA, 15 bp, Homo sapiens
ctctctggaggggcc

SEQ ID NO: 1571975 - DNA, 15 bp, Homo sapiens
tctctggaggggccg

SEQ ID NO: 1571976 - DNA, 15 bp, Homo sapiens
ctctggaggggccgg

SEQ ID NO: 1571977 - DNA, 15 bp, Homo sapiens
tctggaggggccggg

SEQ ID NO: 1571978 - DNA, 15 bp, Homo sapiens
ctggaggggccgggc

SEQ ID NO: 1571979 - DNA, 15 bp, Homo sapiens
tggaggggccgggct

SEQ ID NO: 1571980 - DNA, 15 bp, Homo sapiens
ggaggggccgggctg

SEQ ID NO: 1571981 - DNA, 15 bp, Homo sapiens
gaggggccgggctgc

SEQ ID NO: 1571982 - DNA, 15 bp, Homo sapiens
aggggccgggctgca

SEQ ID NO: 1571983 - DNA, 15 bp, Homo sapiens
ggggccgggctgcaa

SEQ ID NO: 1571984 - DNA, 15 bp, Homo sapiens
gggccgggctgcaag

SEQ ID NO: 1571985 - DNA, 15 bp, Homo sapiens
ggccgggctgcaagt

SEQ ID NO: 1571986 - DNA, 15 bp, Homo sapiens
gccgggctgcaagtc

SEQ ID NO: 1571987 - DNA, 15 bp, Homo sapiens
ccgggctgcaagtcc

SEQ ID NO: 1571988 - DNA, 15 bp, Homo sapiens
cgggctgcaagtcct

SEQ ID NO: 1571989 - DNA, 15 bp, Homo sapiens
gggctgcaagtcctt

SEQ ID NO: 1571990 - DNA, 15 bp, Homo sapiens
ggctgcaagtcctta

SEQ ID NO: 1571991 - DNA, 15 bp, Homo sapiens
gctgcaagtccttaa

SEQ ID NO: 1571992 - DNA, 15 bp, Homo sapiens
ctgcaagtccttaag

SEQ ID NO: 1571993 - DNA, 15 bp, Homo sapiens
tgcaagtccttaagc

SEQ ID NO: 1571994 - DNA, 15 bp, Homo sapiens
gcaagtccttaagcc

SEQ ID NO: 1571995 - DNA, 15 bp, Homo sapiens
caagtccttaagccc

SEQ ID NO: 1571996 - DNA, 15 bp, Homo sapiens
aagtccttaagccct

SEQ ID NO: 1571997 - DNA, 15 bp, Homo sapiens
agtccttaagccctg

SEQ ID NO: 1571998 - DNA, 15 bp, Homo sapiens
gtccttaagccctgc

SEQ ID NO: 1571999 - DNA, 15 bp, Homo sapiens
tccttaagccctgcc

SEQ ID NO: 1572000 - DNA, 15 bp, Homo sapiens
ccttaagccctgcct

SEQ ID NO: 1572001 - DNA, 15 bp, Homo sapiens
cttaagccctgcctc

SEQ ID NO: 1572002 - DNA, 15 bp, Homo sapiens
ttaagccctgcctcc

SEQ ID NO: 1572003 - DNA, 15 bp, Homo sapiens
taagccctgcctccc

SEQ ID NO: 1572004 - DNA, 15 bp, Homo sapiens
aagccctgcctcccc

SEQ ID NO: 1572005 - DNA, 15 bp, Homo sapiens
agccctgcctcccct

SEQ ID NO: 1572006 - DNA, 15 bp, Homo sapiens
gccctgcctcccctc

SEQ ID NO: 1572007 - DNA, 15 bp, Homo sapiens
ccctgcctcccctcc

SEQ ID NO: 1572008 - DNA, 15 bp, Homo sapiens
cctgcctcccctccc

SEQ ID NO: 1572009 - DNA, 15 bp, Homo sapiens
ctgcctcccctccca

SEQ ID NO: 1572010 - DNA, 15 bp, Homo sapiens
tgcctcccctcccac

SEQ ID NO: 1572011 - DNA, 15 bp, Homo sapiens
gcctcccctcccacc

SEQ ID NO: 1572012 - DNA, 15 bp, Homo sapiens
cctcccctcccacct

SEQ ID NO: 1572013 - DNA, 15 bp, Homo sapiens
ctcccctcccacctc

SEQ ID NO: 1572014 - DNA, 15 bp, Homo sapiens
tcccctcccacctcc

SEQ ID NO: 1572015 - DNA, 15 bp, Homo sapiens
cccctcccacctccc

SEQ ID NO: 1572016 - DNA, 15 bp, Homo sapiens
ccctcccacctcccc

SEQ ID NO: 1572017 - DNA, 15 bp, Homo sapiens
cctcccacctccccg

SEQ ID NO: 1572018 - DNA, 15 bp, Homo sapiens
ctcccacctccccgc

SEQ ID NO: 1572019 - DNA, 15 bp, Homo sapiens
tcccacctccccgct

SEQ ID NO: 1572020 - DNA, 15 bp, Homo sapiens
cccacctccccgctg

SEQ ID NO: 1572021 - DNA, 15 bp, Homo sapiens
ccacctccccgctgt

SEQ ID NO: 1572022 - DNA, 15 bp, Homo sapiens
cacctccccgctgtc

SEQ ID NO: 1572023 - DNA, 15 bp, Homo sapiens
acctccccgctgtct

SEQ ID NO: 1572024 - DNA, 15 bp, Homo sapiens
cctccccgctgtctt

SEQ ID NO: 1572025 - DNA, 15 bp, Homo sapiens
ctccccgctgtcttc

SEQ ID NO: 1572026 - DNA, 15 bp, Homo sapiens
tccccgctgtcttca

SEQ ID NO: 1572027 - DNA, 15 bp, Homo sapiens
ccccgctgtcttcaa

SEQ ID NO: 1572028 - DNA, 15 bp, Homo sapiens
cccgctgtcttcaac

SEQ ID NO: 1572029 - DNA, 15 bp, Homo sapiens
ccgctgtcttcaacc

SEQ ID NO: 1572030 - DNA, 15 bp, Homo sapiens
cgctgtcttcaacca

SEQ ID NO: 1572031 - DNA, 15 bp, Homo sapiens
gctgtcttcaaccac

SEQ ID NO: 1572032 - DNA, 15 bp, Homo sapiens
ctgtcttcaaccacc

SEQ ID NO: 1572033 - DNA, 15 bp, Homo sapiens
tgtcttcaaccacca

SEQ ID NO: 1572034 - DNA, 15 bp, Homo sapiens
gtcttcaaccaccag

SEQ ID NO: 1572035 - DNA, 15 bp, Homo sapiens
tcttcaaccaccagc

SEQ ID NO: 1572036 - DNA, 15 bp, Homo sapiens
cttcaaccaccagca

SEQ ID NO: 1572037 - DNA, 15 bp, Homo sapiens
ttcaaccaccagcac

SEQ ID NO: 1572038 - DNA, 15 bp, Homo sapiens
tcaaccaccagcacc

SEQ ID NO: 1572039 - DNA, 15 bp, Homo sapiens
caaccaccagcacca

SEQ ID NO: 1572040 - DNA, 15 bp, Homo sapiens
aaccaccagcaccag

SEQ ID NO: 1572041 - DNA, 15 bp, Homo sapiens
accaccagcaccagc

SEQ ID NO: 1572042 - DNA, 15 bp, Homo sapiens
ccaccagcaccagcc

SEQ ID NO: 1572043 - DNA, 15 bp, Homo sapiens
caccagcaccagccc

SEQ ID NO: 1572044 - DNA, 15 bp, Homo sapiens
accagcaccagccct

SEQ ID NO: 1572045 - DNA, 15 bp, Homo sapiens
ccagcaccagccctt

SEQ ID NO: 1572046 - DNA, 15 bp, Homo sapiens
cagcaccagcccttc

SEQ ID NO: 1572047 - DNA, 15 bp, Homo sapiens
agcaccagcccttca

SEQ ID NO: 1572048 - DNA, 15 bp, Homo sapiens
gcaccagcccttcag

SEQ ID NO: 1572049 - DNA, 15 bp, Homo sapiens
caccagcccttcagg

SEQ ID NO: 1572050 - DNA, 15 bp, Homo sapiens
accagcccttcaggt

SEQ ID NO: 1572051 - DNA, 15 bp, Homo sapiens
ccagcccttcaggtc

SEQ ID NO: 1572052 - DNA, 15 bp, Homo sapiens
cagcccttcaggtct

SEQ ID NO: 1572053 - DNA, 15 bp, Homo sapiens
agcccttcaggtctt

SEQ ID NO: 1572054 - DNA, 15 bp, Homo sapiens
gcccttcaggtctta

SEQ ID NO: 1572055 - DNA, 15 bp, Homo sapiens
tacaggcgtgagctt

SEQ ID NO: 1572056 - DNA, 15 bp, Homo sapiens
acaggcgtgagcttc

SEQ ID NO: 1572057 - DNA, 15 bp, Homo sapiens
caggcgtgagcttct

SEQ ID NO: 1572058 - DNA, 15 bp, Homo sapiens
aggcgtgagcttctg

SEQ ID NO: 1572059 - DNA, 15 bp, Homo sapiens
ggcgtgagcttctgt

SEQ ID NO: 1572060 - DNA, 15 bp, Homo sapiens
gcgtgagcttctgtc

SEQ ID NO: 1572061 - DNA, 15 bp, Homo sapiens
cgtgagcttctgtct

SEQ ID NO: 1572062 - DNA, 15 bp, Homo sapiens
gtgagcttctgtctt

SEQ ID NO: 1572063 - DNA, 15 bp, Homo sapiens
tgagcttctgtcttt

SEQ ID NO: 1572064 - DNA, 15 bp, Homo sapiens
gagcttctgtctttt

SEQ ID NO: 1572065 - DNA, 15 bp, Homo sapiens
agcttctgtcttttc

SEQ ID NO: 1572066 - DNA, 15 bp, Homo sapiens
gcttctgtcttttct

SEQ ID NO: 1572067 - DNA, 15 bp, Homo sapiens
cttctgtcttttctt

SEQ ID NO: 1572068 - DNA, 15 bp, Homo sapiens
ttctgtcttttcttt

SEQ ID NO: 1572069 - DNA, 15 bp, Homo sapiens
tctgtcttttctttg

SEQ ID NO: 1572070 - DNA, 15 bp, Homo sapiens
ctgtcttttctttga

SEQ ID NO: 1572071 - DNA, 15 bp, Homo sapiens
tgtcttttctttgac

SEQ ID NO: 1572072 - DNA, 15 bp, Homo sapiens
gtcttttctttgacc

SEQ ID NO: 1572073 - DNA, 15 bp, Homo sapiens
tcttttctttgaccc

SEQ ID NO: 1572074 - DNA, 15 bp, Homo sapiens
cttttctttgaccct

SEQ ID NO: 1572075 - DNA, 15 bp, Homo sapiens
ttttctttgaccctt

SEQ ID NO: 1572076 - DNA, 15 bp, Homo sapiens
tttctttgacccttc

SEQ ID NO: 1572077 - DNA, 15 bp, Homo sapiens
ttctttgacccttcc

SEQ ID NO: 1572078 - DNA, 15 bp, Homo sapiens
tctttgacccttcct

SEQ ID NO: 1572079 - DNA, 15 bp, Homo sapiens
ctttgacccttcctt

SEQ ID NO: 1572080 - DNA, 15 bp, Homo sapiens
tttgacccttccttt

SEQ ID NO: 1572081 - DNA, 15 bp, Homo sapiens
ttgacccttcctttc

SEQ ID NO: 1572082 - DNA, 15 bp, Homo sapiens
tgacccttcctttcc

SEQ ID NO: 1572083 - DNA, 15 bp, Homo sapiens
gacccttcctttcca

SEQ ID NO: 1572084 - DNA, 15 bp, Homo sapiens
acccttcctttccag

SEQ ID NO: 1572085 - DNA, 15 bp, Homo sapiens
cccttcctttccagt

SEQ ID NO: 1572086 - DNA, 15 bp, Homo sapiens
ccttcctttccagtt

SEQ ID NO: 1572087 - DNA, 15 bp, Homo sapiens
cttcctttccagttt

SEQ ID NO: 1572088 - DNA, 15 bp, Homo sapiens
ttcctttccagtttt

SEQ ID NO: 1572089 - DNA, 15 bp, Homo sapiens
tcctttccagttttt

SEQ ID NO: 1572090 - DNA, 15 bp, Homo sapiens
cctttccagtttttg

SEQ ID NO: 1572091 - DNA, 15 bp, Homo sapiens
ctttccagtttttga

SEQ ID NO: 1572092 - DNA, 15 bp, Homo sapiens
tttccagtttttgaa

SEQ ID NO: 1572093 - DNA, 15 bp, Homo sapiens
ttccagtttttgaag

SEQ ID NO: 1572094 - DNA, 15 bp, Homo sapiens
tccagtttttgaaga

SEQ ID NO: 1572095 - DNA, 15 bp, Homo sapiens
ccagtttttgaagat

SEQ ID NO: 1572096 - DNA, 15 bp, Homo sapiens
cagtttttgaagata

SEQ ID NO: 1572097 - DNA, 15 bp, Homo sapiens
agtttttgaagataa

SEQ ID NO: 1572098 - DNA, 15 bp, Homo sapiens
gtttttgaagataaa

SEQ ID NO: 1572099 - DNA, 15 bp, Homo sapiens
tttttgaagataaag

SEQ ID NO: 1572100 - DNA, 15 bp, Homo sapiens
ttttgaagataaagc

SEQ ID NO: 1572101 - DNA, 15 bp, Homo sapiens
tttgaagataaagct

SEQ ID NO: 1572102 - DNA, 15 bp, Homo sapiens
ttgaagataaagctg

SEQ ID NO: 1572103 - DNA, 15 bp, Homo sapiens
tgaagataaagctgg

SEQ ID NO: 1572104 - DNA, 15 bp, Homo sapiens
gaagataaagctgga

SEQ ID NO: 1572105 - DNA, 15 bp, Homo sapiens
aagataaagctggaa

SEQ ID NO: 1572106 - DNA, 15 bp, Homo sapiens
agataaagctggaaa

SEQ ID NO: 1572107 - DNA, 15 bp, Homo sapiens
gataaagctggaaat

SEQ ID NO: 1572108 - DNA, 15 bp, Homo sapiens
ataaagctggaaata

SEQ ID NO: 1572109 - DNA, 15 bp, Homo sapiens
taaagctggaaataa

SEQ ID NO: 1572110 - DNA, 15 bp, Homo sapiens
aaagctggaaataat

SEQ ID NO: 1572111 - DNA, 15 bp, Homo sapiens
aagctggaaataatc

SEQ ID NO: 1572112 - DNA, 15 bp, Homo sapiens
agctggaaataatct

SEQ ID NO: 1572113 - DNA, 15 bp, Homo sapiens
gctggaaataatctt

SEQ ID NO: 1572114 - DNA, 15 bp, Homo sapiens
ctggaaataatcttc

SEQ ID NO: 1572115 - DNA, 15 bp, Homo sapiens
tggaaataatcttct

SEQ ID NO: 1572116 - DNA, 15 bp, Homo sapiens
ggaaataatcttctc

SEQ ID NO: 1572117 - DNA, 15 bp, Homo sapiens
gaaataatcttctct

SEQ ID NO: 1572118 - DNA, 15 bp, Homo sapiens
aaataatcttctctg

SEQ ID NO: 1572119 - DNA, 15 bp, Homo sapiens
aataatcttctctga

SEQ ID NO: 1572120 - DNA, 15 bp, Homo sapiens
ataatcttctctgaa

SEQ ID NO: 1572121 - DNA, 15 bp, Homo sapiens
taatcttctctgaag

SEQ ID NO: 1572122 - DNA, 15 bp, Homo sapiens
aatcttctctgaaga

SEQ ID NO: 1572123 - DNA, 15 bp, Homo sapiens
atcttctctgaagat

SEQ ID NO: 1572124 - DNA, 15 bp, Homo sapiens
tcttctctgaagata

SEQ ID NO: 1572125 - DNA, 15 bp, Homo sapiens
cttctctgaagatac

SEQ ID NO: 1572126 - DNA, 15 bp, Homo sapiens
ttctctgaagatact

SEQ ID NO: 1572127 - DNA, 15 bp, Homo sapiens
tctctgaagatactt

SEQ ID NO: 1572128 - DNA, 15 bp, Homo sapiens
ctctgaagatacttg

SEQ ID NO: 1572129 - DNA, 15 bp, Homo sapiens
tctgaagatacttga

SEQ ID NO: 1572130 - DNA, 15 bp, Homo sapiens
ctgaagatacttgat

SEQ ID NO: 1572131 - DNA, 15 bp, Homo sapiens
tgaagatacttgata

SEQ ID NO: 1572132 - DNA, 15 bp, Homo sapiens
gaagatacttgataa

SEQ ID NO: 1572133 - DNA, 15 bp, Homo sapiens
aagatacttgataaa

SEQ ID NO: 1572134 - DNA, 15 bp, Homo sapiens
agatacttgataaaa

SEQ ID NO: 1572135 - DNA, 15 bp, Homo sapiens
gatacttgataaaaa

SEQ ID NO: 1572136 - DNA, 15 bp, Homo sapiens
atacttgataaaaat

SEQ ID NO: 1572137 - DNA, 15 bp, Homo sapiens
tacttgataaaaatt

SEQ ID NO: 1572138 - DNA, 15 bp, Homo sapiens
acttgataaaaattc

SEQ ID NO: 1572139 - DNA, 15 bp, Homo sapiens
cttgataaaaattcc

SEQ ID NO: 1572140 - DNA, 15 bp, Homo sapiens
ttgataaaaattccc

SEQ ID NO: 1572141 - DNA, 15 bp, Homo sapiens
tgataaaaattccca

SEQ ID NO: 1572142 - DNA, 15 bp, Homo sapiens
gataaaaattcccaa

SEQ ID NO: 1572143 - DNA, 15 bp, Homo sapiens
ataaaaattcccaaa

SEQ ID NO: 1572144 - DNA, 15 bp, Homo sapiens
taaaaattcccaaaa

SEQ ID NO: 1572145 - DNA, 15 bp, Homo sapiens
aaaaattcccaaaaa

SEQ ID NO: 1572146 - DNA, 15 bp, Homo sapiens
aaaattcccaaaaaa

SEQ ID NO: 1572147 - DNA, 15 bp, Homo sapiens
aaattcccaaaaaaa

SEQ ID NO: 1572148 - DNA, 15 bp, Homo sapiens
aattcccaaaaaaac

SEQ ID NO: 1572149 - DNA, 15 bp, Homo sapiens
attcccaaaaaaaca

SEQ ID NO: 1572150 - DNA, 15 bp, Homo sapiens
ttcccaaaaaaacaa

SEQ ID NO: 1572151 - DNA, 15 bp, Homo sapiens
tcccaaaaaaacaaa

SEQ ID NO: 1572152 - DNA, 15 bp, Homo sapiens
cccaaaaaaacaaaa

SEQ ID NO: 1572153 - DNA, 15 bp, Homo sapiens
ccaaaaaaacaaaaa

SEQ ID NO: 1572154 - DNA, 15 bp, Homo sapiens
caaaaaaacaaaaac

SEQ ID NO: 1572155 - DNA, 15 bp, Homo sapiens
aaaaaacaaaaacac

SEQ ID NO: 1572156 - DNA, 15 bp, Homo sapiens
aaaaacaaaaacaca

SEQ ID NO: 1572157 - DNA, 15 bp, Homo sapiens
aaaacaaaaacacat

SEQ ID NO: 1572158 - DNA, 15 bp, Homo sapiens
aaacaaaaacacatg

SEQ ID NO: 1572159 - DNA, 15 bp, Homo sapiens
aacaaaaacacatgc

SEQ ID NO: 1572160 - DNA, 15 bp, Homo sapiens
acaaaaacacatgct

SEQ ID NO: 1572161 - DNA, 15 bp, Homo sapiens
caaaaacacatgctt

SEQ ID NO: 1572162 - DNA, 15 bp, Homo sapiens
aaaaacacatgcttc

SEQ ID NO: 1572163 - DNA, 15 bp, Homo sapiens
aaaacacatgcttct

SEQ ID NO: 1572164 - DNA, 15 bp, Homo sapiens
aaacacatgcttcta

SEQ ID NO: 1572165 - DNA, 15 bp, Homo sapiens
aacacatgcttctac

SEQ ID NO: 1572166 - DNA, 15 bp, Homo sapiens
acacatgcttctact

SEQ ID NO: 1572167 - DNA, 15 bp, Homo sapiens
cacatgcttctacta

SEQ ID NO: 1572168 - DNA, 15 bp, Homo sapiens
acatgcttctactac

SEQ ID NO: 1572169 - DNA, 15 bp, Homo sapiens
catgcttctactacc

SEQ ID NO: 1572170 - DNA, 15 bp, Homo sapiens
atgcttctactaccc

SEQ ID NO: 1572171 - DNA, 15 bp, Homo sapiens
tgcttctactaccca

SEQ ID NO: 1572172 - DNA, 15 bp, Homo sapiens
gcttctactacccat

SEQ ID NO: 1572173 - DNA, 15 bp, Homo sapiens
cttctactacccatg

SEQ ID NO: 1572174 - DNA, 15 bp, Homo sapiens
ttctactacccatgc

SEQ ID NO: 1572175 - DNA, 15 bp, Homo sapiens
tctactacccatgct

SEQ ID NO: 1572176 - DNA, 15 bp, Homo sapiens
ctactacccatgctt

SEQ ID NO: 1572177 - DNA, 15 bp, Homo sapiens
tactacccatgcttc

SEQ ID NO: 1572178 - DNA, 15 bp, Homo sapiens
actacccatgcttcc

SEQ ID NO: 1572179 - DNA, 15 bp, Homo sapiens
ctacccatgcttcca

SEQ ID NO: 1572180 - DNA, 15 bp, Homo sapiens
tacccatgcttccac

SEQ ID NO: 1572181 - DNA, 15 bp, Homo sapiens
acccatgcttccact

SEQ ID NO: 1572182 - DNA, 15 bp, Homo sapiens
cccatgcttccactt

SEQ ID NO: 1572183 - DNA, 15 bp, Homo sapiens
ccatgcttccacttc

SEQ ID NO: 1572184 - DNA, 15 bp, Homo sapiens
catgcttccacttca

SEQ ID NO: 1572185 - DNA, 15 bp, Homo sapiens
atgcttccacttcat

SEQ ID NO: 1572186 - DNA, 15 bp, Homo sapiens
tgcttccacttcatt

SEQ ID NO: 1572187 - DNA, 15 bp, Homo sapiens
gcttccacttcatta

SEQ ID NO: 1572188 - DNA, 15 bp, Homo sapiens
cttccacttcattaa

SEQ ID NO: 1572189 - DNA, 15 bp, Homo sapiens
ttccacttcattaat

SEQ ID NO: 1572190 - DNA, 15 bp, Homo sapiens
tccacttcattaata

SEQ ID NO: 1572191 - DNA, 15 bp, Homo sapiens
ccacttcattaataa

SEQ ID NO: 1572192 - DNA, 15 bp, Homo sapiens
cacttcattaataaa

SEQ ID NO: 1572193 - DNA, 15 bp, Homo sapiens
acttcattaataaaa

SEQ ID NO: 1572194 - DNA, 15 bp, Homo sapiens
cttcattaataaaaa

SEQ ID NO: 1572195 - DNA, 15 bp, Homo sapiens
ttcattaataaaaat

SEQ ID NO: 1572196 - DNA, 15 bp, Homo sapiens
tcattaataaaaatt

SEQ ID NO: 1572197 - DNA, 15 bp, Homo sapiens
cattaataaaaattt

SEQ ID NO: 1572198 - DNA, 15 bp, Homo sapiens
attaataaaaattta

SEQ ID NO: 1572199 - DNA, 15 bp, Homo sapiens
taataaaaatttact

SEQ ID NO: 1572200 - DNA, 15 bp, Homo sapiens
aataaaaatttactg

SEQ ID NO: 1572201 - DNA, 15 bp, Homo sapiens
ataaaaatttactgc

SEQ ID NO: 1572202 - DNA, 15 bp, Homo sapiens
taaaaatttactgca

SEQ ID NO: 1572203 - DNA, 15 bp, Homo sapiens
aaaaatttactgcag

SEQ ID NO: 1572204 - DNA, 15 bp, Homo sapiens
aaaatttactgcagt

SEQ ID NO: 1572205 - DNA, 15 bp, Homo sapiens
aaatttactgcagtt

SEQ ID NO: 1572206 - DNA, 15 bp, Homo sapiens
aatttactgcagttt

SEQ ID NO: 1572207 - DNA, 15 bp, Homo sapiens
atttactgcagtttg

SEQ ID NO: 1572208 - DNA, 15 bp, Homo sapiens
tttactgcagtttgg

SEQ ID NO: 1572209 - DNA, 15 bp, Homo sapiens
ttactgcagtttggc

SEQ ID NO: 1572210 - DNA, 15 bp, Homo sapiens
tactgcagtttggca

SEQ ID NO: 1572211 - DNA, 15 bp, Homo sapiens
actgcagtttggcac

SEQ ID NO: 1572212 - DNA, 15 bp, Homo sapiens
ctgcagtttggcacc

SEQ ID NO: 1572213 - DNA, 15 bp, Homo sapiens
tgcagtttggcacct

SEQ ID NO: 1572214 - DNA, 15 bp, Homo sapiens
gcagtttggcacctg

SEQ ID NO: 1572215 - DNA, 15 bp, Homo sapiens
cagtttggcacctgg

SEQ ID NO: 1572216 - DNA, 15 bp, Homo sapiens
agtttggcacctggg

SEQ ID NO: 1572217 - DNA, 15 bp, Homo sapiens
gtttggcacctgggt

SEQ ID NO: 1572218 - DNA, 15 bp, Homo sapiens
tttggcacctgggtc

SEQ ID NO: 1572219 - DNA, 15 bp, Homo sapiens
ttggcacctgggtct

SEQ ID NO: 1572220 - DNA, 15 bp, Homo sapiens
tggcacctgggtcta

SEQ ID NO: 1572221 - DNA, 15 bp, Homo sapiens
ggcacctgggtctag

SEQ ID NO: 1572222 - DNA, 15 bp, Homo sapiens
gcacctgggtctagt

SEQ ID NO: 1572223 - DNA, 15 bp, Homo sapiens
cacctgggtctagtt

SEQ ID NO: 1572224 - DNA, 15 bp, Homo sapiens
acctgggtctagttc

SEQ ID NO: 1572225 - DNA, 15 bp, Homo sapiens
cctgggtctagttca

SEQ ID NO: 1572226 - DNA, 15 bp, Homo sapiens
ctgggtctagttcag

SEQ ID NO: 1572227 - DNA, 15 bp, Homo sapiens
tgggtctagttcagc

SEQ ID NO: 1572228 - DNA, 15 bp, Homo sapiens
gggtctagttcagct

SEQ ID NO: 1572229 - DNA, 15 bp, Homo sapiens
ggtctagttcagctg

SEQ ID NO: 1572230 - DNA, 15 bp, Homo sapiens
gtctagttcagctgg

SEQ ID NO: 1572231 - DNA, 15 bp, Homo sapiens
tctagttcagctggc

SEQ ID NO: 1572232 - DNA, 15 bp, Homo sapiens
ctagttcagctggcg

SEQ ID NO: 1572233 - DNA, 15 bp, Homo sapiens
tagttcagctggcgg

SEQ ID NO: 1572234 - DNA, 15 bp, Homo sapiens
agttcagctggcgga

SEQ ID NO: 1572235 - DNA, 15 bp, Homo sapiens
gttcagctggcggat

SEQ ID NO: 1572236 - DNA, 15 bp, Homo sapiens
ttcagctggcggatg

SEQ ID NO: 1572237 - DNA, 15 bp, Homo sapiens
tcagctggcggatga

SEQ ID NO: 1572238 - DNA, 15 bp, Homo sapiens
cagctggcggatgag

SEQ ID NO: 1572239 - DNA, 15 bp, Homo sapiens
agctggcggatgagc

SEQ ID NO: 1572240 - DNA, 15 bp, Homo sapiens
gctggcggatgagct

SEQ ID NO: 1572241 - DNA, 15 bp, Homo sapiens
ctggcggatgagctg

SEQ ID NO: 1572242 - DNA, 15 bp, Homo sapiens
tggcggatgagctga

SEQ ID NO: 1572243 - DNA, 15 bp, Homo sapiens
ggcggatgagctgac

SEQ ID NO: 1572244 - DNA, 15 bp, Homo sapiens
gcggatgagctgact

SEQ ID NO: 1572245 - DNA, 15 bp, Homo sapiens
cggatgagctgactg

SEQ ID NO: 1572246 - DNA, 15 bp, Homo sapiens
ggatgagctgactga

SEQ ID NO: 1572247 - DNA, 15 bp, Homo sapiens
gatgagctgactgat

SEQ ID NO: 1572248 - DNA, 15 bp, Homo sapiens
atgagctgactgatg

SEQ ID NO: 1572249 - DNA, 15 bp, Homo sapiens
tgagctgactgatgc

SEQ ID NO: 1572250 - DNA, 15 bp, Homo sapiens
gagctgactgatgcg

SEQ ID NO: 1572251 - DNA, 15 bp, Homo sapiens
agctgactgatgcgt

SEQ ID NO: 1572252 - DNA, 15 bp, Homo sapiens
gctgactgatgcgtt

SEQ ID NO: 1572253 - DNA, 15 bp, Homo sapiens
ctgactgatgcgttc

SEQ ID NO: 1572254 - DNA, 15 bp, Homo sapiens
tgactgatgcgttca

SEQ ID NO: 1572255 - DNA, 15 bp, Homo sapiens
gactgatgcgttcac

SEQ ID NO: 1572256 - DNA, 15 bp, Homo sapiens
actgatgcgttcacc

SEQ ID NO: 1572257 - DNA, 15 bp, Homo sapiens
ctgatgcgttcaccc

SEQ ID NO: 1572258 - DNA, 15 bp, Homo sapiens
tgatgcgttcaccct

SEQ ID NO: 1572259 - DNA, 15 bp, Homo sapiens
gatgcgttcaccctg

SEQ ID NO: 1572260 - DNA, 15 bp, Homo sapiens
atgcgttcaccctga

SEQ ID NO: 1572261 - DNA, 15 bp, Homo sapiens
tgcgttcaccctgat

SEQ ID NO: 1572262 - DNA, 15 bp, Homo sapiens
gcgttcaccctgata

SEQ ID NO: 1572263 - DNA, 15 bp, Homo sapiens
cgttcaccctgatag

SEQ ID NO: 1572264 - DNA, 15 bp, Homo sapiens
gttcaccctgatagc

SEQ ID NO: 1572265 - DNA, 15 bp, Homo sapiens
ttcaccctgatagcc

SEQ ID NO: 1572266 - DNA, 15 bp, Homo sapiens
tcaccctgatagcca

SEQ ID NO: 1572267 - DNA, 15 bp, Homo sapiens
caccctgatagccag

SEQ ID NO: 1572268 - DNA, 15 bp, Homo sapiens
accctgatagccagg

SEQ ID NO: 1572269 - DNA, 15 bp, Homo sapiens
ccctgatagccaggt

SEQ ID NO: 1572270 - DNA, 15 bp, Homo sapiens
cctgatagccaggtg

SEQ ID NO: 1572271 - DNA, 15 bp, Homo sapiens
ctgatagccaggtgt

SEQ ID NO: 1572272 - DNA, 15 bp, Homo sapiens
tgatagccaggtgtg

SEQ ID NO: 1572273 - DNA, 15 bp, Homo sapiens
gatagccaggtgtgc

SEQ ID NO: 1572274 - DNA, 15 bp, Homo sapiens
atagccaggtgtgcc

SEQ ID NO: 1572275 - DNA, 15 bp, Homo sapiens
tagccaggtgtgccc

SEQ ID NO: 1572276 - DNA, 15 bp, Homo sapiens
agccaggtgtgccca

SEQ ID NO: 1572277 - DNA, 15 bp, Homo sapiens
gccaggtgtgcccat

SEQ ID NO: 1572278 - DNA, 15 bp, Homo sapiens
ccaggtgtgcccatc

SEQ ID NO: 1572279 - DNA, 15 bp, Homo sapiens
caggtgtgcccatct

SEQ ID NO: 1572280 - DNA, 15 bp, Homo sapiens
aggtgtgcccatctc

SEQ ID NO: 1572281 - DNA, 15 bp, Homo sapiens
ggtgtgcccatctcc

SEQ ID NO: 1572282 - DNA, 15 bp, Homo sapiens
gtgtgcccatctcct

SEQ ID NO: 1572283 - DNA, 15 bp, Homo sapiens
tgtgcccatctcctt

SEQ ID NO: 1572284 - DNA, 15 bp, Homo sapiens
gtgcccatctccttg

SEQ ID NO: 1572285 - DNA, 15 bp, Homo sapiens
tgcccatctccttga

SEQ ID NO: 1572286 - DNA, 15 bp, Homo sapiens
gcccatctccttgag

SEQ ID NO: 1572287 - DNA, 15 bp, Homo sapiens
cccatctccttgagg

SEQ ID NO: 1572288 - DNA, 15 bp, Homo sapiens
ccatctccttgagga

SEQ ID NO: 1572289 - DNA, 15 bp, Homo sapiens
catctccttgaggaa

SEQ ID NO: 1572290 - DNA, 15 bp, Homo sapiens
atctccttgaggaag

SEQ ID NO: 1572291 - DNA, 15 bp, Homo sapiens
tctccttgaggaagc

SEQ ID NO: 1572292 - DNA, 15 bp, Homo sapiens
ctccttgaggaagcc

SEQ ID NO: 1572293 - DNA, 15 bp, Homo sapiens
tccttgaggaagccc

SEQ ID NO: 1572294 - DNA, 15 bp, Homo sapiens
ccttgaggaagccca

SEQ ID NO: 1572295 - DNA, 15 bp, Homo sapiens
cttgaggaagcccac

SEQ ID NO: 1572296 - DNA, 15 bp, Homo sapiens
ttgaggaagcccact

SEQ ID NO: 1572297 - DNA, 15 bp, Homo sapiens
tgaggaagcccactg

SEQ ID NO: 1572298 - DNA, 15 bp, Homo sapiens
gaggaagcccactgt

SEQ ID NO: 1572299 - DNA, 15 bp, Homo sapiens
aggaagcccactgta

SEQ ID NO: 1572300 - DNA, 15 bp, Homo sapiens
ggaagcccactgtat

SEQ ID NO: 1572301 - DNA, 15 bp, Homo sapiens
gaagcccactgtatt

SEQ ID NO: 1572302 - DNA, 15 bp, Homo sapiens
aagcccactgtattt

SEQ ID NO: 1572303 - DNA, 15 bp, Homo sapiens
agcccactgtatttt

SEQ ID NO: 1572304 - DNA, 15 bp, Homo sapiens
gcccactgtattttt

SEQ ID NO: 1572305 - DNA, 15 bp, Homo sapiens
cccactgtatttttg

SEQ ID NO: 1572306 - DNA, 15 bp, Homo sapiens
ccactgtatttttgg

SEQ ID NO: 1572307 - DNA, 15 bp, Homo sapiens
gaggcacgatttgcc

SEQ ID NO: 1572308 - DNA, 15 bp, Homo sapiens
aggcacgatttgcct

SEQ ID NO: 1572309 - DNA, 15 bp, Homo sapiens
ggcacgatttgccta

SEQ ID NO: 1572310 - DNA, 15 bp, Homo sapiens
gcacgatttgcctat

SEQ ID NO: 1572311 - DNA, 15 bp, Homo sapiens
cacgatttgcctatt

SEQ ID NO: 1572312 - DNA, 15 bp, Homo sapiens
acgatttgcctattt

SEQ ID NO: 1572313 - DNA, 15 bp, Homo sapiens
cgatttgcctatttc

SEQ ID NO: 1572314 - DNA, 15 bp, Homo sapiens
gatttgcctatttcc

SEQ ID NO: 1572315 - DNA, 15 bp, Homo sapiens
atttgcctatttccc

SEQ ID NO: 1572316 - DNA, 15 bp, Homo sapiens
tttgcctatttccca

SEQ ID NO: 1572317 - DNA, 15 bp, Homo sapiens
ttgcctatttcccag

SEQ ID NO: 1572318 - DNA, 15 bp, Homo sapiens
tgcctatttcccagc

SEQ ID NO: 1572319 - DNA, 15 bp, Homo sapiens
gcctatttcccagcg

SEQ ID NO: 1572320 - DNA, 15 bp, Homo sapiens
cctatttcccagcgt

SEQ ID NO: 1572321 - DNA, 15 bp, Homo sapiens
ctatttcccagcgtc

SEQ ID NO: 1572322 - DNA, 15 bp, Homo sapiens
tatttcccagcgtcc

SEQ ID NO: 1572323 - DNA, 15 bp, Homo sapiens
atttcccagcgtcca

SEQ ID NO: 1572324 - DNA, 15 bp, Homo sapiens
tttcccagcgtccag

SEQ ID NO: 1572325 - DNA, 15 bp, Homo sapiens
ttcccagcgtccagt

SEQ ID NO: 1572326 - DNA, 15 bp, Homo sapiens
tcccagcgtccagtg

SEQ ID NO: 1572327 - DNA, 15 bp, Homo sapiens
cccagcgtccagtgt

SEQ ID NO: 1572328 - DNA, 15 bp, Homo sapiens
ccagcgtccagtgtg

SEQ ID NO: 1572329 - DNA, 15 bp, Homo sapiens
cagcgtccagtgtgg

SEQ ID NO: 1572330 - DNA, 15 bp, Homo sapiens
agcgtccagtgtggg

SEQ ID NO: 1572331 - DNA, 15 bp, Homo sapiens
gcgtccagtgtggga

SEQ ID NO: 1572332 - DNA, 15 bp, Homo sapiens
cgtccagtgtgggag

SEQ ID NO: 1572333 - DNA, 15 bp, Homo sapiens
gtccagtgtgggaga

SEQ ID NO: 1572334 - DNA, 15 bp, Homo sapiens
tccagtgtgggagat

SEQ ID NO: 1572335 - DNA, 15 bp, Homo sapiens
ccagtgtgggagata

SEQ ID NO: 1572336 - DNA, 15 bp, Homo sapiens
cagtgtgggagatac

SEQ ID NO: 1572337 - DNA, 15 bp, Homo sapiens
agtgtgggagatact

SEQ ID NO: 1572338 - DNA, 15 bp, Homo sapiens
gtgtgggagatacta

SEQ ID NO: 1572339 - DNA, 15 bp, Homo sapiens
tgtgggagatactac

SEQ ID NO: 1572340 - DNA, 15 bp, Homo sapiens
gtgggagatactacg

SEQ ID NO: 1572341 - DNA, 15 bp, Homo sapiens
tgggagatactacgg

SEQ ID NO: 1572342 - DNA, 15 bp, Homo sapiens
gggagatactacggc

SEQ ID NO: 1572343 - DNA, 15 bp, Homo sapiens
ggagatactacggct

SEQ ID NO: 1572344 - DNA, 15 bp, Homo sapiens
gagatactacggctg

SEQ ID NO: 1572345 - DNA, 15 bp, Homo sapiens
agatactacggctgt

SEQ ID NO: 1572346 - DNA, 15 bp, Homo sapiens
gatactacggctgtg

SEQ ID NO: 1572347 - DNA, 15 bp, Homo sapiens
atactacggctgtgt

SEQ ID NO: 1572348 - DNA, 15 bp, Homo sapiens
tactacggctgtgtc

SEQ ID NO: 1572349 - DNA, 15 bp, Homo sapiens
actacggctgtgtcc

SEQ ID NO: 1572350 - DNA, 15 bp, Homo sapiens
ctacggctgtgtccg

SEQ ID NO: 1572351 - DNA, 15 bp, Homo sapiens
tacggctgtgtccgt

SEQ ID NO: 1572352 - DNA, 15 bp, Homo sapiens
acggctgtgtccgta

SEQ ID NO: 1572353 - DNA, 15 bp, Homo sapiens
cggctgtgtccgtac

SEQ ID NO: 1572354 - DNA, 15 bp, Homo sapiens
ggctgtgtccgtaca

SEQ ID NO: 1572355 - DNA, 15 bp, Homo sapiens
gctgtgtccgtacag

SEQ ID NO: 1572356 - DNA, 15 bp, Homo sapiens
ctgtgtccgtacaga

SEQ ID NO: 1572357 - DNA, 15 bp, Homo sapiens
tgtgtccgtacagac

SEQ ID NO: 1572358 - DNA, 15 bp, Homo sapiens
gtgtccgtacagacc

SEQ ID NO: 1572359 - DNA, 15 bp, Homo sapiens
tgtccgtacagacca

SEQ ID NO: 1572360 - DNA, 15 bp, Homo sapiens
gtccgtacagaccac

SEQ ID NO: 1572361 - DNA, 15 bp, Homo sapiens
tccgtacagaccaca

SEQ ID NO: 1572362 - DNA, 15 bp, Homo sapiens
ccgtacagaccacag

SEQ ID NO: 1572363 - DNA, 15 bp, Homo sapiens
cgtacagaccacaga

SEQ ID NO: 1572364 - DNA, 15 bp, Homo sapiens
gtacagaccacagac

SEQ ID NO: 1572365 - DNA, 15 bp, Homo sapiens
tacagaccacagacc

SEQ ID NO: 1572366 - DNA, 15 bp, Homo sapiens
acagaccacagacca

SEQ ID NO: 1572367 - DNA, 15 bp, Homo sapiens
cagaccacagaccag

SEQ ID NO: 1572368 - DNA, 15 bp, Homo sapiens
agaccacagaccaga

SEQ ID NO: 1572369 - DNA, 15 bp, Homo sapiens
gaccacagaccagag

SEQ ID NO: 1572370 - DNA, 15 bp, Homo sapiens
accacagaccagagc

SEQ ID NO: 1572371 - DNA, 15 bp, Homo sapiens
ccacagaccagagct

SEQ ID NO: 1572372 - DNA, 15 bp, Homo sapiens
cacagaccagagctt

SEQ ID NO: 1572373 - DNA, 15 bp, Homo sapiens
acagaccagagcttg

SEQ ID NO: 1572374 - DNA, 15 bp, Homo sapiens
cagaccagagcttgc

SEQ ID NO: 1572375 - DNA, 15 bp, Homo sapiens
agaccagagcttgca

SEQ ID NO: 1572376 - DNA, 15 bp, Homo sapiens
gaccagagcttgcag

SEQ ID NO: 1572377 - DNA, 15 bp, Homo sapiens
accagagcttgcagg

SEQ ID NO: 1572378 - DNA, 15 bp, Homo sapiens
ccagagcttgcaggc

SEQ ID NO: 1572379 - DNA, 15 bp, Homo sapiens
cagagcttgcaggct

SEQ ID NO: 1572380 - DNA, 15 bp, Homo sapiens
agagcttgcaggctg

SEQ ID NO: 1572381 - DNA, 15 bp, Homo sapiens
gagcttgcaggctgg

SEQ ID NO: 1572382 - DNA, 15 bp, Homo sapiens
agcttgcaggctgga

SEQ ID NO: 1572383 - DNA, 15 bp, Homo sapiens
gcttgcaggctggag

SEQ ID NO: 1572384 - DNA, 15 bp, Homo sapiens
cttgcaggctggagg

SEQ ID NO: 1572385 - DNA, 15 bp, Homo sapiens
ttgcaggctggaggt

SEQ ID NO: 1572386 - DNA, 15 bp, Homo sapiens
tgcaggctggaggtg

SEQ ID NO: 1572387 - DNA, 15 bp, Homo sapiens
gcaggctggaggtga

SEQ ID NO: 1572388 - DNA, 15 bp, Homo sapiens
caggctggaggtgag

SEQ ID NO: 1572389 - DNA, 15 bp, Homo sapiens
aggctggaggtgagg

SEQ ID NO: 1572390 - DNA, 15 bp, Homo sapiens
ggctggaggtgagga

SEQ ID NO: 1572391 - DNA, 15 bp, Homo sapiens
gctggaggtgaggag

SEQ ID NO: 1572392 - DNA, 15 bp, Homo sapiens
ctggaggtgaggagt

SEQ ID NO: 1572393 - DNA, 15 bp, Homo sapiens
tggaggtgaggagta

SEQ ID NO: 1572394 - DNA, 15 bp, Homo sapiens
ggaggtgaggagtag

SEQ ID NO: 1572395 - DNA, 15 bp, Homo sapiens
gaggtgaggagtaga

SEQ ID NO: 1572396 - DNA, 15 bp, Homo sapiens
aggtgaggagtagaa

SEQ ID NO: 1572397 - DNA, 15 bp, Homo sapiens
ggtgaggagtagaag

SEQ ID NO: 1572398 - DNA, 15 bp, Homo sapiens
gtgaggagtagaagt

SEQ ID NO: 1572399 - DNA, 15 bp, Homo sapiens
tgaggagtagaagtc

SEQ ID NO: 1572400 - DNA, 15 bp, Homo sapiens
gaggagtagaagtca

SEQ ID NO: 1572401 - DNA, 15 bp, Homo sapiens
aggagtagaagtcag

SEQ ID NO: 1572402 - DNA, 15 bp, Homo sapiens
ggagtagaagtcaga

SEQ ID NO: 1572403 - DNA, 15 bp, Homo sapiens
gagtagaagtcagat

SEQ ID NO: 1572404 - DNA, 15 bp, Homo sapiens
agtagaagtcagatt

SEQ ID NO: 1572405 - DNA, 15 bp, Homo sapiens
gtagaagtcagattg

SEQ ID NO: 1572406 - DNA, 15 bp, Homo sapiens
tagaagtcagattgg

SEQ ID NO: 1572407 - DNA, 15 bp, Homo sapiens
agaagtcagattggc

SEQ ID NO: 1572408 - DNA, 15 bp, Homo sapiens
gaagtcagattggca

SEQ ID NO: 1572409 - DNA, 15 bp, Homo sapiens
aagtcagattggcag

SEQ ID NO: 1572410 - DNA, 15 bp, Homo sapiens
agtcagattggcagg

SEQ ID NO: 1572411 - DNA, 15 bp, Homo sapiens
gtcagattggcaggt

SEQ ID NO: 1572412 - DNA, 15 bp, Homo sapiens
tcagattggcaggtg

SEQ ID NO: 1572413 - DNA, 15 bp, Homo sapiens
cagattggcaggtgg

SEQ ID NO: 1572414 - DNA, 15 bp, Homo sapiens
agattggcaggtggg

SEQ ID NO: 1572415 - DNA, 15 bp, Homo sapiens
gattggcaggtgggg

SEQ ID NO: 1572416 - DNA, 15 bp, Homo sapiens
attggcaggtggggg

SEQ ID NO: 1572417 - DNA, 15 bp, Homo sapiens
ttggcaggtggggga

SEQ ID NO: 1572418 - DNA, 15 bp, Homo sapiens
tggcaggtgggggag

SEQ ID NO: 1572419 - DNA, 15 bp, Homo sapiens
ggcaggtgggggagg

SEQ ID NO: 1572420 - DNA, 15 bp, Homo sapiens
gcaggtgggggaggc

SEQ ID NO: 1572421 - DNA, 15 bp, Homo sapiens
caggtgggggaggca

SEQ ID NO: 1572422 - DNA, 15 bp, Homo sapiens
aggtgggggaggcaa

SEQ ID NO: 1572423 - DNA, 15 bp, Homo sapiens
ggtgggggaggcaac

SEQ ID NO: 1572424 - DNA, 15 bp, Homo sapiens
gtgggggaggcaacg

SEQ ID NO: 1572425 - DNA, 15 bp, Homo sapiens
tgggggaggcaacgg

SEQ ID NO: 1572426 - DNA, 15 bp, Homo sapiens
gggggaggcaacggg

SEQ ID NO: 1572427 - DNA, 15 bp, Homo sapiens
ggggaggcaacgggc

SEQ ID NO: 1572428 - DNA, 15 bp, Homo sapiens
gggaggcaacgggcc

SEQ ID NO: 1572429 - DNA, 15 bp, Homo sapiens
ggaggcaacgggccc

SEQ ID NO: 1572430 - DNA, 15 bp, Homo sapiens
gaggcaacgggccca

SEQ ID NO: 1572431 - DNA, 15 bp, Homo sapiens
aggcaacgggcccag

SEQ ID NO: 1572432 - DNA, 15 bp, Homo sapiens
ggcaacgggcccagc

SEQ ID NO: 1572433 - DNA, 15 bp, Homo sapiens
gcaacgggcccagca

SEQ ID NO: 1572434 - DNA, 15 bp, Homo sapiens
caacgggcccagcag

SEQ ID NO: 1572435 - DNA, 15 bp, Homo sapiens
aacgggcccagcagg

SEQ ID NO: 1572436 - DNA, 15 bp, Homo sapiens
acgggcccagcaggg

SEQ ID NO: 1572437 - DNA, 15 bp, Homo sapiens
cgggcccagcaggga

SEQ ID NO: 1572438 - DNA, 15 bp, Homo sapiens
gggcccagcagggag

SEQ ID NO: 1572439 - DNA, 15 bp, Homo sapiens
ggcccagcagggagg

SEQ ID NO: 1572440 - DNA, 15 bp, Homo sapiens
gcccagcagggaggg

SEQ ID NO: 1572441 - DNA, 15 bp, Homo sapiens
cccagcagggaggga

SEQ ID NO: 1572442 - DNA, 15 bp, Homo sapiens
ccagcagggagggaa

SEQ ID NO: 1572443 - DNA, 15 bp, Homo sapiens
cagcagggagggaag

SEQ ID NO: 1572444 - DNA, 15 bp, Homo sapiens
agcagggagggaagc

SEQ ID NO: 1572445 - DNA, 15 bp, Homo sapiens
gcagggagggaagcc

SEQ ID NO: 1572446 - DNA, 15 bp, Homo sapiens
cagggagggaagccc

SEQ ID NO: 1572447 - DNA, 15 bp, Homo sapiens
agggagggaagcccc

SEQ ID NO: 1572448 - DNA, 15 bp, Homo sapiens
gggagggaagccccc

SEQ ID NO: 1572449 - DNA, 15 bp, Homo sapiens
ggagggaagcccccc

SEQ ID NO: 1572450 - DNA, 15 bp, Homo sapiens
gagggaagccccccc

SEQ ID NO: 1572451 - DNA, 15 bp, Homo sapiens
agggaagccccccca

SEQ ID NO: 1572452 - DNA, 15 bp, Homo sapiens
gggaagcccccccag

SEQ ID NO: 1572453 - DNA, 15 bp, Homo sapiens
ggaagcccccccagc

SEQ ID NO: 1572454 - DNA, 15 bp, Homo sapiens
gaagcccccccagcc

SEQ ID NO: 1572455 - DNA, 15 bp, Homo sapiens
aagcccccccagcca

SEQ ID NO: 1572456 - DNA, 15 bp, Homo sapiens
agcccccccagccag

SEQ ID NO: 1572457 - DNA, 15 bp, Homo sapiens
gcccccccagccagt

SEQ ID NO: 1572458 - DNA, 15 bp, Homo sapiens
cccccccagccagtt

SEQ ID NO: 1572459 - DNA, 15 bp, Homo sapiens
ccccccagccagttc

SEQ ID NO: 1572460 - DNA, 15 bp, Homo sapiens
cccccagccagttct

SEQ ID NO: 1572461 - DNA, 15 bp, Homo sapiens
ccccagccagttctg

SEQ ID NO: 1572462 - DNA, 15 bp, Homo sapiens
cccagccagttctga

SEQ ID NO: 1572463 - DNA, 15 bp, Homo sapiens
ccagccagttctgac

SEQ ID NO: 1572464 - DNA, 15 bp, Homo sapiens
cagccagttctgact

SEQ ID NO: 1572465 - DNA, 15 bp, Homo sapiens
agccagttctgactt

SEQ ID NO: 1572466 - DNA, 15 bp, Homo sapiens
gccagttctgacttc

SEQ ID NO: 1572467 - DNA, 15 bp, Homo sapiens
ccagttctgacttca

SEQ ID NO: 1572468 - DNA, 15 bp, Homo sapiens
cagttctgacttcac

SEQ ID NO: 1572469 - DNA, 15 bp, Homo sapiens
agttctgacttcacc

SEQ ID NO: 1572470 - DNA, 15 bp, Homo sapiens
gttctgacttcaccc

SEQ ID NO: 1572471 - DNA, 15 bp, Homo sapiens
ttctgacttcaccct

SEQ ID NO: 1572472 - DNA, 15 bp, Homo sapiens
tctgacttcaccctg

SEQ ID NO: 1572473 - DNA, 15 bp, Homo sapiens
ctgacttcaccctgc

SEQ ID NO: 1572474 - DNA, 15 bp, Homo sapiens
tgacttcaccctgcc

SEQ ID NO: 1572475 - DNA, 15 bp, Homo sapiens
gacttcaccctgcct

SEQ ID NO: 1572476 - DNA, 15 bp, Homo sapiens
acttcaccctgcctt

SEQ ID NO: 1572477 - DNA, 15 bp, Homo sapiens
cttcaccctgccttg

SEQ ID NO: 1572478 - DNA, 15 bp, Homo sapiens
ttcaccctgccttgc

SEQ ID NO: 1572479 - DNA, 15 bp, Homo sapiens
tcaccctgccttgcc

SEQ ID NO: 1572480 - DNA, 15 bp, Homo sapiens
caccctgccttgcca

SEQ ID NO: 1572481 - DNA, 15 bp, Homo sapiens
accctgccttgccac

SEQ ID NO: 1572482 - DNA, 15 bp, Homo sapiens
ccctgccttgccact

SEQ ID NO: 1572483 - DNA, 15 bp, Homo sapiens
cctgccttgccacta

SEQ ID NO: 1572484 - DNA, 15 bp, Homo sapiens
ctgccttgccactaa

SEQ ID NO: 1572485 - DNA, 15 bp, Homo sapiens
tgccttgccactaac

SEQ ID NO: 1572486 - DNA, 15 bp, Homo sapiens
gccttgccactaacc

SEQ ID NO: 1572487 - DNA, 15 bp, Homo sapiens
ccttgccactaaccc

SEQ ID NO: 1572488 - DNA, 15 bp, Homo sapiens
cttgccactaacccc

SEQ ID NO: 1572489 - DNA, 15 bp, Homo sapiens
ttgccactaaccccc

SEQ ID NO: 1572490 - DNA, 15 bp, Homo sapiens
tgccactaacccccc

SEQ ID NO: 1572491 - DNA, 15 bp, Homo sapiens
gccactaacccccca

SEQ ID NO: 1572492 - DNA, 15 bp, Homo sapiens
ccactaaccccccac

SEQ ID NO: 1572493 - DNA, 15 bp, Homo sapiens
cactaaccccccact

SEQ ID NO: 1572494 - DNA, 15 bp, Homo sapiens
actaaccccccactc

SEQ ID NO: 1572495 - DNA, 15 bp, Homo sapiens
ctaaccccccactct

SEQ ID NO: 1572496 - DNA, 15 bp, Homo sapiens
taaccccccactctc

SEQ ID NO: 1572497 - DNA, 15 bp, Homo sapiens
aaccccccactctcc

SEQ ID NO: 1572498 - DNA, 15 bp, Homo sapiens
accccccactctccc

SEQ ID NO: 1572499 - DNA, 15 bp, Homo sapiens
ccccccactctccct

SEQ ID NO: 1572500 - DNA, 15 bp, Homo sapiens
cccccactctccctg

SEQ ID NO: 1572501 - DNA, 15 bp, Homo sapiens
ccccactctccctgc

SEQ ID NO: 1572502 - DNA, 15 bp, Homo sapiens
cccactctccctgca

SEQ ID NO: 1572503 - DNA, 15 bp, Homo sapiens
ccactctccctgcag

SEQ ID NO: 1572504 - DNA, 15 bp, Homo sapiens
cactctccctgcagg

SEQ ID NO: 1572505 - DNA, 15 bp, Homo sapiens
actctccctgcaggc

SEQ ID NO: 1572506 - DNA, 15 bp, Homo sapiens
ctctccctgcaggcc

SEQ ID NO: 1572507 - DNA, 15 bp, Homo sapiens
tctccctgcaggcca

SEQ ID NO: 1572508 - DNA, 15 bp, Homo sapiens
ctccctgcaggccag

SEQ ID NO: 1572509 - DNA, 15 bp, Homo sapiens
tccctgcaggccagt

SEQ ID NO: 1572510 - DNA, 15 bp, Homo sapiens
ccctgcaggccagtt

SEQ ID NO: 1572511 - DNA, 15 bp, Homo sapiens
cctgcaggccagttc

SEQ ID NO: 1572512 - DNA, 15 bp, Homo sapiens
ctgcaggccagttct

SEQ ID NO: 1572513 - DNA, 15 bp, Homo sapiens
tgcaggccagttcta

SEQ ID NO: 1572514 - DNA, 15 bp, Homo sapiens
gcaggccagttctac

SEQ ID NO: 1572515 - DNA, 15 bp, Homo sapiens
caggccagttctacg

SEQ ID NO: 1572516 - DNA, 15 bp, Homo sapiens
aggccagttctacgt

SEQ ID NO: 1572517 - DNA, 15 bp, Homo sapiens
ggccagttctacgtc

SEQ ID NO: 1572518 - DNA, 15 bp, Homo sapiens
gccagttctacgtca

SEQ ID NO: 1572519 - DNA, 15 bp, Homo sapiens
ccagttctacgtcat

SEQ ID NO: 1572520 - DNA, 15 bp, Homo sapiens
cagttctacgtcatg

SEQ ID NO: 1572521 - DNA, 15 bp, Homo sapiens
agttctacgtcatga

SEQ ID NO: 1572522 - DNA, 15 bp, Homo sapiens
gttctacgtcatgat

SEQ ID NO: 1572523 - DNA, 15 bp, Homo sapiens
ttctacgtcatgatg

SEQ ID NO: 1572524 - DNA, 15 bp, Homo sapiens
tctacgtcatgatga

SEQ ID NO: 1572525 - DNA, 15 bp, Homo sapiens
ctacgtcatgatgac

SEQ ID NO: 1572526 - DNA, 15 bp, Homo sapiens
tacgtcatgatgacg

SEQ ID NO: 1572527 - DNA, 15 bp, Homo sapiens
acgtcatgatgacgc

SEQ ID NO: 1572528 - DNA, 15 bp, Homo sapiens
cgtcatgatgacgcc

SEQ ID NO: 1572529 - DNA, 15 bp, Homo sapiens
gtcatgatgacgccc

SEQ ID NO: 1572530 - DNA, 15 bp, Homo sapiens
tcatgatgacgcccc

SEQ ID NO: 1572531 - DNA, 15 bp, Homo sapiens
catgatgacgcccca

SEQ ID NO: 1572532 - DNA, 15 bp, Homo sapiens
atgatgacgccccag

SEQ ID NO: 1572533 - DNA, 15 bp, Homo sapiens
tgatgacgccccagg

SEQ ID NO: 1572534 - DNA, 15 bp, Homo sapiens
gatgacgccccagga

SEQ ID NO: 1572535 - DNA, 15 bp, Homo sapiens
atgacgccccaggat

SEQ ID NO: 1572536 - DNA, 15 bp, Homo sapiens
tgacgccccaggatg

SEQ ID NO: 1572537 - DNA, 15 bp, Homo sapiens
gacgccccaggatgt

SEQ ID NO: 1572538 - DNA, 15 bp, Homo sapiens
acgccccaggatgtg

SEQ ID NO: 1572539 - DNA, 15 bp, Homo sapiens
cgccccaggatgtgc

SEQ ID NO: 1572540 - DNA, 15 bp, Homo sapiens
gccccaggatgtgct

SEQ ID NO: 1572541 - DNA, 15 bp, Homo sapiens
ccccaggatgtgctt

SEQ ID NO: 1572542 - DNA, 15 bp, Homo sapiens
cccaggatgtgcttc

SEQ ID NO: 1572543 - DNA, 15 bp, Homo sapiens
ccaggatgtgcttca

SEQ ID NO: 1572544 - DNA, 15 bp, Homo sapiens
caggatgtgcttcag

SEQ ID NO: 1572545 - DNA, 15 bp, Homo sapiens
aggatgtgcttcaga

SEQ ID NO: 1572546 - DNA, 15 bp, Homo sapiens
ggatgtgcttcagac

SEQ ID NO: 1572547 - DNA, 15 bp, Homo sapiens
gatgtgcttcagaca

SEQ ID NO: 1572548 - DNA, 15 bp, Homo sapiens
atgtgcttcagacag

SEQ ID NO: 1572549 - DNA, 15 bp, Homo sapiens
tgtgcttcagacagg

SEQ ID NO: 1572550 - DNA, 15 bp, Homo sapiens
gtgcttcagacagga

SEQ ID NO: 1572551 - DNA, 15 bp, Homo sapiens
tgcttcagacaggaa

SEQ ID NO: 1572552 - DNA, 15 bp, Homo sapiens
gcttcagacaggaac

SEQ ID NO: 1572553 - DNA, 15 bp, Homo sapiens
cttcagacaggaaca

SEQ ID NO: 1572554 - DNA, 15 bp, Homo sapiens
ttcagacaggaacac

SEQ ID NO: 1572555 - DNA, 15 bp, Homo sapiens
tcagacaggaacaca

SEQ ID NO: 1572556 - DNA, 15 bp, Homo sapiens
cagacaggaacacag

SEQ ID NO: 1572557 - DNA, 15 bp, Homo sapiens
agacaggaacacaga

SEQ ID NO: 1572558 - DNA, 15 bp, Homo sapiens
gacaggaacacagag

SEQ ID NO: 1572559 - DNA, 15 bp, Homo sapiens
acaggaacacagagg

SEQ ID NO: 1572560 - DNA, 15 bp, Homo sapiens
caggaacacagagga

SEQ ID NO: 1572561 - DNA, 15 bp, Homo sapiens
aggaacacagaggac

SEQ ID NO: 1572562 - DNA, 15 bp, Homo sapiens
ggaacacagaggacg

SEQ ID NO: 1572563 - DNA, 15 bp, Homo sapiens
gaacacagaggacga

SEQ ID NO: 1572564 - DNA, 15 bp, Homo sapiens
aacacagaggacgat

SEQ ID NO: 1572565 - DNA, 15 bp, Homo sapiens
acacagaggacgatc

SEQ ID NO: 1572566 - DNA, 15 bp, Homo sapiens
cacagaggacgatcg

SEQ ID NO: 1572567 - DNA, 15 bp, Homo sapiens
acagaggacgatcgc

SEQ ID NO: 1572568 - DNA, 15 bp, Homo sapiens
cagaggacgatcgcc

SEQ ID NO: 1572569 - DNA, 15 bp, Homo sapiens
agaggacgatcgccc

SEQ ID NO: 1572570 - DNA, 15 bp, Homo sapiens
gaggacgatcgcccc

SEQ ID NO: 1572571 - DNA, 15 bp, Homo sapiens
aggacgatcgccccc

SEQ ID NO: 1572572 - DNA, 15 bp, Homo sapiens
ggacgatcgcccccc

SEQ ID NO: 1572573 - DNA, 15 bp, Homo sapiens
gacgatcgccccccg

SEQ ID NO: 1572574 - DNA, 15 bp, Homo sapiens
acgatcgccccccgg

SEQ ID NO: 1572575 - DNA, 15 bp, Homo sapiens
cgatcgccccccgga

SEQ ID NO: 1572576 - DNA, 15 bp, Homo sapiens
gatcgccccccggac

SEQ ID NO: 1572577 - DNA, 15 bp, Homo sapiens
atcgccccccggaca

SEQ ID NO: 1572578 - DNA, 15 bp, Homo sapiens
tcgccccccggacac

SEQ ID NO: 1572579 - DNA, 15 bp, Homo sapiens
cgccccccggacaca

SEQ ID NO: 1572580 - DNA, 15 bp, Homo sapiens
gccccccggacacac

SEQ ID NO: 1572581 - DNA, 15 bp, Homo sapiens
ccccccggacacacc

SEQ ID NO: 1572582 - DNA, 15 bp, Homo sapiens
cccccggacacaccc

SEQ ID NO: 1572583 - DNA, 15 bp, Homo sapiens
ccccggacacaccct

SEQ ID NO: 1572584 - DNA, 15 bp, Homo sapiens
cccggacacaccctt

SEQ ID NO: 1572585 - DNA, 15 bp, Homo sapiens
ccggacacaccctta

SEQ ID NO: 1572586 - DNA, 15 bp, Homo sapiens
cggacacacccttac

SEQ ID NO: 1572587 - DNA, 15 bp, Homo sapiens
ggacacacccttact

SEQ ID NO: 1572588 - DNA, 15 bp, Homo sapiens
gacacacccttactc

SEQ ID NO: 1572589 - DNA, 15 bp, Homo sapiens
acacacccttactct

SEQ ID NO: 1572590 - DNA, 15 bp, Homo sapiens
cacacccttactctc

SEQ ID NO: 1572591 - DNA, 15 bp, Homo sapiens
acacccttactctcc

SEQ ID NO: 1572592 - DNA, 15 bp, Homo sapiens
cacccttactctccg

SEQ ID NO: 1572593 - DNA, 15 bp, Homo sapiens
acccttactctccgt

SEQ ID NO: 1572594 - DNA, 15 bp, Homo sapiens
cccttactctccgta

SEQ ID NO: 1572595 - DNA, 15 bp, Homo sapiens
ccttactctccgtat

SEQ ID NO: 1572596 - DNA, 15 bp, Homo sapiens
cttactctccgtatg

SEQ ID NO: 1572597 - DNA, 15 bp, Homo sapiens
ttactctccgtatgt

SEQ ID NO: 1572598 - DNA, 15 bp, Homo sapiens
tactctccgtatgtg

SEQ ID NO: 1572599 - DNA, 15 bp, Homo sapiens
actctccgtatgtgc

SEQ ID NO: 1572600 - DNA, 15 bp, Homo sapiens
ctctccgtatgtgca

SEQ ID NO: 1572601 - DNA, 15 bp, Homo sapiens
tctccgtatgtgcag

SEQ ID NO: 1572602 - DNA, 15 bp, Homo sapiens
ctccgtatgtgcagg

SEQ ID NO: 1572603 - DNA, 15 bp, Homo sapiens
tccgtatgtgcaggg

SEQ ID NO: 1572604 - DNA, 15 bp, Homo sapiens
ccgtatgtgcagggg

SEQ ID NO: 1572605 - DNA, 15 bp, Homo sapiens
cgtatgtgcagggga

SEQ ID NO: 1572606 - DNA, 15 bp, Homo sapiens
gtatgtgcaggggac

SEQ ID NO: 1572607 - DNA, 15 bp, Homo sapiens
tatgtgcaggggaca

SEQ ID NO: 1572608 - DNA, 15 bp, Homo sapiens
atgtgcaggggacac

SEQ ID NO: 1572609 - DNA, 15 bp, Homo sapiens
tgtgcaggggacacc

SEQ ID NO: 1572610 - DNA, 15 bp, Homo sapiens
gtgcaggggacacct

SEQ ID NO: 1572611 - DNA, 15 bp, Homo sapiens
tgcaggggacacctg

SEQ ID NO: 1572612 - DNA, 15 bp, Homo sapiens
gcaggggacacctgg

SEQ ID NO: 1572613 - DNA, 15 bp, Homo sapiens
caggggacacctgga

SEQ ID NO: 1572614 - DNA, 15 bp, Homo sapiens
aggggacacctggag

SEQ ID NO: 1572615 - DNA, 15 bp, Homo sapiens
ggggacacctggagg

SEQ ID NO: 1572616 - DNA, 15 bp, Homo sapiens
gggacacctggaggg

SEQ ID NO: 1572617 - DNA, 15 bp, Homo sapiens
ggacacctggagggc

SEQ ID NO: 1572618 - DNA, 15 bp, Homo sapiens
gacacctggagggcc

SEQ ID NO: 1572619 - DNA, 15 bp, Homo sapiens
acacctggagggcct

SEQ ID NO: 1572620 - DNA, 15 bp, Homo sapiens
cacctggagggcctg

SEQ ID NO: 1572621 - DNA, 15 bp, Homo sapiens
acctggagggcctgg

SEQ ID NO: 1572622 - DNA, 15 bp, Homo sapiens
cctggagggcctggt

SEQ ID NO: 1572623 - DNA, 15 bp, Homo sapiens
ctggagggcctggtg

SEQ ID NO: 1572624 - DNA, 15 bp, Homo sapiens
tggagggcctggtgt

SEQ ID NO: 1572625 - DNA, 15 bp, Homo sapiens
ggagggcctggtgtt

SEQ ID NO: 1572626 - DNA, 15 bp, Homo sapiens
gagggcctggtgttg

SEQ ID NO: 1572627 - DNA, 15 bp, Homo sapiens
agggcctggtgttga

SEQ ID NO: 1572628 - DNA, 15 bp, Homo sapiens
gggcctggtgttgaa

SEQ ID NO: 1572629 - DNA, 15 bp, Homo sapiens
ggcctggtgttgaaa

SEQ ID NO: 1572630 - DNA, 15 bp, Homo sapiens
gcctggtgttgaaat

SEQ ID NO: 1572631 - DNA, 15 bp, Homo sapiens
cctggtgttgaaatg

SEQ ID NO: 1572632 - DNA, 15 bp, Homo sapiens
ctggtgttgaaatgg

SEQ ID NO: 1572633 - DNA, 15 bp, Homo sapiens
tggtgttgaaatgga

SEQ ID NO: 1572634 - DNA, 15 bp, Homo sapiens
ggtgttgaaatggaa

SEQ ID NO: 1572635 - DNA, 15 bp, Homo sapiens
gtgttgaaatggaag

SEQ ID NO: 1572636 - DNA, 15 bp, Homo sapiens
tgttgaaatggaagg

SEQ ID NO: 1572637 - DNA, 15 bp, Homo sapiens
gttgaaatggaagga

SEQ ID NO: 1572638 - DNA, 15 bp, Homo sapiens
ttgaaatggaaggaa

SEQ ID NO: 1572639 - DNA, 15 bp, Homo sapiens
tgaaatggaaggaag

SEQ ID NO: 1572640 - DNA, 15 bp, Homo sapiens
gaaatggaaggaaga

SEQ ID NO: 1572641 - DNA, 15 bp, Homo sapiens
aaatggaaggaagag

SEQ ID NO: 1572642 - DNA, 15 bp, Homo sapiens
aatggaaggaagagg

SEQ ID NO: 1572643 - DNA, 15 bp, Homo sapiens
atggaaggaagaggg

SEQ ID NO: 1572644 - DNA, 15 bp, Homo sapiens
tggaaggaagagggg

SEQ ID NO: 1572645 - DNA, 15 bp, Homo sapiens
ggaaggaagaggggt

SEQ ID NO: 1572646 - DNA, 15 bp, Homo sapiens
gaaggaagaggggtt

SEQ ID NO: 1572647 - DNA, 15 bp, Homo sapiens
aaggaagaggggttt

SEQ ID NO: 1572648 - DNA, 15 bp, Homo sapiens
aggaagaggggtttc

SEQ ID NO: 1572649 - DNA, 15 bp, Homo sapiens
ggaagaggggtttct

SEQ ID NO: 1572650 - DNA, 15 bp, Homo sapiens
gaagaggggtttctg

SEQ ID NO: 1572651 - DNA, 15 bp, Homo sapiens
aagaggggtttctgg

SEQ ID NO: 1572652 - DNA, 15 bp, Homo sapiens
agaggggtttctgga

SEQ ID NO: 1572653 - DNA, 15 bp, Homo sapiens
gaggggtttctggag

SEQ ID NO: 1572654 - DNA, 15 bp, Homo sapiens
aggggtttctggagt

SEQ ID NO: 1572655 - DNA, 15 bp, Homo sapiens
ggggtttctggagta

SEQ ID NO: 1572656 - DNA, 15 bp, Homo sapiens
gggtttctggagtag

SEQ ID NO: 1572657 - DNA, 15 bp, Homo sapiens
ggtttctggagtaga

SEQ ID NO: 1572658 - DNA, 15 bp, Homo sapiens
gtttctggagtagaa

SEQ ID NO: 1572659 - DNA, 15 bp, Homo sapiens
tttctggagtagaag

SEQ ID NO: 1572660 - DNA, 15 bp, Homo sapiens
ttctggagtagaagc

SEQ ID NO: 1572661 - DNA, 15 bp, Homo sapiens
tctggagtagaagct

SEQ ID NO: 1572662 - DNA, 15 bp, Homo sapiens
ctggagtagaagctg

SEQ ID NO: 1572663 - DNA, 15 bp, Homo sapiens
tggagtagaagctgg

SEQ ID NO: 1572664 - DNA, 15 bp, Homo sapiens
ggagtagaagctggg

SEQ ID NO: 1572665 - DNA, 15 bp, Homo sapiens
gagtagaagctgggc

SEQ ID NO: 1572666 - DNA, 15 bp, Homo sapiens
agtagaagctgggca

SEQ ID NO: 1572667 - DNA, 15 bp, Homo sapiens
gtagaagctgggcag

SEQ ID NO: 1572668 - DNA, 15 bp, Homo sapiens
tagaagctgggcagt

SEQ ID NO: 1572669 - DNA, 15 bp, Homo sapiens
agaagctgggcagtt

SEQ ID NO: 1572670 - DNA, 15 bp, Homo sapiens
gaagctgggcagtta

SEQ ID NO: 1572671 - DNA, 15 bp, Homo sapiens
aagctgggcagttag

SEQ ID NO: 1572672 - DNA, 15 bp, Homo sapiens
agctgggcagttagc

SEQ ID NO: 1572673 - DNA, 15 bp, Homo sapiens
gctgggcagttagca

SEQ ID NO: 1572674 - DNA, 15 bp, Homo sapiens
ctgggcagttagcat

SEQ ID NO: 1572675 - DNA, 15 bp, Homo sapiens
tgggcagttagcatg

SEQ ID NO: 1572676 - DNA, 15 bp, Homo sapiens
gggcagttagcatga

SEQ ID NO: 1572677 - DNA, 15 bp, Homo sapiens
ggcagttagcatgaa

SEQ ID NO: 1572678 - DNA, 15 bp, Homo sapiens
gcagttagcatgaag

SEQ ID NO: 1572679 - DNA, 15 bp, Homo sapiens
cagttagcatgaagt

SEQ ID NO: 1572680 - DNA, 15 bp, Homo sapiens
agttagcatgaagtg

SEQ ID NO: 1572681 - DNA, 15 bp, Homo sapiens
gttagcatgaagtgg

SEQ ID NO: 1572682 - DNA, 15 bp, Homo sapiens
ttagcatgaagtggg

SEQ ID NO: 1572683 - DNA, 15 bp, Homo sapiens
tagcatgaagtgggc

SEQ ID NO: 1572684 - DNA, 15 bp, Homo sapiens
agcatgaagtgggca

SEQ ID NO: 1572685 - DNA, 15 bp, Homo sapiens
gcatgaagtgggcac

SEQ ID NO: 1572686 - DNA, 15 bp, Homo sapiens
catgaagtgggcaca

SEQ ID NO: 1572687 - DNA, 15 bp, Homo sapiens
atgaagtgggcacat

SEQ ID NO: 1572688 - DNA, 15 bp, Homo sapiens
tgaagtgggcacatg

SEQ ID NO: 1572689 - DNA, 15 bp, Homo sapiens
gaagtgggcacatgg

SEQ ID NO: 1572690 - DNA, 15 bp, Homo sapiens
aagtgggcacatggt

SEQ ID NO: 1572691 - DNA, 15 bp, Homo sapiens
agtgggcacatggtg

SEQ ID NO: 1572692 - DNA, 15 bp, Homo sapiens
gtgggcacatggtgt

SEQ ID NO: 1572693 - DNA, 15 bp, Homo sapiens
tgggcacatggtgta

SEQ ID NO: 1572694 - DNA, 15 bp, Homo sapiens
gggcacatggtgtaa

SEQ ID NO: 1572695 - DNA, 15 bp, Homo sapiens
ggcacatggtgtaat

SEQ ID NO: 1572696 - DNA, 15 bp, Homo sapiens
gcacatggtgtaatg

SEQ ID NO: 1572697 - DNA, 15 bp, Homo sapiens
cacatggtgtaatgt

SEQ ID NO: 1572698 - DNA, 15 bp, Homo sapiens
acatggtgtaatgtt

SEQ ID NO: 1572699 - DNA, 15 bp, Homo sapiens
catggtgtaatgttt

SEQ ID NO: 1572700 - DNA, 15 bp, Homo sapiens
atggtgtaatgtttt

SEQ ID NO: 1572701 - DNA, 15 bp, Homo sapiens
tggtgtaatgttttt

SEQ ID NO: 1572702 - DNA, 15 bp, Homo sapiens
ggtgtaatgtttttt

SEQ ID NO: 1572703 - DNA, 15 bp, Homo sapiens
gtgtaatgttttttt

SEQ ID NO: 1572704 - DNA, 15 bp, Homo sapiens
tgtaatgtttttttt

SEQ ID NO: 1572705 - DNA, 15 bp, Homo sapiens
gtaatgttttttttc

SEQ ID NO: 1572706 - DNA, 15 bp, Homo sapiens
taatgttttttttct

SEQ ID NO: 1572707 - DNA, 15 bp, Homo sapiens
atgttttttttcttt

SEQ ID NO: 1572708 - DNA, 15 bp, Homo sapiens
tgttttttttctttg

SEQ ID NO: 1572709 - DNA, 15 bp, Homo sapiens
gttttttttctttgc

SEQ ID NO: 1572710 - DNA, 15 bp, Homo sapiens
ttttttttctttgcc

SEQ ID NO: 1572711 - DNA, 15 bp, Homo sapiens
tttttttctttgcct

SEQ ID NO: 1572712 - DNA, 15 bp, Homo sapiens
ttttttctttgcctg

SEQ ID NO: 1572713 - DNA, 15 bp, Homo sapiens
tttttctttgcctgt

SEQ ID NO: 1572714 - DNA, 15 bp, Homo sapiens
ttttctttgcctgtt

SEQ ID NO: 1572715 - DNA, 15 bp, Homo sapiens
tttctttgcctgttt

SEQ ID NO: 1572716 - DNA, 15 bp, Homo sapiens
ttctttgcctgtttc

SEQ ID NO: 1572717 - DNA, 15 bp, Homo sapiens
tctttgcctgtttct

SEQ ID NO: 1572718 - DNA, 15 bp, Homo sapiens
ctttgcctgtttctg

SEQ ID NO: 1572719 - DNA, 15 bp, Homo sapiens
tttgcctgtttctgc

SEQ ID NO: 1572720 - DNA, 15 bp, Homo sapiens
ttgcctgtttctgct

SEQ ID NO: 1572721 - DNA, 15 bp, Homo sapiens
tgcctgtttctgctg

SEQ ID NO: 1572722 - DNA, 15 bp, Homo sapiens
gcctgtttctgctgc

SEQ ID NO: 1572723 - DNA, 15 bp, Homo sapiens
cctgtttctgctgct

SEQ ID NO: 1572724 - DNA, 15 bp, Homo sapiens
ctgtttctgctgctc

SEQ ID NO: 1572725 - DNA, 15 bp, Homo sapiens
tgtttctgctgctct

SEQ ID NO: 1572726 - DNA, 15 bp, Homo sapiens
gtttctgctgctcta

SEQ ID NO: 1572727 - DNA, 15 bp, Homo sapiens
tttctgctgctctag

SEQ ID NO: 1572728 - DNA, 15 bp, Homo sapiens
ttctgctgctctagt

SEQ ID NO: 1572729 - DNA, 15 bp, Homo sapiens
tctgctgctctagtg

SEQ ID NO: 1572730 - DNA, 15 bp, Homo sapiens
ctgctgctctagtgc

SEQ ID NO: 1572731 - DNA, 15 bp, Homo sapiens
tgctgctctagtgca

SEQ ID NO: 1572732 - DNA, 15 bp, Homo sapiens
gctgctctagtgcac

SEQ ID NO: 1572733 - DNA, 15 bp, Homo sapiens
ctgctctagtgcaca

SEQ ID NO: 1572734 - DNA, 15 bp, Homo sapiens
tgctctagtgcacat

SEQ ID NO: 1572735 - DNA, 15 bp, Homo sapiens
gctctagtgcacata

SEQ ID NO: 1572736 - DNA, 15 bp, Homo sapiens
ctctagtgcacataa

SEQ ID NO: 1572737 - DNA, 15 bp, Homo sapiens
tctagtgcacataaa

SEQ ID NO: 1572738 - DNA, 15 bp, Homo sapiens
ctagtgcacataaag

SEQ ID NO: 1572739 - DNA, 15 bp, Homo sapiens
tagtgcacataaagt

SEQ ID NO: 1572740 - DNA, 15 bp, Homo sapiens
agtgcacataaagta

SEQ ID NO: 1572741 - DNA, 15 bp, Homo sapiens
gtgcacataaagtat

SEQ ID NO: 1572742 - DNA, 15 bp, Homo sapiens
tgcacataaagtatc

SEQ ID NO: 1572743 - DNA, 15 bp, Homo sapiens
gcacataaagtatca

SEQ ID NO: 1572744 - DNA, 15 bp, Homo sapiens
cacataaagtatcat

SEQ ID NO: 1572745 - DNA, 15 bp, Homo sapiens
acataaagtatcatg

SEQ ID NO: 1572746 - DNA, 15 bp, Homo sapiens
cataaagtatcatgt

SEQ ID NO: 1572747 - DNA, 15 bp, Homo sapiens
ataaagtatcatgtc

SEQ ID NO: 1572748 - DNA, 15 bp, Homo sapiens
taaagtatcatgtct

SEQ ID NO: 1572749 - DNA, 15 bp, Homo sapiens
aaagtatcatgtctt

SEQ ID NO: 1572750 - DNA, 15 bp, Homo sapiens
aagtatcatgtcttt

SEQ ID NO: 1572751 - DNA, 15 bp, Homo sapiens
agtatcatgtctttt

SEQ ID NO: 1572752 - DNA, 15 bp, Homo sapiens
gtatcatgtcttttg

SEQ ID NO: 1572753 - DNA, 15 bp, Homo sapiens
tatcatgtcttttgt

SEQ ID NO: 1572754 - DNA, 15 bp, Homo sapiens
atcatgtcttttgtt

SEQ ID NO: 1572755 - DNA, 15 bp, Homo sapiens
tcatgtcttttgttt

SEQ ID NO: 1572756 - DNA, 15 bp, Homo sapiens
catgtcttttgtttt

SEQ ID NO: 1572757 - DNA, 15 bp, Homo sapiens
atgtcttttgttttt

SEQ ID NO: 1572758 - DNA, 15 bp, Homo sapiens
tgtcttttgtttttg

SEQ ID NO: 1572759 - DNA, 15 bp, Homo sapiens
gtcttttgtttttgc

SEQ ID NO: 1572760 - DNA, 15 bp, Homo sapiens
tcttttgtttttgca

SEQ ID NO: 1572761 - DNA, 15 bp, Homo sapiens
cttttgtttttgcag

SEQ ID NO: 1572762 - DNA, 15 bp, Homo sapiens
ttttgtttttgcaga

SEQ ID NO: 1572763 - DNA, 15 bp, Homo sapiens
tttgtttttgcagat

SEQ ID NO: 1572764 - DNA, 15 bp, Homo sapiens
ttgtttttgcagatg

SEQ ID NO: 1572765 - DNA, 15 bp, Homo sapiens
tgtttttgcagatgg

SEQ ID NO: 1572766 - DNA, 15 bp, Homo sapiens
gtttttgcagatgga

SEQ ID NO: 1572767 - DNA, 15 bp, Homo sapiens
tttttgcagatggat

SEQ ID NO: 1572768 - DNA, 15 bp, Homo sapiens
ttttgcagatggatt

SEQ ID NO: 1572769 - DNA, 15 bp, Homo sapiens
tttgcagatggattt

SEQ ID NO: 1572770 - DNA, 15 bp, Homo sapiens
ttgcagatggattta

SEQ ID NO: 1572771 - DNA, 15 bp, Homo sapiens
tgcagatggatttac

SEQ ID NO: 1572772 - DNA, 15 bp, Homo sapiens
gcagatggatttacc

SEQ ID NO: 1572773 - DNA, 15 bp, Homo sapiens
cagatggatttacct

SEQ ID NO: 1572774 - DNA, 15 bp, Homo sapiens
agatggatttacctt

SEQ ID NO: 1572775 - DNA, 15 bp, Homo sapiens
gatggatttaccttg

SEQ ID NO: 1572776 - DNA, 15 bp, Homo sapiens
atggatttaccttgc

SEQ ID NO: 1572777 - DNA, 15 bp, Homo sapiens
tggatttaccttgca

SEQ ID NO: 1572778 - DNA, 15 bp, Homo sapiens
ggatttaccttgcaa

SEQ ID NO: 1572779 - DNA, 15 bp, Homo sapiens
gatttaccttgcaaa

SEQ ID NO: 1572780 - DNA, 15 bp, Homo sapiens
atttaccttgcaaag

SEQ ID NO: 1572781 - DNA, 15 bp, Homo sapiens
tttaccttgcaaaga

SEQ ID NO: 1572782 - DNA, 15 bp, Homo sapiens
ttaccttgcaaagat

SEQ ID NO: 1572783 - DNA, 15 bp, Homo sapiens
taccttgcaaagata

SEQ ID NO: 1572784 - DNA, 15 bp, Homo sapiens
accttgcaaagataa

SEQ ID NO: 1572785 - DNA, 15 bp, Homo sapiens
ccttgcaaagataat

SEQ ID NO: 1572786 - DNA, 15 bp, Homo sapiens
cttgcaaagataatt

SEQ ID NO: 1572787 - DNA, 15 bp, Homo sapiens
ttgcaaagataattt

SEQ ID NO: 1572788 - DNA, 15 bp, Homo sapiens
tgcaaagataatttt

SEQ ID NO: 1572789 - DNA, 15 bp, Homo sapiens
gcaaagataattttc

SEQ ID NO: 1572790 - DNA, 15 bp, Homo sapiens
caaagataattttca

SEQ ID NO: 1572791 - DNA, 15 bp, Homo sapiens
aaagataattttcaa

SEQ ID NO: 1572792 - DNA, 15 bp, Homo sapiens
aagataattttcaaa

SEQ ID NO: 1572793 - DNA, 15 bp, Homo sapiens
agataattttcaaat

SEQ ID NO: 1572794 - DNA, 15 bp, Homo sapiens
gataattttcaaatc

SEQ ID NO: 1572795 - DNA, 15 bp, Homo sapiens
ataattttcaaatct

SEQ ID NO: 1572796 - DNA, 15 bp, Homo sapiens
taattttcaaatcta

SEQ ID NO: 1572797 - DNA, 15 bp, Homo sapiens
aattttcaaatctaa

SEQ ID NO: 1572798 - DNA, 15 bp, Homo sapiens
attttcaaatctaat

SEQ ID NO: 1572799 - DNA, 15 bp, Homo sapiens
ttttcaaatctaata

SEQ ID NO: 1572800 - DNA, 15 bp, Homo sapiens
tttcaaatctaatac

SEQ ID NO: 1572801 - DNA, 15 bp, Homo sapiens
ttcaaatctaatact

SEQ ID NO: 1572802 - DNA, 15 bp, Homo sapiens
tcaaatctaatactt

SEQ ID NO: 1572803 - DNA, 15 bp, Homo sapiens
caaatctaatactta

SEQ ID NO: 1572804 - DNA, 15 bp, Homo sapiens
aaatctaatacttag

SEQ ID NO: 1572805 - DNA, 15 bp, Homo sapiens
aatctaatacttagc

SEQ ID NO: 1572806 - DNA, 15 bp, Homo sapiens
atctaatacttagca

SEQ ID NO: 1572807 - DNA, 15 bp, Homo sapiens
tctaatacttagcag

SEQ ID NO: 1572808 - DNA, 15 bp, Homo sapiens
ctaatacttagcaga

SEQ ID NO: 1572809 - DNA, 15 bp, Homo sapiens
taatacttagcagat

SEQ ID NO: 1572810 - DNA, 15 bp, Homo sapiens
aatacttagcagatg

SEQ ID NO: 1572811 - DNA, 15 bp, Homo sapiens
atacttagcagatgc

SEQ ID NO: 1572812 - DNA, 15 bp, Homo sapiens
tacttagcagatgct

SEQ ID NO: 1572813 - DNA, 15 bp, Homo sapiens
acttagcagatgctt

SEQ ID NO: 1572814 - DNA, 15 bp, Homo sapiens
cttagcagatgcttg

SEQ ID NO: 1572815 - DNA, 15 bp, Homo sapiens
ttagcagatgcttgg

SEQ ID NO: 1572816 - DNA, 15 bp, Homo sapiens
tagcagatgcttggg

SEQ ID NO: 1572817 - DNA, 15 bp, Homo sapiens
agcagatgcttgggc

SEQ ID NO: 1572818 - DNA, 15 bp, Homo sapiens
gcagatgcttgggca

SEQ ID NO: 1572819 - DNA, 15 bp, Homo sapiens
cagatgcttgggcaa

SEQ ID NO: 1572820 - DNA, 15 bp, Homo sapiens
agatgcttgggcaaa

SEQ ID NO: 1572821 - DNA, 15 bp, Homo sapiens
gatgcttgggcaaac

SEQ ID NO: 1572822 - DNA, 15 bp, Homo sapiens
atgcttgggcaaaca

SEQ ID NO: 1572823 - DNA, 15 bp, Homo sapiens
tgcttgggcaaacag

SEQ ID NO: 1572824 - DNA, 15 bp, Homo sapiens
gcttgggcaaacagc

SEQ ID NO: 1572825 - DNA, 15 bp, Homo sapiens
cttgggcaaacagct

SEQ ID NO: 1572826 - DNA, 15 bp, Homo sapiens
ttgggcaaacagctc

SEQ ID NO: 1572827 - DNA, 15 bp, Homo sapiens
tgggcaaacagctct

SEQ ID NO: 1572828 - DNA, 15 bp, Homo sapiens
gggcaaacagctctg

SEQ ID NO: 1572829 - DNA, 15 bp, Homo sapiens
ggcaaacagctctgc

SEQ ID NO: 1572830 - DNA, 15 bp, Homo sapiens
gcaaacagctctgcg

SEQ ID NO: 1572831 - DNA, 15 bp, Homo sapiens
caaacagctctgcga

SEQ ID NO: 1572832 - DNA, 15 bp, Homo sapiens
aaacagctctgcgat

SEQ ID NO: 1572833 - DNA, 15 bp, Homo sapiens
aacagctctgcgata

SEQ ID NO: 1572834 - DNA, 15 bp, Homo sapiens
acagctctgcgataa

SEQ ID NO: 1572835 - DNA, 15 bp, Homo sapiens
cagctctgcgataat

SEQ ID NO: 1572836 - DNA, 15 bp, Homo sapiens
agctctgcgataata

SEQ ID NO: 1572837 - DNA, 15 bp, Homo sapiens
gctctgcgataatac

SEQ ID NO: 1572838 - DNA, 15 bp, Homo sapiens
ctctgcgataataca

SEQ ID NO: 1572839 - DNA, 15 bp, Homo sapiens
tctgcgataatacat

SEQ ID NO: 1572840 - DNA, 15 bp, Homo sapiens
ctgcgataatacatg

SEQ ID NO: 1572841 - DNA, 15 bp, Homo sapiens
tgcgataatacatgc

SEQ ID NO: 1572842 - DNA, 15 bp, Homo sapiens
gcgataatacatgcc

SEQ ID NO: 1572843 - DNA, 15 bp, Homo sapiens
cgataatacatgccc

SEQ ID NO: 1572844 - DNA, 15 bp, Homo sapiens
gataatacatgcccc

SEQ ID NO: 1572845 - DNA, 15 bp, Homo sapiens
ataatacatgccccc

SEQ ID NO: 1572846 - DNA, 15 bp, Homo sapiens
taatacatgccccct

SEQ ID NO: 1572847 - DNA, 15 bp, Homo sapiens
aatacatgccccctt

SEQ ID NO: 1572848 - DNA, 15 bp, Homo sapiens
atacatgcccccttt

SEQ ID NO: 1572849 - DNA, 15 bp, Homo sapiens
tacatgccccctttt

SEQ ID NO: 1572850 - DNA, 15 bp, Homo sapiens
acatgcccccttttt

SEQ ID NO: 1572851 - DNA, 15 bp, Homo sapiens
catgccccctttttt

SEQ ID NO: 1572852 - DNA, 15 bp, Homo sapiens
atgcccccttttttt

SEQ ID NO: 1572853 - DNA, 15 bp, Homo sapiens
tgccccctttttttt

SEQ ID NO: 1572854 - DNA, 15 bp, Homo sapiens
gcccccttttttttt

SEQ ID NO: 1572855 - DNA, 15 bp, Homo sapiens
ccccctttttttttc

SEQ ID NO: 1572856 - DNA, 15 bp, Homo sapiens
cccctttttttttcc

SEQ ID NO: 1572857 - DNA, 15 bp, Homo sapiens
ccctttttttttcct

SEQ ID NO: 1572858 - DNA, 15 bp, Homo sapiens
cctttttttttcctc

SEQ ID NO: 1572859 - DNA, 15 bp, Homo sapiens
ctttttttttcctcc

SEQ ID NO: 1572860 - DNA, 15 bp, Homo sapiens
tttttttttcctcct

SEQ ID NO: 1572861 - DNA, 15 bp, Homo sapiens
ttttttttcctcctc

SEQ ID NO: 1572862 - DNA, 15 bp, Homo sapiens
tttttttcctcctct

SEQ ID NO: 1572863 - DNA, 15 bp, Homo sapiens
tttttcctcctcttg

SEQ ID NO: 1572864 - DNA, 15 bp, Homo sapiens
ttttcctcctcttgt

SEQ ID NO: 1572865 - DNA, 15 bp, Homo sapiens
tttcctcctcttgta

SEQ ID NO: 1572866 - DNA, 15 bp, Homo sapiens
ttcctcctcttgtag

SEQ ID NO: 1572867 - DNA, 15 bp, Homo sapiens
tcctcctcttgtaga

SEQ ID NO: 1572868 - DNA, 15 bp, Homo sapiens
cctcctcttgtagaa

SEQ ID NO: 1572869 - DNA, 15 bp, Homo sapiens
ctcctcttgtagaaa

SEQ ID NO: 1572870 - DNA, 15 bp, Homo sapiens
tcctcttgtagaaaa

SEQ ID NO: 1572871 - DNA, 15 bp, Homo sapiens
cctcttgtagaaaaa

SEQ ID NO: 1572872 - DNA, 15 bp, Homo sapiens
ctcttgtagaaaaat

SEQ ID NO: 1572873 - DNA, 15 bp, Homo sapiens
tcttgtagaaaaatt

SEQ ID NO: 1572874 - DNA, 15 bp, Homo sapiens
cttgtagaaaaattg

SEQ ID NO: 1572875 - DNA, 15 bp, Homo sapiens
ttgtagaaaaattga

SEQ ID NO: 1572876 - DNA, 15 bp, Homo sapiens
tgtagaaaaattgat

SEQ ID NO: 1572877 - DNA, 15 bp, Homo sapiens
gtagaaaaattgatg

SEQ ID NO: 1572878 - DNA, 15 bp, Homo sapiens
tagaaaaattgatgg

SEQ ID NO: 1572879 - DNA, 15 bp, Homo sapiens
agaaaaattgatgga

SEQ ID NO: 1572880 - DNA, 15 bp, Homo sapiens
gaaaaattgatggaa

SEQ ID NO: 1572881 - DNA, 15 bp, Homo sapiens
aaaaattgatggaac

SEQ ID NO: 1572882 - DNA, 15 bp, Homo sapiens
aaaattgatggaacc

SEQ ID NO: 1572883 - DNA, 15 bp, Homo sapiens
aaattgatggaacca

SEQ ID NO: 1572884 - DNA, 15 bp, Homo sapiens
aattgatggaaccag

SEQ ID NO: 1572885 - DNA, 15 bp, Homo sapiens
attgatggaaccaga

SEQ ID NO: 1572886 - DNA, 15 bp, Homo sapiens
ttgatggaaccagaa

SEQ ID NO: 1572887 - DNA, 15 bp, Homo sapiens
tgatggaaccagaac

SEQ ID NO: 1572888 - DNA, 15 bp, Homo sapiens
gatggaaccagaaca

SEQ ID NO: 1572889 - DNA, 15 bp, Homo sapiens
atggaaccagaacac

SEQ ID NO: 1572890 - DNA, 15 bp, Homo sapiens
tggaaccagaacacc

SEQ ID NO: 1572891 - DNA, 15 bp, Homo sapiens
ggaaccagaacaccc

SEQ ID NO: 1572892 - DNA, 15 bp, Homo sapiens
gaaccagaacacccc

SEQ ID NO: 1572893 - DNA, 15 bp, Homo sapiens
aaccagaacaccccg

SEQ ID NO: 1572894 - DNA, 15 bp, Homo sapiens
accagaacaccccga

SEQ ID NO: 1572895 - DNA, 15 bp, Homo sapiens
ccagaacaccccgag

SEQ ID NO: 1572896 - DNA, 15 bp, Homo sapiens
cagaacaccccgaga

SEQ ID NO: 1572897 - DNA, 15 bp, Homo sapiens
agaacaccccgagat

SEQ ID NO: 1572898 - DNA, 15 bp, Homo sapiens
gaacaccccgagatg

SEQ ID NO: 1572899 - DNA, 15 bp, Homo sapiens
aacaccccgagatga

SEQ ID NO: 1572900 - DNA, 15 bp, Homo sapiens
acaccccgagatgag

SEQ ID NO: 1572901 - DNA, 15 bp, Homo sapiens
caccccgagatgaga

SEQ ID NO: 1572902 - DNA, 15 bp, Homo sapiens
accccgagatgagag

SEQ ID NO: 1572903 - DNA, 15 bp, Homo sapiens
ccccgagatgagagg

SEQ ID NO: 1572904 - DNA, 15 bp, Homo sapiens
cccgagatgagagga

SEQ ID NO: 1572905 - DNA, 15 bp, Homo sapiens
ccgagatgagaggag

SEQ ID NO: 1572906 - DNA, 15 bp, Homo sapiens
cgagatgagaggaga

SEQ ID NO: 1572907 - DNA, 15 bp, Homo sapiens
gagatgagaggagaa

SEQ ID NO: 1572908 - DNA, 15 bp, Homo sapiens
agatgagaggagaag

SEQ ID NO: 1572909 - DNA, 15 bp, Homo sapiens
gatgagaggagaaga

SEQ ID NO: 1572910 - DNA, 15 bp, Homo sapiens
atgagaggagaagag

SEQ ID NO: 1572911 - DNA, 15 bp, Homo sapiens
tgagaggagaagagc

SEQ ID NO: 1572912 - DNA, 15 bp, Homo sapiens
gagaggagaagagcc

SEQ ID NO: 1572913 - DNA, 15 bp, Homo sapiens
agaggagaagagccc

SEQ ID NO: 1572914 - DNA, 15 bp, Homo sapiens
gaggagaagagccca

SEQ ID NO: 1572915 - DNA, 15 bp, Homo sapiens
aggagaagagcccag

SEQ ID NO: 1572916 - DNA, 15 bp, Homo sapiens
ggagaagagcccagc

SEQ ID NO: 1572917 - DNA, 15 bp, Homo sapiens
gagaagagcccagca

SEQ ID NO: 1572918 - DNA, 15 bp, Homo sapiens
agaagagcccagcac

SEQ ID NO: 1572919 - DNA, 15 bp, Homo sapiens
gaagagcccagcaca

SEQ ID NO: 1572920 - DNA, 15 bp, Homo sapiens
aagagcccagcacaa

SEQ ID NO: 1572921 - DNA, 15 bp, Homo sapiens
agagcccagcacaac

SEQ ID NO: 1572922 - DNA, 15 bp, Homo sapiens
gagcccagcacaacg

SEQ ID NO: 1572923 - DNA, 15 bp, Homo sapiens
agcccagcacaacga

SEQ ID NO: 1572924 - DNA, 15 bp, Homo sapiens
gcccagcacaacgaa

SEQ ID NO: 1572925 - DNA, 15 bp, Homo sapiens
cccagcacaacgaag

SEQ ID NO: 1572926 - DNA, 15 bp, Homo sapiens
ccagcacaacgaagg

SEQ ID NO: 1572927 - DNA, 15 bp, Homo sapiens
cagcacaacgaaggt

SEQ ID NO: 1572928 - DNA, 15 bp, Homo sapiens
agcacaacgaaggtg

SEQ ID NO: 1572929 - DNA, 15 bp, Homo sapiens
gcacaacgaaggtga

SEQ ID NO: 1572930 - DNA, 15 bp, Homo sapiens
cacaacgaaggtgag

SEQ ID NO: 1572931 - DNA, 15 bp, Homo sapiens
acaacgaaggtgagg

SEQ ID NO: 1572932 - DNA, 15 bp, Homo sapiens
caacgaaggtgagga

SEQ ID NO: 1572933 - DNA, 15 bp, Homo sapiens
aacgaaggtgaggac

SEQ ID NO: 1572934 - DNA, 15 bp, Homo sapiens
acgaaggtgaggaca

SEQ ID NO: 1572935 - DNA, 15 bp, Homo sapiens
cgaaggtgaggacaa

SEQ ID NO: 1572936 - DNA, 15 bp, Homo sapiens
gaaggtgaggacaag

SEQ ID NO: 1572937 - DNA, 15 bp, Homo sapiens
aaggtgaggacaagg

SEQ ID NO: 1572938 - DNA, 15 bp, Homo sapiens
aggtgaggacaaggt

SEQ ID NO: 1572939 - DNA, 15 bp, Homo sapiens
ggtgaggacaaggtg

SEQ ID NO: 1572940 - DNA, 15 bp, Homo sapiens
gtgaggacaaggtgt

SEQ ID NO: 1572941 - DNA, 15 bp, Homo sapiens
tgaggacaaggtgtg

SEQ ID NO: 1572942 - DNA, 15 bp, Homo sapiens
gaggacaaggtgtgg

SEQ ID NO: 1572943 - DNA, 15 bp, Homo sapiens
aggacaaggtgtggc

SEQ ID NO: 1572944 - DNA, 15 bp, Homo sapiens
ggacaaggtgtggct

SEQ ID NO: 1572945 - DNA, 15 bp, Homo sapiens
gacaaggtgtggctc

SEQ ID NO: 1572946 - DNA, 15 bp, Homo sapiens
acaaggtgtggctcc

SEQ ID NO: 1572947 - DNA, 15 bp, Homo sapiens
caaggtgtggctccg

SEQ ID NO: 1572948 - DNA, 15 bp, Homo sapiens
aaggtgtggctccgg

SEQ ID NO: 1572949 - DNA, 15 bp, Homo sapiens
aggtgtggctccggg

SEQ ID NO: 1572950 - DNA, 15 bp, Homo sapiens
ggtgtggctccgggt

SEQ ID NO: 1572951 - DNA, 15 bp, Homo sapiens
gtgtggctccgggtc

SEQ ID NO: 1572952 - DNA, 15 bp, Homo sapiens
tgtggctccgggtcc

SEQ ID NO: 1572953 - DNA, 15 bp, Homo sapiens
gtggctccgggtccc

SEQ ID NO: 1572954 - DNA, 15 bp, Homo sapiens
tggctccgggtcccc

SEQ ID NO: 1572955 - DNA, 15 bp, Homo sapiens
ggctccgggtccccc

SEQ ID NO: 1572956 - DNA, 15 bp, Homo sapiens
gctccgggtccccct

SEQ ID NO: 1572957 - DNA, 15 bp, Homo sapiens
ctccgggtccccctg

SEQ ID NO: 1572958 - DNA, 15 bp, Homo sapiens
tccgggtccccctga

SEQ ID NO: 1572959 - DNA, 15 bp, Homo sapiens
ccgggtccccctgac

SEQ ID NO: 1572960 - DNA, 15 bp, Homo sapiens
cgggtccccctgacc

SEQ ID NO: 1572961 - DNA, 15 bp, Homo sapiens
gggtccccctgacca

SEQ ID NO: 1572962 - DNA, 15 bp, Homo sapiens
ggtccccctgaccac

SEQ ID NO: 1572963 - DNA, 15 bp, Homo sapiens
gtccccctgaccacc

SEQ ID NO: 1572964 - DNA, 15 bp, Homo sapiens
tccccctgaccacca

SEQ ID NO: 1572965 - DNA, 15 bp, Homo sapiens
ccccctgaccaccac

SEQ ID NO: 1572966 - DNA, 15 bp, Homo sapiens
cccctgaccaccacc

SEQ ID NO: 1572967 - DNA, 15 bp, Homo sapiens
ccctgaccaccaccc

SEQ ID NO: 1572968 - DNA, 15 bp, Homo sapiens
cctgaccaccaccct

SEQ ID NO: 1572969 - DNA, 15 bp, Homo sapiens
ctgaccaccaccctc

SEQ ID NO: 1572970 - DNA, 15 bp, Homo sapiens
tgaccaccaccctca

SEQ ID NO: 1572971 - DNA, 15 bp, Homo sapiens
gaccaccaccctcac

SEQ ID NO: 1572972 - DNA, 15 bp, Homo sapiens
accaccaccctcaca

SEQ ID NO: 1572973 - DNA, 15 bp, Homo sapiens
ccaccaccctcacag

SEQ ID NO: 1572974 - DNA, 15 bp, Homo sapiens
caccaccctcacagg

SEQ ID NO: 1572975 - DNA, 15 bp, Homo sapiens
accaccctcacaggc

SEQ ID NO: 1572976 - DNA, 15 bp, Homo sapiens
ccaccctcacaggct

SEQ ID NO: 1572977 - DNA, 15 bp, Homo sapiens
caccctcacaggctc

SEQ ID NO: 1572978 - DNA, 15 bp, Homo sapiens
accctcacaggctca

SEQ ID NO: 1572979 - DNA, 15 bp, Homo sapiens
ccctcacaggctcag

SEQ ID NO: 1572980 - DNA, 15 bp, Homo sapiens
cctcacaggctcagc

SEQ ID NO: 1572981 - DNA, 15 bp, Homo sapiens
ctcacaggctcagcc

SEQ ID NO: 1572982 - DNA, 15 bp, Homo sapiens
tcacaggctcagcca

SEQ ID NO: 1572983 - DNA, 15 bp, Homo sapiens
cacaggctcagccag

SEQ ID NO: 1572984 - DNA, 15 bp, Homo sapiens
acaggctcagccagc

SEQ ID NO: 1572985 - DNA, 15 bp, Homo sapiens
caggctcagccagcc

SEQ ID NO: 1572986 - DNA, 15 bp, Homo sapiens
aggctcagccagccc

SEQ ID NO: 1572987 - DNA, 15 bp, Homo sapiens
ggctcagccagccct

SEQ ID NO: 1572988 - DNA, 15 bp, Homo sapiens
gctcagccagccctg

SEQ ID NO: 1572989 - DNA, 15 bp, Homo sapiens
ctcagccagccctgg

SEQ ID NO: 1572990 - DNA, 15 bp, Homo sapiens
tcagccagccctgga

SEQ ID NO: 1572991 - DNA, 15 bp, Homo sapiens
cagccagccctggag

SEQ ID NO: 1572992 - DNA, 15 bp, Homo sapiens
agccagccctggagt

SEQ ID NO: 1572993 - DNA, 15 bp, Homo sapiens
gccagccctggagtg

SEQ ID NO: 1572994 - DNA, 15 bp, Homo sapiens
ccagccctggagtgt

SEQ ID NO: 1572995 - DNA, 15 bp, Homo sapiens
cagccctggagtgtg

SEQ ID NO: 1572996 - DNA, 15 bp, Homo sapiens
agccctggagtgtgg

SEQ ID NO: 1572997 - DNA, 15 bp, Homo sapiens
gccctggagtgtgga

SEQ ID NO: 1572998 - DNA, 15 bp, Homo sapiens
ccctggagtgtggag

SEQ ID NO: 1572999 - DNA, 15 bp, Homo sapiens
cctggagtgtggagt

SEQ ID NO: 1573000 - DNA, 15 bp, Homo sapiens
ctggagtgtggagtg

SEQ ID NO: 1573001 - DNA, 15 bp, Homo sapiens
tggagtgtggagtga

SEQ ID NO: 1573002 - DNA, 15 bp, Homo sapiens
ggagtgtggagtgac

SEQ ID NO: 1573003 - DNA, 15 bp, Homo sapiens
gagtgtggagtgaca

SEQ ID NO: 1573004 - DNA, 15 bp, Homo sapiens
agtgtggagtgacag

SEQ ID NO: 1573005 - DNA, 15 bp, Homo sapiens
gtgtggagtgacaga

SEQ ID NO: 1573006 - DNA, 15 bp, Homo sapiens
tgtggagtgacagag

SEQ ID NO: 1573007 - DNA, 15 bp, Homo sapiens
gtggagtgacagaga

SEQ ID NO: 1573008 - DNA, 15 bp, Homo sapiens
tggagtgacagagag

SEQ ID NO: 1573009 - DNA, 15 bp, Homo sapiens
ggagtgacagagaga

SEQ ID NO: 1573010 - DNA, 15 bp, Homo sapiens
gagtgacagagagag

SEQ ID NO: 1573011 - DNA, 15 bp, Homo sapiens
agtgacagagagaga

SEQ ID NO: 1573012 - DNA, 15 bp, Homo sapiens
gtgacagagagagaa

SEQ ID NO: 1573013 - DNA, 15 bp, Homo sapiens
tgacagagagagaag

SEQ ID NO: 1573014 - DNA, 15 bp, Homo sapiens
gacagagagagaagc

SEQ ID NO: 1573015 - DNA, 15 bp, Homo sapiens
acagagagagaagcc

SEQ ID NO: 1573016 - DNA, 15 bp, Homo sapiens
cagagagagaagcca

SEQ ID NO: 1573017 - DNA, 15 bp, Homo sapiens
agagagagaagccac

SEQ ID NO: 1573018 - DNA, 15 bp, Homo sapiens
gagagagaagccact

SEQ ID NO: 1573019 - DNA, 15 bp, Homo sapiens
agagagaagccactc

SEQ ID NO: 1573020 - DNA, 15 bp, Homo sapiens
gagagaagccactcc

SEQ ID NO: 1573021 - DNA, 15 bp, Homo sapiens
agagaagccactcct

SEQ ID NO: 1573022 - DNA, 15 bp, Homo sapiens
gagaagccactcctg

SEQ ID NO: 1573023 - DNA, 15 bp, Homo sapiens
agaagccactcctgg

SEQ ID NO: 1573024 - DNA, 15 bp, Homo sapiens
gaagccactcctggg

SEQ ID NO: 1573025 - DNA, 15 bp, Homo sapiens
aagccactcctgggc

SEQ ID NO: 1573026 - DNA, 15 bp, Homo sapiens
agccactcctgggca

SEQ ID NO: 1573027 - DNA, 15 bp, Homo sapiens
gccactcctgggcag

SEQ ID NO: 1573028 - DNA, 15 bp, Homo sapiens
ccactcctgggcagg

SEQ ID NO: 1573029 - DNA, 15 bp, Homo sapiens
cactcctgggcaggc

SEQ ID NO: 1573030 - DNA, 15 bp, Homo sapiens
actcctgggcaggcc

SEQ ID NO: 1573031 - DNA, 15 bp, Homo sapiens
ctcctgggcaggcca

SEQ ID NO: 1573032 - DNA, 15 bp, Homo sapiens
tcctgggcaggccac

SEQ ID NO: 1573033 - DNA, 15 bp, Homo sapiens
cctgggcaggccaca

SEQ ID NO: 1573034 - DNA, 15 bp, Homo sapiens
ctgggcaggccacaa

SEQ ID NO: 1573035 - DNA, 15 bp, Homo sapiens
tgggcaggccacaag

SEQ ID NO: 1573036 - DNA, 15 bp, Homo sapiens
gggcaggccacaagt

SEQ ID NO: 1573037 - DNA, 15 bp, Homo sapiens
ggcaggccacaagtg

SEQ ID NO: 1573038 - DNA, 15 bp, Homo sapiens
gcaggccacaagtgc

SEQ ID NO: 1573039 - DNA, 15 bp, Homo sapiens
caggccacaagtgct

SEQ ID NO: 1573040 - DNA, 15 bp, Homo sapiens
aggccacaagtgctc

SEQ ID NO: 1573041 - DNA, 15 bp, Homo sapiens
ggccacaagtgctcc

SEQ ID NO: 1573042 - DNA, 15 bp, Homo sapiens
gccacaagtgctcca

SEQ ID NO: 1573043 - DNA, 15 bp, Homo sapiens
ccacaagtgctccag

SEQ ID NO: 1573044 - DNA, 15 bp, Homo sapiens
cacaagtgctccaga

SEQ ID NO: 1573045 - DNA, 15 bp, Homo sapiens
acaagtgctccagag

SEQ ID NO: 1573046 - DNA, 15 bp, Homo sapiens
caagtgctccagagg

SEQ ID NO: 1573047 - DNA, 15 bp, Homo sapiens
aagtgctccagaggg

SEQ ID NO: 1573048 - DNA, 15 bp, Homo sapiens
agtgctccagagggc

SEQ ID NO: 1573049 - DNA, 15 bp, Homo sapiens
gtgctccagagggct

SEQ ID NO: 1573050 - DNA, 15 bp, Homo sapiens
tgctccagagggctt

SEQ ID NO: 1573051 - DNA, 15 bp, Homo sapiens
gctccagagggcttt

SEQ ID NO: 1573052 - DNA, 15 bp, Homo sapiens
ctccagagggctttg

SEQ ID NO: 1573053 - DNA, 15 bp, Homo sapiens
tccagagggctttgc

SEQ ID NO: 1573054 - DNA, 15 bp, Homo sapiens
ccagagggctttgct

SEQ ID NO: 1573055 - DNA, 15 bp, Homo sapiens
cagagggctttgctg

SEQ ID NO: 1573056 - DNA, 15 bp, Homo sapiens
agagggctttgctgg

SEQ ID NO: 1573057 - DNA, 15 bp, Homo sapiens
gagggctttgctgga

SEQ ID NO: 1573058 - DNA, 15 bp, Homo sapiens
agggctttgctggac

SEQ ID NO: 1573059 - DNA, 15 bp, Homo sapiens
gggctttgctggacg

SEQ ID NO: 1573060 - DNA, 15 bp, Homo sapiens
ggctttgctggacgc

SEQ ID NO: 1573061 - DNA, 15 bp, Homo sapiens
gctttgctggacgct

SEQ ID NO: 1573062 - DNA, 15 bp, Homo sapiens
ctttgctggacgctg

SEQ ID NO: 1573063 - DNA, 15 bp, Homo sapiens
tttgctggacgctgt

SEQ ID NO: 1573064 - DNA, 15 bp, Homo sapiens
ttgctggacgctgta

SEQ ID NO: 1573065 - DNA, 15 bp, Homo sapiens
tgctggacgctgtaa

SEQ ID NO: 1573066 - DNA, 15 bp, Homo sapiens
gctggacgctgtaaa

SEQ ID NO: 1573067 - DNA, 15 bp, Homo sapiens
ctggacgctgtaaag

SEQ ID NO: 1573068 - DNA, 15 bp, Homo sapiens
tggacgctgtaaagg

SEQ ID NO: 1573069 - DNA, 15 bp, Homo sapiens
ggacgctgtaaaggt

SEQ ID NO: 1573070 - DNA, 15 bp, Homo sapiens
gacgctgtaaaggta

SEQ ID NO: 1573071 - DNA, 15 bp, Homo sapiens
acgctgtaaaggtag

SEQ ID NO: 1573072 - DNA, 15 bp, Homo sapiens
cgctgtaaaggtaga

SEQ ID NO: 1573073 - DNA, 15 bp, Homo sapiens
gctgtaaaggtagaa

SEQ ID NO: 1573074 - DNA, 15 bp, Homo sapiens
ctgtaaaggtagaaa

SEQ ID NO: 1573075 - DNA, 15 bp, Homo sapiens
tgtaaaggtagaaag

SEQ ID NO: 1573076 - DNA, 15 bp, Homo sapiens
gtaaaggtagaaagt

SEQ ID NO: 1573077 - DNA, 15 bp, Homo sapiens
taaaggtagaaagtg

SEQ ID NO: 1573078 - DNA, 15 bp, Homo sapiens
aaaggtagaaagtga

SEQ ID NO: 1573079 - DNA, 15 bp, Homo sapiens
aaggtagaaagtgag

SEQ ID NO: 1573080 - DNA, 15 bp, Homo sapiens
aggtagaaagtgagc

SEQ ID NO: 1573081 - DNA, 15 bp, Homo sapiens
ggtagaaagtgagca

SEQ ID NO: 1573082 - DNA, 15 bp, Homo sapiens
gtagaaagtgagcaa

SEQ ID NO: 1573083 - DNA, 15 bp, Homo sapiens
tagaaagtgagcaac

SEQ ID NO: 1573084 - DNA, 15 bp, Homo sapiens
agaaagtgagcaacg

SEQ ID NO: 1573085 - DNA, 15 bp, Homo sapiens
gaaagtgagcaacga

SEQ ID NO: 1573086 - DNA, 15 bp, Homo sapiens
aaagtgagcaacgag

SEQ ID NO: 1573087 - DNA, 15 bp, Homo sapiens
aagtgagcaacgagg

SEQ ID NO: 1573088 - DNA, 15 bp, Homo sapiens
agtgagcaacgaggg

SEQ ID NO: 1573089 - DNA, 15 bp, Homo sapiens
gtgagcaacgagggg

SEQ ID NO: 1573090 - DNA, 15 bp, Homo sapiens
tgagcaacgagggga

SEQ ID NO: 1573091 - DNA, 15 bp, Homo sapiens
gagcaacgaggggag

SEQ ID NO: 1573092 - DNA, 15 bp, Homo sapiens
agcaacgaggggaga

SEQ ID NO: 1573093 - DNA, 15 bp, Homo sapiens
gcaacgaggggagag

SEQ ID NO: 1573094 - DNA, 15 bp, Homo sapiens
caacgaggggagagt

SEQ ID NO: 1573095 - DNA, 15 bp, Homo sapiens
aacgaggggagagta

SEQ ID NO: 1573096 - DNA, 15 bp, Homo sapiens
acgaggggagagtac

SEQ ID NO: 1573097 - DNA, 15 bp, Homo sapiens
cgaggggagagtaca

SEQ ID NO: 1573098 - DNA, 15 bp, Homo sapiens
gaggggagagtacag

SEQ ID NO: 1573099 - DNA, 15 bp, Homo sapiens
aggggagagtacagt

SEQ ID NO: 1573100 - DNA, 15 bp, Homo sapiens
ggggagagtacagtg

SEQ ID NO: 1573101 - DNA, 15 bp, Homo sapiens
gggagagtacagtgt

SEQ ID NO: 1573102 - DNA, 15 bp, Homo sapiens
ggagagtacagtgtc

SEQ ID NO: 1573103 - DNA, 15 bp, Homo sapiens
gagagtacagtgtca

SEQ ID NO: 1573104 - DNA, 15 bp, Homo sapiens
agagtacagtgtcag

SEQ ID NO: 1573105 - DNA, 15 bp, Homo sapiens
gagtacagtgtcaga

SEQ ID NO: 1573106 - DNA, 15 bp, Homo sapiens
agtacagtgtcagaa

SEQ ID NO: 1573107 - DNA, 15 bp, Homo sapiens
gtacagtgtcagaag

SEQ ID NO: 1573108 - DNA, 15 bp, Homo sapiens
tacagtgtcagaagt

SEQ ID NO: 1573109 - DNA, 15 bp, Homo sapiens
acagtgtcagaagta

SEQ ID NO: 1573110 - DNA, 15 bp, Homo sapiens
cagtgtcagaagtag

SEQ ID NO: 1573111 - DNA, 15 bp, Homo sapiens
agtgtcagaagtaga

SEQ ID NO: 1573112 - DNA, 15 bp, Homo sapiens
gtgtcagaagtagag

SEQ ID NO: 1573113 - DNA, 15 bp, Homo sapiens
tgtcagaagtagagg

SEQ ID NO: 1573114 - DNA, 15 bp, Homo sapiens
gtcagaagtagaggg

SEQ ID NO: 1573115 - DNA, 15 bp, Homo sapiens
tcagaagtagaggga

SEQ ID NO: 1573116 - DNA, 15 bp, Homo sapiens
cagaagtagagggac

SEQ ID NO: 1573117 - DNA, 15 bp, Homo sapiens
agaagtagagggaca

SEQ ID NO: 1573118 - DNA, 15 bp, Homo sapiens
gaagtagagggacag

SEQ ID NO: 1573119 - DNA, 15 bp, Homo sapiens
aagtagagggacagg

SEQ ID NO: 1573120 - DNA, 15 bp, Homo sapiens
agtagagggacaggg

SEQ ID NO: 1573121 - DNA, 15 bp, Homo sapiens
gtagagggacaggga

SEQ ID NO: 1573122 - DNA, 15 bp, Homo sapiens
tagagggacagggag

SEQ ID NO: 1573123 - DNA, 15 bp, Homo sapiens
agagggacagggagt

SEQ ID NO: 1573124 - DNA, 15 bp, Homo sapiens
gagggacagggagtg

SEQ ID NO: 1573125 - DNA, 15 bp, Homo sapiens
agggacagggagtgt

SEQ ID NO: 1573126 - DNA, 15 bp, Homo sapiens
gggacagggagtgtg

SEQ ID NO: 1573127 - DNA, 15 bp, Homo sapiens
ggacagggagtgtga

SEQ ID NO: 1573128 - DNA, 15 bp, Homo sapiens
gacagggagtgtgaa

SEQ ID NO: 1573129 - DNA, 15 bp, Homo sapiens
acagggagtgtgaat

SEQ ID NO: 1573130 - DNA, 15 bp, Homo sapiens
cagggagtgtgaatt

SEQ ID NO: 1573131 - DNA, 15 bp, Homo sapiens
agggagtgtgaattg

SEQ ID NO: 1573132 - DNA, 15 bp, Homo sapiens
gggagtgtgaattgg

SEQ ID NO: 1573133 - DNA, 15 bp, Homo sapiens
ggagtgtgaattgga

SEQ ID NO: 1573134 - DNA, 15 bp, Homo sapiens
gagtgtgaattggaa

SEQ ID NO: 1573135 - DNA, 15 bp, Homo sapiens
agtgtgaattggaac

SEQ ID NO: 1573136 - DNA, 15 bp, Homo sapiens
gtgtgaattggaact

SEQ ID NO: 1573137 - DNA, 15 bp, Homo sapiens
tgtgaattggaactg

SEQ ID NO: 1573138 - DNA, 15 bp, Homo sapiens
gtgaattggaactgg

SEQ ID NO: 1573139 - DNA, 15 bp, Homo sapiens
tgaattggaactggc

SEQ ID NO: 1573140 - DNA, 15 bp, Homo sapiens
gaattggaactggcc

SEQ ID NO: 1573141 - DNA, 15 bp, Homo sapiens
aattggaactggcca

SEQ ID NO: 1573142 - DNA, 15 bp, Homo sapiens
attggaactggccat

SEQ ID NO: 1573143 - DNA, 15 bp, Homo sapiens
ttggaactggccatt

SEQ ID NO: 1573144 - DNA, 15 bp, Homo sapiens
tggaactggccattt

SEQ ID NO: 1573145 - DNA, 15 bp, Homo sapiens
ggaactggccatttg

SEQ ID NO: 1573146 - DNA, 15 bp, Homo sapiens
gaactggccatttgt

SEQ ID NO: 1573147 - DNA, 15 bp, Homo sapiens
aactggccatttgtt

SEQ ID NO: 1573148 - DNA, 15 bp, Homo sapiens
actggccatttgttg

SEQ ID NO: 1573149 - DNA, 15 bp, Homo sapiens
ctggccatttgttga

SEQ ID NO: 1573150 - DNA, 15 bp, Homo sapiens
tggccatttgttgac

SEQ ID NO: 1573151 - DNA, 15 bp, Homo sapiens
ggccatttgttgacc

SEQ ID NO: 1573152 - DNA, 15 bp, Homo sapiens
gccatttgttgaccc

SEQ ID NO: 1573153 - DNA, 15 bp, Homo sapiens
ccatttgttgacccg

SEQ ID NO: 1573154 - DNA, 15 bp, Homo sapiens
catttgttgacccgg

SEQ ID NO: 1573155 - DNA, 15 bp, Homo sapiens
atttgttgacccggc

SEQ ID NO: 1573156 - DNA, 15 bp, Homo sapiens
tttgttgacccggct

SEQ ID NO: 1573157 - DNA, 15 bp, Homo sapiens
ttgttgacccggctg

SEQ ID NO: 1573158 - DNA, 15 bp, Homo sapiens
tgttgacccggctgg

SEQ ID NO: 1573159 - DNA, 15 bp, Homo sapiens
gttgacccggctggt

SEQ ID NO: 1573160 - DNA, 15 bp, Homo sapiens
ttgacccggctggtg

SEQ ID NO: 1573161 - DNA, 15 bp, Homo sapiens
tgacccggctggtga

SEQ ID NO: 1573162 - DNA, 15 bp, Homo sapiens
gacccggctggtgat

SEQ ID NO: 1573163 - DNA, 15 bp, Homo sapiens
acccggctggtgatc

SEQ ID NO: 1573164 - DNA, 15 bp, Homo sapiens
cccggctggtgatct

SEQ ID NO: 1573165 - DNA, 15 bp, Homo sapiens
ccggctggtgatctt

SEQ ID NO: 1573166 - DNA, 15 bp, Homo sapiens
cggctggtgatcttg

SEQ ID NO: 1573167 - DNA, 15 bp, Homo sapiens
ggctggtgatcttga

SEQ ID NO: 1573168 - DNA, 15 bp, Homo sapiens
gctggtgatcttgaa

SEQ ID NO: 1573169 - DNA, 15 bp, Homo sapiens
ctggtgatcttgaat

SEQ ID NO: 1573170 - DNA, 15 bp, Homo sapiens
tggtgatcttgaatt

SEQ ID NO: 1573171 - DNA, 15 bp, Homo sapiens
ggtgatcttgaattc

SEQ ID NO: 1573172 - DNA, 15 bp, Homo sapiens
gtgatcttgaattca

SEQ ID NO: 1573173 - DNA, 15 bp, Homo sapiens
tgatcttgaattcat

SEQ ID NO: 1573174 - DNA, 15 bp, Homo sapiens
gatcttgaattcatg

SEQ ID NO: 1573175 - DNA, 15 bp, Homo sapiens
atcttgaattcatgg

SEQ ID NO: 1573176 - DNA, 15 bp, Homo sapiens
tcttgaattcatggc

SEQ ID NO: 1573177 - DNA, 15 bp, Homo sapiens
cttgaattcatggcc

SEQ ID NO: 1573178 - DNA, 15 bp, Homo sapiens
ttgaattcatggccc

SEQ ID NO: 1573179 - DNA, 15 bp, Homo sapiens
tgaattcatggccca

SEQ ID NO: 1573180 - DNA, 15 bp, Homo sapiens
gaattcatggcccac

SEQ ID NO: 1573181 - DNA, 15 bp, Homo sapiens
aattcatggcccaca

SEQ ID NO: 1573182 - DNA, 15 bp, Homo sapiens
attcatggcccacat

SEQ ID NO: 1573183 - DNA, 15 bp, Homo sapiens
ttcatggcccacatc

SEQ ID NO: 1573184 - DNA, 15 bp, Homo sapiens
tcatggcccacatct

SEQ ID NO: 1573185 - DNA, 15 bp, Homo sapiens
catggcccacatcta

SEQ ID NO: 1573186 - DNA, 15 bp, Homo sapiens
atggcccacatctaa

SEQ ID NO: 1573187 - DNA, 15 bp, Homo sapiens
tggcccacatctaag

SEQ ID NO: 1573188 - DNA, 15 bp, Homo sapiens
ggcccacatctaaga

SEQ ID NO: 1573189 - DNA, 15 bp, Homo sapiens
gcccacatctaagat

SEQ ID NO: 1573190 - DNA, 15 bp, Homo sapiens
cccacatctaagatg

SEQ ID NO: 1573191 - DNA, 15 bp, Homo sapiens
ccacatctaagatgg

SEQ ID NO: 1573192 - DNA, 15 bp, Homo sapiens
cacatctaagatggt

SEQ ID NO: 1573193 - DNA, 15 bp, Homo sapiens
acatctaagatggtg

SEQ ID NO: 1573194 - DNA, 15 bp, Homo sapiens
catctaagatggtgg

SEQ ID NO: 1573195 - DNA, 15 bp, Homo sapiens
atctaagatggtgga

SEQ ID NO: 1573196 - DNA, 15 bp, Homo sapiens
tctaagatggtggac

SEQ ID NO: 1573197 - DNA, 15 bp, Homo sapiens
ctaagatggtggact

SEQ ID NO: 1573198 - DNA, 15 bp, Homo sapiens
taagatggtggactt

SEQ ID NO: 1573199 - DNA, 15 bp, Homo sapiens
aagatggtggacttc

SEQ ID NO: 1573200 - DNA, 15 bp, Homo sapiens
agatggtggacttca

SEQ ID NO: 1573201 - DNA, 15 bp, Homo sapiens
gatggtggacttcac

SEQ ID NO: 1573202 - DNA, 15 bp, Homo sapiens
atggtggacttcaca

SEQ ID NO: 1573203 - DNA, 15 bp, Homo sapiens
tggtggacttcacac

SEQ ID NO: 1573204 - DNA, 15 bp, Homo sapiens
ggtggacttcacact

SEQ ID NO: 1573205 - DNA, 15 bp, Homo sapiens
gtggacttcacactc

SEQ ID NO: 1573206 - DNA, 15 bp, Homo sapiens
tggacttcacactcc

SEQ ID NO: 1573207 - DNA, 15 bp, Homo sapiens
ggacttcacactccc

SEQ ID NO: 1573208 - DNA, 15 bp, Homo sapiens
gacttcacactccca

SEQ ID NO: 1573209 - DNA, 15 bp, Homo sapiens
acttcacactcccat

SEQ ID NO: 1573210 - DNA, 15 bp, Homo sapiens
cttcacactcccata

SEQ ID NO: 1573211 - DNA, 15 bp, Homo sapiens
ttcacactcccatac

SEQ ID NO: 1573212 - DNA, 15 bp, Homo sapiens
tcacactcccatacg

SEQ ID NO: 1573213 - DNA, 15 bp, Homo sapiens
cacactcccatacgg

SEQ ID NO: 1573214 - DNA, 15 bp, Homo sapiens
acactcccatacgga

SEQ ID NO: 1573215 - DNA, 15 bp, Homo sapiens
cactcccatacggat

SEQ ID NO: 1573216 - DNA, 15 bp, Homo sapiens
actcccatacggatt

SEQ ID NO: 1573217 - DNA, 15 bp, Homo sapiens
ctcccatacggattg

SEQ ID NO: 1573218 - DNA, 15 bp, Homo sapiens
tcccatacggattgc

SEQ ID NO: 1573219 - DNA, 15 bp, Homo sapiens
cccatacggattgcc

SEQ ID NO: 1573220 - DNA, 15 bp, Homo sapiens
ccatacggattgcct

SEQ ID NO: 1573221 - DNA, 15 bp, Homo sapiens
catacggattgcctg

SEQ ID NO: 1573222 - DNA, 15 bp, Homo sapiens
atacggattgcctgc

SEQ ID NO: 1573223 - DNA, 15 bp, Homo sapiens
tacggattgcctgcc

SEQ ID NO: 1573224 - DNA, 15 bp, Homo sapiens
acggattgcctgccc

SEQ ID NO: 1573225 - DNA, 15 bp, Homo sapiens
cggattgcctgcccc

SEQ ID NO: 1573226 - DNA, 15 bp, Homo sapiens
ggattgcctgcccca

SEQ ID NO: 1573227 - DNA, 15 bp, Homo sapiens
gattgcctgccccac

SEQ ID NO: 1573228 - DNA, 15 bp, Homo sapiens
attgcctgccccact

SEQ ID NO: 1573229 - DNA, 15 bp, Homo sapiens
ttgcctgccccactt

SEQ ID NO: 1573230 - DNA, 15 bp, Homo sapiens
tgcctgccccacttg

SEQ ID NO: 1573231 - DNA, 15 bp, Homo sapiens
gcctgccccacttga

SEQ ID NO: 1573232 - DNA, 15 bp, Homo sapiens
cctgccccacttgaa

SEQ ID NO: 1573233 - DNA, 15 bp, Homo sapiens
ctgccccacttgaaa

SEQ ID NO: 1573234 - DNA, 15 bp, Homo sapiens
tgccccacttgaaaa

SEQ ID NO: 1573235 - DNA, 15 bp, Homo sapiens
gccccacttgaaaaa

SEQ ID NO: 1573236 - DNA, 15 bp, Homo sapiens
ccccacttgaaaaat

SEQ ID NO: 1573237 - DNA, 15 bp, Homo sapiens
cccacttgaaaaatg

SEQ ID NO: 1573238 - DNA, 15 bp, Homo sapiens
ccacttgaaaaatgg

SEQ ID NO: 1573239 - DNA, 15 bp, Homo sapiens
cacttgaaaaatggg

SEQ ID NO: 1573240 - DNA, 15 bp, Homo sapiens
acttgaaaaatgggg

SEQ ID NO: 1573241 - DNA, 15 bp, Homo sapiens
cttgaaaaatggggc

SEQ ID NO: 1573242 - DNA, 15 bp, Homo sapiens
ttgaaaaatggggct

SEQ ID NO: 1573243 - DNA, 15 bp, Homo sapiens
tgaaaaatggggctg

SEQ ID NO: 1573244 - DNA, 15 bp, Homo sapiens
gaaaaatggggctga

SEQ ID NO: 1573245 - DNA, 15 bp, Homo sapiens
aaaaatggggctgac

SEQ ID NO: 1573246 - DNA, 15 bp, Homo sapiens
aaaatggggctgacc

SEQ ID NO: 1573247 - DNA, 15 bp, Homo sapiens
aaatggggctgaccg

SEQ ID NO: 1573248 - DNA, 15 bp, Homo sapiens
aatggggctgaccgg

SEQ ID NO: 1573249 - DNA, 15 bp, Homo sapiens
atggggctgaccggg

SEQ ID NO: 1573250 - DNA, 15 bp, Homo sapiens
tggggctgaccgggc

SEQ ID NO: 1573251 - DNA, 15 bp, Homo sapiens
ggggctgaccgggct

SEQ ID NO: 1573252 - DNA, 15 bp, Homo sapiens
gggctgaccgggctc

SEQ ID NO: 1573253 - DNA, 15 bp, Homo sapiens
ggctgaccgggctca

SEQ ID NO: 1573254 - DNA, 15 bp, Homo sapiens
gctgaccgggctcac

SEQ ID NO: 1573255 - DNA, 15 bp, Homo sapiens
ctgaccgggctcacg

SEQ ID NO: 1573256 - DNA, 15 bp, Homo sapiens
tgaccgggctcacgt

SEQ ID NO: 1573257 - DNA, 15 bp, Homo sapiens
gaccgggctcacgtg

SEQ ID NO: 1573258 - DNA, 15 bp, Homo sapiens
accgggctcacgtgg

SEQ ID NO: 1573259 - DNA, 15 bp, Homo sapiens
ccgggctcacgtggg

SEQ ID NO: 1573260 - DNA, 15 bp, Homo sapiens
cgggctcacgtgggc

SEQ ID NO: 1573261 - DNA, 15 bp, Homo sapiens
gggctcacgtgggct

SEQ ID NO: 1573262 - DNA, 15 bp, Homo sapiens
ggctcacgtgggctg

SEQ ID NO: 1573263 - DNA, 15 bp, Homo sapiens
gctcacgtgggctga

SEQ ID NO: 1573264 - DNA, 15 bp, Homo sapiens
ctcacgtgggctgac

SEQ ID NO: 1573265 - DNA, 15 bp, Homo sapiens
tcacgtgggctgacc

SEQ ID NO: 1573266 - DNA, 15 bp, Homo sapiens
cacgtgggctgacct

SEQ ID NO: 1573267 - DNA, 15 bp, Homo sapiens
acgtgggctgacctt

SEQ ID NO: 1573268 - DNA, 15 bp, Homo sapiens
cgtgggctgaccttt

SEQ ID NO: 1573269 - DNA, 15 bp, Homo sapiens
gtgggctgacctttc

SEQ ID NO: 1573270 - DNA, 15 bp, Homo sapiens
tgggctgacctttcc

SEQ ID NO: 1573271 - DNA, 15 bp, Homo sapiens
gggctgacctttcca

SEQ ID NO: 1573272 - DNA, 15 bp, Homo sapiens
ggctgacctttccac

SEQ ID NO: 1573273 - DNA, 15 bp, Homo sapiens
gctgacctttccacg

SEQ ID NO: 1573274 - DNA, 15 bp, Homo sapiens
ctgacctttccacgt

SEQ ID NO: 1573275 - DNA, 15 bp, Homo sapiens
tgacctttccacgtg

SEQ ID NO: 1573276 - DNA, 15 bp, Homo sapiens
gacctttccacgtgg

SEQ ID NO: 1573277 - DNA, 15 bp, Homo sapiens
acctttccacgtggc

SEQ ID NO: 1573278 - DNA, 15 bp, Homo sapiens
cctttccacgtggca

SEQ ID NO: 1573279 - DNA, 15 bp, Homo sapiens
ctttccacgtggcag

SEQ ID NO: 1573280 - DNA, 15 bp, Homo sapiens
tttccacgtggcagc

SEQ ID NO: 1573281 - DNA, 15 bp, Homo sapiens
ttccacgtggcagct

SEQ ID NO: 1573282 - DNA, 15 bp, Homo sapiens
tccacgtggcagctg

SEQ ID NO: 1573283 - DNA, 15 bp, Homo sapiens
ccacgtggcagctgt

SEQ ID NO: 1573284 - DNA, 15 bp, Homo sapiens
cacgtggcagctgtc

SEQ ID NO: 1573285 - DNA, 15 bp, Homo sapiens
acgtggcagctgtca

SEQ ID NO: 1573286 - DNA, 15 bp, Homo sapiens
cgtggcagctgtcat

SEQ ID NO: 1573287 - DNA, 15 bp, Homo sapiens
gtggcagctgtcatg

SEQ ID NO: 1573288 - DNA, 15 bp, Homo sapiens
tggcagctgtcatgc

SEQ ID NO: 1573289 - DNA, 15 bp, Homo sapiens
ggcagctgtcatgct

SEQ ID NO: 1573290 - DNA, 15 bp, Homo sapiens
gcagctgtcatgctc

SEQ ID NO: 1573291 - DNA, 15 bp, Homo sapiens
cagctgtcatgctca

SEQ ID NO: 1573292 - DNA, 15 bp, Homo sapiens
agctgtcatgctcac

SEQ ID NO: 1573293 - DNA, 15 bp, Homo sapiens
gctgtcatgctcaca

SEQ ID NO: 1573294 - DNA, 15 bp, Homo sapiens
ctgtcatgctcacat

SEQ ID NO: 1573295 - DNA, 15 bp, Homo sapiens
tgtcatgctcacatc

SEQ ID NO: 1573296 - DNA, 15 bp, Homo sapiens
gtcatgctcacatcc

SEQ ID NO: 1573297 - DNA, 15 bp, Homo sapiens
tcatgctcacatccc

SEQ ID NO: 1573298 - DNA, 15 bp, Homo sapiens
catgctcacatcccg

SEQ ID NO: 1573299 - DNA, 15 bp, Homo sapiens
atgctcacatcccgc

SEQ ID NO: 1573300 - DNA, 15 bp, Homo sapiens
tgctcacatcccgca

SEQ ID NO: 1573301 - DNA, 15 bp, Homo sapiens
gctcacatcccgcac

SEQ ID NO: 1573302 - DNA, 15 bp, Homo sapiens
ctcacatcccgcact

SEQ ID NO: 1573303 - DNA, 15 bp, Homo sapiens
tcacatcccgcactc

SEQ ID NO: 1573304 - DNA, 15 bp, Homo sapiens
cacatcccgcactcc

SEQ ID NO: 1573305 - DNA, 15 bp, Homo sapiens
acatcccgcactccc

SEQ ID NO: 1573306 - DNA, 15 bp, Homo sapiens
catcccgcactccca

SEQ ID NO: 1573307 - DNA, 15 bp, Homo sapiens
atcccgcactcccat

SEQ ID NO: 1573308 - DNA, 15 bp, Homo sapiens
tcccgcactcccatg

SEQ ID NO: 1573309 - DNA, 15 bp, Homo sapiens
cccgcactcccatgc

SEQ ID NO: 1573310 - DNA, 15 bp, Homo sapiens
ccgcactcccatgcc

SEQ ID NO: 1573311 - DNA, 15 bp, Homo sapiens
cgcactcccatgcct

SEQ ID NO: 1573312 - DNA, 15 bp, Homo sapiens
gcactcccatgcctg

SEQ ID NO: 1573313 - DNA, 15 bp, Homo sapiens
cactcccatgcctgc

SEQ ID NO: 1573314 - DNA, 15 bp, Homo sapiens
actcccatgcctgcc

SEQ ID NO: 1573315 - DNA, 15 bp, Homo sapiens
ctcccatgcctgcct

SEQ ID NO: 1573316 - DNA, 15 bp, Homo sapiens
tcccatgcctgcctg

SEQ ID NO: 1573317 - DNA, 15 bp, Homo sapiens
cccatgcctgcctgg

SEQ ID NO: 1573318 - DNA, 15 bp, Homo sapiens
ccatgcctgcctggc

SEQ ID NO: 1573319 - DNA, 15 bp, Homo sapiens
catgcctgcctggcc

SEQ ID NO: 1573320 - DNA, 15 bp, Homo sapiens
atgcctgcctggcct

SEQ ID NO: 1573321 - DNA, 15 bp, Homo sapiens
tgcctgcctggcctc

SEQ ID NO: 1573322 - DNA, 15 bp, Homo sapiens
gcctgcctggcctcc

SEQ ID NO: 1573323 - DNA, 15 bp, Homo sapiens
cctgcctggcctcca

SEQ ID NO: 1573324 - DNA, 15 bp, Homo sapiens
ctgcctggcctccag

SEQ ID NO: 1573325 - DNA, 15 bp, Homo sapiens
tgcctggcctccaga

SEQ ID NO: 1573326 - DNA, 15 bp, Homo sapiens
gcctggcctccagaa

SEQ ID NO: 1573327 - DNA, 15 bp, Homo sapiens
cctggcctccagaag

SEQ ID NO: 1573328 - DNA, 15 bp, Homo sapiens
ctggcctccagaagt

SEQ ID NO: 1573329 - DNA, 15 bp, Homo sapiens
tggcctccagaagta

SEQ ID NO: 1573330 - DNA, 15 bp, Homo sapiens
ggcctccagaagtag

SEQ ID NO: 1573331 - DNA, 15 bp, Homo sapiens
gcctccagaagtagg

SEQ ID NO: 1573332 - DNA, 15 bp, Homo sapiens
cctccagaagtaggt

SEQ ID NO: 1573333 - DNA, 15 bp, Homo sapiens
ctccagaagtaggtc

SEQ ID NO: 1573334 - DNA, 15 bp, Homo sapiens
tccagaagtaggtct

SEQ ID NO: 1573335 - DNA, 15 bp, Homo sapiens
ccagaagtaggtctg

SEQ ID NO: 1573336 - DNA, 15 bp, Homo sapiens
cagaagtaggtctgt

SEQ ID NO: 1573337 - DNA, 15 bp, Homo sapiens
agaagtaggtctgtt

SEQ ID NO: 1573338 - DNA, 15 bp, Homo sapiens
gaagtaggtctgttc

SEQ ID NO: 1573339 - DNA, 15 bp, Homo sapiens
aagtaggtctgttcc

SEQ ID NO: 1573340 - DNA, 15 bp, Homo sapiens
agtaggtctgttccc

SEQ ID NO: 1573341 - DNA, 15 bp, Homo sapiens
gtaggtctgttcccc

SEQ ID NO: 1573342 - DNA, 15 bp, Homo sapiens
taggtctgttccccc

SEQ ID NO: 1573343 - DNA, 15 bp, Homo sapiens
aggtctgttccccca

SEQ ID NO: 1573344 - DNA, 15 bp, Homo sapiens
ggtctgttcccccag

SEQ ID NO: 1573345 - DNA, 15 bp, Homo sapiens
gtctgttcccccagg

SEQ ID NO: 1573346 - DNA, 15 bp, Homo sapiens
tctgttcccccaggg

SEQ ID NO: 1573347 - DNA, 15 bp, Homo sapiens
ctgttcccccaggga

SEQ ID NO: 1573348 - DNA, 15 bp, Homo sapiens
tgttcccccagggag

SEQ ID NO: 1573349 - DNA, 15 bp, Homo sapiens
gttcccccagggagc

SEQ ID NO: 1573350 - DNA, 15 bp, Homo sapiens
ttcccccagggagca

SEQ ID NO: 1573351 - DNA, 15 bp, Homo sapiens
tcccccagggagcac

SEQ ID NO: 1573352 - DNA, 15 bp, Homo sapiens
cccccagggagcaca

SEQ ID NO: 1573353 - DNA, 15 bp, Homo sapiens
ccccagggagcacat

SEQ ID NO: 1573354 - DNA, 15 bp, Homo sapiens
cccagggagcacatc

SEQ ID NO: 1573355 - DNA, 15 bp, Homo sapiens
ccagggagcacatct

SEQ ID NO: 1573356 - DNA, 15 bp, Homo sapiens
cagggagcacatctg

SEQ ID NO: 1573357 - DNA, 15 bp, Homo sapiens
agggagcacatctga

SEQ ID NO: 1573358 - DNA, 15 bp, Homo sapiens
gggagcacatctgag

SEQ ID NO: 1573359 - DNA, 15 bp, Homo sapiens
ggagcacatctgagg

SEQ ID NO: 1573360 - DNA, 15 bp, Homo sapiens
gagcacatctgaggg

SEQ ID NO: 1573361 - DNA, 15 bp, Homo sapiens
agcacatctgaggga

SEQ ID NO: 1573362 - DNA, 15 bp, Homo sapiens
gcacatctgagggag

SEQ ID NO: 1573363 - DNA, 15 bp, Homo sapiens
cacatctgagggaga

SEQ ID NO: 1573364 - DNA, 15 bp, Homo sapiens
acatctgagggagaa

SEQ ID NO: 1573365 - DNA, 15 bp, Homo sapiens
catctgagggagaaa

SEQ ID NO: 1573366 - DNA, 15 bp, Homo sapiens
atctgagggagaaac

SEQ ID NO: 1573367 - DNA, 15 bp, Homo sapiens
tctgagggagaaact

SEQ ID NO: 1573368 - DNA, 15 bp, Homo sapiens
ctgagggagaaactg

SEQ ID NO: 1573369 - DNA, 15 bp, Homo sapiens
tgagggagaaactgc

SEQ ID NO: 1573370 - DNA, 15 bp, Homo sapiens
gagggagaaactgca

SEQ ID NO: 1573371 - DNA, 15 bp, Homo sapiens
agggagaaactgcat

SEQ ID NO: 1573372 - DNA, 15 bp, Homo sapiens
gggagaaactgcatg

SEQ ID NO: 1573373 - DNA, 15 bp, Homo sapiens
ggagaaactgcatga

SEQ ID NO: 1573374 - DNA, 15 bp, Homo sapiens
gagaaactgcatgaa

SEQ ID NO: 1573375 - DNA, 15 bp, Homo sapiens
agaaactgcatgaag

SEQ ID NO: 1573376 - DNA, 15 bp, Homo sapiens
gaaactgcatgaagt

SEQ ID NO: 1573377 - DNA, 15 bp, Homo sapiens
aaactgcatgaagtt

SEQ ID NO: 1573378 - DNA, 15 bp, Homo sapiens
aactgcatgaagttc

SEQ ID NO: 1573379 - DNA, 15 bp, Homo sapiens
actgcatgaagttct

SEQ ID NO: 1573380 - DNA, 15 bp, Homo sapiens
ctgcatgaagttctg

SEQ ID NO: 1573381 - DNA, 15 bp, Homo sapiens
tgcatgaagttctgc

SEQ ID NO: 1573382 - DNA, 15 bp, Homo sapiens
gcatgaagttctgcc

SEQ ID NO: 1573383 - DNA, 15 bp, Homo sapiens
catgaagttctgcct

SEQ ID NO: 1573384 - DNA, 15 bp, Homo sapiens
atgaagttctgcctc

SEQ ID NO: 1573385 - DNA, 15 bp, Homo sapiens
tgaagttctgcctct

SEQ ID NO: 1573386 - DNA, 15 bp, Homo sapiens
gaagttctgcctctg

SEQ ID NO: 1573387 - DNA, 15 bp, Homo sapiens
aagttctgcctctgg

SEQ ID NO: 1573388 - DNA, 15 bp, Homo sapiens
agttctgcctctggc

SEQ ID NO: 1573389 - DNA, 15 bp, Homo sapiens
gttctgcctctggct

SEQ ID NO: 1573390 - DNA, 15 bp, Homo sapiens
ttctgcctctggcta

SEQ ID NO: 1573391 - DNA, 15 bp, Homo sapiens
tctgcctctggctac

SEQ ID NO: 1573392 - DNA, 15 bp, Homo sapiens
ctgcctctggctacc

SEQ ID NO: 1573393 - DNA, 15 bp, Homo sapiens
tgcctctggctacct

SEQ ID NO: 1573394 - DNA, 15 bp, Homo sapiens
gcctctggctaccta

SEQ ID NO: 1573395 - DNA, 15 bp, Homo sapiens
cctctggctacctaa

SEQ ID NO: 1573396 - DNA, 15 bp, Homo sapiens
ctctggctacctaag

SEQ ID NO: 1573397 - DNA, 15 bp, Homo sapiens
tctggctacctaagg

SEQ ID NO: 1573398 - DNA, 15 bp, Homo sapiens
ctggctacctaaggc

SEQ ID NO: 1573399 - DNA, 15 bp, Homo sapiens
tggctacctaaggcc

SEQ ID NO: 1573400 - DNA, 15 bp, Homo sapiens
ggctacctaaggccg

SEQ ID NO: 1573401 - DNA, 15 bp, Homo sapiens
gctacctaaggccgg

SEQ ID NO: 1573402 - DNA, 15 bp, Homo sapiens
ctacctaaggccgga

SEQ ID NO: 1573403 - DNA, 15 bp, Homo sapiens
tacctaaggccggag

SEQ ID NO: 1573404 - DNA, 15 bp, Homo sapiens
acctaaggccggagc

SEQ ID NO: 1573405 - DNA, 15 bp, Homo sapiens
cctaaggccggagca

SEQ ID NO: 1573406 - DNA, 15 bp, Homo sapiens
ctaaggccggagcat

SEQ ID NO: 1573407 - DNA, 15 bp, Homo sapiens
taaggccggagcatc

SEQ ID NO: 1573408 - DNA, 15 bp, Homo sapiens
aaggccggagcatcc

SEQ ID NO: 1573409 - DNA, 15 bp, Homo sapiens
aggccggagcatcct

SEQ ID NO: 1573410 - DNA, 15 bp, Homo sapiens
ggccggagcatcctg

SEQ ID NO: 1573411 - DNA, 15 bp, Homo sapiens
gccggagcatcctgc

SEQ ID NO: 1573412 - DNA, 15 bp, Homo sapiens
ccggagcatcctgcc

SEQ ID NO: 1573413 - DNA, 15 bp, Homo sapiens
cggagcatcctgccc

SEQ ID NO: 1573414 - DNA, 15 bp, Homo sapiens
ggagcatcctgccct

SEQ ID NO: 1573415 - DNA, 15 bp, Homo sapiens
gagcatcctgccctt

SEQ ID NO: 1573416 - DNA, 15 bp, Homo sapiens
agcatcctgcccttt

SEQ ID NO: 1573417 - DNA, 15 bp, Homo sapiens
gcatcctgccctttc

SEQ ID NO: 1573418 - DNA, 15 bp, Homo sapiens
catcctgccctttcc

SEQ ID NO: 1573419 - DNA, 15 bp, Homo sapiens
atcctgccctttcca

SEQ ID NO: 1573420 - DNA, 15 bp, Homo sapiens
tcctgccctttccag

SEQ ID NO: 1573421 - DNA, 15 bp, Homo sapiens
cctgccctttccaga

SEQ ID NO: 1573422 - DNA, 15 bp, Homo sapiens
ctgccctttccagaa

SEQ ID NO: 1573423 - DNA, 15 bp, Homo sapiens
tgccctttccagaaa

SEQ ID NO: 1573424 - DNA, 15 bp, Homo sapiens
gccctttccagaaac

SEQ ID NO: 1573425 - DNA, 15 bp, Homo sapiens
ccctttccagaaaca

SEQ ID NO: 1573426 - DNA, 15 bp, Homo sapiens
cctttccagaaacac

SEQ ID NO: 1573427 - DNA, 15 bp, Homo sapiens
ctttccagaaacacc

SEQ ID NO: 1573428 - DNA, 15 bp, Homo sapiens
tttccagaaacacca

SEQ ID NO: 1573429 - DNA, 15 bp, Homo sapiens
ttccagaaacaccag

SEQ ID NO: 1573430 - DNA, 15 bp, Homo sapiens
tccagaaacaccagg

SEQ ID NO: 1573431 - DNA, 15 bp, Homo sapiens
ccagaaacaccaggt

SEQ ID NO: 1573432 - DNA, 15 bp, Homo sapiens
cagaaacaccaggtc

SEQ ID NO: 1573433 - DNA, 15 bp, Homo sapiens
agaaacaccaggtct

SEQ ID NO: 1573434 - DNA, 15 bp, Homo sapiens
gaaacaccaggtctc

SEQ ID NO: 1573435 - DNA, 15 bp, Homo sapiens
aaacaccaggtctca

SEQ ID NO: 1573436 - DNA, 15 bp, Homo sapiens
aacaccaggtctcac

SEQ ID NO: 1573437 - DNA, 15 bp, Homo sapiens
acaccaggtctcacc

SEQ ID NO: 1573438 - DNA, 15 bp, Homo sapiens
caccaggtctcacct

SEQ ID NO: 1573439 - DNA, 15 bp, Homo sapiens
accaggtctcacctc

SEQ ID NO: 1573440 - DNA, 15 bp, Homo sapiens
ccaggtctcacctca

SEQ ID NO: 1573441 - DNA, 15 bp, Homo sapiens
caggtctcacctcag

SEQ ID NO: 1573442 - DNA, 15 bp, Homo sapiens
aggtctcacctcagg

SEQ ID NO: 1573443 - DNA, 15 bp, Homo sapiens
ggtctcacctcaggt

SEQ ID NO: 1573444 - DNA, 15 bp, Homo sapiens
gtctcacctcaggtc

SEQ ID NO: 1573445 - DNA, 15 bp, Homo sapiens
tctcacctcaggtca

SEQ ID NO: 1573446 - DNA, 15 bp, Homo sapiens
ctcacctcaggtcat

SEQ ID NO: 1573447 - DNA, 15 bp, Homo sapiens
tcacctcaggtcatt

SEQ ID NO: 1573448 - DNA, 15 bp, Homo sapiens
cacctcaggtcattt

SEQ ID NO: 1573449 - DNA, 15 bp, Homo sapiens
acctcaggtcatttg

SEQ ID NO: 1573450 - DNA, 15 bp, Homo sapiens
cctcaggtcatttgg

SEQ ID NO: 1573451 - DNA, 15 bp, Homo sapiens
ctcaggtcatttggc

SEQ ID NO: 1573452 - DNA, 15 bp, Homo sapiens
tcaggtcatttggcc

SEQ ID NO: 1573453 - DNA, 15 bp, Homo sapiens
caggtcatttggcct

SEQ ID NO: 1573454 - DNA, 15 bp, Homo sapiens
aggtcatttggcctt

SEQ ID NO: 1573455 - DNA, 15 bp, Homo sapiens
ggtcatttggccttc

SEQ ID NO: 1573456 - DNA, 15 bp, Homo sapiens
gtcatttggccttca

SEQ ID NO: 1573457 - DNA, 15 bp, Homo sapiens
tcatttggccttcag

SEQ ID NO: 1573458 - DNA, 15 bp, Homo sapiens
catttggccttcagc

SEQ ID NO: 1573459 - DNA, 15 bp, Homo sapiens
atttggccttcagca

SEQ ID NO: 1573460 - DNA, 15 bp, Homo sapiens
tttggccttcagcac

SEQ ID NO: 1573461 - DNA, 15 bp, Homo sapiens
ttggccttcagcact

SEQ ID NO: 1573462 - DNA, 15 bp, Homo sapiens
tggccttcagcactg

SEQ ID NO: 1573463 - DNA, 15 bp, Homo sapiens
ggccttcagcactgt

SEQ ID NO: 1573464 - DNA, 15 bp, Homo sapiens
gccttcagcactgtc

SEQ ID NO: 1573465 - DNA, 15 bp, Homo sapiens
ccttcagcactgtcc

SEQ ID NO: 1573466 - DNA, 15 bp, Homo sapiens
cttcagcactgtccc

SEQ ID NO: 1573467 - DNA, 15 bp, Homo sapiens
ttcagcactgtcccg

SEQ ID NO: 1573468 - DNA, 15 bp, Homo sapiens
tcagcactgtcccgc

SEQ ID NO: 1573469 - DNA, 15 bp, Homo sapiens
cagcactgtcccgcc

SEQ ID NO: 1573470 - DNA, 15 bp, Homo sapiens
agcactgtcccgccc

SEQ ID NO: 1573471 - DNA, 15 bp, Homo sapiens
gcactgtcccgcccc

SEQ ID NO: 1573472 - DNA, 15 bp, Homo sapiens
cactgtcccgccccg

SEQ ID NO: 1573473 - DNA, 15 bp, Homo sapiens
actgtcccgccccgc

SEQ ID NO: 1573474 - DNA, 15 bp, Homo sapiens
ctgtcccgccccgcc

SEQ ID NO: 1573475 - DNA, 15 bp, Homo sapiens
tgtcccgccccgcct

SEQ ID NO: 1573476 - DNA, 15 bp, Homo sapiens
gtcccgccccgcctg

SEQ ID NO: 1573477 - DNA, 15 bp, Homo sapiens
tcccgccccgcctgt

SEQ ID NO: 1573478 - DNA, 15 bp, Homo sapiens
cccgccccgcctgtc

SEQ ID NO: 1573479 - DNA, 15 bp, Homo sapiens
ccgccccgcctgtca

SEQ ID NO: 1573480 - DNA, 15 bp, Homo sapiens
cgccccgcctgtcag

SEQ ID NO: 1573481 - DNA, 15 bp, Homo sapiens
gccccgcctgtcagt

SEQ ID NO: 1573482 - DNA, 15 bp, Homo sapiens
ccccgcctgtcagta

SEQ ID NO: 1573483 - DNA, 15 bp, Homo sapiens
cccgcctgtcagtag

SEQ ID NO: 1573484 - DNA, 15 bp, Homo sapiens
ccgcctgtcagtagc

SEQ ID NO: 1573485 - DNA, 15 bp, Homo sapiens
cgcctgtcagtagcc

SEQ ID NO: 1573486 - DNA, 15 bp, Homo sapiens
gcctgtcagtagcca

SEQ ID NO: 1573487 - DNA, 15 bp, Homo sapiens
cctgtcagtagccac

SEQ ID NO: 1573488 - DNA, 15 bp, Homo sapiens
ctgtcagtagccact

SEQ ID NO: 1573489 - DNA, 15 bp, Homo sapiens
tgtcagtagccactg

SEQ ID NO: 1573490 - DNA, 15 bp, Homo sapiens
gtcagtagccactgc

SEQ ID NO: 1573491 - DNA, 15 bp, Homo sapiens
tcagtagccactgca

SEQ ID NO: 1573492 - DNA, 15 bp, Homo sapiens
cagtagccactgcag

SEQ ID NO: 1573493 - DNA, 15 bp, Homo sapiens
agtagccactgcagt

SEQ ID NO: 1573494 - DNA, 15 bp, Homo sapiens
gtagccactgcagtg

SEQ ID NO: 1573495 - DNA, 15 bp, Homo sapiens
tagccactgcagtgg

SEQ ID NO: 1573496 - DNA, 15 bp, Homo sapiens
agccactgcagtggg

SEQ ID NO: 1573497 - DNA, 15 bp, Homo sapiens
gccactgcagtgggc

SEQ ID NO: 1573498 - DNA, 15 bp, Homo sapiens
ccactgcagtgggca

SEQ ID NO: 1573499 - DNA, 15 bp, Homo sapiens
cactgcagtgggcac

SEQ ID NO: 1573500 - DNA, 15 bp, Homo sapiens
actgcagtgggcaca

SEQ ID NO: 1573501 - DNA, 15 bp, Homo sapiens
ctgcagtgggcacag

SEQ ID NO: 1573502 - DNA, 15 bp, Homo sapiens
tgcagtgggcacagc

SEQ ID NO: 1573503 - DNA, 15 bp, Homo sapiens
cagtgggcacagcac

SEQ ID NO: 1573504 - DNA, 15 bp, Homo sapiens
agtgggcacagcact

SEQ ID NO: 1573505 - DNA, 15 bp, Homo sapiens
gtgggcacagcactg

SEQ ID NO: 1573506 - DNA, 15 bp, Homo sapiens
tgggcacagcactgt

SEQ ID NO: 1573507 - DNA, 15 bp, Homo sapiens
gggcacagcactgtg

SEQ ID NO: 1573508 - DNA, 15 bp, Homo sapiens
ggcacagcactgtgc

SEQ ID NO: 1573509 - DNA, 15 bp, Homo sapiens
gcacagcactgtgca

SEQ ID NO: 1573510 - DNA, 15 bp, Homo sapiens
cacagcactgtgcaa

SEQ ID NO: 1573511 - DNA, 15 bp, Homo sapiens
acagcactgtgcaag

SEQ ID NO: 1573512 - DNA, 15 bp, Homo sapiens
cagcactgtgcaagt

SEQ ID NO: 1573513 - DNA, 15 bp, Homo sapiens
agcactgtgcaagtg

SEQ ID NO: 1573514 - DNA, 15 bp, Homo sapiens
gcactgtgcaagtgc

SEQ ID NO: 1573515 - DNA, 15 bp, Homo sapiens
cactgtgcaagtgcc

SEQ ID NO: 1573516 - DNA, 15 bp, Homo sapiens
actgtgcaagtgcca

SEQ ID NO: 1573517 - DNA, 15 bp, Homo sapiens
ctgtgcaagtgccag

SEQ ID NO: 1573518 - DNA, 15 bp, Homo sapiens
tgtgcaagtgccagg

SEQ ID NO: 1573519 - DNA, 15 bp, Homo sapiens
gtgcaagtgccagga

SEQ ID NO: 1573520 - DNA, 15 bp, Homo sapiens
tgcaagtgccaggag

SEQ ID NO: 1573521 - DNA, 15 bp, Homo sapiens
gcaagtgccaggaga

SEQ ID NO: 1573522 - DNA, 15 bp, Homo sapiens
caagtgccaggagag

SEQ ID NO: 1573523 - DNA, 15 bp, Homo sapiens
aagtgccaggagagt

SEQ ID NO: 1573524 - DNA, 15 bp, Homo sapiens
agtgccaggagagtg

SEQ ID NO: 1573525 - DNA, 15 bp, Homo sapiens
gtgccaggagagtgc

SEQ ID NO: 1573526 - DNA, 15 bp, Homo sapiens
tgccaggagagtgct

SEQ ID NO: 1573527 - DNA, 15 bp, Homo sapiens
gccaggagagtgctt

SEQ ID NO: 1573528 - DNA, 15 bp, Homo sapiens
ccaggagagtgctta

SEQ ID NO: 1573529 - DNA, 15 bp, Homo sapiens
caggagagtgcttac

SEQ ID NO: 1573530 - DNA, 15 bp, Homo sapiens
aggagagtgcttaca

SEQ ID NO: 1573531 - DNA, 15 bp, Homo sapiens
ggagagtgcttacac

SEQ ID NO: 1573532 - DNA, 15 bp, Homo sapiens
gagagtgcttacacc

SEQ ID NO: 1573533 - DNA, 15 bp, Homo sapiens
agagtgcttacaccc

SEQ ID NO: 1573534 - DNA, 15 bp, Homo sapiens
gagtgcttacaccca

SEQ ID NO: 1573535 - DNA, 15 bp, Homo sapiens
agtgcttacacccaa

SEQ ID NO: 1573536 - DNA, 15 bp, Homo sapiens
gtgcttacacccaaa

SEQ ID NO: 1573537 - DNA, 15 bp, Homo sapiens
tgcttacacccaaac

SEQ ID NO: 1573538 - DNA, 15 bp, Homo sapiens
gcttacacccaaaca

SEQ ID NO: 1573539 - DNA, 15 bp, Homo sapiens
cttacacccaaacaa

SEQ ID NO: 1573540 - DNA, 15 bp, Homo sapiens
ttacacccaaacaac

SEQ ID NO: 1573541 - DNA, 15 bp, Homo sapiens
tacacccaaacaacc

SEQ ID NO: 1573542 - DNA, 15 bp, Homo sapiens
acacccaaacaacca

SEQ ID NO: 1573543 - DNA, 15 bp, Homo sapiens
cacccaaacaaccat

SEQ ID NO: 1573544 - DNA, 15 bp, Homo sapiens
acccaaacaaccatc

SEQ ID NO: 1573545 - DNA, 15 bp, Homo sapiens
cccaaacaaccatca

SEQ ID NO: 1573546 - DNA, 15 bp, Homo sapiens
ccaaacaaccatcat

SEQ ID NO: 1573547 - DNA, 15 bp, Homo sapiens
caaacaaccatcatt

SEQ ID NO: 1573548 - DNA, 15 bp, Homo sapiens
aaacaaccatcattc

SEQ ID NO: 1573549 - DNA, 15 bp, Homo sapiens
aacaaccatcattca

SEQ ID NO: 1573550 - DNA, 15 bp, Homo sapiens
acaaccatcattcaa

SEQ ID NO: 1573551 - DNA, 15 bp, Homo sapiens
caaccatcattcaac

SEQ ID NO: 1573552 - DNA, 15 bp, Homo sapiens
aaccatcattcaaca

SEQ ID NO: 1573553 - DNA, 15 bp, Homo sapiens
accatcattcaacaa

SEQ ID NO: 1573554 - DNA, 15 bp, Homo sapiens
ccatcattcaacaaa

SEQ ID NO: 1573555 - DNA, 15 bp, Homo sapiens
catcattcaacaaat

SEQ ID NO: 1573556 - DNA, 15 bp, Homo sapiens
atcattcaacaaata

SEQ ID NO: 1573557 - DNA, 15 bp, Homo sapiens
acaaatatttactgc

SEQ ID NO: 1573558 - DNA, 15 bp, Homo sapiens
caaatatttactgcc

SEQ ID NO: 1573559 - DNA, 15 bp, Homo sapiens
aaatatttactgccc

SEQ ID NO: 1573560 - DNA, 15 bp, Homo sapiens
aatatttactgcccg

SEQ ID NO: 1573561 - DNA, 15 bp, Homo sapiens
atatttactgcccgt

SEQ ID NO: 1573562 - DNA, 15 bp, Homo sapiens
tatttactgcccgtg

SEQ ID NO: 1573563 - DNA, 15 bp, Homo sapiens
atttactgcccgtgg

SEQ ID NO: 1573564 - DNA, 15 bp, Homo sapiens
tttactgcccgtggg

SEQ ID NO: 1573565 - DNA, 15 bp, Homo sapiens
ttactgcccgtgggt

SEQ ID NO: 1573566 - DNA, 15 bp, Homo sapiens
tactgcccgtgggtt

SEQ ID NO: 1573567 - DNA, 15 bp, Homo sapiens
actgcccgtgggttc

SEQ ID NO: 1573568 - DNA, 15 bp, Homo sapiens
ctgcccgtgggttct

SEQ ID NO: 1573569 - DNA, 15 bp, Homo sapiens
tgcccgtgggttctg

SEQ ID NO: 1573570 - DNA, 15 bp, Homo sapiens
gcccgtgggttctgg

SEQ ID NO: 1573571 - DNA, 15 bp, Homo sapiens
cccgtgggttctggg

SEQ ID NO: 1573572 - DNA, 15 bp, Homo sapiens
ccgtgggttctgggc

SEQ ID NO: 1573573 - DNA, 15 bp, Homo sapiens
cgtgggttctgggct

SEQ ID NO: 1573574 - DNA, 15 bp, Homo sapiens
gtgggttctgggctg

SEQ ID NO: 1573575 - DNA, 15 bp, Homo sapiens
tgggttctgggctga

SEQ ID NO: 1573576 - DNA, 15 bp, Homo sapiens
gggttctgggctgag

SEQ ID NO: 1573577 - DNA, 15 bp, Homo sapiens
ggttctgggctgagc

SEQ ID NO: 1573578 - DNA, 15 bp, Homo sapiens
gttctgggctgagcg

SEQ ID NO: 1573579 - DNA, 15 bp, Homo sapiens
ttctgggctgagcgg

SEQ ID NO: 1573580 - DNA, 15 bp, Homo sapiens
tctgggctgagcggc

SEQ ID NO: 1573581 - DNA, 15 bp, Homo sapiens
ctgggctgagcggca

SEQ ID NO: 1573582 - DNA, 15 bp, Homo sapiens
tgggctgagcggcac

SEQ ID NO: 1573583 - DNA, 15 bp, Homo sapiens
gggctgagcggcaca

SEQ ID NO: 1573584 - DNA, 15 bp, Homo sapiens
ggctgagcggcacag

SEQ ID NO: 1573585 - DNA, 15 bp, Homo sapiens
gctgagcggcacagg

SEQ ID NO: 1573586 - DNA, 15 bp, Homo sapiens
ctgagcggcacaggc

SEQ ID NO: 1573587 - DNA, 15 bp, Homo sapiens
tgagcggcacaggcc

SEQ ID NO: 1573588 - DNA, 15 bp, Homo sapiens
gagcggcacaggccc

SEQ ID NO: 1573589 - DNA, 15 bp, Homo sapiens
agcggcacaggccct

SEQ ID NO: 1573590 - DNA, 15 bp, Homo sapiens
gcggcacaggccctg

SEQ ID NO: 1573591 - DNA, 15 bp, Homo sapiens
cggcacaggccctgt

SEQ ID NO: 1573592 - DNA, 15 bp, Homo sapiens
ggcacaggccctgtg

SEQ ID NO: 1573593 - DNA, 15 bp, Homo sapiens
gcacaggccctgtgc

SEQ ID NO: 1573594 - DNA, 15 bp, Homo sapiens
cacaggccctgtgcc

SEQ ID NO: 1573595 - DNA, 15 bp, Homo sapiens
acaggccctgtgcca

SEQ ID NO: 1573596 - DNA, 15 bp, Homo sapiens
aggccctgtgccagg

SEQ ID NO: 1573597 - DNA, 15 bp, Homo sapiens
ggccctgtgccaggt

SEQ ID NO: 1573598 - DNA, 15 bp, Homo sapiens
gccctgtgccaggtc

SEQ ID NO: 1573599 - DNA, 15 bp, Homo sapiens
ccctgtgccaggtct

SEQ ID NO: 1573600 - DNA, 15 bp, Homo sapiens
cctgtgccaggtctg

SEQ ID NO: 1573601 - DNA, 15 bp, Homo sapiens
ctgtgccaggtctgg

SEQ ID NO: 1573602 - DNA, 15 bp, Homo sapiens
tgtgccaggtctgga

SEQ ID NO: 1573603 - DNA, 15 bp, Homo sapiens
gtgccaggtctggag

SEQ ID NO: 1573604 - DNA, 15 bp, Homo sapiens
tgccaggtctggagt

SEQ ID NO: 1573605 - DNA, 15 bp, Homo sapiens
gccaggtctggagtc

SEQ ID NO: 1573606 - DNA, 15 bp, Homo sapiens
ccaggtctggagtct

SEQ ID NO: 1573607 - DNA, 15 bp, Homo sapiens
caggtctggagtctg

SEQ ID NO: 1573608 - DNA, 15 bp, Homo sapiens
aggtctggagtctgg

SEQ ID NO: 1573609 - DNA, 15 bp, Homo sapiens
ggtctggagtctggc

SEQ ID NO: 1573610 - DNA, 15 bp, Homo sapiens
gtctggagtctggcc

SEQ ID NO: 1573611 - DNA, 15 bp, Homo sapiens
tctggagtctggcct

SEQ ID NO: 1573612 - DNA, 15 bp, Homo sapiens
ctggagtctggcctg

SEQ ID NO: 1573613 - DNA, 15 bp, Homo sapiens
tggagtctggcctgg

SEQ ID NO: 1573614 - DNA, 15 bp, Homo sapiens
ggagtctggcctgga

SEQ ID NO: 1573615 - DNA, 15 bp, Homo sapiens
gagtctggcctggag

SEQ ID NO: 1573616 - DNA, 15 bp, Homo sapiens
agtctggcctggagc

SEQ ID NO: 1573617 - DNA, 15 bp, Homo sapiens
gtctggcctggagcg

SEQ ID NO: 1573618 - DNA, 15 bp, Homo sapiens
tctggcctggagcgt

SEQ ID NO: 1573619 - DNA, 15 bp, Homo sapiens
ctggcctggagcgtc

SEQ ID NO: 1573620 - DNA, 15 bp, Homo sapiens
tggcctggagcgtca

SEQ ID NO: 1573621 - DNA, 15 bp, Homo sapiens
ggcctggagcgtcag

SEQ ID NO: 1573622 - DNA, 15 bp, Homo sapiens
gcctggagcgtcagg

SEQ ID NO: 1573623 - DNA, 15 bp, Homo sapiens
cctggagcgtcaggg

SEQ ID NO: 1573624 - DNA, 15 bp, Homo sapiens
ctggagcgtcaggga

SEQ ID NO: 1573625 - DNA, 15 bp, Homo sapiens
tggagcgtcagggag

SEQ ID NO: 1573626 - DNA, 15 bp, Homo sapiens
ggagcgtcagggagg

SEQ ID NO: 1573627 - DNA, 15 bp, Homo sapiens
gagcgtcagggaggc

SEQ ID NO: 1573628 - DNA, 15 bp, Homo sapiens
agcgtcagggaggct

SEQ ID NO: 1573629 - DNA, 15 bp, Homo sapiens
gcgtcagggaggctc

SEQ ID NO: 1573630 - DNA, 15 bp, Homo sapiens
cgtcagggaggctca

SEQ ID NO: 1573631 - DNA, 15 bp, Homo sapiens
gtcagggaggctcaa

SEQ ID NO: 1573632 - DNA, 15 bp, Homo sapiens
tcagggaggctcaaa

SEQ ID NO: 1573633 - DNA, 15 bp, Homo sapiens
cagggaggctcaaag

SEQ ID NO: 1573634 - DNA, 15 bp, Homo sapiens
agggaggctcaaagg

SEQ ID NO: 1573635 - DNA, 15 bp, Homo sapiens
gggaggctcaaaggc

SEQ ID NO: 1573636 - DNA, 15 bp, Homo sapiens
ggaggctcaaaggcc

SEQ ID NO: 1573637 - DNA, 15 bp, Homo sapiens
gaggctcaaaggcct

SEQ ID NO: 1573638 - DNA, 15 bp, Homo sapiens
aggctcaaaggcctg

SEQ ID NO: 1573639 - DNA, 15 bp, Homo sapiens
ggctcaaaggcctga

SEQ ID NO: 1573640 - DNA, 15 bp, Homo sapiens
gctcaaaggcctgag

SEQ ID NO: 1573641 - DNA, 15 bp, Homo sapiens
ctcaaaggcctgagg

SEQ ID NO: 1573642 - DNA, 15 bp, Homo sapiens
tcaaaggcctgaggg

SEQ ID NO: 1573643 - DNA, 15 bp, Homo sapiens
caaaggcctgagggc

SEQ ID NO: 1573644 - DNA, 15 bp, Homo sapiens
aaaggcctgagggct

SEQ ID NO: 1573645 - DNA, 15 bp, Homo sapiens
aaggcctgagggctt

SEQ ID NO: 1573646 - DNA, 15 bp, Homo sapiens
aggcctgagggctta

SEQ ID NO: 1573647 - DNA, 15 bp, Homo sapiens
ggcctgagggcttat

SEQ ID NO: 1573648 - DNA, 15 bp, Homo sapiens
gcctgagggcttatg

SEQ ID NO: 1573649 - DNA, 15 bp, Homo sapiens
cctgagggcttatgt

SEQ ID NO: 1573650 - DNA, 15 bp, Homo sapiens
ctgagggcttatgtc

SEQ ID NO: 1573651 - DNA, 15 bp, Homo sapiens
tgagggcttatgtct

SEQ ID NO: 1573652 - DNA, 15 bp, Homo sapiens
gagggcttatgtctc

SEQ ID NO: 1573653 - DNA, 15 bp, Homo sapiens
agggcttatgtctca

SEQ ID NO: 1573654 - DNA, 15 bp, Homo sapiens
gggcttatgtctcat

SEQ ID NO: 1573655 - DNA, 15 bp, Homo sapiens
ggcttatgtctcatg

SEQ ID NO: 1573656 - DNA, 15 bp, Homo sapiens
gcttatgtctcatgg

SEQ ID NO: 1573657 - DNA, 15 bp, Homo sapiens
cttatgtctcatggg

SEQ ID NO: 1573658 - DNA, 15 bp, Homo sapiens
ttatgtctcatgggt

SEQ ID NO: 1573659 - DNA, 15 bp, Homo sapiens
tatgtctcatgggtc

SEQ ID NO: 1573660 - DNA, 15 bp, Homo sapiens
atgtctcatgggtct

SEQ ID NO: 1573661 - DNA, 15 bp, Homo sapiens
tgtctcatgggtctc

SEQ ID NO: 1573662 - DNA, 15 bp, Homo sapiens
gtctcatgggtctca

SEQ ID NO: 1573663 - DNA, 15 bp, Homo sapiens
tctcatgggtctcat

SEQ ID NO: 1573664 - DNA, 15 bp, Homo sapiens
ctcatgggtctcatg

SEQ ID NO: 1573665 - DNA, 15 bp, Homo sapiens
tcatgggtctcatgg

SEQ ID NO: 1573666 - DNA, 15 bp, Homo sapiens
catgggtctcatggg

SEQ ID NO: 1573667 - DNA, 15 bp, Homo sapiens
atgggtctcatggga

SEQ ID NO: 1573668 - DNA, 15 bp, Homo sapiens
tgggtctcatgggac

SEQ ID NO: 1573669 - DNA, 15 bp, Homo sapiens
gggtctcatgggaca

SEQ ID NO: 1573670 - DNA, 15 bp, Homo sapiens
ggtctcatgggacat

SEQ ID NO: 1573671 - DNA, 15 bp, Homo sapiens
gtctcatgggacatt

SEQ ID NO: 1573672 - DNA, 15 bp, Homo sapiens
tctcatgggacattg

SEQ ID NO: 1573673 - DNA, 15 bp, Homo sapiens
ctcatgggacattga

SEQ ID NO: 1573674 - DNA, 15 bp, Homo sapiens
tcatgggacattgat

SEQ ID NO: 1573675 - DNA, 15 bp, Homo sapiens
catgggacattgatg

SEQ ID NO: 1573676 - DNA, 15 bp, Homo sapiens
atgggacattgatgg

SEQ ID NO: 1573677 - DNA, 15 bp, Homo sapiens
tgggacattgatggg

SEQ ID NO: 1573678 - DNA, 15 bp, Homo sapiens
gggacattgatgggg

SEQ ID NO: 1573679 - DNA, 15 bp, Homo sapiens
ggacattgatggggg

SEQ ID NO: 1573680 - DNA, 15 bp, Homo sapiens
gacattgatgggggg

SEQ ID NO: 1573681 - DNA, 15 bp, Homo sapiens
acattgatggggggt

SEQ ID NO: 1573682 - DNA, 15 bp, Homo sapiens
cattgatggggggtg

SEQ ID NO: 1573683 - DNA, 15 bp, Homo sapiens
attgatggggggtgg

SEQ ID NO: 1573684 - DNA, 15 bp, Homo sapiens
ttgatggggggtggg

SEQ ID NO: 1573685 - DNA, 15 bp, Homo sapiens
tgatggggggtgggc

SEQ ID NO: 1573686 - DNA, 15 bp, Homo sapiens
gatggggggtgggct

SEQ ID NO: 1573687 - DNA, 15 bp, Homo sapiens
atggggggtgggctg

SEQ ID NO: 1573688 - DNA, 15 bp, Homo sapiens
tggggggtgggctgg

SEQ ID NO: 1573689 - DNA, 15 bp, Homo sapiens
ggggggtgggctggg

SEQ ID NO: 1573690 - DNA, 15 bp, Homo sapiens
gggggtgggctgggg

SEQ ID NO: 1573691 - DNA, 15 bp, Homo sapiens
ggggtgggctggggt

SEQ ID NO: 1573692 - DNA, 15 bp, Homo sapiens
gggtgggctggggtg

SEQ ID NO: 1573693 - DNA, 15 bp, Homo sapiens
ggtgggctggggtga

SEQ ID NO: 1573694 - DNA, 15 bp, Homo sapiens
gtgggctggggtgac

SEQ ID NO: 1573695 - DNA, 15 bp, Homo sapiens
tgggctggggtgacg

SEQ ID NO: 1573696 - DNA, 15 bp, Homo sapiens
gggctggggtgacgc

SEQ ID NO: 1573697 - DNA, 15 bp, Homo sapiens
ggctggggtgacgct

SEQ ID NO: 1573698 - DNA, 15 bp, Homo sapiens
gctggggtgacgctt

SEQ ID NO: 1573699 - DNA, 15 bp, Homo sapiens
ctggggtgacgcttc

SEQ ID NO: 1573700 - DNA, 15 bp, Homo sapiens
tggggtgacgcttcc

SEQ ID NO: 1573701 - DNA, 15 bp, Homo sapiens
ggggtgacgcttccc

SEQ ID NO: 1573702 - DNA, 15 bp, Homo sapiens
gggtgacgcttccct

SEQ ID NO: 1573703 - DNA, 15 bp, Homo sapiens
ggtgacgcttcccta

SEQ ID NO: 1573704 - DNA, 15 bp, Homo sapiens
gtgacgcttccctag

SEQ ID NO: 1573705 - DNA, 15 bp, Homo sapiens
tgacgcttccctagg

SEQ ID NO: 1573706 - DNA, 15 bp, Homo sapiens
gacgcttccctaggg

SEQ ID NO: 1573707 - DNA, 15 bp, Homo sapiens
acgcttccctaggga

SEQ ID NO: 1573708 - DNA, 15 bp, Homo sapiens
cgcttccctagggag

SEQ ID NO: 1573709 - DNA, 15 bp, Homo sapiens
gcttccctagggaga

SEQ ID NO: 1573710 - DNA, 15 bp, Homo sapiens
cttccctagggagag

SEQ ID NO: 1573711 - DNA, 15 bp, Homo sapiens
ttccctagggagagg

SEQ ID NO: 1573712 - DNA, 15 bp, Homo sapiens
tccctagggagaggg

SEQ ID NO: 1573713 - DNA, 15 bp, Homo sapiens
ccctagggagagggg

SEQ ID NO: 1573714 - DNA, 15 bp, Homo sapiens
cctagggagagggga

SEQ ID NO: 1573715 - DNA, 15 bp, Homo sapiens
ctagggagaggggag

SEQ ID NO: 1573716 - DNA, 15 bp, Homo sapiens
tagggagaggggagt

SEQ ID NO: 1573717 - DNA, 15 bp, Homo sapiens
agggagaggggagtg

SEQ ID NO: 1573718 - DNA, 15 bp, Homo sapiens
gggagaggggagtgt

SEQ ID NO: 1573719 - DNA, 15 bp, Homo sapiens
ggagaggggagtgtg

SEQ ID NO: 1573720 - DNA, 15 bp, Homo sapiens
gagaggggagtgtgg

SEQ ID NO: 1573721 - DNA, 15 bp, Homo sapiens
agaggggagtgtggg

SEQ ID NO: 1573722 - DNA, 15 bp, Homo sapiens
gaggggagtgtgggt

SEQ ID NO: 1573723 - DNA, 15 bp, Homo sapiens
aggggagtgtgggtc

SEQ ID NO: 1573724 - DNA, 15 bp, Homo sapiens
ggggagtgtgggtca

SEQ ID NO: 1573725 - DNA, 15 bp, Homo sapiens
gggagtgtgggtcag

SEQ ID NO: 1573726 - DNA, 15 bp, Homo sapiens
ggagtgtgggtcagg

SEQ ID NO: 1573727 - DNA, 15 bp, Homo sapiens
gagtgtgggtcaggt

SEQ ID NO: 1573728 - DNA, 15 bp, Homo sapiens
agtgtgggtcaggtt

SEQ ID NO: 1573729 - DNA, 15 bp, Homo sapiens
gtgtgggtcaggtta

SEQ ID NO: 1573730 - DNA, 15 bp, Homo sapiens
tgtgggtcaggttac

SEQ ID NO: 1573731 - DNA, 15 bp, Homo sapiens
gtgggtcaggttact

SEQ ID NO: 1573732 - DNA, 15 bp, Homo sapiens
tgggtcaggttactt

SEQ ID NO: 1573733 - DNA, 15 bp, Homo sapiens
gggtcaggttacttt

SEQ ID NO: 1573734 - DNA, 15 bp, Homo sapiens
ggtcaggttactttg

SEQ ID NO: 1573735 - DNA, 15 bp, Homo sapiens
gtcaggttactttgt

SEQ ID NO: 1573736 - DNA, 15 bp, Homo sapiens
tcaggttactttgtg

SEQ ID NO: 1573737 - DNA, 15 bp, Homo sapiens
caggttactttgtgg

SEQ ID NO: 1573738 - DNA, 15 bp, Homo sapiens
aggttactttgtggg

SEQ ID NO: 1573739 - DNA, 15 bp, Homo sapiens
ggttactttgtgggg

SEQ ID NO: 1573740 - DNA, 15 bp, Homo sapiens
gttactttgtggggt

SEQ ID NO: 1573741 - DNA, 15 bp, Homo sapiens
ttactttgtggggtg

SEQ ID NO: 1573742 - DNA, 15 bp, Homo sapiens
tactttgtggggtgc

SEQ ID NO: 1573743 - DNA, 15 bp, Homo sapiens
actttgtggggtgct

SEQ ID NO: 1573744 - DNA, 15 bp, Homo sapiens
ctttgtggggtgctg

SEQ ID NO: 1573745 - DNA, 15 bp, Homo sapiens
tttgtggggtgctgg

SEQ ID NO: 1573746 - DNA, 15 bp, Homo sapiens
ttgtggggtgctggt

SEQ ID NO: 1573747 - DNA, 15 bp, Homo sapiens
tgtggggtgctggtt

SEQ ID NO: 1573748 - DNA, 15 bp, Homo sapiens
gtggggtgctggttt

SEQ ID NO: 1573749 - DNA, 15 bp, Homo sapiens
tggggtgctggtttg

SEQ ID NO: 1573750 - DNA, 15 bp, Homo sapiens
ggggtgctggtttgg

SEQ ID NO: 1573751 - DNA, 15 bp, Homo sapiens
gggtgctggtttggt

SEQ ID NO: 1573752 - DNA, 15 bp, Homo sapiens
ggtgctggtttggtt

SEQ ID NO: 1573753 - DNA, 15 bp, Homo sapiens
gtgctggtttggttg

SEQ ID NO: 1573754 - DNA, 15 bp, Homo sapiens
tgctggtttggttgt

SEQ ID NO: 1573755 - DNA, 15 bp, Homo sapiens
gctggtttggttgtg

SEQ ID NO: 1573756 - DNA, 15 bp, Homo sapiens
ctggtttggttgtgg

SEQ ID NO: 1573757 - DNA, 15 bp, Homo sapiens
tggtttggttgtggg

SEQ ID NO: 1573758 - DNA, 15 bp, Homo sapiens
ggtttggttgtggga

SEQ ID NO: 1573759 - DNA, 15 bp, Homo sapiens
gtttggttgtgggag

SEQ ID NO: 1573760 - DNA, 15 bp, Homo sapiens
tttggttgtgggaga

SEQ ID NO: 1573761 - DNA, 15 bp, Homo sapiens
ttggttgtgggagaa

SEQ ID NO: 1573762 - DNA, 15 bp, Homo sapiens
tggttgtgggagaag

SEQ ID NO: 1573763 - DNA, 15 bp, Homo sapiens
ggttgtgggagaagt

SEQ ID NO: 1573764 - DNA, 15 bp, Homo sapiens
gttgtgggagaagtt

SEQ ID NO: 1573765 - DNA, 15 bp, Homo sapiens
ttgtgggagaagttc

SEQ ID NO: 1573766 - DNA, 15 bp, Homo sapiens
tgtgggagaagttcc

SEQ ID NO: 1573767 - DNA, 15 bp, Homo sapiens
gtgggagaagttcca

SEQ ID NO: 1573768 - DNA, 15 bp, Homo sapiens
tgggagaagttccat

SEQ ID NO: 1573769 - DNA, 15 bp, Homo sapiens
gggagaagttccatt

SEQ ID NO: 1573770 - DNA, 15 bp, Homo sapiens
ggagaagttccattt

SEQ ID NO: 1573771 - DNA, 15 bp, Homo sapiens
gagaagttccattta

SEQ ID NO: 1573772 - DNA, 15 bp, Homo sapiens
agaagttccatttag

SEQ ID NO: 1573773 - DNA, 15 bp, Homo sapiens
gaagttccatttaga

SEQ ID NO: 1573774 - DNA, 15 bp, Homo sapiens
aagttccatttagaa

SEQ ID NO: 1573775 - DNA, 15 bp, Homo sapiens
agttccatttagaat

SEQ ID NO: 1573776 - DNA, 15 bp, Homo sapiens
gttccatttagaatg

SEQ ID NO: 1573777 - DNA, 15 bp, Homo sapiens
ttccatttagaatgc

SEQ ID NO: 1573778 - DNA, 15 bp, Homo sapiens
tccatttagaatgcc

SEQ ID NO: 1573779 - DNA, 15 bp, Homo sapiens
ccatttagaatgcct

SEQ ID NO: 1573780 - DNA, 15 bp, Homo sapiens
catttagaatgcctc

SEQ ID NO: 1573781 - DNA, 15 bp, Homo sapiens
atttagaatgcctca

SEQ ID NO: 1573782 - DNA, 15 bp, Homo sapiens
tttagaatgcctcag

SEQ ID NO: 1573783 - DNA, 15 bp, Homo sapiens
ttagaatgcctcagg

SEQ ID NO: 1573784 - DNA, 15 bp, Homo sapiens
tagaatgcctcagga

SEQ ID NO: 1573785 - DNA, 15 bp, Homo sapiens
agaatgcctcaggag

SEQ ID NO: 1573786 - DNA, 15 bp, Homo sapiens
gaatgcctcaggagg

SEQ ID NO: 1573787 - DNA, 15 bp, Homo sapiens
aatgcctcaggaggg

SEQ ID NO: 1573788 - DNA, 15 bp, Homo sapiens
atgcctcaggaggga

SEQ ID NO: 1573789 - DNA, 15 bp, Homo sapiens
tgcctcaggagggaa

SEQ ID NO: 1573790 - DNA, 15 bp, Homo sapiens
gcctcaggagggaag

SEQ ID NO: 1573791 - DNA, 15 bp, Homo sapiens
cctcaggagggaaga

SEQ ID NO: 1573792 - DNA, 15 bp, Homo sapiens
ctcaggagggaagat

SEQ ID NO: 1573793 - DNA, 15 bp, Homo sapiens
tcaggagggaagatc

SEQ ID NO: 1573794 - DNA, 15 bp, Homo sapiens
caggagggaagatcg

SEQ ID NO: 1573795 - DNA, 15 bp, Homo sapiens
aggagggaagatcgg

SEQ ID NO: 1573796 - DNA, 15 bp, Homo sapiens
ggagggaagatcggg

SEQ ID NO: 1573797 - DNA, 15 bp, Homo sapiens
gagggaagatcggga

SEQ ID NO: 1573798 - DNA, 15 bp, Homo sapiens
agggaagatcgggaa

SEQ ID NO: 1573799 - DNA, 15 bp, Homo sapiens
gggaagatcgggaag

SEQ ID NO: 1573800 - DNA, 15 bp, Homo sapiens
ggaagatcgggaagg

SEQ ID NO: 1573801 - DNA, 15 bp, Homo sapiens
gaagatcgggaaggc

SEQ ID NO: 1573802 - DNA, 15 bp, Homo sapiens
aagatcgggaaggcc

SEQ ID NO: 1573803 - DNA, 15 bp, Homo sapiens
agatcgggaaggcct

SEQ ID NO: 1573804 - DNA, 15 bp, Homo sapiens
gatcgggaaggcctc

SEQ ID NO: 1573805 - DNA, 15 bp, Homo sapiens
atcgggaaggcctcg

SEQ ID NO: 1573806 - DNA, 15 bp, Homo sapiens
tcgggaaggcctcga

SEQ ID NO: 1573807 - DNA, 15 bp, Homo sapiens
cgggaaggcctcgaa

SEQ ID NO: 1573808 - DNA, 15 bp, Homo sapiens
gggaaggcctcgaat

SEQ ID NO: 1573809 - DNA, 15 bp, Homo sapiens
ggaaggcctcgaatg

SEQ ID NO: 1573810 - DNA, 15 bp, Homo sapiens
gaaggcctcgaatgc

SEQ ID NO: 1573811 - DNA, 15 bp, Homo sapiens
aaggcctcgaatgcc

SEQ ID NO: 1573812 - DNA, 15 bp, Homo sapiens
aggcctcgaatgccc

SEQ ID NO: 1573813 - DNA, 15 bp, Homo sapiens
ggcctcgaatgcccg

SEQ ID NO: 1573814 - DNA, 15 bp, Homo sapiens
gcctcgaatgcccga

SEQ ID NO: 1573815 - DNA, 15 bp, Homo sapiens
cctcgaatgcccgag

SEQ ID NO: 1573816 - DNA, 15 bp, Homo sapiens
ctcgaatgcccgagt

SEQ ID NO: 1573817 - DNA, 15 bp, Homo sapiens
tcgaatgcccgagtg

SEQ ID NO: 1573818 - DNA, 15 bp, Homo sapiens
cgaatgcccgagtga

SEQ ID NO: 1573819 - DNA, 15 bp, Homo sapiens
gaatgcccgagtgag

SEQ ID NO: 1573820 - DNA, 15 bp, Homo sapiens
aatgcccgagtgagg

SEQ ID NO: 1573821 - DNA, 15 bp, Homo sapiens
atgcccgagtgaggg

SEQ ID NO: 1573822 - DNA, 15 bp, Homo sapiens
tgcccgagtgagggg

SEQ ID NO: 1573823 - DNA, 15 bp, Homo sapiens
gcccgagtgaggggc

SEQ ID NO: 1573824 - DNA, 15 bp, Homo sapiens
cccgagtgaggggct

SEQ ID NO: 1573825 - DNA, 15 bp, Homo sapiens
ccgagtgaggggctg

SEQ ID NO: 1573826 - DNA, 15 bp, Homo sapiens
cgagtgaggggctga

SEQ ID NO: 1573827 - DNA, 15 bp, Homo sapiens
gagtgaggggctgaa

SEQ ID NO: 1573828 - DNA, 15 bp, Homo sapiens
agtgaggggctgaat

SEQ ID NO: 1573829 - DNA, 15 bp, Homo sapiens
gtgaggggctgaatg

SEQ ID NO: 1573830 - DNA, 15 bp, Homo sapiens
tgaggggctgaatgc

SEQ ID NO: 1573831 - DNA, 15 bp, Homo sapiens
gaggggctgaatgct

SEQ ID NO: 1573832 - DNA, 15 bp, Homo sapiens
aggggctgaatgctg

SEQ ID NO: 1573833 - DNA, 15 bp, Homo sapiens
ggggctgaatgctga

SEQ ID NO: 1573834 - DNA, 15 bp, Homo sapiens
gggctgaatgctgag

SEQ ID NO: 1573835 - DNA, 15 bp, Homo sapiens
ggctgaatgctgagt

SEQ ID NO: 1573836 - DNA, 15 bp, Homo sapiens
gctgaatgctgagtc

SEQ ID NO: 1573837 - DNA, 15 bp, Homo sapiens
ctgaatgctgagtcc

SEQ ID NO: 1573838 - DNA, 15 bp, Homo sapiens
tgaatgctgagtcct

SEQ ID NO: 1573839 - DNA, 15 bp, Homo sapiens
gaatgctgagtccta

SEQ ID NO: 1573840 - DNA, 15 bp, Homo sapiens
aatgctgagtcctaa

SEQ ID NO: 1573841 - DNA, 15 bp, Homo sapiens
atgctgagtcctaaa

SEQ ID NO: 1573842 - DNA, 15 bp, Homo sapiens
tgctgagtcctaaag

SEQ ID NO: 1573843 - DNA, 15 bp, Homo sapiens
gctgagtcctaaagg

SEQ ID NO: 1573844 - DNA, 15 bp, Homo sapiens
ctgagtcctaaaggt

SEQ ID NO: 1573845 - DNA, 15 bp, Homo sapiens
tgagtcctaaaggtg

SEQ ID NO: 1573846 - DNA, 15 bp, Homo sapiens
gagtcctaaaggtgg

SEQ ID NO: 1573847 - DNA, 15 bp, Homo sapiens
agtcctaaaggtggt

SEQ ID NO: 1573848 - DNA, 15 bp, Homo sapiens
gtcctaaaggtggtg

SEQ ID NO: 1573849 - DNA, 15 bp, Homo sapiens
tcctaaaggtggtga

SEQ ID NO: 1573850 - DNA, 15 bp, Homo sapiens
cctaaaggtggtgat

SEQ ID NO: 1573851 - DNA, 15 bp, Homo sapiens
ctaaaggtggtgatg

SEQ ID NO: 1573852 - DNA, 15 bp, Homo sapiens
taaaggtggtgatgg

SEQ ID NO: 1573853 - DNA, 15 bp, Homo sapiens
aaaggtggtgatggg

SEQ ID NO: 1573854 - DNA, 15 bp, Homo sapiens
aaggtggtgatggga

SEQ ID NO: 1573855 - DNA, 15 bp, Homo sapiens
aggtggtgatgggac

SEQ ID NO: 1573856 - DNA, 15 bp, Homo sapiens
ggtggtgatgggact

SEQ ID NO: 1573857 - DNA, 15 bp, Homo sapiens
gtggtgatgggactg

SEQ ID NO: 1573858 - DNA, 15 bp, Homo sapiens
tggtgatgggactgg

SEQ ID NO: 1573859 - DNA, 15 bp, Homo sapiens
ggtgatgggactggg

SEQ ID NO: 1573860 - DNA, 15 bp, Homo sapiens
gtgatgggactgggg

SEQ ID NO: 1573861 - DNA, 15 bp, Homo sapiens
tgatgggactggggt

SEQ ID NO: 1573862 - DNA, 15 bp, Homo sapiens
gatgggactggggtc

SEQ ID NO: 1573863 - DNA, 15 bp, Homo sapiens
atgggactggggtct

SEQ ID NO: 1573864 - DNA, 15 bp, Homo sapiens
tgggactggggtctg

SEQ ID NO: 1573865 - DNA, 15 bp, Homo sapiens
gggactggggtctgt

SEQ ID NO: 1573866 - DNA, 15 bp, Homo sapiens
gactggggtctgtgg

SEQ ID NO: 1573867 - DNA, 15 bp, Homo sapiens
actggggtctgtggc

SEQ ID NO: 1573868 - DNA, 15 bp, Homo sapiens
ctggggtctgtggcc

SEQ ID NO: 1573869 - DNA, 15 bp, Homo sapiens
tggggtctgtggccc

SEQ ID NO: 1573870 - DNA, 15 bp, Homo sapiens
ggggtctgtggccca

SEQ ID NO: 1573871 - DNA, 15 bp, Homo sapiens
gggtctgtggcccag

SEQ ID NO: 1573872 - DNA, 15 bp, Homo sapiens
ggtctgtggcccagg

SEQ ID NO: 1573873 - DNA, 15 bp, Homo sapiens
gtctgtggcccaggt

SEQ ID NO: 1573874 - DNA, 15 bp, Homo sapiens
tctgtggcccaggta

SEQ ID NO: 1573875 - DNA, 15 bp, Homo sapiens
ctgtggcccaggtag

SEQ ID NO: 1573876 - DNA, 15 bp, Homo sapiens
tgtggcccaggtagt

SEQ ID NO: 1573877 - DNA, 15 bp, Homo sapiens
gtggcccaggtagtt

SEQ ID NO: 1573878 - DNA, 15 bp, Homo sapiens
tggcccaggtagttg

SEQ ID NO: 1573879 - DNA, 15 bp, Homo sapiens
ggcccaggtagttgt

SEQ ID NO: 1573880 - DNA, 15 bp, Homo sapiens
gcccaggtagttgtg

SEQ ID NO: 1573881 - DNA, 15 bp, Homo sapiens
cccaggtagttgtgt

SEQ ID NO: 1573882 - DNA, 15 bp, Homo sapiens
ccaggtagttgtgtt

SEQ ID NO: 1573883 - DNA, 15 bp, Homo sapiens
caggtagttgtgttc

SEQ ID NO: 1573884 - DNA, 15 bp, Homo sapiens
aggtagttgtgttct

SEQ ID NO: 1573885 - DNA, 15 bp, Homo sapiens
ggtagttgtgttctg

SEQ ID NO: 1573886 - DNA, 15 bp, Homo sapiens
gtagttgtgttctga

SEQ ID NO: 1573887 - DNA, 15 bp, Homo sapiens
tagttgtgttctgag

SEQ ID NO: 1573888 - DNA, 15 bp, Homo sapiens
agttgtgttctgagc

SEQ ID NO: 1573889 - DNA, 15 bp, Homo sapiens
gttgtgttctgagca

SEQ ID NO: 1573890 - DNA, 15 bp, Homo sapiens
ttgtgttctgagcag

SEQ ID NO: 1573891 - DNA, 15 bp, Homo sapiens
tgtgttctgagcagc

SEQ ID NO: 1573892 - DNA, 15 bp, Homo sapiens
gtgttctgagcagct

SEQ ID NO: 1573893 - DNA, 15 bp, Homo sapiens
tgttctgagcagctc

SEQ ID NO: 1573894 - DNA, 15 bp, Homo sapiens
gttctgagcagctcc

SEQ ID NO: 1573895 - DNA, 15 bp, Homo sapiens
ttctgagcagctcct

SEQ ID NO: 1573896 - DNA, 15 bp, Homo sapiens
tctgagcagctcctc

SEQ ID NO: 1573897 - DNA, 15 bp, Homo sapiens
ctgagcagctcctcc

SEQ ID NO: 1573898 - DNA, 15 bp, Homo sapiens
tgagcagctcctccc

SEQ ID NO: 1573899 - DNA, 15 bp, Homo sapiens
gagcagctcctccct

SEQ ID NO: 1573900 - DNA, 15 bp, Homo sapiens
agcagctcctccctg

SEQ ID NO: 1573901 - DNA, 15 bp, Homo sapiens
gcagctcctccctga

SEQ ID NO: 1573902 - DNA, 15 bp, Homo sapiens
cagctcctccctgag

SEQ ID NO: 1573903 - DNA, 15 bp, Homo sapiens
agctcctccctgagt

SEQ ID NO: 1573904 - DNA, 15 bp, Homo sapiens
gctcctccctgagtt

SEQ ID NO: 1573905 - DNA, 15 bp, Homo sapiens
ctcctccctgagttc

SEQ ID NO: 1573906 - DNA, 15 bp, Homo sapiens
tcctccctgagttca

SEQ ID NO: 1573907 - DNA, 15 bp, Homo sapiens
cctccctgagttcag

SEQ ID NO: 1573908 - DNA, 15 bp, Homo sapiens
ctccctgagttcagg

SEQ ID NO: 1573909 - DNA, 15 bp, Homo sapiens
tccctgagttcaggc

SEQ ID NO: 1573910 - DNA, 15 bp, Homo sapiens
ccctgagttcaggcg

SEQ ID NO: 1573911 - DNA, 15 bp, Homo sapiens
cctgagttcaggcgt

SEQ ID NO: 1573912 - DNA, 15 bp, Homo sapiens
ctgagttcaggcgtt

SEQ ID NO: 1573913 - DNA, 15 bp, Homo sapiens
tgagttcaggcgttc

SEQ ID NO: 1573914 - DNA, 15 bp, Homo sapiens
gagttcaggcgttca

SEQ ID NO: 1573915 - DNA, 15 bp, Homo sapiens
agttcaggcgttcat

SEQ ID NO: 1573916 - DNA, 15 bp, Homo sapiens
gttcaggcgttcatt

SEQ ID NO: 1573917 - DNA, 15 bp, Homo sapiens
ttcaggcgttcattc

SEQ ID NO: 1573918 - DNA, 15 bp, Homo sapiens
tcaggcgttcattca

SEQ ID NO: 1573919 - DNA, 15 bp, Homo sapiens
caggcgttcattcag

SEQ ID NO: 1573920 - DNA, 15 bp, Homo sapiens
aggcgttcattcagc

SEQ ID NO: 1573921 - DNA, 15 bp, Homo sapiens
ggcgttcattcagcg

SEQ ID NO: 1573922 - DNA, 15 bp, Homo sapiens
gcgttcattcagcgc

SEQ ID NO: 1573923 - DNA, 15 bp, Homo sapiens
cgttcattcagcgcg

SEQ ID NO: 1573924 - DNA, 15 bp, Homo sapiens
gttcattcagcgcgt

SEQ ID NO: 1573925 - DNA, 15 bp, Homo sapiens
ttcattcagcgcgtg

SEQ ID NO: 1573926 - DNA, 15 bp, Homo sapiens
tcattcagcgcgtgc

SEQ ID NO: 1573927 - DNA, 15 bp, Homo sapiens
cattcagcgcgtgca

SEQ ID NO: 1573928 - DNA, 15 bp, Homo sapiens
attcagcgcgtgcat

SEQ ID NO: 1573929 - DNA, 15 bp, Homo sapiens
ttcagcgcgtgcata

SEQ ID NO: 1573930 - DNA, 15 bp, Homo sapiens
tcagcgcgtgcatac

SEQ ID NO: 1573931 - DNA, 15 bp, Homo sapiens
cagcgcgtgcatact

SEQ ID NO: 1573932 - DNA, 15 bp, Homo sapiens
agcgcgtgcatacta

SEQ ID NO: 1573933 - DNA, 15 bp, Homo sapiens
gcgcgtgcatactac

SEQ ID NO: 1573934 - DNA, 15 bp, Homo sapiens
cgcgtgcatactacg

SEQ ID NO: 1573935 - DNA, 15 bp, Homo sapiens
gcgtgcatactacga

SEQ ID NO: 1573936 - DNA, 15 bp, Homo sapiens
cgtgcatactacgac

SEQ ID NO: 1573937 - DNA, 15 bp, Homo sapiens
gtgcatactacgacc

SEQ ID NO: 1573938 - DNA, 15 bp, Homo sapiens
tgcatactacgacca

SEQ ID NO: 1573939 - DNA, 15 bp, Homo sapiens
gcatactacgaccag

SEQ ID NO: 1573940 - DNA, 15 bp, Homo sapiens
catactacgaccagc

SEQ ID NO: 1573941 - DNA, 15 bp, Homo sapiens
atactacgaccagcc

SEQ ID NO: 1573942 - DNA, 15 bp, Homo sapiens
tactacgaccagccc

SEQ ID NO: 1573943 - DNA, 15 bp, Homo sapiens
actacgaccagcccc

SEQ ID NO: 1573944 - DNA, 15 bp, Homo sapiens
ctacgaccagccccc

SEQ ID NO: 1573945 - DNA, 15 bp, Homo sapiens
tacgaccagcccccc

SEQ ID NO: 1573946 - DNA, 15 bp, Homo sapiens
acgaccagcccccct

SEQ ID NO: 1573947 - DNA, 15 bp, Homo sapiens
cgaccagcccccctt

SEQ ID NO: 1573948 - DNA, 15 bp, Homo sapiens
gaccagccccccttt

SEQ ID NO: 1573949 - DNA, 15 bp, Homo sapiens
accagcccccctttt

SEQ ID NO: 1573950 - DNA, 15 bp, Homo sapiens
ccagccccccttttg

SEQ ID NO: 1573951 - DNA, 15 bp, Homo sapiens
cagccccccttttgc

SEQ ID NO: 1573952 - DNA, 15 bp, Homo sapiens
agccccccttttgcg

SEQ ID NO: 1573953 - DNA, 15 bp, Homo sapiens
gccccccttttgcgt

SEQ ID NO: 1573954 - DNA, 15 bp, Homo sapiens
ccccccttttgcgtc

SEQ ID NO: 1573955 - DNA, 15 bp, Homo sapiens
cccccttttgcgtcc

SEQ ID NO: 1573956 - DNA, 15 bp, Homo sapiens
ccccttttgcgtcct

SEQ ID NO: 1573957 - DNA, 15 bp, Homo sapiens
cccttttgcgtcctc

SEQ ID NO: 1573958 - DNA, 15 bp, Homo sapiens
ccttttgcgtcctca

SEQ ID NO: 1573959 - DNA, 15 bp, Homo sapiens
cttttgcgtcctcag

SEQ ID NO: 1573960 - DNA, 15 bp, Homo sapiens
ttttgcgtcctcaga

SEQ ID NO: 1573961 - DNA, 15 bp, Homo sapiens
tttgcgtcctcagat

SEQ ID NO: 1573962 - DNA, 15 bp, Homo sapiens
ttgcgtcctcagata

SEQ ID NO: 1573963 - DNA, 15 bp, Homo sapiens
tgcgtcctcagatat

SEQ ID NO: 1573964 - DNA, 15 bp, Homo sapiens
gcgtcctcagatatg

SEQ ID NO: 1573965 - DNA, 15 bp, Homo sapiens
cgtcctcagatatgg

SEQ ID NO: 1573966 - DNA, 15 bp, Homo sapiens
gtcctcagatatggc

SEQ ID NO: 1573967 - DNA, 15 bp, Homo sapiens
tcctcagatatggca

SEQ ID NO: 1573968 - DNA, 15 bp, Homo sapiens
cctcagatatggcaa

SEQ ID NO: 1573969 - DNA, 15 bp, Homo sapiens
ctcagatatggcaat

SEQ ID NO: 1573970 - DNA, 15 bp, Homo sapiens
tcagatatggcaatg

SEQ ID NO: 1573971 - DNA, 15 bp, Homo sapiens
cagatatggcaatgc

SEQ ID NO: 1573972 - DNA, 15 bp, Homo sapiens
agatatggcaatgca

SEQ ID NO: 1573973 - DNA, 15 bp, Homo sapiens
gatatggcaatgcag

SEQ ID NO: 1573974 - DNA, 15 bp, Homo sapiens
atatggcaatgcagc

SEQ ID NO: 1573975 - DNA, 15 bp, Homo sapiens
tatggcaatgcagca

SEQ ID NO: 1573976 - DNA, 15 bp, Homo sapiens
atggcaatgcagcag

SEQ ID NO: 1573977 - DNA, 15 bp, Homo sapiens
tggcaatgcagcaga

SEQ ID NO: 1573978 - DNA, 15 bp, Homo sapiens
ggcaatgcagcagat

SEQ ID NO: 1573979 - DNA, 15 bp, Homo sapiens
gcaatgcagcagatg

SEQ ID NO: 1573980 - DNA, 15 bp, Homo sapiens
caatgcagcagatga

SEQ ID NO: 1573981 - DNA, 15 bp, Homo sapiens
aatgcagcagatgat

SEQ ID NO: 1573982 - DNA, 15 bp, Homo sapiens
atgcagcagatgata

SEQ ID NO: 1573983 - DNA, 15 bp, Homo sapiens
tgcagcagatgatag

SEQ ID NO: 1573984 - DNA, 15 bp, Homo sapiens
gcagcagatgatagg

SEQ ID NO: 1573985 - DNA, 15 bp, Homo sapiens
cagcagatgatagga

SEQ ID NO: 1573986 - DNA, 15 bp, Homo sapiens
agcagatgataggac

SEQ ID NO: 1573987 - DNA, 15 bp, Homo sapiens
gcagatgataggaca

SEQ ID NO: 1573988 - DNA, 15 bp, Homo sapiens
cagatgataggacag

SEQ ID NO: 1573989 - DNA, 15 bp, Homo sapiens
agatgataggacaga

SEQ ID NO: 1573990 - DNA, 15 bp, Homo sapiens
gatgataggacagac

SEQ ID NO: 1573991 - DNA, 15 bp, Homo sapiens
atgataggacagaca

SEQ ID NO: 1573992 - DNA, 15 bp, Homo sapiens
tgataggacagacaa

SEQ ID NO: 1573993 - DNA, 15 bp, Homo sapiens
gataggacagacaag

SEQ ID NO: 1573994 - DNA, 15 bp, Homo sapiens
ataggacagacaagg

SEQ ID NO: 1573995 - DNA, 15 bp, Homo sapiens
taggacagacaaggt

SEQ ID NO: 1573996 - DNA, 15 bp, Homo sapiens
aggacagacaaggtc

SEQ ID NO: 1573997 - DNA, 15 bp, Homo sapiens
ggacagacaaggtct

SEQ ID NO: 1573998 - DNA, 15 bp, Homo sapiens
gacagacaaggtctc

SEQ ID NO: 1573999 - DNA, 15 bp, Homo sapiens
acagacaaggtctca

SEQ ID NO: 1574000 - DNA, 15 bp, Homo sapiens
cagacaaggtctcag

SEQ ID NO: 1574001 - DNA, 15 bp, Homo sapiens
agacaaggtctcagc

SEQ ID NO: 1574002 - DNA, 15 bp, Homo sapiens
gacaaggtctcagct

SEQ ID NO: 1574003 - DNA, 15 bp, Homo sapiens
acaaggtctcagctc

SEQ ID NO: 1574004 - DNA, 15 bp, Homo sapiens
caaggtctcagctct

SEQ ID NO: 1574005 - DNA, 15 bp, Homo sapiens
aaggtctcagctctc

SEQ ID NO: 1574006 - DNA, 15 bp, Homo sapiens
aggtctcagctctct

SEQ ID NO: 1574007 - DNA, 15 bp, Homo sapiens
ggtctcagctctctg

SEQ ID NO: 1574008 - DNA, 15 bp, Homo sapiens
gtctcagctctctgt

SEQ ID NO: 1574009 - DNA, 15 bp, Homo sapiens
tctcagctctctgtg

SEQ ID NO: 1574010 - DNA, 15 bp, Homo sapiens
ctcagctctctgtgc

SEQ ID NO: 1574011 - DNA, 15 bp, Homo sapiens
tcagctctctgtgcg

SEQ ID NO: 1574012 - DNA, 15 bp, Homo sapiens
cagctctctgtgcgc

SEQ ID NO: 1574013 - DNA, 15 bp, Homo sapiens
agctctctgtgcgcg

SEQ ID NO: 1574014 - DNA, 15 bp, Homo sapiens
gctctctgtgcgcgt

SEQ ID NO: 1574015 - DNA, 15 bp, Homo sapiens
ctctctgtgcgcgtt

SEQ ID NO: 1574016 - DNA, 15 bp, Homo sapiens
tctctgtgcgcgttc

SEQ ID NO: 1574017 - DNA, 15 bp, Homo sapiens
ctctgtgcgcgttct

SEQ ID NO: 1574018 - DNA, 15 bp, Homo sapiens
tctgtgcgcgttctg

SEQ ID NO: 1574019 - DNA, 15 bp, Homo sapiens
ctgtgcgcgttctgg

SEQ ID NO: 1574020 - DNA, 15 bp, Homo sapiens
tgtgcgcgttctggt

SEQ ID NO: 1574021 - DNA, 15 bp, Homo sapiens
gtgcgcgttctggtg

SEQ ID NO: 1574022 - DNA, 15 bp, Homo sapiens
tgcgcgttctggtgg

SEQ ID NO: 1574023 - DNA, 15 bp, Homo sapiens
gcgcgttctggtggg

SEQ ID NO: 1574024 - DNA, 15 bp, Homo sapiens
cgcgttctggtggga

SEQ ID NO: 1574025 - DNA, 15 bp, Homo sapiens
gcgttctggtgggag

SEQ ID NO: 1574026 - DNA, 15 bp, Homo sapiens
cgttctggtgggaga

SEQ ID NO: 1574027 - DNA, 15 bp, Homo sapiens
gttctggtgggagag

SEQ ID NO: 1574028 - DNA, 15 bp, Homo sapiens
ttctggtgggagaga

SEQ ID NO: 1574029 - DNA, 15 bp, Homo sapiens
tctggtgggagagat

SEQ ID NO: 1574030 - DNA, 15 bp, Homo sapiens
ctggtgggagagatg

SEQ ID NO: 1574031 - DNA, 15 bp, Homo sapiens
tggtgggagagatgg

SEQ ID NO: 1574032 - DNA, 15 bp, Homo sapiens
ggtgggagagatggg

SEQ ID NO: 1574033 - DNA, 15 bp, Homo sapiens
gtgggagagatggga

SEQ ID NO: 1574034 - DNA, 15 bp, Homo sapiens
tgggagagatgggag

SEQ ID NO: 1574035 - DNA, 15 bp, Homo sapiens
gggagagatgggagt

SEQ ID NO: 1574036 - DNA, 15 bp, Homo sapiens
ggagagatgggagtc

SEQ ID NO: 1574037 - DNA, 15 bp, Homo sapiens
gagagatgggagtca

SEQ ID NO: 1574038 - DNA, 15 bp, Homo sapiens
agagatgggagtcac

SEQ ID NO: 1574039 - DNA, 15 bp, Homo sapiens
gagatgggagtcaca

SEQ ID NO: 1574040 - DNA, 15 bp, Homo sapiens
agatgggagtcacac

SEQ ID NO: 1574041 - DNA, 15 bp, Homo sapiens
gatgggagtcacaca

SEQ ID NO: 1574042 - DNA, 15 bp, Homo sapiens
atgggagtcacacag

SEQ ID NO: 1574043 - DNA, 15 bp, Homo sapiens
tgggagtcacacagc

SEQ ID NO: 1574044 - DNA, 15 bp, Homo sapiens
gggagtcacacagcc

SEQ ID NO: 1574045 - DNA, 15 bp, Homo sapiens
ggagtcacacagccg

SEQ ID NO: 1574046 - DNA, 15 bp, Homo sapiens
gagtcacacagccgc

SEQ ID NO: 1574047 - DNA, 15 bp, Homo sapiens
agtcacacagccgca

SEQ ID NO: 1574048 - DNA, 15 bp, Homo sapiens
gtcacacagccgcat

SEQ ID NO: 1574049 - DNA, 15 bp, Homo sapiens
tcacacagccgcatc

SEQ ID NO: 1574050 - DNA, 15 bp, Homo sapiens
cacacagccgcatca

SEQ ID NO: 1574051 - DNA, 15 bp, Homo sapiens
acacagccgcatcag

SEQ ID NO: 1574052 - DNA, 15 bp, Homo sapiens
cacagccgcatcagg

SEQ ID NO: 1574053 - DNA, 15 bp, Homo sapiens
acagccgcatcaggc

SEQ ID NO: 1574054 - DNA, 15 bp, Homo sapiens
cagccgcatcaggca

SEQ ID NO: 1574055 - DNA, 15 bp, Homo sapiens
agccgcatcaggcag

SEQ ID NO: 1574056 - DNA, 15 bp, Homo sapiens
gccgcatcaggcagt

SEQ ID NO: 1574057 - DNA, 15 bp, Homo sapiens
ccgcatcaggcagtg

SEQ ID NO: 1574058 - DNA, 15 bp, Homo sapiens
cgcatcaggcagtgc

SEQ ID NO: 1574059 - DNA, 15 bp, Homo sapiens
gcatcaggcagtgca

SEQ ID NO: 1574060 - DNA, 15 bp, Homo sapiens
catcaggcagtgcag

SEQ ID NO: 1574061 - DNA, 15 bp, Homo sapiens
atcaggcagtgcagg

SEQ ID NO: 1574062 - DNA, 15 bp, Homo sapiens
tcaggcagtgcaggc

SEQ ID NO: 1574063 - DNA, 15 bp, Homo sapiens
caggcagtgcaggca

SEQ ID NO: 1574064 - DNA, 15 bp, Homo sapiens
aggcagtgcaggcag

SEQ ID NO: 1574065 - DNA, 15 bp, Homo sapiens
ggcagtgcaggcagt

SEQ ID NO: 1574066 - DNA, 15 bp, Homo sapiens
gcagtgcaggcagtc

SEQ ID NO: 1574067 - DNA, 15 bp, Homo sapiens
cagtgcaggcagtca

SEQ ID NO: 1574068 - DNA, 15 bp, Homo sapiens
agtgcaggcagtcac

SEQ ID NO: 1574069 - DNA, 15 bp, Homo sapiens
gtgcaggcagtcaca
